United States Patent Application Publication US 2007/0042381 A1 - sequence listing, part 50

SEQ ID NO: 2247820 - RNA, 23 nt, Human
uaaguaauuaucgggaacagugu

SEQ ID NO: 2247821 - RNA, 16 nt, Human
uaagguucucauagga

SEQ ID NO: 2247822 - RNA, 19 nt, Human
uaagguuucguuucuguau

SEQ ID NO: 2247823 - RNA, 20 nt, Human
uaagguuucguuucuguaua

SEQ ID NO: 2247824 - RNA, 22 nt, Human
uaagguuucguuucuguauaca

SEQ ID NO: 2247825 - RNA, 20 nt, Human
uaaguaaugauaacuggaaa

SEQ ID NO: 2247826 - RNA, 19 nt, Human
uaaguaaaaccacagcagu

SEQ ID NO: 2247827 - RNA, 18 nt, Human
uaaguaaaaccacagcag

SEQ ID NO: 2247828 - RNA, 17 nt, Human
uaaguaaaaccacagca

SEQ ID NO: 2247829 - RNA, 16 nt, Human
uaaguaaaaccacagc

SEQ ID NO: 2247830 - RNA, 17 nt, Human
uaaggauacuuuacaug

SEQ ID NO: 2247831 - RNA, 19 nt, Human
uaaggaucagaacagcaga

SEQ ID NO: 2247832 - RNA, 20 nt, Human
uaaggaguaaucuguguaca

SEQ ID NO: 2247833 - RNA, 19 nt, Human
uaaggaguaaucuguguac

SEQ ID NO: 2247834 - RNA, 16 nt, Human
uaaggagaugggccuu

SEQ ID NO: 2247835 - RNA, 19 nt, Human
uaaggagaaaucuauagaa

SEQ ID NO: 2247836 - RNA, 21 nt, Human
uaagguuauuuauuuaaaugu

SEQ ID NO: 2247837 - RNA, 16 nt, Human
uaaggaucucucagga

SEQ ID NO: 2247838 - RNA, 17 nt, Human
uaaggaugcuaaaccuu

SEQ ID NO: 2247839 - RNA, 18 nt, Human
uaagguuaccuuuguucc

SEQ ID NO: 2247840 - RNA, 15 nt, Human
uaaguaaaaccacag

SEQ ID NO: 2247841 - RNA, 13 nt, Human
uaaguaaaaccac

SEQ ID NO: 2247842 - RNA, 15 nt, Human
uaagacguguuugug

SEQ ID NO: 2247843 - RNA, 14 nt, Human
uaagacgacaagga

SEQ ID NO: 2247844 - RNA, 16 nt, Human
uaagacuguaaugaau

SEQ ID NO: 2247845 - RNA, 22 nt, Human
uaagacuccucggccuggcucc

SEQ ID NO: 2247846 - RNA, 23 nt, Human
uaagacuccucggccuggcuccu

SEQ ID NO: 2247847 - RNA, 18 nt, Human
uaagacucauucccuaga

SEQ ID NO: 2247848 - RNA, 13 nt, Human
uaagacuccucgg

SEQ ID NO: 2247849 - RNA, 18 nt, Human
aauauuuauauuucacua

SEQ ID NO: 2247850 - RNA, 17 nt, Human
aauauuuauauuucacu

SEQ ID NO: 2247851 - RNA, 14 nt, Human
aauauuuauauuuc

SEQ ID NO: 2247852 - RNA, 17 nt, Human
aauauuuauauauuuau

SEQ ID NO: 2247853 - RNA, 14 nt, Human
aauauuuauauauu

SEQ ID NO: 2247854 - RNA, 15 nt, Human
uaagacuguguauuc

SEQ ID NO: 2247855 - RNA, 19 nt, Human
uaagacuguaaugaaucua

SEQ ID NO: 2247856 - RNA, 15 nt, Human
aauauuuauagguca

SEQ ID NO: 2247857 - RNA, 12 nt, Human
aauauuuauuac

SEQ ID NO: 2247858 - RNA, 13 nt, Human
aauauuuauuacc

SEQ ID NO: 2247859 - RNA, 14 nt, Human
aauauuuauuaccu

SEQ ID NO: 2247860 - RNA, 15 nt, Human
aauauuuauuaccuc

SEQ ID NO: 2247861 - RNA, 16 nt, Human
aauauuuauuaccucu

SEQ ID NO: 2247862 - RNA, 17 nt, Human
aauauuuauuaccucug

SEQ ID NO: 2247863 - RNA, 18 nt, Human
aauauuuauuaccucuga

SEQ ID NO: 2247864 - RNA, 12 nt, Human
aauauuuauuau

SEQ ID NO: 2247865 - RNA, 15 nt, Human
aauauuuauguaaac

SEQ ID NO: 2247866 - RNA, 19 nt, Human
aauauuuaugucuauuuaa

SEQ ID NO: 2247867 - RNA, 21 nt, Human
aauauuuaugucuauuuaagc

SEQ ID NO: 2247868 - RNA, 23 nt, Human
aauauuuaugucuauuuaagccu

SEQ ID NO: 2247869 - RNA, 15 nt, Human
aaucacguaaagcua

SEQ ID NO: 2247870 - RNA, 17 nt, Human
aaucacuaaaaaugauc

SEQ ID NO: 2247871 - RNA, 21 nt, Human
aaucacguaaagcuagaaaug

SEQ ID NO: 2247872 - RNA, 20 nt, Human
aaucacguaaagcuagaaau

SEQ ID NO: 2247873 - RNA, 20 nt, Human
aauauuuugaaucaauaaua

SEQ ID NO: 2247874 - RNA, 21 nt, Human
aauauuuucuuuaaugcuuuu

SEQ ID NO: 2247875 - RNA, 19 nt, Human
aauauuuucuuuaaugcuu

SEQ ID NO: 2247876 - RNA, 13 nt, Human
aauauuuugaauc

SEQ ID NO: 2247877 - RNA, 14 nt, Human
aauauuuugaauca

SEQ ID NO: 2247878 - RNA, 15 nt, Human
aauauuuugaaucaa

SEQ ID NO: 2247879 - RNA, 16 nt, Human
aauauuuugaaucaau

SEQ ID NO: 2247880 - RNA, 18 nt, Human
aauauuuugaaucaauaa

SEQ ID NO: 2247881 - RNA, 22 nt, Human
aauauuuugaaucaauaauaua

SEQ ID NO: 2247882 - RNA, 11 nt, Human
aauauuuauuu

SEQ ID NO: 2247883 - RNA, 21 nt, Human
aauauuuauugcuuuauaaau

SEQ ID NO: 2247884 - RNA, 23 nt, Human
aauauuuauugcuuuauaaauaa

SEQ ID NO: 2247885 - RNA, 14 nt, Human
aauauuuauugcuu

SEQ ID NO: 2247886 - RNA, 15 nt, Human
aauauuuauugcuuu

SEQ ID NO: 2247887 - RNA, 16 nt, Human
aauauuuauugcuuua

SEQ ID NO: 2247888 - RNA, 17 nt, Human
aauauuuauugcuuuau

SEQ ID NO: 2247889 - RNA, 19 nt, Human
aauauuuauuauuuucacc

SEQ ID NO: 2247890 - RNA, 20 nt, Human
aauauuuauuauuuucaccu

SEQ ID NO: 2247891 - RNA, 13 nt, Human
aauauuuauugcu

SEQ ID NO: 2247892 - RNA, 12 nt, Human
aauauuuauugc

SEQ ID NO: 2247893 - RNA, 18 nt, Human
aauauuuucuuuaaugcu

SEQ ID NO: 2247894 - RNA, 13 nt, Human
aauauuuauuuau

SEQ ID NO: 2247895 - RNA, 15 nt, Human
aauauuuucuggguu

SEQ ID NO: 2247896 - RNA, 15 nt, Human
aauauuuauuuuaau

SEQ ID NO: 2247897 - RNA, 16 nt, Human
aaucagccucuuaaag

SEQ ID NO: 2247898 - RNA, 12 nt, Human
aaucagccucuu

SEQ ID NO: 2247899 - RNA, 23 nt, Human
aaucagccuaggggucagggacc

SEQ ID NO: 2247900 - RNA, 21 nt, Human
aaucagccaauuauguuaaac

SEQ ID NO: 2247901 - RNA, 11 nt, Human
aaucagccugc

SEQ ID NO: 2247902 - RNA, 14 nt, Human
aaucagccaauuau

SEQ ID NO: 2247903 - RNA, 18 nt, Human
aaucagccaauuauguua

SEQ ID NO: 2247904 - RNA, 19 nt, Human
aaucagccaauuauguuaa

SEQ ID NO: 2247905 - RNA, 20 nt, Human
aaucagccaauuauguuaaa

SEQ ID NO: 2247906 - RNA, 16 nt, Human
aaucagccuaguugau

SEQ ID NO: 2247907 - RNA, 18 nt, Human
aaucagcauucucacucc

SEQ ID NO: 2247908 - RNA, 19 nt, Human
aaucagcauucucacuccu

SEQ ID NO: 2247909 - RNA, 12 nt, Human
aaucagcauucu

SEQ ID NO: 2247910 - RNA, 18 nt, Human
aaucacucuguccuugga

SEQ ID NO: 2247911 - RNA, 22 nt, Human
aaucacucuuguggauguuuua

SEQ ID NO: 2247912 - RNA, 12 nt, Human
aaucacucuugu

SEQ ID NO: 2247913 - RNA, 16 nt, Human
aaucacucuuguggau

SEQ ID NO: 2247914 - RNA, 18 nt, Human
aaucacucuuguggaugu

SEQ ID NO: 2247915 - RNA, 18 nt, Human
aaucagccugcuccagcu

SEQ ID NO: 2247916 - RNA, 13 nt, Human
aaucagccugcuc

SEQ ID NO: 2247917 - RNA, 19 nt, Human
aaucagccugcuccagcug

SEQ ID NO: 2247918 - RNA, 23 nt, Human
aaucagcuauuuacugccaaagg

SEQ ID NO: 2247919 - RNA, 20 nt, Human
aaucagcuccuuccuggaga

SEQ ID NO: 2247920 - RNA, 21 nt, Human
aaucaguaauauuuauauauu

SEQ ID NO: 2247921 - RNA, 15 nt, Human
aaucaguauaaacaa

SEQ ID NO: 2247922 - RNA, 14 nt, Human
aaucaguauaaaca

SEQ ID NO: 2247923 - RNA, 17 nt, Human
aaucaguauaaacaaag

SEQ ID NO: 2247924 - RNA, 14 nt, Human
aaucaguauaauuc

SEQ ID NO: 2247925 - RNA, 17 nt, Human
aaucaguauaauucugu

SEQ ID NO: 2247926 - RNA, 11 nt, Human
aaucaguauau

SEQ ID NO: 2247927 - RNA, 19 nt, Human
aaucagucagugcaaaugu

SEQ ID NO: 2247928 - RNA, 21 nt, Human
aaucagucagugcaaauguca

SEQ ID NO: 2247929 - RNA, 13 nt, Human
aaucaguccccuc

SEQ ID NO: 2247930 - RNA, 14 nt, Human
aaucaguccccucc

SEQ ID NO: 2247931 - RNA, 19 nt, Human
aaucagggaggucauuuug

SEQ ID NO: 2247932 - RNA, 18 nt, Human
aaucagggaggucauuuu

SEQ ID NO: 2247933 - RNA, 20 nt, Human
aaucaggaauauuuuccaaa

SEQ ID NO: 2247934 - RNA, 18 nt, Human
aaucaggaauauuuucca

SEQ ID NO: 2247935 - RNA, 20 nt, Human
uaagcucaaggcgugaggau

SEQ ID NO: 2247936 - RNA, 12 nt, Human
uaagcucagaau

SEQ ID NO: 2247937 - RNA, 21 nt, Human
uaagcuauucaguaauaacuc

SEQ ID NO: 2247938 - RNA, 21 nt, Human
uaagcagauuuaacaauucca

SEQ ID NO: 2247939 - RNA, 16 nt, Human
uaagauuaucugggga

SEQ ID NO: 2247940 - RNA, 18 nt, Human
uaagcagcauuucugaag

SEQ ID NO: 2247941 - RNA, 19 nt, Human
uaagcagcauuucugaagu

SEQ ID NO: 2247942 - RNA, 23 nt, Human
uaagcagcauuucugaaguggac

SEQ ID NO: 2247943 - RNA, 21 nt, Human
uaagcagcauuucugaagugg

SEQ ID NO: 2247944 - RNA, 12 nt, Human
uaagcagcucuu

SEQ ID NO: 2247945 - RNA, 18 nt, Human
uaagcagcucuugcuaau

SEQ ID NO: 2247946 - RNA, 17 nt, Human
uaagcagcucuugcuaa

SEQ ID NO: 2247947 - RNA, 15 nt, Human
uaagcaggaggaggu

SEQ ID NO: 2247948 - RNA, 18 nt, Human
uaagcaggaggaggugcc

SEQ ID NO: 2247949 - RNA, 23 nt, Human
uaagcaggaggaggugccaacag

SEQ ID NO: 2247950 - RNA, 14 nt, Human
uaagauucauauuu

SEQ ID NO: 2247951 - RNA, 14 nt, Human
uaagcaaaauguga

SEQ ID NO: 2247952 - RNA, 21 nt, Human
uaagcaaaaugugauauguac

SEQ ID NO: 2247953 - RNA, 15 nt, Human
uaagcaaaaugugau

SEQ ID NO: 2247954 - RNA, 14 nt, Human
aaucagugugucua

SEQ ID NO: 2247955 - RNA, 17 nt, Human
aaucagucuauccacag

SEQ ID NO: 2247956 - RNA, 20 nt, Human
aaucagucuauccacagaga

SEQ ID NO: 2247957 - RNA, 15 nt, Human
aaucaguccccuccc

SEQ ID NO: 2247958 - RNA, 16 nt, Human
aaucaguccccuccca

SEQ ID NO: 2247959 - RNA, 17 nt, Human
aaucaguccccucccau

SEQ ID NO: 2247960 - RNA, 18 nt, Human
aaucaguccccucccauc

SEQ ID NO: 2247961 - RNA, 13 nt, Human
uaagauuagaaug

SEQ ID NO: 2247962 - RNA, 15 nt, Human
uaagauuagaaugaa

SEQ ID NO: 2247963 - RNA, 18 nt, Human
uaagauuagaaugaaaau

SEQ ID NO: 2247964 - RNA, 13 nt, Human
uaagcucuggcuu

SEQ ID NO: 2247965 - RNA, 15 nt, Human
uaagcucagaaucca

SEQ ID NO: 2247966 - RNA, 14 nt, Human
uaaggaaacugggu

SEQ ID NO: 2247967 - RNA, 12 nt, Human
uaaggaaacugg

SEQ ID NO: 2247968 - RNA, 10 nt, Human
uaaggaaacu

SEQ ID NO: 2247969 - RNA, 15 nt, Human
uaaggaaacucuuau

SEQ ID NO: 2247970 - RNA, 17 nt, Human
uaaggaaacucuuaucu

SEQ ID NO: 2247971 - RNA, 19 nt, Human
uaaggaaacucuuaucuca

SEQ ID NO: 2247972 - RNA, 13 nt, Human
uaagcugaaaaua

SEQ ID NO: 2247973 - RNA, 11 nt, Human
uaaggaaacaa

SEQ ID NO: 2247974 - RNA, 13 nt, Human
uaaggaagacaau

SEQ ID NO: 2247975 - RNA, 9 nt, Human
uaaggaaua

SEQ ID NO: 2247976 - RNA, 21 nt, Human
uaaggaaagcaauaaaugaau

SEQ ID NO: 2247977 - RNA, 18 nt, Human
uaaggaaagcaauaaaug

SEQ ID NO: 2247978 - RNA, 16 nt, Human
uaaggaaagcaauaaa

SEQ ID NO: 2247979 - RNA, 19 nt, Human
uaaggaaacuggguuccug

SEQ ID NO: 2247980 - RNA, 20 nt, Human
uaaggaaacucuuaucucag

SEQ ID NO: 2247981 - RNA, 19 nt, Human
uaaggaauguagcugguuu

SEQ ID NO: 2247982 - RNA, 18 nt, Human
uaaggacaaaaaugaacu

SEQ ID NO: 2247983 - RNA, 20 nt, Human
uaaggaauaugggagaaaua

SEQ ID NO: 2247984 - RNA, 14 nt, Human
uaaggaauauggga

SEQ ID NO: 2247985 - RNA, 22 nt, Human
uaaggaauuuuauuuuuuucug

SEQ ID NO: 2247986 - RNA, 17 nt, Human
uaaggaauaccuguccc

SEQ ID NO: 2247987 - RNA, 18 nt, Human
uaaggaauaccugucccc

SEQ ID NO: 2247988 - RNA, 18 nt, Human
uaaggacauuucccaggg

SEQ ID NO: 2247989 - RNA, 14 nt, Human
uaaggacacacuaa

SEQ ID NO: 2247990 - RNA, 15 nt, Human
uaaggacacacuaau

SEQ ID NO: 2247991 - RNA, 15 nt, Human
uaacuuagcaugugu

SEQ ID NO: 2247992 - RNA, 17 nt, Human
uaacuuauauuguaaga

SEQ ID NO: 2247993 - RNA, 23 nt, Human
uaacuuauaucaucagcauaccu

SEQ ID NO: 2247994 - RNA, 21 nt, Human
uaacuuauauuguaagaaaua

SEQ ID NO: 2247995 - RNA, 20 nt, Human
uaacuuauauuguaagaaau

SEQ ID NO: 2247996 - RNA, 19 nt, Human
uaacuuauauuguaagaaa

SEQ ID NO: 2247997 - RNA, 18 nt, Human
uaacuuauauuguaagaa

SEQ ID NO: 2247998 - RNA, 15 nt, Human
uaacuagcuuggaaa

SEQ ID NO: 2247999 - RNA, 15 nt, Human
uaacuaggcucagag

SEQ ID NO: 2248000 - RNA, 17 nt, Human
uaacuaguccuuuacua

SEQ ID NO: 2248001 - RNA, 15 nt, Human
uaacuagcaccaggg

SEQ ID NO: 2248002 - RNA, 16 nt, Human
uaacuaggcucagaga

SEQ ID NO: 2248003 - RNA, 17 nt, Human
uaacuaguguugcuugg

SEQ ID NO: 2248004 - RNA, 23 nt, Human
uaacuauaguccagcuuuguucu

SEQ ID NO: 2248005 - RNA, 18 nt, Human
uaacuauauuugcuuuuu

SEQ ID NO: 2248006 - RNA, 19 nt, Human
uaacuaggcucagagaugu

SEQ ID NO: 2248007 - RNA, 17 nt, Human
uaacuauauuugcuuuu

SEQ ID NO: 2248008 - RNA, 17 nt, Human
uaacuuacccuuaggga

SEQ ID NO: 2248009 - RNA, 18 nt, Human
uaacuuacccuuagggag

SEQ ID NO: 2248010 - RNA, 15 nt, Human
uaacuuaauugcuau

SEQ ID NO: 2248011 - RNA, 15 nt, Human
uaacguaaauacaca

SEQ ID NO: 2248012 - RNA, 18 nt, Human
uaacggcuccaggauuuu

SEQ ID NO: 2248013 - RNA, 13 nt, Human
uaacggcuccagg

SEQ ID NO: 2248014 - RNA, 15 nt, Human
uaacggcuccaggau

SEQ ID NO: 2248015 - RNA, 16 nt, Human
uaacguugagccccug

SEQ ID NO: 2248016 - RNA, 22 nt, Human
uaacguuagaccacaaauagug

SEQ ID NO: 2248017 - RNA, 14 nt, Human
uaacguugcugugg

SEQ ID NO: 2248018 - RNA, 16 nt, Human
uaacguugcuguggga

SEQ ID NO: 2248019 - RNA, 17 nt, Human
uaacguugcugugggaa

SEQ ID NO: 2248020 - RNA, 21 nt, Human
uaacuagauggugcugagaag

SEQ ID NO: 2248021 - RNA, 20 nt, Human
uaacuagauggugcugagaa

SEQ ID NO: 2248022 - RNA, 19 nt, Human
uaacuagauggugcugaga

SEQ ID NO: 2248023 - RNA, 18 nt, Human
uaacuagauggugcugag

SEQ ID NO: 2248024 - RNA, 16 nt, Human
uaacuagauggugcug

SEQ ID NO: 2248025 - RNA, 22 nt, Human
uaacuagagcagcccuggaguc

SEQ ID NO: 2248026 - RNA, 20 nt, Human
uaacguuuuuccuuuaaaaa

SEQ ID NO: 2248027 - RNA, 18 nt, Human
uaacguuuuuccuuuaaa

SEQ ID NO: 2248028 - RNA, 19 nt, Human
uaacguuuuuccuuuaaaa

SEQ ID NO: 2248029 - RNA, 15 nt, Human
uaacguuuuuccuuu

SEQ ID NO: 2248030 - RNA, 18 nt, Human
uaacguugcugugggaac

SEQ ID NO: 2248031 - RNA, 13 nt, Human
uaacguauaaaag

SEQ ID NO: 2248032 - RNA, 17 nt, Human
uaacguauaaaagccug

SEQ ID NO: 2248033 - RNA, 21 nt, Human
uaacggaucagaaauacagau

SEQ ID NO: 2248034 - RNA, 12 nt, Human
uaacggcuccag

SEQ ID NO: 2248035 - RNA, 14 nt, Human
uaacggaucagaaa

SEQ ID NO: 2248036 - RNA, 19 nt, Human
uaacggaucagaaauacag

SEQ ID NO: 2248037 - RNA, 13 nt, Human
uaacggaucagaa

SEQ ID NO: 2248038 - RNA, 17 nt, Human
uaacgcgucuuccugag

SEQ ID NO: 2248039 - RNA, 15 nt, Human
uaacgcgucuuccug

SEQ ID NO: 2248040 - RNA, 16 nt, Human
uaacgcgucuuccuga

SEQ ID NO: 2248041 - RNA, 13 nt, Human
uaacuucugccug

SEQ ID NO: 2248042 - RNA, 17 nt, Human
uaacuucuuauggaauu

SEQ ID NO: 2248043 - RNA, 18 nt, Human
uaacuucuuaaaaguugu

SEQ ID NO: 2248044 - RNA, 15 nt, Human
uaacuuggcuuucau

SEQ ID NO: 2248045 - RNA, 19 nt, Human
uaacuucuuauggaauuga

SEQ ID NO: 2248046 - RNA, 18 nt, Human
uaacuucuuauggaauug

SEQ ID NO: 2248047 - RNA, 21 nt, Human
uaacuuccuuggacucauuuu

SEQ ID NO: 2248048 - RNA, 17 nt, Human
uaacuuguuuccaaugu

SEQ ID NO: 2248049 - RNA, 16 nt, Human
uaacuugucuaaauaa

SEQ ID NO: 2248050 - RNA, 17 nt, Human
uaacuugucuaaauaag

SEQ ID NO: 2248051 - RNA, 22 nt, Human
uaacuuuaauucucuuucaaag

SEQ ID NO: 2248052 - RNA, 12 nt, Human
uaacuuuaaguu

SEQ ID NO: 2248053 - RNA, 15 nt, Human
uaacuuuaaguuuca

SEQ ID NO: 2248054 - RNA, 16 nt, Human
uaacuuuaaguuucag

SEQ ID NO: 2248055 - RNA, 15 nt, Human
uaagaagcuguugua

SEQ ID NO: 2248056 - RNA, 18 nt, Human
uaagaagcuguuguacau

SEQ ID NO: 2248057 - RNA, 19 nt, Human
uaagaagcuguuguacauu

SEQ ID NO: 2248058 - RNA, 16 nt, Human
uaacuugucuuuggac

SEQ ID NO: 2248059 - RNA, 20 nt, Human
uaacuugucuuuggacccug

SEQ ID NO: 2248060 - RNA, 13 nt, Human
uaagaagugaaaa

SEQ ID NO: 2248061 - RNA, 17 nt, Human
uaagaaggcaaaaaugu

SEQ ID NO: 2248062 - RNA, 13 nt, Human
uaagaaggcaaaa

SEQ ID NO: 2248063 - RNA, 22 nt, Human
uaagaagcuguuguacauuuau

SEQ ID NO: 2248064 - RNA, 18 nt, Human
uaagaauucaaacugggg

SEQ ID NO: 2248065 - RNA, 14 nt, Human
uaagaauucaaacu

SEQ ID NO: 2248066 - RNA, 12 nt, Human
uaagaauuauuu

SEQ ID NO: 2248067 - RNA, 17 nt, Human
uaagaauuauuuugaug

SEQ ID NO: 2248068 - RNA, 18 nt, Human
uaagaaggcaaaaaugua

SEQ ID NO: 2248069 - RNA, 21 nt, Human
uaagaagcuguuguacauuua

SEQ ID NO: 2248070 - RNA, 19 nt, Human
uaagaagggauggauucca

SEQ ID NO: 2248071 - RNA, 20 nt, Human
uaagaagggauggauuccaa

SEQ ID NO: 2248072 - RNA, 17 nt, Human
uaagaccuggcagcucu

SEQ ID NO: 2248073 - RNA, 18 nt, Human
uaagaccuggcagcucug

SEQ ID NO: 2248074 - RNA, 20 nt, Human
uaagacggauuuauuuuucc

SEQ ID NO: 2248075 - RNA, 22 nt, Human
uaagaauucaaacuggggccuc

SEQ ID NO: 2248076 - RNA, 16 nt, Human
uaagaauuuagggaga

SEQ ID NO: 2248077 - RNA, 19 nt, Human
uaacaggucuccucuuaaa

SEQ ID NO: 2248078 - RNA, 18 nt, Human
uaacaggucuccucuuaa

SEQ ID NO: 2248079 - RNA, 16 nt, Human
uaacagguuauuuuag

SEQ ID NO: 2248080 - RNA, 21 nt, Human
uaacagguuauuuuaguuucu

SEQ ID NO: 2248081 - RNA, 16 nt, Human
uaacaggucuccucuu

SEQ ID NO: 2248082 - RNA, 15 nt, Human
uaacaggucuccucu

SEQ ID NO: 2248083 - RNA, 14 nt, Human
uaacaggucuccuc

SEQ ID NO: 2248084 - RNA, 13 nt, Human
uaacaggucuccu

SEQ ID NO: 2248085 - RNA, 23 nt, Human
uaacagggucucuagugcuguga

SEQ ID NO: 2248086 - RNA, 19 nt, Human
uaacaugaauauuuagugu

SEQ ID NO: 2248087 - RNA, 15 nt, Human
uaacaguaacgcagg

SEQ ID NO: 2248088 - RNA, 22 nt, Human
uaacagguuauuuuaguuucug

SEQ ID NO: 2248089 - RNA, 23 nt, Human
uaacagguuauuuuaguuucugu

SEQ ID NO: 2248090 - RNA, 13 nt, Human
uaacagucauuua

SEQ ID NO: 2248091 - RNA, 14 nt, Human
uaacagucauuuaa

SEQ ID NO: 2248092 - RNA, 15 nt, Human
uaacagucauuuaaa

SEQ ID NO: 2248093 - RNA, 18 nt, Human
uaacagucauuuaaaaaa

SEQ ID NO: 2248094 - RNA, 15 nt, Human
aauauauuuucuguu

SEQ ID NO: 2248095 - RNA, 21 nt, Human
aauauauuuucuguuuucuuu

SEQ ID NO: 2248096 - RNA, 15 nt, Human
aauauauuuuuauau

SEQ ID NO: 2248097 - RNA, 19 nt, Human
aauauauuuuuauauuuag

SEQ ID NO: 2248098 - RNA, 20 nt, Human
aauauauuuuuauauuuagu

SEQ ID NO: 2248099 - RNA, 15 nt, Human
uaacauguaucccaa

SEQ ID NO: 2248100 - RNA, 17 nt, Human
uaacgcccuauuuuugc

SEQ ID NO: 2248101 - RNA, 20 nt, Human
uaacgcccuauuuuugcaau

SEQ ID NO: 2248102 - RNA, 22 nt, Human
uaacauguguuaaguauuuuca

SEQ ID NO: 2248103 - RNA, 23 nt, Human
uaacaugaggggacauuuuggug

SEQ ID NO: 2248104 - RNA, 15 nt, Human
uaacauguaggaagu

SEQ ID NO: 2248105 - RNA, 19 nt, Human
uaacauguaauuaaguacu

SEQ ID NO: 2248106 - RNA, 14 nt, Human
uaacaugaauauuu

SEQ ID NO: 2248107 - RNA, 20 nt, Human
uaacaugaggggacauuuug

SEQ ID NO: 2248108 - RNA, 19 nt, Human
uaacaugaggggacauuuu

SEQ ID NO: 2248109 - RNA, 18 nt, Human
uaacaugaggggacauuu

SEQ ID NO: 2248110 - RNA, 21 nt, Human
uaacaguccuaacugguauag

SEQ ID NO: 2248111 - RNA, 20 nt, Human
uaacaugaauauuuaguguu

SEQ ID NO: 2248112 - RNA, 21 nt, Human
uaacaugaauauuuaguguuc

SEQ ID NO: 2248113 - RNA, 21 nt, Human
aauaguucagguaacaggcag

SEQ ID NO: 2248114 - RNA, 21 nt, Human
aauauauucagccuggcuuca

SEQ ID NO: 2248115 - RNA, 21 nt, Human
aauaguuaagacaugauuucc

SEQ ID NO: 2248116 - RNA, 17 nt, Human
aauaguguuaaucaauu

SEQ ID NO: 2248117 - RNA, 18 nt, Human
aauaguguuaaucaauuu

SEQ ID NO: 2248118 - RNA, 19 nt, Human
aauaguguuaaucaauuua

SEQ ID NO: 2248119 - RNA, 22 nt, Human
aauaguguuaaucaauuuaaac

SEQ ID NO: 2248120 - RNA, 23 nt, Human
aauaguuaagacaugauuuccuu

SEQ ID NO: 2248121 - RNA, 22 nt, Human
aauaguuaagacaugauuuccu

SEQ ID NO: 2248122 - RNA, 20 nt, Human
aauaguuacuccagugccaa

SEQ ID NO: 2248123 - RNA, 18 nt, Human
aauaguuacuccagugcc

SEQ ID NO: 2248124 - RNA, 15 nt, Human
aauaguuacuccagu

SEQ ID NO: 2248125 - RNA, 22 nt, Human
aauaguucaaagccaaguuuau

SEQ ID NO: 2248126 - RNA, 21 nt, Human
aauauauugcugcugguaauu

SEQ ID NO: 2248127 - RNA, 15 nt, Human
aauauauuuaagaua

SEQ ID NO: 2248128 - RNA, 21 nt, Human
aauauauuuuaagacgaaaca

SEQ ID NO: 2248129 - RNA, 19 nt, Human
aauauauuuaagauaauua

SEQ ID NO: 2248130 - RNA, 20 nt, Human
aauauauuuaagauaauuau

SEQ ID NO: 2248131 - RNA, 14 nt, Human
aauauauuuaauga

SEQ ID NO: 2248132 - RNA, 20 nt, Human
aauagcuauauccauguacu

SEQ ID NO: 2248133 - RNA, 18 nt, Human
aauagcuauauccaugua

SEQ ID NO: 2248134 - RNA, 17 nt, Human
aauagcuauauccaugu

SEQ ID NO: 2248135 - RNA, 15 nt, Human
aauagcuauauccau

SEQ ID NO: 2248136 - RNA, 19 nt, Human
aauagucaaauugugugaa

SEQ ID NO: 2248137 - RNA, 23 nt, Human
aauaguguguucugauuagaaau

SEQ ID NO: 2248138 - RNA, 22 nt, Human
aauaguguguucugauuagaaa

SEQ ID NO: 2248139 - RNA, 15 nt, Human
aauaguguuaaucaa

SEQ ID NO: 2248140 - RNA, 16 nt, Human
aauaguguuaaucaau

SEQ ID NO: 2248141 - RNA, 20 nt, Human
aauagugcuuaaaaaucauu

SEQ ID NO: 2248142 - RNA, 21 nt, Human
aauaguguguucugauuagaa

SEQ ID NO: 2248143 - RNA, 15 nt, Human
aauagucugugugaa

SEQ ID NO: 2248144 - RNA, 20 nt, Human
aauagucuagauggcuccuc

SEQ ID NO: 2248145 - RNA, 13 nt, Human
aauagugaaauga

SEQ ID NO: 2248146 - RNA, 22 nt, Human
aauagugcucgcuuucuaugua

SEQ ID NO: 2248147 - RNA, 15 nt, Human
aauagugaaaugaau

SEQ ID NO: 2248148 - RNA, 19 nt, Human
aauagugcagaaucucaua

SEQ ID NO: 2248149 - RNA, 14 nt, Human
aauagucuguguga

SEQ ID NO: 2248150 - RNA, 13 nt, Human
aauagucugugug

SEQ ID NO: 2248151 - RNA, 21 nt, Human
aauagucuagauggcuccucu

SEQ ID NO: 2248152 - RNA, 14 nt, Human
aauagucuagaugg

SEQ ID NO: 2248153 - RNA, 21 nt, Human
aauagcuauauccauguacug

SEQ ID NO: 2248154 - RNA, 13 nt, Human
aauagucaagaaa

SEQ ID NO: 2248155 - RNA, 17 nt, Human
aauagucaagaaaaauu

SEQ ID NO: 2248156 - RNA, 16 nt, Human
aauagucaagaaaaau

SEQ ID NO: 2248157 - RNA, 20 nt, Human
uaaauuaacuuuuauaaacu

SEQ ID NO: 2248158 - RNA, 19 nt, Human
uaaauuaacuuuuauaaac

SEQ ID NO: 2248159 - RNA, 12 nt, Human
uaaaugaagaaa

SEQ ID NO: 2248160 - RNA, 16 nt, Human
uaaaugaagcagcuuu

SEQ ID NO: 2248161 - RNA, 17 nt, Human
uaaaugaagcagcuuua

SEQ ID NO: 2248162 - RNA, 13 nt, Human
uaaaugugguaaa

SEQ ID NO: 2248163 - RNA, 22 nt, Human
uaaaugaagcagcuuuaaacaa

SEQ ID NO: 2248164 - RNA, 23 nt, Human
uaaaugaagcagcuuuaaacaaa

SEQ ID NO: 2248165 - RNA, 18 nt, Human
aaguguaugcacgugugc

SEQ ID NO: 2248166 - RNA, 22 nt, Human
aagugcguguguagaguuaaga

SEQ ID NO: 2248167 - RNA, 19 nt, Human
aagugcguguguagaguua

SEQ ID NO: 2248168 - RNA, 21 nt, Human
aagugcguguguagaguuaag

SEQ ID NO: 2248169 - RNA, 22 nt, Human
aaguguauuuuucaauaaagca

SEQ ID NO: 2248170 - RNA, 15 nt, Human
aaguguauuuuucaa

SEQ ID NO: 2248171 - RNA, 13 nt, Human
aaguguauuuuuc

SEQ ID NO: 2248172 - RNA, 22 nt, Human
aagugcguccacgagcuguuua

SEQ ID NO: 2248173 - RNA, 15 nt, Human
aagugcguguguaga

SEQ ID NO: 2248174 - RNA, 16 nt, Human
aagugcguguguagag

SEQ ID NO: 2248175 - RNA, 17 nt, Human
aagugcguguguagagu

SEQ ID NO: 2248176 - RNA, 18 nt, Human
aagugcguguguagaguu

SEQ ID NO: 2248177 - RNA, 18 nt, Human
uaaaugaaaaucgugaca

SEQ ID NO: 2248178 - RNA, 16 nt, Human
uaaaugaaauuguaaa

SEQ ID NO: 2248179 - RNA, 14 nt, Human
uaaaugaaauugua

SEQ ID NO: 2248180 - RNA, 15 nt, Human
uaaaugaaauuguaa

SEQ ID NO: 2248181 - RNA, 21 nt, Human
aaguguauuuuuuuacuaaua

SEQ ID NO: 2248182 - RNA, 18 nt, Human
aaguguauuuuuuuacua

SEQ ID NO: 2248183 - RNA, 21 nt, Human
aauacaccagguagaacacaa

SEQ ID NO: 2248184 - RNA, 16 nt, Human
aauacacgagguauga

SEQ ID NO: 2248185 - RNA, 21 nt, Human
aauacaccacuacauucuguu

SEQ ID NO: 2248186 - RNA, 13 nt, Human
uaacaaugcugua

SEQ ID NO: 2248187 - RNA, 19 nt, Human
aauacagaaauuagccggg

SEQ ID NO: 2248188 - RNA, 13 nt, Human
aauacagacacua

SEQ ID NO: 2248189 - RNA, 15 nt, Human
aauacagacacuaag

SEQ ID NO: 2248190 - RNA, 20 nt, Human
aauacacuaauuccuuucua

SEQ ID NO: 2248191 - RNA, 16 nt, Human
aauacacuaguuguuu

SEQ ID NO: 2248192 - RNA, 17 nt, Human
aauacacuaguuguuuc

SEQ ID NO: 2248193 - RNA, 13 nt, Human
aauacagaggcaa

SEQ ID NO: 2248194 - RNA, 21 nt, Human
uaacaauaacuacuguguucc

SEQ ID NO: 2248195 - RNA, 19 nt, Human
uaacaauaacuacuguguu

SEQ ID NO: 2248196 - RNA, 23 nt, Human
uaacaauaacuacuguguuccug

SEQ ID NO: 2248197 - RNA, 18 nt, Human
uaacaauaacuacugugu

SEQ ID NO: 2248198 - RNA, 17 nt, Human
uaacaauaacuacugug

SEQ ID NO: 2248199 - RNA, 16 nt, Human
uaacaauaacuacugu

SEQ ID NO: 2248200 - RNA, 14 nt, Human
uaacaaucagcucc

SEQ ID NO: 2248201 - RNA, 17 nt, Human
uaacaaugaagauaaaa

SEQ ID NO: 2248202 - RNA, 13 nt, Human
uaacaaugauaua

SEQ ID NO: 2248203 - RNA, 19 nt, Human
uaacaaugauauauggaua

SEQ ID NO: 2248204 - RNA, 22 nt, Human
uaacaaugauauauggauaaug

SEQ ID NO: 2248205 - RNA, 22 nt, Human
uaaauuauaacuuaaaauauuu

SEQ ID NO: 2248206 - RNA, 13 nt, Human
uaaauuauguuua

SEQ ID NO: 2248207 - RNA, 14 nt, Human
uaaauuauguuuau

SEQ ID NO: 2248208 - RNA, 15 nt, Human
uaaauuauguuuaua

SEQ ID NO: 2248209 - RNA, 17 nt, Human
uaaauuauguuuauaua

SEQ ID NO: 2248210 - RNA, 16 nt, Human
uaaauuauacuggaga

SEQ ID NO: 2248211 - RNA, 20 nt, Human
uaaauuaugggaaucaagau

SEQ ID NO: 2248212 - RNA, 21 nt, Human
uaaauuaugggaaucaagauu

SEQ ID NO: 2248213 - RNA, 17 nt, Human
uaaauuauaacuuaaaa

SEQ ID NO: 2248214 - RNA, 21 nt, Human
uaaauuaacuuuuauaaacuu

SEQ ID NO: 2248215 - RNA, 20 nt, Human
uaacaaacuacauguaaucc

SEQ ID NO: 2248216 - RNA, 22 nt, Human
uaacaaacaucacucugcugcu

SEQ ID NO: 2248217 - RNA, 21 nt, Human
uaacaaacaucacucugcugc

SEQ ID NO: 2248218 - RNA, 19 nt, Human
uaaauuauuaguuuacauc

SEQ ID NO: 2248219 - RNA, 19 nt, Human
uaaauuauguuuauauaaa

SEQ ID NO: 2248220 - RNA, 20 nt, Human
uaaauuauguuuauauaaau

SEQ ID NO: 2248221 - RNA, 16 nt, Human
uaaauuauuuauuauu

SEQ ID NO: 2248222 - RNA, 16 nt, Human
aauagacuuaaaucuc

SEQ ID NO: 2248223 - RNA, 20 nt, Human
aauagagcaaaauugaugug

SEQ ID NO: 2248224 - RNA, 14 nt, Human
aauagagccugagg

SEQ ID NO: 2248225 - RNA, 22 nt, Human
aauagagcaaaauugauguguu

SEQ ID NO: 2248226 - RNA, 18 nt, Human
aauagaguauaugcacuu

SEQ ID NO: 2248227 - RNA, 15 nt, Human
aauagaguauaugca

SEQ ID NO: 2248228 - RNA, 16 nt, Human
aauagagccugaggga

SEQ ID NO: 2248229 - RNA, 16 nt, Human
aauagaguauaugcac

SEQ ID NO: 2248230 - RNA, 17 nt, Human
aauagaguauaugcacu

SEQ ID NO: 2248231 - RNA, 19 nt, Human
aauagcauguauugugucu

SEQ ID NO: 2248232 - RNA, 14 nt, Human
aauagcauguauug

SEQ ID NO: 2248233 - RNA, 18 nt, Human
aauagcauguauuguguc

SEQ ID NO: 2248234 - RNA, 12 nt, Human
aauaccugcccu

SEQ ID NO: 2248235 - RNA, 19 nt, Human
aauaccugucccccugaca

SEQ ID NO: 2248236 - RNA, 15 nt, Human
aauaccugucccccu

SEQ ID NO: 2248237 - RNA, 18 nt, Human
aauaccugucccccugac

SEQ ID NO: 2248238 - RNA, 14 nt, Human
aauaccucugugug

SEQ ID NO: 2248239 - RNA, 13 nt, Human
aauaccucugugu

SEQ ID NO: 2248240 - RNA, 15 nt, Human
aauaccucugugugc

SEQ ID NO: 2248241 - RNA, 16 nt, Human
aauaccucugugugcu

SEQ ID NO: 2248242 - RNA, 14 nt, Human
aauaccucuuagcu

SEQ ID NO: 2248243 - RNA, 16 nt, Human
aauaccucuuagcuga

SEQ ID NO: 2248244 - RNA, 17 nt, Human
aauaccucuuagcugag

SEQ ID NO: 2248245 - RNA, 21 nt, Human
aauaccucuuagcugagugga

SEQ ID NO: 2248246 - RNA, 20 nt, Human
aauaccagugaaccaaagag

SEQ ID NO: 2248247 - RNA, 13 nt, Human
aauaccaguucug

SEQ ID NO: 2248248 - RNA, 20 nt, Human
aauaccauuuuuuaaggaaa

SEQ ID NO: 2248249 - RNA, 22 nt, Human
aauaccauuuuuuaaggaaaca

SEQ ID NO: 2248250 - RNA, 23 nt, Human
aauaccauuuuuuaaggaaacaa

SEQ ID NO: 2248251 - RNA, 20 nt, Human
aauaccaaaauuauuucaga

SEQ ID NO: 2248252 - RNA, 16 nt, Human
aauaccaaguauuuau

SEQ ID NO: 2248253 - RNA, 12 nt, Human
aauacauuuuau

SEQ ID NO: 2248254 - RNA, 17 nt, Human
aauaccagccaguaaau

SEQ ID NO: 2248255 - RNA, 19 nt, Human
aauaccagccaguaaaugg

SEQ ID NO: 2248256 - RNA, 18 nt, Human
aauaccaugccauuuaaa

SEQ ID NO: 2248257 - RNA, 17 nt, Human
aauacauugaauuagaa

SEQ ID NO: 2248258 - RNA, 18 nt, Human
aauacauugaauuagaaa

SEQ ID NO: 2248259 - RNA, 12 nt, Human
aauaccaaggaa

SEQ ID NO: 2248260 - RNA, 23 nt, Human
aauaccacaggaaccacaagacu

SEQ ID NO: 2248261 - RNA, 23 nt, Human
aauacagggcaugcauuuugcag

SEQ ID NO: 2248262 - RNA, 19 nt, Human
aauacaguaagcugcucua

SEQ ID NO: 2248263 - RNA, 21 nt, Human
aauacaguaagcugcucuauu

SEQ ID NO: 2248264 - RNA, 16 nt, Human
aauacagggcaugcau

SEQ ID NO: 2248265 - RNA, 16 nt, Human
aauacagggcauuuug

SEQ ID NO: 2248266 - RNA, 23 nt, Human
aauacaucccuuaccugggaaag

SEQ ID NO: 2248267 - RNA, 15 nt, Human
aauacauucugcuuu

SEQ ID NO: 2248268 - RNA, 14 nt, Human
aauacaugcugcua

SEQ ID NO: 2248269 - RNA, 13 nt, Human
aauacaugcaucu

SEQ ID NO: 2248270 - RNA, 23 nt, Human
aauacaugacauuuauuuuucau

SEQ ID NO: 2248271 - RNA, 17 nt, Human
aauacaugacauuuauu

SEQ ID NO: 2248272 - RNA, 24 nt, Human
aauacagccaaagauaaucucuca

SEQ ID NO: 2248273 - RNA, 19 nt, Human
aauacagccaaagauaauc

SEQ ID NO: 2248274 - RNA, 21 nt, Human
aauacagauuuugauagcaaa

SEQ ID NO: 2248275 - RNA, 23 nt, Human
aauacagauuuugauagcaaagc

SEQ ID NO: 2248276 - RNA, 18 nt, Human
aauacagcaacaauuuau

SEQ ID NO: 2248277 - RNA, 20 nt, Human
aauacagacacuaaguuaua

SEQ ID NO: 2248278 - RNA, 21 nt, Human
aauacagacacuaaguuauag

SEQ ID NO: 2248279 - RNA, 19 nt, Human
aauacagauuuugauagca

SEQ ID NO: 2248280 - RNA, 20 nt, Human
aauacagauuuugauagcaa

SEQ ID NO: 2248281 - RNA, 15 nt, Human
guuaggauuuaacag

SEQ ID NO: 2248282 - RNA, 23 nt, Human
guuaggauuuaacagucauuuaa

SEQ ID NO: 2248283 - RNA, 12 nt, Human
guuagaauuccu

SEQ ID NO: 2248284 - RNA, 16 nt, Human
guuaggccuggcacag

SEQ ID NO: 2248285 - RNA, 13 nt, Human
guuaggccuggca

SEQ ID NO: 2248286 - RNA, 15 nt, Human
guuaggccuggcaca

SEQ ID NO: 2248287 - RNA, 20 nt, Human
guuagggaaaacauuccauc

SEQ ID NO: 2248288 - RNA, 15 nt, Human
guuagggaaaacauu

SEQ ID NO: 2248289 - RNA, 19 nt, Human
guuaggcauugugggaagg

SEQ ID NO: 2248290 - RNA, 20 nt, Human
guuaggcauugugggaaggg

SEQ ID NO: 2248291 - RNA, 15 nt, Human
guuaggaguucgaga

SEQ ID NO: 2248292 - RNA, 23 nt, Human
guuaggaaauaaaaccuuucaaa

SEQ ID NO: 2248293 - RNA, 22 nt, Human
guuaggaaauaaaaccuuucaa

SEQ ID NO: 2248294 - RNA, 21 nt, Human
guuaggaaauaaaaccuuuca

SEQ ID NO: 2248295 - RNA, 19 nt, Human
guuaggaaauaaaaccuuu

SEQ ID NO: 2248296 - RNA, 18 nt, Human
guuaggaaauaaaaccuu

SEQ ID NO: 2248297 - RNA, 17 nt, Human
guuaggaaauaaaaccu

SEQ ID NO: 2248298 - RNA, 16 nt, Human
guuaggaaauaaaacc

SEQ ID NO: 2248299 - RNA, 14 nt, Human
guuagaaugaggag

SEQ ID NO: 2248300 - RNA, 16 nt, Human
guuagaaugaggagga

SEQ ID NO: 2248301 - RNA, 15 nt, Human
guuagaaugaggagg

SEQ ID NO: 2248302 - RNA, 16 nt, Human
guuagcuccuguggcc

SEQ ID NO: 2248303 - RNA, 14 nt, Human
guuaggaaauaaaa

SEQ ID NO: 2248304 - RNA, 11 nt, Human
guuagcuggag

SEQ ID NO: 2248305 - RNA, 11 nt, Human
guuagcugagc

SEQ ID NO: 2248306 - RNA, 20 nt, Human
guuagcuccuguggccccac

SEQ ID NO: 2248307 - RNA, 16 nt, Human
guuacuugaaauacca

SEQ ID NO: 2248308 - RNA, 19 nt, Human
guuacuugaaauaccagug

SEQ ID NO: 2248309 - RNA, 19 nt, Human
guuagaaaugcagaauccu

SEQ ID NO: 2248310 - RNA, 13 nt, Human
guuacuuccuauc

SEQ ID NO: 2248311 - RNA, 23 nt, Human
guuacuucacuuuaauucucaug

SEQ ID NO: 2248312 - RNA, 17 nt, Human
guuacuuaccuaaacag

SEQ ID NO: 2248313 - RNA, 16 nt, Human
guuacuucacuuuaau

SEQ ID NO: 2248314 - RNA, 14 nt, Human
guuacuucugaggu

SEQ ID NO: 2248315 - RNA, 15 nt, Human
guuaagauaugaugu

SEQ ID NO: 2248316 - RNA, 22 nt, Human
guuaagagugggggagagcagg

SEQ ID NO: 2248317 - RNA, 18 nt, Human
guuaagcauuaccacuca

SEQ ID NO: 2248318 - RNA, 16 nt, Human
guuaagcauuaccacu

SEQ ID NO: 2248319 - RNA, 23 nt, Human
guuacuguugugaccugaaguuc

SEQ ID NO: 2248320 - RNA, 18 nt, Human
guuaagagaaaugagcuu

SEQ ID NO: 2248321 - RNA, 14 nt, Human
guuaagauuccuaa

SEQ ID NO: 2248322 - RNA, 11 nt, Human
guuaagagaaa

SEQ ID NO: 2248323 - RNA, 12 nt, Human
guuaagagaaau

SEQ ID NO: 2248324 - RNA, 12 nt, Human
guucaaagccag

SEQ ID NO: 2248325 - RNA, 13 nt, Human
guucaaagccagc

SEQ ID NO: 2248326 - RNA, 18 nt, Human
guucaagcgauucuucug

SEQ ID NO: 2248327 - RNA, 19 nt, Human
guucaacuuuuccuuugaa

SEQ ID NO: 2248328 - RNA, 15 nt, Human
guucaacuuccagaa

SEQ ID NO: 2248329 - RNA, 13 nt, Human
guucaaaaugucu

SEQ ID NO: 2248330 - RNA, 14 nt, Human
guucaaaaugucug

SEQ ID NO: 2248331 - RNA, 14 nt, Human
guucaaaaagucua

SEQ ID NO: 2248332 - RNA, 21 nt, Human
guuauuuuuuaauuauuauuu

SEQ ID NO: 2248333 - RNA, 20 nt, Human
guucaaagauauuuugcuuu

SEQ ID NO: 2248334 - RNA, 22 nt, Human
guucaaagauauuuugcuuugu

SEQ ID NO: 2248335 - RNA, 21 nt, Human
guucaaagauauuuugcuuug

SEQ ID NO: 2248336 - RNA, 13 nt, Human
guuagggaauggc

SEQ ID NO: 2248337 - RNA, 23 nt, Human
guuagggaaaacauuccauccuu

SEQ ID NO: 2248338 - RNA, 13 nt, Human
guuauucuggagu

SEQ ID NO: 2248339 - RNA, 23 nt, Human
guuauuuuuauuuauuuaaauuu

SEQ ID NO: 2248340 - RNA, 22 nt, Human
guuauuuuuguuucuuccaaag

SEQ ID NO: 2248341 - RNA, 16 nt, Human
guuauuuuuuaauuau

SEQ ID NO: 2248342 - RNA, 16 nt, Human
guuauuuuuauaucag

SEQ ID NO: 2248343 - RNA, 23 nt, Human
guuauuuuuauaucagccugagu

SEQ ID NO: 2248344 - RNA, 16 nt, Human
guuauugacaaacucu

SEQ ID NO: 2248345 - RNA, 13 nt, Human
guuauuuugcaac

SEQ ID NO: 2248346 - RNA, 19 nt, Human
guuauuuuuacauucugaa

SEQ ID NO: 2248347 - RNA, 20 nt, Human
guuauuuuuacauucugaau

SEQ ID NO: 2248348 - RNA, 17 nt, Human
aagcuauuuaucuguag

SEQ ID NO: 2248349 - RNA, 21 nt, Human
aagcucagcccaccccccuca

SEQ ID NO: 2248350 - RNA, 17 nt, Human
aagcucagcuacugauu

SEQ ID NO: 2248351 - RNA, 16 nt, Human
aagcucagcccacccc

SEQ ID NO: 2248352 - RNA, 15 nt, Human
aagcucagcccaccc

SEQ ID NO: 2248353 - RNA, 15 nt, Human
aagcucacaguuccu

SEQ ID NO: 2248354 - RNA, 11 nt, Human
aagcucacagu

SEQ ID NO: 2248355 - RNA, 20 nt, Human
aagcucacagaccuuugaac

SEQ ID NO: 2248356 - RNA, 12 nt, Human
aagcucagggcc

SEQ ID NO: 2248357 - RNA, 13 nt, Human
aagcucagggccu

SEQ ID NO: 2248358 - RNA, 16 nt, Human
aagcucagggccuggc

SEQ ID NO: 2248359 - RNA, 17 nt, Human
aagcucagggccuggcu

SEQ ID NO: 2248360 - RNA, 20 nt, Human
aagcucagggccuggcucag

SEQ ID NO: 2248361 - RNA, 17 nt, Human
aagcucaggaccaggca

SEQ ID NO: 2248362 - RNA, 12 nt, Human
aagcucauauuu

SEQ ID NO: 2248363 - RNA, 20 nt, Human
aagcucauauuuuguauaua

SEQ ID NO: 2248364 - RNA, 21 nt, Human
aagcucauauuuuguauauau

SEQ ID NO: 2248365 - RNA, 22 nt, Human
aagcucauauuuuguauauauc

SEQ ID NO: 2248366 - RNA, 23 nt, Human
aagcucauauuuuguauauaucu

SEQ ID NO: 2248367 - RNA, 18 nt, Human
aagcucagggccuggcuc

SEQ ID NO: 2248368 - RNA, 19 nt, Human
aagcucagggccuggcuca

SEQ ID NO: 2248369 - RNA, 17 nt, Human
aagcuccaagcucccag

SEQ ID NO: 2248370 - RNA, 18 nt, Human
aagcuccaagcucccagg

SEQ ID NO: 2248371 - RNA, 13 nt, Human
aagcuccagguag

SEQ ID NO: 2248372 - RNA, 14 nt, Human
aagcuccagguaga

SEQ ID NO: 2248373 - RNA, 22 nt, Human
guucagcuaagcuaggaaugaa

SEQ ID NO: 2248374 - RNA, 13 nt, Human
guucagcuacucc

SEQ ID NO: 2248375 - RNA, 13 nt, Human
guucagcuccagc

SEQ ID NO: 2248376 - RNA, 23 nt, Human
guucagccccuccucugccaccu

SEQ ID NO: 2248377 - RNA, 22 nt, Human
guucagccccuccucugccacc

SEQ ID NO: 2248378 - RNA, 21 nt, Human
guucagccccuccucugccac

SEQ ID NO: 2248379 - RNA, 20 nt, Human
guucagccccuccucugcca

SEQ ID NO: 2248380 - RNA, 19 nt, Human
guucagcuaagcuaggaau

SEQ ID NO: 2248381 - RNA, 19 nt, Human
guucagccccuccucugcc

SEQ ID NO: 2248382 - RNA, 18 nt, Human
guucagccccuccucugc

SEQ ID NO: 2248383 - RNA, 17 nt, Human
guucagccccuccucug

SEQ ID NO: 2248384 - RNA, 13 nt, Human
aagccucagagaa

SEQ ID NO: 2248385 - RNA, 22 nt, Human
aagccucaacuagucauuuuuu

SEQ ID NO: 2248386 - RNA, 20 nt, Human
aagccuagaagagcuucuga

SEQ ID NO: 2248387 - RNA, 16 nt, Human
aagccuaccugcucuc

SEQ ID NO: 2248388 - RNA, 19 nt, Human
aagccuaccugcucuccaa

SEQ ID NO: 2248389 - RNA, 21 nt, Human
aagccuaucaaagaccuugug

SEQ ID NO: 2248390 - RNA, 22 nt, Human
aagccuagugaaggcuucucuc

SEQ ID NO: 2248391 - RNA, 14 nt, Human
aagccuaagaaucu

SEQ ID NO: 2248392 - RNA, 14 nt, Human
aagccuaccugcuc

SEQ ID NO: 2248393 - RNA, 15 nt, Human
aagccugaggcuggg

SEQ ID NO: 2248394 - RNA, 24 nt, Human
aagccugaaggggcgucuguuccc

SEQ ID NO: 2248395 - RNA, 20 nt, Human
aagccugaguuugcuuucaa

SEQ ID NO: 2248396 - RNA, 22 nt, Human
aagcuagacgagcaggcuucuu

SEQ ID NO: 2248397 - RNA, 15 nt, Human
aagccugaugcugac

SEQ ID NO: 2248398 - RNA, 21 nt, Human
aagccugcacaauaaaaaugu

SEQ ID NO: 2248399 - RNA, 17 nt, Human
aagccugcaauuucaua

SEQ ID NO: 2248400 - RNA, 22 nt, Human
aagccugcaauuucauaugcug

SEQ ID NO: 2248401 - RNA, 12 nt, Human
aagcuaggccug

SEQ ID NO: 2248402 - RNA, 14 nt, Human
aagcuagagauaug

SEQ ID NO: 2248403 - RNA, 12 nt, Human
aagccugcaacu

SEQ ID NO: 2248404 - RNA, 12 nt, Human
aagcuagcuccc

SEQ ID NO: 2248405 - RNA, 13 nt, Human
aagcuagcucccc

SEQ ID NO: 2248406 - RNA, 15 nt, Human
aagcuagcuccccuc

SEQ ID NO: 2248407 - RNA, 18 nt, Human
aagcuagcuccccuccuc

SEQ ID NO: 2248408 - RNA, 19 nt, Human
aagcuagcuccccuccucu

SEQ ID NO: 2248409 - RNA, 20 nt, Human
aagcuagcuccccuccucuc

SEQ ID NO: 2248410 - RNA, 14 nt, Human
aagcuaggaaugaa

SEQ ID NO: 2248411 - RNA, 16 nt, Human
gugugugggagugugu

SEQ ID NO: 2248412 - RNA, 22 nt, Human
aagcagguugaggggcuccugg

SEQ ID NO: 2248413 - RNA, 10 nt, Human
gugugugcgu

SEQ ID NO: 2248414 - RNA, 19 nt, Human
aagcagguucccaagcuca

SEQ ID NO: 2248415 - RNA, 21 nt, Human
gugugugcgccuacaggagug

SEQ ID NO: 2248416 - RNA, 17 nt, Human
gugugugaaugaacacu

SEQ ID NO: 2248417 - RNA, 14 nt, Human
gugugugaaaggaa

SEQ ID NO: 2248418 - RNA, 16 nt, Human
aagcagguuuuucucc

SEQ ID NO: 2248419 - RNA, 13 nt, Human
aagcaguaacuga

SEQ ID NO: 2248420 - RNA, 20 nt, Human
aagcaguagaaauaauaugc

SEQ ID NO: 2248421 - RNA, 14 nt, Human
aagcaguagacaag

SEQ ID NO: 2248422 - RNA, 21 nt, Human
aagcaguagaaauaauaugca

SEQ ID NO: 2248423 - RNA, 22 nt, Human
aagcaguagaaauaauaugcau

SEQ ID NO: 2248424 - RNA, 17 nt, Human
aagcagucgugccugug

SEQ ID NO: 2248425 - RNA, 18 nt, Human
aagcagucgugccugugu

SEQ ID NO: 2248426 - RNA, 19 nt, Human
aagcagucgugccuguguc

SEQ ID NO: 2248427 - RNA, 12 nt, Human
aagcagugcaug

SEQ ID NO: 2248428 - RNA, 19 nt, Human
aagcagucuacccaccuca

SEQ ID NO: 2248429 - RNA, 18 nt, Human
aagcagucuacccaccuc

SEQ ID NO: 2248430 - RNA, 15 nt, Human
aagcagugccuucca

SEQ ID NO: 2248431 - RNA, 20 nt, Human
aagcagugcaugcugucccu

SEQ ID NO: 2248432 - RNA, 14 nt, Human
aagcagugcaugcu

SEQ ID NO: 2248433 - RNA, 15 nt, Human
aagcagugcaugcug

SEQ ID NO: 2248434 - RNA, 22 nt, Human
aagcauaaaugcaaacacacaa

SEQ ID NO: 2248435 - RNA, 12 nt, Human
aagcauccaugu

SEQ ID NO: 2248436 - RNA, 14 nt, Human
aagcauccaugugu

SEQ ID NO: 2248437 - RNA, 22 nt, Human
aagcaucauuauuugcagagac

SEQ ID NO: 2248438 - RNA, 20 nt, Human
aagcagugccuuccauaauu

SEQ ID NO: 2248439 - RNA, 15 nt, Human
aagcagugcuucuca

SEQ ID NO: 2248440 - RNA, 18 nt, Human
aagcagugccuuccauaa

SEQ ID NO: 2248441 - RNA, 17 nt, Human
aagcagugccuuccaua

SEQ ID NO: 2248442 - RNA, 17 nt, Human
aagcaguggacaccagg

SEQ ID NO: 2248443 - RNA, 15 nt, Human
aagcaguugugucag

SEQ ID NO: 2248444 - RNA, 22 nt, Human
aagcauuggguggguaaauuca

SEQ ID NO: 2248445 - RNA, 12 nt, Human
aagcauuuauaa

SEQ ID NO: 2248446 - RNA, 12 nt, Human
aagcauuugaau

SEQ ID NO: 2248447 - RNA, 13 nt, Human
aagcauuugaaug

SEQ ID NO: 2248448 - RNA, 14 nt, Human
aagcauuugaaugc

SEQ ID NO: 2248449 - RNA, 17 nt, Human
aagcauuugaaugcauu

SEQ ID NO: 2248450 - RNA, 15 nt, Human
aagcauuugaaugca

SEQ ID NO: 2248451 - RNA, 16 nt, Human
aagcauuugaaugcau

SEQ ID NO: 2248452 - RNA, 16 nt, Human
aagcauuuacuuugug

SEQ ID NO: 2248453 - RNA, 16 nt, Human
aagcauuuagauguau

SEQ ID NO: 2248454 - RNA, 13 nt, Human
aagcauuguaaau

SEQ ID NO: 2248455 - RNA, 13 nt, Human
aagcauucugucu

SEQ ID NO: 2248456 - RNA, 21 nt, Human
aagcauucaauuuauucaaga

SEQ ID NO: 2248457 - RNA, 23 nt, Human
aagcauucaauuuauucaagaaa

SEQ ID NO: 2248458 - RNA, 22 nt, Human
aagcauucaauuuauucaagaa

SEQ ID NO: 2248459 - RNA, 12 nt, Human
aagcauucacaa

SEQ ID NO: 2248460 - RNA, 13 nt, Human
aagcauucacaac

SEQ ID NO: 2248461 - RNA, 15 nt, Human
aagcauucagagagc

SEQ ID NO: 2248462 - RNA, 17 nt, Human
aagcauucagagagcag

SEQ ID NO: 2248463 - RNA, 13 nt, Human
aagcauuccaaca

SEQ ID NO: 2248464 - RNA, 14 nt, Human
aagcauuccaacaa

SEQ ID NO: 2248465 - RNA, 22 nt, Human
aagcauuccuucuuugauaaug

SEQ ID NO: 2248466 - RNA, 23 nt, Human
aagcauuccuucuuugauaaugu

SEQ ID NO: 2248467 - RNA, 17 nt, Human
aagcauuccaacaaagg

SEQ ID NO: 2248468 - RNA, 13 nt, Human
aagcauuccuucu

SEQ ID NO: 2248469 - RNA, 14 nt, Human
aagcauuccuucuu

SEQ ID NO: 2248470 - RNA, 16 nt, Human
aagcauuccuucuuug

SEQ ID NO: 2248471 - RNA, 17 nt, Human
aagcauuccuucuuuga

SEQ ID NO: 2248472 - RNA, 18 nt, Human
aagcauuccuucuuugau

SEQ ID NO: 2248473 - RNA, 20 nt, Human
aagcauuccuucuuugauaa

SEQ ID NO: 2248474 - RNA, 21 nt, Human
aagcauuccuucuuugauaau

SEQ ID NO: 2248475 - RNA, 18 nt, Human
aagcauuaacuucucugg

SEQ ID NO: 2248476 - RNA, 18 nt, Human
aagcauuaagaacacuuu

SEQ ID NO: 2248477 - RNA, 18 nt, Human
aagcauuacauuuccaaa

SEQ ID NO: 2248478 - RNA, 18 nt, Human
aagcauuaccacucaggc

SEQ ID NO: 2248479 - RNA, 19 nt, Human
aagcauuaccacucaggca

SEQ ID NO: 2248480 - RNA, 21 nt, Human
aagcauccauguguggacuca

SEQ ID NO: 2248481 - RNA, 20 nt, Human
aagcauccauguguggacuc

SEQ ID NO: 2248482 - RNA, 19 nt, Human
aagcauccauguguggacu

SEQ ID NO: 2248483 - RNA, 17 nt, Human
aagcauccaugugugga

SEQ ID NO: 2248484 - RNA, 18 nt, Human
aagcaucggagggaauug

SEQ ID NO: 2248485 - RNA, 19 nt, Human
aagcccugggaucacugug

SEQ ID NO: 2248486 - RNA, 12 nt, Human
aagcccugaggg

SEQ ID NO: 2248487 - RNA, 19 nt, Human
aagcccuggagccaacugc

SEQ ID NO: 2248488 - RNA, 23 nt, Human
aagcccugauuguguauauucau

SEQ ID NO: 2248489 - RNA, 18 nt, Human
aagcccucuuccaucaug

SEQ ID NO: 2248490 - RNA, 21 nt, Human
aagcccucuuccaucaugucc

SEQ ID NO: 2248491 - RNA, 19 nt, Human
aagcccugagcuuucugcu

SEQ ID NO: 2248492 - RNA, 15 nt, Human
aagcccuccuuccac

SEQ ID NO: 2248493 - RNA, 13 nt, Human
aagcccucuucca

SEQ ID NO: 2248494 - RNA, 14 nt, Human
aagcccucuuccau

SEQ ID NO: 2248495 - RNA, 16 nt, Human
aagcccucuuccauca

SEQ ID NO: 2248496 - RNA, 14 nt, Human
aagcccuccuucca

SEQ ID NO: 2248497 - RNA, 13 nt, Human
aagcccuccuucc

SEQ ID NO: 2248498 - RNA, 12 nt, Human
aagcccuccuuc

SEQ ID NO: 2248499 - RNA, 11 nt, Human
aagcccuccuu

SEQ ID NO: 2248500 - RNA, 9 nt, Human
aagcccucc

SEQ ID NO: 2248501 - RNA, 17 nt, Human
aagcccgacuugcuguu

SEQ ID NO: 2248502 - RNA, 16 nt, Human
aagcccccccuuccac

SEQ ID NO: 2248503 - RNA, 17 nt, Human
aagccccugcccaucug

SEQ ID NO: 2248504 - RNA, 21 nt, Human
aagccccuugcucuccccugc

SEQ ID NO: 2248505 - RNA, 15 nt, Human
aagcccgacuugcug

SEQ ID NO: 2248506 - RNA, 23 nt, Human
aagcccccagcuaagaaccugga

SEQ ID NO: 2248507 - RNA, 21 nt, Human
aagcccccagcuaagaaccug

SEQ ID NO: 2248508 - RNA, 16 nt, Human
aagcccccagcuaaga

SEQ ID NO: 2248509 - RNA, 20 nt, Human
aagcccccaccgugggcagg

SEQ ID NO: 2248510 - RNA, 14 nt, Human
aagcccccaccgug

SEQ ID NO: 2248511 - RNA, 22 nt, Human
aagccccaugcuggagccugug

SEQ ID NO: 2248512 - RNA, 23 nt, Human
aagccccaugcuggagccugugu

SEQ ID NO: 2248513 - RNA, 18 nt, Human
aagccccaugcuggagcc

SEQ ID NO: 2248514 - RNA, 19 nt, Human
aagccccaugcuggagccu

SEQ ID NO: 2248515 - RNA, 20 nt, Human
aagccccaugcuggagccug

SEQ ID NO: 2248516 - RNA, 21 nt, Human
aagccccaugcuggagccugu

SEQ ID NO: 2248517 - RNA, 14 nt, Human
aagccgggaacaga

SEQ ID NO: 2248518 - RNA, 19 nt, Human
aagccggcggcccaagccc

SEQ ID NO: 2248519 - RNA, 12 nt, Human
aagccggcggcc

SEQ ID NO: 2248520 - RNA, 13 nt, Human
aagccggcggccc

SEQ ID NO: 2248521 - RNA, 14 nt, Human
aagccggcggccca

SEQ ID NO: 2248522 - RNA, 18 nt, Human
guuaagacaaacugcaua

SEQ ID NO: 2248523 - RNA, 19 nt, Human
guuaagaagcuguuguaca

SEQ ID NO: 2248524 - RNA, 20 nt, Human
guuaagaagcuguuguacau

SEQ ID NO: 2248525 - RNA, 15 nt, Human
guuaagaagcuguug

SEQ ID NO: 2248526 - RNA, 17 nt, Human
guuaagaagcuguugua

SEQ ID NO: 2248527 - RNA, 13 nt, Human
guuaagaccuggc

SEQ ID NO: 2248528 - RNA, 22 nt, Human
guuaagacaugauuuccuugaa

SEQ ID NO: 2248529 - RNA, 19 nt, Human
guuaagacaugauuuccuu

SEQ ID NO: 2248530 - RNA, 17 nt, Human
guuaagacaugauuucc

SEQ ID NO: 2248531 - RNA, 16 nt, Human
guuaagaccuggcagc

SEQ ID NO: 2248532 - RNA, 14 nt, Human
guuaagaccuggca

SEQ ID NO: 2248533 - RNA, 21 nt, Human
guuaagaagcuguuguacauu

SEQ ID NO: 2248534 - RNA, 13 nt, Human
aagccgcugcugg

SEQ ID NO: 2248535 - RNA, 23 nt, Human
aagcccuuccaugucgccucugc

SEQ ID NO: 2248536 - RNA, 20 nt, Human
aagccgcuggggccaguugg

SEQ ID NO: 2248537 - RNA, 15 nt, Human
aagcccuuccauguc

SEQ ID NO: 2248538 - RNA, 20 nt, Human
aagcccuuccaugucgccuc

SEQ ID NO: 2248539 - RNA, 22 nt, Human
aagcccuguugacacaggucuu

SEQ ID NO: 2248540 - RNA, 23 nt, Human
aagcccuggagccaacugcugcu

SEQ ID NO: 2248541 - RNA, 18 nt, Human
aagcccugucgagacacu

SEQ ID NO: 2248542 - RNA, 19 nt, Human
aagcccugucgagacacuu

SEQ ID NO: 2248543 - RNA, 20 nt, Human
aagcccugucgagacacuug

SEQ ID NO: 2248544 - RNA, 22 nt, Human
aagcccaucaauuauagaaagc

SEQ ID NO: 2248545 - RNA, 14 nt, Human
aagcccaggccccu

SEQ ID NO: 2248546 - RNA, 21 nt, Human
aagcccauucauuccauucug

SEQ ID NO: 2248547 - RNA, 16 nt, Human
aagcccauucauucca

SEQ ID NO: 2248548 - RNA, 19 nt, Human
aagcccaugaguccuugaa

SEQ ID NO: 2248549 - RNA, 20 nt, Human
aagcccaugaguccuugaaa

SEQ ID NO: 2248550 - RNA, 16 nt, Human
aagccccaugcuggag

SEQ ID NO: 2248551 - RNA, 17 nt, Human
aagccccaugcuggagc

SEQ ID NO: 2248552 - RNA, 21 nt, Human
aagccccaggcaggcugugcg

SEQ ID NO: 2248553 - RNA, 17 nt, Human
aagccccaggcaggcug

SEQ ID NO: 2248554 - RNA, 14 nt, Human
aagccccaggcagg

SEQ ID NO: 2248555 - RNA, 12 nt, Human
aagccccaggca

SEQ ID NO: 2248556 - RNA, 14 nt, Human
aagccccagcaagc

SEQ ID NO: 2248557 - RNA, 23 nt, Human
aagcccauucauuccauucugga

SEQ ID NO: 2248558 - RNA, 22 nt, Human
aagcccaugaguccuugaaaau

SEQ ID NO: 2248559 - RNA, 19 nt, Human
aagcccaggaaaggcucca

SEQ ID NO: 2248560 - RNA, 22 nt, Human
aagcccaggaaaggcuccagga

SEQ ID NO: 2248561 - RNA, 19 nt, Human
aagccaacuuguaaauaca

SEQ ID NO: 2248562 - RNA, 19 nt, Human
aagcccaguucagcuuggg

SEQ ID NO: 2248563 - RNA, 18 nt, Human
aagcccaguucagcuugg

SEQ ID NO: 2248564 - RNA, 17 nt, Human
aagccaacagucaaaac

SEQ ID NO: 2248565 - RNA, 22 nt, Human
aagccaacuuggcuuucccgga

SEQ ID NO: 2248566 - RNA, 16 nt, Human
aagccaacuuguaaau

SEQ ID NO: 2248567 - RNA, 17 nt, Human
aagccaacuuguaaaua

SEQ ID NO: 2248568 - RNA, 16 nt, Human
aagccaacgacaaagc

SEQ ID NO: 2248569 - RNA, 15 nt, Human
aagccaaagaaaaau

SEQ ID NO: 2248570 - RNA, 16 nt, Human
aagccaacacccuguc

SEQ ID NO: 2248571 - RNA, 22 nt, Human
aagccaagaggcugcagccagg

SEQ ID NO: 2248572 - RNA, 18 nt, Human
aagccaagaggcugcagc

SEQ ID NO: 2248573 - RNA, 14 nt, Human
aagcccaggaaagg

SEQ ID NO: 2248574 - RNA, 17 nt, Human
aagcccaggaaaggcuc

SEQ ID NO: 2248575 - RNA, 22 nt, Human
aagccaaagcuaggccuggcca

SEQ ID NO: 2248576 - RNA, 21 nt, Human
aagccaaagaaaaauaacccu

SEQ ID NO: 2248577 - RNA, 11 nt, Human
aagccaaagaa

SEQ ID NO: 2248578 - RNA, 13 nt, Human
aagccaaagaaaa

SEQ ID NO: 2248579 - RNA, 20 nt, Human
aagccaaacucugccagcca

SEQ ID NO: 2248580 - RNA, 12 nt, Human
aagccaaagaaa

SEQ ID NO: 2248581 - RNA, 16 nt, Human
aagccaaacucugcca

SEQ ID NO: 2248582 - RNA, 15 nt, Human
aagccaaacucugcc

SEQ ID NO: 2248583 - RNA, 14 nt, Human
aagccaaacucugc

SEQ ID NO: 2248584 - RNA, 17 nt, Human
aagccaaaccucuguga

SEQ ID NO: 2248585 - RNA, 9 nt, Human
aagagccau

SEQ ID NO: 2248586 - RNA, 19 nt, Human
aagagccauauaaguuuga

SEQ ID NO: 2248587 - RNA, 20 nt, Human
aagagccauauaaguuugaa

SEQ ID NO: 2248588 - RNA, 23 nt, Human
aagaggaaugaaguacucauaca

SEQ ID NO: 2248589 - RNA, 21 nt, Human
aagaggaguuucgagguagag

SEQ ID NO: 2248590 - RNA, 16 nt, Human
aagaggaucggaggcu

SEQ ID NO: 2248591 - RNA, 20 nt, Human
aagaggaguuucgagguaga

SEQ ID NO: 2248592 - RNA, 22 nt, Human
aagaggacauaaugggguccug

SEQ ID NO: 2248593 - RNA, 22 nt, Human
aagaggagagaggaagcucucu

SEQ ID NO: 2248594 - RNA, 17 nt, Human
guggccgcccaaggccc

SEQ ID NO: 2248595 - RNA, 9 nt, Human
guggccuca

SEQ ID NO: 2248596 - RNA, 14 nt, Human
aagaggcaagaggc

SEQ ID NO: 2248597 - RNA, 22 nt, Human
guggcccugucccucccaccuc

SEQ ID NO: 2248598 - RNA, 23 nt, Human
guggcccugucccucccaccucu

SEQ ID NO: 2248599 - RNA, 11 nt, Human
guggcccuugc

SEQ ID NO: 2248600 - RNA, 24 nt, Human
guggccucugccccgucucaugag

SEQ ID NO: 2248601 - RNA, 13 nt, Human
guggccucugugg

SEQ ID NO: 2248602 - RNA, 20 nt, Human
guggccucugccccgucuca

SEQ ID NO: 2248603 - RNA, 23 nt, Human
guggccucuccuuguggccuggg

SEQ ID NO: 2248604 - RNA, 17 nt, Human
guggccucuugagcagu

SEQ ID NO: 2248605 - RNA, 20 nt, Human
guggccucuugagcaguggc

SEQ ID NO: 2248606 - RNA, 19 nt, Human
guggccucaacccucccuc

SEQ ID NO: 2248607 - RNA, 22 nt, Human
guggccucgggacaccugcccu

SEQ ID NO: 2248608 - RNA, 21 nt, Human
guggccucuccuuguggccug

SEQ ID NO: 2248609 - RNA, 22 nt, Human
guggccucuccuuguggccugg

SEQ ID NO: 2248610 - RNA, 21 nt, Human
guggccucccaacucacccca

SEQ ID NO: 2248611 - RNA, 22 nt, Human
guggccucccaacucaccccag

SEQ ID NO: 2248612 - RNA, 20 nt, Human
guggccuggccaggagcucu

SEQ ID NO: 2248613 - RNA, 18 nt, Human
guggccuggccaggagcu

SEQ ID NO: 2248614 - RNA, 16 nt, Human
guggccuggccaggag

SEQ ID NO: 2248615 - RNA, 13 nt, Human
guggccuggccag

SEQ ID NO: 2248616 - RNA, 12 nt, Human
guggccuggcca

SEQ ID NO: 2248617 - RNA, 19 nt, Human
guggccucuuugucuaaaa

SEQ ID NO: 2248618 - RNA, 16 nt, Human
guggccucuuugucua

SEQ ID NO: 2248619 - RNA, 13 nt, Human
guggccucuuugu

SEQ ID NO: 2248620 - RNA, 21 nt, Human
guggccucuugagcaguggcu

SEQ ID NO: 2248621 - RNA, 14 nt, Human
guggccugggcaag

SEQ ID NO: 2248622 - RNA, 12 nt, Human
guggccugggca

SEQ ID NO: 2248623 - RNA, 21 nt, Human
guggccuggccaggagcucuu

SEQ ID NO: 2248624 - RNA, 12 nt, Human
guggccugggcc

SEQ ID NO: 2248625 - RNA, 15 nt, Human
guggccugggccucc

SEQ ID NO: 2248626 - RNA, 15 nt, Human
guggccuguggccug

SEQ ID NO: 2248627 - RNA, 16 nt, Human
guggccuguggccugu

SEQ ID NO: 2248628 - RNA, 19 nt, Human
guggccuuccccagccucu

SEQ ID NO: 2248629 - RNA, 15 nt, Human
guggccuuccccagc

SEQ ID NO: 2248630 - RNA, 17 nt, Human
guggccuuccccagccu

SEQ ID NO: 2248631 - RNA, 12 nt, Human
guggccuucccc

SEQ ID NO: 2248632 - RNA, 17 nt, Human
guggccugugucccaug

SEQ ID NO: 2248633 - RNA, 19 nt, Human
guggccugugucccaugac

SEQ ID NO: 2248634 - RNA, 20 nt, Human
guggcgacucuauagacucu

SEQ ID NO: 2248635 - RNA, 22 nt, Human
guggcgcagcauauucaggaag

SEQ ID NO: 2248636 - RNA, 20 nt, Human
guggccuuccccagccucuu

SEQ ID NO: 2248637 - RNA, 13 nt, Human
gugggaagggaga

SEQ ID NO: 2248638 - RNA, 14 nt, Human
gugggaaggccagc

SEQ ID NO: 2248639 - RNA, 13 nt, Human
gugggaaggccag

SEQ ID NO: 2248640 - RNA, 17 nt, Human
gugggaagcgucugucc

SEQ ID NO: 2248641 - RNA, 13 nt, Human
gugggacacccug

SEQ ID NO: 2248642 - RNA, 14 nt, Human
gugggagcugccug

SEQ ID NO: 2248643 - RNA, 15 nt, Human
gugggacacccugug

SEQ ID NO: 2248644 - RNA, 18 nt, Human
guggggcugcuccuccag

SEQ ID NO: 2248645 - RNA, 17 nt, Human
gugggggaagaccuggc

SEQ ID NO: 2248646 - RNA, 12 nt, Human
guggggcuuggg

SEQ ID NO: 2248647 - RNA, 19 nt, Human
gugggggaagagcacagcc

SEQ ID NO: 2248648 - RNA, 21 nt, Human
gugggggaagagcacagcccu

SEQ ID NO: 2248649 - RNA, 22 nt, Human
gugggggaagagcacagcccuc

SEQ ID NO: 2248650 - RNA, 20 nt, Human
gugggggagagcaggcuggc

SEQ ID NO: 2248651 - RNA, 15 nt, Human
guggggucacucugg

SEQ ID NO: 2248652 - RNA, 20 nt, Human
guggggcugguagcucaggu

SEQ ID NO: 2248653 - RNA, 17 nt, Human
guggggcugcuccucca

SEQ ID NO: 2248654 - RNA, 16 nt, Human
guggggcugcuccucc

SEQ ID NO: 2248655 - RNA, 14 nt, Human
guggggcugcuccu

SEQ ID NO: 2248656 - RNA, 12 nt, Human
guggggcugcuc

SEQ ID NO: 2248657 - RNA, 15 nt, Human
guggggccuagaucc

SEQ ID NO: 2248658 - RNA, 13 nt, Human
guggggccuuggu

SEQ ID NO: 2248659 - RNA, 17 nt, Human
guggggcucgccaugcc

SEQ ID NO: 2248660 - RNA, 15 nt, Human
gugggagcugccugu

SEQ ID NO: 2248661 - RNA, 18 nt, Human
gugggagcugccuguuca

SEQ ID NO: 2248662 - RNA, 14 nt, Human
gugggaagggagag

SEQ ID NO: 2248663 - RNA, 17 nt, Human
guggggccgccgccucu

SEQ ID NO: 2248664 - RNA, 17 nt, Human
gugggaagggcuacacc

SEQ ID NO: 2248665 - RNA, 22 nt, Human
aagaccuuguguguauguguac

SEQ ID NO: 2248666 - RNA, 21 nt, Human
aagacgaggcccucgggccca

SEQ ID NO: 2248667 - RNA, 13 nt, Human
aagacgcugugcu

SEQ ID NO: 2248668 - RNA, 20 nt, Human
aagaccuucuccccauucug

SEQ ID NO: 2248669 - RNA, 18 nt, Human
aagaccuuguguguaugu

SEQ ID NO: 2248670 - RNA, 21 nt, Human
aagaccuuuggagcaaagcug

SEQ ID NO: 2248671 - RNA, 23 nt, Human
aagaccuugcuuaugauugcaga

SEQ ID NO: 2248672 - RNA, 15 nt, Human
aagacgcugugcugc

SEQ ID NO: 2248673 - RNA, 17 nt, Human
aagacgcugugcugccc

SEQ ID NO: 2248674 - RNA, 18 nt, Human
aagacgcugugcugcccu

SEQ ID NO: 2248675 - RNA, 19 nt, Human
aagacgcugugcugcccug

SEQ ID NO: 2248676 - RNA, 21 nt, Human
gugccuuaccuccugcccagg

SEQ ID NO: 2248677 - RNA, 22 nt, Human
aacuugagggcccagagcagga

SEQ ID NO: 2248678 - RNA, 20 nt, Human
gugccuuaccuccugcccag

SEQ ID NO: 2248679 - RNA, 19 nt, Human
gugccuuaccuccugccca

SEQ ID NO: 2248680 - RNA, 16 nt, Human
aacuugaggguaauaa

SEQ ID NO: 2248681 - RNA, 19 nt, Human
aacuugaggguaauaaacu

SEQ ID NO: 2248682 - RNA, 22 nt, Human
aacuugaggguaauaaacuuag

SEQ ID NO: 2248683 - RNA, 18 nt, Human
gugccuuaccuccugccc

SEQ ID NO: 2248684 - RNA, 17 nt, Human
gugccuuaccuccugcc

SEQ ID NO: 2248685 - RNA, 15 nt, Human
gugccuuaccuccug

SEQ ID NO: 2248686 - RNA, 14 nt, Human
gugccuuaccuccu

SEQ ID NO: 2248687 - RNA, 20 nt, Human
aacuugagggcccagagcag

SEQ ID NO: 2248688 - RNA, 15 nt, Human
aacuugcauggagca

SEQ ID NO: 2248689 - RNA, 21 nt, Human
aacuugcauccaacuccagga

SEQ ID NO: 2248690 - RNA, 22 nt, Human
aacuugcugcaguaugaaaaua

SEQ ID NO: 2248691 - RNA, 20 nt, Human
aacuugcugcaguaugaaaa

SEQ ID NO: 2248692 - RNA, 15 nt, Human
aagaccuucuccuuc

SEQ ID NO: 2248693 - RNA, 18 nt, Human
aagaccuucuccuucacc

SEQ ID NO: 2248694 - RNA, 19 nt, Human
aagaccuucuccuucaccu

SEQ ID NO: 2248695 - RNA, 23 nt, Human
aagagcaggcacauggaggagcu

SEQ ID NO: 2248696 - RNA, 16 nt, Human
aagagcagccuguggc

SEQ ID NO: 2248697 - RNA, 14 nt, Human
aagagcagccugug

SEQ ID NO: 2248698 - RNA, 12 nt, Human
aagacuuguuuu

SEQ ID NO: 2248699 - RNA, 13 nt, Human
aagagcagccugu

SEQ ID NO: 2248700 - RNA, 18 nt, Human
aagagcagccuguggcau

SEQ ID NO: 2248701 - RNA, 17 nt, Human
aagagcagccuguggca

SEQ ID NO: 2248702 - RNA, 19 nt, Human
aagagcagccuguggcauc

SEQ ID NO: 2248703 - RNA, 16 nt, Human
aagacuuggcaacaga

SEQ ID NO: 2248704 - RNA, 21 nt, Human
aagacuucaguauguugucaa

SEQ ID NO: 2248705 - RNA, 22 nt, Human
aagacuucaguauguugucaaa

SEQ ID NO: 2248706 - RNA, 16 nt, Human
aagacuuuggaaagac

SEQ ID NO: 2248707 - RNA, 17 nt, Human
aagacuuggcaacagaa

SEQ ID NO: 2248708 - RNA, 20 nt, Human
aagacuuggcaacagaagca

SEQ ID NO: 2248709 - RNA, 18 nt, Human
aagacuuggcaacagaag

SEQ ID NO: 2248710 - RNA, 19 nt, Human
aagacuuggcaacagaagc

SEQ ID NO: 2248711 - RNA, 20 nt, Human
aagacuagaggcuugcauaa

SEQ ID NO: 2248712 - RNA, 23 nt, Human
aagacugaguacguugugcauuu

SEQ ID NO: 2248713 - RNA, 16 nt, Human
aagacugcacaucaaa

SEQ ID NO: 2248714 - RNA, 17 nt, Human
aagacugcauuauauuu

SEQ ID NO: 2248715 - RNA, 23 nt, Human
aagacguguuuguguuugugugu

SEQ ID NO: 2248716 - RNA, 18 nt, Human
aagacgucccuuuuuucu

SEQ ID NO: 2248717 - RNA, 16 nt, Human
aagacuaauuuaaaaa

SEQ ID NO: 2248718 - RNA, 19 nt, Human
aagacuaauuuaaaaaaua

SEQ ID NO: 2248719 - RNA, 15 nt, Human
aagacguguuugugu

SEQ ID NO: 2248720 - RNA, 16 nt, Human
aagacguguuuguguu

SEQ ID NO: 2248721 - RNA, 23 nt, Human
aagacgugauuuugcuguagaag

SEQ ID NO: 2248722 - RNA, 16 nt, Human
aagacgugauuuugcu

SEQ ID NO: 2248723 - RNA, 22 nt, Human
aagacgugauuuugcuguagaa

SEQ ID NO: 2248724 - RNA, 14 nt, Human
aagacgccugagcu

SEQ ID NO: 2248725 - RNA, 15 nt, Human
aagacgccugagcuc

SEQ ID NO: 2248726 - RNA, 22 nt, Human
aagauggggucuguaaaaucuu

SEQ ID NO: 2248727 - RNA, 20 nt, Human
aagauggggucuguaaaauc

SEQ ID NO: 2248728 - RNA, 21 nt, Human
aagauggggucuguaaaaucu

SEQ ID NO: 2248729 - RNA, 13 nt, Human
aagauguagagga

SEQ ID NO: 2248730 - RNA, 17 nt, Human
aagaugggggcaagaag

SEQ ID NO: 2248731 - RNA, 15 nt, Human
aagauggggucugua

SEQ ID NO: 2248732 - RNA, 17 nt, Human
aagauggggucuguaaa

SEQ ID NO: 2248733 - RNA, 18 nt, Human
aagauggggucuguaaaa

SEQ ID NO: 2248734 - RNA, 19 nt, Human
aagauggggucuguaaaau

SEQ ID NO: 2248735 - RNA, 17 nt, Human
guguauuuacgcuuuga

SEQ ID NO: 2248736 - RNA, 21 nt, Human
guguauuuacgcuuugauuca

SEQ ID NO: 2248737 - RNA, 16 nt, Human
aagaugguauauuugg

SEQ ID NO: 2248738 - RNA, 14 nt, Human
aagaugggugggga

SEQ ID NO: 2248739 - RNA, 22 nt, Human
guguauuuauuuuccuccccag

SEQ ID NO: 2248740 - RNA, 14 nt, Human
guguauuugcuuuu

SEQ ID NO: 2248741 - RNA, 19 nt, Human
guguauuuccagugcaauu

SEQ ID NO: 2248742 - RNA, 21 nt, Human
guguauuuauuuuccucccca

SEQ ID NO: 2248743 - RNA, 19 nt, Human
guguauuuauuuuccuccc

SEQ ID NO: 2248744 - RNA, 23 nt, Human
gugucacuggcugccuccacucc

SEQ ID NO: 2248745 - RNA, 17 nt, Human
gugucacuuacuguuuc

SEQ ID NO: 2248746 - RNA, 19 nt, Human
gugucacuuacuguuucug

SEQ ID NO: 2248747 - RNA, 16 nt, Human
gugucagcauagaagu

SEQ ID NO: 2248748 - RNA, 17 nt, Human
gugucaaauaaacacug

SEQ ID NO: 2248749 - RNA, 15 nt, Human
gugucaacuucaaca

SEQ ID NO: 2248750 - RNA, 13 nt, Human
gugucacuggcug

SEQ ID NO: 2248751 - RNA, 14 nt, Human
gugucacuggcugc

SEQ ID NO: 2248752 - RNA, 15 nt, Human
gugucacuggcugcc

SEQ ID NO: 2248753 - RNA, 16 nt, Human
gugucacuggcugccu

SEQ ID NO: 2248754 - RNA, 17 nt, Human
gugucacuggcugccuc

SEQ ID NO: 2248755 - RNA, 18 nt, Human
gugucacuggcugccucc

SEQ ID NO: 2248756 - RNA, 19 nt, Human
gugucacuggcugccucca

SEQ ID NO: 2248757 - RNA, 23 nt, Human
guguauuuguauuuuuuugcaag

SEQ ID NO: 2248758 - RNA, 23 nt, Human
guguauuuuucaauaaagcauuu

SEQ ID NO: 2248759 - RNA, 16 nt, Human
gugucaaauaaacacu

SEQ ID NO: 2248760 - RNA, 19 nt, Human
gugucaaauaaacacugug

SEQ ID NO: 2248761 - RNA, 20 nt, Human
gugucaagagggucugagga

SEQ ID NO: 2248762 - RNA, 23 nt, Human
guguauuuuuuuacuaauagaca

SEQ ID NO: 2248763 - RNA, 17 nt, Human
guguauuuuuuuacuaa

SEQ ID NO: 2248764 - RNA, 17 nt, Human
guguggguaccuguauu

SEQ ID NO: 2248765 - RNA, 16 nt, Human
gugugggggcugcagc

SEQ ID NO: 2248766 - RNA, 14 nt, Human
gugugggucugugu

SEQ ID NO: 2248767 - RNA, 16 nt, Human
guguggguaccuguau

SEQ ID NO: 2248768 - RNA, 16 nt, Human
gugugguagagugugc

SEQ ID NO: 2248769 - RNA, 15 nt, Human
guguguauuguuccc

SEQ ID NO: 2248770 - RNA, 14 nt, Human
guguguauuaaaaa

SEQ ID NO: 2248771 - RNA, 20 nt, Human
guguguauuaaaaaaaacaa

SEQ ID NO: 2248772 - RNA, 11 nt, Human
guguguauuaa

SEQ ID NO: 2248773 - RNA, 13 nt, Human
guguguaugugua

SEQ ID NO: 2248774 - RNA, 15 nt, Human
guguguauguggggg

SEQ ID NO: 2248775 - RNA, 13 nt, Human
guguguauguggg

SEQ ID NO: 2248776 - RNA, 20 nt, Human
gugugugaaaaugugugugu

SEQ ID NO: 2248777 - RNA, 18 nt, Human
guguguccaaaacugccu

SEQ ID NO: 2248778 - RNA, 20 nt, Human
gugugucacccuuaggccag

SEQ ID NO: 2248779 - RNA, 13 nt, Human
guguccaaagcag

SEQ ID NO: 2248780 - RNA, 18 nt, Human
gugucauuuaugaaaaga

SEQ ID NO: 2248781 - RNA, 21 nt, Human
gugucaugauucacccccaaa

SEQ ID NO: 2248782 - RNA, 16 nt, Human
gugucaucagaagaua

SEQ ID NO: 2248783 - RNA, 20 nt, Human
gugucagguggggcagcuug

SEQ ID NO: 2248784 - RNA, 14 nt, Human
gugucaggcugcug

SEQ ID NO: 2248785 - RNA, 15 nt, Human
gugucaggcugcugg

SEQ ID NO: 2248786 - RNA, 18 nt, Human
gugucauaccaggccgcc

SEQ ID NO: 2248787 - RNA, 23 nt, Human
gugucauauauggggggccaaca

SEQ ID NO: 2248788 - RNA, 22 nt, Human
gugucaggcugcuggcgccucu

SEQ ID NO: 2248789 - RNA, 16 nt, Human
gugucaggcugcuggc

SEQ ID NO: 2248790 - RNA, 19 nt, Human
gugucaggcugcuggcgcc

SEQ ID NO: 2248791 - RNA, 17 nt, Human
guguccaagugugugug

SEQ ID NO: 2248792 - RNA, 19 nt, Human
guguccaaaggaagacgug

SEQ ID NO: 2248793 - RNA, 13 nt, Human
guguccaccuggc

SEQ ID NO: 2248794 - RNA, 13 nt, Human
gugugaaugaaca

SEQ ID NO: 2248795 - RNA, 14 nt, Human
gugugaaugaacac

SEQ ID NO: 2248796 - RNA, 22 nt, Human
gugugacaaggauugcuacugu

SEQ ID NO: 2248797 - RNA, 20 nt, Human
gugugacaucaguggcaugg

SEQ ID NO: 2248798 - RNA, 15 nt, Human
gugugaaugaacacu

SEQ ID NO: 2248799 - RNA, 15 nt, Human
gugugacaucagugg

SEQ ID NO: 2248800 - RNA, 21 nt, Human
gugugaccacugcagaagaca

SEQ ID NO: 2248801 - RNA, 23 nt, Human
aagaugaaggagaggcaacaucc

SEQ ID NO: 2248802 - RNA, 13 nt, Human
aagaugacauugc

SEQ ID NO: 2248803 - RNA, 15 nt, Human
aagaugaaucaaugg

SEQ ID NO: 2248804 - RNA, 13 nt, Human
aagaugacacaag

SEQ ID NO: 2248805 - RNA, 14 nt, Human
aagaugaagaggau

SEQ ID NO: 2248806 - RNA, 16 nt, Human
aagaugcuucucacug

SEQ ID NO: 2248807 - RNA, 17 nt, Human
aagaugcuucucacugc

SEQ ID NO: 2248808 - RNA, 19 nt, Human
aagaugcuucucacugcca

SEQ ID NO: 2248809 - RNA, 18 nt, Human
aagauggcugugccucug

SEQ ID NO: 2248810 - RNA, 20 nt, Human
aagauggcugugccucugcc

SEQ ID NO: 2248811 - RNA, 21 nt, Human
aagauggcugugccucugccu

SEQ ID NO: 2248812 - RNA, 21 nt, Human
aagaugggaacgcagaugauc

SEQ ID NO: 2248813 - RNA, 18 nt, Human
aagaugggcagcuaguuc

SEQ ID NO: 2248814 - RNA, 23 nt, Human
aagauggcugugccucugccugu

SEQ ID NO: 2248815 - RNA, 23 nt, Human
aagaucugcagggggugugucug

SEQ ID NO: 2248816 - RNA, 17 nt, Human
aagaucuguccucagcc

SEQ ID NO: 2248817 - RNA, 14 nt, Human
aagaucguuaguau

SEQ ID NO: 2248818 - RNA, 18 nt, Human
aagaucucagugguuaag

SEQ ID NO: 2248819 - RNA, 14 nt, Human
aagaugaaaauauu

SEQ ID NO: 2248820 - RNA, 13 nt, Human
aagaugaaaauau

SEQ ID NO: 2248821 - RNA, 16 nt, Human
aagaucguucucugcc

SEQ ID NO: 2248822 - RNA, 17 nt, Human
aagaucguucucugccu

SEQ ID NO: 2248823 - RNA, 16 nt, Human
aagaucgcccccaccu

SEQ ID NO: 2248824 - RNA, 20 nt, Human
aagaucgcgccacugcacuc

SEQ ID NO: 2248825 - RNA, 18 nt, Human
aagaguagcauuucauuc

SEQ ID NO: 2248826 - RNA, 19 nt, Human
aagaguagcauuucauucu

SEQ ID NO: 2248827 - RNA, 16 nt, Human
aagaucgaauuuuuca

SEQ ID NO: 2248828 - RNA, 13 nt, Human
aagaguaggaaga

SEQ ID NO: 2248829 - RNA, 14 nt, Human
aagaguaggaagac

SEQ ID NO: 2248830 - RNA, 21 nt, Human
aagaguagcaaguucuagaga

SEQ ID NO: 2248831 - RNA, 23 nt, Human
aagaguagcaaguucuagagaag

SEQ ID NO: 2248832 - RNA, 14 nt, Human
aagaguagcauuuc

SEQ ID NO: 2248833 - RNA, 17 nt, Human
aagaguagcauuucauu

SEQ ID NO: 2248834 - RNA, 14 nt, Human
aagaggcugaggca

SEQ ID NO: 2248835 - RNA, 21 nt, Human
aagaggcugauaauuccagug

SEQ ID NO: 2248836 - RNA, 22 nt, Human
aagaggcugaggcuggcacagg

SEQ ID NO: 2248837 - RNA, 18 nt, Human
aagaggcugaggccugga

SEQ ID NO: 2248838 - RNA, 20 nt, Human
aagaggcugaggccuggacu

SEQ ID NO: 2248839 - RNA, 14 nt, Human
aagaggcugcagcc

SEQ ID NO: 2248840 - RNA, 23 nt, Human
aagagggagggagggcuccagac

SEQ ID NO: 2248841 - RNA, 16 nt, Human
aagagggcacacacug

SEQ ID NO: 2248842 - RNA, 17 nt, Human
aagagggcacacacugu

SEQ ID NO: 2248843 - RNA, 19 nt, Human
aagaggggaccagaagcca

SEQ ID NO: 2248844 - RNA, 11 nt, Human
aagaggggcag

SEQ ID NO: 2248845 - RNA, 13 nt, Human
aagaggggcagcc

SEQ ID NO: 2248846 - RNA, 15 nt, Human
aagaggggcagcccu

SEQ ID NO: 2248847 - RNA, 12 nt, Human
aagagggccugu

SEQ ID NO: 2248848 - RNA, 14 nt, Human
aagagggccugugg

SEQ ID NO: 2248849 - RNA, 19 nt, Human
aagagggccugugggagcc

SEQ ID NO: 2248850 - RNA, 13 nt, Human
aagaggggacagg

SEQ ID NO: 2248851 - RNA, 15 nt, Human
aagaggggcugggcu

SEQ ID NO: 2248852 - RNA, 16 nt, Human
aagaggggcagcccuu

SEQ ID NO: 2248853 - RNA, 16 nt, Human
aagaggggguggaggg

SEQ ID NO: 2248854 - RNA, 12 nt, Human
aagaguaggaag

SEQ ID NO: 2248855 - RNA, 15 nt, Human
aagaguagaauugca

SEQ ID NO: 2248856 - RNA, 15 nt, Human
aagagggguggagac

SEQ ID NO: 2248857 - RNA, 13 nt, Human
aagaguagacauu

SEQ ID NO: 2248858 - RNA, 20 nt, Human
aagaguagaaacugcaggga

SEQ ID NO: 2248859 - RNA, 13 nt, Human
aagagggggugga

SEQ ID NO: 2248860 - RNA, 14 nt, Human
aagagggguggaga

SEQ ID NO: 2248861 - RNA, 22 nt, Human
guggggucucccucuccugccu

SEQ ID NO: 2248862 - RNA, 21 nt, Human
guggggucucccucuccugcc

SEQ ID NO: 2248863 - RNA, 19 nt, Human
guggggucucccucuccug

SEQ ID NO: 2248864 - RNA, 17 nt, Human
guggggucucccucucc

SEQ ID NO: 2248865 - RNA, 14 nt, Human
guggggucucccuc

SEQ ID NO: 2248866 - RNA, 19 nt, Human
guggggucaugcccuccuc

SEQ ID NO: 2248867 - RNA, 21 nt, Human
guggggucaugcccuccucuc

SEQ ID NO: 2248868 - RNA, 15 nt, Human
guggggucaugcccu

SEQ ID NO: 2248869 - RNA, 20 nt, Human
guggggguggaggcuuccug

SEQ ID NO: 2248870 - RNA, 19 nt, Human
gugggguagguugggagaa

SEQ ID NO: 2248871 - RNA, 13 nt, Human
aagaggcugaggc

SEQ ID NO: 2248872 - RNA, 22 nt, Human
aagaggcgggccagccaggcgg

SEQ ID NO: 2248873 - RNA, 15 nt, Human
aagaggcugaggccu

SEQ ID NO: 2248874 - RNA, 18 nt, Human
aagaggcugaaagaggcc

SEQ ID NO: 2248875 - RNA, 16 nt, Human
aagaggcugaaagagg

SEQ ID NO: 2248876 - RNA, 15 nt, Human
aagaggcgggccagc

SEQ ID NO: 2248877 - RNA, 17 nt, Human
aagaggcgggccagcca

SEQ ID NO: 2248878 - RNA, 18 nt, Human
aagaggcgggccagccag

SEQ ID NO: 2248879 - RNA, 20 nt, Human
aagaggcgggccagccaggc

SEQ ID NO: 2248880 - RNA, 21 nt, Human
aagaggcgggccagccaggcg

SEQ ID NO: 2248881 - RNA, 19 nt, Human
aagaggcgucuguauauuu

SEQ ID NO: 2248882 - RNA, 17 nt, Human
guggggucacucuggca

SEQ ID NO: 2248883 - RNA, 20 nt, Human
guggggucacucuggcagcu

SEQ ID NO: 2248884 - RNA, 21 nt, Human
guggggucacucuggcagcuc

SEQ ID NO: 2248885 - RNA, 22 nt, Human
guggggucacucuggcagcuca

SEQ ID NO: 2248886 - RNA, 12 nt, Human
uaaaauacuauu

SEQ ID NO: 2248887 - RNA, 15 nt, Human
uaaaauacuauuuuu

SEQ ID NO: 2248888 - RNA, 20 nt, Human
uaaaauacuauuuuuacugc

SEQ ID NO: 2248889 - RNA, 21 nt, Human
uaaaauacuauuuuuacugcc

SEQ ID NO: 2248890 - RNA, 17 nt, Human
uaaaauagaaauaagug

SEQ ID NO: 2248891 - RNA, 20 nt, Human
uaaaauagauaaauaaauau

SEQ ID NO: 2248892 - RNA, 18 nt, Human
uaaaauaucuuuugaccu

SEQ ID NO: 2248893 - RNA, 19 nt, Human
uaaaauaugaagacauaaa

SEQ ID NO: 2248894 - RNA, 16 nt, Human
uaaaauaauucuaaag

SEQ ID NO: 2248895 - RNA, 17 nt, Human
uaaaauaauucuaaagg

SEQ ID NO: 2248896 - RNA, 20 nt, Human
uaaaauaauuuuuauauuug

SEQ ID NO: 2248897 - RNA, 22 nt, Human
uaaaauaccagccaguaaaugg

SEQ ID NO: 2248898 - RNA, 13 nt, Human
uaaaagacuuuuu

SEQ ID NO: 2248899 - RNA, 22 nt, Human
uaaaagugggcuugauucugca

SEQ ID NO: 2248900 - RNA, 23 nt, Human
uaaaagacacuguuuacaagaaa

SEQ ID NO: 2248901 - RNA, 15 nt, Human
uaaaagacaagacuu

SEQ ID NO: 2248902 - RNA, 20 nt, Human
uaaaagacaaaucaaagcag

SEQ ID NO: 2248903 - RNA, 22 nt, Human
uaaaagacaaaucaaagcagau

SEQ ID NO: 2248904 - RNA, 20 nt, Human
uaaaagacagugaaagaaaa

SEQ ID NO: 2248905 - RNA, 17 nt, Human
uaaaaguuauuaauauu

SEQ ID NO: 2248906 - RNA, 12 nt, Human
uaaaaguuacuu

SEQ ID NO: 2248907 - RNA, 18 nt, Human
uaaaagugugagcaguga

SEQ ID NO: 2248908 - RNA, 23 nt, Human
uaaaagugggcuugauucugcag

SEQ ID NO: 2248909 - RNA, 14 nt, Human
uaaaagugugagca

SEQ ID NO: 2248910 - RNA, 14 nt, Human
uaaaaguugugauu

SEQ ID NO: 2248911 - RNA, 15 nt, Human
uaaaaguugugauuc

SEQ ID NO: 2248912 - RNA, 21 nt, Human
uaaaaguugugauuccagaua

SEQ ID NO: 2248913 - RNA, 13 nt, Human
uaaaaguuucaau

SEQ ID NO: 2248914 - RNA, 15 nt, Human
uaaaaguuucaaugu

SEQ ID NO: 2248915 - RNA, 18 nt, Human
uaaaaguuucaaugugau

SEQ ID NO: 2248916 - RNA, 21 nt, Human
uaaaauaaaaauucugaaugu

SEQ ID NO: 2248917 - RNA, 15 nt, Human
uaaaauaaugggauu

SEQ ID NO: 2248918 - RNA, 15 nt, Human
uaaaauaauucuaaa

SEQ ID NO: 2248919 - RNA, 19 nt, Human
uaaaaguuucaaugugauu

SEQ ID NO: 2248920 - RNA, 17 nt, Human
uaaaauaaaauaaaaau

SEQ ID NO: 2248921 - RNA, 12 nt, Human
aagugccuuaau

SEQ ID NO: 2248922 - RNA, 19 nt, Human
aagugccccugcugccucc

SEQ ID NO: 2248923 - RNA, 14 nt, Human
aagugaucaauaaa

SEQ ID NO: 2248924 - RNA, 22 nt, Human
aagugaucaauaaaaugugauu

SEQ ID NO: 2248925 - RNA, 23 nt, Human
aagugccccugcugccuccccaa

SEQ ID NO: 2248926 - RNA, 22 nt, Human
aagugccccugcugccucccca

SEQ ID NO: 2248927 - RNA, 21 nt, Human
aagugauucucaugccucagc

SEQ ID NO: 2248928 - RNA, 19 nt, Human
aagugauucuccugccuca

SEQ ID NO: 2248929 - RNA, 15 nt, Human
aagugauucuccugc

SEQ ID NO: 2248930 - RNA, 16 nt, Human
aagugauucuccugcc

SEQ ID NO: 2248931 - RNA, 17 nt, Human
aagugauucuccugccu

SEQ ID NO: 2248932 - RNA, 18 nt, Human
aagugauucuccugccuc

SEQ ID NO: 2248933 - RNA, 17 nt, Human
aagugagcuuugcugcu

SEQ ID NO: 2248934 - RNA, 18 nt, Human
aagugagcuuugcugcua

SEQ ID NO: 2248935 - RNA, 21 nt, Human
aagugagcuuugcugcuacag

SEQ ID NO: 2248936 - RNA, 16 nt, Human
aagugaggaugaaaaa

SEQ ID NO: 2248937 - RNA, 18 nt, Human
aagugagggucagagagg

SEQ ID NO: 2248938 - RNA, 11 nt, Human
aagugaggaag

SEQ ID NO: 2248939 - RNA, 22 nt, Human
aagugagggccgagugagagcg

SEQ ID NO: 2248940 - RNA, 15 nt, Human
aagugauaauuucug

SEQ ID NO: 2248941 - RNA, 20 nt, Human
aagugauucucaugccucag

SEQ ID NO: 2248942 - RNA, 20 nt, Human
uaaaauaugaagacauaaac

SEQ ID NO: 2248943 - RNA, 14 nt, Human
uaaaauauggcuau

SEQ ID NO: 2248944 - RNA, 13 nt, Human
uaaaauauuccug

SEQ ID NO: 2248945 - RNA, 22 nt, Human
uaaaauauuccugcauuuguga

SEQ ID NO: 2248946 - RNA, 15 nt, Human
uaaaauauuuaucug

SEQ ID NO: 2248947 - RNA, 18 nt, Human
uaaaauauggcuauaaau

SEQ ID NO: 2248948 - RNA, 12 nt, Human
uaaaauauuuau

SEQ ID NO: 2248949 - RNA, 13 nt, Human
uaaaacuuuaauc

SEQ ID NO: 2248950 - RNA, 13 nt, Human
uaaaacuuuccuc

SEQ ID NO: 2248951 - RNA, 13 nt, Human
uaaaacuugcugc

SEQ ID NO: 2248952 - RNA, 18 nt, Human
uaaaacuaaauagcaugu

SEQ ID NO: 2248953 - RNA, 20 nt, Human
uaaaacuaaauagcauguau

SEQ ID NO: 2248954 - RNA, 22 nt, Human
uaaaacuugauguguuaucucu

SEQ ID NO: 2248955 - RNA, 20 nt, Human
uaaaacuugauguguuaucu

SEQ ID NO: 2248956 - RNA, 20 nt, Human
uaaaagaaugggcaguuaca

SEQ ID NO: 2248957 - RNA, 15 nt, Human
uaaaacuuuccucgc

SEQ ID NO: 2248958 - RNA, 17 nt, Human
uaaaacuuuccucgccu

SEQ ID NO: 2248959 - RNA, 12 nt, Human
uaaaagaauugu

SEQ ID NO: 2248960 - RNA, 21 nt, Human
uaaaagaaugggcaguuacau

SEQ ID NO: 2248961 - RNA, 11 nt, Human
uaaaagacaaa

SEQ ID NO: 2248962 - RNA, 12 nt, Human
uaaaagacaaau

SEQ ID NO: 2248963 - RNA, 12 nt, Human
uaaaagaaugau

SEQ ID NO: 2248964 - RNA, 23 nt, Human
uaaaagaauauuuuaacuuccuu

SEQ ID NO: 2248965 - RNA, 21 nt, Human
uaaaaccuuucaaauuucaca

SEQ ID NO: 2248966 - RNA, 20 nt, Human
uaaaaccuuucaaauuucac

SEQ ID NO: 2248967 - RNA, 16 nt, Human
uaaaaccuuucaaauu

SEQ ID NO: 2248968 - RNA, 14 nt, Human
uaaaaccuuucaaa

SEQ ID NO: 2248969 - RNA, 10 nt, Human
uaaaacuaaa

SEQ ID NO: 2248970 - RNA, 15 nt, Human
uaaaacuaaauagca

SEQ ID NO: 2248971 - RNA, 19 nt, Human
uaaaaccccaucucuacua

SEQ ID NO: 2248972 - RNA, 20 nt, Human
uaaaaaucuaccuucuguag

SEQ ID NO: 2248973 - RNA, 21 nt, Human
uaaaaccccagccaacucauu

SEQ ID NO: 2248974 - RNA, 15 nt, Human
uaaaaccugucaaug

SEQ ID NO: 2248975 - RNA, 13 nt, Human
uaaaaccuuucaa

SEQ ID NO: 2248976 - RNA, 11 nt, Human
uaaaaccuuuc

SEQ ID NO: 2248977 - RNA, 10 nt, Human
uaaaaccuuu

SEQ ID NO: 2248978 - RNA, 18 nt, Human
uaaaaccugagcuagaag

SEQ ID NO: 2248979 - RNA, 16 nt, Human
uaaaaccugucaauga

SEQ ID NO: 2248980 - RNA, 17 nt, Human
uaaaaaucauugauugu

SEQ ID NO: 2248981 - RNA, 15 nt, Human
uaaaaaucauaguac

SEQ ID NO: 2248982 - RNA, 20 nt, Human
uaaaaaucauaaacugugug

SEQ ID NO: 2248983 - RNA, 19 nt, Human
uaaaaaucuaccuucugua

SEQ ID NO: 2248984 - RNA, 19 nt, Human
uaaaacccauuuaaauuuu

SEQ ID NO: 2248985 - RNA, 21 nt, Human
uaaaaaucucaaauuucuaaa

SEQ ID NO: 2248986 - RNA, 20 nt, Human
uaaaaaucucaaauuucuaa

SEQ ID NO: 2248987 - RNA, 19 nt, Human
uaaaaaucucaaauuucua

SEQ ID NO: 2248988 - RNA, 15 nt, Human
guuuuucuucucccu

SEQ ID NO: 2248989 - RNA, 23 nt, Human
guuuuucuucaacaucaauguuc

SEQ ID NO: 2248990 - RNA, 22 nt, Human
guuuuucuucaacaucaauguu

SEQ ID NO: 2248991 - RNA, 12 nt, Human
guuuuucuucaa

SEQ ID NO: 2248992 - RNA, 21 nt, Human
guuuuucuuaaauaauaaaga

SEQ ID NO: 2248993 - RNA, 15 nt, Human
uaaaaaguggaaaaa

SEQ ID NO: 2248994 - RNA, 19 nt, Human
guuuuugaaggcagaaagc

SEQ ID NO: 2248995 - RNA, 14 nt, Human
guuuuugaaacaga

SEQ ID NO: 2248996 - RNA, 17 nt, Human
guuuuugaaacagaacc

SEQ ID NO: 2248997 - RNA, 20 nt, Human
guuuuugaaggcagaaagca

SEQ ID NO: 2248998 - RNA, 18 nt, Human
guuuuugauagcuuuauu

SEQ ID NO: 2248999 - RNA, 9 nt, Human
uaaaaaguu

SEQ ID NO: 2249000 - RNA, 15 nt, Human
uaaaaaguuaaaaag

SEQ ID NO: 2249001 - RNA, 13 nt, Human
uaaaaaguuaaaa

SEQ ID NO: 2249002 - RNA, 12 nt, Human
uaaaaaguuaaa

SEQ ID NO: 2249003 - RNA, 11 nt, Human
uaaaaaguuaa

SEQ ID NO: 2249004 - RNA, 18 nt, Human
uaaaaauaaaaaacacug

SEQ ID NO: 2249005 - RNA, 19 nt, Human
uaaaaauaaaaaacacugg

SEQ ID NO: 2249006 - RNA, 17 nt, Human
uaaaaauaaauuugguu

SEQ ID NO: 2249007 - RNA, 14 nt, Human
uaaaaauaaauuca

SEQ ID NO: 2249008 - RNA, 17 nt, Human
uaaaaaguuaaaaaguu

SEQ ID NO: 2249009 - RNA, 20 nt, Human
uaaaaaguuuuaguuuugau

SEQ ID NO: 2249010 - RNA, 21 nt, Human
uaaaaauaaaaaacacuggga

SEQ ID NO: 2249011 - RNA, 17 nt, Human
uaaaaaucauaaacugu

SEQ ID NO: 2249012 - RNA, 11 nt, Human
uaaaaaucaua

SEQ ID NO: 2249013 - RNA, 15 nt, Human
uaaaaaucucaaauu

SEQ ID NO: 2249014 - RNA, 17 nt, Human
uaaaaaucucaaauuuc

SEQ ID NO: 2249015 - RNA, 16 nt, Human
uaaaaaucucaaauuu

SEQ ID NO: 2249016 - RNA, 14 nt, Human
aaguauuucccagc

SEQ ID NO: 2249017 - RNA, 22 nt, Human
aaguauuuucauaaguauuuca

SEQ ID NO: 2249018 - RNA, 17 nt, Human
aaguauuuucauaagua

SEQ ID NO: 2249019 - RNA, 21 nt, Human
aagucaugcguuuaaucacau

SEQ ID NO: 2249020 - RNA, 14 nt, Human
aaguauuuuccugu

SEQ ID NO: 2249021 - RNA, 15 nt, Human
aaguauuuuccugua

SEQ ID NO: 2249022 - RNA, 18 nt, Human
aaguauuuuccuguaaaa

SEQ ID NO: 2249023 - RNA, 23 nt, Human
aaguauuuauauauuuauaacuc

SEQ ID NO: 2249024 - RNA, 22 nt, Human
aaguauuuauauauuuauaacu

SEQ ID NO: 2249025 - RNA, 21 nt, Human
aaguauuuauauauuuauaac

SEQ ID NO: 2249026 - RNA, 20 nt, Human
aaguauuuauauauuuauaa

SEQ ID NO: 2249027 - RNA, 13 nt, Human
aaguauuugggaa

SEQ ID NO: 2249028 - RNA, 22 nt, Human
aaguauuucaaauuggagcuuc

SEQ ID NO: 2249029 - RNA, 21 nt, Human
aaguauuucaaauuggagcuu

SEQ ID NO: 2249030 - RNA, 13 nt, Human
aaguauuucaaau

SEQ ID NO: 2249031 - RNA, 14 nt, Human
aagucaugugcauu

SEQ ID NO: 2249032 - RNA, 15 nt, Human
aagucaugugcauuu

SEQ ID NO: 2249033 - RNA, 12 nt, Human
aagucauguucc

SEQ ID NO: 2249034 - RNA, 20 nt, Human
aagucaugcaaaggcuggga

SEQ ID NO: 2249035 - RNA, 15 nt, Human
aagucauggcugugc

SEQ ID NO: 2249036 - RNA, 16 nt, Human
aagucauuuuaacuuu

SEQ ID NO: 2249037 - RNA, 20 nt, Human
aagucauuggcuuuauccuc

SEQ ID NO: 2249038 - RNA, 13 nt, Human
aagucauuggcuu

SEQ ID NO: 2249039 - RNA, 22 nt, Human
aagucuuauauauuguagauaa

SEQ ID NO: 2249040 - RNA, 14 nt, Human
aagucuuuuguucg

SEQ ID NO: 2249041 - RNA, 16 nt, Human
aagucuuucacauuua

SEQ ID NO: 2249042 - RNA, 22 nt, Human
aagucuucccugaucaagucac

SEQ ID NO: 2249043 - RNA, 18 nt, Human
aagucuucccugaucaag

SEQ ID NO: 2249044 - RNA, 20 nt, Human
aagucuucacucucugaaga

SEQ ID NO: 2249045 - RNA, 16 nt, Human
aagucuuaucaagcag

SEQ ID NO: 2249046 - RNA, 17 nt, Human
aagucuuaucaagcagc

SEQ ID NO: 2249047 - RNA, 22 nt, Human
aagucauuuuaacuuuaucaca

SEQ ID NO: 2249048 - RNA, 21 nt, Human
aaguccaaauguuuacaggga

SEQ ID NO: 2249049 - RNA, 20 nt, Human
aagucauuuuaacuuuauca

SEQ ID NO: 2249050 - RNA, 18 nt, Human
aagucauuuuaacuuuau

SEQ ID NO: 2249051 - RNA, 12 nt, Human
aagucuucaggg

SEQ ID NO: 2249052 - RNA, 19 nt, Human
guuuuuccuguucuuaaga

SEQ ID NO: 2249053 - RNA, 22 nt, Human
aagugagacaguccagccugga

SEQ ID NO: 2249054 - RNA, 19 nt, Human
guuuuuccuuguauuuaaa

SEQ ID NO: 2249055 - RNA, 20 nt, Human
guuuuucuuaaauaauaaag

SEQ ID NO: 2249056 - RNA, 14 nt, Human
guuuuuccuuuaaa

SEQ ID NO: 2249057 - RNA, 15 nt, Human
guuuuuccuuuaaaa

SEQ ID NO: 2249058 - RNA, 14 nt, Human
guuuuucaguuuuc

SEQ ID NO: 2249059 - RNA, 18 nt, Human
aagugaagguuuacaauu

SEQ ID NO: 2249060 - RNA, 20 nt, Human
aagugagacaguccagccug

SEQ ID NO: 2249061 - RNA, 18 nt, Human
guuuuuccacuacugcua

SEQ ID NO: 2249062 - RNA, 17 nt, Human
guuuuuccacuacugcu

SEQ ID NO: 2249063 - RNA, 16 nt, Human
guuuuuccacuacugc

SEQ ID NO: 2249064 - RNA, 15 nt, Human
guuuuuccacuacug

SEQ ID NO: 2249065 - RNA, 15 nt, Human
aagugagagcugggu

SEQ ID NO: 2249066 - RNA, 15 nt, Human
guuuuucauaaagca

SEQ ID NO: 2249067 - RNA, 14 nt, Human
aagugagagcuggg

SEQ ID NO: 2249068 - RNA, 12 nt, Human
aagugagagagg

SEQ ID NO: 2249069 - RNA, 10 nt, Human
aagugaaggu

SEQ ID NO: 2249070 - RNA, 17 nt, Human
aagugaagguuuacaau

SEQ ID NO: 2249071 - RNA, 22 nt, Human
aagugaagguuuacaauuuaca

SEQ ID NO: 2249072 - RNA, 15 nt, Human
aagugagacagucca

SEQ ID NO: 2249073 - RNA, 16 nt, Human
aagugaacacuagcca

SEQ ID NO: 2249074 - RNA, 16 nt, Human
aagugaagaaaaguga

SEQ ID NO: 2249075 - RNA, 16 nt, Human
aagugaagacuggaag

SEQ ID NO: 2249076 - RNA, 13 nt, Human
aagugaagacugg

SEQ ID NO: 2249077 - RNA, 19 nt, Human
aagugaagacaaugacuua

SEQ ID NO: 2249078 - RNA, 17 nt, Human
aagugaagacaaugacu

SEQ ID NO: 2249079 - RNA, 21 nt, Human
aagugaaaaaggaggaagaga

SEQ ID NO: 2249080 - RNA, 18 nt, Human
aagucuuuuguucgcaug

SEQ ID NO: 2249081 - RNA, 16 nt, Human
aagucuuuuuugauca

SEQ ID NO: 2249082 - RNA, 16 nt, Human
aagugaaaucaaaggu

SEQ ID NO: 2249083 - RNA, 21 nt, Human
aaguaauccaccugccucggc

SEQ ID NO: 2249084 - RNA, 20 nt, Human
guuuuggcaaacgcuaaaga

SEQ ID NO: 2249085 - RNA, 16 nt, Human
guuuuggggacucauu

SEQ ID NO: 2249086 - RNA, 23 nt, Human
guuuuggcugaaauucuccugga

SEQ ID NO: 2249087 - RNA, 20 nt, Human
guuuuggcugaaauucuccu

SEQ ID NO: 2249088 - RNA, 22 nt, Human
guuuuggcugaaauucuccugg

SEQ ID NO: 2249089 - RNA, 16 nt, Human
guuuugcuguuuccuu

SEQ ID NO: 2249090 - RNA, 19 nt, Human
guuuugcuauuagacugua

SEQ ID NO: 2249091 - RNA, 13 nt, Human
guuuugcacuuuu

SEQ ID NO: 2249092 - RNA, 14 nt, Human
guuuugccaacauu

SEQ ID NO: 2249093 - RNA, 16 nt, Human
guuuugccaacauugc

SEQ ID NO: 2249094 - RNA, 16 nt, Human
guuuuggaagcucuga

SEQ ID NO: 2249095 - RNA, 18 nt, Human
guuuugcuuuuucugacu

SEQ ID NO: 2249096 - RNA, 18 nt, Human
aaguacacuguuucaaac

SEQ ID NO: 2249097 - RNA, 13 nt, Human
aaguacacuguuu

SEQ ID NO: 2249098 - RNA, 14 nt, Human
aaguaaugauaacu

SEQ ID NO: 2249099 - RNA, 19 nt, Human
aaguaaugauaacuggaaa

SEQ ID NO: 2249100 - RNA, 21 nt, Human
guuucugcccacauuggaccc

SEQ ID NO: 2249101 - RNA, 15 nt, Human
guuucugccgcagcc

SEQ ID NO: 2249102 - RNA, 20 nt, Human
guuucugaguuccugcaugc

SEQ ID NO: 2249103 - RNA, 14 nt, Human
guuucugcaguagu

SEQ ID NO: 2249104 - RNA, 20 nt, Human
guuucugcaguagucucugu

SEQ ID NO: 2249105 - RNA, 22 nt, Human
guuucugcaguagucucugugc

SEQ ID NO: 2249106 - RNA, 14 nt, Human
guuucugccgcagc

SEQ ID NO: 2249107 - RNA, 16 nt, Human
guuuugccauguuggc

SEQ ID NO: 2249108 - RNA, 20 nt, Human
guuuugccauguuggccagg

SEQ ID NO: 2249109 - RNA, 21 nt, Human
guuuugccauguuggccaggc

SEQ ID NO: 2249110 - RNA, 22 nt, Human
guuuugccauguuggccaggcu

SEQ ID NO: 2249111 - RNA, 21 nt, Human
aaguaaugaauuuuuaugaua

SEQ ID NO: 2249112 - RNA, 18 nt, Human
aaguaaucccgccaccua

SEQ ID NO: 2249113 - RNA, 16 nt, Human
aaguaauccuagggaa

SEQ ID NO: 2249114 - RNA, 23 nt, Human
aaguacacuguuucaaacuuuac

SEQ ID NO: 2249115 - RNA, 20 nt, Human
aaguacacuguuucaaacuu

SEQ ID NO: 2249116 - RNA, 19 nt, Human
aaguacacuguuucaaacu

SEQ ID NO: 2249117 - RNA, 17 nt, Human
aaguaccacucaggcca

SEQ ID NO: 2249118 - RNA, 18 nt, Human
aaguacccguucacauuu

SEQ ID NO: 2249119 - RNA, 20 nt, Human
aaguacauauuaggaaaaua

SEQ ID NO: 2249120 - RNA, 12 nt, Human
aaguacauuuaa

SEQ ID NO: 2249121 - RNA, 13 nt, Human
aaguacauuuaau

SEQ ID NO: 2249122 - RNA, 18 nt, Human
aaguauuuauauauuuau

SEQ ID NO: 2249123 - RNA, 17 nt, Human
aaguauuuauauauuua

SEQ ID NO: 2249124 - RNA, 16 nt, Human
aaguauuuauauauuu

SEQ ID NO: 2249125 - RNA, 15 nt, Human
aaguauuuauauauu

SEQ ID NO: 2249126 - RNA, 14 nt, Human
aaguauuuauauau

SEQ ID NO: 2249127 - RNA, 13 nt, Human
aaguauuuauaua

SEQ ID NO: 2249128 - RNA, 12 nt, Human
aaguauuuauau

SEQ ID NO: 2249129 - RNA, 19 nt, Human
aaguauuuaauuagugcua

SEQ ID NO: 2249130 - RNA, 20 nt, Human
aaguauuuaauuagugcuaa

SEQ ID NO: 2249131 - RNA, 21 nt, Human
aaguauuuaauuagugcuaag

SEQ ID NO: 2249132 - RNA, 22 nt, Human
aaguauuuaauuagugcuaagu

SEQ ID NO: 2249133 - RNA, 23 nt, Human
aaguauuuaauuagugcuaagug

SEQ ID NO: 2249134 - RNA, 10 nt, Human
aaguauuuag

SEQ ID NO: 2249135 - RNA, 16 nt, Human
aaguauuuagguuuuu

SEQ ID NO: 2249136 - RNA, 11 nt, Human
aaguauuuagg

SEQ ID NO: 2249137 - RNA, 20 nt, Human
aaguauuagggguaauauau

SEQ ID NO: 2249138 - RNA, 22 nt, Human
aaguauuagggguaauauauug

SEQ ID NO: 2249139 - RNA, 16 nt, Human
aaguauuuaauuagug

SEQ ID NO: 2249140 - RNA, 17 nt, Human
aaguauuuaauuagugc

SEQ ID NO: 2249141 - RNA, 18 nt, Human
aaguauuuaauuagugcu

SEQ ID NO: 2249142 - RNA, 13 nt, Human
aaguauuagaaua

SEQ ID NO: 2249143 - RNA, 21 nt, Human
guugcuugccugauauaaaug

SEQ ID NO: 2249144 - RNA, 23 nt, Human
guugcguggacucugcacauguc

SEQ ID NO: 2249145 - RNA, 16 nt, Human
guugcuuacaauuuuu

SEQ ID NO: 2249146 - RNA, 23 nt, Human
guugcuuaggaugugugcaugug

SEQ ID NO: 2249147 - RNA, 13 nt, Human
guugcggggggag

SEQ ID NO: 2249148 - RNA, 15 nt, Human
guugcggggggaggg

SEQ ID NO: 2249149 - RNA, 18 nt, Human
guugcguaacuggcugug

SEQ ID NO: 2249150 - RNA, 22 nt, Human
guuggaaaagaauacagaaaga

SEQ ID NO: 2249151 - RNA, 20 nt, Human
guuggaaaagaauacagaaa

SEQ ID NO: 2249152 - RNA, 15 nt, Human
guuggaaaagaauac

SEQ ID NO: 2249153 - RNA, 15 nt, Human
guugcuuugcccugg

SEQ ID NO: 2249154 - RNA, 14 nt, Human
guugggaggauucu

SEQ ID NO: 2249155 - RNA, 18 nt, Human
guugggauacugcagggc

SEQ ID NO: 2249156 - RNA, 21 nt, Human
guugggauacugcagggccag

SEQ ID NO: 2249157 - RNA, 16 nt, Human
guugggauuccugacc

SEQ ID NO: 2249158 - RNA, 18 nt, Human
guugggauuccugaccca

SEQ ID NO: 2249159 - RNA, 19 nt, Human
guugggauuccugacccag

SEQ ID NO: 2249160 - RNA, 21 nt, Human
guugggauugggggcuggugc

SEQ ID NO: 2249161 - RNA, 22 nt, Human
guugggauugggggcuggugcc

SEQ ID NO: 2249162 - RNA, 20 nt, Human
guugggauuccugacccagg

SEQ ID NO: 2249163 - RNA, 21 nt, Human
guugggauuccugacccaggc

SEQ ID NO: 2249164 - RNA, 22 nt, Human
guugggauuccugacccaggcc

SEQ ID NO: 2249165 - RNA, 23 nt, Human
guugggauuccugacccaggccg

SEQ ID NO: 2249166 - RNA, 16 nt, Human
guugggagcacuggag

SEQ ID NO: 2249167 - RNA, 15 nt, Human
guugggagcacugga

SEQ ID NO: 2249168 - RNA, 14 nt, Human
guugggagcacugg

SEQ ID NO: 2249169 - RNA, 22 nt, Human
guuggaagcuagcuccccuccu

SEQ ID NO: 2249170 - RNA, 16 nt, Human
guuggaaagcaggugg

SEQ ID NO: 2249171 - RNA, 18 nt, Human
guuggaaauauucaugcu

SEQ ID NO: 2249172 - RNA, 23 nt, Human
guuggaaauagaaauuuccagag

SEQ ID NO: 2249173 - RNA, 22 nt, Human
guuggaaugaauuaaauaaacc

SEQ ID NO: 2249174 - RNA, 23 nt, Human
guugcccaggcaggucuugaacu

SEQ ID NO: 2249175 - RNA, 13 nt, Human
aaggccucccaca

SEQ ID NO: 2249176 - RNA, 14 nt, Human
aaggccucccacag

SEQ ID NO: 2249177 - RNA, 15 nt, Human
aaggccucccacagu

SEQ ID NO: 2249178 - RNA, 12 nt, Human
guugcccaggcu

SEQ ID NO: 2249179 - RNA, 13 nt, Human
guugcccaggcug

SEQ ID NO: 2249180 - RNA, 21 nt, Human
guugccuugaaccacuucccu

SEQ ID NO: 2249181 - RNA, 18 nt, Human
guugccuuaaagaaaguc

SEQ ID NO: 2249182 - RNA, 19 nt, Human
guugccuugaaccacuucc

SEQ ID NO: 2249183 - RNA, 16 nt, Human
guugccuaauaaacau

SEQ ID NO: 2249184 - RNA, 19 nt, Human
aaggccucccacagugacu

SEQ ID NO: 2249185 - RNA, 16 nt, Human
aaggccucccacagug

SEQ ID NO: 2249186 - RNA, 17 nt, Human
aaggccucccacaguga

SEQ ID NO: 2249187 - RNA, 19 nt, Human
aaggccucccuagccagca

SEQ ID NO: 2249188 - RNA, 22 nt, Human
aaggccauccuucccugucugc

SEQ ID NO: 2249189 - RNA, 22 nt, Human
aaggccaucugggcuccuccag

SEQ ID NO: 2249190 - RNA, 24 nt, Human
aaggccauaaaacagguaauauaa

SEQ ID NO: 2249191 - RNA, 18 nt, Human
aaggccauaaaacaggua

SEQ ID NO: 2249192 - RNA, 19 nt, Human
aaggccagcuggcagcaga

SEQ ID NO: 2249193 - RNA, 17 nt, Human
aaggccagcuggcagca

SEQ ID NO: 2249194 - RNA, 17 nt, Human
aaggccauaaaacaggu

SEQ ID NO: 2249195 - RNA, 14 nt, Human
aaggccauaaaaca

SEQ ID NO: 2249196 - RNA, 14 nt, Human
aaggccagcuggca

SEQ ID NO: 2249197 - RNA, 17 nt, Human
aaggccaaaccucuguu

SEQ ID NO: 2249198 - RNA, 16 nt, Human
aaggccaaaggaagca

SEQ ID NO: 2249199 - RNA, 17 nt, Human
aaggcauucucugaaga

SEQ ID NO: 2249200 - RNA, 14 nt, Human
aaggcauucucuga

SEQ ID NO: 2249201 - RNA, 15 nt, Human
aaggcauuguuugag

SEQ ID NO: 2249202 - RNA, 16 nt, Human
aaggccaaaccucugu

SEQ ID NO: 2249203 - RNA, 13 nt, Human
aaggcauuuuauu

SEQ ID NO: 2249204 - RNA, 21 nt, Human
aaggcccacgagcuuguucuu

SEQ ID NO: 2249205 - RNA, 21 nt, Human
aaggccauggagagcuggagc

SEQ ID NO: 2249206 - RNA, 14 nt, Human
aaggccaucagagc

SEQ ID NO: 2249207 - RNA, 18 nt, Human
aaggccauggagagcugg

SEQ ID NO: 2249208 - RNA, 22 nt, Human
aaggccauggagagcuggagcc

SEQ ID NO: 2249209 - RNA, 14 nt, Human
aaggccccagagac

SEQ ID NO: 2249210 - RNA, 22 nt, Human
aaggccgcuguucacccacagg

SEQ ID NO: 2249211 - RNA, 18 nt, Human
aaggccgagaagcaagaa

SEQ ID NO: 2249212 - RNA, 17 nt, Human
aaggccgagaagcaaga

SEQ ID NO: 2249213 - RNA, 14 nt, Human
aaggccgagaagca

SEQ ID NO: 2249214 - RNA, 16 nt, Human
aaggccgaagcucugg

SEQ ID NO: 2249215 - RNA, 18 nt, Human
aaggccgaagcucuggcu

SEQ ID NO: 2249216 - RNA, 19 nt, Human
aaggccgaagcucuggcug

SEQ ID NO: 2249217 - RNA, 20 nt, Human
aaggccgaagcucuggcuga

SEQ ID NO: 2249218 - RNA, 22 nt, Human
aaggccgaagaaggguccuucc

SEQ ID NO: 2249219 - RNA, 22 nt, Human
aaggcccuaucuguuuacagug

SEQ ID NO: 2249220 - RNA, 23 nt, Human
aaggauacuguaacacuuuacaa

SEQ ID NO: 2249221 - RNA, 15 nt, Human
aaggauagaugcugg

SEQ ID NO: 2249222 - RNA, 20 nt, Human
aaggcauaucagucucugag

SEQ ID NO: 2249223 - RNA, 19 nt, Human
aaggauacuguaacacuuu

SEQ ID NO: 2249224 - RNA, 21 nt, Human
aaggcaugauguuaaccagaa

SEQ ID NO: 2249225 - RNA, 16 nt, Human
aaggcauguuccucug

SEQ ID NO: 2249226 - RNA, 12 nt, Human
aaggcauucucu

SEQ ID NO: 2249227 - RNA, 12 nt, Human
aaggcaugaagg

SEQ ID NO: 2249228 - RNA, 20 nt, Human
aaggcaucagucccuaugua

SEQ ID NO: 2249229 - RNA, 21 nt, Human
aaggauacaaaagcaugugag

SEQ ID NO: 2249230 - RNA, 13 nt, Human
aaggauacaaaag

SEQ ID NO: 2249231 - RNA, 20 nt, Human
aaggaguuccaugaagacca

SEQ ID NO: 2249232 - RNA, 13 nt, Human
aaggaguuaagag

SEQ ID NO: 2249233 - RNA, 19 nt, Human
aaggagugagaucauuuuc

SEQ ID NO: 2249234 - RNA, 19 nt, Human
aaggaguaaucuguguaca

SEQ ID NO: 2249235 - RNA, 20 nt, Human
aaggagucagacauuuuaag

SEQ ID NO: 2249236 - RNA, 15 nt, Human
aaggagaugaagcaa

SEQ ID NO: 2249237 - RNA, 20 nt, Human
aaggagaggcaacauccaaa

SEQ ID NO: 2249238 - RNA, 17 nt, Human
aaggagaggaaagaacu

SEQ ID NO: 2249239 - RNA, 13 nt, Human
aaggagaggaggc

SEQ ID NO: 2249240 - RNA, 11 nt, Human
aaggagagcua

SEQ ID NO: 2249241 - RNA, 22 nt, Human
aaggaaguuacuguuauagagg

SEQ ID NO: 2249242 - RNA, 14 nt, Human
aaggaagugaagag

SEQ ID NO: 2249243 - RNA, 13 nt, Human
aaggaauauaugg

SEQ ID NO: 2249244 - RNA, 15 nt, Human
aaggaauauauggca

SEQ ID NO: 2249245 - RNA, 16 nt, Human
aaggaauauauggcag

SEQ ID NO: 2249246 - RNA, 18 nt, Human
aaggaauaccuguccccc

SEQ ID NO: 2249247 - RNA, 14 nt, Human
aaggagaggaggca

SEQ ID NO: 2249248 - RNA, 14 nt, Human
aaggagauuuacaa

SEQ ID NO: 2249249 - RNA, 22 nt, Human
aaggagcucacuguggugucug

SEQ ID NO: 2249250 - RNA, 12 nt, Human
aaggagggugag

SEQ ID NO: 2249251 - RNA, 21 nt, Human
aaggaggguggaucaccugag

SEQ ID NO: 2249252 - RNA, 17 nt, Human
aaggagggucaggaagg

SEQ ID NO: 2249253 - RNA, 19 nt, Human
aaggaggguuagggagggg

SEQ ID NO: 2249254 - RNA, 18 nt, Human
aaggaggguuagggaggg

SEQ ID NO: 2249255 - RNA, 13 nt, Human
aaggaguagaaaa

SEQ ID NO: 2249256 - RNA, 17 nt, Human
aaggagucaaaacuaca

SEQ ID NO: 2249257 - RNA, 15 nt, Human
aaggaggugagggau

SEQ ID NO: 2249258 - RNA, 19 nt, Human
aaggaggugagggauguga

SEQ ID NO: 2249259 - RNA, 15 nt, Human
aaggaguaagaaccu

SEQ ID NO: 2249260 - RNA, 18 nt, Human
aaggaguaaucuguguac

SEQ ID NO: 2249261 - RNA, 15 nt, Human
aaggagggagaugga

SEQ ID NO: 2249262 - RNA, 17 nt, Human
aaggaggggcuguaaaa

SEQ ID NO: 2249263 - RNA, 13 nt, Human
aaggaggggaacc

SEQ ID NO: 2249264 - RNA, 20 nt, Human
aaggaggggauagagagaga

SEQ ID NO: 2249265 - RNA, 14 nt, Human
aaggaggcuggcag

SEQ ID NO: 2249266 - RNA, 13 nt, Human
aaggaggcuggcu

SEQ ID NO: 2249267 - RNA, 15 nt, Human
aaggaggcuggcugg

SEQ ID NO: 2249268 - RNA, 18 nt, Human
aaggaggcuggcuggggc

SEQ ID NO: 2249269 - RNA, 23 nt, Human
aaggaggcgcacuuuccuccugg

SEQ ID NO: 2249270 - RNA, 21 nt, Human
aaggagcugcuauagccuggg

SEQ ID NO: 2249271 - RNA, 11 nt, Human
aaggaggaaaa

SEQ ID NO: 2249272 - RNA, 20 nt, Human
aaggagcugcuauagccugg

SEQ ID NO: 2249273 - RNA, 18 nt, Human
aaggagcugcuauagccu

SEQ ID NO: 2249274 - RNA, 14 nt, Human
aaggagcugcuaua

SEQ ID NO: 2249275 - RNA, 12 nt, Human
aaggagcugcua

SEQ ID NO: 2249276 - RNA, 18 nt, Human
aaggaggaagagaaaaaa

SEQ ID NO: 2249277 - RNA, 22 nt, Human
aaggaagccacagcugguggua

SEQ ID NO: 2249278 - RNA, 13 nt, Human
aaggaagacuaga

SEQ ID NO: 2249279 - RNA, 16 nt, Human
aaggaagcacaugccu

SEQ ID NO: 2249280 - RNA, 14 nt, Human
aaggaagucuagga

SEQ ID NO: 2249281 - RNA, 18 nt, Human
aaggaagcuccacuguca

SEQ ID NO: 2249282 - RNA, 16 nt, Human
aaggaagcuccacugu

SEQ ID NO: 2249283 - RNA, 21 nt, Human
aaggaauaaauugcuccuuga

SEQ ID NO: 2249284 - RNA, 17 nt, Human
aaggaauaccugucccc

SEQ ID NO: 2249285 - RNA, 18 nt, Human
aaggaacucuggcuucca

SEQ ID NO: 2249286 - RNA, 20 nt, Human
aaggaacucuggcuuccagg

SEQ ID NO: 2249287 - RNA, 22 nt, Human
aaggaacucuggcuuccaggua

SEQ ID NO: 2249288 - RNA, 14 nt, Human
aaggaagacuucau

SEQ ID NO: 2249289 - RNA, 15 nt, Human
aaggaagacuucauc

SEQ ID NO: 2249290 - RNA, 13 nt, Human
aaggaagcacaug

SEQ ID NO: 2249291 - RNA, 22 nt, Human
aaggaaaucucaccccauccca

SEQ ID NO: 2249292 - RNA, 16 nt, Human
aaggaaaucucacccc

SEQ ID NO: 2249293 - RNA, 14 nt, Human
aaggaaaugauuga

SEQ ID NO: 2249294 - RNA, 21 nt, Human
aaggaaaugauugaggaguga

SEQ ID NO: 2249295 - RNA, 13 nt, Human
aaggaaaggcaaa

SEQ ID NO: 2249296 - RNA, 14 nt, Human
aaggaaaggccuga

SEQ ID NO: 2249297 - RNA, 22 nt, Human
aaggaaagggggucccaguggg

SEQ ID NO: 2249298 - RNA, 22 nt, Human
aaggaaauaccaguucugggca

SEQ ID NO: 2249299 - RNA, 23 nt, Human
aaggaaccaaagcgaauuuuaaa

SEQ ID NO: 2249300 - RNA, 22 nt, Human
aaggaaccaaagcgaauuuuaa

SEQ ID NO: 2249301 - RNA, 20 nt, Human
aaggaaagcaauaaaugaau

SEQ ID NO: 2249302 - RNA, 16 nt, Human
aaggaaagcaauaaau

SEQ ID NO: 2249303 - RNA, 13 nt, Human
aaggaaagcaaua

SEQ ID NO: 2249304 - RNA, 15 nt, Human
aaggaaagagggagg

SEQ ID NO: 2249305 - RNA, 14 nt, Human
aagcuccaucucca

SEQ ID NO: 2249306 - RNA, 13 nt, Human
aagcuccaagccc

SEQ ID NO: 2249307 - RNA, 15 nt, Human
aagcuccacugucac

SEQ ID NO: 2249308 - RNA, 16 nt, Human
aagcuccacugucacc

SEQ ID NO: 2249309 - RNA, 19 nt, Human
aagcuccacugucacccuc

SEQ ID NO: 2249310 - RNA, 21 nt, Human
aagcuccacugucacccucca

SEQ ID NO: 2249311 - RNA, 13 nt, Human
guuuauuuuaaga

SEQ ID NO: 2249312 - RNA, 14 nt, Human
guuuauuucuuaaa

SEQ ID NO: 2249313 - RNA, 13 nt, Human
guuucaaacuuua

SEQ ID NO: 2249314 - RNA, 16 nt, Human
guuucaaacuuuacua

SEQ ID NO: 2249315 - RNA, 14 nt, Human
guuucaaacuuuac

SEQ ID NO: 2249316 - RNA, 16 nt, Human
aaggcuccaggagcag

SEQ ID NO: 2249317 - RNA, 18 nt, Human
aaggcuccaggagcagcc

SEQ ID NO: 2249318 - RNA, 15 nt, Human
aaggcuccaggagca

SEQ ID NO: 2249319 - RNA, 15 nt, Human
aaggcucgauuuugu

SEQ ID NO: 2249320 - RNA, 17 nt, Human
aaggcucgauuuuguau

SEQ ID NO: 2249321 - RNA, 22 nt, Human
aaggcucgauuuuguaucugca

SEQ ID NO: 2249322 - RNA, 19 nt, Human
guuuauuuucaagaauaau

SEQ ID NO: 2249323 - RNA, 14 nt, Human
guuuauuuuauauu

SEQ ID NO: 2249324 - RNA, 22 nt, Human
aaggcucgagcaugccuggaug

SEQ ID NO: 2249325 - RNA, 19 nt, Human
aaggcucgagcaugccugg

SEQ ID NO: 2249326 - RNA, 20 nt, Human
aaggcucgagcaugccugga

SEQ ID NO: 2249327 - RNA, 19 nt, Human
aaggcuccaggagcagcca

SEQ ID NO: 2249328 - RNA, 22 nt, Human
aaggcuccaggagcagccacau

SEQ ID NO: 2249329 - RNA, 16 nt, Human
aaggcucgagcaugcc

SEQ ID NO: 2249330 - RNA, 18 nt, Human
aaggcucgagcaugccug

SEQ ID NO: 2249331 - RNA, 23 nt, Human
guuuacagggagccuccugccca

SEQ ID NO: 2249332 - RNA, 13 nt, Human
guuuacaguaaau

SEQ ID NO: 2249333 - RNA, 15 nt, Human
guuuacaguaaauaa

SEQ ID NO: 2249334 - RNA, 19 nt, Human
guuuacaguaaauaaauug

SEQ ID NO: 2249335 - RNA, 17 nt, Human
guuuacagguggacaca

SEQ ID NO: 2249336 - RNA, 19 nt, Human
guuuacagggagccuccug

SEQ ID NO: 2249337 - RNA, 20 nt, Human
guuuacagggagccuccugc

SEQ ID NO: 2249338 - RNA, 16 nt, Human
guuuacagggagccuc

SEQ ID NO: 2249339 - RNA, 17 nt, Human
guuuacagggagccucc

SEQ ID NO: 2249340 - RNA, 18 nt, Human
guuuacagggagccuccu

SEQ ID NO: 2249341 - RNA, 16 nt, Human
guuuacacucuuugua

SEQ ID NO: 2249342 - RNA, 23 nt, Human
guuuacagcacuacucugugcca

SEQ ID NO: 2249343 - RNA, 19 nt, Human
guuuauuuaucagugacag

SEQ ID NO: 2249344 - RNA, 16 nt, Human
guuuauuuaucaguga

SEQ ID NO: 2249345 - RNA, 17 nt, Human
guuuauuuauucugcau

SEQ ID NO: 2249346 - RNA, 12 nt, Human
guuuauuuccaa

SEQ ID NO: 2249347 - RNA, 21 nt, Human
guuuauuuccaaauaaaauga

SEQ ID NO: 2249348 - RNA, 14 nt, Human
guuuauuuaucagu

SEQ ID NO: 2249349 - RNA, 11 nt, Human
guuuacaugua

SEQ ID NO: 2249350 - RNA, 13 nt, Human
guuuauugucaaa

SEQ ID NO: 2249351 - RNA, 15 nt, Human
guuuacaguguuccg

SEQ ID NO: 2249352 - RNA, 13 nt, Human
guuuacaguguuc

SEQ ID NO: 2249353 - RNA, 13 nt, Human
guugggcccagau

SEQ ID NO: 2249354 - RNA, 20 nt, Human
guugggccauacuggccucg

SEQ ID NO: 2249355 - RNA, 21 nt, Human
guugggccauacuggccucgc

SEQ ID NO: 2249356 - RNA, 22 nt, Human
guugggcagggugacccugaag

SEQ ID NO: 2249357 - RNA, 18 nt, Human
guugggccauacuggccu

SEQ ID NO: 2249358 - RNA, 19 nt, Human
guugggccauacuggccuc

SEQ ID NO: 2249359 - RNA, 13 nt, Human
guugggcuggugu

SEQ ID NO: 2249360 - RNA, 15 nt, Human
guugggccaggagcc

SEQ ID NO: 2249361 - RNA, 17 nt, Human
guugggccaggagccuc

SEQ ID NO: 2249362 - RNA, 19 nt, Human
guuuaauauugagaaagaa

SEQ ID NO: 2249363 - RNA, 12 nt, Human
guuuaauauuua

SEQ ID NO: 2249364 - RNA, 15 nt, Human
guuuaauauuuaaac

SEQ ID NO: 2249365 - RNA, 17 nt, Human
guuuaauauugagaaag

SEQ ID NO: 2249366 - RNA, 15 nt, Human
guuuaauauugagaa

SEQ ID NO: 2249367 - RNA, 19 nt, Human
guuuaauccccaguaaaau

SEQ ID NO: 2249368 - RNA, 21 nt, Human
guuuaauccccaguaaaauug

SEQ ID NO: 2249369 - RNA, 17 nt, Human
guuuaauauuuaaacag

SEQ ID NO: 2249370 - RNA, 17 nt, Human
guugggcccagaucugg

SEQ ID NO: 2249371 - RNA, 16 nt, Human
guugggcccagaucug

SEQ ID NO: 2249372 - RNA, 15 nt, Human
guugggcccagaucu

SEQ ID NO: 2249373 - RNA, 15 nt, Human
guugggcugguguca

SEQ ID NO: 2249374 - RNA, 21 nt, Human
guuucugaaaauuaacacugc

SEQ ID NO: 2249375 - RNA, 12 nt, Human
guuucugacucu

SEQ ID NO: 2249376 - RNA, 20 nt, Human
guuucugaaaauuaacacug

SEQ ID NO: 2249377 - RNA, 14 nt, Human
guuucucuuuccuu

SEQ ID NO: 2249378 - RNA, 13 nt, Human
guuucugacucug

SEQ ID NO: 2249379 - RNA, 17 nt, Human
guuucugacucugagcu

SEQ ID NO: 2249380 - RNA, 21 nt, Human
guuucucuuuccuuggcuccc

SEQ ID NO: 2249381 - RNA, 18 nt, Human
guuucugaaagggacgcu

SEQ ID NO: 2249382 - RNA, 18 nt, Human
aaguaaggugcaguuccc

SEQ ID NO: 2249383 - RNA, 19 nt, Human
guuucuauguguagggcgg

SEQ ID NO: 2249384 - RNA, 15 nt, Human
guuucucugcuguug

SEQ ID NO: 2249385 - RNA, 19 nt, Human
guuucucagauccuuguuu

SEQ ID NO: 2249386 - RNA, 14 nt, Human
guuucucagauccu

SEQ ID NO: 2249387 - RNA, 21 nt, Human
aaguaaguaccacucaggcca

SEQ ID NO: 2249388 - RNA, 20 nt, Human
aaguaaguaccacucaggcc

SEQ ID NO: 2249389 - RNA, 22 nt, Human
guuucuaugacacaugcaaggu

SEQ ID NO: 2249390 - RNA, 23 nt, Human
aaguaagcccuugaagauaucuu

SEQ ID NO: 2249391 - RNA, 19 nt, Human
aaguaagcaacagcauaac

SEQ ID NO: 2249392 - RNA, 15 nt, Human
aaguaagaagacaug

SEQ ID NO: 2249393 - RNA, 17 nt, Human
aaguaagcaacagcaua

SEQ ID NO: 2249394 - RNA, 18 nt, Human
aaguaaguaccacucagg

SEQ ID NO: 2249395 - RNA, 15 nt, Human
aaguaaggugcaguu

SEQ ID NO: 2249396 - RNA, 20 nt, Human
aaguaagaagacaugaacca

SEQ ID NO: 2249397 - RNA, 14 nt, Human
aaguaagaagacau

SEQ ID NO: 2249398 - RNA, 13 nt, Human
aaguaagaagaca

SEQ ID NO: 2249399 - RNA, 13 nt, Human
aaguaagcaaaga

SEQ ID NO: 2249400 - RNA, 16 nt, Human
aaguaaggaauuuuau

SEQ ID NO: 2249401 - RNA, 13 nt, Human
aaggucaucaucg

SEQ ID NO: 2249402 - RNA, 19 nt, Human
aaggucaccagcaccaaca

SEQ ID NO: 2249403 - RNA, 21 nt, Human
aaguaagaaagugaagcaaau

SEQ ID NO: 2249404 - RNA, 12 nt, Human
aaggucauuuuu

SEQ ID NO: 2249405 - RNA, 20 nt, Human
aagguagaaauaucugaaaa

SEQ ID NO: 2249406 - RNA, 22 nt, Human
aagguauuccuuuuguguacag

SEQ ID NO: 2249407 - RNA, 18 nt, Human
aagguauuccuuuugugu

SEQ ID NO: 2249408 - RNA, 19 nt, Human
aagggucuugggaaauaug

SEQ ID NO: 2249409 - RNA, 15 nt, Human
aagggucuugggaaa

SEQ ID NO: 2249410 - RNA, 16 nt, Human
aagggucuugggaaau

SEQ ID NO: 2249411 - RNA, 14 nt, Human
aagguacuucaaau

SEQ ID NO: 2249412 - RNA, 18 nt, Human
aagggucuagggagagac

SEQ ID NO: 2249413 - RNA, 17 nt, Human
aagggucuagggagaga

SEQ ID NO: 2249414 - RNA, 16 nt, Human
aagggucuagggagag

SEQ ID NO: 2249415 - RNA, 16 nt, Human
aaggggcugaaagaac

SEQ ID NO: 2249416 - RNA, 22 nt, Human
aagggucuagggagagacccuu

SEQ ID NO: 2249417 - RNA, 20 nt, Human
aagggucuagggagagaccc

SEQ ID NO: 2249418 - RNA, 19 nt, Human
aagggugaugggaaagcau

SEQ ID NO: 2249419 - RNA, 21 nt, Human
aaggggcccugguccuuccag

SEQ ID NO: 2249420 - RNA, 14 nt, Human
aaggggcccugguc

SEQ ID NO: 2249421 - RNA, 23 nt, Human
aaggggccucaccgagugggggc

SEQ ID NO: 2249422 - RNA, 15 nt, Human
aaggggcccguggga

SEQ ID NO: 2249423 - RNA, 21 nt, Human
aaggggccuuugucuugucaa

SEQ ID NO: 2249424 - RNA, 18 nt, Human
aaggggcgucuguucccc

SEQ ID NO: 2249425 - RNA, 19 nt, Human
aaggguccuucccucuccc

SEQ ID NO: 2249426 - RNA, 13 nt, Human
aaggggcccuggu

SEQ ID NO: 2249427 - RNA, 16 nt, Human
aaggcugaccaagaga

SEQ ID NO: 2249428 - RNA, 13 nt, Human
aaggggccauccu

SEQ ID NO: 2249429 - RNA, 15 nt, Human
aaggcugaccaagag

SEQ ID NO: 2249430 - RNA, 16 nt, Human
aaggcucuucugacua

SEQ ID NO: 2249431 - RNA, 17 nt, Human
aaggggccagaggcucg

SEQ ID NO: 2249432 - RNA, 22 nt, Human
aaggggcccaaauucuuucagu

SEQ ID NO: 2249433 - RNA, 18 nt, Human
aaggcucugaaagccagc

SEQ ID NO: 2249434 - RNA, 17 nt, Human
aaggcucugaaagccag

SEQ ID NO: 2249435 - RNA, 23 nt, Human
aaggcucgauuuuguaucugcag

SEQ ID NO: 2249436 - RNA, 17 nt, Human
aaggcugaccaagagag

SEQ ID NO: 2249437 - RNA, 23 nt, Human
aaggcucugagcaaauguggcuc

SEQ ID NO: 2249438 - RNA, 17 nt, Human
aaggcucuucuccccag

SEQ ID NO: 2249439 - RNA, 19 nt, Human
aaggcucuucuccccagag

SEQ ID NO: 2249440 - RNA, 11 nt, Human
aacagggaggg

SEQ ID NO: 2249441 - RNA, 17 nt, Human
aacagggcaucuccagg

SEQ ID NO: 2249442 - RNA, 18 nt, Human
aacagggcaucuccagga

SEQ ID NO: 2249443 - RNA, 18 nt, Human
aacagggucucuagugcu

SEQ ID NO: 2249444 - RNA, 13 nt, Human
aacagggucucua

SEQ ID NO: 2249445 - RNA, 22 nt, Human
aacagggucucuagugcuguga

SEQ ID NO: 2249446 - RNA, 20 nt, Human
aacagggucucuagugcugu

SEQ ID NO: 2249447 - RNA, 23 nt, Human
aacagggucucuagugcugugaa

SEQ ID NO: 2249448 - RNA, 15 nt, Human
aacagguaauauaaa

SEQ ID NO: 2249449 - RNA, 21 nt, Human
aacaguguuucccauaauuuu

SEQ ID NO: 2249450 - RNA, 19 nt, Human
aacaguguuucccauaauu

SEQ ID NO: 2249451 - RNA, 15 nt, Human
aacagugccugcuga

SEQ ID NO: 2249452 - RNA, 14 nt, Human
aacagugccugcug

SEQ ID NO: 2249453 - RNA, 13 nt, Human
aacagugccugcu

SEQ ID NO: 2249454 - RNA, 22 nt, Human
aacagugcauauuccuuucuau

SEQ ID NO: 2249455 - RNA, 12 nt, Human
aacagugccugc

SEQ ID NO: 2249456 - RNA, 18 nt, Human
aacagguaauauaaaaag

SEQ ID NO: 2249457 - RNA, 15 nt, Human
aacagugcauauucc

SEQ ID NO: 2249458 - RNA, 22 nt, Human
aacagugauuaccagggacuga

SEQ ID NO: 2249459 - RNA, 15 nt, Human
aacagugauuaccag

SEQ ID NO: 2249460 - RNA, 18 nt, Human
aacagacaacagaaguca

SEQ ID NO: 2249461 - RNA, 16 nt, Human
aacagacaacagaagu

SEQ ID NO: 2249462 - RNA, 21 nt, Human
aacagacaaaaacagccucac

SEQ ID NO: 2249463 - RNA, 18 nt, Human
aacagacaaaaacagccu

SEQ ID NO: 2249464 - RNA, 13 nt, Human
aacagaauuuuaa

SEQ ID NO: 2249465 - RNA, 23 nt, Human
aacagaauacuguuaaaggaaaa

SEQ ID NO: 2249466 - RNA, 13 nt, Human
aacagaagugguu

SEQ ID NO: 2249467 - RNA, 14 nt, Human
aacagaauguuuua

SEQ ID NO: 2249468 - RNA, 13 nt, Human
aacagaaggauga

SEQ ID NO: 2249469 - RNA, 14 nt, Human
aacagaagcuucca

SEQ ID NO: 2249470 - RNA, 16 nt, Human
aacagaagcuuccauu

SEQ ID NO: 2249471 - RNA, 23 nt, Human
aacagauacuggaaguuuugcau

SEQ ID NO: 2249472 - RNA, 19 nt, Human
aacagacaccaucuuuugu

SEQ ID NO: 2249473 - RNA, 20 nt, Human
aacagauaguuguguuuuua

SEQ ID NO: 2249474 - RNA, 20 nt, Human
aacagauauaaauggcuggu

SEQ ID NO: 2249475 - RNA, 13 nt, Human
aacagaucuggaa

SEQ ID NO: 2249476 - RNA, 21 nt, Human
aacagaucuggaaccucagcc

SEQ ID NO: 2249477 - RNA, 16 nt, Human
aacagaucaauuugua

SEQ ID NO: 2249478 - RNA, 22 nt, Human
aacagaucuggaaccucagccu

SEQ ID NO: 2249479 - RNA, 19 nt, Human
aacagauaagcaagagaga

SEQ ID NO: 2249480 - RNA, 18 nt, Human
aacagauaagcaagagag

SEQ ID NO: 2249481 - RNA, 13 nt, Human
aacagauaaucag

SEQ ID NO: 2249482 - RNA, 16 nt, Human
aacagauaaauaguuu

SEQ ID NO: 2249483 - RNA, 22 nt, Human
gucccuugagaccucagccaug

SEQ ID NO: 2249484 - RNA, 18 nt, Human
gucccuugagaccucagc

SEQ ID NO: 2249485 - RNA, 17 nt, Human
gucccuugagaccucag

SEQ ID NO: 2249486 - RNA, 22 nt, Human
gucccccuggggcuucuccuga

SEQ ID NO: 2249487 - RNA, 13 nt, Human
gucccuugcagcu

SEQ ID NO: 2249488 - RNA, 20 nt, Human
gucccuugagaccucagcca

SEQ ID NO: 2249489 - RNA, 19 nt, Human
gucccuugagaccucagcc

SEQ ID NO: 2249490 - RNA, 21 nt, Human
gucccuugagaccucagccau

SEQ ID NO: 2249491 - RNA, 23 nt, Human
gucccuuucgacuugcauuuuug

SEQ ID NO: 2249492 - RNA, 20 nt, Human
gucccuuguuuccagcuaga

SEQ ID NO: 2249493 - RNA, 17 nt, Human
gucccuuguuuccagcu

SEQ ID NO: 2249494 - RNA, 13 nt, Human
gucccuugccuca

SEQ ID NO: 2249495 - RNA, 14 nt, Human
gucccuugccucaa

SEQ ID NO: 2249496 - RNA, 19 nt, Human
gucccuugccucaaugcca

SEQ ID NO: 2249497 - RNA, 14 nt, Human
gucccccuuccaug

SEQ ID NO: 2249498 - RNA, 18 nt, Human
gucccccugacaacacuc

SEQ ID NO: 2249499 - RNA, 13 nt, Human
guccccccacccu

SEQ ID NO: 2249500 - RNA, 16 nt, Human
gucccccuuccaugga

SEQ ID NO: 2249501 - RNA, 18 nt, Human
gucccccuuccauggacu

SEQ ID NO: 2249502 - RNA, 16 nt, Human
guccuacccacccucc

SEQ ID NO: 2249503 - RNA, 15 nt, Human
guccuacccacccuc

SEQ ID NO: 2249504 - RNA, 17 nt, Human
gucccuuucuuggccag

SEQ ID NO: 2249505 - RNA, 15 nt, Human
gucccuuucuuggcc

SEQ ID NO: 2249506 - RNA, 18 nt, Human
guccuacccauccccgca

SEQ ID NO: 2249507 - RNA, 16 nt, Human
guccuacccauccccg

SEQ ID NO: 2249508 - RNA, 14 nt, Human
guccuacccauccc

SEQ ID NO: 2249509 - RNA, 12 nt, Human
guccuacucugu

SEQ ID NO: 2249510 - RNA, 15 nt, Human
aacagaaauguacag

SEQ ID NO: 2249511 - RNA, 14 nt, Human
aacagaaauguaca

SEQ ID NO: 2249512 - RNA, 13 nt, Human
aacagaaauguac

SEQ ID NO: 2249513 - RNA, 12 nt, Human
aacagaaaugua

SEQ ID NO: 2249514 - RNA, 20 nt, Human
aacacagacauucugccagg

SEQ ID NO: 2249515 - RNA, 19 nt, Human
aacacagacauucugccag

SEQ ID NO: 2249516 - RNA, 21 nt, Human
gucauuuuuuuuaagaaaaag

SEQ ID NO: 2249517 - RNA, 19 nt, Human
gucauuuuuuuuaagaaaa

SEQ ID NO: 2249518 - RNA, 21 nt, Human
aacacacugaggcagggaagu

SEQ ID NO: 2249519 - RNA, 13 nt, Human
aacacacuguguc

SEQ ID NO: 2249520 - RNA, 16 nt, Human
aacacacuguguccug

SEQ ID NO: 2249521 - RNA, 19 nt, Human
aacacacuguguccuggug

SEQ ID NO: 2249522 - RNA, 19 nt, Human
aacacagaaaccuuuuuaa

SEQ ID NO: 2249523 - RNA, 21 nt, Human
aacacacuguguccuggugcu

SEQ ID NO: 2249524 - RNA, 22 nt, Human
aacacagaaagccuaucaaaga

SEQ ID NO: 2249525 - RNA, 15 nt, Human
aacacagcaagggug

SEQ ID NO: 2249526 - RNA, 20 nt, Human
aacacacugaggcagggaag

SEQ ID NO: 2249527 - RNA, 19 nt, Human
aacacacugaggcagggaa

SEQ ID NO: 2249528 - RNA, 18 nt, Human
aacacacugaggcaggga

SEQ ID NO: 2249529 - RNA, 17 nt, Human
aacacaacuauauuguu

SEQ ID NO: 2249530 - RNA, 13 nt, Human
aacacaaaugcag

SEQ ID NO: 2249531 - RNA, 20 nt, Human
aacacaaaugcagggauugc

SEQ ID NO: 2249532 - RNA, 23 nt, Human
aacacaccaggcugugggccuca

SEQ ID NO: 2249533 - RNA, 18 nt, Human
guccaacguggggcagca

SEQ ID NO: 2249534 - RNA, 13 nt, Human
guccaagaagccc

SEQ ID NO: 2249535 - RNA, 15 nt, Human
guccaagaagcccag

SEQ ID NO: 2249536 - RNA, 16 nt, Human
guccaagaagcccagg

SEQ ID NO: 2249537 - RNA, 20 nt, Human
guccaacguggggcagcaca

SEQ ID NO: 2249538 - RNA, 21 nt, Human
guccaacguggggcagcacag

SEQ ID NO: 2249539 - RNA, 20 nt, Human
guccaagaagcccaggaaag

SEQ ID NO: 2249540 - RNA, 17 nt, Human
guccaagaagcccagga

SEQ ID NO: 2249541 - RNA, 18 nt, Human
guccaagaagcccaggaa

SEQ ID NO: 2249542 - RNA, 21 nt, Human
gucccacccccacccccagcu

SEQ ID NO: 2249543 - RNA, 22 nt, Human
gucccacccccacccccagcuc

SEQ ID NO: 2249544 - RNA, 14 nt, Human
gucccacccccacc

SEQ ID NO: 2249545 - RNA, 15 nt, Human
gucccacccccaccc

SEQ ID NO: 2249546 - RNA, 19 nt, Human
gucccacccccacccccag

SEQ ID NO: 2249547 - RNA, 21 nt, Human
gucccaccccacacacgccag

SEQ ID NO: 2249548 - RNA, 13 nt, Human
guccauagagagc

SEQ ID NO: 2249549 - RNA, 14 nt, Human
guccauagagagca

SEQ ID NO: 2249550 - RNA, 14 nt, Human
guccaguucccaga

SEQ ID NO: 2249551 - RNA, 19 nt, Human
guccaguucccagaaggca

SEQ ID NO: 2249552 - RNA, 13 nt, Human
guccagugcccau

SEQ ID NO: 2249553 - RNA, 14 nt, Human
guccagugcccauu

SEQ ID NO: 2249554 - RNA, 12 nt, Human
guccagugccca

SEQ ID NO: 2249555 - RNA, 17 nt, Human
guccagugaccugcugg

SEQ ID NO: 2249556 - RNA, 19 nt, Human
guccccaguuugcagaaaa

SEQ ID NO: 2249557 - RNA, 15 nt, Human
guccccaucauccca

SEQ ID NO: 2249558 - RNA, 17 nt, Human
guccccaucaucccagc

SEQ ID NO: 2249559 - RNA, 19 nt, Human
guccccaucaucccagcug

SEQ ID NO: 2249560 - RNA, 20 nt, Human
guccccaucaucccagcugc

SEQ ID NO: 2249561 - RNA, 18 nt, Human
guccccaguuugcagaaa

SEQ ID NO: 2249562 - RNA, 20 nt, Human
guccccaggccccaggaagc

SEQ ID NO: 2249563 - RNA, 21 nt, Human
guccccaggccccaggaagcc

SEQ ID NO: 2249564 - RNA, 19 nt, Human
guccccaggccccaggaag

SEQ ID NO: 2249565 - RNA, 22 nt, Human
gucccaccucuucucuuccugu

SEQ ID NO: 2249566 - RNA, 23 nt, Human
gucccaccucuucucuuccugua

SEQ ID NO: 2249567 - RNA, 12 nt, Human
guccccccaccc

SEQ ID NO: 2249568 - RNA, 11 nt, Human
guccccccacc

SEQ ID NO: 2249569 - RNA, 14 nt, Human
gucccccagcucug

SEQ ID NO: 2249570 - RNA, 15 nt, Human
gucccccagcucugg

SEQ ID NO: 2249571 - RNA, 16 nt, Human
gucccccagcucuggu

SEQ ID NO: 2249572 - RNA, 22 nt, Human
gucccccauccccauccuccag

SEQ ID NO: 2249573 - RNA, 12 nt, Human
gucccccagcuc

SEQ ID NO: 2249574 - RNA, 13 nt, Human
gucccccagcucu

SEQ ID NO: 2249575 - RNA, 19 nt, Human
guccccauggcacccugcu

SEQ ID NO: 2249576 - RNA, 17 nt, Human
gucccccaaccccagcc

SEQ ID NO: 2249577 - RNA, 20 nt, Human
gucccccaaccccagccgcu

SEQ ID NO: 2249578 - RNA, 14 nt, Human
gucccaccuuggcu

SEQ ID NO: 2249579 - RNA, 23 nt, Human
gucccacccccacccccagcuca

SEQ ID NO: 2249580 - RNA, 12 nt, Human
gucccaccucuu

SEQ ID NO: 2249581 - RNA, 13 nt, Human
gucccaccucuuc

SEQ ID NO: 2249582 - RNA, 14 nt, Human
gucccaccucuucu

SEQ ID NO: 2249583 - RNA, 19 nt, Human
gucccaccucuucucuucc

SEQ ID NO: 2249584 - RNA, 21 nt, Human
gucccaccucuucucuuccug

SEQ ID NO: 2249585 - RNA, 15 nt, Human
gucccaccuuggcug

SEQ ID NO: 2249586 - RNA, 16 nt, Human
gucccaccuuggcugc

SEQ ID NO: 2249587 - RNA, 13 nt, Human
aacaauguuaagg

SEQ ID NO: 2249588 - RNA, 18 nt, Human
aacaauguuaaggaaacu

SEQ ID NO: 2249589 - RNA, 21 nt, Human
aacaauguuaaggaaacucuu

SEQ ID NO: 2249590 - RNA, 22 nt, Human
aacaauguuaaggaaacucuua

SEQ ID NO: 2249591 - RNA, 15 nt, Human
aacacaacuauauug

SEQ ID NO: 2249592 - RNA, 16 nt, Human
aacacaacuauauugu

SEQ ID NO: 2249593 - RNA, 12 nt, Human
aacaauguuaag

SEQ ID NO: 2249594 - RNA, 11 nt, Human
aacaauguuaa

SEQ ID NO: 2249595 - RNA, 17 nt, Human
aacaauggaaacugaau

SEQ ID NO: 2249596 - RNA, 18 nt, Human
aacaauggaaacugaaug

SEQ ID NO: 2249597 - RNA, 16 nt, Human
aacaauggaaacugaa

SEQ ID NO: 2249598 - RNA, 23 nt, Human
aacaauaaaauuuuuuuucaugu

SEQ ID NO: 2249599 - RNA, 14 nt, Human
aacaauaaagagau

SEQ ID NO: 2249600 - RNA, 17 nt, Human
aacaaguuuuucuguca

SEQ ID NO: 2249601 - RNA, 17 nt, Human
aacaaugcuguauuuua

SEQ ID NO: 2249602 - RNA, 22 nt, Human
aacaaugcuguauuuuaaaaga

SEQ ID NO: 2249603 - RNA, 14 nt, Human
aacaagugcuggca

SEQ ID NO: 2249604 - RNA, 15 nt, Human
aacaagugcuggcac

SEQ ID NO: 2249605 - RNA, 19 nt, Human
aacaagcaagcucccaagg

SEQ ID NO: 2249606 - RNA, 19 nt, Human
aacaagucgaugaacuauu

SEQ ID NO: 2249607 - RNA, 18 nt, Human
aacaaggcaaggcuguca

SEQ ID NO: 2249608 - RNA, 21 nt, Human
aacaaggcaaggcugucaauu

SEQ ID NO: 2249609 - RNA, 12 nt, Human
aacaauaaaaga

SEQ ID NO: 2249610 - RNA, 14 nt, Human
aacaaugcuguauu

SEQ ID NO: 2249611 - RNA, 15 nt, Human
aacaaugcuguauuu

SEQ ID NO: 2249612 - RNA, 18 nt, Human
aaauuuuggccaaagugu

SEQ ID NO: 2249613 - RNA, 12 nt, Human
aaauuuuggcca

SEQ ID NO: 2249614 - RNA, 20 nt, Human
aaauuuuuucucuaggaaau

SEQ ID NO: 2249615 - RNA, 23 nt, Human
aaauuuugauguuuuaaggaugc

SEQ ID NO: 2249616 - RNA, 18 nt, Human
aaauuuugauguuuuaag

SEQ ID NO: 2249617 - RNA, 17 nt, Human
aaauuuuaucucuuauu

SEQ ID NO: 2249618 - RNA, 12 nt, Human
aaauuuuauaug

SEQ ID NO: 2249619 - RNA, 13 nt, Human
aaauuuuauuccu

SEQ ID NO: 2249620 - RNA, 12 nt, Human
aaauuuuauucc

SEQ ID NO: 2249621 - RNA, 14 nt, Human
aaauuuuaauuuau

SEQ ID NO: 2249622 - RNA, 21 nt, Human
aaauuuuauaaaauuaagcaa

SEQ ID NO: 2249623 - RNA, 18 nt, Human
aaauuuucacauaaaaua

SEQ ID NO: 2249624 - RNA, 18 nt, Human
aaauuuuauuuccuggac

SEQ ID NO: 2249625 - RNA, 14 nt, Human
aaauuuucuagacu

SEQ ID NO: 2249626 - RNA, 18 nt, Human
aaauuuucuagacuuucu

SEQ ID NO: 2249627 - RNA, 19 nt, Human
aaauuuucuagacuuucug

SEQ ID NO: 2249628 - RNA, 20 nt, Human
aaauuuucuagacuuucugu

SEQ ID NO: 2249629 - RNA, 19 nt, Human
aacaagaucuuucaggaaa

SEQ ID NO: 2249630 - RNA, 19 nt, Human
aacaagagcgaaacuccgu

SEQ ID NO: 2249631 - RNA, 17 nt, Human
aacaagaucuuucagga

SEQ ID NO: 2249632 - RNA, 19 nt, Human
aacaagagcacuacauuca

SEQ ID NO: 2249633 - RNA, 22 nt, Human
aacaagaugcuggaugucugcc

SEQ ID NO: 2249634 - RNA, 20 nt, Human
aacaagauuuuaaagacaug

SEQ ID NO: 2249635 - RNA, 15 nt, Human
aacaaggcaaggcug

SEQ ID NO: 2249636 - RNA, 16 nt, Human
aacaaggcaaggcugu

SEQ ID NO: 2249637 - RNA, 19 nt, Human
aacaagaccccgucucaaa

SEQ ID NO: 2249638 - RNA, 22 nt, Human
aacaagaccucagugccuuccu

SEQ ID NO: 2249639 - RNA, 23 nt, Human
aacaagaccucagugccuuccug

SEQ ID NO: 2249640 - RNA, 21 nt, Human
aaauuuuuuuagaaagcauuu

SEQ ID NO: 2249641 - RNA, 13 nt, Human
aaauuuuuuuaga

SEQ ID NO: 2249642 - RNA, 15 nt, Human
aaauuuuuuuagaaa

SEQ ID NO: 2249643 - RNA, 18 nt, Human
gucaacagagaaggcagg

SEQ ID NO: 2249644 - RNA, 19 nt, Human
gucaacacuuaaggguuuu

SEQ ID NO: 2249645 - RNA, 22 nt, Human
gucaacagagaaggcaggaaug

SEQ ID NO: 2249646 - RNA, 19 nt, Human
gucaacagagaaggcagga

SEQ ID NO: 2249647 - RNA, 23 nt, Human
gucaacagagaaggcaggaaugu

SEQ ID NO: 2249648 - RNA, 21 nt, Human
gucacacaguauuacuucugc

SEQ ID NO: 2249649 - RNA, 12 nt, Human
gucacagccacc

SEQ ID NO: 2249650 - RNA, 13 nt, Human
gucacaccagcca

SEQ ID NO: 2249651 - RNA, 22 nt, Human
gucacacaguauuacuucugcu

SEQ ID NO: 2249652 - RNA, 20 nt, Human
gucagaauaauaagaggugc

SEQ ID NO: 2249653 - RNA, 21 nt, Human
gucacagccuccucugucugc

SEQ ID NO: 2249654 - RNA, 23 nt, Human
gucacagccuccucugucugccc

SEQ ID NO: 2249655 - RNA, 17 nt, Human
gucagaauagaaauuag

SEQ ID NO: 2249656 - RNA, 23 nt, Human
gucagaaguuucugccgcagccc

SEQ ID NO: 2249657 - RNA, 12 nt, Human
gucacagccuca

SEQ ID NO: 2249658 - RNA, 14 nt, Human
gucacagccuccuc

SEQ ID NO: 2249659 - RNA, 16 nt, Human
gucacagccuccucug

SEQ ID NO: 2249660 - RNA, 13 nt, Human
gucagaauagaaa

SEQ ID NO: 2249661 - RNA, 23 nt, Human
gucaggaguucgagaccagccug

SEQ ID NO: 2249662 - RNA, 23 nt, Human
gucaggaguuagaggccagccug

SEQ ID NO: 2249663 - RNA, 12 nt, Human
gucaggaugacg

SEQ ID NO: 2249664 - RNA, 22 nt, Human
gucaggaguuagaggccagccu

SEQ ID NO: 2249665 - RNA, 13 nt, Human
gucaggaguuccu

SEQ ID NO: 2249666 - RNA, 19 nt, Human
gucaggaguuagaggccag

SEQ ID NO: 2249667 - RNA, 18 nt, Human
gucagacauccauguuug

SEQ ID NO: 2249668 - RNA, 20 nt, Human
gucagacauccauguuugua

SEQ ID NO: 2249669 - RNA, 12 nt, Human
gucaggccacgg

SEQ ID NO: 2249670 - RNA, 13 nt, Human
gucaggcagggug

SEQ ID NO: 2249671 - RNA, 14 nt, Human
gucaggccacggca

SEQ ID NO: 2249672 - RNA, 15 nt, Human
gucaggccacggcag

SEQ ID NO: 2249673 - RNA, 16 nt, Human
gucaggccacggcagc

SEQ ID NO: 2249674 - RNA, 18 nt, Human
gucaggccacggcagccu

SEQ ID NO: 2249675 - RNA, 21 nt, Human
gucaggcccuuauuuucaaga

SEQ ID NO: 2249676 - RNA, 22 nt, Human
gucaggcccuuauuuucaagaa

SEQ ID NO: 2249677 - RNA, 13 nt, Human
gucaggcugcugg

SEQ ID NO: 2249678 - RNA, 14 nt, Human
gucaggcugcuggc

SEQ ID NO: 2249679 - RNA, 15 nt, Human
gucaggcugcuggcg

SEQ ID NO: 2249680 - RNA, 16 nt, Human
gucaggcugcuggcgc

SEQ ID NO: 2249681 - RNA, 17 nt, Human
gucaggcuccauuagga

SEQ ID NO: 2249682 - RNA, 12 nt, Human
gucaggcuccau

SEQ ID NO: 2249683 - RNA, 13 nt, Human
gucaggccugugu

SEQ ID NO: 2249684 - RNA, 15 nt, Human
gucaggccugugugu

SEQ ID NO: 2249685 - RNA, 23 nt, Human
gucaggccugugugugaaaggaa

SEQ ID NO: 2249686 - RNA, 19 nt, Human
gucaggcguagaucaccag

SEQ ID NO: 2249687 - RNA, 15 nt, Human
aaauuugguucuaau

SEQ ID NO: 2249688 - RNA, 16 nt, Human
aaauuugguucuaaua

SEQ ID NO: 2249689 - RNA, 14 nt, Human
aaauuugauuucua

SEQ ID NO: 2249690 - RNA, 17 nt, Human
aaauuugauugauuuga

SEQ ID NO: 2249691 - RNA, 15 nt, Human
aaauuugauugauuu

SEQ ID NO: 2249692 - RNA, 22 nt, Human
aaauuuguaaguuucaggugac

SEQ ID NO: 2249693 - RNA, 12 nt, Human
aaauuuguaagu

SEQ ID NO: 2249694 - RNA, 13 nt, Human
aaauuuguaaguu

SEQ ID NO: 2249695 - RNA, 14 nt, Human
aaauuuguaaguuu

SEQ ID NO: 2249696 - RNA, 15 nt, Human
aaauuuguaaguuuc

SEQ ID NO: 2249697 - RNA, 16 nt, Human
aaauuuguaaguuuca

SEQ ID NO: 2249698 - RNA, 17 nt, Human
aaauuuguaaguuucag

SEQ ID NO: 2249699 - RNA, 19 nt, Human
aaauuuguaaguuucaggu

SEQ ID NO: 2249700 - RNA, 20 nt, Human
aaauuuguaaguuucaggug

SEQ ID NO: 2249701 - RNA, 18 nt, Human
aaauuuguuauaaugaau

SEQ ID NO: 2249702 - RNA, 19 nt, Human
aaauuuguuauuuugcaac

SEQ ID NO: 2249703 - RNA, 23 nt, Human
aaauuugucuugccuuauuaaag

SEQ ID NO: 2249704 - RNA, 22 nt, Human
aaauuuuaauauggguucuuuu

SEQ ID NO: 2249705 - RNA, 14 nt, Human
aaauuuguuugaaa

SEQ ID NO: 2249706 - RNA, 18 nt, Human
aaauuuguuugaaaucuu

SEQ ID NO: 2249707 - RNA, 22 nt, Human
aaauuuguuuugacggaugauu

SEQ ID NO: 2249708 - RNA, 14 nt, Human
aaauuuguugcaua

SEQ ID NO: 2249709 - RNA, 18 nt, Human
aaauuuguugaaauuaug

SEQ ID NO: 2249710 - RNA, 13 nt, Human
aaauuuguugcau

SEQ ID NO: 2249711 - RNA, 14 nt, Human
aaauuugauugauu

SEQ ID NO: 2249712 - RNA, 18 nt, Human
gucauaacuaaauaaagc

SEQ ID NO: 2249713 - RNA, 19 nt, Human
gucagucaugauggcacca

SEQ ID NO: 2249714 - RNA, 13 nt, Human
gucaguuguauca

SEQ ID NO: 2249715 - RNA, 15 nt, Human
gucagugugacugau

SEQ ID NO: 2249716 - RNA, 16 nt, Human
gucagucacagccacc

SEQ ID NO: 2249717 - RNA, 14 nt, Human
gucagucacagcca

SEQ ID NO: 2249718 - RNA, 14 nt, Human
gucaguaugacauu

SEQ ID NO: 2249719 - RNA, 20 nt, Human
gucaguaucuguaucucucu

SEQ ID NO: 2249720 - RNA, 21 nt, Human
gucaguaucuguaucucucuc

SEQ ID NO: 2249721 - RNA, 17 nt, Human
gucaguauguggaagug

SEQ ID NO: 2249722 - RNA, 21 nt, Human
gucaguauguggaaguguggg

SEQ ID NO: 2249723 - RNA, 13 nt, Human
gucagucacagcc

SEQ ID NO: 2249724 - RNA, 14 nt, Human
gucaguauuguuuu

SEQ ID NO: 2249725 - RNA, 16 nt, Human
gucaguauuguuuugg

SEQ ID NO: 2249726 - RNA, 14 nt, Human
gucagggaccccug

SEQ ID NO: 2249727 - RNA, 21 nt, Human
gucagggaccaaggaccccuc

SEQ ID NO: 2249728 - RNA, 16 nt, Human
gucagggaccaaggac

SEQ ID NO: 2249729 - RNA, 14 nt, Human
gucagggaccaagg

SEQ ID NO: 2249730 - RNA, 13 nt, Human
gucagggaccaag

SEQ ID NO: 2249731 - RNA, 22 nt, Human
gucaggcugcuggcgccucugc

SEQ ID NO: 2249732 - RNA, 17 nt, Human
gucaggcugcuggcgcc

SEQ ID NO: 2249733 - RNA, 20 nt, Human
gucaggcugcuggcgccucu

SEQ ID NO: 2249734 - RNA, 18 nt, Human
gucagggaccccugcccu

SEQ ID NO: 2249735 - RNA, 16 nt, Human
gucaguaccuucaaac

SEQ ID NO: 2249736 - RNA, 22 nt, Human
gucaguaccuucaaacuagggc

SEQ ID NO: 2249737 - RNA, 23 nt, Human
gucaguaucaggccugccagacg

SEQ ID NO: 2249738 - RNA, 16 nt, Human
gucaguaucaggccug

SEQ ID NO: 2249739 - RNA, 17 nt, Human
aaauuauaacuuaaaau

SEQ ID NO: 2249740 - RNA, 16 nt, Human
aaauuauaacuuaaaa

SEQ ID NO: 2249741 - RNA, 21 nt, Human
aaauuaguuagccaauauuuu

SEQ ID NO: 2249742 - RNA, 23 nt, Human
aaauuagguuuuguacaauugaa

SEQ ID NO: 2249743 - RNA, 19 nt, Human
aaauuagguuuuguacaau

SEQ ID NO: 2249744 - RNA, 17 nt, Human
aaauuagguuuuguaca

SEQ ID NO: 2249745 - RNA, 17 nt, Human
aaauuaaggguuaagaa

SEQ ID NO: 2249746 - RNA, 13 nt, Human
aaauuaauaaucu

SEQ ID NO: 2249747 - RNA, 18 nt, Human
aaauuagguauuuugucc

SEQ ID NO: 2249748 - RNA, 19 nt, Human
aaauuauuaguuuacauca

SEQ ID NO: 2249749 - RNA, 14 nt, Human
aaauuauuaaugaa

SEQ ID NO: 2249750 - RNA, 23 nt, Human
aaauuauuaguuuacaucauuuu

SEQ ID NO: 2249751 - RNA, 15 nt, Human
aaauuauuuaauaaa

SEQ ID NO: 2249752 - RNA, 17 nt, Human
aaauuauagaugggaau

SEQ ID NO: 2249753 - RNA, 22 nt, Human
aaauuauaacuuaaaauauuuu

SEQ ID NO: 2249754 - RNA, 19 nt, Human
aaauuauaacuuaaaauau

SEQ ID NO: 2249755 - RNA, 12 nt, Human
aaauuaagacau

SEQ ID NO: 2249756 - RNA, 15 nt, Human
aaauuaagaaggcaa

SEQ ID NO: 2249757 - RNA, 14 nt, Human
aaauuaagaaggca

SEQ ID NO: 2249758 - RNA, 16 nt, Human
aaauuaagaagaaacu

SEQ ID NO: 2249759 - RNA, 15 nt, Human
aaauuaagaagaaac

SEQ ID NO: 2249760 - RNA, 14 nt, Human
aaauuaagaagaaa

SEQ ID NO: 2249761 - RNA, 13 nt, Human
aaauuaagaagaa

SEQ ID NO: 2249762 - RNA, 14 nt, Human
aaauguguuucugu

SEQ ID NO: 2249763 - RNA, 13 nt, Human
aaauguguuucug

SEQ ID NO: 2249764 - RNA, 14 nt, Human
aaauuaagaaagga

SEQ ID NO: 2249765 - RNA, 13 nt, Human
aaauguguauuuu

SEQ ID NO: 2249766 - RNA, 20 nt, Human
aaauguguaucggaugcuuu

SEQ ID NO: 2249767 - RNA, 10 nt, Human
aaauguguaa

SEQ ID NO: 2249768 - RNA, 13 nt, Human
aaaugugauuuuu

SEQ ID NO: 2249769 - RNA, 21 nt, Human
aaaugugaugaauacuguauu

SEQ ID NO: 2249770 - RNA, 16 nt, Human
aaauguguuuaaaaca

SEQ ID NO: 2249771 - RNA, 12 nt, Human
aaaugugugugu

SEQ ID NO: 2249772 - RNA, 12 nt, Human
aaauguguacau

SEQ ID NO: 2249773 - RNA, 14 nt, Human
guaugucauuuccu

SEQ ID NO: 2249774 - RNA, 17 nt, Human
guaugucauuuccuuca

SEQ ID NO: 2249775 - RNA, 14 nt, Human
guauguaaacagga

SEQ ID NO: 2249776 - RNA, 16 nt, Human
guaugcuuauuuuaaa

SEQ ID NO: 2249777 - RNA, 22 nt, Human
guaugccuuuaaaucugugaug

SEQ ID NO: 2249778 - RNA, 15 nt, Human
guaugguugacacua

SEQ ID NO: 2249779 - RNA, 14 nt, Human
guauguaaaugugc

SEQ ID NO: 2249780 - RNA, 15 nt, Human
guauguaaaugugca

SEQ ID NO: 2249781 - RNA, 11 nt, Human
guauguaaaug

SEQ ID NO: 2249782 - RNA, 12 nt, Human
guauguaaaugu

SEQ ID NO: 2249783 - RNA, 15 nt, Human
guauguaaauguaua

SEQ ID NO: 2249784 - RNA, 13 nt, Human
guauguaaaugug

SEQ ID NO: 2249785 - RNA, 15 nt, Human
guauguauaauucaa

SEQ ID NO: 2249786 - RNA, 11 nt, Human
guauguauaau

SEQ ID NO: 2249787 - RNA, 18 nt, Human
guauguacuucaugcugu

SEQ ID NO: 2249788 - RNA, 19 nt, Human
aaaugucuaguuguaacac

SEQ ID NO: 2249789 - RNA, 22 nt, Human
aaauguccuccagaagccucug

SEQ ID NO: 2249790 - RNA, 11 nt, Human
aaaugucuaau

SEQ ID NO: 2249791 - RNA, 16 nt, Human
aaaugucuaauguauu

SEQ ID NO: 2249792 - RNA, 22 nt, Human
aaaugucaguggaagaagcaga

SEQ ID NO: 2249793 - RNA, 22 nt, Human
aaaugucagauacaauguauuu

SEQ ID NO: 2249794 - RNA, 15 nt, Human
aaaugucagauacaa

SEQ ID NO: 2249795 - RNA, 20 nt, Human
aaaugucagauacaauguau

SEQ ID NO: 2249796 - RNA, 22 nt, Human
aaaugucuuuccuuuugcucuu

SEQ ID NO: 2249797 - RNA, 13 nt, Human
aaaugucuugugu

SEQ ID NO: 2249798 - RNA, 24 nt, Human
aaaugucuaguuguaacaccauga

SEQ ID NO: 2249799 - RNA, 18 nt, Human
aaaugucuaauguauuuu

SEQ ID NO: 2249800 - RNA, 19 nt, Human
aaaugucuaauguauuuua

SEQ ID NO: 2249801 - RNA, 20 nt, Human
aaaugucuaauguauuuuau

SEQ ID NO: 2249802 - RNA, 22 nt, Human
aaaugucuaauguauuuuauug

SEQ ID NO: 2249803 - RNA, 21 nt, Human
aaaugugaauaaaauuauuuu

SEQ ID NO: 2249804 - RNA, 19 nt, Human
aaaugugaaugggaaaaga

SEQ ID NO: 2249805 - RNA, 20 nt, Human
aaaugucuuuuuuuuaaugu

SEQ ID NO: 2249806 - RNA, 22 nt, Human
aaaugucuuuuuuuuaaugugc

SEQ ID NO: 2249807 - RNA, 13 nt, Human
aaaugugaugaau

SEQ ID NO: 2249808 - RNA, 22 nt, Human
aaauuguuuaaguguuguaaau

SEQ ID NO: 2249809 - RNA, 12 nt, Human
aaauuuauguga

SEQ ID NO: 2249810 - RNA, 21 nt, Human
aaauuguuucaaaauaaaaac

SEQ ID NO: 2249811 - RNA, 22 nt, Human
aaauuguuuccaagauagagag

SEQ ID NO: 2249812 - RNA, 15 nt, Human
aaauuuaugugaugg

SEQ ID NO: 2249813 - RNA, 19 nt, Human
aaauuuauuuacugcuagu

SEQ ID NO: 2249814 - RNA, 14 nt, Human
aaauuuauuuacug

SEQ ID NO: 2249815 - RNA, 19 nt, Human
aaauugugggucuauuucu

SEQ ID NO: 2249816 - RNA, 15 nt, Human
aaauugugauguguc

SEQ ID NO: 2249817 - RNA, 12 nt, Human
aaauugugaugu

SEQ ID NO: 2249818 - RNA, 13 nt, Human
aaauucuguuucu

SEQ ID NO: 2249819 - RNA, 12 nt, Human
aaauuguacaua

SEQ ID NO: 2249820 - RNA, 14 nt, Human
aaauuguauauuca

SEQ ID NO: 2249821 - RNA, 22 nt, Human
aaauuguacauauuuguggaau

SEQ ID NO: 2249822 - RNA, 15 nt, Human
aaauuguauauucac

SEQ ID NO: 2249823 - RNA, 16 nt, Human
aaauuguauauucacu

SEQ ID NO: 2249824 - RNA, 15 nt, Human
aaauuguacauauuu

SEQ ID NO: 2249825 - RNA, 13 nt, Human
aaauuauuucaga

SEQ ID NO: 2249826 - RNA, 13 nt, Human
aaauuauuugcau

SEQ ID NO: 2249827 - RNA, 13 nt, Human
aaauuauuugaaa

SEQ ID NO: 2249828 - RNA, 15 nt, Human
aaauuauuuauuauu

SEQ ID NO: 2249829 - RNA, 13 nt, Human
aaauuauuugugu

SEQ ID NO: 2249830 - RNA, 16 nt, Human
aaauuauuuguguaau

SEQ ID NO: 2249831 - RNA, 21 nt, Human
aaauuauuuguguaauagaaa

SEQ ID NO: 2249832 - RNA, 16 nt, Human
aaauucugucucugga

SEQ ID NO: 2249833 - RNA, 19 nt, Human
aaauuguaagcaugcacaa

SEQ ID NO: 2249834 - RNA, 18 nt, Human
aaauucugucucuggauu

SEQ ID NO: 2249835 - RNA, 20 nt, Human
aaauuguaagcaugcacaaa

SEQ ID NO: 2249836 - RNA, 20 nt, Human
gucaaacaaacucucugaac

SEQ ID NO: 2249837 - RNA, 15 nt, Human
gucaaacaaagccag

SEQ ID NO: 2249838 - RNA, 14 nt, Human
gucaaaaggugccu

SEQ ID NO: 2249839 - RNA, 15 nt, Human
gucaaaagcuggauu

SEQ ID NO: 2249840 - RNA, 16 nt, Human
gucaaaacucaaaugc

SEQ ID NO: 2249841 - RNA, 16 nt, Human
gucaaaaggugccugu

SEQ ID NO: 2249842 - RNA, 15 nt, Human
gucaaaaggugccug

SEQ ID NO: 2249843 - RNA, 18 nt, Human
guauuuuucaauaaagca

SEQ ID NO: 2249844 - RNA, 22 nt, Human
guauuuuguuuuugucuuaaaa

SEQ ID NO: 2249845 - RNA, 21 nt, Human
aaauuuauuuacugcuagucu

SEQ ID NO: 2249846 - RNA, 13 nt, Human
aaauuuauuuccu

SEQ ID NO: 2249847 - RNA, 18 nt, Human
guauuuuuaaugggggua

SEQ ID NO: 2249848 - RNA, 22 nt, Human
guauuuuuaauggggguagcag

SEQ ID NO: 2249849 - RNA, 21 nt, Human
guauuuuucaauaaagcauuu

SEQ ID NO: 2249850 - RNA, 20 nt, Human
aaauuuauuuccuaguucug

SEQ ID NO: 2249851 - RNA, 14 nt, Human
guauuuuuaauggg

SEQ ID NO: 2249852 - RNA, 13 nt, Human
gucaaaguaaaac

SEQ ID NO: 2249853 - RNA, 11 nt, Human
gucaaagaagg

SEQ ID NO: 2249854 - RNA, 18 nt, Human
gucaacaaacuauuucuu

SEQ ID NO: 2249855 - RNA, 23 nt, Human
gucaaagcaggggaguaugcaaa

SEQ ID NO: 2249856 - RNA, 16 nt, Human
gucaaagaaaugcuga

SEQ ID NO: 2249857 - RNA, 22 nt, Human
gucaacacuuaaggguuuuaga

SEQ ID NO: 2249858 - RNA, 21 nt, Human
gucaacaaguaugaauaaaga

SEQ ID NO: 2249859 - RNA, 17 nt, Human
gucaacacuaacaugau

SEQ ID NO: 2249860 - RNA, 20 nt, Human
gucaaacuguagaaaugaug

SEQ ID NO: 2249861 - RNA, 16 nt, Human
gucaaacuguagaaau

SEQ ID NO: 2249862 - RNA, 22 nt, Human
gucaaaccgcacucacccaugu

SEQ ID NO: 2249863 - RNA, 12 nt, Human
gucaaagaaaug

SEQ ID NO: 2249864 - RNA, 15 nt, Human
gucaaacgugaaaau

SEQ ID NO: 2249865 - RNA, 17 nt, Human
gucaaacgugaaaaugc

SEQ ID NO: 2249866 - RNA, 14 nt, Human
gucaaacgugaaaa

SEQ ID NO: 2249867 - RNA, 16 nt, Human
gucaaaccauaaacuu

SEQ ID NO: 2249868 - RNA, 13 nt, Human
gucaaaccgcacu

SEQ ID NO: 2249869 - RNA, 21 nt, Human
gucaaaccgcacucacccaug

SEQ ID NO: 2249870 - RNA, 17 nt, Human
gucaaacaaagccagaa

SEQ ID NO: 2249871 - RNA, 16 nt, Human
gucaaacaaagccaga

SEQ ID NO: 2249872 - RNA, 15 nt, Human
gucaaacaugaagug

SEQ ID NO: 2249873 - RNA, 16 nt, Human
gucaaacaugaagugu

SEQ ID NO: 2249874 - RNA, 22 nt, Human
guaucaggccugccagacggca

SEQ ID NO: 2249875 - RNA, 18 nt, Human
guaucaggccugccagac

SEQ ID NO: 2249876 - RNA, 17 nt, Human
guaucaggacgagaaug

SEQ ID NO: 2249877 - RNA, 22 nt, Human
guaucaggugcugccauccagg

SEQ ID NO: 2249878 - RNA, 15 nt, Human
guaucauagaaaugu

SEQ ID NO: 2249879 - RNA, 12 nt, Human
guaucauagaaa

SEQ ID NO: 2249880 - RNA, 15 nt, Human
guaucaggucuccca

SEQ ID NO: 2249881 - RNA, 17 nt, Human
guaucaguugcaauaau

SEQ ID NO: 2249882 - RNA, 14 nt, Human
guaucaugaagccu

SEQ ID NO: 2249883 - RNA, 14 nt, Human
guaucaucuggaua

SEQ ID NO: 2249884 - RNA, 17 nt, Human
guaucaugcccugugca

SEQ ID NO: 2249885 - RNA, 24 nt, Human
guaucaucuggauaggagccugcu

SEQ ID NO: 2249886 - RNA, 11 nt, Human
guaucaugcau

SEQ ID NO: 2249887 - RNA, 22 nt, Human
guaucauuguuguuugauuucu

SEQ ID NO: 2249888 - RNA, 18 nt, Human
guaucaugcccugugcaa

SEQ ID NO: 2249889 - RNA, 19 nt, Human
guauccacuuugcacagcu

SEQ ID NO: 2249890 - RNA, 14 nt, Human
guauccacuuugca

SEQ ID NO: 2249891 - RNA, 16 nt, Human
guauccaugggggcag

SEQ ID NO: 2249892 - RNA, 19 nt, Human
guaucccaacuccuauaau

SEQ ID NO: 2249893 - RNA, 21 nt, Human
guauccauuaucauguguaau

SEQ ID NO: 2249894 - RNA, 18 nt, Human
guauccauuaucaugugu

SEQ ID NO: 2249895 - RNA, 19 nt, Human
guauccauuaucaugugua

SEQ ID NO: 2249896 - RNA, 20 nt, Human
guauccaugggggcagggca

SEQ ID NO: 2249897 - RNA, 18 nt, Human
guauccaugggggcaggg

SEQ ID NO: 2249898 - RNA, 16 nt, Human
guauccauuaucaugu

SEQ ID NO: 2249899 - RNA, 17 nt, Human
guauccauuaucaugug

SEQ ID NO: 2249900 - RNA, 19 nt, Human
guaucccaugagccucagc

SEQ ID NO: 2249901 - RNA, 21 nt, Human
guaucccaugagccucagcau

SEQ ID NO: 2249902 - RNA, 18 nt, Human
guaugcaugugaagaaag

SEQ ID NO: 2249903 - RNA, 16 nt, Human
guaugcaugugaagaa

SEQ ID NO: 2249904 - RNA, 17 nt, Human
guaugcaugugaagaaa

SEQ ID NO: 2249905 - RNA, 15 nt, Human
guaugcgugugugug

SEQ ID NO: 2249906 - RNA, 15 nt, Human
guaugcuucauacag

SEQ ID NO: 2249907 - RNA, 14 nt, Human
guaugcuucauaca

SEQ ID NO: 2249908 - RNA, 13 nt, Human
guaugcuucauac

SEQ ID NO: 2249909 - RNA, 12 nt, Human
guaugcuucaua

SEQ ID NO: 2249910 - RNA, 15 nt, Human
guaugguggcugggu

SEQ ID NO: 2249911 - RNA, 16 nt, Human
guaugguggcuggguu

SEQ ID NO: 2249912 - RNA, 14 nt, Human
guaugguggcuggg

SEQ ID NO: 2249913 - RNA, 21 nt, Human
guaugcuucauacagggaugg

SEQ ID NO: 2249914 - RNA, 12 nt, Human
guauaauauuuu

SEQ ID NO: 2249915 - RNA, 15 nt, Human
guauaauauuuuuaa

SEQ ID NO: 2249916 - RNA, 21 nt, Human
guauaaugguugacuggguuu

SEQ ID NO: 2249917 - RNA, 19 nt, Human
guauaaugguugacugggu

SEQ ID NO: 2249918 - RNA, 21 nt, Human
guauaaguggaggcacuuuag

SEQ ID NO: 2249919 - RNA, 23 nt, Human
guauaaugguugacuggguuucu

SEQ ID NO: 2249920 - RNA, 13 nt, Human
guauauuguguuu

SEQ ID NO: 2249921 - RNA, 20 nt, Human
guauauuguguuuguguauu

SEQ ID NO: 2249922 - RNA, 19 nt, Human
guauauuguguuuguguau

SEQ ID NO: 2249923 - RNA, 23 nt, Human
guauaaguccuugcaagaaucag

SEQ ID NO: 2249924 - RNA, 20 nt, Human
guauaaguggaggcacuuua

SEQ ID NO: 2249925 - RNA, 19 nt, Human
guauaaguggaggcacuuu

SEQ ID NO: 2249926 - RNA, 15 nt, Human
guauaaguggugugu

SEQ ID NO: 2249927 - RNA, 21 nt, Human
guauaaaacuuuccucgccug

SEQ ID NO: 2249928 - RNA, 18 nt, Human
guauaaguaagaaaauau

SEQ ID NO: 2249929 - RNA, 15 nt, Human
guauaaaauaauuuu

SEQ ID NO: 2249930 - RNA, 21 nt, Human
guauaaaauaauuuuuauauu

SEQ ID NO: 2249931 - RNA, 23 nt, Human
guauauuugugauagcacuuucu

SEQ ID NO: 2249932 - RNA, 21 nt, Human
guauauuugugauagcacuuu

SEQ ID NO: 2249933 - RNA, 20 nt, Human
guauauuugugauagcacuu

SEQ ID NO: 2249934 - RNA, 14 nt, Human
guauauuuguacaa

SEQ ID NO: 2249935 - RNA, 16 nt, Human
guauauuuuauaucaa

SEQ ID NO: 2249936 - RNA, 17 nt, Human
guauauuuaaaagaaag

SEQ ID NO: 2249937 - RNA, 13 nt, Human
guauauuuauagu

SEQ ID NO: 2249938 - RNA, 22 nt, Human
guauauuuauagucacaagagc

SEQ ID NO: 2249939 - RNA, 13 nt, Human
guauauuuguaca

SEQ ID NO: 2249940 - RNA, 15 nt, Human
guauauuuguacaaa

SEQ ID NO: 2249941 - RNA, 16 nt, Human
guaucaggugcugcca

SEQ ID NO: 2249942 - RNA, 18 nt, Human
guaucaggugcugccauc

SEQ ID NO: 2249943 - RNA, 21 nt, Human
guauauuuugggaaucuuuuc

SEQ ID NO: 2249944 - RNA, 15 nt, Human
guaucaaauaaaauu

SEQ ID NO: 2249945 - RNA, 14 nt, Human
aaauguaagaucgu

SEQ ID NO: 2249946 - RNA, 22 nt, Human
aaauguaagaucguucucugcc

SEQ ID NO: 2249947 - RNA, 18 nt, Human
aaauguaacuuuuguaag

SEQ ID NO: 2249948 - RNA, 17 nt, Human
guaguguuggagaagaa

SEQ ID NO: 2249949 - RNA, 16 nt, Human
aaauguaagggaaacu

SEQ ID NO: 2249950 - RNA, 17 nt, Human
aaauguaacuuuuguaa

SEQ ID NO: 2249951 - RNA, 15 nt, Human
aaauguaaauauucu

SEQ ID NO: 2249952 - RNA, 22 nt, Human
aaauguaaagauauuuuuaucu

SEQ ID NO: 2249953 - RNA, 17 nt, Human
aaauguaaauauucuau

SEQ ID NO: 2249954 - RNA, 13 nt, Human
aaauguaacaguc

SEQ ID NO: 2249955 - RNA, 16 nt, Human
aaauguaacagucuga

SEQ ID NO: 2249956 - RNA, 17 nt, Human
aaauguaacagucugau

SEQ ID NO: 2249957 - RNA, 20 nt, Human
aaaugguuguauuagauguu

SEQ ID NO: 2249958 - RNA, 22 nt, Human
aaaugguuguauuagauguucu

SEQ ID NO: 2249959 - RNA, 14 nt, Human
aaaugguuguauua

SEQ ID NO: 2249960 - RNA, 16 nt, Human
aaaugguuguauuaga

SEQ ID NO: 2249961 - RNA, 17 nt, Human
aaaugguuguauuagau

SEQ ID NO: 2249962 - RNA, 19 nt, Human
aaaugguuguauuagaugu

SEQ ID NO: 2249963 - RNA, 17 nt, Human
guaguuuuucuucaaca

SEQ ID NO: 2249964 - RNA, 21 nt, Human
guaguuuuaucacauguaugu

SEQ ID NO: 2249965 - RNA, 12 nt, Human
guaguugucuuu

SEQ ID NO: 2249966 - RNA, 16 nt, Human
guaguugucuuuccug

SEQ ID NO: 2249967 - RNA, 15 nt, Human
guauaaaaaaaauag

SEQ ID NO: 2249968 - RNA, 12 nt, Human
guauaaaaacaa

SEQ ID NO: 2249969 - RNA, 19 nt, Human
guauaaaagggacugagaa

SEQ ID NO: 2249970 - RNA, 15 nt, Human
guauaaaacuuuccu

SEQ ID NO: 2249971 - RNA, 16 nt, Human
guauaaaacuuuccuc

SEQ ID NO: 2249972 - RNA, 18 nt, Human
guauaaaacuuuccucgc

SEQ ID NO: 2249973 - RNA, 19 nt, Human
guauaaaacuuuccucgcc

SEQ ID NO: 2249974 - RNA, 14 nt, Human
guaguuaggaaaua

SEQ ID NO: 2249975 - RNA, 13 nt, Human
guaguuaggaaau

SEQ ID NO: 2249976 - RNA, 11 nt, Human
guaguuaggaa

SEQ ID NO: 2249977 - RNA, 20 nt, Human
guaguguuggagaagaacug

SEQ ID NO: 2249978 - RNA, 22 nt, Human
guaguuaggaaauaaaaccuuu

SEQ ID NO: 2249979 - RNA, 20 nt, Human
guaguuaggaaauaaaaccu

SEQ ID NO: 2249980 - RNA, 16 nt, Human
guaguuaggaaauaaa

SEQ ID NO: 2249981 - RNA, 15 nt, Human
guaguuaggaaauaa

SEQ ID NO: 2249982 - RNA, 13 nt, Human
guaguuaguagca

SEQ ID NO: 2249983 - RNA, 18 nt, Human
guaguugcaauagaacag

SEQ ID NO: 2249984 - RNA, 23 nt, Human
aaauggugaaaauaaaauaaagc

SEQ ID NO: 2249985 - RNA, 11 nt, Human
aaauggugccu

SEQ ID NO: 2249986 - RNA, 18 nt, Human
aaauggucgcccaggaga

SEQ ID NO: 2249987 - RNA, 14 nt, Human
aaauggugccuuca

SEQ ID NO: 2249988 - RNA, 20 nt, Human
aaaugguguacauaauguau

SEQ ID NO: 2249989 - RNA, 14 nt, Human
aaaugguguacaua

SEQ ID NO: 2249990 - RNA, 14 nt, Human
aaaugguguuuuuu

SEQ ID NO: 2249991 - RNA, 11 nt, Human
aaaugguuaaa

SEQ ID NO: 2249992 - RNA, 13 nt, Human
aaaugguuguauu

SEQ ID NO: 2249993 - RNA, 16 nt, Human
aaaugguguacauaau

SEQ ID NO: 2249994 - RNA, 19 nt, Human
aaaugguuaaaagagguuu

SEQ ID NO: 2249995 - RNA, 13 nt, Human
aaaugguuaaaag

SEQ ID NO: 2249996 - RNA, 19 nt, Human
aaauggguagagaaacacu

SEQ ID NO: 2249997 - RNA, 20 nt, Human
aaauggguuggugcuucuaa

SEQ ID NO: 2249998 - RNA, 18 nt, Human
guaacaguucauguuugc

SEQ ID NO: 2249999 - RNA, 20 nt, Human
guaacaguucauguuugcuu

SEQ ID NO: 2250000 - RNA, 22 nt, Human
aaauggguuggugcuucuaacc

SEQ ID NO: 2250001 - RNA, 17 nt, Human
aaauggucgcccaggag

SEQ ID NO: 2250002 - RNA, 16 nt, Human
aaauggucgcccagga

SEQ ID NO: 2250003 - RNA, 14 nt, Human
aaaugguccaggag

SEQ ID NO: 2250004 - RNA, 19 nt, Human
aaaugguaggcauuuccua

SEQ ID NO: 2250005 - RNA, 22 nt, Human
guaacaggaaaauuuuaaaaau

SEQ ID NO: 2250006 - RNA, 12 nt, Human
guaacaggcaga

SEQ ID NO: 2250007 - RNA, 16 nt, Human
guaacaggucuccucu

SEQ ID NO: 2250008 - RNA, 14 nt, Human
guaacaggucuccu

SEQ ID NO: 2250009 - RNA, 14 nt, Human
guaacagaacagcu

SEQ ID NO: 2250010 - RNA, 15 nt, Human
guaacagaacagcuu

SEQ ID NO: 2250011 - RNA, 21 nt, Human
guaacaggucuccucuuaaaa

SEQ ID NO: 2250012 - RNA, 20 nt, Human
guaacaggucuccucuuaaa

SEQ ID NO: 2250013 - RNA, 18 nt, Human
guaacagucugaucguga

SEQ ID NO: 2250014 - RNA, 17 nt, Human
guaacaguucauguuug

SEQ ID NO: 2250015 - RNA, 19 nt, Human
aaaugggggugcauuugag

SEQ ID NO: 2250016 - RNA, 22 nt, Human
guaacacagcugagagacuuuu

SEQ ID NO: 2250017 - RNA, 22 nt, Human
guaacacagugccuucaauaaa

SEQ ID NO: 2250018 - RNA, 23 nt, Human
guaacacagugccuucaauaaau

SEQ ID NO: 2250019 - RNA, 17 nt, Human
guaacacaagccacaga

SEQ ID NO: 2250020 - RNA, 19 nt, Human
guaacacaagccacagaag

SEQ ID NO: 2250021 - RNA, 20 nt, Human
guaacacaagccacagaagc

SEQ ID NO: 2250022 - RNA, 19 nt, Human
guaaauuuagcauaucaau

SEQ ID NO: 2250023 - RNA, 18 nt, Human
guaaauuuccccaacagu

SEQ ID NO: 2250024 - RNA, 19 nt, Human
guaaauuuccccaacagug

SEQ ID NO: 2250025 - RNA, 19 nt, Human
guaacaauuuuaaugcuau

SEQ ID NO: 2250026 - RNA, 16 nt, Human
guaacacuuuacaaug

SEQ ID NO: 2250027 - RNA, 17 nt, Human
guaacacuuuacaaugu

SEQ ID NO: 2250028 - RNA, 11 nt, Human
guaacagaaag

SEQ ID NO: 2250029 - RNA, 12 nt, Human
guaacagaaagg

SEQ ID NO: 2250030 - RNA, 15 nt, Human
guaacagaaagggca

SEQ ID NO: 2250031 - RNA, 16 nt, Human
guaacagaaagggcaa

SEQ ID NO: 2250032 - RNA, 21 nt, Human
guaacagaaagggcaacaaua

SEQ ID NO: 2250033 - RNA, 22 nt, Human
guaacagaaagggcaacaauaa

SEQ ID NO: 2250034 - RNA, 23 nt, Human
guaacagaaagggcaacaauaaa

SEQ ID NO: 2250035 - RNA, 14 nt, Human
aacuacuguguucc

SEQ ID NO: 2250036 - RNA, 13 nt, Human
aacuacuguguuc

SEQ ID NO: 2250037 - RNA, 23 nt, Human
aacuagacucccaagcuggacua

SEQ ID NO: 2250038 - RNA, 20 nt, Human
aacuagacucccaagcugga

SEQ ID NO: 2250039 - RNA, 15 nt, Human
aacuacuguguuccu

SEQ ID NO: 2250040 - RNA, 16 nt, Human
aacuagagcagcccug

SEQ ID NO: 2250041 - RNA, 20 nt, Human
aacuagagaugacugagucc

SEQ ID NO: 2250042 - RNA, 22 nt, Human
aacuagagcagcccuggaguca

SEQ ID NO: 2250043 - RNA, 23 nt, Human
aacuagagcagcccuggagucau

SEQ ID NO: 2250044 - RNA, 21 nt, Human
aacuagaguuuagcuggaaaa

SEQ ID NO: 2250045 - RNA, 16 nt, Human
aacuaugauuuggaaa

SEQ ID NO: 2250046 - RNA, 21 nt, Human
aacuaugauuuggaaaauaaa

SEQ ID NO: 2250047 - RNA, 23 nt, Human
aacuaugcauggugccccaggac

SEQ ID NO: 2250048 - RNA, 22 nt, Human
aacuaugcauggugccccagga

SEQ ID NO: 2250049 - RNA, 17 nt, Human
aacuaugcauggugccc

SEQ ID NO: 2250050 - RNA, 18 nt, Human
aacuaugauaugguaaaa

SEQ ID NO: 2250051 - RNA, 17 nt, Human
aacuaugaacuacaaag

SEQ ID NO: 2250052 - RNA, 11 nt, Human
aacuaucuugg

SEQ ID NO: 2250053 - RNA, 18 nt, Human
aacuaucuuggugaauuu

SEQ ID NO: 2250054 - RNA, 21 nt, Human
aaccuugguguaguugaacug

SEQ ID NO: 2250055 - RNA, 19 nt, Human
aacuacgcuugcucauuuu

SEQ ID NO: 2250056 - RNA, 17 nt, Human
aacuacucagggaauga

SEQ ID NO: 2250057 - RNA, 19 nt, Human
aacuacuccggagacaggg

SEQ ID NO: 2250058 - RNA, 20 nt, Human
aaccuugguguaguugaacu

SEQ ID NO: 2250059 - RNA, 18 nt, Human
aaccuugguguaguugaa

SEQ ID NO: 2250060 - RNA, 23 nt, Human
aaccuugccuuucucgauuuuau

SEQ ID NO: 2250061 - RNA, 22 nt, Human
aacuacaugagaacaaacagau

SEQ ID NO: 2250062 - RNA, 11 nt, Human
aaccuguccuu

SEQ ID NO: 2250063 - RNA, 12 nt, Human
aaccugugucuc

SEQ ID NO: 2250064 - RNA, 18 nt, Human
aaccuugaaaacuuuaug

SEQ ID NO: 2250065 - RNA, 22 nt, Human
aaccugugaccagucugacccu

SEQ ID NO: 2250066 - RNA, 17 nt, Human
aaccuucuggccuccca

SEQ ID NO: 2250067 - RNA, 15 nt, Human
aaccuugagacagcu

SEQ ID NO: 2250068 - RNA, 16 nt, Human
aaccuugagacagcuu

SEQ ID NO: 2250069 - RNA, 13 nt, Human
aaccuugccuuuc

SEQ ID NO: 2250070 - RNA, 16 nt, Human
aacucuccucugcugc

SEQ ID NO: 2250071 - RNA, 15 nt, Human
aacucuccuccagag

SEQ ID NO: 2250072 - RNA, 18 nt, Human
aacucuccuccagaguca

SEQ ID NO: 2250073 - RNA, 15 nt, Human
gugaacguggacucc

SEQ ID NO: 2250074 - RNA, 14 nt, Human
gugaacucagccaa

SEQ ID NO: 2250075 - RNA, 14 nt, Human
gugaacgauuuaga

SEQ ID NO: 2250076 - RNA, 16 nt, Human
gugaacgauuuagaaa

SEQ ID NO: 2250077 - RNA, 14 nt, Human
gugaaccuguauaa

SEQ ID NO: 2250078 - RNA, 15 nt, Human
gugaaccaugucagc

SEQ ID NO: 2250079 - RNA, 16 nt, Human
gugaaccuaccuucau

SEQ ID NO: 2250080 - RNA, 22 nt, Human
gugaaccaccacacccagccca

SEQ ID NO: 2250081 - RNA, 23 nt, Human
gugaaccaccacacccagcccac

SEQ ID NO: 2250082 - RNA, 23 nt, Human
aacucauuccugccugucuccuu

SEQ ID NO: 2250083 - RNA, 22 nt, Human
aacucauuccugccugucuccu

SEQ ID NO: 2250084 - RNA, 22 nt, Human
aacucauuuccuauguaacugc

SEQ ID NO: 2250085 - RNA, 12 nt, Human
aacuccuggccu

SEQ ID NO: 2250086 - RNA, 15 nt, Human
aacucauuccugccu

SEQ ID NO: 2250087 - RNA, 21 nt, Human
aacucauuccugccugucucc

SEQ ID NO: 2250088 - RNA, 19 nt, Human
aacucauuccugccugucu

SEQ ID NO: 2250089 - RNA, 22 nt, Human
aacucaucuagguaaauuacag

SEQ ID NO: 2250090 - RNA, 17 nt, Human
aacucaucugucaccaa

SEQ ID NO: 2250091 - RNA, 14 nt, Human
aacuccuguccuuu

SEQ ID NO: 2250092 - RNA, 18 nt, Human
aacuccuuuagcaggugg

SEQ ID NO: 2250093 - RNA, 21 nt, Human
aacuccuuuagcagguggucc

SEQ ID NO: 2250094 - RNA, 14 nt, Human
aacucgaggacugu

SEQ ID NO: 2250095 - RNA, 19 nt, Human
aacucgaggacuguauuug

SEQ ID NO: 2250096 - RNA, 20 nt, Human
aacucgaggacuguauuugu

SEQ ID NO: 2250097 - RNA, 22 nt, Human
aacucgaggacuguauuuguga

SEQ ID NO: 2250098 - RNA, 19 nt, Human
gucuguauuuaugugugag

SEQ ID NO: 2250099 - RNA, 23 nt, Human
gucuguauuuaugugugaggagc

SEQ ID NO: 2250100 - RNA, 14 nt, Human
gucuguaagcugaa

SEQ ID NO: 2250101 - RNA, 14 nt, Human
gucuguacacgugu

SEQ ID NO: 2250102 - RNA, 19 nt, Human
gucuguacacguguccugu

SEQ ID NO: 2250103 - RNA, 20 nt, Human
gucuguacacguguccugua

SEQ ID NO: 2250104 - RNA, 21 nt, Human
gucuguacacguguccuguag

SEQ ID NO: 2250105 - RNA, 14 nt, Human
gucuguagagggcc

SEQ ID NO: 2250106 - RNA, 17 nt, Human
gucuguagagggcccug

SEQ ID NO: 2250107 - RNA, 18 nt, Human
gucuguagagggcccugg

SEQ ID NO: 2250108 - RNA, 19 nt, Human
gucuguagagggcccuggu

SEQ ID NO: 2250109 - RNA, 22 nt, Human
gucuguagagggcccugguguu

SEQ ID NO: 2250110 - RNA, 20 nt, Human
gucuuccugcauucacccag

SEQ ID NO: 2250111 - RNA, 12 nt, Human
gucuuccugugg

SEQ ID NO: 2250112 - RNA, 17 nt, Human
gucuuccugcauucacc

SEQ ID NO: 2250113 - RNA, 19 nt, Human
gucuuccugaguggugcca

SEQ ID NO: 2250114 - RNA, 15 nt, Human
gucugucuucacagc

SEQ ID NO: 2250115 - RNA, 14 nt, Human
gucuuccugugggg

SEQ ID NO: 2250116 - RNA, 15 nt, Human
gucuuccuucugccu

SEQ ID NO: 2250117 - RNA, 15 nt, Human
gucuucggaaaccuu

SEQ ID NO: 2250118 - RNA, 17 nt, Human
gucuucggaaaccuugg

SEQ ID NO: 2250119 - RNA, 13 nt, Human
gucuucguacagu

SEQ ID NO: 2250120 - RNA, 14 nt, Human
gucuucguacaguu

SEQ ID NO: 2250121 - RNA, 16 nt, Human
gucuucguacaguucu

SEQ ID NO: 2250122 - RNA, 18 nt, Human
gucuucguacaguucuuc

SEQ ID NO: 2250123 - RNA, 24 nt, Human
gucugucccgggguccuguggcag

SEQ ID NO: 2250124 - RNA, 21 nt, Human
gucugucccgggguccugugg

SEQ ID NO: 2250125 - RNA, 23 nt, Human
gucugucccgggguccuguggca

SEQ ID NO: 2250126 - RNA, 22 nt, Human
gucugucucuccaucuguuugg

SEQ ID NO: 2250127 - RNA, 14 nt, Human
gucugucucuguca

SEQ ID NO: 2250128 - RNA, 15 nt, Human
gucugucccaccagc

SEQ ID NO: 2250129 - RNA, 20 nt, Human
gucuguaucggagacaguga

SEQ ID NO: 2250130 - RNA, 22 nt, Human
gucugucaugaacauguuccug

SEQ ID NO: 2250131 - RNA, 16 nt, Human
gucugucccggggucc

SEQ ID NO: 2250132 - RNA, 19 nt, Human
gucugucccgggguccugu

SEQ ID NO: 2250133 - RNA, 20 nt, Human
gucugucccgggguccugug

SEQ ID NO: 2250134 - RNA, 14 nt, Human
gucuggcccuuccu

SEQ ID NO: 2250135 - RNA, 22 nt, Human
gucuggcagccucccauccagg

SEQ ID NO: 2250136 - RNA, 12 nt, Human
gucuggcagccu

SEQ ID NO: 2250137 - RNA, 13 nt, Human
gucuguaaaaucu

SEQ ID NO: 2250138 - RNA, 14 nt, Human
gucuguaaaaucuu

SEQ ID NO: 2250139 - RNA, 15 nt, Human
gucuguaaaaucuuu

SEQ ID NO: 2250140 - RNA, 18 nt, Human
gucuguaaaaucuuucuu

SEQ ID NO: 2250141 - RNA, 11 nt, Human
gucuguaaaau

SEQ ID NO: 2250142 - RNA, 12 nt, Human
gucuguaaaauc

SEQ ID NO: 2250143 - RNA, 16 nt, Human
gucugguuuuaacaau

SEQ ID NO: 2250144 - RNA, 18 nt, Human
gucugguuuuaacaauuu

SEQ ID NO: 2250145 - RNA, 21 nt, Human
gucugguuuuaacaauuuccu

SEQ ID NO: 2250146 - RNA, 20 nt, Human
aaccugagccccaaaaggua

SEQ ID NO: 2250147 - RNA, 20 nt, Human
aaccugagucguacagaaag

SEQ ID NO: 2250148 - RNA, 15 nt, Human
gucuuuuuaagcuua

SEQ ID NO: 2250149 - RNA, 15 nt, Human
gucuuuuguucgcau

SEQ ID NO: 2250150 - RNA, 16 nt, Human
gucuuuuucuggacug

SEQ ID NO: 2250151 - RNA, 11 nt, Human
aaccuggugcu

SEQ ID NO: 2250152 - RNA, 20 nt, Human
gucuuuuuaagcuuauuuaa

SEQ ID NO: 2250153 - RNA, 16 nt, Human
gucuuuuuaugcauuu

SEQ ID NO: 2250154 - RNA, 23 nt, Human
aaccuggucacaggacucugccu

SEQ ID NO: 2250155 - RNA, 23 nt, Human
aaccuguacuucaaguuaaagug

SEQ ID NO: 2250156 - RNA, 16 nt, Human
aaccuguaauaaauau

SEQ ID NO: 2250157 - RNA, 18 nt, Human
aaccuguaauaaauauga

SEQ ID NO: 2250158 - RNA, 14 nt, Human
aaccuggugcugga

SEQ ID NO: 2250159 - RNA, 14 nt, Human
aaccuguaauaaau

SEQ ID NO: 2250160 - RNA, 13 nt, Human
aaccuguaauaaa

SEQ ID NO: 2250161 - RNA, 15 nt, Human
aaccuguacuucaag

SEQ ID NO: 2250162 - RNA, 22 nt, Human
aaccuguauaaguggaggcacu

SEQ ID NO: 2250163 - RNA, 15 nt, Human
aaccuguccuugcac

SEQ ID NO: 2250164 - RNA, 16 nt, Human
gucuuuugacaugugg

SEQ ID NO: 2250165 - RNA, 14 nt, Human
gucuuuugacaugu

SEQ ID NO: 2250166 - RNA, 20 nt, Human
gucuuuguaaugucaccacc

SEQ ID NO: 2250167 - RNA, 19 nt, Human
gucuuuguaaugucaccac

SEQ ID NO: 2250168 - RNA, 18 nt, Human
gucuuuguaaugucacca

SEQ ID NO: 2250169 - RNA, 16 nt, Human
gucuuuguaaugucac

SEQ ID NO: 2250170 - RNA, 22 nt, Human
gucuuuguaagaguguagaagc

SEQ ID NO: 2250171 - RNA, 20 nt, Human
gucuuuguaagaguguagaa

SEQ ID NO: 2250172 - RNA, 21 nt, Human
gucuuuguaagaguguagaag

SEQ ID NO: 2250173 - RNA, 12 nt, Human
gucuuuguaaga

SEQ ID NO: 2250174 - RNA, 13 nt, Human
gucuuuguaagag

SEQ ID NO: 2250175 - RNA, 14 nt, Human
gucuuuguaagagu

SEQ ID NO: 2250176 - RNA, 15 nt, Human
gucuuuguaagagug

SEQ ID NO: 2250177 - RNA, 19 nt, Human
gucuuuugacauguggaaa

SEQ ID NO: 2250178 - RNA, 12 nt, Human
gucuuuugcaug

SEQ ID NO: 2250179 - RNA, 12 nt, Human
gucuuuugcuuu

SEQ ID NO: 2250180 - RNA, 13 nt, Human
gucuuuugcuuuu

SEQ ID NO: 2250181 - RNA, 14 nt, Human
gucuuuugcuuuug

SEQ ID NO: 2250182 - RNA, 13 nt, Human
gucuuuugcauga

SEQ ID NO: 2250183 - RNA, 16 nt, Human
gucuuuugcuuuuggc

SEQ ID NO: 2250184 - RNA, 18 nt, Human
gucuuuggacccugaggc

SEQ ID NO: 2250185 - RNA, 15 nt, Human
gucuuugguucagcu

SEQ ID NO: 2250186 - RNA, 22 nt, Human
gucuuuggguaccuauuuucau

SEQ ID NO: 2250187 - RNA, 16 nt, Human
gucuuucacauuuaaa

SEQ ID NO: 2250188 - RNA, 17 nt, Human
gucuuuaggcagcagcu

SEQ ID NO: 2250189 - RNA, 15 nt, Human
gucuuucacagcucc

SEQ ID NO: 2250190 - RNA, 16 nt, Human
gucuuucacagcuccu

SEQ ID NO: 2250191 - RNA, 14 nt, Human
gucuuuaacuguca

SEQ ID NO: 2250192 - RNA, 23 nt, Human
gucuucuaaacuuccccaucuuc

SEQ ID NO: 2250193 - RNA, 14 nt, Human
gucuucuaaacuuc

SEQ ID NO: 2250194 - RNA, 20 nt, Human
gucuucguacaguucuucgg

SEQ ID NO: 2250195 - RNA, 13 nt, Human
gucuucuaauuuc

SEQ ID NO: 2250196 - RNA, 15 nt, Human
gucuucuaauuucaa

SEQ ID NO: 2250197 - RNA, 23 nt, Human
gucuucuaauuucaaaaauauaa

SEQ ID NO: 2250198 - RNA, 16 nt, Human
aacaguuagcuggagc

SEQ ID NO: 2250199 - RNA, 20 nt, Human
aacaguuaacuuucagaaga

SEQ ID NO: 2250200 - RNA, 16 nt, Human
aacaguucauguuugc

SEQ ID NO: 2250201 - RNA, 14 nt, Human
aacaguuccuucag

SEQ ID NO: 2250202 - RNA, 23 nt, Human
aacaguucauguuugcuucauaa

SEQ ID NO: 2250203 - RNA, 19 nt, Human
aacaguuaauaccauuuuu

SEQ ID NO: 2250204 - RNA, 18 nt, Human
aacaguuaacuuucagaa

SEQ ID NO: 2250205 - RNA, 17 nt, Human
aacaguuaacuuucaga

SEQ ID NO: 2250206 - RNA, 13 nt, Human
aacaguuaacuuu

SEQ ID NO: 2250207 - RNA, 20 nt, Human
aacaguguuuuggaauaaaa

SEQ ID NO: 2250208 - RNA, 23 nt, Human
aacaguguuucccauaauuuucu

SEQ ID NO: 2250209 - RNA, 22 nt, Human
gucucccucuccugccuacuca

SEQ ID NO: 2250210 - RNA, 21 nt, Human
gucucccucuccugccuacuc

SEQ ID NO: 2250211 - RNA, 16 nt, Human
gucucccuggagugca

SEQ ID NO: 2250212 - RNA, 12 nt, Human
gucucccuggcc

SEQ ID NO: 2250213 - RNA, 13 nt, Human
gucucccuggccc

SEQ ID NO: 2250214 - RNA, 14 nt, Human
gucucccuggcccu

SEQ ID NO: 2250215 - RNA, 15 nt, Human
gucucccuggcccuc

SEQ ID NO: 2250216 - RNA, 20 nt, Human
gucucccucuccugccuacu

SEQ ID NO: 2250217 - RNA, 19 nt, Human
gucucccucuccugccuac

SEQ ID NO: 2250218 - RNA, 18 nt, Human
gucucccucuccugccua

SEQ ID NO: 2250219 - RNA, 17 nt, Human
gucucccucuccugccu

SEQ ID NO: 2250220 - RNA, 16 nt, Human
gucucccucuccugcc

SEQ ID NO: 2250221 - RNA, 15 nt, Human
gucucccucuccugc

SEQ ID NO: 2250222 - RNA, 14 nt, Human
gucucccucuccug

SEQ ID NO: 2250223 - RNA, 18 nt, Human
gucucccuuucccuucuu

SEQ ID NO: 2250224 - RNA, 15 nt, Human
gucucccuucuccca

SEQ ID NO: 2250225 - RNA, 19 nt, Human
gucucccuucucccaugag

SEQ ID NO: 2250226 - RNA, 18 nt, Human
gucucccuggcccucaag

SEQ ID NO: 2250227 - RNA, 16 nt, Human
gucucccuggcccuca

SEQ ID NO: 2250228 - RNA, 13 nt, Human
gucucccuucucc

SEQ ID NO: 2250229 - RNA, 21 nt, Human
gucuccugugcccacauccca

SEQ ID NO: 2250230 - RNA, 22 nt, Human
gucuccugugcccacaucccag

SEQ ID NO: 2250231 - RNA, 16 nt, Human
gucuccuuaacacuga

SEQ ID NO: 2250232 - RNA, 18 nt, Human
gucuccuuucaccccagg

SEQ ID NO: 2250233 - RNA, 22 nt, Human
gucuccuuaacacugagcuguc

SEQ ID NO: 2250234 - RNA, 19 nt, Human
aaccaccacacccagccca

SEQ ID NO: 2250235 - RNA, 20 nt, Human
aaccacauuggagauguuua

SEQ ID NO: 2250236 - RNA, 15 nt, Human
aaccaagucaaguga

SEQ ID NO: 2250237 - RNA, 16 nt, Human
aaccaagucaugugca

SEQ ID NO: 2250238 - RNA, 17 nt, Human
aaccaagcucucugcau

SEQ ID NO: 2250239 - RNA, 16 nt, Human
aaccaagccguggcuu

SEQ ID NO: 2250240 - RNA, 19 nt, Human
gucucgaacuccugaccuu

SEQ ID NO: 2250241 - RNA, 18 nt, Human
gucuccuuugcaggcuca

SEQ ID NO: 2250242 - RNA, 23 nt, Human
gucuccuuugcacugagggccac

SEQ ID NO: 2250243 - RNA, 15 nt, Human
aaccaagcucucugc

SEQ ID NO: 2250244 - RNA, 18 nt, Human
aaccaagccguggcuucc

SEQ ID NO: 2250245 - RNA, 18 nt, Human
gucucgaacuccugaccu

SEQ ID NO: 2250246 - RNA, 13 nt, Human
gucucgaacuccu

SEQ ID NO: 2250247 - RNA, 20 nt, Human
gucuccuuucaccccagggc

SEQ ID NO: 2250248 - RNA, 21 nt, Human
gucuccuuucucagccacaaa

SEQ ID NO: 2250249 - RNA, 15 nt, Human
gucuccuuugcacug

SEQ ID NO: 2250250 - RNA, 16 nt, Human
gucuccuuugcacuga

SEQ ID NO: 2250251 - RNA, 18 nt, Human
gucuccuuugcacugagg

SEQ ID NO: 2250252 - RNA, 20 nt, Human
gucuccuuugcacugagggc

SEQ ID NO: 2250253 - RNA, 22 nt, Human
gucuccuuugcacugagggcca

SEQ ID NO: 2250254 - RNA, 16 nt, Human
aacccaacucuccugg

SEQ ID NO: 2250255 - RNA, 16 nt, Human
aacccaagcuuagaac

SEQ ID NO: 2250256 - RNA, 15 nt, Human
aacccaagcuuagaa

SEQ ID NO: 2250257 - RNA, 18 nt, Human
aacccaaguccaagcaua

SEQ ID NO: 2250258 - RNA, 22 nt, Human
aacccaagguggguagaucacg

SEQ ID NO: 2250259 - RNA, 14 nt, Human
aacccaauccaaau

SEQ ID NO: 2250260 - RNA, 16 nt, Human
aacccaagugggggca

SEQ ID NO: 2250261 - RNA, 19 nt, Human
aacccacaggcccacagua

SEQ ID NO: 2250262 - RNA, 13 nt, Human
aacccaauaguug

SEQ ID NO: 2250263 - RNA, 18 nt, Human
aacccaaggacugaggga

SEQ ID NO: 2250264 - RNA, 22 nt, Human
aacccaaauuacguguacuaca

SEQ ID NO: 2250265 - RNA, 23 nt, Human
aacccaaauguucaucaaugaau

SEQ ID NO: 2250266 - RNA, 15 nt, Human
aaccauugucuuguu

SEQ ID NO: 2250267 - RNA, 18 nt, Human
aaccauugucuuguucug

SEQ ID NO: 2250268 - RNA, 19 nt, Human
aaccauugucuuguucugu

SEQ ID NO: 2250269 - RNA, 24 nt, Human
aaccauugucuuguucugugauga

SEQ ID NO: 2250270 - RNA, 14 nt, Human
aaccauugucuugu

SEQ ID NO: 2250271 - RNA, 16 nt, Human
aaccaucauuauaaac

SEQ ID NO: 2250272 - RNA, 13 nt, Human
aaccauguuuugg

SEQ ID NO: 2250273 - RNA, 23 nt, Human
aaccauuaaaacugaagucugaa

SEQ ID NO: 2250274 - RNA, 17 nt, Human
aaccaucauugaaaucu

SEQ ID NO: 2250275 - RNA, 18 nt, Human
aaccaucauugaaaucuu

SEQ ID NO: 2250276 - RNA, 20 nt, Human
aaccaagucaugugcauuuc

SEQ ID NO: 2250277 - RNA, 12 nt, Human
aaccaucauuga

SEQ ID NO: 2250278 - RNA, 21 nt, Human
aaccaccacacccagcccacu

SEQ ID NO: 2250279 - RNA, 17 nt, Human
aaccaccagaagcccag

SEQ ID NO: 2250280 - RNA, 14 nt, Human
aaccaccagaagcc

SEQ ID NO: 2250281 - RNA, 20 nt, Human
aaccccggggugcccacagg

SEQ ID NO: 2250282 - RNA, 22 nt, Human
aaccccgucgaggggcucucag

SEQ ID NO: 2250283 - RNA, 17 nt, Human
aaccccccauuucuucc

SEQ ID NO: 2250284 - RNA, 16 nt, Human
aacccccuuugugcug

SEQ ID NO: 2250285 - RNA, 18 nt, Human
aacccccuuugugcugug

SEQ ID NO: 2250286 - RNA, 19 nt, Human
aacccccuuugugcugugg

SEQ ID NO: 2250287 - RNA, 21 nt, Human
aaccccuacaugaaacagaaa

SEQ ID NO: 2250288 - RNA, 20 nt, Human
aaccccuggcuccaggccag

SEQ ID NO: 2250289 - RNA, 19 nt, Human
aacccccaccccacacuug

SEQ ID NO: 2250290 - RNA, 11 nt, Human
aaccccccagc

SEQ ID NO: 2250291 - RNA, 14 nt, Human
aaccccccagcacu

SEQ ID NO: 2250292 - RNA, 18 nt, Human
aaccccccagcacugagg

SEQ ID NO: 2250293 - RNA, 19 nt, Human
aaccccccagcacugagga

SEQ ID NO: 2250294 - RNA, 18 nt, Human
aacccccaccccacacuu

SEQ ID NO: 2250295 - RNA, 17 nt, Human
aacccccaccccacacu

SEQ ID NO: 2250296 - RNA, 15 nt, Human
aacccccaccccaca

SEQ ID NO: 2250297 - RNA, 13 nt, Human
aacccccacccca

SEQ ID NO: 2250298 - RNA, 12 nt, Human
aacccccacccc

SEQ ID NO: 2250299 - RNA, 11 nt, Human
aacccccaccc

SEQ ID NO: 2250300 - RNA, 10 nt, Human
aacccccacc

SEQ ID NO: 2250301 - RNA, 15 nt, Human
aacccccacacacac

SEQ ID NO: 2250302 - RNA, 14 nt, Human
aacccagccgcugc

SEQ ID NO: 2250303 - RNA, 10 nt, Human
aacccagccg

SEQ ID NO: 2250304 - RNA, 21 nt, Human
aacccagauuuugcuguauau

SEQ ID NO: 2250305 - RNA, 13 nt, Human
aacccagauuuug

SEQ ID NO: 2250306 - RNA, 10 nt, Human
aacccagcuc

SEQ ID NO: 2250307 - RNA, 23 nt, Human
aaccccaguucugcuccucucca

SEQ ID NO: 2250308 - RNA, 12 nt, Human
aacccccacaca

SEQ ID NO: 2250309 - RNA, 14 nt, Human
aacccccacacaca

SEQ ID NO: 2250310 - RNA, 13 nt, Human
aacccccacacac

SEQ ID NO: 2250311 - RNA, 14 nt, Human
aaccccaggccccg

SEQ ID NO: 2250312 - RNA, 16 nt, Human
aacccagccgcugccc

SEQ ID NO: 2250313 - RNA, 12 nt, Human
aaccccaguucu

SEQ ID NO: 2250314 - RNA, 13 nt, Human
aaccccaguucug

SEQ ID NO: 2250315 - RNA, 16 nt, Human
aaccccaguucugcuc

SEQ ID NO: 2250316 - RNA, 18 nt, Human
aaccccaguucugcuccu

SEQ ID NO: 2250317 - RNA, 19 nt, Human
aaccccaguucugcuccuc

SEQ ID NO: 2250318 - RNA, 22 nt, Human
aaccccaguucugcuccucucc

SEQ ID NO: 2250319 - RNA, 23 nt, Human
aacccagaccuguuagcagacag

SEQ ID NO: 2250320 - RNA, 14 nt, Human
aacccagacucaga

SEQ ID NO: 2250321 - RNA, 12 nt, Human
aacccagacuca

SEQ ID NO: 2250322 - RNA, 14 nt, Human
aacccaccugcuga

SEQ ID NO: 2250323 - RNA, 22 nt, Human
aacccaccuuguuggagccugc

SEQ ID NO: 2250324 - RNA, 22 nt, Human
aacccagaccuguuagcagaca

SEQ ID NO: 2250325 - RNA, 12 nt, Human
aacccagagagg

SEQ ID NO: 2250326 - RNA, 11 nt, Human
aacccagagag

SEQ ID NO: 2250327 - RNA, 18 nt, Human
aacccagacucagacauu

SEQ ID NO: 2250328 - RNA, 16 nt, Human
aacccagacucagaca

SEQ ID NO: 2250329 - RNA, 15 nt, Human
aacccagacucagac

SEQ ID NO: 2250330 - RNA, 14 nt, Human
aacccagauaaagg

SEQ ID NO: 2250331 - RNA, 15 nt, Human
aaccugaaccuagga

SEQ ID NO: 2250332 - RNA, 21 nt, Human
aaccugaaaaaaaguuuacaa

SEQ ID NO: 2250333 - RNA, 19 nt, Human
aaccugacaaaaaaaaagu

SEQ ID NO: 2250334 - RNA, 20 nt, Human
aaccugacagaugucagccg

SEQ ID NO: 2250335 - RNA, 23 nt, Human
aaccugacagaugucagccgagc

SEQ ID NO: 2250336 - RNA, 11 nt, Human
aaccugacccc

SEQ ID NO: 2250337 - RNA, 17 nt, Human
aaccugaccccugcuca

SEQ ID NO: 2250338 - RNA, 16 nt, Human
aaccugaccccugcuc

SEQ ID NO: 2250339 - RNA, 17 nt, Human
aaccugacguagcugca

SEQ ID NO: 2250340 - RNA, 20 nt, Human
aaccugaccgugggcggggc

SEQ ID NO: 2250341 - RNA, 19 nt, Human
aaccugaccccugcucagu

SEQ ID NO: 2250342 - RNA, 18 nt, Human
aaccugagccccaaaagg

SEQ ID NO: 2250343 - RNA, 19 nt, Human
aaccucgcuggacucucag

SEQ ID NO: 2250344 - RNA, 14 nt, Human
aaccucgcuggacu

SEQ ID NO: 2250345 - RNA, 11 nt, Human
aaccugaaaaa

SEQ ID NO: 2250346 - RNA, 18 nt, Human
aaccucaggcuuccuugg

SEQ ID NO: 2250347 - RNA, 14 nt, Human
aaccucagcucugg

SEQ ID NO: 2250348 - RNA, 15 nt, Human
aaccucagcucuggg

SEQ ID NO: 2250349 - RNA, 16 nt, Human
aaccucagcucuggga

SEQ ID NO: 2250350 - RNA, 21 nt, Human
aaccucagcucugggagagga

SEQ ID NO: 2250351 - RNA, 19 nt, Human
aaccucagugucauuuaug

SEQ ID NO: 2250352 - RNA, 18 nt, Human
aaccucagugucauuuau

SEQ ID NO: 2250353 - RNA, 13 nt, Human
aaccucaguguca

SEQ ID NO: 2250354 - RNA, 16 nt, Human
aaccucaucuucuuca

SEQ ID NO: 2250355 - RNA, 13 nt, Human
aaccuccuuucuc

SEQ ID NO: 2250356 - RNA, 17 nt, Human
aaccuccuuucucuucu

SEQ ID NO: 2250357 - RNA, 18 nt, Human
aaccuccuuucucuucuc

SEQ ID NO: 2250358 - RNA, 19 nt, Human
aaccuccuuucucuucucu

SEQ ID NO: 2250359 - RNA, 21 nt, Human
aaccuccuguuagcuguuauu

SEQ ID NO: 2250360 - RNA, 21 nt, Human
aaccucauugacaagaacuga

SEQ ID NO: 2250361 - RNA, 14 nt, Human
aaccucauucccca

SEQ ID NO: 2250362 - RNA, 16 nt, Human
aaccucauugacaaga

SEQ ID NO: 2250363 - RNA, 20 nt, Human
aacccgacagagggaagaaa

SEQ ID NO: 2250364 - RNA, 23 nt, Human
aacccgagucauucguucugugg

SEQ ID NO: 2250365 - RNA, 13 nt, Human
aaccucagcucug

SEQ ID NO: 2250366 - RNA, 20 nt, Human
aaccucagccuggccagaca

SEQ ID NO: 2250367 - RNA, 16 nt, Human
aacccgggaggcagag

SEQ ID NO: 2250368 - RNA, 17 nt, Human
aacccgacagagggaag

SEQ ID NO: 2250369 - RNA, 11 nt, Human
aaccccuuucc

SEQ ID NO: 2250370 - RNA, 16 nt, Human
aacccgacagagggaa

SEQ ID NO: 2250371 - RNA, 15 nt, Human
aacccgaggcccgca

SEQ ID NO: 2250372 - RNA, 16 nt, Human
aacccgaggcccgcau

SEQ ID NO: 2250373 - RNA, 13 nt, Human
aaccccuguggag

SEQ ID NO: 2250374 - RNA, 21 nt, Human
gugaacugugaggguaaaggc

SEQ ID NO: 2250375 - RNA, 23 nt, Human
gugaacuggacccuguugcuaag

SEQ ID NO: 2250376 - RNA, 21 nt, Human
gugaacuggacccuguugcua

SEQ ID NO: 2250377 - RNA, 22 nt, Human
gugaacuggacccuguugcuaa

SEQ ID NO: 2250378 - RNA, 19 nt, Human
gugaacuggacccuguugc

SEQ ID NO: 2250379 - RNA, 20 nt, Human
gugaacuggacccuguugcu

SEQ ID NO: 2250380 - RNA, 13 nt, Human
gugaacugacagg

SEQ ID NO: 2250381 - RNA, 16 nt, Human
gugaacugacaggcag

SEQ ID NO: 2250382 - RNA, 15 nt, Human
gugaacucagccaag

SEQ ID NO: 2250383 - RNA, 16 nt, Human
gugaacucagccaagc

SEQ ID NO: 2250384 - RNA, 17 nt, Human
gugaacucagccaagca

SEQ ID NO: 2250385 - RNA, 18 nt, Human
gugaacucagccaagcac

SEQ ID NO: 2250386 - RNA, 19 nt, Human
gugaacucagccaagcaca

SEQ ID NO: 2250387 - RNA, 21 nt, Human
gugaacucagccaagcacagu

SEQ ID NO: 2250388 - RNA, 22 nt, Human
gugaacucagccaagcacagug

SEQ ID NO: 2250389 - RNA, 23 nt, Human
gugaacucagccaagcacagugg

SEQ ID NO: 2250390 - RNA, 20 nt, Human
gugaacuuggggaacaaggg

SEQ ID NO: 2250391 - RNA, 15 nt, Human
gugaacuuuauuaaa

SEQ ID NO: 2250392 - RNA, 14 nt, Human
gugaacuuuuugua

SEQ ID NO: 2250393 - RNA, 23 nt, Human
gugaagaaaagugaaugcucaag

SEQ ID NO: 2250394 - RNA, 21 nt, Human
gugagaugcuagaacucccuu

SEQ ID NO: 2250395 - RNA, 19 nt, Human
gugaacuugggccacugug

SEQ ID NO: 2250396 - RNA, 17 nt, Human
gugaacuugggccacug

SEQ ID NO: 2250397 - RNA, 15 nt, Human
gugaggcccagggag

SEQ ID NO: 2250398 - RNA, 22 nt, Human
gugagaugcuggagaagagagg

SEQ ID NO: 2250399 - RNA, 13 nt, Human
gugaggccccugg

SEQ ID NO: 2250400 - RNA, 11 nt, Human
gugaggccugg

SEQ ID NO: 2250401 - RNA, 13 nt, Human
gugaggccuggcc

SEQ ID NO: 2250402 - RNA, 14 nt, Human
gugaggccuggcca

SEQ ID NO: 2250403 - RNA, 16 nt, Human
gugaggccuggccagg

SEQ ID NO: 2250404 - RNA, 21 nt, Human
gugagcaagaagucaaaguaa

SEQ ID NO: 2250405 - RNA, 14 nt, Human
gugaggccagggca

SEQ ID NO: 2250406 - RNA, 17 nt, Human
gugaggccagggcagag

SEQ ID NO: 2250407 - RNA, 15 nt, Human
gugaggccagggcag

SEQ ID NO: 2250408 - RNA, 22 nt, Human
gugagggcuugucauuaccaga

SEQ ID NO: 2250409 - RNA, 19 nt, Human
gugagggguaaaagcugau

SEQ ID NO: 2250410 - RNA, 17 nt, Human
gugagggagggcuguca

SEQ ID NO: 2250411 - RNA, 15 nt, Human
gugagggucccaugu

SEQ ID NO: 2250412 - RNA, 16 nt, Human
gugagggucccaugug

SEQ ID NO: 2250413 - RNA, 17 nt, Human
gugaggccagagacaca

SEQ ID NO: 2250414 - RNA, 22 nt, Human
gugaggccagagacacaagccu

SEQ ID NO: 2250415 - RNA, 15 nt, Human
gugagauguaauugu

SEQ ID NO: 2250416 - RNA, 15 nt, Human
gugagaugcagcugg

SEQ ID NO: 2250417 - RNA, 16 nt, Human
gugagaugcagcugga

SEQ ID NO: 2250418 - RNA, 18 nt, Human
gugagaugcagcuggaaa

SEQ ID NO: 2250419 - RNA, 15 nt, Human
gugagaugcuggaga

SEQ ID NO: 2250420 - RNA, 17 nt, Human
gugagaugcuggagaag

SEQ ID NO: 2250421 - RNA, 18 nt, Human
gugagaugcuggagaaga

SEQ ID NO: 2250422 - RNA, 19 nt, Human
gugagaugcuggagaagag

SEQ ID NO: 2250423 - RNA, 20 nt, Human
gugagaugcuggagaagaga

SEQ ID NO: 2250424 - RNA, 13 nt, Human
aacugaaagugaa

SEQ ID NO: 2250425 - RNA, 12 nt, Human
aacugaaaucau

SEQ ID NO: 2250426 - RNA, 12 nt, Human
aacugaaaagac

SEQ ID NO: 2250427 - RNA, 19 nt, Human
aacugaaaaucuaauauua

SEQ ID NO: 2250428 - RNA, 12 nt, Human
aacugaaaaugu

SEQ ID NO: 2250429 - RNA, 20 nt, Human
aacugaaaagacucaguguu

SEQ ID NO: 2250430 - RNA, 19 nt, Human
aacugaaaacaagccauga

SEQ ID NO: 2250431 - RNA, 18 nt, Human
aacucuucacaaaaucug

SEQ ID NO: 2250432 - RNA, 15 nt, Human
aacucuuaucucagu

SEQ ID NO: 2250433 - RNA, 19 nt, Human
aacucuguugcaagugcaa

SEQ ID NO: 2250434 - RNA, 17 nt, Human
aacucuuagaaaugaag

SEQ ID NO: 2250435 - RNA, 22 nt, Human
aacucuguugcaagugcaauaa

SEQ ID NO: 2250436 - RNA, 21 nt, Human
aacucuucaaucucuugcacu

SEQ ID NO: 2250437 - RNA, 14 nt, Human
aacucuuaucucag

SEQ ID NO: 2250438 - RNA, 13 nt, Human
aacucuuaucuca

SEQ ID NO: 2250439 - RNA, 18 nt, Human
gugagggucagagaggag

SEQ ID NO: 2250440 - RNA, 19 nt, Human
gugaggguuucugagcugc

SEQ ID NO: 2250441 - RNA, 18 nt, Human
gugaggguuucugagcug

SEQ ID NO: 2250442 - RNA, 19 nt, Human
gugaggugcagagugccca

SEQ ID NO: 2250443 - RNA, 21 nt, Human
gugagguggaauuauuuuaaa

SEQ ID NO: 2250444 - RNA, 21 nt, Human
gugaggugcagagugcccaga

SEQ ID NO: 2250445 - RNA, 14 nt, Human
gugaggugcccagc

SEQ ID NO: 2250446 - RNA, 16 nt, Human
gugagucuuggcggca

SEQ ID NO: 2250447 - RNA, 17 nt, Human
gugagucuuggcggcag

SEQ ID NO: 2250448 - RNA, 18 nt, Human
gugagucuuggcggcagc

SEQ ID NO: 2250449 - RNA, 22 nt, Human
gugagucgaggacagggaggug

SEQ ID NO: 2250450 - RNA, 20 nt, Human
aacucugacaacagacuucu

SEQ ID NO: 2250451 - RNA, 14 nt, Human
gugagugagccugg

SEQ ID NO: 2250452 - RNA, 15 nt, Human
gugagugagccuggc

SEQ ID NO: 2250453 - RNA, 18 nt, Human
gugagugagccuggcucu

SEQ ID NO: 2250454 - RNA, 13 nt, Human
gugagugagccug

SEQ ID NO: 2250455 - RNA, 19 nt, Human
gugagucuuggcggcagca

SEQ ID NO: 2250456 - RNA, 20 nt, Human
gugagucuuggcggcagcag

SEQ ID NO: 2250457 - RNA, 21 nt, Human
gugagucuuggcggcagcagc

SEQ ID NO: 2250458 - RNA, 22 nt, Human
gugagucuuggcggcagcagcc

SEQ ID NO: 2250459 - RNA, 23 nt, Human
aacucugacaacagacuucugaa

SEQ ID NO: 2250460 - RNA, 22 nt, Human
aacucugacaacagacuucuga

SEQ ID NO: 2250461 - RNA, 17 nt, Human
aacugcagaccuguccu

SEQ ID NO: 2250462 - RNA, 18 nt, Human
aacugcagaccuguccuc

SEQ ID NO: 2250463 - RNA, 19 nt, Human
aacugcagaccuguccucc

SEQ ID NO: 2250464 - RNA, 19 nt, Human
aacugcacugucaagauga

SEQ ID NO: 2250465 - RNA, 17 nt, Human
aacugccuuaaaacuuu

SEQ ID NO: 2250466 - RNA, 15 nt, Human
aacugccucuuuccu

SEQ ID NO: 2250467 - RNA, 17 nt, Human
aacugccuuggcuucag

SEQ ID NO: 2250468 - RNA, 16 nt, Human
aacugccuuggcuuca

SEQ ID NO: 2250469 - RNA, 20 nt, Human
aacugccucgaaacacagaa

SEQ ID NO: 2250470 - RNA, 13 nt, Human
aacugcaggcccu

SEQ ID NO: 2250471 - RNA, 20 nt, Human
aacugccuacuccaaaaugu

SEQ ID NO: 2250472 - RNA, 15 nt, Human
aacugcugacuguuu

SEQ ID NO: 2250473 - RNA, 23 nt, Human
aacugcugaaaacuagcucguga

SEQ ID NO: 2250474 - RNA, 16 nt, Human
aacugcguuaaaggcu

SEQ ID NO: 2250475 - RNA, 21 nt, Human
aacugcugacuguuuucucuu

SEQ ID NO: 2250476 - RNA, 20 nt, Human
aacugcugacuguuuucucu

SEQ ID NO: 2250477 - RNA, 14 nt, Human
aacugcugcuuuuu

SEQ ID NO: 2250478 - RNA, 20 nt, Human
aacugcugcuuuuugaggug

SEQ ID NO: 2250479 - RNA, 23 nt, Human
aacugcugacuguuuucucuuga

SEQ ID NO: 2250480 - RNA, 20 nt, Human
aacuggaagcauguaggaga

SEQ ID NO: 2250481 - RNA, 17 nt, Human
aacuggaauaguuuuuu

SEQ ID NO: 2250482 - RNA, 21 nt, Human
aacugcuuucuuucguuuguu

SEQ ID NO: 2250483 - RNA, 15 nt, Human
aacugcuuucuuucg

SEQ ID NO: 2250484 - RNA, 17 nt, Human
aacugcuuguuuccuag

SEQ ID NO: 2250485 - RNA, 22 nt, Human
aacuggacucaggaugcccagg

SEQ ID NO: 2250486 - RNA, 21 nt, Human
aacuggacucaggaugcccag

SEQ ID NO: 2250487 - RNA, 12 nt, Human
aacuggagcccc

SEQ ID NO: 2250488 - RNA, 17 nt, Human
aacuggcaguuuuccau

SEQ ID NO: 2250489 - RNA, 16 nt, Human
aacuggauuaaacuua

SEQ ID NO: 2250490 - RNA, 11 nt, Human
aacuggcugca

SEQ ID NO: 2250491 - RNA, 15 nt, Human
aacuggacucaggau

SEQ ID NO: 2250492 - RNA, 13 nt, Human
aacuggacucagg

SEQ ID NO: 2250493 - RNA, 22 nt, Human
aacuggacccuguugcuaagcc

SEQ ID NO: 2250494 - RNA, 20 nt, Human
aacuggacccuguugcuaag

SEQ ID NO: 2250495 - RNA, 21 nt, Human
aacuggacccuguugcuaagc

SEQ ID NO: 2250496 - RNA, 14 nt, Human
aacuggacccuguu

SEQ ID NO: 2250497 - RNA, 17 nt, Human
aacuggacccuguugcu

SEQ ID NO: 2250498 - RNA, 18 nt, Human
aacuggacccuguugcua

SEQ ID NO: 2250499 - RNA, 19 nt, Human
aacuggacccuguugcuaa

SEQ ID NO: 2250500 - RNA, 15 nt, Human
aacuggauuaaacuu

SEQ ID NO: 2250501 - RNA, 19 nt, Human
aacuggacugguucaaaug

SEQ ID NO: 2250502 - RNA, 16 nt, Human
aacuggguacuugugg

SEQ ID NO: 2250503 - RNA, 21 nt, Human
aacuggguacuuguggacaca

SEQ ID NO: 2250504 - RNA, 22 nt, Human
aacugggggagggugaagugaa

SEQ ID NO: 2250505 - RNA, 21 nt, Human
aacugggggagggugaaguga

SEQ ID NO: 2250506 - RNA, 17 nt, Human
aacuggccggucugcaa

SEQ ID NO: 2250507 - RNA, 21 nt, Human
aacuggccggucugcaaguca

SEQ ID NO: 2250508 - RNA, 23 nt, Human
aacuggccggucugcaagucaga

SEQ ID NO: 2250509 - RNA, 12 nt, Human
aacuggcugugu

SEQ ID NO: 2250510 - RNA, 17 nt, Human
aacugggacaggggaga

SEQ ID NO: 2250511 - RNA, 16 nt, Human
aacugggcugaacacu

SEQ ID NO: 2250512 - RNA, 14 nt, Human
aacugggcugaaca

SEQ ID NO: 2250513 - RNA, 13 nt, Human
aacugggaccuuu

SEQ ID NO: 2250514 - RNA, 13 nt, Human
gugccuccuucca

SEQ ID NO: 2250515 - RNA, 22 nt, Human
gugccucggcuuuucucagcug

SEQ ID NO: 2250516 - RNA, 22 nt, Human
gugccuccuuccaccucccucc

SEQ ID NO: 2250517 - RNA, 18 nt, Human
gugccuccuuccaccucc

SEQ ID NO: 2250518 - RNA, 21 nt, Human
gugccuccuuccaccucccuc

SEQ ID NO: 2250519 - RNA, 15 nt, Human
gugccuccaggugug

SEQ ID NO: 2250520 - RNA, 13 nt, Human
gugccuccaggug

SEQ ID NO: 2250521 - RNA, 23 nt, Human
gugccacugcccgagcuggugca

SEQ ID NO: 2250522 - RNA, 22 nt, Human
gugccacugcccgagcuggugc

SEQ ID NO: 2250523 - RNA, 21 nt, Human
gugccacugcccgagcuggug

SEQ ID NO: 2250524 - RNA, 20 nt, Human
gugccacugcccgagcuggu

SEQ ID NO: 2250525 - RNA, 19 nt, Human
gugccacugcccgagcugg

SEQ ID NO: 2250526 - RNA, 17 nt, Human
gugccugugaggcaggg

SEQ ID NO: 2250527 - RNA, 16 nt, Human
gugccugugaggcagg

SEQ ID NO: 2250528 - RNA, 15 nt, Human
gugccugugaggcag

SEQ ID NO: 2250529 - RNA, 20 nt, Human
gugccugucuguuacacugg

SEQ ID NO: 2250530 - RNA, 13 nt, Human
gugccugugucca

SEQ ID NO: 2250531 - RNA, 22 nt, Human
gugccuguguccaugcgcucag

SEQ ID NO: 2250532 - RNA, 23 nt, Human
gugccuggguggggcugcuccuc

SEQ ID NO: 2250533 - RNA, 22 nt, Human
gugccuggguggggcugcuccu

SEQ ID NO: 2250534 - RNA, 19 nt, Human
gugccuguaugcaacaggc

SEQ ID NO: 2250535 - RNA, 21 nt, Human
gugccuguaugcaacaggcac

SEQ ID NO: 2250536 - RNA, 15 nt, Human
gugccugucccaccc

SEQ ID NO: 2250537 - RNA, 20 nt, Human
gugccugucccacccccacc

SEQ ID NO: 2250538 - RNA, 12 nt, Human
gugccucugccu

SEQ ID NO: 2250539 - RNA, 21 nt, Human
gugccuggguggggcugcucc

SEQ ID NO: 2250540 - RNA, 20 nt, Human
gugccuggguggggcugcuc

SEQ ID NO: 2250541 - RNA, 18 nt, Human
gugccacugcccgagcug

SEQ ID NO: 2250542 - RNA, 17 nt, Human
gugccacugcccgagcu

SEQ ID NO: 2250543 - RNA, 22 nt, Human
gugccacccugggcucuguggg

SEQ ID NO: 2250544 - RNA, 22 nt, Human
gugccacucaccgaagccacuu

SEQ ID NO: 2250545 - RNA, 15 nt, Human
gugccacccugggcu

SEQ ID NO: 2250546 - RNA, 16 nt, Human
gugccacccugggcuc

SEQ ID NO: 2250547 - RNA, 20 nt, Human
gugccacccugggcucugug

SEQ ID NO: 2250548 - RNA, 21 nt, Human
gugccacccugggcucugugg

SEQ ID NO: 2250549 - RNA, 18 nt, Human
gugccacccaccagggcg

SEQ ID NO: 2250550 - RNA, 12 nt, Human
gugccacccugg

SEQ ID NO: 2250551 - RNA, 14 nt, Human
gugccacccugggc

SEQ ID NO: 2250552 - RNA, 11 nt, Human
gugccacccug

SEQ ID NO: 2250553 - RNA, 23 nt, Human
gugcauuacagagaggagaaaca

SEQ ID NO: 2250554 - RNA, 14 nt, Human
gugccaauuucaag

SEQ ID NO: 2250555 - RNA, 21 nt, Human
gugccaauuucaaguuccaag

SEQ ID NO: 2250556 - RNA, 23 nt, Human
gugcauuaucuagauacuguauc

SEQ ID NO: 2250557 - RNA, 16 nt, Human
gugcauuacagagagg

SEQ ID NO: 2250558 - RNA, 14 nt, Human
gugcauuacagaga

SEQ ID NO: 2250559 - RNA, 18 nt, Human
gugcaugugugugcucag

SEQ ID NO: 2250560 - RNA, 15 nt, Human
gugcaugugugugcu

SEQ ID NO: 2250561 - RNA, 14 nt, Human
gugcaugugugugc

SEQ ID NO: 2250562 - RNA, 13 nt, Human
gugcaugugugug

SEQ ID NO: 2250563 - RNA, 23 nt, Human
gugcauguaugucuuggacacug

SEQ ID NO: 2250564 - RNA, 19 nt, Human
gugcauguguguucaugca

SEQ ID NO: 2250565 - RNA, 19 nt, Human
gugcauuaucuagauacug

SEQ ID NO: 2250566 - RNA, 15 nt, Human
gugcauuaucuagau

SEQ ID NO: 2250567 - RNA, 13 nt, Human
gugcaacccaagg

SEQ ID NO: 2250568 - RNA, 14 nt, Human
gugcaacccuuacc

SEQ ID NO: 2250569 - RNA, 23 nt, Human
gugcaacccuuaccccuuagccu

SEQ ID NO: 2250570 - RNA, 23 nt, Human
gugcaaccucuuggccugaucag

SEQ ID NO: 2250571 - RNA, 14 nt, Human
gugaugguuccccu

SEQ ID NO: 2250572 - RNA, 16 nt, Human
gugaugguuccccugu

SEQ ID NO: 2250573 - RNA, 19 nt, Human
gugauggggcccugccucc

SEQ ID NO: 2250574 - RNA, 15 nt, Human
gugcaagccccugcu

SEQ ID NO: 2250575 - RNA, 22 nt, Human
gugcaagagacucuggccucca

SEQ ID NO: 2250576 - RNA, 20 nt, Human
gugcaaguaugugagugugu

SEQ ID NO: 2250577 - RNA, 12 nt, Human
gugcaagagagg

SEQ ID NO: 2250578 - RNA, 22 nt, Human
gugcaacccaaggacugaggga

SEQ ID NO: 2250579 - RNA, 18 nt, Human
gugcaagagacucuggcc

SEQ ID NO: 2250580 - RNA, 19 nt, Human
gugcaagagacucuggccu

SEQ ID NO: 2250581 - RNA, 20 nt, Human
gugcaagagacucuggccuc

SEQ ID NO: 2250582 - RNA, 18 nt, Human
gugcaagugucugugugc

SEQ ID NO: 2250583 - RNA, 17 nt, Human
gugcaagugucugugug

SEQ ID NO: 2250584 - RNA, 22 nt, Human
gugcaaguguaugcacgugugc

SEQ ID NO: 2250585 - RNA, 22 nt, Human
gugcaaugaccuuucaauagga

SEQ ID NO: 2250586 - RNA, 21 nt, Human
gugcaaugucugagugaaccu

SEQ ID NO: 2250587 - RNA, 15 nt, Human
gugcacaaauauuua

SEQ ID NO: 2250588 - RNA, 18 nt, Human
gugcacaaaacccagacc

SEQ ID NO: 2250589 - RNA, 21 nt, Human
gugcaauuuguuugugcuucu

SEQ ID NO: 2250590 - RNA, 23 nt, Human
gugcaauuuguuugugcuucuaa

SEQ ID NO: 2250591 - RNA, 22 nt, Human
gugcaauuguaggggugugugu

SEQ ID NO: 2250592 - RNA, 17 nt, Human
gugcaauuuguuugugc

SEQ ID NO: 2250593 - RNA, 20 nt, Human
gugcaauuuguuugugcuuc

SEQ ID NO: 2250594 - RNA, 20 nt, Human
gugcacagacgucccuccac

SEQ ID NO: 2250595 - RNA, 22 nt, Human
gugcacagacgucccuccacgu

SEQ ID NO: 2250596 - RNA, 21 nt, Human
gugcacacaccagagcccacc

SEQ ID NO: 2250597 - RNA, 18 nt, Human
gugcaugggugaagggag

SEQ ID NO: 2250598 - RNA, 13 nt, Human
gugcaugggugaa

SEQ ID NO: 2250599 - RNA, 16 nt, Human
gugcauguaugucuug

SEQ ID NO: 2250600 - RNA, 14 nt, Human
gugcaugguggcac

SEQ ID NO: 2250601 - RNA, 22 nt, Human
gugcaugcugucccuuacguga

SEQ ID NO: 2250602 - RNA, 13 nt, Human
gugcacagugauu

SEQ ID NO: 2250603 - RNA, 14 nt, Human
gugcacagugauuu

SEQ ID NO: 2250604 - RNA, 18 nt, Human
gugcacaucugugucuug

SEQ ID NO: 2250605 - RNA, 13 nt, Human
gugaugccucccu

SEQ ID NO: 2250606 - RNA, 22 nt, Human
gugaugcuaaagguuguauugc

SEQ ID NO: 2250607 - RNA, 12 nt, Human
gugaugcggcag

SEQ ID NO: 2250608 - RNA, 22 nt, Human
gugaugcgcaugucacggaggg

SEQ ID NO: 2250609 - RNA, 15 nt, Human
gugaugcugggcugg

SEQ ID NO: 2250610 - RNA, 13 nt, Human
gugaugcggcaga

SEQ ID NO: 2250611 - RNA, 16 nt, Human
gugaugcucaggcuug

SEQ ID NO: 2250612 - RNA, 17 nt, Human
gugaugggaaagcauug

SEQ ID NO: 2250613 - RNA, 14 nt, Human
gugauggggcccug

SEQ ID NO: 2250614 - RNA, 16 nt, Human
gugauggggcccugcc

SEQ ID NO: 2250615 - RNA, 17 nt, Human
gugauggggcccugccu

SEQ ID NO: 2250616 - RNA, 18 nt, Human
gugauggggcccugccuc

SEQ ID NO: 2250617 - RNA, 11 nt, Human
aacuucuucag

SEQ ID NO: 2250618 - RNA, 19 nt, Human
aacuucuucagagcugaca

SEQ ID NO: 2250619 - RNA, 14 nt, Human
gugaugagaggaaa

SEQ ID NO: 2250620 - RNA, 24 nt, Human
aacuucuuauggaauugauuugca

SEQ ID NO: 2250621 - RNA, 19 nt, Human
aacuucuuauggaauugau

SEQ ID NO: 2250622 - RNA, 17 nt, Human
aacuucuuauggaauug

SEQ ID NO: 2250623 - RNA, 16 nt, Human
aacuucuuauggaauu

SEQ ID NO: 2250624 - RNA, 13 nt, Human
aacuucugccugu

SEQ ID NO: 2250625 - RNA, 14 nt, Human
aacuucucucagac

SEQ ID NO: 2250626 - RNA, 15 nt, Human
aacuucucuggaaag

SEQ ID NO: 2250627 - RNA, 15 nt, Human
aacuucuuauggaau

SEQ ID NO: 2250628 - RNA, 19 nt, Human
gugaugccacacagagugg

SEQ ID NO: 2250629 - RNA, 15 nt, Human
gugaugccagguucu

SEQ ID NO: 2250630 - RNA, 18 nt, Human
gugaugccagguucuauu

SEQ ID NO: 2250631 - RNA, 23 nt, Human
gugaugccagguucuauuuggaa

SEQ ID NO: 2250632 - RNA, 17 nt, Human
gugaugccacacagagu

SEQ ID NO: 2250633 - RNA, 15 nt, Human
gugaugccacacaga

SEQ ID NO: 2250634 - RNA, 22 nt, Human
gugaugaucagcuguuugucau

SEQ ID NO: 2250635 - RNA, 15 nt, Human
gugaugaggggaggg

SEQ ID NO: 2250636 - RNA, 22 nt, Human
gugaugaagaaaagugggccag

SEQ ID NO: 2250637 - RNA, 14 nt, Human
gugaugaauacugu

SEQ ID NO: 2250638 - RNA, 22 nt, Human
gugaugacaacuggaauaguuu

SEQ ID NO: 2250639 - RNA, 16 nt, Human
gugaugagaggaaauc

SEQ ID NO: 2250640 - RNA, 13 nt, Human
aacuguacuucac

SEQ ID NO: 2250641 - RNA, 15 nt, Human
aacuguacuucacug

SEQ ID NO: 2250642 - RNA, 18 nt, Human
aacuguacuuuuaaggca

SEQ ID NO: 2250643 - RNA, 17 nt, Human
aacuguagaaaugauga

SEQ ID NO: 2250644 - RNA, 16 nt, Human
aacuguagaaaugaug

SEQ ID NO: 2250645 - RNA, 15 nt, Human
aacuguagaaaugau

SEQ ID NO: 2250646 - RNA, 14 nt, Human
aacuguagaaauga

SEQ ID NO: 2250647 - RNA, 14 nt, Human
aacuguaugucaga

SEQ ID NO: 2250648 - RNA, 21 nt, Human
aacugguuuguugcagccaaa

SEQ ID NO: 2250649 - RNA, 13 nt, Human
aacuguaaauaaa

SEQ ID NO: 2250650 - RNA, 22 nt, Human
aacugguauuuuaucuuugauu

SEQ ID NO: 2250651 - RNA, 19 nt, Human
aacuggucaccaugaaacu

SEQ ID NO: 2250652 - RNA, 13 nt, Human
aacugguauuuua

SEQ ID NO: 2250653 - RNA, 15 nt, Human
aacuggguuccugca

SEQ ID NO: 2250654 - RNA, 14 nt, Human
aacuggguuccugc

SEQ ID NO: 2250655 - RNA, 22 nt, Human
aacuucuccccugguagaaaga

SEQ ID NO: 2250656 - RNA, 22 nt, Human
aacuucccgucccauauccugc

SEQ ID NO: 2250657 - RNA, 23 nt, Human
aacuucccgucccauauccugcc

SEQ ID NO: 2250658 - RNA, 15 nt, Human
aacuuccugcaggua

SEQ ID NO: 2250659 - RNA, 23 nt, Human
aacuuccugcagguaaacaguuc

SEQ ID NO: 2250660 - RNA, 22 nt, Human
aacuuccagguguuacuguaau

SEQ ID NO: 2250661 - RNA, 18 nt, Human
aacuuccccaucuucuaa

SEQ ID NO: 2250662 - RNA, 17 nt, Human
aacuuccccaucuucua

SEQ ID NO: 2250663 - RNA, 19 nt, Human
aacuuccagguguuacugu

SEQ ID NO: 2250664 - RNA, 20 nt, Human
aacuucaugucaacuucugg

SEQ ID NO: 2250665 - RNA, 18 nt, Human
aacuucccagugaauucu

SEQ ID NO: 2250666 - RNA, 18 nt, Human
aacuuccagauccuggaa

SEQ ID NO: 2250667 - RNA, 14 nt, Human
aacuucauuugaug

SEQ ID NO: 2250668 - RNA, 12 nt, Human
aacuucauuuga

SEQ ID NO: 2250669 - RNA, 13 nt, Human
aacuuccaauuua

SEQ ID NO: 2250670 - RNA, 17 nt, Human
aacuucagcuguacuuc

SEQ ID NO: 2250671 - RNA, 19 nt, Human
aacuguagaaaugaugaug

SEQ ID NO: 2250672 - RNA, 14 nt, Human
aacuguauauauuc

SEQ ID NO: 2250673 - RNA, 21 nt, Human
aacuucaggauaauaaagugu

SEQ ID NO: 2250674 - RNA, 20 nt, Human
aacuucauauaugaggacuu

SEQ ID NO: 2250675 - RNA, 22 nt, Human
accucagguaaucgaccugccu

SEQ ID NO: 2250676 - RNA, 18 nt, Human
accucaggcuuccuuggc

SEQ ID NO: 2250677 - RNA, 18 nt, Human
accgugagcgacaaagau

SEQ ID NO: 2250678 - RNA, 14 nt, Human
accucaggccuggg

SEQ ID NO: 2250679 - RNA, 22 nt, Human
accucaggccugggggcugggc

SEQ ID NO: 2250680 - RNA, 16 nt, Human
accgugaggccagaga

SEQ ID NO: 2250681 - RNA, 17 nt, Human
accgugaggccagagac

SEQ ID NO: 2250682 - RNA, 12 nt, Human
accucaggccug

SEQ ID NO: 2250683 - RNA, 13 nt, Human
accucaggccugg

SEQ ID NO: 2250684 - RNA, 19 nt, Human
accucagugucauuuauga

SEQ ID NO: 2250685 - RNA, 14 nt, Human
accucaucaggaug

SEQ ID NO: 2250686 - RNA, 15 nt, Human
accucaucaggauga

SEQ ID NO: 2250687 - RNA, 18 nt, Human
accucaucaggaugaacc

SEQ ID NO: 2250688 - RNA, 15 nt, Human
accucaucuucuuca

SEQ ID NO: 2250689 - RNA, 20 nt, Human
accucaucaggaugaaccca

SEQ ID NO: 2250690 - RNA, 23 nt, Human
accucaguucccuuggccucaga

SEQ ID NO: 2250691 - RNA, 22 nt, Human
accucaguucccuuggccucag

SEQ ID NO: 2250692 - RNA, 17 nt, Human
accucaguuuuaucauu

SEQ ID NO: 2250693 - RNA, 18 nt, Human
accucaguuuuaucauuu

SEQ ID NO: 2250694 - RNA, 21 nt, Human
accucaguucccuuggccuca

SEQ ID NO: 2250695 - RNA, 20 nt, Human
accucaguucccuuggccuc

SEQ ID NO: 2250696 - RNA, 19 nt, Human
accucaguucccuuggccu

SEQ ID NO: 2250697 - RNA, 18 nt, Human
accucaguucccuuggcc

SEQ ID NO: 2250698 - RNA, 17 nt, Human
accucaguucccuuggc

SEQ ID NO: 2250699 - RNA, 16 nt, Human
accucaguucccuugg

SEQ ID NO: 2250700 - RNA, 21 nt, Human
accucagugucauuuaugaaa

SEQ ID NO: 2250701 - RNA, 16 nt, Human
accucagugucauuua

SEQ ID NO: 2250702 - RNA, 23 nt, Human
accucagugccuuccuguuuuuc

SEQ ID NO: 2250703 - RNA, 18 nt, Human
accucaggugagaagcag

SEQ ID NO: 2250704 - RNA, 19 nt, Human
accucaggcuuccuuggca

SEQ ID NO: 2250705 - RNA, 15 nt, Human
accucaggugaucca

SEQ ID NO: 2250706 - RNA, 23 nt, Human
accucagguaaucgaccugccuc

SEQ ID NO: 2250707 - RNA, 14 nt, Human
accccaaucccagc

SEQ ID NO: 2250708 - RNA, 17 nt, Human
accccaaggagggagau

SEQ ID NO: 2250709 - RNA, 16 nt, Human
accccacacacgccag

SEQ ID NO: 2250710 - RNA, 17 nt, Human
accccaauuccuuguag

SEQ ID NO: 2250711 - RNA, 15 nt, Human
accccaauuccuugu

SEQ ID NO: 2250712 - RNA, 22 nt, Human
acccugugauggggcccugccu

SEQ ID NO: 2250713 - RNA, 14 nt, Human
acccaugcugcccu

SEQ ID NO: 2250714 - RNA, 15 nt, Human
acccaugcugcccug

SEQ ID NO: 2250715 - RNA, 15 nt, Human
accccaacuccagua

SEQ ID NO: 2250716 - RNA, 17 nt, Human
accggcaauuuccggcc

SEQ ID NO: 2250717 - RNA, 16 nt, Human
accggauccugggugg

SEQ ID NO: 2250718 - RNA, 14 nt, Human
accggauccugggu

SEQ ID NO: 2250719 - RNA, 13 nt, Human
accggauccuggg

SEQ ID NO: 2250720 - RNA, 23 nt, Human
acccuuaucaccagcugccucuu

SEQ ID NO: 2250721 - RNA, 22 nt, Human
acccuuaccccuuagccucccu

SEQ ID NO: 2250722 - RNA, 19 nt, Human
acccuuaccccuuagccuc

SEQ ID NO: 2250723 - RNA, 18 nt, Human
acccuuaccccuuagccu

SEQ ID NO: 2250724 - RNA, 16 nt, Human
acccuguuuuauacug

SEQ ID NO: 2250725 - RNA, 19 nt, Human
acccuuacaguaggagccc

SEQ ID NO: 2250726 - RNA, 18 nt, Human
acccuuaccaugugccug

SEQ ID NO: 2250727 - RNA, 22 nt, Human
acccuuaccaugugccugaucc

SEQ ID NO: 2250728 - RNA, 13 nt, Human
acccuuacaguag

SEQ ID NO: 2250729 - RNA, 18 nt, Human
acccuuacagccucugac

SEQ ID NO: 2250730 - RNA, 19 nt, Human
acccuuacagccucugacu

SEQ ID NO: 2250731 - RNA, 19 nt, Human
acccugugcugguguccug

SEQ ID NO: 2250732 - RNA, 14 nt, Human
acccugugcuggug

SEQ ID NO: 2250733 - RNA, 15 nt, Human
acccugugcuggugu

SEQ ID NO: 2250734 - RNA, 23 nt, Human
acccugugcugguguccugacca

SEQ ID NO: 2250735 - RNA, 17 nt, Human
acccuguuaccauuuug

SEQ ID NO: 2250736 - RNA, 14 nt, Human
acccuguugcuaag

SEQ ID NO: 2250737 - RNA, 15 nt, Human
acccuguugcuaagc

SEQ ID NO: 2250738 - RNA, 14 nt, Human
acccuguuuccuga

SEQ ID NO: 2250739 - RNA, 15 nt, Human
acccuguuuccugag

SEQ ID NO: 2250740 - RNA, 12 nt, Human
acccuguugcua

SEQ ID NO: 2250741 - RNA, 18 nt, Human
accggcaauuuccggcca

SEQ ID NO: 2250742 - RNA, 14 nt, Human
accggauggcggac

SEQ ID NO: 2250743 - RNA, 20 nt, Human
accggcugcuuuucccuaag

SEQ ID NO: 2250744 - RNA, 14 nt, Human
accggcugcuuuuc

SEQ ID NO: 2250745 - RNA, 14 nt, Human
accggcuggccugg

SEQ ID NO: 2250746 - RNA, 15 nt, Human
accggcuggccuggc

SEQ ID NO: 2250747 - RNA, 20 nt, Human
accgggcacucagaagacac

SEQ ID NO: 2250748 - RNA, 19 nt, Human
accggcuggccuggccccu

SEQ ID NO: 2250749 - RNA, 17 nt, Human
accggcuggccuggccc

SEQ ID NO: 2250750 - RNA, 18 nt, Human
accggcuggccuggcccc

SEQ ID NO: 2250751 - RNA, 17 nt, Human
accguaauaauuauuau

SEQ ID NO: 2250752 - RNA, 22 nt, Human
accgucauggcuuaauguuuau

SEQ ID NO: 2250753 - RNA, 14 nt, Human
accgguggggcugg

SEQ ID NO: 2250754 - RNA, 23 nt, Human
accgucauggcuuaauguuuauu

SEQ ID NO: 2250755 - RNA, 14 nt, Human
accguccgcccugc

SEQ ID NO: 2250756 - RNA, 15 nt, Human
accguccgcccugcu

SEQ ID NO: 2250757 - RNA, 16 nt, Human
accguccgcccugcuc

SEQ ID NO: 2250758 - RNA, 12 nt, Human
accguccucacc

SEQ ID NO: 2250759 - RNA, 21 nt, Human
accguccucaccccuguccuc

SEQ ID NO: 2250760 - RNA, 13 nt, Human
accguccucaccc

SEQ ID NO: 2250761 - RNA, 15 nt, Human
accguccucaccccu

SEQ ID NO: 2250762 - RNA, 17 nt, Human
accguccucaccccugu

SEQ ID NO: 2250763 - RNA, 18 nt, Human
accguccucaccccuguc

SEQ ID NO: 2250764 - RNA, 14 nt, Human
accgugaggccaga

SEQ ID NO: 2250765 - RNA, 13 nt, Human
accgguacagaaa

SEQ ID NO: 2250766 - RNA, 15 nt, Human
accgggccacagaga

SEQ ID NO: 2250767 - RNA, 19 nt, Human
accgggccacagagaaagu

SEQ ID NO: 2250768 - RNA, 12 nt, Human
accucugccuca

SEQ ID NO: 2250769 - RNA, 17 nt, Human
accucugccucagaaaa

SEQ ID NO: 2250770 - RNA, 18 nt, Human
accucugccucagaaaac

SEQ ID NO: 2250771 - RNA, 21 nt, Human
accucuugagccuugaacuuu

SEQ ID NO: 2250772 - RNA, 20 nt, Human
accucuugagccuugaacuu

SEQ ID NO: 2250773 - RNA, 19 nt, Human
accucuugagccuugaacu

SEQ ID NO: 2250774 - RNA, 17 nt, Human
accucuugagccuugaa

SEQ ID NO: 2250775 - RNA, 15 nt, Human
accucugccucaaug

SEQ ID NO: 2250776 - RNA, 14 nt, Human
accucugccucaau

SEQ ID NO: 2250777 - RNA, 13 nt, Human
accucugccucaa

SEQ ID NO: 2250778 - RNA, 20 nt, Human
accucugccucagaaaacaa

SEQ ID NO: 2250779 - RNA, 11 nt, Human
accugccaggg

SEQ ID NO: 2250780 - RNA, 12 nt, Human
accugccaggga

SEQ ID NO: 2250781 - RNA, 13 nt, Human
accugccagggac

SEQ ID NO: 2250782 - RNA, 15 nt, Human
accugccauuugcac

SEQ ID NO: 2250783 - RNA, 21 nt, Human
accugccagggagacagagcu

SEQ ID NO: 2250784 - RNA, 18 nt, Human
accugccaggcaggggug

SEQ ID NO: 2250785 - RNA, 20 nt, Human
accugccaggcagggguggg

SEQ ID NO: 2250786 - RNA, 13 nt, Human
accugccagggag

SEQ ID NO: 2250787 - RNA, 18 nt, Human
accugccagggagacaga

SEQ ID NO: 2250788 - RNA, 18 nt, Human
accugccagggacagagg

SEQ ID NO: 2250789 - RNA, 15 nt, Human
accugccagggacag

SEQ ID NO: 2250790 - RNA, 16 nt, Human
accugccagggacaga

SEQ ID NO: 2250791 - RNA, 19 nt, Human
accugccauuugcacccuc

SEQ ID NO: 2250792 - RNA, 18 nt, Human
accugccauuugcacccu

SEQ ID NO: 2250793 - RNA, 23 nt, Human
accugccccuccucucugcccua

SEQ ID NO: 2250794 - RNA, 17 nt, Human
accugcccugcccccac

SEQ ID NO: 2250795 - RNA, 12 nt, Human
accugcccugcc

SEQ ID NO: 2250796 - RNA, 13 nt, Human
accugugaccagc

SEQ ID NO: 2250797 - RNA, 15 nt, Human
accugcccugccuga

SEQ ID NO: 2250798 - RNA, 16 nt, Human
accugcccugccugag

SEQ ID NO: 2250799 - RNA, 13 nt, Human
accugcccugccu

SEQ ID NO: 2250800 - RNA, 14 nt, Human
accugcccugccug

SEQ ID NO: 2250801 - RNA, 23 nt, Human
acuaacuagagcagcccuggagu

SEQ ID NO: 2250802 - RNA, 15 nt, Human
acuaacuaugcaugg

SEQ ID NO: 2250803 - RNA, 23 nt, Human
acuaacuaugcauggugccccag

SEQ ID NO: 2250804 - RNA, 15 nt, Human
acuaauagacaauuu

SEQ ID NO: 2250805 - RNA, 19 nt, Human
acuaauauuuuaugugaga

SEQ ID NO: 2250806 - RNA, 15 nt, Human
acuaauaugggcauu

SEQ ID NO: 2250807 - RNA, 22 nt, Human
acuaauaugggcauuguaguua

SEQ ID NO: 2250808 - RNA, 20 nt, Human
acuaacuccuaggaaaauac

SEQ ID NO: 2250809 - RNA, 15 nt, Human
acuaaccuggguucc

SEQ ID NO: 2250810 - RNA, 13 nt, Human
acuaaccugaccg

SEQ ID NO: 2250811 - RNA, 19 nt, Human
acguggcucagccagcacu

SEQ ID NO: 2250812 - RNA, 17 nt, Human
acguggcucagccagca

SEQ ID NO: 2250813 - RNA, 14 nt, Human
acguggcucugcug

SEQ ID NO: 2250814 - RNA, 15 nt, Human
acguggcucugcugg

SEQ ID NO: 2250815 - RNA, 18 nt, Human
acuaacguugagccccug

SEQ ID NO: 2250816 - RNA, 13 nt, Human
acuaacuaaacuc

SEQ ID NO: 2250817 - RNA, 14 nt, Human
acuaacuaaacucu

SEQ ID NO: 2250818 - RNA, 22 nt, Human
acuaacuaaacucucuuuggga

SEQ ID NO: 2250819 - RNA, 12 nt, Human
acuaacuagagc

SEQ ID NO: 2250820 - RNA, 13 nt, Human
acuaacuagagca

SEQ ID NO: 2250821 - RNA, 14 nt, Human
acguggagagggau

SEQ ID NO: 2250822 - RNA, 16 nt, Human
acguggagcucuuggc

SEQ ID NO: 2250823 - RNA, 15 nt, Human
acguggagagggaug

SEQ ID NO: 2250824 - RNA, 13 nt, Human
acguggagaggga

SEQ ID NO: 2250825 - RNA, 23 nt, Human
acgucugggagaaauugacagau

SEQ ID NO: 2250826 - RNA, 19 nt, Human
acgucugucuucacagcuc

SEQ ID NO: 2250827 - RNA, 15 nt, Human
acgucugucuucaca

SEQ ID NO: 2250828 - RNA, 14 nt, Human
acgucugucuucac

SEQ ID NO: 2250829 - RNA, 12 nt, Human
acguggagaggg

SEQ ID NO: 2250830 - RNA, 15 nt, Human
acguggcauguggcc

SEQ ID NO: 2250831 - RNA, 15 nt, Human
acguggcccagagaa

SEQ ID NO: 2250832 - RNA, 14 nt, Human
acguggcucagcca

SEQ ID NO: 2250833 - RNA, 16 nt, Human
acguggccucuugagc

SEQ ID NO: 2250834 - RNA, 21 nt, Human
acguggaggaaugcuccccca

SEQ ID NO: 2250835 - RNA, 13 nt, Human
acguggaggagca

SEQ ID NO: 2250836 - RNA, 17 nt, Human
acguggaggagcagugc

SEQ ID NO: 2250837 - RNA, 18 nt, Human
acguggaggagcagugca

SEQ ID NO: 2250838 - RNA, 13 nt, Human
acggagagcgccu

SEQ ID NO: 2250839 - RNA, 19 nt, Human
acggagagcgccugccccu

SEQ ID NO: 2250840 - RNA, 14 nt, Human
acggagauguuuca

SEQ ID NO: 2250841 - RNA, 18 nt, Human
acggagccacuccucuga

SEQ ID NO: 2250842 - RNA, 15 nt, Human
acgucugacaggcaa

SEQ ID NO: 2250843 - RNA, 20 nt, Human
acggagccacuccucugacu

SEQ ID NO: 2250844 - RNA, 19 nt, Human
acggagccacuccucugac

SEQ ID NO: 2250845 - RNA, 22 nt, Human
acgucugacccucuccacccca

SEQ ID NO: 2250846 - RNA, 16 nt, Human
acgucugacccucucc

SEQ ID NO: 2250847 - RNA, 17 nt, Human
acgucugggagaaauug

SEQ ID NO: 2250848 - RNA, 22 nt, Human
acgucugggagaaauugacaga

SEQ ID NO: 2250849 - RNA, 13 nt, Human
acgucugucuuca

SEQ ID NO: 2250850 - RNA, 16 nt, Human
acgucuguaagcugaa

SEQ ID NO: 2250851 - RNA, 23 nt, Human
acgucugacaggcaaugcuggcu

SEQ ID NO: 2250852 - RNA, 23 nt, Human
acgcugucccuaguaaaaauaca

SEQ ID NO: 2250853 - RNA, 11 nt, Human
acgcugucucc

SEQ ID NO: 2250854 - RNA, 21 nt, Human
acgcugguagagauggaggag

SEQ ID NO: 2250855 - RNA, 17 nt, Human
acgcugucuccagaccc

SEQ ID NO: 2250856 - RNA, 15 nt, Human
acgcugucuccagac

SEQ ID NO: 2250857 - RNA, 14 nt, Human
acgcugucuccaga

SEQ ID NO: 2250858 - RNA, 12 nt, Human
acgcugucucca

SEQ ID NO: 2250859 - RNA, 23 nt, Human
acgcugguagagauggaggagga

SEQ ID NO: 2250860 - RNA, 20 nt, Human
acgcugguagagauggagga

SEQ ID NO: 2250861 - RNA, 19 nt, Human
acgcugguagagauggagg

SEQ ID NO: 2250862 - RNA, 16 nt, Human
acggaagagccuugcg

SEQ ID NO: 2250863 - RNA, 15 nt, Human
acggaagagccuugc

SEQ ID NO: 2250864 - RNA, 13 nt, Human
acggaaguuuuca

SEQ ID NO: 2250865 - RNA, 14 nt, Human
acggaaguuuucaa

SEQ ID NO: 2250866 - RNA, 19 nt, Human
acggaaguuuucaaugaug

SEQ ID NO: 2250867 - RNA, 20 nt, Human
acggaaguuuucaaugaugg

SEQ ID NO: 2250868 - RNA, 15 nt, Human
acggaauaguuggcu

SEQ ID NO: 2250869 - RNA, 19 nt, Human
acggacacucaaaagcugg

SEQ ID NO: 2250870 - RNA, 16 nt, Human
acggacguuuccauca

SEQ ID NO: 2250871 - RNA, 19 nt, Human
acggacgaaccuugaaaac

SEQ ID NO: 2250872 - RNA, 20 nt, Human
acgcacgugggucuucaggg

SEQ ID NO: 2250873 - RNA, 16 nt, Human
acgcacgcacacacac

SEQ ID NO: 2250874 - RNA, 16 nt, Human
acgcacuccaugagca

SEQ ID NO: 2250875 - RNA, 17 nt, Human
acgcacuccaugagcac

SEQ ID NO: 2250876 - RNA, 21 nt, Human
acgcacuccaugagcacccca

SEQ ID NO: 2250877 - RNA, 17 nt, Human
acgcagaugauccauga

SEQ ID NO: 2250878 - RNA, 15 nt, Human
acgcagaugauccau

SEQ ID NO: 2250879 - RNA, 19 nt, Human
acgcagaugauccaugagu

SEQ ID NO: 2250880 - RNA, 14 nt, Human
acgcagcaggaggc

SEQ ID NO: 2250881 - RNA, 19 nt, Human
acgcuggagugcagugagc

SEQ ID NO: 2250882 - RNA, 21 nt, Human
acgcagcaggaggccaggccg

SEQ ID NO: 2250883 - RNA, 18 nt, Human
acgcuggagugcagugag

SEQ ID NO: 2250884 - RNA, 19 nt, Human
acgcacgugggucuucagg

SEQ ID NO: 2250885 - RNA, 11 nt, Human
acgcacgcaca

SEQ ID NO: 2250886 - RNA, 13 nt, Human
acgcacgcacaca

SEQ ID NO: 2250887 - RNA, 14 nt, Human
acgcacgcacacac

SEQ ID NO: 2250888 - RNA, 15 nt, Human
acgcacgcacacaca

SEQ ID NO: 2250889 - RNA, 17 nt, Human
acgcaccugccucagga

SEQ ID NO: 2250890 - RNA, 13 nt, Human
accugugucacua

SEQ ID NO: 2250891 - RNA, 16 nt, Human
accuguggugcaaaag

SEQ ID NO: 2250892 - RNA, 18 nt, Human
accuguggccaaguucuu

SEQ ID NO: 2250893 - RNA, 19 nt, Human
accuguggccaaguucuua

SEQ ID NO: 2250894 - RNA, 19 nt, Human
accugugaccagcacuguc

SEQ ID NO: 2250895 - RNA, 14 nt, Human
accugugaccagca

SEQ ID NO: 2250896 - RNA, 15 nt, Human
accugugagcccagc

SEQ ID NO: 2250897 - RNA, 18 nt, Human
accugugagcccagcugg

SEQ ID NO: 2250898 - RNA, 17 nt, Human
accugugagcccagcug

SEQ ID NO: 2250899 - RNA, 23 nt, Human
accuguggggauuucucccagcu

SEQ ID NO: 2250900 - RNA, 22 nt, Human
accuguggggauuucucccagc

SEQ ID NO: 2250901 - RNA, 21 nt, Human
accuguggggauuucucccag

SEQ ID NO: 2250902 - RNA, 20 nt, Human
accuguggggauuucuccca

SEQ ID NO: 2250903 - RNA, 19 nt, Human
accuguggggauuucuccc

SEQ ID NO: 2250904 - RNA, 23 nt, Human
accugugaccagcacugucucag

SEQ ID NO: 2250905 - RNA, 15 nt, Human
accuguggcucuaca

SEQ ID NO: 2250906 - RNA, 11 nt, Human
accugugucuc

SEQ ID NO: 2250907 - RNA, 13 nt, Human
acuauugcccagg

SEQ ID NO: 2250908 - RNA, 17 nt, Human
acuauugcuugcacaaa

SEQ ID NO: 2250909 - RNA, 18 nt, Human
acuauugaaguugcagau

SEQ ID NO: 2250910 - RNA, 19 nt, Human
acuauuggagggugggaga

SEQ ID NO: 2250911 - RNA, 13 nt, Human
acuauuggagggu

SEQ ID NO: 2250912 - RNA, 22 nt, Human
acuauuucccuugaaauuuuaa

SEQ ID NO: 2250913 - RNA, 16 nt, Human
acuauuguuagucucu

SEQ ID NO: 2250914 - RNA, 19 nt, Human
acuaguaguuccugcuaca

SEQ ID NO: 2250915 - RNA, 19 nt, Human
acuaguauuucuaugaaau

SEQ ID NO: 2250916 - RNA, 22 nt, Human
acuaggugcccagaaugaggcu

SEQ ID NO: 2250917 - RNA, 18 nt, Human
acuagguaacuucauauu

SEQ ID NO: 2250918 - RNA, 16 nt, Human
acuagggaucccucau

SEQ ID NO: 2250919 - RNA, 18 nt, Human
acuaguauuucuaugaaa

SEQ ID NO: 2250920 - RNA, 14 nt, Human
acuaggcucagaga

SEQ ID NO: 2250921 - RNA, 23 nt, Human
acuaggcccccacuugccucuuc

SEQ ID NO: 2250922 - RNA, 22 nt, Human
acuaggcccccacuugccucuu

SEQ ID NO: 2250923 - RNA, 17 nt, Human
acuagggagaagguuuc

SEQ ID NO: 2250924 - RNA, 17 nt, Human
acuagggaagauaauau

SEQ ID NO: 2250925 - RNA, 14 nt, Human
acuaaucuuucugc

SEQ ID NO: 2250926 - RNA, 22 nt, Human
acuaaucuauuggguucauuau

SEQ ID NO: 2250927 - RNA, 20 nt, Human
acuaaucuauuggguucauu

SEQ ID NO: 2250928 - RNA, 18 nt, Human
acuaaucuauuggguuca

SEQ ID NO: 2250929 - RNA, 19 nt, Human
acuaaucgaacuaugaacu

SEQ ID NO: 2250930 - RNA, 13 nt, Human
acuaaugauguuu

SEQ ID NO: 2250931 - RNA, 19 nt, Human
acuaaucugggaagggaag

SEQ ID NO: 2250932 - RNA, 16 nt, Human
acuugggaggcugagg

SEQ ID NO: 2250933 - RNA, 20 nt, Human
acuugggagaccuguaauca

SEQ ID NO: 2250934 - RNA, 13 nt, Human
acuugggaauaua

SEQ ID NO: 2250935 - RNA, 13 nt, Human
acuuggcuuucau

SEQ ID NO: 2250936 - RNA, 13 nt, Human
acuugggacauug

SEQ ID NO: 2250937 - RNA, 22 nt, Human
acuugggaggcugagaugggag

SEQ ID NO: 2250938 - RNA, 17 nt, Human
acuuucacauagauguc

SEQ ID NO: 2250939 - RNA, 15 nt, Human
acuuucacauagaug

SEQ ID NO: 2250940 - RNA, 15 nt, Human
acuuuauuaaauaca

SEQ ID NO: 2250941 - RNA, 12 nt, Human
acuuuauuaaau

SEQ ID NO: 2250942 - RNA, 23 nt, Human
acuuuaugccggaugugcuuuuc

SEQ ID NO: 2250943 - RNA, 16 nt, Human
acuuuauguguaaaua

SEQ ID NO: 2250944 - RNA, 21 nt, Human
acuuuauguguaaauacauaa

SEQ ID NO: 2250945 - RNA, 21 nt, Human
acuuucagguacuaaauaccu

SEQ ID NO: 2250946 - RNA, 18 nt, Human
acuuucagguacuaaaua

SEQ ID NO: 2250947 - RNA, 21 nt, Human
acuuucacauagaugucccuu

SEQ ID NO: 2250948 - RNA, 20 nt, Human
acuuucacauagaugucccu

SEQ ID NO: 2250949 - RNA, 22 nt, Human
acuuucaggccacauggcuaaa

SEQ ID NO: 2250950 - RNA, 15 nt, Human
acuuuauuuuguguu

SEQ ID NO: 2250951 - RNA, 13 nt, Human
acuuuauguguaa

SEQ ID NO: 2250952 - RNA, 17 nt, Human
acuuuaugcuaagugaa

SEQ ID NO: 2250953 - RNA, 12 nt, Human
acuuuaugcuaa

SEQ ID NO: 2250954 - RNA, 13 nt, Human
acuucugccucuu

SEQ ID NO: 2250955 - RNA, 12 nt, Human
acuucugccugg

SEQ ID NO: 2250956 - RNA, 13 nt, Human
acuucugccugga

SEQ ID NO: 2250957 - RNA, 14 nt, Human
acuucugcuuucca

SEQ ID NO: 2250958 - RNA, 16 nt, Human
acuucugcuuuccaca

SEQ ID NO: 2250959 - RNA, 19 nt, Human
acuucugcuuuccacaccu

SEQ ID NO: 2250960 - RNA, 12 nt, Human
acuucugccugu

SEQ ID NO: 2250961 - RNA, 16 nt, Human
acuucugccuggagac

SEQ ID NO: 2250962 - RNA, 23 nt, Human
acuucugugagacccccacaccu

SEQ ID NO: 2250963 - RNA, 20 nt, Human
acuucugugagacccccaca

SEQ ID NO: 2250964 - RNA, 19 nt, Human
acuucugugagacccccac

SEQ ID NO: 2250965 - RNA, 22 nt, Human
acuucugcuuuccacaccuggc

SEQ ID NO: 2250966 - RNA, 13 nt, Human
acuucuggcuccu

SEQ ID NO: 2250967 - RNA, 18 nt, Human
acuucuuauacauuugau

SEQ ID NO: 2250968 - RNA, 17 nt, Human
acuucuuauacauuuga

SEQ ID NO: 2250969 - RNA, 11 nt, Human
acuuggcuuuc

SEQ ID NO: 2250970 - RNA, 22 nt, Human
acuuggcucgaaucucugugcc

SEQ ID NO: 2250971 - RNA, 23 nt, Human
acuuggcucgaaucucugugccu

SEQ ID NO: 2250972 - RNA, 16 nt, Human
acuucuuaaaaguugu

SEQ ID NO: 2250973 - RNA, 19 nt, Human
acuuaaauaaaugucauua

SEQ ID NO: 2250974 - RNA, 19 nt, Human
acuucaacauuuacaugua

SEQ ID NO: 2250975 - RNA, 13 nt, Human
acuucaaggccca

SEQ ID NO: 2250976 - RNA, 20 nt, Human
acuucaaauccuugaagauu

SEQ ID NO: 2250977 - RNA, 17 nt, Human
acuucagcgguuuauau

SEQ ID NO: 2250978 - RNA, 18 nt, Human
acuucagcgguuuauaua

SEQ ID NO: 2250979 - RNA, 16 nt, Human
acuucacacacaggca

SEQ ID NO: 2250980 - RNA, 15 nt, Human
acuucaaugauagua

SEQ ID NO: 2250981 - RNA, 16 nt, Human
acuucaaguuaaagug

SEQ ID NO: 2250982 - RNA, 23 nt, Human
acuucaagugcaugcucucugca

SEQ ID NO: 2250983 - RNA, 22 nt, Human
acuucaagugcaugcucucugc

SEQ ID NO: 2250984 - RNA, 19 nt, Human
acuucagcgguuuauauaa

SEQ ID NO: 2250985 - RNA, 20 nt, Human
acuucugccauauucuguug

SEQ ID NO: 2250986 - RNA, 13 nt, Human
acuucagcucugu

SEQ ID NO: 2250987 - RNA, 11 nt, Human
acuuaaagauu

SEQ ID NO: 2250988 - RNA, 15 nt, Human
acuuaaagauuuauc

SEQ ID NO: 2250989 - RNA, 17 nt, Human
acuuaaaggcuguggua

SEQ ID NO: 2250990 - RNA, 13 nt, Human
acuuaaagauuua

SEQ ID NO: 2250991 - RNA, 13 nt, Human
acuuaaaauauuu

SEQ ID NO: 2250992 - RNA, 22 nt, Human
acuuaaaauauuccugcauuug

SEQ ID NO: 2250993 - RNA, 14 nt, Human
acuuaaauaaugug

SEQ ID NO: 2250994 - RNA, 19 nt, Human
acuucaaauccuugaagau

SEQ ID NO: 2250995 - RNA, 15 nt, Human
acuuaaaaaaugucc

SEQ ID NO: 2250996 - RNA, 16 nt, Human
acuuaaaaaaugucca

SEQ ID NO: 2250997 - RNA, 20 nt, Human
acuuaaaauauuccugcauu

SEQ ID NO: 2250998 - RNA, 21 nt, Human
acuuaaaaaugguuuaaaugg

SEQ ID NO: 2250999 - RNA, 14 nt, Human
acuuaaaaaugguu

SEQ ID NO: 2251000 - RNA, 13 nt, Human
acuuaaaaauggu

SEQ ID NO: 2251001 - RNA, 16 nt, Human
acuggaaguuuugcau

SEQ ID NO: 2251002 - RNA, 20 nt, Human
acuggaccacugggcaauga

SEQ ID NO: 2251003 - RNA, 16 nt, Human
acuggaccacugggca

SEQ ID NO: 2251004 - RNA, 15 nt, Human
acuggacccuguugc

SEQ ID NO: 2251005 - RNA, 21 nt, Human
acuggaccacugggcaaugau

SEQ ID NO: 2251006 - RNA, 15 nt, Human
acucuguuauuuaga

SEQ ID NO: 2251007 - RNA, 14 nt, Human
acucuuaagaagac

SEQ ID NO: 2251008 - RNA, 15 nt, Human
acucuuaagaagacu

SEQ ID NO: 2251009 - RNA, 17 nt, Human
acugaaguuaacagaga

SEQ ID NO: 2251010 - RNA, 16 nt, Human
acucuguuauuuagac

SEQ ID NO: 2251011 - RNA, 21 nt, Human
acugaaguuaacagagacaga

SEQ ID NO: 2251012 - RNA, 15 nt, Human
acugaaguuucacau

SEQ ID NO: 2251013 - RNA, 16 nt, Human
acugaaguuucacaug

SEQ ID NO: 2251014 - RNA, 20 nt, Human
acucuuaagaagacugcauu

SEQ ID NO: 2251015 - RNA, 19 nt, Human
acugaaguuucacaugagc

SEQ ID NO: 2251016 - RNA, 21 nt, Human
acucugugucagguggggcag

SEQ ID NO: 2251017 - RNA, 19 nt, Human
acucugugucagguggggc

SEQ ID NO: 2251018 - RNA, 17 nt, Human
acucugucucaguccau

SEQ ID NO: 2251019 - RNA, 15 nt, Human
acucugucucagucc

SEQ ID NO: 2251020 - RNA, 19 nt, Human
acucugucucaaaaaaaca

SEQ ID NO: 2251021 - RNA, 22 nt, Human
acucuagaugaaguuuuacauu

SEQ ID NO: 2251022 - RNA, 21 nt, Human
acucuagaugaaguuuuacau

SEQ ID NO: 2251023 - RNA, 21 nt, Human
acucuacuuagcaugucccua

SEQ ID NO: 2251024 - RNA, 21 nt, Human
acucuacuuaauccaaugggu

SEQ ID NO: 2251025 - RNA, 22 nt, Human
acucuaauucccauuuugcaaa

SEQ ID NO: 2251026 - RNA, 19 nt, Human
acucuacuuaauccaaugg

SEQ ID NO: 2251027 - RNA, 20 nt, Human
acucuacuuagcaugucccu

SEQ ID NO: 2251028 - RNA, 17 nt, Human
acuauuuuauuuucuaa

SEQ ID NO: 2251029 - RNA, 11 nt, Human
acuauuuuauu

SEQ ID NO: 2251030 - RNA, 13 nt, Human
acuauuuuacuuc

SEQ ID NO: 2251031 - RNA, 18 nt, Human
acuauuugucuuucagga

SEQ ID NO: 2251032 - RNA, 13 nt, Human
acuauuuuaugca

SEQ ID NO: 2251033 - RNA, 14 nt, Human
acuauuuuaugcaa

SEQ ID NO: 2251034 - RNA, 16 nt, Human
acuauuugucuuucag

SEQ ID NO: 2251035 - RNA, 21 nt, Human
acuauuucuuauauaugugaa

SEQ ID NO: 2251036 - RNA, 12 nt, Human
acuauuuccuuu

SEQ ID NO: 2251037 - RNA, 13 nt, Human
acuauuuccuuua

SEQ ID NO: 2251038 - RNA, 16 nt, Human
acuauuuccuuuauaa

SEQ ID NO: 2251039 - RNA, 15 nt, Human
acuauuuuaugcaaa

SEQ ID NO: 2251040 - RNA, 12 nt, Human
acuauuuuuacu

SEQ ID NO: 2251041 - RNA, 18 nt, Human
acuauuuuuauuuauauu

SEQ ID NO: 2251042 - RNA, 13 nt, Human
acuauuuuuacug

SEQ ID NO: 2251043 - RNA, 18 nt, Human
acuauuuuuacugccacu

SEQ ID NO: 2251044 - RNA, 21 nt, Human
acucuaauucccauuuugcaa

SEQ ID NO: 2251045 - RNA, 20 nt, Human
acucuaauucccauuuugca

SEQ ID NO: 2251046 - RNA, 21 nt, Human
acucuaauagugcuuaaaaau

SEQ ID NO: 2251047 - RNA, 14 nt, Human
acucuaauagugcu

SEQ ID NO: 2251048 - RNA, 22 nt, Human
acugaccaauauuguacaguuu

SEQ ID NO: 2251049 - RNA, 14 nt, Human
acugaccagaacua

SEQ ID NO: 2251050 - RNA, 12 nt, Human
acugaccagaac

SEQ ID NO: 2251051 - RNA, 20 nt, Human
acugaccaauauuguacagu

SEQ ID NO: 2251052 - RNA, 21 nt, Human
acugaccaauauuguacaguu

SEQ ID NO: 2251053 - RNA, 15 nt, Human
acugaccagccucca

SEQ ID NO: 2251054 - RNA, 20 nt, Human
acugaccagccuccaugcug

SEQ ID NO: 2251055 - RNA, 13 nt, Human
acugaccagccuc

SEQ ID NO: 2251056 - RNA, 22 nt, Human
acugacauuguuggccaaagcc

SEQ ID NO: 2251057 - RNA, 23 nt, Human
acugacauuguuggccaaagcca

SEQ ID NO: 2251058 - RNA, 18 nt, Human
acugaauauuuauauuuc

SEQ ID NO: 2251059 - RNA, 15 nt, Human
acugaauauuuauau

SEQ ID NO: 2251060 - RNA, 22 nt, Human
acugaauauuuauauuucacua

SEQ ID NO: 2251061 - RNA, 21 nt, Human
acugaauauuuauauuucacu

SEQ ID NO: 2251062 - RNA, 22 nt, Human
acugaaugaaacccccacacac

SEQ ID NO: 2251063 - RNA, 21 nt, Human
acugaaugaaacccccacaca

SEQ ID NO: 2251064 - RNA, 19 nt, Human
acugaaugaaacccccaca

SEQ ID NO: 2251065 - RNA, 16 nt, Human
acugaaugaaaccccc

SEQ ID NO: 2251066 - RNA, 22 nt, Human
acugaccauccacucuacccuc

SEQ ID NO: 2251067 - RNA, 16 nt, Human
acugaccauccacucu

SEQ ID NO: 2251068 - RNA, 23 nt, Human
acugaccagccuccaugcugccu

SEQ ID NO: 2251069 - RNA, 13 nt, Human
acugaucucucgu

SEQ ID NO: 2251070 - RNA, 15 nt, Human
acugaugcuuagaug

SEQ ID NO: 2251071 - RNA, 20 nt, Human
acugaugcugccccucaucu

SEQ ID NO: 2251072 - RNA, 19 nt, Human
acugaugcugccccucauc

SEQ ID NO: 2251073 - RNA, 15 nt, Human
acugaugcugccccu

SEQ ID NO: 2251074 - RNA, 14 nt, Human
acugaugcugcccc

SEQ ID NO: 2251075 - RNA, 12 nt, Human
acugaugcugcc

SEQ ID NO: 2251076 - RNA, 11 nt, Human
acugaugcugc

SEQ ID NO: 2251077 - RNA, 22 nt, Human
acugauggcuaauguacugcau

SEQ ID NO: 2251078 - RNA, 18 nt, Human
acugaugcuuuuagcuca

SEQ ID NO: 2251079 - RNA, 23 nt, Human
acugaccauccacucuacccucc

SEQ ID NO: 2251080 - RNA, 12 nt, Human
acugaugcuuuu

SEQ ID NO: 2251081 - RNA, 12 nt, Human
acugaugggcaa

SEQ ID NO: 2251082 - RNA, 22 nt, Human
acugaugggcaacccccagccu

SEQ ID NO: 2251083 - RNA, 15 nt, Human
acugcaaaggcgcag

SEQ ID NO: 2251084 - RNA, 20 nt, Human
acugauuucacaacagauca

SEQ ID NO: 2251085 - RNA, 23 nt, Human
acugauuuuuuuuuccuucagug

SEQ ID NO: 2251086 - RNA, 21 nt, Human
acugauuuuuuuuuccuucag

SEQ ID NO: 2251087 - RNA, 22 nt, Human
acugauuuuuuuuuccuucagu

SEQ ID NO: 2251088 - RNA, 13 nt, Human
acugauuguuuca

SEQ ID NO: 2251089 - RNA, 13 nt, Human
acugauuucacaa

SEQ ID NO: 2251090 - RNA, 17 nt, Human
acugauuucacaacaga

SEQ ID NO: 2251091 - RNA, 20 nt, Human
acugauucauaauaaauauc

SEQ ID NO: 2251092 - RNA, 15 nt, Human
acugcccggcagggu

SEQ ID NO: 2251093 - RNA, 23 nt, Human
acugccauaaaacauuaagaaaa

SEQ ID NO: 2251094 - RNA, 21 nt, Human
acugccauaaaacauuaagaa

SEQ ID NO: 2251095 - RNA, 22 nt, Human
acugccauaaaacauuaagaaa

SEQ ID NO: 2251096 - RNA, 19 nt, Human
acugccagucccccugccc

SEQ ID NO: 2251097 - RNA, 16 nt, Human
acugccagucucacug

SEQ ID NO: 2251098 - RNA, 13 nt, Human
acugccauaaaac

SEQ ID NO: 2251099 - RNA, 14 nt, Human
acugccauaaaaca

SEQ ID NO: 2251100 - RNA, 15 nt, Human
acugccauaaaacau

SEQ ID NO: 2251101 - RNA, 18 nt, Human
acugccagucccccugcc

SEQ ID NO: 2251102 - RNA, 18 nt, Human
acugccaggccagccucc

SEQ ID NO: 2251103 - RNA, 19 nt, Human
acugccaggccagccuccg

SEQ ID NO: 2251104 - RNA, 23 nt, Human
acugccaggccagccuccgagag

SEQ ID NO: 2251105 - RNA, 22 nt, Human
acugcccggggcagcugccaga

SEQ ID NO: 2251106 - RNA, 21 nt, Human
acugcccggggcagcugccag

SEQ ID NO: 2251107 - RNA, 20 nt, Human
acugcccuccagcucuuucc

SEQ ID NO: 2251108 - RNA, 20 nt, Human
acuggaagcuaauuugcauu

SEQ ID NO: 2251109 - RNA, 18 nt, Human
acuggaaggggaagggac

SEQ ID NO: 2251110 - RNA, 17 nt, Human
acuggaaguuuugcauu

SEQ ID NO: 2251111 - RNA, 13 nt, Human
acuggaaguuuug

SEQ ID NO: 2251112 - RNA, 23 nt, Human
acugcccuccagcucuuuccucc

SEQ ID NO: 2251113 - RNA, 18 nt, Human
acuggaagguggggacag

SEQ ID NO: 2251114 - RNA, 16 nt, Human
acugcuuuuggucugu

SEQ ID NO: 2251115 - RNA, 20 nt, Human
acugcuuuuggucuguguga

SEQ ID NO: 2251116 - RNA, 20 nt, Human
acugcccggggcagcugcca

SEQ ID NO: 2251117 - RNA, 17 nt, Human
acugcccggggcagcug

SEQ ID NO: 2251118 - RNA, 16 nt, Human
acugccaugcagggcc

SEQ ID NO: 2251119 - RNA, 22 nt, Human
acugcccgagcuggugcauuac

SEQ ID NO: 2251120 - RNA, 22 nt, Human
acugcccggcaggguccuagaa

SEQ ID NO: 2251121 - RNA, 14 nt, Human
acugcuuuuggucu

SEQ ID NO: 2251122 - RNA, 15 nt, Human
acugcuuuuggucug

SEQ ID NO: 2251123 - RNA, 22 nt, Human
acacugggagaggugccagcaa

SEQ ID NO: 2251124 - RNA, 20 nt, Human
acacugggagaaaugaaaaa

SEQ ID NO: 2251125 - RNA, 14 nt, Human
acacugggaaacag

SEQ ID NO: 2251126 - RNA, 13 nt, Human
acacugggacuug

SEQ ID NO: 2251127 - RNA, 19 nt, Human
acacugggacuugcaaaaa

SEQ ID NO: 2251128 - RNA, 18 nt, Human
acacugggacuugcaaaa

SEQ ID NO: 2251129 - RNA, 16 nt, Human
acacugggggagggga

SEQ ID NO: 2251130 - RNA, 20 nt, Human
acacuggggugccgccugcc

SEQ ID NO: 2251131 - RNA, 15 nt, Human
acacugggggagggg

SEQ ID NO: 2251132 - RNA, 23 nt, Human
acacugggagaggugccagcaac

SEQ ID NO: 2251133 - RNA, 17 nt, Human
acacugugcugagucug

SEQ ID NO: 2251134 - RNA, 22 nt, Human
acacugugcuuucuauuguaca

SEQ ID NO: 2251135 - RNA, 14 nt, Human
acacugugcuuucu

SEQ ID NO: 2251136 - RNA, 15 nt, Human
acacugugcuuucua

SEQ ID NO: 2251137 - RNA, 23 nt, Human
acacugugcuuucuauuguacag

SEQ ID NO: 2251138 - RNA, 22 nt, Human
acacugugcugagucugaaggc

SEQ ID NO: 2251139 - RNA, 16 nt, Human
acagaaccuuguuauu

SEQ ID NO: 2251140 - RNA, 17 nt, Human
acagaacaucauuagaa

SEQ ID NO: 2251141 - RNA, 17 nt, Human
acagaaccccuacauga

SEQ ID NO: 2251142 - RNA, 11 nt, Human
acacugugucc

SEQ ID NO: 2251143 - RNA, 13 nt, Human
acacuguguccug

SEQ ID NO: 2251144 - RNA, 18 nt, Human
acacuguguccuggugcu

SEQ ID NO: 2251145 - RNA, 19 nt, Human
acacuguguccuggugcuc

SEQ ID NO: 2251146 - RNA, 20 nt, Human
acacuguguccuggugcucu

SEQ ID NO: 2251147 - RNA, 21 nt, Human
acacuguguccuggugcucuc

SEQ ID NO: 2251148 - RNA, 22 nt, Human
acacuguguccuggugcucucu

SEQ ID NO: 2251149 - RNA, 18 nt, Human
acagaacucuuucaaaac

SEQ ID NO: 2251150 - RNA, 20 nt, Human
acagaacucuuucaaaaccu

SEQ ID NO: 2251151 - RNA, 22 nt, Human
acagaaccuuguuauuucucag

SEQ ID NO: 2251152 - RNA, 22 nt, Human
acagaacuaucucagcaucaga

SEQ ID NO: 2251153 - RNA, 19 nt, Human
acagaaccuuguuauuucu

SEQ ID NO: 2251154 - RNA, 17 nt, Human
acagaaccuuguuauuu

SEQ ID NO: 2251155 - RNA, 23 nt, Human
acagaaccuuguuauuucucaga

SEQ ID NO: 2251156 - RNA, 14 nt, Human
acagacacacgcac

SEQ ID NO: 2251157 - RNA, 23 nt, Human
acagacacacacacgcacgcaca

SEQ ID NO: 2251158 - RNA, 17 nt, Human
acagaggaagagcaggc

SEQ ID NO: 2251159 - RNA, 16 nt, Human
acagacacacacacgc

SEQ ID NO: 2251160 - RNA, 17 nt, Human
acagacacacacacgca

SEQ ID NO: 2251161 - RNA, 18 nt, Human
acagacacacacacgcac

SEQ ID NO: 2251162 - RNA, 22 nt, Human
acagacacacacacgcacgcac

SEQ ID NO: 2251163 - RNA, 18 nt, Human
acagaggaagagcaggca

SEQ ID NO: 2251164 - RNA, 23 nt, Human
acagaggacaguauuugugggga

SEQ ID NO: 2251165 - RNA, 13 nt, Human
acagaggcagccc

SEQ ID NO: 2251166 - RNA, 17 nt, Human
acagaggagagucccag

SEQ ID NO: 2251167 - RNA, 16 nt, Human
acagaggaugagcucu

SEQ ID NO: 2251168 - RNA, 17 nt, Human
acagaggccauggcaga

SEQ ID NO: 2251169 - RNA, 20 nt, Human
acagaggaugagcucuaccc

SEQ ID NO: 2251170 - RNA, 17 nt, Human
acagaggccaugggccu

SEQ ID NO: 2251171 - RNA, 21 nt, Human
acagaggccaugggccuccug

SEQ ID NO: 2251172 - RNA, 23 nt, Human
acagaggccaugggccuccugug

SEQ ID NO: 2251173 - RNA, 21 nt, Human
acagaagccucacugcaagca

SEQ ID NO: 2251174 - RNA, 21 nt, Human
acagaagcugaagugcaucca

SEQ ID NO: 2251175 - RNA, 13 nt, Human
acagaagcuucag

SEQ ID NO: 2251176 - RNA, 14 nt, Human
acagaagcuucaga

SEQ ID NO: 2251177 - RNA, 21 nt, Human
acagaagccaggagcaaaugu

SEQ ID NO: 2251178 - RNA, 13 nt, Human
acagaagcuucca

SEQ ID NO: 2251179 - RNA, 18 nt, Human
acagaagcuucagaaguu

SEQ ID NO: 2251180 - RNA, 19 nt, Human
acagaagcuucagaaguuu

SEQ ID NO: 2251181 - RNA, 16 nt, Human
acagaagcuccaggua

SEQ ID NO: 2251182 - RNA, 22 nt, Human
acagacaagguagcccuggcca

SEQ ID NO: 2251183 - RNA, 21 nt, Human
acagacaagguagcccuggcc

SEQ ID NO: 2251184 - RNA, 14 nt, Human
acagacaacagaag

SEQ ID NO: 2251185 - RNA, 16 nt, Human
acagaagucaugaagc

SEQ ID NO: 2251186 - RNA, 12 nt, Human
acagacacacac

SEQ ID NO: 2251187 - RNA, 13 nt, Human
acagacacacaca

SEQ ID NO: 2251188 - RNA, 14 nt, Human
acagacacacacac

SEQ ID NO: 2251189 - RNA, 11 nt, Human
acagacacaca

SEQ ID NO: 2251190 - RNA, 15 nt, Human
acagacacacacacg

SEQ ID NO: 2251191 - RNA, 14 nt, Human
acagacaaagcgug

SEQ ID NO: 2251192 - RNA, 14 nt, Human
acaauuuaaagcaa

SEQ ID NO: 2251193 - RNA, 20 nt, Human
acaauuuaaagcaaaggagu

SEQ ID NO: 2251194 - RNA, 13 nt, Human
acaauuuaaagca

SEQ ID NO: 2251195 - RNA, 15 nt, Human
acaauucuacauugu

SEQ ID NO: 2251196 - RNA, 23 nt, Human
acaauuccucuacuaacaaucag

SEQ ID NO: 2251197 - RNA, 16 nt, Human
acaauucccugcuguc

SEQ ID NO: 2251198 - RNA, 22 nt, Human
acaauuccucuacuaacaauca

SEQ ID NO: 2251199 - RNA, 18 nt, Human
acaauuccaaaggaaucu

SEQ ID NO: 2251200 - RNA, 14 nt, Human
acaauuccaaagga

SEQ ID NO: 2251201 - RNA, 15 nt, Human
acaauucccugcugu

SEQ ID NO: 2251202 - RNA, 21 nt, Human
acaauuauuuuuacaguucuc

SEQ ID NO: 2251203 - RNA, 14 nt, Human
acaauucaugaacu

SEQ ID NO: 2251204 - RNA, 15 nt, Human
acaauucaugaacuu

SEQ ID NO: 2251205 - RNA, 20 nt, Human
acaauucaugaacuucgcau

SEQ ID NO: 2251206 - RNA, 13 nt, Human
acaauuuauuaug

SEQ ID NO: 2251207 - RNA, 18 nt, Human
acaauuuaugaauugaau

SEQ ID NO: 2251208 - RNA, 20 nt, Human
acaauuuacaaaguguguau

SEQ ID NO: 2251209 - RNA, 23 nt, Human
acaauuuacaaaguguguauuaa

SEQ ID NO: 2251210 - RNA, 21 nt, Human
acaauuguuugggguugaaaa

SEQ ID NO: 2251211 - RNA, 13 nt, Human
acaauuuacaaag

SEQ ID NO: 2251212 - RNA, 17 nt, Human
acaauuuacaaagugug

SEQ ID NO: 2251213 - RNA, 19 nt, Human
acaauuuacaaagugugua

SEQ ID NO: 2251214 - RNA, 14 nt, Human
acaauuuauuaugg

SEQ ID NO: 2251215 - RNA, 18 nt, Human
acaauuauuuuuacaguu

SEQ ID NO: 2251216 - RNA, 18 nt, Human
acaauuauaucaguccuc

SEQ ID NO: 2251217 - RNA, 16 nt, Human
acaaggauugcuacug

SEQ ID NO: 2251218 - RNA, 20 nt, Human
acaaggaugaucuaggaaga

SEQ ID NO: 2251219 - RNA, 22 nt, Human
acaaggauagaugcuggcccag

SEQ ID NO: 2251220 - RNA, 19 nt, Human
acacagcucuucuccaggc

SEQ ID NO: 2251221 - RNA, 21 nt, Human
acaauuuuuuuaauuuuguau

SEQ ID NO: 2251222 - RNA, 19 nt, Human
acacaaaaguuucucuuuu

SEQ ID NO: 2251223 - RNA, 22 nt, Human
acaauuuuuuaucaugcauguc

SEQ ID NO: 2251224 - RNA, 16 nt, Human
acaauuuuuuaucaug

SEQ ID NO: 2251225 - RNA, 14 nt, Human
acaauuuuuuuaau

SEQ ID NO: 2251226 - RNA, 17 nt, Human
acaauuuuuuuaauuuu

SEQ ID NO: 2251227 - RNA, 18 nt, Human
acaauuuuuuuaauuuug

SEQ ID NO: 2251228 - RNA, 19 nt, Human
acaauuuuuuuaauuuugu

SEQ ID NO: 2251229 - RNA, 22 nt, Human
acacagcucuucuccaggcugu

SEQ ID NO: 2251230 - RNA, 14 nt, Human
acacauuuuuuaaa

SEQ ID NO: 2251231 - RNA, 20 nt, Human
acacagcucuucuccaggcu

SEQ ID NO: 2251232 - RNA, 21 nt, Human
acacagcucuucuccaggcug

SEQ ID NO: 2251233 - RNA, 20 nt, Human
acaccacuacauucuguuaa

SEQ ID NO: 2251234 - RNA, 17 nt, Human
acaccacuacauucugu

SEQ ID NO: 2251235 - RNA, 12 nt, Human
acacgaauauug

SEQ ID NO: 2251236 - RNA, 14 nt, Human
acacgaauauugcu

SEQ ID NO: 2251237 - RNA, 15 nt, Human
acaccacuacauucu

SEQ ID NO: 2251238 - RNA, 19 nt, Human
acacauuuuuuaaaugcac

SEQ ID NO: 2251239 - RNA, 18 nt, Human
acacauuuuuuaaaugca

SEQ ID NO: 2251240 - RNA, 16 nt, Human
acacauuuuuuaaaug

SEQ ID NO: 2251241 - RNA, 18 nt, Human
acacggaggcaucugcac

SEQ ID NO: 2251242 - RNA, 17 nt, Human
acacggaggcaucugca

SEQ ID NO: 2251243 - RNA, 14 nt, Human
acacggaggcaucu

SEQ ID NO: 2251244 - RNA, 14 nt, Human
acacggccacauca

SEQ ID NO: 2251245 - RNA, 12 nt, Human
acacggccacau

SEQ ID NO: 2251246 - RNA, 15 nt, Human
acacggaucugagaa

SEQ ID NO: 2251247 - RNA, 16 nt, Human
acacggaucugagaau

SEQ ID NO: 2251248 - RNA, 17 nt, Human
acacggaucugagaauc

SEQ ID NO: 2251249 - RNA, 19 nt, Human
acacggaucugagaaucuu

SEQ ID NO: 2251250 - RNA, 15 nt, Human
acacgaauauugcug

SEQ ID NO: 2251251 - RNA, 21 nt, Human
acacgaauauugcugauggug

SEQ ID NO: 2251252 - RNA, 16 nt, Human
acacguacuuaaauga

SEQ ID NO: 2251253 - RNA, 19 nt, Human
acacgguuugaagccugga

SEQ ID NO: 2251254 - RNA, 22 nt, Human
acacgguuugaagccuggaaca

SEQ ID NO: 2251255 - RNA, 19 nt, Human
acacguaccucucaucagu

SEQ ID NO: 2251256 - RNA, 20 nt, Human
acacguaaugaaacuuggau

SEQ ID NO: 2251257 - RNA, 23 nt, Human
acacgggggcagcugauacaaau

SEQ ID NO: 2251258 - RNA, 16 nt, Human
acacgggguauuuuag

SEQ ID NO: 2251259 - RNA, 17 nt, Human
acacgggguauuuuagg

SEQ ID NO: 2251260 - RNA, 20 nt, Human
acacggccacaucaaagagg

SEQ ID NO: 2251261 - RNA, 21 nt, Human
acacggaucugagaaucuuua

SEQ ID NO: 2251262 - RNA, 20 nt, Human
acacgggagccgcuggcaga

SEQ ID NO: 2251263 - RNA, 16 nt, Human
acacgggggcagcuga

SEQ ID NO: 2251264 - RNA, 13 nt, Human
acaaccugaaccu

SEQ ID NO: 2251265 - RNA, 15 nt, Human
acaaccucaacugcc

SEQ ID NO: 2251266 - RNA, 14 nt, Human
acaaccugaaccua

SEQ ID NO: 2251267 - RNA, 18 nt, Human
acaaccugaaccuaggag

SEQ ID NO: 2251268 - RNA, 22 nt, Human
acaaccgaugcuccagccaacc

SEQ ID NO: 2251269 - RNA, 20 nt, Human
acaaccgaugcuccagccaa

SEQ ID NO: 2251270 - RNA, 19 nt, Human
acaaccgaugcuccagcca

SEQ ID NO: 2251271 - RNA, 18 nt, Human
acaacccuguuuuauacu

SEQ ID NO: 2251272 - RNA, 16 nt, Human
acaaccucaacugccu

SEQ ID NO: 2251273 - RNA, 17 nt, Human
acaacccuguuuuauac

SEQ ID NO: 2251274 - RNA, 19 nt, Human
acaacccugcaaaggacug

SEQ ID NO: 2251275 - RNA, 14 nt, Human
acaacccugcaaag

SEQ ID NO: 2251276 - RNA, 13 nt, Human
acaaccguuggaa

SEQ ID NO: 2251277 - RNA, 22 nt, Human
acaaccugcuuggguggagaag

SEQ ID NO: 2251278 - RNA, 23 nt, Human
acaaccugcuuggguggagaagc

SEQ ID NO: 2251279 - RNA, 12 nt, Human
acaaccuggaga

SEQ ID NO: 2251280 - RNA, 21 nt, Human
acaaggaugaauuaaguuuuu

SEQ ID NO: 2251281 - RNA, 16 nt, Human
acaagaaaugaaagca

SEQ ID NO: 2251282 - RNA, 15 nt, Human
acaagaaaugaaagc

SEQ ID NO: 2251283 - RNA, 12 nt, Human
acaaagaaauua

SEQ ID NO: 2251284 - RNA, 13 nt, Human
acaaacuuuuaua

SEQ ID NO: 2251285 - RNA, 14 nt, Human
acaaagaaauuaug

SEQ ID NO: 2251286 - RNA, 16 nt, Human
acaaagaaauuaugug

SEQ ID NO: 2251287 - RNA, 13 nt, Human
acaaaaugaaacg

SEQ ID NO: 2251288 - RNA, 22 nt, Human
acaaaaugaaacgcaaccacca

SEQ ID NO: 2251289 - RNA, 18 nt, Human
aauuuugguuguauucuu

SEQ ID NO: 2251290 - RNA, 14 nt, Human
acaaaaucuguuua

SEQ ID NO: 2251291 - RNA, 21 nt, Human
acaaaaugacauuuugccaaa

SEQ ID NO: 2251292 - RNA, 15 nt, Human
aauuuucaaguaauu

SEQ ID NO: 2251293 - RNA, 12 nt, Human
aauuuuauuccu

SEQ ID NO: 2251294 - RNA, 19 nt, Human
aauuuucaaguaauuguga

SEQ ID NO: 2251295 - RNA, 19 nt, Human
aauuuucacacacgugaga

SEQ ID NO: 2251296 - RNA, 14 nt, Human
aauuuucacaugaa

SEQ ID NO: 2251297 - RNA, 16 nt, Human
aauuuucacaugaaca

SEQ ID NO: 2251298 - RNA, 17 nt, Human
aauuuucacaugaacau

SEQ ID NO: 2251299 - RNA, 17 nt, Human
aauuuucagaccccagc

SEQ ID NO: 2251300 - RNA, 21 nt, Human
aauuuucacaugaacauacug

SEQ ID NO: 2251301 - RNA, 18 nt, Human
aauuuucaucuaggauuu

SEQ ID NO: 2251302 - RNA, 17 nt, Human
aauuuuggccaaagugu

SEQ ID NO: 2251303 - RNA, 16 nt, Human
aauuuugaugaacaaa

SEQ ID NO: 2251304 - RNA, 20 nt, Human
aauuuucaguauaauuuaac

SEQ ID NO: 2251305 - RNA, 14 nt, Human
aauuuugaugaaca

SEQ ID NO: 2251306 - RNA, 14 nt, Human
aauuuugauguuuu

SEQ ID NO: 2251307 - RNA, 22 nt, Human
aauuuuggccaaaguguuaauc

SEQ ID NO: 2251308 - RNA, 15 nt, Human
aauuuugguuguauu

SEQ ID NO: 2251309 - RNA, 16 nt, Human
aauuuugguuguauuc

SEQ ID NO: 2251310 - RNA, 19 nt, Human
aauuuugguuguauucuuu

SEQ ID NO: 2251311 - RNA, 17 nt, Human
aauuuugugaagcaaaa

SEQ ID NO: 2251312 - RNA, 16 nt, Human
aauuuugugcccccau

SEQ ID NO: 2251313 - RNA, 18 nt, Human
aauuuugugaagcaaaau

SEQ ID NO: 2251314 - RNA, 15 nt, Human
aauugguucuuuauu

SEQ ID NO: 2251315 - RNA, 21 nt, Human
aauugguuggagaauuuaggu

SEQ ID NO: 2251316 - RNA, 18 nt, Human
aauugguaucaagaaagu

SEQ ID NO: 2251317 - RNA, 23 nt, Human
aauuggguggggggcuucauaca

SEQ ID NO: 2251318 - RNA, 22 nt, Human
aauuggguggggggcuucauac

SEQ ID NO: 2251319 - RNA, 21 nt, Human
aauuggguggggggcuucaua

SEQ ID NO: 2251320 - RNA, 18 nt, Human
aaugucaccaccuuccca

SEQ ID NO: 2251321 - RNA, 16 nt, Human
aaugucaccaccuucc

SEQ ID NO: 2251322 - RNA, 15 nt, Human
aaugucaccaccuuc

SEQ ID NO: 2251323 - RNA, 19 nt, Human
aauggucccauccaggcag

SEQ ID NO: 2251324 - RNA, 23 nt, Human
aaugucaccaccuucccagcucu

SEQ ID NO: 2251325 - RNA, 20 nt, Human
aaugucaccaccuucccagc

SEQ ID NO: 2251326 - RNA, 19 nt, Human
aaugucaccaccuucccag

SEQ ID NO: 2251327 - RNA, 16 nt, Human
aaugucacaggcaggu

SEQ ID NO: 2251328 - RNA, 19 nt, Human
aaugucacaggcaggucca

SEQ ID NO: 2251329 - RNA, 16 nt, Human
aauuguauuuuaguaa

SEQ ID NO: 2251330 - RNA, 23 nt, Human
aauuguaucuagugcagcugauu

SEQ ID NO: 2251331 - RNA, 20 nt, Human
aauuguaucuagugcagcug

SEQ ID NO: 2251332 - RNA, 12 nt, Human
aauuguauguua

SEQ ID NO: 2251333 - RNA, 22 nt, Human
aauuguauguuaaguuacuuca

SEQ ID NO: 2251334 - RNA, 13 nt, Human
aauuguaucuagu

SEQ ID NO: 2251335 - RNA, 22 nt, Human
aauuguaucguauagcuguauu

SEQ ID NO: 2251336 - RNA, 20 nt, Human
aauuguaucguauagcugua

SEQ ID NO: 2251337 - RNA, 21 nt, Human
aauuguaucguauagcuguau

SEQ ID NO: 2251338 - RNA, 24 nt, Human
aauuguaucauuugaacaacuagg

SEQ ID NO: 2251339 - RNA, 19 nt, Human
aauuguaucguauagcugu

SEQ ID NO: 2251340 - RNA, 18 nt, Human
aauuguaucauuugaaca

SEQ ID NO: 2251341 - RNA, 22 nt, Human
aauuguaucagaggccuauaau

SEQ ID NO: 2251342 - RNA, 17 nt, Human
aauuguaucagaggccu

SEQ ID NO: 2251343 - RNA, 20 nt, Human
aauuguaucagaggccuaua

SEQ ID NO: 2251344 - RNA, 21 nt, Human
aauuguaucagaggccuauaa

SEQ ID NO: 2251345 - RNA, 13 nt, Human
aauuguauauuca

SEQ ID NO: 2251346 - RNA, 14 nt, Human
aauuguauauucac

SEQ ID NO: 2251347 - RNA, 16 nt, Human
aauuguauauucacuu

SEQ ID NO: 2251348 - RNA, 17 nt, Human
aauuguauauucacuuu

SEQ ID NO: 2251349 - RNA, 17 nt, Human
aauuguaaaacugaggc

SEQ ID NO: 2251350 - RNA, 18 nt, Human
aauuguaaaauuguauag

SEQ ID NO: 2251351 - RNA, 21 nt, Human
aauuguaaaauuguauagaga

SEQ ID NO: 2251352 - RNA, 17 nt, Human
aauuguaaauugaauca

SEQ ID NO: 2251353 - RNA, 12 nt, Human
aauuguaaggaa

SEQ ID NO: 2251354 - RNA, 16 nt, Human
aauuguaaggaaugau

SEQ ID NO: 2251355 - RNA, 24 nt, Human
aauuguaaauugaaucaguauaaa

SEQ ID NO: 2251356 - RNA, 23 nt, Human
aauuguauagagauaugcagaag

SEQ ID NO: 2251357 - RNA, 12 nt, Human
aauuguauauuc

SEQ ID NO: 2251358 - RNA, 16 nt, Human
aauuguaacuguucuu

SEQ ID NO: 2251359 - RNA, 14 nt, Human
aauuguaacuguuc

SEQ ID NO: 2251360 - RNA, 21 nt, Human
aauuguggggaugaugaaaua

SEQ ID NO: 2251361 - RNA, 20 nt, Human
aauugugccgagaaaagcau

SEQ ID NO: 2251362 - RNA, 17 nt, Human
aauuuauuauggcacau

SEQ ID NO: 2251363 - RNA, 13 nt, Human
aauugugucugca

SEQ ID NO: 2251364 - RNA, 14 nt, Human
aauugugucugcag

SEQ ID NO: 2251365 - RNA, 16 nt, Human
aauugugggucuauuu

SEQ ID NO: 2251366 - RNA, 17 nt, Human
aauugugggucuauuuc

SEQ ID NO: 2251367 - RNA, 21 nt, Human
aauugugggucuauuucuagu

SEQ ID NO: 2251368 - RNA, 12 nt, Human
aauugugaaaaa

SEQ ID NO: 2251369 - RNA, 11 nt, Human
aauugugaugu

SEQ ID NO: 2251370 - RNA, 15 nt, Human
aauugugaugugucc

SEQ ID NO: 2251371 - RNA, 14 nt, Human
aauugugauguguc

SEQ ID NO: 2251372 - RNA, 13 nt, Human
aauuguccccagu

SEQ ID NO: 2251373 - RNA, 17 nt, Human
aauuguccguguucaua

SEQ ID NO: 2251374 - RNA, 18 nt, Human
aauugucccuuaaacaaa

SEQ ID NO: 2251375 - RNA, 16 nt, Human
aauugucccuuaaaca

SEQ ID NO: 2251376 - RNA, 11 nt, Human
aauugucccuu

SEQ ID NO: 2251377 - RNA, 14 nt, Human
aauuuauucaagaa

SEQ ID NO: 2251378 - RNA, 16 nt, Human
aauuuauuauuguucu

SEQ ID NO: 2251379 - RNA, 12 nt, Human
aauuuauucaau

SEQ ID NO: 2251380 - RNA, 16 nt, Human
aauuuauuauugaaau

SEQ ID NO: 2251381 - RNA, 17 nt, Human
aauuuauuauugaaauu

SEQ ID NO: 2251382 - RNA, 18 nt, Human
aauuuauuauugaaauug

SEQ ID NO: 2251383 - RNA, 21 nt, Human
aauuuauucaauuccucuggg

SEQ ID NO: 2251384 - RNA, 22 nt, Human
aauuuauuuauuaagauggauu

SEQ ID NO: 2251385 - RNA, 16 nt, Human
aauuuauuuauuaaga

SEQ ID NO: 2251386 - RNA, 16 nt, Human
aauuuauugcuugaua

SEQ ID NO: 2251387 - RNA, 17 nt, Human
aauuuauuuauuaagau

SEQ ID NO: 2251388 - RNA, 16 nt, Human
aauuuauuuccuaguu

SEQ ID NO: 2251389 - RNA, 19 nt, Human
aauuuauuuccuaguucug

SEQ ID NO: 2251390 - RNA, 22 nt, Human
aauuuauuuccuaguucuguag

SEQ ID NO: 2251391 - RNA, 20 nt, Human
aauuuauuuauacuauuuag

SEQ ID NO: 2251392 - RNA, 17 nt, Human
aauuuauuuauacuauu

SEQ ID NO: 2251393 - RNA, 20 nt, Human
aauuuauuuaugggauccug

SEQ ID NO: 2251394 - RNA, 23 nt, Human
aauuucagacucccauuccugaa

SEQ ID NO: 2251395 - RNA, 13 nt, Human
aauuucagacucc

SEQ ID NO: 2251396 - RNA, 20 nt, Human
aauuucaccuguaaaccuga

SEQ ID NO: 2251397 - RNA, 19 nt, Human
aauuucaccuguaaaccug

SEQ ID NO: 2251398 - RNA, 22 nt, Human
aauuucagguuuuguaaagaug

SEQ ID NO: 2251399 - RNA, 20 nt, Human
aauuucagguuuuguaaaga

SEQ ID NO: 2251400 - RNA, 15 nt, Human
aauuuauuuuugcau

SEQ ID NO: 2251401 - RNA, 12 nt, Human
aauuuauuuugu

SEQ ID NO: 2251402 - RNA, 17 nt, Human
aauuuauuuugucgaau

SEQ ID NO: 2251403 - RNA, 21 nt, Human
aauuuauuuugucgaauuuuu

SEQ ID NO: 2251404 - RNA, 12 nt, Human
aauuucaaaaug

SEQ ID NO: 2251405 - RNA, 19 nt, Human
aauuucaaaaauauaacuu

SEQ ID NO: 2251406 - RNA, 20 nt, Human
aauuuauuuuugcauggcac

SEQ ID NO: 2251407 - RNA, 15 nt, Human
aauuucaaaaauaua

SEQ ID NO: 2251408 - RNA, 16 nt, Human
aauuucaaaaauauaa

SEQ ID NO: 2251409 - RNA, 17 nt, Human
aauuucaaaaauauaac

SEQ ID NO: 2251410 - RNA, 14 nt, Human
aauuucacauuaau

SEQ ID NO: 2251411 - RNA, 16 nt, Human
aauuucaccuguaaac

SEQ ID NO: 2251412 - RNA, 16 nt, Human
aauuucaaaaugcuuu

SEQ ID NO: 2251413 - RNA, 21 nt, Human
aauuucgccguugaagaggaa

SEQ ID NO: 2251414 - RNA, 18 nt, Human
aauuucgccguugaagag

SEQ ID NO: 2251415 - RNA, 18 nt, Human
aauuuccuggugugaagg

SEQ ID NO: 2251416 - RNA, 22 nt, Human
aauuuccuggugugaagguccu

SEQ ID NO: 2251417 - RNA, 20 nt, Human
aauuuccuguuggauuuguu

SEQ ID NO: 2251418 - RNA, 21 nt, Human
aauuuccuguuggauuuguuu

SEQ ID NO: 2251419 - RNA, 16 nt, Human
aauuuccuuuauauuu

SEQ ID NO: 2251420 - RNA, 21 nt, Human
aauuuccuuuauauuuaguga

SEQ ID NO: 2251421 - RNA, 20 nt, Human
acccaugaugagcuccucuu

SEQ ID NO: 2251422 - RNA, 19 nt, Human
acccaucagaaggagaagg

SEQ ID NO: 2251423 - RNA, 17 nt, Human
acccauccccgcagugu

SEQ ID NO: 2251424 - RNA, 18 nt, Human
acccaugaugagcuccuc

SEQ ID NO: 2251425 - RNA, 13 nt, Human
acccaugcugccc

SEQ ID NO: 2251426 - RNA, 23 nt, Human
acccauauccuuacccuccuugg

SEQ ID NO: 2251427 - RNA, 14 nt, Human
acccauauccccuc

SEQ ID NO: 2251428 - RNA, 15 nt, Human
acccauauccccucu

SEQ ID NO: 2251429 - RNA, 19 nt, Human
acccauauccccucucccc

SEQ ID NO: 2251430 - RNA, 20 nt, Human
acccauauccccucuccccc

SEQ ID NO: 2251431 - RNA, 15 nt, Human
acccaucaacaaaaa

SEQ ID NO: 2251432 - RNA, 18 nt, Human
acccaucagaaggagaag

SEQ ID NO: 2251433 - RNA, 14 nt, Human
acccaucagaagga

SEQ ID NO: 2251434 - RNA, 18 nt, Human
acccaucacgccugugca

SEQ ID NO: 2251435 - RNA, 21 nt, Human
acccauauccccucucccccc

SEQ ID NO: 2251436 - RNA, 16 nt, Human
acccauagcuuccaug

SEQ ID NO: 2251437 - RNA, 11 nt, Human
acccauauccc

SEQ ID NO: 2251438 - RNA, 15 nt, Human
acccauagcuuccau

SEQ ID NO: 2251439 - RNA, 15 nt, Human
acccacccuccuuuc

SEQ ID NO: 2251440 - RNA, 20 nt, Human
acccaccgccacaauaaaga

SEQ ID NO: 2251441 - RNA, 15 nt, Human
acccaccgcccuugc

SEQ ID NO: 2251442 - RNA, 14 nt, Human
acccaccccugugc

SEQ ID NO: 2251443 - RNA, 15 nt, Human
acccaccccugugcu

SEQ ID NO: 2251444 - RNA, 16 nt, Human
acccaccccugugcuc

SEQ ID NO: 2251445 - RNA, 17 nt, Human
acccaccccugugcucc

SEQ ID NO: 2251446 - RNA, 15 nt, Human
acccaccaccaugcc

SEQ ID NO: 2251447 - RNA, 15 nt, Human
acccacccccaccca

SEQ ID NO: 2251448 - RNA, 16 nt, Human
acccacccagcaccca

SEQ ID NO: 2251449 - RNA, 12 nt, Human
acccaccccugu

SEQ ID NO: 2251450 - RNA, 13 nt, Human
acccaccccugug

SEQ ID NO: 2251451 - RNA, 17 nt, Human
acccacccccacccaag

SEQ ID NO: 2251452 - RNA, 18 nt, Human
acccacaggcccacagua

SEQ ID NO: 2251453 - RNA, 20 nt, Human
accaugaagagauuuuucau

SEQ ID NO: 2251454 - RNA, 13 nt, Human
acccacagggcua

SEQ ID NO: 2251455 - RNA, 15 nt, Human
acccacaugugacac

SEQ ID NO: 2251456 - RNA, 16 nt, Human
acccacaugugacaca

SEQ ID NO: 2251457 - RNA, 15 nt, Human
accaugaaacaaagc

SEQ ID NO: 2251458 - RNA, 21 nt, Human
accaucuuuuccucauuuuca

SEQ ID NO: 2251459 - RNA, 14 nt, Human
accaugaaacaaag

SEQ ID NO: 2251460 - RNA, 19 nt, Human
accaugaagagauuuuuca

SEQ ID NO: 2251461 - RNA, 14 nt, Human
accaugaagacagg

SEQ ID NO: 2251462 - RNA, 15 nt, Human
accaugaagacagga

SEQ ID NO: 2251463 - RNA, 18 nt, Human
accaugaacagaaaacau

SEQ ID NO: 2251464 - RNA, 23 nt, Human
accaugaacagaaaacauucuga

SEQ ID NO: 2251465 - RNA, 23 nt, Human
accauccacucuacccucccacc

SEQ ID NO: 2251466 - RNA, 22 nt, Human
accauccacucuacccucccac

SEQ ID NO: 2251467 - RNA, 23 nt, Human
accaucauugaaaucuuuuugcu

SEQ ID NO: 2251468 - RNA, 19 nt, Human
accaucauuggaaaugaaa

SEQ ID NO: 2251469 - RNA, 14 nt, Human
accaucucuuuacc

SEQ ID NO: 2251470 - RNA, 12 nt, Human
accaucauugaa

SEQ ID NO: 2251471 - RNA, 23 nt, Human
accaucagaaacacccucacacu

SEQ ID NO: 2251472 - RNA, 14 nt, Human
accaucagggacag

SEQ ID NO: 2251473 - RNA, 15 nt, Human
accaucagggacagg

SEQ ID NO: 2251474 - RNA, 15 nt, Human
accaucauugaaauc

SEQ ID NO: 2251475 - RNA, 20 nt, Human
accaucagaaacacccucac

SEQ ID NO: 2251476 - RNA, 15 nt, Human
accaucaagccacca

SEQ ID NO: 2251477 - RNA, 20 nt, Human
accauaguaccauuuauaca

SEQ ID NO: 2251478 - RNA, 17 nt, Human
accauaggucaccuuua

SEQ ID NO: 2251479 - RNA, 15 nt, Human
accauacugagggac

SEQ ID NO: 2251480 - RNA, 21 nt, Human
accauacuaauuauacccccu

SEQ ID NO: 2251481 - RNA, 14 nt, Human
accaucaagccacc

SEQ ID NO: 2251482 - RNA, 23 nt, Human
accauaguaccauuuauacaaau

SEQ ID NO: 2251483 - RNA, 21 nt, Human
accauaguaccauuuauacaa

SEQ ID NO: 2251484 - RNA, 16 nt, Human
accauacuaauuauac

SEQ ID NO: 2251485 - RNA, 13 nt, Human
accauacuaauua

SEQ ID NO: 2251486 - RNA, 16 nt, Human
acauuuacauguauua

SEQ ID NO: 2251487 - RNA, 21 nt, Human
acauuuacauguauuauuuca

SEQ ID NO: 2251488 - RNA, 14 nt, Human
acauuuacauguau

SEQ ID NO: 2251489 - RNA, 18 nt, Human
acauuuauaauguuugcu

SEQ ID NO: 2251490 - RNA, 22 nt, Human
acauuuaucaaucaguauaauu

SEQ ID NO: 2251491 - RNA, 20 nt, Human
acauuuauaauguuugcuau

SEQ ID NO: 2251492 - RNA, 15 nt, Human
acauuuauaauguuu

SEQ ID NO: 2251493 - RNA, 21 nt, Human
acauuuagagaacuguggccg

SEQ ID NO: 2251494 - RNA, 15 nt, Human
acauuucccugugcu

SEQ ID NO: 2251495 - RNA, 23 nt, Human
acauuuaucaaucaguauaauuc

SEQ ID NO: 2251496 - RNA, 14 nt, Human
acauuuaugauuua

SEQ ID NO: 2251497 - RNA, 15 nt, Human
acauuuaugauuuaa

SEQ ID NO: 2251498 - RNA, 17 nt, Human
acauuuaugauuuaaua

SEQ ID NO: 2251499 - RNA, 16 nt, Human
acauuuccuaaauaua

SEQ ID NO: 2251500 - RNA, 17 nt, Human
acauuuccuaaauauau

SEQ ID NO: 2251501 - RNA, 12 nt, Human
acaugugaaacc

SEQ ID NO: 2251502 - RNA, 23 nt, Human
acaugucuuuucuugcaugaggc

SEQ ID NO: 2251503 - RNA, 19 nt, Human
acaugccucucucaggcca

SEQ ID NO: 2251504 - RNA, 14 nt, Human
acaugugacacaua

SEQ ID NO: 2251505 - RNA, 23 nt, Human
acaugugaaaccuuuuuuaagau

SEQ ID NO: 2251506 - RNA, 12 nt, Human
acaugugacaca

SEQ ID NO: 2251507 - RNA, 20 nt, Human
acaugugaaaccuuuuuuaa

SEQ ID NO: 2251508 - RNA, 21 nt, Human
acaugugaaaccuuuuuuaag

SEQ ID NO: 2251509 - RNA, 13 nt, Human
acaugugaaaccu

SEQ ID NO: 2251510 - RNA, 14 nt, Human
acaugugaaaccuu

SEQ ID NO: 2251511 - RNA, 15 nt, Human
acaugugaaaccuuu

SEQ ID NO: 2251512 - RNA, 17 nt, Human
acaugugaaaccuuuuu

SEQ ID NO: 2251513 - RNA, 17 nt, Human
accaaggagaugaagca

SEQ ID NO: 2251514 - RNA, 16 nt, Human
accaaggcaaggcagg

SEQ ID NO: 2251515 - RNA, 17 nt, Human
accaaggcaaggcaggu

SEQ ID NO: 2251516 - RNA, 18 nt, Human
accaaggaccccucaccu

SEQ ID NO: 2251517 - RNA, 16 nt, Human
accaaggaccccucac

SEQ ID NO: 2251518 - RNA, 19 nt, Human
accaaggcugauuaaacca

SEQ ID NO: 2251519 - RNA, 16 nt, Human
accaagacucugaaau

SEQ ID NO: 2251520 - RNA, 20 nt, Human
accaagaagccuuuccugua

SEQ ID NO: 2251521 - RNA, 24 nt, Human
accaagaagccuuuccuguagccu

SEQ ID NO: 2251522 - RNA, 20 nt, Human
accaagagagaaagaaguag

SEQ ID NO: 2251523 - RNA, 15 nt, Human
accaagagagaaaga

SEQ ID NO: 2251524 - RNA, 13 nt, Human
accaagagagaaa

SEQ ID NO: 2251525 - RNA, 19 nt, Human
accaacuuucuguaaacuc

SEQ ID NO: 2251526 - RNA, 22 nt, Human
acauuucuccuuugauaaaaua

SEQ ID NO: 2251527 - RNA, 18 nt, Human
accaacuuucuguaaacu

SEQ ID NO: 2251528 - RNA, 23 nt, Human
acauuucucuaagagaacaaugu

SEQ ID NO: 2251529 - RNA, 16 nt, Human
accaagaagaugucuu

SEQ ID NO: 2251530 - RNA, 19 nt, Human
accaagaagccuuuccugu

SEQ ID NO: 2251531 - RNA, 11 nt, Human
accaagaagau

SEQ ID NO: 2251532 - RNA, 14 nt, Human
accaagaaagcagg

SEQ ID NO: 2251533 - RNA, 22 nt, Human
acauuuaugauuuaauaaaaua

SEQ ID NO: 2251534 - RNA, 19 nt, Human
acauuuaugauuuaauaaa

SEQ ID NO: 2251535 - RNA, 20 nt, Human
acauuuaugauuuaauaaaa

SEQ ID NO: 2251536 - RNA, 12 nt, Human
acauuucucaau

SEQ ID NO: 2251537 - RNA, 21 nt, Human
accacccuagucccuuccccu

SEQ ID NO: 2251538 - RNA, 20 nt, Human
accacccuagucccuucccc

SEQ ID NO: 2251539 - RNA, 15 nt, Human
accaccccuuccugu

SEQ ID NO: 2251540 - RNA, 13 nt, Human
accaccccugccu

SEQ ID NO: 2251541 - RNA, 14 nt, Human
accaccccugccuc

SEQ ID NO: 2251542 - RNA, 15 nt, Human
accaccccugccucc

SEQ ID NO: 2251543 - RNA, 19 nt, Human
accaccccugccuccaccc

SEQ ID NO: 2251544 - RNA, 20 nt, Human
accaccccugccuccacccu

SEQ ID NO: 2251545 - RNA, 22 nt, Human
accaccccugccuccacccucu

SEQ ID NO: 2251546 - RNA, 14 nt, Human
accaccccuuccug

SEQ ID NO: 2251547 - RNA, 20 nt, Human
accaaggcugauuaaaccaa

SEQ ID NO: 2251548 - RNA, 22 nt, Human
accaccccgccugcccucaugg

SEQ ID NO: 2251549 - RNA, 18 nt, Human
accaaggcaaggcaggug

SEQ ID NO: 2251550 - RNA, 19 nt, Human
accaaggcaaggcaggugc

SEQ ID NO: 2251551 - RNA, 20 nt, Human
accaaggcaaggcaggugcc

SEQ ID NO: 2251552 - RNA, 19 nt, Human
accaccuucccagcucucc

SEQ ID NO: 2251553 - RNA, 17 nt, Human
accaccuucccagcucu

SEQ ID NO: 2251554 - RNA, 16 nt, Human
accaccuucccagcuc

SEQ ID NO: 2251555 - RNA, 15 nt, Human
accaccuucccagcu

SEQ ID NO: 2251556 - RNA, 21 nt, Human
accaccuucccagcucucccu

SEQ ID NO: 2251557 - RNA, 20 nt, Human
accaccuucccagcucuccc

SEQ ID NO: 2251558 - RNA, 14 nt, Human
accaccuuucagau

SEQ ID NO: 2251559 - RNA, 14 nt, Human
accaccuucccagc

SEQ ID NO: 2251560 - RNA, 13 nt, Human
accaccuucccag

SEQ ID NO: 2251561 - RNA, 12 nt, Human
accaccugccca

SEQ ID NO: 2251562 - RNA, 23 nt, Human
accacccuccccucucuugcacc

SEQ ID NO: 2251563 - RNA, 18 nt, Human
accacccuccccucucuu

SEQ ID NO: 2251564 - RNA, 21 nt, Human
accacccuccccucucuugca

SEQ ID NO: 2251565 - RNA, 11 nt, Human
accacccuccc

SEQ ID NO: 2251566 - RNA, 13 nt, Human
accacccuccccu

SEQ ID NO: 2251567 - RNA, 14 nt, Human
accacccuccccuc

SEQ ID NO: 2251568 - RNA, 15 nt, Human
accacccuccccucu

SEQ ID NO: 2251569 - RNA, 16 nt, Human
accacccuccccucuc

SEQ ID NO: 2251570 - RNA, 17 nt, Human
accacccuccccucucu

SEQ ID NO: 2251571 - RNA, 16 nt, Human
accacgauguggcccu

SEQ ID NO: 2251572 - RNA, 17 nt, Human
accaccuuuuauuacau

SEQ ID NO: 2251573 - RNA, 22 nt, Human
accaccuucccagcucucccuc

SEQ ID NO: 2251574 - RNA, 14 nt, Human
accagcagaaaugc

SEQ ID NO: 2251575 - RNA, 12 nt, Human
accagcagagca

SEQ ID NO: 2251576 - RNA, 13 nt, Human
accagcagagcac

SEQ ID NO: 2251577 - RNA, 16 nt, Human
accagccccagugccc

SEQ ID NO: 2251578 - RNA, 17 nt, Human
accagccccagugccca

SEQ ID NO: 2251579 - RNA, 15 nt, Human
accagcagaucccag

SEQ ID NO: 2251580 - RNA, 19 nt, Human
accacgauguggcccuggc

SEQ ID NO: 2251581 - RNA, 18 nt, Human
accacgauguggcccugg

SEQ ID NO: 2251582 - RNA, 17 nt, Human
accacgauguggcccug

SEQ ID NO: 2251583 - RNA, 21 nt, Human
accagcagaucccagcucacg

SEQ ID NO: 2251584 - RNA, 19 nt, Human
accagcagaucccagcuca

SEQ ID NO: 2251585 - RNA, 18 nt, Human
accagccccagugcccac

SEQ ID NO: 2251586 - RNA, 19 nt, Human
accagccccagugcccaca

SEQ ID NO: 2251587 - RNA, 20 nt, Human
accagccccagugcccacag

SEQ ID NO: 2251588 - RNA, 11 nt, Human
accagccccug

SEQ ID NO: 2251589 - RNA, 12 nt, Human
accagccccugc

SEQ ID NO: 2251590 - RNA, 15 nt, Human
accagccccugcccc

SEQ ID NO: 2251591 - RNA, 16 nt, Human
accagcccggccugcu

SEQ ID NO: 2251592 - RNA, 21 nt, Human
accagcccggccugcucccag

SEQ ID NO: 2251593 - RNA, 16 nt, Human
accagccccugcccca

SEQ ID NO: 2251594 - RNA, 18 nt, Human
accagccccugccccagc

SEQ ID NO: 2251595 - RNA, 14 nt, Human
accagcccggccug

SEQ ID NO: 2251596 - RNA, 15 nt, Human
accagcccggccugc

SEQ ID NO: 2251597 - RNA, 12 nt, Human
acauaauuuuuu

SEQ ID NO: 2251598 - RNA, 18 nt, Human
acauaauuuuuuauucaa

SEQ ID NO: 2251599 - RNA, 21 nt, Human
acauaauuuuuuuuuuuuaac

SEQ ID NO: 2251600 - RNA, 20 nt, Human
acauaauucaggaagcagcu

SEQ ID NO: 2251601 - RNA, 22 nt, Human
acaucagcuggucaaacaaacu

SEQ ID NO: 2251602 - RNA, 22 nt, Human
acauacaauuauuuuuacaguu

SEQ ID NO: 2251603 - RNA, 16 nt, Human
acauacaauuauuuuu

SEQ ID NO: 2251604 - RNA, 23 nt, Human
acaucaguggcauggcuccaguc

SEQ ID NO: 2251605 - RNA, 22 nt, Human
acaucaguggcauggcuccagu

SEQ ID NO: 2251606 - RNA, 20 nt, Human
acaucaguggcauggcucca

SEQ ID NO: 2251607 - RNA, 14 nt, Human
acaucaggaguuca

SEQ ID NO: 2251608 - RNA, 20 nt, Human
acauaauuaaaguguccauu

SEQ ID NO: 2251609 - RNA, 15 nt, Human
acauaaguaauucaa

SEQ ID NO: 2251610 - RNA, 19 nt, Human
acauaauuaaauuuugagu

SEQ ID NO: 2251611 - RNA, 22 nt, Human
acauaagcggcguaaguuuaaa

SEQ ID NO: 2251612 - RNA, 15 nt, Human
acauaagauaaaugu

SEQ ID NO: 2251613 - RNA, 14 nt, Human
acauaagcucagaa

SEQ ID NO: 2251614 - RNA, 16 nt, Human
acauaagauaaaugug

SEQ ID NO: 2251615 - RNA, 14 nt, Human
acaugccaagcacu

SEQ ID NO: 2251616 - RNA, 18 nt, Human
acaugccaagcacugugc

SEQ ID NO: 2251617 - RNA, 14 nt, Human
acaugccacaagga

SEQ ID NO: 2251618 - RNA, 17 nt, Human
acaugcaaggucauuuu

SEQ ID NO: 2251619 - RNA, 18 nt, Human
acaugcaaggucauuuuu

SEQ ID NO: 2251620 - RNA, 23 nt, Human
acaugauuuccuugaauguggcu

SEQ ID NO: 2251621 - RNA, 15 nt, Human
acaugccucucucag

SEQ ID NO: 2251622 - RNA, 16 nt, Human
acaugccucucucagg

SEQ ID NO: 2251623 - RNA, 17 nt, Human
acaugccucucucaggc

SEQ ID NO: 2251624 - RNA, 18 nt, Human
acaugccucucucaggcc

SEQ ID NO: 2251625 - RNA, 17 nt, Human
acauccuccguccagcc

SEQ ID NO: 2251626 - RNA, 14 nt, Human
acauccuccgucca

SEQ ID NO: 2251627 - RNA, 13 nt, Human
acauccuccuccc

SEQ ID NO: 2251628 - RNA, 15 nt, Human
acauccuccucccac

SEQ ID NO: 2251629 - RNA, 21 nt, Human
acauccuccacguucugcuca

SEQ ID NO: 2251630 - RNA, 15 nt, Human
acauccuacaagaca

SEQ ID NO: 2251631 - RNA, 16 nt, Human
acaugcaaggucauuu

SEQ ID NO: 2251632 - RNA, 21 nt, Human
acaugauuuccuugaaugugg

SEQ ID NO: 2251633 - RNA, 13 nt, Human
acauccucuucug

SEQ ID NO: 2251634 - RNA, 15 nt, Human
acauccucuucugcu

SEQ ID NO: 2251635 - RNA, 20 nt, Human
acaucccuuaccugggaaag

SEQ ID NO: 2251636 - RNA, 20 nt, Human
acaucaguuacucugaaggg

SEQ ID NO: 2251637 - RNA, 15 nt, Human
acaucaguuuuaacg

SEQ ID NO: 2251638 - RNA, 19 nt, Human
acaucaucaaggcacugcc

SEQ ID NO: 2251639 - RNA, 18 nt, Human
acaucaguuacucugaag

SEQ ID NO: 2251640 - RNA, 15 nt, Human
acaucaguuacucug

SEQ ID NO: 2251641 - RNA, 20 nt, Human
acaucaucaaggcacugccu

SEQ ID NO: 2251642 - RNA, 21 nt, Human
acagggcugauaagcuaacac

SEQ ID NO: 2251643 - RNA, 13 nt, Human
acagggcuggccc

SEQ ID NO: 2251644 - RNA, 14 nt, Human
acagggcuggccca

SEQ ID NO: 2251645 - RNA, 15 nt, Human
acagggcuggcccag

SEQ ID NO: 2251646 - RNA, 16 nt, Human
acagggcuggcccagc

SEQ ID NO: 2251647 - RNA, 17 nt, Human
acagggcuggcccagcc

SEQ ID NO: 2251648 - RNA, 18 nt, Human
acagggcuggcccagccc

SEQ ID NO: 2251649 - RNA, 19 nt, Human
acagggcuggcccagcccu

SEQ ID NO: 2251650 - RNA, 20 nt, Human
acagggcuggcccagcccug

SEQ ID NO: 2251651 - RNA, 21 nt, Human
acagggcuggcccagcccugc

SEQ ID NO: 2251652 - RNA, 22 nt, Human
acagggcuggcccagcccugcu

SEQ ID NO: 2251653 - RNA, 23 nt, Human
acagggcuggcccagcccugcug

SEQ ID NO: 2251654 - RNA, 24 nt, Human
acagggcuggcccagcccugcugg

SEQ ID NO: 2251655 - RNA, 18 nt, Human
acagguggacacacaagg

SEQ ID NO: 2251656 - RNA, 16 nt, Human
acagguggacacacaa

SEQ ID NO: 2251657 - RNA, 15 nt, Human
acagguggcaggacc

SEQ ID NO: 2251658 - RNA, 16 nt, Human
acagguggcaggacca

SEQ ID NO: 2251659 - RNA, 19 nt, Human
acagguggcaggaccagga

SEQ ID NO: 2251660 - RNA, 20 nt, Human
acagguggcaggaccaggac

SEQ ID NO: 2251661 - RNA, 19 nt, Human
acaggucuccucuuaaaaa

SEQ ID NO: 2251662 - RNA, 16 nt, Human
acaggucuucaucgaa

SEQ ID NO: 2251663 - RNA, 21 nt, Human
acaggucuuuccuaaggcugc

SEQ ID NO: 2251664 - RNA, 14 nt, Human
acaggcaaugcugg

SEQ ID NO: 2251665 - RNA, 19 nt, Human
acaggcaagcaccuccugc

SEQ ID NO: 2251666 - RNA, 22 nt, Human
acagggcuaagagcuagcgcug

SEQ ID NO: 2251667 - RNA, 21 nt, Human
acagggccuuuggcaggugca

SEQ ID NO: 2251668 - RNA, 18 nt, Human
acagguuacaacagauuu

SEQ ID NO: 2251669 - RNA, 23 nt, Human
acagugagcuuggaaaggaccag

SEQ ID NO: 2251670 - RNA, 17 nt, Human
acagugaggugcccagc

SEQ ID NO: 2251671 - RNA, 22 nt, Human
acagugagucgaggacagggag

SEQ ID NO: 2251672 - RNA, 14 nt, Human
acagguguuuauac

SEQ ID NO: 2251673 - RNA, 12 nt, Human
acagguuacaac

SEQ ID NO: 2251674 - RNA, 13 nt, Human
acagguuacaaca

SEQ ID NO: 2251675 - RNA, 14 nt, Human
acagguuacaacag

SEQ ID NO: 2251676 - RNA, 15 nt, Human
acagguuacaacaga

SEQ ID NO: 2251677 - RNA, 17 nt, Human
acagugagccugaauuu

SEQ ID NO: 2251678 - RNA, 16 nt, Human
acagguuacaacagau

SEQ ID NO: 2251679 - RNA, 17 nt, Human
acagguuacaacagauu

SEQ ID NO: 2251680 - RNA, 21 nt, Human
acagugagccugaauuuuguu

SEQ ID NO: 2251681 - RNA, 18 nt, Human
acagugagccugaauuuu

SEQ ID NO: 2251682 - RNA, 19 nt, Human
acaggugugaaccaccaca

SEQ ID NO: 2251683 - RNA, 22 nt, Human
acaggugugagucaccaagccc

SEQ ID NO: 2251684 - RNA, 23 nt, Human
acaggugugagucaccaagccca

SEQ ID NO: 2251685 - RNA, 22 nt, Human
acaggugggcuucccaguggcu

SEQ ID NO: 2251686 - RNA, 21 nt, Human
acagguggcaggaccaggacu

SEQ ID NO: 2251687 - RNA, 20 nt, Human
acaggugggcuucccagugg

SEQ ID NO: 2251688 - RNA, 16 nt, Human
acagcugaggucucuu

SEQ ID NO: 2251689 - RNA, 15 nt, Human
acagcugcagagaca

SEQ ID NO: 2251690 - RNA, 17 nt, Human
acagcugcagagacaga

SEQ ID NO: 2251691 - RNA, 21 nt, Human
acagcugcagagacagagagg

SEQ ID NO: 2251692 - RNA, 22 nt, Human
acagcugaggucucuugaggga

SEQ ID NO: 2251693 - RNA, 20 nt, Human
acagaggagggcgugacuca

SEQ ID NO: 2251694 - RNA, 13 nt, Human
acagcucuguccu

SEQ ID NO: 2251695 - RNA, 16 nt, Human
acagcucuguccuggg

SEQ ID NO: 2251696 - RNA, 17 nt, Human
acagcucuguccuggga

SEQ ID NO: 2251697 - RNA, 16 nt, Human
acagcugccugcagua

SEQ ID NO: 2251698 - RNA, 13 nt, Human
acagcugccuggg

SEQ ID NO: 2251699 - RNA, 12 nt, Human
acagcugccugc

SEQ ID NO: 2251700 - RNA, 20 nt, Human
acaggcaagcaccuccugcc

SEQ ID NO: 2251701 - RNA, 23 nt, Human
acaggcaagcaccuccugccucg

SEQ ID NO: 2251702 - RNA, 15 nt, Human
acagcuccuucuguc

SEQ ID NO: 2251703 - RNA, 19 nt, Human
acagaggggguggccuccc

SEQ ID NO: 2251704 - RNA, 17 nt, Human
acagaggggguggccuc

SEQ ID NO: 2251705 - RNA, 18 nt, Human
acagaggggguggccucc

SEQ ID NO: 2251706 - RNA, 16 nt, Human
acagcuccuucugucc

SEQ ID NO: 2251707 - RNA, 18 nt, Human
acagcuccuucuguccua

SEQ ID NO: 2251708 - RNA, 23 nt, Human
acagcuccuucuguccuacucug

SEQ ID NO: 2251709 - RNA, 14 nt, Human
acagcucuguccug

SEQ ID NO: 2251710 - RNA, 24 nt, Human
acagugucuguaucggagacagug

SEQ ID NO: 2251711 - RNA, 23 nt, Human
acagugucuguaucggagacagu

SEQ ID NO: 2251712 - RNA, 15 nt, Human
acagugucugggcug

SEQ ID NO: 2251713 - RNA, 16 nt, Human
acagugucugggcuga

SEQ ID NO: 2251714 - RNA, 19 nt, Human
acagugucugggcugacug

SEQ ID NO: 2251715 - RNA, 21 nt, Human
acagugucugggcugacuggg

SEQ ID NO: 2251716 - RNA, 18 nt, Human
acaguguacagucuugua

SEQ ID NO: 2251717 - RNA, 22 nt, Human
acagugguuuuauacugaagga

SEQ ID NO: 2251718 - RNA, 23 nt, Human
acagugguggcagggccuagcug

SEQ ID NO: 2251719 - RNA, 20 nt, Human
acagugguuuuauacugaag

SEQ ID NO: 2251720 - RNA, 15 nt, Human
acaguguacagucuu

SEQ ID NO: 2251721 - RNA, 17 nt, Human
acaguguacagucuugu

SEQ ID NO: 2251722 - RNA, 12 nt, Human
acaguguacagu

SEQ ID NO: 2251723 - RNA, 13 nt, Human
acaguguacaguc

SEQ ID NO: 2251724 - RNA, 18 nt, Human
acagugguuuuauacuga

SEQ ID NO: 2251725 - RNA, 16 nt, Human
acagugguggcagggc

SEQ ID NO: 2251726 - RNA, 17 nt, Human
acagugguggcagggcc

SEQ ID NO: 2251727 - RNA, 15 nt, Human
acaguggguggugga

SEQ ID NO: 2251728 - RNA, 13 nt, Human
acagugguggcag

SEQ ID NO: 2251729 - RNA, 15 nt, Human
acagugguggcaggg

SEQ ID NO: 2251730 - RNA, 21 nt, Human
acagugggugccccccuugcc

SEQ ID NO: 2251731 - RNA, 14 nt, Human
acagugggugcccc

SEQ ID NO: 2251732 - RNA, 21 nt, Human
acagugcauauuccuuucuau

SEQ ID NO: 2251733 - RNA, 10 nt, Human
acagugauuu

SEQ ID NO: 2251734 - RNA, 13 nt, Human
acagugauuuuuu

SEQ ID NO: 2251735 - RNA, 20 nt, Human
acagugcauauuccuuucua

SEQ ID NO: 2251736 - RNA, 21 nt, Human
acagugauuaccagggacuga

SEQ ID NO: 2251737 - RNA, 23 nt, Human
acagugagucgaggacagggagg

SEQ ID NO: 2251738 - RNA, 20 nt, Human
acagugauuaccagggacug

SEQ ID NO: 2251739 - RNA, 20 nt, Human
aaggcaaagcacgaaauguu

SEQ ID NO: 2251740 - RNA, 20 nt, Human
aaggcaaacccaucaacaaa

SEQ ID NO: 2251741 - RNA, 15 nt, Human
aaggcaaacccauca

SEQ ID NO: 2251742 - RNA, 19 nt, Human
aaggcaaaauugcaaaucu

SEQ ID NO: 2251743 - RNA, 15 nt, Human
aaggcaaaauugcaa

SEQ ID NO: 2251744 - RNA, 14 nt, Human
aaggcaaaauugca

SEQ ID NO: 2251745 - RNA, 16 nt, Human
aaggcaaaugcccaag

SEQ ID NO: 2251746 - RNA, 16 nt, Human
aaggcaaaugacuuug

SEQ ID NO: 2251747 - RNA, 15 nt, Human
aaggcaaaugacuuu

SEQ ID NO: 2251748 - RNA, 14 nt, Human
aaggcaaaugacuu

SEQ ID NO: 2251749 - RNA, 17 nt, Human
aaggcaaaugcccaagg

SEQ ID NO: 2251750 - RNA, 21 nt, Human
aaggcacucuguuauuuagac

SEQ ID NO: 2251751 - RNA, 12 nt, Human
aaggcacugccu

SEQ ID NO: 2251752 - RNA, 13 nt, Human
aaggcacugccug

SEQ ID NO: 2251753 - RNA, 11 nt, Human
aaggcagccac

SEQ ID NO: 2251754 - RNA, 14 nt, Human
aaggcagccaccag

SEQ ID NO: 2251755 - RNA, 19 nt, Human
aaggcagaaagcaaaauua

SEQ ID NO: 2251756 - RNA, 17 nt, Human
aaggcagaaagcaaaau

SEQ ID NO: 2251757 - RNA, 16 nt, Human
aaggcagaaagcaaaa

SEQ ID NO: 2251758 - RNA, 15 nt, Human
aaggcagaaagcaaa

SEQ ID NO: 2251759 - RNA, 14 nt, Human
aaggcacugccuga

SEQ ID NO: 2251760 - RNA, 14 nt, Human
aaggcagaagcagc

SEQ ID NO: 2251761 - RNA, 21 nt, Human
aaggacggccuucaacugaaa

SEQ ID NO: 2251762 - RNA, 13 nt, Human
aaggacuaggguc

SEQ ID NO: 2251763 - RNA, 12 nt, Human
aaggcaaaauug

SEQ ID NO: 2251764 - RNA, 21 nt, Human
aaggacuacguuaagggaagg

SEQ ID NO: 2251765 - RNA, 15 nt, Human
aaggcaaaaauguaa

SEQ ID NO: 2251766 - RNA, 13 nt, Human
aaggaccuccuga

SEQ ID NO: 2251767 - RNA, 22 nt, Human
aaggacccggaggggccuggca

SEQ ID NO: 2251768 - RNA, 14 nt, Human
aaggacaauuucaa

SEQ ID NO: 2251769 - RNA, 14 nt, Human
aaggacacacuaau

SEQ ID NO: 2251770 - RNA, 18 nt, Human
aaggacacagaugaaaca

SEQ ID NO: 2251771 - RNA, 22 nt, Human
aaggacacagaugaaacacaaa

SEQ ID NO: 2251772 - RNA, 17 nt, Human
aaggacaaaaaugaacu

SEQ ID NO: 2251773 - RNA, 23 nt, Human
aaggacaaaaaugaacugaaguu

SEQ ID NO: 2251774 - RNA, 20 nt, Human
aaggaauucuaggcauccca

SEQ ID NO: 2251775 - RNA, 12 nt, Human
aaggaauuuuau

SEQ ID NO: 2251776 - RNA, 16 nt, Human
aagcugccucaaggaa

SEQ ID NO: 2251777 - RNA, 11 nt, Human
aagcuggaagc

SEQ ID NO: 2251778 - RNA, 21 nt, Human
aagcugcuuuaaaaaaauaca

SEQ ID NO: 2251779 - RNA, 14 nt, Human
aagcuggaagcaca

SEQ ID NO: 2251780 - RNA, 19 nt, Human
aagcuggaggacuagaacc

SEQ ID NO: 2251781 - RNA, 17 nt, Human
aaggaauauauggcaga

SEQ ID NO: 2251782 - RNA, 23 nt, Human
aagcuggaggacuagaaccugga

SEQ ID NO: 2251783 - RNA, 18 nt, Human
aaggaauauauggcagag

SEQ ID NO: 2251784 - RNA, 22 nt, Human
aaggaauauauggcagaguugu

SEQ ID NO: 2251785 - RNA, 16 nt, Human
aagcugcugacagugu

SEQ ID NO: 2251786 - RNA, 15 nt, Human
aagcugcccugccca

SEQ ID NO: 2251787 - RNA, 17 nt, Human
aaggaaucuccaguuuu

SEQ ID NO: 2251788 - RNA, 21 nt, Human
aaggaauguagcugguuuccu

SEQ ID NO: 2251789 - RNA, 15 nt, Human
aaggaauucuaggca

SEQ ID NO: 2251790 - RNA, 21 nt, Human
aaggaaucuccaguuuucagu

SEQ ID NO: 2251791 - RNA, 21 nt, Human
aaggaauaugggagaaauagu

SEQ ID NO: 2251792 - RNA, 20 nt, Human
aaggaauccacucccaggca

SEQ ID NO: 2251793 - RNA, 23 nt, Human
aaggaauauauggcagaguugua

SEQ ID NO: 2251794 - RNA, 21 nt, Human
aaggaauccacucccaggcag

SEQ ID NO: 2251795 - RNA, 22 nt, Human
aaggaauccacucccaggcagc

SEQ ID NO: 2251796 - RNA, 23 nt, Human
aaggaauccacucccaggcagcc

SEQ ID NO: 2251797 - RNA, 23 nt, Human
aaggaaugauuaauuaaaacaca

SEQ ID NO: 2251798 - RNA, 21 nt, Human
aagcgugagccacugcaccgg

SEQ ID NO: 2251799 - RNA, 18 nt, Human
aagcugcaucuagaggcu

SEQ ID NO: 2251800 - RNA, 17 nt, Human
aagcgugagccacugca

SEQ ID NO: 2251801 - RNA, 20 nt, Human
aagcgugagccacugcaccg

SEQ ID NO: 2251802 - RNA, 14 nt, Human
aagcugcugacagu

SEQ ID NO: 2251803 - RNA, 22 nt, Human
aagcugccagccgagauagcca

SEQ ID NO: 2251804 - RNA, 11 nt, Human
aagcugccagc

SEQ ID NO: 2251805 - RNA, 12 nt, Human
aagcugccagcc

SEQ ID NO: 2251806 - RNA, 11 nt, Human
aagccaccucu

SEQ ID NO: 2251807 - RNA, 13 nt, Human
aagccaccucucc

SEQ ID NO: 2251808 - RNA, 20 nt, Human
aagccaccucucccucaaca

SEQ ID NO: 2251809 - RNA, 19 nt, Human
aagccagauuuuccugaaa

SEQ ID NO: 2251810 - RNA, 21 nt, Human
aagccaccaacauacucccau

SEQ ID NO: 2251811 - RNA, 18 nt, Human
aagcagguucccaagcuc

SEQ ID NO: 2251812 - RNA, 14 nt, Human
aagccacugaagcu

SEQ ID NO: 2251813 - RNA, 13 nt, Human
aagccacugaagc

SEQ ID NO: 2251814 - RNA, 17 nt, Human
aagccacugaagcuggg

SEQ ID NO: 2251815 - RNA, 17 nt, Human
aagccaccucucccuca

SEQ ID NO: 2251816 - RNA, 15 nt, Human
aagccagcaggcucu

SEQ ID NO: 2251817 - RNA, 18 nt, Human
aagccagcaggcucucag

SEQ ID NO: 2251818 - RNA, 15 nt, Human
aagcgauucuucugc

SEQ ID NO: 2251819 - RNA, 14 nt, Human
aagcgauucuucug

SEQ ID NO: 2251820 - RNA, 16 nt, Human
aagcgauucuucugcu

SEQ ID NO: 2251821 - RNA, 15 nt, Human
aagggagaagaaagg

SEQ ID NO: 2251822 - RNA, 20 nt, Human
aagggauggaaaaggaagac

SEQ ID NO: 2251823 - RNA, 15 nt, Human
aagggauggaaaagg

SEQ ID NO: 2251824 - RNA, 15 nt, Human
aagggaucugguccu

SEQ ID NO: 2251825 - RNA, 19 nt, Human
aagggauauauaagaugga

SEQ ID NO: 2251826 - RNA, 20 nt, Human
aagggacuuggaagcuccgc

SEQ ID NO: 2251827 - RNA, 13 nt, Human
aagggagaaaaaa

SEQ ID NO: 2251828 - RNA, 12 nt, Human
aagggagaagaa

SEQ ID NO: 2251829 - RNA, 15 nt, Human
aagggacugagaaau

SEQ ID NO: 2251830 - RNA, 17 nt, Human
aagggacugagaaauuu

SEQ ID NO: 2251831 - RNA, 19 nt, Human
aagggauuacccaagcaaa

SEQ ID NO: 2251832 - RNA, 17 nt, Human
aagggauuuuagucaca

SEQ ID NO: 2251833 - RNA, 20 nt, Human
aagggauuuuagucacacgu

SEQ ID NO: 2251834 - RNA, 24 nt, Human
aagggauggaggucacacugguag

SEQ ID NO: 2251835 - RNA, 21 nt, Human
aagggauggaaaaggaagacu

SEQ ID NO: 2251836 - RNA, 17 nt, Human
aagggauuacccaagca

SEQ ID NO: 2251837 - RNA, 18 nt, Human
aagggauuacccaagcaa

SEQ ID NO: 2251838 - RNA, 17 nt, Human
aagggauggcaagaugu

SEQ ID NO: 2251839 - RNA, 14 nt, Human
aagggauggcaaga

SEQ ID NO: 2251840 - RNA, 22 nt, Human
aagggcaggaaggagagccugc

SEQ ID NO: 2251841 - RNA, 21 nt, Human
aagggcaggaaggagagccug

SEQ ID NO: 2251842 - RNA, 22 nt, Human
aagggcagggcaucuccugugc

SEQ ID NO: 2251843 - RNA, 15 nt, Human
aagggcagagucaca

SEQ ID NO: 2251844 - RNA, 18 nt, Human
aagggcagaacacuaacc

SEQ ID NO: 2251845 - RNA, 19 nt, Human
aagggcagaacacuaaccu

SEQ ID NO: 2251846 - RNA, 21 nt, Human
aagggcaauaccguguugguu

SEQ ID NO: 2251847 - RNA, 20 nt, Human
aagggcaacaauaaaauagc

SEQ ID NO: 2251848 - RNA, 22 nt, Human
aagggauuuuagucacacgugg

SEQ ID NO: 2251849 - RNA, 18 nt, Human
aagggcaaaauucccagg

SEQ ID NO: 2251850 - RNA, 15 nt, Human
aaguaggaaaaauaa

SEQ ID NO: 2251851 - RNA, 23 nt, Human
aaguagacuucauuuuuccuaac

SEQ ID NO: 2251852 - RNA, 19 nt, Human
aaguagacuucauuuuucc

SEQ ID NO: 2251853 - RNA, 17 nt, Human
aagguucucauaggaaa

SEQ ID NO: 2251854 - RNA, 21 nt, Human
aagguucucuccuccccaagg

SEQ ID NO: 2251855 - RNA, 12 nt, Human
aaguagaggagg

SEQ ID NO: 2251856 - RNA, 22 nt, Human
aagguuccaaucagaucuuuau

SEQ ID NO: 2251857 - RNA, 18 nt, Human
aagguuccaacuguauau

SEQ ID NO: 2251858 - RNA, 19 nt, Human
aagguuccaacuguauaua

SEQ ID NO: 2251859 - RNA, 23 nt, Human
aagguuccgcuuggagcagaggg

SEQ ID NO: 2251860 - RNA, 16 nt, Human
aagguucccucugaga

SEQ ID NO: 2251861 - RNA, 21 nt, Human
aagguuccaacuguauauauu

SEQ ID NO: 2251862 - RNA, 21 nt, Human
aagguucucagguguugccaa

SEQ ID NO: 2251863 - RNA, 17 nt, Human
aagguucacuaaagcag

SEQ ID NO: 2251864 - RNA, 20 nt, Human
aagguuauuuauuuaaaugu

SEQ ID NO: 2251865 - RNA, 22 nt, Human
aagguuauuuauuuaaaugucu

SEQ ID NO: 2251866 - RNA, 18 nt, Human
aagguuaccaagaagccu

SEQ ID NO: 2251867 - RNA, 17 nt, Human
aagguuauuuauuuaaa

SEQ ID NO: 2251868 - RNA, 22 nt, Human
aagguguucauucacuugcauu

SEQ ID NO: 2251869 - RNA, 17 nt, Human
aagguuaggauuuaaca

SEQ ID NO: 2251870 - RNA, 18 nt, Human
aagguuaggauuuaacag

SEQ ID NO: 2251871 - RNA, 23 nt, Human
aaggugggguauuuaccacagca

SEQ ID NO: 2251872 - RNA, 16 nt, Human
aagguggggacaggga

SEQ ID NO: 2251873 - RNA, 17 nt, Human
aaggugguaugugugug

SEQ ID NO: 2251874 - RNA, 21 nt, Human
aagguggggucuuugugagag

SEQ ID NO: 2251875 - RNA, 16 nt, Human
aaggugguaugugugu

SEQ ID NO: 2251876 - RNA, 21 nt, Human
aaggugggcugagcccuggca

SEQ ID NO: 2251877 - RNA, 20 nt, Human
aaggugggcugagcccuggc

SEQ ID NO: 2251878 - RNA, 16 nt, Human
aaggugaaggaauaua

SEQ ID NO: 2251879 - RNA, 18 nt, Human
aaggugaaggaauauaug

SEQ ID NO: 2251880 - RNA, 15 nt, Human
aaggugucuuccucc

SEQ ID NO: 2251881 - RNA, 16 nt, Human
aaggugucuuccuccc

SEQ ID NO: 2251882 - RNA, 20 nt, Human
aaggugucuuccucccaagu

SEQ ID NO: 2251883 - RNA, 18 nt, Human
aaggugucagaauaauaa

SEQ ID NO: 2251884 - RNA, 20 nt, Human
aaggugguauguguguguau

SEQ ID NO: 2251885 - RNA, 22 nt, Human
aagguggucugcucgggcccag

SEQ ID NO: 2251886 - RNA, 20 nt, Human
aagguggugggggugcagau

SEQ ID NO: 2251887 - RNA, 17 nt, Human
aagguguaacucuaauu

SEQ ID NO: 2251888 - RNA, 23 nt, Human
aaggucuggagaagcucccagga

SEQ ID NO: 2251889 - RNA, 14 nt, Human
aagggcauccuucu

SEQ ID NO: 2251890 - RNA, 17 nt, Human
aagggcauccuucugcc

SEQ ID NO: 2251891 - RNA, 16 nt, Human
aaggucuggccucagg

SEQ ID NO: 2251892 - RNA, 13 nt, Human
aaggucuuugguu

SEQ ID NO: 2251893 - RNA, 11 nt, Human
aaggugaagga

SEQ ID NO: 2251894 - RNA, 14 nt, Human
aaggugaaggaaua

SEQ ID NO: 2251895 - RNA, 15 nt, Human
aaggugaaggaauau

SEQ ID NO: 2251896 - RNA, 19 nt, Human
aaggucuuugguucagcua

SEQ ID NO: 2251897 - RNA, 13 nt, Human
aagauucuuuccc

SEQ ID NO: 2251898 - RNA, 16 nt, Human
aagauucuuucccaau

SEQ ID NO: 2251899 - RNA, 12 nt, Human
aagauugcugaa

SEQ ID NO: 2251900 - RNA, 17 nt, Human
aagauucuccugugcua

SEQ ID NO: 2251901 - RNA, 18 nt, Human
aagauucccagagacagg

SEQ ID NO: 2251902 - RNA, 15 nt, Human
aagauucccagagac

SEQ ID NO: 2251903 - RNA, 17 nt, Human
aagauucauccauuuau

SEQ ID NO: 2251904 - RNA, 19 nt, Human
aagauucauuuuuaaucau

SEQ ID NO: 2251905 - RNA, 20 nt, Human
aagauucauuuuuaaucaug

SEQ ID NO: 2251906 - RNA, 21 nt, Human
aagauucauuuuuaaucauga

SEQ ID NO: 2251907 - RNA, 14 nt, Human
aagauucccagaga

SEQ ID NO: 2251908 - RNA, 13 nt, Human
aagauucccagag

SEQ ID NO: 2251909 - RNA, 12 nt, Human
aagauucccaga

SEQ ID NO: 2251910 - RNA, 20 nt, Human
aagauucauauuuacuucuu

SEQ ID NO: 2251911 - RNA, 15 nt, Human
aagauucagguaugu

SEQ ID NO: 2251912 - RNA, 19 nt, Human
aagauucacaccugacucu

SEQ ID NO: 2251913 - RNA, 23 nt, Human
aagauucacaccugacucugaaa

SEQ ID NO: 2251914 - RNA, 17 nt, Human
aagauuacuuuuucuuu

SEQ ID NO: 2251915 - RNA, 11 nt, Human
aagauuagaag

SEQ ID NO: 2251916 - RNA, 13 nt, Human
aagauuagaagcu

SEQ ID NO: 2251917 - RNA, 14 nt, Human
aagauagcagggca

SEQ ID NO: 2251918 - RNA, 18 nt, Human
aagauuagaagcugaaaa

SEQ ID NO: 2251919 - RNA, 13 nt, Human
aagauuagaauga

SEQ ID NO: 2251920 - RNA, 18 nt, Human
aagauuagaaugaaaauu

SEQ ID NO: 2251921 - RNA, 17 nt, Human
aagauucaaucccagga

SEQ ID NO: 2251922 - RNA, 14 nt, Human
aagcagaggagggg

SEQ ID NO: 2251923 - RNA, 12 nt, Human
aagcagaggagg

SEQ ID NO: 2251924 - RNA, 21 nt, Human
aagcagaggaaggagaggaga

SEQ ID NO: 2251925 - RNA, 23 nt, Human
aagcagaauaaagcaauuuuccu

SEQ ID NO: 2251926 - RNA, 15 nt, Human
aagcagggacuugaa

SEQ ID NO: 2251927 - RNA, 20 nt, Human
aagcagaggaggggccgcug

SEQ ID NO: 2251928 - RNA, 15 nt, Human
aagcagaggaggggc

SEQ ID NO: 2251929 - RNA, 18 nt, Human
aagcagaugcaaagaggc

SEQ ID NO: 2251930 - RNA, 12 nt, Human
aagcagggagga

SEQ ID NO: 2251931 - RNA, 16 nt, Human
aagcagaugcaaagag

SEQ ID NO: 2251932 - RNA, 14 nt, Human
aagcagaugcaaag

SEQ ID NO: 2251933 - RNA, 22 nt, Human
aagcagaggaggggccgcugcc

SEQ ID NO: 2251934 - RNA, 17 nt, Human
aagcagggucugggcag

SEQ ID NO: 2251935 - RNA, 21 nt, Human
aagcaggggcuacaagaggga

SEQ ID NO: 2251936 - RNA, 22 nt, Human
aagcaggggcuacaagagggaa

SEQ ID NO: 2251937 - RNA, 17 nt, Human
aagcaggggaguaugca

SEQ ID NO: 2251938 - RNA, 18 nt, Human
aagcaggggaguaugcaa

SEQ ID NO: 2251939 - RNA, 19 nt, Human
aagcaggggaguaugcaaa

SEQ ID NO: 2251940 - RNA, 20 nt, Human
aagcaggggcuacaagaggg

SEQ ID NO: 2251941 - RNA, 19 nt, Human
aagccaccaacauacuccc

SEQ ID NO: 2251942 - RNA, 18 nt, Human
aagcacuuugggauucuu

SEQ ID NO: 2251943 - RNA, 20 nt, Human
aagcacuuggacucuugcuc

SEQ ID NO: 2251944 - RNA, 13 nt, Human
aagcagaaaauac

SEQ ID NO: 2251945 - RNA, 16 nt, Human
aagcacugugcucagg

SEQ ID NO: 2251946 - RNA, 15 nt, Human
aagcacugugcucag

SEQ ID NO: 2251947 - RNA, 19 nt, Human
aagcacuuggacucuugcu

SEQ ID NO: 2251948 - RNA, 20 nt, Human
aagcagaaaauacagcugga

SEQ ID NO: 2251949 - RNA, 12 nt, Human
aagcagaaauac

SEQ ID NO: 2251950 - RNA, 11 nt, Human
aagcagaauaa

SEQ ID NO: 2251951 - RNA, 12 nt, Human
aagcagaauaaa

SEQ ID NO: 2251952 - RNA, 13 nt, Human
aagcagaauaaag

SEQ ID NO: 2251953 - RNA, 14 nt, Human
aagcagaauaaagc

SEQ ID NO: 2251954 - RNA, 15 nt, Human
aagcagaauaaagca

SEQ ID NO: 2251955 - RNA, 16 nt, Human
aagcagaauaaagcaa

SEQ ID NO: 2251956 - RNA, 17 nt, Human
aagcagaauaaagcaau

SEQ ID NO: 2251957 - RNA, 18 nt, Human
aagcagaauaaagcaauu

SEQ ID NO: 2251958 - RNA, 19 nt, Human
aagcagaauaaagcaauuu

SEQ ID NO: 2251959 - RNA, 20 nt, Human
aagcagaauaaagcaauuuu

SEQ ID NO: 2251960 - RNA, 21 nt, Human
aagcagaauaaagcaauuuuc

SEQ ID NO: 2251961 - RNA, 22 nt, Human
aagcagaauaaagcaauuuucc

SEQ ID NO: 2251962 - RNA, 15 nt, Human
aagauugcugaaauu

SEQ ID NO: 2251963 - RNA, 13 nt, Human
aagauuuucagaa

SEQ ID NO: 2251964 - RNA, 19 nt, Human
aagauuuugaaauuuuuau

SEQ ID NO: 2251965 - RNA, 21 nt, Human
aagauuuugaaugcuuccuga

SEQ ID NO: 2251966 - RNA, 17 nt, Human
aagauuuugaaugcuuc

SEQ ID NO: 2251967 - RNA, 15 nt, Human
aagauuuugaaugcu

SEQ ID NO: 2251968 - RNA, 21 nt, Human
aagauuuuccuuuuuuauaca

SEQ ID NO: 2251969 - RNA, 12 nt, Human
aagauuuuccuu

SEQ ID NO: 2251970 - RNA, 18 nt, Human
aagauuuuccuuuuuuau

SEQ ID NO: 2251971 - RNA, 21 nt, Human
aagauuuuggaggagaaggac

SEQ ID NO: 2251972 - RNA, 23 nt, Human
aagauuuuggaggguccuccaca

SEQ ID NO: 2251973 - RNA, 13 nt, Human
aagauuuuucuca

SEQ ID NO: 2251974 - RNA, 14 nt, Human
aagauuuuucucaa

SEQ ID NO: 2251975 - RNA, 14 nt, Human
aagagagaaagaag

SEQ ID NO: 2251976 - RNA, 23 nt, Human
aagagagaaaauaaaaaguuaaa

SEQ ID NO: 2251977 - RNA, 21 nt, Human
aagagagaaagaaguaggcau

SEQ ID NO: 2251978 - RNA, 22 nt, Human
aagagagaaaauaaaaaguuaa

SEQ ID NO: 2251979 - RNA, 21 nt, Human
aagagagaaaauaaaaaguua

SEQ ID NO: 2251980 - RNA, 20 nt, Human
aagagagaaaauaaaaaguu

SEQ ID NO: 2251981 - RNA, 19 nt, Human
aagagagaaaauaaaaagu

SEQ ID NO: 2251982 - RNA, 19 nt, Human
aagagacaaacaccuccca

SEQ ID NO: 2251983 - RNA, 21 nt, Human
aagagacaaacaccucccagg

SEQ ID NO: 2251984 - RNA, 14 nt, Human
aagagacagucacc

SEQ ID NO: 2251985 - RNA, 20 nt, Human
aagagacagucaccccagga

SEQ ID NO: 2251986 - RNA, 21 nt, Human
aagagacagucaccccaggac

SEQ ID NO: 2251987 - RNA, 22 nt, Human
aagagacaggagggcaagggcc

SEQ ID NO: 2251988 - RNA, 13 nt, Human
aagagagaaugua

SEQ ID NO: 2251989 - RNA, 12 nt, Human
aagagagaaugu

SEQ ID NO: 2251990 - RNA, 15 nt, Human
aagagagauguuuug

SEQ ID NO: 2251991 - RNA, 15 nt, Human
aagagaggacacaaa

SEQ ID NO: 2251992 - RNA, 22 nt, Human
aagagagcuuaaugauaauauu

SEQ ID NO: 2251993 - RNA, 19 nt, Human
aagagaggagaggagagag

SEQ ID NO: 2251994 - RNA, 17 nt, Human
aagagaggagaggagag

SEQ ID NO: 2251995 - RNA, 18 nt, Human
aagagaggagaggagaga

SEQ ID NO: 2251996 - RNA, 20 nt, Human
aagagaauauuagcuuuacu

SEQ ID NO: 2251997 - RNA, 12 nt, Human
aagagaauauuu

SEQ ID NO: 2251998 - RNA, 13 nt, Human
aagagaauauuuu

SEQ ID NO: 2251999 - RNA, 14 nt, Human
aagagaaguuauuu

SEQ ID NO: 2252000 - RNA, 21 nt, Human
aagagaaguuauuuucuacag

SEQ ID NO: 2252001 - RNA, 18 nt, Human
aagagaauauuuuaagua

SEQ ID NO: 2252002 - RNA, 20 nt, Human
aagagaauauuuuaaguauu

SEQ ID NO: 2252003 - RNA, 22 nt, Human
aagagaauauuuuaaguauugc

SEQ ID NO: 2252004 - RNA, 19 nt, Human
aagacuuugggauaggaaa

SEQ ID NO: 2252005 - RNA, 16 nt, Human
aagagaaccgagcaaa

SEQ ID NO: 2252006 - RNA, 21 nt, Human
aagagaaccgagcaaagauca

SEQ ID NO: 2252007 - RNA, 22 nt, Human
aagagaaccgagcaaagaucaa

SEQ ID NO: 2252008 - RNA, 18 nt, Human
aagagaagggcagggcug

SEQ ID NO: 2252009 - RNA, 20 nt, Human
aagacuuugggauaggaaaa

SEQ ID NO: 2252010 - RNA, 15 nt, Human
aagacuuuuaugaua

SEQ ID NO: 2252011 - RNA, 20 nt, Human
aagagaacccacgaacauuc

SEQ ID NO: 2252012 - RNA, 15 nt, Human
aagagaacuuccaga

SEQ ID NO: 2252013 - RNA, 18 nt, Human
aagacauggagacuccug

SEQ ID NO: 2252014 - RNA, 21 nt, Human
aagacagggcugauaagcuaa

SEQ ID NO: 2252015 - RNA, 19 nt, Human
aagacauggggaggaagga

SEQ ID NO: 2252016 - RNA, 16 nt, Human
aagacauguagguguu

SEQ ID NO: 2252017 - RNA, 22 nt, Human
aagacaggaugggggcuggccu

SEQ ID NO: 2252018 - RNA, 19 nt, Human
aagacauggagacuccugc

SEQ ID NO: 2252019 - RNA, 13 nt, Human
aagacaugucugu

SEQ ID NO: 2252020 - RNA, 12 nt, Human
aagacaugucug

SEQ ID NO: 2252021 - RNA, 23 nt, Human
aagacagugaaagaaaauaacaa

SEQ ID NO: 2252022 - RNA, 13 nt, Human
aagacauugucaa

SEQ ID NO: 2252023 - RNA, 18 nt, Human
aagacauuaaaucuauga

SEQ ID NO: 2252024 - RNA, 13 nt, Human
aagacauguuuua

SEQ ID NO: 2252025 - RNA, 14 nt, Human
aagacauguuuuag

SEQ ID NO: 2252026 - RNA, 17 nt, Human
aagacauguuuuagaca

SEQ ID NO: 2252027 - RNA, 15 nt, Human
aagacauuaaaucua

SEQ ID NO: 2252028 - RNA, 16 nt, Human
aagacuuuggaaagag

SEQ ID NO: 2252029 - RNA, 21 nt, Human
aagacauucuuccaaaaagau

SEQ ID NO: 2252030 - RNA, 19 nt, Human
aagacaugucuguucuaca

SEQ ID NO: 2252031 - RNA, 17 nt, Human
aagacaugucuguucua

SEQ ID NO: 2252032 - RNA, 16 nt, Human
aagacaugucuguucu

SEQ ID NO: 2252033 - RNA, 22 nt, Human
aagacagcuucucauccugcag

SEQ ID NO: 2252034 - RNA, 23 nt, Human
aagacaggacagugcuucagccu

SEQ ID NO: 2252035 - RNA, 16 nt, Human
aacuuagcauguguug

SEQ ID NO: 2252036 - RNA, 17 nt, Human
aacuuagaauaaaauug

SEQ ID NO: 2252037 - RNA, 18 nt, Human
aacuuagaauaaaauugu

SEQ ID NO: 2252038 - RNA, 19 nt, Human
aacuuagaauaaaauugua

SEQ ID NO: 2252039 - RNA, 21 nt, Human
aacuuagaauaaaauuguaaa

SEQ ID NO: 2252040 - RNA, 14 nt, Human
aacuuacuuagugu

SEQ ID NO: 2252041 - RNA, 19 nt, Human
aacuuaccugggcauucuu

SEQ ID NO: 2252042 - RNA, 23 nt, Human
aacuuaccgugagcgacaaagau

SEQ ID NO: 2252043 - RNA, 16 nt, Human
aacuuagaauaaaauu

SEQ ID NO: 2252044 - RNA, 15 nt, Human
aacuuagaauaaaau

SEQ ID NO: 2252045 - RNA, 23 nt, Human
aacuuacauugugaaacuucugu

SEQ ID NO: 2252046 - RNA, 22 nt, Human
aacuuacauuguucaauuagaa

SEQ ID NO: 2252047 - RNA, 21 nt, Human
aacuuacauuguucaauuaga

SEQ ID NO: 2252048 - RNA, 20 nt, Human
aacuuacauuguucaauuag

SEQ ID NO: 2252049 - RNA, 19 nt, Human
aacuuacauuguucaauua

SEQ ID NO: 2252050 - RNA, 13 nt, Human
aacuuacacacaa

SEQ ID NO: 2252051 - RNA, 22 nt, Human
aacuguuuagggcccugauuug

SEQ ID NO: 2252052 - RNA, 19 nt, Human
aacuguuguauaaauuuau

SEQ ID NO: 2252053 - RNA, 15 nt, Human
aacuguugccagaga

SEQ ID NO: 2252054 - RNA, 16 nt, Human
aacuguuaugaaauaa

SEQ ID NO: 2252055 - RNA, 14 nt, Human
aacuguugauugca

SEQ ID NO: 2252056 - RNA, 18 nt, Human
aacuguugccagagaugg

SEQ ID NO: 2252057 - RNA, 17 nt, Human
aacuguugccagagaug

SEQ ID NO: 2252058 - RNA, 15 nt, Human
aacuguuguauaaau

SEQ ID NO: 2252059 - RNA, 14 nt, Human
aacuguuguauaaa

SEQ ID NO: 2252060 - RNA, 13 nt, Human
aacuguuguauaa

SEQ ID NO: 2252061 - RNA, 15 nt, Human
aaugcucagaccagc

SEQ ID NO: 2252062 - RNA, 17 nt, Human
aaugcuaggucucggac

SEQ ID NO: 2252063 - RNA, 16 nt, Human
aaugcucauaacggau

SEQ ID NO: 2252064 - RNA, 12 nt, Human
aaugcucaucug

SEQ ID NO: 2252065 - RNA, 20 nt, Human
aaugcucccccauccucccc

SEQ ID NO: 2252066 - RNA, 14 nt, Human
aaugcucccccauc

SEQ ID NO: 2252067 - RNA, 11 nt, Human
aaugcuccccc

SEQ ID NO: 2252068 - RNA, 20 nt, Human
aaugcuauuuuuuauuuuac

SEQ ID NO: 2252069 - RNA, 22 nt, Human
aaugcucccccauccuccccuu

SEQ ID NO: 2252070 - RNA, 21 nt, Human
aaugcucccccauccuccccu

SEQ ID NO: 2252071 - RNA, 11 nt, Human
aaugcucuagu

SEQ ID NO: 2252072 - RNA, 19 nt, Human
aaugcuccuuguuccuaga

SEQ ID NO: 2252073 - RNA, 14 nt, Human
aaugcucuccuuuc

SEQ ID NO: 2252074 - RNA, 13 nt, Human
aaugcucuccuuu

SEQ ID NO: 2252075 - RNA, 20 nt, Human
aaugcucuggggucuuuuua

SEQ ID NO: 2252076 - RNA, 23 nt, Human
aaugcucuuuacuucauggacuu

SEQ ID NO: 2252077 - RNA, 17 nt, Human
aaugggacuucuuuuca

SEQ ID NO: 2252078 - RNA, 18 nt, Human
aaugggacuucuuuucac

SEQ ID NO: 2252079 - RNA, 20 nt, Human
aaugggacuucuuuucacau

SEQ ID NO: 2252080 - RNA, 21 nt, Human
aaugggacuucuuuucacauu

SEQ ID NO: 2252081 - RNA, 21 nt, Human
aaugggagcugaggccacacu

SEQ ID NO: 2252082 - RNA, 17 nt, Human
aauggggccagauccag

SEQ ID NO: 2252083 - RNA, 18 nt, Human
aaugggcaaaacugaauu

SEQ ID NO: 2252084 - RNA, 12 nt, Human
aaugggcacagc

SEQ ID NO: 2252085 - RNA, 23 nt, Human
aaugggcacugggaugagccgcu

SEQ ID NO: 2252086 - RNA, 13 nt, Human
aaugggacacuaa

SEQ ID NO: 2252087 - RNA, 14 nt, Human
aaugggagcucaug

SEQ ID NO: 2252088 - RNA, 18 nt, Human
aaugguaugagcugaggg

SEQ ID NO: 2252089 - RNA, 16 nt, Human
aaugguauggaacucu

SEQ ID NO: 2252090 - RNA, 19 nt, Human
aaugguccaggagaaggcc

SEQ ID NO: 2252091 - RNA, 14 nt, Human
aaugguccaggaga

SEQ ID NO: 2252092 - RNA, 20 nt, Human
aauggucagcguugcauguc

SEQ ID NO: 2252093 - RNA, 14 nt, Human
aauggucagcguug

SEQ ID NO: 2252094 - RNA, 18 nt, Human
aauggucagcguugcaug

SEQ ID NO: 2252095 - RNA, 15 nt, Human
aaugucacaggcagg

SEQ ID NO: 2252096 - RNA, 13 nt, Human
aaugguccagggu

SEQ ID NO: 2252097 - RNA, 14 nt, Human
aaugguccaggguu

SEQ ID NO: 2252098 - RNA, 16 nt, Human
aaugguccaggguuga

SEQ ID NO: 2252099 - RNA, 17 nt, Human
aauggucccauccaggc

SEQ ID NO: 2252100 - RNA, 17 nt, Human
aaugggggugcauuuga

SEQ ID NO: 2252101 - RNA, 15 nt, Human
aaugggggugcauuu

SEQ ID NO: 2252102 - RNA, 18 nt, Human
aaugggguccuggccauc

SEQ ID NO: 2252103 - RNA, 17 nt, Human
aaugggguccuggccau

SEQ ID NO: 2252104 - RNA, 18 nt, Human
aauggggguagcagcugg

SEQ ID NO: 2252105 - RNA, 19 nt, Human
aauggggguagcagcugga

SEQ ID NO: 2252106 - RNA, 22 nt, Human
aauggggccagauccagccugg

SEQ ID NO: 2252107 - RNA, 20 nt, Human
aaugggggccucuucaaauu

SEQ ID NO: 2252108 - RNA, 12 nt, Human
aauggguaauau

SEQ ID NO: 2252109 - RNA, 16 nt, Human
aauggguaucuauauu

SEQ ID NO: 2252110 - RNA, 16 nt, Human
aauggguuuuucccug

SEQ ID NO: 2252111 - RNA, 15 nt, Human
aaugguaugagcuga

SEQ ID NO: 2252112 - RNA, 18 nt, Human
aaugcuaaagaaaaaguc

SEQ ID NO: 2252113 - RNA, 20 nt, Human
aaugcuaaagaaaaagucau

SEQ ID NO: 2252114 - RNA, 16 nt, Human
aaugcuacgugugauu

SEQ ID NO: 2252115 - RNA, 17 nt, Human
aaugcuacgugugauuu

SEQ ID NO: 2252116 - RNA, 19 nt, Human
aaugcuacgugugauuuuu

SEQ ID NO: 2252117 - RNA, 18 nt, Human
aaugcuagcucugagcca

SEQ ID NO: 2252118 - RNA, 23 nt, Human
aaugcuacgugugauuuuucugg

SEQ ID NO: 2252119 - RNA, 13 nt, Human
aaugcuacuuuau

SEQ ID NO: 2252120 - RNA, 23 nt, Human
aaugcgugcauaccacuuuuguu

SEQ ID NO: 2252121 - RNA, 21 nt, Human
aaugcgugcauaccacuuuug

SEQ ID NO: 2252122 - RNA, 17 nt, Human
aaugccugagugccugg

SEQ ID NO: 2252123 - RNA, 19 nt, Human
aaugccugagugccuggcc

SEQ ID NO: 2252124 - RNA, 16 nt, Human
aaugccugagugccug

SEQ ID NO: 2252125 - RNA, 14 nt, Human
aaugcgcaggcugg

SEQ ID NO: 2252126 - RNA, 15 nt, Human
aaugcgcaggcuggc

SEQ ID NO: 2252127 - RNA, 20 nt, Human
aaugcgcaggcuggcccugc

SEQ ID NO: 2252128 - RNA, 19 nt, Human
aaugcgcaggcuggcccug

SEQ ID NO: 2252129 - RNA, 18 nt, Human
aaugcgcaggcuggcccu

SEQ ID NO: 2252130 - RNA, 17 nt, Human
aaugcgcaggcuggccc

SEQ ID NO: 2252131 - RNA, 15 nt, Human
aaugccuccucccug

SEQ ID NO: 2252132 - RNA, 14 nt, Human
aaugccuccucccu

SEQ ID NO: 2252133 - RNA, 12 nt, Human
aaugccuccucc

SEQ ID NO: 2252134 - RNA, 21 nt, Human
aaugccucaguguauuuguau

SEQ ID NO: 2252135 - RNA, 23 nt, Human
aaugccucaguguauuuguauuu

SEQ ID NO: 2252136 - RNA, 20 nt, Human
aaugccucaaugugaccagg

SEQ ID NO: 2252137 - RNA, 15 nt, Human
aaugccucaguguau

SEQ ID NO: 2252138 - RNA, 20 nt, Human
aaugccucaguguauuugua

SEQ ID NO: 2252139 - RNA, 16 nt, Human
aaugcccuuaaaucau

SEQ ID NO: 2252140 - RNA, 22 nt, Human
aaugcccucaggggacuugaau

SEQ ID NO: 2252141 - RNA, 18 nt, Human
aaugcccuuacacuuacu

SEQ ID NO: 2252142 - RNA, 22 nt, Human
aaugcccuuacacuuacuguug

SEQ ID NO: 2252143 - RNA, 19 nt, Human
aaugcccguaaugcuuaga

SEQ ID NO: 2252144 - RNA, 18 nt, Human
aaugcccguaaugcuuag

SEQ ID NO: 2252145 - RNA, 18 nt, Human
aaucuccucuuuuaucuu

SEQ ID NO: 2252146 - RNA, 18 nt, Human
aaucucggcucacugcau

SEQ ID NO: 2252147 - RNA, 15 nt, Human
aaucuccucuuuuau

SEQ ID NO: 2252148 - RNA, 19 nt, Human
aaucucccgcugcugcugc

SEQ ID NO: 2252149 - RNA, 23 nt, Human
aaucucgcucugucgcccaggcu

SEQ ID NO: 2252150 - RNA, 17 nt, Human
aaucucccgcugcugcu

SEQ ID NO: 2252151 - RNA, 15 nt, Human
aaucuccaguauucu

SEQ ID NO: 2252152 - RNA, 12 nt, Human
aauccauguaag

SEQ ID NO: 2252153 - RNA, 16 nt, Human
aauccauguaagguau

SEQ ID NO: 2252154 - RNA, 17 nt, Human
aauccauguuaguuuuu

SEQ ID NO: 2252155 - RNA, 15 nt, Human
aauccaugcuugggu

SEQ ID NO: 2252156 - RNA, 22 nt, Human
aauccaucuaaauaccugcccu

SEQ ID NO: 2252157 - RNA, 23 nt, Human
aauccaucuaaauaccugcccug

SEQ ID NO: 2252158 - RNA, 14 nt, Human
aaucuggagaccag

SEQ ID NO: 2252159 - RNA, 20 nt, Human
aaucuggacuccucugucca

SEQ ID NO: 2252160 - RNA, 17 nt, Human
aaucuggacuccucugu

SEQ ID NO: 2252161 - RNA, 18 nt, Human
aaucuggacuccucuguc

SEQ ID NO: 2252162 - RNA, 15 nt, Human
aaucuggacuccucu

SEQ ID NO: 2252163 - RNA, 16 nt, Human
aaucuggacuccucug

SEQ ID NO: 2252164 - RNA, 24 nt, Human
aaucuggaccccaucugugaauaa

SEQ ID NO: 2252165 - RNA, 23 nt, Human
aaucuggaccccaucugugaaua

SEQ ID NO: 2252166 - RNA, 15 nt, Human
aaucucguuucaaaa

SEQ ID NO: 2252167 - RNA, 16 nt, Human
aaucucguuucaaaaa

SEQ ID NO: 2252168 - RNA, 18 nt, Human
aaucucguuucaaaaaca

SEQ ID NO: 2252169 - RNA, 19 nt, Human
aaucucguuucaaaaacac

SEQ ID NO: 2252170 - RNA, 18 nt, Human
aauccaccugccucggcc

SEQ ID NO: 2252171 - RNA, 19 nt, Human
aauccaccugccucggccu

SEQ ID NO: 2252172 - RNA, 12 nt, Human
aauccacccauc

SEQ ID NO: 2252173 - RNA, 18 nt, Human
aauccacaaucugacauu

SEQ ID NO: 2252174 - RNA, 22 nt, Human
aauccaagauauuuuaaaaucu

SEQ ID NO: 2252175 - RNA, 17 nt, Human
aauccaacccaugauga

SEQ ID NO: 2252176 - RNA, 20 nt, Human
aauccaaauggcgucuggaa

SEQ ID NO: 2252177 - RNA, 13 nt, Human
aauccaaauggcg

SEQ ID NO: 2252178 - RNA, 21 nt, Human
aauccaaacuuggauuuuuga

SEQ ID NO: 2252179 - RNA, 14 nt, Human
aauccaaacuugga

SEQ ID NO: 2252180 - RNA, 22 nt, Human
aauccagaauugaccuuuugac

SEQ ID NO: 2252181 - RNA, 21 nt, Human
aauccaucuaaauaccugccc

SEQ ID NO: 2252182 - RNA, 17 nt, Human
aauccauacauuugugu

SEQ ID NO: 2252183 - RNA, 17 nt, Human
aauccagaaagaaaaaa

SEQ ID NO: 2252184 - RNA, 13 nt, Human
aauccagaaagaa

SEQ ID NO: 2252185 - RNA, 23 nt, Human
aauccacccauccuaccaaugca

SEQ ID NO: 2252186 - RNA, 15 nt, Human
aauccacucccaggc

SEQ ID NO: 2252187 - RNA, 17 nt, Human
aauccacucccaggcag

SEQ ID NO: 2252188 - RNA, 18 nt, Human
aauccacucccaggcagc

SEQ ID NO: 2252189 - RNA, 16 nt, Human
aauccauacauuugug

SEQ ID NO: 2252190 - RNA, 18 nt, Human
aaugauacccugaauuug

SEQ ID NO: 2252191 - RNA, 18 nt, Human
aaugaacacucuuuugcu

SEQ ID NO: 2252192 - RNA, 15 nt, Human
aaugaacacucuuuu

SEQ ID NO: 2252193 - RNA, 21 nt, Human
aaugaacacucuuuugcuuua

SEQ ID NO: 2252194 - RNA, 15 nt, Human
aaugauaacuggaaa

SEQ ID NO: 2252195 - RNA, 16 nt, Human
aaugauaacuggaaac

SEQ ID NO: 2252196 - RNA, 17 nt, Human
aaugaaauuacuacaaa

SEQ ID NO: 2252197 - RNA, 14 nt, Human
aaugaaauuguaaa

SEQ ID NO: 2252198 - RNA, 23 nt, Human
aaugaaauuacuacaaaauuuga

SEQ ID NO: 2252199 - RNA, 14 nt, Human
aaugaacaaauuga

SEQ ID NO: 2252200 - RNA, 14 nt, Human
aaugauaacuggaa

SEQ ID NO: 2252201 - RNA, 21 nt, Human
aaugauguguacccaaacgug

SEQ ID NO: 2252202 - RNA, 12 nt, Human
aaugauuaauua

SEQ ID NO: 2252203 - RNA, 13 nt, Human
aaugauuaauuaa

SEQ ID NO: 2252204 - RNA, 15 nt, Human
aaugauagcuacugu

SEQ ID NO: 2252205 - RNA, 18 nt, Human
aaugauaguaagaaaagu

SEQ ID NO: 2252206 - RNA, 18 nt, Human
aaugauauagccagaaaa

SEQ ID NO: 2252207 - RNA, 17 nt, Human
aaugauauauggauaau

SEQ ID NO: 2252208 - RNA, 16 nt, Human
aaugaucauaagucua

SEQ ID NO: 2252209 - RNA, 23 nt, Human
aaugauguauguugaagccuuug

SEQ ID NO: 2252210 - RNA, 14 nt, Human
aaugauguccagaa

SEQ ID NO: 2252211 - RNA, 15 nt, Human
aaugauguccagaag

SEQ ID NO: 2252212 - RNA, 18 nt, Human
aaugauguccagaagaau

SEQ ID NO: 2252213 - RNA, 20 nt, Human
aaucauuuuacccuuggcuc

SEQ ID NO: 2252214 - RNA, 19 nt, Human
aaucauuuuauaugucaaa

SEQ ID NO: 2252215 - RNA, 20 nt, Human
aaucauuuuauaugucaaag

SEQ ID NO: 2252216 - RNA, 23 nt, Human
aaucauuuuauaugucaaagcag

SEQ ID NO: 2252217 - RNA, 19 nt, Human
aaucauuuugccucuuuuc

SEQ ID NO: 2252218 - RNA, 18 nt, Human
aaucauuuguucaaagcu

SEQ ID NO: 2252219 - RNA, 15 nt, Human
aaucauuuuaauuau

SEQ ID NO: 2252220 - RNA, 16 nt, Human
aaucauuuuaauuauu

SEQ ID NO: 2252221 - RNA, 17 nt, Human
aaucauuuuaauuauua

SEQ ID NO: 2252222 - RNA, 19 nt, Human
aaucauuuuaauuauuauu

SEQ ID NO: 2252223 - RNA, 20 nt, Human
aaucauuuuaauuauuauuc

SEQ ID NO: 2252224 - RNA, 22 nt, Human
aaucauuuuaauuauuauucuu

SEQ ID NO: 2252225 - RNA, 22 nt, Human
aaucauuucuugggcccuccug

SEQ ID NO: 2252226 - RNA, 21 nt, Human
aaucauuucuugggcccuccu

SEQ ID NO: 2252227 - RNA, 11 nt, Human
aaucauuuguu

SEQ ID NO: 2252228 - RNA, 14 nt, Human
aaucauuugcuuuu

SEQ ID NO: 2252229 - RNA, 22 nt, Human
aaucauuuggguuaauauggcu

SEQ ID NO: 2252230 - RNA, 22 nt, Human
aaucauuucugcaucagcugcu

SEQ ID NO: 2252231 - RNA, 18 nt, Human
aauauggaacuucuaaua

SEQ ID NO: 2252232 - RNA, 22 nt, Human
aaucaaauaugcaaagcacuga

SEQ ID NO: 2252233 - RNA, 16 nt, Human
aaucaaauaugcaaag

SEQ ID NO: 2252234 - RNA, 15 nt, Human
aaucaaauaugcaaa

SEQ ID NO: 2252235 - RNA, 14 nt, Human
aauaugcuggcugg

SEQ ID NO: 2252236 - RNA, 16 nt, Human
aauaugcuggcuggag

SEQ ID NO: 2252237 - RNA, 22 nt, Human
aauaugcugccaaauuuuggcc

SEQ ID NO: 2252238 - RNA, 19 nt, Human
aauaugcugccaaauuuug

SEQ ID NO: 2252239 - RNA, 14 nt, Human
aauaugcugccaaa

SEQ ID NO: 2252240 - RNA, 22 nt, Human
aauauagcuguacaaauauaag

SEQ ID NO: 2252241 - RNA, 18 nt, Human
aauauagcuguacaaaua

SEQ ID NO: 2252242 - RNA, 19 nt, Human
aauauagcuguacaaauau

SEQ ID NO: 2252243 - RNA, 20 nt, Human
aauauagcuguacaaauaua

SEQ ID NO: 2252244 - RNA, 21 nt, Human
aauauagcuguacaaauauaa

SEQ ID NO: 2252245 - RNA, 24 nt, Human
aauauggaacuuacauuguucaau

SEQ ID NO: 2252246 - RNA, 20 nt, Human
aauauggaacuuacauuguu

SEQ ID NO: 2252247 - RNA, 14 nt, Human
aauauggaacuucu

SEQ ID NO: 2252248 - RNA, 17 nt, Human
aauauggaacuucuaau

SEQ ID NO: 2252249 - RNA, 17 nt, Human
aauauggaacuuacauu

SEQ ID NO: 2252250 - RNA, 16 nt, Human
aauauggaacuuacau

SEQ ID NO: 2252251 - RNA, 15 nt, Human
aauauggaacuuaca

SEQ ID NO: 2252252 - RNA, 14 nt, Human
aauauggaacuuac

SEQ ID NO: 2252253 - RNA, 11 nt, Human
aauaugcuuac

SEQ ID NO: 2252254 - RNA, 10 nt, Human
aauaugcuua

SEQ ID NO: 2252255 - RNA, 20 nt, Human
aauauggaacuucuaauaua

SEQ ID NO: 2252256 - RNA, 13 nt, Human
aauauaaacacua

SEQ ID NO: 2252257 - RNA, 14 nt, Human
aauauaaacacuau

SEQ ID NO: 2252258 - RNA, 21 nt, Human
aauauaaagauggcugacuuu

SEQ ID NO: 2252259 - RNA, 13 nt, Human
aauauaacugccu

SEQ ID NO: 2252260 - RNA, 13 nt, Human
aauauagcuauuu

SEQ ID NO: 2252261 - RNA, 16 nt, Human
aauauagcuguacaaa

SEQ ID NO: 2252262 - RNA, 15 nt, Human
aauauagcuauuuuu

SEQ ID NO: 2252263 - RNA, 16 nt, Human
aauauaggaacuuaaa

SEQ ID NO: 2252264 - RNA, 17 nt, Human
aauauacuuguggacua

SEQ ID NO: 2252265 - RNA, 22 nt, Human
aauauacuuguggacuaaaaga

SEQ ID NO: 2252266 - RNA, 23 nt, Human
aauauacuuguggacuaaaagau

SEQ ID NO: 2252267 - RNA, 21 nt, Human
aauauagaucaguuauaagua

SEQ ID NO: 2252268 - RNA, 14 nt, Human
aauauagaaacacg

SEQ ID NO: 2252269 - RNA, 22 nt, Human
aauauagaaacacgaacuuuag

SEQ ID NO: 2252270 - RNA, 13 nt, Human
aauauagaaacac

SEQ ID NO: 2252271 - RNA, 17 nt, Human
aauagaaauggggaacu

SEQ ID NO: 2252272 - RNA, 16 nt, Human
aauagaaauaaguggu

SEQ ID NO: 2252273 - RNA, 16 nt, Human
aauagaaauuuccaga

SEQ ID NO: 2252274 - RNA, 15 nt, Human
aauagaagaacaucc

SEQ ID NO: 2252275 - RNA, 21 nt, Human
aauagaaacucaccauguaaa

SEQ ID NO: 2252276 - RNA, 22 nt, Human
aauagaaauaaaggaugugauu

SEQ ID NO: 2252277 - RNA, 13 nt, Human
aauagaaacucac

SEQ ID NO: 2252278 - RNA, 10 nt, Human
aauacuuguc

SEQ ID NO: 2252279 - RNA, 11 nt, Human
aauauaaaacu

SEQ ID NO: 2252280 - RNA, 22 nt, Human
aauaguuuuauuaauaaacauu

SEQ ID NO: 2252281 - RNA, 20 nt, Human
aauaguuuuauuaauaaaca

SEQ ID NO: 2252282 - RNA, 21 nt, Human
aauaguuuuauuaauaaacau

SEQ ID NO: 2252283 - RNA, 14 nt, Human
aauauaaaauauga

SEQ ID NO: 2252284 - RNA, 23 nt, Human
aauauaaaaggcaaauguguaca

SEQ ID NO: 2252285 - RNA, 14 nt, Human
aauauaaaacugcg

SEQ ID NO: 2252286 - RNA, 18 nt, Human
aauauaaaacugcguuaa

SEQ ID NO: 2252287 - RNA, 17 nt, Human
aauauaaaacuguacuu

SEQ ID NO: 2252288 - RNA, 14 nt, Human
aauauaaaaggcaa

SEQ ID NO: 2252289 - RNA, 23 nt, Human
aauauaaaauaugaagacauaaa

SEQ ID NO: 2252290 - RNA, 22 nt, Human
aauauaaaaggcaaauguguac

SEQ ID NO: 2252291 - RNA, 16 nt, Human
aauacgcacuacaugu

SEQ ID NO: 2252292 - RNA, 18 nt, Human
aauacgcacuacaugugg

SEQ ID NO: 2252293 - RNA, 21 nt, Human
aauaccugucccccugacaac

SEQ ID NO: 2252294 - RNA, 16 nt, Human
aauacuaccuugaaaa

SEQ ID NO: 2252295 - RNA, 15 nt, Human
aauacuaccuugaaa

SEQ ID NO: 2252296 - RNA, 14 nt, Human
aauacuaccuugaa

SEQ ID NO: 2252297 - RNA, 17 nt, Human
aauacuucucaaaccug

SEQ ID NO: 2252298 - RNA, 12 nt, Human
aauacuguuuga

SEQ ID NO: 2252299 - RNA, 23 nt, Human
aauacuucucaaaccuguuuaaa

SEQ ID NO: 2252300 - RNA, 21 nt, Human
aauacuucucaaaccuguuua

SEQ ID NO: 2252301 - RNA, 22 nt, Human
aauacuucucaaaccuguuuaa

SEQ ID NO: 2252302 - RNA, 11 nt, Human
aauaauaaauc

SEQ ID NO: 2252303 - RNA, 11 nt, Human
aauaauaauua

SEQ ID NO: 2252304 - RNA, 21 nt, Human
aauaauaauuauccagaguuu

SEQ ID NO: 2252305 - RNA, 20 nt, Human
aauaauacauugaauuagaa

SEQ ID NO: 2252306 - RNA, 18 nt, Human
aauaauaccuaagccuuc

SEQ ID NO: 2252307 - RNA, 14 nt, Human
aauaauacacuaau

SEQ ID NO: 2252308 - RNA, 12 nt, Human
aauaauauacuu

SEQ ID NO: 2252309 - RNA, 13 nt, Human
aauaauauacuug

SEQ ID NO: 2252310 - RNA, 16 nt, Human
aauaauauacuugugg

SEQ ID NO: 2252311 - RNA, 17 nt, Human
aauaauauauuuuaaau

SEQ ID NO: 2252312 - RNA, 13 nt, Human
aauaauauauguu

SEQ ID NO: 2252313 - RNA, 11 nt, Human
aauaauaugca

SEQ ID NO: 2252314 - RNA, 12 nt, Human
aauaauaugcau

SEQ ID NO: 2252315 - RNA, 13 nt, Human
aauaauaugcauu

SEQ ID NO: 2252316 - RNA, 15 nt, Human
aauaauaugcauugu

SEQ ID NO: 2252317 - RNA, 15 nt, Human
aauaauauauuuucu

SEQ ID NO: 2252318 - RNA, 17 nt, Human
aauaauauauuuucugu

SEQ ID NO: 2252319 - RNA, 19 nt, Human
aauaauauauuuucuguuu

SEQ ID NO: 2252320 - RNA, 17 nt, Human
aauaauaugcauuguca

SEQ ID NO: 2252321 - RNA, 14 nt, Human
aauaauauauguuu

SEQ ID NO: 2252322 - RNA, 12 nt, Human
aauaauguuuca

SEQ ID NO: 2252323 - RNA, 14 nt, Human
aauaauguuucaaa

SEQ ID NO: 2252324 - RNA, 19 nt, Human
aauaauguuucaaacauau

SEQ ID NO: 2252325 - RNA, 18 nt, Human
aauaaagccuucaaacuc

SEQ ID NO: 2252326 - RNA, 15 nt, Human
aauaaagccugcuuu

SEQ ID NO: 2252327 - RNA, 15 nt, Human
aauaaagcccuggga

SEQ ID NO: 2252328 - RNA, 12 nt, Human
aauaaacgauuu

SEQ ID NO: 2252329 - RNA, 15 nt, Human
aauaaacgauuuaau

SEQ ID NO: 2252330 - RNA, 20 nt, Human
aauaaaccucaaaaugucua

SEQ ID NO: 2252331 - RNA, 11 nt, Human
aauaaagcugu

SEQ ID NO: 2252332 - RNA, 19 nt, Human
aauaaagcuguguggcagu

SEQ ID NO: 2252333 - RNA, 14 nt, Human
aauaauaaauauuu

SEQ ID NO: 2252334 - RNA, 18 nt, Human
aauaauaaagaugcucuu

SEQ ID NO: 2252335 - RNA, 21 nt, Human
aauaauaaagaucauguaaaa

SEQ ID NO: 2252336 - RNA, 19 nt, Human
aauaauaaagaugcucuuu

SEQ ID NO: 2252337 - RNA, 21 nt, Human
aauaaacgauuuaauucucuu

SEQ ID NO: 2252338 - RNA, 16 nt, Human
aauaaaggaugugauu

SEQ ID NO: 2252339 - RNA, 13 nt, Human
aauaauaaagauc

SEQ ID NO: 2252340 - RNA, 16 nt, Human
aaguugcagugagcug

SEQ ID NO: 2252341 - RNA, 15 nt, Human
aauaaaauugcacuu

SEQ ID NO: 2252342 - RNA, 12 nt, Human
aauaaaauugua

SEQ ID NO: 2252343 - RNA, 14 nt, Human
aauaaaauuguaaa

SEQ ID NO: 2252344 - RNA, 11 nt, Human
aauaaaauuug

SEQ ID NO: 2252345 - RNA, 12 nt, Human
aauaaaauuugu

SEQ ID NO: 2252346 - RNA, 13 nt, Human
aauaaaauuuguu

SEQ ID NO: 2252347 - RNA, 14 nt, Human
aauaaaauuuguug

SEQ ID NO: 2252348 - RNA, 18 nt, Human
aaguugauggugaugaaa

SEQ ID NO: 2252349 - RNA, 14 nt, Human
aaguugaugcaauc

SEQ ID NO: 2252350 - RNA, 15 nt, Human
aaguugcacggcugc

SEQ ID NO: 2252351 - RNA, 16 nt, Human
aaguugcacggcugcu

SEQ ID NO: 2252352 - RNA, 18 nt, Human
aaguugcacggcugcuga

SEQ ID NO: 2252353 - RNA, 18 nt, Human
aaguugcacugauauuuu

SEQ ID NO: 2252354 - RNA, 20 nt, Human
aaguugcacugauauuuuac

SEQ ID NO: 2252355 - RNA, 22 nt, Human
aauaaaauuuuuuuucauguuu

SEQ ID NO: 2252356 - RNA, 13 nt, Human
aauaaacaaauaa

SEQ ID NO: 2252357 - RNA, 17 nt, Human
aauaaaccucaaaaugu

SEQ ID NO: 2252358 - RNA, 10 nt, Human
aauaaaccau

SEQ ID NO: 2252359 - RNA, 12 nt, Human
aauaaaauuuuu

SEQ ID NO: 2252360 - RNA, 19 nt, Human
aauaaaauuuuuuuucaug

SEQ ID NO: 2252361 - RNA, 18 nt, Human
aauaaaauuuuuuuucau

SEQ ID NO: 2252362 - RNA, 16 nt, Human
aauaaaauuuguugca

SEQ ID NO: 2252363 - RNA, 17 nt, Human
aauaaaauuuguugcau

SEQ ID NO: 2252364 - RNA, 15 nt, Human
aaguucuuaguugcu

SEQ ID NO: 2252365 - RNA, 19 nt, Human
aaguucuguacucaaaugu

SEQ ID NO: 2252366 - RNA, 19 nt, Human
aaguucuggaugcauuucu

SEQ ID NO: 2252367 - RNA, 22 nt, Human
aaguucuuaguugcuguauguc

SEQ ID NO: 2252368 - RNA, 20 nt, Human
aaguucuggaugcauuucuc

SEQ ID NO: 2252369 - RNA, 15 nt, Human
aaguucuucuccaau

SEQ ID NO: 2252370 - RNA, 22 nt, Human
aaguugauaugccuuuucccaa

SEQ ID NO: 2252371 - RNA, 19 nt, Human
aagugggggcagagggcag

SEQ ID NO: 2252372 - RNA, 18 nt, Human
aaguggggugcugggagg

SEQ ID NO: 2252373 - RNA, 20 nt, Human
aagugggguugcaaccacug

SEQ ID NO: 2252374 - RNA, 15 nt, Human
aaguggggcucgcca

SEQ ID NO: 2252375 - RNA, 13 nt, Human
aaguggggcucgc

SEQ ID NO: 2252376 - RNA, 14 nt, Human
aagugggugagaug

SEQ ID NO: 2252377 - RNA, 19 nt, Human
aagugggugagaugcugga

SEQ ID NO: 2252378 - RNA, 19 nt, Human
aaguggguuauucuggagu

SEQ ID NO: 2252379 - RNA, 21 nt, Human
aagugggccaggacaggcccg

SEQ ID NO: 2252380 - RNA, 16 nt, Human
aagugggcuugauucu

SEQ ID NO: 2252381 - RNA, 12 nt, Human
aagugggcuuga

SEQ ID NO: 2252382 - RNA, 16 nt, Human
aagugggccaggacag

SEQ ID NO: 2252383 - RNA, 22 nt, Human
aagugggcuugauucugcagua

SEQ ID NO: 2252384 - RNA, 15 nt, Human
aaguggggacagagc

SEQ ID NO: 2252385 - RNA, 18 nt, Human
aaguauacuguauuuuua

SEQ ID NO: 2252386 - RNA, 12 nt, Human
aaguauacugua

SEQ ID NO: 2252387 - RNA, 15 nt, Human
aaguauacauaaguu

SEQ ID NO: 2252388 - RNA, 20 nt, Human
aaguaguuuguauaacuucu

SEQ ID NO: 2252389 - RNA, 12 nt, Human
aaguaguuugua

SEQ ID NO: 2252390 - RNA, 13 nt, Human
aaguaggaaguaa

SEQ ID NO: 2252391 - RNA, 15 nt, Human
aaguagugugcaguu

SEQ ID NO: 2252392 - RNA, 23 nt, Human
aagugcguguguagaguuaagaa

SEQ ID NO: 2252393 - RNA, 13 nt, Human
aagugcugcauuu

SEQ ID NO: 2252394 - RNA, 14 nt, Human
aagugcugcauuua

SEQ ID NO: 2252395 - RNA, 16 nt, Human
aacaaacucucugaac

SEQ ID NO: 2252396 - RNA, 14 nt, Human
aacaaacuauuucu

SEQ ID NO: 2252397 - RNA, 15 nt, Human
aacaaacuauuucuu

SEQ ID NO: 2252398 - RNA, 22 nt, Human
aacaaaccuguuucugcagcca

SEQ ID NO: 2252399 - RNA, 12 nt, Human
aacaaauaugca

SEQ ID NO: 2252400 - RNA, 13 nt, Human
aacaaauaugcaa

SEQ ID NO: 2252401 - RNA, 13 nt, Human
aacaaaguuacua

SEQ ID NO: 2252402 - RNA, 18 nt, Human
aacaaaggguuuuaaugu

SEQ ID NO: 2252403 - RNA, 23 nt, Human
aacaaaguuacuagguaacuuca

SEQ ID NO: 2252404 - RNA, 16 nt, Human
aacaaagguugagaug

SEQ ID NO: 2252405 - RNA, 21 nt, Human
aacaaauuagguuuuguacaa

SEQ ID NO: 2252406 - RNA, 22 nt, Human
aacacaggcaaaauccuugcuu

SEQ ID NO: 2252407 - RNA, 14 nt, Human
aacaaaugugaagg

SEQ ID NO: 2252408 - RNA, 21 nt, Human
aacacauacaggaagguagaa

SEQ ID NO: 2252409 - RNA, 19 nt, Human
aacacagugccuucaauaa

SEQ ID NO: 2252410 - RNA, 16 nt, Human
aacacaguguuuuugu

SEQ ID NO: 2252411 - RNA, 19 nt, Human
aacaaauuagguuuuguac

SEQ ID NO: 2252412 - RNA, 20 nt, Human
aacaaauuagguuuuguaca

SEQ ID NO: 2252413 - RNA, 19 nt, Human
aacaccucugcacaagcug

SEQ ID NO: 2252414 - RNA, 17 nt, Human
aacacuaacaugauuug

SEQ ID NO: 2252415 - RNA, 23 nt, Human
aacaccucccaggagacaguuca

SEQ ID NO: 2252416 - RNA, 13 nt, Human
aacaccucccagg

SEQ ID NO: 2252417 - RNA, 18 nt, Human
aacacuaacuaugcaugg

SEQ ID NO: 2252418 - RNA, 16 nt, Human
aacaccuccucaugua

SEQ ID NO: 2252419 - RNA, 11 nt, Human
aacacuaaccu

SEQ ID NO: 2252420 - RNA, 18 nt, Human
aacacccucgaagcgcgc

SEQ ID NO: 2252421 - RNA, 19 nt, Human
aacaccuagcuuuauucuu

SEQ ID NO: 2252422 - RNA, 21 nt, Human
aacacccucacacugggacuu

SEQ ID NO: 2252423 - RNA, 16 nt, Human
aacacccuauauuuug

SEQ ID NO: 2252424 - RNA, 17 nt, Human
aacacccucacacuggg

SEQ ID NO: 2252425 - RNA, 22 nt, Human
aacacaguguuuuuguaaagug

SEQ ID NO: 2252426 - RNA, 18 nt, Human
aacacaguguuuuuguaa

SEQ ID NO: 2252427 - RNA, 19 nt, Human
aacacaguguuuuuguaaa

SEQ ID NO: 2252428 - RNA, 20 nt, Human
aacacaguguuuuuguaaag

SEQ ID NO: 2252429 - RNA, 21 nt, Human
aacacaguguuuuuguaaagu

SEQ ID NO: 2252430 - RNA, 12 nt, Human
aacacaucagcu

SEQ ID NO: 2252431 - RNA, 13 nt, Human
aacaaaauuucua

SEQ ID NO: 2252432 - RNA, 15 nt, Human
aacaaaauuucuauu

SEQ ID NO: 2252433 - RNA, 19 nt, Human
aacaaaauuuguuugaaau

SEQ ID NO: 2252434 - RNA, 16 nt, Human
aaauugguucuuuauu

SEQ ID NO: 2252435 - RNA, 22 nt, Human
aaauugguuggagaauuuaggu

SEQ ID NO: 2252436 - RNA, 20 nt, Human
aaauugguaucaagaaaguc

SEQ ID NO: 2252437 - RNA, 18 nt, Human
aaauugaugggauuuggu

SEQ ID NO: 2252438 - RNA, 14 nt, Human
aaauugauguguuu

SEQ ID NO: 2252439 - RNA, 17 nt, Human
aaauugagagaauggaa

SEQ ID NO: 2252440 - RNA, 13 nt, Human
aaauugagagaau

SEQ ID NO: 2252441 - RNA, 15 nt, Human
aaauugacauugcuu

SEQ ID NO: 2252442 - RNA, 22 nt, Human
aaauugacagaucaagcuguga

SEQ ID NO: 2252443 - RNA, 22 nt, Human
aaauugacacuuaaaaaugguu

SEQ ID NO: 2252444 - RNA, 14 nt, Human
aaauuaacuuuuau

SEQ ID NO: 2252445 - RNA, 13 nt, Human
aaauuaacuuuua

SEQ ID NO: 2252446 - RNA, 20 nt, Human
aaauuaaccauagauguaga

SEQ ID NO: 2252447 - RNA, 17 nt, Human
aaauuaacuugaguuuu

SEQ ID NO: 2252448 - RNA, 12 nt, Human
aaauuaacuuuu

SEQ ID NO: 2252449 - RNA, 22 nt, Human
aaauguuuuuuuuuaaagacuu

SEQ ID NO: 2252450 - RNA, 23 nt, Human
aaauguugaauaaaaauauguac

SEQ ID NO: 2252451 - RNA, 21 nt, Human
aaauuaaaaaaaaaaaacuuu

SEQ ID NO: 2252452 - RNA, 19 nt, Human
aaauuaaaaaaaaaaaacu

SEQ ID NO: 2252453 - RNA, 15 nt, Human
aaauguucuuugggg

SEQ ID NO: 2252454 - RNA, 21 nt, Human
aaauguugaaaagucaaacug

SEQ ID NO: 2252455 - RNA, 12 nt, Human
aaauguugaaua

SEQ ID NO: 2252456 - RNA, 15 nt, Human
aaauguugaauaaaa

SEQ ID NO: 2252457 - RNA, 18 nt, Human
aaauguuuuuuuuuaaag

SEQ ID NO: 2252458 - RNA, 21 nt, Human
aaauguuuuuuuuuaaagacu

SEQ ID NO: 2252459 - RNA, 20 nt, Human
aaauguucaucaaugaauga

SEQ ID NO: 2252460 - RNA, 20 nt, Human
aaaugcuagguuaauuccaa

SEQ ID NO: 2252461 - RNA, 18 nt, Human
aaaucuguuugaucccug

SEQ ID NO: 2252462 - RNA, 19 nt, Human
aaaucuguuugaucccugu

SEQ ID NO: 2252463 - RNA, 19 nt, Human
aaaucugugccugagaaca

SEQ ID NO: 2252464 - RNA, 14 nt, Human
aaaucuuaacuuga

SEQ ID NO: 2252465 - RNA, 18 nt, Human
aaaucugcuuuuuaaaga

SEQ ID NO: 2252466 - RNA, 20 nt, Human
aaaucugcuggaguuucaug

SEQ ID NO: 2252467 - RNA, 23 nt, Human
aaaucugcagaaggaaaaaugug

SEQ ID NO: 2252468 - RNA, 18 nt, Human
aaaucugacccagugccc

SEQ ID NO: 2252469 - RNA, 22 nt, Human
aaaucugcuggaguuucaugua

SEQ ID NO: 2252470 - RNA, 19 nt, Human
aaaucugugaugauccuca

SEQ ID NO: 2252471 - RNA, 23 nt, Human
aaaucugugaugauccucauaug

SEQ ID NO: 2252472 - RNA, 17 nt, Human
aaaucugaccaaaacaa

SEQ ID NO: 2252473 - RNA, 14 nt, Human
aaaucugacccagu

SEQ ID NO: 2252474 - RNA, 20 nt, Human
aaaucugacccagugccccc

SEQ ID NO: 2252475 - RNA, 13 nt, Human
aaaucugaagacc

SEQ ID NO: 2252476 - RNA, 11 nt, Human
aaaucugaaga

SEQ ID NO: 2252477 - RNA, 13 nt, Human
aaaucucuaauau

SEQ ID NO: 2252478 - RNA, 15 nt, Human
aaaucucuaauaugg

SEQ ID NO: 2252479 - RNA, 12 nt, Human
aaaucucuaaua

SEQ ID NO: 2252480 - RNA, 22 nt, Human
aaaucuccaaaauaaaacuuuu

SEQ ID NO: 2252481 - RNA, 16 nt, Human
aaauggacacugugcc

SEQ ID NO: 2252482 - RNA, 17 nt, Human
aaaugcugcgcccuucc

SEQ ID NO: 2252483 - RNA, 16 nt, Human
aaaugcugccugccug

SEQ ID NO: 2252484 - RNA, 19 nt, Human
aaauggacauaggacucaa

SEQ ID NO: 2252485 - RNA, 15 nt, Human
aaauggacguguuau

SEQ ID NO: 2252486 - RNA, 17 nt, Human
aaauggacguguuauga

SEQ ID NO: 2252487 - RNA, 15 nt, Human
aaaugcugaacauug

SEQ ID NO: 2252488 - RNA, 12 nt, Human
aaaugcugaaca

SEQ ID NO: 2252489 - RNA, 14 nt, Human
aaaugcuauuuuuu

SEQ ID NO: 2252490 - RNA, 14 nt, Human
aaauggacguguua

SEQ ID NO: 2252491 - RNA, 14 nt, Human
aaaugcugcauuuu

SEQ ID NO: 2252492 - RNA, 13 nt, Human
aaaugcugccugc

SEQ ID NO: 2252493 - RNA, 14 nt, Human
aaaugcugccugcc

SEQ ID NO: 2252494 - RNA, 21 nt, Human
aaccagggagccccuuugaug

SEQ ID NO: 2252495 - RNA, 16 nt, Human
aaccagggagacugca

SEQ ID NO: 2252496 - RNA, 21 nt, Human
aaccagguuuagacaguauga

SEQ ID NO: 2252497 - RNA, 19 nt, Human
aaccagggaagcugucccu

SEQ ID NO: 2252498 - RNA, 18 nt, Human
aaccagggaagcuguccc

SEQ ID NO: 2252499 - RNA, 14 nt, Human
aacauggacuugua

SEQ ID NO: 2252500 - RNA, 15 nt, Human
aacauggaaguacua

SEQ ID NO: 2252501 - RNA, 22 nt, Human
aacauggaacucauuccugccu

SEQ ID NO: 2252502 - RNA, 22 nt, Human
aacaucuguccugugaaagacu

SEQ ID NO: 2252503 - RNA, 16 nt, Human
aacaucugaaagccac

SEQ ID NO: 2252504 - RNA, 15 nt, Human
aacauccuuccuucc

SEQ ID NO: 2252505 - RNA, 21 nt, Human
aacaucugagaaaagcuuuga

SEQ ID NO: 2252506 - RNA, 17 nt, Human
aacaucuagcaaauguu

SEQ ID NO: 2252507 - RNA, 14 nt, Human
aacaucuauucucu

SEQ ID NO: 2252508 - RNA, 22 nt, Human
aacaugcuacacacugcauguu

SEQ ID NO: 2252509 - RNA, 18 nt, Human
aaccaguuucagguguuu

SEQ ID NO: 2252510 - RNA, 15 nt, Human
aaccauaaaaagcug

SEQ ID NO: 2252511 - RNA, 14 nt, Human
aaccaguuauguga

SEQ ID NO: 2252512 - RNA, 13 nt, Human
aaccaguuggcua

SEQ ID NO: 2252513 - RNA, 23 nt, Human
aaccaguuggcuaggggagcagg

SEQ ID NO: 2252514 - RNA, 19 nt, Human
aaccaguguuguggauuua

SEQ ID NO: 2252515 - RNA, 17 nt, Human
aaccaguguuguggauu

SEQ ID NO: 2252516 - RNA, 23 nt, Human
aacccuuaccccuuagccucccu

SEQ ID NO: 2252517 - RNA, 21 nt, Human
aacccuuaccccuuagccucc

SEQ ID NO: 2252518 - RNA, 20 nt, Human
aacccuuccccacugcacac

SEQ ID NO: 2252519 - RNA, 23 nt, Human
aacccuuaggacagggucccugc

SEQ ID NO: 2252520 - RNA, 13 nt, Human
aacccuucagugc

SEQ ID NO: 2252521 - RNA, 22 nt, Human
aacccuguuuuauacuguacuu

SEQ ID NO: 2252522 - RNA, 20 nt, Human
aacccuguuuuauacuguac

SEQ ID NO: 2252523 - RNA, 23 nt, Human
aacccuguuuuauacuguacuua

SEQ ID NO: 2252524 - RNA, 16 nt, Human
aacccuguuuuauacu

SEQ ID NO: 2252525 - RNA, 15 nt, Human
aacccuguuuuauac

SEQ ID NO: 2252526 - RNA, 18 nt, Human
aaccauaaacuucauggu

SEQ ID NO: 2252527 - RNA, 21 nt, Human
aaccauaccuuccuucccugg

SEQ ID NO: 2252528 - RNA, 13 nt, Human
aaccauaaacuuc

SEQ ID NO: 2252529 - RNA, 18 nt, Human
aaccauaacaacuucaua

SEQ ID NO: 2252530 - RNA, 11 nt, Human
aacccuucucc

SEQ ID NO: 2252531 - RNA, 18 nt, Human
aacccuucuccucuugua

SEQ ID NO: 2252532 - RNA, 20 nt, Human
aacccuucuccucuuguaaa

SEQ ID NO: 2252533 - RNA, 21 nt, Human
aacccuucuccucuuguaaau

SEQ ID NO: 2252534 - RNA, 13 nt, Human
aaccgaugcucca

SEQ ID NO: 2252535 - RNA, 22 nt, Human
aaccgagcaaagaucaaaauaa

SEQ ID NO: 2252536 - RNA, 20 nt, Human
aaccgaggggcucaggaaaa

SEQ ID NO: 2252537 - RNA, 21 nt, Human
aaccgaugcuccagccaaccc

SEQ ID NO: 2252538 - RNA, 17 nt, Human
aaccgaugcuccagcca

SEQ ID NO: 2252539 - RNA, 15 nt, Human
aaccgaugcuccagc

SEQ ID NO: 2252540 - RNA, 15 nt, Human
aaccgcaggaagcug

SEQ ID NO: 2252541 - RNA, 14 nt, Human
aaccgcaggaagcu

SEQ ID NO: 2252542 - RNA, 13 nt, Human
aaccgcaggaagc

SEQ ID NO: 2252543 - RNA, 18 nt, Human
aaccgcacucacccaugu

SEQ ID NO: 2252544 - RNA, 21 nt, Human
aaccgcaggaagcugcuccgu

SEQ ID NO: 2252545 - RNA, 21 nt, Human
aaccggauggcggacaccugg

SEQ ID NO: 2252546 - RNA, 14 nt, Human
aaccgcugaauaug

SEQ ID NO: 2252547 - RNA, 14 nt, Human
aacacuauauggca

SEQ ID NO: 2252548 - RNA, 18 nt, Human
aacacuauauggcagugu

SEQ ID NO: 2252549 - RNA, 14 nt, Human
aacacuagccagac

SEQ ID NO: 2252550 - RNA, 20 nt, Human
aacacuauauggcagugucu

SEQ ID NO: 2252551 - RNA, 15 nt, Human
aacacuauaaagguu

SEQ ID NO: 2252552 - RNA, 12 nt, Human
aacaggagaauu

SEQ ID NO: 2252553 - RNA, 21 nt, Human
aacaggagcugggauccuaag

SEQ ID NO: 2252554 - RNA, 14 nt, Human
aacaggaggacaau

SEQ ID NO: 2252555 - RNA, 19 nt, Human
aacaggagcugggauccua

SEQ ID NO: 2252556 - RNA, 17 nt, Human
aacaggagacaggaagg

SEQ ID NO: 2252557 - RNA, 20 nt, Human
aacaggaccacaaaaaugaa

SEQ ID NO: 2252558 - RNA, 20 nt, Human
aacaggaaucaagagcugcc

SEQ ID NO: 2252559 - RNA, 10 nt, Human
aacagcucag

SEQ ID NO: 2252560 - RNA, 14 nt, Human
aacaggaagaucuu

SEQ ID NO: 2252561 - RNA, 22 nt, Human
aacaggaagaucuuaaauuuug

SEQ ID NO: 2252562 - RNA, 10 nt, Human
aacaggaagc

SEQ ID NO: 2252563 - RNA, 19 nt, Human
aacagcuaugggagcccca

SEQ ID NO: 2252564 - RNA, 18 nt, Human
aacagcuaugggagcccc

SEQ ID NO: 2252565 - RNA, 23 nt, Human
aacagcguuuaagacuguaauga

SEQ ID NO: 2252566 - RNA, 22 nt, Human
aacaggaaaggcucgaaauaca

SEQ ID NO: 2252567 - RNA, 22 nt, Human
aacagcuaugggagccccaggg

SEQ ID NO: 2252568 - RNA, 18 nt, Human
aacagcucaagucuuccc

SEQ ID NO: 2252569 - RNA, 19 nt, Human
aacaggauuagacagucaa

SEQ ID NO: 2252570 - RNA, 22 nt, Human
aacaggaggacaauucaugaac

SEQ ID NO: 2252571 - RNA, 15 nt, Human
aacaucccuccuggg

SEQ ID NO: 2252572 - RNA, 16 nt, Human
aacaggauuagacagu

SEQ ID NO: 2252573 - RNA, 16 nt, Human
aacaggaggacaauuc

SEQ ID NO: 2252574 - RNA, 17 nt, Human
aacaggaggacaauuca

SEQ ID NO: 2252575 - RNA, 18 nt, Human
aacaggaggacaauucau

SEQ ID NO: 2252576 - RNA, 19 nt, Human
aacaggaggacaauucaug

SEQ ID NO: 2252577 - RNA, 19 nt, Human
aacauccuucaagaacucu

SEQ ID NO: 2252578 - RNA, 22 nt, Human
aacauccuaucaacaacaaggu

SEQ ID NO: 2252579 - RNA, 22 nt, Human
aacauccuuucuauugaaaaau

SEQ ID NO: 2252580 - RNA, 22 nt, Human
aacauccuacaagacacaguga

SEQ ID NO: 2252581 - RNA, 15 nt, Human
aacauccuacaagac

SEQ ID NO: 2252582 - RNA, 13 nt, Human
aacagcgcugggu

SEQ ID NO: 2252583 - RNA, 21 nt, Human
aacagauuugugaacucagcc

SEQ ID NO: 2252584 - RNA, 22 nt, Human
aacagauuugugaacucagcca

SEQ ID NO: 2252585 - RNA, 23 nt, Human
aacagauuugugaacucagccaa

SEQ ID NO: 2252586 - RNA, 16 nt, Human
aacagauuuugggguu

SEQ ID NO: 2252587 - RNA, 13 nt, Human
aacagauuuuuac

SEQ ID NO: 2252588 - RNA, 14 nt, Human
aacagauuuuuaca

SEQ ID NO: 2252589 - RNA, 17 nt, Human
aacagauuuuuacaaau

SEQ ID NO: 2252590 - RNA, 16 nt, Human
aacagcuaaugggaca

SEQ ID NO: 2252591 - RNA, 20 nt, Human
aacagcggcuggacuuggag

SEQ ID NO: 2252592 - RNA, 14 nt, Human
aacagcguuuaaga

SEQ ID NO: 2252593 - RNA, 13 nt, Human
aacagauuuguga

SEQ ID NO: 2252594 - RNA, 14 nt, Human
aacagauuugugaa

SEQ ID NO: 2252595 - RNA, 15 nt, Human
aacagauuugugaac

SEQ ID NO: 2252596 - RNA, 16 nt, Human
aacagauuugugaacu

SEQ ID NO: 2252597 - RNA, 18 nt, Human
aacagauuugugaacuca

SEQ ID NO: 2252598 - RNA, 18 nt, Human
aacuguucccaccugcug

SEQ ID NO: 2252599 - RNA, 15 nt, Human
aacuguucccaccug

SEQ ID NO: 2252600 - RNA, 13 nt, Human
aacuguucccacc

SEQ ID NO: 2252601 - RNA, 22 nt, Human
aacuguuauuuauaaucacuuu

SEQ ID NO: 2252602 - RNA, 20 nt, Human
aacuguuauuuauaaucacu

SEQ ID NO: 2252603 - RNA, 17 nt, Human
aacuguuauuuauaauc

SEQ ID NO: 2252604 - RNA, 16 nt, Human
aacuguuauuuauaau

SEQ ID NO: 2252605 - RNA, 15 nt, Human
aacuguuauuuauaa

SEQ ID NO: 2252606 - RNA, 22 nt, Human
aacugagcuccucugggcagga

SEQ ID NO: 2252607 - RNA, 19 nt, Human
aacuguguuucaaguucaa

SEQ ID NO: 2252608 - RNA, 22 nt, Human
aacuguguuucaaguucaaucc

SEQ ID NO: 2252609 - RNA, 19 nt, Human
aacuguuaaauugcugugu

SEQ ID NO: 2252610 - RNA, 14 nt, Human
aacuguuaugaaau

SEQ ID NO: 2252611 - RNA, 18 nt, Human
aacugagcuccucugggc

SEQ ID NO: 2252612 - RNA, 14 nt, Human
aacugagcuccucu

SEQ ID NO: 2252613 - RNA, 12 nt, Human
aacugaggaauu

SEQ ID NO: 2252614 - RNA, 21 nt, Human
aacugagcuuggaagcuucug

SEQ ID NO: 2252615 - RNA, 16 nt, Human
aacugaggaauuuucu

SEQ ID NO: 2252616 - RNA, 18 nt, Human
aacugaggaauuucaccu

SEQ ID NO: 2252617 - RNA, 13 nt, Human
aacugaggaauuu

SEQ ID NO: 2252618 - RNA, 17 nt, Human
aacugagcuuggaagcu

SEQ ID NO: 2252619 - RNA, 13 nt, Human
aacugagcuugga

SEQ ID NO: 2252620 - RNA, 23 nt, Human
aacugagaugugaacacaucagc

SEQ ID NO: 2252621 - RNA, 18 nt, Human
aacucaucauaaaauaaa

SEQ ID NO: 2252622 - RNA, 21 nt, Human
aacucaucccuaaugcugcag

SEQ ID NO: 2252623 - RNA, 22 nt, Human
aacucaucccuaaugcugcaga

SEQ ID NO: 2252624 - RNA, 17 nt, Human
aacucaucauaaaauaa

SEQ ID NO: 2252625 - RNA, 16 nt, Human
aacucaucauaaaaua

SEQ ID NO: 2252626 - RNA, 13 nt, Human
aacugaagccaga

SEQ ID NO: 2252627 - RNA, 21 nt, Human
aacugaagcagccucucccca

SEQ ID NO: 2252628 - RNA, 15 nt, Human
aacucaucauaaaau

SEQ ID NO: 2252629 - RNA, 14 nt, Human
aacucaucauaaaa

SEQ ID NO: 2252630 - RNA, 15 nt, Human
aacugaaggagaagg

SEQ ID NO: 2252631 - RNA, 13 nt, Human
aacugaaggagaa

SEQ ID NO: 2252632 - RNA, 14 nt, Human
aacugaagucugaa

SEQ ID NO: 2252633 - RNA, 16 nt, Human
aacugaagucugaaau

SEQ ID NO: 2252634 - RNA, 16 nt, Human
aacugaaguuucacau

SEQ ID NO: 2252635 - RNA, 15 nt, Human
aacugaagucugaaa

SEQ ID NO: 2252636 - RNA, 10 nt, Human
aacugaauaa

SEQ ID NO: 2252637 - RNA, 12 nt, Human
aacugaauaaau

SEQ ID NO: 2252638 - RNA, 22 nt, Human
aacugaauggaagguuuguaua

SEQ ID NO: 2252639 - RNA, 20 nt, Human
aacugaauguuuauuccuug

SEQ ID NO: 2252640 - RNA, 12 nt, Human
aacugaaugaga

SEQ ID NO: 2252641 - RNA, 23 nt, Human
aacugaaugaaacccccacacac

SEQ ID NO: 2252642 - RNA, 18 nt, Human
aacugaaugaaaccccca

SEQ ID NO: 2252643 - RNA, 13 nt, Human
aacgguuaaaacu

SEQ ID NO: 2252644 - RNA, 14 nt, Human
aacgguuaaaacug

SEQ ID NO: 2252645 - RNA, 17 nt, Human
aacgguaaauuucugug

SEQ ID NO: 2252646 - RNA, 12 nt, Human
aacggggagaaa

SEQ ID NO: 2252647 - RNA, 15 nt, Human
aacgggguccuucaa

SEQ ID NO: 2252648 - RNA, 18 nt, Human
aacggggcucuucucauu

SEQ ID NO: 2252649 - RNA, 17 nt, Human
aacgggcugcccugcca

SEQ ID NO: 2252650 - RNA, 16 nt, Human
aacggggcucuucuca

SEQ ID NO: 2252651 - RNA, 17 nt, Human
aacguaaccacggaaaa

SEQ ID NO: 2252652 - RNA, 15 nt, Human
aacucaaaauauuug

SEQ ID NO: 2252653 - RNA, 15 nt, Human
aacguauaaaagccu

SEQ ID NO: 2252654 - RNA, 16 nt, Human
aacgcguguguacacg

SEQ ID NO: 2252655 - RNA, 17 nt, Human
aacgcuaaagagcccuu

SEQ ID NO: 2252656 - RNA, 21 nt, Human
aacgcuaaagagcccuugccu

SEQ ID NO: 2252657 - RNA, 22 nt, Human
aacgcuaaagagcccuugccuc

SEQ ID NO: 2252658 - RNA, 17 nt, Human
aacucaccuaauguuua

SEQ ID NO: 2252659 - RNA, 23 nt, Human
aacucauacugugcuggagccac

SEQ ID NO: 2252660 - RNA, 22 nt, Human
aacucacccccaaggggcaguc

SEQ ID NO: 2252661 - RNA, 14 nt, Human
aacucaccuaacuc

SEQ ID NO: 2252662 - RNA, 18 nt, Human
aacucaccccagccccaa

SEQ ID NO: 2252663 - RNA, 16 nt, Human
aacucaccccagcccc

SEQ ID NO: 2252664 - RNA, 17 nt, Human
aacucaccccagcccca

SEQ ID NO: 2252665 - RNA, 22 nt, Human
aacucaaacugaggaauuucac

SEQ ID NO: 2252666 - RNA, 16 nt, Human
aacucaaaauauuugu

SEQ ID NO: 2252667 - RNA, 18 nt, Human
aacguaugcaugugaaga

SEQ ID NO: 2252668 - RNA, 21 nt, Human
aacguaugcaugugaagaaag

SEQ ID NO: 2252669 - RNA, 17 nt, Human
aacucaaacucuuaaaa

SEQ ID NO: 2252670 - RNA, 23 nt, Human
aacucaaauggggccagauccag

SEQ ID NO: 2252671 - RNA, 22 nt, Human
aacucaaauggggccagaucca

SEQ ID NO: 2252672 - RNA, 21 nt, Human
aacucaaauggggccagaucc

SEQ ID NO: 2252673 - RNA, 18 nt, Human
aacucaaauggggccaga

SEQ ID NO: 2252674 - RNA, 11 nt, Human
aacucaaaugc

SEQ ID NO: 2252675 - RNA, 22 nt, Human
aacucaaaugcuuggcuucuca

SEQ ID NO: 2252676 - RNA, 23 nt, Human
aacgacaaagccaaacucugcca

SEQ ID NO: 2252677 - RNA, 11 nt, Human
aacgaaugaag

SEQ ID NO: 2252678 - RNA, 23 nt, Human
aaccuuuuuuaagauuuuucuca

SEQ ID NO: 2252679 - RNA, 14 nt, Human
aacgacaauagcuu

SEQ ID NO: 2252680 - RNA, 18 nt, Human
aacgacugggcacugcca

SEQ ID NO: 2252681 - RNA, 23 nt, Human
aacgagaggggaagaguguacug

SEQ ID NO: 2252682 - RNA, 12 nt, Human
aacgaggaagcc

SEQ ID NO: 2252683 - RNA, 16 nt, Human
aacgagucaauccccu

SEQ ID NO: 2252684 - RNA, 17 nt, Human
aaccuuuuuuaagauuu

SEQ ID NO: 2252685 - RNA, 18 nt, Human
aaccuuuuuuaagauuuu

SEQ ID NO: 2252686 - RNA, 21 nt, Human
aaccuuuuuuaagauuuuucu

SEQ ID NO: 2252687 - RNA, 22 nt, Human
aaccuuuuuuaagauuuuucuc

SEQ ID NO: 2252688 - RNA, 16 nt, Human
aaacaggagacaggaa

SEQ ID NO: 2252689 - RNA, 17 nt, Human
aaacaggagacaggaag

SEQ ID NO: 2252690 - RNA, 18 nt, Human
aaacaggagacaggaagg

SEQ ID NO: 2252691 - RNA, 12 nt, Human
aaacaggagaga

SEQ ID NO: 2252692 - RNA, 11 nt, Human
aaacaggacca

SEQ ID NO: 2252693 - RNA, 15 nt, Human
aaacagcguuuaaga

SEQ ID NO: 2252694 - RNA, 17 nt, Human
aaacagcuaaugggaca

SEQ ID NO: 2252695 - RNA, 21 nt, Human
aaacaggcaguuggccagaga

SEQ ID NO: 2252696 - RNA, 11 nt, Human
aaacaggcagu

SEQ ID NO: 2252697 - RNA, 19 nt, Human
aaacagggcaucuccagga

SEQ ID NO: 2252698 - RNA, 13 nt, Human
aaacaggcccagc

SEQ ID NO: 2252699 - RNA, 14 nt, Human
aaacaggcccagca

SEQ ID NO: 2252700 - RNA, 15 nt, Human
aaacaggcccagcau

SEQ ID NO: 2252701 - RNA, 17 nt, Human
aaacagggcaucuccag

SEQ ID NO: 2252702 - RNA, 13 nt, Human
aaaauucuuggaa

SEQ ID NO: 2252703 - RNA, 20 nt, Human
aaaauucuguagguucugug

SEQ ID NO: 2252704 - RNA, 21 nt, Human
aaacagcauugcuuucugaaa

SEQ ID NO: 2252705 - RNA, 17 nt, Human
aaacagcauugcuuucu

SEQ ID NO: 2252706 - RNA, 16 nt, Human
aaacagcauugcuuuc

SEQ ID NO: 2252707 - RNA, 14 nt, Human
aaacagcauugcuu

SEQ ID NO: 2252708 - RNA, 14 nt, Human
aaacagcaguguuc

SEQ ID NO: 2252709 - RNA, 15 nt, Human
aaacagccucacaga

SEQ ID NO: 2252710 - RNA, 23 nt, Human
aaacagccgucagccaaauguaa

SEQ ID NO: 2252711 - RNA, 22 nt, Human
aaacagccgucagccaaaugua

SEQ ID NO: 2252712 - RNA, 18 nt, Human
aaacagcauugcuuucug

SEQ ID NO: 2252713 - RNA, 21 nt, Human
aaacagcgcuggguccacccc

SEQ ID NO: 2252714 - RNA, 21 nt, Human
aaaauucgaccugauuuacag

SEQ ID NO: 2252715 - RNA, 23 nt, Human
aaaauucgaccugauuuacaguu

SEQ ID NO: 2252716 - RNA, 20 nt, Human
aaaauucucagucaguaauu

SEQ ID NO: 2252717 - RNA, 16 nt, Human
aaaauucuacuguaug

SEQ ID NO: 2252718 - RNA, 15 nt, Human
aaaauucugaaugua

SEQ ID NO: 2252719 - RNA, 21 nt, Human
aaaauuccaucccaucaucuu

SEQ ID NO: 2252720 - RNA, 14 nt, Human
aaaauuccuauugu

SEQ ID NO: 2252721 - RNA, 17 nt, Human
aaaauuccuauugugau

SEQ ID NO: 2252722 - RNA, 22 nt, Human
aaaauuccuuuguguuucuauu

SEQ ID NO: 2252723 - RNA, 14 nt, Human
aaaauuaacacugc

SEQ ID NO: 2252724 - RNA, 17 nt, Human
aaaauuaaaucaaccuu

SEQ ID NO: 2252725 - RNA, 23 nt, Human
aaaauuaaucugggccagaauuu

SEQ ID NO: 2252726 - RNA, 13 nt, Human
aaaauuaagaaag

SEQ ID NO: 2252727 - RNA, 20 nt, Human
aaaauuaagaaaggauaaag

SEQ ID NO: 2252728 - RNA, 11 nt, Human
aaaauuaaagc

SEQ ID NO: 2252729 - RNA, 19 nt, Human
aaaauccauacauuugugu

SEQ ID NO: 2252730 - RNA, 22 nt, Human
aaaauuaacaugaauauuuagu

SEQ ID NO: 2252731 - RNA, 12 nt, Human
aaaauuaagaaa

SEQ ID NO: 2252732 - RNA, 15 nt, Human
aaaauuagccaagug

SEQ ID NO: 2252733 - RNA, 14 nt, Human
aaaauuagaaauug

SEQ ID NO: 2252734 - RNA, 20 nt, Human
aaaauuagaaauuggcugga

SEQ ID NO: 2252735 - RNA, 18 nt, Human
aaaauuagccgggcgugg

SEQ ID NO: 2252736 - RNA, 19 nt, Human
aaaauuaggauuucaugau

SEQ ID NO: 2252737 - RNA, 19 nt, Human
aaaauuauuucagaaaugu

SEQ ID NO: 2252738 - RNA, 21 nt, Human
aaaauuauuugaaaacauaua

SEQ ID NO: 2252739 - RNA, 14 nt, Human
aaaauuauuucaga

SEQ ID NO: 2252740 - RNA, 23 nt, Human
aaaauuauguuugccacuuugca

SEQ ID NO: 2252741 - RNA, 14 nt, Human
aaaauuauuugcau

SEQ ID NO: 2252742 - RNA, 13 nt, Human
aaaauuauuugca

SEQ ID NO: 2252743 - RNA, 17 nt, Human
aaaauuauuuuaaacaa

SEQ ID NO: 2252744 - RNA, 18 nt, Human
aaaauuauuuuaaacaaa

SEQ ID NO: 2252745 - RNA, 19 nt, Human
aaaauuauuuuaaacaaaa

SEQ ID NO: 2252746 - RNA, 13 nt, Human
aaaauuauuuugg

SEQ ID NO: 2252747 - RNA, 18 nt, Human
aaaauuauagaugggaau

SEQ ID NO: 2252748 - RNA, 22 nt, Human
aaaauuauagaugggaaugaag

SEQ ID NO: 2252749 - RNA, 14 nt, Human
aaaaucagccaauu

SEQ ID NO: 2252750 - RNA, 17 nt, Human
aaaaucagccaauuaug

SEQ ID NO: 2252751 - RNA, 18 nt, Human
aaaaucagccaauuaugu

SEQ ID NO: 2252752 - RNA, 19 nt, Human
aaaaucagccaauuauguu

SEQ ID NO: 2252753 - RNA, 20 nt, Human
aaaaucagccaauuauguua

SEQ ID NO: 2252754 - RNA, 21 nt, Human
aaaaucagccaauuauguuaa

SEQ ID NO: 2252755 - RNA, 19 nt, Human
aaaaucauuuuauauguca

SEQ ID NO: 2252756 - RNA, 20 nt, Human
aaaaucauuuuauaugucaa

SEQ ID NO: 2252757 - RNA, 22 nt, Human
aaaaucauuuuauaugucaaag

SEQ ID NO: 2252758 - RNA, 21 nt, Human
aaaauccacuuuaucuugaau

SEQ ID NO: 2252759 - RNA, 23 nt, Human
aaaauauuuuuuauauauacagu

SEQ ID NO: 2252760 - RNA, 20 nt, Human
aaaauauuuugucuaaaaug

SEQ ID NO: 2252761 - RNA, 20 nt, Human
aaaauauuuuuuauauauac

SEQ ID NO: 2252762 - RNA, 12 nt, Human
aaaauauuuugu

SEQ ID NO: 2252763 - RNA, 16 nt, Human
aaaauauuuugucuaa

SEQ ID NO: 2252764 - RNA, 18 nt, Human
aaaauauuuugucuaaaa

SEQ ID NO: 2252765 - RNA, 14 nt, Human
aaaauaaaaaguua

SEQ ID NO: 2252766 - RNA, 22 nt, Human
aaaauaaaaagugacacagcag

SEQ ID NO: 2252767 - RNA, 13 nt, Human
aaaauaaaaaguu

SEQ ID NO: 2252768 - RNA, 21 nt, Human
aaaauaaaaagcgggcacggg

SEQ ID NO: 2252769 - RNA, 20 nt, Human
aaaauaaaaagaucacuuuc

SEQ ID NO: 2252770 - RNA, 12 nt, Human
aaaauaaaaagu

SEQ ID NO: 2252771 - RNA, 17 nt, Human
aaaauaaaaagugacac

SEQ ID NO: 2252772 - RNA, 21 nt, Human
aaaauaaaaagugacacagca

SEQ ID NO: 2252773 - RNA, 11 nt, Human
aaaauaaaaac

SEQ ID NO: 2252774 - RNA, 17 nt, Human
aaaaguuugccagaagu

SEQ ID NO: 2252775 - RNA, 17 nt, Human
aaaauaaaaaacauaua

SEQ ID NO: 2252776 - RNA, 21 nt, Human
aaaauaaaaaaaagaaaaaag

SEQ ID NO: 2252777 - RNA, 15 nt, Human
aaaauaaaaaacacu

SEQ ID NO: 2252778 - RNA, 16 nt, Human
aaaaguuugccagaag

SEQ ID NO: 2252779 - RNA, 18 nt, Human
aaaaguuucaaugugauu

SEQ ID NO: 2252780 - RNA, 17 nt, Human
aaaaguuuuauuuuucu

SEQ ID NO: 2252781 - RNA, 12 nt, Human
aaaaguuucaau

SEQ ID NO: 2252782 - RNA, 13 nt, Human
aaaaguuucaaug

SEQ ID NO: 2252783 - RNA, 12 nt, Human
aaaaguuuccau

SEQ ID NO: 2252784 - RNA, 18 nt, Human
aaaauaaaaaaaagaaaa

SEQ ID NO: 2252785 - RNA, 17 nt, Human
aaaauaaaaaaaagaaa

SEQ ID NO: 2252786 - RNA, 16 nt, Human
aaaauaaaaaaaagaa

SEQ ID NO: 2252787 - RNA, 15 nt, Human
aaaauaaaaaaaaga

SEQ ID NO: 2252788 - RNA, 16 nt, Human
aaaaguuuacaagugu

SEQ ID NO: 2252789 - RNA, 22 nt, Human
aaaaguuuacaaguguauauca

SEQ ID NO: 2252790 - RNA, 13 nt, Human
aaaccccaucucu

SEQ ID NO: 2252791 - RNA, 17 nt, Human
aaaccccaucucuacaa

SEQ ID NO: 2252792 - RNA, 21 nt, Human
aaacccugucucuacuaaaaa

SEQ ID NO: 2252793 - RNA, 17 nt, Human
aaacccccuuugugcug

SEQ ID NO: 2252794 - RNA, 22 nt, Human
aaacccccacacacacacacau

SEQ ID NO: 2252795 - RNA, 16 nt, Human
aaacccccacacacac

SEQ ID NO: 2252796 - RNA, 15 nt, Human
aaacccccacacaca

SEQ ID NO: 2252797 - RNA, 18 nt, Human
aaacccagcucuggucca

SEQ ID NO: 2252798 - RNA, 17 nt, Human
aaacccaguugccaucu

SEQ ID NO: 2252799 - RNA, 16 nt, Human
aaacccuugaaaagac

SEQ ID NO: 2252800 - RNA, 12 nt, Human
aaacccugucuc

SEQ ID NO: 2252801 - RNA, 14 nt, Human
aaacccuucagugc

SEQ ID NO: 2252802 - RNA, 19 nt, Human
aaacccuugccaugugcua

SEQ ID NO: 2252803 - RNA, 17 nt, Human
aaacucuugaccucagg

SEQ ID NO: 2252804 - RNA, 16 nt, Human
aaacucuuuaacuucu

SEQ ID NO: 2252805 - RNA, 14 nt, Human
aaacucuuuaacuu

SEQ ID NO: 2252806 - RNA, 15 nt, Human
aaaccuaaaaaagau

SEQ ID NO: 2252807 - RNA, 17 nt, Human
aaaccuaaaaaagauau

SEQ ID NO: 2252808 - RNA, 19 nt, Human
aaaccuaaaaaagauauau

SEQ ID NO: 2252809 - RNA, 20 nt, Human
aaaccuaaguccuuuaugug

SEQ ID NO: 2252810 - RNA, 19 nt, Human
aaaccuaaguccuuuaugu

SEQ ID NO: 2252811 - RNA, 17 nt, Human
aaaccucaaaaugucua

SEQ ID NO: 2252812 - RNA, 22 nt, Human
aaaccucaaaaugucuaagaua

SEQ ID NO: 2252813 - RNA, 15 nt, Human
aaagaaaauaugcau

SEQ ID NO: 2252814 - RNA, 17 nt, Human
aaagaaaauaugcaucu

SEQ ID NO: 2252815 - RNA, 14 nt, Human
aaagaaaauaugca

SEQ ID NO: 2252816 - RNA, 13 nt, Human
aaagaaaauaugc

SEQ ID NO: 2252817 - RNA, 18 nt, Human
aaagaaaauucuuggaau

SEQ ID NO: 2252818 - RNA, 20 nt, Human
aaacugauuuuuuuuuccuu

SEQ ID NO: 2252819 - RNA, 19 nt, Human
aaacugaggaauuuucuuu

SEQ ID NO: 2252820 - RNA, 22 nt, Human
aaacugaagcagccucucccca

SEQ ID NO: 2252821 - RNA, 13 nt, Human
aaacucuuuuccc

SEQ ID NO: 2252822 - RNA, 12 nt, Human
aaacugaaaauc

SEQ ID NO: 2252823 - RNA, 13 nt, Human
aaacugaaaaucu

SEQ ID NO: 2252824 - RNA, 18 nt, Human
aaacugaagcagccucuc

SEQ ID NO: 2252825 - RNA, 21 nt, Human
aaacugaagcagccucucccc

SEQ ID NO: 2252826 - RNA, 14 nt, Human
aaacugaaaaucua

SEQ ID NO: 2252827 - RNA, 17 nt, Human
aaacugaaaaucuaaua

SEQ ID NO: 2252828 - RNA, 18 nt, Human
aaacugaaaaucuaauau

SEQ ID NO: 2252829 - RNA, 19 nt, Human
aaacugaaaaucuaauauu

SEQ ID NO: 2252830 - RNA, 13 nt, Human
aaacugauuuuuu

SEQ ID NO: 2252831 - RNA, 19 nt, Human
aaacugauuuuuuuuuccu

SEQ ID NO: 2252832 - RNA, 19 nt, Human
aaagaagacaacauuaaaa

SEQ ID NO: 2252833 - RNA, 17 nt, Human
aaagaagaacuugcaug

SEQ ID NO: 2252834 - RNA, 12 nt, Human
aaagaagacaug

SEQ ID NO: 2252835 - RNA, 14 nt, Human
aaagaagacauguu

SEQ ID NO: 2252836 - RNA, 15 nt, Human
aaagaagacauguuu

SEQ ID NO: 2252837 - RNA, 17 nt, Human
aaagaagaaacgucuau

SEQ ID NO: 2252838 - RNA, 19 nt, Human
aaagaggcugaggcuggca

SEQ ID NO: 2252839 - RNA, 12 nt, Human
aaagaggcugag

SEQ ID NO: 2252840 - RNA, 19 nt, Human
aaagaggcugaggccugga

SEQ ID NO: 2252841 - RNA, 20 nt, Human
aaagaggcugaggccuggac

SEQ ID NO: 2252842 - RNA, 21 nt, Human
aaagaggcugaggccuggacu

SEQ ID NO: 2252843 - RNA, 23 nt, Human
aaagaaacccgacagagggaaga

SEQ ID NO: 2252844 - RNA, 22 nt, Human
aaagaaccaaaaguuuuccuga

SEQ ID NO: 2252845 - RNA, 20 nt, Human
aaagaaacccgacagaggga

SEQ ID NO: 2252846 - RNA, 13 nt, Human
aaagaaacauuug

SEQ ID NO: 2252847 - RNA, 23 nt, Human
aaagaaccaacaaccucaacugc

SEQ ID NO: 2252848 - RNA, 19 nt, Human
aaagauaaucucucagcuu

SEQ ID NO: 2252849 - RNA, 22 nt, Human
aaagauaacaagaucuuucagg

SEQ ID NO: 2252850 - RNA, 21 nt, Human
aaagauacagaacucuuucaa

SEQ ID NO: 2252851 - RNA, 20 nt, Human
aaagauaacaagaucuuuca

SEQ ID NO: 2252852 - RNA, 21 nt, Human
aaagauaaauuauaucaauuu

SEQ ID NO: 2252853 - RNA, 16 nt, Human
aaagauaaauauuaua

SEQ ID NO: 2252854 - RNA, 15 nt, Human
aaagauacaguuacu

SEQ ID NO: 2252855 - RNA, 13 nt, Human
aaagauaaauauu

SEQ ID NO: 2252856 - RNA, 15 nt, Human
aaagauaaauauuau

SEQ ID NO: 2252857 - RNA, 14 nt, Human
aaagauaaauauua

SEQ ID NO: 2252858 - RNA, 15 nt, Human
aaagagggcuuccuc

SEQ ID NO: 2252859 - RNA, 19 nt, Human
aaagagggcuuccucuaga

SEQ ID NO: 2252860 - RNA, 13 nt, Human
aaagaggugugca

SEQ ID NO: 2252861 - RNA, 24 nt, Human
aaagaggugacugggcccugccuc

SEQ ID NO: 2252862 - RNA, 15 nt, Human
aaagugccacucauu

SEQ ID NO: 2252863 - RNA, 23 nt, Human
aaagugcagcuccguuuggcagu

SEQ ID NO: 2252864 - RNA, 15 nt, Human
aaagugauuaaacgu

SEQ ID NO: 2252865 - RNA, 12 nt, Human
aaagugauuucu

SEQ ID NO: 2252866 - RNA, 21 nt, Human
aaagugauaauuucuggaauu

SEQ ID NO: 2252867 - RNA, 23 nt, Human
aaagugaucaauaaaaugugauu

SEQ ID NO: 2252868 - RNA, 10 nt, Human
aaagugauua

SEQ ID NO: 2252869 - RNA, 19 nt, Human
aaagucaugcaaaggcugg

SEQ ID NO: 2252870 - RNA, 12 nt, Human
aaaguauuuucc

SEQ ID NO: 2252871 - RNA, 13 nt, Human
aaaguauuuuccu

SEQ ID NO: 2252872 - RNA, 14 nt, Human
aaaguauuuuccug

SEQ ID NO: 2252873 - RNA, 21 nt, Human
aaaguauuuuccuguaaaaaa

SEQ ID NO: 2252874 - RNA, 13 nt, Human
aaaggcuguggua

SEQ ID NO: 2252875 - RNA, 16 nt, Human
aaagucagguccaauu

SEQ ID NO: 2252876 - RNA, 18 nt, Human
aaagucaaaaggugccug

SEQ ID NO: 2252877 - RNA, 17 nt, Human
aaaguauuuuccuguaa

SEQ ID NO: 2252878 - RNA, 17 nt, Human
aaagucaauguuuucag

SEQ ID NO: 2252879 - RNA, 20 nt, Human
aaagucaaaaggugccugug

SEQ ID NO: 2252880 - RNA, 18 nt, Human
aaagucaauguuuucagu

SEQ ID NO: 2252881 - RNA, 12 nt, Human
aaauaaaacauu

SEQ ID NO: 2252882 - RNA, 23 nt, Human
aaauaaaaauuauuauugauuuu

SEQ ID NO: 2252883 - RNA, 16 nt, Human
aaauaaaaauucugaa

SEQ ID NO: 2252884 - RNA, 18 nt, Human
aaauaaaacauuuucaca

SEQ ID NO: 2252885 - RNA, 13 nt, Human
aaauaaaacauuu

SEQ ID NO: 2252886 - RNA, 15 nt, Human
aaauaaaacauuuua

SEQ ID NO: 2252887 - RNA, 22 nt, Human
aaauaaaacauuuucacacaau

SEQ ID NO: 2252888 - RNA, 14 nt, Human
aaauaaaaccagcu

SEQ ID NO: 2252889 - RNA, 15 nt, Human
aaauaaaaauggaua

SEQ ID NO: 2252890 - RNA, 20 nt, Human
aaauaaaaauauuguguugu

SEQ ID NO: 2252891 - RNA, 14 nt, Human
aaauaaaaccuuuc

SEQ ID NO: 2252892 - RNA, 13 nt, Human
aaauaaaaccuuu

SEQ ID NO: 2252893 - RNA, 12 nt, Human
aaauaaaaccuu

SEQ ID NO: 2252894 - RNA, 11 nt, Human
aaauaaaaccu

SEQ ID NO: 2252895 - RNA, 15 nt, Human
aaauaaaaccuuuca

SEQ ID NO: 2252896 - RNA, 18 nt, Human
aaauaaaauuuguugcau

SEQ ID NO: 2252897 - RNA, 18 nt, Human
aaauaaacaaauaacaau

SEQ ID NO: 2252898 - RNA, 19 nt, Human
aaauaaaauuuguugcaua

SEQ ID NO: 2252899 - RNA, 23 nt, Human
aaauaaaacauuuuaaauggaca

SEQ ID NO: 2252900 - RNA, 13 nt, Human
aaauaaacacugu

SEQ ID NO: 2252901 - RNA, 19 nt, Human
aaauaaaccucaaaauguc

SEQ ID NO: 2252902 - RNA, 12 nt, Human
aaauaaauuguu

SEQ ID NO: 2252903 - RNA, 22 nt, Human
aaauaaauuguauauucacuuu

SEQ ID NO: 2252904 - RNA, 20 nt, Human
aaauaaauuguauauucacu

SEQ ID NO: 2252905 - RNA, 21 nt, Human
aaauaaauuguauauucacuu

SEQ ID NO: 2252906 - RNA, 13 nt, Human
aaauaaauuguuu

SEQ ID NO: 2252907 - RNA, 15 nt, Human
aaauaaauuguuuga

SEQ ID NO: 2252908 - RNA, 11 nt, Human
aaauaaauuau

SEQ ID NO: 2252909 - RNA, 12 nt, Human
aaauaaacacug

SEQ ID NO: 2252910 - RNA, 15 nt, Human
aaauaaauguaucau

SEQ ID NO: 2252911 - RNA, 14 nt, Human
aaauaaauuguaua

SEQ ID NO: 2252912 - RNA, 15 nt, Human
aaauaaauuguauau

SEQ ID NO: 2252913 - RNA, 18 nt, Human
aaauaaauuguauauuca

SEQ ID NO: 2252914 - RNA, 19 nt, Human
aaauaaauuguauauucac

SEQ ID NO: 2252915 - RNA, 13 nt, Human
aaauaaauuguau

SEQ ID NO: 2252916 - RNA, 16 nt, Human
aaauaaauguaucaua

SEQ ID NO: 2252917 - RNA, 21 nt, Human
aaauaaauguaucauagaaau

SEQ ID NO: 2252918 - RNA, 15 nt, Human
aaagccccaugcugg

SEQ ID NO: 2252919 - RNA, 17 nt, Human
aaagcccauucauucca

SEQ ID NO: 2252920 - RNA, 17 nt, Human
aaagccccaugcuggag

SEQ ID NO: 2252921 - RNA, 18 nt, Human
aaagccccaugcuggagc

SEQ ID NO: 2252922 - RNA, 19 nt, Human
aaagccccaugcuggagcc

SEQ ID NO: 2252923 - RNA, 20 nt, Human
aaagccccaugcuggagccu

SEQ ID NO: 2252924 - RNA, 16 nt, Human
aaagcccauucauucc

SEQ ID NO: 2252925 - RNA, 23 nt, Human
aaagcccaagggaucugguccua

SEQ ID NO: 2252926 - RNA, 15 nt, Human
aaagcccagagacag

SEQ ID NO: 2252927 - RNA, 18 nt, Human
aaagcccaagggaucugg

SEQ ID NO: 2252928 - RNA, 16 nt, Human
aaagcccaaccuccug

SEQ ID NO: 2252929 - RNA, 18 nt, Human
aaagcccaaagugguaua

SEQ ID NO: 2252930 - RNA, 15 nt, Human
aaagccaagaggcug

SEQ ID NO: 2252931 - RNA, 21 nt, Human
aaaggcauaagacccuaagcc

SEQ ID NO: 2252932 - RNA, 15 nt, Human
aaaggcauauugcuu

SEQ ID NO: 2252933 - RNA, 17 nt, Human
aaaggcauauugcuuuu

SEQ ID NO: 2252934 - RNA, 21 nt, Human
aaagccccaugcuggagccug

SEQ ID NO: 2252935 - RNA, 19 nt, Human
aaaggcagaagcaacccaa

SEQ ID NO: 2252936 - RNA, 21 nt, Human
aaaggcucagucucaggagca

SEQ ID NO: 2252937 - RNA, 19 nt, Human
aaaggcucagucucaggag

SEQ ID NO: 2252938 - RNA, 21 nt, Human
aaaggcuccaggagcagccac

SEQ ID NO: 2252939 - RNA, 20 nt, Human
aaaggcucugaaagccagcu

SEQ ID NO: 2252940 - RNA, 19 nt, Human
aaaggcucgauuuuguauc

SEQ ID NO: 2252941 - RNA, 23 nt, Human
aaaggcucgauuuuguaucugca

SEQ ID NO: 2252942 - RNA, 17 nt, Human
aaaggccaaaccucugu

SEQ ID NO: 2252943 - RNA, 16 nt, Human
aaaggcucgauuuugu

SEQ ID NO: 2252944 - RNA, 17 nt, Human
aaaggcucgauuuugua

SEQ ID NO: 2252945 - RNA, 18 nt, Human
aaaggcucgauuuuguau

SEQ ID NO: 2252946 - RNA, 22 nt, Human
aaaggcuccaggagcagccaca

SEQ ID NO: 2252947 - RNA, 18 nt, Human
aaaggcauucucugaaga

SEQ ID NO: 2252948 - RNA, 16 nt, Human
aaaggcauucucugaa

SEQ ID NO: 2252949 - RNA, 15 nt, Human
aaaggccaaaccucu

SEQ ID NO: 2252950 - RNA, 14 nt, Human
aaaggccaaaccuc

SEQ ID NO: 2252951 - RNA, 19 nt, Human
aaaggcuagguacacagcu

SEQ ID NO: 2252952 - RNA, 14 nt, Human
aaaggcuccaggag

SEQ ID NO: 2252953 - RNA, 14 nt, Human
aaaggcuaccuuug

SEQ ID NO: 2252954 - RNA, 17 nt, Human
aaaggcuaccuuuguau

SEQ ID NO: 2252955 - RNA, 17 nt, Human
aaagcauuuacuuugaa

SEQ ID NO: 2252956 - RNA, 16 nt, Human
aaagcauuuacuuuga

SEQ ID NO: 2252957 - RNA, 15 nt, Human
aaagcauuuauaaau

SEQ ID NO: 2252958 - RNA, 13 nt, Human
aaagcauuugaau

SEQ ID NO: 2252959 - RNA, 14 nt, Human
aaagcauuugaaug

SEQ ID NO: 2252960 - RNA, 15 nt, Human
aaagcauuugaaugc

SEQ ID NO: 2252961 - RNA, 20 nt, Human
aaagcauuguaaaugugcuu

SEQ ID NO: 2252962 - RNA, 19 nt, Human
aaagcauuguaaaugugcu

SEQ ID NO: 2252963 - RNA, 23 nt, Human
aaagccaacagucaaaacagaga

SEQ ID NO: 2252964 - RNA, 20 nt, Human
aaagccaaaucaaaauaugu

SEQ ID NO: 2252965 - RNA, 17 nt, Human
aaagccaaacucugcca

SEQ ID NO: 2252966 - RNA, 12 nt, Human
aaagcauuuaua

SEQ ID NO: 2252967 - RNA, 15 nt, Human
aaagccaaagcuagg

SEQ ID NO: 2252968 - RNA, 23 nt, Human
aaagcauuugaaugcauuuuguu

SEQ ID NO: 2252969 - RNA, 17 nt, Human
aaagcauuugaaugcau

SEQ ID NO: 2252970 - RNA, 19 nt, Human
aaagcauuugaaugcauuu

SEQ ID NO: 2252971 - RNA, 20 nt, Human
aaagcauuugaaugcauuuu

SEQ ID NO: 2252972 - RNA, 22 nt, Human
aaagcauuugaaugcauuuugu

SEQ ID NO: 2252973 - RNA, 17 nt, Human
agcugaggcaauucuaa

SEQ ID NO: 2252974 - RNA, 15 nt, Human
agcugaggcagcagu

SEQ ID NO: 2252975 - RNA, 17 nt, Human
agcugaggccacacuca

SEQ ID NO: 2252976 - RNA, 13 nt, Human
agcugaggccaca

SEQ ID NO: 2252977 - RNA, 17 nt, Human
agcugaggcagcagugu

SEQ ID NO: 2252978 - RNA, 16 nt, Human
agcugaggcagcagug

SEQ ID NO: 2252979 - RNA, 17 nt, Human
agcugagcgccaggaug

SEQ ID NO: 2252980 - RNA, 15 nt, Human
agcugagcgccagga

SEQ ID NO: 2252981 - RNA, 14 nt, Human
agcugagcgccagg

SEQ ID NO: 2252982 - RNA, 12 nt, Human
agcugagcgcca

SEQ ID NO: 2252983 - RNA, 13 nt, Human
agcugagccucuc

SEQ ID NO: 2252984 - RNA, 14 nt, Human
agcugagccucuca

SEQ ID NO: 2252985 - RNA, 18 nt, Human
agcugaauacauucugcu

SEQ ID NO: 2252986 - RNA, 15 nt, Human
agcugaauacauucu

SEQ ID NO: 2252987 - RNA, 16 nt, Human
agcugaagauuuugga

SEQ ID NO: 2252988 - RNA, 17 nt, Human
agcugaagugcauccaa

SEQ ID NO: 2252989 - RNA, 15 nt, Human
agcugaaccugggua

SEQ ID NO: 2252990 - RNA, 19 nt, Human
agcugaacccauuuugagu

SEQ ID NO: 2252991 - RNA, 22 nt, Human
agcugaacagccaaaugcaugg

SEQ ID NO: 2252992 - RNA, 23 nt, Human
agcugaacaauaggcuguuccca

SEQ ID NO: 2252993 - RNA, 12 nt, Human
agcuccuguggc

SEQ ID NO: 2252994 - RNA, 13 nt, Human
agcuccuguggcc

SEQ ID NO: 2252995 - RNA, 15 nt, Human
agcuccuguccuccc

SEQ ID NO: 2252996 - RNA, 16 nt, Human
agcuccuguccuccca

SEQ ID NO: 2252997 - RNA, 17 nt, Human
agcuccuguccucccau

SEQ ID NO: 2252998 - RNA, 21 nt, Human
agcuccuguccucccaucccc

SEQ ID NO: 2252999 - RNA, 15 nt, Human
agcuccuguggcccc

SEQ ID NO: 2253000 - RNA, 16 nt, Human
agcuccuguggcccca

SEQ ID NO: 2253001 - RNA, 19 nt, Human
agcuccuguggccccaccc

SEQ ID NO: 2253002 - RNA, 22 nt, Human
agcuccuguggccccacccugg

SEQ ID NO: 2253003 - RNA, 19 nt, Human
agcuccccucggagaagag

SEQ ID NO: 2253004 - RNA, 17 nt, Human
agcuccccucggagaag

SEQ ID NO: 2253005 - RNA, 20 nt, Human
agcuccccucggagaagagc

SEQ ID NO: 2253006 - RNA, 19 nt, Human
agcuccccuccucuccccu

SEQ ID NO: 2253007 - RNA, 14 nt, Human
agcuccccuccucu

SEQ ID NO: 2253008 - RNA, 13 nt, Human
agcuccccuccuc

SEQ ID NO: 2253009 - RNA, 16 nt, Human
agcugguugagguuuc

SEQ ID NO: 2253010 - RNA, 21 nt, Human
agcugguuuccucauuccuga

SEQ ID NO: 2253011 - RNA, 15 nt, Human
agcugguuggagagc

SEQ ID NO: 2253012 - RNA, 15 nt, Human
agcugguuuccucau

SEQ ID NO: 2253013 - RNA, 22 nt, Human
agcugguuuuuagcggagacgg

SEQ ID NO: 2253014 - RNA, 18 nt, Human
agcuggucccacucaguc

SEQ ID NO: 2253015 - RNA, 19 nt, Human
agcuggucccacucagucc

SEQ ID NO: 2253016 - RNA, 13 nt, Human
agcugcugacagu

SEQ ID NO: 2253017 - RNA, 14 nt, Human
agcugcugacagug

SEQ ID NO: 2253018 - RNA, 16 nt, Human
agcuggucccacucag

SEQ ID NO: 2253019 - RNA, 17 nt, Human
agcuggucccacucagu

SEQ ID NO: 2253020 - RNA, 12 nt, Human
agcugcugacag

SEQ ID NO: 2253021 - RNA, 15 nt, Human
agcugcgggcugggu

SEQ ID NO: 2253022 - RNA, 19 nt, Human
agcugcgguccacccagga

SEQ ID NO: 2253023 - RNA, 20 nt, Human
agcugcgguccacccaggag

SEQ ID NO: 2253024 - RNA, 13 nt, Human
agcugcgguccac

SEQ ID NO: 2253025 - RNA, 16 nt, Human
agcugcgguccaccca

SEQ ID NO: 2253026 - RNA, 17 nt, Human
agcugcgguccacccag

SEQ ID NO: 2253027 - RNA, 18 nt, Human
agcugcgguccacccagg

SEQ ID NO: 2253028 - RNA, 15 nt, Human
agcucagcccacccc

SEQ ID NO: 2253029 - RNA, 14 nt, Human
agcucagcccaccc

SEQ ID NO: 2253030 - RNA, 11 nt, Human
agcucagccca

SEQ ID NO: 2253031 - RNA, 16 nt, Human
agcucagcauuuccac

SEQ ID NO: 2253032 - RNA, 21 nt, Human
agcucagcccaccccccucau

SEQ ID NO: 2253033 - RNA, 20 nt, Human
agcucagcccaccccccuca

SEQ ID NO: 2253034 - RNA, 19 nt, Human
agcucagcccaccccccuc

SEQ ID NO: 2253035 - RNA, 16 nt, Human
agcucagcccaccccc

SEQ ID NO: 2253036 - RNA, 22 nt, Human
agcucagcccaccccccucauu

SEQ ID NO: 2253037 - RNA, 12 nt, Human
agcucagcgcca

SEQ ID NO: 2253038 - RNA, 21 nt, Human
agcuccccgcuucugccugca

SEQ ID NO: 2253039 - RNA, 20 nt, Human
agcucagacccccacucuca

SEQ ID NO: 2253040 - RNA, 14 nt, Human
agcucagagagggc

SEQ ID NO: 2253041 - RNA, 18 nt, Human
agcucagacccccacucu

SEQ ID NO: 2253042 - RNA, 17 nt, Human
agcucagacccccacuc

SEQ ID NO: 2253043 - RNA, 16 nt, Human
agcucagacccccacu

SEQ ID NO: 2253044 - RNA, 15 nt, Human
agcucagacccccac

SEQ ID NO: 2253045 - RNA, 16 nt, Human
agcucagaauccaagu

SEQ ID NO: 2253046 - RNA, 22 nt, Human
agcucagaauccaagugaacac

SEQ ID NO: 2253047 - RNA, 14 nt, Human
agcucagagagggu

SEQ ID NO: 2253048 - RNA, 18 nt, Human
agcucagagaggguggga

SEQ ID NO: 2253049 - RNA, 22 nt, Human
agcucagaggcgcacugugacc

SEQ ID NO: 2253050 - RNA, 21 nt, Human
agcucagagagggcaggcaug

SEQ ID NO: 2253051 - RNA, 19 nt, Human
agcucagaggcgcacugug

SEQ ID NO: 2253052 - RNA, 16 nt, Human
agcucagagagggcag

SEQ ID NO: 2253053 - RNA, 17 nt, Human
agcucagagagggcagg

SEQ ID NO: 2253054 - RNA, 16 nt, Human
agcucacgucacacuu

SEQ ID NO: 2253055 - RNA, 13 nt, Human
agcucacgucaca

SEQ ID NO: 2253056 - RNA, 22 nt, Human
agcucaccuguugcuuacaauu

SEQ ID NO: 2253057 - RNA, 23 nt, Human
agcucaccuguugcuuacaauuu

SEQ ID NO: 2253058 - RNA, 13 nt, Human
agcucacuacccu

SEQ ID NO: 2253059 - RNA, 13 nt, Human
agcucacuucugg

SEQ ID NO: 2253060 - RNA, 23 nt, Human
agcucacuucugggcuucaucug

SEQ ID NO: 2253061 - RNA, 15 nt, Human
agcucagaaggcucu

SEQ ID NO: 2253062 - RNA, 16 nt, Human
agcucagaaggcucuu

SEQ ID NO: 2253063 - RNA, 19 nt, Human
agcucagaaggcucuucug

SEQ ID NO: 2253064 - RNA, 23 nt, Human
agcucagaaggcucuucugacua

SEQ ID NO: 2253065 - RNA, 12 nt, Human
agcucagagagg

SEQ ID NO: 2253066 - RNA, 19 nt, Human
agcucaccagccccagugc

SEQ ID NO: 2253067 - RNA, 20 nt, Human
agcucaccagccccagugcc

SEQ ID NO: 2253068 - RNA, 12 nt, Human
agcucaccucuc

SEQ ID NO: 2253069 - RNA, 21 nt, Human
agcucacccaauaaacauuaa

SEQ ID NO: 2253070 - RNA, 14 nt, Human
agcucaccccccac

SEQ ID NO: 2253071 - RNA, 15 nt, Human
agcucaccccccaca

SEQ ID NO: 2253072 - RNA, 15 nt, Human
agcucaccucucccu

SEQ ID NO: 2253073 - RNA, 18 nt, Human
agcucaccucucccuugg

SEQ ID NO: 2253074 - RNA, 19 nt, Human
agcucaccucucccuugga

SEQ ID NO: 2253075 - RNA, 17 nt, Human
agcucaccccccacacu

SEQ ID NO: 2253076 - RNA, 21 nt, Human
agcucaccccccacacucacu

SEQ ID NO: 2253077 - RNA, 13 nt, Human
agcucaccccugg

SEQ ID NO: 2253078 - RNA, 16 nt, Human
agcucaccuguugcuu

SEQ ID NO: 2253079 - RNA, 17 nt, Human
agcucaccuguugcuua

SEQ ID NO: 2253080 - RNA, 18 nt, Human
agcucaccuguugcuuac

SEQ ID NO: 2253081 - RNA, 19 nt, Human
agcucaccuguugcuuaca

SEQ ID NO: 2253082 - RNA, 21 nt, Human
agcucaccuguugcuuacaau

SEQ ID NO: 2253083 - RNA, 16 nt, Human
agcucaaaggcacagu

SEQ ID NO: 2253084 - RNA, 15 nt, Human
agcucaaaggcacag

SEQ ID NO: 2253085 - RNA, 13 nt, Human
agcucaaaggcac

SEQ ID NO: 2253086 - RNA, 22 nt, Human
agcucaaagcguggacaggugu

SEQ ID NO: 2253087 - RNA, 22 nt, Human
agcuaauuugcauuaaauucac

SEQ ID NO: 2253088 - RNA, 20 nt, Human
agcuaauuugcauuaaauuc

SEQ ID NO: 2253089 - RNA, 23 nt, Human
agcuaauguaauaacugugaagu

SEQ ID NO: 2253090 - RNA, 19 nt, Human
agcuaauucuuugaccugu

SEQ ID NO: 2253091 - RNA, 14 nt, Human
agcuaauuugcauu

SEQ ID NO: 2253092 - RNA, 13 nt, Human
agcuaauuugcau

SEQ ID NO: 2253093 - RNA, 18 nt, Human
agcucaagucuucccuga

SEQ ID NO: 2253094 - RNA, 20 nt, Human
agcucaagcaggaaguucaa

SEQ ID NO: 2253095 - RNA, 23 nt, Human
agcucaagucuucccugaucaag

SEQ ID NO: 2253096 - RNA, 19 nt, Human
agcucaaggaaaggccuga

SEQ ID NO: 2253097 - RNA, 16 nt, Human
agcucaccagccccag

SEQ ID NO: 2253098 - RNA, 14 nt, Human
agcucaauggacug

SEQ ID NO: 2253099 - RNA, 21 nt, Human
agcguuugaggggcuggccuu

SEQ ID NO: 2253100 - RNA, 14 nt, Human
agcguugcaugucg

SEQ ID NO: 2253101 - RNA, 16 nt, Human
agcuaaaaugauuuua

SEQ ID NO: 2253102 - RNA, 20 nt, Human
agcuaaaaugauuuuaucug

SEQ ID NO: 2253103 - RNA, 15 nt, Human
agcuaaaaugauuuu

SEQ ID NO: 2253104 - RNA, 15 nt, Human
agcuaaaaccugagc

SEQ ID NO: 2253105 - RNA, 21 nt, Human
agcuaaucagcauucucacuc

SEQ ID NO: 2253106 - RNA, 16 nt, Human
agcuaaucagcauucu

SEQ ID NO: 2253107 - RNA, 16 nt, Human
agcgagagucugucuc

SEQ ID NO: 2253108 - RNA, 21 nt, Human
agcgacuccguuggccacucc

SEQ ID NO: 2253109 - RNA, 19 nt, Human
agcgacuccguuggccacu

SEQ ID NO: 2253110 - RNA, 20 nt, Human
agcgacuccguuggccacuc

SEQ ID NO: 2253111 - RNA, 13 nt, Human
agcgagcccuggu

SEQ ID NO: 2253112 - RNA, 19 nt, Human
agcgagcccugguggcagu

SEQ ID NO: 2253113 - RNA, 19 nt, Human
agcgaggaggcuccagagg

SEQ ID NO: 2253114 - RNA, 15 nt, Human
agcgaggaggcucca

SEQ ID NO: 2253115 - RNA, 20 nt, Human
agcgaggagaugcuccuugg

SEQ ID NO: 2253116 - RNA, 18 nt, Human
agcgaugaauuuggagac

SEQ ID NO: 2253117 - RNA, 19 nt, Human
agcgaugaauuuggagacu

SEQ ID NO: 2253118 - RNA, 18 nt, Human
agcgauggucucagaaac

SEQ ID NO: 2253119 - RNA, 16 nt, Human
agcgauguaugcagcu

SEQ ID NO: 2253120 - RNA, 18 nt, Human
agcgauguaugcagcuau

SEQ ID NO: 2253121 - RNA, 19 nt, Human
agcgauuauuaucuaaagu

SEQ ID NO: 2253122 - RNA, 23 nt, Human
agcgauuauuaucuaaagugugu

SEQ ID NO: 2253123 - RNA, 21 nt, Human
agcgaguuguggaaagccucu

SEQ ID NO: 2253124 - RNA, 14 nt, Human
agcgaguuguggaa

SEQ ID NO: 2253125 - RNA, 22 nt, Human
agcgaggucaacagagaaggca

SEQ ID NO: 2253126 - RNA, 19 nt, Human
agcgaggucaacagagaag

SEQ ID NO: 2253127 - RNA, 23 nt, Human
agcgaggucaacagagaaggcag

SEQ ID NO: 2253128 - RNA, 18 nt, Human
agcgaggucaacagagaa

SEQ ID NO: 2253129 - RNA, 21 nt, Human
agcgaccaccccugccuccac

SEQ ID NO: 2253130 - RNA, 14 nt, Human
agcgaccgcccccu

SEQ ID NO: 2253131 - RNA, 15 nt, Human
agcgaccgcccccuc

SEQ ID NO: 2253132 - RNA, 16 nt, Human
agcgaccgcccccucc

SEQ ID NO: 2253133 - RNA, 17 nt, Human
agcgaccgcccccuccu

SEQ ID NO: 2253134 - RNA, 22 nt, Human
agcgaccuuccucauccacccc

SEQ ID NO: 2253135 - RNA, 16 nt, Human
agcgacuccguuggcc

SEQ ID NO: 2253136 - RNA, 17 nt, Human
agcgacuccguuggcca

SEQ ID NO: 2253137 - RNA, 17 nt, Human
agcgacagugagacucu

SEQ ID NO: 2253138 - RNA, 23 nt, Human
agccuuuucccucuuuggcuccc

SEQ ID NO: 2253139 - RNA, 21 nt, Human
agcgacauagcccaucccugc

SEQ ID NO: 2253140 - RNA, 19 nt, Human
agcgacauagcccaucccu

SEQ ID NO: 2253141 - RNA, 17 nt, Human
agcgaccaccccugccu

SEQ ID NO: 2253142 - RNA, 19 nt, Human
agcgaccaccccugccucc

SEQ ID NO: 2253143 - RNA, 20 nt, Human
agcgaccaccccugccucca

SEQ ID NO: 2253144 - RNA, 15 nt, Human
agccuuuggaaacag

SEQ ID NO: 2253145 - RNA, 14 nt, Human
agccuggggcuggc

SEQ ID NO: 2253146 - RNA, 18 nt, Human
agccuuuggaugaccaga

SEQ ID NO: 2253147 - RNA, 20 nt, Human
agccuuuggaugaccagaac

SEQ ID NO: 2253148 - RNA, 18 nt, Human
agccuuugguucuggcca

SEQ ID NO: 2253149 - RNA, 23 nt, Human
agccuuuggcucuggagacagcc

SEQ ID NO: 2253150 - RNA, 16 nt, Human
agccuuuggcucugga

SEQ ID NO: 2253151 - RNA, 17 nt, Human
agccuuuggcucuggag

SEQ ID NO: 2253152 - RNA, 18 nt, Human
agccuuuggcucuggaga

SEQ ID NO: 2253153 - RNA, 21 nt, Human
agccuuuggcucuggagacag

SEQ ID NO: 2253154 - RNA, 18 nt, Human
agccuuuucccucuuugg

SEQ ID NO: 2253155 - RNA, 19 nt, Human
agccuuugguucuggccag

SEQ ID NO: 2253156 - RNA, 14 nt, Human
agccugggcgacag

SEQ ID NO: 2253157 - RNA, 21 nt, Human
agccugggcagccaggcugcc

SEQ ID NO: 2253158 - RNA, 15 nt, Human
agccugggcgacaga

SEQ ID NO: 2253159 - RNA, 20 nt, Human
agccuggcuucuggagcccu

SEQ ID NO: 2253160 - RNA, 19 nt, Human
agccuggcuucuggagccc

SEQ ID NO: 2253161 - RNA, 18 nt, Human
agccuggcuucuggagcc

SEQ ID NO: 2253162 - RNA, 15 nt, Human
agccuggcuucugga

SEQ ID NO: 2253163 - RNA, 23 nt, Human
agccuggcuucuggagcccuugg

SEQ ID NO: 2253164 - RNA, 21 nt, Human
agccuggcuucuggagcccuu

SEQ ID NO: 2253165 - RNA, 20 nt, Human
agccugggcagccaggcugc

SEQ ID NO: 2253166 - RNA, 19 nt, Human
agccugggcagccaggcug

SEQ ID NO: 2253167 - RNA, 12 nt, Human
agccugggaggu

SEQ ID NO: 2253168 - RNA, 14 nt, Human
agccccaugcugga

SEQ ID NO: 2253169 - RNA, 13 nt, Human
agccuggcuccaa

SEQ ID NO: 2253170 - RNA, 20 nt, Human
agccuggcuccaaacccucg

SEQ ID NO: 2253171 - RNA, 22 nt, Human
agcccucccugccccucccuuc

SEQ ID NO: 2253172 - RNA, 23 nt, Human
agcccucccugccccucccuuca

SEQ ID NO: 2253173 - RNA, 15 nt, Human
agcccucccugcccc

SEQ ID NO: 2253174 - RNA, 16 nt, Human
agcccucccugccccu

SEQ ID NO: 2253175 - RNA, 17 nt, Human
agcccucccugccccuc

SEQ ID NO: 2253176 - RNA, 19 nt, Human
agcccucccugccccuccc

SEQ ID NO: 2253177 - RNA, 14 nt, Human
agccuggcuucugg

SEQ ID NO: 2253178 - RNA, 11 nt, Human
agccuggcucu

SEQ ID NO: 2253179 - RNA, 12 nt, Human
agccuggcucuu

SEQ ID NO: 2253180 - RNA, 18 nt, Human
agccuggcuucaaauugu

SEQ ID NO: 2253181 - RNA, 17 nt, Human
agccuggcuucaaauug

SEQ ID NO: 2253182 - RNA, 22 nt, Human
agccuggcuccaaacccucgag

SEQ ID NO: 2253183 - RNA, 20 nt, Human
agccuggcucccacaggcag

SEQ ID NO: 2253184 - RNA, 21 nt, Human
agccuggcucccacaggcagc

SEQ ID NO: 2253185 - RNA, 22 nt, Human
agccuggcucccacaggcagcu

SEQ ID NO: 2253186 - RNA, 23 nt, Human
agccuggcucccacaggcagcuu

SEQ ID NO: 2253187 - RNA, 20 nt, Human
agcuucaccccaaucccagc

SEQ ID NO: 2253188 - RNA, 18 nt, Human
agcuucaccccaauccca

SEQ ID NO: 2253189 - RNA, 18 nt, Human
agcuucacuguaaaauaa

SEQ ID NO: 2253190 - RNA, 21 nt, Human
agcuucaccccaaucccagcu

SEQ ID NO: 2253191 - RNA, 19 nt, Human
agcuucauggcagaaggca

SEQ ID NO: 2253192 - RNA, 18 nt, Human
agcuucauuuccuguguc

SEQ ID NO: 2253193 - RNA, 12 nt, Human
agcuuauuuaau

SEQ ID NO: 2253194 - RNA, 13 nt, Human
agcuucugccacu

SEQ ID NO: 2253195 - RNA, 18 nt, Human
agcuucugaggcgcugcu

SEQ ID NO: 2253196 - RNA, 13 nt, Human
agcuucugcuggg

SEQ ID NO: 2253197 - RNA, 14 nt, Human
agcuucugcugggc

SEQ ID NO: 2253198 - RNA, 15 nt, Human
agcuucugcugggcu

SEQ ID NO: 2253199 - RNA, 16 nt, Human
agcuucugcugggcug

SEQ ID NO: 2253200 - RNA, 17 nt, Human
agcuucugcugggcugg

SEQ ID NO: 2253201 - RNA, 18 nt, Human
agcuucugcugggcuggg

SEQ ID NO: 2253202 - RNA, 19 nt, Human
agcuucugcuuuucugccc

SEQ ID NO: 2253203 - RNA, 23 nt, Human
agcuuuguuuguugucagcugaa

SEQ ID NO: 2253204 - RNA, 16 nt, Human
agcuuuuaaacccuau

SEQ ID NO: 2253205 - RNA, 12 nt, Human
agcuucugcuuu

SEQ ID NO: 2253206 - RNA, 17 nt, Human
agcuucugcuuuucugc

SEQ ID NO: 2253207 - RNA, 14 nt, Human
agcuucucugugaa

SEQ ID NO: 2253208 - RNA, 13 nt, Human
agcuucucuguga

SEQ ID NO: 2253209 - RNA, 21 nt, Human
agcuucuccugugugauugac

SEQ ID NO: 2253210 - RNA, 16 nt, Human
agcuucuccuguguga

SEQ ID NO: 2253211 - RNA, 12 nt, Human
agcuucuccugu

SEQ ID NO: 2253212 - RNA, 23 nt, Human
agcuucuccaggcucuuuggggu

SEQ ID NO: 2253213 - RNA, 14 nt, Human
agcuucuccaggcu

SEQ ID NO: 2253214 - RNA, 15 nt, Human
agcuucuccaggcuc

SEQ ID NO: 2253215 - RNA, 19 nt, Human
agcuucauuuccugugucu

SEQ ID NO: 2253216 - RNA, 12 nt, Human
agcuucuccagg

SEQ ID NO: 2253217 - RNA, 20 nt, Human
agcuucauuugugucaaugg

SEQ ID NO: 2253218 - RNA, 15 nt, Human
agcuucaccagagca

SEQ ID NO: 2253219 - RNA, 13 nt, Human
agcuucauuugug

SEQ ID NO: 2253220 - RNA, 17 nt, Human
agcuucauuugugucaa

SEQ ID NO: 2253221 - RNA, 19 nt, Human
agcuucauuugugucaaug

SEQ ID NO: 2253222 - RNA, 22 nt, Human
agcugguuuccucauuccugaa

SEQ ID NO: 2253223 - RNA, 15 nt, Human
agcuguaaaaagaga

SEQ ID NO: 2253224 - RNA, 19 nt, Human
agcuguaaaaagagagaaa

SEQ ID NO: 2253225 - RNA, 14 nt, Human
agcuguaaaccaga

SEQ ID NO: 2253226 - RNA, 16 nt, Human
agcuguaaaccagaga

SEQ ID NO: 2253227 - RNA, 18 nt, Human
agcuguaagaagagacug

SEQ ID NO: 2253228 - RNA, 17 nt, Human
agcuguaagaagagacu

SEQ ID NO: 2253229 - RNA, 17 nt, Human
agcuguaaaccagagag

SEQ ID NO: 2253230 - RNA, 15 nt, Human
agcuuuuaugugaaa

SEQ ID NO: 2253231 - RNA, 23 nt, Human
aggaaauugagauuagagggagg

SEQ ID NO: 2253232 - RNA, 12 nt, Human
aggaacaaggca

SEQ ID NO: 2253233 - RNA, 13 nt, Human
aggaacaaggcaa

SEQ ID NO: 2253234 - RNA, 16 nt, Human
aggaacaaggcaaggc

SEQ ID NO: 2253235 - RNA, 17 nt, Human
aggaacaaggcaaggcu

SEQ ID NO: 2253236 - RNA, 19 nt, Human
aggaacaaggcaaggcugu

SEQ ID NO: 2253237 - RNA, 19 nt, Human
aggaaccuccuccacacca

SEQ ID NO: 2253238 - RNA, 22 nt, Human
aggaacugcugggcuuggcagc

SEQ ID NO: 2253239 - RNA, 21 nt, Human
aggaacuuaaauaaugugaaa

SEQ ID NO: 2253240 - RNA, 19 nt, Human
aggaacccuuacaguagga

SEQ ID NO: 2253241 - RNA, 20 nt, Human
aggaacaaggcaaggcuguc

SEQ ID NO: 2253242 - RNA, 23 nt, Human
aggaacaaggcaaggcugucaau

SEQ ID NO: 2253243 - RNA, 16 nt, Human
aggaaccauaaucaau

SEQ ID NO: 2253244 - RNA, 17 nt, Human
aggaaccacaccacauc

SEQ ID NO: 2253245 - RNA, 15 nt, Human
aggaaccacaccaca

SEQ ID NO: 2253246 - RNA, 15 nt, Human
aggaaccaaagcgaa

SEQ ID NO: 2253247 - RNA, 13 nt, Human
aggaaccaaagcg

SEQ ID NO: 2253248 - RNA, 21 nt, Human
aggaauaaauaaaaauggaua

SEQ ID NO: 2253249 - RNA, 14 nt, Human
aggaauaaggccuu

SEQ ID NO: 2253250 - RNA, 20 nt, Human
aggaauaaauugcuccuuga

SEQ ID NO: 2253251 - RNA, 19 nt, Human
aggaauaaauaaaaaugga

SEQ ID NO: 2253252 - RNA, 13 nt, Human
aggaauaaauaaa

SEQ ID NO: 2253253 - RNA, 19 nt, Human
aggaauaaauugcuccuug

SEQ ID NO: 2253254 - RNA, 17 nt, Human
aggaaguguaacagcug

SEQ ID NO: 2253255 - RNA, 18 nt, Human
aggaaguguaacagcuga

SEQ ID NO: 2253256 - RNA, 16 nt, Human
aggaaguguaacagcu

SEQ ID NO: 2253257 - RNA, 14 nt, Human
aggaagugaagaau

SEQ ID NO: 2253258 - RNA, 22 nt, Human
aggaauaccugucccccugaca

SEQ ID NO: 2253259 - RNA, 18 nt, Human
aggaauaauuauuuauuu

SEQ ID NO: 2253260 - RNA, 22 nt, Human
aggaauaauuauuuauuuaaua

SEQ ID NO: 2253261 - RNA, 15 nt, Human
aggaauaaugggcuu

SEQ ID NO: 2253262 - RNA, 23 nt, Human
aggaauaaugggcuuagagcagu

SEQ ID NO: 2253263 - RNA, 16 nt, Human
aggaauaauuauuuau

SEQ ID NO: 2253264 - RNA, 17 nt, Human
aggaauaauuauuuauu

SEQ ID NO: 2253265 - RNA, 15 nt, Human
aggaauaccuguccc

SEQ ID NO: 2253266 - RNA, 18 nt, Human
aggaauaccugucccccu

SEQ ID NO: 2253267 - RNA, 15 nt, Human
aggaaggcugagagg

SEQ ID NO: 2253268 - RNA, 22 nt, Human
aggaaggcugagaggagagaga

SEQ ID NO: 2253269 - RNA, 15 nt, Human
aggaacuguccagag

SEQ ID NO: 2253270 - RNA, 16 nt, Human
aggaacuguccagaga

SEQ ID NO: 2253271 - RNA, 17 nt, Human
aggaacuguccagagag

SEQ ID NO: 2253272 - RNA, 17 nt, Human
aggaagggcaggaagga

SEQ ID NO: 2253273 - RNA, 12 nt, Human
aggaagggcaaa

SEQ ID NO: 2253274 - RNA, 16 nt, Human
aggaagggaccaaggc

SEQ ID NO: 2253275 - RNA, 17 nt, Human
aggaagggaccaaggca

SEQ ID NO: 2253276 - RNA, 23 nt, Human
aggaagggaccaaggcaaggcag

SEQ ID NO: 2253277 - RNA, 20 nt, Human
aggaacuguccagagagcaa

SEQ ID NO: 2253278 - RNA, 18 nt, Human
aggaacuguccagagagc

SEQ ID NO: 2253279 - RNA, 19 nt, Human
aggaacuguccagagagca

SEQ ID NO: 2253280 - RNA, 17 nt, Human
aggaagugaaaauaggu

SEQ ID NO: 2253281 - RNA, 18 nt, Human
aggaagucuaggagcugg

SEQ ID NO: 2253282 - RNA, 17 nt, Human
aggaagucuaggagcug

SEQ ID NO: 2253283 - RNA, 14 nt, Human
aggaaguaggaagu

SEQ ID NO: 2253284 - RNA, 18 nt, Human
aggaagucaaagcaagga

SEQ ID NO: 2253285 - RNA, 15 nt, Human
aggaaguaggaagua

SEQ ID NO: 2253286 - RNA, 20 nt, Human
aggaaggggccagaggcucg

SEQ ID NO: 2253287 - RNA, 18 nt, Human
aggaaggggccagaggcu

SEQ ID NO: 2253288 - RNA, 16 nt, Human
aggaaggggccagagg

SEQ ID NO: 2253289 - RNA, 18 nt, Human
aggaagggcauccuucug

SEQ ID NO: 2253290 - RNA, 20 nt, Human
aggaagggcauccuucugcc

SEQ ID NO: 2253291 - RNA, 16 nt, Human
aggaccuguggccaag

SEQ ID NO: 2253292 - RNA, 17 nt, Human
aggaccuggcugccaua

SEQ ID NO: 2253293 - RNA, 12 nt, Human
aggagagaagaa

SEQ ID NO: 2253294 - RNA, 13 nt, Human
aggagagaagaau

SEQ ID NO: 2253295 - RNA, 14 nt, Human
aggagagaagaaug

SEQ ID NO: 2253296 - RNA, 14 nt, Human
aggaccugccugua

SEQ ID NO: 2253297 - RNA, 13 nt, Human
aggaccugccugu

SEQ ID NO: 2253298 - RNA, 16 nt, Human
aggaccuggcugccau

SEQ ID NO: 2253299 - RNA, 13 nt, Human
aggaccuggcugc

SEQ ID NO: 2253300 - RNA, 19 nt, Human
aggaccugggaccuccccu

SEQ ID NO: 2253301 - RNA, 17 nt, Human
aggagagagcagcuucu

SEQ ID NO: 2253302 - RNA, 21 nt, Human
aggagagagaaagccaggcag

SEQ ID NO: 2253303 - RNA, 22 nt, Human
aggagagagaaagccaggcagg

SEQ ID NO: 2253304 - RNA, 12 nt, Human
aggagagagaaa

SEQ ID NO: 2253305 - RNA, 14 nt, Human
aggagagagaaagc

SEQ ID NO: 2253306 - RNA, 18 nt, Human
aggagagagaaagccagg

SEQ ID NO: 2253307 - RNA, 19 nt, Human
aggagagagaaagccaggc

SEQ ID NO: 2253308 - RNA, 21 nt, Human
aggagagaaggggaggagggc

SEQ ID NO: 2253309 - RNA, 11 nt, Human
aggagagagaa

SEQ ID NO: 2253310 - RNA, 17 nt, Human
aggagagaaggggagga

SEQ ID NO: 2253311 - RNA, 15 nt, Human
aggagagaagaauga

SEQ ID NO: 2253312 - RNA, 11 nt, Human
aggagagaccg

SEQ ID NO: 2253313 - RNA, 15 nt, Human
aggagaggagagggg

SEQ ID NO: 2253314 - RNA, 20 nt, Human
aggagagagcagcuucugcc

SEQ ID NO: 2253315 - RNA, 10 nt, Human
aggagagagg

SEQ ID NO: 2253316 - RNA, 13 nt, Human
aggagagaggcag

SEQ ID NO: 2253317 - RNA, 14 nt, Human
aggagagaggcaga

SEQ ID NO: 2253318 - RNA, 18 nt, Human
aggagagaggcagagagc

SEQ ID NO: 2253319 - RNA, 13 nt, Human
aggagaggaugag

SEQ ID NO: 2253320 - RNA, 15 nt, Human
aggagaggaugagag

SEQ ID NO: 2253321 - RNA, 17 nt, Human
aggagaggaugagagcc

SEQ ID NO: 2253322 - RNA, 19 nt, Human
aggacccugaaggggccau

SEQ ID NO: 2253323 - RNA, 15 nt, Human
aggacccugaagggg

SEQ ID NO: 2253324 - RNA, 21 nt, Human
aggacccggaggggccuggca

SEQ ID NO: 2253325 - RNA, 22 nt, Human
aggacccggaggggccuggcag

SEQ ID NO: 2253326 - RNA, 21 nt, Human
aggaccaggacucccuccuca

SEQ ID NO: 2253327 - RNA, 19 nt, Human
aggaccaggacucccuccu

SEQ ID NO: 2253328 - RNA, 23 nt, Human
aggaccaggacuauagcccaggu

SEQ ID NO: 2253329 - RNA, 13 nt, Human
aggaccaggcaau

SEQ ID NO: 2253330 - RNA, 18 nt, Human
aggaccagggcagggcca

SEQ ID NO: 2253331 - RNA, 18 nt, Human
aggaccaggacucccucc

SEQ ID NO: 2253332 - RNA, 17 nt, Human
aggaccaggacucccuc

SEQ ID NO: 2253333 - RNA, 16 nt, Human
aggaccaggacucccu

SEQ ID NO: 2253334 - RNA, 13 nt, Human
aggaccaggacuc

SEQ ID NO: 2253335 - RNA, 18 nt, Human
aggacccggaggggccug

SEQ ID NO: 2253336 - RNA, 20 nt, Human
aggacccggaggggccuggc

SEQ ID NO: 2253337 - RNA, 19 nt, Human
aggaccagucaaccugggc

SEQ ID NO: 2253338 - RNA, 20 nt, Human
aggaccagucaaccugggca

SEQ ID NO: 2253339 - RNA, 12 nt, Human
aggaccaggacu

SEQ ID NO: 2253340 - RNA, 19 nt, Human
aggaccagcuggggcgugg

SEQ ID NO: 2253341 - RNA, 22 nt, Human
aggaccaggacuauagcccagg

SEQ ID NO: 2253342 - RNA, 13 nt, Human
aggaccagcuggg

SEQ ID NO: 2253343 - RNA, 14 nt, Human
aggaccagcugggg

SEQ ID NO: 2253344 - RNA, 15 nt, Human
aggaccagcuggggc

SEQ ID NO: 2253345 - RNA, 24 nt, Human
aggaccagcucaggacagaugcca

SEQ ID NO: 2253346 - RNA, 15 nt, Human
aggaaucagacuuca

SEQ ID NO: 2253347 - RNA, 22 nt, Human
aggaaucagcaagaagauccua

SEQ ID NO: 2253348 - RNA, 21 nt, Human
aggaaucaugucaggccugug

SEQ ID NO: 2253349 - RNA, 22 nt, Human
aggaaucaugucaggccugugu

SEQ ID NO: 2253350 - RNA, 23 nt, Human
aggaaucaugucaggccugugug

SEQ ID NO: 2253351 - RNA, 16 nt, Human
aggaaucaagagcugc

SEQ ID NO: 2253352 - RNA, 20 nt, Human
aggaauauuuuccaaagagu

SEQ ID NO: 2253353 - RNA, 15 nt, Human
aggaauauuuuccaa

SEQ ID NO: 2253354 - RNA, 16 nt, Human
aggaauauuuuccaaa

SEQ ID NO: 2253355 - RNA, 17 nt, Human
aggaaucaagagcugcc

SEQ ID NO: 2253356 - RNA, 19 nt, Human
aggaaucaagagcugcccu

SEQ ID NO: 2253357 - RNA, 20 nt, Human
aggaaucaagagcugcccuc

SEQ ID NO: 2253358 - RNA, 15 nt, Human
aggaaucacucuugu

SEQ ID NO: 2253359 - RNA, 21 nt, Human
aggaaucaagagcugcccucc

SEQ ID NO: 2253360 - RNA, 16 nt, Human
aggaaucacucuugug

SEQ ID NO: 2253361 - RNA, 18 nt, Human
aggaaucacucuugugga

SEQ ID NO: 2253362 - RNA, 20 nt, Human
aggaauaugacggaagaaca

SEQ ID NO: 2253363 - RNA, 12 nt, Human
aggaauauaugg

SEQ ID NO: 2253364 - RNA, 17 nt, Human
aggaauauauggcagag

SEQ ID NO: 2253365 - RNA, 17 nt, Human
aggaauaguugagcccc

SEQ ID NO: 2253366 - RNA, 21 nt, Human
aggaauaguugagccccaagu

SEQ ID NO: 2253367 - RNA, 22 nt, Human
aggaauaugacggaagaacaua

SEQ ID NO: 2253368 - RNA, 23 nt, Human
aggaauauauggcagaguuguaa

SEQ ID NO: 2253369 - RNA, 18 nt, Human
aggaauaugggagaaaua

SEQ ID NO: 2253370 - RNA, 19 nt, Human
agggucagacgccugagga

SEQ ID NO: 2253371 - RNA, 20 nt, Human
agggucaacaucuuuuacau

SEQ ID NO: 2253372 - RNA, 21 nt, Human
aggguauggacuaucugucug

SEQ ID NO: 2253373 - RNA, 22 nt, Human
aggggccuggagauccuccugc

SEQ ID NO: 2253374 - RNA, 12 nt, Human
agggucccuggu

SEQ ID NO: 2253375 - RNA, 14 nt, Human
agggucccuggugg

SEQ ID NO: 2253376 - RNA, 13 nt, Human
aggguauuccaga

SEQ ID NO: 2253377 - RNA, 21 nt, Human
aggguaucuggugacuuuccu

SEQ ID NO: 2253378 - RNA, 13 nt, Human
aggggccuggcag

SEQ ID NO: 2253379 - RNA, 12 nt, Human
aggggccuggca

SEQ ID NO: 2253380 - RNA, 18 nt, Human
aggggccuggagauccuc

SEQ ID NO: 2253381 - RNA, 21 nt, Human
aggggccuggagauccuccug

SEQ ID NO: 2253382 - RNA, 16 nt, Human
aggguccuggcuccug

SEQ ID NO: 2253383 - RNA, 22 nt, Human
aggguccuucccucuccccaag

SEQ ID NO: 2253384 - RNA, 18 nt, Human
aggguccuuuaguaccug

SEQ ID NO: 2253385 - RNA, 14 nt, Human
aggguccuggcucc

SEQ ID NO: 2253386 - RNA, 15 nt, Human
aggguccuccacaau

SEQ ID NO: 2253387 - RNA, 22 nt, Human
agggucggaacccaagcuuaga

SEQ ID NO: 2253388 - RNA, 23 nt, Human
agggucggggaggaaauaccaaa

SEQ ID NO: 2253389 - RNA, 17 nt, Human
agggucggaacccaagc

SEQ ID NO: 2253390 - RNA, 20 nt, Human
aggguccuuuaguaccugaa

SEQ ID NO: 2253391 - RNA, 16 nt, Human
agggucccugguggca

SEQ ID NO: 2253392 - RNA, 17 nt, Human
agggucccugguggcag

SEQ ID NO: 2253393 - RNA, 20 nt, Human
agggucccugguggcagcuc

SEQ ID NO: 2253394 - RNA, 22 nt, Human
agggucccugguggcagcucac

SEQ ID NO: 2253395 - RNA, 20 nt, Human
agggcgaacgacaauagcuu

SEQ ID NO: 2253396 - RNA, 23 nt, Human
agggccuugcccagagaugccuc

SEQ ID NO: 2253397 - RNA, 21 nt, Human
agggcgaccccgucacagccu

SEQ ID NO: 2253398 - RNA, 13 nt, Human
agggcgagacucc

SEQ ID NO: 2253399 - RNA, 19 nt, Human
agggccuugcccagagaug

SEQ ID NO: 2253400 - RNA, 18 nt, Human
agggccuugcccagagau

SEQ ID NO: 2253401 - RNA, 15 nt, Human
aggggcagcuucuau

SEQ ID NO: 2253402 - RNA, 13 nt, Human
agggcgaggggag

SEQ ID NO: 2253403 - RNA, 23 nt, Human
agggcgaggggaggguggcaggu

SEQ ID NO: 2253404 - RNA, 18 nt, Human
aggggcaggaggaagggg

SEQ ID NO: 2253405 - RNA, 13 nt, Human
aggggcaggcaca

SEQ ID NO: 2253406 - RNA, 14 nt, Human
aggggcaggcacag

SEQ ID NO: 2253407 - RNA, 16 nt, Human
aggggcaggcacagca

SEQ ID NO: 2253408 - RNA, 17 nt, Human
aggggcaggcacagcac

SEQ ID NO: 2253409 - RNA, 13 nt, Human
aggggcaggagga

SEQ ID NO: 2253410 - RNA, 12 nt, Human
aggggcaggagg

SEQ ID NO: 2253411 - RNA, 17 nt, Human
agggccuugcccagaga

SEQ ID NO: 2253412 - RNA, 16 nt, Human
agggccuugcccagag

SEQ ID NO: 2253413 - RNA, 15 nt, Human
agggccuugcccaga

SEQ ID NO: 2253414 - RNA, 14 nt, Human
agggccuugcccag

SEQ ID NO: 2253415 - RNA, 12 nt, Human
agggccuugccc

SEQ ID NO: 2253416 - RNA, 18 nt, Human
agggccugugggagccug

SEQ ID NO: 2253417 - RNA, 19 nt, Human
agggccugugggagccugc

SEQ ID NO: 2253418 - RNA, 17 nt, Human
agggccuggucccuggg

SEQ ID NO: 2253419 - RNA, 12 nt, Human
agggccuguggg

SEQ ID NO: 2253420 - RNA, 21 nt, Human
agggccuggucccugggagga

SEQ ID NO: 2253421 - RNA, 22 nt, Human
agggccuggguuuucauguuuu

SEQ ID NO: 2253422 - RNA, 14 nt, Human
agggccuggccuga

SEQ ID NO: 2253423 - RNA, 19 nt, Human
agggccuggaagacagaga

SEQ ID NO: 2253424 - RNA, 21 nt, Human
aggggcccgagcagaagcagg

SEQ ID NO: 2253425 - RNA, 21 nt, Human
aggggccccugcuucuccagc

SEQ ID NO: 2253426 - RNA, 16 nt, Human
aggggccccugcuucu

SEQ ID NO: 2253427 - RNA, 20 nt, Human
aggggccccugcuucuccag

SEQ ID NO: 2253428 - RNA, 13 nt, Human
aggggccccugcu

SEQ ID NO: 2253429 - RNA, 17 nt, Human
aggggccccguguccug

SEQ ID NO: 2253430 - RNA, 18 nt, Human
aggggccccguguccugc

SEQ ID NO: 2253431 - RNA, 20 nt, Human
aggggccccguguccugccu

SEQ ID NO: 2253432 - RNA, 16 nt, Human
aggggccccuccagcu

SEQ ID NO: 2253433 - RNA, 13 nt, Human
aggggccuggaga

SEQ ID NO: 2253434 - RNA, 14 nt, Human
aggggccuggagau

SEQ ID NO: 2253435 - RNA, 15 nt, Human
aggggcccgcuugcc

SEQ ID NO: 2253436 - RNA, 16 nt, Human
aggggcagucuggagg

SEQ ID NO: 2253437 - RNA, 15 nt, Human
aggggcagucuggag

SEQ ID NO: 2253438 - RNA, 13 nt, Human
aggggcaggcuga

SEQ ID NO: 2253439 - RNA, 23 nt, Human
aggggcagguaaacuccuguccu

SEQ ID NO: 2253440 - RNA, 15 nt, Human
aggggcaggcccugc

SEQ ID NO: 2253441 - RNA, 19 nt, Human
aggggcaggcccugcacug

SEQ ID NO: 2253442 - RNA, 23 nt, Human
aggggcaggcccugcacuguccu

SEQ ID NO: 2253443 - RNA, 12 nt, Human
aggggcaggcug

SEQ ID NO: 2253444 - RNA, 14 nt, Human
aggggcaucugccc

SEQ ID NO: 2253445 - RNA, 18 nt, Human
aggggcagucuggagggg

SEQ ID NO: 2253446 - RNA, 17 nt, Human
aggggcagucuggaggg

SEQ ID NO: 2253447 - RNA, 15 nt, Human
aggggcaucugcccc

SEQ ID NO: 2253448 - RNA, 20 nt, Human
aggggcagucuggaggggca

SEQ ID NO: 2253449 - RNA, 22 nt, Human
aggggcccaaauucuuucagug

SEQ ID NO: 2253450 - RNA, 19 nt, Human
aggggcccaguccuggccu

SEQ ID NO: 2253451 - RNA, 19 nt, Human
aggggcccacagggaaccc

SEQ ID NO: 2253452 - RNA, 21 nt, Human
aggggcccacagggaacccug

SEQ ID NO: 2253453 - RNA, 17 nt, Human
aggggcccaaggcggcc

SEQ ID NO: 2253454 - RNA, 20 nt, Human
aggggcccaaggcggccccu

SEQ ID NO: 2253455 - RNA, 22 nt, Human
aggggcccaaggcggccccucc

SEQ ID NO: 2253456 - RNA, 14 nt, Human
aggggcccacaggg

SEQ ID NO: 2253457 - RNA, 23 nt, Human
agggccugcaggaccugccugua

SEQ ID NO: 2253458 - RNA, 22 nt, Human
agggccugcaggaccugccugu

SEQ ID NO: 2253459 - RNA, 20 nt, Human
agggccugcaggaccugccu

SEQ ID NO: 2253460 - RNA, 15 nt, Human
agggccugcaaggga

SEQ ID NO: 2253461 - RNA, 12 nt, Human
agggccuggccu

SEQ ID NO: 2253462 - RNA, 13 nt, Human
agggccuggccug

SEQ ID NO: 2253463 - RNA, 14 nt, Human
agggccugcaaggg

SEQ ID NO: 2253464 - RNA, 22 nt, Human
agggccugagccuggccagccu

SEQ ID NO: 2253465 - RNA, 14 nt, Human
agggcaagggccau

SEQ ID NO: 2253466 - RNA, 16 nt, Human
agggccugaggucugg

SEQ ID NO: 2253467 - RNA, 21 nt, Human
agggccugaggucuggcugcu

SEQ ID NO: 2253468 - RNA, 22 nt, Human
agggccugaggucuggcugcuu

SEQ ID NO: 2253469 - RNA, 20 nt, Human
agggccugagccuggccagc

SEQ ID NO: 2253470 - RNA, 22 nt, Human
agggcaagggccaugcugaagg

SEQ ID NO: 2253471 - RNA, 18 nt, Human
agggccugagccuggcca

SEQ ID NO: 2253472 - RNA, 13 nt, Human
agggcaagggcca

SEQ ID NO: 2253473 - RNA, 22 nt, Human
agggcaacaauacaugcugcua

SEQ ID NO: 2253474 - RNA, 20 nt, Human
agggcaacaauaaaauagca

SEQ ID NO: 2253475 - RNA, 15 nt, Human
agggauuagggagag

SEQ ID NO: 2253476 - RNA, 20 nt, Human
agggauuagggagagaagau

SEQ ID NO: 2253477 - RNA, 19 nt, Human
agggauuacccaagcaaaa

SEQ ID NO: 2253478 - RNA, 19 nt, Human
agggauuuuagucacacgu

SEQ ID NO: 2253479 - RNA, 19 nt, Human
agggauuaaccucugcacu

SEQ ID NO: 2253480 - RNA, 17 nt, Human
agggauuacccaagcaa

SEQ ID NO: 2253481 - RNA, 18 nt, Human
agggauuacccaagcaaa

SEQ ID NO: 2253482 - RNA, 22 nt, Human
agggaucacagggccccagaag

SEQ ID NO: 2253483 - RNA, 17 nt, Human
agggaucacagggcccc

SEQ ID NO: 2253484 - RNA, 15 nt, Human
agggaucccucaucu

SEQ ID NO: 2253485 - RNA, 15 nt, Human
agggaucacagggcc

SEQ ID NO: 2253486 - RNA, 14 nt, Human
agggaucacagggc

SEQ ID NO: 2253487 - RNA, 13 nt, Human
agggaucacaggg

SEQ ID NO: 2253488 - RNA, 22 nt, Human
agggaucaaccagcuaagaaaa

SEQ ID NO: 2253489 - RNA, 22 nt, Human
agggaucccucaucugucccuc

SEQ ID NO: 2253490 - RNA, 14 nt, Human
agggaugguguuca

SEQ ID NO: 2253491 - RNA, 19 nt, Human
agggaucccucaucugucc

SEQ ID NO: 2253492 - RNA, 16 nt, Human
agggaucccucaucug

SEQ ID NO: 2253493 - RNA, 18 nt, Human
agggauguucuggcccuc

SEQ ID NO: 2253494 - RNA, 17 nt, Human
agggauuaaccucugca

SEQ ID NO: 2253495 - RNA, 18 nt, Human
agggauuaaccucugcac

SEQ ID NO: 2253496 - RNA, 22 nt, Human
agggaugugaauugccugcaga

SEQ ID NO: 2253497 - RNA, 23 nt, Human
agggaugugaauugccugcagag

SEQ ID NO: 2253498 - RNA, 16 nt, Human
agggaugguguucaaa

SEQ ID NO: 2253499 - RNA, 12 nt, Human
agggacuuaaaa

SEQ ID NO: 2253500 - RNA, 17 nt, Human
agggacuuaaaaaacuu

SEQ ID NO: 2253501 - RNA, 13 nt, Human
agggacuuaaaaa

SEQ ID NO: 2253502 - RNA, 21 nt, Human
aggcguccgcgcgccagcaca

SEQ ID NO: 2253503 - RNA, 22 nt, Human
agggauagcacugagcaaagca

SEQ ID NO: 2253504 - RNA, 16 nt, Human
agggauagaggggggc

SEQ ID NO: 2253505 - RNA, 13 nt, Human
agggauagagggg

SEQ ID NO: 2253506 - RNA, 18 nt, Human
agggauauauaagaugga

SEQ ID NO: 2253507 - RNA, 17 nt, Human
agggauagcacugagca

SEQ ID NO: 2253508 - RNA, 21 nt, Human
agggaucaaccagcuaagaaa

SEQ ID NO: 2253509 - RNA, 16 nt, Human
agggauacccauccca

SEQ ID NO: 2253510 - RNA, 22 nt, Human
aggucucaacccuuuugucugc

SEQ ID NO: 2253511 - RNA, 13 nt, Human
aggucucacgggc

SEQ ID NO: 2253512 - RNA, 17 nt, Human
aggucucccacguggga

SEQ ID NO: 2253513 - RNA, 12 nt, Human
aggucuccucca

SEQ ID NO: 2253514 - RNA, 13 nt, Human
aggucuccuccac

SEQ ID NO: 2253515 - RNA, 15 nt, Human
aggucuccuccaccg

SEQ ID NO: 2253516 - RNA, 11 nt, Human
aggucugugcu

SEQ ID NO: 2253517 - RNA, 14 nt, Human
aggucugugcugag

SEQ ID NO: 2253518 - RNA, 23 nt, Human
aggucuccucuuaaaaaauaaaa

SEQ ID NO: 2253519 - RNA, 23 nt, Human
aggucuggagaagcucccaggaa

SEQ ID NO: 2253520 - RNA, 16 nt, Human
aggucuggccucaggu

SEQ ID NO: 2253521 - RNA, 16 nt, Human
aggucuggcugcuugc

SEQ ID NO: 2253522 - RNA, 17 nt, Human
aggucuccucuuaaaaa

SEQ ID NO: 2253523 - RNA, 15 nt, Human
aggucuccucuuaaa

SEQ ID NO: 2253524 - RNA, 14 nt, Human
aggucuccucuuaa

SEQ ID NO: 2253525 - RNA, 13 nt, Human
aggucuccucuua

SEQ ID NO: 2253526 - RNA, 12 nt, Human
aggucuccucuu

SEQ ID NO: 2253527 - RNA, 11 nt, Human
aggucuccucu

SEQ ID NO: 2253528 - RNA, 18 nt, Human
aggucuccuccaccgcca

SEQ ID NO: 2253529 - RNA, 23 nt, Human
aggucuccuccaccgccauggcu

SEQ ID NO: 2253530 - RNA, 21 nt, Human
agguccucuacuuaaugagau

SEQ ID NO: 2253531 - RNA, 15 nt, Human
agguccucagagaau

SEQ ID NO: 2253532 - RNA, 20 nt, Human
agguccucugauacccagag

SEQ ID NO: 2253533 - RNA, 13 nt, Human
agguccucuguca

SEQ ID NO: 2253534 - RNA, 19 nt, Human
agguccucugucagucaca

SEQ ID NO: 2253535 - RNA, 14 nt, Human
agguccucugucag

SEQ ID NO: 2253536 - RNA, 22 nt, Human
aggucgguagguucagccaagg

SEQ ID NO: 2253537 - RNA, 22 nt, Human
aggucuaggaacauacuucagc

SEQ ID NO: 2253538 - RNA, 23 nt, Human
agguccucugucagucacagcca

SEQ ID NO: 2253539 - RNA, 15 nt, Human
agguacuaaauaccu

SEQ ID NO: 2253540 - RNA, 23 nt, Human
aggucccuaauaaagcugugugg

SEQ ID NO: 2253541 - RNA, 14 nt, Human
aggucccuuguuuc

SEQ ID NO: 2253542 - RNA, 12 nt, Human
agguacuauuau

SEQ ID NO: 2253543 - RNA, 14 nt, Human
agguacucuccugg

SEQ ID NO: 2253544 - RNA, 13 nt, Human
agguacucuccug

SEQ ID NO: 2253545 - RNA, 16 nt, Human
agguaacaggcagaua

SEQ ID NO: 2253546 - RNA, 22 nt, Human
agguacgaaaagaggggaagag

SEQ ID NO: 2253547 - RNA, 13 nt, Human
agguaacaggcag

SEQ ID NO: 2253548 - RNA, 14 nt, Human
agguaacaggcaga

SEQ ID NO: 2253549 - RNA, 14 nt, Human
aggguuuguggcug

SEQ ID NO: 2253550 - RNA, 16 nt, Human
aggguuuuaauguaga

SEQ ID NO: 2253551 - RNA, 17 nt, Human
aggguuuuaauguagau

SEQ ID NO: 2253552 - RNA, 22 nt, Human
aggguuuugccauguuggccag

SEQ ID NO: 2253553 - RNA, 19 nt, Human
aggguuuuccacccuggaa

SEQ ID NO: 2253554 - RNA, 23 nt, Human
agguaacagaacagcuucagguu

SEQ ID NO: 2253555 - RNA, 18 nt, Human
aggguuuuccacccugga

SEQ ID NO: 2253556 - RNA, 15 nt, Human
aggguuuuccacccu

SEQ ID NO: 2253557 - RNA, 23 nt, Human
aggguuuugccauguuggccagg

SEQ ID NO: 2253558 - RNA, 23 nt, Human
agggucuagggagagacccuugu

SEQ ID NO: 2253559 - RNA, 19 nt, Human
agggucuagggagagaccc

SEQ ID NO: 2253560 - RNA, 16 nt, Human
agggucuagggagaga

SEQ ID NO: 2253561 - RNA, 15 nt, Human
agggucuagggagag

SEQ ID NO: 2253562 - RNA, 20 nt, Human
agggucucacuauguugccc

SEQ ID NO: 2253563 - RNA, 23 nt, Human
aggccagggucacugaaggccug

SEQ ID NO: 2253564 - RNA, 15 nt, Human
aggccaggccagcug

SEQ ID NO: 2253565 - RNA, 13 nt, Human
aggccaggccagc

SEQ ID NO: 2253566 - RNA, 15 nt, Human
aggccaggcccucug

SEQ ID NO: 2253567 - RNA, 21 nt, Human
aggccauccuucccugucugc

SEQ ID NO: 2253568 - RNA, 16 nt, Human
aggccauaaaacaggu

SEQ ID NO: 2253569 - RNA, 21 nt, Human
aggccaucaucaguggagcca

SEQ ID NO: 2253570 - RNA, 19 nt, Human
aggccaggccaccaggaug

SEQ ID NO: 2253571 - RNA, 21 nt, Human
aggccaguaagggaaauagaa

SEQ ID NO: 2253572 - RNA, 15 nt, Human
aggccaggugcaggu

SEQ ID NO: 2253573 - RNA, 14 nt, Human
aggccaggugcagu

SEQ ID NO: 2253574 - RNA, 21 nt, Human
aggccaugauucgcccaaagc

SEQ ID NO: 2253575 - RNA, 19 nt, Human
aggccaugauucgcccaaa

SEQ ID NO: 2253576 - RNA, 13 nt, Human
aggccaugaaaaa

SEQ ID NO: 2253577 - RNA, 19 nt, Human
aggccaugaaaaaaaugau

SEQ ID NO: 2253578 - RNA, 15 nt, Human
aggccaucuuccagg

SEQ ID NO: 2253579 - RNA, 18 nt, Human
aggccaucuuccaggugg

SEQ ID NO: 2253580 - RNA, 19 nt, Human
aggccaucuuccagguggg

SEQ ID NO: 2253581 - RNA, 22 nt, Human
aggccaucugggcuccuccagg

SEQ ID NO: 2253582 - RNA, 21 nt, Human
aggccaucugggcuccuccag

SEQ ID NO: 2253583 - RNA, 15 nt, Human
aggccauggcagaau

SEQ ID NO: 2253584 - RNA, 17 nt, Human
aggccauggagagcugg

SEQ ID NO: 2253585 - RNA, 18 nt, Human
aggccauggagagcugga

SEQ ID NO: 2253586 - RNA, 21 nt, Human
aggccauggagagcuggagcc

SEQ ID NO: 2253587 - RNA, 22 nt, Human
aggccauggagagcuggagccu

SEQ ID NO: 2253588 - RNA, 16 nt, Human
aggccauggagagcug

SEQ ID NO: 2253589 - RNA, 21 nt, Human
aggccaggaguuugagaccag

SEQ ID NO: 2253590 - RNA, 14 nt, Human
aggccaggccacca

SEQ ID NO: 2253591 - RNA, 16 nt, Human
aggccaggccaccagg

SEQ ID NO: 2253592 - RNA, 17 nt, Human
aggccaggccaccagga

SEQ ID NO: 2253593 - RNA, 18 nt, Human
aggccaggccaccaggau

SEQ ID NO: 2253594 - RNA, 11 nt, Human
aggccaggagu

SEQ ID NO: 2253595 - RNA, 13 nt, Human
aggccaggcccuc

SEQ ID NO: 2253596 - RNA, 14 nt, Human
aggccaggcccucu

SEQ ID NO: 2253597 - RNA, 20 nt, Human
aggccagcuggcagcagagu

SEQ ID NO: 2253598 - RNA, 19 nt, Human
aggccagcuggcagcagag

SEQ ID NO: 2253599 - RNA, 18 nt, Human
aggccagcuggcagcaga

SEQ ID NO: 2253600 - RNA, 17 nt, Human
aggccagcuggcagcag

SEQ ID NO: 2253601 - RNA, 16 nt, Human
aggccagcuggcagca

SEQ ID NO: 2253602 - RNA, 15 nt, Human
aggccagcuggcagc

SEQ ID NO: 2253603 - RNA, 14 nt, Human
aggccagcuggcag

SEQ ID NO: 2253604 - RNA, 14 nt, Human
aggcauguccugga

SEQ ID NO: 2253605 - RNA, 23 nt, Human
aggccagcugcuugggcuucauc

SEQ ID NO: 2253606 - RNA, 19 nt, Human
aggcauuccccaggaggcc

SEQ ID NO: 2253607 - RNA, 20 nt, Human
aggcauuccccaggaggcca

SEQ ID NO: 2253608 - RNA, 17 nt, Human
aggccgcuguucaccca

SEQ ID NO: 2253609 - RNA, 21 nt, Human
aggccgcuagaggccugagga

SEQ ID NO: 2253610 - RNA, 18 nt, Human
aggccgcuagaggccuga

SEQ ID NO: 2253611 - RNA, 20 nt, Human
aggccgcuagaggccugagg

SEQ ID NO: 2253612 - RNA, 20 nt, Human
aggccgcuguucacccacag

SEQ ID NO: 2253613 - RNA, 19 nt, Human
aggccggcgagcccugugg

SEQ ID NO: 2253614 - RNA, 18 nt, Human
aggccgccccagccucug

SEQ ID NO: 2253615 - RNA, 14 nt, Human
aggccgcuagaggc

SEQ ID NO: 2253616 - RNA, 17 nt, Human
aggccgcuagaggccug

SEQ ID NO: 2253617 - RNA, 19 nt, Human
aggccgccccagccucuga

SEQ ID NO: 2253618 - RNA, 14 nt, Human
aggccgccccagcc

SEQ ID NO: 2253619 - RNA, 22 nt, Human
aggccgcagcucuugcccuucc

SEQ ID NO: 2253620 - RNA, 19 nt, Human
aggcccuuccucuccacug

SEQ ID NO: 2253621 - RNA, 21 nt, Human
aggccgcagcucuugcccuuc

SEQ ID NO: 2253622 - RNA, 22 nt, Human
aggcccuuccucuccacugccu

SEQ ID NO: 2253623 - RNA, 12 nt, Human
aggcccuucucu

SEQ ID NO: 2253624 - RNA, 21 nt, Human
aggcccuggccuccccugcca

SEQ ID NO: 2253625 - RNA, 22 nt, Human
aggcccuggccuccccugccac

SEQ ID NO: 2253626 - RNA, 23 nt, Human
aggcccuggccuccccugccacc

SEQ ID NO: 2253627 - RNA, 13 nt, Human
aggcccugucugu

SEQ ID NO: 2253628 - RNA, 14 nt, Human
aggcccugucugua

SEQ ID NO: 2253629 - RNA, 15 nt, Human
aggcccuucucucca

SEQ ID NO: 2253630 - RNA, 19 nt, Human
aggcccuucucuccagccc

SEQ ID NO: 2253631 - RNA, 15 nt, Human
aggcccucuggagug

SEQ ID NO: 2253632 - RNA, 13 nt, Human
aggcccucuggag

SEQ ID NO: 2253633 - RNA, 22 nt, Human
aggcccucuggaguggccacua

SEQ ID NO: 2253634 - RNA, 21 nt, Human
aggcccucuggaguggccacu

SEQ ID NO: 2253635 - RNA, 20 nt, Human
aggcccucuggaguggccac

SEQ ID NO: 2253636 - RNA, 13 nt, Human
aggcccugcacug

SEQ ID NO: 2253637 - RNA, 15 nt, Human
aggcccugcacuguc

SEQ ID NO: 2253638 - RNA, 16 nt, Human
aggcccugcacugucc

SEQ ID NO: 2253639 - RNA, 17 nt, Human
aggcccugcacuguccu

SEQ ID NO: 2253640 - RNA, 18 nt, Human
aggcccugcacuguccug

SEQ ID NO: 2253641 - RNA, 19 nt, Human
aggcccugcacuguccugc

SEQ ID NO: 2253642 - RNA, 21 nt, Human
aggcccugcacuguccugcuc

SEQ ID NO: 2253643 - RNA, 22 nt, Human
aggcccugcacuguccugcucc

SEQ ID NO: 2253644 - RNA, 23 nt, Human
aggcccugcacuguccugcucca

SEQ ID NO: 2253645 - RNA, 24 nt, Human
aggcccugcacuguccugcuccac

SEQ ID NO: 2253646 - RNA, 14 nt, Human
aggcccuggccucc

SEQ ID NO: 2253647 - RNA, 15 nt, Human
aggcccuggccuccc

SEQ ID NO: 2253648 - RNA, 21 nt, Human
aggcccucugcccacucccug

SEQ ID NO: 2253649 - RNA, 21 nt, Human
aggccaugggcacugugggua

SEQ ID NO: 2253650 - RNA, 22 nt, Human
aggcccucugcccacucccugc

SEQ ID NO: 2253651 - RNA, 23 nt, Human
aggcccucugcccacucccugca

SEQ ID NO: 2253652 - RNA, 14 nt, Human
aggcacgaacccac

SEQ ID NO: 2253653 - RNA, 19 nt, Human
aggcaccuuaguggcuuuu

SEQ ID NO: 2253654 - RNA, 14 nt, Human
aggcaccugcaggu

SEQ ID NO: 2253655 - RNA, 18 nt, Human
aggcaccugcagguuggg

SEQ ID NO: 2253656 - RNA, 21 nt, Human
aggcaccugcagguugggcca

SEQ ID NO: 2253657 - RNA, 14 nt, Human
aggcaccugcauuu

SEQ ID NO: 2253658 - RNA, 21 nt, Human
aggagaggcaacauccaaaau

SEQ ID NO: 2253659 - RNA, 18 nt, Human
aggagaggggaagggcca

SEQ ID NO: 2253660 - RNA, 19 nt, Human
aggagaggggaagggccag

SEQ ID NO: 2253661 - RNA, 23 nt, Human
aggagaggaugagagcccagagg

SEQ ID NO: 2253662 - RNA, 20 nt, Human
aggagaggcaacauccaaaa

SEQ ID NO: 2253663 - RNA, 18 nt, Human
aggagaggaugagagccc

SEQ ID NO: 2253664 - RNA, 19 nt, Human
aggagaggaugagagccca

SEQ ID NO: 2253665 - RNA, 20 nt, Human
aggagaggaugagagcccag

SEQ ID NO: 2253666 - RNA, 21 nt, Human
aggagaggaugagagcccaga

SEQ ID NO: 2253667 - RNA, 22 nt, Human
aggagaggggaagggccagucu

SEQ ID NO: 2253668 - RNA, 21 nt, Human
aggcacgaacccaccugcuga

SEQ ID NO: 2253669 - RNA, 13 nt, Human
aggcacuagccuu

SEQ ID NO: 2253670 - RNA, 15 nt, Human
aggcacuagccuuug

SEQ ID NO: 2253671 - RNA, 20 nt, Human
aggcacgaacccaccugcug

SEQ ID NO: 2253672 - RNA, 19 nt, Human
aggcacgaacccaccugcu

SEQ ID NO: 2253673 - RNA, 18 nt, Human
aggcacgaacccaccugc

SEQ ID NO: 2253674 - RNA, 17 nt, Human
aggcacgaacccaccug

SEQ ID NO: 2253675 - RNA, 23 nt, Human
aggcacuagccuuuggcucugga

SEQ ID NO: 2253676 - RNA, 16 nt, Human
aggcacucuguuauuu

SEQ ID NO: 2253677 - RNA, 20 nt, Human
aggcacucuguuauuuagac

SEQ ID NO: 2253678 - RNA, 22 nt, Human
aggcagacuucccugaauguau

SEQ ID NO: 2253679 - RNA, 19 nt, Human
aggcacucuguuauuuaga

SEQ ID NO: 2253680 - RNA, 9 nt, Human
aggcagaga

SEQ ID NO: 2253681 - RNA, 23 nt, Human
aggcacugagauaccagcgagga

SEQ ID NO: 2253682 - RNA, 17 nt, Human
aggcacugaagugcuua

SEQ ID NO: 2253683 - RNA, 13 nt, Human
aggcagagaaaga

SEQ ID NO: 2253684 - RNA, 15 nt, Human
aggcagagaaagaag

SEQ ID NO: 2253685 - RNA, 17 nt, Human
aggcagagaaagaagag

SEQ ID NO: 2253686 - RNA, 18 nt, Human
aggcagagaaagaagaga

SEQ ID NO: 2253687 - RNA, 19 nt, Human
aggcagagaaagaagagac

SEQ ID NO: 2253688 - RNA, 21 nt, Human
aggcagagaaagaagagacag

SEQ ID NO: 2253689 - RNA, 22 nt, Human
aggcagagaaagaagagacagg

SEQ ID NO: 2253690 - RNA, 21 nt, Human
aggcagaucugugccccaugc

SEQ ID NO: 2253691 - RNA, 20 nt, Human
aggcagaucugugccccaug

SEQ ID NO: 2253692 - RNA, 16 nt, Human
aggcagaucugugccc

SEQ ID NO: 2253693 - RNA, 15 nt, Human
aggcagaucugugcc

SEQ ID NO: 2253694 - RNA, 17 nt, Human
aggcagauccaggacua

SEQ ID NO: 2253695 - RNA, 14 nt, Human
aggcagagaaucau

SEQ ID NO: 2253696 - RNA, 22 nt, Human
aggcagagaaucauacuuagca

SEQ ID NO: 2253697 - RNA, 11 nt, Human
aggcagagagc

SEQ ID NO: 2253698 - RNA, 13 nt, Human
aggcagagagcgg

SEQ ID NO: 2253699 - RNA, 20 nt, Human
aggcagagagcggucucagg

SEQ ID NO: 2253700 - RNA, 13 nt, Human
aggcagaggacag

SEQ ID NO: 2253701 - RNA, 15 nt, Human
aggcaugguggccca

SEQ ID NO: 2253702 - RNA, 16 nt, Human
aggcauggcccugggg

SEQ ID NO: 2253703 - RNA, 21 nt, Human
aggcauggcccugggguccca

SEQ ID NO: 2253704 - RNA, 14 nt, Human
aggcauggcccugg

SEQ ID NO: 2253705 - RNA, 15 nt, Human
aggcauggcccuggg

SEQ ID NO: 2253706 - RNA, 12 nt, Human
aggcauguccug

SEQ ID NO: 2253707 - RNA, 12 nt, Human
aggcauggugga

SEQ ID NO: 2253708 - RNA, 17 nt, Human
aggcaugugaugagagg

SEQ ID NO: 2253709 - RNA, 12 nt, Human
aggcagcauuua

SEQ ID NO: 2253710 - RNA, 12 nt, Human
aggcauggcccu

SEQ ID NO: 2253711 - RNA, 13 nt, Human
aggcauggcccug

SEQ ID NO: 2253712 - RNA, 23 nt, Human
aggcagcagugugaggccagggc

SEQ ID NO: 2253713 - RNA, 22 nt, Human
aggcagcagugugaggccaggg

SEQ ID NO: 2253714 - RNA, 20 nt, Human
aggcagcagugugaggccag

SEQ ID NO: 2253715 - RNA, 19 nt, Human
aggcagcagugugaggcca

SEQ ID NO: 2253716 - RNA, 23 nt, Human
aggcagaucugugccccaugccu

SEQ ID NO: 2253717 - RNA, 22 nt, Human
aggcagaucugugccccaugcc

SEQ ID NO: 2253718 - RNA, 15 nt, Human
aggcagauugaaaag

SEQ ID NO: 2253719 - RNA, 16 nt, Human
aggcagauugaaaagg

SEQ ID NO: 2253720 - RNA, 17 nt, Human
aggcagauugaaaagga

SEQ ID NO: 2253721 - RNA, 17 nt, Human
aggcauguucucugagg

SEQ ID NO: 2253722 - RNA, 21 nt, Human
aggcaugugaugagaggaaau

SEQ ID NO: 2253723 - RNA, 19 nt, Human
aggcaugugaugagaggaa

SEQ ID NO: 2253724 - RNA, 20 nt, Human
aggcaugugaugagaggaaa

SEQ ID NO: 2253725 - RNA, 18 nt, Human
aggcauguucucugagga

SEQ ID NO: 2253726 - RNA, 19 nt, Human
aggcauguucucugaggac

SEQ ID NO: 2253727 - RNA, 18 nt, Human
aggcauuccccaggaggc

SEQ ID NO: 2253728 - RNA, 17 nt, Human
aggcauuccccaggagg

SEQ ID NO: 2253729 - RNA, 14 nt, Human
aggcggugggcacc

SEQ ID NO: 2253730 - RNA, 21 nt, Human
aggcggugggcacccacccug

SEQ ID NO: 2253731 - RNA, 19 nt, Human
aggcgucaacgugcauuuu

SEQ ID NO: 2253732 - RNA, 21 nt, Human
aggcuaaagcccagagacagc

SEQ ID NO: 2253733 - RNA, 18 nt, Human
aggcuaaagcccagagac

SEQ ID NO: 2253734 - RNA, 19 nt, Human
aggcuaaggcaggaaaauu

SEQ ID NO: 2253735 - RNA, 14 nt, Human
aggcgggccagcca

SEQ ID NO: 2253736 - RNA, 15 nt, Human
aggcgggccagccag

SEQ ID NO: 2253737 - RNA, 16 nt, Human
aggcgggccagccagg

SEQ ID NO: 2253738 - RNA, 17 nt, Human
aggcgggccagccaggc

SEQ ID NO: 2253739 - RNA, 21 nt, Human
aggcgggccagccaggcgggc

SEQ ID NO: 2253740 - RNA, 23 nt, Human
aggcgggccagccaggcgggcuc

SEQ ID NO: 2253741 - RNA, 15 nt, Human
aggcgggcggucagg

SEQ ID NO: 2253742 - RNA, 14 nt, Human
aggcgggcucaagg

SEQ ID NO: 2253743 - RNA, 21 nt, Human
aggcgggaaaagcagcccuug

SEQ ID NO: 2253744 - RNA, 16 nt, Human
aggcggccccucccgc

SEQ ID NO: 2253745 - RNA, 15 nt, Human
aggcgggaaggaggg

SEQ ID NO: 2253746 - RNA, 14 nt, Human
aggcgggaaggagg

SEQ ID NO: 2253747 - RNA, 14 nt, Human
aggcgggaguggag

SEQ ID NO: 2253748 - RNA, 12 nt, Human
aggcgggccagc

SEQ ID NO: 2253749 - RNA, 13 nt, Human
aggcgggccagcc

SEQ ID NO: 2253750 - RNA, 20 nt, Human
aggccggcgagcccugugga

SEQ ID NO: 2253751 - RNA, 22 nt, Human
aggcuggucucaaacuccugac

SEQ ID NO: 2253752 - RNA, 17 nt, Human
aggcugaggcagaagaa

SEQ ID NO: 2253753 - RNA, 23 nt, Human
aggcuggucucgaacuccugacc

SEQ ID NO: 2253754 - RNA, 20 nt, Human
aggcuggugcuguggccagg

SEQ ID NO: 2253755 - RNA, 20 nt, Human
aggcuguaucccaugagccu

SEQ ID NO: 2253756 - RNA, 21 nt, Human
aggcuguaucccaugagccuc

SEQ ID NO: 2253757 - RNA, 22 nt, Human
aggcuguaucccaugagccuca

SEQ ID NO: 2253758 - RNA, 14 nt, Human
aggcugguggccca

SEQ ID NO: 2253759 - RNA, 13 nt, Human
aggcugguggccc

SEQ ID NO: 2253760 - RNA, 22 nt, Human
aggcuggugcuguggccagggu

SEQ ID NO: 2253761 - RNA, 23 nt, Human
aggcuggugcuguggccagggug

SEQ ID NO: 2253762 - RNA, 17 nt, Human
aggcuuagucacugaga

SEQ ID NO: 2253763 - RNA, 15 nt, Human
aggcugguggcccag

SEQ ID NO: 2253764 - RNA, 15 nt, Human
aggcuuagcuuugcu

SEQ ID NO: 2253765 - RNA, 19 nt, Human
aggcuuagcuuugcucugc

SEQ ID NO: 2253766 - RNA, 20 nt, Human
aggcuuagcuuugcucugcc

SEQ ID NO: 2253767 - RNA, 23 nt, Human
agggacugccagucccccugccc

SEQ ID NO: 2253768 - RNA, 15 nt, Human
agggacuggaaccag

SEQ ID NO: 2253769 - RNA, 18 nt, Human
agggacuggaaccaggga

SEQ ID NO: 2253770 - RNA, 15 nt, Human
agggacugaggggag

SEQ ID NO: 2253771 - RNA, 23 nt, Human
agggaccccugcccuugucccac

SEQ ID NO: 2253772 - RNA, 15 nt, Human
agggacccuccacca

SEQ ID NO: 2253773 - RNA, 15 nt, Human
agggaccccugcccu

SEQ ID NO: 2253774 - RNA, 15 nt, Human
agggaccccuccucc

SEQ ID NO: 2253775 - RNA, 13 nt, Human
agggaccccuccu

SEQ ID NO: 2253776 - RNA, 14 nt, Human
agggaccccuccuc

SEQ ID NO: 2253777 - RNA, 20 nt, Human
agggaccagccaagagggcu

SEQ ID NO: 2253778 - RNA, 12 nt, Human
agggaccccucc

SEQ ID NO: 2253779 - RNA, 15 nt, Human
agggaccagccaaga

SEQ ID NO: 2253780 - RNA, 14 nt, Human
agggaccagccaag

SEQ ID NO: 2253781 - RNA, 14 nt, Human
agggaccacagcaa

SEQ ID NO: 2253782 - RNA, 23 nt, Human
agggaccacagcaaggcaccugc

SEQ ID NO: 2253783 - RNA, 18 nt, Human
agggaccacacccuguac

SEQ ID NO: 2253784 - RNA, 23 nt, Human
agggaccaaggcaaggcaggugc

SEQ ID NO: 2253785 - RNA, 13 nt, Human
agggaccacagca

SEQ ID NO: 2253786 - RNA, 18 nt, Human
aggcuuagucacugagac

SEQ ID NO: 2253787 - RNA, 12 nt, Human
agggaccaaggc

SEQ ID NO: 2253788 - RNA, 13 nt, Human
agggaccaaggca

SEQ ID NO: 2253789 - RNA, 17 nt, Human
agggaccaaggcaaggc

SEQ ID NO: 2253790 - RNA, 21 nt, Human
agggaccaaggcaaggcaggu

SEQ ID NO: 2253791 - RNA, 19 nt, Human
aggcugaggcaggagaaug

SEQ ID NO: 2253792 - RNA, 15 nt, Human
aggcugaggcaggag

SEQ ID NO: 2253793 - RNA, 14 nt, Human
aggcugaggcagga

SEQ ID NO: 2253794 - RNA, 16 nt, Human
aggcugagacugcggg

SEQ ID NO: 2253795 - RNA, 15 nt, Human
aggcugagacaggag

SEQ ID NO: 2253796 - RNA, 18 nt, Human
aggcugagacaggagaau

SEQ ID NO: 2253797 - RNA, 17 nt, Human
aggcugagacugcggga

SEQ ID NO: 2253798 - RNA, 15 nt, Human
aggcugaggcagaag

SEQ ID NO: 2253799 - RNA, 22 nt, Human
aggcugaccuugaacuccuggg

SEQ ID NO: 2253800 - RNA, 16 nt, Human
aggcugagaacacugu

SEQ ID NO: 2253801 - RNA, 19 nt, Human
aggcugagaacacugugaa

SEQ ID NO: 2253802 - RNA, 13 nt, Human
aggcugagacagg

SEQ ID NO: 2253803 - RNA, 14 nt, Human
aggcugagacagga

SEQ ID NO: 2253804 - RNA, 21 nt, Human
aggcugaccacagcacagcca

SEQ ID NO: 2253805 - RNA, 18 nt, Human
aggcugaccacagcacag

SEQ ID NO: 2253806 - RNA, 17 nt, Human
aggcugaccacagcaca

SEQ ID NO: 2253807 - RNA, 16 nt, Human
aggcugaccacagcac

SEQ ID NO: 2253808 - RNA, 21 nt, Human
aggcugaggcggguggaucac

SEQ ID NO: 2253809 - RNA, 11 nt, Human
aggcugaggcg

SEQ ID NO: 2253810 - RNA, 16 nt, Human
aggcugaggccuggac

SEQ ID NO: 2253811 - RNA, 17 nt, Human
aggcugaggccuggacu

SEQ ID NO: 2253812 - RNA, 17 nt, Human
aggcugaggcaggagga

SEQ ID NO: 2253813 - RNA, 13 nt, Human
aggcugaggccug

SEQ ID NO: 2253814 - RNA, 14 nt, Human
aggcugaggccugg

SEQ ID NO: 2253815 - RNA, 15 nt, Human
aggcugaggccugga

SEQ ID NO: 2253816 - RNA, 18 nt, Human
aggcuggguucugauccu

SEQ ID NO: 2253817 - RNA, 17 nt, Human
aggcugaggcuggcaca

SEQ ID NO: 2253818 - RNA, 16 nt, Human
aggcugaggcuggcac

SEQ ID NO: 2253819 - RNA, 15 nt, Human
aggcugaggcuggca

SEQ ID NO: 2253820 - RNA, 14 nt, Human
aggcugaggcuggc

SEQ ID NO: 2253821 - RNA, 19 nt, Human
aggcuacacugacacuggu

SEQ ID NO: 2253822 - RNA, 22 nt, Human
aggcuacaauuuucucccagga

SEQ ID NO: 2253823 - RNA, 23 nt, Human
aggcuacaauuuucucccaggaa

SEQ ID NO: 2253824 - RNA, 13 nt, Human
aggcuacacugac

SEQ ID NO: 2253825 - RNA, 18 nt, Human
aggcuacacugacacugg

SEQ ID NO: 2253826 - RNA, 19 nt, Human
aggcuacaauuuucuccca

SEQ ID NO: 2253827 - RNA, 18 nt, Human
aggcuacaauuuucuccc

SEQ ID NO: 2253828 - RNA, 19 nt, Human
aggcuaaauuacucaggaa

SEQ ID NO: 2253829 - RNA, 15 nt, Human
aggcuaaggcgugga

SEQ ID NO: 2253830 - RNA, 18 nt, Human
aggcuaaggcguggagcu

SEQ ID NO: 2253831 - RNA, 19 nt, Human
aggcuaaggcguggagcug

SEQ ID NO: 2253832 - RNA, 23 nt, Human
aggcuaaggcguggagcugccug

SEQ ID NO: 2253833 - RNA, 20 nt, Human
aggcuaaggcguggagcugc

SEQ ID NO: 2253834 - RNA, 22 nt, Human
aggcugaccaagagagaaagaa

SEQ ID NO: 2253835 - RNA, 20 nt, Human
aggcugaccaagagagaaag

SEQ ID NO: 2253836 - RNA, 19 nt, Human
aggcugaccaagagagaaa

SEQ ID NO: 2253837 - RNA, 18 nt, Human
aggcugaccaagagagaa

SEQ ID NO: 2253838 - RNA, 14 nt, Human
aggcugaccacagc

SEQ ID NO: 2253839 - RNA, 13 nt, Human
aggcugaccacag

SEQ ID NO: 2253840 - RNA, 15 nt, Human
aggcuaccuuuguau

SEQ ID NO: 2253841 - RNA, 14 nt, Human
aggcuaccuuugua

SEQ ID NO: 2253842 - RNA, 13 nt, Human
aggcuaccuuugu

SEQ ID NO: 2253843 - RNA, 23 nt, Human
agcaaaaucauggaaugguuaua

SEQ ID NO: 2253844 - RNA, 13 nt, Human
agcaaacacauua

SEQ ID NO: 2253845 - RNA, 20 nt, Human
agcaaaaucauggaaugguu

SEQ ID NO: 2253846 - RNA, 13 nt, Human
agcaaacagagga

SEQ ID NO: 2253847 - RNA, 19 nt, Human
agcaaacuaacuugacuuu

SEQ ID NO: 2253848 - RNA, 23 nt, Human
agcaaagccccaugcuggagccu

SEQ ID NO: 2253849 - RNA, 13 nt, Human
agcaaacuaagcc

SEQ ID NO: 2253850 - RNA, 21 nt, Human
agcaaagccccaugcuggagc

SEQ ID NO: 2253851 - RNA, 22 nt, Human
agcaaagccccaugcuggagcc

SEQ ID NO: 2253852 - RNA, 18 nt, Human
agcaaaagaugcuucuca

SEQ ID NO: 2253853 - RNA, 21 nt, Human
agcaaaaccaaauauuccaga

SEQ ID NO: 2253854 - RNA, 18 nt, Human
agcaaaagggugucugag

SEQ ID NO: 2253855 - RNA, 21 nt, Human
agcaaaagggugucugagccc

SEQ ID NO: 2253856 - RNA, 21 nt, Human
agcaaaauaauuuuaaacaaa

SEQ ID NO: 2253857 - RNA, 24 nt, Human
agcaaaauuuuuucucuaggaaau

SEQ ID NO: 2253858 - RNA, 19 nt, Human
agauugaaaacuuuucuca

SEQ ID NO: 2253859 - RNA, 20 nt, Human
agauugaaaacuuuucucag

SEQ ID NO: 2253860 - RNA, 19 nt, Human
agauucuuuccugaggcug

SEQ ID NO: 2253861 - RNA, 21 nt, Human
agauucuuuccugaggcuggg

SEQ ID NO: 2253862 - RNA, 17 nt, Human
agcaaaacuccaucuca

SEQ ID NO: 2253863 - RNA, 23 nt, Human
agauugcaacaggcugggcuuca

SEQ ID NO: 2253864 - RNA, 20 nt, Human
agauugcaacaggcugggcu

SEQ ID NO: 2253865 - RNA, 21 nt, Human
agauugcaacaggcugggcuu

SEQ ID NO: 2253866 - RNA, 23 nt, Human
agcaaagcugaugacaacuuccc

SEQ ID NO: 2253867 - RNA, 21 nt, Human
agcaaagcugaugacaacuuc

SEQ ID NO: 2253868 - RNA, 20 nt, Human
agcaaaggagauuggaagga

SEQ ID NO: 2253869 - RNA, 17 nt, Human
agcaaauguuaugcaua

SEQ ID NO: 2253870 - RNA, 15 nt, Human
agcaaaugugaccug

SEQ ID NO: 2253871 - RNA, 16 nt, Human
agcaaauguggcuccu

SEQ ID NO: 2253872 - RNA, 20 nt, Human
agcaaaugucuuccuggauu

SEQ ID NO: 2253873 - RNA, 17 nt, Human
agcaaaugucuuccugg

SEQ ID NO: 2253874 - RNA, 17 nt, Human
agauucugaaacauugc

SEQ ID NO: 2253875 - RNA, 15 nt, Human
agauucuccugugcu

SEQ ID NO: 2253876 - RNA, 17 nt, Human
agauguaaaagguauua

SEQ ID NO: 2253877 - RNA, 18 nt, Human
agaugguuugagccugag

SEQ ID NO: 2253878 - RNA, 22 nt, Human
agaugguuuuauaaucugauuu

SEQ ID NO: 2253879 - RNA, 16 nt, Human
agauguagaggagaaa

SEQ ID NO: 2253880 - RNA, 19 nt, Human
agauguagauaaacucaga

SEQ ID NO: 2253881 - RNA, 15 nt, Human
agauguagauuuauu

SEQ ID NO: 2253882 - RNA, 21 nt, Human
agauguagcaaaacgcaugga

SEQ ID NO: 2253883 - RNA, 18 nt, Human
agauguagauuuauuuca

SEQ ID NO: 2253884 - RNA, 19 nt, Human
agauguagaggagaaacug

SEQ ID NO: 2253885 - RNA, 13 nt, Human
agaugggugggga

SEQ ID NO: 2253886 - RNA, 23 nt, Human
agaugaugaaaauauuuaaaggc

SEQ ID NO: 2253887 - RNA, 19 nt, Human
agaugguauauuugguacu

SEQ ID NO: 2253888 - RNA, 19 nt, Human
agauggucacgcaccuggg

SEQ ID NO: 2253889 - RNA, 21 nt, Human
agauggucacgcaccugggug

SEQ ID NO: 2253890 - RNA, 14 nt, Human
agauggugcugaga

SEQ ID NO: 2253891 - RNA, 15 nt, Human
agauggugaaauuua

SEQ ID NO: 2253892 - RNA, 17 nt, Human
agauggugcugagaagc

SEQ ID NO: 2253893 - RNA, 14 nt, Human
agaugguggcagua

SEQ ID NO: 2253894 - RNA, 13 nt, Human
agaugauccauga

SEQ ID NO: 2253895 - RNA, 13 nt, Human
agaugaucauuug

SEQ ID NO: 2253896 - RNA, 16 nt, Human
agaugaucuacucaga

SEQ ID NO: 2253897 - RNA, 18 nt, Human
agaugaugaaaauauuua

SEQ ID NO: 2253898 - RNA, 20 nt, Human
agaugauacauccaaagcag

SEQ ID NO: 2253899 - RNA, 16 nt, Human
agaugauacauccaaa

SEQ ID NO: 2253900 - RNA, 14 nt, Human
agaugagugagcau

SEQ ID NO: 2253901 - RNA, 19 nt, Human
agaugaaguuuuacauugu

SEQ ID NO: 2253902 - RNA, 22 nt, Human
agaugaauacaaacaauggaaa

SEQ ID NO: 2253903 - RNA, 16 nt, Human
agaugaauacaaacaa

SEQ ID NO: 2253904 - RNA, 21 nt, Human
agaugaguaaaggaguaagaa

SEQ ID NO: 2253905 - RNA, 21 nt, Human
agagugcaagccccugcucca

SEQ ID NO: 2253906 - RNA, 18 nt, Human
agagugcauugugagggu

SEQ ID NO: 2253907 - RNA, 12 nt, Human
agagugcccaga

SEQ ID NO: 2253908 - RNA, 13 nt, Human
agagugcccagaa

SEQ ID NO: 2253909 - RNA, 21 nt, Human
agagugcgccgagucugucuc

SEQ ID NO: 2253910 - RNA, 17 nt, Human
agagugcgccgagucug

SEQ ID NO: 2253911 - RNA, 22 nt, Human
agaguggaaugcuuccuagaag

SEQ ID NO: 2253912 - RNA, 22 nt, Human
agagugcaacaguagcauagga

SEQ ID NO: 2253913 - RNA, 17 nt, Human
agagugcaacaguagca

SEQ ID NO: 2253914 - RNA, 13 nt, Human
agagugcaacagu

SEQ ID NO: 2253915 - RNA, 22 nt, Human
agagugauagucuuuugcuuuu

SEQ ID NO: 2253916 - RNA, 17 nt, Human
agagugauaauacaagu

SEQ ID NO: 2253917 - RNA, 20 nt, Human
agagugauagucuuuugcuu

SEQ ID NO: 2253918 - RNA, 12 nt, Human
agagggggugga

SEQ ID NO: 2253919 - RNA, 19 nt, Human
agaggggguggaggggugu

SEQ ID NO: 2253920 - RNA, 12 nt, Human
agaguggccugg

SEQ ID NO: 2253921 - RNA, 11 nt, Human
agaguggccug

SEQ ID NO: 2253922 - RNA, 19 nt, Human
agaugaagcaaacacauua

SEQ ID NO: 2253923 - RNA, 20 nt, Human
agaugaagagugagagggca

SEQ ID NO: 2253924 - RNA, 15 nt, Human
agaugaaguuuuaca

SEQ ID NO: 2253925 - RNA, 18 nt, Human
agaugaagcaaacacauu

SEQ ID NO: 2253926 - RNA, 17 nt, Human
agaugaagcaaacacau

SEQ ID NO: 2253927 - RNA, 16 nt, Human
agaugaaggagaggca

SEQ ID NO: 2253928 - RNA, 19 nt, Human
agaugaagagugagagggc

SEQ ID NO: 2253929 - RNA, 19 nt, Human
agaugaacucuuagaaaug

SEQ ID NO: 2253930 - RNA, 17 nt, Human
agaugaagagugagagg

SEQ ID NO: 2253931 - RNA, 17 nt, Human
agaucuguccucagccu

SEQ ID NO: 2253932 - RNA, 15 nt, Human
agaucuguccucagc

SEQ ID NO: 2253933 - RNA, 18 nt, Human
agaucuguccucagccuu

SEQ ID NO: 2253934 - RNA, 18 nt, Human
agaucugguuuugcuauu

SEQ ID NO: 2253935 - RNA, 20 nt, Human
agaucuggaaccucagccug

SEQ ID NO: 2253936 - RNA, 19 nt, Human
agaucuggaaccucagccu

SEQ ID NO: 2253937 - RNA, 17 nt, Human
agaucuggaaccucagc

SEQ ID NO: 2253938 - RNA, 15 nt, Human
agaucuggaaccuca

SEQ ID NO: 2253939 - RNA, 14 nt, Human
agaucuguccucag

SEQ ID NO: 2253940 - RNA, 15 nt, Human
agaucugguuuugcu

SEQ ID NO: 2253941 - RNA, 17 nt, Human
agaucugguuuugcuau

SEQ ID NO: 2253942 - RNA, 17 nt, Human
agaucuggacuuggcaa

SEQ ID NO: 2253943 - RNA, 12 nt, Human
agaucugguuuu

SEQ ID NO: 2253944 - RNA, 14 nt, Human
agaucuggaaccuc

SEQ ID NO: 2253945 - RNA, 13 nt, Human
agaucuggaaccu

SEQ ID NO: 2253946 - RNA, 20 nt, Human
agcacacacuuuugguuaag

SEQ ID NO: 2253947 - RNA, 14 nt, Human
agcacacacuuuug

SEQ ID NO: 2253948 - RNA, 12 nt, Human
agcacagacccu

SEQ ID NO: 2253949 - RNA, 14 nt, Human
agcacagacccugc

SEQ ID NO: 2253950 - RNA, 15 nt, Human
agcacagacccugcc

SEQ ID NO: 2253951 - RNA, 16 nt, Human
agcaaugucugugcua

SEQ ID NO: 2253952 - RNA, 14 nt, Human
agcaaugucugugc

SEQ ID NO: 2253953 - RNA, 15 nt, Human
agcaaugucugugcu

SEQ ID NO: 2253954 - RNA, 14 nt, Human
agcaauuccaaccu

SEQ ID NO: 2253955 - RNA, 19 nt, Human
agcacaacuuuaagaggac

SEQ ID NO: 2253956 - RNA, 11 nt, Human
agcacaagaag

SEQ ID NO: 2253957 - RNA, 12 nt, Human
agcacaagaagc

SEQ ID NO: 2253958 - RNA, 13 nt, Human
agcacaagaagcg

SEQ ID NO: 2253959 - RNA, 18 nt, Human
agcacaagaagcgugaga

SEQ ID NO: 2253960 - RNA, 15 nt, Human
agcaaugccugccca

SEQ ID NO: 2253961 - RNA, 13 nt, Human
agcaaugucugug

SEQ ID NO: 2253962 - RNA, 21 nt, Human
agcaaugcccguaaugcuuag

SEQ ID NO: 2253963 - RNA, 21 nt, Human
agcaauggacgguccgcagaa

SEQ ID NO: 2253964 - RNA, 20 nt, Human
agcaaugacaucucaggggc

SEQ ID NO: 2253965 - RNA, 21 nt, Human
agcaaugacaucucaggggcc

SEQ ID NO: 2253966 - RNA, 18 nt, Human
agcaaugauguccagaag

SEQ ID NO: 2253967 - RNA, 19 nt, Human
agcaaugauguccagaaga

SEQ ID NO: 2253968 - RNA, 20 nt, Human
agcaaugauguccagaagaa

SEQ ID NO: 2253969 - RNA, 23 nt, Human
agcaaugauguccagaagaauau

SEQ ID NO: 2253970 - RNA, 13 nt, Human
agcaaugcauuuu

SEQ ID NO: 2253971 - RNA, 20 nt, Human
agcaaugcccguaaugcuua

SEQ ID NO: 2253972 - RNA, 18 nt, Human
agcaaugacaucucaggg

SEQ ID NO: 2253973 - RNA, 19 nt, Human
agcaaugacaucucagggg

SEQ ID NO: 2253974 - RNA, 18 nt, Human
agcagcccuccucacccc

SEQ ID NO: 2253975 - RNA, 15 nt, Human
agcagcccuggaguc

SEQ ID NO: 2253976 - RNA, 16 nt, Human
agcagcccuggaguca

SEQ ID NO: 2253977 - RNA, 17 nt, Human
agcagcccuggagucau

SEQ ID NO: 2253978 - RNA, 19 nt, Human
agcagcccuggagucaugc

SEQ ID NO: 2253979 - RNA, 13 nt, Human
agcagcccuuggc

SEQ ID NO: 2253980 - RNA, 22 nt, Human
agcagcccuuggccagaaguca

SEQ ID NO: 2253981 - RNA, 16 nt, Human
agcagcccuuggccag

SEQ ID NO: 2253982 - RNA, 20 nt, Human
agcagccucagaacaaagug

SEQ ID NO: 2253983 - RNA, 15 nt, Human
agcagccucucccca

SEQ ID NO: 2253984 - RNA, 23 nt, Human
agcagcccuccucaccccgucug

SEQ ID NO: 2253985 - RNA, 17 nt, Human
agcagcccuccucaccc

SEQ ID NO: 2253986 - RNA, 16 nt, Human
agcagcccuccucacc

SEQ ID NO: 2253987 - RNA, 17 nt, Human
agcacuuggagccaagg

SEQ ID NO: 2253988 - RNA, 14 nt, Human
agcacuuggagcca

SEQ ID NO: 2253989 - RNA, 13 nt, Human
agcacuugcugua

SEQ ID NO: 2253990 - RNA, 22 nt, Human
agcacuugcaaccgucuguuau

SEQ ID NO: 2253991 - RNA, 13 nt, Human
agcacuuggacuc

SEQ ID NO: 2253992 - RNA, 18 nt, Human
agcacuuggacucuugcu

SEQ ID NO: 2253993 - RNA, 20 nt, Human
agcacuuggacucuugcucu

SEQ ID NO: 2253994 - RNA, 21 nt, Human
agcacuuggacucuugcucuu

SEQ ID NO: 2253995 - RNA, 16 nt, Human
agcagcuuuaaacaaa

SEQ ID NO: 2253996 - RNA, 17 nt, Human
agcagcuucugccacuu

SEQ ID NO: 2253997 - RNA, 20 nt, Human
agcagcuucugccacuuccc

SEQ ID NO: 2253998 - RNA, 22 nt, Human
agcagcuucugccacuucccag

SEQ ID NO: 2253999 - RNA, 17 nt, Human
agcagcuuuaaacaaau

SEQ ID NO: 2254000 - RNA, 19 nt, Human
agcagcuuuaaacucaggg

SEQ ID NO: 2254001 - RNA, 20 nt, Human
agcagcuuuaaacucaggga

SEQ ID NO: 2254002 - RNA, 12 nt, Human
agcagcuuccag

SEQ ID NO: 2254003 - RNA, 14 nt, Human
agcagcuuccagau

SEQ ID NO: 2254004 - RNA, 16 nt, Human
agcagcuuccagauug

SEQ ID NO: 2254005 - RNA, 15 nt, Human
agcagcuucugccac

SEQ ID NO: 2254006 - RNA, 16 nt, Human
agcagcuucugccacu

SEQ ID NO: 2254007 - RNA, 21 nt, Human
agcagccucuccccaggucca

SEQ ID NO: 2254008 - RNA, 18 nt, Human
agcagccucuccccaggu

SEQ ID NO: 2254009 - RNA, 20 nt, Human
agcagccucuccccaggucc

SEQ ID NO: 2254010 - RNA, 19 nt, Human
agcagccugagcaacucuu

SEQ ID NO: 2254011 - RNA, 13 nt, Human
agcagccugagca

SEQ ID NO: 2254012 - RNA, 16 nt, Human
agcagcuucaccagag

SEQ ID NO: 2254013 - RNA, 18 nt, Human
agcagcuucaccagagca

SEQ ID NO: 2254014 - RNA, 16 nt, Human
agcagcuucaguuguu

SEQ ID NO: 2254015 - RNA, 17 nt, Human
agcagcuucaguuguuu

SEQ ID NO: 2254016 - RNA, 21 nt, Human
agcacgauuucuguuuagaua

SEQ ID NO: 2254017 - RNA, 19 nt, Human
agcacgauuucuguuuaga

SEQ ID NO: 2254018 - RNA, 17 nt, Human
agcacgauuucuguuua

SEQ ID NO: 2254019 - RNA, 16 nt, Human
agcacagacccugccc

SEQ ID NO: 2254020 - RNA, 15 nt, Human
agcacuuauuuaaug

SEQ ID NO: 2254021 - RNA, 13 nt, Human
agcacuuaagaga

SEQ ID NO: 2254022 - RNA, 15 nt, Human
agcacuuaagagaau

SEQ ID NO: 2254023 - RNA, 17 nt, Human
agcacuuaagagaauau

SEQ ID NO: 2254024 - RNA, 18 nt, Human
agcacuuaagagaauauu

SEQ ID NO: 2254025 - RNA, 17 nt, Human
agcacggacucuuacug

SEQ ID NO: 2254026 - RNA, 20 nt, Human
agcacggccaacaaagcugu

SEQ ID NO: 2254027 - RNA, 12 nt, Human
agcacuuaagag

SEQ ID NO: 2254028 - RNA, 16 nt, Human
agccccacccaggagg

SEQ ID NO: 2254029 - RNA, 15 nt, Human
agccccacccaggag

SEQ ID NO: 2254030 - RNA, 13 nt, Human
agccccacccagg

SEQ ID NO: 2254031 - RNA, 12 nt, Human
agccccacccag

SEQ ID NO: 2254032 - RNA, 15 nt, Human
agccccauccucugu

SEQ ID NO: 2254033 - RNA, 17 nt, Human
agccccauccucuguac

SEQ ID NO: 2254034 - RNA, 23 nt, Human
agccccauccucuguacagagcc

SEQ ID NO: 2254035 - RNA, 20 nt, Human
agccccacccaggagggagg

SEQ ID NO: 2254036 - RNA, 17 nt, Human
agccccauucugccugc

SEQ ID NO: 2254037 - RNA, 18 nt, Human
agccccauucugccugcc

SEQ ID NO: 2254038 - RNA, 19 nt, Human
agccccauucugccugccc

SEQ ID NO: 2254039 - RNA, 12 nt, Human
agcccucccugc

SEQ ID NO: 2254040 - RNA, 13 nt, Human
agcccucccugcc

SEQ ID NO: 2254041 - RNA, 21 nt, Human
agcccuccccauggagccagc

SEQ ID NO: 2254042 - RNA, 20 nt, Human
agcccuccccauggagccag

SEQ ID NO: 2254043 - RNA, 19 nt, Human
agcccuccccauggagcca

SEQ ID NO: 2254044 - RNA, 12 nt, Human
agcccuccccau

SEQ ID NO: 2254045 - RNA, 20 nt, Human
agccccacagcccacguccu

SEQ ID NO: 2254046 - RNA, 23 nt, Human
agcccuccaucuaaacugccccc

SEQ ID NO: 2254047 - RNA, 21 nt, Human
agcccuccaucuaaacugccc

SEQ ID NO: 2254048 - RNA, 17 nt, Human
agcccgggcucugccuc

SEQ ID NO: 2254049 - RNA, 18 nt, Human
agcccgggcucugccucc

SEQ ID NO: 2254050 - RNA, 20 nt, Human
agcccgggcucugccuccca

SEQ ID NO: 2254051 - RNA, 21 nt, Human
agcccgggcucugccucccau

SEQ ID NO: 2254052 - RNA, 15 nt, Human
agccccacacggagg

SEQ ID NO: 2254053 - RNA, 20 nt, Human
agccccacacuggggugccg

SEQ ID NO: 2254054 - RNA, 11 nt, Human
agccccacagc

SEQ ID NO: 2254055 - RNA, 15 nt, Human
agccccaaguccuga

SEQ ID NO: 2254056 - RNA, 19 nt, Human
agccccaaguccugaagag

SEQ ID NO: 2254057 - RNA, 13 nt, Human
agccccacagccc

SEQ ID NO: 2254058 - RNA, 12 nt, Human
agccccacagcc

SEQ ID NO: 2254059 - RNA, 14 nt, Human
agccccacagccca

SEQ ID NO: 2254060 - RNA, 15 nt, Human
agccccacagcccac

SEQ ID NO: 2254061 - RNA, 16 nt, Human
agccccacagcccacg

SEQ ID NO: 2254062 - RNA, 17 nt, Human
agccccacagcccacgu

SEQ ID NO: 2254063 - RNA, 18 nt, Human
agccccacagcccacguc

SEQ ID NO: 2254064 - RNA, 14 nt, Human
agccccaaguccug

SEQ ID NO: 2254065 - RNA, 23 nt, Human
agccccaaagucaauuaaaggcu

SEQ ID NO: 2254066 - RNA, 13 nt, Human
agcauccuggcac

SEQ ID NO: 2254067 - RNA, 22 nt, Human
agcaggaagcauucagagagca

SEQ ID NO: 2254068 - RNA, 21 nt, Human
agcaggaagcauucagagagc

SEQ ID NO: 2254069 - RNA, 23 nt, Human
agcaggaaaugaaaaugucuugu

SEQ ID NO: 2254070 - RNA, 22 nt, Human
agcagcuuuaaacucagggaca

SEQ ID NO: 2254071 - RNA, 21 nt, Human
agcagcuuuuuuuuccccccu

SEQ ID NO: 2254072 - RNA, 21 nt, Human
agcaggaaaugaaaaugucuu

SEQ ID NO: 2254073 - RNA, 15 nt, Human
agcaggaaaugaaaa

SEQ ID NO: 2254074 - RNA, 20 nt, Human
agccagcagccagcucucag

SEQ ID NO: 2254075 - RNA, 15 nt, Human
agcccaauauuauaa

SEQ ID NO: 2254076 - RNA, 16 nt, Human
agcccaauauuauaau

SEQ ID NO: 2254077 - RNA, 20 nt, Human
agcccaauauuauaauuuuu

SEQ ID NO: 2254078 - RNA, 16 nt, Human
agcccaaugaaaugaa

SEQ ID NO: 2254079 - RNA, 22 nt, Human
agccagcagacauugucagcaa

SEQ ID NO: 2254080 - RNA, 16 nt, Human
agcccacaaagccuua

SEQ ID NO: 2254081 - RNA, 17 nt, Human
agcccacaaagccuuau

SEQ ID NO: 2254082 - RNA, 15 nt, Human
agcccacacuugaga

SEQ ID NO: 2254083 - RNA, 23 nt, Human
agcccacacuugagaggaugaau

SEQ ID NO: 2254084 - RNA, 16 nt, Human
agccagcagccagcuc

SEQ ID NO: 2254085 - RNA, 14 nt, Human
agccagcagccagc

SEQ ID NO: 2254086 - RNA, 16 nt, Human
agcccaauaaaccucu

SEQ ID NO: 2254087 - RNA, 16 nt, Human
agccagcaggcucuca

SEQ ID NO: 2254088 - RNA, 17 nt, Human
agcccacacuugagagg

SEQ ID NO: 2254089 - RNA, 16 nt, Human
agcccaccccccucau

SEQ ID NO: 2254090 - RNA, 14 nt, Human
agcccaccccccuc

SEQ ID NO: 2254091 - RNA, 13 nt, Human
agcccaccccccu

SEQ ID NO: 2254092 - RNA, 15 nt, Human
agcccaccccucaac

SEQ ID NO: 2254093 - RNA, 16 nt, Human
agcccaccuuggcuca

SEQ ID NO: 2254094 - RNA, 14 nt, Human
agcccaccuuggcu

SEQ ID NO: 2254095 - RNA, 22 nt, Human
agcccacguccugucagugccg

SEQ ID NO: 2254096 - RNA, 19 nt, Human
agcccacguccugucagug

SEQ ID NO: 2254097 - RNA, 21 nt, Human
agcccacguccugucagugcc

SEQ ID NO: 2254098 - RNA, 14 nt, Human
agcccacguccugu

SEQ ID NO: 2254099 - RNA, 15 nt, Human
agcccacguccuguc

SEQ ID NO: 2254100 - RNA, 17 nt, Human
agcccacguccugucag

SEQ ID NO: 2254101 - RNA, 14 nt, Human
agcccacucugcuc

SEQ ID NO: 2254102 - RNA, 13 nt, Human
agcccacucugcu

SEQ ID NO: 2254103 - RNA, 15 nt, Human
agcccacucugcucg

SEQ ID NO: 2254104 - RNA, 23 nt, Human
agcccacgcccccacuggugaca

SEQ ID NO: 2254105 - RNA, 14 nt, Human
agcccacgccccca

SEQ ID NO: 2254106 - RNA, 20 nt, Human
agcccacgcccccacuggug

SEQ ID NO: 2254107 - RNA, 15 nt, Human
agcccacgcccccac

SEQ ID NO: 2254108 - RNA, 13 nt, Human
agccagcagccag

SEQ ID NO: 2254109 - RNA, 11 nt, Human
agccagcagcc

SEQ ID NO: 2254110 - RNA, 14 nt, Human
agccagcaggcucu

SEQ ID NO: 2254111 - RNA, 17 nt, Human
agccagaggagagagga

SEQ ID NO: 2254112 - RNA, 18 nt, Human
agccagaggagagaggac

SEQ ID NO: 2254113 - RNA, 23 nt, Human
agccaagcuccuugggaggcccc

SEQ ID NO: 2254114 - RNA, 17 nt, Human
agccaagcuccuuggga

SEQ ID NO: 2254115 - RNA, 15 nt, Human
agccaagcuccuugg

SEQ ID NO: 2254116 - RNA, 21 nt, Human
agccaagcuagaauucccucu

SEQ ID NO: 2254117 - RNA, 13 nt, Human
agccagaggagag

SEQ ID NO: 2254118 - RNA, 15 nt, Human
agccagaggagagag

SEQ ID NO: 2254119 - RNA, 16 nt, Human
agccaagcagccaagc

SEQ ID NO: 2254120 - RNA, 13 nt, Human
agccaagcagcca

SEQ ID NO: 2254121 - RNA, 18 nt, Human
agccaagcacaguggugg

SEQ ID NO: 2254122 - RNA, 21 nt, Human
agccaagcacagugguggcag

SEQ ID NO: 2254123 - RNA, 13 nt, Human
agccaagcacagu

SEQ ID NO: 2254124 - RNA, 14 nt, Human
agccaagcacagug

SEQ ID NO: 2254125 - RNA, 16 nt, Human
agccaagcacaguggu

SEQ ID NO: 2254126 - RNA, 17 nt, Human
agccaagcacaguggug

SEQ ID NO: 2254127 - RNA, 19 nt, Human
agccaagauugcgccauug

SEQ ID NO: 2254128 - RNA, 12 nt, Human
agccaaagccaa

SEQ ID NO: 2254129 - RNA, 19 nt, Human
agccaagaucgcgccacug

SEQ ID NO: 2254130 - RNA, 15 nt, Human
agccaaagauaaucu

SEQ ID NO: 2254131 - RNA, 12 nt, Human
agccaaagaaaa

SEQ ID NO: 2254132 - RNA, 11 nt, Human
agccaaagagu

SEQ ID NO: 2254133 - RNA, 16 nt, Human
agccaaagcuaggccu

SEQ ID NO: 2254134 - RNA, 18 nt, Human
agccaaagcuaggccugg

SEQ ID NO: 2254135 - RNA, 14 nt, Human
agcauccuggcacc

SEQ ID NO: 2254136 - RNA, 17 nt, Human
agcauccuggcacccgg

SEQ ID NO: 2254137 - RNA, 15 nt, Human
agccaaacucugcca

SEQ ID NO: 2254138 - RNA, 14 nt, Human
agccaaacucugcc

SEQ ID NO: 2254139 - RNA, 13 nt, Human
agccaaagaaaaa

SEQ ID NO: 2254140 - RNA, 16 nt, Human
agccaaaccucuguga

SEQ ID NO: 2254141 - RNA, 17 nt, Human
acuuuccuccuggcaga

SEQ ID NO: 2254142 - RNA, 21 nt, Human
acuuuccucuuagucgagcca

SEQ ID NO: 2254143 - RNA, 21 nt, Human
acuuuccucuuuggucuacac

SEQ ID NO: 2254144 - RNA, 19 nt, Human
acuuuccuccugaggcuuu

SEQ ID NO: 2254145 - RNA, 13 nt, Human
agaagacacugau

SEQ ID NO: 2254146 - RNA, 14 nt, Human
agaagacaccagag

SEQ ID NO: 2254147 - RNA, 15 nt, Human
agaagacaccagagc

SEQ ID NO: 2254148 - RNA, 16 nt, Human
agaagacaccagagca

SEQ ID NO: 2254149 - RNA, 17 nt, Human
agaagacaccagagcag

SEQ ID NO: 2254150 - RNA, 18 nt, Human
agaagacaccagagcaga

SEQ ID NO: 2254151 - RNA, 19 nt, Human
agaagacaccagagcagau

SEQ ID NO: 2254152 - RNA, 22 nt, Human
agaagacaccagagcagaugca

SEQ ID NO: 2254153 - RNA, 16 nt, Human
agaagacaugaaccaa

SEQ ID NO: 2254154 - RNA, 14 nt, Human
agaagacauggaga

SEQ ID NO: 2254155 - RNA, 15 nt, Human
agaagacaugaacca

SEQ ID NO: 2254156 - RNA, 12 nt, Human
agaagacacugc

SEQ ID NO: 2254157 - RNA, 23 nt, Human
agaagacaccagagcagaugcag

SEQ ID NO: 2254158 - RNA, 12 nt, Human
agaagacaugaa

SEQ ID NO: 2254159 - RNA, 21 nt, Human
agaagacacugaugggcaacc

SEQ ID NO: 2254160 - RNA, 22 nt, Human
agaagagaguccauauuucaau

SEQ ID NO: 2254161 - RNA, 22 nt, Human
agaagagaggagaggagagagg

SEQ ID NO: 2254162 - RNA, 15 nt, Human
agaagagaggagagg

SEQ ID NO: 2254163 - RNA, 16 nt, Human
agaagagaggagagga

SEQ ID NO: 2254164 - RNA, 20 nt, Human
agaagagaggagaggagaga

SEQ ID NO: 2254165 - RNA, 21 nt, Human
agaagagaggagaggagagag

SEQ ID NO: 2254166 - RNA, 21 nt, Human
agaagagauugugguuucauu

SEQ ID NO: 2254167 - RNA, 21 nt, Human
agaagagcuguucacagccag

SEQ ID NO: 2254168 - RNA, 22 nt, Human
agaagagcuguucacagccaga

SEQ ID NO: 2254169 - RNA, 15 nt, Human
agaagagagaaauag

SEQ ID NO: 2254170 - RNA, 15 nt, Human
agaagagagaucaaa

SEQ ID NO: 2254171 - RNA, 13 nt, Human
agaagagaggaga

SEQ ID NO: 2254172 - RNA, 18 nt, Human
agaagagacucuuugcau

SEQ ID NO: 2254173 - RNA, 20 nt, Human
agaagacucuaccagacugu

SEQ ID NO: 2254174 - RNA, 12 nt, Human
agaagagacagg

SEQ ID NO: 2254175 - RNA, 18 nt, Human
agaagacugcauuauauu

SEQ ID NO: 2254176 - RNA, 21 nt, Human
agaagaccacaaaaauugacu

SEQ ID NO: 2254177 - RNA, 17 nt, Human
agaagacauguuuuaga

SEQ ID NO: 2254178 - RNA, 19 nt, Human
agaagacauguuuuagaca

SEQ ID NO: 2254179 - RNA, 14 nt, Human
agaagacucuacca

SEQ ID NO: 2254180 - RNA, 14 nt, Human
agaagacccuucuc

SEQ ID NO: 2254181 - RNA, 19 nt, Human
agaagacucuaccagacug

SEQ ID NO: 2254182 - RNA, 16 nt, Human
agaagacauggagacu

SEQ ID NO: 2254183 - RNA, 19 nt, Human
agaagacauggagacuccu

SEQ ID NO: 2254184 - RNA, 20 nt, Human
agaagacauggagacuccug

SEQ ID NO: 2254185 - RNA, 22 nt, Human
agaagacauggagacuccugcc

SEQ ID NO: 2254186 - RNA, 13 nt, Human
agaagacauguuu

SEQ ID NO: 2254187 - RNA, 14 nt, Human
agaagacauguuuu

SEQ ID NO: 2254188 - RNA, 15 nt, Human
agaagacauguuuua

SEQ ID NO: 2254189 - RNA, 16 nt, Human
agaagacauguuuuag

SEQ ID NO: 2254190 - RNA, 17 nt, Human
agaagguuuguguuuuu

SEQ ID NO: 2254191 - RNA, 19 nt, Human
agaagguuuguguuuuucu

SEQ ID NO: 2254192 - RNA, 20 nt, Human
agaagguuuguguuuuucug

SEQ ID NO: 2254193 - RNA, 18 nt, Human
agaagguuucagaaagaa

SEQ ID NO: 2254194 - RNA, 20 nt, Human
agaagguuaccaagaagccu

SEQ ID NO: 2254195 - RNA, 20 nt, Human
agaagguugcucuagauuga

SEQ ID NO: 2254196 - RNA, 16 nt, Human
agaagguugcucuaga

SEQ ID NO: 2254197 - RNA, 14 nt, Human
agaaguaacuuacu

SEQ ID NO: 2254198 - RNA, 21 nt, Human
agaaguacugcccuuuugugu

SEQ ID NO: 2254199 - RNA, 13 nt, Human
agaaguauacaua

SEQ ID NO: 2254200 - RNA, 17 nt, Human
agaaguaggcaugaggg

SEQ ID NO: 2254201 - RNA, 19 nt, Human
agaaguagauuaagagcca

SEQ ID NO: 2254202 - RNA, 21 nt, Human
agaaguaggcaugagggauca

SEQ ID NO: 2254203 - RNA, 13 nt, Human
agaaguagauuaa

SEQ ID NO: 2254204 - RNA, 20 nt, Human
agaaguagauuaagagccau

SEQ ID NO: 2254205 - RNA, 14 nt, Human
agaaguauuauaaa

SEQ ID NO: 2254206 - RNA, 19 nt, Human
agaaguauuauaaauuaug

SEQ ID NO: 2254207 - RNA, 17 nt, Human
agaagggggccaugagg

SEQ ID NO: 2254208 - RNA, 13 nt, Human
agaaggggguggu

SEQ ID NO: 2254209 - RNA, 20 nt, Human
agaaggggguggugucucca

SEQ ID NO: 2254210 - RNA, 13 nt, Human
agaagauagcagg

SEQ ID NO: 2254211 - RNA, 20 nt, Human
agaagagaugggcuuguuuu

SEQ ID NO: 2254212 - RNA, 17 nt, Human
agaagaggcuggugcug

SEQ ID NO: 2254213 - RNA, 22 nt, Human
agaagaggcuggugcuguggcc

SEQ ID NO: 2254214 - RNA, 22 nt, Human
agaagagaugggcuuguuuucu

SEQ ID NO: 2254215 - RNA, 24 nt, Human
agaagagggccugugggagccugc

SEQ ID NO: 2254216 - RNA, 15 nt, Human
agaagagggguuuuu

SEQ ID NO: 2254217 - RNA, 12 nt, Human
agaagagggaga

SEQ ID NO: 2254218 - RNA, 14 nt, Human
agaagagggccugu

SEQ ID NO: 2254219 - RNA, 16 nt, Human
agaagagggccugugg

SEQ ID NO: 2254220 - RNA, 18 nt, Human
agaagagggccuguggga

SEQ ID NO: 2254221 - RNA, 21 nt, Human
agaagguccuuaaugauccgu

SEQ ID NO: 2254222 - RNA, 20 nt, Human
agaaggucggaggcuuggga

SEQ ID NO: 2254223 - RNA, 20 nt, Human
agaagguccuuaaugauccg

SEQ ID NO: 2254224 - RNA, 14 nt, Human
agaagguccuuaau

SEQ ID NO: 2254225 - RNA, 21 nt, Human
agaaggugccucaagaauuuc

SEQ ID NO: 2254226 - RNA, 22 nt, Human
agaagguggguuuucaucaaga

SEQ ID NO: 2254227 - RNA, 18 nt, Human
agaagguuaccaagaagc

SEQ ID NO: 2254228 - RNA, 20 nt, Human
agaaggguuuuccacccugg

SEQ ID NO: 2254229 - RNA, 19 nt, Human
agaaggguuauauuuuacu

SEQ ID NO: 2254230 - RNA, 16 nt, Human
agaaggguuauauuuu

SEQ ID NO: 2254231 - RNA, 23 nt, Human
agaaggguccuucccucucccca

SEQ ID NO: 2254232 - RNA, 20 nt, Human
agaaggguccuucccucucc

SEQ ID NO: 2254233 - RNA, 18 nt, Human
agaaggguccuucccucu

SEQ ID NO: 2254234 - RNA, 15 nt, Human
agaaggguccuuccc

SEQ ID NO: 2254235 - RNA, 22 nt, Human
agaaggguuuuccacccuggaa

SEQ ID NO: 2254236 - RNA, 21 nt, Human
agaaggguuuuccacccugga

SEQ ID NO: 2254237 - RNA, 23 nt, Human
agaaggguuuuccacccuggaau

SEQ ID NO: 2254238 - RNA, 21 nt, Human
agaagguauuccuuuugugua

SEQ ID NO: 2254239 - RNA, 16 nt, Human
agaagugaaugcuggg

SEQ ID NO: 2254240 - RNA, 17 nt, Human
agaagucaugaagccca

SEQ ID NO: 2254241 - RNA, 21 nt, Human
agaagugaaaaucuacacucc

SEQ ID NO: 2254242 - RNA, 13 nt, Human
agaagucaugaag

SEQ ID NO: 2254243 - RNA, 22 nt, Human
agaagucagagagggugacaag

SEQ ID NO: 2254244 - RNA, 16 nt, Human
agaaguauuauaaauu

SEQ ID NO: 2254245 - RNA, 14 nt, Human
agaagucaaaguaa

SEQ ID NO: 2254246 - RNA, 18 nt, Human
agaaugaaagggcccaga

SEQ ID NO: 2254247 - RNA, 17 nt, Human
agaagugaaugcuggga

SEQ ID NO: 2254248 - RNA, 19 nt, Human
agaagugaaugcugggacu

SEQ ID NO: 2254249 - RNA, 21 nt, Human
agaagugaaugcugggacuca

SEQ ID NO: 2254250 - RNA, 12 nt, Human
agaagugacagg

SEQ ID NO: 2254251 - RNA, 20 nt, Human
agaaugaaauugcugaaaga

SEQ ID NO: 2254252 - RNA, 20 nt, Human
agaaugaaauacuguuugag

SEQ ID NO: 2254253 - RNA, 19 nt, Human
agaaugaaauacuguuuga

SEQ ID NO: 2254254 - RNA, 16 nt, Human
agaaugaaauacuguu

SEQ ID NO: 2254255 - RNA, 13 nt, Human
agaagugacaggg

SEQ ID NO: 2254256 - RNA, 14 nt, Human
agaagugacaggga

SEQ ID NO: 2254257 - RNA, 17 nt, Human
agaagugacagggaagc

SEQ ID NO: 2254258 - RNA, 14 nt, Human
agaaugagagugug

SEQ ID NO: 2254259 - RNA, 17 nt, Human
agaaugauuaugaauua

SEQ ID NO: 2254260 - RNA, 19 nt, Human
agaaugcacaaacagaggc

SEQ ID NO: 2254261 - RNA, 22 nt, Human
agaaugcacaaacagaggccgc

SEQ ID NO: 2254262 - RNA, 15 nt, Human
agaaugaacaaauug

SEQ ID NO: 2254263 - RNA, 16 nt, Human
agaagugacagggaag

SEQ ID NO: 2254264 - RNA, 17 nt, Human
agaaugagagacacacu

SEQ ID NO: 2254265 - RNA, 22 nt, Human
agaaugagagacacacugaaga

SEQ ID NO: 2254266 - RNA, 18 nt, Human
agaaugcugguuuuccua

SEQ ID NO: 2254267 - RNA, 13 nt, Human
agaaugcugguuu

SEQ ID NO: 2254268 - RNA, 13 nt, Human
agaaugcuguaca

SEQ ID NO: 2254269 - RNA, 22 nt, Human
agaaugcugcaggacuugagaa

SEQ ID NO: 2254270 - RNA, 12 nt, Human
agaaugcugaaa

SEQ ID NO: 2254271 - RNA, 17 nt, Human
agaaugcugaaaccaag

SEQ ID NO: 2254272 - RNA, 14 nt, Human
agaaugauuucaug

SEQ ID NO: 2254273 - RNA, 13 nt, Human
agaaugauuucau

SEQ ID NO: 2254274 - RNA, 21 nt, Human
agaaugagccuacgcugaaga

SEQ ID NO: 2254275 - RNA, 16 nt, Human
agaaugauuuuuagau

SEQ ID NO: 2254276 - RNA, 11 nt, Human
agaaugcugaa

SEQ ID NO: 2254277 - RNA, 15 nt, Human
agaaugcuguacauc

SEQ ID NO: 2254278 - RNA, 14 nt, Human
agaaugcuguacau

SEQ ID NO: 2254279 - RNA, 20 nt, Human
agaaugcuguacaucuauuu

SEQ ID NO: 2254280 - RNA, 17 nt, Human
agaaugggaauauuuua

SEQ ID NO: 2254281 - RNA, 13 nt, Human
agaccagcucuuc

SEQ ID NO: 2254282 - RNA, 12 nt, Human
agaccagcucuu

SEQ ID NO: 2254283 - RNA, 15 nt, Human
agaccagccuggcca

SEQ ID NO: 2254284 - RNA, 13 nt, Human
agaccagccuggc

SEQ ID NO: 2254285 - RNA, 14 nt, Human
agaccagccuggcc

SEQ ID NO: 2254286 - RNA, 12 nt, Human
agaccagccugg

SEQ ID NO: 2254287 - RNA, 19 nt, Human
agacccaaaaggcagaagc

SEQ ID NO: 2254288 - RNA, 17 nt, Human
agacccaaaaggcagaa

SEQ ID NO: 2254289 - RNA, 17 nt, Human
agacccagcccucaucc

SEQ ID NO: 2254290 - RNA, 16 nt, Human
agacccaaggaggaaa

SEQ ID NO: 2254291 - RNA, 14 nt, Human
agacccaaggagga

SEQ ID NO: 2254292 - RNA, 17 nt, Human
agacgaugucuucauac

SEQ ID NO: 2254293 - RNA, 19 nt, Human
agacccagcccucaucccg

SEQ ID NO: 2254294 - RNA, 18 nt, Human
agacccagcccucauccc

SEQ ID NO: 2254295 - RNA, 16 nt, Human
agacgaugucuucaua

SEQ ID NO: 2254296 - RNA, 19 nt, Human
agacgaugucuucauaccu

SEQ ID NO: 2254297 - RNA, 15 nt, Human
agacgccaccauucc

SEQ ID NO: 2254298 - RNA, 17 nt, Human
agacgccaccauuccug

SEQ ID NO: 2254299 - RNA, 20 nt, Human
agacgccaccauuccuggaa

SEQ ID NO: 2254300 - RNA, 15 nt, Human
agacgccugaggaac

SEQ ID NO: 2254301 - RNA, 15 nt, Human
agacgccugagcuca

SEQ ID NO: 2254302 - RNA, 13 nt, Human
agacgccugagga

SEQ ID NO: 2254303 - RNA, 20 nt, Human
agacgccggggacagaggcc

SEQ ID NO: 2254304 - RNA, 22 nt, Human
agacgccggggacagaggccug

SEQ ID NO: 2254305 - RNA, 16 nt, Human
agaccagacuguggag

SEQ ID NO: 2254306 - RNA, 17 nt, Human
agaccagacuguggaga

SEQ ID NO: 2254307 - RNA, 18 nt, Human
agaccagacuguggagaa

SEQ ID NO: 2254308 - RNA, 22 nt, Human
agaccagacuguggagaaauaa

SEQ ID NO: 2254309 - RNA, 15 nt, Human
agaccacguuucuaa

SEQ ID NO: 2254310 - RNA, 18 nt, Human
agacagccacauugggca

SEQ ID NO: 2254311 - RNA, 14 nt, Human
agaccagacugugg

SEQ ID NO: 2254312 - RNA, 16 nt, Human
agacagcagcucaggc

SEQ ID NO: 2254313 - RNA, 22 nt, Human
agacagccaacuauggccugug

SEQ ID NO: 2254314 - RNA, 14 nt, Human
agacagcagcucag

SEQ ID NO: 2254315 - RNA, 12 nt, Human
agacagcagcuc

SEQ ID NO: 2254316 - RNA, 19 nt, Human
agacagaugccccagagcu

SEQ ID NO: 2254317 - RNA, 16 nt, Human
agacagaugccccaga

SEQ ID NO: 2254318 - RNA, 15 nt, Human
agacagaugccccag

SEQ ID NO: 2254319 - RNA, 14 nt, Human
agacagaugcccca

SEQ ID NO: 2254320 - RNA, 22 nt, Human
agacagauacuccuccaagguu

SEQ ID NO: 2254321 - RNA, 21 nt, Human
agacagagucucacuguugcc

SEQ ID NO: 2254322 - RNA, 12 nt, Human
agacagagcugg

SEQ ID NO: 2254323 - RNA, 21 nt, Human
agacagagcugguugggaaga

SEQ ID NO: 2254324 - RNA, 15 nt, Human
agacagagcucacaa

SEQ ID NO: 2254325 - RNA, 13 nt, Human
agacagagcuaca

SEQ ID NO: 2254326 - RNA, 11 nt, Human
agacagagucu

SEQ ID NO: 2254327 - RNA, 19 nt, Human
agacagagucucacuguug

SEQ ID NO: 2254328 - RNA, 20 nt, Human
agacagagucucacuguugc

SEQ ID NO: 2254329 - RNA, 18 nt, Human
agacaaauggaggaauau

SEQ ID NO: 2254330 - RNA, 14 nt, Human
agacaaauggagga

SEQ ID NO: 2254331 - RNA, 18 nt, Human
agacaaaugcugcgcccu

SEQ ID NO: 2254332 - RNA, 15 nt, Human
agacagagcuacaca

SEQ ID NO: 2254333 - RNA, 22 nt, Human
agacaaugacuuacuguacaug

SEQ ID NO: 2254334 - RNA, 21 nt, Human
agacaaugacuuacuguacau

SEQ ID NO: 2254335 - RNA, 17 nt, Human
agacaaaccagaagcaa

SEQ ID NO: 2254336 - RNA, 19 nt, Human
agacaaacaccucccagga

SEQ ID NO: 2254337 - RNA, 16 nt, Human
agacaaaccagaagca

SEQ ID NO: 2254338 - RNA, 18 nt, Human
agacaaagguuuuccucu

SEQ ID NO: 2254339 - RNA, 18 nt, Human
agacaaauacucaugugu

SEQ ID NO: 2254340 - RNA, 20 nt, Human
agacaaauacucauguguau

SEQ ID NO: 2254341 - RNA, 13 nt, Human
agacaaauacuca

SEQ ID NO: 2254342 - RNA, 14 nt, Human
agacaaauacucau

SEQ ID NO: 2254343 - RNA, 17 nt, Human
agacaaauacucaugug

SEQ ID NO: 2254344 - RNA, 12 nt, Human
agacaaauauuu

SEQ ID NO: 2254345 - RNA, 15 nt, Human
agacaaauauuugga

SEQ ID NO: 2254346 - RNA, 16 nt, Human
agacaaaucaaagcag

SEQ ID NO: 2254347 - RNA, 16 nt, Human
agacaaauauuuggag

SEQ ID NO: 2254348 - RNA, 23 nt, Human
agacaaaucuaugccacucagaa

SEQ ID NO: 2254349 - RNA, 20 nt, Human
agacaaugacuuacuguaca

SEQ ID NO: 2254350 - RNA, 15 nt, Human
agagagagaggacag

SEQ ID NO: 2254351 - RNA, 15 nt, Human
agagagagagagaga

SEQ ID NO: 2254352 - RNA, 15 nt, Human
agagagagagagagg

SEQ ID NO: 2254353 - RNA, 13 nt, Human
agagagagagagg

SEQ ID NO: 2254354 - RNA, 14 nt, Human
agagagagaggaca

SEQ ID NO: 2254355 - RNA, 14 nt, Human
agagagaguguuug

SEQ ID NO: 2254356 - RNA, 20 nt, Human
agagaggccuuuuggaaugu

SEQ ID NO: 2254357 - RNA, 14 nt, Human
agagaggccuuuug

SEQ ID NO: 2254358 - RNA, 15 nt, Human
agagagggagaagaa

SEQ ID NO: 2254359 - RNA, 16 nt, Human
agagagggagaagaag

SEQ ID NO: 2254360 - RNA, 19 nt, Human
agagagggagaagaaguca

SEQ ID NO: 2254361 - RNA, 16 nt, Human
agagaggccuuguccc

SEQ ID NO: 2254362 - RNA, 18 nt, Human
agagagggaggcaagccc

SEQ ID NO: 2254363 - RNA, 17 nt, Human
agagagggaggcaagcc

SEQ ID NO: 2254364 - RNA, 17 nt, Human
agagagggagguaugga

SEQ ID NO: 2254365 - RNA, 15 nt, Human
agagagggcagaggg

SEQ ID NO: 2254366 - RNA, 15 nt, Human
agagagggcaggcau

SEQ ID NO: 2254367 - RNA, 14 nt, Human
agagagggcaggca

SEQ ID NO: 2254368 - RNA, 15 nt, Human
agagagggcuuuaau

SEQ ID NO: 2254369 - RNA, 14 nt, Human
agagagggggccac

SEQ ID NO: 2254370 - RNA, 16 nt, Human
agagagggggccaccu

SEQ ID NO: 2254371 - RNA, 19 nt, Human
agagagggggccaccuccc

SEQ ID NO: 2254372 - RNA, 22 nt, Human
agagaggggaauaauagaagaa

SEQ ID NO: 2254373 - RNA, 19 nt, Human
agagagggguacauuuccc

SEQ ID NO: 2254374 - RNA, 13 nt, Human
agagccagggucu

SEQ ID NO: 2254375 - RNA, 13 nt, Human
agagcccaccuug

SEQ ID NO: 2254376 - RNA, 19 nt, Human
agagccauggacucuacac

SEQ ID NO: 2254377 - RNA, 16 nt, Human
agagccaugcugggaa

SEQ ID NO: 2254378 - RNA, 20 nt, Human
agagccauauaaguuugaag

SEQ ID NO: 2254379 - RNA, 22 nt, Human
agagccauauaaguuugaagga

SEQ ID NO: 2254380 - RNA, 19 nt, Human
agagccauauaaguuugaa

SEQ ID NO: 2254381 - RNA, 11 nt, Human
agacuggaggg

SEQ ID NO: 2254382 - RNA, 18 nt, Human
agacuggagcaucugacu

SEQ ID NO: 2254383 - RNA, 15 nt, Human
agacuggagcaucug

SEQ ID NO: 2254384 - RNA, 16 nt, Human
agacuggagcaucuga

SEQ ID NO: 2254385 - RNA, 14 nt, Human
agacuggagcaucu

SEQ ID NO: 2254386 - RNA, 21 nt, Human
agacuggaagcuaauuugcau

SEQ ID NO: 2254387 - RNA, 11 nt, Human
agacuggaagg

SEQ ID NO: 2254388 - RNA, 17 nt, Human
agacugcuucccauccu

SEQ ID NO: 2254389 - RNA, 21 nt, Human
agacugcuucccauccuaccc

SEQ ID NO: 2254390 - RNA, 22 nt, Human
agacugcuucccauccuacccu

SEQ ID NO: 2254391 - RNA, 23 nt, Human
agacugcuucccauccuacccuc

SEQ ID NO: 2254392 - RNA, 20 nt, Human
agacuggaagcuaauuugca

SEQ ID NO: 2254393 - RNA, 13 nt, Human
agagagagaagug

SEQ ID NO: 2254394 - RNA, 17 nt, Human
agagagagagacagaga

SEQ ID NO: 2254395 - RNA, 16 nt, Human
agagagaccacuuuuc

SEQ ID NO: 2254396 - RNA, 16 nt, Human
agacuggauacugccc

SEQ ID NO: 2254397 - RNA, 15 nt, Human
agacuggauacugcc

SEQ ID NO: 2254398 - RNA, 23 nt, Human
agacuggaggggacgcugguaga

SEQ ID NO: 2254399 - RNA, 13 nt, Human
agacuggagggga

SEQ ID NO: 2254400 - RNA, 15 nt, Human
agagagaagugcccc

SEQ ID NO: 2254401 - RNA, 11 nt, Human
agagagaagcc

SEQ ID NO: 2254402 - RNA, 19 nt, Human
agagagaagugccccugcu

SEQ ID NO: 2254403 - RNA, 14 nt, Human
agagcccuugccuc

SEQ ID NO: 2254404 - RNA, 16 nt, Human
agagccgggaagcgau

SEQ ID NO: 2254405 - RNA, 13 nt, Human
agagccgggaagc

SEQ ID NO: 2254406 - RNA, 17 nt, Human
agagccauuuugugaau

SEQ ID NO: 2254407 - RNA, 19 nt, Human
agagcccuugccuccccau

SEQ ID NO: 2254408 - RNA, 15 nt, Human
agagcccuucauuug

SEQ ID NO: 2254409 - RNA, 16 nt, Human
agagccauuuugugaa

SEQ ID NO: 2254410 - RNA, 18 nt, Human
agagccauguagaagcug

SEQ ID NO: 2254411 - RNA, 20 nt, Human
agagccauguagaagcugca

SEQ ID NO: 2254412 - RNA, 17 nt, Human
agagccgugaugccucc

SEQ ID NO: 2254413 - RNA, 15 nt, Human
agagccugagaguga

SEQ ID NO: 2254414 - RNA, 22 nt, Human
agagccucccucaauucccccu

SEQ ID NO: 2254415 - RNA, 13 nt, Human
agacugagcucaa

SEQ ID NO: 2254416 - RNA, 19 nt, Human
agacugcugggacuggcca

SEQ ID NO: 2254417 - RNA, 22 nt, Human
agacugaguacguugugcauuu

SEQ ID NO: 2254418 - RNA, 22 nt, Human
agacugcugggacuggccaggu

SEQ ID NO: 2254419 - RNA, 20 nt, Human
agacugcugggacuggccag

SEQ ID NO: 2254420 - RNA, 17 nt, Human
agacugagcaccugcuu

SEQ ID NO: 2254421 - RNA, 19 nt, Human
agacugcuuccaauuuucu

SEQ ID NO: 2254422 - RNA, 14 nt, Human
agacugcuucccau

SEQ ID NO: 2254423 - RNA, 16 nt, Human
agacugcuucccaucc

SEQ ID NO: 2254424 - RNA, 20 nt, Human
agacugcuguguuugagcuc

SEQ ID NO: 2254425 - RNA, 16 nt, Human
agacugagcaccugcu

SEQ ID NO: 2254426 - RNA, 22 nt, Human
agacugaccaauauuguacagu

SEQ ID NO: 2254427 - RNA, 20 nt, Human
agacugaguacguugugcau

SEQ ID NO: 2254428 - RNA, 16 nt, Human
agacucuguggggccu

SEQ ID NO: 2254429 - RNA, 18 nt, Human
agacucugucucagucca

SEQ ID NO: 2254430 - RNA, 18 nt, Human
agacucugucucaaaaaa

SEQ ID NO: 2254431 - RNA, 13 nt, Human
agacucugucuca

SEQ ID NO: 2254432 - RNA, 16 nt, Human
agacgcugugcugccc

SEQ ID NO: 2254433 - RNA, 12 nt, Human
agagggggccac

SEQ ID NO: 2254434 - RNA, 14 nt, Human
agaggggggcugcc

SEQ ID NO: 2254435 - RNA, 22 nt, Human
agaggggggaagaucaggucau

SEQ ID NO: 2254436 - RNA, 12 nt, Human
agagggcuuccu

SEQ ID NO: 2254437 - RNA, 17 nt, Human
agaggggguggccuccc

SEQ ID NO: 2254438 - RNA, 19 nt, Human
agaggggguggccucccaa

SEQ ID NO: 2254439 - RNA, 16 nt, Human
agaggagugacugagc

SEQ ID NO: 2254440 - RNA, 14 nt, Human
agaggagugcuugu

SEQ ID NO: 2254441 - RNA, 12 nt, Human
agaggaguucaa

SEQ ID NO: 2254442 - RNA, 13 nt, Human
agaggaguucaau

SEQ ID NO: 2254443 - RNA, 15 nt, Human
agagggccuguggga

SEQ ID NO: 2254444 - RNA, 16 nt, Human
agagggccugugggag

SEQ ID NO: 2254445 - RNA, 19 nt, Human
agagggccugugggagccu

SEQ ID NO: 2254446 - RNA, 13 nt, Human
agagggccugcaa

SEQ ID NO: 2254447 - RNA, 16 nt, Human
agagggccugcaaggg

SEQ ID NO: 2254448 - RNA, 23 nt, Human
agaggaaucagacuucacacugc

SEQ ID NO: 2254449 - RNA, 14 nt, Human
agaggacuuuucuu

SEQ ID NO: 2254450 - RNA, 21 nt, Human
agaggacuuuucuuuguggcu

SEQ ID NO: 2254451 - RNA, 22 nt, Human
agaggacuuuucuuuguggcuu

SEQ ID NO: 2254452 - RNA, 17 nt, Human
agaggagggaugcugcc

SEQ ID NO: 2254453 - RNA, 21 nt, Human
agaggagcgggaccuguggcu

SEQ ID NO: 2254454 - RNA, 19 nt, Human
agaggagggcgugacucac

SEQ ID NO: 2254455 - RNA, 23 nt, Human
agaggagggcagcagaagggggu

SEQ ID NO: 2254456 - RNA, 21 nt, Human
agaggagggcgugacucaccc

SEQ ID NO: 2254457 - RNA, 12 nt, Human
agaggaggggcc

SEQ ID NO: 2254458 - RNA, 18 nt, Human
agaggaggggccgcugcc

SEQ ID NO: 2254459 - RNA, 14 nt, Human
agaggaggggccgc

SEQ ID NO: 2254460 - RNA, 14 nt, Human
agaggagucagaga

SEQ ID NO: 2254461 - RNA, 20 nt, Human
agaggaguacaggugaagca

SEQ ID NO: 2254462 - RNA, 22 nt, Human
agaggaggggccgcugccaccc

SEQ ID NO: 2254463 - RNA, 20 nt, Human
agaggaggggccgcugccac

SEQ ID NO: 2254464 - RNA, 23 nt, Human
agaggacuuuucuuuguggcuuc

SEQ ID NO: 2254465 - RNA, 23 nt, Human
agaggagggagcaucagugcccu

SEQ ID NO: 2254466 - RNA, 19 nt, Human
agaggagcgggaccugugg

SEQ ID NO: 2254467 - RNA, 20 nt, Human
agaggagcgggaccuguggc

SEQ ID NO: 2254468 - RNA, 24 nt, Human
agaggaaucagacuucacacugca

SEQ ID NO: 2254469 - RNA, 22 nt, Human
agaggaaucacucuuguggaug

SEQ ID NO: 2254470 - RNA, 23 nt, Human
agaggaaggggccagaggcucgu

SEQ ID NO: 2254471 - RNA, 13 nt, Human
agaggaaugaagu

SEQ ID NO: 2254472 - RNA, 20 nt, Human
agaggaaggggccagaggcu

SEQ ID NO: 2254473 - RNA, 18 nt, Human
agaggaaggggccagagg

SEQ ID NO: 2254474 - RNA, 16 nt, Human
agaggaaggggccaga

SEQ ID NO: 2254475 - RNA, 19 nt, Human
auccuucccugucugccag

SEQ ID NO: 2254476 - RNA, 22 nt, Human
auccuucccugucugccagggc

SEQ ID NO: 2254477 - RNA, 20 nt, Human
auccuucaagaacucugggc

SEQ ID NO: 2254478 - RNA, 16 nt, Human
auccuugagucaaaaa

SEQ ID NO: 2254479 - RNA, 22 nt, Human
auccuuguauaaaaaaaauagu

SEQ ID NO: 2254480 - RNA, 15 nt, Human
auccucacugggugg

SEQ ID NO: 2254481 - RNA, 15 nt, Human
auccucaauccagcu

SEQ ID NO: 2254482 - RNA, 12 nt, Human
auccucaaucca

SEQ ID NO: 2254483 - RNA, 17 nt, Human
auccucauacccacccc

SEQ ID NO: 2254484 - RNA, 14 nt, Human
auccucacugggug

SEQ ID NO: 2254485 - RNA, 13 nt, Human
auccuuacaaguu

SEQ ID NO: 2254486 - RNA, 19 nt, Human
aucgcccuccacaucccug

SEQ ID NO: 2254487 - RNA, 22 nt, Human
aucgcaucauugcacucuagcc

SEQ ID NO: 2254488 - RNA, 14 nt, Human
auccuuuccagcau

SEQ ID NO: 2254489 - RNA, 17 nt, Human
auccuuuccagcaugag

SEQ ID NO: 2254490 - RNA, 17 nt, Human
auccuuuaaauccuucc

SEQ ID NO: 2254491 - RNA, 12 nt, Human
auccuuguuuca

SEQ ID NO: 2254492 - RNA, 13 nt, Human
auccuuguuucaa

SEQ ID NO: 2254493 - RNA, 14 nt, Human
auccuuguuucaaa

SEQ ID NO: 2254494 - RNA, 16 nt, Human
auccuuguuucaaaca

SEQ ID NO: 2254495 - RNA, 23 nt, Human
auccuuguuucaaacacaaaugc

SEQ ID NO: 2254496 - RNA, 20 nt, Human
aucgcggcggagcuggcccc

SEQ ID NO: 2254497 - RNA, 22 nt, Human
aucgcggcggagcuggccccgc

SEQ ID NO: 2254498 - RNA, 23 nt, Human
aucgcgccacuacacuccagccu

SEQ ID NO: 2254499 - RNA, 12 nt, Human
aucgccuuuccc

SEQ ID NO: 2254500 - RNA, 21 nt, Human
auccacucuacccucccaccc

SEQ ID NO: 2254501 - RNA, 20 nt, Human
auccacucuacccucccacc

SEQ ID NO: 2254502 - RNA, 19 nt, Human
auccacucuacccucccac

SEQ ID NO: 2254503 - RNA, 18 nt, Human
auccacucuacccuccca

SEQ ID NO: 2254504 - RNA, 19 nt, Human
auccagacccggcugcgug

SEQ ID NO: 2254505 - RNA, 21 nt, Human
auccaccugucucagccuccc

SEQ ID NO: 2254506 - RNA, 18 nt, Human
auccaccugucucagccu

SEQ ID NO: 2254507 - RNA, 13 nt, Human
auccaccugucuc

SEQ ID NO: 2254508 - RNA, 16 nt, Human
auccacucuacccucc

SEQ ID NO: 2254509 - RNA, 19 nt, Human
auccacuagugcaaaucau

SEQ ID NO: 2254510 - RNA, 21 nt, Human
auccacuagugcaaaucauag

SEQ ID NO: 2254511 - RNA, 13 nt, Human
auccacucgccuu

SEQ ID NO: 2254512 - RNA, 10 nt, Human
auccaccucc

SEQ ID NO: 2254513 - RNA, 12 nt, Human
auccaccuccau

SEQ ID NO: 2254514 - RNA, 14 nt, Human
auccaccuccaucu

SEQ ID NO: 2254515 - RNA, 22 nt, Human
auccaccuccaucuucuuugca

SEQ ID NO: 2254516 - RNA, 13 nt, Human
auccaccuccuuc

SEQ ID NO: 2254517 - RNA, 14 nt, Human
auccaccuccuucu

SEQ ID NO: 2254518 - RNA, 15 nt, Human
auccaccuccuucuc

SEQ ID NO: 2254519 - RNA, 16 nt, Human
aucccauucugcguca

SEQ ID NO: 2254520 - RNA, 13 nt, Human
auccccacccuug

SEQ ID NO: 2254521 - RNA, 15 nt, Human
auccccaccugucuu

SEQ ID NO: 2254522 - RNA, 14 nt, Human
auccccacccuggg

SEQ ID NO: 2254523 - RNA, 16 nt, Human
auccccacccugggcu

SEQ ID NO: 2254524 - RNA, 22 nt, Human
auccccaauaauugcagaacua

SEQ ID NO: 2254525 - RNA, 11 nt, Human
auccccacccu

SEQ ID NO: 2254526 - RNA, 21 nt, Human
auccccaauaauugcagaacu

SEQ ID NO: 2254527 - RNA, 19 nt, Human
auccccaauaauugcagaa

SEQ ID NO: 2254528 - RNA, 18 nt, Human
auccccaagccuggcaag

SEQ ID NO: 2254529 - RNA, 12 nt, Human
auccccaauaau

SEQ ID NO: 2254530 - RNA, 16 nt, Human
auccccaagugugaac

SEQ ID NO: 2254531 - RNA, 14 nt, Human
auccccaaguguga

SEQ ID NO: 2254532 - RNA, 13 nt, Human
aucccauguaaca

SEQ ID NO: 2254533 - RNA, 16 nt, Human
aucccauguaacagaa

SEQ ID NO: 2254534 - RNA, 18 nt, Human
aucccauguaacagaaag

SEQ ID NO: 2254535 - RNA, 19 nt, Human
aucccauguaacagaaagg

SEQ ID NO: 2254536 - RNA, 23 nt, Human
aucccauguaacagaaagggcaa

SEQ ID NO: 2254537 - RNA, 15 nt, Human
aucccauguauuuau

SEQ ID NO: 2254538 - RNA, 19 nt, Human
aucccaugagccucagcau

SEQ ID NO: 2254539 - RNA, 16 nt, Human
auccacucccaggcag

SEQ ID NO: 2254540 - RNA, 21 nt, Human
aucccuacccccuaagagcca

SEQ ID NO: 2254541 - RNA, 14 nt, Human
aucccuacccccua

SEQ ID NO: 2254542 - RNA, 22 nt, Human
aucccuacccccuaagagccau

SEQ ID NO: 2254543 - RNA, 13 nt, Human
aucccuacaugua

SEQ ID NO: 2254544 - RNA, 14 nt, Human
aucccuacauguau

SEQ ID NO: 2254545 - RNA, 15 nt, Human
aucccuacauguauu

SEQ ID NO: 2254546 - RNA, 18 nt, Human
aucccuacauguauugca

SEQ ID NO: 2254547 - RNA, 19 nt, Human
auccucaguuuuugugaaa

SEQ ID NO: 2254548 - RNA, 21 nt, Human
auccccaggggucccagccac

SEQ ID NO: 2254549 - RNA, 19 nt, Human
auccccaggggucccagcc

SEQ ID NO: 2254550 - RNA, 15 nt, Human
aucccggcugcccuu

SEQ ID NO: 2254551 - RNA, 17 nt, Human
auccccaccugucuuca

SEQ ID NO: 2254552 - RNA, 23 nt, Human
auccccaggggucccagccaccc

SEQ ID NO: 2254553 - RNA, 13 nt, Human
aucccguguucuc

SEQ ID NO: 2254554 - RNA, 16 nt, Human
aucccguguucuccuu

SEQ ID NO: 2254555 - RNA, 12 nt, Human
aucccuacaugu

SEQ ID NO: 2254556 - RNA, 16 nt, Human
aucccuaaugcugcag

SEQ ID NO: 2254557 - RNA, 18 nt, Human
aucccuaaugugugccau

SEQ ID NO: 2254558 - RNA, 14 nt, Human
aucaugaaauaugc

SEQ ID NO: 2254559 - RNA, 20 nt, Human
aucaggaaauauauaugugu

SEQ ID NO: 2254560 - RNA, 21 nt, Human
aucaggaaauauauaugugug

SEQ ID NO: 2254561 - RNA, 12 nt, Human
aucaccucaggc

SEQ ID NO: 2254562 - RNA, 16 nt, Human
aucagcuguuugucau

SEQ ID NO: 2254563 - RNA, 21 nt, Human
aucagcuucuauccuugacuu

SEQ ID NO: 2254564 - RNA, 18 nt, Human
aucaugaaauaugcaucu

SEQ ID NO: 2254565 - RNA, 16 nt, Human
aucaugaaauuacuua

SEQ ID NO: 2254566 - RNA, 15 nt, Human
aucaugaaauaugca

SEQ ID NO: 2254567 - RNA, 16 nt, Human
aucaugaaauaugcau

SEQ ID NO: 2254568 - RNA, 18 nt, Human
aucaugaagauauuuuuc

SEQ ID NO: 2254569 - RNA, 14 nt, Human
aucaccuauuucca

SEQ ID NO: 2254570 - RNA, 22 nt, Human
aucaccuauuuccauucaacaa

SEQ ID NO: 2254571 - RNA, 15 nt, Human
aucaccuauuuccau

SEQ ID NO: 2254572 - RNA, 13 nt, Human
aucagcuuauugu

SEQ ID NO: 2254573 - RNA, 22 nt, Human
aucagcuugcccuguuaaaaga

SEQ ID NO: 2254574 - RNA, 14 nt, Human
aucaugucuggcua

SEQ ID NO: 2254575 - RNA, 19 nt, Human
aucauguaguaucaaauau

SEQ ID NO: 2254576 - RNA, 21 nt, Human
aucauguaguaucaaauauua

SEQ ID NO: 2254577 - RNA, 19 nt, Human
aucaugucaggccugugug

SEQ ID NO: 2254578 - RNA, 18 nt, Human
aucaugucaggccugugu

SEQ ID NO: 2254579 - RNA, 12 nt, Human
aucaugucccca

SEQ ID NO: 2254580 - RNA, 20 nt, Human
aucauguccccaaaccugca

SEQ ID NO: 2254581 - RNA, 17 nt, Human
aucaugaauuaguuuua

SEQ ID NO: 2254582 - RNA, 15 nt, Human
aucauguacauuucu

SEQ ID NO: 2254583 - RNA, 15 nt, Human
aucaugaauguguaa

SEQ ID NO: 2254584 - RNA, 18 nt, Human
aucaugaauguguaacac

SEQ ID NO: 2254585 - RNA, 17 nt, Human
aucauguaguaucaaau

SEQ ID NO: 2254586 - RNA, 18 nt, Human
aucauguaguaucaaaua

SEQ ID NO: 2254587 - RNA, 12 nt, Human
aucaugugaaau

SEQ ID NO: 2254588 - RNA, 14 nt, Human
aucauguccccaaa

SEQ ID NO: 2254589 - RNA, 14 nt, Human
aucaaagccacacu

SEQ ID NO: 2254590 - RNA, 12 nt, Human
aucaaagcaaug

SEQ ID NO: 2254591 - RNA, 15 nt, Human
aucaaagcaaugcau

SEQ ID NO: 2254592 - RNA, 16 nt, Human
aucaaagcaaugcauu

SEQ ID NO: 2254593 - RNA, 16 nt, Human
aucaaagccacacucu

SEQ ID NO: 2254594 - RNA, 21 nt, Human
aucaaaggaaaauaguaaugu

SEQ ID NO: 2254595 - RNA, 14 nt, Human
aucaaauacuuuaa

SEQ ID NO: 2254596 - RNA, 17 nt, Human
aucaaagcaaugcauuu

SEQ ID NO: 2254597 - RNA, 23 nt, Human
aucaaagcacuuggacucuugcu

SEQ ID NO: 2254598 - RNA, 21 nt, Human
aucaaauagaaccacuaugaa

SEQ ID NO: 2254599 - RNA, 20 nt, Human
aucaaauagaaccacuauga

SEQ ID NO: 2254600 - RNA, 15 nt, Human
aucaaauacuuuaaa

SEQ ID NO: 2254601 - RNA, 20 nt, Human
aucaaauacuuuaaaggaaa

SEQ ID NO: 2254602 - RNA, 21 nt, Human
aucaaauacuuuaaaggaaaa

SEQ ID NO: 2254603 - RNA, 22 nt, Human
aucaaauacuuuaaaggaaaaa

SEQ ID NO: 2254604 - RNA, 14 nt, Human
aucaaauauauuca

SEQ ID NO: 2254605 - RNA, 13 nt, Human
aucaaaaugcuuu

SEQ ID NO: 2254606 - RNA, 22 nt, Human
aucaaaaugcuuuuuauuucug

SEQ ID NO: 2254607 - RNA, 12 nt, Human
aucaaaaugcuu

SEQ ID NO: 2254608 - RNA, 23 nt, Human
aucaaagagguuuuaaaaaaauc

SEQ ID NO: 2254609 - RNA, 20 nt, Human
aucaaagagguuuuaaaaaa

SEQ ID NO: 2254610 - RNA, 15 nt, Human
aucaaaauaaaaagu

SEQ ID NO: 2254611 - RNA, 18 nt, Human
aucaaaauaaaaagugac

SEQ ID NO: 2254612 - RNA, 14 nt, Human
aucaaaauaaaaag

SEQ ID NO: 2254613 - RNA, 21 nt, Human
auauuuccuuaaacugugugg

SEQ ID NO: 2254614 - RNA, 21 nt, Human
auauuucccuccccuggggac

SEQ ID NO: 2254615 - RNA, 21 nt, Human
auauuucccugaaggaaccaa

SEQ ID NO: 2254616 - RNA, 20 nt, Human
aucacaggguugggcccaga

SEQ ID NO: 2254617 - RNA, 19 nt, Human
aucacaggguugggcccag

SEQ ID NO: 2254618 - RNA, 18 nt, Human
aucacaggguugggccca

SEQ ID NO: 2254619 - RNA, 22 nt, Human
aucacagggccccagaaggcag

SEQ ID NO: 2254620 - RNA, 14 nt, Human
aucacagaggcuuc

SEQ ID NO: 2254621 - RNA, 14 nt, Human
aucacagcagcuuc

SEQ ID NO: 2254622 - RNA, 16 nt, Human
aucacagggccccaga

SEQ ID NO: 2254623 - RNA, 12 nt, Human
aucacagggccc

SEQ ID NO: 2254624 - RNA, 15 nt, Human
aucacagaggcuucu

SEQ ID NO: 2254625 - RNA, 18 nt, Human
aucacagagacauuccuc

SEQ ID NO: 2254626 - RNA, 22 nt, Human
aucacagagacauuccuccgag

SEQ ID NO: 2254627 - RNA, 14 nt, Human
aucacagagacauu

SEQ ID NO: 2254628 - RNA, 15 nt, Human
aucacagagacauuc

SEQ ID NO: 2254629 - RNA, 16 nt, Human
aucacagagacauucc

SEQ ID NO: 2254630 - RNA, 17 nt, Human
aucacagagacauuccu

SEQ ID NO: 2254631 - RNA, 13 nt, Human
aucacagccucug

SEQ ID NO: 2254632 - RNA, 11 nt, Human
aucacacacac

SEQ ID NO: 2254633 - RNA, 18 nt, Human
aucacacuucugugagac

SEQ ID NO: 2254634 - RNA, 16 nt, Human
aucacacuucugugag

SEQ ID NO: 2254635 - RNA, 14 nt, Human
aucacacuucugug

SEQ ID NO: 2254636 - RNA, 22 nt, Human
aucaaauauauucagccuggcu

SEQ ID NO: 2254637 - RNA, 14 nt, Human
aucaaauaugcaaa

SEQ ID NO: 2254638 - RNA, 21 nt, Human
aucacagggccccagaaggca

SEQ ID NO: 2254639 - RNA, 15 nt, Human
aucacagucuaauuu

SEQ ID NO: 2254640 - RNA, 23 nt, Human
aucacaggguugggcccagaucu

SEQ ID NO: 2254641 - RNA, 15 nt, Human
aucacaguuuugguu

SEQ ID NO: 2254642 - RNA, 18 nt, Human
aucacagucuaauuuuua

SEQ ID NO: 2254643 - RNA, 19 nt, Human
aucacagucuaauuuuuau

SEQ ID NO: 2254644 - RNA, 12 nt, Human
aucacauccugg

SEQ ID NO: 2254645 - RNA, 21 nt, Human
aucacaguuuugguugcuuua

SEQ ID NO: 2254646 - RNA, 22 nt, Human
aucacaguuuugguugcuuuaa

SEQ ID NO: 2254647 - RNA, 13 nt, Human
aucaccagacagg

SEQ ID NO: 2254648 - RNA, 20 nt, Human
aucaccaacgucugugccau

SEQ ID NO: 2254649 - RNA, 22 nt, Human
aucacagucuaauuuuuauuca

SEQ ID NO: 2254650 - RNA, 11 nt, Human
aucacauguau

SEQ ID NO: 2254651 - RNA, 20 nt, Human
aucaccgagaguagccgaga

SEQ ID NO: 2254652 - RNA, 22 nt, Human
aucaccgacgcgucuccuguuu

SEQ ID NO: 2254653 - RNA, 20 nt, Human
aucaccgacgcgucuccugu

SEQ ID NO: 2254654 - RNA, 22 nt, Human
aucaccgugggcucccugacug

SEQ ID NO: 2254655 - RNA, 20 nt, Human
aucaccgugggcucccugac

SEQ ID NO: 2254656 - RNA, 19 nt, Human
aucaccgugggcucccuga

SEQ ID NO: 2254657 - RNA, 21 nt, Human
aucaccagcccggccugcucc

SEQ ID NO: 2254658 - RNA, 23 nt, Human
aucaccagagagggacugacacc

SEQ ID NO: 2254659 - RNA, 15 nt, Human
aucaccagcccggcc

SEQ ID NO: 2254660 - RNA, 13 nt, Human
aucaccacaguuu

SEQ ID NO: 2254661 - RNA, 19 nt, Human
aucaccacaguaaguuccu

SEQ ID NO: 2254662 - RNA, 13 nt, Human
aucacauguaugu

SEQ ID NO: 2254663 - RNA, 13 nt, Human
aucaccagaauaa

SEQ ID NO: 2254664 - RNA, 16 nt, Human
aucaccagaauaaacc

SEQ ID NO: 2254665 - RNA, 12 nt, Human
aucaccagagag

SEQ ID NO: 2254666 - RNA, 19 nt, Human
aucuucaaagcuugaagau

SEQ ID NO: 2254667 - RNA, 15 nt, Human
aucuucaaagcuuga

SEQ ID NO: 2254668 - RNA, 15 nt, Human
aucuucaauggcuuu

SEQ ID NO: 2254669 - RNA, 23 nt, Human
aucuuauuuucauguauaugugu

SEQ ID NO: 2254670 - RNA, 16 nt, Human
aucuuauuuucaugua

SEQ ID NO: 2254671 - RNA, 13 nt, Human
aucuuauucacau

SEQ ID NO: 2254672 - RNA, 22 nt, Human
aucuuauuagggagaaaauuca

SEQ ID NO: 2254673 - RNA, 21 nt, Human
aucuuauuagggagaaaauuc

SEQ ID NO: 2254674 - RNA, 22 nt, Human
aucugggugcaugaucuugagc

SEQ ID NO: 2254675 - RNA, 16 nt, Human
aucuggggcucuggga

SEQ ID NO: 2254676 - RNA, 15 nt, Human
aucugggggagugga

SEQ ID NO: 2254677 - RNA, 16 nt, Human
aucugggggaguggaa

SEQ ID NO: 2254678 - RNA, 17 nt, Human
aucugggggaguggaau

SEQ ID NO: 2254679 - RNA, 18 nt, Human
aucugggggccucuucug

SEQ ID NO: 2254680 - RNA, 18 nt, Human
aucugggugcaugaucuu

SEQ ID NO: 2254681 - RNA, 18 nt, Human
aucugggggaguggaaua

SEQ ID NO: 2254682 - RNA, 14 nt, Human
aucuggguccuugc

SEQ ID NO: 2254683 - RNA, 18 nt, Human
aucuggguccuugcaccc

SEQ ID NO: 2254684 - RNA, 21 nt, Human
aucugggugcaugaucuugag

SEQ ID NO: 2254685 - RNA, 18 nt, Human
aucuggguagcuguaagg

SEQ ID NO: 2254686 - RNA, 17 nt, Human
aucuggguagcuguaag

SEQ ID NO: 2254687 - RNA, 15 nt, Human
aucuggguagcugua

SEQ ID NO: 2254688 - RNA, 14 nt, Human
aucuggguagcugu

SEQ ID NO: 2254689 - RNA, 17 nt, Human
aucucucuuuaauauaa

SEQ ID NO: 2254690 - RNA, 13 nt, Human
aucucugaagcau

SEQ ID NO: 2254691 - RNA, 20 nt, Human
aucucuccuccaagacacug

SEQ ID NO: 2254692 - RNA, 19 nt, Human
aucucucgguuccacgucc

SEQ ID NO: 2254693 - RNA, 20 nt, Human
aucucucgguuccacguccc

SEQ ID NO: 2254694 - RNA, 16 nt, Human
aucucugaagcauguu

SEQ ID NO: 2254695 - RNA, 17 nt, Human
aucucugaagcauguuu

SEQ ID NO: 2254696 - RNA, 19 nt, Human
aucucugaagcauguuuca

SEQ ID NO: 2254697 - RNA, 20 nt, Human
aucucugaagcauguuucau

SEQ ID NO: 2254698 - RNA, 22 nt, Human
aucuggacuccucuguccaggc

SEQ ID NO: 2254699 - RNA, 16 nt, Human
aucucugcuuuggaaa

SEQ ID NO: 2254700 - RNA, 22 nt, Human
aucucugcaggaaauggcugug

SEQ ID NO: 2254701 - RNA, 21 nt, Human
aucucugcaaucuucucagaa

SEQ ID NO: 2254702 - RNA, 18 nt, Human
aucucugcaaucuucuca

SEQ ID NO: 2254703 - RNA, 17 nt, Human
aucuggauaggagccug

SEQ ID NO: 2254704 - RNA, 18 nt, Human
aucuggauaggagccugc

SEQ ID NO: 2254705 - RNA, 20 nt, Human
aucuggauaggagccugcug

SEQ ID NO: 2254706 - RNA, 21 nt, Human
aucuggauaggagccugcugg

SEQ ID NO: 2254707 - RNA, 22 nt, Human
aucuggauaggagccugcuggu

SEQ ID NO: 2254708 - RNA, 16 nt, Human
aucuggcaacaucuuu

SEQ ID NO: 2254709 - RNA, 15 nt, Human
aucuggagagcuaga

SEQ ID NO: 2254710 - RNA, 20 nt, Human
aucuggagagcuagaaccug

SEQ ID NO: 2254711 - RNA, 22 nt, Human
aucuggagagcuagaaccugga

SEQ ID NO: 2254712 - RNA, 23 nt, Human
aucuggagagcuagaaccuggag

SEQ ID NO: 2254713 - RNA, 22 nt, Human
aucuggagaccagggagccuuu

SEQ ID NO: 2254714 - RNA, 21 nt, Human
aucuggagaccagggagccuu

SEQ ID NO: 2254715 - RNA, 20 nt, Human
aucuggagaccagggagccu

SEQ ID NO: 2254716 - RNA, 20 nt, Human
aucucugcacccuggggccu

SEQ ID NO: 2254717 - RNA, 23 nt, Human
aucucugcacccuggggccugga

SEQ ID NO: 2254718 - RNA, 21 nt, Human
aucuucccuagaggguuccug

SEQ ID NO: 2254719 - RNA, 20 nt, Human
aucuucccagcagggccacu

SEQ ID NO: 2254720 - RNA, 23 nt, Human
aucuucccagcagggccacuccc

SEQ ID NO: 2254721 - RNA, 22 nt, Human
aucuucccuagaggguuccugu

SEQ ID NO: 2254722 - RNA, 14 nt, Human
aucuucccucuccc

SEQ ID NO: 2254723 - RNA, 17 nt, Human
aucuuccagaaguguga

SEQ ID NO: 2254724 - RNA, 18 nt, Human
aucuuccagaagugugau

SEQ ID NO: 2254725 - RNA, 19 nt, Human
aucuuccagaagugugauu

SEQ ID NO: 2254726 - RNA, 11 nt, Human
aucuucccagc

SEQ ID NO: 2254727 - RNA, 18 nt, Human
aucuuccaggugggguga

SEQ ID NO: 2254728 - RNA, 21 nt, Human
aucuucuaaacccaauccaaa

SEQ ID NO: 2254729 - RNA, 13 nt, Human
aucuauuuaagua

SEQ ID NO: 2254730 - RNA, 19 nt, Human
aucuauuggguucauuauu

SEQ ID NO: 2254731 - RNA, 17 nt, Human
aucuauuggguucauua

SEQ ID NO: 2254732 - RNA, 16 nt, Human
aucuauuggguucauu

SEQ ID NO: 2254733 - RNA, 22 nt, Human
aucuauuggguucauuauugga

SEQ ID NO: 2254734 - RNA, 15 nt, Human
aucuauuucugagaa

SEQ ID NO: 2254735 - RNA, 15 nt, Human
aucuauuucuaugag

SEQ ID NO: 2254736 - RNA, 13 nt, Human
aucuauauauaau

SEQ ID NO: 2254737 - RNA, 16 nt, Human
aucuauagaacugaau

SEQ ID NO: 2254738 - RNA, 14 nt, Human
aucuauauauaauu

SEQ ID NO: 2254739 - RNA, 15 nt, Human
aucuauauauaauuc

SEQ ID NO: 2254740 - RNA, 19 nt, Human
aucuauauauaauucugua

SEQ ID NO: 2254741 - RNA, 20 nt, Human
aucuauauauaauucuguac

SEQ ID NO: 2254742 - RNA, 15 nt, Human
aucuauauaugugua

SEQ ID NO: 2254743 - RNA, 16 nt, Human
aucuauauauguguau

SEQ ID NO: 2254744 - RNA, 17 nt, Human
aucuauauauguguaug

SEQ ID NO: 2254745 - RNA, 15 nt, Human
aucuauauuuaacaa

SEQ ID NO: 2254746 - RNA, 22 nt, Human
aucuauauguacuugucaaaga

SEQ ID NO: 2254747 - RNA, 23 nt, Human
aucuauauguacuugucaaagaa

SEQ ID NO: 2254748 - RNA, 18 nt, Human
aucuauauauguguaugu

SEQ ID NO: 2254749 - RNA, 19 nt, Human
aucuauauauguguaugua

SEQ ID NO: 2254750 - RNA, 16 nt, Human
aucuauauguacuugu

SEQ ID NO: 2254751 - RNA, 21 nt, Human
aucuauauguacuugucaaag

SEQ ID NO: 2254752 - RNA, 15 nt, Human
aucucucccuccccu

SEQ ID NO: 2254753 - RNA, 14 nt, Human
aucucucccucccc

SEQ ID NO: 2254754 - RNA, 23 nt, Human
aucucucccuccccugccauuuu

SEQ ID NO: 2254755 - RNA, 12 nt, Human
aucucuccucca

SEQ ID NO: 2254756 - RNA, 11 nt, Human
aucucucccuc

SEQ ID NO: 2254757 - RNA, 22 nt, Human
aucucucaggagcacaggcagc

SEQ ID NO: 2254758 - RNA, 23 nt, Human
aucucucaggagcacaggcagcu

SEQ ID NO: 2254759 - RNA, 17 nt, Human
aucucuauuuaauauuu

SEQ ID NO: 2254760 - RNA, 20 nt, Human
aucuccugccuuccuccugg

SEQ ID NO: 2254761 - RNA, 19 nt, Human
aucucuauuuaauauuuau

SEQ ID NO: 2254762 - RNA, 18 nt, Human
aucucuauuuaauauuua

SEQ ID NO: 2254763 - RNA, 17 nt, Human
aucucucagaagggagg

SEQ ID NO: 2254764 - RNA, 13 nt, Human
aucucucaggagc

SEQ ID NO: 2254765 - RNA, 14 nt, Human
aucucucaggagca

SEQ ID NO: 2254766 - RNA, 16 nt, Human
aucucucaggagcaca

SEQ ID NO: 2254767 - RNA, 17 nt, Human
aucucucaggagcacag

SEQ ID NO: 2254768 - RNA, 18 nt, Human
aucucucaggagcacagg

SEQ ID NO: 2254769 - RNA, 21 nt, Human
aucucucaggagcacaggcag

SEQ ID NO: 2254770 - RNA, 20 nt, Human
aucuccucgcaagcugggua

SEQ ID NO: 2254771 - RNA, 19 nt, Human
aucuccucaaguccccaag

SEQ ID NO: 2254772 - RNA, 17 nt, Human
aucuccugccuuccucc

SEQ ID NO: 2254773 - RNA, 16 nt, Human
aucuccugccuuccuc

SEQ ID NO: 2254774 - RNA, 14 nt, Human
aucuauuucugaga

SEQ ID NO: 2254775 - RNA, 14 nt, Human
aucuauuuuggauu

SEQ ID NO: 2254776 - RNA, 16 nt, Human
aucuauacauaucuuu

SEQ ID NO: 2254777 - RNA, 13 nt, Human
aucuauaaagaag

SEQ ID NO: 2254778 - RNA, 16 nt, Human
aucuauaaagaagaac

SEQ ID NO: 2254779 - RNA, 17 nt, Human
aucuagugcagcugauu

SEQ ID NO: 2254780 - RNA, 15 nt, Human
aucuagugcagcuga

SEQ ID NO: 2254781 - RNA, 14 nt, Human
aucuagugcagcug

SEQ ID NO: 2254782 - RNA, 13 nt, Human
aucuagugcagcu

SEQ ID NO: 2254783 - RNA, 22 nt, Human
aucuagugcagcugauuuuaac

SEQ ID NO: 2254784 - RNA, 19 nt, Human
aucuagugcagcugauuuu

SEQ ID NO: 2254785 - RNA, 18 nt, Human
aucuagugcagcugauuu

SEQ ID NO: 2254786 - RNA, 21 nt, Human
aucuagugcagcugauuuuaa

SEQ ID NO: 2254787 - RNA, 12 nt, Human
aucuagguuuaa

SEQ ID NO: 2254788 - RNA, 13 nt, Human
aucuagguuuaac

SEQ ID NO: 2254789 - RNA, 14 nt, Human
aucuagguuuaacu

SEQ ID NO: 2254790 - RNA, 20 nt, Human
aucuaggugaggauugauua

SEQ ID NO: 2254791 - RNA, 22 nt, Human
aucuagguuuaacucagaucac

SEQ ID NO: 2254792 - RNA, 16 nt, Human
aucuagguuuaacuca

SEQ ID NO: 2254793 - RNA, 17 nt, Human
aucuagguuuaacucag

SEQ ID NO: 2254794 - RNA, 18 nt, Human
aucuagguuuaacucaga

SEQ ID NO: 2254795 - RNA, 19 nt, Human
aucuagguuuaacucagau

SEQ ID NO: 2254796 - RNA, 20 nt, Human
augaaaaugcaacaacaugu

SEQ ID NO: 2254797 - RNA, 19 nt, Human
augaaaaugucagaaacca

SEQ ID NO: 2254798 - RNA, 13 nt, Human
augaaaaugucuu

SEQ ID NO: 2254799 - RNA, 15 nt, Human
augaaaaugucagaa

SEQ ID NO: 2254800 - RNA, 13 nt, Human
augaaaaugucag

SEQ ID NO: 2254801 - RNA, 12 nt, Human
augaaaauguca

SEQ ID NO: 2254802 - RNA, 21 nt, Human
augaaguacucauacauguua

SEQ ID NO: 2254803 - RNA, 15 nt, Human
augaaaaugucuugu

SEQ ID NO: 2254804 - RNA, 23 nt, Human
augaaguguguuuccuucagugc

SEQ ID NO: 2254805 - RNA, 19 nt, Human
augaaguguguuuccuuca

SEQ ID NO: 2254806 - RNA, 14 nt, Human
augaagucucugaa

SEQ ID NO: 2254807 - RNA, 14 nt, Human
augaaaaugucuug

SEQ ID NO: 2254808 - RNA, 14 nt, Human
augaaguauauaau

SEQ ID NO: 2254809 - RNA, 16 nt, Human
augaaguauauaaugg

SEQ ID NO: 2254810 - RNA, 18 nt, Human
augaagucguugugaggg

SEQ ID NO: 2254811 - RNA, 17 nt, Human
augaaguauauaauggu

SEQ ID NO: 2254812 - RNA, 20 nt, Human
augaaguccaagcauuuaga

SEQ ID NO: 2254813 - RNA, 23 nt, Human
augaaguccaagcauuuagaugu

SEQ ID NO: 2254814 - RNA, 15 nt, Human
augaaguuguaggua

SEQ ID NO: 2254815 - RNA, 18 nt, Human
augaaguguuagauagaa

SEQ ID NO: 2254816 - RNA, 15 nt, Human
augaaguguuagaua

SEQ ID NO: 2254817 - RNA, 15 nt, Human
augaccacacuccag

SEQ ID NO: 2254818 - RNA, 18 nt, Human
augaccacacuccagcug

SEQ ID NO: 2254819 - RNA, 19 nt, Human
augaaguuuccuuggcugg

SEQ ID NO: 2254820 - RNA, 17 nt, Human
augaccauacugaggga

SEQ ID NO: 2254821 - RNA, 19 nt, Human
augaccaguaauugugaaa

SEQ ID NO: 2254822 - RNA, 13 nt, Human
augacccaaagac

SEQ ID NO: 2254823 - RNA, 15 nt, Human
augacccaaagacca

SEQ ID NO: 2254824 - RNA, 16 nt, Human
augacccaaagaccaa

SEQ ID NO: 2254825 - RNA, 12 nt, Human
augacccacccc

SEQ ID NO: 2254826 - RNA, 21 nt, Human
augacggaagaacauagaacu

SEQ ID NO: 2254827 - RNA, 19 nt, Human
augacggaagaacauagaa

SEQ ID NO: 2254828 - RNA, 16 nt, Human
augacgguauuaugcu

SEQ ID NO: 2254829 - RNA, 17 nt, Human
augacgguauuaugcuu

SEQ ID NO: 2254830 - RNA, 16 nt, Human
augacggaagaacaua

SEQ ID NO: 2254831 - RNA, 16 nt, Human
augacccaggcugggc

SEQ ID NO: 2254832 - RNA, 19 nt, Human
augacccaccccugugcuc

SEQ ID NO: 2254833 - RNA, 15 nt, Human
augacccaggcuggg

SEQ ID NO: 2254834 - RNA, 14 nt, Human
augacccaggcugg

SEQ ID NO: 2254835 - RNA, 12 nt, Human
augacccaggcu

SEQ ID NO: 2254836 - RNA, 13 nt, Human
augacccaccccu

SEQ ID NO: 2254837 - RNA, 14 nt, Human
augacccaccccug

SEQ ID NO: 2254838 - RNA, 16 nt, Human
augacccaccccugug

SEQ ID NO: 2254839 - RNA, 17 nt, Human
augacccaccccugugc

SEQ ID NO: 2254840 - RNA, 18 nt, Human
augacuaaagagagaaug

SEQ ID NO: 2254841 - RNA, 17 nt, Human
augacuaaagagagaau

SEQ ID NO: 2254842 - RNA, 16 nt, Human
augacuaaagagagaa

SEQ ID NO: 2254843 - RNA, 15 nt, Human
augacuaaagagaga

SEQ ID NO: 2254844 - RNA, 14 nt, Human
augacuaaagagag

SEQ ID NO: 2254845 - RNA, 13 nt, Human
augacuaaagaga

SEQ ID NO: 2254846 - RNA, 12 nt, Human
augacuaaagag

SEQ ID NO: 2254847 - RNA, 11 nt, Human
augacuaaaga

SEQ ID NO: 2254848 - RNA, 23 nt, Human
augacuaaaaauauuauaacuua

SEQ ID NO: 2254849 - RNA, 16 nt, Human
augacuaaaaauauua

SEQ ID NO: 2254850 - RNA, 14 nt, Human
augacuaaaaauau

SEQ ID NO: 2254851 - RNA, 20 nt, Human
augacgguauuaugcuucuu

SEQ ID NO: 2254852 - RNA, 16 nt, Human
augagggaucacaggg

SEQ ID NO: 2254853 - RNA, 14 nt, Human
augagggacuggaa

SEQ ID NO: 2254854 - RNA, 18 nt, Human
augacuguuuuuguagug

SEQ ID NO: 2254855 - RNA, 17 nt, Human
augacuguuuuuguagu

SEQ ID NO: 2254856 - RNA, 13 nt, Human
augagggacugga

SEQ ID NO: 2254857 - RNA, 20 nt, Human
augagggacuggaaccaggg

SEQ ID NO: 2254858 - RNA, 15 nt, Human
augaggggcccgagc

SEQ ID NO: 2254859 - RNA, 13 nt, Human
augaggggagggg

SEQ ID NO: 2254860 - RNA, 14 nt, Human
augaggggaggggg

SEQ ID NO: 2254861 - RNA, 20 nt, Human
augaggguaucaaauaaaau

SEQ ID NO: 2254862 - RNA, 19 nt, Human
augaggggacauuuuggug

SEQ ID NO: 2254863 - RNA, 11 nt, Human
augagggccac

SEQ ID NO: 2254864 - RNA, 20 nt, Human
augagggucuugguuccagc

SEQ ID NO: 2254865 - RNA, 13 nt, Human
augagggucuugg

SEQ ID NO: 2254866 - RNA, 22 nt, Human
augacugcuccccagcccuggc

SEQ ID NO: 2254867 - RNA, 23 nt, Human
augacugcuccccagcccuggcu

SEQ ID NO: 2254868 - RNA, 17 nt, Human
augacugugauuuucag

SEQ ID NO: 2254869 - RNA, 13 nt, Human
augacuguagaau

SEQ ID NO: 2254870 - RNA, 17 nt, Human
augacuguagaauuugu

SEQ ID NO: 2254871 - RNA, 13 nt, Human
augacugcacaug

SEQ ID NO: 2254872 - RNA, 21 nt, Human
augacugcuccccagcccugg

SEQ ID NO: 2254873 - RNA, 23 nt, Human
augacuaaagagagaauguagau

SEQ ID NO: 2254874 - RNA, 20 nt, Human
augacuaaagagagaaugua

SEQ ID NO: 2254875 - RNA, 19 nt, Human
augacuaaagagagaaugu

SEQ ID NO: 2254876 - RNA, 21 nt, Human
augacuaaagagagaauguag

SEQ ID NO: 2254877 - RNA, 22 nt, Human
augaggcauuuguuugaacuga

SEQ ID NO: 2254878 - RNA, 21 nt, Human
augaggcauuuguuugaacug

SEQ ID NO: 2254879 - RNA, 14 nt, Human
augaggcauuuguu

SEQ ID NO: 2254880 - RNA, 13 nt, Human
augaggcauuugu

SEQ ID NO: 2254881 - RNA, 22 nt, Human
augaaaaauuuaagcauuguuu

SEQ ID NO: 2254882 - RNA, 16 nt, Human
augaaaacacauuuuu

SEQ ID NO: 2254883 - RNA, 16 nt, Human
augaaaauauuuaaag

SEQ ID NO: 2254884 - RNA, 14 nt, Human
augaaaauauuuaa

SEQ ID NO: 2254885 - RNA, 13 nt, Human
augaaaauauuua

SEQ ID NO: 2254886 - RNA, 12 nt, Human
augaaaauauuu

SEQ ID NO: 2254887 - RNA, 15 nt, Human
augaaaacacauuuu

SEQ ID NO: 2254888 - RNA, 14 nt, Human
augaaaacacauuu

SEQ ID NO: 2254889 - RNA, 20 nt, Human
auguauugugucuuuugcau

SEQ ID NO: 2254890 - RNA, 22 nt, Human
auguauugugucuuuugcauga

SEQ ID NO: 2254891 - RNA, 19 nt, Human
auguauugugucuuuugca

SEQ ID NO: 2254892 - RNA, 21 nt, Human
auguauuguaaacauguguuu

SEQ ID NO: 2254893 - RNA, 12 nt, Human
auguauuguacc

SEQ ID NO: 2254894 - RNA, 13 nt, Human
auguauuguaccu

SEQ ID NO: 2254895 - RNA, 15 nt, Human
auguauuguaccuuu

SEQ ID NO: 2254896 - RNA, 21 nt, Human
auguacaaaaucgauuggcuu

SEQ ID NO: 2254897 - RNA, 11 nt, Human
auguaauuguu

SEQ ID NO: 2254898 - RNA, 11 nt, Human
auguauuguaa

SEQ ID NO: 2254899 - RNA, 19 nt, Human
auguauuguaaacaugugu

SEQ ID NO: 2254900 - RNA, 20 nt, Human
auguauuguaaacauguguu

SEQ ID NO: 2254901 - RNA, 13 nt, Human
augucacaggcag

SEQ ID NO: 2254902 - RNA, 21 nt, Human
augucaaucagccuaguugau

SEQ ID NO: 2254903 - RNA, 17 nt, Human
auguauuuauaaauaua

SEQ ID NO: 2254904 - RNA, 14 nt, Human
auguauuuauauuu

SEQ ID NO: 2254905 - RNA, 16 nt, Human
auguauuuauuuaaaa

SEQ ID NO: 2254906 - RNA, 22 nt, Human
auguauuuauuuaaaagauuca

SEQ ID NO: 2254907 - RNA, 18 nt, Human
auguauuuauuuaaaaga

SEQ ID NO: 2254908 - RNA, 19 nt, Human
auguauuuauuuaaaagau

SEQ ID NO: 2254909 - RNA, 15 nt, Human
auguaauugaauaaa

SEQ ID NO: 2254910 - RNA, 20 nt, Human
auguaauuguuugucuuuaa

SEQ ID NO: 2254911 - RNA, 14 nt, Human
auguaacugcugaa

SEQ ID NO: 2254912 - RNA, 13 nt, Human
auguaacugcuga

SEQ ID NO: 2254913 - RNA, 15 nt, Human
augguccgguguccu

SEQ ID NO: 2254914 - RNA, 20 nt, Human
auguaaauuuuguaugaaaa

SEQ ID NO: 2254915 - RNA, 23 nt, Human
auguaacugcauugagaacugca

SEQ ID NO: 2254916 - RNA, 20 nt, Human
auguaacugcauugagaacu

SEQ ID NO: 2254917 - RNA, 14 nt, Human
auguaacuagaauu

SEQ ID NO: 2254918 - RNA, 13 nt, Human
auguaacagucug

SEQ ID NO: 2254919 - RNA, 16 nt, Human
auguaacagucugauc

SEQ ID NO: 2254920 - RNA, 13 nt, Human
auguaacagaaag

SEQ ID NO: 2254921 - RNA, 14 nt, Human
auguaacagaaagg

SEQ ID NO: 2254922 - RNA, 21 nt, Human
auguaacagccaggaguguua

SEQ ID NO: 2254923 - RNA, 16 nt, Human
augugaaaaucaaaua

SEQ ID NO: 2254924 - RNA, 22 nt, Human
augucuuuuuuuuaaugugcug

SEQ ID NO: 2254925 - RNA, 20 nt, Human
augucuuuuuaagcuuauuu

SEQ ID NO: 2254926 - RNA, 18 nt, Human
augucuuuuuuuuaaugu

SEQ ID NO: 2254927 - RNA, 17 nt, Human
augucuuuuuuuuaaug

SEQ ID NO: 2254928 - RNA, 23 nt, Human
augucuuuuuaagcuuauuuaau

SEQ ID NO: 2254929 - RNA, 18 nt, Human
augucuuuuuaagcuuau

SEQ ID NO: 2254930 - RNA, 16 nt, Human
augucuuuugaauauu

SEQ ID NO: 2254931 - RNA, 16 nt, Human
augucuuuuuaagcuu

SEQ ID NO: 2254932 - RNA, 22 nt, Human
augucaccguggaccuuccugc

SEQ ID NO: 2254933 - RNA, 23 nt, Human
augucaccguggaccuuccugcc

SEQ ID NO: 2254934 - RNA, 14 nt, Human
augugaaacauguu

SEQ ID NO: 2254935 - RNA, 14 nt, Human
augugaaaucauuc

SEQ ID NO: 2254936 - RNA, 21 nt, Human
augugaaaaugguccaggaga

SEQ ID NO: 2254937 - RNA, 19 nt, Human
augucuuuuuuuuaaugug

SEQ ID NO: 2254938 - RNA, 18 nt, Human
augugaaaaucaaauaca

SEQ ID NO: 2254939 - RNA, 20 nt, Human
augucaccggauccugggug

SEQ ID NO: 2254940 - RNA, 19 nt, Human
augucaccggauccugggu

SEQ ID NO: 2254941 - RNA, 20 nt, Human
augucaccguggaccuuccu

SEQ ID NO: 2254942 - RNA, 21 nt, Human
augucaccguggaccuuccug

SEQ ID NO: 2254943 - RNA, 23 nt, Human
augucaccaccuucccagcucuc

SEQ ID NO: 2254944 - RNA, 20 nt, Human
augucaccaccuucccagcu

SEQ ID NO: 2254945 - RNA, 19 nt, Human
augucaccaccuucccagc

SEQ ID NO: 2254946 - RNA, 18 nt, Human
augucaccaccuucccag

SEQ ID NO: 2254947 - RNA, 16 nt, Human
augucaccaccuuccc

SEQ ID NO: 2254948 - RNA, 15 nt, Human
augucaccaccuucc

SEQ ID NO: 2254949 - RNA, 13 nt, Human
augucaccaccuu

SEQ ID NO: 2254950 - RNA, 14 nt, Human
augucacagggcca

SEQ ID NO: 2254951 - RNA, 19 nt, Human
augucaauuucuguguugc

SEQ ID NO: 2254952 - RNA, 12 nt, Human
augucacagggc

SEQ ID NO: 2254953 - RNA, 13 nt, Human
augucacagggcc

SEQ ID NO: 2254954 - RNA, 19 nt, Human
augucacaggcagguccag

SEQ ID NO: 2254955 - RNA, 21 nt, Human
auguauuuauuuaaaagauuc

SEQ ID NO: 2254956 - RNA, 16 nt, Human
augucaauuucugugu

SEQ ID NO: 2254957 - RNA, 17 nt, Human
augugaaaucauucauu

SEQ ID NO: 2254958 - RNA, 18 nt, Human
augugaaaucauucauuu

SEQ ID NO: 2254959 - RNA, 16 nt, Human
augugaacagcggcug

SEQ ID NO: 2254960 - RNA, 22 nt, Human
augugaaaaugguccaggagaa

SEQ ID NO: 2254961 - RNA, 15 nt, Human
augugaacacaucag

SEQ ID NO: 2254962 - RNA, 14 nt, Human
augguaauuguugc

SEQ ID NO: 2254963 - RNA, 23 nt, Human
augguaaaaguuacuuauucuag

SEQ ID NO: 2254964 - RNA, 14 nt, Human
auggguugcauuug

SEQ ID NO: 2254965 - RNA, 16 nt, Human
auggguuggugcuucu

SEQ ID NO: 2254966 - RNA, 22 nt, Human
auggguuuuucccuguacagua

SEQ ID NO: 2254967 - RNA, 13 nt, Human
auggguguguguu

SEQ ID NO: 2254968 - RNA, 12 nt, Human
augggugugugu

SEQ ID NO: 2254969 - RNA, 19 nt, Human
auggguguguguuugugug

SEQ ID NO: 2254970 - RNA, 22 nt, Human
auggguuagggaaaacauucca

SEQ ID NO: 2254971 - RNA, 20 nt, Human
augggugcuuggaggaagga

SEQ ID NO: 2254972 - RNA, 21 nt, Human
augggugcuuggaggaaggaa

SEQ ID NO: 2254973 - RNA, 23 nt, Human
augggugcuuggaggaaggaaac

SEQ ID NO: 2254974 - RNA, 19 nt, Human
augguacuagggggaagug

SEQ ID NO: 2254975 - RNA, 17 nt, Human
augguacccccuucugg

SEQ ID NO: 2254976 - RNA, 14 nt, Human
augguacccccuuc

SEQ ID NO: 2254977 - RNA, 15 nt, Human
augguacccccuucu

SEQ ID NO: 2254978 - RNA, 13 nt, Human
augguacuauuua

SEQ ID NO: 2254979 - RNA, 15 nt, Human
augguaccagauaaa

SEQ ID NO: 2254980 - RNA, 18 nt, Human
augguaggcauuuccuau

SEQ ID NO: 2254981 - RNA, 17 nt, Human
augguaggcauuuccua

SEQ ID NO: 2254982 - RNA, 20 nt, Human
augguagccaguugaauuua

SEQ ID NO: 2254983 - RNA, 13 nt, Human
auggucccaucca

SEQ ID NO: 2254984 - RNA, 14 nt, Human
auggucccauccag

SEQ ID NO: 2254985 - RNA, 15 nt, Human
auggucccauccagg

SEQ ID NO: 2254986 - RNA, 17 nt, Human
auggucccauccaggca

SEQ ID NO: 2254987 - RNA, 18 nt, Human
auggucccauccaggcag

SEQ ID NO: 2254988 - RNA, 19 nt, Human
auggucccauccaggcagu

SEQ ID NO: 2254989 - RNA, 20 nt, Human
auggucccauccaggcaguc

SEQ ID NO: 2254990 - RNA, 16 nt, Human
auggucccaucugcag

SEQ ID NO: 2254991 - RNA, 19 nt, Human
augguccaggagaaggcca

SEQ ID NO: 2254992 - RNA, 18 nt, Human
augguccaggagaaggcc

SEQ ID NO: 2254993 - RNA, 16 nt, Human
augguccaggagaagg

SEQ ID NO: 2254994 - RNA, 13 nt, Human
augguccaggaga

SEQ ID NO: 2254995 - RNA, 13 nt, Human
auguguaaguauu

SEQ ID NO: 2254996 - RNA, 15 nt, Human
auguguagccugugc

SEQ ID NO: 2254997 - RNA, 14 nt, Human
auguguagccugug

SEQ ID NO: 2254998 - RNA, 16 nt, Human
auguguagccugugca

SEQ ID NO: 2254999 - RNA, 17 nt, Human
auguguagccugugcau

SEQ ID NO: 2255000 - RNA, 23 nt, Human
auguguagccugugcauguaugu

SEQ ID NO: 2255001 - RNA, 18 nt, Human
auguguaucggaugcuuu

SEQ ID NO: 2255002 - RNA, 15 nt, Human
auguuccacuaaccc

SEQ ID NO: 2255003 - RNA, 14 nt, Human
auguuccacuaacc

SEQ ID NO: 2255004 - RNA, 16 nt, Human
auguuccuagugaaag

SEQ ID NO: 2255005 - RNA, 15 nt, Human
auguuccuagugaaa

SEQ ID NO: 2255006 - RNA, 15 nt, Human
auguguaaaauguga

SEQ ID NO: 2255007 - RNA, 22 nt, Human
auguguaacacagugccuucaa

SEQ ID NO: 2255008 - RNA, 15 nt, Human
auguguaaggugaac

SEQ ID NO: 2255009 - RNA, 21 nt, Human
auguucugugccuguaaacau

SEQ ID NO: 2255010 - RNA, 15 nt, Human
auguucugggacaca

SEQ ID NO: 2255011 - RNA, 17 nt, Human
auguucucugaggacac

SEQ ID NO: 2255012 - RNA, 14 nt, Human
auguucugggacac

SEQ ID NO: 2255013 - RNA, 16 nt, Human
auguucucucuucucc

SEQ ID NO: 2255014 - RNA, 17 nt, Human
auguuccuagugaaaga

SEQ ID NO: 2255015 - RNA, 17 nt, Human
auguucucucuucucca

SEQ ID NO: 2255016 - RNA, 13 nt, Human
auguucucugagg

SEQ ID NO: 2255017 - RNA, 20 nt, Human
auguuucgugaaguauacug

SEQ ID NO: 2255018 - RNA, 22 nt, Human
auguuucgcugauauauguguu

SEQ ID NO: 2255019 - RNA, 20 nt, Human
auguuuccucuaguucuuug

SEQ ID NO: 2255020 - RNA, 23 nt, Human
auguuucgugaaguauacuguau

SEQ ID NO: 2255021 - RNA, 12 nt, Human
auguuucucugg

SEQ ID NO: 2255022 - RNA, 19 nt, Human
auguuucucuggccccaag

SEQ ID NO: 2255023 - RNA, 17 nt, Human
auguuucucuggcccca

SEQ ID NO: 2255024 - RNA, 22 nt, Human
auguuucugcaguagucucugu

SEQ ID NO: 2255025 - RNA, 14 nt, Human
auguucuuaauucu

SEQ ID NO: 2255026 - RNA, 14 nt, Human
auguuuccucuagu

SEQ ID NO: 2255027 - RNA, 15 nt, Human
auguuugccucugcc

SEQ ID NO: 2255028 - RNA, 17 nt, Human
auguuugccucugccuc

SEQ ID NO: 2255029 - RNA, 18 nt, Human
auguuucuuaaaugggcu

SEQ ID NO: 2255030 - RNA, 15 nt, Human
auguuucuucuaggu

SEQ ID NO: 2255031 - RNA, 23 nt, Human
auguuucugcaguagucucugug

SEQ ID NO: 2255032 - RNA, 14 nt, Human
auguuugccucugc

SEQ ID NO: 2255033 - RNA, 15 nt, Human
augaucuuuucaagu

SEQ ID NO: 2255034 - RNA, 20 nt, Human
augaucuuucuuuccuuucu

SEQ ID NO: 2255035 - RNA, 19 nt, Human
augaugaaaauauuuaaag

SEQ ID NO: 2255036 - RNA, 18 nt, Human
augaugaaaugaggucag

SEQ ID NO: 2255037 - RNA, 15 nt, Human
augaugaaugagaau

SEQ ID NO: 2255038 - RNA, 12 nt, Human
augaugaaugag

SEQ ID NO: 2255039 - RNA, 23 nt, Human
augaugaaaugaggucagagccu

SEQ ID NO: 2255040 - RNA, 15 nt, Human
augaugauccuaggc

SEQ ID NO: 2255041 - RNA, 18 nt, Human
augaugaucuuuaaaaua

SEQ ID NO: 2255042 - RNA, 20 nt, Human
augaugauguggaagaacuu

SEQ ID NO: 2255043 - RNA, 22 nt, Human
augaugauccggauuuaauuug

SEQ ID NO: 2255044 - RNA, 15 nt, Human
augaugaugggaauu

SEQ ID NO: 2255045 - RNA, 15 nt, Human
augauggagucaggu

SEQ ID NO: 2255046 - RNA, 18 nt, Human
augaugaugggaauugug

SEQ ID NO: 2255047 - RNA, 21 nt, Human
augaugaucuuuaaaauacac

SEQ ID NO: 2255048 - RNA, 19 nt, Human
augauggcaauuuuguaac

SEQ ID NO: 2255049 - RNA, 19 nt, Human
augauggaugccaauauua

SEQ ID NO: 2255050 - RNA, 15 nt, Human
augauggaugccaau

SEQ ID NO: 2255051 - RNA, 16 nt, Human
augauggguguuuuua

SEQ ID NO: 2255052 - RNA, 16 nt, Human
augaugggucaguugu

SEQ ID NO: 2255053 - RNA, 16 nt, Human
augauggugcugaccu

SEQ ID NO: 2255054 - RNA, 18 nt, Human
augaugguugcaaaagac

SEQ ID NO: 2255055 - RNA, 20 nt, Human
augauguaaguuuaccuaug

SEQ ID NO: 2255056 - RNA, 18 nt, Human
augcacaaacagaggccg

SEQ ID NO: 2255057 - RNA, 12 nt, Human
augauguauauu

SEQ ID NO: 2255058 - RNA, 21 nt, Human
augauguagugccucuuucau

SEQ ID NO: 2255059 - RNA, 13 nt, Human
augauguauauuu

SEQ ID NO: 2255060 - RNA, 23 nt, Human
augcacaaauucugucucuggau

SEQ ID NO: 2255061 - RNA, 15 nt, Human
augcacaaauucugu

SEQ ID NO: 2255062 - RNA, 22 nt, Human
augcacaaauucugucucugga

SEQ ID NO: 2255063 - RNA, 18 nt, Human
augaucuuugcagacagg

SEQ ID NO: 2255064 - RNA, 19 nt, Human
augaucuuugcagacaggc

SEQ ID NO: 2255065 - RNA, 21 nt, Human
augaucuuugcagacaggcaa

SEQ ID NO: 2255066 - RNA, 15 nt, Human
augaugaaaauauuu

SEQ ID NO: 2255067 - RNA, 13 nt, Human
augaugaaaauau

SEQ ID NO: 2255068 - RNA, 15 nt, Human
augaucuugugacau

SEQ ID NO: 2255069 - RNA, 14 nt, Human
augaucuugugaca

SEQ ID NO: 2255070 - RNA, 17 nt, Human
augaucuuugcagacag

SEQ ID NO: 2255071 - RNA, 16 nt, Human
augaucuuuaaaauac

SEQ ID NO: 2255072 - RNA, 16 nt, Human
augccugcggaguugu

SEQ ID NO: 2255073 - RNA, 21 nt, Human
augccugauugccaagcucag

SEQ ID NO: 2255074 - RNA, 19 nt, Human
augccugccccaaacaaau

SEQ ID NO: 2255075 - RNA, 19 nt, Human
augccugagugccuggcca

SEQ ID NO: 2255076 - RNA, 20 nt, Human
augccugagugccuggccaa

SEQ ID NO: 2255077 - RNA, 19 nt, Human
augccuggauggggcugca

SEQ ID NO: 2255078 - RNA, 18 nt, Human
augccuguccagccuggg

SEQ ID NO: 2255079 - RNA, 17 nt, Human
augccuguccagccugg

SEQ ID NO: 2255080 - RNA, 20 nt, Human
augccuggauggggcugcac

SEQ ID NO: 2255081 - RNA, 16 nt, Human
augcauuaaaagaaaa

SEQ ID NO: 2255082 - RNA, 15 nt, Human
augcauuaaaagaaa

SEQ ID NO: 2255083 - RNA, 17 nt, Human
augcaugugaagaaagg

SEQ ID NO: 2255084 - RNA, 16 nt, Human
augcaugugaagaaag

SEQ ID NO: 2255085 - RNA, 19 nt, Human
augcauguuuuccagcucc

SEQ ID NO: 2255086 - RNA, 20 nt, Human
augcauuaaaagaaaauaaa

SEQ ID NO: 2255087 - RNA, 17 nt, Human
augcauuaaaagaaaau

SEQ ID NO: 2255088 - RNA, 21 nt, Human
augcauuauaggaucauuugu

SEQ ID NO: 2255089 - RNA, 17 nt, Human
augccugaggguggaga

SEQ ID NO: 2255090 - RNA, 16 nt, Human
augccugagugccugg

SEQ ID NO: 2255091 - RNA, 21 nt, Human
augcauucuugguuggcuggc

SEQ ID NO: 2255092 - RNA, 22 nt, Human
augcauuauaggaucauuuguu

SEQ ID NO: 2255093 - RNA, 20 nt, Human
augcauguuuuccagcuccu

SEQ ID NO: 2255094 - RNA, 21 nt, Human
augcacacagugcuuuccgug

SEQ ID NO: 2255095 - RNA, 14 nt, Human
augcacacaaaaca

SEQ ID NO: 2255096 - RNA, 15 nt, Human
augcacacaaaacaa

SEQ ID NO: 2255097 - RNA, 22 nt, Human
augcacacaaaacaacccuaga

SEQ ID NO: 2255098 - RNA, 15 nt, Human
augcacacauuuuuu

SEQ ID NO: 2255099 - RNA, 14 nt, Human
augcacacauuuuu

SEQ ID NO: 2255100 - RNA, 13 nt, Human
augcacacauuuu

SEQ ID NO: 2255101 - RNA, 17 nt, Human
augcauguccuguaaag

SEQ ID NO: 2255102 - RNA, 13 nt, Human
augcaugugaaga

SEQ ID NO: 2255103 - RNA, 14 nt, Human
augcaugugaagaa

SEQ ID NO: 2255104 - RNA, 22 nt, Human
augcacagaguuguuacauuuu

SEQ ID NO: 2255105 - RNA, 21 nt, Human
augcacagaguuguuacauuu

SEQ ID NO: 2255106 - RNA, 19 nt, Human
augcacagaguuguuacau

SEQ ID NO: 2255107 - RNA, 21 nt, Human
augccuuuaaaucugugauga

SEQ ID NO: 2255108 - RNA, 20 nt, Human
augccuuuaaaucugugaug

SEQ ID NO: 2255109 - RNA, 17 nt, Human
augccuuuaaaguauga

SEQ ID NO: 2255110 - RNA, 21 nt, Human
augccuuuaaaguaugaaucu

SEQ ID NO: 2255111 - RNA, 22 nt, Human
augccuuuaaaguaugaaucua

SEQ ID NO: 2255112 - RNA, 20 nt, Human
augccuucuuauugcuuuua

SEQ ID NO: 2255113 - RNA, 15 nt, Human
augccuucuccagac

SEQ ID NO: 2255114 - RNA, 14 nt, Human
augccuucuuauug

SEQ ID NO: 2255115 - RNA, 19 nt, Human
augccuuccagcacccugc

SEQ ID NO: 2255116 - RNA, 16 nt, Human
augccuuccccugggc

SEQ ID NO: 2255117 - RNA, 18 nt, Human
augccuuccagcacccug

SEQ ID NO: 2255118 - RNA, 18 nt, Human
augccuuacucuucuuga

SEQ ID NO: 2255119 - RNA, 16 nt, Human
augccuuacucuucuu

SEQ ID NO: 2255120 - RNA, 18 nt, Human
augcuuuaggauguacag

SEQ ID NO: 2255121 - RNA, 19 nt, Human
augcugcgcccuuccccag

SEQ ID NO: 2255122 - RNA, 19 nt, Human
augcugcuaauucaaagcu

SEQ ID NO: 2255123 - RNA, 13 nt, Human
augcuuguguuau

SEQ ID NO: 2255124 - RNA, 13 nt, Human
augcuuuaaacau

SEQ ID NO: 2255125 - RNA, 15 nt, Human
augcuuguacauaau

SEQ ID NO: 2255126 - RNA, 16 nt, Human
augcuuguacauaaug

SEQ ID NO: 2255127 - RNA, 19 nt, Human
auggaggcacacagcugca

SEQ ID NO: 2255128 - RNA, 12 nt, Human
auggaggccugu

SEQ ID NO: 2255129 - RNA, 17 nt, Human
auggaggcagaauccug

SEQ ID NO: 2255130 - RNA, 15 nt, Human
auggaggccuguccu

SEQ ID NO: 2255131 - RNA, 16 nt, Human
auggagggaauaauac

SEQ ID NO: 2255132 - RNA, 22 nt, Human
auggaggggugguccugacuca

SEQ ID NO: 2255133 - RNA, 20 nt, Human
auggaggggugguccugacu

SEQ ID NO: 2255134 - RNA, 18 nt, Human
auggaggggugguccuga

SEQ ID NO: 2255135 - RNA, 20 nt, Human
auggaguccagggaagagaa

SEQ ID NO: 2255136 - RNA, 24 nt, Human
auggagguuucauacucuagauuu

SEQ ID NO: 2255137 - RNA, 15 nt, Human
auggcugugccucug

SEQ ID NO: 2255138 - RNA, 16 nt, Human
auggcugugccucugc

SEQ ID NO: 2255139 - RNA, 17 nt, Human
auggcugugccucugcc

SEQ ID NO: 2255140 - RNA, 16 nt, Human
auggauccuggaggau

SEQ ID NO: 2255141 - RNA, 15 nt, Human
auggcuggccacugc

SEQ ID NO: 2255142 - RNA, 16 nt, Human
auggcuggccacugca

SEQ ID NO: 2255143 - RNA, 21 nt, Human
auggcuggccacugcacagag

SEQ ID NO: 2255144 - RNA, 22 nt, Human
auggcuggccacugcacagagc

SEQ ID NO: 2255145 - RNA, 23 nt, Human
auggcuggccacugcacagagcu

SEQ ID NO: 2255146 - RNA, 21 nt, Human
auggcugggaacugcagaccu

SEQ ID NO: 2255147 - RNA, 22 nt, Human
auggcugggaacugcagaccug

SEQ ID NO: 2255148 - RNA, 23 nt, Human
auggcugggaacugcagaccugu

SEQ ID NO: 2255149 - RNA, 20 nt, Human
auggcugucucaaaccaagc

SEQ ID NO: 2255150 - RNA, 13 nt, Human
auggcugugagga

SEQ ID NO: 2255151 - RNA, 14 nt, Human
auggcugugaggau

SEQ ID NO: 2255152 - RNA, 15 nt, Human
auggcugugaggaug

SEQ ID NO: 2255153 - RNA, 22 nt, Human
auggauauaguuuuacuuuuaa

SEQ ID NO: 2255154 - RNA, 18 nt, Human
auggauaggcacaggaaa

SEQ ID NO: 2255155 - RNA, 17 nt, Human
auggauaggcacaggaa

SEQ ID NO: 2255156 - RNA, 21 nt, Human
auggauaaugccggugagaau

SEQ ID NO: 2255157 - RNA, 22 nt, Human
auggauaaugccggugagaaua

SEQ ID NO: 2255158 - RNA, 18 nt, Human
auggauaaccuauaugau

SEQ ID NO: 2255159 - RNA, 19 nt, Human
auggauaaccuauaugauu

SEQ ID NO: 2255160 - RNA, 17 nt, Human
auggcuuuugugcauua

SEQ ID NO: 2255161 - RNA, 16 nt, Human
auggcuuuugugcauu

SEQ ID NO: 2255162 - RNA, 18 nt, Human
auggcuuuugugcauuau

SEQ ID NO: 2255163 - RNA, 17 nt, Human
auggcuuugugauucaa

SEQ ID NO: 2255164 - RNA, 19 nt, Human
augcugacuguacuccucc

SEQ ID NO: 2255165 - RNA, 22 nt, Human
augcugacauucaccugcccca

SEQ ID NO: 2255166 - RNA, 20 nt, Human
augcugacuguacuccuccc

SEQ ID NO: 2255167 - RNA, 21 nt, Human
augcugacuguacuccuccca

SEQ ID NO: 2255168 - RNA, 20 nt, Human
augcugacauucaccugccc

SEQ ID NO: 2255169 - RNA, 19 nt, Human
augcugacauucaccugcc

SEQ ID NO: 2255170 - RNA, 23 nt, Human
augcugaauauacagcaggugcu

SEQ ID NO: 2255171 - RNA, 21 nt, Human
augcugagauuacagguguga

SEQ ID NO: 2255172 - RNA, 14 nt, Human
augcugaggccugg

SEQ ID NO: 2255173 - RNA, 15 nt, Human
augcugaggccuggg

SEQ ID NO: 2255174 - RNA, 17 nt, Human
augcugaggccugggcc

SEQ ID NO: 2255175 - RNA, 18 nt, Human
augcugaggccugggccg

SEQ ID NO: 2255176 - RNA, 22 nt, Human
augcugaggccugggccgcugc

SEQ ID NO: 2255177 - RNA, 14 nt, Human
augcugauguccuc

SEQ ID NO: 2255178 - RNA, 22 nt, Human
augcugaguauguuaagcucuu

SEQ ID NO: 2255179 - RNA, 14 nt, Human
augcugagucuccc

SEQ ID NO: 2255180 - RNA, 18 nt, Human
augcugagucucccaagg

SEQ ID NO: 2255181 - RNA, 16 nt, Human
augcugauguccucac

SEQ ID NO: 2255182 - RNA, 12 nt, Human
augcugauguuc

SEQ ID NO: 2255183 - RNA, 15 nt, Human
augcugauguucagu

SEQ ID NO: 2255184 - RNA, 13 nt, Human
augcugccugagu

SEQ ID NO: 2255185 - RNA, 11 nt, Human
augcugccugc

SEQ ID NO: 2255186 - RNA, 13 nt, Human
augcugccugccu

SEQ ID NO: 2255187 - RNA, 12 nt, Human
augcugccugag

SEQ ID NO: 2255188 - RNA, 19 nt, Human
augcugccuaggcugaccu

SEQ ID NO: 2255189 - RNA, 17 nt, Human
augcugccuaggcugac

SEQ ID NO: 2255190 - RNA, 18 nt, Human
augcugcgcccuucccca

SEQ ID NO: 2255191 - RNA, 16 nt, Human
augcugcgcccuuccc

SEQ ID NO: 2255192 - RNA, 14 nt, Human
augcugccugccug

SEQ ID NO: 2255193 - RNA, 15 nt, Human
augcugccugccugu

SEQ ID NO: 2255194 - RNA, 17 nt, Human
augcugccugccugucu

SEQ ID NO: 2255195 - RNA, 18 nt, Human
augcugccugccugucug

SEQ ID NO: 2255196 - RNA, 12 nt, Human
augcugccucca

SEQ ID NO: 2255197 - RNA, 15 nt, Human
augcugccuccagaa

SEQ ID NO: 2255198 - RNA, 16 nt, Human
augcugcccugugagu

SEQ ID NO: 2255199 - RNA, 13 nt, Human
augcugcccugug

SEQ ID NO: 2255200 - RNA, 16 nt, Human
augcugauguucagug

SEQ ID NO: 2255201 - RNA, 17 nt, Human
augcugauguucagugu

SEQ ID NO: 2255202 - RNA, 18 nt, Human
augcugauguucagugua

SEQ ID NO: 2255203 - RNA, 19 nt, Human
augcugauguucaguguaa

SEQ ID NO: 2255204 - RNA, 20 nt, Human
augcugauguucaguguaau

SEQ ID NO: 2255205 - RNA, 14 nt, Human
augcugcccuguga

SEQ ID NO: 2255206 - RNA, 15 nt, Human
augcugcccugugag

SEQ ID NO: 2255207 - RNA, 14 nt, Human
agugucaggaggaa

SEQ ID NO: 2255208 - RNA, 21 nt, Human
agugucacuuaccuagauuua

SEQ ID NO: 2255209 - RNA, 19 nt, Human
agugucacuuaccuagauu

SEQ ID NO: 2255210 - RNA, 19 nt, Human
agugucauuuaugaaaaga

SEQ ID NO: 2255211 - RNA, 16 nt, Human
agugucaucagaagau

SEQ ID NO: 2255212 - RNA, 20 nt, Human
agugucaucagaagauaacu

SEQ ID NO: 2255213 - RNA, 22 nt, Human
agugucaaguugugcuuguuua

SEQ ID NO: 2255214 - RNA, 20 nt, Human
agugucauauguaggugucu

SEQ ID NO: 2255215 - RNA, 18 nt, Human
agugucucaguccaccug

SEQ ID NO: 2255216 - RNA, 15 nt, Human
agugucucacacugg

SEQ ID NO: 2255217 - RNA, 14 nt, Human
agugucuaaaaaca

SEQ ID NO: 2255218 - RNA, 14 nt, Human
aguguccaaagcag

SEQ ID NO: 2255219 - RNA, 22 nt, Human
agugucucggagggauuccccu

SEQ ID NO: 2255220 - RNA, 12 nt, Human
agugucuggcug

SEQ ID NO: 2255221 - RNA, 20 nt, Human
agugggccaggacaggcccg

SEQ ID NO: 2255222 - RNA, 19 nt, Human
agugggccaggacaggccc

SEQ ID NO: 2255223 - RNA, 16 nt, Human
agugggccaggacagg

SEQ ID NO: 2255224 - RNA, 15 nt, Human
agugggccaggacag

SEQ ID NO: 2255225 - RNA, 13 nt, Human
agugggccaggac

SEQ ID NO: 2255226 - RNA, 20 nt, Human
agugggaucugucacaccag

SEQ ID NO: 2255227 - RNA, 22 nt, Human
agugggaggggcaggcugacau

SEQ ID NO: 2255228 - RNA, 18 nt, Human
agugggaggggcaggcug

SEQ ID NO: 2255229 - RNA, 19 nt, Human
agugggaggggcaggcuga

SEQ ID NO: 2255230 - RNA, 14 nt, Human
agugggccagugug

SEQ ID NO: 2255231 - RNA, 18 nt, Human
agugucaaguugugcuug

SEQ ID NO: 2255232 - RNA, 19 nt, Human
agugucaaguugugcuugu

SEQ ID NO: 2255233 - RNA, 20 nt, Human
agugucaaguugugcuuguu

SEQ ID NO: 2255234 - RNA, 21 nt, Human
agugggccaggacaggcccgg

SEQ ID NO: 2255235 - RNA, 19 nt, Human
agugucaaugcagccccca

SEQ ID NO: 2255236 - RNA, 17 nt, Human
aguggcuuuaaugaaua

SEQ ID NO: 2255237 - RNA, 19 nt, Human
aguggcuuuuuuccuccug

SEQ ID NO: 2255238 - RNA, 21 nt, Human
aguggcuuuuuuccuccugug

SEQ ID NO: 2255239 - RNA, 23 nt, Human
aguggccuggccaggagcucuuc

SEQ ID NO: 2255240 - RNA, 22 nt, Human
aguggccuggccaggagcucuu

SEQ ID NO: 2255241 - RNA, 20 nt, Human
aguggccuggccaggagcuc

SEQ ID NO: 2255242 - RNA, 19 nt, Human
aguggccuggccaggagcu

SEQ ID NO: 2255243 - RNA, 18 nt, Human
aguggccuggccaggagc

SEQ ID NO: 2255244 - RNA, 15 nt, Human
aguggccuggccagg

SEQ ID NO: 2255245 - RNA, 14 nt, Human
aguggccuggccag

SEQ ID NO: 2255246 - RNA, 13 nt, Human
aguggccuggcca

SEQ ID NO: 2255247 - RNA, 23 nt, Human
aguggccucuuugucuaaaacaa

SEQ ID NO: 2255248 - RNA, 21 nt, Human
aguggccucuuugucuaaaac

SEQ ID NO: 2255249 - RNA, 15 nt, Human
aguggccucuuuguc

SEQ ID NO: 2255250 - RNA, 14 nt, Human
aguggccucuuugu

SEQ ID NO: 2255251 - RNA, 17 nt, Human
agugggacagagucugg

SEQ ID NO: 2255252 - RNA, 16 nt, Human
agugggaggcgcgagc

SEQ ID NO: 2255253 - RNA, 11 nt, Human
agugggagggg

SEQ ID NO: 2255254 - RNA, 12 nt, Human
agugggaggggc

SEQ ID NO: 2255255 - RNA, 13 nt, Human
agugggaggggca

SEQ ID NO: 2255256 - RNA, 14 nt, Human
agugggaggggcag

SEQ ID NO: 2255257 - RNA, 15 nt, Human
agugggaggggcagg

SEQ ID NO: 2255258 - RNA, 16 nt, Human
agugggaggggcaggc

SEQ ID NO: 2255259 - RNA, 17 nt, Human
agugggaggggcaggcu

SEQ ID NO: 2255260 - RNA, 15 nt, Human
agugggacagagucu

SEQ ID NO: 2255261 - RNA, 20 nt, Human
agugggaacgugacugcccc

SEQ ID NO: 2255262 - RNA, 19 nt, Human
agugggacagggcauggcc

SEQ ID NO: 2255263 - RNA, 21 nt, Human
agugggacagggcauggccag

SEQ ID NO: 2255264 - RNA, 22 nt, Human
agugucugugugcaagugugug

SEQ ID NO: 2255265 - RNA, 13 nt, Human
agugucugugugc

SEQ ID NO: 2255266 - RNA, 22 nt, Human
agugucugucccgggguccugu

SEQ ID NO: 2255267 - RNA, 22 nt, Human
agugucuguaucggagacagug

SEQ ID NO: 2255268 - RNA, 19 nt, Human
agugucugggcugacuggg

SEQ ID NO: 2255269 - RNA, 22 nt, Human
agugucucaguccaccugagcu

SEQ ID NO: 2255270 - RNA, 19 nt, Human
agugucucaguccaccuga

SEQ ID NO: 2255271 - RNA, 16 nt, Human
agugucuggcacacag

SEQ ID NO: 2255272 - RNA, 14 nt, Human
agugucugggcuga

SEQ ID NO: 2255273 - RNA, 14 nt, Human
agugucuggcugca

SEQ ID NO: 2255274 - RNA, 13 nt, Human
agugucuggcugc

SEQ ID NO: 2255275 - RNA, 21 nt, Human
agugaugcugugcuaugaauu

SEQ ID NO: 2255276 - RNA, 21 nt, Human
agugaucuccauauguuacac

SEQ ID NO: 2255277 - RNA, 14 nt, Human
agugaucuccauau

SEQ ID NO: 2255278 - RNA, 13 nt, Human
agugaucuccaua

SEQ ID NO: 2255279 - RNA, 16 nt, Human
agugauccuuacaagu

SEQ ID NO: 2255280 - RNA, 14 nt, Human
agugauucuccugc

SEQ ID NO: 2255281 - RNA, 21 nt, Human
agugauucucaugccucagcc

SEQ ID NO: 2255282 - RNA, 20 nt, Human
agugccuuaccuccugccca

SEQ ID NO: 2255283 - RNA, 19 nt, Human
agugccuuaccuccugccc

SEQ ID NO: 2255284 - RNA, 18 nt, Human
agugccuuaccuccugcc

SEQ ID NO: 2255285 - RNA, 17 nt, Human
agugccuuaccuccugc

SEQ ID NO: 2255286 - RNA, 16 nt, Human
agugccuuaccuccug

SEQ ID NO: 2255287 - RNA, 14 nt, Human
agugauggagcaga

SEQ ID NO: 2255288 - RNA, 18 nt, Human
agugauggagcagagcaa

SEQ ID NO: 2255289 - RNA, 18 nt, Human
agugccuuacacaauggu

SEQ ID NO: 2255290 - RNA, 15 nt, Human
agugauucuccugcc

SEQ ID NO: 2255291 - RNA, 17 nt, Human
agugauucuccugccuc

SEQ ID NO: 2255292 - RNA, 14 nt, Human
agugauccucccac

SEQ ID NO: 2255293 - RNA, 15 nt, Human
agugauccucccacc

SEQ ID NO: 2255294 - RNA, 18 nt, Human
agugauccucccaccuca

SEQ ID NO: 2255295 - RNA, 24 nt, Human
agugauccucccaccucagccucc

SEQ ID NO: 2255296 - RNA, 21 nt, Human
aguggccucaacccucccuca

SEQ ID NO: 2255297 - RNA, 20 nt, Human
aguggccucaacccucccuc

SEQ ID NO: 2255298 - RNA, 15 nt, Human
aguggccucaacccu

SEQ ID NO: 2255299 - RNA, 22 nt, Human
aguggccucaacccucccucag

SEQ ID NO: 2255300 - RNA, 14 nt, Human
agugcugaacagug

SEQ ID NO: 2255301 - RNA, 15 nt, Human
agugcugaacagugg

SEQ ID NO: 2255302 - RNA, 21 nt, Human
agugcucugaucccucuacag

SEQ ID NO: 2255303 - RNA, 17 nt, Human
agugcucugaucccucu

SEQ ID NO: 2255304 - RNA, 16 nt, Human
agugcucugaucccuc

SEQ ID NO: 2255305 - RNA, 20 nt, Human
agugcucgcuuucuauguag

SEQ ID NO: 2255306 - RNA, 12 nt, Human
agugcucugaua

SEQ ID NO: 2255307 - RNA, 11 nt, Human
agugcucugau

SEQ ID NO: 2255308 - RNA, 12 nt, Human
agugcucgcuuu

SEQ ID NO: 2255309 - RNA, 18 nt, Human
agugcucgcuuucuaugu

SEQ ID NO: 2255310 - RNA, 22 nt, Human
agugcucgcuguugcugaauag

SEQ ID NO: 2255311 - RNA, 23 nt, Human
agugcucgcuguugcugaauagg

SEQ ID NO: 2255312 - RNA, 18 nt, Human
agugcuaauuuugaaaaa

SEQ ID NO: 2255313 - RNA, 20 nt, Human
agugcuaauuuugaaaaacu

SEQ ID NO: 2255314 - RNA, 19 nt, Human
agugcuaagugugaacugg

SEQ ID NO: 2255315 - RNA, 22 nt, Human
agugcuaagugugaacuggacc

SEQ ID NO: 2255316 - RNA, 15 nt, Human
agugcucgcuguugc

SEQ ID NO: 2255317 - RNA, 16 nt, Human
agugcucgcuguugcu

SEQ ID NO: 2255318 - RNA, 17 nt, Human
agugcucgcuguugcug

SEQ ID NO: 2255319 - RNA, 18 nt, Human
agugcucgcuguugcuga

SEQ ID NO: 2255320 - RNA, 19 nt, Human
agugcucgcuguugcugaa

SEQ ID NO: 2255321 - RNA, 20 nt, Human
agugcucgcuguugcugaau

SEQ ID NO: 2255322 - RNA, 22 nt, Human
agugccuuaccuccugcccagg

SEQ ID NO: 2255323 - RNA, 21 nt, Human
agugccuuaccuccugcccag

SEQ ID NO: 2255324 - RNA, 23 nt, Human
agugccuuaccuccugcccagga

SEQ ID NO: 2255325 - RNA, 14 nt, Human
agugcuaaguguga

SEQ ID NO: 2255326 - RNA, 16 nt, Human
agugccuuauggaaca

SEQ ID NO: 2255327 - RNA, 15 nt, Human
agugcuaauuuugaa

SEQ ID NO: 2255328 - RNA, 15 nt, Human
agugcuaagugugaa

SEQ ID NO: 2255329 - RNA, 16 nt, Human
agugcuaagugugaac

SEQ ID NO: 2255330 - RNA, 17 nt, Human
agugcuaagugugaacu

SEQ ID NO: 2255331 - RNA, 18 nt, Human
agugcuaagugugaacug

SEQ ID NO: 2255332 - RNA, 10 nt, Human
agugccuuau

SEQ ID NO: 2255333 - RNA, 13 nt, Human
agugccuuaugga

SEQ ID NO: 2255334 - RNA, 14 nt, Human
agugccuuauggaa

SEQ ID NO: 2255335 - RNA, 15 nt, Human
agugccuuauggaac

SEQ ID NO: 2255336 - RNA, 13 nt, Human
aguucagcuuggg

SEQ ID NO: 2255337 - RNA, 18 nt, Human
aguucagcaccacccuag

SEQ ID NO: 2255338 - RNA, 17 nt, Human
aguucagcaccacccua

SEQ ID NO: 2255339 - RNA, 15 nt, Human
aguucagcaccaccc

SEQ ID NO: 2255340 - RNA, 16 nt, Human
aguucaggagucccaa

SEQ ID NO: 2255341 - RNA, 14 nt, Human
aguucagcuugggg

SEQ ID NO: 2255342 - RNA, 20 nt, Human
aguucaggagucccaaggaa

SEQ ID NO: 2255343 - RNA, 19 nt, Human
aguucaggagucccaagga

SEQ ID NO: 2255344 - RNA, 21 nt, Human
aguucaggagucccaaggaaa

SEQ ID NO: 2255345 - RNA, 18 nt, Human
aguucagguaacaggcag

SEQ ID NO: 2255346 - RNA, 13 nt, Human
aguucaucuugaa

SEQ ID NO: 2255347 - RNA, 15 nt, Human
aguucaucuugaauu

SEQ ID NO: 2255348 - RNA, 19 nt, Human
aguucaucuugaauuguaa

SEQ ID NO: 2255349 - RNA, 18 nt, Human
aguugugaccuuaguguu

SEQ ID NO: 2255350 - RNA, 18 nt, Human
aguugugcacauggcuua

SEQ ID NO: 2255351 - RNA, 22 nt, Human
aguugugaguuuaccuuguaua

SEQ ID NO: 2255352 - RNA, 14 nt, Human
aguugugcuuguuu

SEQ ID NO: 2255353 - RNA, 21 nt, Human
aguugugccuuuuauagcuau

SEQ ID NO: 2255354 - RNA, 22 nt, Human
aguugugccuuuuauagcuauu

SEQ ID NO: 2255355 - RNA, 21 nt, Human
aguugugaccuuaguguuucu

SEQ ID NO: 2255356 - RNA, 15 nt, Human
aguugugccuuuuau

SEQ ID NO: 2255357 - RNA, 18 nt, Human
aguugugccuuuuauagc

SEQ ID NO: 2255358 - RNA, 19 nt, Human
aguugugccuuuuauagcu

SEQ ID NO: 2255359 - RNA, 13 nt, Human
aguugucuugucc

SEQ ID NO: 2255360 - RNA, 13 nt, Human
aguugucuaaaca

SEQ ID NO: 2255361 - RNA, 21 nt, Human
aguugagccccaaguccugaa

SEQ ID NO: 2255362 - RNA, 21 nt, Human
aguugagccagcagacauugu

SEQ ID NO: 2255363 - RNA, 11 nt, Human
aguugagcccc

SEQ ID NO: 2255364 - RNA, 12 nt, Human
aguugagcccca

SEQ ID NO: 2255365 - RNA, 16 nt, Human
aguugagccccaaguc

SEQ ID NO: 2255366 - RNA, 20 nt, Human
aguugagucgucaucacuuu

SEQ ID NO: 2255367 - RNA, 17 nt, Human
aguugagugauagagcu

SEQ ID NO: 2255368 - RNA, 16 nt, Human
aguugauacuacaguu

SEQ ID NO: 2255369 - RNA, 22 nt, Human
aguugacuugacagaacacugu

SEQ ID NO: 2255370 - RNA, 15 nt, Human
aguugagccagcaga

SEQ ID NO: 2255371 - RNA, 16 nt, Human
aguugagccagcagac

SEQ ID NO: 2255372 - RNA, 19 nt, Human
aguugagccagcagacauu

SEQ ID NO: 2255373 - RNA, 20 nt, Human
aguugagccagcagacauug

SEQ ID NO: 2255374 - RNA, 17 nt, Human
aguugacaugagauuua

SEQ ID NO: 2255375 - RNA, 13 nt, Human
aguugacagcagg

SEQ ID NO: 2255376 - RNA, 22 nt, Human
aguugacaaaaagcucuuacac

SEQ ID NO: 2255377 - RNA, 22 nt, Human
aguucaucuugaauuguaagga

SEQ ID NO: 2255378 - RNA, 18 nt, Human
aguugaaaagacuccaaa

SEQ ID NO: 2255379 - RNA, 20 nt, Human
aguugaaaagacuccaaaga

SEQ ID NO: 2255380 - RNA, 19 nt, Human
aguugaaaagacuccaaag

SEQ ID NO: 2255381 - RNA, 13 nt, Human
aguaagaaaauau

SEQ ID NO: 2255382 - RNA, 23 nt, Human
aguaaccaucacugguugcacuu

SEQ ID NO: 2255383 - RNA, 14 nt, Human
aguaaccauuugca

SEQ ID NO: 2255384 - RNA, 21 nt, Human
aguaagaaagugaagcaaauc

SEQ ID NO: 2255385 - RNA, 23 nt, Human
aguaagaaaauauuuugucuaaa

SEQ ID NO: 2255386 - RNA, 17 nt, Human
aguaagaaccuugccug

SEQ ID NO: 2255387 - RNA, 20 nt, Human
aguaagaaagugaagcaaau

SEQ ID NO: 2255388 - RNA, 14 nt, Human
aguaagaaaauauu

SEQ ID NO: 2255389 - RNA, 16 nt, Human
aguaagaaaauauuuu

SEQ ID NO: 2255390 - RNA, 17 nt, Human
aguaacaugaggggaca

SEQ ID NO: 2255391 - RNA, 23 nt, Human
aguaacaggaaaccacuuaucac

SEQ ID NO: 2255392 - RNA, 14 nt, Human
aguaagagcuggug

SEQ ID NO: 2255393 - RNA, 12 nt, Human
aguaagagcugg

SEQ ID NO: 2255394 - RNA, 16 nt, Human
aguaagaagacaugaa

SEQ ID NO: 2255395 - RNA, 15 nt, Human
aguaagaagacauga

SEQ ID NO: 2255396 - RNA, 14 nt, Human
aguaagaagacaug

SEQ ID NO: 2255397 - RNA, 19 nt, Human
aguaagagcuggugucuga

SEQ ID NO: 2255398 - RNA, 14 nt, Human
aguacguugugcau

SEQ ID NO: 2255399 - RNA, 15 nt, Human
aguacguugugcauu

SEQ ID NO: 2255400 - RNA, 14 nt, Human
aguaaauauuucag

SEQ ID NO: 2255401 - RNA, 16 nt, Human
aggucuguucuuucca

SEQ ID NO: 2255402 - RNA, 15 nt, Human
aggucuguucuuucc

SEQ ID NO: 2255403 - RNA, 13 nt, Human
aggucuguucuuu

SEQ ID NO: 2255404 - RNA, 18 nt, Human
aguaaaugggggugcauu

SEQ ID NO: 2255405 - RNA, 19 nt, Human
aguaacaaugaagauaaaa

SEQ ID NO: 2255406 - RNA, 22 nt, Human
aguaaauggcuuauccagcugg

SEQ ID NO: 2255407 - RNA, 15 nt, Human
aguaaaucuuuuaca

SEQ ID NO: 2255408 - RNA, 23 nt, Human
aguaaaugcuagguuaauuccaa

SEQ ID NO: 2255409 - RNA, 11 nt, Human
aguaaaugcua

SEQ ID NO: 2255410 - RNA, 22 nt, Human
aguaaaugcuagguuaauucca

SEQ ID NO: 2255411 - RNA, 20 nt, Human
aguacuggcugauggaguaa

SEQ ID NO: 2255412 - RNA, 16 nt, Human
aguacuguguacagaa

SEQ ID NO: 2255413 - RNA, 14 nt, Human
aguacuauguauca

SEQ ID NO: 2255414 - RNA, 12 nt, Human
aguacuauguau

SEQ ID NO: 2255415 - RNA, 17 nt, Human
aguacuucuccacccug

SEQ ID NO: 2255416 - RNA, 12 nt, Human
aguacuucuuuu

SEQ ID NO: 2255417 - RNA, 22 nt, Human
aguacuucuccacccugcucuc

SEQ ID NO: 2255418 - RNA, 22 nt, Human
aguaagcccuugaagauaucuu

SEQ ID NO: 2255419 - RNA, 18 nt, Human
aguacguugugcauuugg

SEQ ID NO: 2255420 - RNA, 17 nt, Human
aguacguugugcauuug

SEQ ID NO: 2255421 - RNA, 16 nt, Human
aguacguugugcauuu

SEQ ID NO: 2255422 - RNA, 23 nt, Human
aguacuaacuccuaggaaaauac

SEQ ID NO: 2255423 - RNA, 14 nt, Human
aguacuauaauuua

SEQ ID NO: 2255424 - RNA, 19 nt, Human
aguacuacaguccucccau

SEQ ID NO: 2255425 - RNA, 22 nt, Human
aguacuacaguccucccaucuc

SEQ ID NO: 2255426 - RNA, 16 nt, Human
agucacaagagcccag

SEQ ID NO: 2255427 - RNA, 22 nt, Human
agucacacaguauuacuucugc

SEQ ID NO: 2255428 - RNA, 23 nt, Human
agucaauguuuucaguucucuug

SEQ ID NO: 2255429 - RNA, 14 nt, Human
agucaaugugcagu

SEQ ID NO: 2255430 - RNA, 15 nt, Human
agucaaugugcagug

SEQ ID NO: 2255431 - RNA, 18 nt, Human
agucaaaaggugccugug

SEQ ID NO: 2255432 - RNA, 18 nt, Human
agucaauccccucauuca

SEQ ID NO: 2255433 - RNA, 14 nt, Human
agucaaaacagaga

SEQ ID NO: 2255434 - RNA, 20 nt, Human
aguauuuuuuuaucuuggga

SEQ ID NO: 2255435 - RNA, 17 nt, Human
agucaaaaggugccugu

SEQ ID NO: 2255436 - RNA, 16 nt, Human
agucaaaaggugccug

SEQ ID NO: 2255437 - RNA, 15 nt, Human
agucaaaaggugccu

SEQ ID NO: 2255438 - RNA, 16 nt, Human
agucaaaacucaaaug

SEQ ID NO: 2255439 - RNA, 21 nt, Human
agucaaaacagagaugugaua

SEQ ID NO: 2255440 - RNA, 17 nt, Human
agucaaaacuacaaauc

SEQ ID NO: 2255441 - RNA, 17 nt, Human
aguaugaggcauuuguu

SEQ ID NO: 2255442 - RNA, 23 nt, Human
aguaugaggcauuuguuugaacu

SEQ ID NO: 2255443 - RNA, 22 nt, Human
aguaucuauauauguguaugua

SEQ ID NO: 2255444 - RNA, 23 nt, Human
aguaucuauauauguguauguac

SEQ ID NO: 2255445 - RNA, 16 nt, Human
aguaucuaacauguau

SEQ ID NO: 2255446 - RNA, 17 nt, Human
aguaucuauauaugugu

SEQ ID NO: 2255447 - RNA, 18 nt, Human
aguaucuauauaugugua

SEQ ID NO: 2255448 - RNA, 19 nt, Human
aguaucuauauauguguau

SEQ ID NO: 2255449 - RNA, 23 nt, Human
aguauccuccagguuuuucaauu

SEQ ID NO: 2255450 - RNA, 21 nt, Human
aguauccuccagguuuuucaa

SEQ ID NO: 2255451 - RNA, 22 nt, Human
aguauccuccagguuuuucaau

SEQ ID NO: 2255452 - RNA, 21 nt, Human
aguaugaggcauuuguuugaa

SEQ ID NO: 2255453 - RNA, 20 nt, Human
aguaugaggcauuuguuuga

SEQ ID NO: 2255454 - RNA, 14 nt, Human
aguauccacuuugc

SEQ ID NO: 2255455 - RNA, 13 nt, Human
aguauccuccagg

SEQ ID NO: 2255456 - RNA, 14 nt, Human
aguauccuccaggu

SEQ ID NO: 2255457 - RNA, 15 nt, Human
aguauccuccagguu

SEQ ID NO: 2255458 - RNA, 16 nt, Human
aguauccuccagguuu

SEQ ID NO: 2255459 - RNA, 17 nt, Human
aguauccuccagguuuu

SEQ ID NO: 2255460 - RNA, 19 nt, Human
aguauccuccagguuuuuc

SEQ ID NO: 2255461 - RNA, 20 nt, Human
aguauccuccagguuuuuca

SEQ ID NO: 2255462 - RNA, 23 nt, Human
aguacuugggagaccuguaauca

SEQ ID NO: 2255463 - RNA, 11 nt, Human
aguacuugaaa

SEQ ID NO: 2255464 - RNA, 19 nt, Human
aguacuugaaaucuaggau

SEQ ID NO: 2255465 - RNA, 11 nt, Human
aguccuuccac

SEQ ID NO: 2255466 - RNA, 17 nt, Human
aguccuucaccucacug

SEQ ID NO: 2255467 - RNA, 14 nt, Human
aguccuugaaaaua

SEQ ID NO: 2255468 - RNA, 23 nt, Human
aguccuuaccucuuccggagaug

SEQ ID NO: 2255469 - RNA, 16 nt, Human
aguccuucaccucacu

SEQ ID NO: 2255470 - RNA, 21 nt, Human
aguccuuaccucuuccggaga

SEQ ID NO: 2255471 - RNA, 17 nt, Human
aguccuuaccucuuccg

SEQ ID NO: 2255472 - RNA, 15 nt, Human
aguccuuaccucuuc

SEQ ID NO: 2255473 - RNA, 23 nt, Human
aguccugcacaguuuucuggcug

SEQ ID NO: 2255474 - RNA, 19 nt, Human
aguccuuaccagcagagca

SEQ ID NO: 2255475 - RNA, 15 nt, Human
aguccuugcaagaau

SEQ ID NO: 2255476 - RNA, 16 nt, Human
aguccuugaaaauauu

SEQ ID NO: 2255477 - RNA, 17 nt, Human
aguccuugaaaauauuu

SEQ ID NO: 2255478 - RNA, 22 nt, Human
aguccuugaaaauauuuuuuau

SEQ ID NO: 2255479 - RNA, 16 nt, Human
agucugaauuuuuaaa

SEQ ID NO: 2255480 - RNA, 12 nt, Human
agucugugugaa

SEQ ID NO: 2255481 - RNA, 11 nt, Human
agucuguguga

SEQ ID NO: 2255482 - RNA, 14 nt, Human
agucuguggaucag

SEQ ID NO: 2255483 - RNA, 17 nt, Human
agucuguggaucagaga

SEQ ID NO: 2255484 - RNA, 22 nt, Human
agucugauccaggaggccgggg

SEQ ID NO: 2255485 - RNA, 21 nt, Human
agucugugagauucauucaug

SEQ ID NO: 2255486 - RNA, 15 nt, Human
agucugauccaggag

SEQ ID NO: 2255487 - RNA, 20 nt, Human
agucugugccacguguuugu

SEQ ID NO: 2255488 - RNA, 16 nt, Human
agucugaguaaaaucu

SEQ ID NO: 2255489 - RNA, 15 nt, Human
agugaauuugaauga

SEQ ID NO: 2255490 - RNA, 14 nt, Human
agugaauuugaaug

SEQ ID NO: 2255491 - RNA, 13 nt, Human
agugaauuugaau

SEQ ID NO: 2255492 - RNA, 21 nt, Human
agugaauugugaccaaguuau

SEQ ID NO: 2255493 - RNA, 16 nt, Human
agugaauuuuucucua

SEQ ID NO: 2255494 - RNA, 15 nt, Human
agugaauuuuucucu

SEQ ID NO: 2255495 - RNA, 20 nt, Human
agugaauuugaaugaaaaau

SEQ ID NO: 2255496 - RNA, 20 nt, Human
agugaauuuuucucuaacuc

SEQ ID NO: 2255497 - RNA, 17 nt, Human
agugaauuuuucucuaa

SEQ ID NO: 2255498 - RNA, 23 nt, Human
agugaauuuuucucuaacucaga

SEQ ID NO: 2255499 - RNA, 19 nt, Human
agugaauuugaaugaaaaa

SEQ ID NO: 2255500 - RNA, 17 nt, Human
agugaccucagcuuuga

SEQ ID NO: 2255501 - RNA, 21 nt, Human
agucugugugaugaacuuucu

SEQ ID NO: 2255502 - RNA, 22 nt, Human
agucugugugaugaacuuucuc

SEQ ID NO: 2255503 - RNA, 15 nt, Human
agucugugugaaggu

SEQ ID NO: 2255504 - RNA, 18 nt, Human
agucugugugaugaacuu

SEQ ID NO: 2255505 - RNA, 19 nt, Human
agucugugugaugaacuuu

SEQ ID NO: 2255506 - RNA, 12 nt, Human
agucuguuuuau

SEQ ID NO: 2255507 - RNA, 15 nt, Human
agugaaugcugggac

SEQ ID NO: 2255508 - RNA, 19 nt, Human
agugaaugcugggacucag

SEQ ID NO: 2255509 - RNA, 20 nt, Human
agugaauucuugaaggaaaa

SEQ ID NO: 2255510 - RNA, 14 nt, Human
agugacgugcaccu

SEQ ID NO: 2255511 - RNA, 15 nt, Human
agugaccugaggaag

SEQ ID NO: 2255512 - RNA, 14 nt, Human
agugaccugaggaa

SEQ ID NO: 2255513 - RNA, 18 nt, Human
agugaccucagcuuugau

SEQ ID NO: 2255514 - RNA, 17 nt, Human
agugaccugaggaagcg

SEQ ID NO: 2255515 - RNA, 16 nt, Human
agugaccugaggaagc

SEQ ID NO: 2255516 - RNA, 18 nt, Human
agugaccugaggaagcgu

SEQ ID NO: 2255517 - RNA, 19 nt, Human
aguccaagaggguccuuua

SEQ ID NO: 2255518 - RNA, 12 nt, Human
aguccugaagag

SEQ ID NO: 2255519 - RNA, 13 nt, Human
aguccugaagagg

SEQ ID NO: 2255520 - RNA, 14 nt, Human
aguccugaagaggc

SEQ ID NO: 2255521 - RNA, 19 nt, Human
aguccugaagaggcgggcc

SEQ ID NO: 2255522 - RNA, 22 nt, Human
aguccucuuuucugagaggacu

SEQ ID NO: 2255523 - RNA, 20 nt, Human
aguccugcacaguuuucugg

SEQ ID NO: 2255524 - RNA, 20 nt, Human
aguccugaucagagccgugg

SEQ ID NO: 2255525 - RNA, 23 nt, Human
aguccugaagaggcgggccagcc

SEQ ID NO: 2255526 - RNA, 21 nt, Human
aguccugaagaggcgggccag

SEQ ID NO: 2255527 - RNA, 22 nt, Human
aguccugaagaggcgggccagc

SEQ ID NO: 2255528 - RNA, 20 nt, Human
aguccuuaccagcagagcac

SEQ ID NO: 2255529 - RNA, 18 nt, Human
aguccaacguggggcagc

SEQ ID NO: 2255530 - RNA, 19 nt, Human
aguccaaauguuuacaggg

SEQ ID NO: 2255531 - RNA, 23 nt, Human
aguccaaauguccuccagaagcc

SEQ ID NO: 2255532 - RNA, 19 nt, Human
aguccaaauguccuccaga

SEQ ID NO: 2255533 - RNA, 19 nt, Human
aguccaacguggggcagca

SEQ ID NO: 2255534 - RNA, 20 nt, Human
aguccaacguggggcagcac

SEQ ID NO: 2255535 - RNA, 22 nt, Human
aguccaacguggggcagcacag

SEQ ID NO: 2255536 - RNA, 23 nt, Human
aguccaacguggggcagcacaga

SEQ ID NO: 2255537 - RNA, 19 nt, Human
aguccucuuuucugagagg

SEQ ID NO: 2255538 - RNA, 11 nt, Human
aguccaagcau

SEQ ID NO: 2255539 - RNA, 19 nt, Human
agucaugcguuuaaucaca

SEQ ID NO: 2255540 - RNA, 16 nt, Human
agucaugcauaaauau

SEQ ID NO: 2255541 - RNA, 17 nt, Human
agucaugcauaaauaug

SEQ ID NO: 2255542 - RNA, 19 nt, Human
agucaugcauaaauaugca

SEQ ID NO: 2255543 - RNA, 20 nt, Human
agucaugcauaaauaugcag

SEQ ID NO: 2255544 - RNA, 17 nt, Human
agucaugcaaaggcugg

SEQ ID NO: 2255545 - RNA, 18 nt, Human
agucaugcaaaggcuggg

SEQ ID NO: 2255546 - RNA, 19 nt, Human
agucaugcaaaggcuggga

SEQ ID NO: 2255547 - RNA, 20 nt, Human
agucaugcaaaggcugggac

SEQ ID NO: 2255548 - RNA, 13 nt, Human
agucaugcauaaa

SEQ ID NO: 2255549 - RNA, 14 nt, Human
agucaugcauaaau

SEQ ID NO: 2255550 - RNA, 23 nt, Human
agucaugaucucccugccgccuc

SEQ ID NO: 2255551 - RNA, 20 nt, Human
agucaugaucucccugccgc

SEQ ID NO: 2255552 - RNA, 19 nt, Human
agucaugaucucccugccg

SEQ ID NO: 2255553 - RNA, 18 nt, Human
agucaugaucucccugcc

SEQ ID NO: 2255554 - RNA, 17 nt, Human
agucaugaucucccugc

SEQ ID NO: 2255555 - RNA, 16 nt, Human
agucaugaucucccug

SEQ ID NO: 2255556 - RNA, 15 nt, Human
agucaugaucucccu

SEQ ID NO: 2255557 - RNA, 21 nt, Human
agucaugaucucccugccgcc

SEQ ID NO: 2255558 - RNA, 16 nt, Human
aguccaaauguccucc

SEQ ID NO: 2255559 - RNA, 14 nt, Human
agucauuuuuguuu

SEQ ID NO: 2255560 - RNA, 13 nt, Human
agucaugugcauu

SEQ ID NO: 2255561 - RNA, 12 nt, Human
agucaugugacc

SEQ ID NO: 2255562 - RNA, 13 nt, Human
agucauguuccuu

SEQ ID NO: 2255563 - RNA, 15 nt, Human
agucauguuccuuca

SEQ ID NO: 2255564 - RNA, 19 nt, Human
agucauguuccuucaagau

SEQ ID NO: 2255565 - RNA, 21 nt, Human
agucaugcauaaauaugcagu

SEQ ID NO: 2255566 - RNA, 22 nt, Human
agucaugcauaaauaugcagug

SEQ ID NO: 2255567 - RNA, 12 nt, Human
agucauggcugu

SEQ ID NO: 2255568 - RNA, 13 nt, Human
agucauggcugug

SEQ ID NO: 2255569 - RNA, 20 nt, Human
agucauguaagcugaaaaua

SEQ ID NO: 2255570 - RNA, 22 nt, Human
agucaugagcugagcagggaga

SEQ ID NO: 2255571 - RNA, 16 nt, Human
agucaugagcugagca

SEQ ID NO: 2255572 - RNA, 14 nt, Human
agucaugagcugag

SEQ ID NO: 2255573 - RNA, 22 nt, Human
auaaagcaacuguuaugaaaua

SEQ ID NO: 2255574 - RNA, 10 nt, Human
auaaagcaau

SEQ ID NO: 2255575 - RNA, 11 nt, Human
auaaagcaauu

SEQ ID NO: 2255576 - RNA, 20 nt, Human
auaaagauuucuugaguuuu

SEQ ID NO: 2255577 - RNA, 15 nt, Human
auaaagauguuaaaa

SEQ ID NO: 2255578 - RNA, 12 nt, Human
auaaagcaauuu

SEQ ID NO: 2255579 - RNA, 13 nt, Human
auaaagcaauuuu

SEQ ID NO: 2255580 - RNA, 14 nt, Human
auaaagcaauuuuc

SEQ ID NO: 2255581 - RNA, 15 nt, Human
auaaagcaauuuucc

SEQ ID NO: 2255582 - RNA, 16 nt, Human
auaaagcaauuuuccu

SEQ ID NO: 2255583 - RNA, 17 nt, Human
auaaagcaauuuuccuu

SEQ ID NO: 2255584 - RNA, 18 nt, Human
auaaagcaauuuuccuug

SEQ ID NO: 2255585 - RNA, 16 nt, Human
auaaauuguauauuca

SEQ ID NO: 2255586 - RNA, 17 nt, Human
auaaauuguauauucac

SEQ ID NO: 2255587 - RNA, 18 nt, Human
auaaauuguauauucacu

SEQ ID NO: 2255588 - RNA, 19 nt, Human
auaaauuguauauucacuu

SEQ ID NO: 2255589 - RNA, 20 nt, Human
auaaauuugguucuaauaga

SEQ ID NO: 2255590 - RNA, 19 nt, Human
auaacaagaucuuucagga

SEQ ID NO: 2255591 - RNA, 17 nt, Human
auaacaagaucuuucag

SEQ ID NO: 2255592 - RNA, 19 nt, Human
auaaauuuauuuacugcua

SEQ ID NO: 2255593 - RNA, 15 nt, Human
auaaauuuauuuacu

SEQ ID NO: 2255594 - RNA, 14 nt, Human
auaaauuuauuuac

SEQ ID NO: 2255595 - RNA, 17 nt, Human
auaaauuguuugaccau

SEQ ID NO: 2255596 - RNA, 19 nt, Human
auaaagcaauuuuccuuga

SEQ ID NO: 2255597 - RNA, 14 nt, Human
auaaauuguauauu

SEQ ID NO: 2255598 - RNA, 13 nt, Human
auaaauuguuuga

SEQ ID NO: 2255599 - RNA, 15 nt, Human
auaaauuguuugacc

SEQ ID NO: 2255600 - RNA, 14 nt, Human
auaacaaugaaagu

SEQ ID NO: 2255601 - RNA, 15 nt, Human
auaacaaugcuguau

SEQ ID NO: 2255602 - RNA, 17 nt, Human
auaacaaugcuguauuu

SEQ ID NO: 2255603 - RNA, 19 nt, Human
auaacaaugcuguauuuua

SEQ ID NO: 2255604 - RNA, 20 nt, Human
auaacaaugcuguauuuuaa

SEQ ID NO: 2255605 - RNA, 21 nt, Human
auaacaaugcuguauuuuaaa

SEQ ID NO: 2255606 - RNA, 16 nt, Human
auaacaaugugcucuc

SEQ ID NO: 2255607 - RNA, 17 nt, Human
auaacaagguccaagau

SEQ ID NO: 2255608 - RNA, 21 nt, Human
auaacaagguccaagauaccu

SEQ ID NO: 2255609 - RNA, 13 nt, Human
auaacaauguuaa

SEQ ID NO: 2255610 - RNA, 14 nt, Human
auaacaauguuaag

SEQ ID NO: 2255611 - RNA, 16 nt, Human
auaacaauguuaagga

SEQ ID NO: 2255612 - RNA, 18 nt, Human
auaacaauguuaaggaaa

SEQ ID NO: 2255613 - RNA, 18 nt, Human
auaacauguaauuaagua

SEQ ID NO: 2255614 - RNA, 13 nt, Human
auaacauguaauu

SEQ ID NO: 2255615 - RNA, 14 nt, Human
auaacacaauauga

SEQ ID NO: 2255616 - RNA, 13 nt, Human
auaacacacagcu

SEQ ID NO: 2255617 - RNA, 22 nt, Human
auaacaauguuaaggaaacucu

SEQ ID NO: 2255618 - RNA, 15 nt, Human
auaacaauuguuugg

SEQ ID NO: 2255619 - RNA, 15 nt, Human
auaacaauuccucua

SEQ ID NO: 2255620 - RNA, 14 nt, Human
auaacaauuccucu

SEQ ID NO: 2255621 - RNA, 12 nt, Human
auaacauguaau

SEQ ID NO: 2255622 - RNA, 11 nt, Human
auaacacacau

SEQ ID NO: 2255623 - RNA, 14 nt, Human
auaacacacagcua

SEQ ID NO: 2255624 - RNA, 23 nt, Human
auaacacacagcuaacacacagc

SEQ ID NO: 2255625 - RNA, 20 nt, Human
auaacauguaauuaaguacu

SEQ ID NO: 2255626 - RNA, 20 nt, Human
auaaaacauuuucacacaau

SEQ ID NO: 2255627 - RNA, 18 nt, Human
auaaaacauuuucacaca

SEQ ID NO: 2255628 - RNA, 11 nt, Human
auaaaacauuu

SEQ ID NO: 2255629 - RNA, 13 nt, Human
auaaaacauuuua

SEQ ID NO: 2255630 - RNA, 18 nt, Human
auaaaacauuuuaaaugg

SEQ ID NO: 2255631 - RNA, 19 nt, Human
auaaaacauuuuaaaugga

SEQ ID NO: 2255632 - RNA, 21 nt, Human
auaaaaaggcaccuauaaaac

SEQ ID NO: 2255633 - RNA, 22 nt, Human
auaaaacauuaagaaaaucaua

SEQ ID NO: 2255634 - RNA, 13 nt, Human
auaaaacauuaau

SEQ ID NO: 2255635 - RNA, 12 nt, Human
auaaaaaggcac

SEQ ID NO: 2255636 - RNA, 11 nt, Human
auaaaaaggca

SEQ ID NO: 2255637 - RNA, 21 nt, Human
auaaaaagcuuccaugauucu

SEQ ID NO: 2255638 - RNA, 17 nt, Human
auaaaaagcuuccauga

SEQ ID NO: 2255639 - RNA, 13 nt, Human
auaaaaagcaaaa

SEQ ID NO: 2255640 - RNA, 12 nt, Human
auaaaaagcuga

SEQ ID NO: 2255641 - RNA, 16 nt, Human
auaaaaagcaaaacaa

SEQ ID NO: 2255642 - RNA, 22 nt, Human
auaaaaagccugcaauuucaua

SEQ ID NO: 2255643 - RNA, 17 nt, Human
auaaaacuuugcugcca

SEQ ID NO: 2255644 - RNA, 20 nt, Human
auaaagaugaucuacucaga

SEQ ID NO: 2255645 - RNA, 18 nt, Human
auaaagauggcugacuuu

SEQ ID NO: 2255646 - RNA, 15 nt, Human
auaaagaugcucuuu

SEQ ID NO: 2255647 - RNA, 14 nt, Human
auaaagaugcucuu

SEQ ID NO: 2255648 - RNA, 15 nt, Human
auaaaacuggcuuug

SEQ ID NO: 2255649 - RNA, 23 nt, Human
auaaagaugaucuacucagaaau

SEQ ID NO: 2255650 - RNA, 22 nt, Human
auaaaaccuuucaaauuucaca

SEQ ID NO: 2255651 - RNA, 21 nt, Human
auaaaaccuuucaaauuucac

SEQ ID NO: 2255652 - RNA, 20 nt, Human
auaaaaccuuucaaauuuca

SEQ ID NO: 2255653 - RNA, 15 nt, Human
auaaaaccuuucaaa

SEQ ID NO: 2255654 - RNA, 14 nt, Human
auaaaaccuuucaa

SEQ ID NO: 2255655 - RNA, 13 nt, Human
auaaaaccuuuca

SEQ ID NO: 2255656 - RNA, 11 nt, Human
auaaaaccuuu

SEQ ID NO: 2255657 - RNA, 12 nt, Human
auaaaacccuua

SEQ ID NO: 2255658 - RNA, 23 nt, Human
auaaaacauuuuaaauggacaga

SEQ ID NO: 2255659 - RNA, 14 nt, Human
aguuugcuauuaga

SEQ ID NO: 2255660 - RNA, 20 nt, Human
aguuugcacuguaugcugga

SEQ ID NO: 2255661 - RNA, 11 nt, Human
aguuugcuuag

SEQ ID NO: 2255662 - RNA, 11 nt, Human
aguuugcugua

SEQ ID NO: 2255663 - RNA, 18 nt, Human
aguuugcuguacuagaga

SEQ ID NO: 2255664 - RNA, 23 nt, Human
aguuugauuauucagugucacug

SEQ ID NO: 2255665 - RNA, 23 nt, Human
aguuugauuaaauucuugcaaag

SEQ ID NO: 2255666 - RNA, 18 nt, Human
aguuugauuauucagugu

SEQ ID NO: 2255667 - RNA, 17 nt, Human
aguuugauuauucagug

SEQ ID NO: 2255668 - RNA, 14 nt, Human
aguuugauuauuca

SEQ ID NO: 2255669 - RNA, 14 nt, Human
aguuugagcugccu

SEQ ID NO: 2255670 - RNA, 15 nt, Human
aguuugagcugccuu

SEQ ID NO: 2255671 - RNA, 18 nt, Human
aguuuggcaaacucucca

SEQ ID NO: 2255672 - RNA, 12 nt, Human
auaaaaagcaaa

SEQ ID NO: 2255673 - RNA, 17 nt, Human
aguuuggcaauaguuug

SEQ ID NO: 2255674 - RNA, 16 nt, Human
aguuuggcaauaguuu

SEQ ID NO: 2255675 - RNA, 20 nt, Human
auaaaaagccugcaauuuca

SEQ ID NO: 2255676 - RNA, 16 nt, Human
aguuuggcaaacucuc

SEQ ID NO: 2255677 - RNA, 18 nt, Human
aguuuggauucuuaugua

SEQ ID NO: 2255678 - RNA, 14 nt, Human
aguuugcuuagaaa

SEQ ID NO: 2255679 - RNA, 13 nt, Human
aguuugcuuagaa

SEQ ID NO: 2255680 - RNA, 21 nt, Human
aguuugaaggaggugagggau

SEQ ID NO: 2255681 - RNA, 12 nt, Human
aguuugaauguu

SEQ ID NO: 2255682 - RNA, 14 nt, Human
aguuugaauguuaa

SEQ ID NO: 2255683 - RNA, 15 nt, Human
aguuugaauguuaaa

SEQ ID NO: 2255684 - RNA, 15 nt, Human
aguuugaacuucaua

SEQ ID NO: 2255685 - RNA, 15 nt, Human
aguuugaaggaaaca

SEQ ID NO: 2255686 - RNA, 16 nt, Human
aguuugaaggaaacag

SEQ ID NO: 2255687 - RNA, 18 nt, Human
aguuugaaggaaacaguu

SEQ ID NO: 2255688 - RNA, 13 nt, Human
aguuucuuuggga

SEQ ID NO: 2255689 - RNA, 18 nt, Human
aguuucuuuccugccuuc

SEQ ID NO: 2255690 - RNA, 19 nt, Human
aguuucuuuccugccuucu

SEQ ID NO: 2255691 - RNA, 21 nt, Human
aguuucuuuccugccuucuuc

SEQ ID NO: 2255692 - RNA, 23 nt, Human
aguuucuuuccugccuucuucuu

SEQ ID NO: 2255693 - RNA, 23 nt, Human
aguuguuacuaacuaaacucucu

SEQ ID NO: 2255694 - RNA, 17 nt, Human
aguuucuuagcuuuuua

SEQ ID NO: 2255695 - RNA, 23 nt, Human
aguugugccuuuuauagcuauua

SEQ ID NO: 2255696 - RNA, 19 nt, Human
aguugugcuuguuuacagc

SEQ ID NO: 2255697 - RNA, 18 nt, Human
aguuguuacuaacuaaac

SEQ ID NO: 2255698 - RNA, 19 nt, Human
aguuguuacuaacuaaacu

SEQ ID NO: 2255699 - RNA, 20 nt, Human
aguuguuacuaacuaaacuc

SEQ ID NO: 2255700 - RNA, 22 nt, Human
aguuguuacuaacuaaacucuc

SEQ ID NO: 2255701 - RNA, 22 nt, Human
aguuguuacauuuuuaagugcu

SEQ ID NO: 2255702 - RNA, 20 nt, Human
aguuguuacauuuuuaagug

SEQ ID NO: 2255703 - RNA, 19 nt, Human
aguuguuacauuuuuaagu

SEQ ID NO: 2255704 - RNA, 19 nt, Human
aguuugagaucagccuggg

SEQ ID NO: 2255705 - RNA, 18 nt, Human
aguuugagaucagccugg

SEQ ID NO: 2255706 - RNA, 20 nt, Human
aguuugagaucagccugggc

SEQ ID NO: 2255707 - RNA, 16 nt, Human
aguuugauuaaauucu

SEQ ID NO: 2255708 - RNA, 16 nt, Human
aguuugaauguuaaau

SEQ ID NO: 2255709 - RNA, 21 nt, Human
aguuugaauguuaaauaaauu

SEQ ID NO: 2255710 - RNA, 22 nt, Human
aguuugauuaaauucuugcaaa

SEQ ID NO: 2255711 - RNA, 20 nt, Human
aguuugauuaaauucuugca

SEQ ID NO: 2255712 - RNA, 18 nt, Human
aguuugauuaaauucuug

SEQ ID NO: 2255713 - RNA, 17 nt, Human
aguuugauuaaauucuu

SEQ ID NO: 2255714 - RNA, 22 nt, Human
auaauguuuaauauugagaaag

SEQ ID NO: 2255715 - RNA, 15 nt, Human
auacaauaucaucca

SEQ ID NO: 2255716 - RNA, 19 nt, Human
auaauguuuaauauugaga

SEQ ID NO: 2255717 - RNA, 19 nt, Human
auaauguuguuauuuaaag

SEQ ID NO: 2255718 - RNA, 18 nt, Human
auaauguuucaaacauau

SEQ ID NO: 2255719 - RNA, 22 nt, Human
auacacuuacacuuuaugcaca

SEQ ID NO: 2255720 - RNA, 13 nt, Human
auacacuuacacu

SEQ ID NO: 2255721 - RNA, 17 nt, Human
auacaaugcugugcccu

SEQ ID NO: 2255722 - RNA, 14 nt, Human
auacaaugcugugc

SEQ ID NO: 2255723 - RNA, 18 nt, Human
auacccauagcuuccaug

SEQ ID NO: 2255724 - RNA, 13 nt, Human
auaccccccucug

SEQ ID NO: 2255725 - RNA, 23 nt, Human
auacagaaagauggaugugcuuu

SEQ ID NO: 2255726 - RNA, 15 nt, Human
auacccaugaacuua

SEQ ID NO: 2255727 - RNA, 19 nt, Human
auacccccugcaaagccca

SEQ ID NO: 2255728 - RNA, 17 nt, Human
auacccccugcaaagcc

SEQ ID NO: 2255729 - RNA, 17 nt, Human
auacccacccccaccca

SEQ ID NO: 2255730 - RNA, 22 nt, Human
auacacuuauuggaacucugcu

SEQ ID NO: 2255731 - RNA, 13 nt, Human
auacccaccccca

SEQ ID NO: 2255732 - RNA, 14 nt, Human
auacccacccccac

SEQ ID NO: 2255733 - RNA, 16 nt, Human
auacccacccccaccc

SEQ ID NO: 2255734 - RNA, 21 nt, Human
auacccccugcaaagcccagc

SEQ ID NO: 2255735 - RNA, 14 nt, Human
auaccugucccccu

SEQ ID NO: 2255736 - RNA, 15 nt, Human
auaccugucccccug

SEQ ID NO: 2255737 - RNA, 16 nt, Human
auaccugucccccuga

SEQ ID NO: 2255738 - RNA, 20 nt, Human
auacccccugcaaagcccag

SEQ ID NO: 2255739 - RNA, 16 nt, Human
auaccccaucauucau

SEQ ID NO: 2255740 - RNA, 19 nt, Human
auaauguaaacaauaucag

SEQ ID NO: 2255741 - RNA, 14 nt, Human
auaauguuguuauu

SEQ ID NO: 2255742 - RNA, 13 nt, Human
auaauguuucaaa

SEQ ID NO: 2255743 - RNA, 14 nt, Human
auaaugguugacug

SEQ ID NO: 2255744 - RNA, 18 nt, Human
auaauggucccauccagg

SEQ ID NO: 2255745 - RNA, 20 nt, Human
auaauggucccauccaggca

SEQ ID NO: 2255746 - RNA, 17 nt, Human
auaaugguaccagauaa

SEQ ID NO: 2255747 - RNA, 18 nt, Human
auaaugguaccagauaaa

SEQ ID NO: 2255748 - RNA, 19 nt, Human
auaaugguaccagauaaaa

SEQ ID NO: 2255749 - RNA, 17 nt, Human
auaauggucccauccag

SEQ ID NO: 2255750 - RNA, 18 nt, Human
auaaugguugacuggguu

SEQ ID NO: 2255751 - RNA, 22 nt, Human
auaauggucccauccaggcagu

SEQ ID NO: 2255752 - RNA, 14 nt, Human
auaaugguuucaaa

SEQ ID NO: 2255753 - RNA, 15 nt, Human
auaauguaaauaaag

SEQ ID NO: 2255754 - RNA, 21 nt, Human
auaagguaccuuucacauaga

SEQ ID NO: 2255755 - RNA, 19 nt, Human
auaaugggguccuggccau

SEQ ID NO: 2255756 - RNA, 15 nt, Human
auaaugguaccagau

SEQ ID NO: 2255757 - RNA, 13 nt, Human
auaauggucagag

SEQ ID NO: 2255758 - RNA, 15 nt, Human
auaagggcagaguca

SEQ ID NO: 2255759 - RNA, 13 nt, Human
auaagggcagagu

SEQ ID NO: 2255760 - RNA, 18 nt, Human
auaaggguaucuggugac

SEQ ID NO: 2255761 - RNA, 21 nt, Human
auaagccuccauuuaguucuu

SEQ ID NO: 2255762 - RNA, 17 nt, Human
auaaggccuuaauaugu

SEQ ID NO: 2255763 - RNA, 18 nt, Human
auaaggccuuaauauguu

SEQ ID NO: 2255764 - RNA, 22 nt, Human
auaagccagacaucaacagaua

SEQ ID NO: 2255765 - RNA, 21 nt, Human
auaagccagacaucaacagau

SEQ ID NO: 2255766 - RNA, 17 nt, Human
auauaauauauuugugu

SEQ ID NO: 2255767 - RNA, 20 nt, Human
auauaauauauuuguguauu

SEQ ID NO: 2255768 - RNA, 23 nt, Human
auauaauaugcacacagugcuuu

SEQ ID NO: 2255769 - RNA, 14 nt, Human
auauacaauuauau

SEQ ID NO: 2255770 - RNA, 16 nt, Human
auauacaauaacauaa

SEQ ID NO: 2255771 - RNA, 18 nt, Human
auauacaauaacauaauu

SEQ ID NO: 2255772 - RNA, 21 nt, Human
auauacaaccugcuugggugg

SEQ ID NO: 2255773 - RNA, 15 nt, Human
auauaaugguuucaa

SEQ ID NO: 2255774 - RNA, 18 nt, Human
auauaaugguuucaaaga

SEQ ID NO: 2255775 - RNA, 21 nt, Human
auauaaugguuucaaagauuc

SEQ ID NO: 2255776 - RNA, 18 nt, Human
auaguacucuuuguagca

SEQ ID NO: 2255777 - RNA, 14 nt, Human
auaguacuggcaug

SEQ ID NO: 2255778 - RNA, 19 nt, Human
auaguaccauuuauacaaa

SEQ ID NO: 2255779 - RNA, 14 nt, Human
auaguaccauuuau

SEQ ID NO: 2255780 - RNA, 17 nt, Human
auaguaccaaucauuuu

SEQ ID NO: 2255781 - RNA, 16 nt, Human
auaguagcauacauuu

SEQ ID NO: 2255782 - RNA, 14 nt, Human
auauaaguuugaag

SEQ ID NO: 2255783 - RNA, 15 nt, Human
auaguagcauacauu

SEQ ID NO: 2255784 - RNA, 21 nt, Human
auaguaccauuuauacaaauu

SEQ ID NO: 2255785 - RNA, 17 nt, Human
auauaaguuugaaggaa

SEQ ID NO: 2255786 - RNA, 19 nt, Human
auauaaguuugaaggaaac

SEQ ID NO: 2255787 - RNA, 21 nt, Human
auauaaguuugaaggaaacag

SEQ ID NO: 2255788 - RNA, 18 nt, Human
auauaauaaagcuacuga

SEQ ID NO: 2255789 - RNA, 21 nt, Human
auauaauaaagcuacugauuu

SEQ ID NO: 2255790 - RNA, 21 nt, Human
auauaauaaauguacauuaau

SEQ ID NO: 2255791 - RNA, 16 nt, Human
auagguuuuguuugcu

SEQ ID NO: 2255792 - RNA, 17 nt, Human
auagguuuuguuugcua

SEQ ID NO: 2255793 - RNA, 19 nt, Human
auagguuuuguuugcuauc

SEQ ID NO: 2255794 - RNA, 13 nt, Human
auaguaaaaauaa

SEQ ID NO: 2255795 - RNA, 18 nt, Human
auaguaaaagauaacaag

SEQ ID NO: 2255796 - RNA, 16 nt, Human
auaguaaaauucuacu

SEQ ID NO: 2255797 - RNA, 21 nt, Human
auagguuuuguuugcuaucuu

SEQ ID NO: 2255798 - RNA, 22 nt, Human
auagguuuuguuugcuaucuua

SEQ ID NO: 2255799 - RNA, 14 nt, Human
auaguaaaaauaaa

SEQ ID NO: 2255800 - RNA, 14 nt, Human
auaguaauucucag

SEQ ID NO: 2255801 - RNA, 21 nt, Human
auaguaacuucuuauggaauu

SEQ ID NO: 2255802 - RNA, 19 nt, Human
auaguaacuucuuauggaa

SEQ ID NO: 2255803 - RNA, 16 nt, Human
auaguaaccuggguaa

SEQ ID NO: 2255804 - RNA, 18 nt, Human
auagccgggcaugguggc

SEQ ID NO: 2255805 - RNA, 14 nt, Human
auagccgggcaugg

SEQ ID NO: 2255806 - RNA, 12 nt, Human
auagccuauauu

SEQ ID NO: 2255807 - RNA, 16 nt, Human
auagccuauauuuaca

SEQ ID NO: 2255808 - RNA, 19 nt, Human
auagccuauauuuacagug

SEQ ID NO: 2255809 - RNA, 15 nt, Human
auagccuaggugaca

SEQ ID NO: 2255810 - RNA, 17 nt, Human
auagccuaggugacaga

SEQ ID NO: 2255811 - RNA, 13 nt, Human
auauacacacagc

SEQ ID NO: 2255812 - RNA, 15 nt, Human
auauacagcucagaa

SEQ ID NO: 2255813 - RNA, 19 nt, Human
auauacacaggauccuauu

SEQ ID NO: 2255814 - RNA, 14 nt, Human
auauacaguaacuu

SEQ ID NO: 2255815 - RNA, 16 nt, Human
auauacaguaacuuua

SEQ ID NO: 2255816 - RNA, 17 nt, Human
auauacaguaacuuuau

SEQ ID NO: 2255817 - RNA, 22 nt, Human
auauacaguaacuuuaugugua

SEQ ID NO: 2255818 - RNA, 23 nt, Human
auauacaguaacuuuauguguaa

SEQ ID NO: 2255819 - RNA, 22 nt, Human
auagaaagccaaaucaaaauau

SEQ ID NO: 2255820 - RNA, 21 nt, Human
auagaaacucaccauguaaaa

SEQ ID NO: 2255821 - RNA, 19 nt, Human
auagaaauaagugguuauu

SEQ ID NO: 2255822 - RNA, 20 nt, Human
auagaaauaaauagcuauau

SEQ ID NO: 2255823 - RNA, 22 nt, Human
auagaaauaaaggaugugauug

SEQ ID NO: 2255824 - RNA, 15 nt, Human
auagcacagacccug

SEQ ID NO: 2255825 - RNA, 15 nt, Human
auagcacugagcaaa

SEQ ID NO: 2255826 - RNA, 14 nt, Human
auagcaccagggcu

SEQ ID NO: 2255827 - RNA, 16 nt, Human
auagcagacaguguuu

SEQ ID NO: 2255828 - RNA, 17 nt, Human
auagcacagacccugcc

SEQ ID NO: 2255829 - RNA, 18 nt, Human
auagcacagacccugccc

SEQ ID NO: 2255830 - RNA, 14 nt, Human
auagcagauuuuaa

SEQ ID NO: 2255831 - RNA, 11 nt, Human
auagcacuuuc

SEQ ID NO: 2255832 - RNA, 22 nt, Human
auagcagauuuuaauuuugaau

SEQ ID NO: 2255833 - RNA, 13 nt, Human
auagcauguaaug

SEQ ID NO: 2255834 - RNA, 19 nt, Human
auagcaugacauuucuuug

SEQ ID NO: 2255835 - RNA, 15 nt, Human
auagcagcuuauuca

SEQ ID NO: 2255836 - RNA, 21 nt, Human
auagcauuaacuaaucuauug

SEQ ID NO: 2255837 - RNA, 15 nt, Human
auagcauuaacuaau

SEQ ID NO: 2255838 - RNA, 13 nt, Human
auagcauuaacua

SEQ ID NO: 2255839 - RNA, 18 nt, Human
auagcauguauugugucu

SEQ ID NO: 2255840 - RNA, 22 nt, Human
auagcauguauugugucuuuug

SEQ ID NO: 2255841 - RNA, 10 nt, Human
auagcaugua

SEQ ID NO: 2255842 - RNA, 14 nt, Human
auagcauguauugu

SEQ ID NO: 2255843 - RNA, 15 nt, Human
auagcauguauugug

SEQ ID NO: 2255844 - RNA, 16 nt, Human
auagcauguauugugu

SEQ ID NO: 2255845 - RNA, 23 nt, Human
auagcauguauugugucuuuugc

SEQ ID NO: 2255846 - RNA, 18 nt, Human
auagcauuuuugauuuau

SEQ ID NO: 2255847 - RNA, 19 nt, Human
auagcauuuuugauuuaug

SEQ ID NO: 2255848 - RNA, 21 nt, Human
auagcauuuuugauuuaugca

SEQ ID NO: 2255849 - RNA, 16 nt, Human
auagcauugugaacug

SEQ ID NO: 2255850 - RNA, 15 nt, Human
auagcauugugaacu

SEQ ID NO: 2255851 - RNA, 16 nt, Human
auagcauucucuauca

SEQ ID NO: 2255852 - RNA, 13 nt, Human
auacuugagacug

SEQ ID NO: 2255853 - RNA, 23 nt, Human
auacuugaagggccagagccagg

SEQ ID NO: 2255854 - RNA, 17 nt, Human
auacuugucuuguucac

SEQ ID NO: 2255855 - RNA, 18 nt, Human
auacuugucaauauuuaa

SEQ ID NO: 2255856 - RNA, 13 nt, Human
auacuuguggacu

SEQ ID NO: 2255857 - RNA, 14 nt, Human
auacuuguggacua

SEQ ID NO: 2255858 - RNA, 20 nt, Human
auacuuguggacuaaaagau

SEQ ID NO: 2255859 - RNA, 21 nt, Human
auacuuguggacuaaaagaua

SEQ ID NO: 2255860 - RNA, 12 nt, Human
auacuuuacaug

SEQ ID NO: 2255861 - RNA, 23 nt, Human
auacuuuaaaggaaaaaauguug

SEQ ID NO: 2255862 - RNA, 15 nt, Human
auacuuuagugaacg

SEQ ID NO: 2255863 - RNA, 23 nt, Human
auacuuuagugaacguggacucc

SEQ ID NO: 2255864 - RNA, 14 nt, Human
auacuuuaaaggaa

SEQ ID NO: 2255865 - RNA, 15 nt, Human
auacuuuaaaggaaa

SEQ ID NO: 2255866 - RNA, 16 nt, Human
auacuuuaaaggaaaa

SEQ ID NO: 2255867 - RNA, 13 nt, Human
auacuuugucuga

SEQ ID NO: 2255868 - RNA, 21 nt, Human
auacuuucauccugacucugc

SEQ ID NO: 2255869 - RNA, 18 nt, Human
auauuuccauauggauuu

SEQ ID NO: 2255870 - RNA, 21 nt, Human
auauuuccauauggauuuucu

SEQ ID NO: 2255871 - RNA, 19 nt, Human
auauuuaugucuauuuaag

SEQ ID NO: 2255872 - RNA, 19 nt, Human
auauuucccugaaggaacc

SEQ ID NO: 2255873 - RNA, 20 nt, Human
auauuuauguagaugugcau

SEQ ID NO: 2255874 - RNA, 18 nt, Human
auauuuaugucuauuuaa

SEQ ID NO: 2255875 - RNA, 14 nt, Human
auauuuauguagau

SEQ ID NO: 2255876 - RNA, 19 nt, Human
auauuuauggggggagaac

SEQ ID NO: 2255877 - RNA, 21 nt, Human
auauuuaugucuauuuaagcc

SEQ ID NO: 2255878 - RNA, 15 nt, Human
auauuuauauuucac

SEQ ID NO: 2255879 - RNA, 14 nt, Human
auauuuauauuuca

SEQ ID NO: 2255880 - RNA, 15 nt, Human
auauuuauauauuua

SEQ ID NO: 2255881 - RNA, 15 nt, Human
auauuuauauauauu

SEQ ID NO: 2255882 - RNA, 15 nt, Human
auauuuauagucaca

SEQ ID NO: 2255883 - RNA, 23 nt, Human
auauuuauaacucaucauaaaau

SEQ ID NO: 2255884 - RNA, 22 nt, Human
auauuuauaacucaucauaaaa

SEQ ID NO: 2255885 - RNA, 21 nt, Human
auauuuauaacucaucauaaa

SEQ ID NO: 2255886 - RNA, 20 nt, Human
auauuuauaacucaucauaa

SEQ ID NO: 2255887 - RNA, 17 nt, Human
auauuuauaacucauca

SEQ ID NO: 2255888 - RNA, 23 nt, Human
auauucagugcuguggccugggc

SEQ ID NO: 2255889 - RNA, 18 nt, Human
auauucaugcuucuuccu

SEQ ID NO: 2255890 - RNA, 20 nt, Human
auauucaugcuucuuccuua

SEQ ID NO: 2255891 - RNA, 16 nt, Human
auauucauuguauaaa

SEQ ID NO: 2255892 - RNA, 15 nt, Human
auauucauuguauaa

SEQ ID NO: 2255893 - RNA, 14 nt, Human
auauucauuguaua

SEQ ID NO: 2255894 - RNA, 22 nt, Human
auauucauguaaacaaaauuua

SEQ ID NO: 2255895 - RNA, 14 nt, Human
auauucauguaaac

SEQ ID NO: 2255896 - RNA, 19 nt, Human
auauucauguaaacaaaau

SEQ ID NO: 2255897 - RNA, 22 nt, Human
auauucagugcuguggccuggg

SEQ ID NO: 2255898 - RNA, 19 nt, Human
auauucaggaagcucaggg

SEQ ID NO: 2255899 - RNA, 20 nt, Human
auauucaacucauaagacuu

SEQ ID NO: 2255900 - RNA, 23 nt, Human
auauggcagaguuguaaauauau

SEQ ID NO: 2255901 - RNA, 22 nt, Human
auauggcagaguuguaaauaua

SEQ ID NO: 2255902 - RNA, 14 nt, Human
auauuauuuuaugu

SEQ ID NO: 2255903 - RNA, 14 nt, Human
auauuauguuaaaa

SEQ ID NO: 2255904 - RNA, 15 nt, Human
auauuauuuuauguu

SEQ ID NO: 2255905 - RNA, 22 nt, Human
auauuauuuuauguugcauaga

SEQ ID NO: 2255906 - RNA, 20 nt, Human
auaugcagugauauggcaga

SEQ ID NO: 2255907 - RNA, 16 nt, Human
auaugcaguuuuccuu

SEQ ID NO: 2255908 - RNA, 20 nt, Human
auaugcucugcauguuacau

SEQ ID NO: 2255909 - RNA, 18 nt, Human
auauggaugauucagaaa

SEQ ID NO: 2255910 - RNA, 16 nt, Human
auauggacucugcaca

SEQ ID NO: 2255911 - RNA, 11 nt, Human
auauggagccc

SEQ ID NO: 2255912 - RNA, 22 nt, Human
auaugcugccaaauuuuggcca

SEQ ID NO: 2255913 - RNA, 12 nt, Human
auaugcugcuca

SEQ ID NO: 2255914 - RNA, 18 nt, Human
auaugcugccaaauuuug

SEQ ID NO: 2255915 - RNA, 15 nt, Human
auauggacucugcac

SEQ ID NO: 2255916 - RNA, 13 nt, Human
auauggccacagu

SEQ ID NO: 2255917 - RNA, 17 nt, Human
auauuauguguuuccau

SEQ ID NO: 2255918 - RNA, 13 nt, Human
auauuauguuaaa

SEQ ID NO: 2255919 - RNA, 22 nt, Human
auauggauuuucuauuguuacu

SEQ ID NO: 2255920 - RNA, 23 nt, Human
auauggauuuucuauuguuacuc

SEQ ID NO: 2255921 - RNA, 16 nt, Human
auauggcaaaaauggc

SEQ ID NO: 2255922 - RNA, 13 nt, Human
auauggcaagaaa

SEQ ID NO: 2255923 - RNA, 15 nt, Human
auauggcaagaaagc

SEQ ID NO: 2255924 - RNA, 17 nt, Human
auauggcaagaaagcug

SEQ ID NO: 2255925 - RNA, 18 nt, Human
auauggcaagaaagcugg

SEQ ID NO: 2255926 - RNA, 19 nt, Human
auauggcaagaaagcuggu

SEQ ID NO: 2255927 - RNA, 12 nt, Human
auauggcagaag

SEQ ID NO: 2255928 - RNA, 15 nt, Human
auauggcagaagaca

SEQ ID NO: 2255929 - RNA, 17 nt, Human
auauggcagaagacacc

SEQ ID NO: 2255930 - RNA, 16 nt, Human
auauggcagaguugua

SEQ ID NO: 2255931 - RNA, 17 nt, Human
auauggcagaguuguaa

SEQ ID NO: 2255932 - RNA, 18 nt, Human
auauggcagaguuguaaa

SEQ ID NO: 2255933 - RNA, 19 nt, Human
auauggcagaguuguaaau

SEQ ID NO: 2255934 - RNA, 20 nt, Human
auauggcagaguuguaaaua

SEQ ID NO: 2255935 - RNA, 17 nt, Human
auaugcucugcauguua

SEQ ID NO: 2255936 - RNA, 16 nt, Human
auaugcucugcauguu

SEQ ID NO: 2255937 - RNA, 21 nt, Human
auaucaucagcauaccuuuau

SEQ ID NO: 2255938 - RNA, 21 nt, Human
auaugcaccuugugucuguac

SEQ ID NO: 2255939 - RNA, 19 nt, Human
auaugcaccuugugucugu

SEQ ID NO: 2255940 - RNA, 20 nt, Human
auaugcaccuugugucugua

SEQ ID NO: 2255941 - RNA, 17 nt, Human
auaugcagauuuugccc

SEQ ID NO: 2255942 - RNA, 14 nt, Human
auaugcacuuauaa

SEQ ID NO: 2255943 - RNA, 13 nt, Human
auaugcacuuaua

SEQ ID NO: 2255944 - RNA, 19 nt, Human
auaucaguuacucagcccu

SEQ ID NO: 2255945 - RNA, 18 nt, Human
auaucaguuacucagccc

SEQ ID NO: 2255946 - RNA, 17 nt, Human
auaucaguuacucagcc

SEQ ID NO: 2255947 - RNA, 21 nt, Human
auaucagccugagucuccugu

SEQ ID NO: 2255948 - RNA, 14 nt, Human
auaucagccugagu

SEQ ID NO: 2255949 - RNA, 20 nt, Human
auaucagccugagucuccug

SEQ ID NO: 2255950 - RNA, 22 nt, Human
auaucagccugagucuccugug

SEQ ID NO: 2255951 - RNA, 23 nt, Human
auaucaguuacucagcccugggc

SEQ ID NO: 2255952 - RNA, 21 nt, Human
auaucaguuacucagcccugg

SEQ ID NO: 2255953 - RNA, 20 nt, Human
auaucaguuacucagcccug

SEQ ID NO: 2255954 - RNA, 13 nt, Human
auaucaguuugcu

SEQ ID NO: 2255955 - RNA, 22 nt, Human
auaucaguuacucagcccuggg

SEQ ID NO: 2255956 - RNA, 14 nt, Human
auaucauauuggua

SEQ ID NO: 2255957 - RNA, 19 nt, Human
auaucauauugguauucac

SEQ ID NO: 2255958 - RNA, 13 nt, Human
auaucaucaguau

SEQ ID NO: 2255959 - RNA, 18 nt, Human
auaucaucagcauaccuu

SEQ ID NO: 2255960 - RNA, 20 nt, Human
auaucaucagcauaccuuua

SEQ ID NO: 2255961 - RNA, 22 nt, Human
auaugcacacauuuuuuaaaug

SEQ ID NO: 2255962 - RNA, 15 nt, Human
auaugcaccuugugu

SEQ ID NO: 2255963 - RNA, 17 nt, Human
auaugcaccuugugucu

SEQ ID NO: 2255964 - RNA, 14 nt, Human
auauauuuuuugua

SEQ ID NO: 2255965 - RNA, 20 nt, Human
auauauuuuugguugucaau

SEQ ID NO: 2255966 - RNA, 21 nt, Human
auauauuuuucacaguuuuuc

SEQ ID NO: 2255967 - RNA, 15 nt, Human
auauauuuuugguug

SEQ ID NO: 2255968 - RNA, 15 nt, Human
auauauuuuucacag

SEQ ID NO: 2255969 - RNA, 14 nt, Human
auauauuuuucaca

SEQ ID NO: 2255970 - RNA, 14 nt, Human
auaucagcaagucu

SEQ ID NO: 2255971 - RNA, 12 nt, Human
auaucagccuga

SEQ ID NO: 2255972 - RNA, 15 nt, Human
auauauuuuuauauu

SEQ ID NO: 2255973 - RNA, 21 nt, Human
auauauuuuuauauuuaguua

SEQ ID NO: 2255974 - RNA, 22 nt, Human
cacaguggaaagacagcuucuc

SEQ ID NO: 2255975 - RNA, 22 nt, Human
cacagugcuuuccguggcacug

SEQ ID NO: 2255976 - RNA, 19 nt, Human
cacagugccuucaauaaau

SEQ ID NO: 2255977 - RNA, 13 nt, Human
cacagugcugucu

SEQ ID NO: 2255978 - RNA, 17 nt, Human
cacagugccuucaauaa

SEQ ID NO: 2255979 - RNA, 18 nt, Human
cacagugccuucaauaaa

SEQ ID NO: 2255980 - RNA, 21 nt, Human
cacaggcccuuccucuccacu

SEQ ID NO: 2255981 - RNA, 17 nt, Human
cacagugcaucucagcc

SEQ ID NO: 2255982 - RNA, 18 nt, Human
cacagugcaucucagccc

SEQ ID NO: 2255983 - RNA, 19 nt, Human
cacagugcaucucagccca

SEQ ID NO: 2255984 - RNA, 19 nt, Human
cacaguguugcccaggcug

SEQ ID NO: 2255985 - RNA, 14 nt, Human
cacaguguugccca

SEQ ID NO: 2255986 - RNA, 16 nt, Human
cacaguguguuuguga

SEQ ID NO: 2255987 - RNA, 13 nt, Human
cacaguguguuug

SEQ ID NO: 2255988 - RNA, 10 nt, Human
cacaguguuu

SEQ ID NO: 2255989 - RNA, 23 nt, Human
cacaguguuaaaugaaauuguaa

SEQ ID NO: 2255990 - RNA, 17 nt, Human
cacaguguuggcgagag

SEQ ID NO: 2255991 - RNA, 16 nt, Human
cacaguguuuuuguaa

SEQ ID NO: 2255992 - RNA, 17 nt, Human
cacaguguuuuuguaaa

SEQ ID NO: 2255993 - RNA, 19 nt, Human
cacaguguuuuuguaaagu

SEQ ID NO: 2255994 - RNA, 22 nt, Human
cacaguguuuuuguaaagugug

SEQ ID NO: 2255995 - RNA, 17 nt, Human
cacaguucaauucucau

SEQ ID NO: 2255996 - RNA, 20 nt, Human
cacagcuuuaucaccagaga

SEQ ID NO: 2255997 - RNA, 15 nt, Human
cacaggcccuuccuc

SEQ ID NO: 2255998 - RNA, 13 nt, Human
cacaggaaaccag

SEQ ID NO: 2255999 - RNA, 16 nt, Human
cacaggcccuuccucu

SEQ ID NO: 2256000 - RNA, 17 nt, Human
cacaggcccuuccucuc

SEQ ID NO: 2256001 - RNA, 18 nt, Human
cacaggcccuuccucucc

SEQ ID NO: 2256002 - RNA, 19 nt, Human
cacaggcccuuccucucca

SEQ ID NO: 2256003 - RNA, 22 nt, Human
cacagcuugaccugaggcugug

SEQ ID NO: 2256004 - RNA, 20 nt, Human
cacagcuugaccugaggcug

SEQ ID NO: 2256005 - RNA, 21 nt, Human
cacagcuugaccugaggcugu

SEQ ID NO: 2256006 - RNA, 23 nt, Human
cacagcuuccccucucuccuccu

SEQ ID NO: 2256007 - RNA, 18 nt, Human
cacagcuugaccugaggc

SEQ ID NO: 2256008 - RNA, 19 nt, Human
cacagcuugaccugaggcu

SEQ ID NO: 2256009 - RNA, 22 nt, Human
cacagcuuccccucucuccucc

SEQ ID NO: 2256010 - RNA, 16 nt, Human
cacagcuuccccucuc

SEQ ID NO: 2256011 - RNA, 12 nt, Human
cacagcugcugg

SEQ ID NO: 2256012 - RNA, 22 nt, Human
cacagcugcucaauaaaguaca

SEQ ID NO: 2256013 - RNA, 12 nt, Human
cacagcugcuca

SEQ ID NO: 2256014 - RNA, 20 nt, Human
cacaguucaguggcagggcu

SEQ ID NO: 2256015 - RNA, 23 nt, Human
cacaguguuuuuguaaagugugg

SEQ ID NO: 2256016 - RNA, 21 nt, Human
cacaguucaguggcagggcuc

SEQ ID NO: 2256017 - RNA, 21 nt, Human
cacaaaggaccucagcugcuu

SEQ ID NO: 2256018 - RNA, 20 nt, Human
cacaaagccuuaucaagugu

SEQ ID NO: 2256019 - RNA, 18 nt, Human
cacaaaggaccucagcug

SEQ ID NO: 2256020 - RNA, 18 nt, Human
cacaagaaaugaaagcag

SEQ ID NO: 2256021 - RNA, 20 nt, Human
cacaaaauucgaccugauuu

SEQ ID NO: 2256022 - RNA, 13 nt, Human
cacaaagccuuau

SEQ ID NO: 2256023 - RNA, 13 nt, Human
cacaaaggagagc

SEQ ID NO: 2256024 - RNA, 20 nt, Human
cacaaguggugguaacccug

SEQ ID NO: 2256025 - RNA, 14 nt, Human
cacaagugguggua

SEQ ID NO: 2256026 - RNA, 14 nt, Human
cacaaguuguguuu

SEQ ID NO: 2256027 - RNA, 18 nt, Human
cacaauaaaaauguuuaa

SEQ ID NO: 2256028 - RNA, 21 nt, Human
cacaaguggugguaacccugg

SEQ ID NO: 2256029 - RNA, 21 nt, Human
cacaagaaaugaaagcaggga

SEQ ID NO: 2256030 - RNA, 20 nt, Human
cacaagaaaugaaagcaggg

SEQ ID NO: 2256031 - RNA, 13 nt, Human
cacaauacaauaa

SEQ ID NO: 2256032 - RNA, 15 nt, Human
cacaauaauuuucua

SEQ ID NO: 2256033 - RNA, 12 nt, Human
cacaauaugaau

SEQ ID NO: 2256034 - RNA, 21 nt, Human
cacaauaaggucaaugccaga

SEQ ID NO: 2256035 - RNA, 20 nt, Human
cacaauggcuaauucccaga

SEQ ID NO: 2256036 - RNA, 22 nt, Human
cacaaugaaaugcucuccuuuc

SEQ ID NO: 2256037 - RNA, 19 nt, Human
cacaaucuuaaggggcagc

SEQ ID NO: 2256038 - RNA, 20 nt, Human
cacaaucuuaaggggcagcu

SEQ ID NO: 2256039 - RNA, 11 nt, Human
cacaauauuuu

SEQ ID NO: 2256040 - RNA, 15 nt, Human
cacaauauugaacuu

SEQ ID NO: 2256041 - RNA, 19 nt, Human
cacaaucugacauucucag

SEQ ID NO: 2256042 - RNA, 18 nt, Human
cacaaucuuaaggggcag

SEQ ID NO: 2256043 - RNA, 15 nt, Human
cacacacacacacag

SEQ ID NO: 2256044 - RNA, 16 nt, Human
cacacacacacacagc

SEQ ID NO: 2256045 - RNA, 15 nt, Human
cacacacacacacaa

SEQ ID NO: 2256046 - RNA, 15 nt, Human
cacacacacacacac

SEQ ID NO: 2256047 - RNA, 13 nt, Human
cacacacacacac

SEQ ID NO: 2256048 - RNA, 14 nt, Human
cacacacacacaca

SEQ ID NO: 2256049 - RNA, 18 nt, Human
cacacaaagguauaauuu

SEQ ID NO: 2256050 - RNA, 13 nt, Human
cacacaaagguau

SEQ ID NO: 2256051 - RNA, 21 nt, Human
cacacaaaauguacccaguau

SEQ ID NO: 2256052 - RNA, 13 nt, Human
cacacaaaacaac

SEQ ID NO: 2256053 - RNA, 21 nt, Human
cacaauggcuaauucccagag

SEQ ID NO: 2256054 - RNA, 13 nt, Human
cacacacacagga

SEQ ID NO: 2256055 - RNA, 12 nt, Human
cacacacacagg

SEQ ID NO: 2256056 - RNA, 15 nt, Human
cacacacacagccac

SEQ ID NO: 2256057 - RNA, 14 nt, Human
cacacacacagcca

SEQ ID NO: 2256058 - RNA, 13 nt, Human
cacacacacagcc

SEQ ID NO: 2256059 - RNA, 12 nt, Human
cacacacacagc

SEQ ID NO: 2256060 - RNA, 15 nt, Human
cacacacacagaaaa

SEQ ID NO: 2256061 - RNA, 14 nt, Human
cacacacacagaaa

SEQ ID NO: 2256062 - RNA, 13 nt, Human
cacacacacagaa

SEQ ID NO: 2256063 - RNA, 14 nt, Human
cacacacacaggag

SEQ ID NO: 2256064 - RNA, 13 nt, Human
cacacacacaugc

SEQ ID NO: 2256065 - RNA, 12 nt, Human
cacacacacaug

SEQ ID NO: 2256066 - RNA, 15 nt, Human
cacacacacaugcau

SEQ ID NO: 2256067 - RNA, 14 nt, Human
cacacacacaugca

SEQ ID NO: 2256068 - RNA, 13 nt, Human
cacacacacccac

SEQ ID NO: 2256069 - RNA, 13 nt, Human
cacacacacgcac

SEQ ID NO: 2256070 - RNA, 16 nt, Human
cacacacacacaggag

SEQ ID NO: 2256071 - RNA, 13 nt, Human
cacacacacacau

SEQ ID NO: 2256072 - RNA, 15 nt, Human
cacacacacacaugc

SEQ ID NO: 2256073 - RNA, 14 nt, Human
cacacacacacaug

SEQ ID NO: 2256074 - RNA, 12 nt, Human
cacacacacaga

SEQ ID NO: 2256075 - RNA, 11 nt, Human
cacacacacag

SEQ ID NO: 2256076 - RNA, 16 nt, Human
cacacacacacaugca

SEQ ID NO: 2256077 - RNA, 13 nt, Human
cacacacacacuc

SEQ ID NO: 2256078 - RNA, 14 nt, Human
cacacacacacagg

SEQ ID NO: 2256079 - RNA, 14 nt, Human
cacacacacacacu

SEQ ID NO: 2256080 - RNA, 16 nt, Human
cacacacacacagcca

SEQ ID NO: 2256081 - RNA, 15 nt, Human
cacacacacacagcc

SEQ ID NO: 2256082 - RNA, 14 nt, Human
cacacacacacagc

SEQ ID NO: 2256083 - RNA, 13 nt, Human
cacacacacacag

SEQ ID NO: 2256084 - RNA, 16 nt, Human
cacacacacacacaug

SEQ ID NO: 2256085 - RNA, 16 nt, Human
cacacacacacacagg

SEQ ID NO: 2256086 - RNA, 15 nt, Human
cacacacacacacau

SEQ ID NO: 2256087 - RNA, 13 nt, Human
cacacacacucua

SEQ ID NO: 2256088 - RNA, 14 nt, Human
cacacacacgcacg

SEQ ID NO: 2256089 - RNA, 14 nt, Human
cacacacacucacu

SEQ ID NO: 2256090 - RNA, 13 nt, Human
cacacacagaaaa

SEQ ID NO: 2256091 - RNA, 11 nt, Human
cacacacagaa

SEQ ID NO: 2256092 - RNA, 19 nt, Human
cacacacagaaaauauacu

SEQ ID NO: 2256093 - RNA, 16 nt, Human
cacacacagaaaauau

SEQ ID NO: 2256094 - RNA, 15 nt, Human
cacacacagaaaaua

SEQ ID NO: 2256095 - RNA, 14 nt, Human
cacacacagaaaau

SEQ ID NO: 2256096 - RNA, 14 nt, Human
cacacacagaggaa

SEQ ID NO: 2256097 - RNA, 12 nt, Human
cacacacagagg

SEQ ID NO: 2256098 - RNA, 23 nt, Human
cacacacagaaaauauacuguaa

SEQ ID NO: 2256099 - RNA, 21 nt, Human
cacacacagaaaauauacugu

SEQ ID NO: 2256100 - RNA, 20 nt, Human
cacacacagaaaauauacug

SEQ ID NO: 2256101 - RNA, 14 nt, Human
cacacacagccaca

SEQ ID NO: 2256102 - RNA, 13 nt, Human
cacacacagccac

SEQ ID NO: 2256103 - RNA, 12 nt, Human
cacacacagcca

SEQ ID NO: 2256104 - RNA, 11 nt, Human
cacacacagcc

SEQ ID NO: 2256105 - RNA, 19 nt, Human
cacacaccuguagucccag

SEQ ID NO: 2256106 - RNA, 14 nt, Human
cacacacgcacgca

SEQ ID NO: 2256107 - RNA, 15 nt, Human
cacacacgcacgcac

SEQ ID NO: 2256108 - RNA, 16 nt, Human
cacacacgcacgcaca

SEQ ID NO: 2256109 - RNA, 20 nt, Human
cacacaccuguagucccagc

SEQ ID NO: 2256110 - RNA, 15 nt, Human
cacacaccuguaguc

SEQ ID NO: 2256111 - RNA, 23 nt, Human
cacacacagaggaagagcaggca

SEQ ID NO: 2256112 - RNA, 11 nt, Human
cacacaccugu

SEQ ID NO: 2256113 - RNA, 13 nt, Human
cacacaccuguag

SEQ ID NO: 2256114 - RNA, 16 nt, Human
cacacacagccacaca

SEQ ID NO: 2256115 - RNA, 15 nt, Human
cacacacagccacac

SEQ ID NO: 2256116 - RNA, 12 nt, Human
cacacacucacu

SEQ ID NO: 2256117 - RNA, 19 nt, Human
cacacacgcacgcacacac

SEQ ID NO: 2256118 - RNA, 17 nt, Human
cacacacgcacgcacac

SEQ ID NO: 2256119 - RNA, 18 nt, Human
cacacacgcacgcacaca

SEQ ID NO: 2256120 - RNA, 23 nt, Human
cacacacgcacgcacacacacaa

SEQ ID NO: 2256121 - RNA, 17 nt, Human
cacacacgcgugcacac

SEQ ID NO: 2256122 - RNA, 12 nt, Human
caauuaaacgga

SEQ ID NO: 2256123 - RNA, 23 nt, Human
caauuaaaaaaaaagaucuguuu

SEQ ID NO: 2256124 - RNA, 13 nt, Human
caauuaaacggau

SEQ ID NO: 2256125 - RNA, 17 nt, Human
caauuacugguccaaaa

SEQ ID NO: 2256126 - RNA, 18 nt, Human
caauuacaggaaguacug

SEQ ID NO: 2256127 - RNA, 23 nt, Human
caauuaggaaguguaacagcuga

SEQ ID NO: 2256128 - RNA, 20 nt, Human
caauuaggaaguguaacagc

SEQ ID NO: 2256129 - RNA, 16 nt, Human
caauuaggaaguguaa

SEQ ID NO: 2256130 - RNA, 13 nt, Human
caauuccaccugc

SEQ ID NO: 2256131 - RNA, 15 nt, Human
caauuaggaagugua

SEQ ID NO: 2256132 - RNA, 21 nt, Human
caauuagcaauugacugucac

SEQ ID NO: 2256133 - RNA, 13 nt, Human
caauuccugggcc

SEQ ID NO: 2256134 - RNA, 16 nt, Human
caauuccugggcccca

SEQ ID NO: 2256135 - RNA, 20 nt, Human
caauuccguagccagcugcu

SEQ ID NO: 2256136 - RNA, 12 nt, Human
caauuccugggc

SEQ ID NO: 2256137 - RNA, 15 nt, Human
caauuccucugggaa

SEQ ID NO: 2256138 - RNA, 13 nt, Human
caauuccucuggg

SEQ ID NO: 2256139 - RNA, 14 nt, Human
caauuccucuggga

SEQ ID NO: 2256140 - RNA, 22 nt, Human
caauuaggaaguguaacagcug

SEQ ID NO: 2256141 - RNA, 11 nt, Human
caauuccccuc

SEQ ID NO: 2256142 - RNA, 12 nt, Human
caauuccccucu

SEQ ID NO: 2256143 - RNA, 13 nt, Human
caauuccccucug

SEQ ID NO: 2256144 - RNA, 15 nt, Human
caauucccugcuguc

SEQ ID NO: 2256145 - RNA, 21 nt, Human
caauuccguagccagcugcuc

SEQ ID NO: 2256146 - RNA, 14 nt, Human
caauuccccucugc

SEQ ID NO: 2256147 - RNA, 17 nt, Human
caauuccccucugcugc

SEQ ID NO: 2256148 - RNA, 22 nt, Human
cacaaaauaaccaauccuggac

SEQ ID NO: 2256149 - RNA, 21 nt, Human
caauuuuuuuaauuuuguauu

SEQ ID NO: 2256150 - RNA, 22 nt, Human
caauuuuuuuaauuuuguauuu

SEQ ID NO: 2256151 - RNA, 21 nt, Human
caauuuuuuaucaugcauguc

SEQ ID NO: 2256152 - RNA, 17 nt, Human
caauuuuuuuaauuuug

SEQ ID NO: 2256153 - RNA, 19 nt, Human
caauuuuugguugaauaaa

SEQ ID NO: 2256154 - RNA, 18 nt, Human
caauuuuugguugaauaa

SEQ ID NO: 2256155 - RNA, 13 nt, Human
caauuuuugccuu

SEQ ID NO: 2256156 - RNA, 14 nt, Human
caauuuuugccuuc

SEQ ID NO: 2256157 - RNA, 15 nt, Human
caauuuuugccuuca

SEQ ID NO: 2256158 - RNA, 16 nt, Human
caauuuuugccuucau

SEQ ID NO: 2256159 - RNA, 22 nt, Human
caauuuuucuuauuucauuucu

SEQ ID NO: 2256160 - RNA, 18 nt, Human
cacaaagcccuuccaugu

SEQ ID NO: 2256161 - RNA, 15 nt, Human
cacaaacagaggccg

SEQ ID NO: 2256162 - RNA, 14 nt, Human
cacaaacagaggcc

SEQ ID NO: 2256163 - RNA, 16 nt, Human
cacaaaauugggaaag

SEQ ID NO: 2256164 - RNA, 15 nt, Human
cacaaaaucugucca

SEQ ID NO: 2256165 - RNA, 13 nt, Human
cacaaacagaggc

SEQ ID NO: 2256166 - RNA, 20 nt, Human
caauguuuaugcaaggaagg

SEQ ID NO: 2256167 - RNA, 23 nt, Human
caauguuuaugcaaggaaggaaa

SEQ ID NO: 2256168 - RNA, 13 nt, Human
caauguuucuuuu

SEQ ID NO: 2256169 - RNA, 17 nt, Human
caauguuucuucuaggu

SEQ ID NO: 2256170 - RNA, 22 nt, Human
caauguuuuccuuugucaucau

SEQ ID NO: 2256171 - RNA, 13 nt, Human
caauguuuuccuu

SEQ ID NO: 2256172 - RNA, 20 nt, Human
caauguuuuccuuugucauc

SEQ ID NO: 2256173 - RNA, 18 nt, Human
caauguuucuuuuaucac

SEQ ID NO: 2256174 - RNA, 16 nt, Human
caauguuucuuuuauc

SEQ ID NO: 2256175 - RNA, 17 nt, Human
caauuacaggaaguacu

SEQ ID NO: 2256176 - RNA, 21 nt, Human
caaugugguugcaaggccgcu

SEQ ID NO: 2256177 - RNA, 23 nt, Human
caaugugcuacugauuguuucau

SEQ ID NO: 2256178 - RNA, 21 nt, Human
caauguggccuaaaaaugcaa

SEQ ID NO: 2256179 - RNA, 13 nt, Human
caauauccuuugc

SEQ ID NO: 2256180 - RNA, 15 nt, Human
caauauccuuugccu

SEQ ID NO: 2256181 - RNA, 20 nt, Human
caauauccuuugccucaagg

SEQ ID NO: 2256182 - RNA, 12 nt, Human
caauauccuuug

SEQ ID NO: 2256183 - RNA, 16 nt, Human
caauaguuugcauaga

SEQ ID NO: 2256184 - RNA, 21 nt, Human
caauaucuuuuuuuuaauaaa

SEQ ID NO: 2256185 - RNA, 13 nt, Human
caaugugccccca

SEQ ID NO: 2256186 - RNA, 16 nt, Human
caaugugcuacugauu

SEQ ID NO: 2256187 - RNA, 17 nt, Human
caaugugaccaggggug

SEQ ID NO: 2256188 - RNA, 23 nt, Human
caauguggcaaggaaaaacaggu

SEQ ID NO: 2256189 - RNA, 13 nt, Human
caaugugcucucg

SEQ ID NO: 2256190 - RNA, 19 nt, Human
caaugugaaucagacccua

SEQ ID NO: 2256191 - RNA, 13 nt, Human
caaugugaccagg

SEQ ID NO: 2256192 - RNA, 18 nt, Human
caaugugaaucagacccu

SEQ ID NO: 2256193 - RNA, 14 nt, Human
caaugugaaucaga

SEQ ID NO: 2256194 - RNA, 22 nt, Human
caaugugacuuaaugccacuaa

SEQ ID NO: 2256195 - RNA, 22 nt, Human
caaugugaaaagaaaaaugagc

SEQ ID NO: 2256196 - RNA, 14 nt, Human
caaugugaacuuua

SEQ ID NO: 2256197 - RNA, 21 nt, Human
caaugugaacuuuauuaaaua

SEQ ID NO: 2256198 - RNA, 19 nt, Human
caaugugaacuuuauuaaa

SEQ ID NO: 2256199 - RNA, 18 nt, Human
caaugugaacuuuauuaa

SEQ ID NO: 2256200 - RNA, 15 nt, Human
caaugugaacuuuau

SEQ ID NO: 2256201 - RNA, 18 nt, Human
cacagcugcagagacaga

SEQ ID NO: 2256202 - RNA, 19 nt, Human
cacagcugcagagacagag

SEQ ID NO: 2256203 - RNA, 19 nt, Human
cacagcugagagacuuuua

SEQ ID NO: 2256204 - RNA, 23 nt, Human
cacagcccugucagugcagcccg

SEQ ID NO: 2256205 - RNA, 18 nt, Human
cacagcugagagacuuuu

SEQ ID NO: 2256206 - RNA, 21 nt, Human
cacagcucuucuccaggcugu

SEQ ID NO: 2256207 - RNA, 18 nt, Human
cacagcccugucagugca

SEQ ID NO: 2256208 - RNA, 12 nt, Human
cacagcccuguc

SEQ ID NO: 2256209 - RNA, 14 nt, Human
cacagcccugucag

SEQ ID NO: 2256210 - RNA, 21 nt, Human
cacagcccugucagugcagcc

SEQ ID NO: 2256211 - RNA, 21 nt, Human
cacagccgauucaccugagca

SEQ ID NO: 2256212 - RNA, 20 nt, Human
cacagccgauucaccugagc

SEQ ID NO: 2256213 - RNA, 11 nt, Human
cacagcccucc

SEQ ID NO: 2256214 - RNA, 12 nt, Human
cacagcccuccc

SEQ ID NO: 2256215 - RNA, 14 nt, Human
cacagcccucccgc

SEQ ID NO: 2256216 - RNA, 11 nt, Human
cacagcccugu

SEQ ID NO: 2256217 - RNA, 10 nt, Human
cacagcccug

SEQ ID NO: 2256218 - RNA, 13 nt, Human
cacagcccuguca

SEQ ID NO: 2256219 - RNA, 15 nt, Human
cacagcccucccgcc

SEQ ID NO: 2256220 - RNA, 17 nt, Human
cacagcccucccgcccc

SEQ ID NO: 2256221 - RNA, 18 nt, Human
cacagcccucccgccccu

SEQ ID NO: 2256222 - RNA, 20 nt, Human
cacagcccucccgccccuuc

SEQ ID NO: 2256223 - RNA, 18 nt, Human
cacagccagacuggcaca

SEQ ID NO: 2256224 - RNA, 17 nt, Human
cacagccagacuggcac

SEQ ID NO: 2256225 - RNA, 22 nt, Human
cacagauuugagcucagcccug

SEQ ID NO: 2256226 - RNA, 18 nt, Human
cacagauuugagcucagc

SEQ ID NO: 2256227 - RNA, 17 nt, Human
cacagauuugagcucag

SEQ ID NO: 2256228 - RNA, 16 nt, Human
cacagauuugagcuca

SEQ ID NO: 2256229 - RNA, 19 nt, Human
cacagcaguugaaaagacu

SEQ ID NO: 2256230 - RNA, 22 nt, Human
cacagcagcuucaccagagcau

SEQ ID NO: 2256231 - RNA, 21 nt, Human
cacagcagcuucaccagagca

SEQ ID NO: 2256232 - RNA, 13 nt, Human
cacagccaccccu

SEQ ID NO: 2256233 - RNA, 23 nt, Human
cacagccacacacacagaaaaua

SEQ ID NO: 2256234 - RNA, 22 nt, Human
cacagccacacacacagaaaau

SEQ ID NO: 2256235 - RNA, 21 nt, Human
cacagccacacacacagaaaa

SEQ ID NO: 2256236 - RNA, 20 nt, Human
cacagccacacacacagaaa

SEQ ID NO: 2256237 - RNA, 19 nt, Human
cacagccacacacacagaa

SEQ ID NO: 2256238 - RNA, 18 nt, Human
cacagccacacacacaga

SEQ ID NO: 2256239 - RNA, 17 nt, Human
cacagccacacacacag

SEQ ID NO: 2256240 - RNA, 21 nt, Human
cacagcaguugaaaagacucc

SEQ ID NO: 2256241 - RNA, 13 nt, Human
cacagaggcugcc

SEQ ID NO: 2256242 - RNA, 16 nt, Human
cacagaggaagagcag

SEQ ID NO: 2256243 - RNA, 15 nt, Human
cacagaggaagagca

SEQ ID NO: 2256244 - RNA, 17 nt, Human
cacagaggaagagcagg

SEQ ID NO: 2256245 - RNA, 18 nt, Human
cacagaggcuucuucaga

SEQ ID NO: 2256246 - RNA, 21 nt, Human
cacagaguuguuacauuuuua

SEQ ID NO: 2256247 - RNA, 22 nt, Human
cacagaguuguuacauuuuuaa

SEQ ID NO: 2256248 - RNA, 14 nt, Human
cacagaucacagcu

SEQ ID NO: 2256249 - RNA, 19 nt, Human
cacagaucacagcuucagc

SEQ ID NO: 2256250 - RNA, 22 nt, Human
cacagaucacagcuucagccag

SEQ ID NO: 2256251 - RNA, 17 nt, Human
cacagaugaaacacaaa

SEQ ID NO: 2256252 - RNA, 18 nt, Human
cacagaguggucuuucug

SEQ ID NO: 2256253 - RNA, 17 nt, Human
cacagauggauuugccu

SEQ ID NO: 2256254 - RNA, 11 nt, Human
cacagaugccu

SEQ ID NO: 2256255 - RNA, 12 nt, Human
cacagauggauu

SEQ ID NO: 2256256 - RNA, 23 nt, Human
cacagaugggugcuuggaggaag

SEQ ID NO: 2256257 - RNA, 19 nt, Human
cacagagaaaguacuucuc

SEQ ID NO: 2256258 - RNA, 20 nt, Human
cacagagaaaguacuucucc

SEQ ID NO: 2256259 - RNA, 21 nt, Human
cacagagaaaguacuucucca

SEQ ID NO: 2256260 - RNA, 13 nt, Human
cacagaggaagag

SEQ ID NO: 2256261 - RNA, 18 nt, Human
cacagagcucuccagcuc

SEQ ID NO: 2256262 - RNA, 21 nt, Human
cacagagcucuccagcuccaa

SEQ ID NO: 2256263 - RNA, 14 nt, Human
cacagagcucucca

SEQ ID NO: 2256264 - RNA, 16 nt, Human
cacagagcucuccagc

SEQ ID NO: 2256265 - RNA, 17 nt, Human
cacagagcucuccagcu

SEQ ID NO: 2256266 - RNA, 12 nt, Human
cacagagaaagu

SEQ ID NO: 2256267 - RNA, 13 nt, Human
cacacugaagaag

SEQ ID NO: 2256268 - RNA, 17 nt, Human
cacacuccaucagcuua

SEQ ID NO: 2256269 - RNA, 15 nt, Human
cacacuccaucagcu

SEQ ID NO: 2256270 - RNA, 14 nt, Human
cacacuccaucagc

SEQ ID NO: 2256271 - RNA, 22 nt, Human
cacacuccaagauauggacaca

SEQ ID NO: 2256272 - RNA, 17 nt, Human
cacacuccccugcacug

SEQ ID NO: 2256273 - RNA, 16 nt, Human
cacacucgcccgccca

SEQ ID NO: 2256274 - RNA, 14 nt, Human
cacacuccagcugg

SEQ ID NO: 2256275 - RNA, 16 nt, Human
cacacuccaagauaug

SEQ ID NO: 2256276 - RNA, 15 nt, Human
cacacacgugagaau

SEQ ID NO: 2256277 - RNA, 15 nt, Human
cacacacucacugcg

SEQ ID NO: 2256278 - RNA, 22 nt, Human
cacaguucaguggcagggcuca

SEQ ID NO: 2256279 - RNA, 23 nt, Human
caaggagaugaagcaaacacauu

SEQ ID NO: 2256280 - RNA, 13 nt, Human
caaggagaugaag

SEQ ID NO: 2256281 - RNA, 13 nt, Human
caaggagaggagg

SEQ ID NO: 2256282 - RNA, 14 nt, Human
caaggagaggaggc

SEQ ID NO: 2256283 - RNA, 15 nt, Human
caaggagaggaggca

SEQ ID NO: 2256284 - RNA, 18 nt, Human
caaggagaggaggcaacu

SEQ ID NO: 2256285 - RNA, 16 nt, Human
caaggagauuuacaac

SEQ ID NO: 2256286 - RNA, 18 nt, Human
caaggauccugagccaga

SEQ ID NO: 2256287 - RNA, 19 nt, Human
caaggauccugagccagau

SEQ ID NO: 2256288 - RNA, 22 nt, Human
caaggcugcagugagccgagau

SEQ ID NO: 2256289 - RNA, 17 nt, Human
caaggcugcagugagcc

SEQ ID NO: 2256290 - RNA, 22 nt, Human
caaggauccugagccagauuuc

SEQ ID NO: 2256291 - RNA, 20 nt, Human
caaggauccugagccagauu

SEQ ID NO: 2256292 - RNA, 22 nt, Human
caagcuggucccacucagucca

SEQ ID NO: 2256293 - RNA, 23 nt, Human
caagcuggucccacucaguccau

SEQ ID NO: 2256294 - RNA, 18 nt, Human
caaggaaaaaauaacaau

SEQ ID NO: 2256295 - RNA, 19 nt, Human
caaggagaaacagagacag

SEQ ID NO: 2256296 - RNA, 20 nt, Human
caaggagacacaacaacucc

SEQ ID NO: 2256297 - RNA, 20 nt, Human
caaggagaaacagagacagg

SEQ ID NO: 2256298 - RNA, 18 nt, Human
caaggagaaacagagaca

SEQ ID NO: 2256299 - RNA, 16 nt, Human
caaggagaaacagaga

SEQ ID NO: 2256300 - RNA, 14 nt, Human
caaggagaaacaga

SEQ ID NO: 2256301 - RNA, 18 nt, Human
caagcugugagacagugg

SEQ ID NO: 2256302 - RNA, 14 nt, Human
caagcuggaagcac

SEQ ID NO: 2256303 - RNA, 18 nt, Human
caagcuggaagcacaugu

SEQ ID NO: 2256304 - RNA, 14 nt, Human
caagcugugagaca

SEQ ID NO: 2256305 - RNA, 20 nt, Human
caaggaaaaaauaacaauga

SEQ ID NO: 2256306 - RNA, 20 nt, Human
caagcgaggucaacagagaa

SEQ ID NO: 2256307 - RNA, 17 nt, Human
caagcgaggucaacaga

SEQ ID NO: 2256308 - RNA, 17 nt, Human
caagccuuggcucuacc

SEQ ID NO: 2256309 - RNA, 21 nt, Human
caagccuguaaucccagcuac

SEQ ID NO: 2256310 - RNA, 18 nt, Human
caagccuguaaucccagc

SEQ ID NO: 2256311 - RNA, 12 nt, Human
caagccugguca

SEQ ID NO: 2256312 - RNA, 18 nt, Human
caagccuggucagcccaa

SEQ ID NO: 2256313 - RNA, 17 nt, Human
caagccuggucagccca

SEQ ID NO: 2256314 - RNA, 16 nt, Human
caagccuggucagccc

SEQ ID NO: 2256315 - RNA, 15 nt, Human
caagccuggucagcc

SEQ ID NO: 2256316 - RNA, 15 nt, Human
caagaggcugaggca

SEQ ID NO: 2256317 - RNA, 22 nt, Human
caagaguuuauuuccaaauaaa

SEQ ID NO: 2256318 - RNA, 15 nt, Human
caagauaacugagaa

SEQ ID NO: 2256319 - RNA, 16 nt, Human
caagauaacugagaau

SEQ ID NO: 2256320 - RNA, 16 nt, Human
caagauaccuaaaaga

SEQ ID NO: 2256321 - RNA, 22 nt, Human
caagcugcacccucaggcaggu

SEQ ID NO: 2256322 - RNA, 14 nt, Human
caagcugcaucuag

SEQ ID NO: 2256323 - RNA, 12 nt, Human
caagcuggaagc

SEQ ID NO: 2256324 - RNA, 13 nt, Human
caagcuggaagca

SEQ ID NO: 2256325 - RNA, 21 nt, Human
caagcuggucccacucagucc

SEQ ID NO: 2256326 - RNA, 15 nt, Human
caagcgauucuucug

SEQ ID NO: 2256327 - RNA, 17 nt, Human
caagcgauucuucugcu

SEQ ID NO: 2256328 - RNA, 21 nt, Human
caagcugcacccucaggcagg

SEQ ID NO: 2256329 - RNA, 18 nt, Human
caagcgauucuucugcuu

SEQ ID NO: 2256330 - RNA, 19 nt, Human
caauagauauuuaccuuuu

SEQ ID NO: 2256331 - RNA, 23 nt, Human
caauagaaacucaccauguaaaa

SEQ ID NO: 2256332 - RNA, 23 nt, Human
caauagaaggauguacauuucca

SEQ ID NO: 2256333 - RNA, 18 nt, Human
caauacucauaaugugaa

SEQ ID NO: 2256334 - RNA, 22 nt, Human
caauacucauaaugugaagugu

SEQ ID NO: 2256335 - RNA, 17 nt, Human
caauacucauaauguga

SEQ ID NO: 2256336 - RNA, 23 nt, Human
caauacccuuugaauuggacaau

SEQ ID NO: 2256337 - RNA, 22 nt, Human
caauacccaaauccucuccagc

SEQ ID NO: 2256338 - RNA, 23 nt, Human
caauacccaaauccucuccagcu

SEQ ID NO: 2256339 - RNA, 18 nt, Human
caauaauaauaccucccu

SEQ ID NO: 2256340 - RNA, 20 nt, Human
caauacccaaauccucucca

SEQ ID NO: 2256341 - RNA, 19 nt, Human
caauaauaaauauuuuugc

SEQ ID NO: 2256342 - RNA, 13 nt, Human
caauaagccuugu

SEQ ID NO: 2256343 - RNA, 17 nt, Human
caauaaggucaaugcca

SEQ ID NO: 2256344 - RNA, 18 nt, Human
caauaaggucaaugccag

SEQ ID NO: 2256345 - RNA, 22 nt, Human
caauaacuacuguguuccuggc

SEQ ID NO: 2256346 - RNA, 19 nt, Human
caauaagcaucaaacucuu

SEQ ID NO: 2256347 - RNA, 12 nt, Human
caauaagccuug

SEQ ID NO: 2256348 - RNA, 18 nt, Human
caauaagcaucaaacucu

SEQ ID NO: 2256349 - RNA, 20 nt, Human
caauaagaauuuagggagaa

SEQ ID NO: 2256350 - RNA, 21 nt, Human
caauaacuacuguguuccugg

SEQ ID NO: 2256351 - RNA, 20 nt, Human
caauaacuacuguguuccug

SEQ ID NO: 2256352 - RNA, 19 nt, Human
caauaacuacuguguuccu

SEQ ID NO: 2256353 - RNA, 18 nt, Human
caauaacuacuguguucc

SEQ ID NO: 2256354 - RNA, 17 nt, Human
caauaacuacuguguuc

SEQ ID NO: 2256355 - RNA, 16 nt, Human
caauaacuacuguguu

SEQ ID NO: 2256356 - RNA, 15 nt, Human
caauaacuacugugu

SEQ ID NO: 2256357 - RNA, 14 nt, Human
caauaacuacugug

SEQ ID NO: 2256358 - RNA, 13 nt, Human
caauaacacuguc

SEQ ID NO: 2256359 - RNA, 15 nt, Human
caauaacacacagcu

SEQ ID NO: 2256360 - RNA, 19 nt, Human
caauagcagacaguguuuu

SEQ ID NO: 2256361 - RNA, 19 nt, Human
caauagcaacguagcuucu

SEQ ID NO: 2256362 - RNA, 15 nt, Human
caauaggaaaaacug

SEQ ID NO: 2256363 - RNA, 16 nt, Human
caauaggaaaaacuga

SEQ ID NO: 2256364 - RNA, 17 nt, Human
caauaggaaaaacugau

SEQ ID NO: 2256365 - RNA, 23 nt, Human
caauaguguguucugauuagaaa

SEQ ID NO: 2256366 - RNA, 18 nt, Human
caauauaaaacuguacuu

SEQ ID NO: 2256367 - RNA, 17 nt, Human
caauaguguguucugau

SEQ ID NO: 2256368 - RNA, 16 nt, Human
caauaguguguucuga

SEQ ID NO: 2256369 - RNA, 15 nt, Human
caauaguguguucug

SEQ ID NO: 2256370 - RNA, 14 nt, Human
caauaguguguucu

SEQ ID NO: 2256371 - RNA, 16 nt, Human
caauagucaagaaaaa

SEQ ID NO: 2256372 - RNA, 16 nt, Human
caauagugggcccucc

SEQ ID NO: 2256373 - RNA, 17 nt, Human
caauagucaaauugugu

SEQ ID NO: 2256374 - RNA, 19 nt, Human
caauagucaaauuguguga

SEQ ID NO: 2256375 - RNA, 18 nt, Human
caaggcugggggaagaag

SEQ ID NO: 2256376 - RNA, 16 nt, Human
caaggcugcuuagaau

SEQ ID NO: 2256377 - RNA, 17 nt, Human
caaggcugcgucuggag

SEQ ID NO: 2256378 - RNA, 18 nt, Human
caaggcugcgucuggagg

SEQ ID NO: 2256379 - RNA, 18 nt, Human
caaggcugcgguuuguug

SEQ ID NO: 2256380 - RNA, 14 nt, Human
caaggcugcgucug

SEQ ID NO: 2256381 - RNA, 15 nt, Human
caagggaaaagucuc

SEQ ID NO: 2256382 - RNA, 21 nt, Human
caagggaaaggggugcuuuua

SEQ ID NO: 2256383 - RNA, 18 nt, Human
caagggaauguaacugcu

SEQ ID NO: 2256384 - RNA, 16 nt, Human
caagggucuagggaga

SEQ ID NO: 2256385 - RNA, 21 nt, Human
caagggugaugggaaagcauu

SEQ ID NO: 2256386 - RNA, 16 nt, Human
caagggaaaagucucu

SEQ ID NO: 2256387 - RNA, 12 nt, Human
caagggaaaggg

SEQ ID NO: 2256388 - RNA, 14 nt, Human
caagggaaaggggu

SEQ ID NO: 2256389 - RNA, 16 nt, Human
caagggaaaggggugc

SEQ ID NO: 2256390 - RNA, 20 nt, Human
caagggaaaggggugcuuuu

SEQ ID NO: 2256391 - RNA, 19 nt, Human
caaggguagggugggccuu

SEQ ID NO: 2256392 - RNA, 15 nt, Human
caagggaaccugugu

SEQ ID NO: 2256393 - RNA, 16 nt, Human
caagggaaccuguguc

SEQ ID NO: 2256394 - RNA, 18 nt, Human
caauaaaucugacccagu

SEQ ID NO: 2256395 - RNA, 17 nt, Human
caauaaaucugacccag

SEQ ID NO: 2256396 - RNA, 12 nt, Human
caauaaaugaau

SEQ ID NO: 2256397 - RNA, 20 nt, Human
caauaaaucugacccagugc

SEQ ID NO: 2256398 - RNA, 23 nt, Human
caauaaaugguauagcaaauguu

SEQ ID NO: 2256399 - RNA, 18 nt, Human
caauaaaugguauagcaa

SEQ ID NO: 2256400 - RNA, 17 nt, Human
caauaaaugugcuuaug

SEQ ID NO: 2256401 - RNA, 16 nt, Human
caauaaaugucuguug

SEQ ID NO: 2256402 - RNA, 14 nt, Human
caauaaaugucugu

SEQ ID NO: 2256403 - RNA, 15 nt, Human
caauaaaugucuguu

SEQ ID NO: 2256404 - RNA, 21 nt, Human
caaggguggcaucccaguggc

SEQ ID NO: 2256405 - RNA, 16 nt, Human
caauaaaguauuuaau

SEQ ID NO: 2256406 - RNA, 17 nt, Human
caauaaaguauuuaauu

SEQ ID NO: 2256407 - RNA, 16 nt, Human
caaggguggcauccca

SEQ ID NO: 2256408 - RNA, 17 nt, Human
caagggucuagggagag

SEQ ID NO: 2256409 - RNA, 19 nt, Human
caaggguucagagacucag

SEQ ID NO: 2256410 - RNA, 23 nt, Human
caagggugaugggaaagcauugu

SEQ ID NO: 2256411 - RNA, 20 nt, Human
caauaaaguauuuaauuagu

SEQ ID NO: 2256412 - RNA, 22 nt, Human
caauaaaguauuuaauuagugc

SEQ ID NO: 2256413 - RNA, 18 nt, Human
caauaggaaaaacugauu

SEQ ID NO: 2256414 - RNA, 17 nt, Human
caacacugugcccuggu

SEQ ID NO: 2256415 - RNA, 19 nt, Human
caaauuuggggguuucuca

SEQ ID NO: 2256416 - RNA, 17 nt, Human
caaauuugucuugccuu

SEQ ID NO: 2256417 - RNA, 22 nt, Human
caaauuugucuugccuuauuaa

SEQ ID NO: 2256418 - RNA, 17 nt, Human
caaauuugauugauuug

SEQ ID NO: 2256419 - RNA, 19 nt, Human
caaauuugaaaauaauugu

SEQ ID NO: 2256420 - RNA, 14 nt, Human
caaauuugauugau

SEQ ID NO: 2256421 - RNA, 22 nt, Human
caaauuucuaaaucuccaaaau

SEQ ID NO: 2256422 - RNA, 15 nt, Human
caaauuucuaaaucu

SEQ ID NO: 2256423 - RNA, 18 nt, Human
caaauuacuuugugaaua

SEQ ID NO: 2256424 - RNA, 11 nt, Human
caaauuagaaa

SEQ ID NO: 2256425 - RNA, 21 nt, Human
caaauuacuuugugaauagaa

SEQ ID NO: 2256426 - RNA, 18 nt, Human
caaauuaauuggcagcag

SEQ ID NO: 2256427 - RNA, 19 nt, Human
caaauuaauuggcagcaga

SEQ ID NO: 2256428 - RNA, 20 nt, Human
caaauuaauuggcagcagau

SEQ ID NO: 2256429 - RNA, 20 nt, Human
caaauuagguuuuguacaau

SEQ ID NO: 2256430 - RNA, 19 nt, Human
caaauuagguuuuguacaa

SEQ ID NO: 2256431 - RNA, 18 nt, Human
caaauuagguuuuguaca

SEQ ID NO: 2256432 - RNA, 18 nt, Human
caaauuagaagacauuua

SEQ ID NO: 2256433 - RNA, 21 nt, Human
caaauuagguuuuguacaauu

SEQ ID NO: 2256434 - RNA, 22 nt, Human
caaauuagaaaauguuauuuaa

SEQ ID NO: 2256435 - RNA, 15 nt, Human
caaauuagaagacau

SEQ ID NO: 2256436 - RNA, 19 nt, Human
caaauuagaagacauuuau

SEQ ID NO: 2256437 - RNA, 19 nt, Human
caaauuagaaaauguuauu

SEQ ID NO: 2256438 - RNA, 18 nt, Human
caaauuagaaaauguuau

SEQ ID NO: 2256439 - RNA, 13 nt, Human
caaauuagaaaau

SEQ ID NO: 2256440 - RNA, 12 nt, Human
caaauuagaaaa

SEQ ID NO: 2256441 - RNA, 15 nt, Human
caacagaagaacugu

SEQ ID NO: 2256442 - RNA, 16 nt, Human
caacagaagcuucaga

SEQ ID NO: 2256443 - RNA, 12 nt, Human
caacagaagcag

SEQ ID NO: 2256444 - RNA, 22 nt, Human
caacacugugcccugguggaga

SEQ ID NO: 2256445 - RNA, 18 nt, Human
caacacugugcccuggug

SEQ ID NO: 2256446 - RNA, 19 nt, Human
caacacugugcccuggugg

SEQ ID NO: 2256447 - RNA, 23 nt, Human
caacacugugcccugguggagaa

SEQ ID NO: 2256448 - RNA, 17 nt, Human
caacagagaaggcagga

SEQ ID NO: 2256449 - RNA, 17 nt, Human
caacagaagcuucagaa

SEQ ID NO: 2256450 - RNA, 18 nt, Human
caacagagaaggcaggaa

SEQ ID NO: 2256451 - RNA, 12 nt, Human
caacagaagugg

SEQ ID NO: 2256452 - RNA, 23 nt, Human
caacagaagucaugaagcccaag

SEQ ID NO: 2256453 - RNA, 22 nt, Human
caacagaagucaugaagcccaa

SEQ ID NO: 2256454 - RNA, 20 nt, Human
caacagaagucaugaagccc

SEQ ID NO: 2256455 - RNA, 15 nt, Human
caacagaagcuucca

SEQ ID NO: 2256456 - RNA, 23 nt, Human
caacagagugagacccugucucu

SEQ ID NO: 2256457 - RNA, 19 nt, Human
caacagagugagacccugu

SEQ ID NO: 2256458 - RNA, 17 nt, Human
caacagauacuggaagu

SEQ ID NO: 2256459 - RNA, 14 nt, Human
caacagauacugga

SEQ ID NO: 2256460 - RNA, 17 nt, Human
caacagaucaauuugua

SEQ ID NO: 2256461 - RNA, 23 nt, Human
caacagaucuggaaccucagccu

SEQ ID NO: 2256462 - RNA, 17 nt, Human
caacagaucuggaaccu

SEQ ID NO: 2256463 - RNA, 14 nt, Human
caacagaucuggaa

SEQ ID NO: 2256464 - RNA, 13 nt, Human
caacagaucugga

SEQ ID NO: 2256465 - RNA, 14 nt, Human
caacagauuuguga

SEQ ID NO: 2256466 - RNA, 23 nt, Human
caacagaugcuuuucugucucug

SEQ ID NO: 2256467 - RNA, 15 nt, Human
caacagaugcuuuuc

SEQ ID NO: 2256468 - RNA, 21 nt, Human
caacagaugcuuuucugucuc

SEQ ID NO: 2256469 - RNA, 20 nt, Human
caacagauuugugaacucag

SEQ ID NO: 2256470 - RNA, 23 nt, Human
caacagauuugugaacucagcca

SEQ ID NO: 2256471 - RNA, 15 nt, Human
caacagauuugugaa

SEQ ID NO: 2256472 - RNA, 16 nt, Human
caacagauuugugaac

SEQ ID NO: 2256473 - RNA, 17 nt, Human
caacagauuugugaacu

SEQ ID NO: 2256474 - RNA, 19 nt, Human
caacagauuugugaacuca

SEQ ID NO: 2256475 - RNA, 16 nt, Human
caaccuggucacagga

SEQ ID NO: 2256476 - RNA, 16 nt, Human
caaccuucuguggcuc

SEQ ID NO: 2256477 - RNA, 20 nt, Human
caaccuggggggcaguggug

SEQ ID NO: 2256478 - RNA, 11 nt, Human
caaccuggaga

SEQ ID NO: 2256479 - RNA, 13 nt, Human
caaccugggucca

SEQ ID NO: 2256480 - RNA, 14 nt, Human
caaccuggguccaa

SEQ ID NO: 2256481 - RNA, 16 nt, Human
caaccuggguccaaau

SEQ ID NO: 2256482 - RNA, 17 nt, Human
caaccuggguccaaaua

SEQ ID NO: 2256483 - RNA, 18 nt, Human
caaccuggguccaaauaa

SEQ ID NO: 2256484 - RNA, 17 nt, Human
caaccuucuguggcuca

SEQ ID NO: 2256485 - RNA, 19 nt, Human
caaccuucuguggcucaca

SEQ ID NO: 2256486 - RNA, 20 nt, Human
caaccuucuguggcucacag

SEQ ID NO: 2256487 - RNA, 16 nt, Human
caaccuugagacagcu

SEQ ID NO: 2256488 - RNA, 19 nt, Human
caaccuggguccaaauaaa

SEQ ID NO: 2256489 - RNA, 20 nt, Human
caaccuggguccaaauaaaa

SEQ ID NO: 2256490 - RNA, 20 nt, Human
caacauacucccaucuguga

SEQ ID NO: 2256491 - RNA, 21 nt, Human
caaccugcucuccucuugcca

SEQ ID NO: 2256492 - RNA, 23 nt, Human
caaccugcucuccucuugccacu

SEQ ID NO: 2256493 - RNA, 18 nt, Human
caaccugcucuccucuug

SEQ ID NO: 2256494 - RNA, 22 nt, Human
caacaggagcugggauccuaag

SEQ ID NO: 2256495 - RNA, 14 nt, Human
caacaggaggacaa

SEQ ID NO: 2256496 - RNA, 15 nt, Human
caacaggaggacaau

SEQ ID NO: 2256497 - RNA, 16 nt, Human
caacaggaggacaauu

SEQ ID NO: 2256498 - RNA, 17 nt, Human
caacaggaggacaauuc

SEQ ID NO: 2256499 - RNA, 19 nt, Human
caacaggaggacaauucau

SEQ ID NO: 2256500 - RNA, 22 nt, Human
caacaggaggacaauucaugaa

SEQ ID NO: 2256501 - RNA, 23 nt, Human
caacaggaggacaauucaugaac

SEQ ID NO: 2256502 - RNA, 12 nt, Human
caacaggcuggg

SEQ ID NO: 2256503 - RNA, 17 nt, Human
caacauacucccaucug

SEQ ID NO: 2256504 - RNA, 19 nt, Human
caacauacucccaucugug

SEQ ID NO: 2256505 - RNA, 21 nt, Human
caacaggagcugggauccuaa

SEQ ID NO: 2256506 - RNA, 15 nt, Human
caacaggagcuggga

SEQ ID NO: 2256507 - RNA, 14 nt, Human
caacaggagcuggg

SEQ ID NO: 2256508 - RNA, 15 nt, Human
caacaggagaauuuu

SEQ ID NO: 2256509 - RNA, 19 nt, Human
caacaggaaucaagagcug

SEQ ID NO: 2256510 - RNA, 21 nt, Human
caacaggaaucaagagcugcc

SEQ ID NO: 2256511 - RNA, 23 nt, Human
caacaggaaucaagagcugcccu

SEQ ID NO: 2256512 - RNA, 23 nt, Human
caacagcuccccauuacccucag

SEQ ID NO: 2256513 - RNA, 22 nt, Human
caacagcucaagucuucccuga

SEQ ID NO: 2256514 - RNA, 15 nt, Human
caacagcucaagucu

SEQ ID NO: 2256515 - RNA, 23 nt, Human
caacagcgacauagcccaucccu

SEQ ID NO: 2256516 - RNA, 21 nt, Human
caacagcgacauagcccaucc

SEQ ID NO: 2256517 - RNA, 17 nt, Human
caacagcaaaucacgac

SEQ ID NO: 2256518 - RNA, 12 nt, Human
caacagcacugg

SEQ ID NO: 2256519 - RNA, 15 nt, Human
caacagcacuggcuc

SEQ ID NO: 2256520 - RNA, 22 nt, Human
caacagcacuggcucucuccag

SEQ ID NO: 2256521 - RNA, 15 nt, Human
caaagaaauuaugug

SEQ ID NO: 2256522 - RNA, 11 nt, Human
caaagaagaaa

SEQ ID NO: 2256523 - RNA, 19 nt, Human
caaagaaggaaaaggcagg

SEQ ID NO: 2256524 - RNA, 14 nt, Human
caaagaagacaugu

SEQ ID NO: 2256525 - RNA, 16 nt, Human
caaagaagacauguuu

SEQ ID NO: 2256526 - RNA, 14 nt, Human
caaagaagacaaca

SEQ ID NO: 2256527 - RNA, 13 nt, Human
caaagaagacaug

SEQ ID NO: 2256528 - RNA, 17 nt, Human
caaagaaggaauucuag

SEQ ID NO: 2256529 - RNA, 20 nt, Human
caaagaagacauguuuuaga

SEQ ID NO: 2256530 - RNA, 16 nt, Human
caaagagagaaaauaa

SEQ ID NO: 2256531 - RNA, 14 nt, Human
caaagagacuggag

SEQ ID NO: 2256532 - RNA, 15 nt, Human
caaagagaaaacuua

SEQ ID NO: 2256533 - RNA, 19 nt, Human
caaagagagaaaauaaaga

SEQ ID NO: 2256534 - RNA, 16 nt, Human
caaagagacuggagca

SEQ ID NO: 2256535 - RNA, 17 nt, Human
caaagagacuggagcau

SEQ ID NO: 2256536 - RNA, 18 nt, Human
caaagagacuggagcauc

SEQ ID NO: 2256537 - RNA, 13 nt, Human
caaagagccugga

SEQ ID NO: 2256538 - RNA, 15 nt, Human
caaagagccuggaga

SEQ ID NO: 2256539 - RNA, 16 nt, Human
caaagagccuggagaa

SEQ ID NO: 2256540 - RNA, 17 nt, Human
caaagagccuggagaag

SEQ ID NO: 2256541 - RNA, 18 nt, Human
caaagagccuggagaagc

SEQ ID NO: 2256542 - RNA, 13 nt, Human
caaagugcuggga

SEQ ID NO: 2256543 - RNA, 19 nt, Human
caaagugcugggauuacaa

SEQ ID NO: 2256544 - RNA, 15 nt, Human
caaauaaaaauauug

SEQ ID NO: 2256545 - RNA, 20 nt, Human
caaaguucccuacuuccugu

SEQ ID NO: 2256546 - RNA, 21 nt, Human
caaaguuacuagguaacuuca

SEQ ID NO: 2256547 - RNA, 16 nt, Human
caaaguuacuagguaa

SEQ ID NO: 2256548 - RNA, 16 nt, Human
caaaguuaacagauuu

SEQ ID NO: 2256549 - RNA, 16 nt, Human
caaauaaaaauauugu

SEQ ID NO: 2256550 - RNA, 18 nt, Human
caaauaaaaauauugugu

SEQ ID NO: 2256551 - RNA, 23 nt, Human
caaauaaaauaaaaauaaaaaca

SEQ ID NO: 2256552 - RNA, 10 nt, Human
caaauaaaau

SEQ ID NO: 2256553 - RNA, 11 nt, Human
caaauaaacac

SEQ ID NO: 2256554 - RNA, 12 nt, Human
caaauaaacacu

SEQ ID NO: 2256555 - RNA, 13 nt, Human
caaauaaacacug

SEQ ID NO: 2256556 - RNA, 14 nt, Human
caaauaaacacugu

SEQ ID NO: 2256557 - RNA, 15 nt, Human
caaauaaacacugug

SEQ ID NO: 2256558 - RNA, 23 nt, Human
caaagugcugggauuacaagcgu

SEQ ID NO: 2256559 - RNA, 18 nt, Human
caaagugcugggauuaca

SEQ ID NO: 2256560 - RNA, 12 nt, Human
caaaguguguau

SEQ ID NO: 2256561 - RNA, 13 nt, Human
caaaguguguauu

SEQ ID NO: 2256562 - RNA, 14 nt, Human
caaaguguguauua

SEQ ID NO: 2256563 - RNA, 17 nt, Human
caaaguguguauuaaaa

SEQ ID NO: 2256564 - RNA, 11 nt, Human
caaaguguuaa

SEQ ID NO: 2256565 - RNA, 15 nt, Human
caaaguuaacagauu

SEQ ID NO: 2256566 - RNA, 21 nt, Human
caaauguuaugcauaaaguca

SEQ ID NO: 2256567 - RNA, 22 nt, Human
caaauggcgucuggaaguccaa

SEQ ID NO: 2256568 - RNA, 18 nt, Human
caaauguucaucaaugaa

SEQ ID NO: 2256569 - RNA, 13 nt, Human
caaauguuaugca

SEQ ID NO: 2256570 - RNA, 21 nt, Human
caaauggcgucuggaagucca

SEQ ID NO: 2256571 - RNA, 19 nt, Human
caaauggcgucuggaaguc

SEQ ID NO: 2256572 - RNA, 14 nt, Human
caaauguucaucaa

SEQ ID NO: 2256573 - RNA, 14 nt, Human
caaauggaggaaua

SEQ ID NO: 2256574 - RNA, 18 nt, Human
caaauggcgucuggaagu

SEQ ID NO: 2256575 - RNA, 15 nt, Human
caaauggaagacaca

SEQ ID NO: 2256576 - RNA, 19 nt, Human
caaauggaagacacauuga

SEQ ID NO: 2256577 - RNA, 23 nt, Human
caaauggaaaugggcagagcaga

SEQ ID NO: 2256578 - RNA, 16 nt, Human
caaaucaauuacuggu

SEQ ID NO: 2256579 - RNA, 17 nt, Human
caaaucaauacacuagu

SEQ ID NO: 2256580 - RNA, 12 nt, Human
caaauaugcaaa

SEQ ID NO: 2256581 - RNA, 17 nt, Human
caaauaaagucccaggu

SEQ ID NO: 2256582 - RNA, 18 nt, Human
caaauaaacucuaaacau

SEQ ID NO: 2256583 - RNA, 20 nt, Human
caaauaaacacuguguaagc

SEQ ID NO: 2256584 - RNA, 17 nt, Human
caaauaaacucuaaaca

SEQ ID NO: 2256585 - RNA, 23 nt, Human
caaauauauucagccuggcuuca

SEQ ID NO: 2256586 - RNA, 14 nt, Human
caaaucaagcuuca

SEQ ID NO: 2256587 - RNA, 15 nt, Human
caaaucaagcuucag

SEQ ID NO: 2256588 - RNA, 14 nt, Human
caaaucaauacacu

SEQ ID NO: 2256589 - RNA, 15 nt, Human
caaaucaauacacua

SEQ ID NO: 2256590 - RNA, 13 nt, Human
caaaucaaagcag

SEQ ID NO: 2256591 - RNA, 17 nt, Human
caaauauuuuuuuguag

SEQ ID NO: 2256592 - RNA, 14 nt, Human
caaaucaaagcaga

SEQ ID NO: 2256593 - RNA, 15 nt, Human
caaaucaaagcagau

SEQ ID NO: 2256594 - RNA, 13 nt, Human
caaauauuuggag

SEQ ID NO: 2256595 - RNA, 15 nt, Human
caaauauuuuuuugu

SEQ ID NO: 2256596 - RNA, 14 nt, Human
caaauaugcaaagc

SEQ ID NO: 2256597 - RNA, 20 nt, Human
caaauauuuauuuucuuucu

SEQ ID NO: 2256598 - RNA, 13 nt, Human
caaauaugcaaag

SEQ ID NO: 2256599 - RNA, 12 nt, Human
caagagcugagg

SEQ ID NO: 2256600 - RNA, 18 nt, Human
caagagcgaaacuccguc

SEQ ID NO: 2256601 - RNA, 13 nt, Human
caagagcugcccu

SEQ ID NO: 2256602 - RNA, 14 nt, Human
caagagcugcccuc

SEQ ID NO: 2256603 - RNA, 23 nt, Human
caagagccuugguguccaccugg

SEQ ID NO: 2256604 - RNA, 19 nt, Human
caagagcccagcagggccu

SEQ ID NO: 2256605 - RNA, 13 nt, Human
caagagcccagca

SEQ ID NO: 2256606 - RNA, 21 nt, Human
caagagccauguagaagcugc

SEQ ID NO: 2256607 - RNA, 22 nt, Human
caagagccuugguguccaccug

SEQ ID NO: 2256608 - RNA, 17 nt, Human
caagagcuuaacagugu

SEQ ID NO: 2256609 - RNA, 20 nt, Human
caagagcugcccuccuuguc

SEQ ID NO: 2256610 - RNA, 16 nt, Human
caagagcugcccuccu

SEQ ID NO: 2256611 - RNA, 18 nt, Human
caagagcugcccuccuug

SEQ ID NO: 2256612 - RNA, 17 nt, Human
caagagcagccuguggc

SEQ ID NO: 2256613 - RNA, 16 nt, Human
caagagcagccugugg

SEQ ID NO: 2256614 - RNA, 15 nt, Human
caagagcagccugug

SEQ ID NO: 2256615 - RNA, 14 nt, Human
caagagcagccugu

SEQ ID NO: 2256616 - RNA, 16 nt, Human
caagagcagaggcagc

SEQ ID NO: 2256617 - RNA, 15 nt, Human
caagagcagaggcag

SEQ ID NO: 2256618 - RNA, 15 nt, Human
caagagauuuaauua

SEQ ID NO: 2256619 - RNA, 13 nt, Human
caagagcacacuu

SEQ ID NO: 2256620 - RNA, 14 nt, Human
caagagcacacuug

SEQ ID NO: 2256621 - RNA, 20 nt, Human
caagagcagccuguggcauc

SEQ ID NO: 2256622 - RNA, 18 nt, Human
caagagcagccuguggca

SEQ ID NO: 2256623 - RNA, 21 nt, Human
caagagcagccuguggcaucu

SEQ ID NO: 2256624 - RNA, 16 nt, Human
caagagcacacuuggc

SEQ ID NO: 2256625 - RNA, 20 nt, Human
caagagccauguagaagcug

SEQ ID NO: 2256626 - RNA, 13 nt, Human
caagagagaaaga

SEQ ID NO: 2256627 - RNA, 12 nt, Human
caagagacucug

SEQ ID NO: 2256628 - RNA, 22 nt, Human
caagagaauugcuugaacccag

SEQ ID NO: 2256629 - RNA, 13 nt, Human
caagagacaugcu

SEQ ID NO: 2256630 - RNA, 23 nt, Human
caagagaugaagagugagagggc

SEQ ID NO: 2256631 - RNA, 16 nt, Human
caagagaugggaauga

SEQ ID NO: 2256632 - RNA, 17 nt, Human
caagagagaaagaagua

SEQ ID NO: 2256633 - RNA, 14 nt, Human
caagagagaaagaa

SEQ ID NO: 2256634 - RNA, 15 nt, Human
caagagagauguuuu

SEQ ID NO: 2256635 - RNA, 13 nt, Human
caagagagauguu

SEQ ID NO: 2256636 - RNA, 21 nt, Human
caagaccuucuccuucaccuu

SEQ ID NO: 2256637 - RNA, 23 nt, Human
caagaccuucuccuucaccuuug

SEQ ID NO: 2256638 - RNA, 13 nt, Human
caagacgcugugc

SEQ ID NO: 2256639 - RNA, 15 nt, Human
caagacgcugugcug

SEQ ID NO: 2256640 - RNA, 12 nt, Human
caacguggggca

SEQ ID NO: 2256641 - RNA, 15 nt, Human
caacguggggcagca

SEQ ID NO: 2256642 - RNA, 17 nt, Human
caacguggggcagcaca

SEQ ID NO: 2256643 - RNA, 17 nt, Human
caacguggcccagagaa

SEQ ID NO: 2256644 - RNA, 19 nt, Human
caacguggcccagagaagc

SEQ ID NO: 2256645 - RNA, 20 nt, Human
caacguggcccagagaagcc

SEQ ID NO: 2256646 - RNA, 21 nt, Human
caacguggcccagagaagcca

SEQ ID NO: 2256647 - RNA, 13 nt, Human
caacguggcccag

SEQ ID NO: 2256648 - RNA, 14 nt, Human
caacguggcccaga

SEQ ID NO: 2256649 - RNA, 18 nt, Human
caacgugcauugugcuuc

SEQ ID NO: 2256650 - RNA, 13 nt, Human
caacgacaaagcc

SEQ ID NO: 2256651 - RNA, 18 nt, Human
caacguggggcagcacag

SEQ ID NO: 2256652 - RNA, 18 nt, Human
caacuuggcuuccuuucu

SEQ ID NO: 2256653 - RNA, 12 nt, Human
caacuugggaac

SEQ ID NO: 2256654 - RNA, 19 nt, Human
caacuuggcuuccuuucuu

SEQ ID NO: 2256655 - RNA, 12 nt, Human
caacuuggcuuu

SEQ ID NO: 2256656 - RNA, 13 nt, Human
caacuuggcuuuc

SEQ ID NO: 2256657 - RNA, 17 nt, Human
caacuuggcuuucccgg

SEQ ID NO: 2256658 - RNA, 16 nt, Human
caacuuguaaaugugg

SEQ ID NO: 2256659 - RNA, 13 nt, Human
caacuuguaaaua

SEQ ID NO: 2256660 - RNA, 16 nt, Human
caacuuguaaauacac

SEQ ID NO: 2256661 - RNA, 22 nt, Human
caacuuguaaauacaccaccuc

SEQ ID NO: 2256662 - RNA, 22 nt, Human
caacuugucuuuuucuggacug

SEQ ID NO: 2256663 - RNA, 19 nt, Human
caacuugucuuuuucugga

SEQ ID NO: 2256664 - RNA, 13 nt, Human
caagaagaccaga

SEQ ID NO: 2256665 - RNA, 21 nt, Human
caagaagaccagacuguggag

SEQ ID NO: 2256666 - RNA, 18 nt, Human
caagaagaucacgcuccc

SEQ ID NO: 2256667 - RNA, 21 nt, Human
caagaagaucacgcuccccgc

SEQ ID NO: 2256668 - RNA, 13 nt, Human
caagaagcaggcu

SEQ ID NO: 2256669 - RNA, 14 nt, Human
caagaagcaggcua

SEQ ID NO: 2256670 - RNA, 19 nt, Human
caagaagaucacgcucccc

SEQ ID NO: 2256671 - RNA, 20 nt, Human
caagaagaucacgcuccccg

SEQ ID NO: 2256672 - RNA, 23 nt, Human
caagaagaucacgcuccccgccu

SEQ ID NO: 2256673 - RNA, 14 nt, Human
caagaagcccagga

SEQ ID NO: 2256674 - RNA, 20 nt, Human
caagaagcaggcuacacuga

SEQ ID NO: 2256675 - RNA, 13 nt, Human
caagaagcccagg

SEQ ID NO: 2256676 - RNA, 17 nt, Human
caacuugucuuuuucug

SEQ ID NO: 2256677 - RNA, 23 nt, Human
caacuuguauuaaagacagaggc

SEQ ID NO: 2256678 - RNA, 15 nt, Human
caagaaaugaaagca

SEQ ID NO: 2256679 - RNA, 19 nt, Human
caagaaaugaaagcaggga

SEQ ID NO: 2256680 - RNA, 17 nt, Human
caagaaaugaaagcagg

SEQ ID NO: 2256681 - RNA, 13 nt, Human
caacuaacaagaa

SEQ ID NO: 2256682 - RNA, 15 nt, Human
caagauauggacaca

SEQ ID NO: 2256683 - RNA, 20 nt, Human
caaaccucuguucaguguaa

SEQ ID NO: 2256684 - RNA, 15 nt, Human
caaacagaggccgcc

SEQ ID NO: 2256685 - RNA, 13 nt, Human
caaacagaggccg

SEQ ID NO: 2256686 - RNA, 15 nt, Human
caaacaccuggacuu

SEQ ID NO: 2256687 - RNA, 12 nt, Human
caaacaccuucc

SEQ ID NO: 2256688 - RNA, 15 nt, Human
caaacaccucccagg

SEQ ID NO: 2256689 - RNA, 14 nt, Human
caaacaccucccag

SEQ ID NO: 2256690 - RNA, 20 nt, Human
caaacacugcaggcaucaca

SEQ ID NO: 2256691 - RNA, 14 nt, Human
caaacaccuuccag

SEQ ID NO: 2256692 - RNA, 21 nt, Human
caaacaccuuccagcuccugu

SEQ ID NO: 2256693 - RNA, 16 nt, Human
caaacaaagccagaag

SEQ ID NO: 2256694 - RNA, 14 nt, Human
caaacaaagccaga

SEQ ID NO: 2256695 - RNA, 13 nt, Human
caaacaaagccag

SEQ ID NO: 2256696 - RNA, 15 nt, Human
caaacaaaauuucua

SEQ ID NO: 2256697 - RNA, 18 nt, Human
caaacaaaauuucuauua

SEQ ID NO: 2256698 - RNA, 14 nt, Human
caaacaaaauuucu

SEQ ID NO: 2256699 - RNA, 20 nt, Human
caaacaaaaagguucucagg

SEQ ID NO: 2256700 - RNA, 21 nt, Human
caaacaaaaagguucucaggu

SEQ ID NO: 2256701 - RNA, 14 nt, Human
caaacaaauaugca

SEQ ID NO: 2256702 - RNA, 15 nt, Human
caaacaaauaugcaa

SEQ ID NO: 2256703 - RNA, 20 nt, Human
caaacaaagccagaagcuga

SEQ ID NO: 2256704 - RNA, 17 nt, Human
caaacaaauaugcaaaa

SEQ ID NO: 2256705 - RNA, 24 nt, Human
caaacaauaguaauucucaggcca

SEQ ID NO: 2256706 - RNA, 14 nt, Human
caaaauuuuauucc

SEQ ID NO: 2256707 - RNA, 13 nt, Human
caaaauuuuauuc

SEQ ID NO: 2256708 - RNA, 21 nt, Human
caaaauuuuauagcucaguuu

SEQ ID NO: 2256709 - RNA, 13 nt, Human
caaaauuuguuug

SEQ ID NO: 2256710 - RNA, 18 nt, Human
caaaauuuuauuccuaua

SEQ ID NO: 2256711 - RNA, 23 nt, Human
caaaauuuuauagcucaguuuau

SEQ ID NO: 2256712 - RNA, 16 nt, Human
caaacaaaaagguucu

SEQ ID NO: 2256713 - RNA, 19 nt, Human
caaaauuuccaguaccuuu

SEQ ID NO: 2256714 - RNA, 18 nt, Human
caaaauuuccaguaccuu

SEQ ID NO: 2256715 - RNA, 17 nt, Human
caaaauuuccaguaccu

SEQ ID NO: 2256716 - RNA, 15 nt, Human
caaaauuuccaguac

SEQ ID NO: 2256717 - RNA, 14 nt, Human
caaaauuuccagua

SEQ ID NO: 2256718 - RNA, 19 nt, Human
caaaaugaggaauguauau

SEQ ID NO: 2256719 - RNA, 20 nt, Human
caaaaugaggaauguauaug

SEQ ID NO: 2256720 - RNA, 14 nt, Human
caaaauuugaaauu

SEQ ID NO: 2256721 - RNA, 11 nt, Human
caaaauuuguu

SEQ ID NO: 2256722 - RNA, 19 nt, Human
caaaauuugaugccaggac

SEQ ID NO: 2256723 - RNA, 12 nt, Human
caaaauuugaaa

SEQ ID NO: 2256724 - RNA, 20 nt, Human
caaaauuuccaguaccuuug

SEQ ID NO: 2256725 - RNA, 14 nt, Human
caaaauuucuauua

SEQ ID NO: 2256726 - RNA, 21 nt, Human
caaaaucuguccaaaggaggc

SEQ ID NO: 2256727 - RNA, 13 nt, Human
caaaaucugucca

SEQ ID NO: 2256728 - RNA, 21 nt, Human
caaaaugagcccuguccugcc

SEQ ID NO: 2256729 - RNA, 22 nt, Human
caaaaugagagggcaguguuuc

SEQ ID NO: 2256730 - RNA, 17 nt, Human
caaaaugaggaauguau

SEQ ID NO: 2256731 - RNA, 18 nt, Human
caaaaugaggaauguaua

SEQ ID NO: 2256732 - RNA, 11 nt, Human
caaaaugaaac

SEQ ID NO: 2256733 - RNA, 22 nt, Human
caaaaugaaacgcaaccaccac

SEQ ID NO: 2256734 - RNA, 14 nt, Human
caaacucucugaac

SEQ ID NO: 2256735 - RNA, 16 nt, Human
caaacucugccagcca

SEQ ID NO: 2256736 - RNA, 17 nt, Human
caaacucuugaccucag

SEQ ID NO: 2256737 - RNA, 19 nt, Human
caaacucuugaccucaggu

SEQ ID NO: 2256738 - RNA, 20 nt, Human
caaacucuugaccucaggug

SEQ ID NO: 2256739 - RNA, 16 nt, Human
caaaccuugaugugcc

SEQ ID NO: 2256740 - RNA, 21 nt, Human
caaaccuguuuaaauauuuca

SEQ ID NO: 2256741 - RNA, 22 nt, Human
caaaccuguuuaaauauuucaa

SEQ ID NO: 2256742 - RNA, 20 nt, Human
caaaccuuuauuuuagaauu

SEQ ID NO: 2256743 - RNA, 18 nt, Human
caaaccuuuauuuuagaa

SEQ ID NO: 2256744 - RNA, 12 nt, Human
caaaccugccug

SEQ ID NO: 2256745 - RNA, 23 nt, Human
caaaccucuguucaguguaaaua

SEQ ID NO: 2256746 - RNA, 19 nt, Human
caaaccugcaagggcuccc

SEQ ID NO: 2256747 - RNA, 20 nt, Human
caaaccugaccccugcucag

SEQ ID NO: 2256748 - RNA, 19 nt, Human
caaaccugaccccugcuca

SEQ ID NO: 2256749 - RNA, 16 nt, Human
caaaccugccuggguu

SEQ ID NO: 2256750 - RNA, 19 nt, Human
caaaccuguuuaaauauuu

SEQ ID NO: 2256751 - RNA, 21 nt, Human
caaaccugcaagggcucccca

SEQ ID NO: 2256752 - RNA, 13 nt, Human
caaaccugccugg

SEQ ID NO: 2256753 - RNA, 14 nt, Human
caaaccugccuggg

SEQ ID NO: 2256754 - RNA, 15 nt, Human
caaaccugccugggu

SEQ ID NO: 2256755 - RNA, 22 nt, Human
caaacugaaugaaacccccaca

SEQ ID NO: 2256756 - RNA, 17 nt, Human
caaacugacucuuaaga

SEQ ID NO: 2256757 - RNA, 21 nt, Human
caaacugacucuuaagaagac

SEQ ID NO: 2256758 - RNA, 15 nt, Human
caaacugaagccaga

SEQ ID NO: 2256759 - RNA, 21 nt, Human
caaacugaaugaaacccccac

SEQ ID NO: 2256760 - RNA, 14 nt, Human
caaacugaagccag

SEQ ID NO: 2256761 - RNA, 23 nt, Human
caaacugaagcagccucucccca

SEQ ID NO: 2256762 - RNA, 16 nt, Human
caaacugacucuuaag

SEQ ID NO: 2256763 - RNA, 21 nt, Human
caaacucuugaccucagguga

SEQ ID NO: 2256764 - RNA, 17 nt, Human
caaacugaagcagccuc

SEQ ID NO: 2256765 - RNA, 12 nt, Human
caaacucugcug

SEQ ID NO: 2256766 - RNA, 13 nt, Human
caaacucugcugu

SEQ ID NO: 2256767 - RNA, 18 nt, Human
caaacucugcugucuaac

SEQ ID NO: 2256768 - RNA, 21 nt, Human
caaaacgguuuuacugcagcu

SEQ ID NO: 2256769 - RNA, 15 nt, Human
caaaacgguuuuacu

SEQ ID NO: 2256770 - RNA, 23 nt, Human
caaaacgcauggaguguguauug

SEQ ID NO: 2256771 - RNA, 19 nt, Human
caaaacgcauggagugugu

SEQ ID NO: 2256772 - RNA, 18 nt, Human
auuuuauuuuauuaugca

SEQ ID NO: 2256773 - RNA, 13 nt, Human
caaaacggggcag

SEQ ID NO: 2256774 - RNA, 13 nt, Human
caaaacgucuuau

SEQ ID NO: 2256775 - RNA, 14 nt, Human
caaaacgucuuauu

SEQ ID NO: 2256776 - RNA, 15 nt, Human
caaaacgucuuauug

SEQ ID NO: 2256777 - RNA, 21 nt, Human
caaaacucauuuccuauguaa

SEQ ID NO: 2256778 - RNA, 16 nt, Human
caaaacuccugucuuu

SEQ ID NO: 2256779 - RNA, 20 nt, Human
caaaacucaaaugcuuggcu

SEQ ID NO: 2256780 - RNA, 21 nt, Human
caaaacuccugccccuguucu

SEQ ID NO: 2256781 - RNA, 15 nt, Human
caaaacucuccucug

SEQ ID NO: 2256782 - RNA, 16 nt, Human
caaaacucuccucugc

SEQ ID NO: 2256783 - RNA, 14 nt, Human
caaaaguuucucuu

SEQ ID NO: 2256784 - RNA, 18 nt, Human
caaaaguuucauccuuuu

SEQ ID NO: 2256785 - RNA, 15 nt, Human
caaaaguucugacuu

SEQ ID NO: 2256786 - RNA, 17 nt, Human
caaaaguucugacuuga

SEQ ID NO: 2256787 - RNA, 18 nt, Human
caaaaguucugacuugac

SEQ ID NO: 2256788 - RNA, 23 nt, Human
caaaacucuccucugcugcuggc

SEQ ID NO: 2256789 - RNA, 17 nt, Human
caaaaguuagcugagcg

SEQ ID NO: 2256790 - RNA, 19 nt, Human
caaaacucuccucugcugc

SEQ ID NO: 2256791 - RNA, 11 nt, Human
caaaacucuac

SEQ ID NO: 2256792 - RNA, 19 nt, Human
caaaacucuacuuaaucca

SEQ ID NO: 2256793 - RNA, 14 nt, Human
caaaacugcacugu

SEQ ID NO: 2256794 - RNA, 18 nt, Human
caaaacugcacugucaag

SEQ ID NO: 2256795 - RNA, 17 nt, Human
caaaacugcacugucaa

SEQ ID NO: 2256796 - RNA, 15 nt, Human
caaaauaaaaaccaa

SEQ ID NO: 2256797 - RNA, 11 nt, Human
caaaauaaaaa

SEQ ID NO: 2256798 - RNA, 15 nt, Human
caaaaguuuuccuga

SEQ ID NO: 2256799 - RNA, 17 nt, Human
caaaaguuuuccugaga

SEQ ID NO: 2256800 - RNA, 16 nt, Human
caaaauaaaacuuuuu

SEQ ID NO: 2256801 - RNA, 14 nt, Human
caaaauaaauguug

SEQ ID NO: 2256802 - RNA, 15 nt, Human
caaaauaagaaaaga

SEQ ID NO: 2256803 - RNA, 14 nt, Human
caaaauaagaaaag

SEQ ID NO: 2256804 - RNA, 20 nt, Human
caaaauaaaacuuuuuaaaa

SEQ ID NO: 2256805 - RNA, 18 nt, Human
caaaauaagaaaagaugu

SEQ ID NO: 2256806 - RNA, 16 nt, Human
caaaauaagaaaagau

SEQ ID NO: 2256807 - RNA, 18 nt, Human
caaaauaauuuuaagaaa

SEQ ID NO: 2256808 - RNA, 22 nt, Human
caaaauaauuuuaagaaaucaa

SEQ ID NO: 2256809 - RNA, 22 nt, Human
caaaauaagaaaagauguagau

SEQ ID NO: 2256810 - RNA, 19 nt, Human
caaaauauguugaugaaaa

SEQ ID NO: 2256811 - RNA, 15 nt, Human
caaaauagcauuugu

SEQ ID NO: 2256812 - RNA, 16 nt, Human
caaaauagcauuuguu

SEQ ID NO: 2256813 - RNA, 13 nt, Human
caaaauagaagcu

SEQ ID NO: 2256814 - RNA, 13 nt, Human
caaaauagagaau

SEQ ID NO: 2256815 - RNA, 14 nt, Human
caaaauauguucuu

SEQ ID NO: 2256816 - RNA, 23 nt, Human
caaaauauuaugcaaacuacugu

SEQ ID NO: 2256817 - RNA, 16 nt, Human
caaaauauuuguacau

SEQ ID NO: 2256818 - RNA, 17 nt, Human
caaaauauuuuuauaga

SEQ ID NO: 2256819 - RNA, 17 nt, Human
caaaauauuuguacaua

SEQ ID NO: 2256820 - RNA, 12 nt, Human
caaaauauuuuc

SEQ ID NO: 2256821 - RNA, 16 nt, Human
caaaaucauuuuaaug

SEQ ID NO: 2256822 - RNA, 19 nt, Human
caaaaucauuuuauauguc

SEQ ID NO: 2256823 - RNA, 23 nt, Human
caaaaucauggaaugguuauaaa

SEQ ID NO: 2256824 - RNA, 16 nt, Human
caaaauccuugcuuau

SEQ ID NO: 2256825 - RNA, 16 nt, Human
caaaauccccuucuca

SEQ ID NO: 2256826 - RNA, 23 nt, Human
caaaaucauuuuauaugucaaag

SEQ ID NO: 2256827 - RNA, 22 nt, Human
caaaaucauuuuauaugucaaa

SEQ ID NO: 2256828 - RNA, 21 nt, Human
caaaaucgaugcagugcuucc

SEQ ID NO: 2256829 - RNA, 20 nt, Human
caaaauccuugcuuaugaca

SEQ ID NO: 2256830 - RNA, 12 nt, Human
caaaauccccuu

SEQ ID NO: 2256831 - RNA, 18 nt, Human
caaaaucgauuggcuuua

SEQ ID NO: 2256832 - RNA, 17 nt, Human
caaacugaggaauuuca

SEQ ID NO: 2256833 - RNA, 13 nt, Human
caacaggcugggc

SEQ ID NO: 2256834 - RNA, 20 nt, Human
uguuuaacuuaaucaauuaa

SEQ ID NO: 2256835 - RNA, 21 nt, Human
uguuuaaguguuguaaauauu

SEQ ID NO: 2256836 - RNA, 14 nt, Human
uguuuaagaugggc

SEQ ID NO: 2256837 - RNA, 20 nt, Human
uguuuaauauugagaaagaa

SEQ ID NO: 2256838 - RNA, 23 nt, Human
uguuuaauacucauccuuguaua

SEQ ID NO: 2256839 - RNA, 16 nt, Human
uguuuaauauugagaa

SEQ ID NO: 2256840 - RNA, 12 nt, Human
uguuuacagugu

SEQ ID NO: 2256841 - RNA, 21 nt, Human
uguuuacaucaguuuuaacga

SEQ ID NO: 2256842 - RNA, 12 nt, Human
uguuuacauauc

SEQ ID NO: 2256843 - RNA, 14 nt, Human
uguuuacaucaguu

SEQ ID NO: 2256844 - RNA, 12 nt, Human
uguuuaaauaaa

SEQ ID NO: 2256845 - RNA, 12 nt, Human
uguuuaaagaga

SEQ ID NO: 2256846 - RNA, 17 nt, Human
uguuuaaagagagguua

SEQ ID NO: 2256847 - RNA, 21 nt, Human
uguuuaaagagagguuauaga

SEQ ID NO: 2256848 - RNA, 12 nt, Human
uguuuaagagac

SEQ ID NO: 2256849 - RNA, 14 nt, Human
uguuuaaauaaagu

SEQ ID NO: 2256850 - RNA, 15 nt, Human
uguuuaaauaaagua

SEQ ID NO: 2256851 - RNA, 17 nt, Human
uguuuaaauaaaguauc

SEQ ID NO: 2256852 - RNA, 20 nt, Human
uguuuaaauaaaguaucaug

SEQ ID NO: 2256853 - RNA, 22 nt, Human
uguuuaaauaaaguaucaugca

SEQ ID NO: 2256854 - RNA, 11 nt, Human
uguuuaaauau

SEQ ID NO: 2256855 - RNA, 19 nt, Human
uguuuaacuuaaucaauua

SEQ ID NO: 2256856 - RNA, 15 nt, Human
uguuggcuaaugaag

SEQ ID NO: 2256857 - RNA, 23 nt, Human
uguuggcguggggccuuugucag

SEQ ID NO: 2256858 - RNA, 17 nt, Human
uguuggcugggggccuc

SEQ ID NO: 2256859 - RNA, 15 nt, Human
uguuggccucugcaa

SEQ ID NO: 2256860 - RNA, 16 nt, Human
uguuggccuccggccu

SEQ ID NO: 2256861 - RNA, 17 nt, Human
uguuggccuccggccuc

SEQ ID NO: 2256862 - RNA, 20 nt, Human
uguuggcgagaggaggggcc

SEQ ID NO: 2256863 - RNA, 20 nt, Human
uguuggccuccggccucccc

SEQ ID NO: 2256864 - RNA, 15 nt, Human
uguuggcgagaggag

SEQ ID NO: 2256865 - RNA, 18 nt, Human
uguuggcaggcuggccag

SEQ ID NO: 2256866 - RNA, 21 nt, Human
uguuggcaggcuggccagucc

SEQ ID NO: 2256867 - RNA, 21 nt, Human
uguuggcagugagugagccug

SEQ ID NO: 2256868 - RNA, 22 nt, Human
uguuggcugggaacucaccugg

SEQ ID NO: 2256869 - RNA, 19 nt, Human
uguugggaaacuuggcucg

SEQ ID NO: 2256870 - RNA, 14 nt, Human
uguugggacugcua

SEQ ID NO: 2256871 - RNA, 19 nt, Human
uguugggacugcuaaauaa

SEQ ID NO: 2256872 - RNA, 19 nt, Human
uguuggcugggggccucag

SEQ ID NO: 2256873 - RNA, 18 nt, Human
uguuuaaaaucauuucug

SEQ ID NO: 2256874 - RNA, 17 nt, Human
uguuuaaaaucauuucu

SEQ ID NO: 2256875 - RNA, 20 nt, Human
uguuggauuuuugucuugug

SEQ ID NO: 2256876 - RNA, 18 nt, Human
uguuggcacauccuaugc

SEQ ID NO: 2256877 - RNA, 18 nt, Human
uguuggacccgcucugga

SEQ ID NO: 2256878 - RNA, 19 nt, Human
uguuggacccgcucuggac

SEQ ID NO: 2256879 - RNA, 13 nt, Human
uguuggacccgcu

SEQ ID NO: 2256880 - RNA, 18 nt, Human
uguuggcacaugccugua

SEQ ID NO: 2256881 - RNA, 19 nt, Human
uguuggcacauccuaugca

SEQ ID NO: 2256882 - RNA, 15 nt, Human
uguuggcacucacag

SEQ ID NO: 2256883 - RNA, 23 nt, Human
uguuggcacucacagaccuggag

SEQ ID NO: 2256884 - RNA, 21 nt, Human
uguuggcacucacagaccugg

SEQ ID NO: 2256885 - RNA, 22 nt, Human
uguuggcacucacagaccugga

SEQ ID NO: 2256886 - RNA, 19 nt, Human
uguuggagaagaacugaaa

SEQ ID NO: 2256887 - RNA, 20 nt, Human
uguuggagaagaacugaaau

SEQ ID NO: 2256888 - RNA, 15 nt, Human
uguuggccaaagcca

SEQ ID NO: 2256889 - RNA, 14 nt, Human
uguuggcagcauaa

SEQ ID NO: 2256890 - RNA, 12 nt, Human
uguuggcaggcu

SEQ ID NO: 2256891 - RNA, 14 nt, Human
uguuggcagccucu

SEQ ID NO: 2256892 - RNA, 15 nt, Human
uguuggccaggcugg

SEQ ID NO: 2256893 - RNA, 16 nt, Human
uguuggccaggcuggu

SEQ ID NO: 2256894 - RNA, 16 nt, Human
uguugauuauuagcca

SEQ ID NO: 2256895 - RNA, 11 nt, Human
uguugauuauu

SEQ ID NO: 2256896 - RNA, 20 nt, Human
uguugauugcaggaauaagg

SEQ ID NO: 2256897 - RNA, 12 nt, Human
uguugauugcua

SEQ ID NO: 2256898 - RNA, 13 nt, Human
uguugauugcuaa

SEQ ID NO: 2256899 - RNA, 16 nt, Human
uguugaucccaagaca

SEQ ID NO: 2256900 - RNA, 12 nt, Human
uguugaucccaa

SEQ ID NO: 2256901 - RNA, 16 nt, Human
uguugaugcuuucguc

SEQ ID NO: 2256902 - RNA, 14 nt, Human
uguuggagaagaac

SEQ ID NO: 2256903 - RNA, 12 nt, Human
uguuggaaugaa

SEQ ID NO: 2256904 - RNA, 14 nt, Human
uguugauugcuaaa

SEQ ID NO: 2256905 - RNA, 15 nt, Human
uguugauugcuaaau

SEQ ID NO: 2256906 - RNA, 21 nt, Human
uguuggaaaagaauacagaaa

SEQ ID NO: 2256907 - RNA, 16 nt, Human
uguuggagaagaacug

SEQ ID NO: 2256908 - RNA, 17 nt, Human
uguuggagaagaacuga

SEQ ID NO: 2256909 - RNA, 12 nt, Human
uguucuggcucu

SEQ ID NO: 2256910 - RNA, 13 nt, Human
uguucuggcucuu

SEQ ID NO: 2256911 - RNA, 16 nt, Human
uguucuggcucuucca

SEQ ID NO: 2256912 - RNA, 13 nt, Human
uguucucugcccu

SEQ ID NO: 2256913 - RNA, 14 nt, Human
uguucucugcccuc

SEQ ID NO: 2256914 - RNA, 15 nt, Human
uguucucugcccucc

SEQ ID NO: 2256915 - RNA, 16 nt, Human
uguucucugcccucca

SEQ ID NO: 2256916 - RNA, 19 nt, Human
uguucaucauccuaagcua

SEQ ID NO: 2256917 - RNA, 23 nt, Human
uguucauagcccaguagaccuug

SEQ ID NO: 2256918 - RNA, 19 nt, Human
uguucauagcccaguagac

SEQ ID NO: 2256919 - RNA, 20 nt, Human
uguucauagcccaguagacc

SEQ ID NO: 2256920 - RNA, 11 nt, Human
uguucauccca

SEQ ID NO: 2256921 - RNA, 19 nt, Human
uguucaucccaugauguag

SEQ ID NO: 2256922 - RNA, 14 nt, Human
uguucaucuguaac

SEQ ID NO: 2256923 - RNA, 15 nt, Human
uguucaucuguaacu

SEQ ID NO: 2256924 - RNA, 21 nt, Human
uguucaucuguaacucuaaaa

SEQ ID NO: 2256925 - RNA, 21 nt, Human
uguucuccuuuuccucucucc

SEQ ID NO: 2256926 - RNA, 15 nt, Human
uguucucuaucauuu

SEQ ID NO: 2256927 - RNA, 18 nt, Human
uguucucuaucauuuaau

SEQ ID NO: 2256928 - RNA, 20 nt, Human
uguucucuaucauuuaauaa

SEQ ID NO: 2256929 - RNA, 15 nt, Human
uguucucucccaggg

SEQ ID NO: 2256930 - RNA, 16 nt, Human
uguucucucuucucca

SEQ ID NO: 2256931 - RNA, 15 nt, Human
uguucucucuucucc

SEQ ID NO: 2256932 - RNA, 14 nt, Human
uguucuuuuuauug

SEQ ID NO: 2256933 - RNA, 17 nt, Human
uguucuuuuuauugaau

SEQ ID NO: 2256934 - RNA, 23 nt, Human
uguugaaaaaaaaguuucagaga

SEQ ID NO: 2256935 - RNA, 16 nt, Human
uguucuuuugucccag

SEQ ID NO: 2256936 - RNA, 15 nt, Human
uguucuggcccucac

SEQ ID NO: 2256937 - RNA, 13 nt, Human
uguucuggcccuc

SEQ ID NO: 2256938 - RNA, 13 nt, Human
uguucuuugggga

SEQ ID NO: 2256939 - RNA, 23 nt, Human
uguucuuucuggcuaugcauuug

SEQ ID NO: 2256940 - RNA, 15 nt, Human
uguucugcuuuccuc

SEQ ID NO: 2256941 - RNA, 21 nt, Human
uguucuggcucuuccaggcug

SEQ ID NO: 2256942 - RNA, 17 nt, Human
uguucuggcucuuccag

SEQ ID NO: 2256943 - RNA, 20 nt, Human
uguucuggcucuuccaggcu

SEQ ID NO: 2256944 - RNA, 14 nt, Human
uguugacaugugcu

SEQ ID NO: 2256945 - RNA, 17 nt, Human
uguugacauccaagcuu

SEQ ID NO: 2256946 - RNA, 19 nt, Human
uguugacauccaagcuucc

SEQ ID NO: 2256947 - RNA, 16 nt, Human
uguugacgaagucucu

SEQ ID NO: 2256948 - RNA, 18 nt, Human
uguugacgaagucucuuu

SEQ ID NO: 2256949 - RNA, 22 nt, Human
uguugagaaucccaaauuugau

SEQ ID NO: 2256950 - RNA, 13 nt, Human
uguugacuuauuu

SEQ ID NO: 2256951 - RNA, 20 nt, Human
uguugacuuauuuucucugu

SEQ ID NO: 2256952 - RNA, 21 nt, Human
uguugacuuauuuucucugug

SEQ ID NO: 2256953 - RNA, 22 nt, Human
uguugacuuauuuucucugugu

SEQ ID NO: 2256954 - RNA, 22 nt, Human
uguugaaugcccacaggcaaau

SEQ ID NO: 2256955 - RNA, 18 nt, Human
uguugaauacuuuuuaca

SEQ ID NO: 2256956 - RNA, 13 nt, Human
uguugaauacuuu

SEQ ID NO: 2256957 - RNA, 15 nt, Human
uguugaagccuuugu

SEQ ID NO: 2256958 - RNA, 16 nt, Human
uguugacacaggucuu

SEQ ID NO: 2256959 - RNA, 17 nt, Human
uguugacaguucauaug

SEQ ID NO: 2256960 - RNA, 16 nt, Human
uguugacaguucugaa

SEQ ID NO: 2256961 - RNA, 20 nt, Human
uguugacaugggacauuugc

SEQ ID NO: 2256962 - RNA, 17 nt, Human
uguucagauugcuuuga

SEQ ID NO: 2256963 - RNA, 22 nt, Human
uguucagaagguugcucuagau

SEQ ID NO: 2256964 - RNA, 13 nt, Human
uguucagcacugu

SEQ ID NO: 2256965 - RNA, 14 nt, Human
uguucagcacuguc

SEQ ID NO: 2256966 - RNA, 18 nt, Human
uguucagaagguugcucu

SEQ ID NO: 2256967 - RNA, 13 nt, Human
uguucacuguccc

SEQ ID NO: 2256968 - RNA, 17 nt, Human
uguucacuuuugacaaa

SEQ ID NO: 2256969 - RNA, 15 nt, Human
uguuagucauuugcu

SEQ ID NO: 2256970 - RNA, 19 nt, Human
uguucacuuuuccucccuc

SEQ ID NO: 2256971 - RNA, 16 nt, Human
uguucacuuuuccucc

SEQ ID NO: 2256972 - RNA, 14 nt, Human
uguuagugcaaauu

SEQ ID NO: 2256973 - RNA, 13 nt, Human
uguuaguaacaug

SEQ ID NO: 2256974 - RNA, 16 nt, Human
uguuaggccuggcaca

SEQ ID NO: 2256975 - RNA, 20 nt, Human
uguuaggccuggcacagugu

SEQ ID NO: 2256976 - RNA, 21 nt, Human
uguuaggccuggcacaguguc

SEQ ID NO: 2256977 - RNA, 17 nt, Human
uguuaguaugaggcauu

SEQ ID NO: 2256978 - RNA, 20 nt, Human
uguuaguaugaggcauuugu

SEQ ID NO: 2256979 - RNA, 19 nt, Human
uguuaguaugaggcauuug

SEQ ID NO: 2256980 - RNA, 20 nt, Human
uguucagcuccagcucacca

SEQ ID NO: 2256981 - RNA, 18 nt, Human
uguucagauugcuuugau

SEQ ID NO: 2256982 - RNA, 18 nt, Human
uguucagcacugucccuu

SEQ ID NO: 2256983 - RNA, 15 nt, Human
uguucagcacugucc

SEQ ID NO: 2256984 - RNA, 17 nt, Human
uguucagcacugucccu

SEQ ID NO: 2256985 - RNA, 21 nt, Human
uguucagcuccagcucaccag

SEQ ID NO: 2256986 - RNA, 22 nt, Human
uguucagcuccagcucaccagc

SEQ ID NO: 2256987 - RNA, 12 nt, Human
uguucauacauu

SEQ ID NO: 2256988 - RNA, 18 nt, Human
uguucauagacccucuca

SEQ ID NO: 2256989 - RNA, 14 nt, Human
uguucauagcccag

SEQ ID NO: 2256990 - RNA, 15 nt, Human
uguucauagcccagu

SEQ ID NO: 2256991 - RNA, 17 nt, Human
uguucauaaauaaaguu

SEQ ID NO: 2256992 - RNA, 17 nt, Human
uguuagccccauaauuu

SEQ ID NO: 2256993 - RNA, 14 nt, Human
uguuagcuguuauu

SEQ ID NO: 2256994 - RNA, 16 nt, Human
uguuaggaaaauuuca

SEQ ID NO: 2256995 - RNA, 20 nt, Human
uguuacugaucaugcauugu

SEQ ID NO: 2256996 - RNA, 13 nt, Human
uguuacugaucau

SEQ ID NO: 2256997 - RNA, 15 nt, Human
uguuacugaccagca

SEQ ID NO: 2256998 - RNA, 14 nt, Human
uguuacugaucaug

SEQ ID NO: 2256999 - RNA, 12 nt, Human
uguuacuguaau

SEQ ID NO: 2257000 - RNA, 14 nt, Human
uguuagcagacagg

SEQ ID NO: 2257001 - RNA, 14 nt, Human
uguuacuguaauuc

SEQ ID NO: 2257002 - RNA, 20 nt, Human
uguuacucugguucuuuguu

SEQ ID NO: 2257003 - RNA, 13 nt, Human
uguuacucugguu

SEQ ID NO: 2257004 - RNA, 15 nt, Human
uguuacucugguucu

SEQ ID NO: 2257005 - RNA, 17 nt, Human
uguuacucugguucuuu

SEQ ID NO: 2257006 - RNA, 15 nt, Human
uguuacuaucugcuu

SEQ ID NO: 2257007 - RNA, 17 nt, Human
uguuacuaacuaaacuc

SEQ ID NO: 2257008 - RNA, 18 nt, Human
uguuacuaacuaaacucu

SEQ ID NO: 2257009 - RNA, 16 nt, Human
uguuacuaucugcuuu

SEQ ID NO: 2257010 - RNA, 14 nt, Human
uguuacuaaguuuu

SEQ ID NO: 2257011 - RNA, 23 nt, Human
uguuaccugaaaacacugugcac

SEQ ID NO: 2257012 - RNA, 21 nt, Human
uguuaccugaucaaugacaga

SEQ ID NO: 2257013 - RNA, 17 nt, Human
uguuacuaaagaaaaua

SEQ ID NO: 2257014 - RNA, 13 nt, Human
uguuacuaacuaa

SEQ ID NO: 2257015 - RNA, 14 nt, Human
uguuacuaacuaaa

SEQ ID NO: 2257016 - RNA, 20 nt, Human
uguuaccuaauuagagcaga

SEQ ID NO: 2257017 - RNA, 18 nt, Human
uguuacccuccuguaaau

SEQ ID NO: 2257018 - RNA, 15 nt, Human
uguuaccugaaaaca

SEQ ID NO: 2257019 - RNA, 16 nt, Human
uguuaccuacuuugac

SEQ ID NO: 2257020 - RNA, 22 nt, Human
uguuaccugaaaacacugugca

SEQ ID NO: 2257021 - RNA, 16 nt, Human
uguuaccugaaaacac

SEQ ID NO: 2257022 - RNA, 14 nt, Human
uguuaaaauaacua

SEQ ID NO: 2257023 - RNA, 15 nt, Human
uguuaaaauguauuc

SEQ ID NO: 2257024 - RNA, 23 nt, Human
uguuaaaauguauucuuaaauuc

SEQ ID NO: 2257025 - RNA, 21 nt, Human
uguuacccaguaacucaucug

SEQ ID NO: 2257026 - RNA, 13 nt, Human
uguguuuuugaaa

SEQ ID NO: 2257027 - RNA, 21 nt, Human
uguguuuuugcuaucacacag

SEQ ID NO: 2257028 - RNA, 12 nt, Human
uguuaaaauaac

SEQ ID NO: 2257029 - RNA, 21 nt, Human
uguuaaaagaugaaaauauuu

SEQ ID NO: 2257030 - RNA, 16 nt, Human
uguguggacugugaug

SEQ ID NO: 2257031 - RNA, 19 nt, Human
uguguggacugugaugcca

SEQ ID NO: 2257032 - RNA, 17 nt, Human
uguguggacucaagucc

SEQ ID NO: 2257033 - RNA, 18 nt, Human
ugugugcucuucuucuuu

SEQ ID NO: 2257034 - RNA, 11 nt, Human
uguguggccug

SEQ ID NO: 2257035 - RNA, 15 nt, Human
ugugugggagugugu

SEQ ID NO: 2257036 - RNA, 14 nt, Human
ugugugggagugug

SEQ ID NO: 2257037 - RNA, 19 nt, Human
ugugugcacguacacacac

SEQ ID NO: 2257038 - RNA, 21 nt, Human
ugugugauugacagcuuugcu

SEQ ID NO: 2257039 - RNA, 19 nt, Human
ugugugauugacagcuuug

SEQ ID NO: 2257040 - RNA, 18 nt, Human
ugugugauugacagcuuu

SEQ ID NO: 2257041 - RNA, 15 nt, Human
ugugugauugacagc

SEQ ID NO: 2257042 - RNA, 16 nt, Human
ugugugauugaaucug

SEQ ID NO: 2257043 - RNA, 14 nt, Human
ugugugaugugcau

SEQ ID NO: 2257044 - RNA, 23 nt, Human
ugugugcaccuuaccaacuuucu

SEQ ID NO: 2257045 - RNA, 22 nt, Human
ugugugcaacaggguauggacu

SEQ ID NO: 2257046 - RNA, 17 nt, Human
ugugugcaccuuaccaa

SEQ ID NO: 2257047 - RNA, 22 nt, Human
ugugugcaccuuaccaacuuuc

SEQ ID NO: 2257048 - RNA, 15 nt, Human
ugugugcuuauguau

SEQ ID NO: 2257049 - RNA, 13 nt, Human
ugugugcucucca

SEQ ID NO: 2257050 - RNA, 23 nt, Human
ugugugaagaucacguuccuucc

SEQ ID NO: 2257051 - RNA, 19 nt, Human
uguguaugugcgugugugc

SEQ ID NO: 2257052 - RNA, 20 nt, Human
ugugugaaauaccagugugg

SEQ ID NO: 2257053 - RNA, 14 nt, Human
uguguaugugcgug

SEQ ID NO: 2257054 - RNA, 16 nt, Human
ugugugaugaacuuuc

SEQ ID NO: 2257055 - RNA, 17 nt, Human
ugugugaugaacuuucu

SEQ ID NO: 2257056 - RNA, 21 nt, Human
ugugugaaagguacuucaaau

SEQ ID NO: 2257057 - RNA, 22 nt, Human
ugugugaaagguacuucaaauc

SEQ ID NO: 2257058 - RNA, 14 nt, Human
uguguaugggcaaa

SEQ ID NO: 2257059 - RNA, 18 nt, Human
uguguaugcgugugugug

SEQ ID NO: 2257060 - RNA, 22 nt, Human
uguguauccauuaucaugugua

SEQ ID NO: 2257061 - RNA, 23 nt, Human
uguguauccauuaucauguguaa

SEQ ID NO: 2257062 - RNA, 24 nt, Human
uguguauccauuaucauguguaau

SEQ ID NO: 2257063 - RNA, 21 nt, Human
uguguaucguaaccagccaga

SEQ ID NO: 2257064 - RNA, 12 nt, Human
uguguauguggg

SEQ ID NO: 2257065 - RNA, 11 nt, Human
uguguaugugg

SEQ ID NO: 2257066 - RNA, 14 nt, Human
uguguuuuuauugu

SEQ ID NO: 2257067 - RNA, 19 nt, Human
uguguuuuuauuguuaacu

SEQ ID NO: 2257068 - RNA, 20 nt, Human
uguguuuuuaauaaagacag

SEQ ID NO: 2257069 - RNA, 18 nt, Human
uguguuuuucauaaagca

SEQ ID NO: 2257070 - RNA, 15 nt, Human
uguguuuuuaauaaa

SEQ ID NO: 2257071 - RNA, 15 nt, Human
uguguuuuucauaaa

SEQ ID NO: 2257072 - RNA, 11 nt, Human
uguguuuccuu

SEQ ID NO: 2257073 - RNA, 12 nt, Human
uguguuuccaca

SEQ ID NO: 2257074 - RNA, 13 nt, Human
uguguuucacuuu

SEQ ID NO: 2257075 - RNA, 20 nt, Human
uguguuucuaugugacaauu

SEQ ID NO: 2257076 - RNA, 15 nt, Human
uguguuucuguauaa

SEQ ID NO: 2257077 - RNA, 13 nt, Human
uguguuuugcaag

SEQ ID NO: 2257078 - RNA, 19 nt, Human
uguguuuugcaagccagau

SEQ ID NO: 2257079 - RNA, 20 nt, Human
ugugugugcuuauguaugag

SEQ ID NO: 2257080 - RNA, 19 nt, Human
ugugugugcuuauguauga

SEQ ID NO: 2257081 - RNA, 15 nt, Human
uguguuucaaguuca

SEQ ID NO: 2257082 - RNA, 16 nt, Human
uguguuuauugucaaa

SEQ ID NO: 2257083 - RNA, 22 nt, Human
ugugugucuaggcaggaccugu

SEQ ID NO: 2257084 - RNA, 22 nt, Human
uguguggguggauauaaauaua

SEQ ID NO: 2257085 - RNA, 16 nt, Human
ugugugucuuaauuau

SEQ ID NO: 2257086 - RNA, 17 nt, Human
ugugugugaaaaugugu

SEQ ID NO: 2257087 - RNA, 20 nt, Human
ugugugugaaugaacacucu

SEQ ID NO: 2257088 - RNA, 16 nt, Human
ugugugugaaugaaca

SEQ ID NO: 2257089 - RNA, 13 nt, Human
ugugugggucuau

SEQ ID NO: 2257090 - RNA, 16 nt, Human
ugugugggagugugua

SEQ ID NO: 2257091 - RNA, 20 nt, Human
uguguggguggauauaaaua

SEQ ID NO: 2257092 - RNA, 21 nt, Human
uguguggguggauauaaauau

SEQ ID NO: 2257093 - RNA, 23 nt, Human
uguguggguggauauaaauauau

SEQ ID NO: 2257094 - RNA, 16 nt, Human
uguuuccugcaggcca

SEQ ID NO: 2257095 - RNA, 19 nt, Human
uguuucugacucugagcua

SEQ ID NO: 2257096 - RNA, 12 nt, Human
uguuucugacuc

SEQ ID NO: 2257097 - RNA, 12 nt, Human
uguuucugcagu

SEQ ID NO: 2257098 - RNA, 22 nt, Human
uguuucugcaguagucucugug

SEQ ID NO: 2257099 - RNA, 21 nt, Human
uguuucugcaguagucucugu

SEQ ID NO: 2257100 - RNA, 15 nt, Human
uguuuccuggcacug

SEQ ID NO: 2257101 - RNA, 11 nt, Human
uguuuccugag

SEQ ID NO: 2257102 - RNA, 23 nt, Human
uguuuccuagcacacacuuuugg

SEQ ID NO: 2257103 - RNA, 20 nt, Human
uguuucccuuucacuggcau

SEQ ID NO: 2257104 - RNA, 14 nt, Human
uguuuccucuaguu

SEQ ID NO: 2257105 - RNA, 23 nt, Human
uguuuacuuaaagauuuaucaaa

SEQ ID NO: 2257106 - RNA, 22 nt, Human
uguuucccauaauuuucuucau

SEQ ID NO: 2257107 - RNA, 14 nt, Human
uguuucccauaauu

SEQ ID NO: 2257108 - RNA, 19 nt, Human
uguuuccauauuuuauagg

SEQ ID NO: 2257109 - RNA, 12 nt, Human
uguuuacugaaa

SEQ ID NO: 2257110 - RNA, 15 nt, Human
uguuuacuuaaagau

SEQ ID NO: 2257111 - RNA, 16 nt, Human
uguuuacuuaaagauu

SEQ ID NO: 2257112 - RNA, 17 nt, Human
uguuuacuuaaagauuu

SEQ ID NO: 2257113 - RNA, 18 nt, Human
uguuuacuuaaagauuua

SEQ ID NO: 2257114 - RNA, 19 nt, Human
uguuuacuuaaagauuuau

SEQ ID NO: 2257115 - RNA, 19 nt, Human
uguuuacuagggaucccuc

SEQ ID NO: 2257116 - RNA, 13 nt, Human
uguuuacuaggga

SEQ ID NO: 2257117 - RNA, 11 nt, Human
uguuugugugu

SEQ ID NO: 2257118 - RNA, 13 nt, Human
uguuugugugugu

SEQ ID NO: 2257119 - RNA, 14 nt, Human
uguuugugugagag

SEQ ID NO: 2257120 - RNA, 19 nt, Human
uguuugugcuucuaauauu

SEQ ID NO: 2257121 - RNA, 14 nt, Human
uguuuguguauuua

SEQ ID NO: 2257122 - RNA, 12 nt, Human
uguuuguuaugg

SEQ ID NO: 2257123 - RNA, 15 nt, Human
uguuuguucaucugu

SEQ ID NO: 2257124 - RNA, 22 nt, Human
uguuuuaaauuuauuucaaaaa

SEQ ID NO: 2257125 - RNA, 11 nt, Human
uguuuuaacaa

SEQ ID NO: 2257126 - RNA, 16 nt, Human
uguuuuaagaggcagg

SEQ ID NO: 2257127 - RNA, 12 nt, Human
uguuuguggccu

SEQ ID NO: 2257128 - RNA, 14 nt, Human
uguuugugcuucua

SEQ ID NO: 2257129 - RNA, 15 nt, Human
uguuugugcuucuaa

SEQ ID NO: 2257130 - RNA, 15 nt, Human
uguuugugcuguggu

SEQ ID NO: 2257131 - RNA, 12 nt, Human
uguuugugcuuc

SEQ ID NO: 2257132 - RNA, 13 nt, Human
uguuugugcuucu

SEQ ID NO: 2257133 - RNA, 14 nt, Human
uguuuguggccuca

SEQ ID NO: 2257134 - RNA, 13 nt, Human
uguuuguggccuc

SEQ ID NO: 2257135 - RNA, 15 nt, Human
uguuuguggccucag

SEQ ID NO: 2257136 - RNA, 12 nt, Human
uguuuguguauu

SEQ ID NO: 2257137 - RNA, 14 nt, Human
uguuucugucagga

SEQ ID NO: 2257138 - RNA, 12 nt, Human
uguuuuuaacuc

SEQ ID NO: 2257139 - RNA, 14 nt, Human
uguuuuuaagcugu

SEQ ID NO: 2257140 - RNA, 19 nt, Human
uguuuuuaaaaguuucaau

SEQ ID NO: 2257141 - RNA, 20 nt, Human
uguuuuuaaaaaucauaaac

SEQ ID NO: 2257142 - RNA, 17 nt, Human
uguuuuuaaaaaucaua

SEQ ID NO: 2257143 - RNA, 23 nt, Human
uguuuuaauuuaaacaccuccuc

SEQ ID NO: 2257144 - RNA, 14 nt, Human
uguuuuaauuccau

SEQ ID NO: 2257145 - RNA, 16 nt, Human
uguuuuaauuccauga

SEQ ID NO: 2257146 - RNA, 22 nt, Human
uguuuuaauuuaaacaccuccu

SEQ ID NO: 2257147 - RNA, 17 nt, Human
uguuuuaagaggcaggg

SEQ ID NO: 2257148 - RNA, 19 nt, Human
uguuuuaaggaugcuugua

SEQ ID NO: 2257149 - RNA, 14 nt, Human
uguuuuaacaaaaa

SEQ ID NO: 2257150 - RNA, 13 nt, Human
uguuuuaacaaaa

SEQ ID NO: 2257151 - RNA, 23 nt, Human
uguuuuaaggaugcuuguacaua

SEQ ID NO: 2257152 - RNA, 22 nt, Human
uguuuuaaggaugcuuguacau

SEQ ID NO: 2257153 - RNA, 15 nt, Human
uguuuuuaagcuguu

SEQ ID NO: 2257154 - RNA, 17 nt, Human
uguuuuuaagcuguuuc

SEQ ID NO: 2257155 - RNA, 20 nt, Human
uguuuuuaagcuguuuccau

SEQ ID NO: 2257156 - RNA, 22 nt, Human
uguuuuuaagcuguuuccauag

SEQ ID NO: 2257157 - RNA, 13 nt, Human
uguuuuuacccau

SEQ ID NO: 2257158 - RNA, 22 nt, Human
uguuuuuacccauauccccucu

SEQ ID NO: 2257159 - RNA, 13 nt, Human
uguuuuugaaaua

SEQ ID NO: 2257160 - RNA, 16 nt, Human
uguuuuugcacauguu

SEQ ID NO: 2257161 - RNA, 20 nt, Human
uguuuuugaaggcagaaagc

SEQ ID NO: 2257162 - RNA, 18 nt, Human
uguuuuugaaggcagaaa

SEQ ID NO: 2257163 - RNA, 16 nt, Human
uguuuuugaaggcaga

SEQ ID NO: 2257164 - RNA, 12 nt, Human
uguuuuucuggg

SEQ ID NO: 2257165 - RNA, 12 nt, Human
uguuuuuguaaa

SEQ ID NO: 2257166 - RNA, 15 nt, Human
uguuuuuguaaagug

SEQ ID NO: 2257167 - RNA, 22 nt, Human
uuaaaaaaaaaccugagcccca

SEQ ID NO: 2257168 - RNA, 13 nt, Human
uuaaaaaaaaaga

SEQ ID NO: 2257169 - RNA, 20 nt, Human
uuaaacuaaggcccucuuga

SEQ ID NO: 2257170 - RNA, 14 nt, Human
uuaaacgugcagac

SEQ ID NO: 2257171 - RNA, 18 nt, Human
uuaaacguaugcauguga

SEQ ID NO: 2257172 - RNA, 20 nt, Human
uuaaacguaugcaugugaag

SEQ ID NO: 2257173 - RNA, 17 nt, Human
uuaaacuagcauaucug

SEQ ID NO: 2257174 - RNA, 19 nt, Human
uuaaacuagcauaucugcc

SEQ ID NO: 2257175 - RNA, 18 nt, Human
uuaaaauacacacucaaa

SEQ ID NO: 2257176 - RNA, 23 nt, Human
uuaaacggauuauuuuuucagac

SEQ ID NO: 2257177 - RNA, 16 nt, Human
uuaaacguaugcaugu

SEQ ID NO: 2257178 - RNA, 20 nt, Human
uuaaacuucucugaagggag

SEQ ID NO: 2257179 - RNA, 17 nt, Human
uuaaacuucucugaagg

SEQ ID NO: 2257180 - RNA, 18 nt, Human
uuaaacuucucugaaggg

SEQ ID NO: 2257181 - RNA, 14 nt, Human
uuaaacuucucuga

SEQ ID NO: 2257182 - RNA, 15 nt, Human
uuaaacuucucugaa

SEQ ID NO: 2257183 - RNA, 22 nt, Human
uuaaacuuaaucuaaauggaac

SEQ ID NO: 2257184 - RNA, 23 nt, Human
uuaaacuagcauaucugccuuua

SEQ ID NO: 2257185 - RNA, 13 nt, Human
uuaaacucaggga

SEQ ID NO: 2257186 - RNA, 14 nt, Human
uuaaacucagggac

SEQ ID NO: 2257187 - RNA, 21 nt, Human
uuaaacuagcauaucugccuu

SEQ ID NO: 2257188 - RNA, 22 nt, Human
uuaaacuagcauaucugccuuu

SEQ ID NO: 2257189 - RNA, 22 nt, Human
uuaaacuaggagaaccaaaucu

SEQ ID NO: 2257190 - RNA, 14 nt, Human
uuaaaacuuuaauc

SEQ ID NO: 2257191 - RNA, 16 nt, Human
uuaaaaguuucaaugu

SEQ ID NO: 2257192 - RNA, 17 nt, Human
uuaaaaguuucaaugug

SEQ ID NO: 2257193 - RNA, 20 nt, Human
uuaaaacugaagucugaaau

SEQ ID NO: 2257194 - RNA, 21 nt, Human
uuaaaacugaagucugaaauu

SEQ ID NO: 2257195 - RNA, 15 nt, Human
uuaaaacuuguaauu

SEQ ID NO: 2257196 - RNA, 15 nt, Human
uuaaaauaacuagug

SEQ ID NO: 2257197 - RNA, 20 nt, Human
uuaaaauaagcacugugcua

SEQ ID NO: 2257198 - RNA, 12 nt, Human
uuaaaauaauau

SEQ ID NO: 2257199 - RNA, 16 nt, Human
uuaaaauaaaaauucu

SEQ ID NO: 2257200 - RNA, 19 nt, Human
uuaaaaguuucaaugugau

SEQ ID NO: 2257201 - RNA, 22 nt, Human
uuaaaaguuucaaugugauucu

SEQ ID NO: 2257202 - RNA, 20 nt, Human
uuaaaauaaaaauucugaau

SEQ ID NO: 2257203 - RNA, 14 nt, Human
uuaaaacccaagug

SEQ ID NO: 2257204 - RNA, 18 nt, Human
uuaaaaaaaaagaucugu

SEQ ID NO: 2257205 - RNA, 16 nt, Human
uuaaaaaaaaaggcau

SEQ ID NO: 2257206 - RNA, 19 nt, Human
uguuuuuguauuuuuaaug

SEQ ID NO: 2257207 - RNA, 14 nt, Human
uuaaaaaaaacaaa

SEQ ID NO: 2257208 - RNA, 15 nt, Human
uuaaaaaaaacaaaa

SEQ ID NO: 2257209 - RNA, 18 nt, Human
uuaaaaaaaacaaaaaga

SEQ ID NO: 2257210 - RNA, 14 nt, Human
uuaaaacugaaguc

SEQ ID NO: 2257211 - RNA, 22 nt, Human
uuaaaaaaaacaaaaagaacaa

SEQ ID NO: 2257212 - RNA, 16 nt, Human
uuaaaacugaagucug

SEQ ID NO: 2257213 - RNA, 17 nt, Human
uuaaaacugaagucuga

SEQ ID NO: 2257214 - RNA, 18 nt, Human
uuaaaacugaagucugaa

SEQ ID NO: 2257215 - RNA, 19 nt, Human
uuaaaacugaagucugaaa

SEQ ID NO: 2257216 - RNA, 19 nt, Human
uuaaaaaaaacaaaaagaa

SEQ ID NO: 2257217 - RNA, 21 nt, Human
uuaaaaaaaacaaaaagaaca

SEQ ID NO: 2257218 - RNA, 14 nt, Human
uuaaauauuuacau

SEQ ID NO: 2257219 - RNA, 18 nt, Human
uuaaauauuuacauauga

SEQ ID NO: 2257220 - RNA, 17 nt, Human
uuaaauauuuacauaug

SEQ ID NO: 2257221 - RNA, 21 nt, Human
uuaaauauguuagcaaagagu

SEQ ID NO: 2257222 - RNA, 13 nt, Human
uuaaagccuccuc

SEQ ID NO: 2257223 - RNA, 15 nt, Human
uuaaauauuucaaga

SEQ ID NO: 2257224 - RNA, 22 nt, Human
uuaaauauuucaagacauuaaa

SEQ ID NO: 2257225 - RNA, 22 nt, Human
uuaaauaucaguagaaacucua

SEQ ID NO: 2257226 - RNA, 15 nt, Human
uuaaagaaaacccac

SEQ ID NO: 2257227 - RNA, 21 nt, Human
uuaaagcagagggacuuugua

SEQ ID NO: 2257228 - RNA, 16 nt, Human
uuaaacucagggacag

SEQ ID NO: 2257229 - RNA, 20 nt, Human
uuaaagcauuuacuuugaau

SEQ ID NO: 2257230 - RNA, 17 nt, Human
uuaaagcauuuacuuug

SEQ ID NO: 2257231 - RNA, 15 nt, Human
uuaaagcauuuacuu

SEQ ID NO: 2257232 - RNA, 22 nt, Human
uuaaagcagagggacuuuguau

SEQ ID NO: 2257233 - RNA, 18 nt, Human
uuaaagcagugcuucuca

SEQ ID NO: 2257234 - RNA, 23 nt, Human
uuaaaugagaaggaauuugaguu

SEQ ID NO: 2257235 - RNA, 12 nt, Human
uuaaaugagaag

SEQ ID NO: 2257236 - RNA, 11 nt, Human
uuaaaugcacc

SEQ ID NO: 2257237 - RNA, 14 nt, Human
uuaaaugcccagcc

SEQ ID NO: 2257238 - RNA, 15 nt, Human
uuaaaugcccagccc

SEQ ID NO: 2257239 - RNA, 16 nt, Human
uuaaaugcccagcccc

SEQ ID NO: 2257240 - RNA, 15 nt, Human
uuaaaugaaagcaug

SEQ ID NO: 2257241 - RNA, 14 nt, Human
uuaaaugaaauugu

SEQ ID NO: 2257242 - RNA, 23 nt, Human
uuaaaugaaauuguaaaaccugu

SEQ ID NO: 2257243 - RNA, 20 nt, Human
uuaaaucccauucauaacuu

SEQ ID NO: 2257244 - RNA, 18 nt, Human
uuaaauauuucaagacau

SEQ ID NO: 2257245 - RNA, 16 nt, Human
uuaaaucucauugcuu

SEQ ID NO: 2257246 - RNA, 16 nt, Human
uuaaaucuaugaagua

SEQ ID NO: 2257247 - RNA, 21 nt, Human
uuaaaucuaugaaguauauaa

SEQ ID NO: 2257248 - RNA, 14 nt, Human
uuaaaucugugaug

SEQ ID NO: 2257249 - RNA, 15 nt, Human
uuaaaucugugauga

SEQ ID NO: 2257250 - RNA, 16 nt, Human
uuaaaucugugaugau

SEQ ID NO: 2257251 - RNA, 17 nt, Human
uuaaugauaaguaaaug

SEQ ID NO: 2257252 - RNA, 20 nt, Human
uuaauuaaugaaauaucugu

SEQ ID NO: 2257253 - RNA, 13 nt, Human
uuaauuaaaugca

SEQ ID NO: 2257254 - RNA, 14 nt, Human
uuaauuaaaugcuc

SEQ ID NO: 2257255 - RNA, 19 nt, Human
uuaaugacagagccagugg

SEQ ID NO: 2257256 - RNA, 16 nt, Human
uuaaugauaaguaaau

SEQ ID NO: 2257257 - RNA, 22 nt, Human
uuaauuaaaacacaacaucuuu

SEQ ID NO: 2257258 - RNA, 16 nt, Human
uuaaugaaguuugaau

SEQ ID NO: 2257259 - RNA, 17 nt, Human
uuaaugaaguuugaaug

SEQ ID NO: 2257260 - RNA, 15 nt, Human
uuaaugaaguuugaa

SEQ ID NO: 2257261 - RNA, 18 nt, Human
uuaaugaaguuugaaugu

SEQ ID NO: 2257262 - RNA, 22 nt, Human
uuaaugaaguuugaauguuaaa

SEQ ID NO: 2257263 - RNA, 23 nt, Human
uuaaugaaguuugaauguuaaau

SEQ ID NO: 2257264 - RNA, 23 nt, Human
uuaaugacacuuguccccaaauc

SEQ ID NO: 2257265 - RNA, 19 nt, Human
uuaaugacacuugucccca

SEQ ID NO: 2257266 - RNA, 14 nt, Human
uuaaugacacuugu

SEQ ID NO: 2257267 - RNA, 21 nt, Human
uuacaacagauuugugaacuc

SEQ ID NO: 2257268 - RNA, 18 nt, Human
uuacaacagauuugugaa

SEQ ID NO: 2257269 - RNA, 19 nt, Human
uuacaacagauuugugaac

SEQ ID NO: 2257270 - RNA, 13 nt, Human
uuacaacagauuu

SEQ ID NO: 2257271 - RNA, 15 nt, Human
uuacaacagauuugu

SEQ ID NO: 2257272 - RNA, 16 nt, Human
uuacaacagauuugug

SEQ ID NO: 2257273 - RNA, 17 nt, Human
uuacaacagauuuguga

SEQ ID NO: 2257274 - RNA, 20 nt, Human
uuaauuagggguugcuaaga

SEQ ID NO: 2257275 - RNA, 19 nt, Human
uuaauuagggguugcuaag

SEQ ID NO: 2257276 - RNA, 19 nt, Human
uuaauuagccagugaaaaa

SEQ ID NO: 2257277 - RNA, 16 nt, Human
uuaauuaccaaccugu

SEQ ID NO: 2257278 - RNA, 13 nt, Human
uuaauuagugcua

SEQ ID NO: 2257279 - RNA, 14 nt, Human
uuaauuagugcuaa

SEQ ID NO: 2257280 - RNA, 15 nt, Human
uuacacauuuuucag

SEQ ID NO: 2257281 - RNA, 17 nt, Human
uuacacaucuucaacag

SEQ ID NO: 2257282 - RNA, 18 nt, Human
uuacacaucucagacccu

SEQ ID NO: 2257283 - RNA, 17 nt, Human
uuacaagaaaaaaugaa

SEQ ID NO: 2257284 - RNA, 19 nt, Human
uuacacacgugcaauuugu

SEQ ID NO: 2257285 - RNA, 23 nt, Human
uuacacacgugcaauuuguuugu

SEQ ID NO: 2257286 - RNA, 23 nt, Human
uuacaacugccucgaaacacaga

SEQ ID NO: 2257287 - RNA, 22 nt, Human
uuacaacugccucgaaacacag

SEQ ID NO: 2257288 - RNA, 17 nt, Human
uuacacauuuuucagau

SEQ ID NO: 2257289 - RNA, 23 nt, Human
uuacacauuuuucagauauaaaa

SEQ ID NO: 2257290 - RNA, 23 nt, Human
uuacacguggaggaaugcucccc

SEQ ID NO: 2257291 - RNA, 21 nt, Human
uuacaccagccucgucuucau

SEQ ID NO: 2257292 - RNA, 14 nt, Human
uuacacucuuugua

SEQ ID NO: 2257293 - RNA, 14 nt, Human
uuacacuguauuug

SEQ ID NO: 2257294 - RNA, 17 nt, Human
uuacacuguauuuguau

SEQ ID NO: 2257295 - RNA, 13 nt, Human
uuacacugggaga

SEQ ID NO: 2257296 - RNA, 21 nt, Human
uuacacuggaggagagaagaa

SEQ ID NO: 2257297 - RNA, 22 nt, Human
uuacacuggaggagagaagaau

SEQ ID NO: 2257298 - RNA, 15 nt, Human
uuacacucuuuguaa

SEQ ID NO: 2257299 - RNA, 20 nt, Human
uuacacuuuaugcacaaaau

SEQ ID NO: 2257300 - RNA, 13 nt, Human
uuacacuuuaugc

SEQ ID NO: 2257301 - RNA, 23 nt, Human
uuacacuuuaugccggaugugcu

SEQ ID NO: 2257302 - RNA, 14 nt, Human
uuacacuuacuguu

SEQ ID NO: 2257303 - RNA, 15 nt, Human
uuacacuuacuguug

SEQ ID NO: 2257304 - RNA, 14 nt, Human
uuacagaaaguggu

SEQ ID NO: 2257305 - RNA, 19 nt, Human
uuacagaaaguggugcuca

SEQ ID NO: 2257306 - RNA, 22 nt, Human
uuacagaaaguggugcucaguu

SEQ ID NO: 2257307 - RNA, 13 nt, Human
uuacauuguucaa

SEQ ID NO: 2257308 - RNA, 15 nt, Human
uuacauugucauuua

SEQ ID NO: 2257309 - RNA, 17 nt, Human
uuacauuguuugucugu

SEQ ID NO: 2257310 - RNA, 12 nt, Human
uuacauuguaaa

SEQ ID NO: 2257311 - RNA, 13 nt, Human
uuacauuguaaau

SEQ ID NO: 2257312 - RNA, 13 nt, Human
uuacauucugaau

SEQ ID NO: 2257313 - RNA, 13 nt, Human
uuacauucaguug

SEQ ID NO: 2257314 - RNA, 19 nt, Human
uuacauuauuaucaacaau

SEQ ID NO: 2257315 - RNA, 20 nt, Human
uuacagaacacgcuuucaca

SEQ ID NO: 2257316 - RNA, 21 nt, Human
uuacagaaaguggugcucagu

SEQ ID NO: 2257317 - RNA, 17 nt, Human
uuacauuuuuaagugcu

SEQ ID NO: 2257318 - RNA, 12 nt, Human
uuacauuuuuaa

SEQ ID NO: 2257319 - RNA, 17 nt, Human
uuacauuuccaaaugaa

SEQ ID NO: 2257320 - RNA, 16 nt, Human
uuacauuuccaaauga

SEQ ID NO: 2257321 - RNA, 16 nt, Human
uuacauuguucaauua

SEQ ID NO: 2257322 - RNA, 20 nt, Human
uuacauuuguauaaaauaau

SEQ ID NO: 2257323 - RNA, 19 nt, Human
uuaauacuauaaauaauau

SEQ ID NO: 2257324 - RNA, 17 nt, Human
uuaauacuaccuugaaa

SEQ ID NO: 2257325 - RNA, 15 nt, Human
uuaauacuaccuuga

SEQ ID NO: 2257326 - RNA, 15 nt, Human
uuaauaccacagcuu

SEQ ID NO: 2257327 - RNA, 22 nt, Human
uuaauacucauccuuguauaaa

SEQ ID NO: 2257328 - RNA, 20 nt, Human
uuaauacucauccuuguaua

SEQ ID NO: 2257329 - RNA, 21 nt, Human
uuaauacucauccuuguauaa

SEQ ID NO: 2257330 - RNA, 17 nt, Human
uuaauaaguuucacuga

SEQ ID NO: 2257331 - RNA, 14 nt, Human
uuaauaauauacuu

SEQ ID NO: 2257332 - RNA, 16 nt, Human
uuaauaauauacuugu

SEQ ID NO: 2257333 - RNA, 18 nt, Human
uuaauaauauacuugugg

SEQ ID NO: 2257334 - RNA, 24 nt, Human
uuaauaaucagcaagaauuugauc

SEQ ID NO: 2257335 - RNA, 21 nt, Human
uuaauaauauacuuguggacu

SEQ ID NO: 2257336 - RNA, 19 nt, Human
uuaauagaauauaauuauc

SEQ ID NO: 2257337 - RNA, 11 nt, Human
uuaauauuaaa

SEQ ID NO: 2257338 - RNA, 20 nt, Human
uuaagcauuggguggguaaa

SEQ ID NO: 2257339 - RNA, 23 nt, Human
uuaagcauuguuugcuuauuguu

SEQ ID NO: 2257340 - RNA, 22 nt, Human
uuaagcauuguuugcuuauugu

SEQ ID NO: 2257341 - RNA, 19 nt, Human
uuaagcauuguuugcuuau

SEQ ID NO: 2257342 - RNA, 14 nt, Human
uuaagcauuguuug

SEQ ID NO: 2257343 - RNA, 12 nt, Human
uuaagcauuguu

SEQ ID NO: 2257344 - RNA, 18 nt, Human
uuaagcauuaccacucag

SEQ ID NO: 2257345 - RNA, 13 nt, Human
uuaagcauuacca

SEQ ID NO: 2257346 - RNA, 16 nt, Human
uuaagcagaagcauua

SEQ ID NO: 2257347 - RNA, 17 nt, Human
uuaagcacuacauaaac

SEQ ID NO: 2257348 - RNA, 20 nt, Human
uuaagcacuacauaaacuga

SEQ ID NO: 2257349 - RNA, 22 nt, Human
uuaagcacuacauaaacugacu

SEQ ID NO: 2257350 - RNA, 15 nt, Human
uuaagcagaagcauu

SEQ ID NO: 2257351 - RNA, 21 nt, Human
uuaagauuuuucucaaaguuu

SEQ ID NO: 2257352 - RNA, 14 nt, Human
uuaagcacuacaua

SEQ ID NO: 2257353 - RNA, 13 nt, Human
uuaauaacauuac

SEQ ID NO: 2257354 - RNA, 21 nt, Human
uuaagccucauauuuaaagac

SEQ ID NO: 2257355 - RNA, 15 nt, Human
uuaauaacauuaccu

SEQ ID NO: 2257356 - RNA, 16 nt, Human
uuaauaacauuaccuu

SEQ ID NO: 2257357 - RNA, 17 nt, Human
uuaauaacauuaccuua

SEQ ID NO: 2257358 - RNA, 20 nt, Human
uuaauaacauuaccuuacug

SEQ ID NO: 2257359 - RNA, 21 nt, Human
uuaauaacauuaccuuacugu

SEQ ID NO: 2257360 - RNA, 15 nt, Human
uuaauaaguuucacu

SEQ ID NO: 2257361 - RNA, 14 nt, Human
uuaauaauaaauuc

SEQ ID NO: 2257362 - RNA, 23 nt, Human
uuaauaauaaauucccuggccuu

SEQ ID NO: 2257363 - RNA, 19 nt, Human
uuaagccucauauuuaaag

SEQ ID NO: 2257364 - RNA, 16 nt, Human
uuaagccaucuuggua

SEQ ID NO: 2257365 - RNA, 13 nt, Human
uuaagcccugagg

SEQ ID NO: 2257366 - RNA, 21 nt, Human
uuaagccacuuaaaauguuca

SEQ ID NO: 2257367 - RNA, 18 nt, Human
uuaagccaucuugguaaa

SEQ ID NO: 2257368 - RNA, 16 nt, Human
uuaacuuuaaguuuca

SEQ ID NO: 2257369 - RNA, 18 nt, Human
uuaacuuuaucacauuau

SEQ ID NO: 2257370 - RNA, 23 nt, Human
uuaacuuuaucacauuauuugca

SEQ ID NO: 2257371 - RNA, 14 nt, Human
uuaacuuuuauaaa

SEQ ID NO: 2257372 - RNA, 12 nt, Human
uuaagaguaaaa

SEQ ID NO: 2257373 - RNA, 20 nt, Human
uuaagaguagcaaguucuag

SEQ ID NO: 2257374 - RNA, 12 nt, Human
uuaagagugaaa

SEQ ID NO: 2257375 - RNA, 21 nt, Human
uuaagagugggggagagcagg

SEQ ID NO: 2257376 - RNA, 19 nt, Human
uuaagauaauaauauaugu

SEQ ID NO: 2257377 - RNA, 23 nt, Human
uuaagauggauucucagauauuu

SEQ ID NO: 2257378 - RNA, 22 nt, Human
uuaagauggauucucagauauu

SEQ ID NO: 2257379 - RNA, 21 nt, Human
uuaagauggauucucagauau

SEQ ID NO: 2257380 - RNA, 18 nt, Human
uuaagauggauucucaga

SEQ ID NO: 2257381 - RNA, 17 nt, Human
uuaagauggauucucag

SEQ ID NO: 2257382 - RNA, 14 nt, Human
uuaagauggauucu

SEQ ID NO: 2257383 - RNA, 14 nt, Human
uuaagauaugaugu

SEQ ID NO: 2257384 - RNA, 21 nt, Human
uuaagauaauaguuuacaugu

SEQ ID NO: 2257385 - RNA, 14 nt, Human
uuaagauaauuaua

SEQ ID NO: 2257386 - RNA, 16 nt, Human
uuaagauaauuauaau

SEQ ID NO: 2257387 - RNA, 14 nt, Human
uuaagauuuuucuc

SEQ ID NO: 2257388 - RNA, 15 nt, Human
uuaagauuuuucuca

SEQ ID NO: 2257389 - RNA, 16 nt, Human
uuaagauuuuucucaa

SEQ ID NO: 2257390 - RNA, 17 nt, Human
uuaagauuuuucucaaa

SEQ ID NO: 2257391 - RNA, 20 nt, Human
uuaagauuuuucucaaaguu

SEQ ID NO: 2257392 - RNA, 22 nt, Human
uuaagauuuuucucaaaguuuu

SEQ ID NO: 2257393 - RNA, 16 nt, Human
uuaacuuuaagacuga

SEQ ID NO: 2257394 - RNA, 15 nt, Human
uuaacuugaguuuua

SEQ ID NO: 2257395 - RNA, 13 nt, Human
uuaacuuuuauaa

SEQ ID NO: 2257396 - RNA, 12 nt, Human
uuaacuuuuaua

SEQ ID NO: 2257397 - RNA, 13 nt, Human
uuaaaugcccagc

SEQ ID NO: 2257398 - RNA, 18 nt, Human
uuaaaugucuaauguauu

SEQ ID NO: 2257399 - RNA, 19 nt, Human
uuaaaugucuaauguauuu

SEQ ID NO: 2257400 - RNA, 22 nt, Human
uuaaaugucuaauguauuuuau

SEQ ID NO: 2257401 - RNA, 18 nt, Human
uuaaaugucuucuguauu

SEQ ID NO: 2257402 - RNA, 14 nt, Human
uuaaaugucuaaug

SEQ ID NO: 2257403 - RNA, 17 nt, Human
uuaaaugucuaauguau

SEQ ID NO: 2257404 - RNA, 13 nt, Human
uguggcggugccu

SEQ ID NO: 2257405 - RNA, 19 nt, Human
uguggcgccgucuccaggg

SEQ ID NO: 2257406 - RNA, 23 nt, Human
uguggcgccgucuccaggggcug

SEQ ID NO: 2257407 - RNA, 10 nt, Human
uguggcucac

SEQ ID NO: 2257408 - RNA, 16 nt, Human
uguggcucacgugugu

SEQ ID NO: 2257409 - RNA, 22 nt, Human
uguggcucacgugagagugucu

SEQ ID NO: 2257410 - RNA, 14 nt, Human
uguggcuccccucu

SEQ ID NO: 2257411 - RNA, 13 nt, Human
uguggcuccccuc

SEQ ID NO: 2257412 - RNA, 13 nt, Human
ugugggagcagcg

SEQ ID NO: 2257413 - RNA, 15 nt, Human
ugugggaguguguaa

SEQ ID NO: 2257414 - RNA, 14 nt, Human
ugugggagugugua

SEQ ID NO: 2257415 - RNA, 13 nt, Human
uguggccucagaa

SEQ ID NO: 2257416 - RNA, 11 nt, Human
uguggccugca

SEQ ID NO: 2257417 - RNA, 15 nt, Human
uguggccugggccuc

SEQ ID NO: 2257418 - RNA, 17 nt, Human
uguggccugcacaguga

SEQ ID NO: 2257419 - RNA, 16 nt, Human
uguggccugggccucc

SEQ ID NO: 2257420 - RNA, 13 nt, Human
uguggccuguggc

SEQ ID NO: 2257421 - RNA, 15 nt, Human
uguggccuguggccu

SEQ ID NO: 2257422 - RNA, 16 nt, Human
uguggccuguggccug

SEQ ID NO: 2257423 - RNA, 20 nt, Human
uguggccuuccauuuauaug

SEQ ID NO: 2257424 - RNA, 18 nt, Human
uguggcgccgucuccagg

SEQ ID NO: 2257425 - RNA, 17 nt, Human
uguggccuguggccugu

SEQ ID NO: 2257426 - RNA, 23 nt, Human
uguggcgcagcauauucaggaag

SEQ ID NO: 2257427 - RNA, 18 nt, Human
uguggaagggacuaggag

SEQ ID NO: 2257428 - RNA, 15 nt, Human
uguggaagggacuag

SEQ ID NO: 2257429 - RNA, 14 nt, Human
uguggaagggacua

SEQ ID NO: 2257430 - RNA, 14 nt, Human
uguggaagcaaaaa

SEQ ID NO: 2257431 - RNA, 18 nt, Human
uguggacacagcucuucu

SEQ ID NO: 2257432 - RNA, 15 nt, Human
uguggaagugugggu

SEQ ID NO: 2257433 - RNA, 17 nt, Human
uguggaaucuggaguga

SEQ ID NO: 2257434 - RNA, 18 nt, Human
uguggaaucuggagugag

SEQ ID NO: 2257435 - RNA, 11 nt, Human
uguggccucag

SEQ ID NO: 2257436 - RNA, 10 nt, Human
uguggccuca

SEQ ID NO: 2257437 - RNA, 19 nt, Human
uguggacuaaaagauauaa

SEQ ID NO: 2257438 - RNA, 15 nt, Human
uguggacuaaaagau

SEQ ID NO: 2257439 - RNA, 16 nt, Human
uguggacuaaaagaua

SEQ ID NO: 2257440 - RNA, 19 nt, Human
uguggacacagcucuucuc

SEQ ID NO: 2257441 - RNA, 17 nt, Human
uguggaccacugcauga

SEQ ID NO: 2257442 - RNA, 19 nt, Human
uguggaccacugcaugagc

SEQ ID NO: 2257443 - RNA, 22 nt, Human
uguguaaucauuucuugggccc

SEQ ID NO: 2257444 - RNA, 21 nt, Human
uguguaaucauuucuugggcc

SEQ ID NO: 2257445 - RNA, 19 nt, Human
uguguaaucaauaaacgau

SEQ ID NO: 2257446 - RNA, 20 nt, Human
uguguaaucaauaaacgauu

SEQ ID NO: 2257447 - RNA, 23 nt, Human
uguguaaucauuucuugggcccu

SEQ ID NO: 2257448 - RNA, 18 nt, Human
uguguaauuuaaaauugu

SEQ ID NO: 2257449 - RNA, 11 nt, Human
uguguaauuua

SEQ ID NO: 2257450 - RNA, 22 nt, Human
ugugggcuaguugggcuuccuc

SEQ ID NO: 2257451 - RNA, 22 nt, Human
ugugggcgugagaccugccccu

SEQ ID NO: 2257452 - RNA, 15 nt, Human
uguguaaucaauaaa

SEQ ID NO: 2257453 - RNA, 21 nt, Human
uguguaauagaaaacugaaaa

SEQ ID NO: 2257454 - RNA, 21 nt, Human
ugugggccucaaggacuugaa

SEQ ID NO: 2257455 - RNA, 19 nt, Human
ugugggccucaaggacuug

SEQ ID NO: 2257456 - RNA, 21 nt, Human
ugugggcgugagaccugcccc

SEQ ID NO: 2257457 - RNA, 20 nt, Human
ugugggcgugagaccugccc

SEQ ID NO: 2257458 - RNA, 16 nt, Human
ugugggcaggaaguga

SEQ ID NO: 2257459 - RNA, 21 nt, Human
ugugggagggagcagacagga

SEQ ID NO: 2257460 - RNA, 22 nt, Human
ugugggauguucagcacugucc

SEQ ID NO: 2257461 - RNA, 13 nt, Human
ugugggagggagc

SEQ ID NO: 2257462 - RNA, 19 nt, Human
ugugggauguucagcacug

SEQ ID NO: 2257463 - RNA, 19 nt, Human
uguguacaguguguaaagu

SEQ ID NO: 2257464 - RNA, 21 nt, Human
uguguacagaugaaugauaaa

SEQ ID NO: 2257465 - RNA, 10 nt, Human
uguguacagg

SEQ ID NO: 2257466 - RNA, 23 nt, Human
uguguacagaauucugcuaccuc

SEQ ID NO: 2257467 - RNA, 22 nt, Human
uguguacacgggacugacgcaa

SEQ ID NO: 2257468 - RNA, 18 nt, Human
uguguacagaugaaugau

SEQ ID NO: 2257469 - RNA, 21 nt, Human
uguguacagaauucugcuacc

SEQ ID NO: 2257470 - RNA, 19 nt, Human
uguguacaaagaaauaaca

SEQ ID NO: 2257471 - RNA, 14 nt, Human
uguguacaaagaaa

SEQ ID NO: 2257472 - RNA, 16 nt, Human
uguguaauuuuguucu

SEQ ID NO: 2257473 - RNA, 23 nt, Human
uguguaauuuaaaauugugaugu

SEQ ID NO: 2257474 - RNA, 22 nt, Human
uguguaauuuaaaauugugaug

SEQ ID NO: 2257475 - RNA, 19 nt, Human
uguguaauuuaaaauugug

SEQ ID NO: 2257476 - RNA, 17 nt, Human
uguguagcuuugcucuu

SEQ ID NO: 2257477 - RNA, 14 nt, Human
uguguagcuuugcu

SEQ ID NO: 2257478 - RNA, 12 nt, Human
uguguagggcgg

SEQ ID NO: 2257479 - RNA, 15 nt, Human
uguguagccugugca

SEQ ID NO: 2257480 - RNA, 16 nt, Human
uguguagccugugcau

SEQ ID NO: 2257481 - RNA, 17 nt, Human
uguguacauaacugaaa

SEQ ID NO: 2257482 - RNA, 14 nt, Human
uguguagccugugc

SEQ ID NO: 2257483 - RNA, 15 nt, Human
uguguacauaacuga

SEQ ID NO: 2257484 - RNA, 23 nt, Human
uguguagccugugcauguauguc

SEQ ID NO: 2257485 - RNA, 15 nt, Human
ugugcaugugugugc

SEQ ID NO: 2257486 - RNA, 22 nt, Human
ugugcagacucaauaaaaucau

SEQ ID NO: 2257487 - RNA, 14 nt, Human
ugugcaugugugug

SEQ ID NO: 2257488 - RNA, 21 nt, Human
ugugcauucuuuuaaaagaca

SEQ ID NO: 2257489 - RNA, 22 nt, Human
ugugcauucuuuuaaaagacaa

SEQ ID NO: 2257490 - RNA, 23 nt, Human
ugugcauucuuuuaaaagacaag

SEQ ID NO: 2257491 - RNA, 23 nt, Human
ugugcauuaucuagauacuguau

SEQ ID NO: 2257492 - RNA, 21 nt, Human
ugugcauuaucuagauacugu

SEQ ID NO: 2257493 - RNA, 20 nt, Human
ugugcauuaucuagauacug

SEQ ID NO: 2257494 - RNA, 23 nt, Human
ugugcauuuggugguuucagaaa

SEQ ID NO: 2257495 - RNA, 14 nt, Human
ugugccuucgucuu

SEQ ID NO: 2257496 - RNA, 23 nt, Human
ugugccuucgucuuucccauggg

SEQ ID NO: 2257497 - RNA, 17 nt, Human
ugugccuuggugugcug

SEQ ID NO: 2257498 - RNA, 16 nt, Human
ugugccuucuuuugau

SEQ ID NO: 2257499 - RNA, 14 nt, Human
ugugcauugcugug

SEQ ID NO: 2257500 - RNA, 15 nt, Human
ugugccuuuuauagc

SEQ ID NO: 2257501 - RNA, 19 nt, Human
ugugcagacucaauaaaau

SEQ ID NO: 2257502 - RNA, 18 nt, Human
ugugcagacucaauaaaa

SEQ ID NO: 2257503 - RNA, 17 nt, Human
ugugcagaaaacauugu

SEQ ID NO: 2257504 - RNA, 19 nt, Human
ugugcagaaaacauuguuc

SEQ ID NO: 2257505 - RNA, 21 nt, Human
ugugcacugucacuuugcucu

SEQ ID NO: 2257506 - RNA, 14 nt, Human
ugugcagaaaacau

SEQ ID NO: 2257507 - RNA, 15 nt, Human
ugugcagaaaacauu

SEQ ID NO: 2257508 - RNA, 16 nt, Human
ugugcagaaaacauug

SEQ ID NO: 2257509 - RNA, 14 nt, Human
ugugcauuaucuag

SEQ ID NO: 2257510 - RNA, 19 nt, Human
ugugcauuaucuagauacu

SEQ ID NO: 2257511 - RNA, 16 nt, Human
ugugcauuaucuagau

SEQ ID NO: 2257512 - RNA, 23 nt, Human
ugugcacuaaggggcccggccag

SEQ ID NO: 2257513 - RNA, 17 nt, Human
ugugcacugucacuuug

SEQ ID NO: 2257514 - RNA, 21 nt, Human
ugugcacugcccauggacagg

SEQ ID NO: 2257515 - RNA, 14 nt, Human
ugugcacugucacu

SEQ ID NO: 2257516 - RNA, 17 nt, Human
ugugcacuaaggggccc

SEQ ID NO: 2257517 - RNA, 16 nt, Human
ugugcacuaaggggcc

SEQ ID NO: 2257518 - RNA, 13 nt, Human
ugugcacugccca

SEQ ID NO: 2257519 - RNA, 12 nt, Human
ugugcacuaagg

SEQ ID NO: 2257520 - RNA, 19 nt, Human
ugugcacguggcauguggc

SEQ ID NO: 2257521 - RNA, 14 nt, Human
ugugcacguacaca

SEQ ID NO: 2257522 - RNA, 21 nt, Human
ugugcacaucugugucuuguu

SEQ ID NO: 2257523 - RNA, 13 nt, Human
ugugcacaucuuc

SEQ ID NO: 2257524 - RNA, 20 nt, Human
ugugcacaucucugcuugag

SEQ ID NO: 2257525 - RNA, 17 nt, Human
ugugcuuugcauuccua

SEQ ID NO: 2257526 - RNA, 19 nt, Human
uguggaaauuaagaagaaa

SEQ ID NO: 2257527 - RNA, 18 nt, Human
ugugcuuuccagcucacc

SEQ ID NO: 2257528 - RNA, 20 nt, Human
ugugcuuuccagcucacccc

SEQ ID NO: 2257529 - RNA, 16 nt, Human
ugugcuuucccugaac

SEQ ID NO: 2257530 - RNA, 22 nt, Human
ugugcuuucccugaacugggac

SEQ ID NO: 2257531 - RNA, 11 nt, Human
ugugcuuucua

SEQ ID NO: 2257532 - RNA, 15 nt, Human
ugugcuuucuauugu

SEQ ID NO: 2257533 - RNA, 17 nt, Human
ugugcuuucuauuguac

SEQ ID NO: 2257534 - RNA, 20 nt, Human
ugugcuuugacucaccuguu

SEQ ID NO: 2257535 - RNA, 19 nt, Human
ugugcuuuaugcugaaaca

SEQ ID NO: 2257536 - RNA, 14 nt, Human
ugugcuuuccagcu

SEQ ID NO: 2257537 - RNA, 15 nt, Human
ugugcuuuccagcuc

SEQ ID NO: 2257538 - RNA, 16 nt, Human
ugugcuuuccagcuca

SEQ ID NO: 2257539 - RNA, 20 nt, Human
ugugcuuuaugcugaaacag

SEQ ID NO: 2257540 - RNA, 18 nt, Human
ugugcuuuaugcugaaac

SEQ ID NO: 2257541 - RNA, 17 nt, Human
ugugcuuuaugcugaaa

SEQ ID NO: 2257542 - RNA, 13 nt, Human
ugugcuuuaugcu

SEQ ID NO: 2257543 - RNA, 14 nt, Human
ugugcuuuagcuug

SEQ ID NO: 2257544 - RNA, 23 nt, Human
ugugcuuguuuacagcacuacuc

SEQ ID NO: 2257545 - RNA, 14 nt, Human
ugugcuuguuuaca

SEQ ID NO: 2257546 - RNA, 14 nt, Human
ugugcuuguuaacu

SEQ ID NO: 2257547 - RNA, 17 nt, Human
ugugcucaggagcccug

SEQ ID NO: 2257548 - RNA, 15 nt, Human
ugugcucaggagccc

SEQ ID NO: 2257549 - RNA, 16 nt, Human
ugugcucaggagcccu

SEQ ID NO: 2257550 - RNA, 14 nt, Human
ugugcgccuacagg

SEQ ID NO: 2257551 - RNA, 16 nt, Human
ugugccuuuuauagcu

SEQ ID NO: 2257552 - RNA, 18 nt, Human
ugugccuuuuauagcuau

SEQ ID NO: 2257553 - RNA, 16 nt, Human
ugugccuuuugccauc

SEQ ID NO: 2257554 - RNA, 19 nt, Human
ugugcgccuacaggaguga

SEQ ID NO: 2257555 - RNA, 19 nt, Human
ugugcuaguaauuggaaag

SEQ ID NO: 2257556 - RNA, 15 nt, Human
ugugcuaugaauuuu

SEQ ID NO: 2257557 - RNA, 14 nt, Human
ugugcuaugaauuu

SEQ ID NO: 2257558 - RNA, 20 nt, Human
ugugcuagggaaacuucccg

SEQ ID NO: 2257559 - RNA, 16 nt, Human
ugugcucaaaauuuga

SEQ ID NO: 2257560 - RNA, 20 nt, Human
ugugcucaaaauuugaagaa

SEQ ID NO: 2257561 - RNA, 18 nt, Human
ugugcucaggacucagaa

SEQ ID NO: 2257562 - RNA, 16 nt, Human
ugugcuacuuugccuu

SEQ ID NO: 2257563 - RNA, 13 nt, Human
ugugcuauacugc

SEQ ID NO: 2257564 - RNA, 15 nt, Human
ugugcuacuuugccu

SEQ ID NO: 2257565 - RNA, 13 nt, Human
ugugcuagaugug

SEQ ID NO: 2257566 - RNA, 21 nt, Human
ugugcuauacugcauacuuuu

SEQ ID NO: 2257567 - RNA, 20 nt, Human
ugugcuauacugcauacuuu

SEQ ID NO: 2257568 - RNA, 18 nt, Human
ugugcuauacugcauacu

SEQ ID NO: 2257569 - RNA, 22 nt, Human
ugugaauugccugcagagagaa

SEQ ID NO: 2257570 - RNA, 15 nt, Human
ugugacauguuuuau

SEQ ID NO: 2257571 - RNA, 18 nt, Human
ugugaauugccugcagag

SEQ ID NO: 2257572 - RNA, 17 nt, Human
ugugacauuuauauauu

SEQ ID NO: 2257573 - RNA, 18 nt, Human
ugugacauuuauauauug

SEQ ID NO: 2257574 - RNA, 14 nt, Human
ugugaauucagauu

SEQ ID NO: 2257575 - RNA, 20 nt, Human
ugugaauuagcucacuuggu

SEQ ID NO: 2257576 - RNA, 13 nt, Human
ugugaauucagau

SEQ ID NO: 2257577 - RNA, 20 nt, Human
ugugaaguuagaauuccuuc

SEQ ID NO: 2257578 - RNA, 19 nt, Human
ugugaauggauuggauuau

SEQ ID NO: 2257579 - RNA, 21 nt, Human
ugugaauguugugauguauuc

SEQ ID NO: 2257580 - RNA, 22 nt, Human
ugugaauggauuggauuauuua

SEQ ID NO: 2257581 - RNA, 16 nt, Human
ugugaaugggaaaaga

SEQ ID NO: 2257582 - RNA, 23 nt, Human
ugugaaguccuucaccucacuga

SEQ ID NO: 2257583 - RNA, 18 nt, Human
ugugaagugaaugaaaca

SEQ ID NO: 2257584 - RNA, 18 nt, Human
ugugaaguguuaauacua

SEQ ID NO: 2257585 - RNA, 13 nt, Human
ugugaaguuagaa

SEQ ID NO: 2257586 - RNA, 14 nt, Human
ugugaaguuagaau

SEQ ID NO: 2257587 - RNA, 15 nt, Human
ugugaaguuagaauu

SEQ ID NO: 2257588 - RNA, 13 nt, Human
ugugaggagcugc

SEQ ID NO: 2257589 - RNA, 16 nt, Human
ugugaccaaugucuug

SEQ ID NO: 2257590 - RNA, 12 nt, Human
ugugaggaagcc

SEQ ID NO: 2257591 - RNA, 20 nt, Human
ugugaggaagccgcuggggc

SEQ ID NO: 2257592 - RNA, 20 nt, Human
ugugaggagcugcuggcuug

SEQ ID NO: 2257593 - RNA, 18 nt, Human
ugugaggagcugcuggcu

SEQ ID NO: 2257594 - RNA, 17 nt, Human
ugugaggagcugcuggc

SEQ ID NO: 2257595 - RNA, 14 nt, Human
ugugaggagcugcu

SEQ ID NO: 2257596 - RNA, 18 nt, Human
ugugaggcaggggcggag

SEQ ID NO: 2257597 - RNA, 13 nt, Human
ugugaggcagggg

SEQ ID NO: 2257598 - RNA, 13 nt, Human
ugugaggccaggg

SEQ ID NO: 2257599 - RNA, 13 nt, Human
ugugaccaaguua

SEQ ID NO: 2257600 - RNA, 12 nt, Human
ugugaggcaggg

SEQ ID NO: 2257601 - RNA, 15 nt, Human
ugugaccaaugucuu

SEQ ID NO: 2257602 - RNA, 13 nt, Human
ugugaggaagccg

SEQ ID NO: 2257603 - RNA, 18 nt, Human
ugugaggaagccgcuggg

SEQ ID NO: 2257604 - RNA, 23 nt, Human
ugugaggcccaugguugagaaau

SEQ ID NO: 2257605 - RNA, 13 nt, Human
ugugaggccccug

SEQ ID NO: 2257606 - RNA, 22 nt, Human
ugugaggccagggcagagugag

SEQ ID NO: 2257607 - RNA, 14 nt, Human
ugugaggccccugg

SEQ ID NO: 2257608 - RNA, 22 nt, Human
ugugaggccccuggacaagcag

SEQ ID NO: 2257609 - RNA, 14 nt, Human
ugugaggccuggcc

SEQ ID NO: 2257610 - RNA, 18 nt, Human
ugugaggccuggccaggc

SEQ ID NO: 2257611 - RNA, 17 nt, Human
ugugaggccagggcaga

SEQ ID NO: 2257612 - RNA, 16 nt, Human
ugugaggccagggcag

SEQ ID NO: 2257613 - RNA, 15 nt, Human
ugugaggccagggca

SEQ ID NO: 2257614 - RNA, 14 nt, Human
ugugaggccagggc

SEQ ID NO: 2257615 - RNA, 15 nt, Human
ugugagucaccaagc

SEQ ID NO: 2257616 - RNA, 17 nt, Human
ugugagucaccaagccc

SEQ ID NO: 2257617 - RNA, 19 nt, Human
ugugagucaccaagcccag

SEQ ID NO: 2257618 - RNA, 21 nt, Human
ugugagucaccaagcccaguu

SEQ ID NO: 2257619 - RNA, 14 nt, Human
ugugagugugugca

SEQ ID NO: 2257620 - RNA, 23 nt, Human
ugugaguguguccaagugugugu

SEQ ID NO: 2257621 - RNA, 20 nt, Human
ugugaguguguccaagugug

SEQ ID NO: 2257622 - RNA, 20 nt, Human
ugugaguguaagugugagua

SEQ ID NO: 2257623 - RNA, 16 nt, Human
ugugaguguaagugug

SEQ ID NO: 2257624 - RNA, 14 nt, Human
ugugaggcuguccu

SEQ ID NO: 2257625 - RNA, 16 nt, Human
ugugaguuuaaagcaa

SEQ ID NO: 2257626 - RNA, 21 nt, Human
ugugaguuuaccuuguauacu

SEQ ID NO: 2257627 - RNA, 16 nt, Human
ugugauauaagugugu

SEQ ID NO: 2257628 - RNA, 14 nt, Human
ugugauauuaacag

SEQ ID NO: 2257629 - RNA, 16 nt, Human
ugugauauauaagugu

SEQ ID NO: 2257630 - RNA, 15 nt, Human
ugugauauggagccc

SEQ ID NO: 2257631 - RNA, 19 nt, Human
ugugaguuuaccuuguaua

SEQ ID NO: 2257632 - RNA, 13 nt, Human
ugugauauauaag

SEQ ID NO: 2257633 - RNA, 14 nt, Human
ugugauauauaagu

SEQ ID NO: 2257634 - RNA, 15 nt, Human
ugugauauauaagug

SEQ ID NO: 2257635 - RNA, 22 nt, Human
ugugcacacacaccacacauac

SEQ ID NO: 2257636 - RNA, 19 nt, Human
ugugcacacacaccacaca

SEQ ID NO: 2257637 - RNA, 19 nt, Human
ugugcacaucucugcuuga

SEQ ID NO: 2257638 - RNA, 15 nt, Human
ugugcacaucucugc

SEQ ID NO: 2257639 - RNA, 14 nt, Human
ugugcacaucucug

SEQ ID NO: 2257640 - RNA, 13 nt, Human
ugugcacaucucu

SEQ ID NO: 2257641 - RNA, 20 nt, Human
ugugcacaucugugucuugu

SEQ ID NO: 2257642 - RNA, 17 nt, Human
ugugcacaucugugucu

SEQ ID NO: 2257643 - RNA, 20 nt, Human
ugugaucaggcuauguaugg

SEQ ID NO: 2257644 - RNA, 20 nt, Human
ugugcacaauucuguuuuag

SEQ ID NO: 2257645 - RNA, 15 nt, Human
ugugaucagaccaua

SEQ ID NO: 2257646 - RNA, 18 nt, Human
uguccucagguggccaug

SEQ ID NO: 2257647 - RNA, 19 nt, Human
uguccucagguggccaugc

SEQ ID NO: 2257648 - RNA, 10 nt, Human
uguccuccuc

SEQ ID NO: 2257649 - RNA, 11 nt, Human
uguccuccucg

SEQ ID NO: 2257650 - RNA, 21 nt, Human
uguccuccucggaucaccgag

SEQ ID NO: 2257651 - RNA, 14 nt, Human
uguccucagguggc

SEQ ID NO: 2257652 - RNA, 14 nt, Human
uguccucagcuucu

SEQ ID NO: 2257653 - RNA, 22 nt, Human
uguccucagccuugccagagau

SEQ ID NO: 2257654 - RNA, 21 nt, Human
uguccucagccuugccagaga

SEQ ID NO: 2257655 - RNA, 20 nt, Human
uguccucagccuugccagag

SEQ ID NO: 2257656 - RNA, 17 nt, Human
uguccucagccuugcca

SEQ ID NO: 2257657 - RNA, 23 nt, Human
uguccucuucugcaucuugggga

SEQ ID NO: 2257658 - RNA, 15 nt, Human
uguccucuugcucaa

SEQ ID NO: 2257659 - RNA, 23 nt, Human
uguccucuugcucaaaaaucugu

SEQ ID NO: 2257660 - RNA, 21 nt, Human
uguccuccugguggguccagg

SEQ ID NO: 2257661 - RNA, 19 nt, Human
uguccucuucugcaucuug

SEQ ID NO: 2257662 - RNA, 12 nt, Human
uguccuccuggu

SEQ ID NO: 2257663 - RNA, 19 nt, Human
uguccucucuggcugggga

SEQ ID NO: 2257664 - RNA, 12 nt, Human
uguccugaccac

SEQ ID NO: 2257665 - RNA, 14 nt, Human
uguccugaccaccc

SEQ ID NO: 2257666 - RNA, 15 nt, Human
uguccugaccacccu

SEQ ID NO: 2257667 - RNA, 19 nt, Human
ugucugaagucacugcaca

SEQ ID NO: 2257668 - RNA, 22 nt, Human
ugucugaaggacacuuccugcc

SEQ ID NO: 2257669 - RNA, 23 nt, Human
ugucugaaggacacuuccugccu

SEQ ID NO: 2257670 - RNA, 17 nt, Human
ugucugaagucacugca

SEQ ID NO: 2257671 - RNA, 18 nt, Human
ugucugaagucacugcac

SEQ ID NO: 2257672 - RNA, 16 nt, Human
ugucugaagucacugc

SEQ ID NO: 2257673 - RNA, 17 nt, Human
ugucugaaggacacuuc

SEQ ID NO: 2257674 - RNA, 18 nt, Human
ugucugaaggacacuucc

SEQ ID NO: 2257675 - RNA, 19 nt, Human
ugucugaaggacacuuccu

SEQ ID NO: 2257676 - RNA, 15 nt, Human
ugucuggauucccag

SEQ ID NO: 2257677 - RNA, 19 nt, Human
ugucuggauucccaggaug

SEQ ID NO: 2257678 - RNA, 19 nt, Human
ugucugcuuucuccauugu

SEQ ID NO: 2257679 - RNA, 15 nt, Human
ugucugguuuuaaca

SEQ ID NO: 2257680 - RNA, 15 nt, Human
ugucuggccaggccu

SEQ ID NO: 2257681 - RNA, 16 nt, Human
ugucugguuuuaacaa

SEQ ID NO: 2257682 - RNA, 23 nt, Human
ugucuuuuucuggacugaagccu

SEQ ID NO: 2257683 - RNA, 17 nt, Human
ugucuuuuucuggacug

SEQ ID NO: 2257684 - RNA, 14 nt, Human
ugucuuuugcauga

SEQ ID NO: 2257685 - RNA, 14 nt, Human
ugucuuuugaauau

SEQ ID NO: 2257686 - RNA, 12 nt, Human
ugucuuuugcau

SEQ ID NO: 2257687 - RNA, 23 nt, Human
ugugaaaagaaaaaugagccugg

SEQ ID NO: 2257688 - RNA, 13 nt, Human
ugucuuuugaaua

SEQ ID NO: 2257689 - RNA, 23 nt, Human
ugucuuuucuugcaugaggcuag

SEQ ID NO: 2257690 - RNA, 20 nt, Human
ugucuuuuucuggacugaag

SEQ ID NO: 2257691 - RNA, 17 nt, Human
ugugaaaaucaaauaca

SEQ ID NO: 2257692 - RNA, 13 nt, Human
ugugaaaaugggu

SEQ ID NO: 2257693 - RNA, 14 nt, Human
ugugaaaauggguu

SEQ ID NO: 2257694 - RNA, 16 nt, Human
ugugaaaaugugugug

SEQ ID NO: 2257695 - RNA, 22 nt, Human
ugugaaaaugguccaggagaag

SEQ ID NO: 2257696 - RNA, 18 nt, Human
ugugaaaaugguccagga

SEQ ID NO: 2257697 - RNA, 17 nt, Human
ugugaaaaugugugugu

SEQ ID NO: 2257698 - RNA, 14 nt, Human
ugugaaggacccuu

SEQ ID NO: 2257699 - RNA, 13 nt, Human
ugugaaggacccu

SEQ ID NO: 2257700 - RNA, 15 nt, Human
ugucuuucugagcac

SEQ ID NO: 2257701 - RNA, 16 nt, Human
ugucugucccgggguc

SEQ ID NO: 2257702 - RNA, 21 nt, Human
ugucugucccgggguccugug

SEQ ID NO: 2257703 - RNA, 12 nt, Human
ugucuuucugag

SEQ ID NO: 2257704 - RNA, 14 nt, Human
ugucuuuggacccu

SEQ ID NO: 2257705 - RNA, 16 nt, Human
ugucuuuggacccuga

SEQ ID NO: 2257706 - RNA, 21 nt, Human
ugucuuuucuugcaugaggcu

SEQ ID NO: 2257707 - RNA, 23 nt, Human
ugucuguagcuccucaacucacc

SEQ ID NO: 2257708 - RNA, 17 nt, Human
ugucuguagcuccucaa

SEQ ID NO: 2257709 - RNA, 19 nt, Human
ugucuguagagggcccugg

SEQ ID NO: 2257710 - RNA, 20 nt, Human
ugucuguagagggcccuggu

SEQ ID NO: 2257711 - RNA, 21 nt, Human
ugucuguagagggcccuggug

SEQ ID NO: 2257712 - RNA, 23 nt, Human
ugucuguagagggcccugguguu

SEQ ID NO: 2257713 - RNA, 13 nt, Human
ugucuuuccuaga

SEQ ID NO: 2257714 - RNA, 19 nt, Human
ugucugucucuccaucugu

SEQ ID NO: 2257715 - RNA, 21 nt, Human
ugucuuuccacuccuccuagc

SEQ ID NO: 2257716 - RNA, 13 nt, Human
ugucuguacacgu

SEQ ID NO: 2257717 - RNA, 15 nt, Human
ugucuguacacgugu

SEQ ID NO: 2257718 - RNA, 22 nt, Human
ugucugguuuuaacaauuuccu

SEQ ID NO: 2257719 - RNA, 19 nt, Human
ugucuguacacguguccug

SEQ ID NO: 2257720 - RNA, 20 nt, Human
ugucuguacacguguccugu

SEQ ID NO: 2257721 - RNA, 21 nt, Human
ugucuguacacguguccugua

SEQ ID NO: 2257722 - RNA, 16 nt, Human
ugucuguagagggccc

SEQ ID NO: 2257723 - RNA, 16 nt, Human
uguauuuucuuucucu

SEQ ID NO: 2257724 - RNA, 23 nt, Human
uguauuuuccaagugugcauauu

SEQ ID NO: 2257725 - RNA, 17 nt, Human
ugucacacacuuuggcu

SEQ ID NO: 2257726 - RNA, 12 nt, Human
ugucacaggcag

SEQ ID NO: 2257727 - RNA, 14 nt, Human
ugucacaccagcca

SEQ ID NO: 2257728 - RNA, 15 nt, Human
ugucacaccagccau

SEQ ID NO: 2257729 - RNA, 14 nt, Human
uguauuuuguauug

SEQ ID NO: 2257730 - RNA, 15 nt, Human
ugucacacagggcag

SEQ ID NO: 2257731 - RNA, 13 nt, Human
ugucacaccagcc

SEQ ID NO: 2257732 - RNA, 19 nt, Human
ugucaccaccuucccagcu

SEQ ID NO: 2257733 - RNA, 18 nt, Human
ugucaccaccuucccagc

SEQ ID NO: 2257734 - RNA, 16 nt, Human
ugucaccaccuuccca

SEQ ID NO: 2257735 - RNA, 19 nt, Human
ugucaccggauccugggug

SEQ ID NO: 2257736 - RNA, 18 nt, Human
ugucaccggauccugggu

SEQ ID NO: 2257737 - RNA, 18 nt, Human
ugucacccuccaccucuu

SEQ ID NO: 2257738 - RNA, 22 nt, Human
ugucacccuccaccucuucacc

SEQ ID NO: 2257739 - RNA, 22 nt, Human
ugucacccuuaggccagcacca

SEQ ID NO: 2257740 - RNA, 23 nt, Human
ugucaccaccuucccagcucucc

SEQ ID NO: 2257741 - RNA, 21 nt, Human
ugucaccaccuucccagcucu

SEQ ID NO: 2257742 - RNA, 13 nt, Human
uguauuuaaauau

SEQ ID NO: 2257743 - RNA, 17 nt, Human
uguauuuaugugugagg

SEQ ID NO: 2257744 - RNA, 13 nt, Human
uguauuuauucaa

SEQ ID NO: 2257745 - RNA, 14 nt, Human
uguauuuauucaau

SEQ ID NO: 2257746 - RNA, 17 nt, Human
uguauuuauucaauaaa

SEQ ID NO: 2257747 - RNA, 19 nt, Human
uguauuuauucaauaaagu

SEQ ID NO: 2257748 - RNA, 15 nt, Human
uguauuuauuuaaaa

SEQ ID NO: 2257749 - RNA, 22 nt, Human
uguauuuauucaauaaaguauu

SEQ ID NO: 2257750 - RNA, 14 nt, Human
uguauuuauuccau

SEQ ID NO: 2257751 - RNA, 23 nt, Human
uguauuuauuccauauucaugua

SEQ ID NO: 2257752 - RNA, 20 nt, Human
uguauuuauuuaguauuuau

SEQ ID NO: 2257753 - RNA, 16 nt, Human
uguauuuauuuaaaag

SEQ ID NO: 2257754 - RNA, 18 nt, Human
uguauuuauuuaaaagau

SEQ ID NO: 2257755 - RNA, 20 nt, Human
uguauuuauuuaaaagauuc

SEQ ID NO: 2257756 - RNA, 18 nt, Human
uguauuuuauuuagacaa

SEQ ID NO: 2257757 - RNA, 19 nt, Human
uguauuuuauuuagacaag

SEQ ID NO: 2257758 - RNA, 13 nt, Human
uguauuuuauugu

SEQ ID NO: 2257759 - RNA, 14 nt, Human
uguauuuuauugua

SEQ ID NO: 2257760 - RNA, 21 nt, Human
uguauuuuauuguaacagaca

SEQ ID NO: 2257761 - RNA, 22 nt, Human
uguauuuuauuuagacaagaga

SEQ ID NO: 2257762 - RNA, 10 nt, Human
uguauuuucc

SEQ ID NO: 2257763 - RNA, 12 nt, Human
uguauuuuccaa

SEQ ID NO: 2257764 - RNA, 17 nt, Human
uguauuuuccaagugug

SEQ ID NO: 2257765 - RNA, 18 nt, Human
uguauuuuccaagugugc

SEQ ID NO: 2257766 - RNA, 20 nt, Human
uguauuuuccaagugugcau

SEQ ID NO: 2257767 - RNA, 21 nt, Human
uguauuuuccaagugugcaua

SEQ ID NO: 2257768 - RNA, 22 nt, Human
uguauuuuccaagugugcauau

SEQ ID NO: 2257769 - RNA, 15 nt, Human
uguauuuccagugca

SEQ ID NO: 2257770 - RNA, 20 nt, Human
uguauuuauuuuccucccca

SEQ ID NO: 2257771 - RNA, 19 nt, Human
uguauuuauuuuccucccc

SEQ ID NO: 2257772 - RNA, 18 nt, Human
uguauuuauuuuccuccc

SEQ ID NO: 2257773 - RNA, 23 nt, Human
uguauuuccccaacauguaauaa

SEQ ID NO: 2257774 - RNA, 14 nt, Human
uguauuguucccag

SEQ ID NO: 2257775 - RNA, 13 nt, Human
uguauuguuccca

SEQ ID NO: 2257776 - RNA, 12 nt, Human
uguauuguuccc

SEQ ID NO: 2257777 - RNA, 20 nt, Human
uguauugugucuuuugcaug

SEQ ID NO: 2257778 - RNA, 19 nt, Human
uguauuguucccagugaca

SEQ ID NO: 2257779 - RNA, 15 nt, Human
uguauuguucccagu

SEQ ID NO: 2257780 - RNA, 18 nt, Human
uguauugugucuuuugca

SEQ ID NO: 2257781 - RNA, 19 nt, Human
uguauugugucuuuugcau

SEQ ID NO: 2257782 - RNA, 21 nt, Human
uguauugugucuuuugcauga

SEQ ID NO: 2257783 - RNA, 22 nt, Human
uguauucuuugauguuaacaca

SEQ ID NO: 2257784 - RNA, 19 nt, Human
uguauucuuugauguuaac

SEQ ID NO: 2257785 - RNA, 21 nt, Human
uguauucuuugauguuaacac

SEQ ID NO: 2257786 - RNA, 21 nt, Human
uguauucuuaaauucauuuua

SEQ ID NO: 2257787 - RNA, 16 nt, Human
uguauucuuugauguu

SEQ ID NO: 2257788 - RNA, 17 nt, Human
uguauucuuugauguua

SEQ ID NO: 2257789 - RNA, 18 nt, Human
uguauucuuugauguuaa

SEQ ID NO: 2257790 - RNA, 16 nt, Human
uguauucuuaaauuca

SEQ ID NO: 2257791 - RNA, 18 nt, Human
uguaugauguguugugau

SEQ ID NO: 2257792 - RNA, 21 nt, Human
uguauucucugagcugugcag

SEQ ID NO: 2257793 - RNA, 20 nt, Human
uguauucucugagcugugca

SEQ ID NO: 2257794 - RNA, 19 nt, Human
uguauucucugagcugugc

SEQ ID NO: 2257795 - RNA, 14 nt, Human
uguauucucugagc

SEQ ID NO: 2257796 - RNA, 22 nt, Human
uguauucucuccuguaccucuu

SEQ ID NO: 2257797 - RNA, 13 nt, Human
uguauucucugag

SEQ ID NO: 2257798 - RNA, 19 nt, Human
uguaguuuuucuucaacau

SEQ ID NO: 2257799 - RNA, 20 nt, Human
uguaguuuuaucacauguau

SEQ ID NO: 2257800 - RNA, 13 nt, Human
uguauaaaaauag

SEQ ID NO: 2257801 - RNA, 17 nt, Human
uguauaaaaaaaauagu

SEQ ID NO: 2257802 - RNA, 19 nt, Human
uguaguuuaccucuuuaaa

SEQ ID NO: 2257803 - RNA, 22 nt, Human
uguaguuuuaucacauguaugu

SEQ ID NO: 2257804 - RNA, 21 nt, Human
uguaguugcguggacucugca

SEQ ID NO: 2257805 - RNA, 19 nt, Human
uguaguucuugucugauug

SEQ ID NO: 2257806 - RNA, 15 nt, Human
uguaguugcguggac

SEQ ID NO: 2257807 - RNA, 20 nt, Human
uguaguugcguggacucugc

SEQ ID NO: 2257808 - RNA, 14 nt, Human
uguaguugaacuga

SEQ ID NO: 2257809 - RNA, 20 nt, Human
uguaguugaacugauaguua

SEQ ID NO: 2257810 - RNA, 22 nt, Human
uguaguugcaauagaacagaga

SEQ ID NO: 2257811 - RNA, 13 nt, Human
uguaugauguguu

SEQ ID NO: 2257812 - RNA, 15 nt, Human
uguaugauucccagc

SEQ ID NO: 2257813 - RNA, 22 nt, Human
uguauaaaagggacugagaaau

SEQ ID NO: 2257814 - RNA, 16 nt, Human
ugucacgauugucauc

SEQ ID NO: 2257815 - RNA, 13 nt, Human
ugucaucugugca

SEQ ID NO: 2257816 - RNA, 14 nt, Human
ugucaccugugcuu

SEQ ID NO: 2257817 - RNA, 23 nt, Human
ugucaccgugagcagcuuuggaa

SEQ ID NO: 2257818 - RNA, 18 nt, Human
ugucaccguggaccuucc

SEQ ID NO: 2257819 - RNA, 22 nt, Human
ugucaccgugagcagcuuugga

SEQ ID NO: 2257820 - RNA, 16 nt, Human
ugucaccgugagcagc

SEQ ID NO: 2257821 - RNA, 19 nt, Human
ugucaccguggaccuuccu

SEQ ID NO: 2257822 - RNA, 20 nt, Human
ugucaccguggaccuuccug

SEQ ID NO: 2257823 - RNA, 21 nt, Human
ugucaccguggaccuuccugc

SEQ ID NO: 2257824 - RNA, 22 nt, Human
ugucaccguggaccuuccugcc

SEQ ID NO: 2257825 - RNA, 13 nt, Human
ugucaccugaaga

SEQ ID NO: 2257826 - RNA, 18 nt, Human
ugucauuaaaauaaauaa

SEQ ID NO: 2257827 - RNA, 16 nt, Human
ugucauuuauauagau

SEQ ID NO: 2257828 - RNA, 13 nt, Human
ugucauuaaaaua

SEQ ID NO: 2257829 - RNA, 23 nt, Human
ugucaucuuucuucuauuuuauu

SEQ ID NO: 2257830 - RNA, 12 nt, Human
ugucaugaacau

SEQ ID NO: 2257831 - RNA, 16 nt, Human
ugucaugaacauguuc

SEQ ID NO: 2257832 - RNA, 16 nt, Human
ugucaugaauucuuau

SEQ ID NO: 2257833 - RNA, 19 nt, Human
ugucaugaauucuuaugcu

SEQ ID NO: 2257834 - RNA, 21 nt, Human
ugucaugaauucuuaugcuua

SEQ ID NO: 2257835 - RNA, 14 nt, Human
ugucaugccccccu

SEQ ID NO: 2257836 - RNA, 15 nt, Human
ugucaugccccccuc

SEQ ID NO: 2257837 - RNA, 16 nt, Human
ugucaugccccccuca

SEQ ID NO: 2257838 - RNA, 17 nt, Human
ugucaugccccccucaa

SEQ ID NO: 2257839 - RNA, 23 nt, Human
ugucaugccccccucaaaccucc

SEQ ID NO: 2257840 - RNA, 19 nt, Human
uguccagggcccugagcuc

SEQ ID NO: 2257841 - RNA, 17 nt, Human
uguccagggcccugagc

SEQ ID NO: 2257842 - RNA, 17 nt, Human
ugucauuucauuuccua

SEQ ID NO: 2257843 - RNA, 16 nt, Human
ugucauuucauuuccu

SEQ ID NO: 2257844 - RNA, 19 nt, Human
ugucauuugagcagggcuc

SEQ ID NO: 2257845 - RNA, 16 nt, Human
ugucauuugagcaggg

SEQ ID NO: 2257846 - RNA, 14 nt, Human
ugucauuucauuuc

SEQ ID NO: 2257847 - RNA, 16 nt, Human
ugucccaacuuguaaa

SEQ ID NO: 2257848 - RNA, 23 nt, Human
uguccaguggguagguuggacug

SEQ ID NO: 2257849 - RNA, 13 nt, Human
uguccagugccca

SEQ ID NO: 2257850 - RNA, 14 nt, Human
uguccagugcccau

SEQ ID NO: 2257851 - RNA, 15 nt, Human
uguccagugcccauu

SEQ ID NO: 2257852 - RNA, 16 nt, Human
uguccagugcccauuc

SEQ ID NO: 2257853 - RNA, 17 nt, Human
uguccagugcccauucc

SEQ ID NO: 2257854 - RNA, 18 nt, Human
uguccagugcccauuccu

SEQ ID NO: 2257855 - RNA, 23 nt, Human
uguccagugcccauuccucaccu

SEQ ID NO: 2257856 - RNA, 17 nt, Human
uguccaguucccagaag

SEQ ID NO: 2257857 - RNA, 12 nt, Human
uguccuacucug

SEQ ID NO: 2257858 - RNA, 17 nt, Human
uguccuacucuguguca

SEQ ID NO: 2257859 - RNA, 16 nt, Human
uguccucagccuugcc

SEQ ID NO: 2257860 - RNA, 13 nt, Human
uguccucagccuu

SEQ ID NO: 2257861 - RNA, 12 nt, Human
uguccucagccu

SEQ ID NO: 2257862 - RNA, 18 nt, Human
ugucccccucuguccagg

SEQ ID NO: 2257863 - RNA, 20 nt, Human
ugucccccuaauauuaggga

SEQ ID NO: 2257864 - RNA, 16 nt, Human
uguccccgacccuugc

SEQ ID NO: 2257865 - RNA, 20 nt, Human
uguccuacccacccuccuuu

SEQ ID NO: 2257866 - RNA, 17 nt, Human
uguccccgacccuugcc

SEQ ID NO: 2257867 - RNA, 19 nt, Human
uguccccaguuugcagaaa

SEQ ID NO: 2257868 - RNA, 13 nt, Human
uguccccaccgca

SEQ ID NO: 2257869 - RNA, 23 nt, Human
ugucccaccucuucucuuccugu

SEQ ID NO: 2257870 - RNA, 13 nt, Human
ugucccccagcuc

SEQ ID NO: 2257871 - RNA, 15 nt, Human
ugucccccagcucug

SEQ ID NO: 2257872 - RNA, 16 nt, Human
ugucccccagcucugg

SEQ ID NO: 2257873 - RNA, 17 nt, Human
ugucccccagcucuggu

SEQ ID NO: 2257874 - RNA, 19 nt, Human
uguccccaccgcagacagg

SEQ ID NO: 2257875 - RNA, 22 nt, Human
uguccccaccgcagacaggacc

SEQ ID NO: 2257876 - RNA, 13 nt, Human
ugucccaccagcu

SEQ ID NO: 2257877 - RNA, 18 nt, Human
uguccaugcgcucagggc

SEQ ID NO: 2257878 - RNA, 17 nt, Human
ugucccacccccacccc

SEQ ID NO: 2257879 - RNA, 18 nt, Human
ugucccacccccaccccc

SEQ ID NO: 2257880 - RNA, 22 nt, Human
ugucccacccccacccccagcu

SEQ ID NO: 2257881 - RNA, 12 nt, Human
ugucccaccucu

SEQ ID NO: 2257882 - RNA, 13 nt, Human
ugucccaccucuu

SEQ ID NO: 2257883 - RNA, 21 nt, Human
ugucccaccucuucucuuccu

SEQ ID NO: 2257884 - RNA, 22 nt, Human
ugucccaccucuucucuuccug

SEQ ID NO: 2257885 - RNA, 23 nt, Human
ugucccacccccacccccagcuc

SEQ ID NO: 2257886 - RNA, 18 nt, Human
uguccccaccgcagacag

SEQ ID NO: 2257887 - RNA, 21 nt, Human
uguagccuuccuccacauccu

SEQ ID NO: 2257888 - RNA, 17 nt, Human
uguagccuugcccggau

SEQ ID NO: 2257889 - RNA, 16 nt, Human
uguagccuugcccgga

SEQ ID NO: 2257890 - RNA, 14 nt, Human
uguagcugguuucc

SEQ ID NO: 2257891 - RNA, 14 nt, Human
uguaguuaggaaau

SEQ ID NO: 2257892 - RNA, 13 nt, Human
uguaguuaggaaa

SEQ ID NO: 2257893 - RNA, 12 nt, Human
uguaguuaggaa

SEQ ID NO: 2257894 - RNA, 13 nt, Human
uguaguuaaugau

SEQ ID NO: 2257895 - RNA, 23 nt, Human
uguaguuaggaaauaaaaccuuu

SEQ ID NO: 2257896 - RNA, 15 nt, Human
uguaguuaggaaaua

SEQ ID NO: 2257897 - RNA, 22 nt, Human
uguaguguuggagaagaacuga

SEQ ID NO: 2257898 - RNA, 22 nt, Human
uguagcccacucugcucgccuu

SEQ ID NO: 2257899 - RNA, 17 nt, Human
uguagcccacucugcuc

SEQ ID NO: 2257900 - RNA, 16 nt, Human
uguagcccacucugcu

SEQ ID NO: 2257901 - RNA, 18 nt, Human
uguagcccccuggccucu

SEQ ID NO: 2257902 - RNA, 17 nt, Human
uguagcccccuggccuc

SEQ ID NO: 2257903 - RNA, 16 nt, Human
uguagcccccuggccu

SEQ ID NO: 2257904 - RNA, 22 nt, Human
uguagccaugaccuuacauuuc

SEQ ID NO: 2257905 - RNA, 11 nt, Human
uguagccaugg

SEQ ID NO: 2257906 - RNA, 15 nt, Human
uguagccaugggacc

SEQ ID NO: 2257907 - RNA, 16 nt, Human
uguagccaugggacca

SEQ ID NO: 2257908 - RNA, 14 nt, Human
uguagcccacacuu

SEQ ID NO: 2257909 - RNA, 16 nt, Human
uguagcccacacuuga

SEQ ID NO: 2257910 - RNA, 22 nt, Human
uguagccucgccgucugugaau

SEQ ID NO: 2257911 - RNA, 13 nt, Human
uguagccugugca

SEQ ID NO: 2257912 - RNA, 14 nt, Human
uguagccugugcau

SEQ ID NO: 2257913 - RNA, 15 nt, Human
uguagccugugcaug

SEQ ID NO: 2257914 - RNA, 22 nt, Human
uguagccugugcauguaugucu

SEQ ID NO: 2257915 - RNA, 15 nt, Human
uguagccuuccucca

SEQ ID NO: 2257916 - RNA, 23 nt, Human
uguagccuggauauuauucuugu

SEQ ID NO: 2257917 - RNA, 16 nt, Human
uguagccugugcaugu

SEQ ID NO: 2257918 - RNA, 20 nt, Human
uguagccugugcauguaugu

SEQ ID NO: 2257919 - RNA, 18 nt, Human
uguagccccucuccugga

SEQ ID NO: 2257920 - RNA, 20 nt, Human
uguagcccccuggccucugu

SEQ ID NO: 2257921 - RNA, 19 nt, Human
uguagcccccuggccucug

SEQ ID NO: 2257922 - RNA, 12 nt, Human
uguacugggggu

SEQ ID NO: 2257923 - RNA, 12 nt, Human
uguacuguaguu

SEQ ID NO: 2257924 - RNA, 13 nt, Human
uguacuggggguu

SEQ ID NO: 2257925 - RNA, 18 nt, Human
uguacuguaaagagaccu

SEQ ID NO: 2257926 - RNA, 16 nt, Human
uguacuguaguuuuuc

SEQ ID NO: 2257927 - RNA, 15 nt, Human
uguacuguucugugu

SEQ ID NO: 2257928 - RNA, 23 nt, Human
uguacuguucucuucuugaacac

SEQ ID NO: 2257929 - RNA, 19 nt, Human
uguacugcauaugaaagga

SEQ ID NO: 2257930 - RNA, 15 nt, Human
uguaccuuuuaacac

SEQ ID NO: 2257931 - RNA, 14 nt, Human
uguaccucugccuc

SEQ ID NO: 2257932 - RNA, 21 nt, Human
uguaccuuuugaggagcccca

SEQ ID NO: 2257933 - RNA, 22 nt, Human
uguaccuuuuaacaccugaugu

SEQ ID NO: 2257934 - RNA, 23 nt, Human
uguaccuuuuaacaccugaugug

SEQ ID NO: 2257935 - RNA, 15 nt, Human
uguacgucugacagg

SEQ ID NO: 2257936 - RNA, 22 nt, Human
uguaccuuuugaggagccccag

SEQ ID NO: 2257937 - RNA, 11 nt, Human
uguagcaguga

SEQ ID NO: 2257938 - RNA, 16 nt, Human
uguagauuuauuucau

SEQ ID NO: 2257939 - RNA, 15 nt, Human
uguagauuuauuuca

SEQ ID NO: 2257940 - RNA, 10 nt, Human
uguagccaag

SEQ ID NO: 2257941 - RNA, 18 nt, Human
uguagcauuucuugaugu

SEQ ID NO: 2257942 - RNA, 23 nt, Human
uguagcagugagaaaaagcuccu

SEQ ID NO: 2257943 - RNA, 16 nt, Human
uguagcaucuucugga

SEQ ID NO: 2257944 - RNA, 17 nt, Human
uguagcauuucuugaug

SEQ ID NO: 2257945 - RNA, 21 nt, Human
uguagauauugugaaguacau

SEQ ID NO: 2257946 - RNA, 19 nt, Human
uguagauauugugaaguac

SEQ ID NO: 2257947 - RNA, 18 nt, Human
uguagaucagagcagcag

SEQ ID NO: 2257948 - RNA, 22 nt, Human
uguagauauugugaaguacaua

SEQ ID NO: 2257949 - RNA, 16 nt, Human
uguacuguucuguguc

SEQ ID NO: 2257950 - RNA, 19 nt, Human
uguacuguucugugucuuu

SEQ ID NO: 2257951 - RNA, 11 nt, Human
uguagaugaaa

SEQ ID NO: 2257952 - RNA, 13 nt, Human
uguagaugaaaaa

SEQ ID NO: 2257953 - RNA, 19 nt, Human
uguagaugaaaaagcaugu

SEQ ID NO: 2257954 - RNA, 20 nt, Human
uguagaugaaaaagcaugua

SEQ ID NO: 2257955 - RNA, 21 nt, Human
uguagaugaaaaagcauguac

SEQ ID NO: 2257956 - RNA, 23 nt, Human
uguagaugaaaaagcauguacag

SEQ ID NO: 2257957 - RNA, 15 nt, Human
uguagauucugugga

SEQ ID NO: 2257958 - RNA, 22 nt, Human
uguagaugaaaaagcauguaca

SEQ ID NO: 2257959 - RNA, 20 nt, Human
uguaaucccagcuacucggg

SEQ ID NO: 2257960 - RNA, 23 nt, Human
uguaaucccagcuacucaggagg

SEQ ID NO: 2257961 - RNA, 22 nt, Human
uguaaucccagcuacuugggag

SEQ ID NO: 2257962 - RNA, 16 nt, Human
uguaauccgaaucucu

SEQ ID NO: 2257963 - RNA, 21 nt, Human
uguaaucccagcuacucagga

SEQ ID NO: 2257964 - RNA, 20 nt, Human
uguaaucccagcuacucagg

SEQ ID NO: 2257965 - RNA, 20 nt, Human
uguaaucaauguuucuucua

SEQ ID NO: 2257966 - RNA, 14 nt, Human
uguaaucacagcua

SEQ ID NO: 2257967 - RNA, 13 nt, Human
uguaaucaauaaa

SEQ ID NO: 2257968 - RNA, 14 nt, Human
uguaaucaauaaac

SEQ ID NO: 2257969 - RNA, 15 nt, Human
uguaaucaauaaacg

SEQ ID NO: 2257970 - RNA, 14 nt, Human
uguaaucaauguuu

SEQ ID NO: 2257971 - RNA, 16 nt, Human
uguaaucaauaaacga

SEQ ID NO: 2257972 - RNA, 18 nt, Human
uguaaucaauaaacgauu

SEQ ID NO: 2257973 - RNA, 17 nt, Human
uguaauauaaagauguu

SEQ ID NO: 2257974 - RNA, 21 nt, Human
uguaaucguuauguguguaua

SEQ ID NO: 2257975 - RNA, 16 nt, Human
uguaaucuauguauau

SEQ ID NO: 2257976 - RNA, 17 nt, Human
uguaaucucguuucaaa

SEQ ID NO: 2257977 - RNA, 18 nt, Human
uguaaucucguuucaaaa

SEQ ID NO: 2257978 - RNA, 19 nt, Human
uguaaucguuaugugugua

SEQ ID NO: 2257979 - RNA, 18 nt, Human
uguaaucguuaugugugu

SEQ ID NO: 2257980 - RNA, 16 nt, Human
uguaaucguuaugugu

SEQ ID NO: 2257981 - RNA, 17 nt, Human
uguaaucccagcuacuu

SEQ ID NO: 2257982 - RNA, 15 nt, Human
uguaaucuugaauug

SEQ ID NO: 2257983 - RNA, 19 nt, Human
uguaaucucguuucaaaaa

SEQ ID NO: 2257984 - RNA, 13 nt, Human
uguaauguuacug

SEQ ID NO: 2257985 - RNA, 14 nt, Human
uguaauguuacuga

SEQ ID NO: 2257986 - RNA, 23 nt, Human
uguaaugucaccaccuucccagc

SEQ ID NO: 2257987 - RNA, 21 nt, Human
uguaaucuugaauuguaacug

SEQ ID NO: 2257988 - RNA, 16 nt, Human
uggucacacacugaug

SEQ ID NO: 2257989 - RNA, 15 nt, Human
uggucacacacugau

SEQ ID NO: 2257990 - RNA, 14 nt, Human
uggucacacacuga

SEQ ID NO: 2257991 - RNA, 22 nt, Human
uggucaauccgaaguaugaggg

SEQ ID NO: 2257992 - RNA, 22 nt, Human
uggucaagauuuugaaugcuuc

SEQ ID NO: 2257993 - RNA, 22 nt, Human
ugguauuguauuuauucaauaa

SEQ ID NO: 2257994 - RNA, 19 nt, Human
ugguauuguauuuauucaa

SEQ ID NO: 2257995 - RNA, 13 nt, Human
uggucacagccuc

SEQ ID NO: 2257996 - RNA, 14 nt, Human
uggucacagccucc

SEQ ID NO: 2257997 - RNA, 15 nt, Human
uggucacagccuccu

SEQ ID NO: 2257998 - RNA, 16 nt, Human
uggucacagccuccuc

SEQ ID NO: 2257999 - RNA, 17 nt, Human
uggucacagccuccucu

SEQ ID NO: 2258000 - RNA, 18 nt, Human
uggucacagccuccucug

SEQ ID NO: 2258001 - RNA, 14 nt, Human
uguaaguuucaggu

SEQ ID NO: 2258002 - RNA, 15 nt, Human
uggucacagcggagg

SEQ ID NO: 2258003 - RNA, 21 nt, Human
uggucacagcggaggugugga

SEQ ID NO: 2258004 - RNA, 12 nt, Human
uguaauaaauau

SEQ ID NO: 2258005 - RNA, 13 nt, Human
uguaauaaacuuu

SEQ ID NO: 2258006 - RNA, 15 nt, Human
uguaauaaacuuuaa

SEQ ID NO: 2258007 - RNA, 18 nt, Human
uguaauagaaaacugaaa

SEQ ID NO: 2258008 - RNA, 20 nt, Human
uguaauagaaaacugaaaau

SEQ ID NO: 2258009 - RNA, 16 nt, Human
uguaauagaaaacuga

SEQ ID NO: 2258010 - RNA, 17 nt, Human
uguaauaaacuuuaaua

SEQ ID NO: 2258011 - RNA, 20 nt, Human
uguaauaaaaaguauauguu

SEQ ID NO: 2258012 - RNA, 23 nt, Human
uguaaguuucaggugacauguga

SEQ ID NO: 2258013 - RNA, 15 nt, Human
uguaaguuucaggug

SEQ ID NO: 2258014 - RNA, 16 nt, Human
uguaaguuucagguga

SEQ ID NO: 2258015 - RNA, 18 nt, Human
uguaaguuucaggugaca

SEQ ID NO: 2258016 - RNA, 19 nt, Human
uguaaguuucaggugacau

SEQ ID NO: 2258017 - RNA, 20 nt, Human
uguaaguuucaggugacaug

SEQ ID NO: 2258018 - RNA, 21 nt, Human
uguaaguuucaggugacaugu

SEQ ID NO: 2258019 - RNA, 17 nt, Human
uguacagucuuguauua

SEQ ID NO: 2258020 - RNA, 21 nt, Human
uguacagucuuguauuaaguu

SEQ ID NO: 2258021 - RNA, 18 nt, Human
uguacagagcccacgccc

SEQ ID NO: 2258022 - RNA, 19 nt, Human
uguacaguguguaaagugu

SEQ ID NO: 2258023 - RNA, 11 nt, Human
uguacaguguu

SEQ ID NO: 2258024 - RNA, 17 nt, Human
uguacaguguguaaagu

SEQ ID NO: 2258025 - RNA, 16 nt, Human
uguacaguguucuguu

SEQ ID NO: 2258026 - RNA, 20 nt, Human
uguacaguguucuguuuaau

SEQ ID NO: 2258027 - RNA, 13 nt, Human
uguacaguguucu

SEQ ID NO: 2258028 - RNA, 15 nt, Human
uguacaguuugcugu

SEQ ID NO: 2258029 - RNA, 20 nt, Human
uguacaguucaguuccucuu

SEQ ID NO: 2258030 - RNA, 16 nt, Human
uguacaguuugcugua

SEQ ID NO: 2258031 - RNA, 13 nt, Human
uguacaguuuguu

SEQ ID NO: 2258032 - RNA, 17 nt, Human
uguacaguuauuuaugc

SEQ ID NO: 2258033 - RNA, 14 nt, Human
uguacaguucaguu

SEQ ID NO: 2258034 - RNA, 14 nt, Human
uguacaguuuguuu

SEQ ID NO: 2258035 - RNA, 16 nt, Human
uguacaguuuguuuac

SEQ ID NO: 2258036 - RNA, 17 nt, Human
uguacaguuuguuuaca

SEQ ID NO: 2258037 - RNA, 22 nt, Human
uguacaguuuguuuacacacgu

SEQ ID NO: 2258038 - RNA, 16 nt, Human
uguaccgcaaugugac

SEQ ID NO: 2258039 - RNA, 23 nt, Human
uguacaauugaacuuaaauaaau

SEQ ID NO: 2258040 - RNA, 22 nt, Human
uguacaauugaacuuaaauaaa

SEQ ID NO: 2258041 - RNA, 13 nt, Human
uguacagagccca

SEQ ID NO: 2258042 - RNA, 15 nt, Human
uguacaauauuuaaa

SEQ ID NO: 2258043 - RNA, 14 nt, Human
uguacaauauuuaa

SEQ ID NO: 2258044 - RNA, 17 nt, Human
uguacaauauuuaaaau

SEQ ID NO: 2258045 - RNA, 18 nt, Human
uguacaaugacuuuauug

SEQ ID NO: 2258046 - RNA, 16 nt, Human
uguacagagcccacgc

SEQ ID NO: 2258047 - RNA, 17 nt, Human
uguacagagcccacgcc

SEQ ID NO: 2258048 - RNA, 17 nt, Human
uguaauuaaguacuaug

SEQ ID NO: 2258049 - RNA, 22 nt, Human
uguaauguuacugaucaugcau

SEQ ID NO: 2258050 - RNA, 19 nt, Human
uguaauguuacugaucaug

SEQ ID NO: 2258051 - RNA, 17 nt, Human
uguaauguuacugauca

SEQ ID NO: 2258052 - RNA, 16 nt, Human
uguaauguuacugauc

SEQ ID NO: 2258053 - RNA, 23 nt, Human
uguacaaggacagccccuccucc

SEQ ID NO: 2258054 - RNA, 13 nt, Human
uguaauaaauaug

SEQ ID NO: 2258055 - RNA, 20 nt, Human
uguacaaggacagccccucc

SEQ ID NO: 2258056 - RNA, 16 nt, Human
uguacaaggacagccc

SEQ ID NO: 2258057 - RNA, 21 nt, Human
ugcuaaagaaaaagucaucca

SEQ ID NO: 2258058 - RNA, 22 nt, Human
ugcuaaagaaaaagucauccaa

SEQ ID NO: 2258059 - RNA, 17 nt, Human
ugcuaaauaaaauuugu

SEQ ID NO: 2258060 - RNA, 21 nt, Human
ugcuaaauaaaauuuguugca

SEQ ID NO: 2258061 - RNA, 22 nt, Human
ugcuaaauaaaauuuguugcau

SEQ ID NO: 2258062 - RNA, 23 nt, Human
ugcuaaauaaaauuuguugcaua

SEQ ID NO: 2258063 - RNA, 22 nt, Human
ugcuaaauggucgcccaggaga

SEQ ID NO: 2258064 - RNA, 11 nt, Human
ugcuaaaugua

SEQ ID NO: 2258065 - RNA, 14 nt, Human
ugcuaaauguaaca

SEQ ID NO: 2258066 - RNA, 21 nt, Human
ugcuaaauggucgcccaggag

SEQ ID NO: 2258067 - RNA, 20 nt, Human
ugcuaaauggucgcccagga

SEQ ID NO: 2258068 - RNA, 15 nt, Human
ugcuaaaugugaaug

SEQ ID NO: 2258069 - RNA, 15 nt, Human
ugcuaaauuuucagu

SEQ ID NO: 2258070 - RNA, 13 nt, Human
ugcuaacaucuaa

SEQ ID NO: 2258071 - RNA, 22 nt, Human
ugcuaagacucaguggggaggg

SEQ ID NO: 2258072 - RNA, 16 nt, Human
ugcuaacaucuaaaaa

SEQ ID NO: 2258073 - RNA, 13 nt, Human
ugcuaagaugcuc

SEQ ID NO: 2258074 - RNA, 19 nt, Human
ugcuaaauguaacagucug

SEQ ID NO: 2258075 - RNA, 20 nt, Human
ugcuaaauguaacagucuga

SEQ ID NO: 2258076 - RNA, 15 nt, Human
ugcuaaauguaacag

SEQ ID NO: 2258077 - RNA, 16 nt, Human
ugcuaaauguaacagu

SEQ ID NO: 2258078 - RNA, 17 nt, Human
ugcuaaauguaacaguc

SEQ ID NO: 2258079 - RNA, 18 nt, Human
ugcuaaauguaacagucu

SEQ ID NO: 2258080 - RNA, 21 nt, Human
ugcuaaauuuucaguagggcu

SEQ ID NO: 2258081 - RNA, 14 nt, Human
ugcgccuacaggag

SEQ ID NO: 2258082 - RNA, 16 nt, Human
ugcgccuacaggagug

SEQ ID NO: 2258083 - RNA, 22 nt, Human
ugcgccuacaggagugagcacu

SEQ ID NO: 2258084 - RNA, 19 nt, Human
ugcguccacgagcuguuua

SEQ ID NO: 2258085 - RNA, 16 nt, Human
ugcgaucuucagagca

SEQ ID NO: 2258086 - RNA, 17 nt, Human
ugcgaucuucagagcag

SEQ ID NO: 2258087 - RNA, 14 nt, Human
ugcgugaaacacac

SEQ ID NO: 2258088 - RNA, 20 nt, Human
ugcgucuggaggggccccug

SEQ ID NO: 2258089 - RNA, 21 nt, Human
ugcgucuggaggggccccugc

SEQ ID NO: 2258090 - RNA, 22 nt, Human
ugcgucuggaggggccccugcu

SEQ ID NO: 2258091 - RNA, 23 nt, Human
ugcgucuggaggggccccugcuu

SEQ ID NO: 2258092 - RNA, 23 nt, Human
ugcguccuccucaccucaugccc

SEQ ID NO: 2258093 - RNA, 15 nt, Human
ugcgucuggaggggc

SEQ ID NO: 2258094 - RNA, 14 nt, Human
ugcguccuccucac

SEQ ID NO: 2258095 - RNA, 16 nt, Human
ugcguccuccucaccu

SEQ ID NO: 2258096 - RNA, 19 nt, Human
ugcguccuccucaccucau

SEQ ID NO: 2258097 - RNA, 22 nt, Human
ugcguccuccucaccucaugcc

SEQ ID NO: 2258098 - RNA, 22 nt, Human
ugcgugaaacacaccaggcugu

SEQ ID NO: 2258099 - RNA, 14 nt, Human
ugcgugacaauaaa

SEQ ID NO: 2258100 - RNA, 15 nt, Human
ugcgugacaauaaaa

SEQ ID NO: 2258101 - RNA, 17 nt, Human
ugcgugacaauaaaaca

SEQ ID NO: 2258102 - RNA, 22 nt, Human
ugcgugacaauaaaacauuaau

SEQ ID NO: 2258103 - RNA, 21 nt, Human
ugcgagugugugcaugugugu

SEQ ID NO: 2258104 - RNA, 19 nt, Human
ugcgagugugugcaugugu

SEQ ID NO: 2258105 - RNA, 22 nt, Human
ugcgagugugugcaugugugug

SEQ ID NO: 2258106 - RNA, 14 nt, Human
ugcgaucuggguuc

SEQ ID NO: 2258107 - RNA, 14 nt, Human
ugccuugaagccac

SEQ ID NO: 2258108 - RNA, 21 nt, Human
ugccuugaaccacuucccuca

SEQ ID NO: 2258109 - RNA, 15 nt, Human
ugccuugaaccacuu

SEQ ID NO: 2258110 - RNA, 17 nt, Human
ugccuugaaccacuucc

SEQ ID NO: 2258111 - RNA, 19 nt, Human
ugccuugaaccacuucccu

SEQ ID NO: 2258112 - RNA, 17 nt, Human
ugcgagugugugcaugu

SEQ ID NO: 2258113 - RNA, 13 nt, Human
ugcgagugugugc

SEQ ID NO: 2258114 - RNA, 20 nt, Human
ugcgagugcucauuucagga

SEQ ID NO: 2258115 - RNA, 15 nt, Human
ugccuugaagccacu

SEQ ID NO: 2258116 - RNA, 23 nt, Human
ugccuugaauauccccucccagu

SEQ ID NO: 2258117 - RNA, 15 nt, Human
ugcgaucuggguuca

SEQ ID NO: 2258118 - RNA, 19 nt, Human
ugcgaucuggguucacugc

SEQ ID NO: 2258119 - RNA, 20 nt, Human
ugcgaucuggguucacugca

SEQ ID NO: 2258120 - RNA, 21 nt, Human
ugcgaucuggguucacugcaa

SEQ ID NO: 2258121 - RNA, 23 nt, Human
ugccuucuucggggaacuccugg

SEQ ID NO: 2258122 - RNA, 22 nt, Human
ugccuucuucggggaacuccug

SEQ ID NO: 2258123 - RNA, 12 nt, Human
ugccuucuucuu

SEQ ID NO: 2258124 - RNA, 19 nt, Human
ugccuucuucuuuuugcug

SEQ ID NO: 2258125 - RNA, 21 nt, Human
ugccuucuucggggaacuccu

SEQ ID NO: 2258126 - RNA, 16 nt, Human
ugccuucuucacccag

SEQ ID NO: 2258127 - RNA, 16 nt, Human
ugccuucuaaaggugu

SEQ ID NO: 2258128 - RNA, 14 nt, Human
ugccuucuucaccc

SEQ ID NO: 2258129 - RNA, 16 nt, Human
ugccuucuuuugauua

SEQ ID NO: 2258130 - RNA, 20 nt, Human
ugccuucuucuuuuugcugu

SEQ ID NO: 2258131 - RNA, 21 nt, Human
ugccuucuucuuuuugcuguu

SEQ ID NO: 2258132 - RNA, 22 nt, Human
ugccuucuucuuuuugcuguug

SEQ ID NO: 2258133 - RNA, 15 nt, Human
ugccuucucaacucc

SEQ ID NO: 2258134 - RNA, 17 nt, Human
ugccuucuucacccagc

SEQ ID NO: 2258135 - RNA, 20 nt, Human
ugccuucgcuucuugccucu

SEQ ID NO: 2258136 - RNA, 21 nt, Human
ugccuucgcuucuugccucug

SEQ ID NO: 2258137 - RNA, 22 nt, Human
ugccuucgcuucuugccucugu

SEQ ID NO: 2258138 - RNA, 23 nt, Human
ugccuucgcuucuugccucugug

SEQ ID NO: 2258139 - RNA, 15 nt, Human
ugccuucuaaaggug

SEQ ID NO: 2258140 - RNA, 16 nt, Human
ugccuucuacuuuuaa

SEQ ID NO: 2258141 - RNA, 20 nt, Human
ugccuucgucuuucccaugg

SEQ ID NO: 2258142 - RNA, 16 nt, Human
ugccugugaggcaggg

SEQ ID NO: 2258143 - RNA, 18 nt, Human
ugccugucuguuacacug

SEQ ID NO: 2258144 - RNA, 14 nt, Human
ugccugugaggcag

SEQ ID NO: 2258145 - RNA, 21 nt, Human
ugccugugaacugaacucuga

SEQ ID NO: 2258146 - RNA, 18 nt, Human
ugccugugaacugaacuc

SEQ ID NO: 2258147 - RNA, 17 nt, Human
ugccugugaacugaacu

SEQ ID NO: 2258148 - RNA, 20 nt, Human
ugccucgaacuggcugcaaa

SEQ ID NO: 2258149 - RNA, 18 nt, Human
ugccucgaacuggcugca

SEQ ID NO: 2258150 - RNA, 19 nt, Human
ugccucgaacuggcugcaa

SEQ ID NO: 2258151 - RNA, 14 nt, Human
ugccccuggcucug

SEQ ID NO: 2258152 - RNA, 18 nt, Human
ugccccuguucucuucca

SEQ ID NO: 2258153 - RNA, 19 nt, Human
ugccccuucccaucucuuc

SEQ ID NO: 2258154 - RNA, 21 nt, Human
ugccccuucccaucucuuccu

SEQ ID NO: 2258155 - RNA, 23 nt, Human
ugccucgaaacacagaaaccuuu

SEQ ID NO: 2258156 - RNA, 18 nt, Human
ugccccuggcagccccug

SEQ ID NO: 2258157 - RNA, 17 nt, Human
ugccccucccugcuuca

SEQ ID NO: 2258158 - RNA, 15 nt, Human
ugccccucccugcuu

SEQ ID NO: 2258159 - RNA, 13 nt, Human
ugccccuggcugg

SEQ ID NO: 2258160 - RNA, 18 nt, Human
ugccucucaucaacugaa

SEQ ID NO: 2258161 - RNA, 21 nt, Human
ugccucucaucaacugaauga

SEQ ID NO: 2258162 - RNA, 18 nt, Human
ugccucucccuggcccuc

SEQ ID NO: 2258163 - RNA, 16 nt, Human
ugccucuccuuuguau

SEQ ID NO: 2258164 - RNA, 17 nt, Human
ugccucuccuuuguaua

SEQ ID NO: 2258165 - RNA, 15 nt, Human
ugccucuucugggag

SEQ ID NO: 2258166 - RNA, 20 nt, Human
ugccucuccuuuguauauua

SEQ ID NO: 2258167 - RNA, 9 nt, Human
ugccucucu

SEQ ID NO: 2258168 - RNA, 14 nt, Human
ugccucuuuccugu

SEQ ID NO: 2258169 - RNA, 16 nt, Human
ugccucuuucauccac

SEQ ID NO: 2258170 - RNA, 17 nt, Human
ugccucuuucauccacu

SEQ ID NO: 2258171 - RNA, 15 nt, Human
ugccucuuucaucca

SEQ ID NO: 2258172 - RNA, 13 nt, Human
ugccucuucuggg

SEQ ID NO: 2258173 - RNA, 16 nt, Human
ugccucuucugugggu

SEQ ID NO: 2258174 - RNA, 21 nt, Human
ugccucuucugggagggcagc

SEQ ID NO: 2258175 - RNA, 20 nt, Human
ugccucuucugggagggcag

SEQ ID NO: 2258176 - RNA, 19 nt, Human
ugccucuucugggagggca

SEQ ID NO: 2258177 - RNA, 16 nt, Human
ugccucuucugggagg

SEQ ID NO: 2258178 - RNA, 18 nt, Human
ugccucuuuccuguuguu

SEQ ID NO: 2258179 - RNA, 13 nt, Human
ugccugaacaucc

SEQ ID NO: 2258180 - RNA, 14 nt, Human
ugccugaacauccu

SEQ ID NO: 2258181 - RNA, 17 nt, Human
ugccugaacauccuucc

SEQ ID NO: 2258182 - RNA, 20 nt, Human
ugccugaacauccuuccuuc

SEQ ID NO: 2258183 - RNA, 21 nt, Human
ugccugaacauccuuccuucc

SEQ ID NO: 2258184 - RNA, 13 nt, Human
ugccugaagaaca

SEQ ID NO: 2258185 - RNA, 16 nt, Human
ugccugaaccuuccau

SEQ ID NO: 2258186 - RNA, 22 nt, Human
ugccugaacauccuuccuuccc

SEQ ID NO: 2258187 - RNA, 22 nt, Human
ugccugggaguuuuguauucau

SEQ ID NO: 2258188 - RNA, 19 nt, Human
ugccuggugcacugugucu

SEQ ID NO: 2258189 - RNA, 22 nt, Human
ugccugggcucccuugugcgug

SEQ ID NO: 2258190 - RNA, 16 nt, Human
ugccugggaauguauu

SEQ ID NO: 2258191 - RNA, 15 nt, Human
ugccugggaauguau

SEQ ID NO: 2258192 - RNA, 18 nt, Human
ugccugggcagaaggaag

SEQ ID NO: 2258193 - RNA, 14 nt, Human
ugccugggaaugua

SEQ ID NO: 2258194 - RNA, 16 nt, Human
ugccuggcucagagcc

SEQ ID NO: 2258195 - RNA, 22 nt, Human
ugccuggcuucgcaaaauguuu

SEQ ID NO: 2258196 - RNA, 11 nt, Human
ugccuggcuca

SEQ ID NO: 2258197 - RNA, 13 nt, Human
ugccuggcucaga

SEQ ID NO: 2258198 - RNA, 15 nt, Human
ugccuggcucagagc

SEQ ID NO: 2258199 - RNA, 21 nt, Human
ugccugggaucccucauccuc

SEQ ID NO: 2258200 - RNA, 11 nt, Human
ugccugagcuu

SEQ ID NO: 2258201 - RNA, 19 nt, Human
ugccugagaggcaggcaua

SEQ ID NO: 2258202 - RNA, 14 nt, Human
ugccugagggcccc

SEQ ID NO: 2258203 - RNA, 15 nt, Human
ugccugagaggcagg

SEQ ID NO: 2258204 - RNA, 16 nt, Human
ugccugagaggcaggc

SEQ ID NO: 2258205 - RNA, 17 nt, Human
ugccugagaggcaggca

SEQ ID NO: 2258206 - RNA, 18 nt, Human
ugccugagaggcaggcau

SEQ ID NO: 2258207 - RNA, 18 nt, Human
ugccugacauuuggagug

SEQ ID NO: 2258208 - RNA, 23 nt, Human
ugccugacccuacuucuuuugcu

SEQ ID NO: 2258209 - RNA, 13 nt, Human
ugccugagaggca

SEQ ID NO: 2258210 - RNA, 14 nt, Human
ugccugagaggcag

SEQ ID NO: 2258211 - RNA, 19 nt, Human
ugccugagggcgaggggag

SEQ ID NO: 2258212 - RNA, 15 nt, Human
ugccuggcggggugg

SEQ ID NO: 2258213 - RNA, 15 nt, Human
ugccugagggccccu

SEQ ID NO: 2258214 - RNA, 16 nt, Human
ugccugagggccccuc

SEQ ID NO: 2258215 - RNA, 17 nt, Human
ugccugagggccccucu

SEQ ID NO: 2258216 - RNA, 19 nt, Human
ugccugagggccccucugc

SEQ ID NO: 2258217 - RNA, 20 nt, Human
ugccugagggccccucugcc

SEQ ID NO: 2258218 - RNA, 21 nt, Human
ugccugagggccccucugccc

SEQ ID NO: 2258219 - RNA, 22 nt, Human
ugccugagggccccucugccca

SEQ ID NO: 2258220 - RNA, 23 nt, Human
ugccugagggccccucugcccag

SEQ ID NO: 2258221 - RNA, 14 nt, Human
ugccugguggcagc

SEQ ID NO: 2258222 - RNA, 15 nt, Human
ugccugguggcagcu

SEQ ID NO: 2258223 - RNA, 16 nt, Human
ugccugguggcagcug

SEQ ID NO: 2258224 - RNA, 18 nt, Human
ugccuguaaucacagcua

SEQ ID NO: 2258225 - RNA, 15 nt, Human
ugccuguaacuugag

SEQ ID NO: 2258226 - RNA, 11 nt, Human
ugccuguaauc

SEQ ID NO: 2258227 - RNA, 19 nt, Human
ugccuguaaucccagcacu

SEQ ID NO: 2258228 - RNA, 15 nt, Human
ugccuguaaacauag

SEQ ID NO: 2258229 - RNA, 23 nt, Human
ugccuguagcccacucugcucgc

SEQ ID NO: 2258230 - RNA, 20 nt, Human
ugccuguagcccacucugcu

SEQ ID NO: 2258231 - RNA, 18 nt, Human
ugccuguagcccacucug

SEQ ID NO: 2258232 - RNA, 19 nt, Human
ugccuguacucgcuugugc

SEQ ID NO: 2258233 - RNA, 22 nt, Human
ugccuguacucgcuugugcaga

SEQ ID NO: 2258234 - RNA, 13 nt, Human
ugccuguaguuag

SEQ ID NO: 2258235 - RNA, 15 nt, Human
ugccuguagcaguga

SEQ ID NO: 2258236 - RNA, 23 nt, Human
ugccugucuccuuugcaggcuca

SEQ ID NO: 2258237 - RNA, 22 nt, Human
ugccugucuccuuugcaggcuc

SEQ ID NO: 2258238 - RNA, 14 nt, Human
ugccugugaacuga

SEQ ID NO: 2258239 - RNA, 18 nt, Human
ugccugucugucucucca

SEQ ID NO: 2258240 - RNA, 14 nt, Human
ugccugucugaagc

SEQ ID NO: 2258241 - RNA, 21 nt, Human
ugccugucugucucuccaucu

SEQ ID NO: 2258242 - RNA, 19 nt, Human
ugcugcaccaacccagccg

SEQ ID NO: 2258243 - RNA, 15 nt, Human
ugcugcaugccuggu

SEQ ID NO: 2258244 - RNA, 23 nt, Human
ugcugcaguugccagucaccccg

SEQ ID NO: 2258245 - RNA, 18 nt, Human
ugcugcaguugccaguca

SEQ ID NO: 2258246 - RNA, 15 nt, Human
ugcugcaaggccuuu

SEQ ID NO: 2258247 - RNA, 20 nt, Human
ugcugcaaggccuuucugug

SEQ ID NO: 2258248 - RNA, 23 nt, Human
ugcugcaaggccuuucugugugu

SEQ ID NO: 2258249 - RNA, 14 nt, Human
ugcugcaccaaccc

SEQ ID NO: 2258250 - RNA, 17 nt, Human
ugcugcaccaacccagc

SEQ ID NO: 2258251 - RNA, 18 nt, Human
ugcugcaccaacccagcc

SEQ ID NO: 2258252 - RNA, 20 nt, Human
ugcugcaccaacccagccgc

SEQ ID NO: 2258253 - RNA, 15 nt, Human
ugcugcgcccuuccc

SEQ ID NO: 2258254 - RNA, 20 nt, Human
ugcugcgcccuuaccuuccc

SEQ ID NO: 2258255 - RNA, 17 nt, Human
ugcugcgcccugggcuc

SEQ ID NO: 2258256 - RNA, 16 nt, Human
ugcugcgcccuuaccu

SEQ ID NO: 2258257 - RNA, 20 nt, Human
ugcugccuucuggauucuug

SEQ ID NO: 2258258 - RNA, 14 nt, Human
ugcugcgugccugu

SEQ ID NO: 2258259 - RNA, 17 nt, Human
ugcugcuaaucuucagg

SEQ ID NO: 2258260 - RNA, 22 nt, Human
ugcugcuaaucuucagggcacu

SEQ ID NO: 2258261 - RNA, 21 nt, Human
ugcugcuaaucuucagggcac

SEQ ID NO: 2258262 - RNA, 14 nt, Human
ugcugcuacccucc

SEQ ID NO: 2258263 - RNA, 15 nt, Human
ugcugcuacccuccc

SEQ ID NO: 2258264 - RNA, 17 nt, Human
ugcugcuacccucccug

SEQ ID NO: 2258265 - RNA, 18 nt, Human
ugcugcuacccucccugc

SEQ ID NO: 2258266 - RNA, 19 nt, Human
ugcugcuacccucccugcu

SEQ ID NO: 2258267 - RNA, 20 nt, Human
ugcugcuacccucccugcug

SEQ ID NO: 2258268 - RNA, 21 nt, Human
ugcugcuacccucccugcugu

SEQ ID NO: 2258269 - RNA, 22 nt, Human
ugcugcuacccucccugcuguc

SEQ ID NO: 2258270 - RNA, 23 nt, Human
ugcugcuacccucccugcugucc

SEQ ID NO: 2258271 - RNA, 13 nt, Human
ugcugcuggcugg

SEQ ID NO: 2258272 - RNA, 23 nt, Human
ugcugcuggacaguaucacuguc

SEQ ID NO: 2258273 - RNA, 13 nt, Human
ugcugcuggacag

SEQ ID NO: 2258274 - RNA, 15 nt, Human
ugcugcuacuuaauu

SEQ ID NO: 2258275 - RNA, 20 nt, Human
ugcugcuuuuccuuggggca

SEQ ID NO: 2258276 - RNA, 20 nt, Human
ugcugcuuuuugagguggca

SEQ ID NO: 2258277 - RNA, 17 nt, Human
ugcugcuuuuccuuggg

SEQ ID NO: 2258278 - RNA, 22 nt, Human
ugcugcuuuuugagguggcacu

SEQ ID NO: 2258279 - RNA, 23 nt, Human
ugcugcuuuuugagguggcacuu

SEQ ID NO: 2258280 - RNA, 17 nt, Human
ugcuggaauaaguucaa

SEQ ID NO: 2258281 - RNA, 16 nt, Human
ugcuggaauucuaaca

SEQ ID NO: 2258282 - RNA, 21 nt, Human
ugcugcuuuccccugugggga

SEQ ID NO: 2258283 - RNA, 23 nt, Human
ugcugcuuuccccuguggggauc

SEQ ID NO: 2258284 - RNA, 16 nt, Human
ugcugcuuuccccugu

SEQ ID NO: 2258285 - RNA, 17 nt, Human
ugcugcuuuccccugug

SEQ ID NO: 2258286 - RNA, 18 nt, Human
ugcugcuuuccccugugg

SEQ ID NO: 2258287 - RNA, 19 nt, Human
ugcugcuuuccccuguggg

SEQ ID NO: 2258288 - RNA, 13 nt, Human
ugcugcugucccu

SEQ ID NO: 2258289 - RNA, 14 nt, Human
ugcugcuguguuuu

SEQ ID NO: 2258290 - RNA, 20 nt, Human
ugcugcuuagacauaacaaa

SEQ ID NO: 2258291 - RNA, 15 nt, Human
ugcugcuuuccccug

SEQ ID NO: 2258292 - RNA, 15 nt, Human
ugcugacagcugacc

SEQ ID NO: 2258293 - RNA, 15 nt, Human
ugcugacagcugcuc

SEQ ID NO: 2258294 - RNA, 14 nt, Human
ugcugacagcugcu

SEQ ID NO: 2258295 - RNA, 18 nt, Human
ugcugacagcugcuccua

SEQ ID NO: 2258296 - RNA, 17 nt, Human
ugcugacagcugcuccu

SEQ ID NO: 2258297 - RNA, 16 nt, Human
ugcugacagcugcucc

SEQ ID NO: 2258298 - RNA, 13 nt, Human
ugcugauggugca

SEQ ID NO: 2258299 - RNA, 15 nt, Human
ugcugauggugcaau

SEQ ID NO: 2258300 - RNA, 17 nt, Human
ugcugauggugcaauga

SEQ ID NO: 2258301 - RNA, 13 nt, Human
ugcugcaaaccug

SEQ ID NO: 2258302 - RNA, 13 nt, Human
ugcugcaaggccu

SEQ ID NO: 2258303 - RNA, 20 nt, Human
ugcugcaaaccugaccccug

SEQ ID NO: 2258304 - RNA, 14 nt, Human
ugcugcaaaccuga

SEQ ID NO: 2258305 - RNA, 18 nt, Human
ugcugauggugcaaugac

SEQ ID NO: 2258306 - RNA, 18 nt, Human
ugcugauuuggugaccaa

SEQ ID NO: 2258307 - RNA, 22 nt, Human
ugcugacagacacaggcccggc

SEQ ID NO: 2258308 - RNA, 23 nt, Human
ugcugacagacacaggcccggcu

SEQ ID NO: 2258309 - RNA, 13 nt, Human
ugcugaaggcucg

SEQ ID NO: 2258310 - RNA, 21 nt, Human
ugcugaaggcucgagcaugcc

SEQ ID NO: 2258311 - RNA, 23 nt, Human
ugcugaaggaauaaauugcuccu

SEQ ID NO: 2258312 - RNA, 12 nt, Human
ugcugaaggcuc

SEQ ID NO: 2258313 - RNA, 14 nt, Human
ugcugaagcugccu

SEQ ID NO: 2258314 - RNA, 21 nt, Human
ugcugaacauugcauauaacu

SEQ ID NO: 2258315 - RNA, 20 nt, Human
ugcugaacaaaaaauaaaaa

SEQ ID NO: 2258316 - RNA, 16 nt, Human
ugcugaacaccuugug

SEQ ID NO: 2258317 - RNA, 21 nt, Human
ugcugaacaccuuguggaagc

SEQ ID NO: 2258318 - RNA, 19 nt, Human
ugcugaacauugcauauaa

SEQ ID NO: 2258319 - RNA, 14 nt, Human
ugcugaacagugga

SEQ ID NO: 2258320 - RNA, 22 nt, Human
ugcucagggaaaagcagcucuc

SEQ ID NO: 2258321 - RNA, 21 nt, Human
ugcucagggaaaagcagcucu

SEQ ID NO: 2258322 - RNA, 19 nt, Human
ugcucaggggcguguggcu

SEQ ID NO: 2258323 - RNA, 14 nt, Human
ugcucagggcugac

SEQ ID NO: 2258324 - RNA, 17 nt, Human
ugcucagcucugggcca

SEQ ID NO: 2258325 - RNA, 21 nt, Human
ugcucagcccuggaggugcca

SEQ ID NO: 2258326 - RNA, 23 nt, Human
ugcucagcccuggaggugccagc

SEQ ID NO: 2258327 - RNA, 14 nt, Human
ugcucagcccugga

SEQ ID NO: 2258328 - RNA, 15 nt, Human
ugcucagcccuggag

SEQ ID NO: 2258329 - RNA, 16 nt, Human
ugcucagcccuggagg

SEQ ID NO: 2258330 - RNA, 20 nt, Human
ugcucagcccuggaggugcc

SEQ ID NO: 2258331 - RNA, 12 nt, Human
ugcucagcagcu

SEQ ID NO: 2258332 - RNA, 11 nt, Human
ugcucagcccu

SEQ ID NO: 2258333 - RNA, 12 nt, Human
ugcucagcccug

SEQ ID NO: 2258334 - RNA, 13 nt, Human
ugcucagcccugg

SEQ ID NO: 2258335 - RNA, 22 nt, Human
ugcucagcccugacuggugcua

SEQ ID NO: 2258336 - RNA, 13 nt, Human
ugcucagcccuga

SEQ ID NO: 2258337 - RNA, 17 nt, Human
ugcucagcccugacugg

SEQ ID NO: 2258338 - RNA, 20 nt, Human
ugcucagggucaauuucuuu

SEQ ID NO: 2258339 - RNA, 16 nt, Human
ugcucagggucaauuu

SEQ ID NO: 2258340 - RNA, 17 nt, Human
ugcucaguaauuugagg

SEQ ID NO: 2258341 - RNA, 16 nt, Human
ugcucagucucccuuu

SEQ ID NO: 2258342 - RNA, 14 nt, Human
ugcuccucucccca

SEQ ID NO: 2258343 - RNA, 19 nt, Human
ugcucagugucuggcugca

SEQ ID NO: 2258344 - RNA, 23 nt, Human
ugcuccuccuuggugccuggccu

SEQ ID NO: 2258345 - RNA, 14 nt, Human
ugcucagucucccu

SEQ ID NO: 2258346 - RNA, 11 nt, Human
ugcuccucucc

SEQ ID NO: 2258347 - RNA, 12 nt, Human
ugcuccucucca

SEQ ID NO: 2258348 - RNA, 13 nt, Human
ugcuccucuccag

SEQ ID NO: 2258349 - RNA, 17 nt, Human
ugcucagaccagcucuu

SEQ ID NO: 2258350 - RNA, 15 nt, Human
ugcucacaccccauu

SEQ ID NO: 2258351 - RNA, 13 nt, Human
ugcucacagucuc

SEQ ID NO: 2258352 - RNA, 16 nt, Human
ugcucagaccagcucu

SEQ ID NO: 2258353 - RNA, 17 nt, Human
ugcucagagcaguguuu

SEQ ID NO: 2258354 - RNA, 15 nt, Human
ugcucacauaucugu

SEQ ID NO: 2258355 - RNA, 16 nt, Human
ugcucacauaucuguc

SEQ ID NO: 2258356 - RNA, 18 nt, Human
ugcucaaugacucucugg

SEQ ID NO: 2258357 - RNA, 14 nt, Human
ugcucacaccccau

SEQ ID NO: 2258358 - RNA, 21 nt, Human
ugcucaauaaaugauucuuag

SEQ ID NO: 2258359 - RNA, 18 nt, Human
ugcuaagccccagcaagc

SEQ ID NO: 2258360 - RNA, 15 nt, Human
ugcucaagaagacau

SEQ ID NO: 2258361 - RNA, 22 nt, Human
ugcucaagaagacauggagacu

SEQ ID NO: 2258362 - RNA, 15 nt, Human
ugcuaagccccagca

SEQ ID NO: 2258363 - RNA, 16 nt, Human
ugcuaagaugcucuau

SEQ ID NO: 2258364 - RNA, 15 nt, Human
ugcuaagcauuccaa

SEQ ID NO: 2258365 - RNA, 19 nt, Human
ugcuaagcauuccaacuau

SEQ ID NO: 2258366 - RNA, 18 nt, Human
ugcugaacaaaaaauaaa

SEQ ID NO: 2258367 - RNA, 15 nt, Human
ugcugaacaaaaaau

SEQ ID NO: 2258368 - RNA, 20 nt, Human
ugcugaaagcccaaguaggg

SEQ ID NO: 2258369 - RNA, 17 nt, Human
ugcugaaauuuuauaug

SEQ ID NO: 2258370 - RNA, 17 nt, Human
ugcugaaacaggagaga

SEQ ID NO: 2258371 - RNA, 16 nt, Human
ugcugaaaccaagggg

SEQ ID NO: 2258372 - RNA, 15 nt, Human
ugcugaaacaggaga

SEQ ID NO: 2258373 - RNA, 15 nt, Human
ugcucuccccugccc

SEQ ID NO: 2258374 - RNA, 18 nt, Human
ugcucuccuuccuggagc

SEQ ID NO: 2258375 - RNA, 23 nt, Human
ugcucuccuuccuggagcccaga

SEQ ID NO: 2258376 - RNA, 22 nt, Human
ugcucuccucuugccacugccu

SEQ ID NO: 2258377 - RNA, 12 nt, Human
ugcucuccuucc

SEQ ID NO: 2258378 - RNA, 17 nt, Human
ugcucuccuuccuggag

SEQ ID NO: 2258379 - RNA, 13 nt, Human
ugcucuccccugc

SEQ ID NO: 2258380 - RNA, 12 nt, Human
ugcucuccccug

SEQ ID NO: 2258381 - RNA, 20 nt, Human
ugcucuccaagucucagugg

SEQ ID NO: 2258382 - RNA, 18 nt, Human
ugcucuccaagucucagu

SEQ ID NO: 2258383 - RNA, 19 nt, Human
ugcucuccaagucucagug

SEQ ID NO: 2258384 - RNA, 17 nt, Human
ugcucuccaagcccagu

SEQ ID NO: 2258385 - RNA, 16 nt, Human
ugcucuccucuugcca

SEQ ID NO: 2258386 - RNA, 14 nt, Human
ugcucuccccugcc

SEQ ID NO: 2258387 - RNA, 14 nt, Human
ugcucuccucuugc

SEQ ID NO: 2258388 - RNA, 18 nt, Human
ugcucuccucuugccacu

SEQ ID NO: 2258389 - RNA, 21 nt, Human
ugcucuccucuugccacugcc

SEQ ID NO: 2258390 - RNA, 18 nt, Human
ugcucgcuguugcugaau

SEQ ID NO: 2258391 - RNA, 15 nt, Human
ugcucgcuguugcug

SEQ ID NO: 2258392 - RNA, 17 nt, Human
ugcucgcuguugcugaa

SEQ ID NO: 2258393 - RNA, 14 nt, Human
ugcucgcccugcgg

SEQ ID NO: 2258394 - RNA, 13 nt, Human
ugcucgcccugcg

SEQ ID NO: 2258395 - RNA, 13 nt, Human
ugcucgcuguugc

SEQ ID NO: 2258396 - RNA, 14 nt, Human
ugcucgcuguugcu

SEQ ID NO: 2258397 - RNA, 21 nt, Human
ugcucuauuguagcauuucuu

SEQ ID NO: 2258398 - RNA, 12 nt, Human
ugcucuauugua

SEQ ID NO: 2258399 - RNA, 21 nt, Human
ugcucuaucuugcucuguaau

SEQ ID NO: 2258400 - RNA, 14 nt, Human
ugcucuaucuugcu

SEQ ID NO: 2258401 - RNA, 20 nt, Human
ugcucuaucuugcucuguaa

SEQ ID NO: 2258402 - RNA, 20 nt, Human
ugcucuaugugcuuguaaaa

SEQ ID NO: 2258403 - RNA, 23 nt, Human
ugcucgauuauucccuguacaau

SEQ ID NO: 2258404 - RNA, 17 nt, Human
ugcucgagacacaguga

SEQ ID NO: 2258405 - RNA, 23 nt, Human
ugcuccuuguuccuagaguagag

SEQ ID NO: 2258406 - RNA, 16 nt, Human
ugcucgccccagcagg

SEQ ID NO: 2258407 - RNA, 14 nt, Human
ugcucgccccagca

SEQ ID NO: 2258408 - RNA, 18 nt, Human
ugcuccuuucuuguuuua

SEQ ID NO: 2258409 - RNA, 17 nt, Human
ugcuccucuccccagca

SEQ ID NO: 2258410 - RNA, 18 nt, Human
ugcuccucuccccagcaa

SEQ ID NO: 2258411 - RNA, 16 nt, Human
ugcuccuuguuccuag

SEQ ID NO: 2258412 - RNA, 17 nt, Human
ugcuccuuguuccuaga

SEQ ID NO: 2258413 - RNA, 16 nt, Human
ugcuccucuccaggca

SEQ ID NO: 2258414 - RNA, 14 nt, Human
ugcuccucuccagg

SEQ ID NO: 2258415 - RNA, 15 nt, Human
ugcuccucuccaggc

SEQ ID NO: 2258416 - RNA, 17 nt, Human
ugcauauauacauauau

SEQ ID NO: 2258417 - RNA, 13 nt, Human
ugcauauccugag

SEQ ID NO: 2258418 - RNA, 21 nt, Human
ugcauauaacuuauauuguaa

SEQ ID NO: 2258419 - RNA, 20 nt, Human
ugcauauaacuuauauugua

SEQ ID NO: 2258420 - RNA, 22 nt, Human
ugcauauaacuuauauuguaag

SEQ ID NO: 2258421 - RNA, 15 nt, Human
ugcaguugccaguca

SEQ ID NO: 2258422 - RNA, 14 nt, Human
ugcaguucugcagc

SEQ ID NO: 2258423 - RNA, 16 nt, Human
ugcaguugacagcagg

SEQ ID NO: 2258424 - RNA, 17 nt, Human
ugcaguugacagcaggu

SEQ ID NO: 2258425 - RNA, 13 nt, Human
ugcaguugccagu

SEQ ID NO: 2258426 - RNA, 14 nt, Human
ugcaguugccaguc

SEQ ID NO: 2258427 - RNA, 19 nt, Human
ugcaguucugaagaagaug

SEQ ID NO: 2258428 - RNA, 22 nt, Human
ugcaguucugaagaagauggua

SEQ ID NO: 2258429 - RNA, 22 nt, Human
ugcagugguaugaucacggcuc

SEQ ID NO: 2258430 - RNA, 17 nt, Human
ugcaguggcucacgccu

SEQ ID NO: 2258431 - RNA, 21 nt, Human
ugcagugcucgcuguugcuga

SEQ ID NO: 2258432 - RNA, 22 nt, Human
ugcagugcucgcuguugcugaa

SEQ ID NO: 2258433 - RNA, 23 nt, Human
ugcagugcucgcuguugcugaau

SEQ ID NO: 2258434 - RNA, 15 nt, Human
ugcaguucugaagaa

SEQ ID NO: 2258435 - RNA, 16 nt, Human
ugcaguucugaagaag

SEQ ID NO: 2258436 - RNA, 17 nt, Human
ugcaguucugaagaaga

SEQ ID NO: 2258437 - RNA, 18 nt, Human
ugcaguucugaagaagau

SEQ ID NO: 2258438 - RNA, 15 nt, Human
ugcaggccaggccag

SEQ ID NO: 2258439 - RNA, 21 nt, Human
ugcaggccaagagcagaggca

SEQ ID NO: 2258440 - RNA, 20 nt, Human
ugcaggccaagagcagaggc

SEQ ID NO: 2258441 - RNA, 16 nt, Human
ugcaggcaucacagcu

SEQ ID NO: 2258442 - RNA, 21 nt, Human
ugcaggcaugcaugugcuugu

SEQ ID NO: 2258443 - RNA, 10 nt, Human
ugcaggcccc

SEQ ID NO: 2258444 - RNA, 12 nt, Human
ugcaggcccugg

SEQ ID NO: 2258445 - RNA, 15 nt, Human
ugcaggcccuggccu

SEQ ID NO: 2258446 - RNA, 16 nt, Human
ugcaggcccuggccuc

SEQ ID NO: 2258447 - RNA, 20 nt, Human
ugcaggcccuggccuccccu

SEQ ID NO: 2258448 - RNA, 23 nt, Human
ugcagugauauggcagaagacac

SEQ ID NO: 2258449 - RNA, 21 nt, Human
ugcagugauauggcagaagac

SEQ ID NO: 2258450 - RNA, 22 nt, Human
ugcagugauauggcagaagaca

SEQ ID NO: 2258451 - RNA, 16 nt, Human
ugcagugccccuagcu

SEQ ID NO: 2258452 - RNA, 17 nt, Human
ugcagugccccuagcuu

SEQ ID NO: 2258453 - RNA, 19 nt, Human
ugcaggccccgcuugucca

SEQ ID NO: 2258454 - RNA, 17 nt, Human
ugcagugauauggcaga

SEQ ID NO: 2258455 - RNA, 20 nt, Human
ugcagugauauggcagaaga

SEQ ID NO: 2258456 - RNA, 17 nt, Human
ugcaggcccuggccucc

SEQ ID NO: 2258457 - RNA, 19 nt, Human
ugcaggcccuggccucccc

SEQ ID NO: 2258458 - RNA, 16 nt, Human
ugcagugcuuccaagg

SEQ ID NO: 2258459 - RNA, 17 nt, Human
ugcagugcucgcuguug

SEQ ID NO: 2258460 - RNA, 12 nt, Human
ugcagugccuug

SEQ ID NO: 2258461 - RNA, 23 nt, Human
ugcagugccuuggggaauuuccu

SEQ ID NO: 2258462 - RNA, 19 nt, Human
ugcagugcucgcuguugcu

SEQ ID NO: 2258463 - RNA, 20 nt, Human
ugcagugcucgcuguugcug

SEQ ID NO: 2258464 - RNA, 14 nt, Human
ugcagcagaggcac

SEQ ID NO: 2258465 - RNA, 20 nt, Human
ugcagcagcgguggccucuu

SEQ ID NO: 2258466 - RNA, 14 nt, Human
ugcagcagggaugc

SEQ ID NO: 2258467 - RNA, 21 nt, Human
ugcagcaggaucuagaggggg

SEQ ID NO: 2258468 - RNA, 22 nt, Human
ugcagcagugagucucuucaga

SEQ ID NO: 2258469 - RNA, 18 nt, Human
ugcagcagugagucucuu

SEQ ID NO: 2258470 - RNA, 22 nt, Human
ugcagcagggaugcccuggagg

SEQ ID NO: 2258471 - RNA, 19 nt, Human
ugcagcagggaugcccugg

SEQ ID NO: 2258472 - RNA, 18 nt, Human
ugcagcagggaugcccug

SEQ ID NO: 2258473 - RNA, 17 nt, Human
ugcagcagggaugcccu

SEQ ID NO: 2258474 - RNA, 16 nt, Human
ugcagcagggaugccc

SEQ ID NO: 2258475 - RNA, 22 nt, Human
ugcagcaugaccugugaccagc

SEQ ID NO: 2258476 - RNA, 19 nt, Human
ugcagcaugaccugugacc

SEQ ID NO: 2258477 - RNA, 17 nt, Human
ugcagcaugaccuguga

SEQ ID NO: 2258478 - RNA, 13 nt, Human
ugcagcaugaccu

SEQ ID NO: 2258479 - RNA, 20 nt, Human
ugcagcauaugaggaugcag

SEQ ID NO: 2258480 - RNA, 17 nt, Human
ugcagcauaugaggaug

SEQ ID NO: 2258481 - RNA, 15 nt, Human
ugcagcauaugagga

SEQ ID NO: 2258482 - RNA, 23 nt, Human
ugcagcaugaccugugaccagca

SEQ ID NO: 2258483 - RNA, 16 nt, Human
ugcaggcaccuuagug

SEQ ID NO: 2258484 - RNA, 19 nt, Human
ugcaggcaccuuaguggcu

SEQ ID NO: 2258485 - RNA, 21 nt, Human
ugcaggcaccuuaguggcuuu

SEQ ID NO: 2258486 - RNA, 23 nt, Human
ugcaggcacucaaugcagccaga

SEQ ID NO: 2258487 - RNA, 12 nt, Human
ugcaggcagaca

SEQ ID NO: 2258488 - RNA, 13 nt, Human
ugcaggcagacac

SEQ ID NO: 2258489 - RNA, 14 nt, Human
ugcaggcagacacg

SEQ ID NO: 2258490 - RNA, 15 nt, Human
ugcaggcagccaggc

SEQ ID NO: 2258491 - RNA, 13 nt, Human
ugcaggcagccag

SEQ ID NO: 2258492 - RNA, 14 nt, Human
ugcaggcagccagg

SEQ ID NO: 2258493 - RNA, 20 nt, Human
ugcacuuucuauccucugua

SEQ ID NO: 2258494 - RNA, 12 nt, Human
ugcacuuuguuc

SEQ ID NO: 2258495 - RNA, 14 nt, Human
ugcacuuuguucug

SEQ ID NO: 2258496 - RNA, 20 nt, Human
ugcacuggaguccagucucu

SEQ ID NO: 2258497 - RNA, 19 nt, Human
ugcacuggaguccagucuc

SEQ ID NO: 2258498 - RNA, 18 nt, Human
ugcacuggaguccagucu

SEQ ID NO: 2258499 - RNA, 15 nt, Human
ugcacuggaguccag

SEQ ID NO: 2258500 - RNA, 21 nt, Human
ugcacuggaguccagucucuu

SEQ ID NO: 2258501 - RNA, 16 nt, Human
ugcacuguaugcugga

SEQ ID NO: 2258502 - RNA, 15 nt, Human
ugcacuguaugcugg

SEQ ID NO: 2258503 - RNA, 21 nt, Human
ugcacuugugauuauuuauua

SEQ ID NO: 2258504 - RNA, 16 nt, Human
ugcacuggggagcccg

SEQ ID NO: 2258505 - RNA, 20 nt, Human
ugcacuggggagcccgucuc

SEQ ID NO: 2258506 - RNA, 18 nt, Human
ugcagcagcgguggccuc

SEQ ID NO: 2258507 - RNA, 16 nt, Human
ugcagcagaggcacug

SEQ ID NO: 2258508 - RNA, 13 nt, Human
ugcagcagaggca

SEQ ID NO: 2258509 - RNA, 20 nt, Human
ugcagcacucacacaggacc

SEQ ID NO: 2258510 - RNA, 17 nt, Human
ugcagcacucacacagg

SEQ ID NO: 2258511 - RNA, 23 nt, Human
ugcagcaauaaagcagcguuucu

SEQ ID NO: 2258512 - RNA, 20 nt, Human
ugcagcaauaaagcagcguu

SEQ ID NO: 2258513 - RNA, 13 nt, Human
ugcagaggggaaa

SEQ ID NO: 2258514 - RNA, 13 nt, Human
ugcagaggggcag

SEQ ID NO: 2258515 - RNA, 17 nt, Human
ugcagaggccagaggcc

SEQ ID NO: 2258516 - RNA, 11 nt, Human
ugcagagcugc

SEQ ID NO: 2258517 - RNA, 14 nt, Human
ugcagaggccagag

SEQ ID NO: 2258518 - RNA, 15 nt, Human
ugcagaggccagagg

SEQ ID NO: 2258519 - RNA, 21 nt, Human
ugcagagcaggaaacaugacu

SEQ ID NO: 2258520 - RNA, 15 nt, Human
ugcagagcugaagau

SEQ ID NO: 2258521 - RNA, 22 nt, Human
ugcagagcagugggccuggcca

SEQ ID NO: 2258522 - RNA, 15 nt, Human
ugcacgcccaugugu

SEQ ID NO: 2258523 - RNA, 22 nt, Human
ugcacgcccaugugugagugug

SEQ ID NO: 2258524 - RNA, 19 nt, Human
ugcacgcccaugugugagu

SEQ ID NO: 2258525 - RNA, 17 nt, Human
ugcacgcccauguguga

SEQ ID NO: 2258526 - RNA, 13 nt, Human
ugcacggcugcug

SEQ ID NO: 2258527 - RNA, 14 nt, Human
ugcacggcugcuga

SEQ ID NO: 2258528 - RNA, 15 nt, Human
ugcacggcugcugag

SEQ ID NO: 2258529 - RNA, 15 nt, Human
ugcacugagcagagu

SEQ ID NO: 2258530 - RNA, 17 nt, Human
ugcacugagcagagucu

SEQ ID NO: 2258531 - RNA, 12 nt, Human
ugcacugagggc

SEQ ID NO: 2258532 - RNA, 14 nt, Human
ugcacugagggcca

SEQ ID NO: 2258533 - RNA, 14 nt, Human
ugcacugaugcugc

SEQ ID NO: 2258534 - RNA, 22 nt, Human
ugcacugauauaucaugaguga

SEQ ID NO: 2258535 - RNA, 15 nt, Human
ugcacugagggccac

SEQ ID NO: 2258536 - RNA, 16 nt, Human
ugcacugagggccaca

SEQ ID NO: 2258537 - RNA, 17 nt, Human
ugcacugagggccacac

SEQ ID NO: 2258538 - RNA, 19 nt, Human
ugcacugagggccacacua

SEQ ID NO: 2258539 - RNA, 22 nt, Human
ugcacugaugcugccccucauc

SEQ ID NO: 2258540 - RNA, 21 nt, Human
ugcacugaugcugccccucau

SEQ ID NO: 2258541 - RNA, 17 nt, Human
ugcacugaugcugcccc

SEQ ID NO: 2258542 - RNA, 16 nt, Human
ugcacugaugcugccc

SEQ ID NO: 2258543 - RNA, 21 nt, Human
ugcacugcccauggacaggcu

SEQ ID NO: 2258544 - RNA, 19 nt, Human
ugcacugcccauggacagg

SEQ ID NO: 2258545 - RNA, 17 nt, Human
ugcaccgggccacagag

SEQ ID NO: 2258546 - RNA, 22 nt, Human
ugcaccgggccacagagaaagu

SEQ ID NO: 2258547 - RNA, 20 nt, Human
ugaguccccuguuuguuucu

SEQ ID NO: 2258548 - RNA, 14 nt, Human
ugcaccgggccaca

SEQ ID NO: 2258549 - RNA, 15 nt, Human
ugcaccgggccacag

SEQ ID NO: 2258550 - RNA, 19 nt, Human
ugaguccccuguuuguuuc

SEQ ID NO: 2258551 - RNA, 23 nt, Human
ugcaccggcuggccuggccccuc

SEQ ID NO: 2258552 - RNA, 12 nt, Human
ugcauauguaug

SEQ ID NO: 2258553 - RNA, 17 nt, Human
ugcauauguugaauacu

SEQ ID NO: 2258554 - RNA, 15 nt, Human
ugcauauguugaaua

SEQ ID NO: 2258555 - RNA, 21 nt, Human
ugcauauuuauaaaaauaaaa

SEQ ID NO: 2258556 - RNA, 15 nt, Human
ugcauauguaugacu

SEQ ID NO: 2258557 - RNA, 13 nt, Human
ugcauauguugaa

SEQ ID NO: 2258558 - RNA, 17 nt, Human
ugcauauccugagccau

SEQ ID NO: 2258559 - RNA, 16 nt, Human
ugcauauccugagcca

SEQ ID NO: 2258560 - RNA, 18 nt, Human
ugcauauccugagccauc

SEQ ID NO: 2258561 - RNA, 20 nt, Human
ugcauauuuauaaaaauaaa

SEQ ID NO: 2258562 - RNA, 18 nt, Human
ugccaaauauaaauaaaa

SEQ ID NO: 2258563 - RNA, 17 nt, Human
ugccaaauauaaauaaa

SEQ ID NO: 2258564 - RNA, 13 nt, Human
ugccaccaggaga

SEQ ID NO: 2258565 - RNA, 12 nt, Human
ugccaccaggag

SEQ ID NO: 2258566 - RNA, 18 nt, Human
ugccaccagagaccgucc

SEQ ID NO: 2258567 - RNA, 19 nt, Human
ugccaccagagaccguccu

SEQ ID NO: 2258568 - RNA, 21 nt, Human
ugccaccagagaccguccuca

SEQ ID NO: 2258569 - RNA, 22 nt, Human
ugccaccagagaccguccucac

SEQ ID NO: 2258570 - RNA, 17 nt, Human
ugccaccaggagaacca

SEQ ID NO: 2258571 - RNA, 14 nt, Human
ugccaccaggagaa

SEQ ID NO: 2258572 - RNA, 22 nt, Human
ugccaccaggagaaccacuaca

SEQ ID NO: 2258573 - RNA, 13 nt, Human
ugccaccaggcca

SEQ ID NO: 2258574 - RNA, 19 nt, Human
ugcaucaagaugugacaug

SEQ ID NO: 2258575 - RNA, 16 nt, Human
ugccaaauauguccug

SEQ ID NO: 2258576 - RNA, 14 nt, Human
ugcaucaagaugug

SEQ ID NO: 2258577 - RNA, 22 nt, Human
ugccaaauauaaauaaaaauaa

SEQ ID NO: 2258578 - RNA, 19 nt, Human
ugccaaauauaaauaaaaa

SEQ ID NO: 2258579 - RNA, 15 nt, Human
ugccacuagggcucu

SEQ ID NO: 2258580 - RNA, 11 nt, Human
ugccacucaca

SEQ ID NO: 2258581 - RNA, 15 nt, Human
ugccacucacacagc

SEQ ID NO: 2258582 - RNA, 16 nt, Human
ugccacucacacagcc

SEQ ID NO: 2258583 - RNA, 18 nt, Human
ugccacucacacagccag

SEQ ID NO: 2258584 - RNA, 19 nt, Human
ugccacucacacagccagg

SEQ ID NO: 2258585 - RNA, 20 nt, Human
ugccacucacacagccaggu

SEQ ID NO: 2258586 - RNA, 12 nt, Human
ugccaggcaggg

SEQ ID NO: 2258587 - RNA, 18 nt, Human
ugccaggauggaaugaug

SEQ ID NO: 2258588 - RNA, 10 nt, Human
ugccaggcau

SEQ ID NO: 2258589 - RNA, 15 nt, Human
ugccaggcaggggug

SEQ ID NO: 2258590 - RNA, 16 nt, Human
ugccaggcaggggugg

SEQ ID NO: 2258591 - RNA, 17 nt, Human
ugccaggcagggguggg

SEQ ID NO: 2258592 - RNA, 18 nt, Human
ugccaggcaggggugggg

SEQ ID NO: 2258593 - RNA, 18 nt, Human
ugccagguuuuuggucug

SEQ ID NO: 2258594 - RNA, 19 nt, Human
ugccagguuuuuggucuga

SEQ ID NO: 2258595 - RNA, 22 nt, Human
ugccagguuuuuggucugaccc

SEQ ID NO: 2258596 - RNA, 18 nt, Human
ugccaccauggccagcca

SEQ ID NO: 2258597 - RNA, 15 nt, Human
ugccaccauccugcu

SEQ ID NO: 2258598 - RNA, 19 nt, Human
ugccaccauccugcugcug

SEQ ID NO: 2258599 - RNA, 17 nt, Human
ugccacccaccagggcg

SEQ ID NO: 2258600 - RNA, 12 nt, Human
ugccacccacca

SEQ ID NO: 2258601 - RNA, 16 nt, Human
ugccacccaccucccu

SEQ ID NO: 2258602 - RNA, 13 nt, Human
ugccacccaccuc

SEQ ID NO: 2258603 - RNA, 14 nt, Human
ugccaccaggccac

SEQ ID NO: 2258604 - RNA, 17 nt, Human
ugccaccaggccaccuc

SEQ ID NO: 2258605 - RNA, 18 nt, Human
ugccaccaggccaccucc

SEQ ID NO: 2258606 - RNA, 23 nt, Human
ugccaccagagaccguccucacc

SEQ ID NO: 2258607 - RNA, 16 nt, Human
ugccaccagucacugu

SEQ ID NO: 2258608 - RNA, 13 nt, Human
ugccacccuaccu

SEQ ID NO: 2258609 - RNA, 17 nt, Human
ugccacccucaugcugu

SEQ ID NO: 2258610 - RNA, 16 nt, Human
ugccacccucaugcug

SEQ ID NO: 2258611 - RNA, 14 nt, Human
ugccacccuaccug

SEQ ID NO: 2258612 - RNA, 13 nt, Human
ugccacccugggc

SEQ ID NO: 2258613 - RNA, 14 nt, Human
ugccacccugggcu

SEQ ID NO: 2258614 - RNA, 15 nt, Human
ugccacccugggcuc

SEQ ID NO: 2258615 - RNA, 17 nt, Human
ugccacccugggcucug

SEQ ID NO: 2258616 - RNA, 18 nt, Human
ugccacccugggcucugu

SEQ ID NO: 2258617 - RNA, 19 nt, Human
ugccacccugggcucugug

SEQ ID NO: 2258618 - RNA, 20 nt, Human
ugccacccugggcucugugg

SEQ ID NO: 2258619 - RNA, 21 nt, Human
ugccacccugggcucuguggg

SEQ ID NO: 2258620 - RNA, 19 nt, Human
ugccacccuggggagaaag

SEQ ID NO: 2258621 - RNA, 20 nt, Human
ugccacuaaauugacacuua

SEQ ID NO: 2258622 - RNA, 22 nt, Human
ugccacuacggaauaguuggcu

SEQ ID NO: 2258623 - RNA, 22 nt, Human
ugccacccugggcucugugggc

SEQ ID NO: 2258624 - RNA, 18 nt, Human
ugcccaggcuggagugca

SEQ ID NO: 2258625 - RNA, 20 nt, Human
ugcccaggcuggagugcaau

SEQ ID NO: 2258626 - RNA, 13 nt, Human
ugcccaggcugga

SEQ ID NO: 2258627 - RNA, 21 nt, Human
ugcccacucccugcaaccuga

SEQ ID NO: 2258628 - RNA, 13 nt, Human
ugcccaggcuggc

SEQ ID NO: 2258629 - RNA, 21 nt, Human
ugcccagggcucagccuggug

SEQ ID NO: 2258630 - RNA, 20 nt, Human
ugcccagggcucagccuggu

SEQ ID NO: 2258631 - RNA, 21 nt, Human
ugcccacccguggagauggga

SEQ ID NO: 2258632 - RNA, 21 nt, Human
ugccacucacacagccaggug

SEQ ID NO: 2258633 - RNA, 11 nt, Human
ugcccaggcug

SEQ ID NO: 2258634 - RNA, 16 nt, Human
ugcccacucccugcaa

SEQ ID NO: 2258635 - RNA, 14 nt, Human
ugcccacucccugc

SEQ ID NO: 2258636 - RNA, 15 nt, Human
ugcccacucccugca

SEQ ID NO: 2258637 - RNA, 19 nt, Human
ugcccaccugcccaucaca

SEQ ID NO: 2258638 - RNA, 17 nt, Human
ugcccaccugcccauca

SEQ ID NO: 2258639 - RNA, 15 nt, Human
ugcccaccugcccau

SEQ ID NO: 2258640 - RNA, 14 nt, Human
ugcccaccugccca

SEQ ID NO: 2258641 - RNA, 13 nt, Human
ugcccaccuggcc

SEQ ID NO: 2258642 - RNA, 14 nt, Human
ugcccaccuggccu

SEQ ID NO: 2258643 - RNA, 21 nt, Human
ugccauccagguucagcuugu

SEQ ID NO: 2258644 - RNA, 20 nt, Human
ugccauccagguucagcuug

SEQ ID NO: 2258645 - RNA, 17 nt, Human
ugcccacccuccacucu

SEQ ID NO: 2258646 - RNA, 13 nt, Human
ugcccaucccugg

SEQ ID NO: 2258647 - RNA, 19 nt, Human
ugcccaucugggaaaauac

SEQ ID NO: 2258648 - RNA, 23 nt, Human
ugcccaucacaggguugggccca

SEQ ID NO: 2258649 - RNA, 19 nt, Human
ugcccaguuucugccucug

SEQ ID NO: 2258650 - RNA, 20 nt, Human
ugcccaucacaggguugggc

SEQ ID NO: 2258651 - RNA, 17 nt, Human
ugcccaguuucugccuc

SEQ ID NO: 2258652 - RNA, 18 nt, Human
ugcccaguuucugccucu

SEQ ID NO: 2258653 - RNA, 16 nt, Human
ugcccaguuucugccu

SEQ ID NO: 2258654 - RNA, 17 nt, Human
ugcccaguuucagggcu

SEQ ID NO: 2258655 - RNA, 15 nt, Human
ugcccaugccaccgc

SEQ ID NO: 2258656 - RNA, 24 nt, Human
ugcccauggacaggcuggcuccag

SEQ ID NO: 2258657 - RNA, 16 nt, Human
ugcccaugggagcugg

SEQ ID NO: 2258658 - RNA, 13 nt, Human
ugccccaggacca

SEQ ID NO: 2258659 - RNA, 20 nt, Human
ugcccaugggcacugcuggg

SEQ ID NO: 2258660 - RNA, 22 nt, Human
ugcccaugggcacugcugggug

SEQ ID NO: 2258661 - RNA, 15 nt, Human
ugcccaugggcacug

SEQ ID NO: 2258662 - RNA, 16 nt, Human
ugcccaugggcacugc

SEQ ID NO: 2258663 - RNA, 17 nt, Human
ugcccaugggcacugcu

SEQ ID NO: 2258664 - RNA, 18 nt, Human
ugcccaugggcacugcug

SEQ ID NO: 2258665 - RNA, 23 nt, Human
ugcccagggcucagccugguggg

SEQ ID NO: 2258666 - RNA, 14 nt, Human
ugcccaggggagcc

SEQ ID NO: 2258667 - RNA, 15 nt, Human
ugcccaggggagccc

SEQ ID NO: 2258668 - RNA, 16 nt, Human
ugcccaggggagcccu

SEQ ID NO: 2258669 - RNA, 17 nt, Human
ugcccaggggagcccuc

SEQ ID NO: 2258670 - RNA, 20 nt, Human
ugcccaggggcccacaggga

SEQ ID NO: 2258671 - RNA, 11 nt, Human
ugcccaggggu

SEQ ID NO: 2258672 - RNA, 15 nt, Human
ugcccaggggugccc

SEQ ID NO: 2258673 - RNA, 16 nt, Human
ugcccaggggugcccc

SEQ ID NO: 2258674 - RNA, 18 nt, Human
ugcccaggggugcccccu

SEQ ID NO: 2258675 - RNA, 19 nt, Human
ugcccaggggugcccccuc

SEQ ID NO: 2258676 - RNA, 20 nt, Human
ugcccaggggugcccccucc

SEQ ID NO: 2258677 - RNA, 21 nt, Human
ugcccaggggugcccccuccu

SEQ ID NO: 2258678 - RNA, 22 nt, Human
ugcccaggggugcccccuccuc

SEQ ID NO: 2258679 - RNA, 23 nt, Human
ugcccaggggugcccccuccucu

SEQ ID NO: 2258680 - RNA, 22 nt, Human
ugcccagucccccaaccccagc

SEQ ID NO: 2258681 - RNA, 23 nt, Human
ugcccagucccccaaccccagcc

SEQ ID NO: 2258682 - RNA, 21 nt, Human
ugcccagucgauaucucacuu

SEQ ID NO: 2258683 - RNA, 20 nt, Human
ugcccagguuucuggucucu

SEQ ID NO: 2258684 - RNA, 14 nt, Human
ugcccaguccccca

SEQ ID NO: 2258685 - RNA, 16 nt, Human
ugcccagucccccaac

SEQ ID NO: 2258686 - RNA, 18 nt, Human
ugcccagucccccaaccc

SEQ ID NO: 2258687 - RNA, 20 nt, Human
ugcccagucccccaacccca

SEQ ID NO: 2258688 - RNA, 21 nt, Human
ugccccucccccaacccccac

SEQ ID NO: 2258689 - RNA, 17 nt, Human
ugccccucccccaaccc

SEQ ID NO: 2258690 - RNA, 12 nt, Human
ugccccuccccc

SEQ ID NO: 2258691 - RNA, 21 nt, Human
ugccccucccagaacacacuc

SEQ ID NO: 2258692 - RNA, 12 nt, Human
ugccccucccag

SEQ ID NO: 2258693 - RNA, 19 nt, Human
ugccccauccuccagcagg

SEQ ID NO: 2258694 - RNA, 19 nt, Human
ugccccucaacucuccucc

SEQ ID NO: 2258695 - RNA, 18 nt, Human
ugccccauccuccagcag

SEQ ID NO: 2258696 - RNA, 17 nt, Human
ugccccauccuccagca

SEQ ID NO: 2258697 - RNA, 23 nt, Human
ugccccucccccaacccccaccc

SEQ ID NO: 2258698 - RNA, 22 nt, Human
ugccccucccccaacccccacc

SEQ ID NO: 2258699 - RNA, 13 nt, Human
ugccccucccuuc

SEQ ID NO: 2258700 - RNA, 17 nt, Human
ugccccuggcagccccu

SEQ ID NO: 2258701 - RNA, 15 nt, Human
ugccccagggcuccc

SEQ ID NO: 2258702 - RNA, 14 nt, Human
ugccccaggccuga

SEQ ID NO: 2258703 - RNA, 20 nt, Human
ugccccaggaccagcucagg

SEQ ID NO: 2258704 - RNA, 19 nt, Human
ugccccaggaccagcucag

SEQ ID NO: 2258705 - RNA, 18 nt, Human
ugccccaggaccagcuca

SEQ ID NO: 2258706 - RNA, 14 nt, Human
ugccccaggaccag

SEQ ID NO: 2258707 - RNA, 23 nt, Human
ugccccucaacucuccuccagag

SEQ ID NO: 2258708 - RNA, 21 nt, Human
ugccccaucagugcucccuca

SEQ ID NO: 2258709 - RNA, 20 nt, Human
ugccccaucagugcucccuc

SEQ ID NO: 2258710 - RNA, 18 nt, Human
ugccccaucagugcuccc

SEQ ID NO: 2258711 - RNA, 16 nt, Human
ugccccaucagugcuc

SEQ ID NO: 2258712 - RNA, 14 nt, Human
uggcuuuaaugaau

SEQ ID NO: 2258713 - RNA, 16 nt, Human
uggcuuuauccucuuu

SEQ ID NO: 2258714 - RNA, 20 nt, Human
uggcuuuauccucuuuagag

SEQ ID NO: 2258715 - RNA, 21 nt, Human
uggcuugaguuuaaauuguaa

SEQ ID NO: 2258716 - RNA, 12 nt, Human
uggcuuucccgg

SEQ ID NO: 2258717 - RNA, 17 nt, Human
uggcuuucauuauuagu

SEQ ID NO: 2258718 - RNA, 21 nt, Human
uggcuuucccggacugcaagc

SEQ ID NO: 2258719 - RNA, 20 nt, Human
uggcuuucucccacugaguu

SEQ ID NO: 2258720 - RNA, 22 nt, Human
uggcuuucuccgacugcuaggg

SEQ ID NO: 2258721 - RNA, 15 nt, Human
uggcuuucagccucu

SEQ ID NO: 2258722 - RNA, 21 nt, Human
uggcuuuauccucuuuagagu

SEQ ID NO: 2258723 - RNA, 17 nt, Human
uggcuuuggcuucuugg

SEQ ID NO: 2258724 - RNA, 23 nt, Human
uggcuuucuccgacugcuaggga

SEQ ID NO: 2258725 - RNA, 14 nt, Human
uggcuuuugugcau

SEQ ID NO: 2258726 - RNA, 18 nt, Human
uggcuucuucuuuaggau

SEQ ID NO: 2258727 - RNA, 20 nt, Human
uggcuugaagccaagucagc

SEQ ID NO: 2258728 - RNA, 15 nt, Human
uggcuugagaaauau

SEQ ID NO: 2258729 - RNA, 14 nt, Human
uggcuucuccaggg

SEQ ID NO: 2258730 - RNA, 14 nt, Human
uggcuuccuuucuu

SEQ ID NO: 2258731 - RNA, 13 nt, Human
uggcuucucauac

SEQ ID NO: 2258732 - RNA, 21 nt, Human
uggcuucucauacguccacca

SEQ ID NO: 2258733 - RNA, 22 nt, Human
uggcuucucauacguccaccau

SEQ ID NO: 2258734 - RNA, 14 nt, Human
uggcuucuggagcc

SEQ ID NO: 2258735 - RNA, 13 nt, Human
uggcuuccuccug

SEQ ID NO: 2258736 - RNA, 21 nt, Human
uggcuuccuccucccuccugc

SEQ ID NO: 2258737 - RNA, 15 nt, Human
uggcuuccuccugcg

SEQ ID NO: 2258738 - RNA, 16 nt, Human
uggcuuccuuucuugg

SEQ ID NO: 2258739 - RNA, 16 nt, Human
uggcuuccuggcaaua

SEQ ID NO: 2258740 - RNA, 20 nt, Human
uggccccaagggcaaaauuc

SEQ ID NO: 2258741 - RNA, 13 nt, Human
uggccccacccug

SEQ ID NO: 2258742 - RNA, 15 nt, Human
uggccccacccuggg

SEQ ID NO: 2258743 - RNA, 16 nt, Human
uggccccacccugggc

SEQ ID NO: 2258744 - RNA, 18 nt, Human
uggccccacccugggccc

SEQ ID NO: 2258745 - RNA, 22 nt, Human
uggcccauccccccucaccagg

SEQ ID NO: 2258746 - RNA, 20 nt, Human
uggcccauccccccucacca

SEQ ID NO: 2258747 - RNA, 21 nt, Human
uggcccauccccccucaccag

SEQ ID NO: 2258748 - RNA, 16 nt, Human
uggcccagggcccaga

SEQ ID NO: 2258749 - RNA, 19 nt, Human
uggcccauccccccucacc

SEQ ID NO: 2258750 - RNA, 15 nt, Human
uggcccagggcccag

SEQ ID NO: 2258751 - RNA, 14 nt, Human
uggcccagggccca

SEQ ID NO: 2258752 - RNA, 19 nt, Human
uggcucugaccgaaacagc

SEQ ID NO: 2258753 - RNA, 15 nt, Human
uggcucucuccagga

SEQ ID NO: 2258754 - RNA, 19 nt, Human
uggcucugagcgccuccau

SEQ ID NO: 2258755 - RNA, 20 nt, Human
uggcucugaggugccugucc

SEQ ID NO: 2258756 - RNA, 21 nt, Human
uggcucugaggugccuguccc

SEQ ID NO: 2258757 - RNA, 17 nt, Human
uggcucucccauuuccu

SEQ ID NO: 2258758 - RNA, 23 nt, Human
uggcucuccaagugccagaggug

SEQ ID NO: 2258759 - RNA, 13 nt, Human
uggcucucuccag

SEQ ID NO: 2258760 - RNA, 14 nt, Human
uggcucucuccagg

SEQ ID NO: 2258761 - RNA, 12 nt, Human
uggccccagcac

SEQ ID NO: 2258762 - RNA, 14 nt, Human
uggcucuccaagug

SEQ ID NO: 2258763 - RNA, 15 nt, Human
uggcucuccaagugc

SEQ ID NO: 2258764 - RNA, 19 nt, Human
uggcucuccaagugccaga

SEQ ID NO: 2258765 - RNA, 20 nt, Human
uggcucuccaagugccagag

SEQ ID NO: 2258766 - RNA, 22 nt, Human
uggccccacccugggcccuggg

SEQ ID NO: 2258767 - RNA, 14 nt, Human
uggcucugcaaugg

SEQ ID NO: 2258768 - RNA, 22 nt, Human
uggcucugaggugccuguccca

SEQ ID NO: 2258769 - RNA, 23 nt, Human
uggcucugcaaugggcacuggga

SEQ ID NO: 2258770 - RNA, 12 nt, Human
uggcucugcugg

SEQ ID NO: 2258771 - RNA, 11 nt, Human
uggcucugcug

SEQ ID NO: 2258772 - RNA, 16 nt, Human
uggcugcuucaaggau

SEQ ID NO: 2258773 - RNA, 21 nt, Human
uggcugcuucaaggauccuga

SEQ ID NO: 2258774 - RNA, 19 nt, Human
uggcuggaagauccugcgg

SEQ ID NO: 2258775 - RNA, 13 nt, Human
uggcucuggagac

SEQ ID NO: 2258776 - RNA, 15 nt, Human
uggcugcuuggccuu

SEQ ID NO: 2258777 - RNA, 20 nt, Human
uggcuggaagauccugcggg

SEQ ID NO: 2258778 - RNA, 21 nt, Human
uggcuggaagauccugcgggu

SEQ ID NO: 2258779 - RNA, 22 nt, Human
uggcugguaacaguucauguuu

SEQ ID NO: 2258780 - RNA, 13 nt, Human
uggcugguccagg

SEQ ID NO: 2258781 - RNA, 15 nt, Human
uggcugguccagggc

SEQ ID NO: 2258782 - RNA, 16 nt, Human
uggcugguccagggcu

SEQ ID NO: 2258783 - RNA, 23 nt, Human
uggcuggagacgggugggcggcu

SEQ ID NO: 2258784 - RNA, 19 nt, Human
uggcuggaugaaauuuucu

SEQ ID NO: 2258785 - RNA, 22 nt, Human
uggcuggaugaaauuuucuaga

SEQ ID NO: 2258786 - RNA, 21 nt, Human
uggcugggggccucagugcca

SEQ ID NO: 2258787 - RNA, 16 nt, Human
uggcuggaagggagga

SEQ ID NO: 2258788 - RNA, 17 nt, Human
ugggaccugccaggcag

SEQ ID NO: 2258789 - RNA, 23 nt, Human
ugggaccucaguuuuaucauuuu

SEQ ID NO: 2258790 - RNA, 19 nt, Human
ugggaccuaggggcgccgc

SEQ ID NO: 2258791 - RNA, 13 nt, Human
ugggacacccugu

SEQ ID NO: 2258792 - RNA, 20 nt, Human
ugggaccugccaggcagggg

SEQ ID NO: 2258793 - RNA, 15 nt, Human
ugggaccuuuagugg

SEQ ID NO: 2258794 - RNA, 18 nt, Human
ugggaccugccaggcagg

SEQ ID NO: 2258795 - RNA, 19 nt, Human
ugggaccugccaggcaggg

SEQ ID NO: 2258796 - RNA, 23 nt, Human
ugggaccugccaggcaggggugg

SEQ ID NO: 2258797 - RNA, 15 nt, Human
ugggacguggcucag

SEQ ID NO: 2258798 - RNA, 23 nt, Human
ugggacggugcccaagccagagg

SEQ ID NO: 2258799 - RNA, 14 nt, Human
ugggacggugccca

SEQ ID NO: 2258800 - RNA, 20 nt, Human
ugggaauguuacauuguuug

SEQ ID NO: 2258801 - RNA, 16 nt, Human
ugggaauguuugucuc

SEQ ID NO: 2258802 - RNA, 22 nt, Human
ugggaauguuugucucauccca

SEQ ID NO: 2258803 - RNA, 14 nt, Human
ugggaauuguguga

SEQ ID NO: 2258804 - RNA, 17 nt, Human
ugggaauugugugaugu

SEQ ID NO: 2258805 - RNA, 12 nt, Human
ugggacacccug

SEQ ID NO: 2258806 - RNA, 19 nt, Human
ugggacaaaucaagcuuca

SEQ ID NO: 2258807 - RNA, 23 nt, Human
ugggagauucaagggacccauga

SEQ ID NO: 2258808 - RNA, 22 nt, Human
ugggagcugaggccacacucag

SEQ ID NO: 2258809 - RNA, 20 nt, Human
ugggagcugaggccacacuc

SEQ ID NO: 2258810 - RNA, 12 nt, Human
ugggagcugccu

SEQ ID NO: 2258811 - RNA, 13 nt, Human
ugggagcugccug

SEQ ID NO: 2258812 - RNA, 14 nt, Human
ugggagcugccugu

SEQ ID NO: 2258813 - RNA, 13 nt, Human
ugggagcaaaaga

SEQ ID NO: 2258814 - RNA, 14 nt, Human
ugggagauguggaa

SEQ ID NO: 2258815 - RNA, 22 nt, Human
ugggagaggugccagcaacuga

SEQ ID NO: 2258816 - RNA, 21 nt, Human
ugggagauauauuuuuaagau

SEQ ID NO: 2258817 - RNA, 23 nt, Human
ugggagauauauuuuuaagauaa

SEQ ID NO: 2258818 - RNA, 16 nt, Human
ugggacguggcucagc

SEQ ID NO: 2258819 - RNA, 20 nt, Human
ugggagaggauuuuuuucug

SEQ ID NO: 2258820 - RNA, 23 nt, Human
ugggagaggauuuuuuucugagc

SEQ ID NO: 2258821 - RNA, 17 nt, Human
ugggagaggugccagca

SEQ ID NO: 2258822 - RNA, 21 nt, Human
ugggauuacagggaugagcca

SEQ ID NO: 2258823 - RNA, 17 nt, Human
ugggauuacagguguga

SEQ ID NO: 2258824 - RNA, 16 nt, Human
ugggaucugccccucc

SEQ ID NO: 2258825 - RNA, 18 nt, Human
ugggaucugccccucccu

SEQ ID NO: 2258826 - RNA, 15 nt, Human
ugggcagaggaaagc

SEQ ID NO: 2258827 - RNA, 18 nt, Human
ugggcagagcuggcucug

SEQ ID NO: 2258828 - RNA, 20 nt, Human
ugggcagagcuggcucugag

SEQ ID NO: 2258829 - RNA, 16 nt, Human
ugggauuacaggugug

SEQ ID NO: 2258830 - RNA, 13 nt, Human
ugggaucugcccc

SEQ ID NO: 2258831 - RNA, 20 nt, Human
ugggaguccccuuuucuuuu

SEQ ID NO: 2258832 - RNA, 18 nt, Human
ugggauuacaggcuccug

SEQ ID NO: 2258833 - RNA, 18 nt, Human
ugggauccuccaggugca

SEQ ID NO: 2258834 - RNA, 13 nt, Human
ugggauccuggag

SEQ ID NO: 2258835 - RNA, 15 nt, Human
ugggagugagcuggu

SEQ ID NO: 2258836 - RNA, 15 nt, Human
ugggagucaagugug

SEQ ID NO: 2258837 - RNA, 13 nt, Human
ugggaguccccuu

SEQ ID NO: 2258838 - RNA, 15 nt, Human
ugggauccuccaggu

SEQ ID NO: 2258839 - RNA, 21 nt, Human
ugggagugaggaugucugggc

SEQ ID NO: 2258840 - RNA, 17 nt, Human
ugggagcugccuguuca

SEQ ID NO: 2258841 - RNA, 21 nt, Human
ugggagcugccuguucagcuc

SEQ ID NO: 2258842 - RNA, 22 nt, Human
ugggagcugccuguucagcucc

SEQ ID NO: 2258843 - RNA, 14 nt, Human
ugggaguacaaaag

SEQ ID NO: 2258844 - RNA, 21 nt, Human
ugggggcggggugggaaagau

SEQ ID NO: 2258845 - RNA, 16 nt, Human
ugggggcagagggcag

SEQ ID NO: 2258846 - RNA, 14 nt, Human
ugggggcugcagca

SEQ ID NO: 2258847 - RNA, 13 nt, Human
ugggggcagaggg

SEQ ID NO: 2258848 - RNA, 23 nt, Human
ugggggcaagaagaucacgcucc

SEQ ID NO: 2258849 - RNA, 13 nt, Human
ugggggcaagaag

SEQ ID NO: 2258850 - RNA, 11 nt, Human
ugggggaugua

SEQ ID NO: 2258851 - RNA, 17 nt, Human
ugggggcugggcagagg

SEQ ID NO: 2258852 - RNA, 18 nt, Human
ugggggcugggcagagga

SEQ ID NO: 2258853 - RNA, 15 nt, Human
ugggggugcauuuga

SEQ ID NO: 2258854 - RNA, 12 nt, Human
ugggggugcauu

SEQ ID NO: 2258855 - RNA, 21 nt, Human
ugggggcugcagcauguugcu

SEQ ID NO: 2258856 - RNA, 14 nt, Human
ugggggcuggccuc

SEQ ID NO: 2258857 - RNA, 19 nt, Human
ugggggcugggcagaggaa

SEQ ID NO: 2258858 - RNA, 15 nt, Human
ugggggucugugugu

SEQ ID NO: 2258859 - RNA, 18 nt, Human
ugggggucuguguguuua

SEQ ID NO: 2258860 - RNA, 20 nt, Human
ugggggaucacagccucuga

SEQ ID NO: 2258861 - RNA, 23 nt, Human
uggggauugggugggcaggaaaa

SEQ ID NO: 2258862 - RNA, 20 nt, Human
ugggggaugacuagaggcag

SEQ ID NO: 2258863 - RNA, 20 nt, Human
uggggauugggccccugcca

SEQ ID NO: 2258864 - RNA, 21 nt, Human
ugggggaucacagccucugaa

SEQ ID NO: 2258865 - RNA, 15 nt, Human
uggggaacaagggug

SEQ ID NO: 2258866 - RNA, 23 nt, Human
uggggaaaggggucggcugacca

SEQ ID NO: 2258867 - RNA, 21 nt, Human
uggggaaaggggucggcugac

SEQ ID NO: 2258868 - RNA, 22 nt, Human
uggggaaaggggucggcugacc

SEQ ID NO: 2258869 - RNA, 19 nt, Human
uggggaacaaggguggcau

SEQ ID NO: 2258870 - RNA, 15 nt, Human
uggggaugugggagg

SEQ ID NO: 2258871 - RNA, 16 nt, Human
uggggaugugggaggg

SEQ ID NO: 2258872 - RNA, 22 nt, Human
ugggcuaagugauccucccacc

SEQ ID NO: 2258873 - RNA, 20 nt, Human
ugggcgugagaccugccccu

SEQ ID NO: 2258874 - RNA, 17 nt, Human
ugggcagauuuucagca

SEQ ID NO: 2258875 - RNA, 22 nt, Human
ugggcagaucuaccccuuacuu

SEQ ID NO: 2258876 - RNA, 15 nt, Human
ugggcagauuuucag

SEQ ID NO: 2258877 - RNA, 15 nt, Human
ugggcagaucuaccc

SEQ ID NO: 2258878 - RNA, 16 nt, Human
ugggcagaucuacccc

SEQ ID NO: 2258879 - RNA, 21 nt, Human
ugggcagaucuaccccuuacu

SEQ ID NO: 2258880 - RNA, 16 nt, Human
ugggcagaggaaagca

SEQ ID NO: 2258881 - RNA, 16 nt, Human
ugggcuacuuuguccu

SEQ ID NO: 2258882 - RNA, 17 nt, Human
ugggcuaauuaaauaaa

SEQ ID NO: 2258883 - RNA, 19 nt, Human
ugggcguggucacugcugu

SEQ ID NO: 2258884 - RNA, 20 nt, Human
ugggcguggucacugcuguc

SEQ ID NO: 2258885 - RNA, 13 nt, Human
ugggcuacaagga

SEQ ID NO: 2258886 - RNA, 16 nt, Human
ugggcuaguugggcuu

SEQ ID NO: 2258887 - RNA, 17 nt, Human
ugggcuggugucaccug

SEQ ID NO: 2258888 - RNA, 23 nt, Human
ugggcuggguucuacccaggugc

SEQ ID NO: 2258889 - RNA, 22 nt, Human
ugggcugugaguguaaguguga

SEQ ID NO: 2258890 - RNA, 15 nt, Human
ugggcugugagugua

SEQ ID NO: 2258891 - RNA, 12 nt, Human
ugggcugugcua

SEQ ID NO: 2258892 - RNA, 17 nt, Human
ugggcuguuggcacuca

SEQ ID NO: 2258893 - RNA, 19 nt, Human
ugggcuguuggcacucaca

SEQ ID NO: 2258894 - RNA, 23 nt, Human
ugggcuguuggcacucacagacc

SEQ ID NO: 2258895 - RNA, 14 nt, Human
ugggcuuaagaaau

SEQ ID NO: 2258896 - RNA, 14 nt, Human
ugggcuuagagcag

SEQ ID NO: 2258897 - RNA, 12 nt, Human
ugggcugugagu

SEQ ID NO: 2258898 - RNA, 19 nt, Human
ugggcugguggcucccgga

SEQ ID NO: 2258899 - RNA, 15 nt, Human
ugggcuucaguggca

SEQ ID NO: 2258900 - RNA, 16 nt, Human
ugggcuucacuguaua

SEQ ID NO: 2258901 - RNA, 17 nt, Human
ugggcuucacuguauaa

SEQ ID NO: 2258902 - RNA, 23 nt, Human
ugggcuucacuguauaaauagga

SEQ ID NO: 2258903 - RNA, 14 nt, Human
ugggcuuguuuucu

SEQ ID NO: 2258904 - RNA, 22 nt, Human
ugggcuuuuuuuuucucuuucu

SEQ ID NO: 2258905 - RNA, 17 nt, Human
ugggcuucaguggcagc

SEQ ID NO: 2258906 - RNA, 18 nt, Human
ugggcuucacuguauaaa

SEQ ID NO: 2258907 - RNA, 16 nt, Human
ugguauuccugccucc

SEQ ID NO: 2258908 - RNA, 19 nt, Human
ugguauucaggauuacaug

SEQ ID NO: 2258909 - RNA, 16 nt, Human
ugguaugagcugaggg

SEQ ID NO: 2258910 - RNA, 18 nt, Human
ugguauuacacuguauuu

SEQ ID NO: 2258911 - RNA, 20 nt, Human
ugguauuacacuguauuugu

SEQ ID NO: 2258912 - RNA, 14 nt, Human
ugguaugagcugag

SEQ ID NO: 2258913 - RNA, 23 nt, Human
ugguaucuguucuuuaauuuauu

SEQ ID NO: 2258914 - RNA, 15 nt, Human
ugguaugagcugagg

SEQ ID NO: 2258915 - RNA, 23 nt, Human
ugguauuggcuagagguucaaag

SEQ ID NO: 2258916 - RNA, 12 nt, Human
ugguauuguauu

SEQ ID NO: 2258917 - RNA, 13 nt, Human
ugguauuguauuu

SEQ ID NO: 2258918 - RNA, 14 nt, Human
ugguauuguauuua

SEQ ID NO: 2258919 - RNA, 18 nt, Human
ugguauuguauuuauuca

SEQ ID NO: 2258920 - RNA, 16 nt, Human
ugguaucuuaaagugu

SEQ ID NO: 2258921 - RNA, 18 nt, Human
ugguaugaucacggcuca

SEQ ID NO: 2258922 - RNA, 14 nt, Human
ugguaucuguucuu

SEQ ID NO: 2258923 - RNA, 17 nt, Human
ugguaucuguucuuuaa

SEQ ID NO: 2258924 - RNA, 19 nt, Human
ugguaucuguucuuuaauu

SEQ ID NO: 2258925 - RNA, 22 nt, Human
ugguaucuguucuuuaauuuau

SEQ ID NO: 2258926 - RNA, 22 nt, Human
ugguauauccaaaagcuuuuua

SEQ ID NO: 2258927 - RNA, 22 nt, Human
ugguaucuagacccaucuucuu

SEQ ID NO: 2258928 - RNA, 15 nt, Human
ugguaucaagaaagu

SEQ ID NO: 2258929 - RNA, 22 nt, Human
ugguauccugugacauguaaca

SEQ ID NO: 2258930 - RNA, 13 nt, Human
ugguauagaaaug

SEQ ID NO: 2258931 - RNA, 20 nt, Human
uggguuuggaccccagcugg

SEQ ID NO: 2258932 - RNA, 21 nt, Human
uggguuuggaccccagcuggg

SEQ ID NO: 2258933 - RNA, 22 nt, Human
ugguauagaaaugcugguuuuu

SEQ ID NO: 2258934 - RNA, 19 nt, Human
ugguauauccaaaagcuuu

SEQ ID NO: 2258935 - RNA, 16 nt, Human
ugguauauccaaaagc

SEQ ID NO: 2258936 - RNA, 14 nt, Human
ugguauagaaaugc

SEQ ID NO: 2258937 - RNA, 16 nt, Human
ugguauagaaaugcug

SEQ ID NO: 2258938 - RNA, 21 nt, Human
uggguuucuaaagcugccagc

SEQ ID NO: 2258939 - RNA, 19 nt, Human
uggguucugccugccagcu

SEQ ID NO: 2258940 - RNA, 16 nt, Human
uggguucugccugcca

SEQ ID NO: 2258941 - RNA, 17 nt, Human
uggguucugauauugcc

SEQ ID NO: 2258942 - RNA, 16 nt, Human
uggguuucuagcccau

SEQ ID NO: 2258943 - RNA, 14 nt, Human
uggguuuggacccc

SEQ ID NO: 2258944 - RNA, 19 nt, Human
uggguuuggaccccagcug

SEQ ID NO: 2258945 - RNA, 17 nt, Human
uggguuucuaaagcugc

SEQ ID NO: 2258946 - RNA, 18 nt, Human
uggguuucuaaagcugcc

SEQ ID NO: 2258947 - RNA, 20 nt, Human
uggguguauuuauuuuccuc

SEQ ID NO: 2258948 - RNA, 22 nt, Human
uggguguaacaggucuccucuu

SEQ ID NO: 2258949 - RNA, 15 nt, Human
ugggugguggaucug

SEQ ID NO: 2258950 - RNA, 14 nt, Human
ugggugguggggag

SEQ ID NO: 2258951 - RNA, 18 nt, Human
uggguguguguagccaag

SEQ ID NO: 2258952 - RNA, 23 nt, Human
uggguguaacaggucuccucuua

SEQ ID NO: 2258953 - RNA, 15 nt, Human
uggguguuccuggca

SEQ ID NO: 2258954 - RNA, 19 nt, Human
uggguguuccuggcaguuu

SEQ ID NO: 2258955 - RNA, 20 nt, Human
uggguguuccuggcaguuua

SEQ ID NO: 2258956 - RNA, 21 nt, Human
uggguuagggaaaacauucca

SEQ ID NO: 2258957 - RNA, 19 nt, Human
uggguuagggaaaacauuc

SEQ ID NO: 2258958 - RNA, 18 nt, Human
uggguuagggaaaacauu

SEQ ID NO: 2258959 - RNA, 16 nt, Human
uggguuagggaaaaca

SEQ ID NO: 2258960 - RNA, 14 nt, Human
uggguuaguggaug

SEQ ID NO: 2258961 - RNA, 14 nt, Human
uggguucugccugc

SEQ ID NO: 2258962 - RNA, 22 nt, Human
uggguucuacccaggugcuagg

SEQ ID NO: 2258963 - RNA, 15 nt, Human
uggguucuacccagg

SEQ ID NO: 2258964 - RNA, 16 nt, Human
uggguucuacccaggu

SEQ ID NO: 2258965 - RNA, 20 nt, Human
uggguggggugaggaccacu

SEQ ID NO: 2258966 - RNA, 15 nt, Human
uggguggggugagga

SEQ ID NO: 2258967 - RNA, 12 nt, Human
uggguaaauuca

SEQ ID NO: 2258968 - RNA, 13 nt, Human
ugggugguacccu

SEQ ID NO: 2258969 - RNA, 14 nt, Human
uggguggguggugg

SEQ ID NO: 2258970 - RNA, 15 nt, Human
ugggugggugguggg

SEQ ID NO: 2258971 - RNA, 14 nt, Human
ugggugguacccuc

SEQ ID NO: 2258972 - RNA, 18 nt, Human
ugggugguacccucugga

SEQ ID NO: 2258973 - RNA, 22 nt, Human
ugggugguacccucuggagggg

SEQ ID NO: 2258974 - RNA, 16 nt, Human
uggguggguggugggg

SEQ ID NO: 2258975 - RNA, 14 nt, Human
ugggugguggaucu

SEQ ID NO: 2258976 - RNA, 18 nt, Human
uggguggggggcuucaua

SEQ ID NO: 2258977 - RNA, 15 nt, Human
uggguaaaugcagcg

SEQ ID NO: 2258978 - RNA, 21 nt, Human
uggguggggggcuucauacac

SEQ ID NO: 2258979 - RNA, 20 nt, Human
uggguggggggcuucauaca

SEQ ID NO: 2258980 - RNA, 19 nt, Human
ugggguuuaucagaauucu

SEQ ID NO: 2258981 - RNA, 14 nt, Human
ugggggugccagga

SEQ ID NO: 2258982 - RNA, 15 nt, Human
ugggggugagggucc

SEQ ID NO: 2258983 - RNA, 15 nt, Human
uggggguggaauaaa

SEQ ID NO: 2258984 - RNA, 18 nt, Human
uggggguggaggcuuccu

SEQ ID NO: 2258985 - RNA, 21 nt, Human
ugggguuggcugggcccagaa

SEQ ID NO: 2258986 - RNA, 19 nt, Human
ugggguugggauugggggc

SEQ ID NO: 2258987 - RNA, 14 nt, Human
ugggguuguguugu

SEQ ID NO: 2258988 - RNA, 16 nt, Human
uggguaacuagggaag

SEQ ID NO: 2258989 - RNA, 11 nt, Human
uggcaggacca

SEQ ID NO: 2258990 - RNA, 14 nt, Human
uggcaggaccagga

SEQ ID NO: 2258991 - RNA, 16 nt, Human
uggcaggaccaggacu

SEQ ID NO: 2258992 - RNA, 17 nt, Human
uggcaggaccaggacua

SEQ ID NO: 2258993 - RNA, 19 nt, Human
uggcaggaguuggaagugu

SEQ ID NO: 2258994 - RNA, 13 nt, Human
uggcagcugcuuu

SEQ ID NO: 2258995 - RNA, 20 nt, Human
uggcacgguggcucaggccu

SEQ ID NO: 2258996 - RNA, 19 nt, Human
uggcacgguggcucaggcc

SEQ ID NO: 2258997 - RNA, 14 nt, Human
uggcacggugguac

SEQ ID NO: 2258998 - RNA, 16 nt, Human
uggcaccgccuucucu

SEQ ID NO: 2258999 - RNA, 15 nt, Human
uggcaccgccuucuc

SEQ ID NO: 2259000 - RNA, 20 nt, Human
uggcaccuaauccaggcaga

SEQ ID NO: 2259001 - RNA, 12 nt, Human
uggcaccuccua

SEQ ID NO: 2259002 - RNA, 22 nt, Human
uggcaccuucagacuuugcuuc

SEQ ID NO: 2259003 - RNA, 21 nt, Human
uggcacccggccccugcuggu

SEQ ID NO: 2259004 - RNA, 22 nt, Human
uggcaacagaucuggaaccuca

SEQ ID NO: 2259005 - RNA, 21 nt, Human
uggcaacaguuagcuggagcu

SEQ ID NO: 2259006 - RNA, 22 nt, Human
uggcaggaugacccugcgaagg

SEQ ID NO: 2259007 - RNA, 18 nt, Human
uggcaggauggccuggcc

SEQ ID NO: 2259008 - RNA, 19 nt, Human
uggcaggauggccuggcca

SEQ ID NO: 2259009 - RNA, 14 nt, Human
uggcagggccuagc

SEQ ID NO: 2259010 - RNA, 15 nt, Human
uggcagggccuagcu

SEQ ID NO: 2259011 - RNA, 19 nt, Human
uggcagggccuagcugcua

SEQ ID NO: 2259012 - RNA, 11 nt, Human
uggcagggcuc

SEQ ID NO: 2259013 - RNA, 15 nt, Human
uggcaggggacagga

SEQ ID NO: 2259014 - RNA, 18 nt, Human
uggcaggggacaggaguc

SEQ ID NO: 2259015 - RNA, 12 nt, Human
uggcagggcuca

SEQ ID NO: 2259016 - RNA, 14 nt, Human
uggcagggcucagg

SEQ ID NO: 2259017 - RNA, 17 nt, Human
uggcagggcucaggauu

SEQ ID NO: 2259018 - RNA, 23 nt, Human
uggcagggguggcugccucauuu

SEQ ID NO: 2259019 - RNA, 21 nt, Human
uggcagggguggcugccucau

SEQ ID NO: 2259020 - RNA, 17 nt, Human
uggcagggugggaugga

SEQ ID NO: 2259021 - RNA, 16 nt, Human
uggcagggugggaugg

SEQ ID NO: 2259022 - RNA, 15 nt, Human
uggcagggcucagga

SEQ ID NO: 2259023 - RNA, 22 nt, Human
uggcagguggaggugucaggcu

SEQ ID NO: 2259024 - RNA, 15 nt, Human
uggcaggugcagccc

SEQ ID NO: 2259025 - RNA, 17 nt, Human
uggcagucacugaauuc

SEQ ID NO: 2259026 - RNA, 18 nt, Human
uggcaguccuggaagcca

SEQ ID NO: 2259027 - RNA, 16 nt, Human
uggcagucugaauuuu

SEQ ID NO: 2259028 - RNA, 13 nt, Human
uggcagucuauau

SEQ ID NO: 2259029 - RNA, 19 nt, Human
uggcagucuauauguuugu

SEQ ID NO: 2259030 - RNA, 13 nt, Human
uggcagugggagc

SEQ ID NO: 2259031 - RNA, 22 nt, Human
uggcagucugaauuuuuaaaac

SEQ ID NO: 2259032 - RNA, 14 nt, Human
uggcagugagugag

SEQ ID NO: 2259033 - RNA, 17 nt, Human
uggcagugagugagccu

SEQ ID NO: 2259034 - RNA, 18 nt, Human
uggcagugagugagccug

SEQ ID NO: 2259035 - RNA, 19 nt, Human
uggcagugagugagccugg

SEQ ID NO: 2259036 - RNA, 23 nt, Human
uggcagugagugagccuggcucu

SEQ ID NO: 2259037 - RNA, 16 nt, Human
uggccaggagcucuuc

SEQ ID NO: 2259038 - RNA, 15 nt, Human
uggccaggagcucuu

SEQ ID NO: 2259039 - RNA, 14 nt, Human
uggccaggagcucu

SEQ ID NO: 2259040 - RNA, 17 nt, Human
uggccagccccacagcc

SEQ ID NO: 2259041 - RNA, 22 nt, Human
uggccaggagcucuucaggccu

SEQ ID NO: 2259042 - RNA, 20 nt, Human
uggccaggagcucuucaggc

SEQ ID NO: 2259043 - RNA, 23 nt, Human
uggccaggagcucuucaggccuc

SEQ ID NO: 2259044 - RNA, 16 nt, Human
uggccagccccacagc

SEQ ID NO: 2259045 - RNA, 20 nt, Human
uggccaggcagaucugugcc

SEQ ID NO: 2259046 - RNA, 19 nt, Human
uggccaggcagaucugugc

SEQ ID NO: 2259047 - RNA, 17 nt, Human
uggccaggcagaucugu

SEQ ID NO: 2259048 - RNA, 16 nt, Human
uggccaggcagaucug

SEQ ID NO: 2259049 - RNA, 12 nt, Human
uggccaggcaga

SEQ ID NO: 2259050 - RNA, 20 nt, Human
uggccaggcacccccuggag

SEQ ID NO: 2259051 - RNA, 21 nt, Human
uggccaggcacccccuggaga

SEQ ID NO: 2259052 - RNA, 12 nt, Human
uggccaggaugg

SEQ ID NO: 2259053 - RNA, 14 nt, Human
uggccaggauggag

SEQ ID NO: 2259054 - RNA, 23 nt, Human
uggccaggcagaucugugcccca

SEQ ID NO: 2259055 - RNA, 14 nt, Human
uggccagcagcuug

SEQ ID NO: 2259056 - RNA, 12 nt, Human
uggccagcccca

SEQ ID NO: 2259057 - RNA, 13 nt, Human
uggccagccccac

SEQ ID NO: 2259058 - RNA, 15 nt, Human
uggccagccccacag

SEQ ID NO: 2259059 - RNA, 21 nt, Human
uggccagccaacuuuugcaug

SEQ ID NO: 2259060 - RNA, 13 nt, Human
uggccagcagcuu

SEQ ID NO: 2259061 - RNA, 12 nt, Human
uggccagcagcu

SEQ ID NO: 2259062 - RNA, 15 nt, Human
uggccacucagcuuc

SEQ ID NO: 2259063 - RNA, 22 nt, Human
uggccacucagcuuccuaccca

SEQ ID NO: 2259064 - RNA, 20 nt, Human
uggccagaugcaccagcccu

SEQ ID NO: 2259065 - RNA, 21 nt, Human
uggccagaugcaccagcccuu

SEQ ID NO: 2259066 - RNA, 21 nt, Human
uggcagugagugagccuggcu

SEQ ID NO: 2259067 - RNA, 17 nt, Human
uggccaccugagguggg

SEQ ID NO: 2259068 - RNA, 20 nt, Human
uggccaccugaggugggccc

SEQ ID NO: 2259069 - RNA, 17 nt, Human
uggccaccuuuucagcg

SEQ ID NO: 2259070 - RNA, 21 nt, Human
uggccaccugaggugggccca

SEQ ID NO: 2259071 - RNA, 22 nt, Human
uggccaccugaggugggcccag

SEQ ID NO: 2259072 - RNA, 23 nt, Human
uggccaccugaggugggcccagg

SEQ ID NO: 2259073 - RNA, 16 nt, Human
uggccaccuuuucagc

SEQ ID NO: 2259074 - RNA, 17 nt, Human
uggccacuccagacccc

SEQ ID NO: 2259075 - RNA, 20 nt, Human
uggccacuccagaccccugg

SEQ ID NO: 2259076 - RNA, 19 nt, Human
uggccacuaagcagaggag

SEQ ID NO: 2259077 - RNA, 18 nt, Human
uggccacuaagcagagga

SEQ ID NO: 2259078 - RNA, 12 nt, Human
uggccacucagc

SEQ ID NO: 2259079 - RNA, 13 nt, Human
uggccacucagcu

SEQ ID NO: 2259080 - RNA, 12 nt, Human
uggccacuaagc

SEQ ID NO: 2259081 - RNA, 20 nt, Human
uggaggcuuccugcguccuc

SEQ ID NO: 2259082 - RNA, 22 nt, Human
uggaggagcagugcaggcacag

SEQ ID NO: 2259083 - RNA, 20 nt, Human
uggaggagcagugcaggcac

SEQ ID NO: 2259084 - RNA, 21 nt, Human
uggaggagcagugcaggcaca

SEQ ID NO: 2259085 - RNA, 18 nt, Human
uggaggagcaaaggcuga

SEQ ID NO: 2259086 - RNA, 20 nt, Human
uggaggagcaaaggcugaga

SEQ ID NO: 2259087 - RNA, 21 nt, Human
uggaggagcaaaggcugagaa

SEQ ID NO: 2259088 - RNA, 13 nt, Human
uggaggagcagug

SEQ ID NO: 2259089 - RNA, 11 nt, Human
uggaggagcaa

SEQ ID NO: 2259090 - RNA, 14 nt, Human
uggaggagcaaagg

SEQ ID NO: 2259091 - RNA, 16 nt, Human
uggaggagcaaaggcu

SEQ ID NO: 2259092 - RNA, 14 nt, Human
uggaggagaaggac

SEQ ID NO: 2259093 - RNA, 15 nt, Human
uggaggagagaagaa

SEQ ID NO: 2259094 - RNA, 21 nt, Human
uggaggagaagaauuuucaga

SEQ ID NO: 2259095 - RNA, 14 nt, Human
uggaggagaagaau

SEQ ID NO: 2259096 - RNA, 19 nt, Human
uggaggacuagaaccugga

SEQ ID NO: 2259097 - RNA, 20 nt, Human
uggaggacuagaaccuggag

SEQ ID NO: 2259098 - RNA, 21 nt, Human
uggaggacuagaaccuggagg

SEQ ID NO: 2259099 - RNA, 19 nt, Human
uggagggaaugaaccugga

SEQ ID NO: 2259100 - RNA, 22 nt, Human
uggaggcuuccugcguccuccu

SEQ ID NO: 2259101 - RNA, 22 nt, Human
uggagggacaaguggacucagg

SEQ ID NO: 2259102 - RNA, 11 nt, Human
uggagggaagc

SEQ ID NO: 2259103 - RNA, 20 nt, Human
uggagggaaugaaccuggag

SEQ ID NO: 2259104 - RNA, 21 nt, Human
uggagggaaugaaccuggagg

SEQ ID NO: 2259105 - RNA, 21 nt, Human
uggagggcgugggagcguggg

SEQ ID NO: 2259106 - RNA, 20 nt, Human
uggagggcuagaaccuggag

SEQ ID NO: 2259107 - RNA, 21 nt, Human
uggagggcuagaaccuggaga

SEQ ID NO: 2259108 - RNA, 22 nt, Human
uggagggcuagaaccuggagaa

SEQ ID NO: 2259109 - RNA, 22 nt, Human
uggagggcuagaaccuggagag

SEQ ID NO: 2259110 - RNA, 23 nt, Human
uggagggcuagaaccuggagagc

SEQ ID NO: 2259111 - RNA, 14 nt, Human
uggaucacagcugc

SEQ ID NO: 2259112 - RNA, 15 nt, Human
uggaucacagcugcu

SEQ ID NO: 2259113 - RNA, 22 nt, Human
uggacucucagucucugagcag

SEQ ID NO: 2259114 - RNA, 13 nt, Human
uggacucugcaca

SEQ ID NO: 2259115 - RNA, 14 nt, Human
uggacucugcacau

SEQ ID NO: 2259116 - RNA, 14 nt, Human
uggaggaaagcaac

SEQ ID NO: 2259117 - RNA, 21 nt, Human
uggacucuacacugugaacuu

SEQ ID NO: 2259118 - RNA, 17 nt, Human
uggacucuacacuguga

SEQ ID NO: 2259119 - RNA, 20 nt, Human
uggacucucagucucugagc

SEQ ID NO: 2259120 - RNA, 15 nt, Human
uggacucucagucuc

SEQ ID NO: 2259121 - RNA, 15 nt, Human
uggacuccucugucc

SEQ ID NO: 2259122 - RNA, 14 nt, Human
uggacuccucuguc

SEQ ID NO: 2259123 - RNA, 15 nt, Human
uggacuccugcacac

SEQ ID NO: 2259124 - RNA, 16 nt, Human
uggacucgccuguaau

SEQ ID NO: 2259125 - RNA, 18 nt, Human
uggaggaagagggacaga

SEQ ID NO: 2259126 - RNA, 20 nt, Human
uggaggaaggaaacccagcu

SEQ ID NO: 2259127 - RNA, 12 nt, Human
uggaggaaggaa

SEQ ID NO: 2259128 - RNA, 18 nt, Human
uggaggaaggaaacccag

SEQ ID NO: 2259129 - RNA, 14 nt, Human
uggauuucagaaag

SEQ ID NO: 2259130 - RNA, 20 nt, Human
uggauuuauaaaugcuauuu

SEQ ID NO: 2259131 - RNA, 14 nt, Human
uggauuuauaaaug

SEQ ID NO: 2259132 - RNA, 18 nt, Human
uggaucuccaaggaccag

SEQ ID NO: 2259133 - RNA, 24 nt, Human
uggauuuaacagaaauguacagca

SEQ ID NO: 2259134 - RNA, 20 nt, Human
uggauuuaacagaaauguac

SEQ ID NO: 2259135 - RNA, 16 nt, Human
uggaucaguccuuuga

SEQ ID NO: 2259136 - RNA, 13 nt, Human
uggauccuagccu

SEQ ID NO: 2259137 - RNA, 23 nt, Human
uggauccuagccuuauccucuga

SEQ ID NO: 2259138 - RNA, 20 nt, Human
uggauccugaaauagaggcu

SEQ ID NO: 2259139 - RNA, 18 nt, Human
uggaucucauuggacccu

SEQ ID NO: 2259140 - RNA, 14 nt, Human
uggaucuccaagga

SEQ ID NO: 2259141 - RNA, 15 nt, Human
uggaucuccaaggac

SEQ ID NO: 2259142 - RNA, 19 nt, Human
uggaucaguccuuugauca

SEQ ID NO: 2259143 - RNA, 16 nt, Human
uggaucagaugaacuc

SEQ ID NO: 2259144 - RNA, 16 nt, Human
uggaucacagcugcuu

SEQ ID NO: 2259145 - RNA, 20 nt, Human
uggaucacagcugcuuucug

SEQ ID NO: 2259146 - RNA, 18 nt, Human
uggauuugccugugccac

SEQ ID NO: 2259147 - RNA, 17 nt, Human
uggauuugccugugcca

SEQ ID NO: 2259148 - RNA, 14 nt, Human
uggauuugacauug

SEQ ID NO: 2259149 - RNA, 13 nt, Human
uggauuugaagca

SEQ ID NO: 2259150 - RNA, 13 nt, Human
uggauuugaugcu

SEQ ID NO: 2259151 - RNA, 13 nt, Human
uggauuugacauu

SEQ ID NO: 2259152 - RNA, 15 nt, Human
uggauuuguuuaaaa

SEQ ID NO: 2259153 - RNA, 16 nt, Human
uggauuuguuuaaaag

SEQ ID NO: 2259154 - RNA, 17 nt, Human
uggauuuguuuaaaagg

SEQ ID NO: 2259155 - RNA, 22 nt, Human
uggauuuugguuuuguuccccu

SEQ ID NO: 2259156 - RNA, 19 nt, Human
uggauuuucuauuguuacu

SEQ ID NO: 2259157 - RNA, 20 nt, Human
uggauuuucuauuguuacuc

SEQ ID NO: 2259158 - RNA, 20 nt, Human
uggcaaauuaacuugaguuu

SEQ ID NO: 2259159 - RNA, 12 nt, Human
uggcaacagaag

SEQ ID NO: 2259160 - RNA, 17 nt, Human
uggcaaauuaacuugag

SEQ ID NO: 2259161 - RNA, 21 nt, Human
uggcaaagggagcagaacuga

SEQ ID NO: 2259162 - RNA, 22 nt, Human
uggcaaagggagcagaacugaa

SEQ ID NO: 2259163 - RNA, 17 nt, Human
uggcaaaggaaggugga

SEQ ID NO: 2259164 - RNA, 13 nt, Human
uggcaacagaagc

SEQ ID NO: 2259165 - RNA, 15 nt, Human
uggcaacagaagcag

SEQ ID NO: 2259166 - RNA, 14 nt, Human
uggcaacagaagug

SEQ ID NO: 2259167 - RNA, 15 nt, Human
uggcaacagaucugg

SEQ ID NO: 2259168 - RNA, 13 nt, Human
uggcaacagaucu

SEQ ID NO: 2259169 - RNA, 20 nt, Human
uggcaacagaucuggaaccu

SEQ ID NO: 2259170 - RNA, 18 nt, Human
uggcaacagaucuggaac

SEQ ID NO: 2259171 - RNA, 17 nt, Human
uggcaacagaucuggaa

SEQ ID NO: 2259172 - RNA, 16 nt, Human
uggcaacagaucugga

SEQ ID NO: 2259173 - RNA, 19 nt, Human
uggaaagacagcuucucau

SEQ ID NO: 2259174 - RNA, 17 nt, Human
uggaaacuguugccaga

SEQ ID NO: 2259175 - RNA, 14 nt, Human
uggaaacaggacca

SEQ ID NO: 2259176 - RNA, 21 nt, Human
uggaaacuguugccagagaug

SEQ ID NO: 2259177 - RNA, 21 nt, Human
uggaaagacuuuuccaacccu

SEQ ID NO: 2259178 - RNA, 22 nt, Human
uggaaacagcucgacuuuaaaa

SEQ ID NO: 2259179 - RNA, 23 nt, Human
uggaaacuucagcgguuuauaua

SEQ ID NO: 2259180 - RNA, 17 nt, Human
uggaaaacaaggaaguc

SEQ ID NO: 2259181 - RNA, 17 nt, Human
uggaaacagcucgacuu

SEQ ID NO: 2259182 - RNA, 23 nt, Human
uggaaagauaacuaggaaaucca

SEQ ID NO: 2259183 - RNA, 19 nt, Human
uggaaagcaucaccucagg

SEQ ID NO: 2259184 - RNA, 16 nt, Human
uggaaagcaucaccuc

SEQ ID NO: 2259185 - RNA, 23 nt, Human
uggaaagacagcuucucauccug

SEQ ID NO: 2259186 - RNA, 16 nt, Human
uggaaagaaucuaaua

SEQ ID NO: 2259187 - RNA, 18 nt, Human
uggaaagauaacuaggaa

SEQ ID NO: 2259188 - RNA, 14 nt, Human
uggaaagaguacuc

SEQ ID NO: 2259189 - RNA, 20 nt, Human
uggaaagaguaggaagacuu

SEQ ID NO: 2259190 - RNA, 12 nt, Human
uggaaagccucu

SEQ ID NO: 2259191 - RNA, 21 nt, Human
uggaacaucaucaaggcacug

SEQ ID NO: 2259192 - RNA, 23 nt, Human
uggaacaucaucaaggcacugcc

SEQ ID NO: 2259193 - RNA, 21 nt, Human
uggaaagcaucaccucaggcc

SEQ ID NO: 2259194 - RNA, 20 nt, Human
uggaaagcaucaccucaggc

SEQ ID NO: 2259195 - RNA, 21 nt, Human
uggaacauaaaauacaauguu

SEQ ID NO: 2259196 - RNA, 20 nt, Human
uggaacauaaaauacaaugu

SEQ ID NO: 2259197 - RNA, 15 nt, Human
ugcuuugaagcaguu

SEQ ID NO: 2259198 - RNA, 14 nt, Human
ugcuuugaagcagu

SEQ ID NO: 2259199 - RNA, 19 nt, Human
ugcuuugaagcaguugugu

SEQ ID NO: 2259200 - RNA, 22 nt, Human
ugcuuugaagcaguugugucag

SEQ ID NO: 2259201 - RNA, 17 nt, Human
uggaaaaauagccugcc

SEQ ID NO: 2259202 - RNA, 19 nt, Human
uggaaaaauccagaaagaa

SEQ ID NO: 2259203 - RNA, 18 nt, Human
uggaaaaauccagaaaga

SEQ ID NO: 2259204 - RNA, 18 nt, Human
uggaaaaaugagagaagg

SEQ ID NO: 2259205 - RNA, 13 nt, Human
uggaaaaauccag

SEQ ID NO: 2259206 - RNA, 18 nt, Human
ugcuuugacucaccuguu

SEQ ID NO: 2259207 - RNA, 12 nt, Human
uggaaaaauauu

SEQ ID NO: 2259208 - RNA, 20 nt, Human
uggaaaaauagccugccucu

SEQ ID NO: 2259209 - RNA, 22 nt, Human
ugcuuucuuucguuuguuuguu

SEQ ID NO: 2259210 - RNA, 15 nt, Human
ugcuuucuuucguuu

SEQ ID NO: 2259211 - RNA, 23 nt, Human
ugcuuucuguugucauugcuguu

SEQ ID NO: 2259212 - RNA, 14 nt, Human
ugcuuuacugucaa

SEQ ID NO: 2259213 - RNA, 13 nt, Human
ugcuuucugcuca

SEQ ID NO: 2259214 - RNA, 12 nt, Human
ugcuuucugcuc

SEQ ID NO: 2259215 - RNA, 20 nt, Human
ugcuuucugcucagcuucuc

SEQ ID NO: 2259216 - RNA, 19 nt, Human
ugcuuucugcucagcuucu

SEQ ID NO: 2259217 - RNA, 15 nt, Human
ugcuuucugcucagc

SEQ ID NO: 2259218 - RNA, 14 nt, Human
ugcuuucugcucag

SEQ ID NO: 2259219 - RNA, 20 nt, Human
ugcuggacggcauuccugcu

SEQ ID NO: 2259220 - RNA, 19 nt, Human
ugcuggacggcauuccugc

SEQ ID NO: 2259221 - RNA, 16 nt, Human
ugcuggacaguaucac

SEQ ID NO: 2259222 - RNA, 17 nt, Human
ugcuggaauucuaacaa

SEQ ID NO: 2259223 - RNA, 19 nt, Human
ugcuggacugucauagaaa

SEQ ID NO: 2259224 - RNA, 15 nt, Human
ugcuggacugucaua

SEQ ID NO: 2259225 - RNA, 14 nt, Human
ugcuggacugucau

SEQ ID NO: 2259226 - RNA, 21 nt, Human
ugcuggacggggacuggggau

SEQ ID NO: 2259227 - RNA, 10 nt, Human
ugcuggagcc

SEQ ID NO: 2259228 - RNA, 18 nt, Human
ugcuggagccacuaacua

SEQ ID NO: 2259229 - RNA, 14 nt, Human
ugcuggagauguuu

SEQ ID NO: 2259230 - RNA, 13 nt, Human
ugcuggagagguu

SEQ ID NO: 2259231 - RNA, 14 nt, Human
ugcuggagagguua

SEQ ID NO: 2259232 - RNA, 13 nt, Human
ugcuggagacucc

SEQ ID NO: 2259233 - RNA, 12 nt, Human
ugcuggagaggu

SEQ ID NO: 2259234 - RNA, 20 nt, Human
ugcuggacggggacugggga

SEQ ID NO: 2259235 - RNA, 13 nt, Human
ugcuggagaagag

SEQ ID NO: 2259236 - RNA, 18 nt, Human
ugcuggagaagagaggag

SEQ ID NO: 2259237 - RNA, 22 nt, Human
ugcuggagaagagaggagagga

SEQ ID NO: 2259238 - RNA, 19 nt, Human
ugcuuuaauuguuaagaua

SEQ ID NO: 2259239 - RNA, 20 nt, Human
ugcuuuaauaucaucaguau

SEQ ID NO: 2259240 - RNA, 18 nt, Human
ugcuuuaauaucaucagu

SEQ ID NO: 2259241 - RNA, 15 nt, Human
ugcuuuaauaucauc

SEQ ID NO: 2259242 - RNA, 13 nt, Human
ugcuuuaauauca

SEQ ID NO: 2259243 - RNA, 17 nt, Human
ugcuggagccuguguaa

SEQ ID NO: 2259244 - RNA, 19 nt, Human
ugcuggagccuguguaaca

SEQ ID NO: 2259245 - RNA, 19 nt, Human
ugcuggagccacuaacuag

SEQ ID NO: 2259246 - RNA, 20 nt, Human
ugcuggagccacuaacuaga

SEQ ID NO: 2259247 - RNA, 11 nt, Human
ugcuggagccu

SEQ ID NO: 2259248 - RNA, 12 nt, Human
ugcuggagccug

SEQ ID NO: 2259249 - RNA, 13 nt, Human
ugcuggagccugu

SEQ ID NO: 2259250 - RNA, 14 nt, Human
ugcuggagccugug

SEQ ID NO: 2259251 - RNA, 15 nt, Human
ugcuggagccugugu

SEQ ID NO: 2259252 - RNA, 16 nt, Human
ugcuggagccugugua

SEQ ID NO: 2259253 - RNA, 21 nt, Human
uggacuagagggaccucuccc

SEQ ID NO: 2259254 - RNA, 24 nt, Human
uggacuacccacguucucacaccc

SEQ ID NO: 2259255 - RNA, 19 nt, Human
uggacauccucuucugcuu

SEQ ID NO: 2259256 - RNA, 16 nt, Human
uggacaugagauaaug

SEQ ID NO: 2259257 - RNA, 12 nt, Human
uggacauggccc

SEQ ID NO: 2259258 - RNA, 14 nt, Human
uggacuaucugucu

SEQ ID NO: 2259259 - RNA, 15 nt, Human
uggacuaucugucug

SEQ ID NO: 2259260 - RNA, 17 nt, Human
uggacuaucugucuggu

SEQ ID NO: 2259261 - RNA, 20 nt, Human
uggacuaucugucugguggc

SEQ ID NO: 2259262 - RNA, 18 nt, Human
uggacuauuauaauuuaa

SEQ ID NO: 2259263 - RNA, 22 nt, Human
uggacuaucugucugguggccc

SEQ ID NO: 2259264 - RNA, 23 nt, Human
uggacuaucugucugguggcccc

SEQ ID NO: 2259265 - RNA, 20 nt, Human
uggacucaccucccccaucu

SEQ ID NO: 2259266 - RNA, 18 nt, Human
uggacucaccucccccau

SEQ ID NO: 2259267 - RNA, 13 nt, Human
uggacaugcacag

SEQ ID NO: 2259268 - RNA, 19 nt, Human
uggacaugcacagcuaaca

SEQ ID NO: 2259269 - RNA, 18 nt, Human
uggacauccuccucccac

SEQ ID NO: 2259270 - RNA, 12 nt, Human
uggacagcccca

SEQ ID NO: 2259271 - RNA, 20 nt, Human
uggacauccuccucccaccc

SEQ ID NO: 2259272 - RNA, 23 nt, Human
uggacauccuccucccacccggc

SEQ ID NO: 2259273 - RNA, 22 nt, Human
uggacaugaagauucuuuccca

SEQ ID NO: 2259274 - RNA, 21 nt, Human
uggacaugaagauucuuuccc

SEQ ID NO: 2259275 - RNA, 18 nt, Human
uggacauccucuucugcu

SEQ ID NO: 2259276 - RNA, 18 nt, Human
uggacaugaagauucuuu

SEQ ID NO: 2259277 - RNA, 12 nt, Human
uggacagaagaa

SEQ ID NO: 2259278 - RNA, 23 nt, Human
uggacacuuugaaauguguuucu

SEQ ID NO: 2259279 - RNA, 17 nt, Human
uggaaugguuauaaaag

SEQ ID NO: 2259280 - RNA, 18 nt, Human
uggaaugguuauaaaagu

SEQ ID NO: 2259281 - RNA, 21 nt, Human
uggacacuuugaaauguguuu

SEQ ID NO: 2259282 - RNA, 22 nt, Human
uggacacuuugaaauguguuuc

SEQ ID NO: 2259283 - RNA, 16 nt, Human
uggacagaagcagcuc

SEQ ID NO: 2259284 - RNA, 15 nt, Human
uggacagaagcagcu

SEQ ID NO: 2259285 - RNA, 16 nt, Human
uggacagacagaggau

SEQ ID NO: 2259286 - RNA, 22 nt, Human
uggacagacagaggaugagcuc

SEQ ID NO: 2259287 - RNA, 18 nt, Human
uggacagaagcagcucuu

SEQ ID NO: 2259288 - RNA, 17 nt, Human
uggacagaagcagcucu

SEQ ID NO: 2259289 - RNA, 17 nt, Human
uggaaugaauuaaauaa

SEQ ID NO: 2259290 - RNA, 18 nt, Human
uggaaugaauuaaauaaa

SEQ ID NO: 2259291 - RNA, 16 nt, Human
uggaaugcuguguuaa

SEQ ID NO: 2259292 - RNA, 16 nt, Human
uggaaugcuuccuaga

SEQ ID NO: 2259293 - RNA, 17 nt, Human
uggaaugcuuccuagaa

SEQ ID NO: 2259294 - RNA, 20 nt, Human
uggaaugaugggucaguugu

SEQ ID NO: 2259295 - RNA, 22 nt, Human
uggaaugcuugaaaaaugugca

SEQ ID NO: 2259296 - RNA, 17 nt, Human
uggaaugggcagcucau

SEQ ID NO: 2259297 - RNA, 24 nt, Human
uggaaugcuuccuagaaguuacug

SEQ ID NO: 2259298 - RNA, 18 nt, Human
uggaaugcuucuucucag

SEQ ID NO: 2259299 - RNA, 20 nt, Human
uggaaugcuucuucucaggc

SEQ ID NO: 2259300 - RNA, 13 nt, Human
uggaaugcuugaa

SEQ ID NO: 2259301 - RNA, 21 nt, Human
uggaacguuuuuccuguucuu

SEQ ID NO: 2259302 - RNA, 21 nt, Human
uggaacucauuccugccuguc

SEQ ID NO: 2259303 - RNA, 19 nt, Human
uggaacucauuccugccug

SEQ ID NO: 2259304 - RNA, 16 nt, Human
uggaacucauuccugc

SEQ ID NO: 2259305 - RNA, 19 nt, Human
uggaauaacauguaauuaa

SEQ ID NO: 2259306 - RNA, 15 nt, Human
uggaauaacauguaa

SEQ ID NO: 2259307 - RNA, 14 nt, Human
uggaauaacaugua

SEQ ID NO: 2259308 - RNA, 14 nt, Human
uggaaguuuugcau

SEQ ID NO: 2259309 - RNA, 22 nt, Human
ugcuuugacucaccuguuacuu

SEQ ID NO: 2259310 - RNA, 13 nt, Human
uggaauaaaauac

SEQ ID NO: 2259311 - RNA, 18 nt, Human
uggaauauaaggaaagca

SEQ ID NO: 2259312 - RNA, 14 nt, Human
uggaauauaaggaa

SEQ ID NO: 2259313 - RNA, 13 nt, Human
uggaauauaaaga

SEQ ID NO: 2259314 - RNA, 14 nt, Human
uggaauaauguaaa

SEQ ID NO: 2259315 - RNA, 22 nt, Human
uggaauaguauccuccagguuu

SEQ ID NO: 2259316 - RNA, 23 nt, Human
uggaauaguauccuccagguuuu

SEQ ID NO: 2259317 - RNA, 15 nt, Human
uggaauauauaacca

SEQ ID NO: 2259318 - RNA, 21 nt, Human
uggaauauaaggaaagcaaua

SEQ ID NO: 2259319 - RNA, 13 nt, Human
uggaauaguuuuu

SEQ ID NO: 2259320 - RNA, 16 nt, Human
uggaauauauaaccag

SEQ ID NO: 2259321 - RNA, 22 nt, Human
uggaauaauccuaaacauauga

SEQ ID NO: 2259322 - RNA, 17 nt, Human
uggaauaaggagaauga

SEQ ID NO: 2259323 - RNA, 15 nt, Human
uggaauaaguucaaa

SEQ ID NO: 2259324 - RNA, 15 nt, Human
uggaauaaaauacua

SEQ ID NO: 2259325 - RNA, 18 nt, Human
uggaauaaaauacuauuu

SEQ ID NO: 2259326 - RNA, 19 nt, Human
uggaauaaaauacuauuuu

SEQ ID NO: 2259327 - RNA, 21 nt, Human
uggaauaaaauauuuuuuuca

SEQ ID NO: 2259328 - RNA, 12 nt, Human
ucuagggaaaaa

SEQ ID NO: 2259329 - RNA, 17 nt, Human
ucuagguagugcccuau

SEQ ID NO: 2259330 - RNA, 20 nt, Human
ucuagguaggggcccacuuc

SEQ ID NO: 2259331 - RNA, 12 nt, Human
ucuaggcugggg

SEQ ID NO: 2259332 - RNA, 15 nt, Human
ucuagguaaauuaca

SEQ ID NO: 2259333 - RNA, 17 nt, Human
ucuagguggcaaggcug

SEQ ID NO: 2259334 - RNA, 23 nt, Human
ucuaggugcccuuggaggccagc

SEQ ID NO: 2259335 - RNA, 14 nt, Human
ucuagguucuaaaa

SEQ ID NO: 2259336 - RNA, 18 nt, Human
ucuagguggcaaggcugu

SEQ ID NO: 2259337 - RNA, 20 nt, Human
ucuagguggcaaggcugugc

SEQ ID NO: 2259338 - RNA, 23 nt, Human
ucuagguucuaaaaauugugauc

SEQ ID NO: 2259339 - RNA, 17 nt, Human
ucuagguuuaacucaga

SEQ ID NO: 2259340 - RNA, 19 nt, Human
ucuagguuuaacucagauc

SEQ ID NO: 2259341 - RNA, 21 nt, Human
ucuauaugaauuuaaauauaa

SEQ ID NO: 2259342 - RNA, 20 nt, Human
ucuagguuuaacucagauca

SEQ ID NO: 2259343 - RNA, 13 nt, Human
ucuauauguacuu

SEQ ID NO: 2259344 - RNA, 18 nt, Human
ucuauauguacuugucaa

SEQ ID NO: 2259345 - RNA, 20 nt, Human
ucuauauguacuugucaaag

SEQ ID NO: 2259346 - RNA, 21 nt, Human
ucuauauguacuugucaaaga

SEQ ID NO: 2259347 - RNA, 23 nt, Human
ucuauauguacuugucaaagaag

SEQ ID NO: 2259348 - RNA, 18 nt, Human
ucuacucauauauaucua

SEQ ID NO: 2259349 - RNA, 18 nt, Human
ucuacucauuccccgggg

SEQ ID NO: 2259350 - RNA, 19 nt, Human
ucuacuccuaccucagccu

SEQ ID NO: 2259351 - RNA, 17 nt, Human
ucuacuccuaccucagc

SEQ ID NO: 2259352 - RNA, 14 nt, Human
ucuacucauauaua

SEQ ID NO: 2259353 - RNA, 21 nt, Human
ucuacucagaaauuuuuauuu

SEQ ID NO: 2259354 - RNA, 14 nt, Human
ucuacucagaaauu

SEQ ID NO: 2259355 - RNA, 18 nt, Human
ucuacuaauuccacaccu

SEQ ID NO: 2259356 - RNA, 20 nt, Human
ucuacucgaguuacagacaa

SEQ ID NO: 2259357 - RNA, 21 nt, Human
ucuacucgaguuacagacaaa

SEQ ID NO: 2259358 - RNA, 19 nt, Human
ucuacuccuuguaaagacu

SEQ ID NO: 2259359 - RNA, 22 nt, Human
ucuacuccuaccucagccuaga

SEQ ID NO: 2259360 - RNA, 20 nt, Human
ucuacucuccucaucucuaa

SEQ ID NO: 2259361 - RNA, 18 nt, Human
ucuacucucccauggcuu

SEQ ID NO: 2259362 - RNA, 21 nt, Human
ucuacucccaaguaugggguu

SEQ ID NO: 2259363 - RNA, 13 nt, Human
ucuacucucccau

SEQ ID NO: 2259364 - RNA, 18 nt, Human
ucuacucuagggaaaaac

SEQ ID NO: 2259365 - RNA, 18 nt, Human
ucuaggcaucccagggga

SEQ ID NO: 2259366 - RNA, 18 nt, Human
ucuaggaggucucuaaga

SEQ ID NO: 2259367 - RNA, 16 nt, Human
ucuacucuuaagccau

SEQ ID NO: 2259368 - RNA, 17 nt, Human
ucuacucuuaagccauc

SEQ ID NO: 2259369 - RNA, 18 nt, Human
ucuacucuuaagccaucu

SEQ ID NO: 2259370 - RNA, 20 nt, Human
ucuaauuggaagaaauuccu

SEQ ID NO: 2259371 - RNA, 22 nt, Human
ucuaauuggaagaaauuccugu

SEQ ID NO: 2259372 - RNA, 22 nt, Human
ucuaauuuaucuugucucuggg

SEQ ID NO: 2259373 - RNA, 23 nt, Human
ucuaauuuaucuugucucugggc

SEQ ID NO: 2259374 - RNA, 19 nt, Human
ucuaauuucaaaaauauaa

SEQ ID NO: 2259375 - RNA, 22 nt, Human
ucuaauuucaaaaauauaacuu

SEQ ID NO: 2259376 - RNA, 12 nt, Human
ucuacuaaaaau

SEQ ID NO: 2259377 - RNA, 15 nt, Human
ucuacuaaaaauaca

SEQ ID NO: 2259378 - RNA, 19 nt, Human
ucuacuaaaaauacaaaaa

SEQ ID NO: 2259379 - RNA, 15 nt, Human
ucuacuaaaaaugca

SEQ ID NO: 2259380 - RNA, 20 nt, Human
ucuaauuucaaaaauauaac

SEQ ID NO: 2259381 - RNA, 15 nt, Human
ucuaauuuuggaugg

SEQ ID NO: 2259382 - RNA, 16 nt, Human
ucuaauuuuggaugga

SEQ ID NO: 2259383 - RNA, 14 nt, Human
ucuacuauuuaugu

SEQ ID NO: 2259384 - RNA, 15 nt, Human
ucuacuaauuccaca

SEQ ID NO: 2259385 - RNA, 22 nt, Human
ucuaauauuuauugcuuuauaa

SEQ ID NO: 2259386 - RNA, 18 nt, Human
ucuaauauuaaaaauaug

SEQ ID NO: 2259387 - RNA, 20 nt, Human
ucuaauauuuauugcuuuau

SEQ ID NO: 2259388 - RNA, 19 nt, Human
ucuaaucuagauaucgacu

SEQ ID NO: 2259389 - RNA, 20 nt, Human
ucuaaucuagauaucgacuu

SEQ ID NO: 2259390 - RNA, 15 nt, Human
ucuaauguauuuuau

SEQ ID NO: 2259391 - RNA, 20 nt, Human
ucuaauggguauuuaaacaa

SEQ ID NO: 2259392 - RNA, 17 nt, Human
ucuaauguauuuuauug

SEQ ID NO: 2259393 - RNA, 24 nt, Human
ucuaauguauuuuauuguaacaga

SEQ ID NO: 2259394 - RNA, 14 nt, Human
ucuaaugucuucau

SEQ ID NO: 2259395 - RNA, 15 nt, Human
ucuaaugucuucauu

SEQ ID NO: 2259396 - RNA, 17 nt, Human
ucuaaugucuucauuuc

SEQ ID NO: 2259397 - RNA, 11 nt, Human
ucuaauguggu

SEQ ID NO: 2259398 - RNA, 19 nt, Human
ucuaaugugguuauuucuc

SEQ ID NO: 2259399 - RNA, 20 nt, Human
ucuaaugugguuauuucucu

SEQ ID NO: 2259400 - RNA, 12 nt, Human
ucguccagggag

SEQ ID NO: 2259401 - RNA, 13 nt, Human
ucguccucccccu

SEQ ID NO: 2259402 - RNA, 17 nt, Human
ucguccucccccugcca

SEQ ID NO: 2259403 - RNA, 16 nt, Human
ucguccucccccugcc

SEQ ID NO: 2259404 - RNA, 14 nt, Human
ucguccucccccug

SEQ ID NO: 2259405 - RNA, 23 nt, Human
ucgucaucauuuuuccuucccuu

SEQ ID NO: 2259406 - RNA, 23 nt, Human
ucguccucccccugccagugccu

SEQ ID NO: 2259407 - RNA, 18 nt, Human
ucguccucccccugccag

SEQ ID NO: 2259408 - RNA, 14 nt, Human
ucgucgcacagucu

SEQ ID NO: 2259409 - RNA, 19 nt, Human
ucgucggggggacagcucc

SEQ ID NO: 2259410 - RNA, 16 nt, Human
ucgucgcacagucucu

SEQ ID NO: 2259411 - RNA, 21 nt, Human
ucgucuccagccccuucucag

SEQ ID NO: 2259412 - RNA, 18 nt, Human
ucgucuguuuauaaacau

SEQ ID NO: 2259413 - RNA, 15 nt, Human
ucgucugacugugug

SEQ ID NO: 2259414 - RNA, 16 nt, Human
ucgucugacugugugu

SEQ ID NO: 2259415 - RNA, 17 nt, Human
ucuaauauuaaaaauau

SEQ ID NO: 2259416 - RNA, 16 nt, Human
ucgucuuaacucacca

SEQ ID NO: 2259417 - RNA, 22 nt, Human
ucucaauuuuugguugaauaaa

SEQ ID NO: 2259418 - RNA, 13 nt, Human
ucucaauuuuugg

SEQ ID NO: 2259419 - RNA, 16 nt, Human
ucucacacaugagcau

SEQ ID NO: 2259420 - RNA, 18 nt, Human
ucucaaauuucuaaaucu

SEQ ID NO: 2259421 - RNA, 12 nt, Human
ucucaauuucua

SEQ ID NO: 2259422 - RNA, 20 nt, Human
ucucacugccaugccagcuu

SEQ ID NO: 2259423 - RNA, 21 nt, Human
ucucacugagaagauugugaa

SEQ ID NO: 2259424 - RNA, 22 nt, Human
ucucacugagaagauugugaau

SEQ ID NO: 2259425 - RNA, 23 nt, Human
ucucacucugucgcccagucugg

SEQ ID NO: 2259426 - RNA, 21 nt, Human
ucucacacaugagcaucaggc

SEQ ID NO: 2259427 - RNA, 16 nt, Human
ucuaucuuauauaguu

SEQ ID NO: 2259428 - RNA, 16 nt, Human
ucuauccuacaacaag

SEQ ID NO: 2259429 - RNA, 12 nt, Human
ucuaucucaucu

SEQ ID NO: 2259430 - RNA, 14 nt, Human
ucuauccucuguaa

SEQ ID NO: 2259431 - RNA, 19 nt, Human
ucuaucauuuuuguacagu

SEQ ID NO: 2259432 - RNA, 14 nt, Human
ucuauccacagaga

SEQ ID NO: 2259433 - RNA, 15 nt, Human
ucuauccacagagag

SEQ ID NO: 2259434 - RNA, 17 nt, Human
ucuauccacagagaguc

SEQ ID NO: 2259435 - RNA, 23 nt, Human
ucuaucauuuuuguacaguuugc

SEQ ID NO: 2259436 - RNA, 16 nt, Human
ucucaaauuucuaaau

SEQ ID NO: 2259437 - RNA, 14 nt, Human
ucucaaauuucuaa

SEQ ID NO: 2259438 - RNA, 22 nt, Human
ucuaucuuugagcgcccacuag

SEQ ID NO: 2259439 - RNA, 17 nt, Human
ucuaucuugcucuguaa

SEQ ID NO: 2259440 - RNA, 19 nt, Human
ucuaucuugcucuguaauc

SEQ ID NO: 2259441 - RNA, 20 nt, Human
ucuaucuugcucuguaaucu

SEQ ID NO: 2259442 - RNA, 13 nt, Human
ucucaaauuucua

SEQ ID NO: 2259443 - RNA, 16 nt, Human
ucucagauauuuauau

SEQ ID NO: 2259444 - RNA, 14 nt, Human
ucucagauauuuau

SEQ ID NO: 2259445 - RNA, 21 nt, Human
ucucagagcuacuugggccau

SEQ ID NO: 2259446 - RNA, 22 nt, Human
ucucagacuuuggaaaaugcau

SEQ ID NO: 2259447 - RNA, 19 nt, Human
ucucagagcuacuugggcc

SEQ ID NO: 2259448 - RNA, 20 nt, Human
ucucagagcuacuugggcca

SEQ ID NO: 2259449 - RNA, 21 nt, Human
ucucagacuuuggaaaaugca

SEQ ID NO: 2259450 - RNA, 16 nt, Human
ucucagacugcaugua

SEQ ID NO: 2259451 - RNA, 17 nt, Human
ucucagacccuuuagcc

SEQ ID NO: 2259452 - RNA, 23 nt, Human
ucucagauauuuauauuuuuauu

SEQ ID NO: 2259453 - RNA, 20 nt, Human
ucucagauauuuauauuuuu

SEQ ID NO: 2259454 - RNA, 14 nt, Human
ucucagauccuugu

SEQ ID NO: 2259455 - RNA, 16 nt, Human
ucucagauccuuguuu

SEQ ID NO: 2259456 - RNA, 17 nt, Human
ucucagauccuuguuuc

SEQ ID NO: 2259457 - RNA, 18 nt, Human
ucucagauccuuguuuca

SEQ ID NO: 2259458 - RNA, 19 nt, Human
ucucagauccuuguuucaa

SEQ ID NO: 2259459 - RNA, 22 nt, Human
ucucagauccuuguuucaaaca

SEQ ID NO: 2259460 - RNA, 14 nt, Human
ucucacuguucccu

SEQ ID NO: 2259461 - RNA, 21 nt, Human
ucucacugugggaaggccagc

SEQ ID NO: 2259462 - RNA, 16 nt, Human
ucucacuguucccucu

SEQ ID NO: 2259463 - RNA, 17 nt, Human
ucucacuguucccucug

SEQ ID NO: 2259464 - RNA, 18 nt, Human
ucucacuguucccucugc

SEQ ID NO: 2259465 - RNA, 21 nt, Human
ucucacuguucccucugcucc

SEQ ID NO: 2259466 - RNA, 22 nt, Human
ucucacuguucccucugcuccu

SEQ ID NO: 2259467 - RNA, 17 nt, Human
ucucacuggaugcaaag

SEQ ID NO: 2259468 - RNA, 20 nt, Human
ucucacugugggaaggccag

SEQ ID NO: 2259469 - RNA, 14 nt, Human
ucucacuguugccc

SEQ ID NO: 2259470 - RNA, 15 nt, Human
ucucacuguugccca

SEQ ID NO: 2259471 - RNA, 13 nt, Human
ucucaguuucacu

SEQ ID NO: 2259472 - RNA, 16 nt, Human
ucucaguuuguguguc

SEQ ID NO: 2259473 - RNA, 17 nt, Human
ucucaguuugugugucu

SEQ ID NO: 2259474 - RNA, 16 nt, Human
ucucaguuuucauaag

SEQ ID NO: 2259475 - RNA, 15 nt, Human
ucucaguuuucauaa

SEQ ID NO: 2259476 - RNA, 18 nt, Human
ucucaguuugugugucuu

SEQ ID NO: 2259477 - RNA, 19 nt, Human
ucucaguuugugugucuua

SEQ ID NO: 2259478 - RNA, 20 nt, Human
ucucagauccuuguuucaaa

SEQ ID NO: 2259479 - RNA, 13 nt, Human
uccuuuguacuuu

SEQ ID NO: 2259480 - RNA, 18 nt, Human
uccuuuguacuuugugcu

SEQ ID NO: 2259481 - RNA, 11 nt, Human
uccuuuguaua

SEQ ID NO: 2259482 - RNA, 19 nt, Human
uccuuuguauauuauuucu

SEQ ID NO: 2259483 - RNA, 17 nt, Human
uccuuugugaggaagcc

SEQ ID NO: 2259484 - RNA, 18 nt, Human
uccuuugugaggaagccg

SEQ ID NO: 2259485 - RNA, 22 nt, Human
uccuuugugaggaagccgcugg

SEQ ID NO: 2259486 - RNA, 13 nt, Human
uccuuugggaaag

SEQ ID NO: 2259487 - RNA, 20 nt, Human
uccuuugcacugagggccac

SEQ ID NO: 2259488 - RNA, 22 nt, Human
uccuuuggagcuuuuuucuuua

SEQ ID NO: 2259489 - RNA, 15 nt, Human
uccuuugcaggcuca

SEQ ID NO: 2259490 - RNA, 22 nt, Human
uccuuugaucaguauaauuuuu

SEQ ID NO: 2259491 - RNA, 14 nt, Human
uccuuugcacugag

SEQ ID NO: 2259492 - RNA, 15 nt, Human
uccuuugcacugagg

SEQ ID NO: 2259493 - RNA, 17 nt, Human
uccuuugcacugagggc

SEQ ID NO: 2259494 - RNA, 21 nt, Human
uccuuugaauccucucucugu

SEQ ID NO: 2259495 - RNA, 15 nt, Human
uccuuugaagaggaa

SEQ ID NO: 2259496 - RNA, 20 nt, Human
uccuuugauaaaauaaauga

SEQ ID NO: 2259497 - RNA, 17 nt, Human
uccuuggggcaggcagu

SEQ ID NO: 2259498 - RNA, 14 nt, Human
uccuuugaagagga

SEQ ID NO: 2259499 - RNA, 18 nt, Human
uccuuggugccuggccug

SEQ ID NO: 2259500 - RNA, 20 nt, Human
uccuuugaauccucucucug

SEQ ID NO: 2259501 - RNA, 20 nt, Human
uccuuugaagaggaaaauga

SEQ ID NO: 2259502 - RNA, 22 nt, Human
uccuuggugucgggcaugacac

SEQ ID NO: 2259503 - RNA, 21 nt, Human
uccuugcuguccuaggccaca

SEQ ID NO: 2259504 - RNA, 16 nt, Human
uccuugcucugcaggc

SEQ ID NO: 2259505 - RNA, 14 nt, Human
uccuuggugccugg

SEQ ID NO: 2259506 - RNA, 19 nt, Human
uccuugcuguccuaggcca

SEQ ID NO: 2259507 - RNA, 17 nt, Human
uccuugcuguccuaggc

SEQ ID NO: 2259508 - RNA, 15 nt, Human
uccuugcucugcacc

SEQ ID NO: 2259509 - RNA, 14 nt, Human
uccuugcucugcag

SEQ ID NO: 2259510 - RNA, 18 nt, Human
uccuuggugucgggcaug

SEQ ID NO: 2259511 - RNA, 21 nt, Human
uccuuggugucgggcaugaca

SEQ ID NO: 2259512 - RNA, 18 nt, Human
uccuugccuccuguguaa

SEQ ID NO: 2259513 - RNA, 14 nt, Human
uccuugcuacccag

SEQ ID NO: 2259514 - RNA, 17 nt, Human
uccuugccuccugugua

SEQ ID NO: 2259515 - RNA, 16 nt, Human
uccuugccuccugugu

SEQ ID NO: 2259516 - RNA, 19 nt, Human
uccuugaagaacugcaggc

SEQ ID NO: 2259517 - RNA, 15 nt, Human
uccuugcuaugauga

SEQ ID NO: 2259518 - RNA, 13 nt, Human
uccuugcucuccc

SEQ ID NO: 2259519 - RNA, 14 nt, Human
uccuugcucucccu

SEQ ID NO: 2259520 - RNA, 19 nt, Human
uccuugcucucccucuucu

SEQ ID NO: 2259521 - RNA, 20 nt, Human
uccuugcucucccucuucuc

SEQ ID NO: 2259522 - RNA, 21 nt, Human
uccuugcucucccucuucuca

SEQ ID NO: 2259523 - RNA, 14 nt, Human
uccuugcucugcac

SEQ ID NO: 2259524 - RNA, 22 nt, Human
uccuucuuugauaauguuaaau

SEQ ID NO: 2259525 - RNA, 19 nt, Human
uccuucuuugauaauguua

SEQ ID NO: 2259526 - RNA, 20 nt, Human
uccuucuuugauaauguuaa

SEQ ID NO: 2259527 - RNA, 18 nt, Human
uccuugaagaacugcagg

SEQ ID NO: 2259528 - RNA, 17 nt, Human
uccuugcaucaauuuuu

SEQ ID NO: 2259529 - RNA, 21 nt, Human
uccuuaucacugacacaaaaa

SEQ ID NO: 2259530 - RNA, 22 nt, Human
uccuuagucuucucauagcauu

SEQ ID NO: 2259531 - RNA, 18 nt, Human
uccuuagucuucucauag

SEQ ID NO: 2259532 - RNA, 17 nt, Human
uccuuaucaaaggacac

SEQ ID NO: 2259533 - RNA, 13 nt, Human
uccuucuuugaua

SEQ ID NO: 2259534 - RNA, 16 nt, Human
uccuucuuugauaaug

SEQ ID NO: 2259535 - RNA, 22 nt, Human
uccuugaaaacacuguucucug

SEQ ID NO: 2259536 - RNA, 23 nt, Human
uccuugaaaacacuguucucugc

SEQ ID NO: 2259537 - RNA, 17 nt, Human
uccuuaccucuuccgga

SEQ ID NO: 2259538 - RNA, 15 nt, Human
uccuuaccuuuuuau

SEQ ID NO: 2259539 - RNA, 20 nt, Human
uccuuaccuuuuuauuugca

SEQ ID NO: 2259540 - RNA, 17 nt, Human
uccuuagucuucucaua

SEQ ID NO: 2259541 - RNA, 16 nt, Human
uccuuagucuucucau

SEQ ID NO: 2259542 - RNA, 15 nt, Human
uccuuagucuucuca

SEQ ID NO: 2259543 - RNA, 22 nt, Human
uccuuagguuuuuuuccuucug

SEQ ID NO: 2259544 - RNA, 23 nt, Human
uccuuagcuuagaccucagccug

SEQ ID NO: 2259545 - RNA, 15 nt, Human
uccuuaucaaaggac

SEQ ID NO: 2259546 - RNA, 14 nt, Human
uccuuaucaaagga

SEQ ID NO: 2259547 - RNA, 20 nt, Human
uccuguccaaccuaaccccu

SEQ ID NO: 2259548 - RNA, 17 nt, Human
uccuguccacacccagc

SEQ ID NO: 2259549 - RNA, 19 nt, Human
uccuguccacacccagcuc

SEQ ID NO: 2259550 - RNA, 22 nt, Human
uccuguccacacccagcucagc

SEQ ID NO: 2259551 - RNA, 20 nt, Human
uccugaggggcaucugcccc

SEQ ID NO: 2259552 - RNA, 18 nt, Human
uccuguccaaccuaaccc

SEQ ID NO: 2259553 - RNA, 16 nt, Human
uccuguccagcuccaa

SEQ ID NO: 2259554 - RNA, 15 nt, Human
uccuguccagcucca

SEQ ID NO: 2259555 - RNA, 14 nt, Human
uccuguccagcucc

SEQ ID NO: 2259556 - RNA, 13 nt, Human
uccuguccagcuc

SEQ ID NO: 2259557 - RNA, 19 nt, Human
uccugaggggcaucugccc

SEQ ID NO: 2259558 - RNA, 16 nt, Human
uccugaggggcaucug

SEQ ID NO: 2259559 - RNA, 15 nt, Human
uccugaggggcaucu

SEQ ID NO: 2259560 - RNA, 13 nt, Human
uccugaggcugag

SEQ ID NO: 2259561 - RNA, 18 nt, Human
uccugaggcuuuggauuu

SEQ ID NO: 2259562 - RNA, 17 nt, Human
uccugaggcuuuggauu

SEQ ID NO: 2259563 - RNA, 16 nt, Human
uccugaggcuuuggau

SEQ ID NO: 2259564 - RNA, 14 nt, Human
uccuguccagagag

SEQ ID NO: 2259565 - RNA, 18 nt, Human
uccugucccuucucuuaa

SEQ ID NO: 2259566 - RNA, 21 nt, Human
uccugucccuucucuuaauuu

SEQ ID NO: 2259567 - RNA, 19 nt, Human
uccugucccucauccauag

SEQ ID NO: 2259568 - RNA, 17 nt, Human
uccuguccagcuccaac

SEQ ID NO: 2259569 - RNA, 16 nt, Human
uccugucccaccaugc

SEQ ID NO: 2259570 - RNA, 14 nt, Human
uccuuaccucuucc

SEQ ID NO: 2259571 - RNA, 18 nt, Human
uccuuacccaucugcacc

SEQ ID NO: 2259572 - RNA, 14 nt, Human
uccuuacccaucug

SEQ ID NO: 2259573 - RNA, 20 nt, Human
uccuuaccagcagagcaccu

SEQ ID NO: 2259574 - RNA, 21 nt, Human
uccuuaccagcagagcaccuu

SEQ ID NO: 2259575 - RNA, 17 nt, Human
ucgcaggauucuuccuc

SEQ ID NO: 2259576 - RNA, 15 nt, Human
ucgauucauauugaa

SEQ ID NO: 2259577 - RNA, 20 nt, Human
ucgauuauucccuguacaau

SEQ ID NO: 2259578 - RNA, 16 nt, Human
ucgauguuauguaaaa

SEQ ID NO: 2259579 - RNA, 23 nt, Human
ucgcaggauucuuccucccuccc

SEQ ID NO: 2259580 - RNA, 21 nt, Human
ucgcaggauucuuccucccuc

SEQ ID NO: 2259581 - RNA, 14 nt, Human
ucgcaucaaaagac

SEQ ID NO: 2259582 - RNA, 15 nt, Human
ucgcaucaaaagaca

SEQ ID NO: 2259583 - RNA, 17 nt, Human
ucgcaucaaaagacaau

SEQ ID NO: 2259584 - RNA, 20 nt, Human
ucgcaucaaaagacaauucu

SEQ ID NO: 2259585 - RNA, 20 nt, Human
ucgcauggucacacacugau

SEQ ID NO: 2259586 - RNA, 19 nt, Human
ucgcauggucacacacuga

SEQ ID NO: 2259587 - RNA, 21 nt, Human
ucgcaucaaaagacaauucuu

SEQ ID NO: 2259588 - RNA, 22 nt, Human
ucgcaucaaaagacaauucuuu

SEQ ID NO: 2259589 - RNA, 23 nt, Human
ucgcaucaaaagacaauucuuua

SEQ ID NO: 2259590 - RNA, 22 nt, Human
uccuuuucgcaggauucuuccu

SEQ ID NO: 2259591 - RNA, 23 nt, Human
uccuuuguauauuauuucuagga

SEQ ID NO: 2259592 - RNA, 15 nt, Human
uccuuuguguuucua

SEQ ID NO: 2259593 - RNA, 20 nt, Human
uccuuuguguuucuauugac

SEQ ID NO: 2259594 - RNA, 18 nt, Human
uccuuuucgcaggauucu

SEQ ID NO: 2259595 - RNA, 19 nt, Human
ucgaugaagcccaauaaac

SEQ ID NO: 2259596 - RNA, 22 nt, Human
ucgauacugcgacuuucugccu

SEQ ID NO: 2259597 - RNA, 23 nt, Human
ucgauacugcgacuuucugccug

SEQ ID NO: 2259598 - RNA, 23 nt, Human
ucgaugaagcccaauaaaccucu

SEQ ID NO: 2259599 - RNA, 14 nt, Human
ucgaugcaaugaac

SEQ ID NO: 2259600 - RNA, 23 nt, Human
ucgaugggggagucugaagcaga

SEQ ID NO: 2259601 - RNA, 19 nt, Human
ucgauacugcgacuuucug

SEQ ID NO: 2259602 - RNA, 20 nt, Human
ucgauacugcgacuuucugc

SEQ ID NO: 2259603 - RNA, 19 nt, Human
ucgcuucuugccucugugc

SEQ ID NO: 2259604 - RNA, 20 nt, Human
ucgcuugugcagaaaacauu

SEQ ID NO: 2259605 - RNA, 21 nt, Human
ucgcuugugcagaaaacauug

SEQ ID NO: 2259606 - RNA, 21 nt, Human
ucgcuucuugccucugugcug

SEQ ID NO: 2259607 - RNA, 18 nt, Human
ucggaaaacaugcuacac

SEQ ID NO: 2259608 - RNA, 15 nt, Human
ucggaaaacaugcua

SEQ ID NO: 2259609 - RNA, 15 nt, Human
ucgcauuugucaaug

SEQ ID NO: 2259610 - RNA, 13 nt, Human
ucgcauuugucaa

SEQ ID NO: 2259611 - RNA, 18 nt, Human
ucgccaccccuccuuccu

SEQ ID NO: 2259612 - RNA, 18 nt, Human
ucgccaccuggcauuccu

SEQ ID NO: 2259613 - RNA, 21 nt, Human
ucgccaccuggcauuccuucu

SEQ ID NO: 2259614 - RNA, 14 nt, Human
ucgcccagucugga

SEQ ID NO: 2259615 - RNA, 19 nt, Human
ucgcccagucuggaaugca

SEQ ID NO: 2259616 - RNA, 23 nt, Human
ucgcccagucuggaaugcagugg

SEQ ID NO: 2259617 - RNA, 15 nt, Human
ucgcuuuugauaauc

SEQ ID NO: 2259618 - RNA, 19 nt, Human
ucgcuuuauuggcugagau

SEQ ID NO: 2259619 - RNA, 23 nt, Human
ucgcuugugcagaaaacauuguu

SEQ ID NO: 2259620 - RNA, 21 nt, Human
ucggaaaccuugguguaguug

SEQ ID NO: 2259621 - RNA, 22 nt, Human
ucggagccucauccgaggcagg

SEQ ID NO: 2259622 - RNA, 23 nt, Human
ucggagacagugaucuccauaug

SEQ ID NO: 2259623 - RNA, 23 nt, Human
ucggagccucauccgaggcaggg

SEQ ID NO: 2259624 - RNA, 12 nt, Human
ucggaggaagcc

SEQ ID NO: 2259625 - RNA, 13 nt, Human
ucggaggaagccc

SEQ ID NO: 2259626 - RNA, 20 nt, Human
ucggaggccccaaaggaaaa

SEQ ID NO: 2259627 - RNA, 12 nt, Human
ucggaggcccca

SEQ ID NO: 2259628 - RNA, 14 nt, Human
ucggaggcugcccc

SEQ ID NO: 2259629 - RNA, 23 nt, Human
ucggaggcugcccccggcccccu

SEQ ID NO: 2259630 - RNA, 14 nt, Human
ucggaggcuuggga

SEQ ID NO: 2259631 - RNA, 22 nt, Human
ucggaggcuugucagagcuggg

SEQ ID NO: 2259632 - RNA, 21 nt, Human
ucgucauguuggccaggcugg

SEQ ID NO: 2259633 - RNA, 17 nt, Human
ucggccuccauccugag

SEQ ID NO: 2259634 - RNA, 16 nt, Human
ucggccuccauccuga

SEQ ID NO: 2259635 - RNA, 15 nt, Human
ucggccuccauccug

SEQ ID NO: 2259636 - RNA, 14 nt, Human
uccuauuuguuuuc

SEQ ID NO: 2259637 - RNA, 16 nt, Human
uccuauuuguuuucau

SEQ ID NO: 2259638 - RNA, 17 nt, Human
uccuauuuguuuucaug

SEQ ID NO: 2259639 - RNA, 11 nt, Human
uccuccagguu

SEQ ID NO: 2259640 - RNA, 12 nt, Human
uccuccagguuu

SEQ ID NO: 2259641 - RNA, 13 nt, Human
uccuccagguuuu

SEQ ID NO: 2259642 - RNA, 14 nt, Human
uccuccagguuuuu

SEQ ID NO: 2259643 - RNA, 15 nt, Human
uccuccagguuuuuc

SEQ ID NO: 2259644 - RNA, 16 nt, Human
uccuccagguuuuuca

SEQ ID NO: 2259645 - RNA, 17 nt, Human
uccuccagguuuuucaa

SEQ ID NO: 2259646 - RNA, 18 nt, Human
uccuccagguuuuucaau

SEQ ID NO: 2259647 - RNA, 19 nt, Human
uccuccagguuuuucaauu

SEQ ID NO: 2259648 - RNA, 17 nt, Human
uccuccgucaccucaga

SEQ ID NO: 2259649 - RNA, 23 nt, Human
uccuccgagccggggaguuucuu

SEQ ID NO: 2259650 - RNA, 14 nt, Human
uccuccgaggccag

SEQ ID NO: 2259651 - RNA, 20 nt, Human
uccuccagguuuuucaauua

SEQ ID NO: 2259652 - RNA, 21 nt, Human
uccuccagguuuuucaauuaa

SEQ ID NO: 2259653 - RNA, 23 nt, Human
uccuccagguuuuucaauuaaac

SEQ ID NO: 2259654 - RNA, 22 nt, Human
uccuccagguuuuucaauuaaa

SEQ ID NO: 2259655 - RNA, 17 nt, Human
uccucccuuuuuccuug

SEQ ID NO: 2259656 - RNA, 19 nt, Human
uccucccuuuuuccuuguc

SEQ ID NO: 2259657 - RNA, 16 nt, Human
uccuccguccagccgc

SEQ ID NO: 2259658 - RNA, 14 nt, Human
uccuccguccagcc

SEQ ID NO: 2259659 - RNA, 18 nt, Human
uccuccguccagccgcca

SEQ ID NO: 2259660 - RNA, 18 nt, Human
uccuccgugcuuccucag

SEQ ID NO: 2259661 - RNA, 15 nt, Human
uccuccgaggccagu

SEQ ID NO: 2259662 - RNA, 12 nt, Human
uccuccucagau

SEQ ID NO: 2259663 - RNA, 12 nt, Human
uccuccugcaga

SEQ ID NO: 2259664 - RNA, 15 nt, Human
uccuccugcagacca

SEQ ID NO: 2259665 - RNA, 20 nt, Human
uccuccugcagaccacgccc

SEQ ID NO: 2259666 - RNA, 18 nt, Human
uccuccucaccucaugcc

SEQ ID NO: 2259667 - RNA, 19 nt, Human
uccuccgugcuuccucagu

SEQ ID NO: 2259668 - RNA, 22 nt, Human
uccuccuaccgaaaccuugccu

SEQ ID NO: 2259669 - RNA, 12 nt, Human
uccuccucaccu

SEQ ID NO: 2259670 - RNA, 16 nt, Human
uccuccucaccucaug

SEQ ID NO: 2259671 - RNA, 16 nt, Human
uccuauuugcacugua

SEQ ID NO: 2259672 - RNA, 18 nt, Human
uccuauuugccaugggcu

SEQ ID NO: 2259673 - RNA, 18 nt, Human
uccuauuuggggcuugca

SEQ ID NO: 2259674 - RNA, 15 nt, Human
uccuauuucuuauag

SEQ ID NO: 2259675 - RNA, 20 nt, Human
uccucaaaacuucagacaua

SEQ ID NO: 2259676 - RNA, 12 nt, Human
uccuccaggugc

SEQ ID NO: 2259677 - RNA, 13 nt, Human
uccuccaggugca

SEQ ID NO: 2259678 - RNA, 14 nt, Human
uccuccaggugcac

SEQ ID NO: 2259679 - RNA, 18 nt, Human
uccuccaggugcacaagc

SEQ ID NO: 2259680 - RNA, 20 nt, Human
uccuccaggugcacaagcuc

SEQ ID NO: 2259681 - RNA, 22 nt, Human
uccuccaggugcacaagcucca

SEQ ID NO: 2259682 - RNA, 15 nt, Human
uccuauugugauuug

SEQ ID NO: 2259683 - RNA, 20 nt, Human
uccuauggcuggccacugca

SEQ ID NO: 2259684 - RNA, 22 nt, Human
uccuauggcuggccacugcaca

SEQ ID NO: 2259685 - RNA, 18 nt, Human
uccuauugugauuugacu

SEQ ID NO: 2259686 - RNA, 19 nt, Human
uccuauugugauuugacug

SEQ ID NO: 2259687 - RNA, 20 nt, Human
uccuauugugauuugacugu

SEQ ID NO: 2259688 - RNA, 22 nt, Human
uccuauugugauuugacuguuu

SEQ ID NO: 2259689 - RNA, 13 nt, Human
uccuaucuguguu

SEQ ID NO: 2259690 - RNA, 14 nt, Human
uccuaucuguguuu

SEQ ID NO: 2259691 - RNA, 17 nt, Human
uccuaucuguguuuuga

SEQ ID NO: 2259692 - RNA, 21 nt, Human
uccuaguuccaccaucaagcc

SEQ ID NO: 2259693 - RNA, 22 nt, Human
uccuaucagccugucucuucca

SEQ ID NO: 2259694 - RNA, 18 nt, Human
uccggaauccuguccuca

SEQ ID NO: 2259695 - RNA, 22 nt, Human
uccggaauccuguccucagcuu

SEQ ID NO: 2259696 - RNA, 15 nt, Human
uccggaguagcuggg

SEQ ID NO: 2259697 - RNA, 21 nt, Human
uccggagugagaagcuuugcc

SEQ ID NO: 2259698 - RNA, 15 nt, Human
uccggagauguagca

SEQ ID NO: 2259699 - RNA, 15 nt, Human
uccggacacuccuag

SEQ ID NO: 2259700 - RNA, 18 nt, Human
uccggacacuccuagaga

SEQ ID NO: 2259701 - RNA, 16 nt, Human
uccuaagcuauucagu

SEQ ID NO: 2259702 - RNA, 17 nt, Human
uccuaagagugcugggc

SEQ ID NO: 2259703 - RNA, 19 nt, Human
uccuaagagugcugggcau

SEQ ID NO: 2259704 - RNA, 17 nt, Human
uccggauuggcuugugu

SEQ ID NO: 2259705 - RNA, 18 nt, Human
uccuaagcuauucaguaa

SEQ ID NO: 2259706 - RNA, 14 nt, Human
uccuaagccuaaaa

SEQ ID NO: 2259707 - RNA, 14 nt, Human
uccuaguuccacca

SEQ ID NO: 2259708 - RNA, 17 nt, Human
uccuaguuccaccauca

SEQ ID NO: 2259709 - RNA, 21 nt, Human
uccugagccagauuucacucu

SEQ ID NO: 2259710 - RNA, 15 nt, Human
uccugaggcuccacu

SEQ ID NO: 2259711 - RNA, 18 nt, Human
uccugagccagauuucac

SEQ ID NO: 2259712 - RNA, 19 nt, Human
uccugagccagauuucacu

SEQ ID NO: 2259713 - RNA, 20 nt, Human
uccucugggcaggaccucag

SEQ ID NO: 2259714 - RNA, 19 nt, Human
uccucugucagucacagcc

SEQ ID NO: 2259715 - RNA, 19 nt, Human
uccucuguacagagcccac

SEQ ID NO: 2259716 - RNA, 23 nt, Human
uccucuguacagagcccacgccc

SEQ ID NO: 2259717 - RNA, 17 nt, Human
uccucuguccaggcacu

SEQ ID NO: 2259718 - RNA, 22 nt, Human
uccucugucagucacagccacc

SEQ ID NO: 2259719 - RNA, 21 nt, Human
uccucugucagucacagccac

SEQ ID NO: 2259720 - RNA, 17 nt, Human
uccugagccagauuuca

SEQ ID NO: 2259721 - RNA, 13 nt, Human
uccucuguccagg

SEQ ID NO: 2259722 - RNA, 12 nt, Human
uccugaggcugg

SEQ ID NO: 2259723 - RNA, 17 nt, Human
uccugaggcuccacuug

SEQ ID NO: 2259724 - RNA, 16 nt, Human
uccugaggcuccacuu

SEQ ID NO: 2259725 - RNA, 15 nt, Human
uccugaggcugggcu

SEQ ID NO: 2259726 - RNA, 16 nt, Human
uccugaggcugggcuc

SEQ ID NO: 2259727 - RNA, 17 nt, Human
uccugaggcugggcucc

SEQ ID NO: 2259728 - RNA, 19 nt, Human
uccugaggcugggcucccu

SEQ ID NO: 2259729 - RNA, 9 nt, Human
uccucuggc

SEQ ID NO: 2259730 - RNA, 19 nt, Human
uccucuggauggcaccaga

SEQ ID NO: 2259731 - RNA, 23 nt, Human
uccucuggcuggcuaacuggaag

SEQ ID NO: 2259732 - RNA, 15 nt, Human
uccucuguacagagc

SEQ ID NO: 2259733 - RNA, 13 nt, Human
uccucuguacaga

SEQ ID NO: 2259734 - RNA, 14 nt, Human
uccucucagccccu

SEQ ID NO: 2259735 - RNA, 17 nt, Human
uccucuggauggcacca

SEQ ID NO: 2259736 - RNA, 15 nt, Human
uccucuggccugugu

SEQ ID NO: 2259737 - RNA, 19 nt, Human
uccucuauugauguacagu

SEQ ID NO: 2259738 - RNA, 18 nt, Human
uccucucaaccaccuuuc

SEQ ID NO: 2259739 - RNA, 21 nt, Human
uccucucaaccaccuuucaga

SEQ ID NO: 2259740 - RNA, 20 nt, Human
uccucucaaccaccuuucag

SEQ ID NO: 2259741 - RNA, 17 nt, Human
uccucugcugcuggcug

SEQ ID NO: 2259742 - RNA, 18 nt, Human
uccucucacuaaacuuua

SEQ ID NO: 2259743 - RNA, 16 nt, Human
uccucgcaagcugggu

SEQ ID NO: 2259744 - RNA, 14 nt, Human
uccucgcagagagg

SEQ ID NO: 2259745 - RNA, 16 nt, Human
uccucgcagagaggcc

SEQ ID NO: 2259746 - RNA, 17 nt, Human
uccucgcagagaggcca

SEQ ID NO: 2259747 - RNA, 15 nt, Human
uccucgcaagcuggg

SEQ ID NO: 2259748 - RNA, 14 nt, Human
uccucgcaagcugg

SEQ ID NO: 2259749 - RNA, 13 nt, Human
uccucgcaagcug

SEQ ID NO: 2259750 - RNA, 17 nt, Human
uccucgagggcagggac

SEQ ID NO: 2259751 - RNA, 17 nt, Human
uccucuaggaggucucu

SEQ ID NO: 2259752 - RNA, 23 nt, Human
uccucgcagagaggccaggugca

SEQ ID NO: 2259753 - RNA, 21 nt, Human
uccucuaggaggucucuaaga

SEQ ID NO: 2259754 - RNA, 16 nt, Human
uccuccugcccaccug

SEQ ID NO: 2259755 - RNA, 12 nt, Human
uccuccugccca

SEQ ID NO: 2259756 - RNA, 12 nt, Human
uccuccugcuca

SEQ ID NO: 2259757 - RNA, 11 nt, Human
uccuccuggaa

SEQ ID NO: 2259758 - RNA, 17 nt, Human
uccuccugcccaccugu

SEQ ID NO: 2259759 - RNA, 13 nt, Human
uccuccuggcaga

SEQ ID NO: 2259760 - RNA, 13 nt, Human
uccuccuggacuc

SEQ ID NO: 2259761 - RNA, 21 nt, Human
uccuccuuuucacaguucucu

SEQ ID NO: 2259762 - RNA, 16 nt, Human
uccuccugggcccucu

SEQ ID NO: 2259763 - RNA, 15 nt, Human
uccuccugggcccuc

SEQ ID NO: 2259764 - RNA, 14 nt, Human
uccuccugggcccu

SEQ ID NO: 2259765 - RNA, 15 nt, Human
uccggaauccugucc

SEQ ID NO: 2259766 - RNA, 17 nt, Human
uccgcccugcuccuccc

SEQ ID NO: 2259767 - RNA, 14 nt, Human
uccgcccugcuccu

SEQ ID NO: 2259768 - RNA, 15 nt, Human
uccgcccugcuccuc

SEQ ID NO: 2259769 - RNA, 19 nt, Human
uccgcccugcuccucccug

SEQ ID NO: 2259770 - RNA, 21 nt, Human
uccgcuuucuacccagcgagc

SEQ ID NO: 2259771 - RNA, 22 nt, Human
uccgcccucaaaaugacagcca

SEQ ID NO: 2259772 - RNA, 12 nt, Human
uccgcccugcuc

SEQ ID NO: 2259773 - RNA, 16 nt, Human
uccgcccugccacuca

SEQ ID NO: 2259774 - RNA, 14 nt, Human
uccgcccugccacu

SEQ ID NO: 2259775 - RNA, 15 nt, Human
uccgcccugccacuc

SEQ ID NO: 2259776 - RNA, 13 nt, Human
uccgcccugccac

SEQ ID NO: 2259777 - RNA, 14 nt, Human
uccgaggcaggguc

SEQ ID NO: 2259778 - RNA, 13 nt, Human
uccgaggcagggu

SEQ ID NO: 2259779 - RNA, 12 nt, Human
uccgaggcaggg

SEQ ID NO: 2259780 - RNA, 21 nt, Human
uccgagccggggaguuucuuu

SEQ ID NO: 2259781 - RNA, 24 nt, Human
uccgagccggggaguuucuuuccu

SEQ ID NO: 2259782 - RNA, 17 nt, Human
uccgagagagcaccccu

SEQ ID NO: 2259783 - RNA, 13 nt, Human
uccgagagggaga

SEQ ID NO: 2259784 - RNA, 14 nt, Human
uccgagagggagag

SEQ ID NO: 2259785 - RNA, 16 nt, Human
uccgagaggugggcca

SEQ ID NO: 2259786 - RNA, 15 nt, Human
uccgagagggagaga

SEQ ID NO: 2259787 - RNA, 19 nt, Human
uccgagccggggaguuucu

SEQ ID NO: 2259788 - RNA, 19 nt, Human
uccgccagggcccacaccc

SEQ ID NO: 2259789 - RNA, 13 nt, Human
uccgccagggccc

SEQ ID NO: 2259790 - RNA, 18 nt, Human
uccgccagggcccacacc

SEQ ID NO: 2259791 - RNA, 21 nt, Human
uccgcccacaggaagccugca

SEQ ID NO: 2259792 - RNA, 22 nt, Human
uccgaaagggacuuggaagcuc

SEQ ID NO: 2259793 - RNA, 19 nt, Human
uccgaacacccucgaagcg

SEQ ID NO: 2259794 - RNA, 17 nt, Human
uccgaaccuccucugug

SEQ ID NO: 2259795 - RNA, 16 nt, Human
uccgaaccuccucugu

SEQ ID NO: 2259796 - RNA, 17 nt, Human
uccgacucuucugagca

SEQ ID NO: 2259797 - RNA, 15 nt, Human
uccgaaccuccucug

SEQ ID NO: 2259798 - RNA, 12 nt, Human
uccgacugcuuu

SEQ ID NO: 2259799 - RNA, 15 nt, Human
uccgacugcuuugga

SEQ ID NO: 2259800 - RNA, 21 nt, Human
uccgacuugaauuuucccacu

SEQ ID NO: 2259801 - RNA, 22 nt, Human
uccgacuugaauuuucccacug

SEQ ID NO: 2259802 - RNA, 20 nt, Human
ucccuucugcuacuggcaaa

SEQ ID NO: 2259803 - RNA, 13 nt, Human
ucccuucuugguu

SEQ ID NO: 2259804 - RNA, 22 nt, Human
ucccuucugucccucacagcac

SEQ ID NO: 2259805 - RNA, 17 nt, Human
ucccuucugucccucac

SEQ ID NO: 2259806 - RNA, 17 nt, Human
ucccuucuuuuucuucu

SEQ ID NO: 2259807 - RNA, 17 nt, Human
ucccuugaaauuuuaaa

SEQ ID NO: 2259808 - RNA, 17 nt, Human
ucccuugaccaggccug

SEQ ID NO: 2259809 - RNA, 21 nt, Human
ucccuugaccaggccugggcc

SEQ ID NO: 2259810 - RNA, 21 nt, Human
uccgaaagggacuuggaagcu

SEQ ID NO: 2259811 - RNA, 17 nt, Human
ucccuugagaccucagc

SEQ ID NO: 2259812 - RNA, 16 nt, Human
ucccuugagaccucag

SEQ ID NO: 2259813 - RNA, 13 nt, Human
ucccuugagaccu

SEQ ID NO: 2259814 - RNA, 19 nt, Human
uccgaaaccaaagaagaaa

SEQ ID NO: 2259815 - RNA, 18 nt, Human
uccgaaaccaaagaagaa

SEQ ID NO: 2259816 - RNA, 22 nt, Human
uccgaaaaauccucuuccucug

SEQ ID NO: 2259817 - RNA, 23 nt, Human
uccgaaaaauccucuuccucuga

SEQ ID NO: 2259818 - RNA, 18 nt, Human
ucccugggcauugcuuuc

SEQ ID NO: 2259819 - RNA, 14 nt, Human
ucccuucccaccuc

SEQ ID NO: 2259820 - RNA, 15 nt, Human
ucccugggcugugcu

SEQ ID NO: 2259821 - RNA, 16 nt, Human
ucccugggcugugcua

SEQ ID NO: 2259822 - RNA, 19 nt, Human
ucccugggcugugcuaccu

SEQ ID NO: 2259823 - RNA, 16 nt, Human
ucccuucccaccucuc

SEQ ID NO: 2259824 - RNA, 16 nt, Human
ucccuucccauaagcu

SEQ ID NO: 2259825 - RNA, 20 nt, Human
ucccugggcugugcuaccug

SEQ ID NO: 2259826 - RNA, 20 nt, Human
ucccuggggcuagggggagc

SEQ ID NO: 2259827 - RNA, 22 nt, Human
ucccuucccaugacccaggcug

SEQ ID NO: 2259828 - RNA, 13 nt, Human
ucccuucugcuac

SEQ ID NO: 2259829 - RNA, 15 nt, Human
ucccuucugcuacug

SEQ ID NO: 2259830 - RNA, 14 nt, Human
ucccuucugcuacu

SEQ ID NO: 2259831 - RNA, 16 nt, Human
ucccuucugucccuca

SEQ ID NO: 2259832 - RNA, 17 nt, Human
ucccuucccaccucucu

SEQ ID NO: 2259833 - RNA, 21 nt, Human
ucccuucccacuggaggcaug

SEQ ID NO: 2259834 - RNA, 13 nt, Human
ucccugccagcuc

SEQ ID NO: 2259835 - RNA, 14 nt, Human
ucccugcauuucug

SEQ ID NO: 2259836 - RNA, 17 nt, Human
ucccugcauuucugagu

SEQ ID NO: 2259837 - RNA, 14 nt, Human
ucccugccccuccc

SEQ ID NO: 2259838 - RNA, 16 nt, Human
ucccugccccccagcc

SEQ ID NO: 2259839 - RNA, 14 nt, Human
ucccuggcucccau

SEQ ID NO: 2259840 - RNA, 16 nt, Human
ucccuggccuuucaua

SEQ ID NO: 2259841 - RNA, 24 nt, Human
ucccuggccuuucauauuuuagcu

SEQ ID NO: 2259842 - RNA, 15 nt, Human
ucccuggccuuucau

SEQ ID NO: 2259843 - RNA, 18 nt, Human
ucccugccccucccuuca

SEQ ID NO: 2259844 - RNA, 17 nt, Human
ucccugggcauugcuuu

SEQ ID NO: 2259845 - RNA, 12 nt, Human
ucccugggcauu

SEQ ID NO: 2259846 - RNA, 16 nt, Human
ucccugggcagaaagu

SEQ ID NO: 2259847 - RNA, 22 nt, Human
ucccuggcuuguaacuccacca

SEQ ID NO: 2259848 - RNA, 19 nt, Human
ucccugggaggaaauuuga

SEQ ID NO: 2259849 - RNA, 11 nt, Human
ucccuggcuug

SEQ ID NO: 2259850 - RNA, 21 nt, Human
ucccuggcuuguaacuccacc

SEQ ID NO: 2259851 - RNA, 19 nt, Human
ucccuggcuuguaacucca

SEQ ID NO: 2259852 - RNA, 18 nt, Human
ucccuggcuuguaacucc

SEQ ID NO: 2259853 - RNA, 20 nt, Human
ucccuggcucucagaaggua

SEQ ID NO: 2259854 - RNA, 19 nt, Human
ucccuggcucucagaaggu

SEQ ID NO: 2259855 - RNA, 14 nt, Human
ucccuggcugcccu

SEQ ID NO: 2259856 - RNA, 15 nt, Human
ucccuggcugcccug

SEQ ID NO: 2259857 - RNA, 18 nt, Human
ucccuggcucucagaagg

SEQ ID NO: 2259858 - RNA, 16 nt, Human
ucccuggcucucagaa

SEQ ID NO: 2259859 - RNA, 15 nt, Human
ucccuggcucucaga

SEQ ID NO: 2259860 - RNA, 23 nt, Human
ucccuggcugcccuggcccugag

SEQ ID NO: 2259861 - RNA, 21 nt, Human
ucccuggcugcccuggcccug

SEQ ID NO: 2259862 - RNA, 22 nt, Human
ucccuggcugcccuggcccuga

SEQ ID NO: 2259863 - RNA, 16 nt, Human
ucccuggcugcccugg

SEQ ID NO: 2259864 - RNA, 18 nt, Human
ucccuggcugcccuggcc

SEQ ID NO: 2259865 - RNA, 19 nt, Human
ucccuggcugcccuggccc

SEQ ID NO: 2259866 - RNA, 20 nt, Human
ucccuggcugcccuggcccu

SEQ ID NO: 2259867 - RNA, 20 nt, Human
ucccucucaggcaugccugu

SEQ ID NO: 2259868 - RNA, 19 nt, Human
ucccucucaggcaugccug

SEQ ID NO: 2259869 - RNA, 19 nt, Human
ucccucuauuuauguuugc

SEQ ID NO: 2259870 - RNA, 13 nt, Human
ucccucuauuuau

SEQ ID NO: 2259871 - RNA, 13 nt, Human
ucccuccucaccu

SEQ ID NO: 2259872 - RNA, 23 nt, Human
ucccucuacugggagccuaccca

SEQ ID NO: 2259873 - RNA, 21 nt, Human
ucccucucucuucugcuccac

SEQ ID NO: 2259874 - RNA, 23 nt, Human
ucccucucaggcaugccugugug

SEQ ID NO: 2259875 - RNA, 22 nt, Human
ucccucucaggcaugccugugu

SEQ ID NO: 2259876 - RNA, 20 nt, Human
ucccucuccauaaccccacc

SEQ ID NO: 2259877 - RNA, 20 nt, Human
ucccucugccugucccucuc

SEQ ID NO: 2259878 - RNA, 18 nt, Human
ucccucugccugucccuc

SEQ ID NO: 2259879 - RNA, 16 nt, Human
ucccucugccuguccc

SEQ ID NO: 2259880 - RNA, 21 nt, Human
ucccucugccugaaccuucca

SEQ ID NO: 2259881 - RNA, 19 nt, Human
ucccucugaggcuguagga

SEQ ID NO: 2259882 - RNA, 11 nt, Human
ucccucugccu

SEQ ID NO: 2259883 - RNA, 13 nt, Human
ucccucugcccca

SEQ ID NO: 2259884 - RNA, 19 nt, Human
ucccucugaccugcaggcc

SEQ ID NO: 2259885 - RNA, 18 nt, Human
ucccucugaccugcaggc

SEQ ID NO: 2259886 - RNA, 21 nt, Human
ucccucugagaauuccaagga

SEQ ID NO: 2259887 - RNA, 22 nt, Human
ucccucugagaauuccaaggag

SEQ ID NO: 2259888 - RNA, 16 nt, Human
ucccucugaggcugua

SEQ ID NO: 2259889 - RNA, 17 nt, Human
ucccucugaccugcagg

SEQ ID NO: 2259890 - RNA, 13 nt, Human
ucccucugaccug

SEQ ID NO: 2259891 - RNA, 23 nt, Human
ucccucucucuucugcuccaccc

SEQ ID NO: 2259892 - RNA, 20 nt, Human
ucccucuggcccugccuucu

SEQ ID NO: 2259893 - RNA, 19 nt, Human
ucccucuggcccugccuuc

SEQ ID NO: 2259894 - RNA, 18 nt, Human
ucccucuggcccugccuu

SEQ ID NO: 2259895 - RNA, 17 nt, Human
ucccucuggcccugccu

SEQ ID NO: 2259896 - RNA, 16 nt, Human
ucccucuggcccugcc

SEQ ID NO: 2259897 - RNA, 20 nt, Human
ucccucugcuccuggagccu

SEQ ID NO: 2259898 - RNA, 15 nt, Human
ucccucugcuccugg

SEQ ID NO: 2259899 - RNA, 18 nt, Human
ucccucugcuccuggagc

SEQ ID NO: 2259900 - RNA, 13 nt, Human
ucccucuggggcu

SEQ ID NO: 2259901 - RNA, 20 nt, Human
ucccugcacuugcagacucu

SEQ ID NO: 2259902 - RNA, 17 nt, Human
ucccucuggggcuguuc

SEQ ID NO: 2259903 - RNA, 14 nt, Human
ucccugccaaugga

SEQ ID NO: 2259904 - RNA, 16 nt, Human
ucccugccaauggacu

SEQ ID NO: 2259905 - RNA, 21 nt, Human
ucccugcaucugaccagcagc

SEQ ID NO: 2259906 - RNA, 20 nt, Human
ucccugcaucugaccagcag

SEQ ID NO: 2259907 - RNA, 18 nt, Human
ucccugcaucugaccagc

SEQ ID NO: 2259908 - RNA, 16 nt, Human
ucccugcaucugacca

SEQ ID NO: 2259909 - RNA, 22 nt, Human
ucccugcaucugaccagcagcg

SEQ ID NO: 2259910 - RNA, 13 nt, Human
ucccucuguuucu

SEQ ID NO: 2259911 - RNA, 14 nt, Human
ucccucuguuucuc

SEQ ID NO: 2259912 - RNA, 12 nt, Human
ucccuccucacc

SEQ ID NO: 2259913 - RNA, 15 nt, Human
ucccuccgggaccug

SEQ ID NO: 2259914 - RNA, 14 nt, Human
ucccuccgggaccu

SEQ ID NO: 2259915 - RNA, 22 nt, Human
ucccucuacugggagccuaccc

SEQ ID NO: 2259916 - RNA, 18 nt, Human
ucccucuacugggagccu

SEQ ID NO: 2259917 - RNA, 15 nt, Human
ucccucccuuugaaa

SEQ ID NO: 2259918 - RNA, 22 nt, Human
ucccuagcuuuagacccugggu

SEQ ID NO: 2259919 - RNA, 19 nt, Human
ucccuagcuuuagacccug

SEQ ID NO: 2259920 - RNA, 20 nt, Human
ucccuagcuuuagacccugg

SEQ ID NO: 2259921 - RNA, 19 nt, Human
ucccuccgauccuuccucc

SEQ ID NO: 2259922 - RNA, 15 nt, Human
ucccuccgauccuuc

SEQ ID NO: 2259923 - RNA, 18 nt, Human
ucccuccgauccuuccuc

SEQ ID NO: 2259924 - RNA, 14 nt, Human
ucccucccuugggg

SEQ ID NO: 2259925 - RNA, 13 nt, Human
ucccucccuuggg

SEQ ID NO: 2259926 - RNA, 18 nt, Human
ucccucccuuccucuuuc

SEQ ID NO: 2259927 - RNA, 18 nt, Human
ucccuagcugugaccucu

SEQ ID NO: 2259928 - RNA, 20 nt, Human
ucccuagccagcacuuguau

SEQ ID NO: 2259929 - RNA, 22 nt, Human
ucccuagccagcacuuguauau

SEQ ID NO: 2259930 - RNA, 16 nt, Human
ucccuagccagcacuu

SEQ ID NO: 2259931 - RNA, 17 nt, Human
ucccuagccagcacuug

SEQ ID NO: 2259932 - RNA, 20 nt, Human
ucccuagaggguuccuguag

SEQ ID NO: 2259933 - RNA, 19 nt, Human
ucccuagaggguuccugua

SEQ ID NO: 2259934 - RNA, 16 nt, Human
ucccuagaucuuucua

SEQ ID NO: 2259935 - RNA, 23 nt, Human
ucccuagaucuuucuauuccaaa

SEQ ID NO: 2259936 - RNA, 18 nt, Human
ucccuagaggguuccugu

SEQ ID NO: 2259937 - RNA, 17 nt, Human
ucccuagaggguuccug

SEQ ID NO: 2259938 - RNA, 18 nt, Human
ucccuagaaacuuccaaa

SEQ ID NO: 2259939 - RNA, 17 nt, Human
ucccuacuuccugugac

SEQ ID NO: 2259940 - RNA, 19 nt, Human
ucccuagaaacuuccaaau

SEQ ID NO: 2259941 - RNA, 17 nt, Human
ucccaugagccucagca

SEQ ID NO: 2259942 - RNA, 22 nt, Human
ucccaugagccucagcauccug

SEQ ID NO: 2259943 - RNA, 12 nt, Human
ucccaugaugua

SEQ ID NO: 2259944 - RNA, 16 nt, Human
ucccaugaucccugug

SEQ ID NO: 2259945 - RNA, 19 nt, Human
ucccaugaucccuguguug

SEQ ID NO: 2259946 - RNA, 15 nt, Human
ucccaugaucccugu

SEQ ID NO: 2259947 - RNA, 19 nt, Human
ucccaugacccaggcuggg

SEQ ID NO: 2259948 - RNA, 19 nt, Human
ucccuacccccuaagagcc

SEQ ID NO: 2259949 - RNA, 13 nt, Human
ucccuaccaccuc

SEQ ID NO: 2259950 - RNA, 20 nt, Human
ucccuacccccuaagagcca

SEQ ID NO: 2259951 - RNA, 18 nt, Human
ucccuaccaccuccccag

SEQ ID NO: 2259952 - RNA, 19 nt, Human
ucccuaccgagucucuucu

SEQ ID NO: 2259953 - RNA, 21 nt, Human
ucccuaccgagucucuucucc

SEQ ID NO: 2259954 - RNA, 22 nt, Human
ucccuaccgagucucuucucca

SEQ ID NO: 2259955 - RNA, 23 nt, Human
ucccuaccgagucucuucuccac

SEQ ID NO: 2259956 - RNA, 18 nt, Human
uccacuuucagugaaagc

SEQ ID NO: 2259957 - RNA, 14 nt, Human
uccacuuucuagcc

SEQ ID NO: 2259958 - RNA, 17 nt, Human
uccacuuuaucuugaau

SEQ ID NO: 2259959 - RNA, 22 nt, Human
uccagagaguggcuccucccgg

SEQ ID NO: 2259960 - RNA, 19 nt, Human
uccagagaguggcuccucc

SEQ ID NO: 2259961 - RNA, 12 nt, Human
uccagagggcac

SEQ ID NO: 2259962 - RNA, 20 nt, Human
uccagaggcuauuauuuuca

SEQ ID NO: 2259963 - RNA, 15 nt, Human
uccagaugcagggca

SEQ ID NO: 2259964 - RNA, 17 nt, Human
uccagagggcacucugc

SEQ ID NO: 2259965 - RNA, 21 nt, Human
uccacuuagaaauugcauuuc

SEQ ID NO: 2259966 - RNA, 23 nt, Human
uccacuuagaaauugcauuuccu

SEQ ID NO: 2259967 - RNA, 15 nt, Human
uccacuuuaucuuga

SEQ ID NO: 2259968 - RNA, 12 nt, Human
uccacuguguau

SEQ ID NO: 2259969 - RNA, 20 nt, Human
uccacuguguauagaaguag

SEQ ID NO: 2259970 - RNA, 14 nt, Human
uccacccugucccc

SEQ ID NO: 2259971 - RNA, 12 nt, Human
uccacccugucc

SEQ ID NO: 2259972 - RNA, 22 nt, Human
uccacugugccaugugccaggu

SEQ ID NO: 2259973 - RNA, 13 nt, Human
uccacccugcucu

SEQ ID NO: 2259974 - RNA, 14 nt, Human
uccacccugcucuc

SEQ ID NO: 2259975 - RNA, 12 nt, Human
uccacccuggaa

SEQ ID NO: 2259976 - RNA, 22 nt, Human
uccacccuggccgaguccaagc

SEQ ID NO: 2259977 - RNA, 13 nt, Human
uccacaggaagug

SEQ ID NO: 2259978 - RNA, 21 nt, Human
uccacccugcucuccgaccag

SEQ ID NO: 2259979 - RNA, 21 nt, Human
uccagaugccuucuccagaca

SEQ ID NO: 2259980 - RNA, 19 nt, Human
uccagaugcagggcaguca

SEQ ID NO: 2259981 - RNA, 18 nt, Human
uccagaugcagggcaguc

SEQ ID NO: 2259982 - RNA, 17 nt, Human
uccagaugcagggcagu

SEQ ID NO: 2259983 - RNA, 16 nt, Human
uccagaugcagggcag

SEQ ID NO: 2259984 - RNA, 22 nt, Human
uccagauuuuuuacagcugccu

SEQ ID NO: 2259985 - RNA, 16 nt, Human
uccagauuuacacugg

SEQ ID NO: 2259986 - RNA, 18 nt, Human
uccagauuuacacuggga

SEQ ID NO: 2259987 - RNA, 20 nt, Human
uccagauuuacacugggaga

SEQ ID NO: 2259988 - RNA, 19 nt, Human
uccagauguuuccagacuu

SEQ ID NO: 2259989 - RNA, 18 nt, Human
uccagauguuuccagacu

SEQ ID NO: 2259990 - RNA, 17 nt, Human
uccagauugacgacaag

SEQ ID NO: 2259991 - RNA, 18 nt, Human
uccagcaauucuccugcc

SEQ ID NO: 2259992 - RNA, 19 nt, Human
uccagauuuacacugggag

SEQ ID NO: 2259993 - RNA, 20 nt, Human
uccagcaauucuccugccuc

SEQ ID NO: 2259994 - RNA, 19 nt, Human
uccagcaauucuccugccu

SEQ ID NO: 2259995 - RNA, 23 nt, Human
uccagggccacgugccaggcccg

SEQ ID NO: 2259996 - RNA, 22 nt, Human
uccagggccacgugccaggccc

SEQ ID NO: 2259997 - RNA, 13 nt, Human
uccaggagaggag

SEQ ID NO: 2259998 - RNA, 13 nt, Human
uccagggcccuga

SEQ ID NO: 2259999 - RNA, 17 nt, Human
uccagggcccccaucuc

SEQ ID NO: 2260000 - RNA, 23 nt, Human
uccaggagaaggccaauuccuau

SEQ ID NO: 2260001 - RNA, 20 nt, Human
uccaggagaaggccaauucc

SEQ ID NO: 2260002 - RNA, 16 nt, Human
uccaggagaaggccaa

SEQ ID NO: 2260003 - RNA, 22 nt, Human
uccaggaaugccuccucccugg

SEQ ID NO: 2260004 - RNA, 23 nt, Human
uccaggacuauauuugggccugc

SEQ ID NO: 2260005 - RNA, 20 nt, Human
uccaggacuauauuugggcc

SEQ ID NO: 2260006 - RNA, 21 nt, Human
uccaggaaacuccacaucugc

SEQ ID NO: 2260007 - RNA, 23 nt, Human
uccaggaaacuccacaucugccu

SEQ ID NO: 2260008 - RNA, 18 nt, Human
uccaggaaccacaccaca

SEQ ID NO: 2260009 - RNA, 20 nt, Human
uccaggaaggcggggcuuca

SEQ ID NO: 2260010 - RNA, 17 nt, Human
uccaggaaaugugcaca

SEQ ID NO: 2260011 - RNA, 19 nt, Human
uccagcuggguuggaaaac

SEQ ID NO: 2260012 - RNA, 19 nt, Human
uccagcugggcucugcaau

SEQ ID NO: 2260013 - RNA, 22 nt, Human
uccagcuggccgggagccugau

SEQ ID NO: 2260014 - RNA, 21 nt, Human
uccagcuggccgggagccuga

SEQ ID NO: 2260015 - RNA, 15 nt, Human
uccagcuggccggga

SEQ ID NO: 2260016 - RNA, 15 nt, Human
uccaagccagcggga

SEQ ID NO: 2260017 - RNA, 22 nt, Human
uccaagcccaguucagcuuggg

SEQ ID NO: 2260018 - RNA, 23 nt, Human
uccaagcagccugagcaacucuu

SEQ ID NO: 2260019 - RNA, 15 nt, Human
uccaagccccaucuu

SEQ ID NO: 2260020 - RNA, 19 nt, Human
uccaagccccaucuucuaa

SEQ ID NO: 2260021 - RNA, 23 nt, Human
uccaagccccaucuucuaaaugg

SEQ ID NO: 2260022 - RNA, 12 nt, Human
uccaagcccugg

SEQ ID NO: 2260023 - RNA, 11 nt, Human
uccaagccugc

SEQ ID NO: 2260024 - RNA, 18 nt, Human
uccacaagauucccagag

SEQ ID NO: 2260025 - RNA, 17 nt, Human
uccacaagauucccaga

SEQ ID NO: 2260026 - RNA, 16 nt, Human
uccacaagauucccag

SEQ ID NO: 2260027 - RNA, 22 nt, Human
uccaagcgaggucaacagagaa

SEQ ID NO: 2260028 - RNA, 21 nt, Human
uccaagcgaggucaacagaga

SEQ ID NO: 2260029 - RNA, 23 nt, Human
uccaagcgaggucaacagagaag

SEQ ID NO: 2260030 - RNA, 21 nt, Human
uccacaagagcccaggccucc

SEQ ID NO: 2260031 - RNA, 20 nt, Human
uccacaagagcccaggccuc

SEQ ID NO: 2260032 - RNA, 19 nt, Human
uccacaagagcccaggccu

SEQ ID NO: 2260033 - RNA, 23 nt, Human
uccacacucaccucuaaaacagu

SEQ ID NO: 2260034 - RNA, 19 nt, Human
uccacagcaaccccaggcu

SEQ ID NO: 2260035 - RNA, 20 nt, Human
uccacagcaaccccaggcug

SEQ ID NO: 2260036 - RNA, 22 nt, Human
uccacaccuggcacugcugugc

SEQ ID NO: 2260037 - RNA, 14 nt, Human
uccacagccauccc

SEQ ID NO: 2260038 - RNA, 17 nt, Human
uccacagccgcagccuc

SEQ ID NO: 2260039 - RNA, 16 nt, Human
uccacagccgcagccu

SEQ ID NO: 2260040 - RNA, 14 nt, Human
uccacagccgcagc

SEQ ID NO: 2260041 - RNA, 15 nt, Human
uccacagccauccca

SEQ ID NO: 2260042 - RNA, 22 nt, Human
uccacagccaucccagccuugg

SEQ ID NO: 2260043 - RNA, 18 nt, Human
uccacagccgcagccucc

SEQ ID NO: 2260044 - RNA, 15 nt, Human
uccacagccugcaag

SEQ ID NO: 2260045 - RNA, 18 nt, Human
uccacagccugcaaguca

SEQ ID NO: 2260046 - RNA, 14 nt, Human
uccacagcuaccuc

SEQ ID NO: 2260047 - RNA, 23 nt, Human
uccacagcuuccccucucuccuc

SEQ ID NO: 2260048 - RNA, 23 nt, Human
uccacaagauucccagagacagg

SEQ ID NO: 2260049 - RNA, 21 nt, Human
uccacaagauucccagagaca

SEQ ID NO: 2260050 - RNA, 20 nt, Human
uccacaagauucccagagac

SEQ ID NO: 2260051 - RNA, 19 nt, Human
uccacaagauucccagaga

SEQ ID NO: 2260052 - RNA, 14 nt, Human
uccacacacgcagg

SEQ ID NO: 2260053 - RNA, 15 nt, Human
uccacacacgcagga

SEQ ID NO: 2260054 - RNA, 20 nt, Human
uccacacacagcugggcugu

SEQ ID NO: 2260055 - RNA, 21 nt, Human
uccacacacagcugggcugug

SEQ ID NO: 2260056 - RNA, 19 nt, Human
uccacacacgcaggaacuc

SEQ ID NO: 2260057 - RNA, 17 nt, Human
uccacaccaagcagcaa

SEQ ID NO: 2260058 - RNA, 12 nt, Human
uccacaccccca

SEQ ID NO: 2260059 - RNA, 13 nt, Human
uccacacccccac

SEQ ID NO: 2260060 - RNA, 15 nt, Human
uccacacccccaccc

SEQ ID NO: 2260061 - RNA, 21 nt, Human
uccacacccucucccaggacc

SEQ ID NO: 2260062 - RNA, 20 nt, Human
uccacacccucucccaggac

SEQ ID NO: 2260063 - RNA, 19 nt, Human
uccacacccucucccagga

SEQ ID NO: 2260064 - RNA, 18 nt, Human
uccacacccucucccagg

SEQ ID NO: 2260065 - RNA, 21 nt, Human
uccacaccuuuuauugacaca

SEQ ID NO: 2260066 - RNA, 15 nt, Human
uccacaccuuuuauu

SEQ ID NO: 2260067 - RNA, 19 nt, Human
uccacaccuggcacugcug

SEQ ID NO: 2260068 - RNA, 20 nt, Human
uccacaccuggcacugcugu

SEQ ID NO: 2260069 - RNA, 12 nt, Human
uccaagagcuga

SEQ ID NO: 2260070 - RNA, 14 nt, Human
uccaagagccugag

SEQ ID NO: 2260071 - RNA, 13 nt, Human
uccaagagccuga

SEQ ID NO: 2260072 - RNA, 19 nt, Human
uccaagaagcccaggaaag

SEQ ID NO: 2260073 - RNA, 20 nt, Human
uccaagaccuucuccuucac

SEQ ID NO: 2260074 - RNA, 15 nt, Human
uccaagcaaauguga

SEQ ID NO: 2260075 - RNA, 19 nt, Human
uccaagaggguccuuuagu

SEQ ID NO: 2260076 - RNA, 17 nt, Human
uccaagcaaaugugaau

SEQ ID NO: 2260077 - RNA, 14 nt, Human
uccaagcaggacau

SEQ ID NO: 2260078 - RNA, 22 nt, Human
uccaagcaggacauggacaagg

SEQ ID NO: 2260079 - RNA, 16 nt, Human
ucaugucaacuucugg

SEQ ID NO: 2260080 - RNA, 17 nt, Human
ucaugucaacuucuggc

SEQ ID NO: 2260081 - RNA, 20 nt, Human
ucauguaucaucuggauagg

SEQ ID NO: 2260082 - RNA, 14 nt, Human
uccaagaagcccag

SEQ ID NO: 2260083 - RNA, 15 nt, Human
uccaagaagcccagg

SEQ ID NO: 2260084 - RNA, 16 nt, Human
uccaagaagcccagga

SEQ ID NO: 2260085 - RNA, 19 nt, Human
ucauguaguaucaaauauu

SEQ ID NO: 2260086 - RNA, 15 nt, Human
ucauguaucaucugg

SEQ ID NO: 2260087 - RNA, 18 nt, Human
ucauguaucaucuggaua

SEQ ID NO: 2260088 - RNA, 19 nt, Human
ucauguaucaucuggauag

SEQ ID NO: 2260089 - RNA, 16 nt, Human
ucauguaguaucaaau

SEQ ID NO: 2260090 - RNA, 17 nt, Human
ucauguaguaucaaaua

SEQ ID NO: 2260091 - RNA, 12 nt, Human
ucauguacauuu

SEQ ID NO: 2260092 - RNA, 22 nt, Human
ucauggcugugcccucuugaug

SEQ ID NO: 2260093 - RNA, 14 nt, Human
ucauggcuuaaugu

SEQ ID NO: 2260094 - RNA, 15 nt, Human
ucauggcuuaauguu

SEQ ID NO: 2260095 - RNA, 18 nt, Human
ucauggcuuaauguuuau

SEQ ID NO: 2260096 - RNA, 23 nt, Human
ucaugggagggggcuugaagcca

SEQ ID NO: 2260097 - RNA, 17 nt, Human
ucaugggauagcacgug

SEQ ID NO: 2260098 - RNA, 14 nt, Human
ucauguacauuucu

SEQ ID NO: 2260099 - RNA, 18 nt, Human
ucauguacaagaugaagg

SEQ ID NO: 2260100 - RNA, 17 nt, Human
ucauguacaagaugaag

SEQ ID NO: 2260101 - RNA, 16 nt, Human
ucauguacaagaugaa

SEQ ID NO: 2260102 - RNA, 15 nt, Human
uccaugucggccucu

SEQ ID NO: 2260103 - RNA, 21 nt, Human
uccaugucggccucuaacccc

SEQ ID NO: 2260104 - RNA, 19 nt, Human
uccaugucgccucugcauu

SEQ ID NO: 2260105 - RNA, 14 nt, Human
uccaugucggccuc

SEQ ID NO: 2260106 - RNA, 17 nt, Human
uccaugucgccucugca

SEQ ID NO: 2260107 - RNA, 18 nt, Human
uccaugucgccucugcau

SEQ ID NO: 2260108 - RNA, 12 nt, Human
uccaugccugag

SEQ ID NO: 2260109 - RNA, 13 nt, Human
uccaugccugagg

SEQ ID NO: 2260110 - RNA, 14 nt, Human
uccaugccugaggg

SEQ ID NO: 2260111 - RNA, 15 nt, Human
uccaugccugagggu

SEQ ID NO: 2260112 - RNA, 16 nt, Human
uccaugccugagggug

SEQ ID NO: 2260113 - RNA, 21 nt, Human
uccaugccugaggguggagac

SEQ ID NO: 2260114 - RNA, 15 nt, Human
uccaugauggaguca

SEQ ID NO: 2260115 - RNA, 12 nt, Human
uccaugauggag

SEQ ID NO: 2260116 - RNA, 14 nt, Human
uccaugauggaaua

SEQ ID NO: 2260117 - RNA, 15 nt, Human
uccaugaugcuggga

SEQ ID NO: 2260118 - RNA, 12 nt, Human
uccaugauucua

SEQ ID NO: 2260119 - RNA, 16 nt, Human
uccaugucgccucugc

SEQ ID NO: 2260120 - RNA, 20 nt, Human
uccaugcguguuucugacuc

SEQ ID NO: 2260121 - RNA, 19 nt, Human
uccaugcguguuucugacu

SEQ ID NO: 2260122 - RNA, 18 nt, Human
uccaugcguguuucugac

SEQ ID NO: 2260123 - RNA, 15 nt, Human
uccaugcgcucaggg

SEQ ID NO: 2260124 - RNA, 16 nt, Human
uccaugcgcucagggc

SEQ ID NO: 2260125 - RNA, 11 nt, Human
ucccaacagga

SEQ ID NO: 2260126 - RNA, 18 nt, Human
ucccaacaggaggacaau

SEQ ID NO: 2260127 - RNA, 19 nt, Human
ucccaacaggaggacaauu

SEQ ID NO: 2260128 - RNA, 20 nt, Human
ucccaacaggaggacaauuc

SEQ ID NO: 2260129 - RNA, 21 nt, Human
ucccaacaggaggacaauuca

SEQ ID NO: 2260130 - RNA, 22 nt, Human
ucccaacaggaggacaauucau

SEQ ID NO: 2260131 - RNA, 11 nt, Human
ucccaacaucg

SEQ ID NO: 2260132 - RNA, 17 nt, Human
ucccaacucaccccagc

SEQ ID NO: 2260133 - RNA, 18 nt, Human
ucccaacucaccccagcc

SEQ ID NO: 2260134 - RNA, 17 nt, Human
ucccaacuccuauaauu

SEQ ID NO: 2260135 - RNA, 14 nt, Human
ucccaacucuagcu

SEQ ID NO: 2260136 - RNA, 23 nt, Human
ucccaacaggaggacaauucaug

SEQ ID NO: 2260137 - RNA, 17 nt, Human
ucccaacucuagcuggg

SEQ ID NO: 2260138 - RNA, 16 nt, Human
ucccaacucuagcugg

SEQ ID NO: 2260139 - RNA, 15 nt, Human
ucccaacucuagcug

SEQ ID NO: 2260140 - RNA, 14 nt, Human
ucccaacuuguaaa

SEQ ID NO: 2260141 - RNA, 19 nt, Human
ucccaacucaccccagccc

SEQ ID NO: 2260142 - RNA, 21 nt, Human
ucccaacucaccccagcccca

SEQ ID NO: 2260143 - RNA, 12 nt, Human
uccauaauguau

SEQ ID NO: 2260144 - RNA, 18 nt, Human
uccauaaugcuacugucu

SEQ ID NO: 2260145 - RNA, 16 nt, Human
uccauaaugcuacugu

SEQ ID NO: 2260146 - RNA, 20 nt, Human
uccauaauguauaaagaaca

SEQ ID NO: 2260147 - RNA, 21 nt, Human
uccauaauuaugacaguuaua

SEQ ID NO: 2260148 - RNA, 19 nt, Human
uccauaauuaugacaguua

SEQ ID NO: 2260149 - RNA, 17 nt, Human
uccauaauuaugacagu

SEQ ID NO: 2260150 - RNA, 12 nt, Human
uccauaauuaug

SEQ ID NO: 2260151 - RNA, 17 nt, Human
uccauagagagcaagac

SEQ ID NO: 2260152 - RNA, 12 nt, Human
uccauacauuug

SEQ ID NO: 2260153 - RNA, 17 nt, Human
uccagggcccugagcuc

SEQ ID NO: 2260154 - RNA, 16 nt, Human
uccagggcccugagcu

SEQ ID NO: 2260155 - RNA, 20 nt, Human
uccagggcccugagcucggu

SEQ ID NO: 2260156 - RNA, 14 nt, Human
uccagggcuaguga

SEQ ID NO: 2260157 - RNA, 14 nt, Human
uccagggcuggacu

SEQ ID NO: 2260158 - RNA, 17 nt, Human
uccagggcuggacugag

SEQ ID NO: 2260159 - RNA, 19 nt, Human
uccagggcuggacugaggc

SEQ ID NO: 2260160 - RNA, 17 nt, Human
uccaggggaugggaggu

SEQ ID NO: 2260161 - RNA, 13 nt, Human
uccaggggccccu

SEQ ID NO: 2260162 - RNA, 17 nt, Human
uccaggggccccuccag

SEQ ID NO: 2260163 - RNA, 23 nt, Human
uccauaaucuggacuccucuguc

SEQ ID NO: 2260164 - RNA, 13 nt, Human
uccagggcucuga

SEQ ID NO: 2260165 - RNA, 23 nt, Human
uccagggcuggacugaggccuga

SEQ ID NO: 2260166 - RNA, 21 nt, Human
uccagggcuggacugaggccu

SEQ ID NO: 2260167 - RNA, 22 nt, Human
uccagggcuggacugaggccug

SEQ ID NO: 2260168 - RNA, 21 nt, Human
uccauagccuaaucccugggc

SEQ ID NO: 2260169 - RNA, 13 nt, Human
uccauacagcucu

SEQ ID NO: 2260170 - RNA, 14 nt, Human
uccauacagcucua

SEQ ID NO: 2260171 - RNA, 22 nt, Human
uccauagccuaaucccugggca

SEQ ID NO: 2260172 - RNA, 20 nt, Human
uccauagagagcaagacgcu

SEQ ID NO: 2260173 - RNA, 18 nt, Human
uccauaguaguaugauga

SEQ ID NO: 2260174 - RNA, 19 nt, Human
uccauauaaauauuagaaa

SEQ ID NO: 2260175 - RNA, 12 nt, Human
uccauauaaaua

SEQ ID NO: 2260176 - RNA, 13 nt, Human
uccauauaaauau

SEQ ID NO: 2260177 - RNA, 18 nt, Human
uccauauauuagcauuua

SEQ ID NO: 2260178 - RNA, 17 nt, Human
uccauauauuagcauuu

SEQ ID NO: 2260179 - RNA, 20 nt, Human
uccauauauuagcauuuagu

SEQ ID NO: 2260180 - RNA, 17 nt, Human
uccauaugaccucaugc

SEQ ID NO: 2260181 - RNA, 24 nt, Human
uccauaugaccucaugcaucucca

SEQ ID NO: 2260182 - RNA, 18 nt, Human
uccauaugaccucaugca

SEQ ID NO: 2260183 - RNA, 19 nt, Human
uccauaugaccucaugcau

SEQ ID NO: 2260184 - RNA, 23 nt, Human
uccaugaguuuuuucucuugggc

SEQ ID NO: 2260185 - RNA, 14 nt, Human
uccauauuuauuca

SEQ ID NO: 2260186 - RNA, 14 nt, Human
uccaugaugcuggg

SEQ ID NO: 2260187 - RNA, 19 nt, Human
uccaugaguuugcccuggu

SEQ ID NO: 2260188 - RNA, 14 nt, Human
uccauauucaugua

SEQ ID NO: 2260189 - RNA, 18 nt, Human
uccauauggauuuucuau

SEQ ID NO: 2260190 - RNA, 13 nt, Human
uccauauggauuu

SEQ ID NO: 2260191 - RNA, 12 nt, Human
ucccaggggacc

SEQ ID NO: 2260192 - RNA, 17 nt, Human
ucccaggggaccacacc

SEQ ID NO: 2260193 - RNA, 15 nt, Human
ucccaugacccaggc

SEQ ID NO: 2260194 - RNA, 16 nt, Human
ucccaugacccaggcu

SEQ ID NO: 2260195 - RNA, 20 nt, Human
ucccaugacccaggcugggc

SEQ ID NO: 2260196 - RNA, 22 nt, Human
ucccagggccagggcccugcag

SEQ ID NO: 2260197 - RNA, 21 nt, Human
ucccagggccagggcccugca

SEQ ID NO: 2260198 - RNA, 23 nt, Human
ucccagggccagggcccugcaga

SEQ ID NO: 2260199 - RNA, 15 nt, Human
ucccaugagccucag

SEQ ID NO: 2260200 - RNA, 16 nt, Human
ucccaugagccucagc

SEQ ID NO: 2260201 - RNA, 20 nt, Human
ucccagggccagggcccugc

SEQ ID NO: 2260202 - RNA, 17 nt, Human
ucccagggccagggccc

SEQ ID NO: 2260203 - RNA, 16 nt, Human
ucccagggccagggcc

SEQ ID NO: 2260204 - RNA, 22 nt, Human
ucccaggcuucacccugaaugg

SEQ ID NO: 2260205 - RNA, 18 nt, Human
ucccagggaagugcucug

SEQ ID NO: 2260206 - RNA, 15 nt, Human
ucccaggcuggggcu

SEQ ID NO: 2260207 - RNA, 16 nt, Human
ucccaggcuggggcug

SEQ ID NO: 2260208 - RNA, 15 nt, Human
ucccaggcuucaccc

SEQ ID NO: 2260209 - RNA, 18 nt, Human
ucccaggcuucacccuga

SEQ ID NO: 2260210 - RNA, 19 nt, Human
ucccaggcugagccucagu

SEQ ID NO: 2260211 - RNA, 18 nt, Human
ucccaggcugagccucag

SEQ ID NO: 2260212 - RNA, 19 nt, Human
ucccaggcauuccccagga

SEQ ID NO: 2260213 - RNA, 22 nt, Human
ucccacugggguccagggagca

SEQ ID NO: 2260214 - RNA, 14 nt, Human
ucccacugccucag

SEQ ID NO: 2260215 - RNA, 16 nt, Human
ucccacugccucaggu

SEQ ID NO: 2260216 - RNA, 18 nt, Human
ucccacugccucagguuc

SEQ ID NO: 2260217 - RNA, 20 nt, Human
ucccacugccucagguuccu

SEQ ID NO: 2260218 - RNA, 21 nt, Human
ucccacugcacccccuccugc

SEQ ID NO: 2260219 - RNA, 18 nt, Human
ucccacugcacccccucc

SEQ ID NO: 2260220 - RNA, 20 nt, Human
ucccacugcacccccuccug

SEQ ID NO: 2260221 - RNA, 13 nt, Human
ucccacugcaccc

SEQ ID NO: 2260222 - RNA, 16 nt, Human
ucccacugcacccccu

SEQ ID NO: 2260223 - RNA, 18 nt, Human
ucccacucaagccaagca

SEQ ID NO: 2260224 - RNA, 15 nt, Human
ucccacucaccccgg

SEQ ID NO: 2260225 - RNA, 23 nt, Human
ucccacucaccccggcagacgcc

SEQ ID NO: 2260226 - RNA, 17 nt, Human
ucccacucuagggcagu

SEQ ID NO: 2260227 - RNA, 22 nt, Human
ucccacucuagggcaguggagu

SEQ ID NO: 2260228 - RNA, 15 nt, Human
ucccacuugccccug

SEQ ID NO: 2260229 - RNA, 16 nt, Human
ucccaggauguacaag

SEQ ID NO: 2260230 - RNA, 20 nt, Human
ucccacuuccccuccuaccc

SEQ ID NO: 2260231 - RNA, 17 nt, Human
ucccacuucccugacac

SEQ ID NO: 2260232 - RNA, 23 nt, Human
ucccacugccucagguuccuaug

SEQ ID NO: 2260233 - RNA, 15 nt, Human
ucccacuuccccucc

SEQ ID NO: 2260234 - RNA, 17 nt, Human
ucccaggcauuccccag

SEQ ID NO: 2260235 - RNA, 18 nt, Human
ucccaggcauuccccagg

SEQ ID NO: 2260236 - RNA, 16 nt, Human
ucccaccucagccucc

SEQ ID NO: 2260237 - RNA, 18 nt, Human
ucccaagaucugugcagc

SEQ ID NO: 2260238 - RNA, 18 nt, Human
ucccaccucagccucccg

SEQ ID NO: 2260239 - RNA, 14 nt, Human
ucccaccucucuca

SEQ ID NO: 2260240 - RNA, 23 nt, Human
ucccaccucccccucccccuucu

SEQ ID NO: 2260241 - RNA, 17 nt, Human
ucccaccucucucacuc

SEQ ID NO: 2260242 - RNA, 18 nt, Human
ucccaccucucucacucc

SEQ ID NO: 2260243 - RNA, 19 nt, Human
ucccaccuuggcugcaggg

SEQ ID NO: 2260244 - RNA, 21 nt, Human
ucccaccuuggcugcagggag

SEQ ID NO: 2260245 - RNA, 20 nt, Human
ucccaccucucucacuccuu

SEQ ID NO: 2260246 - RNA, 21 nt, Human
ucccacgaauuugcuggggaa

SEQ ID NO: 2260247 - RNA, 18 nt, Human
ucccacgcuucucuuugg

SEQ ID NO: 2260248 - RNA, 14 nt, Human
ucccacgugggaga

SEQ ID NO: 2260249 - RNA, 20 nt, Human
ucccacgcacuccaugagca

SEQ ID NO: 2260250 - RNA, 15 nt, Human
ucccacgaauuugcu

SEQ ID NO: 2260251 - RNA, 18 nt, Human
ucccacgaauuugcuggg

SEQ ID NO: 2260252 - RNA, 20 nt, Human
ucccacgaauuugcugggga

SEQ ID NO: 2260253 - RNA, 17 nt, Human
ucccacucaagccaagc

SEQ ID NO: 2260254 - RNA, 20 nt, Human
ucccacuaucugggugcaug

SEQ ID NO: 2260255 - RNA, 14 nt, Human
ucccacuaucuggg

SEQ ID NO: 2260256 - RNA, 15 nt, Human
ucccacuaucugggu

SEQ ID NO: 2260257 - RNA, 13 nt, Human
ucccacucacccc

SEQ ID NO: 2260258 - RNA, 14 nt, Human
ucccacucagucca

SEQ ID NO: 2260259 - RNA, 16 nt, Human
ucaucugggaaagaca

SEQ ID NO: 2260260 - RNA, 22 nt, Human
ucaucuuucuugaucaacaucu

SEQ ID NO: 2260261 - RNA, 13 nt, Human
ucaucuuucuuga

SEQ ID NO: 2260262 - RNA, 18 nt, Human
ucaucugggaaagacauc

SEQ ID NO: 2260263 - RNA, 13 nt, Human
ucaucuggaacca

SEQ ID NO: 2260264 - RNA, 21 nt, Human
ucaucuggauaggagccugcu

SEQ ID NO: 2260265 - RNA, 22 nt, Human
ucaucuggauaggagccugcug

SEQ ID NO: 2260266 - RNA, 23 nt, Human
ucaucuggcaacaucuuuauccg

SEQ ID NO: 2260267 - RNA, 19 nt, Human
ucaucuggcaacaucuuua

SEQ ID NO: 2260268 - RNA, 23 nt, Human
ucaucuggauaggagccugcugg

SEQ ID NO: 2260269 - RNA, 12 nt, Human
ucaucugggaaa

SEQ ID NO: 2260270 - RNA, 13 nt, Human
ucaucugggaaag

SEQ ID NO: 2260271 - RNA, 14 nt, Human
ucaucugggaaaga

SEQ ID NO: 2260272 - RNA, 22 nt, Human
ucauccaauccucacugggugg

SEQ ID NO: 2260273 - RNA, 20 nt, Human
ucauccaauccucacugggu

SEQ ID NO: 2260274 - RNA, 14 nt, Human
ucauccacauuguu

SEQ ID NO: 2260275 - RNA, 19 nt, Human
ucauccaauccucacuggg

SEQ ID NO: 2260276 - RNA, 18 nt, Human
ucauccaauccucacugg

SEQ ID NO: 2260277 - RNA, 15 nt, Human
ucauccaauccucac

SEQ ID NO: 2260278 - RNA, 12 nt, Human
ucauccacccca

SEQ ID NO: 2260279 - RNA, 19 nt, Human
ucauccacauuguuuuaaa

SEQ ID NO: 2260280 - RNA, 22 nt, Human
ucauccacauuguuuuaaaaag

SEQ ID NO: 2260281 - RNA, 22 nt, Human
ucauccaaucuaaccacaucaa

SEQ ID NO: 2260282 - RNA, 15 nt, Human
ucauccacauuguuu

SEQ ID NO: 2260283 - RNA, 16 nt, Human
ucauccacauuguuuu

SEQ ID NO: 2260284 - RNA, 17 nt, Human
ucauccacauuguuuua

SEQ ID NO: 2260285 - RNA, 18 nt, Human
ucaucuggaaccaucaga

SEQ ID NO: 2260286 - RNA, 12 nt, Human
ucaucuggaacc

SEQ ID NO: 2260287 - RNA, 19 nt, Human
ucaucugcugguccguggg

SEQ ID NO: 2260288 - RNA, 14 nt, Human
ucauccaccccauc

SEQ ID NO: 2260289 - RNA, 16 nt, Human
ucauccaccccauccc

SEQ ID NO: 2260290 - RNA, 21 nt, Human
ucaucugcucuccuuccugga

SEQ ID NO: 2260291 - RNA, 13 nt, Human
ucaucugcugguc

SEQ ID NO: 2260292 - RNA, 14 nt, Human
ucaucugcuggucc

SEQ ID NO: 2260293 - RNA, 11 nt, Human
ucaugaaaauu

SEQ ID NO: 2260294 - RNA, 19 nt, Human
ucauggaauuggagcucgu

SEQ ID NO: 2260295 - RNA, 17 nt, Human
ucauggacacuuugaaa

SEQ ID NO: 2260296 - RNA, 21 nt, Human
ucauggaauuggagcucgugg

SEQ ID NO: 2260297 - RNA, 24 nt, Human
ucauggacuucugccagcauaaua

SEQ ID NO: 2260298 - RNA, 23 nt, Human
ucauggaugggggaacucagauc

SEQ ID NO: 2260299 - RNA, 20 nt, Human
ucauggauucauuacagcuu

SEQ ID NO: 2260300 - RNA, 14 nt, Human
ucauggacacuuug

SEQ ID NO: 2260301 - RNA, 20 nt, Human
ucauggagaagcagaaauac

SEQ ID NO: 2260302 - RNA, 23 nt, Human
ucauggagugacggucccacacu

SEQ ID NO: 2260303 - RNA, 22 nt, Human
ucauggcagaaggcaaacccau

SEQ ID NO: 2260304 - RNA, 13 nt, Human
ucauggccccucu

SEQ ID NO: 2260305 - RNA, 14 nt, Human
ucauggccccucug

SEQ ID NO: 2260306 - RNA, 18 nt, Human
ucauggccccucugaccu

SEQ ID NO: 2260307 - RNA, 20 nt, Human
ucauggccuauuauauuaaa

SEQ ID NO: 2260308 - RNA, 19 nt, Human
ucaucauuguauauaugug

SEQ ID NO: 2260309 - RNA, 22 nt, Human
ucaucauucucugucucaucca

SEQ ID NO: 2260310 - RNA, 20 nt, Human
ucaucauuguauauaugugu

SEQ ID NO: 2260311 - RNA, 19 nt, Human
ucaucauucucugucucau

SEQ ID NO: 2260312 - RNA, 20 nt, Human
ucaucauucucugucucauc

SEQ ID NO: 2260313 - RNA, 19 nt, Human
ucaucauaaaauaaaguau

SEQ ID NO: 2260314 - RNA, 15 nt, Human
ucaucauaaaauaaa

SEQ ID NO: 2260315 - RNA, 14 nt, Human
ucaucauaaaauaa

SEQ ID NO: 2260316 - RNA, 13 nt, Human
ucaucauaaaaua

SEQ ID NO: 2260317 - RNA, 17 nt, Human
ucaucauauuauacaga

SEQ ID NO: 2260318 - RNA, 14 nt, Human
ucaucauauuauac

SEQ ID NO: 2260319 - RNA, 15 nt, Human
ucaucauacaugacu

SEQ ID NO: 2260320 - RNA, 17 nt, Human
ucaucaacccuaaaaag

SEQ ID NO: 2260321 - RNA, 13 nt, Human
ucaucaacugaau

SEQ ID NO: 2260322 - RNA, 23 nt, Human
ucauauuuuguauauaucugcuu

SEQ ID NO: 2260323 - RNA, 19 nt, Human
ucaucaaauggaagacaca

SEQ ID NO: 2260324 - RNA, 23 nt, Human
ucaucaaauggaagacacauuga

SEQ ID NO: 2260325 - RNA, 11 nt, Human
ucaucaagacu

SEQ ID NO: 2260326 - RNA, 22 nt, Human
ucaucaacugaaugaggucagc

SEQ ID NO: 2260327 - RNA, 15 nt, Human
ucaucaacugaauga

SEQ ID NO: 2260328 - RNA, 23 nt, Human
ucaucaguauugaagcauuuuau

SEQ ID NO: 2260329 - RNA, 17 nt, Human
ucaucaaggcacugccu

SEQ ID NO: 2260330 - RNA, 15 nt, Human
ucaucaguggagcca

SEQ ID NO: 2260331 - RNA, 21 nt, Human
ucaucaguauugaagcauuuu

SEQ ID NO: 2260332 - RNA, 20 nt, Human
ucaucaguauugaagcauuu

SEQ ID NO: 2260333 - RNA, 16 nt, Human
ucaucaguauugaagc

SEQ ID NO: 2260334 - RNA, 16 nt, Human
ucaucaaggcacugcc

SEQ ID NO: 2260335 - RNA, 19 nt, Human
ucaucaagacuggaaggug

SEQ ID NO: 2260336 - RNA, 15 nt, Human
ucaucaaggcacugc

SEQ ID NO: 2260337 - RNA, 13 nt, Human
ucauagaaaugua

SEQ ID NO: 2260338 - RNA, 23 nt, Human
ucauagaaauguaacuuuuguaa

SEQ ID NO: 2260339 - RNA, 22 nt, Human
ucauagaaauguaacuuuugua

SEQ ID NO: 2260340 - RNA, 19 nt, Human
ucauauuuugauuauugua

SEQ ID NO: 2260341 - RNA, 15 nt, Human
ucauauuuuguauau

SEQ ID NO: 2260342 - RNA, 18 nt, Human
ucauauuuucuuucaaaa

SEQ ID NO: 2260343 - RNA, 12 nt, Human
ucauauuuugau

SEQ ID NO: 2260344 - RNA, 14 nt, Human
ucauauuuugauua

SEQ ID NO: 2260345 - RNA, 16 nt, Human
ucauauuuugauuauu

SEQ ID NO: 2260346 - RNA, 19 nt, Human
ucauacugugcuggagcca

SEQ ID NO: 2260347 - RNA, 13 nt, Human
ucauacugaagau

SEQ ID NO: 2260348 - RNA, 15 nt, Human
ucauacugaagaugc

SEQ ID NO: 2260349 - RNA, 17 nt, Human
ucauacugugcuggagc

SEQ ID NO: 2260350 - RNA, 18 nt, Human
ucauacugugcuggagcc

SEQ ID NO: 2260351 - RNA, 20 nt, Human
ucauacugugcuggagccac

SEQ ID NO: 2260352 - RNA, 20 nt, Human
ucaguuccugcccuuggccu

SEQ ID NO: 2260353 - RNA, 17 nt, Human
ucaguuccucuuugcau

SEQ ID NO: 2260354 - RNA, 18 nt, Human
ucaguuccucuuugcaug

SEQ ID NO: 2260355 - RNA, 19 nt, Human
ucaguuccucuuugcaugg

SEQ ID NO: 2260356 - RNA, 21 nt, Human
ucaguuccucuuugcauggaa

SEQ ID NO: 2260357 - RNA, 14 nt, Human
ucaguucucuucac

SEQ ID NO: 2260358 - RNA, 19 nt, Human
ucaguucuagucucucugg

SEQ ID NO: 2260359 - RNA, 14 nt, Human
ucauacucuagauu

SEQ ID NO: 2260360 - RNA, 23 nt, Human
ucauacucuagauuuuguuuugc

SEQ ID NO: 2260361 - RNA, 20 nt, Human
ucaguucuagucucucuggg

SEQ ID NO: 2260362 - RNA, 17 nt, Human
ucaguucucuucacuca

SEQ ID NO: 2260363 - RNA, 13 nt, Human
ucagguggccaug

SEQ ID NO: 2260364 - RNA, 21 nt, Human
ucagguggggucacucuggca

SEQ ID NO: 2260365 - RNA, 17 nt, Human
ucaggugggcgugguca

SEQ ID NO: 2260366 - RNA, 19 nt, Human
ucagucagugcaaauguca

SEQ ID NO: 2260367 - RNA, 14 nt, Human
ucagucaugcauaa

SEQ ID NO: 2260368 - RNA, 15 nt, Human
ucagucaugcauaaa

SEQ ID NO: 2260369 - RNA, 16 nt, Human
ucagucaugcauaaau

SEQ ID NO: 2260370 - RNA, 17 nt, Human
ucagguggggucacucu

SEQ ID NO: 2260371 - RNA, 20 nt, Human
ucagguggggucacucuggc

SEQ ID NO: 2260372 - RNA, 15 nt, Human
ucaguccauagcaga

SEQ ID NO: 2260373 - RNA, 18 nt, Human
ucaguccaugaagaugua

SEQ ID NO: 2260374 - RNA, 18 nt, Human
ucaguccccgugaaggag

SEQ ID NO: 2260375 - RNA, 17 nt, Human
ucagucccaucagagag

SEQ ID NO: 2260376 - RNA, 12 nt, Human
ucaguccaggau

SEQ ID NO: 2260377 - RNA, 17 nt, Human
ucagucaugcauaaaua

SEQ ID NO: 2260378 - RNA, 20 nt, Human
ucagucaugcauaaauaugc

SEQ ID NO: 2260379 - RNA, 21 nt, Human
ucagucauuagacuccuccuc

SEQ ID NO: 2260380 - RNA, 11 nt, Human
ucagguggcca

SEQ ID NO: 2260381 - RNA, 20 nt, Human
ucaggagucccaaggaaagc

SEQ ID NO: 2260382 - RNA, 19 nt, Human
ucaggagucccaaggaaag

SEQ ID NO: 2260383 - RNA, 14 nt, Human
ucagguggggcagc

SEQ ID NO: 2260384 - RNA, 18 nt, Human
ucaggugcugccauccag

SEQ ID NO: 2260385 - RNA, 20 nt, Human
ucaggugcugccauccaggu

SEQ ID NO: 2260386 - RNA, 15 nt, Human
ucagguggggcagcu

SEQ ID NO: 2260387 - RNA, 16 nt, Human
ucagguggggcagcuu

SEQ ID NO: 2260388 - RNA, 21 nt, Human
ucagguggggcagcuugaggg

SEQ ID NO: 2260389 - RNA, 17 nt, Human
ucagguggggcagcuug

SEQ ID NO: 2260390 - RNA, 13 nt, Human
ucaguuacagaaa

SEQ ID NO: 2260391 - RNA, 14 nt, Human
ucaguuacagaaag

SEQ ID NO: 2260392 - RNA, 14 nt, Human
ucaguuacuaagaa

SEQ ID NO: 2260393 - RNA, 15 nt, Human
ucaguuacagaaagu

SEQ ID NO: 2260394 - RNA, 20 nt, Human
ucaguuacuaagaagaaaau

SEQ ID NO: 2260395 - RNA, 17 nt, Human
ucaguuaagccuuugga

SEQ ID NO: 2260396 - RNA, 16 nt, Human
ucaguuaagccuuugg

SEQ ID NO: 2260397 - RNA, 22 nt, Human
ucaguucccuuggccucagaau

SEQ ID NO: 2260398 - RNA, 20 nt, Human
ucaguuccgauuucccaggc

SEQ ID NO: 2260399 - RNA, 16 nt, Human
ucaguuccucuuugca

SEQ ID NO: 2260400 - RNA, 20 nt, Human
ucaguucccuuggccucaga

SEQ ID NO: 2260401 - RNA, 19 nt, Human
ucaguucccuuggccucag

SEQ ID NO: 2260402 - RNA, 18 nt, Human
ucaguucccuuggccuca

SEQ ID NO: 2260403 - RNA, 17 nt, Human
ucaguucccuuggccuc

SEQ ID NO: 2260404 - RNA, 16 nt, Human
ucaguucccuuggccu

SEQ ID NO: 2260405 - RNA, 14 nt, Human
ucaguuacucagcc

SEQ ID NO: 2260406 - RNA, 19 nt, Human
ucagugugccccccauccu

SEQ ID NO: 2260407 - RNA, 20 nt, Human
ucagugugccccccauccug

SEQ ID NO: 2260408 - RNA, 17 nt, Human
ucaguguuaaaugugau

SEQ ID NO: 2260409 - RNA, 15 nt, Human
ucaguguuaaaugug

SEQ ID NO: 2260410 - RNA, 20 nt, Human
ucaguguucccuuuccuacu

SEQ ID NO: 2260411 - RNA, 14 nt, Human
ucaguguuauuagu

SEQ ID NO: 2260412 - RNA, 21 nt, Human
ucaguguuaaaugugaugaau

SEQ ID NO: 2260413 - RNA, 22 nt, Human
ucaguguuugggucaccccucc

SEQ ID NO: 2260414 - RNA, 22 nt, Human
ucagugugccccccauccuggc

SEQ ID NO: 2260415 - RNA, 23 nt, Human
ucagucugauuaaagguggugcc

SEQ ID NO: 2260416 - RNA, 17 nt, Human
ucagucucugagggcuu

SEQ ID NO: 2260417 - RNA, 13 nt, Human
ucagugugccccc

SEQ ID NO: 2260418 - RNA, 14 nt, Human
ucagugugcccccc

SEQ ID NO: 2260419 - RNA, 19 nt, Human
ucagugugucuaaauuuga

SEQ ID NO: 2260420 - RNA, 18 nt, Human
ucagugugacugaucucu

SEQ ID NO: 2260421 - RNA, 17 nt, Human
ucagucugauucccaag

SEQ ID NO: 2260422 - RNA, 19 nt, Human
ucagucugauucccaagcu

SEQ ID NO: 2260423 - RNA, 20 nt, Human
ucagucucugagcagugaau

SEQ ID NO: 2260424 - RNA, 17 nt, Human
ucagucucugagcagug

SEQ ID NO: 2260425 - RNA, 15 nt, Human
ucagucucugagcag

SEQ ID NO: 2260426 - RNA, 13 nt, Human
ucagucucugagc

SEQ ID NO: 2260427 - RNA, 19 nt, Human
ucaguccuccccucacagc

SEQ ID NO: 2260428 - RNA, 21 nt, Human
ucaguccuccccucacagccu

SEQ ID NO: 2260429 - RNA, 12 nt, Human
ucaguccccucc

SEQ ID NO: 2260430 - RNA, 13 nt, Human
ucaguccccuccc

SEQ ID NO: 2260431 - RNA, 14 nt, Human
ucaguccccuccca

SEQ ID NO: 2260432 - RNA, 15 nt, Human
ucaguccccucccau

SEQ ID NO: 2260433 - RNA, 18 nt, Human
ucaguccccucccaucug

SEQ ID NO: 2260434 - RNA, 20 nt, Human
ucaguccccucccaucuggg

SEQ ID NO: 2260435 - RNA, 23 nt, Human
ucaguccccucccaucugggagu

SEQ ID NO: 2260436 - RNA, 13 nt, Human
ucagucccuaugu

SEQ ID NO: 2260437 - RNA, 16 nt, Human
ucagucccuauguauu

SEQ ID NO: 2260438 - RNA, 17 nt, Human
ucagucccuauguauuu

SEQ ID NO: 2260439 - RNA, 18 nt, Human
ucagucccuauguauuug

SEQ ID NO: 2260440 - RNA, 23 nt, Human
ucagucccuauguauuugcaguu

SEQ ID NO: 2260441 - RNA, 13 nt, Human
ucaguccuccccu

SEQ ID NO: 2260442 - RNA, 17 nt, Human
ucaguccuccccucaca

SEQ ID NO: 2260443 - RNA, 18 nt, Human
ucaguccuccccucacag

SEQ ID NO: 2260444 - RNA, 13 nt, Human
ucaggacacuaau

SEQ ID NO: 2260445 - RNA, 13 nt, Human
ucaggaccaggca

SEQ ID NO: 2260446 - RNA, 15 nt, Human
ucaggacccagagga

SEQ ID NO: 2260447 - RNA, 19 nt, Human
ucaggacccagaggaaggg

SEQ ID NO: 2260448 - RNA, 16 nt, Human
ucaggacccagaggaa

SEQ ID NO: 2260449 - RNA, 20 nt, Human
ucagcuguaagaagagacug

SEQ ID NO: 2260450 - RNA, 21 nt, Human
ucagcuggcacugucucugcu

SEQ ID NO: 2260451 - RNA, 14 nt, Human
ucaggacagaugcc

SEQ ID NO: 2260452 - RNA, 15 nt, Human
ucaggacagaugcca

SEQ ID NO: 2260453 - RNA, 20 nt, Human
ucaggaccaaagcuuucaug

SEQ ID NO: 2260454 - RNA, 17 nt, Human
ucaggaccugggaccuc

SEQ ID NO: 2260455 - RNA, 14 nt, Human
ucaggaccaggcaa

SEQ ID NO: 2260456 - RNA, 21 nt, Human
ucaggaccugggaccuccccu

SEQ ID NO: 2260457 - RNA, 19 nt, Human
ucaggacgagaaugagggu

SEQ ID NO: 2260458 - RNA, 23 nt, Human
ucaggaccugggaccuccccuga

SEQ ID NO: 2260459 - RNA, 14 nt, Human
ucaggaccuuuuga

SEQ ID NO: 2260460 - RNA, 21 nt, Human
ucaggacucagaagccucugg

SEQ ID NO: 2260461 - RNA, 14 nt, Human
ucaggacucagaag

SEQ ID NO: 2260462 - RNA, 15 nt, Human
ucagcugccucacuu

SEQ ID NO: 2260463 - RNA, 14 nt, Human
ucagcugccucacu

SEQ ID NO: 2260464 - RNA, 12 nt, Human
ucagcugccuca

SEQ ID NO: 2260465 - RNA, 15 nt, Human
ucagcugcuacuacu

SEQ ID NO: 2260466 - RNA, 12 nt, Human
ucagcugcuucu

SEQ ID NO: 2260467 - RNA, 15 nt, Human
ucagcugcuucuccc

SEQ ID NO: 2260468 - RNA, 24 nt, Human
ucagcugccucacuuccuacaaga

SEQ ID NO: 2260469 - RNA, 16 nt, Human
ucagcugcugaaacaa

SEQ ID NO: 2260470 - RNA, 16 nt, Human
ucaggaggaaggcuua

SEQ ID NO: 2260471 - RNA, 23 nt, Human
ucaggaggaaggcuuacacccac

SEQ ID NO: 2260472 - RNA, 11 nt, Human
ucaggagcaca

SEQ ID NO: 2260473 - RNA, 17 nt, Human
ucaggaggcaggaccuu

SEQ ID NO: 2260474 - RNA, 13 nt, Human
ucaggagggauug

SEQ ID NO: 2260475 - RNA, 18 nt, Human
ucaggaggcugaggggag

SEQ ID NO: 2260476 - RNA, 15 nt, Human
ucaggaggcugaggg

SEQ ID NO: 2260477 - RNA, 22 nt, Human
ucaggaggcugaggcagaagaa

SEQ ID NO: 2260478 - RNA, 20 nt, Human
ucaggaggcugaggcagaag

SEQ ID NO: 2260479 - RNA, 18 nt, Human
ucaggaggcugaggcaga

SEQ ID NO: 2260480 - RNA, 13 nt, Human
ucaggaggcugag

SEQ ID NO: 2260481 - RNA, 12 nt, Human
ucaggaggcuga

SEQ ID NO: 2260482 - RNA, 18 nt, Human
ucaggagcacaggcagcu

SEQ ID NO: 2260483 - RNA, 15 nt, Human
ucaggacuuggucug

SEQ ID NO: 2260484 - RNA, 12 nt, Human
ucaggagaaaaa

SEQ ID NO: 2260485 - RNA, 20 nt, Human
ucaggacuuaacggcuccag

SEQ ID NO: 2260486 - RNA, 14 nt, Human
ucaggacuccucuc

SEQ ID NO: 2260487 - RNA, 18 nt, Human
ucaggagaggggcagaac

SEQ ID NO: 2260488 - RNA, 17 nt, Human
ucaggagaggggcagaa

SEQ ID NO: 2260489 - RNA, 15 nt, Human
ucaggagaggggcag

SEQ ID NO: 2260490 - RNA, 20 nt, Human
ucaggagagaguugaaccua

SEQ ID NO: 2260491 - RNA, 20 nt, Human
ucaggagaggggcagaacag

SEQ ID NO: 2260492 - RNA, 13 nt, Human
ucaggagagcagc

SEQ ID NO: 2260493 - RNA, 22 nt, Human
ucaggagaguagaacagauaau

SEQ ID NO: 2260494 - RNA, 18 nt, Human
ucagccugaggcugagac

SEQ ID NO: 2260495 - RNA, 13 nt, Human
ucagccugaggcu

SEQ ID NO: 2260496 - RNA, 20 nt, Human
ucagccugaggcugagacug

SEQ ID NO: 2260497 - RNA, 11 nt, Human
ucagccugagu

SEQ ID NO: 2260498 - RNA, 16 nt, Human
ucagccugcuccagcu

SEQ ID NO: 2260499 - RNA, 21 nt, Human
ucagccucuuaaagcugccug

SEQ ID NO: 2260500 - RNA, 12 nt, Human
ucagccucuuaa

SEQ ID NO: 2260501 - RNA, 22 nt, Human
ucagccucuuaaagcugccugu

SEQ ID NO: 2260502 - RNA, 10 nt, Human
ucagccugag

SEQ ID NO: 2260503 - RNA, 16 nt, Human
ucagccucucucccag

SEQ ID NO: 2260504 - RNA, 17 nt, Human
ucagccucucucccagu

SEQ ID NO: 2260505 - RNA, 18 nt, Human
ucagccucucucccaguc

SEQ ID NO: 2260506 - RNA, 19 nt, Human
ucagccucucucccagucu

SEQ ID NO: 2260507 - RNA, 20 nt, Human
ucagccucucucccagucua

SEQ ID NO: 2260508 - RNA, 21 nt, Human
ucagccucucucccagucuac

SEQ ID NO: 2260509 - RNA, 22 nt, Human
ucagccucccaaagugcuggga

SEQ ID NO: 2260510 - RNA, 20 nt, Human
ucagccucccaaguagcugg

SEQ ID NO: 2260511 - RNA, 18 nt, Human
ucagccuccagccucugu

SEQ ID NO: 2260512 - RNA, 19 nt, Human
ucagccuccagccucuguu

SEQ ID NO: 2260513 - RNA, 12 nt, Human
ucagccucccga

SEQ ID NO: 2260514 - RNA, 20 nt, Human
ucagccucccgaauagcugg

SEQ ID NO: 2260515 - RNA, 18 nt, Human
ucagcuccagcucaccag

SEQ ID NO: 2260516 - RNA, 15 nt, Human
ucagccugagucucc

SEQ ID NO: 2260517 - RNA, 16 nt, Human
ucagccugagucuccu

SEQ ID NO: 2260518 - RNA, 19 nt, Human
ucagccugagucuccugug

SEQ ID NO: 2260519 - RNA, 21 nt, Human
ucagcuccagcucaccagccc

SEQ ID NO: 2260520 - RNA, 22 nt, Human
ucagcuccagcucaccagcccc

SEQ ID NO: 2260521 - RNA, 17 nt, Human
ucagcuccuuccuggag

SEQ ID NO: 2260522 - RNA, 16 nt, Human
ucagcuccuuccugga

SEQ ID NO: 2260523 - RNA, 15 nt, Human
ucagcuccuuccugg

SEQ ID NO: 2260524 - RNA, 14 nt, Human
ucagcuccuuccug

SEQ ID NO: 2260525 - RNA, 21 nt, Human
ucagcuccccucggagaagag

SEQ ID NO: 2260526 - RNA, 22 nt, Human
ucagcuccccucggagaagagc

SEQ ID NO: 2260527 - RNA, 20 nt, Human
ucagcaccuacaguguacag

SEQ ID NO: 2260528 - RNA, 17 nt, Human
ucagcaccccugucucu

SEQ ID NO: 2260529 - RNA, 13 nt, Human
ucagcaccccuuc

SEQ ID NO: 2260530 - RNA, 14 nt, Human
ucagcaccccuucc

SEQ ID NO: 2260531 - RNA, 21 nt, Human
ucagcaccuacaguguacagu

SEQ ID NO: 2260532 - RNA, 22 nt, Human
ucagcaccuacaguguacaguc

SEQ ID NO: 2260533 - RNA, 16 nt, Human
ucagcacgauuucugu

SEQ ID NO: 2260534 - RNA, 15 nt, Human
ucagcacgauuucug

SEQ ID NO: 2260535 - RNA, 20 nt, Human
ucagcaguaccuauaaagua

SEQ ID NO: 2260536 - RNA, 15 nt, Human
ucagcaccccuucca

SEQ ID NO: 2260537 - RNA, 17 nt, Human
ucagcaccccuuccaug

SEQ ID NO: 2260538 - RNA, 17 nt, Human
ucagcacgauuucuguu

SEQ ID NO: 2260539 - RNA, 12 nt, Human
ucagccucccaa

SEQ ID NO: 2260540 - RNA, 13 nt, Human
ucagccucccaaa

SEQ ID NO: 2260541 - RNA, 18 nt, Human
ucagccuaggggucaggg

SEQ ID NO: 2260542 - RNA, 23 nt, Human
ucagccuagccgaccucagccuu

SEQ ID NO: 2260543 - RNA, 14 nt, Human
ucagccuccagccu

SEQ ID NO: 2260544 - RNA, 15 nt, Human
ucagccuccagccuc

SEQ ID NO: 2260545 - RNA, 16 nt, Human
ucagccuccagccucu

SEQ ID NO: 2260546 - RNA, 17 nt, Human
ucagccuccagccucug

SEQ ID NO: 2260547 - RNA, 17 nt, Human
ucagcauaccuuuauug

SEQ ID NO: 2260548 - RNA, 13 nt, Human
ucagcauauuugu

SEQ ID NO: 2260549 - RNA, 22 nt, Human
ucagcauauuuguauaguugcu

SEQ ID NO: 2260550 - RNA, 23 nt, Human
ucagcauauuuguauaguugcuu

SEQ ID NO: 2260551 - RNA, 15 nt, Human
ucagcauccuggcac

SEQ ID NO: 2260552 - RNA, 16 nt, Human
ucagcauccuggcacc

SEQ ID NO: 2260553 - RNA, 17 nt, Human
ucagcauccuggcaccc

SEQ ID NO: 2260554 - RNA, 18 nt, Human
ucagcauccuggcacccg

SEQ ID NO: 2260555 - RNA, 13 nt, Human
ucagaucagugcu

SEQ ID NO: 2260556 - RNA, 17 nt, Human
ucagaucacuacugcag

SEQ ID NO: 2260557 - RNA, 18 nt, Human
ucagaucacuacugcagu

SEQ ID NO: 2260558 - RNA, 23 nt, Human
ucagaucaguguaccauuugccu

SEQ ID NO: 2260559 - RNA, 13 nt, Human
ucagaucauggca

SEQ ID NO: 2260560 - RNA, 16 nt, Human
ucagaucauggcaucc

SEQ ID NO: 2260561 - RNA, 23 nt, Human
ucagauauuuuuucagaaauaug

SEQ ID NO: 2260562 - RNA, 22 nt, Human
ucagauauuuuuucagaaauau

SEQ ID NO: 2260563 - RNA, 15 nt, Human
ucagaucacuacugc

SEQ ID NO: 2260564 - RNA, 16 nt, Human
ucagaucacuacugca

SEQ ID NO: 2260565 - RNA, 21 nt, Human
ucagauauuuuuucagaaaua

SEQ ID NO: 2260566 - RNA, 21 nt, Human
ucagaucauuucaaaacucau

SEQ ID NO: 2260567 - RNA, 20 nt, Human
ucagaucauuaucagccugu

SEQ ID NO: 2260568 - RNA, 16 nt, Human
ucagauccagggacag

SEQ ID NO: 2260569 - RNA, 15 nt, Human
ucagauccagggaca

SEQ ID NO: 2260570 - RNA, 14 nt, Human
ucagauccagggac

SEQ ID NO: 2260571 - RNA, 16 nt, Human
ucagauccuuguuuca

SEQ ID NO: 2260572 - RNA, 17 nt, Human
ucagauccuuguuucaa

SEQ ID NO: 2260573 - RNA, 18 nt, Human
ucagauccuuguuucaaa

SEQ ID NO: 2260574 - RNA, 19 nt, Human
ucagauccuuguuucaaac

SEQ ID NO: 2260575 - RNA, 19 nt, Human
ucagcacaaggccaucugg

SEQ ID NO: 2260576 - RNA, 14 nt, Human
ucagcaccacccua

SEQ ID NO: 2260577 - RNA, 13 nt, Human
ucagcaccacccu

SEQ ID NO: 2260578 - RNA, 12 nt, Human
ucagcaccaccc

SEQ ID NO: 2260579 - RNA, 23 nt, Human
ucagcaccacccuagucccuucc

SEQ ID NO: 2260580 - RNA, 15 nt, Human
ucagcaccacccuag

SEQ ID NO: 2260581 - RNA, 21 nt, Human
ucagauauuuauauuuuuauu

SEQ ID NO: 2260582 - RNA, 13 nt, Human
ucagauauuuaua

SEQ ID NO: 2260583 - RNA, 13 nt, Human
uaucauucauucu

SEQ ID NO: 2260584 - RNA, 15 nt, Human
uaucauuaaaguucu

SEQ ID NO: 2260585 - RNA, 22 nt, Human
uaucauucaaguguaaaauauu

SEQ ID NO: 2260586 - RNA, 18 nt, Human
uaucauucauucuuagcu

SEQ ID NO: 2260587 - RNA, 14 nt, Human
uaucauuuaauaau

SEQ ID NO: 2260588 - RNA, 22 nt, Human
ucagauaacuguuauuuauaau

SEQ ID NO: 2260589 - RNA, 14 nt, Human
ucagauacaaugua

SEQ ID NO: 2260590 - RNA, 19 nt, Human
ucuucuuuugagcaacuuu

SEQ ID NO: 2260591 - RNA, 22 nt, Human
ucuucuuuuaaaccauuuucuu

SEQ ID NO: 2260592 - RNA, 21 nt, Human
ucuucuuuuaaaccauuuucu

SEQ ID NO: 2260593 - RNA, 23 nt, Human
ucuucuuuaggauugugaugguu

SEQ ID NO: 2260594 - RNA, 21 nt, Human
ucuucuuuuugaaaucagcau

SEQ ID NO: 2260595 - RNA, 18 nt, Human
ucuucuuuuggcuuccau

SEQ ID NO: 2260596 - RNA, 15 nt, Human
ucuucuuuuugcugu

SEQ ID NO: 2260597 - RNA, 15 nt, Human
ucuucuuuugugaag

SEQ ID NO: 2260598 - RNA, 22 nt, Human
ucuucuuuugagcaacuuucuu

SEQ ID NO: 2260599 - RNA, 16 nt, Human
ucuucuuuuggcuucc

SEQ ID NO: 2260600 - RNA, 19 nt, Human
ucuucggggaacuccugga

SEQ ID NO: 2260601 - RNA, 14 nt, Human
ucuucguacaguuc

SEQ ID NO: 2260602 - RNA, 15 nt, Human
ucuucguacaguucu

SEQ ID NO: 2260603 - RNA, 17 nt, Human
ucuucguacaguucuuc

SEQ ID NO: 2260604 - RNA, 16 nt, Human
ucuucuuggucucagu

SEQ ID NO: 2260605 - RNA, 13 nt, Human
ucuucgaggugga

SEQ ID NO: 2260606 - RNA, 14 nt, Human
ucuucggaaaccuu

SEQ ID NO: 2260607 - RNA, 18 nt, Human
ucuucgggaagagaggag

SEQ ID NO: 2260608 - RNA, 22 nt, Human
ucuucgggaagagaggaguuca

SEQ ID NO: 2260609 - RNA, 13 nt, Human
ucuucgggaagag

SEQ ID NO: 2260610 - RNA, 14 nt, Human
ucuucgggaagaga

SEQ ID NO: 2260611 - RNA, 16 nt, Human
ucuucgggaagagagg

SEQ ID NO: 2260612 - RNA, 15 nt, Human
ucuuccaaaggcaua

SEQ ID NO: 2260613 - RNA, 18 nt, Human
ucuuccuuggagggggga

SEQ ID NO: 2260614 - RNA, 14 nt, Human
ucuuccuuuuauca

SEQ ID NO: 2260615 - RNA, 23 nt, Human
ucuuccuugaagaacugcaggcc

SEQ ID NO: 2260616 - RNA, 13 nt, Human
ucuugaaaugaaa

SEQ ID NO: 2260617 - RNA, 12 nt, Human
ucuugaaaugaa

SEQ ID NO: 2260618 - RNA, 14 nt, Human
ucuugaaagcugug

SEQ ID NO: 2260619 - RNA, 17 nt, Human
ucuucuuuuugcuguug

SEQ ID NO: 2260620 - RNA, 20 nt, Human
ucuugaaauuaagaaggcaa

SEQ ID NO: 2260621 - RNA, 14 nt, Human
ucuugaaauuaaga

SEQ ID NO: 2260622 - RNA, 17 nt, Human
ucuugaacugagcuugg

SEQ ID NO: 2260623 - RNA, 22 nt, Human
ucuugaaauuaagaaggcaaaa

SEQ ID NO: 2260624 - RNA, 21 nt, Human
ucuugaaauauaggaacuuaa

SEQ ID NO: 2260625 - RNA, 20 nt, Human
ucuugaaauauaggaacuua

SEQ ID NO: 2260626 - RNA, 23 nt, Human
ucuugaaaugaaaguauaacuga

SEQ ID NO: 2260627 - RNA, 21 nt, Human
ucuugaaauuaagaaggcaaa

SEQ ID NO: 2260628 - RNA, 18 nt, Human
ucuugaacugagcuugga

SEQ ID NO: 2260629 - RNA, 13 nt, Human
ucuugaagacuuu

SEQ ID NO: 2260630 - RNA, 22 nt, Human
ucuugaagacuuuucuuucagc

SEQ ID NO: 2260631 - RNA, 21 nt, Human
ucuugccccccaccccagccu

SEQ ID NO: 2260632 - RNA, 13 nt, Human
ucuugcccuuccc

SEQ ID NO: 2260633 - RNA, 15 nt, Human
ucuugcccuucccug

SEQ ID NO: 2260634 - RNA, 16 nt, Human
ucuugcccuucccugu

SEQ ID NO: 2260635 - RNA, 12 nt, Human
ucuugcccccca

SEQ ID NO: 2260636 - RNA, 22 nt, Human
ucuugccccaacccccagcacc

SEQ ID NO: 2260637 - RNA, 14 nt, Human
ucuugcucugcuga

SEQ ID NO: 2260638 - RNA, 23 nt, Human
ucuugccaaccuguaauaaauau

SEQ ID NO: 2260639 - RNA, 18 nt, Human
ucuugccccaacccccag

SEQ ID NO: 2260640 - RNA, 20 nt, Human
ucuugccccaacccccagca

SEQ ID NO: 2260641 - RNA, 21 nt, Human
ucuugccccaacccccagcac

SEQ ID NO: 2260642 - RNA, 23 nt, Human
ucuugccccaacccccagcaccc

SEQ ID NO: 2260643 - RNA, 16 nt, Human
ucuugccacugccucu

SEQ ID NO: 2260644 - RNA, 17 nt, Human
ucuugccacugccucuu

SEQ ID NO: 2260645 - RNA, 23 nt, Human
ucuugcauggcaaggacugcagg

SEQ ID NO: 2260646 - RNA, 19 nt, Human
ucuugaaggaaaaugauac

SEQ ID NO: 2260647 - RNA, 20 nt, Human
ucuugccaaccuguaauaaa

SEQ ID NO: 2260648 - RNA, 22 nt, Human
ucuugccaaccuguaauaaaua

SEQ ID NO: 2260649 - RNA, 19 nt, Human
ucuugccaaauauaaauaa

SEQ ID NO: 2260650 - RNA, 13 nt, Human
ucuuguccuagcu

SEQ ID NO: 2260651 - RNA, 19 nt, Human
ucuuguauuaaacucuuca

SEQ ID NO: 2260652 - RNA, 15 nt, Human
ucuuguauuaagaau

SEQ ID NO: 2260653 - RNA, 14 nt, Human
ucuugucucaaugc

SEQ ID NO: 2260654 - RNA, 15 nt, Human
ucuugucucaaugcu

SEQ ID NO: 2260655 - RNA, 17 nt, Human
ucuugucucaaugcuca

SEQ ID NO: 2260656 - RNA, 16 nt, Human
ucuuguauuaaacucu

SEQ ID NO: 2260657 - RNA, 14 nt, Human
ucuuguauuaagaa

SEQ ID NO: 2260658 - RNA, 16 nt, Human
ucuuguaguagucuca

SEQ ID NO: 2260659 - RNA, 19 nt, Human
ucuuguacauguguagccu

SEQ ID NO: 2260660 - RNA, 24 nt, Human
ucuuguacauguguagccugugca

SEQ ID NO: 2260661 - RNA, 15 nt, Human
ucuugcucugcugac

SEQ ID NO: 2260662 - RNA, 23 nt, Human
ucuugcucugcugacagacacag

SEQ ID NO: 2260663 - RNA, 14 nt, Human
ucuuguacaugugu

SEQ ID NO: 2260664 - RNA, 17 nt, Human
ucuuguacauguguagc

SEQ ID NO: 2260665 - RNA, 23 nt, Human
ucuuguaauuuaaacaggcccag

SEQ ID NO: 2260666 - RNA, 18 nt, Human
ucuugcccuucccugucc

SEQ ID NO: 2260667 - RNA, 20 nt, Human
ucuugcccuucccugucccu

SEQ ID NO: 2260668 - RNA, 21 nt, Human
ucuugcccuucccugucccuc

SEQ ID NO: 2260669 - RNA, 13 nt, Human
ucuugcucuguaa

SEQ ID NO: 2260670 - RNA, 14 nt, Human
ucuugcucuguaau

SEQ ID NO: 2260671 - RNA, 17 nt, Human
ucuugcucuguaaucuc

SEQ ID NO: 2260672 - RNA, 14 nt, Human
ucuugcucuuucua

SEQ ID NO: 2260673 - RNA, 24 nt, Human
ucuucauuucauuguaugaugugu

SEQ ID NO: 2260674 - RNA, 14 nt, Human
ucuuccaaagcaca

SEQ ID NO: 2260675 - RNA, 16 nt, Human
ucuucauuucauugua

SEQ ID NO: 2260676 - RNA, 17 nt, Human
ucuucauuucauuguau

SEQ ID NO: 2260677 - RNA, 21 nt, Human
ucuucauuucauuguaugaug

SEQ ID NO: 2260678 - RNA, 22 nt, Human
ucuucauuucauuguaugaugu

SEQ ID NO: 2260679 - RNA, 22 nt, Human
ucuucauuaccucagugagaag

SEQ ID NO: 2260680 - RNA, 22 nt, Human
ucuucauuaagcccucuuccau

SEQ ID NO: 2260681 - RNA, 14 nt, Human
ucuucauuucauug

SEQ ID NO: 2260682 - RNA, 15 nt, Human
ucuucauuucauugu

SEQ ID NO: 2260683 - RNA, 19 nt, Human
ucuucaguuuuaucuuuaa

SEQ ID NO: 2260684 - RNA, 18 nt, Human
ucuucaguuuuaucuuua

SEQ ID NO: 2260685 - RNA, 12 nt, Human
ucuucaguuuua

SEQ ID NO: 2260686 - RNA, 20 nt, Human
ucuucauaacaauuuuagga

SEQ ID NO: 2260687 - RNA, 21 nt, Human
ucuucauuaagcccucuucca

SEQ ID NO: 2260688 - RNA, 16 nt, Human
ucuucauguuucagga

SEQ ID NO: 2260689 - RNA, 19 nt, Human
ucuucagauacaaacugca

SEQ ID NO: 2260690 - RNA, 22 nt, Human
ucuucaguuaagccuuuggaaa

SEQ ID NO: 2260691 - RNA, 20 nt, Human
ucuucaguuaagccuuugga

SEQ ID NO: 2260692 - RNA, 19 nt, Human
ucuucaguuaagccuuugg

SEQ ID NO: 2260693 - RNA, 15 nt, Human
ucuucagaucucuaa

SEQ ID NO: 2260694 - RNA, 15 nt, Human
ucuucagaggcccuc

SEQ ID NO: 2260695 - RNA, 14 nt, Human
ucuucagaggcccu

SEQ ID NO: 2260696 - RNA, 13 nt, Human
ucuuaucaagcag

SEQ ID NO: 2260697 - RNA, 16 nt, Human
ucuuaucaagcagcca

SEQ ID NO: 2260698 - RNA, 23 nt, Human
ucuuaucaccacaguaaguuccu

SEQ ID NO: 2260699 - RNA, 22 nt, Human
ucuuauccaacaucaacaucuu

SEQ ID NO: 2260700 - RNA, 14 nt, Human
ucuuagugccugag

SEQ ID NO: 2260701 - RNA, 14 nt, Human
ucuuaguagauuuu

SEQ ID NO: 2260702 - RNA, 16 nt, Human
ucuuagcuccccucca

SEQ ID NO: 2260703 - RNA, 13 nt, Human
ucuuagcuccccu

SEQ ID NO: 2260704 - RNA, 14 nt, Human
ucuuagcuccccuc

SEQ ID NO: 2260705 - RNA, 18 nt, Human
ucuuagugccugagagua

SEQ ID NO: 2260706 - RNA, 18 nt, Human
ucuuauauaugugaacau

SEQ ID NO: 2260707 - RNA, 15 nt, Human
ucuuauauaugugaa

SEQ ID NO: 2260708 - RNA, 14 nt, Human
ucuucagaucucua

SEQ ID NO: 2260709 - RNA, 15 nt, Human
ucuuaucuucugcaa

SEQ ID NO: 2260710 - RNA, 16 nt, Human
ucuucagagcaggggu

SEQ ID NO: 2260711 - RNA, 12 nt, Human
ucuucagagcug

SEQ ID NO: 2260712 - RNA, 13 nt, Human
ucuucagagcuga

SEQ ID NO: 2260713 - RNA, 21 nt, Human
ucuucagagacuccugcaggc

SEQ ID NO: 2260714 - RNA, 12 nt, Human
ucuuaucucagu

SEQ ID NO: 2260715 - RNA, 20 nt, Human
ucuuaucauggucucaguca

SEQ ID NO: 2260716 - RNA, 14 nt, Human
ucuuaucucaguca

SEQ ID NO: 2260717 - RNA, 20 nt, Human
ucuuaucucagucaugcaua

SEQ ID NO: 2260718 - RNA, 22 nt, Human
ucuuaucucagucaugcauaaa

SEQ ID NO: 2260719 - RNA, 11 nt, Human
ucugugugugu

SEQ ID NO: 2260720 - RNA, 14 nt, Human
ucuuagauguauau

SEQ ID NO: 2260721 - RNA, 13 nt, Human
ucugugugugugu

SEQ ID NO: 2260722 - RNA, 18 nt, Human
ucugugugcaccuuacca

SEQ ID NO: 2260723 - RNA, 19 nt, Human
ucugugugcaccuuaccaa

SEQ ID NO: 2260724 - RNA, 16 nt, Human
ucuuagcauccugccu

SEQ ID NO: 2260725 - RNA, 16 nt, Human
ucuuagcagcuuccag

SEQ ID NO: 2260726 - RNA, 22 nt, Human
ucugugugcaccuuaccaacuu

SEQ ID NO: 2260727 - RNA, 15 nt, Human
ucuuagauguauaua

SEQ ID NO: 2260728 - RNA, 22 nt, Human
ucugugugcaagugugugcaca

SEQ ID NO: 2260729 - RNA, 20 nt, Human
ucugugugaugaacuuucuc

SEQ ID NO: 2260730 - RNA, 18 nt, Human
ucugugugaugaacuuuc

SEQ ID NO: 2260731 - RNA, 21 nt, Human
ucugugugcacaaauauuuau

SEQ ID NO: 2260732 - RNA, 14 nt, Human
ucugugugcacaaa

SEQ ID NO: 2260733 - RNA, 13 nt, Human
ucugugugaaaau

SEQ ID NO: 2260734 - RNA, 17 nt, Human
ucugugucagguggggc

SEQ ID NO: 2260735 - RNA, 20 nt, Human
ucugugucagguggggcagc

SEQ ID NO: 2260736 - RNA, 22 nt, Human
ucuuaggguuaugauuaaguaa

SEQ ID NO: 2260737 - RNA, 23 nt, Human
ucuuagguuggcaaaaaggcagg

SEQ ID NO: 2260738 - RNA, 20 nt, Human
ucuuagguuggcaaaaaggc

SEQ ID NO: 2260739 - RNA, 14 nt, Human
ucuuauaauuuaaa

SEQ ID NO: 2260740 - RNA, 13 nt, Human
ucuuauaauuuaa

SEQ ID NO: 2260741 - RNA, 23 nt, Human
ucuuguggauguuuuaauuccau

SEQ ID NO: 2260742 - RNA, 21 nt, Human
ucuugugugguuuggcccuuc

SEQ ID NO: 2260743 - RNA, 22 nt, Human
ucuugugcuggauggagcccag

SEQ ID NO: 2260744 - RNA, 23 nt, Human
ucuugugcuggauggagcccagg

SEQ ID NO: 2260745 - RNA, 19 nt, Human
ucuuguggauguuuuaauu

SEQ ID NO: 2260746 - RNA, 21 nt, Human
ucuugugcuuuuccuauuugu

SEQ ID NO: 2260747 - RNA, 23 nt, Human
ucuuuccaaaguacacuguuuca

SEQ ID NO: 2260748 - RNA, 13 nt, Human
ucuuguguguuua

SEQ ID NO: 2260749 - RNA, 21 nt, Human
ucuugucucaaugcucauaac

SEQ ID NO: 2260750 - RNA, 13 nt, Human
ucuugugaggaaa

SEQ ID NO: 2260751 - RNA, 23 nt, Human
ucuugugaggaaagucauuggcu

SEQ ID NO: 2260752 - RNA, 18 nt, Human
ucuugucucaaugcucau

SEQ ID NO: 2260753 - RNA, 20 nt, Human
ucuugucucaaugcucauaa

SEQ ID NO: 2260754 - RNA, 12 nt, Human
ucuuucccuccc

SEQ ID NO: 2260755 - RNA, 17 nt, Human
ucuuuccacagaagcuc

SEQ ID NO: 2260756 - RNA, 23 nt, Human
ucuuucccucccuuccucuuucc

SEQ ID NO: 2260757 - RNA, 13 nt, Human
ucuuucccucccu

SEQ ID NO: 2260758 - RNA, 16 nt, Human
ucuuugaaugacaaag

SEQ ID NO: 2260759 - RNA, 14 nt, Human
ucuuugaaugcuuu

SEQ ID NO: 2260760 - RNA, 15 nt, Human
ucuuugaaugacaaa

SEQ ID NO: 2260761 - RNA, 18 nt, Human
ucuuucccauggggaggg

SEQ ID NO: 2260762 - RNA, 14 nt, Human
ucuuugcagacagg

SEQ ID NO: 2260763 - RNA, 17 nt, Human
ucuuugcagacaggcaa

SEQ ID NO: 2260764 - RNA, 21 nt, Human
ucuuugccacccucaugcugu

SEQ ID NO: 2260765 - RNA, 22 nt, Human
ucuuugccacccucaugcugug

SEQ ID NO: 2260766 - RNA, 22 nt, Human
ucuuugagauagaagaacugca

SEQ ID NO: 2260767 - RNA, 18 nt, Human
ucuuugagauagaagaac

SEQ ID NO: 2260768 - RNA, 17 nt, Human
ucuuugagauagaagaa

SEQ ID NO: 2260769 - RNA, 23 nt, Human
ucuuugaccucaaccugugauga

SEQ ID NO: 2260770 - RNA, 13 nt, Human
ucuuugcagacag

SEQ ID NO: 2260771 - RNA, 16 nt, Human
ucuuugaauuuucugu

SEQ ID NO: 2260772 - RNA, 17 nt, Human
ucuuugaauuuucugug

SEQ ID NO: 2260773 - RNA, 23 nt, Human
ucuuugagugaagcugggagaac

SEQ ID NO: 2260774 - RNA, 13 nt, Human
ucuuugcuugccu

SEQ ID NO: 2260775 - RNA, 11 nt, Human
ucuuugcuuug

SEQ ID NO: 2260776 - RNA, 22 nt, Human
ucuuuggacagaagcagcucuu

SEQ ID NO: 2260777 - RNA, 19 nt, Human
ucuuugcuucacuucuccc

SEQ ID NO: 2260778 - RNA, 15 nt, Human
ucuuugcuugccucu

SEQ ID NO: 2260779 - RNA, 13 nt, Human
ucuuuggacccug

SEQ ID NO: 2260780 - RNA, 21 nt, Human
ucuuugccuugggcugcuccu

SEQ ID NO: 2260781 - RNA, 20 nt, Human
ucuuugccuugggcugcucc

SEQ ID NO: 2260782 - RNA, 14 nt, Human
ucuuugccuugggc

SEQ ID NO: 2260783 - RNA, 17 nt, Human
ucuuugccuguucaguu

SEQ ID NO: 2260784 - RNA, 23 nt, Human
ucuuugccuguucaguuacagaa

SEQ ID NO: 2260785 - RNA, 12 nt, Human
ucuuugccuggu

SEQ ID NO: 2260786 - RNA, 12 nt, Human
ucuuugccuguu

SEQ ID NO: 2260787 - RNA, 15 nt, Human
ucuuugccuguucag

SEQ ID NO: 2260788 - RNA, 16 nt, Human
ucuuugccuguucagu

SEQ ID NO: 2260789 - RNA, 16 nt, Human
ucuuuggacccugagg

SEQ ID NO: 2260790 - RNA, 18 nt, Human
ucuuuucaucugggaaag

SEQ ID NO: 2260791 - RNA, 20 nt, Human
ucuuuucagaucauggcauc

SEQ ID NO: 2260792 - RNA, 17 nt, Human
ucuuuucacauucuuau

SEQ ID NO: 2260793 - RNA, 18 nt, Human
ucuuuucacauucuuaua

SEQ ID NO: 2260794 - RNA, 19 nt, Human
ucuuuucacauucuuauaa

SEQ ID NO: 2260795 - RNA, 22 nt, Human
ucuuuucacauucuuauaaaua

SEQ ID NO: 2260796 - RNA, 14 nt, Human
ucuuuggacccuga

SEQ ID NO: 2260797 - RNA, 15 nt, Human
ucuuuggacccugag

SEQ ID NO: 2260798 - RNA, 22 nt, Human
ucuuuucaucugggaaagacau

SEQ ID NO: 2260799 - RNA, 19 nt, Human
ucuuuucaucugggaaaga

SEQ ID NO: 2260800 - RNA, 19 nt, Human
ucuuuucccacuguuuaag

SEQ ID NO: 2260801 - RNA, 22 nt, Human
ucuuuucgccguggcugcggca

SEQ ID NO: 2260802 - RNA, 12 nt, Human
ucuuuucuaccc

SEQ ID NO: 2260803 - RNA, 17 nt, Human
ucuuuucuacccuagcc

SEQ ID NO: 2260804 - RNA, 18 nt, Human
ucuuuucuacccuagcca

SEQ ID NO: 2260805 - RNA, 19 nt, Human
ucuuuucuacccuagccau

SEQ ID NO: 2260806 - RNA, 14 nt, Human
ucuuuucuauuuuc

SEQ ID NO: 2260807 - RNA, 18 nt, Human
ucuuuucuauuuucccuc

SEQ ID NO: 2260808 - RNA, 10 nt, Human
ucuuuuguau

SEQ ID NO: 2260809 - RNA, 11 nt, Human
ucuuuuguaug

SEQ ID NO: 2260810 - RNA, 15 nt, Human
ucuuuuguauguaaa

SEQ ID NO: 2260811 - RNA, 17 nt, Human
ucuuuuguauguaaaug

SEQ ID NO: 2260812 - RNA, 20 nt, Human
ucuuuuguauguaaaugugc

SEQ ID NO: 2260813 - RNA, 22 nt, Human
ucuuuuguauguaaaugugcau

SEQ ID NO: 2260814 - RNA, 21 nt, Human
ucuuuuuaagcuuauuuaauu

SEQ ID NO: 2260815 - RNA, 14 nt, Human
ucuuuuuaagcuua

SEQ ID NO: 2260816 - RNA, 15 nt, Human
ucuuuuuaauaaaaa

SEQ ID NO: 2260817 - RNA, 21 nt, Human
ugaaaacacauuuuucuuagg

SEQ ID NO: 2260818 - RNA, 23 nt, Human
ucuuuuuaaaguguuucuguuau

SEQ ID NO: 2260819 - RNA, 20 nt, Human
ucuuuuguucgcauggucac

SEQ ID NO: 2260820 - RNA, 18 nt, Human
ugaaaacagaaaacgguu

SEQ ID NO: 2260821 - RNA, 14 nt, Human
ugaaaacauguaau

SEQ ID NO: 2260822 - RNA, 23 nt, Human
ugaaaacaugguagaauuggaga

SEQ ID NO: 2260823 - RNA, 19 nt, Human
ugaaaacaugguagaauug

SEQ ID NO: 2260824 - RNA, 13 nt, Human
ugaaaacaucugg

SEQ ID NO: 2260825 - RNA, 17 nt, Human
ugaaaacaucuggaagg

SEQ ID NO: 2260826 - RNA, 22 nt, Human
ugaaaacacuguucucugcccu

SEQ ID NO: 2260827 - RNA, 23 nt, Human
ugaaaacacuguucucugcccuc

SEQ ID NO: 2260828 - RNA, 17 nt, Human
ugaaaacacuguucucu

SEQ ID NO: 2260829 - RNA, 18 nt, Human
ugaaaacacugugcacau

SEQ ID NO: 2260830 - RNA, 16 nt, Human
ugaaaacacugugcac

SEQ ID NO: 2260831 - RNA, 20 nt, Human
ugaaaacacuguucucugcc

SEQ ID NO: 2260832 - RNA, 21 nt, Human
ugaaaacacuguucucugccc

SEQ ID NO: 2260833 - RNA, 14 nt, Human
ugaaaauucagugg

SEQ ID NO: 2260834 - RNA, 18 nt, Human
ugaaaauuauuuuaaaca

SEQ ID NO: 2260835 - RNA, 19 nt, Human
ugaaaauuauuuuaaacaa

SEQ ID NO: 2260836 - RNA, 21 nt, Human
ugaaaauuauuuuaaacaaaa

SEQ ID NO: 2260837 - RNA, 17 nt, Human
ugaaaauucaaaaagug

SEQ ID NO: 2260838 - RNA, 23 nt, Human
ugaaaauucaaaaaguguuuauu

SEQ ID NO: 2260839 - RNA, 18 nt, Human
ugaaaauucaaaaagugu

SEQ ID NO: 2260840 - RNA, 19 nt, Human
ugaaaauucaaaaaguguu

SEQ ID NO: 2260841 - RNA, 12 nt, Human
ugaaaauuuuga

SEQ ID NO: 2260842 - RNA, 17 nt, Human
ugaaaauuguauguuaa

SEQ ID NO: 2260843 - RNA, 18 nt, Human
ugaaacaccuucucugga

SEQ ID NO: 2260844 - RNA, 19 nt, Human
ugaaacaccuucucuggag

SEQ ID NO: 2260845 - RNA, 15 nt, Human
ugaaacacuuugcau

SEQ ID NO: 2260846 - RNA, 23 nt, Human
ugaaacacucaguuguucaauaa

SEQ ID NO: 2260847 - RNA, 22 nt, Human
ugaaaagaaaaaugagccuggc

SEQ ID NO: 2260848 - RNA, 20 nt, Human
ugaaaagaaaaaugagccug

SEQ ID NO: 2260849 - RNA, 15 nt, Human
ugaaaauuauuugaa

SEQ ID NO: 2260850 - RNA, 20 nt, Human
ugaaaauuaggauuucauga

SEQ ID NO: 2260851 - RNA, 16 nt, Human
ugaaaauuauuugaaa

SEQ ID NO: 2260852 - RNA, 15 nt, Human
ugaaaauuauuuuaa

SEQ ID NO: 2260853 - RNA, 16 nt, Human
ugaaaauuauuuuaaa

SEQ ID NO: 2260854 - RNA, 15 nt, Human
ugaaaagaaaaauga

SEQ ID NO: 2260855 - RNA, 18 nt, Human
ugaaaacguuuuauugug

SEQ ID NO: 2260856 - RNA, 17 nt, Human
ugaaaacguuuuauugu

SEQ ID NO: 2260857 - RNA, 16 nt, Human
ugaaaacguuuuauug

SEQ ID NO: 2260858 - RNA, 16 nt, Human
ugaaaacccagagagg

SEQ ID NO: 2260859 - RNA, 19 nt, Human
ugaaaagaaaaaugagccu

SEQ ID NO: 2260860 - RNA, 15 nt, Human
ugaaaacccagagag

SEQ ID NO: 2260861 - RNA, 14 nt, Human
ugaaaacccagaga

SEQ ID NO: 2260862 - RNA, 23 nt, Human
ugaaaacccagagaggaaucaga

SEQ ID NO: 2260863 - RNA, 20 nt, Human
ugaaaacggagcugaacaau

SEQ ID NO: 2260864 - RNA, 18 nt, Human
ugaaaaccacauuggaga

SEQ ID NO: 2260865 - RNA, 20 nt, Human
ucuggaccuuguuguuguua

SEQ ID NO: 2260866 - RNA, 14 nt, Human
ucuggacggcaggc

SEQ ID NO: 2260867 - RNA, 15 nt, Human
ucuggacggcaggcu

SEQ ID NO: 2260868 - RNA, 17 nt, Human
ucuggacggcaggcuca

SEQ ID NO: 2260869 - RNA, 19 nt, Human
ucuggacggcaggcucacu

SEQ ID NO: 2260870 - RNA, 23 nt, Human
ucuggaccccaucugugaauaag

SEQ ID NO: 2260871 - RNA, 23 nt, Human
ucuggacaagccaacuuguaaau

SEQ ID NO: 2260872 - RNA, 20 nt, Human
ucuggacagccccacccugg

SEQ ID NO: 2260873 - RNA, 21 nt, Human
ucuggaccccaucugugaaua

SEQ ID NO: 2260874 - RNA, 15 nt, Human
ucuggacuccucugu

SEQ ID NO: 2260875 - RNA, 23 nt, Human
ucuggacggcaggcucacugcca

SEQ ID NO: 2260876 - RNA, 16 nt, Human
ucuggacuccucuguc

SEQ ID NO: 2260877 - RNA, 18 nt, Human
ucuggacuccucugucca

SEQ ID NO: 2260878 - RNA, 22 nt, Human
ucuggacuccucuguccaggca

SEQ ID NO: 2260879 - RNA, 21 nt, Human
ucuggacggcaggcucacugc

SEQ ID NO: 2260880 - RNA, 22 nt, Human
ucuggacggcaggcucacugcc

SEQ ID NO: 2260881 - RNA, 21 nt, Human
ucuggacugaagccugcagga

SEQ ID NO: 2260882 - RNA, 19 nt, Human
ucuggacugccccagaaaa

SEQ ID NO: 2260883 - RNA, 19 nt, Human
ucuggacugaagccugcag

SEQ ID NO: 2260884 - RNA, 17 nt, Human
ucuggacugaagccugc

SEQ ID NO: 2260885 - RNA, 13 nt, Human
ucuggacugaagc

SEQ ID NO: 2260886 - RNA, 15 nt, Human
ucuggacuggcuaga

SEQ ID NO: 2260887 - RNA, 14 nt, Human
ucuggacuggcuag

SEQ ID NO: 2260888 - RNA, 20 nt, Human
ucuggacugaagccugcagg

SEQ ID NO: 2260889 - RNA, 19 nt, Human
ucuggacuuggcaacagaa

SEQ ID NO: 2260890 - RNA, 11 nt, Human
ucuggagaagc

SEQ ID NO: 2260891 - RNA, 16 nt, Human
ucuggagaagcaguga

SEQ ID NO: 2260892 - RNA, 21 nt, Human
ucuggagagcuagaaccugga

SEQ ID NO: 2260893 - RNA, 22 nt, Human
ucuggagagcuagaaccuggag

SEQ ID NO: 2260894 - RNA, 23 nt, Human
ucuggagagcuagaaccuggagg

SEQ ID NO: 2260895 - RNA, 22 nt, Human
ucuggagaagcagugagccgca

SEQ ID NO: 2260896 - RNA, 15 nt, Human
ucuggagaagcagug

SEQ ID NO: 2260897 - RNA, 18 nt, Human
ucugcugcccuccauccc

SEQ ID NO: 2260898 - RNA, 21 nt, Human
ucugcugccgccccacccaga

SEQ ID NO: 2260899 - RNA, 13 nt, Human
ucugcuggaguuu

SEQ ID NO: 2260900 - RNA, 18 nt, Human
ucugcugcugucccuccc

SEQ ID NO: 2260901 - RNA, 17 nt, Human
ucugcugcuggcugguu

SEQ ID NO: 2260902 - RNA, 14 nt, Human
ucugcugcuggcug

SEQ ID NO: 2260903 - RNA, 15 nt, Human
ucugcugcuggcugg

SEQ ID NO: 2260904 - RNA, 12 nt, Human
ucuggacaagcc

SEQ ID NO: 2260905 - RNA, 21 nt, Human
ucuggacaagccaacuuguaa

SEQ ID NO: 2260906 - RNA, 19 nt, Human
ucuggacagccccacccug

SEQ ID NO: 2260907 - RNA, 18 nt, Human
ucuggacagccccacccu

SEQ ID NO: 2260908 - RNA, 14 nt, Human
ucuggaauuugaaa

SEQ ID NO: 2260909 - RNA, 19 nt, Human
ucugcuggaguuucaugua

SEQ ID NO: 2260910 - RNA, 22 nt, Human
ucugcugccgccccacccagau

SEQ ID NO: 2260911 - RNA, 23 nt, Human
ucugcuggaguuucauguacaag

SEQ ID NO: 2260912 - RNA, 15 nt, Human
ucuggaauguaauca

SEQ ID NO: 2260913 - RNA, 16 nt, Human
ucuggaauguaaucaa

SEQ ID NO: 2260914 - RNA, 18 nt, Human
ucuggaauguaaucaaug

SEQ ID NO: 2260915 - RNA, 22 nt, Human
ucuggaauguaaucaauguuuc

SEQ ID NO: 2260916 - RNA, 15 nt, Human
ucugcugcccuccau

SEQ ID NO: 2260917 - RNA, 14 nt, Human
ucugcugcccucca

SEQ ID NO: 2260918 - RNA, 13 nt, Human
ucugcugcccucc

SEQ ID NO: 2260919 - RNA, 17 nt, Human
ucugcugaauuuucaca

SEQ ID NO: 2260920 - RNA, 20 nt, Human
ucugcucuuucucugccagu

SEQ ID NO: 2260921 - RNA, 14 nt, Human
ucugcugaauuuuc

SEQ ID NO: 2260922 - RNA, 16 nt, Human
ucugcugaauuuucac

SEQ ID NO: 2260923 - RNA, 11 nt, Human
ucugcugcugg

SEQ ID NO: 2260924 - RNA, 13 nt, Human
ucugcugcuggcu

SEQ ID NO: 2260925 - RNA, 13 nt, Human
ucugcugaaggaa

SEQ ID NO: 2260926 - RNA, 18 nt, Human
ucugcucuuucucugcca

SEQ ID NO: 2260927 - RNA, 19 nt, Human
ucugcucuuucucugccag

SEQ ID NO: 2260928 - RNA, 14 nt, Human
ucugcucuuucucu

SEQ ID NO: 2260929 - RNA, 15 nt, Human
ucugcucuuucucug

SEQ ID NO: 2260930 - RNA, 16 nt, Human
ucugcucuuucucugc

SEQ ID NO: 2260931 - RNA, 17 nt, Human
ucugcucuuucucugcc

SEQ ID NO: 2260932 - RNA, 19 nt, Human
ucugcucugaggcuuccag

SEQ ID NO: 2260933 - RNA, 20 nt, Human
ucugcucugaggcuuccaga

SEQ ID NO: 2260934 - RNA, 12 nt, Human
ucugcucugccc

SEQ ID NO: 2260935 - RNA, 13 nt, Human
ucugcucugcccu

SEQ ID NO: 2260936 - RNA, 14 nt, Human
ucugcucugcccuu

SEQ ID NO: 2260937 - RNA, 21 nt, Human
ucugcucugcgugucaccugu

SEQ ID NO: 2260938 - RNA, 16 nt, Human
ucugcucugcguguca

SEQ ID NO: 2260939 - RNA, 18 nt, Human
ucugcucggccgucuuca

SEQ ID NO: 2260940 - RNA, 15 nt, Human
ucugcucggccgucu

SEQ ID NO: 2260941 - RNA, 14 nt, Human
ucugcucggccguc

SEQ ID NO: 2260942 - RNA, 16 nt, Human
ucugcucgccuuagca

SEQ ID NO: 2260943 - RNA, 22 nt, Human
ucugccugccagcugcacugau

SEQ ID NO: 2260944 - RNA, 22 nt, Human
ucugcuccuggagccuuugaau

SEQ ID NO: 2260945 - RNA, 12 nt, Human
ucugcucuccuu

SEQ ID NO: 2260946 - RNA, 13 nt, Human
ucugcucuccuuc

SEQ ID NO: 2260947 - RNA, 16 nt, Human
ucugcucgggcccagg

SEQ ID NO: 2260948 - RNA, 17 nt, Human
ucugcucgggcccaggc

SEQ ID NO: 2260949 - RNA, 18 nt, Human
ucugcucgggcccaggcc

SEQ ID NO: 2260950 - RNA, 22 nt, Human
ucugcucgggcccaggccaucu

SEQ ID NO: 2260951 - RNA, 14 nt, Human
ucugcucuccuucc

SEQ ID NO: 2260952 - RNA, 15 nt, Human
ucugcucuccuuccu

SEQ ID NO: 2260953 - RNA, 19 nt, Human
ucugcucuccuuccuggag

SEQ ID NO: 2260954 - RNA, 20 nt, Human
ucugcucuccuuccuggagc

SEQ ID NO: 2260955 - RNA, 17 nt, Human
ucugccugcccaggccc

SEQ ID NO: 2260956 - RNA, 21 nt, Human
ucugccugccagcugcacuga

SEQ ID NO: 2260957 - RNA, 18 nt, Human
ucugccugccagcugcac

SEQ ID NO: 2260958 - RNA, 18 nt, Human
ucugccugcccaggcccc

SEQ ID NO: 2260959 - RNA, 20 nt, Human
ucugccugcccaggccccug

SEQ ID NO: 2260960 - RNA, 22 nt, Human
ucugucgccuuagcauguuugc

SEQ ID NO: 2260961 - RNA, 23 nt, Human
ucugucgccuuagcauguuugcu

SEQ ID NO: 2260962 - RNA, 17 nt, Human
ucugucgccuuagcaug

SEQ ID NO: 2260963 - RNA, 18 nt, Human
ucugucgccuuagcaugu

SEQ ID NO: 2260964 - RNA, 19 nt, Human
ucugucgccuuagcauguu

SEQ ID NO: 2260965 - RNA, 16 nt, Human
ucugucgccuuagcau

SEQ ID NO: 2260966 - RNA, 12 nt, Human
ucuguccugcug

SEQ ID NO: 2260967 - RNA, 21 nt, Human
ucugucucaaaaaauaaaaau

SEQ ID NO: 2260968 - RNA, 13 nt, Human
ucugucuaggaau

SEQ ID NO: 2260969 - RNA, 23 nt, Human
ucugugucacuggcugccuccac

SEQ ID NO: 2260970 - RNA, 17 nt, Human
ucugugucacuggcugc

SEQ ID NO: 2260971 - RNA, 22 nt, Human
ucugugucacuggcugccucca

SEQ ID NO: 2260972 - RNA, 15 nt, Human
ucuguguacaaagaa

SEQ ID NO: 2260973 - RNA, 14 nt, Human
ucugugucacuggc

SEQ ID NO: 2260974 - RNA, 15 nt, Human
ucugugucacuggcu

SEQ ID NO: 2260975 - RNA, 14 nt, Human
ucugucuccuuaac

SEQ ID NO: 2260976 - RNA, 17 nt, Human
ucugucucauccaucau

SEQ ID NO: 2260977 - RNA, 19 nt, Human
ucugucuccuuaacacuga

SEQ ID NO: 2260978 - RNA, 16 nt, Human
ucuguguacaaagaaa

SEQ ID NO: 2260979 - RNA, 15 nt, Human
ucugucucauaugau

SEQ ID NO: 2260980 - RNA, 13 nt, Human
ucugucucaucca

SEQ ID NO: 2260981 - RNA, 21 nt, Human
ucugucucauccaucaucaug

SEQ ID NO: 2260982 - RNA, 14 nt, Human
ucugucucagucca

SEQ ID NO: 2260983 - RNA, 12 nt, Human
ucuguccuggga

SEQ ID NO: 2260984 - RNA, 17 nt, Human
ucugucgcccagucugg

SEQ ID NO: 2260985 - RNA, 23 nt, Human
ucuguccucagccuugccagaga

SEQ ID NO: 2260986 - RNA, 23 nt, Human
ucuguacaaugaacccccaugau

SEQ ID NO: 2260987 - RNA, 10 nt, Human
ucuguccuga

SEQ ID NO: 2260988 - RNA, 21 nt, Human
ucuguccucagccuugccaga

SEQ ID NO: 2260989 - RNA, 19 nt, Human
ucuguccucagccuugcca

SEQ ID NO: 2260990 - RNA, 15 nt, Human
ucuguccucagccuu

SEQ ID NO: 2260991 - RNA, 14 nt, Human
ucuguccucagccu

SEQ ID NO: 2260992 - RNA, 13 nt, Human
ucuguccucagcc

SEQ ID NO: 2260993 - RNA, 17 nt, Human
ucuguacacguguccug

SEQ ID NO: 2260994 - RNA, 15 nt, Human
ucuguacagagccca

SEQ ID NO: 2260995 - RNA, 13 nt, Human
ucuguacacgugu

SEQ ID NO: 2260996 - RNA, 13 nt, Human
ucuguacaaugaa

SEQ ID NO: 2260997 - RNA, 14 nt, Human
ucuguacagagccc

SEQ ID NO: 2260998 - RNA, 17 nt, Human
ucuguaauuguguguga

SEQ ID NO: 2260999 - RNA, 23 nt, Human
ucuggcuuccagaaaaccccagc

SEQ ID NO: 2261000 - RNA, 24 nt, Human
ucuggcuuccagguaucuccagga

SEQ ID NO: 2261001 - RNA, 13 nt, Human
ucuggcuuccagg

SEQ ID NO: 2261002 - RNA, 15 nt, Human
ucuggcuuccaggua

SEQ ID NO: 2261003 - RNA, 22 nt, Human
ucuggcuuccagguaucuccag

SEQ ID NO: 2261004 - RNA, 21 nt, Human
ucuggcuggcuaacuggaagc

SEQ ID NO: 2261005 - RNA, 22 nt, Human
ucuggcugguuuggaaugcuuc

SEQ ID NO: 2261006 - RNA, 15 nt, Human
ucuggcugcagagca

SEQ ID NO: 2261007 - RNA, 14 nt, Human
ucuggcugcagagc

SEQ ID NO: 2261008 - RNA, 21 nt, Human
ucuggcugccccaaccugcug

SEQ ID NO: 2261009 - RNA, 22 nt, Human
ucuggcugccccaaccugcuga

SEQ ID NO: 2261010 - RNA, 22 nt, Human
ucuggagagguuauaggucacu

SEQ ID NO: 2261011 - RNA, 20 nt, Human
ucuggagagguuauagguca

SEQ ID NO: 2261012 - RNA, 16 nt, Human
ucuggagccaagucca

SEQ ID NO: 2261013 - RNA, 12 nt, Human
ucuggagcccac

SEQ ID NO: 2261014 - RNA, 16 nt, Human
ucuggagcccacugua

SEQ ID NO: 2261015 - RNA, 22 nt, Human
ucuggagcccacuguacuugcu

SEQ ID NO: 2261016 - RNA, 22 nt, Human
ucuguaacucuaaaagauccuu

SEQ ID NO: 2261017 - RNA, 22 nt, Human
ucuguaaacuguguauuccaag

SEQ ID NO: 2261018 - RNA, 19 nt, Human
ucuguaaacuguguauucc

SEQ ID NO: 2261019 - RNA, 22 nt, Human
ucuguaaaaucuuucuuucuua

SEQ ID NO: 2261020 - RNA, 23 nt, Human
ucuguaaaaucuuucuuucuuag

SEQ ID NO: 2261021 - RNA, 12 nt, Human
ucuguaaacugu

SEQ ID NO: 2261022 - RNA, 15 nt, Human
ucuguaaacucaaaa

SEQ ID NO: 2261023 - RNA, 18 nt, Human
ucuguaaacucaaaacuu

SEQ ID NO: 2261024 - RNA, 16 nt, Human
ucuguaaacuguguau

SEQ ID NO: 2261025 - RNA, 15 nt, Human
ucuguaaacugugua

SEQ ID NO: 2261026 - RNA, 14 nt, Human
ucuguaaacugugu

SEQ ID NO: 2261027 - RNA, 13 nt, Human
ucuguaaacugug

SEQ ID NO: 2261028 - RNA, 18 nt, Human
ucuggugacaccagccuu

SEQ ID NO: 2261029 - RNA, 17 nt, Human
ucuggugacaccagccu

SEQ ID NO: 2261030 - RNA, 16 nt, Human
ucuggugacaccagcc

SEQ ID NO: 2261031 - RNA, 14 nt, Human
ucuggucugggugc

SEQ ID NO: 2261032 - RNA, 16 nt, Human
ucuggugaccuuccaa

SEQ ID NO: 2261033 - RNA, 17 nt, Human
ucuggugaagcucacuu

SEQ ID NO: 2261034 - RNA, 19 nt, Human
ucuggucucuaggcugggg

SEQ ID NO: 2261035 - RNA, 21 nt, Human
ucuggucucuaggcuggggaa

SEQ ID NO: 2261036 - RNA, 16 nt, Human
ucuggucucuaggcug

SEQ ID NO: 2261037 - RNA, 17 nt, Human
ucuggucucuaggcugg

SEQ ID NO: 2261038 - RNA, 18 nt, Human
ucuggucucuaggcuggg

SEQ ID NO: 2261039 - RNA, 16 nt, Human
ucuggugacuuuccuc

SEQ ID NO: 2261040 - RNA, 23 nt, Human
ucuggugaccuuccaagagccug

SEQ ID NO: 2261041 - RNA, 18 nt, Human
ucuggugaccuuccaaga

SEQ ID NO: 2261042 - RNA, 18 nt, Human
ucugcaccguacugugga

SEQ ID NO: 2261043 - RNA, 23 nt, Human
ucugcacccuggggccuggaccu

SEQ ID NO: 2261044 - RNA, 12 nt, Human
ucugcacuacuc

SEQ ID NO: 2261045 - RNA, 14 nt, Human
ucugcacuacuccu

SEQ ID NO: 2261046 - RNA, 18 nt, Human
ucugcacuacuccucugc

SEQ ID NO: 2261047 - RNA, 18 nt, Human
ucugcacuacugacaugu

SEQ ID NO: 2261048 - RNA, 20 nt, Human
ucugcacuacugacaugugg

SEQ ID NO: 2261049 - RNA, 19 nt, Human
ucugcacuacuccucugca

SEQ ID NO: 2261050 - RNA, 20 nt, Human
ucugcacuacuccucugcag

SEQ ID NO: 2261051 - RNA, 21 nt, Human
ucugcacuacuccucugcagu

SEQ ID NO: 2261052 - RNA, 23 nt, Human
ucugcacuacuccucugcagugc

SEQ ID NO: 2261053 - RNA, 13 nt, Human
ucugcacuccccu

SEQ ID NO: 2261054 - RNA, 16 nt, Human
ucugcaguaaaucuuu

SEQ ID NO: 2261055 - RNA, 21 nt, Human
ucugcacuacugacauguggg

SEQ ID NO: 2261056 - RNA, 20 nt, Human
ucugcaagcacaucugcauu

SEQ ID NO: 2261057 - RNA, 21 nt, Human
ucugcaagauucugaaacauu

SEQ ID NO: 2261058 - RNA, 14 nt, Human
ucugcaagccugcg

SEQ ID NO: 2261059 - RNA, 17 nt, Human
ucugcaaggucuuuggu

SEQ ID NO: 2261060 - RNA, 15 nt, Human
ucugcaagccugcgu

SEQ ID NO: 2261061 - RNA, 23 nt, Human
ucugcaagggcagaacacuaacc

SEQ ID NO: 2261062 - RNA, 12 nt, Human
ucugcaagucag

SEQ ID NO: 2261063 - RNA, 13 nt, Human
ucugcaagucaga

SEQ ID NO: 2261064 - RNA, 14 nt, Human
ucugcaagucagag

SEQ ID NO: 2261065 - RNA, 15 nt, Human
ucugcaagucagagg

SEQ ID NO: 2261066 - RNA, 16 nt, Human
ucugcaagucagagga

SEQ ID NO: 2261067 - RNA, 17 nt, Human
ucugcaagucagaggau

SEQ ID NO: 2261068 - RNA, 17 nt, Human
ucugcaaucuucucaga

SEQ ID NO: 2261069 - RNA, 14 nt, Human
ucugcaaucuucuc

SEQ ID NO: 2261070 - RNA, 23 nt, Human
ucugcaagucagaggauggccag

SEQ ID NO: 2261071 - RNA, 16 nt, Human
ucugcaaugggcacug

SEQ ID NO: 2261072 - RNA, 19 nt, Human
ucugcaaugggcacuggga

SEQ ID NO: 2261073 - RNA, 21 nt, Human
ucugcaaugggcacugggaug

SEQ ID NO: 2261074 - RNA, 24 nt, Human
ucugcacccuggggccuggaccug

SEQ ID NO: 2261075 - RNA, 20 nt, Human
ucugcaaaaauauuuauaaa

SEQ ID NO: 2261076 - RNA, 19 nt, Human
ucugcaaaaauauuuauaa

SEQ ID NO: 2261077 - RNA, 14 nt, Human
ucugcaaaaauauu

SEQ ID NO: 2261078 - RNA, 20 nt, Human
ucugauuugucccuaugcau

SEQ ID NO: 2261079 - RNA, 13 nt, Human
ucugauuucagga

SEQ ID NO: 2261080 - RNA, 18 nt, Human
ucugcaaagaaugagaag

SEQ ID NO: 2261081 - RNA, 22 nt, Human
ucugcaaaaugaggaauguaua

SEQ ID NO: 2261082 - RNA, 24 nt, Human
ucugcaaacaccaacauguuggga

SEQ ID NO: 2261083 - RNA, 20 nt, Human
ucugcaaaaugaggaaugua

SEQ ID NO: 2261084 - RNA, 21 nt, Human
ucugcaaaaugaggaauguau

SEQ ID NO: 2261085 - RNA, 23 nt, Human
ucugcaaaaugaggaauguauau

SEQ ID NO: 2261086 - RNA, 22 nt, Human
ucugaggaauccagacccggcu

SEQ ID NO: 2261087 - RNA, 18 nt, Human
ucugagcccucaaaguga

SEQ ID NO: 2261088 - RNA, 16 nt, Human
ucugauugugauguga

SEQ ID NO: 2261089 - RNA, 18 nt, Human
ucugaggaauccagaccc

SEQ ID NO: 2261090 - RNA, 21 nt, Human
ucugaggaauccagacccggc

SEQ ID NO: 2261091 - RNA, 16 nt, Human
ucugagccccugggac

SEQ ID NO: 2261092 - RNA, 15 nt, Human
ucugagccccuggga

SEQ ID NO: 2261093 - RNA, 22 nt, Human
ucugagccaguucaguaccugg

SEQ ID NO: 2261094 - RNA, 12 nt, Human
ucugagccaguu

SEQ ID NO: 2261095 - RNA, 13 nt, Human
ucugagcccgggc

SEQ ID NO: 2261096 - RNA, 15 nt, Human
ucugagcccgggcug

SEQ ID NO: 2261097 - RNA, 16 nt, Human
ucugagcccgggcugc

SEQ ID NO: 2261098 - RNA, 17 nt, Human
ucugagcccgggcugcc

SEQ ID NO: 2261099 - RNA, 18 nt, Human
ucugagcccgggcugccu

SEQ ID NO: 2261100 - RNA, 19 nt, Human
ucugagcccgggcugccug

SEQ ID NO: 2261101 - RNA, 20 nt, Human
ucugagcccgggcugccugg

SEQ ID NO: 2261102 - RNA, 21 nt, Human
ucugagcccgggcugccuggg

SEQ ID NO: 2261103 - RNA, 22 nt, Human
ucugagcuauuucaucuauuuu

SEQ ID NO: 2261104 - RNA, 20 nt, Human
ucugagcuauuucaucuauu

SEQ ID NO: 2261105 - RNA, 17 nt, Human
ucugagcuauuucaucu

SEQ ID NO: 2261106 - RNA, 14 nt, Human
ucugagcgccucca

SEQ ID NO: 2261107 - RNA, 17 nt, Human
ucugagcccucaaagug

SEQ ID NO: 2261108 - RNA, 24 nt, Human
ucugagcccgggcugccugggcug

SEQ ID NO: 2261109 - RNA, 21 nt, Human
ucugagcgccuccauccaagg

SEQ ID NO: 2261110 - RNA, 24 nt, Human
ucugagaucaaaacgguuuuacug

SEQ ID NO: 2261111 - RNA, 18 nt, Human
ucugagaggacuuuucuu

SEQ ID NO: 2261112 - RNA, 15 nt, Human
ucucauccccagggg

SEQ ID NO: 2261113 - RNA, 12 nt, Human
ucugagagcugu

SEQ ID NO: 2261114 - RNA, 22 nt, Human
ucucauccccaggggucccagc

SEQ ID NO: 2261115 - RNA, 14 nt, Human
ucucauccccaggg

SEQ ID NO: 2261116 - RNA, 10 nt, Human
ucucauccca

SEQ ID NO: 2261117 - RNA, 19 nt, Human
ucucaucccacgcacucca

SEQ ID NO: 2261118 - RNA, 14 nt, Human
ucucauccaucauc

SEQ ID NO: 2261119 - RNA, 13 nt, Human
ucucauccaucau

SEQ ID NO: 2261120 - RNA, 15 nt, Human
ucucaucaguguccu

SEQ ID NO: 2261121 - RNA, 21 nt, Human
ucucaucaguguccucuugcu

SEQ ID NO: 2261122 - RNA, 15 nt, Human
ucucaucacuccccu

SEQ ID NO: 2261123 - RNA, 16 nt, Human
ucucaucacuccccuc

SEQ ID NO: 2261124 - RNA, 19 nt, Human
ucucaucacuccccuccaa

SEQ ID NO: 2261125 - RNA, 17 nt, Human
ucucaucaacugaauga

SEQ ID NO: 2261126 - RNA, 22 nt, Human
ucucauaggaaaaguacauuua

SEQ ID NO: 2261127 - RNA, 23 nt, Human
ucucauaggaaaaguacauuuaa

SEQ ID NO: 2261128 - RNA, 15 nt, Human
ucucaucaacugaau

SEQ ID NO: 2261129 - RNA, 24 nt, Human
ucucauaggaaaaguacauuuaau

SEQ ID NO: 2261130 - RNA, 19 nt, Human
ucugacccaugcugcccug

SEQ ID NO: 2261131 - RNA, 20 nt, Human
ucugacccaugcugcccugu

SEQ ID NO: 2261132 - RNA, 22 nt, Human
ucugacccaugcugcccuguga

SEQ ID NO: 2261133 - RNA, 23 nt, Human
ucugacccaugcugcccugugag

SEQ ID NO: 2261134 - RNA, 20 nt, Human
ucugccucacauagcuuaca

SEQ ID NO: 2261135 - RNA, 21 nt, Human
ucugccucaaugugaaucaga

SEQ ID NO: 2261136 - RNA, 15 nt, Human
ucugccucccucacc

SEQ ID NO: 2261137 - RNA, 15 nt, Human
ucugccuccucuuca

SEQ ID NO: 2261138 - RNA, 12 nt, Human
ucugccucucaa

SEQ ID NO: 2261139 - RNA, 15 nt, Human
ucugccucugacaca

SEQ ID NO: 2261140 - RNA, 18 nt, Human
ucugccucugacacacag

SEQ ID NO: 2261141 - RNA, 16 nt, Human
ucugccucccaucacc

SEQ ID NO: 2261142 - RNA, 17 nt, Human
ucugccucccaucaccc

SEQ ID NO: 2261143 - RNA, 20 nt, Human
ucugccucccaucacccgcu

SEQ ID NO: 2261144 - RNA, 21 nt, Human
ucugccucccaucacccgcua

SEQ ID NO: 2261145 - RNA, 23 nt, Human
ucugccucugacacacagcucug

SEQ ID NO: 2261146 - RNA, 16 nt, Human
ucugccucugccugca

SEQ ID NO: 2261147 - RNA, 14 nt, Human
ucugccucugccug

SEQ ID NO: 2261148 - RNA, 14 nt, Human
ucugccucuucugg

SEQ ID NO: 2261149 - RNA, 15 nt, Human
ucugccucugaggga

SEQ ID NO: 2261150 - RNA, 21 nt, Human
ucugccucugacacacagcuc

SEQ ID NO: 2261151 - RNA, 22 nt, Human
ucugccucugacacacagcucu

SEQ ID NO: 2261152 - RNA, 19 nt, Human
ucugccugaagucacacag

SEQ ID NO: 2261153 - RNA, 19 nt, Human
ucugccucuucugggaggg

SEQ ID NO: 2261154 - RNA, 18 nt, Human
ucugccucuucugggagg

SEQ ID NO: 2261155 - RNA, 17 nt, Human
ucugccucuucugggag

SEQ ID NO: 2261156 - RNA, 15 nt, Human
ucugccucuucuggg

SEQ ID NO: 2261157 - RNA, 20 nt, Human
ucugccugaagucacacagu

SEQ ID NO: 2261158 - RNA, 12 nt, Human
ucugccugagcu

SEQ ID NO: 2261159 - RNA, 17 nt, Human
ucugccugccagcugca

SEQ ID NO: 2261160 - RNA, 16 nt, Human
ucugccugccagcugc

SEQ ID NO: 2261161 - RNA, 18 nt, Human
ucugcccacauuggaccc

SEQ ID NO: 2261162 - RNA, 19 nt, Human
ucugcccaaaaauaugguu

SEQ ID NO: 2261163 - RNA, 18 nt, Human
ucugcccaauuggaggaa

SEQ ID NO: 2261164 - RNA, 13 nt, Human
ucugcccacuccc

SEQ ID NO: 2261165 - RNA, 14 nt, Human
ucugcccacucccu

SEQ ID NO: 2261166 - RNA, 16 nt, Human
ucugccucaaugugaa

SEQ ID NO: 2261167 - RNA, 12 nt, Human
ucugccucccau

SEQ ID NO: 2261168 - RNA, 13 nt, Human
ucugccucccauc

SEQ ID NO: 2261169 - RNA, 15 nt, Human
ucugccucccaucac

SEQ ID NO: 2261170 - RNA, 22 nt, Human
ucugccauauucuguuggccag

SEQ ID NO: 2261171 - RNA, 23 nt, Human
ucugccauauucuguuggccagu

SEQ ID NO: 2261172 - RNA, 12 nt, Human
ucugcccacucc

SEQ ID NO: 2261173 - RNA, 21 nt, Human
ucugcauauguugaauacuuu

SEQ ID NO: 2261174 - RNA, 19 nt, Human
ucugcauauguugaauacu

SEQ ID NO: 2261175 - RNA, 12 nt, Human
ucugcccaaccc

SEQ ID NO: 2261176 - RNA, 18 nt, Human
ucugccauauucuguugg

SEQ ID NO: 2261177 - RNA, 18 nt, Human
ucugcauauguugaauac

SEQ ID NO: 2261178 - RNA, 16 nt, Human
ucugcauauguugaau

SEQ ID NO: 2261179 - RNA, 15 nt, Human
ucugcauauguugaa

SEQ ID NO: 2261180 - RNA, 15 nt, Human
ucugcagugccuugg

SEQ ID NO: 2261181 - RNA, 16 nt, Human
ucugcaguagucucug

SEQ ID NO: 2261182 - RNA, 18 nt, Human
ucugcaguagucucugug

SEQ ID NO: 2261183 - RNA, 19 nt, Human
ucugcaguagucucugugc

SEQ ID NO: 2261184 - RNA, 20 nt, Human
ucugcaguagucucugugcu

SEQ ID NO: 2261185 - RNA, 21 nt, Human
ucugcaguagucucugugcuu

SEQ ID NO: 2261186 - RNA, 13 nt, Human
ucugcagugccuu

SEQ ID NO: 2261187 - RNA, 20 nt, Human
ucugcagucacuucguggga

SEQ ID NO: 2261188 - RNA, 14 nt, Human
ucugcagugccuug

SEQ ID NO: 2261189 - RNA, 17 nt, Human
ugagcuccagaccccca

SEQ ID NO: 2261190 - RNA, 16 nt, Human
ugagcuccagaccccc

SEQ ID NO: 2261191 - RNA, 15 nt, Human
ugagcuccagacccc

SEQ ID NO: 2261192 - RNA, 14 nt, Human
ugagcuccagaccc

SEQ ID NO: 2261193 - RNA, 13 nt, Human
ugagcuccagacc

SEQ ID NO: 2261194 - RNA, 12 nt, Human
ugagcuccagac

SEQ ID NO: 2261195 - RNA, 22 nt, Human
ugagcucagacccccacucuca

SEQ ID NO: 2261196 - RNA, 20 nt, Human
ugagcucagacccccacucu

SEQ ID NO: 2261197 - RNA, 20 nt, Human
ugagcucagcccuggugggc

SEQ ID NO: 2261198 - RNA, 13 nt, Human
ugagcugagcagg

SEQ ID NO: 2261199 - RNA, 19 nt, Human
ugagcugagaucgugccgu

SEQ ID NO: 2261200 - RNA, 14 nt, Human
ugagcugagcaggg

SEQ ID NO: 2261201 - RNA, 14 nt, Human
ugagcugaggcagc

SEQ ID NO: 2261202 - RNA, 17 nt, Human
ugagcugagaucgugcc

SEQ ID NO: 2261203 - RNA, 17 nt, Human
ugagcugaaaugcugca

SEQ ID NO: 2261204 - RNA, 18 nt, Human
ugagcugaaaugcugcau

SEQ ID NO: 2261205 - RNA, 20 nt, Human
ugagcugaaaugcugcauuu

SEQ ID NO: 2261206 - RNA, 19 nt, Human
ugagcucaggaguuugaga

SEQ ID NO: 2261207 - RNA, 11 nt, Human
ugagcucagga

SEQ ID NO: 2261208 - RNA, 19 nt, Human
ugagcucagacccccacuc

SEQ ID NO: 2261209 - RNA, 18 nt, Human
ugagcucagacccccacu

SEQ ID NO: 2261210 - RNA, 17 nt, Human
ugagcucagacccccac

SEQ ID NO: 2261211 - RNA, 16 nt, Human
ugagcucagaccccca

SEQ ID NO: 2261212 - RNA, 12 nt, Human
ugagcucagccc

SEQ ID NO: 2261213 - RNA, 11 nt, Human
ugagcucagcc

SEQ ID NO: 2261214 - RNA, 23 nt, Human
ugagccgagaucacgccacugca

SEQ ID NO: 2261215 - RNA, 23 nt, Human
ugagccgcaucuucuccaucugg

SEQ ID NO: 2261216 - RNA, 21 nt, Human
ugagccgcaucuucuccaucu

SEQ ID NO: 2261217 - RNA, 20 nt, Human
ugagccgcaucuucuccauc

SEQ ID NO: 2261218 - RNA, 17 nt, Human
ugagccgcaucuucucc

SEQ ID NO: 2261219 - RNA, 16 nt, Human
ugagcuauugcuguuc

SEQ ID NO: 2261220 - RNA, 15 nt, Human
ugagcuauguauuaa

SEQ ID NO: 2261221 - RNA, 15 nt, Human
ugagcuauuucaucu

SEQ ID NO: 2261222 - RNA, 21 nt, Human
ugagccgcugugagccccugg

SEQ ID NO: 2261223 - RNA, 14 nt, Human
ugagcuauguauua

SEQ ID NO: 2261224 - RNA, 19 nt, Human
ugagcuauuuccauuccag

SEQ ID NO: 2261225 - RNA, 21 nt, Human
ugagcuauuuccauuccagaa

SEQ ID NO: 2261226 - RNA, 20 nt, Human
ugagcagggcucagcgggga

SEQ ID NO: 2261227 - RNA, 22 nt, Human
ugagcagggcucagcggggaca

SEQ ID NO: 2261228 - RNA, 23 nt, Human
ugagcagggcucagcggggacag

SEQ ID NO: 2261229 - RNA, 22 nt, Human
ugagccgagaucacgccacugc

SEQ ID NO: 2261230 - RNA, 16 nt, Human
ugagcugagcagggag

SEQ ID NO: 2261231 - RNA, 16 nt, Human
ugagcugccucugaga

SEQ ID NO: 2261232 - RNA, 11 nt, Human
ugagcugccuu

SEQ ID NO: 2261233 - RNA, 20 nt, Human
ugagcugccuguaacuugag

SEQ ID NO: 2261234 - RNA, 15 nt, Human
ugagcugccauccag

SEQ ID NO: 2261235 - RNA, 14 nt, Human
ugagcuguugccuc

SEQ ID NO: 2261236 - RNA, 15 nt, Human
ugagcuguugccuca

SEQ ID NO: 2261237 - RNA, 11 nt, Human
ugagcuguuuu

SEQ ID NO: 2261238 - RNA, 23 nt, Human
ugagcuuaagaauuuugagcagg

SEQ ID NO: 2261239 - RNA, 15 nt, Human
ugagcuuaucaugcu

SEQ ID NO: 2261240 - RNA, 16 nt, Human
ugagcuuagugaaauu

SEQ ID NO: 2261241 - RNA, 15 nt, Human
ugagcuucucuguga

SEQ ID NO: 2261242 - RNA, 19 nt, Human
ugagcuuggcagcugaacu

SEQ ID NO: 2261243 - RNA, 16 nt, Human
ugagcuucucugugaa

SEQ ID NO: 2261244 - RNA, 14 nt, Human
ugagcuuggccaga

SEQ ID NO: 2261245 - RNA, 13 nt, Human
ugagcuuggccag

SEQ ID NO: 2261246 - RNA, 20 nt, Human
ugagcuuggcagcugaacua

SEQ ID NO: 2261247 - RNA, 16 nt, Human
ugagcuuggccagaag

SEQ ID NO: 2261248 - RNA, 15 nt, Human
ugagcuuggccagaa

SEQ ID NO: 2261249 - RNA, 19 nt, Human
ugaggaggggcagguaaac

SEQ ID NO: 2261250 - RNA, 15 nt, Human
ugaggagucuugugu

SEQ ID NO: 2261251 - RNA, 16 nt, Human
ugaggagucuugugug

SEQ ID NO: 2261252 - RNA, 12 nt, Human
ugaggaugggaa

SEQ ID NO: 2261253 - RNA, 18 nt, Human
ugaggaugcagagucagc

SEQ ID NO: 2261254 - RNA, 16 nt, Human
ugaggaugagcuggaa

SEQ ID NO: 2261255 - RNA, 22 nt, Human
ugaggaugauuauuuucaaggc

SEQ ID NO: 2261256 - RNA, 20 nt, Human
ugaggaugggaaggagggag

SEQ ID NO: 2261257 - RNA, 16 nt, Human
ugaggaugggaaggag

SEQ ID NO: 2261258 - RNA, 17 nt, Human
ugaggaugucacucaga

SEQ ID NO: 2261259 - RNA, 15 nt, Human
ugaggaugagcugga

SEQ ID NO: 2261260 - RNA, 14 nt, Human
ugaggaugaggccg

SEQ ID NO: 2261261 - RNA, 16 nt, Human
ugaggagugugagaau

SEQ ID NO: 2261262 - RNA, 20 nt, Human
ugaggauauauuuucacuuu

SEQ ID NO: 2261263 - RNA, 16 nt, Human
ugaggauuucaagccu

SEQ ID NO: 2261264 - RNA, 16 nt, Human
ugaggauuuugaguau

SEQ ID NO: 2261265 - RNA, 20 nt, Human
ugaggcaaccacaggcagca

SEQ ID NO: 2261266 - RNA, 20 nt, Human
ugaggcaauaaaaaucauag

SEQ ID NO: 2261267 - RNA, 14 nt, Human
ugaggcaagagaau

SEQ ID NO: 2261268 - RNA, 13 nt, Human
ugaggauuucaag

SEQ ID NO: 2261269 - RNA, 12 nt, Human
ugagcugccuuc

SEQ ID NO: 2261270 - RNA, 13 nt, Human
ugaggaucagagu

SEQ ID NO: 2261271 - RNA, 17 nt, Human
ugaggaucagaguaauc

SEQ ID NO: 2261272 - RNA, 19 nt, Human
ugaggaucagaguaaucca

SEQ ID NO: 2261273 - RNA, 22 nt, Human
ugaggaugaaaaaauaacacug

SEQ ID NO: 2261274 - RNA, 18 nt, Human
ugaggucauagcagugcu

SEQ ID NO: 2261275 - RNA, 13 nt, Human
ugaggcuguagga

SEQ ID NO: 2261276 - RNA, 16 nt, Human
ugagguccagcccugg

SEQ ID NO: 2261277 - RNA, 20 nt, Human
ugagguccagcccuggcuga

SEQ ID NO: 2261278 - RNA, 21 nt, Human
ugagguccagcccuggcugaa

SEQ ID NO: 2261279 - RNA, 23 nt, Human
ugagguccagcccuggcugaagg

SEQ ID NO: 2261280 - RNA, 16 nt, Human
ugaggucaggaguucc

SEQ ID NO: 2261281 - RNA, 13 nt, Human
ugaggcuguccug

SEQ ID NO: 2261282 - RNA, 14 nt, Human
ugaggcuguccugu

SEQ ID NO: 2261283 - RNA, 16 nt, Human
ugaggugaaagggagc

SEQ ID NO: 2261284 - RNA, 15 nt, Human
ugaggugaaagggag

SEQ ID NO: 2261285 - RNA, 23 nt, Human
ugaggucuuuugacauguggaaa

SEQ ID NO: 2261286 - RNA, 22 nt, Human
ugaggucuuuugacauguggaa

SEQ ID NO: 2261287 - RNA, 21 nt, Human
ugaggucuuuugacaugugga

SEQ ID NO: 2261288 - RNA, 18 nt, Human
ugaggugaaagggagcua

SEQ ID NO: 2261289 - RNA, 17 nt, Human
ugaggugaaagggagcu

SEQ ID NO: 2261290 - RNA, 17 nt, Human
ugaggugcagagugccc

SEQ ID NO: 2261291 - RNA, 13 nt, Human
ugaggcugagacu

SEQ ID NO: 2261292 - RNA, 19 nt, Human
ugaggcucuuucugggcca

SEQ ID NO: 2261293 - RNA, 18 nt, Human
ugaggcugagacugcggg

SEQ ID NO: 2261294 - RNA, 10 nt, Human
ugaggcugua

SEQ ID NO: 2261295 - RNA, 12 nt, Human
ugaggcuguccu

SEQ ID NO: 2261296 - RNA, 21 nt, Human
ugaggcugggcucccuuccca

SEQ ID NO: 2261297 - RNA, 18 nt, Human
ugaggucagagccugcag

SEQ ID NO: 2261298 - RNA, 19 nt, Human
ugaggucagagccugcagu

SEQ ID NO: 2261299 - RNA, 21 nt, Human
ugaggugcagagugcccagaa

SEQ ID NO: 2261300 - RNA, 22 nt, Human
ugaggugcccagcuagcugcag

SEQ ID NO: 2261301 - RNA, 20 nt, Human
ugaggugcagagugcccaga

SEQ ID NO: 2261302 - RNA, 21 nt, Human
ugaggugcccagcuagcugca

SEQ ID NO: 2261303 - RNA, 14 nt, Human
ugaggugccugucc

SEQ ID NO: 2261304 - RNA, 15 nt, Human
ugaggugccuguccc

SEQ ID NO: 2261305 - RNA, 11 nt, Human
ugaggugggcc

SEQ ID NO: 2261306 - RNA, 13 nt, Human
ugaggugggccca

SEQ ID NO: 2261307 - RNA, 21 nt, Human
ugaggugggagguggaagaag

SEQ ID NO: 2261308 - RNA, 22 nt, Human
ugaggugggagguggaagaagg

SEQ ID NO: 2261309 - RNA, 14 nt, Human
ugaggugggcccag

SEQ ID NO: 2261310 - RNA, 15 nt, Human
ugaggugggcccagg

SEQ ID NO: 2261311 - RNA, 16 nt, Human
ugaggugggcccagga

SEQ ID NO: 2261312 - RNA, 20 nt, Human
ugaggugggcccaggaccag

SEQ ID NO: 2261313 - RNA, 16 nt, Human
ugaggugccuguccca

SEQ ID NO: 2261314 - RNA, 13 nt, Human
ugaggugggaggu

SEQ ID NO: 2261315 - RNA, 18 nt, Human
ugaggugggagguggaag

SEQ ID NO: 2261316 - RNA, 20 nt, Human
ugagguggucugaauguucu

SEQ ID NO: 2261317 - RNA, 19 nt, Human
ugagguggucugaauguuc

SEQ ID NO: 2261318 - RNA, 18 nt, Human
ugagguggucugaauguu

SEQ ID NO: 2261319 - RNA, 17 nt, Human
ugagguggucugaaugu

SEQ ID NO: 2261320 - RNA, 14 nt, Human
ugagguggucugaa

SEQ ID NO: 2261321 - RNA, 13 nt, Human
ugagguggucuga

SEQ ID NO: 2261322 - RNA, 21 nt, Human
ugagguggguuuucuucccau

SEQ ID NO: 2261323 - RNA, 21 nt, Human
ugagguggucugaauguucug

SEQ ID NO: 2261324 - RNA, 14 nt, Human
ugaggugugggggc

SEQ ID NO: 2261325 - RNA, 18 nt, Human
ugaggugugggggcugca

SEQ ID NO: 2261326 - RNA, 19 nt, Human
ugagucccaggcugagccu

SEQ ID NO: 2261327 - RNA, 22 nt, Human
ugagguggucugaauguucuga

SEQ ID NO: 2261328 - RNA, 18 nt, Human
ugaggugucuuaagccuu

SEQ ID NO: 2261329 - RNA, 21 nt, Human
ugagucccaggcugagccuca

SEQ ID NO: 2261330 - RNA, 20 nt, Human
ugagucccaggcugagccuc

SEQ ID NO: 2261331 - RNA, 19 nt, Human
ugagucccagugggaggcg

SEQ ID NO: 2261332 - RNA, 15 nt, Human
ugaggugugggggcu

SEQ ID NO: 2261333 - RNA, 13 nt, Human
ugagucccagugg

SEQ ID NO: 2261334 - RNA, 15 nt, Human
ugagucccaguggga

SEQ ID NO: 2261335 - RNA, 16 nt, Human
ugagucccagugggag

SEQ ID NO: 2261336 - RNA, 23 nt, Human
ugaggcagacagcagcucaggca

SEQ ID NO: 2261337 - RNA, 20 nt, Human
ugaggcagacagcagcucag

SEQ ID NO: 2261338 - RNA, 17 nt, Human
ugaggcagacagcagcu

SEQ ID NO: 2261339 - RNA, 16 nt, Human
ugaggcagacagcagc

SEQ ID NO: 2261340 - RNA, 15 nt, Human
ugaggcagacagcag

SEQ ID NO: 2261341 - RNA, 14 nt, Human
ugaggcagacagca

SEQ ID NO: 2261342 - RNA, 13 nt, Human
ugaggcagacagc

SEQ ID NO: 2261343 - RNA, 12 nt, Human
ugaggcagacag

SEQ ID NO: 2261344 - RNA, 21 nt, Human
ugaggcaaugucaggaacaga

SEQ ID NO: 2261345 - RNA, 20 nt, Human
ugaggcaaugucaggaacag

SEQ ID NO: 2261346 - RNA, 17 nt, Human
ugaggcaaugucaggaa

SEQ ID NO: 2261347 - RNA, 16 nt, Human
ugaggcaaugucagga

SEQ ID NO: 2261348 - RNA, 22 nt, Human
ugaggcacgaaugaucuuucuu

SEQ ID NO: 2261349 - RNA, 13 nt, Human
ugaggcagaagaa

SEQ ID NO: 2261350 - RNA, 15 nt, Human
ugaggcaggggcgga

SEQ ID NO: 2261351 - RNA, 21 nt, Human
ugaggccugcccucagggauc

SEQ ID NO: 2261352 - RNA, 11 nt, Human
ugaggccugga

SEQ ID NO: 2261353 - RNA, 12 nt, Human
ugaggccuggac

SEQ ID NO: 2261354 - RNA, 14 nt, Human
ugaggccuggacuu

SEQ ID NO: 2261355 - RNA, 17 nt, Human
ugaggccuggacuuucc

SEQ ID NO: 2261356 - RNA, 19 nt, Human
ugaggccuggacuuuccug

SEQ ID NO: 2261357 - RNA, 20 nt, Human
ugaggccuggacuuuccugc

SEQ ID NO: 2261358 - RNA, 23 nt, Human
ugaggccuggacuuuccugcaac

SEQ ID NO: 2261359 - RNA, 22 nt, Human
ugaggcagggaaguccccaggc

SEQ ID NO: 2261360 - RNA, 14 nt, Human
ugaggcagggaagu

SEQ ID NO: 2261361 - RNA, 13 nt, Human
ugaggcagggaag

SEQ ID NO: 2261362 - RNA, 13 nt, Human
ugaggcagguccc

SEQ ID NO: 2261363 - RNA, 15 nt, Human
ugaggcaggcuuugu

SEQ ID NO: 2261364 - RNA, 21 nt, Human
ugaggcagcagugugaggcca

SEQ ID NO: 2261365 - RNA, 24 nt, Human
ugaggcagacagcagcucaggcac

SEQ ID NO: 2261366 - RNA, 18 nt, Human
ugaggcagaagaauugaa

SEQ ID NO: 2261367 - RNA, 18 nt, Human
ugaggcucuuucugggcc

SEQ ID NO: 2261368 - RNA, 17 nt, Human
ugaggcucuuucugggc

SEQ ID NO: 2261369 - RNA, 16 nt, Human
ugaggcucuuucuggg

SEQ ID NO: 2261370 - RNA, 18 nt, Human
ugaggcucugcccuuggu

SEQ ID NO: 2261371 - RNA, 15 nt, Human
ugaggcugggcuccc

SEQ ID NO: 2261372 - RNA, 16 nt, Human
ugaggcugggcucccu

SEQ ID NO: 2261373 - RNA, 23 nt, Human
ugaggcggguggaucaccugagg

SEQ ID NO: 2261374 - RNA, 15 nt, Human
ugaggcucugcccuu

SEQ ID NO: 2261375 - RNA, 16 nt, Human
ugaggcucugcccuug

SEQ ID NO: 2261376 - RNA, 12 nt, Human
ugaggccugggc

SEQ ID NO: 2261377 - RNA, 13 nt, Human
ugaggccugggcc

SEQ ID NO: 2261378 - RNA, 14 nt, Human
ugaggccuggccag

SEQ ID NO: 2261379 - RNA, 15 nt, Human
ugaggccuggccagg

SEQ ID NO: 2261380 - RNA, 16 nt, Human
ugaggccuggccaggc

SEQ ID NO: 2261381 - RNA, 17 nt, Human
ugaggccuggccaggca

SEQ ID NO: 2261382 - RNA, 22 nt, Human
ugaggccugggccgcugccacg

SEQ ID NO: 2261383 - RNA, 13 nt, Human
ugaggccuugcuc

SEQ ID NO: 2261384 - RNA, 22 nt, Human
ugaggccuuaucauucauucuu

SEQ ID NO: 2261385 - RNA, 12 nt, Human
ugaggccuugcu

SEQ ID NO: 2261386 - RNA, 22 nt, Human
ugagaguuuuggaugcagugcu

SEQ ID NO: 2261387 - RNA, 22 nt, Human
ugagauaaugugauauuauaca

SEQ ID NO: 2261388 - RNA, 18 nt, Human
ugagaguuuugucuugaa

SEQ ID NO: 2261389 - RNA, 21 nt, Human
ugagauaccagcgaggaggcu

SEQ ID NO: 2261390 - RNA, 21 nt, Human
ugagaguuuugucuugaaugu

SEQ ID NO: 2261391 - RNA, 16 nt, Human
ugagauaauguuagag

SEQ ID NO: 2261392 - RNA, 16 nt, Human
ugagauagcauuguga

SEQ ID NO: 2261393 - RNA, 18 nt, Human
ugagauagcauugugaac

SEQ ID NO: 2261394 - RNA, 19 nt, Human
ugagauagcauugugaacu

SEQ ID NO: 2261395 - RNA, 19 nt, Human
ugagauaguagcauacauu

SEQ ID NO: 2261396 - RNA, 23 nt, Human
ugagauagcauugugaacugaca

SEQ ID NO: 2261397 - RNA, 23 nt, Human
ugagauaguagcauacauuuaua

SEQ ID NO: 2261398 - RNA, 21 nt, Human
ugagauagaagaacugcaaag

SEQ ID NO: 2261399 - RNA, 19 nt, Human
ugagauagaagaacugcaa

SEQ ID NO: 2261400 - RNA, 16 nt, Human
ugagauagaagaacug

SEQ ID NO: 2261401 - RNA, 15 nt, Human
ugagauagaagaacu

SEQ ID NO: 2261402 - RNA, 20 nt, Human
ugagauaccagcgaggaggc

SEQ ID NO: 2261403 - RNA, 22 nt, Human
ugagcagggagauccugguugg

SEQ ID NO: 2261404 - RNA, 17 nt, Human
ugagcagggauccuggu

SEQ ID NO: 2261405 - RNA, 20 nt, Human
ugagcaggauuuuaaucuuu

SEQ ID NO: 2261406 - RNA, 23 nt, Human
ugagcagacuggugagcagacug

SEQ ID NO: 2261407 - RNA, 21 nt, Human
ugagcagacuggugagcagac

SEQ ID NO: 2261408 - RNA, 12 nt, Human
ugagcagagucu

SEQ ID NO: 2261409 - RNA, 21 nt, Human
ugagcagagucuugcuaccuc

SEQ ID NO: 2261410 - RNA, 15 nt, Human
ugagcaggauuuuaa

SEQ ID NO: 2261411 - RNA, 22 nt, Human
ugagagggcaugcgcacaaggc

SEQ ID NO: 2261412 - RNA, 17 nt, Human
ugagagggcaugcgcac

SEQ ID NO: 2261413 - RNA, 21 nt, Human
ugagagggcaguguuuccuuu

SEQ ID NO: 2261414 - RNA, 18 nt, Human
ugagaggggaacagacug

SEQ ID NO: 2261415 - RNA, 14 nt, Human
ugagaggggaacag

SEQ ID NO: 2261416 - RNA, 19 nt, Human
ugagaccucagccaugagg

SEQ ID NO: 2261417 - RNA, 17 nt, Human
ugagaccucagccauga

SEQ ID NO: 2261418 - RNA, 20 nt, Human
ugagacgccaccauuccugg

SEQ ID NO: 2261419 - RNA, 21 nt, Human
ugagacgccaccauuccugga

SEQ ID NO: 2261420 - RNA, 23 nt, Human
ugagacggagucucgcucuguca

SEQ ID NO: 2261421 - RNA, 14 nt, Human
ugagaccaaccugg

SEQ ID NO: 2261422 - RNA, 16 nt, Human
ugagaccucagccaug

SEQ ID NO: 2261423 - RNA, 12 nt, Human
ugagaccugccc

SEQ ID NO: 2261424 - RNA, 22 nt, Human
ugagaccugccccuccucucug

SEQ ID NO: 2261425 - RNA, 15 nt, Human
ugagaccugccccuc

SEQ ID NO: 2261426 - RNA, 14 nt, Human
ugagaccugccccu

SEQ ID NO: 2261427 - RNA, 13 nt, Human
ugagaccugcccc

SEQ ID NO: 2261428 - RNA, 11 nt, Human
ugacuuugucu

SEQ ID NO: 2261429 - RNA, 20 nt, Human
ugacuuuuaaggcuaaaacu

SEQ ID NO: 2261430 - RNA, 13 nt, Human
ugacuuuuccaug

SEQ ID NO: 2261431 - RNA, 22 nt, Human
ugacuuuucuguccgagcuuug

SEQ ID NO: 2261432 - RNA, 12 nt, Human
ugacuuuuguau

SEQ ID NO: 2261433 - RNA, 14 nt, Human
ugacuuuuugcauu

SEQ ID NO: 2261434 - RNA, 22 nt, Human
ugacuuuuccauguaucuaccu

SEQ ID NO: 2261435 - RNA, 18 nt, Human
ugacuuuuccauguaucu

SEQ ID NO: 2261436 - RNA, 19 nt, Human
ugacuuuuccauguaucua

SEQ ID NO: 2261437 - RNA, 16 nt, Human
ugagaaaaagcuccug

SEQ ID NO: 2261438 - RNA, 17 nt, Human
ugagaaaaagcuccugu

SEQ ID NO: 2261439 - RNA, 18 nt, Human
ugagaaaaagcuccuguc

SEQ ID NO: 2261440 - RNA, 21 nt, Human
ugagaaaaauuuacauggcaa

SEQ ID NO: 2261441 - RNA, 22 nt, Human
ugacuuuuucuaagagcucccg

SEQ ID NO: 2261442 - RNA, 23 nt, Human
ugacuuuuugcauuuaaaacaga

SEQ ID NO: 2261443 - RNA, 17 nt, Human
ugacuuuuugcauuuaa

SEQ ID NO: 2261444 - RNA, 16 nt, Human
ugagaaaacuucuuuu

SEQ ID NO: 2261445 - RNA, 12 nt, Human
ugagaaaacaug

SEQ ID NO: 2261446 - RNA, 20 nt, Human
ugagaaacaacaauuucuac

SEQ ID NO: 2261447 - RNA, 19 nt, Human
ugagaaaagcuuugaaccc

SEQ ID NO: 2261448 - RNA, 23 nt, Human
ugagaaaccuuauuguaccucuc

SEQ ID NO: 2261449 - RNA, 17 nt, Human
ugagaaaacuucuuuua

SEQ ID NO: 2261450 - RNA, 15 nt, Human
ugagaaagacuauuc

SEQ ID NO: 2261451 - RNA, 15 nt, Human
ugagaaauaaaguuu

SEQ ID NO: 2261452 - RNA, 14 nt, Human
ugagaaagagcacu

SEQ ID NO: 2261453 - RNA, 13 nt, Human
ugagaaagagcac

SEQ ID NO: 2261454 - RNA, 21 nt, Human
ugagaaagagcacuuaagaga

SEQ ID NO: 2261455 - RNA, 23 nt, Human
ugagacaguuucuuagcuuuuua

SEQ ID NO: 2261456 - RNA, 20 nt, Human
ugagacaguuucuuagcuuu

SEQ ID NO: 2261457 - RNA, 21 nt, Human
ugagacaguuucuuagcuuuu

SEQ ID NO: 2261458 - RNA, 16 nt, Human
ugagacagugggaaau

SEQ ID NO: 2261459 - RNA, 17 nt, Human
ugagacagugggaaaua

SEQ ID NO: 2261460 - RNA, 18 nt, Human
ugagacagugggaaauau

SEQ ID NO: 2261461 - RNA, 14 nt, Human
ugagacaguuucuu

SEQ ID NO: 2261462 - RNA, 15 nt, Human
ugagacaguuucuua

SEQ ID NO: 2261463 - RNA, 16 nt, Human
ugagacaguuucuuag

SEQ ID NO: 2261464 - RNA, 18 nt, Human
ugagacaguuucuuagcu

SEQ ID NO: 2261465 - RNA, 19 nt, Human
ugagacaguuucuuagcuu

SEQ ID NO: 2261466 - RNA, 21 nt, Human
ugagaaauauggacacuuaau

SEQ ID NO: 2261467 - RNA, 13 nt, Human
ugagacaguggga

SEQ ID NO: 2261468 - RNA, 15 nt, Human
ugagacagugggaaa

SEQ ID NO: 2261469 - RNA, 17 nt, Human
ugagaaauauggacacu

SEQ ID NO: 2261470 - RNA, 15 nt, Human
ugagaaauauggaca

SEQ ID NO: 2261471 - RNA, 21 nt, Human
ugagaaagucuuauuuauuca

SEQ ID NO: 2261472 - RNA, 13 nt, Human
ugacuaauuguau

SEQ ID NO: 2261473 - RNA, 14 nt, Human
ugacuaauuguaua

SEQ ID NO: 2261474 - RNA, 15 nt, Human
ugacuaauuguauaa

SEQ ID NO: 2261475 - RNA, 17 nt, Human
ugacuaauuguauaaca

SEQ ID NO: 2261476 - RNA, 18 nt, Human
ugacuaauuguauaacag

SEQ ID NO: 2261477 - RNA, 19 nt, Human
ugacuaauuguauaacagg

SEQ ID NO: 2261478 - RNA, 20 nt, Human
ugacuaauuguauaacaggu

SEQ ID NO: 2261479 - RNA, 21 nt, Human
ugacuaauuguauaacagguu

SEQ ID NO: 2261480 - RNA, 22 nt, Human
ugacuaauuguauaacagguua

SEQ ID NO: 2261481 - RNA, 23 nt, Human
ugacuaauuguauaacagguuau

SEQ ID NO: 2261482 - RNA, 17 nt, Human
ugacuacagucaggaaa

SEQ ID NO: 2261483 - RNA, 16 nt, Human
ugacuacagucaggaa

SEQ ID NO: 2261484 - RNA, 13 nt, Human
ugacucuuaagaa

SEQ ID NO: 2261485 - RNA, 18 nt, Human
ugacuacagucaggaaag

SEQ ID NO: 2261486 - RNA, 16 nt, Human
ugacucuuaagaagac

SEQ ID NO: 2261487 - RNA, 14 nt, Human
ugacucuuaagaag

SEQ ID NO: 2261488 - RNA, 15 nt, Human
ugacucuuaagaaga

SEQ ID NO: 2261489 - RNA, 17 nt, Human
ugacuaaagagagaaug

SEQ ID NO: 2261490 - RNA, 16 nt, Human
ugacuaaagagagaau

SEQ ID NO: 2261491 - RNA, 22 nt, Human
ugacuaaaaauauuauaacuua

SEQ ID NO: 2261492 - RNA, 14 nt, Human
ugacuaaaaauauu

SEQ ID NO: 2261493 - RNA, 22 nt, Human
ugacuaaaaaacaaagaagaca

SEQ ID NO: 2261494 - RNA, 14 nt, Human
ugacuaaaauauuu

SEQ ID NO: 2261495 - RNA, 15 nt, Human
ugacuaaaaaacaaa

SEQ ID NO: 2261496 - RNA, 23 nt, Human
ugacgugccuuuugcaccccucc

SEQ ID NO: 2261497 - RNA, 19 nt, Human
ugaccaugcucaucugcug

SEQ ID NO: 2261498 - RNA, 14 nt, Human
ugaccauucuccac

SEQ ID NO: 2261499 - RNA, 13 nt, Human
ugaccauucucca

SEQ ID NO: 2261500 - RNA, 12 nt, Human
ugaccaugcuca

SEQ ID NO: 2261501 - RNA, 16 nt, Human
ugaccaugcucaucug

SEQ ID NO: 2261502 - RNA, 18 nt, Human
ugaccaugcucaucugcu

SEQ ID NO: 2261503 - RNA, 13 nt, Human
ugacuuucaggua

SEQ ID NO: 2261504 - RNA, 21 nt, Human
ugacuggguuucucuguauag

SEQ ID NO: 2261505 - RNA, 21 nt, Human
ugacugggcccugccucuguu

SEQ ID NO: 2261506 - RNA, 18 nt, Human
ugacugggcccugccucu

SEQ ID NO: 2261507 - RNA, 11 nt, Human
ugacuggauau

SEQ ID NO: 2261508 - RNA, 16 nt, Human
ugacugggcccugccu

SEQ ID NO: 2261509 - RNA, 16 nt, Human
ugacuuugcucuuucu

SEQ ID NO: 2261510 - RNA, 13 nt, Human
ugacuuucucagc

SEQ ID NO: 2261511 - RNA, 16 nt, Human
ugacuuuccucuuugg

SEQ ID NO: 2261512 - RNA, 16 nt, Human
ugacuuuggcugcaug

SEQ ID NO: 2261513 - RNA, 19 nt, Human
ugacucuuggcacagcaug

SEQ ID NO: 2261514 - RNA, 14 nt, Human
ugacucuuggcaca

SEQ ID NO: 2261515 - RNA, 20 nt, Human
ugacucuuguuuucaguuuc

SEQ ID NO: 2261516 - RNA, 21 nt, Human
ugacucuuucuauuguuucuu

SEQ ID NO: 2261517 - RNA, 15 nt, Human
ugacuggcacagucu

SEQ ID NO: 2261518 - RNA, 15 nt, Human
ugacugcugauucuc

SEQ ID NO: 2261519 - RNA, 23 nt, Human
ugacugcuccccagcccuggcuc

SEQ ID NO: 2261520 - RNA, 20 nt, Human
ugacugccccaacuccugga

SEQ ID NO: 2261521 - RNA, 17 nt, Human
ugacugcgaucuucaga

SEQ ID NO: 2261522 - RNA, 16 nt, Human
ugacugcgaucuucag

SEQ ID NO: 2261523 - RNA, 20 nt, Human
ugacugcuccccagcccugg

SEQ ID NO: 2261524 - RNA, 21 nt, Human
ugacugcuccccagcccuggc

SEQ ID NO: 2261525 - RNA, 22 nt, Human
ugacugcuccccagcccuggcu

SEQ ID NO: 2261526 - RNA, 19 nt, Human
ugacugccccaacuccugg

SEQ ID NO: 2261527 - RNA, 17 nt, Human
ugacugccccaacuccu

SEQ ID NO: 2261528 - RNA, 16 nt, Human
ugacugccccaacucc

SEQ ID NO: 2261529 - RNA, 15 nt, Human
ugacugccccaacuc

SEQ ID NO: 2261530 - RNA, 22 nt, Human
ugacucuuuuuagggccaggca

SEQ ID NO: 2261531 - RNA, 19 nt, Human
ugacugaagaugcagcuca

SEQ ID NO: 2261532 - RNA, 23 nt, Human
ugacucuuuuuagggccaggcag

SEQ ID NO: 2261533 - RNA, 19 nt, Human
ugacaacuggaauaguuuu

SEQ ID NO: 2261534 - RNA, 22 nt, Human
ugacaacuucccagugaauucu

SEQ ID NO: 2261535 - RNA, 23 nt, Human
ugacaaccaccgcuccccagccc

SEQ ID NO: 2261536 - RNA, 21 nt, Human
ugacaacguuucagcgacucc

SEQ ID NO: 2261537 - RNA, 17 nt, Human
ugacaaccacuggucug

SEQ ID NO: 2261538 - RNA, 21 nt, Human
ugacaaccaccgcuccccagc

SEQ ID NO: 2261539 - RNA, 20 nt, Human
ugacaaccaccgcuccccag

SEQ ID NO: 2261540 - RNA, 16 nt, Human
ugacaaccacuggucu

SEQ ID NO: 2261541 - RNA, 19 nt, Human
ugacaaccaugagaccacu

SEQ ID NO: 2261542 - RNA, 16 nt, Human
ugacaaggccccagag

SEQ ID NO: 2261543 - RNA, 15 nt, Human
ugacaaggccccaga

SEQ ID NO: 2261544 - RNA, 14 nt, Human
ugacaaggccccag

SEQ ID NO: 2261545 - RNA, 13 nt, Human
ugacaaggcccca

SEQ ID NO: 2261546 - RNA, 23 nt, Human
ugacaaggauugcuacuguccua

SEQ ID NO: 2261547 - RNA, 22 nt, Human
ugacaaggccccagagacucag

SEQ ID NO: 2261548 - RNA, 18 nt, Human
ugacaaggccccagagac

SEQ ID NO: 2261549 - RNA, 17 nt, Human
ugacaaggccccagaga

SEQ ID NO: 2261550 - RNA, 14 nt, Human
ugacaagucauuuu

SEQ ID NO: 2261551 - RNA, 20 nt, Human
ugacaagucauuuuaacuuu

SEQ ID NO: 2261552 - RNA, 12 nt, Human
ugacaauaaaac

SEQ ID NO: 2261553 - RNA, 13 nt, Human
ugacaauaaaaca

SEQ ID NO: 2261554 - RNA, 14 nt, Human
ugacaauaaaacau

SEQ ID NO: 2261555 - RNA, 16 nt, Human
ugacaauaaaacauua

SEQ ID NO: 2261556 - RNA, 14 nt, Human
ugacacacagcucu

SEQ ID NO: 2261557 - RNA, 16 nt, Human
ugacacaaguggaccu

SEQ ID NO: 2261558 - RNA, 17 nt, Human
ugacacaaaccugccug

SEQ ID NO: 2261559 - RNA, 18 nt, Human
ugacacaaaccugccugg

SEQ ID NO: 2261560 - RNA, 19 nt, Human
ugacacaaaccugccuggg

SEQ ID NO: 2261561 - RNA, 15 nt, Human
ugacacacagcucug

SEQ ID NO: 2261562 - RNA, 19 nt, Human
ugacacaaguggaccuuag

SEQ ID NO: 2261563 - RNA, 17 nt, Human
ugacacaaguggaccuu

SEQ ID NO: 2261564 - RNA, 14 nt, Human
ugacagacacaggc

SEQ ID NO: 2261565 - RNA, 16 nt, Human
ugacagacacaggccc

SEQ ID NO: 2261566 - RNA, 13 nt, Human
ugacagacacagg

SEQ ID NO: 2261567 - RNA, 17 nt, Human
ugaauugugaccaaguu

SEQ ID NO: 2261568 - RNA, 12 nt, Human
ugaauuuaaaua

SEQ ID NO: 2261569 - RNA, 14 nt, Human
ugaauuuaaauaua

SEQ ID NO: 2261570 - RNA, 14 nt, Human
ugacaaaguuacug

SEQ ID NO: 2261571 - RNA, 20 nt, Human
ugacaaagguaaaucagacu

SEQ ID NO: 2261572 - RNA, 23 nt, Human
ugacaaauguguaucggaugcuu

SEQ ID NO: 2261573 - RNA, 13 nt, Human
ugacaacacucau

SEQ ID NO: 2261574 - RNA, 16 nt, Human
ugacaaccaccgcucc

SEQ ID NO: 2261575 - RNA, 19 nt, Human
ugacaaccaccgcucccca

SEQ ID NO: 2261576 - RNA, 12 nt, Human
ugacaacaucug

SEQ ID NO: 2261577 - RNA, 22 nt, Human
ugacaacagaagcuucagaagu

SEQ ID NO: 2261578 - RNA, 13 nt, Human
ugacaacagaagc

SEQ ID NO: 2261579 - RNA, 14 nt, Human
ugacaacagaagcu

SEQ ID NO: 2261580 - RNA, 19 nt, Human
ugacaacagacuucugaaa

SEQ ID NO: 2261581 - RNA, 18 nt, Human
ugacaacagacuucugaa

SEQ ID NO: 2261582 - RNA, 15 nt, Human
ugacaacagacuucu

SEQ ID NO: 2261583 - RNA, 23 nt, Human
ugacaacacucauugaccugagg

SEQ ID NO: 2261584 - RNA, 16 nt, Human
ugaauuaaauuaggaa

SEQ ID NO: 2261585 - RNA, 15 nt, Human
ugaauuaaauuuaau

SEQ ID NO: 2261586 - RNA, 11 nt, Human
ugaauuaaauu

SEQ ID NO: 2261587 - RNA, 15 nt, Human
ugaauuaaaguaauu

SEQ ID NO: 2261588 - RNA, 17 nt, Human
ugaauuaaauaaacccu

SEQ ID NO: 2261589 - RNA, 14 nt, Human
ugaauuaaguuuuu

SEQ ID NO: 2261590 - RNA, 13 nt, Human
ugaauuacauuug

SEQ ID NO: 2261591 - RNA, 16 nt, Human
ugaauuaauaucccua

SEQ ID NO: 2261592 - RNA, 19 nt, Human
ugaauuaauaucccuacau

SEQ ID NO: 2261593 - RNA, 22 nt, Human
ugaauuaauaucccuacaugua

SEQ ID NO: 2261594 - RNA, 23 nt, Human
ugaauuaauaucccuacauguau

SEQ ID NO: 2261595 - RNA, 21 nt, Human
ugaauuaaugacagagccagu

SEQ ID NO: 2261596 - RNA, 20 nt, Human
ugaauuaaugacagagccag

SEQ ID NO: 2261597 - RNA, 23 nt, Human
ugaauuaaucaucuauaaagaag

SEQ ID NO: 2261598 - RNA, 15 nt, Human
ugaauuguccccagu

SEQ ID NO: 2261599 - RNA, 19 nt, Human
ugaauuguaacuguucuug

SEQ ID NO: 2261600 - RNA, 21 nt, Human
ugaauuguaaggaaugauuaa

SEQ ID NO: 2261601 - RNA, 13 nt, Human
ugaauuguaagga

SEQ ID NO: 2261602 - RNA, 14 nt, Human
ugaauuacauuugu

SEQ ID NO: 2261603 - RNA, 18 nt, Human
ugacaugcacucagcucu

SEQ ID NO: 2261604 - RNA, 22 nt, Human
ugacaugauuccuuccuguucu

SEQ ID NO: 2261605 - RNA, 18 nt, Human
ugacaugauuccuuccug

SEQ ID NO: 2261606 - RNA, 16 nt, Human
ugacaugauuccuucc

SEQ ID NO: 2261607 - RNA, 17 nt, Human
ugacaugcgggcugggc

SEQ ID NO: 2261608 - RNA, 18 nt, Human
ugacaugcgggcugggca

SEQ ID NO: 2261609 - RNA, 19 nt, Human
ugacaugauuccuuccugu

SEQ ID NO: 2261610 - RNA, 17 nt, Human
ugacaucuuaguauuug

SEQ ID NO: 2261611 - RNA, 12 nt, Human
ugacaugaaaaa

SEQ ID NO: 2261612 - RNA, 15 nt, Human
ugacaugauuccuuc

SEQ ID NO: 2261613 - RNA, 16 nt, Human
ugacaucuucaaagcu

SEQ ID NO: 2261614 - RNA, 16 nt, Human
ugacaucuguguuuca

SEQ ID NO: 2261615 - RNA, 14 nt, Human
ugacaucuggaauc

SEQ ID NO: 2261616 - RNA, 19 nt, Human
ugacaugcgggcugggcag

SEQ ID NO: 2261617 - RNA, 20 nt, Human
ugacaugcgggcugggcagc

SEQ ID NO: 2261618 - RNA, 21 nt, Human
ugacaugcgggcugggcagcu

SEQ ID NO: 2261619 - RNA, 22 nt, Human
ugacaugcgggcugggcagcug

SEQ ID NO: 2261620 - RNA, 15 nt, Human
ugacaugugaaaccu

SEQ ID NO: 2261621 - RNA, 16 nt, Human
ugacaugugaaaccuu

SEQ ID NO: 2261622 - RNA, 17 nt, Human
ugacaugugaaaccuuu

SEQ ID NO: 2261623 - RNA, 19 nt, Human
ugacaugugaaaccuuuuu

SEQ ID NO: 2261624 - RNA, 21 nt, Human
ugacaugugaaaccuuuuuua

SEQ ID NO: 2261625 - RNA, 16 nt, Human
ugacaugugacuccua

SEQ ID NO: 2261626 - RNA, 22 nt, Human
ugacauguggaaagugaauuug

SEQ ID NO: 2261627 - RNA, 21 nt, Human
ugacauguggaaagugaauuu

SEQ ID NO: 2261628 - RNA, 17 nt, Human
ugacauguggaaaguga

SEQ ID NO: 2261629 - RNA, 14 nt, Human
ugacauguggaaag

SEQ ID NO: 2261630 - RNA, 17 nt, Human
ugacauguggggccagg

SEQ ID NO: 2261631 - RNA, 18 nt, Human
ugacauguggggccaggu

SEQ ID NO: 2261632 - RNA, 19 nt, Human
ugacauguguuggcagccu

SEQ ID NO: 2261633 - RNA, 19 nt, Human
ugacauguggggccagguc

SEQ ID NO: 2261634 - RNA, 20 nt, Human
ugacauguggggccagguca

SEQ ID NO: 2261635 - RNA, 21 nt, Human
ugaccagcagaucccagcuca

SEQ ID NO: 2261636 - RNA, 20 nt, Human
ugaccagcagaucccagcuc

SEQ ID NO: 2261637 - RNA, 18 nt, Human
ugaccagcagaucccagc

SEQ ID NO: 2261638 - RNA, 17 nt, Human
ugaccagcagaucccag

SEQ ID NO: 2261639 - RNA, 18 nt, Human
ugaccagcacugucucag

SEQ ID NO: 2261640 - RNA, 19 nt, Human
ugacauguuauauauuuuu

SEQ ID NO: 2261641 - RNA, 18 nt, Human
ugacauguuauauauuuu

SEQ ID NO: 2261642 - RNA, 22 nt, Human
ugaccagcagaucccagcucac

SEQ ID NO: 2261643 - RNA, 11 nt, Human
ugaccagcagc

SEQ ID NO: 2261644 - RNA, 15 nt, Human
ugaccagcagcgccu

SEQ ID NO: 2261645 - RNA, 14 nt, Human
ugaccagcagcgcc

SEQ ID NO: 2261646 - RNA, 21 nt, Human
ugaccagccuccaugcugccu

SEQ ID NO: 2261647 - RNA, 23 nt, Human
ugaccauccacucuacccuccca

SEQ ID NO: 2261648 - RNA, 22 nt, Human
ugaccauccacucuacccuccc

SEQ ID NO: 2261649 - RNA, 19 nt, Human
ugaccauccacucuacccu

SEQ ID NO: 2261650 - RNA, 22 nt, Human
ugaccagccuccaugcugccuc

SEQ ID NO: 2261651 - RNA, 13 nt, Human
ugacauguuuuau

SEQ ID NO: 2261652 - RNA, 16 nt, Human
ugaccacucugucuug

SEQ ID NO: 2261653 - RNA, 18 nt, Human
ugaccacugcagaagaca

SEQ ID NO: 2261654 - RNA, 17 nt, Human
ugaccacugcagaagac

SEQ ID NO: 2261655 - RNA, 16 nt, Human
ugaccacugcagaaga

SEQ ID NO: 2261656 - RNA, 21 nt, Human
ugacagagcaagacucugucu

SEQ ID NO: 2261657 - RNA, 12 nt, Human
ugacagagccag

SEQ ID NO: 2261658 - RNA, 22 nt, Human
ugacagagcaagugagacccug

SEQ ID NO: 2261659 - RNA, 22 nt, Human
ugacagagccuucugaggacau

SEQ ID NO: 2261660 - RNA, 23 nt, Human
ugacagagccuucugaggacauu

SEQ ID NO: 2261661 - RNA, 23 nt, Human
ugacaucaacugcaucaagaugu

SEQ ID NO: 2261662 - RNA, 18 nt, Human
ugacagagcaagacucug

SEQ ID NO: 2261663 - RNA, 14 nt, Human
ugacagacucucgu

SEQ ID NO: 2261664 - RNA, 17 nt, Human
ugacagacuccugagga

SEQ ID NO: 2261665 - RNA, 19 nt, Human
ugacagacuccugaggaca

SEQ ID NO: 2261666 - RNA, 22 nt, Human
ugacagaccacaucuuuaucug

SEQ ID NO: 2261667 - RNA, 14 nt, Human
ugacagacuccuga

SEQ ID NO: 2261668 - RNA, 15 nt, Human
ugacagacuccugag

SEQ ID NO: 2261669 - RNA, 17 nt, Human
ugacagacacaggcccg

SEQ ID NO: 2261670 - RNA, 18 nt, Human
ugacagacacaggcccgg

SEQ ID NO: 2261671 - RNA, 17 nt, Human
ugacauccaagcuuccu

SEQ ID NO: 2261672 - RNA, 14 nt, Human
ugacaucucagggg

SEQ ID NO: 2261673 - RNA, 15 nt, Human
ugacaucucaggggc

SEQ ID NO: 2261674 - RNA, 13 nt, Human
ugacauccaagcu

SEQ ID NO: 2261675 - RNA, 23 nt, Human
ugacaucaguggcauggcuccag

SEQ ID NO: 2261676 - RNA, 17 nt, Human
ugacaucaguggcaugg

SEQ ID NO: 2261677 - RNA, 14 nt, Human
ugacaucucuuuga

SEQ ID NO: 2261678 - RNA, 13 nt, Human
ugacaucucuuug

SEQ ID NO: 2261679 - RNA, 12 nt, Human
ugacaucucuuu

SEQ ID NO: 2261680 - RNA, 23 nt, Human
ugacaucucugcaaucuucucag

SEQ ID NO: 2261681 - RNA, 14 nt, Human
ugacaucucugcaa

SEQ ID NO: 2261682 - RNA, 13 nt, Human
ugacaucucugca

SEQ ID NO: 2261683 - RNA, 18 nt, Human
ugacaucucaggggccag

SEQ ID NO: 2261684 - RNA, 19 nt, Human
ugacaucucaggggccaga

SEQ ID NO: 2261685 - RNA, 21 nt, Human
ugacaucucaggggccagagg

SEQ ID NO: 2261686 - RNA, 22 nt, Human
ugacaucucaggggccagagga

SEQ ID NO: 2261687 - RNA, 15 nt, Human
ugacauauuuuugcu

SEQ ID NO: 2261688 - RNA, 17 nt, Human
ugacaucaccacaguuu

SEQ ID NO: 2261689 - RNA, 13 nt, Human
ugacaucacuugu

SEQ ID NO: 2261690 - RNA, 23 nt, Human
ugacaucacuuguacaaaauaaa

SEQ ID NO: 2261691 - RNA, 22 nt, Human
ugacaucacuuguacaaaauaa

SEQ ID NO: 2261692 - RNA, 21 nt, Human
ugacaucacuuguacaaaaua

SEQ ID NO: 2261693 - RNA, 20 nt, Human
ugacaucacuuguacaaaau

SEQ ID NO: 2261694 - RNA, 19 nt, Human
ugacaucacuuguacaaaa

SEQ ID NO: 2261695 - RNA, 18 nt, Human
ugacaucacuuguacaaa

SEQ ID NO: 2261696 - RNA, 17 nt, Human
ugacaucacuuguacaa

SEQ ID NO: 2261697 - RNA, 16 nt, Human
ugacaucacuuguaca

SEQ ID NO: 2261698 - RNA, 18 nt, Human
ugaaggccuggcccacag

SEQ ID NO: 2261699 - RNA, 19 nt, Human
ugaaggaacauuccuuagu

SEQ ID NO: 2261700 - RNA, 19 nt, Human
ugaaggccgagaagcaaga

SEQ ID NO: 2261701 - RNA, 16 nt, Human
ugaaggaaccaaagcg

SEQ ID NO: 2261702 - RNA, 19 nt, Human
ugaaggccccgcccaggcu

SEQ ID NO: 2261703 - RNA, 20 nt, Human
ugaaggccccgcccaggcuu

SEQ ID NO: 2261704 - RNA, 21 nt, Human
ugaagcuuuuaugugaaacau

SEQ ID NO: 2261705 - RNA, 23 nt, Human
ugaaggaaaaacacaagcaaaaa

SEQ ID NO: 2261706 - RNA, 21 nt, Human
ugaaggaaaaacacaagcaaa

SEQ ID NO: 2261707 - RNA, 16 nt, Human
ugaagcuuuuauguga

SEQ ID NO: 2261708 - RNA, 12 nt, Human
ugaaggaaacag

SEQ ID NO: 2261709 - RNA, 14 nt, Human
ugaaggaaacaguu

SEQ ID NO: 2261710 - RNA, 16 nt, Human
ugaaggaaacaguuaa

SEQ ID NO: 2261711 - RNA, 15 nt, Human
ugaaggaaaaugaua

SEQ ID NO: 2261712 - RNA, 18 nt, Human
ugaaggccccgcccaggc

SEQ ID NO: 2261713 - RNA, 23 nt, Human
ugaagaguccucugaaugaaccu

SEQ ID NO: 2261714 - RNA, 23 nt, Human
ugaagaguaagucaaccugccug

SEQ ID NO: 2261715 - RNA, 16 nt, Human
ugaagaggaaaaugaa

SEQ ID NO: 2261716 - RNA, 19 nt, Human
ugaagaggaaaaugaauaa

SEQ ID NO: 2261717 - RNA, 17 nt, Human
ugaagaguccucugaau

SEQ ID NO: 2261718 - RNA, 16 nt, Human
ugaagagugagagggc

SEQ ID NO: 2261719 - RNA, 19 nt, Human
ugaagaguggguuucacaa

SEQ ID NO: 2261720 - RNA, 18 nt, Human
ugaagagugagagggcau

SEQ ID NO: 2261721 - RNA, 17 nt, Human
ugaagagugagagggca

SEQ ID NO: 2261722 - RNA, 12 nt, Human
ugaagaggaaaa

SEQ ID NO: 2261723 - RNA, 23 nt, Human
ugaagagaccaagacucugaaau

SEQ ID NO: 2261724 - RNA, 15 nt, Human
ugaagagauuuuuca

SEQ ID NO: 2261725 - RNA, 16 nt, Human
ugaagagauccuucug

SEQ ID NO: 2261726 - RNA, 16 nt, Human
ugaagagauuuuucau

SEQ ID NO: 2261727 - RNA, 17 nt, Human
ugaagacuggaagcuaa

SEQ ID NO: 2261728 - RNA, 15 nt, Human
ugaagacuggaagcu

SEQ ID NO: 2261729 - RNA, 22 nt, Human
ugaagagaagggcagggcugag

SEQ ID NO: 2261730 - RNA, 20 nt, Human
ugaagagaagggcagggcug

SEQ ID NO: 2261731 - RNA, 20 nt, Human
ugaaacaggagagaaagggg

SEQ ID NO: 2261732 - RNA, 16 nt, Human
ugaaacagaaacaaaa

SEQ ID NO: 2261733 - RNA, 14 nt, Human
ugaaacagaaacaa

SEQ ID NO: 2261734 - RNA, 21 nt, Human
ugaaacaggagagaaagggga

SEQ ID NO: 2261735 - RNA, 16 nt, Human
ugaaacacuuugcaua

SEQ ID NO: 2261736 - RNA, 13 nt, Human
ugaaacagaaaca

SEQ ID NO: 2261737 - RNA, 23 nt, Human
ugaacuggguacuuguggacaca

SEQ ID NO: 2261738 - RNA, 13 nt, Human
ugaacugguucau

SEQ ID NO: 2261739 - RNA, 13 nt, Human
ugaaacauguuuc

SEQ ID NO: 2261740 - RNA, 22 nt, Human
ugaacuuaaauaaaugucauua

SEQ ID NO: 2261741 - RNA, 17 nt, Human
ugaacuuaaauaaaugu

SEQ ID NO: 2261742 - RNA, 15 nt, Human
ugaacuuaaaaugaa

SEQ ID NO: 2261743 - RNA, 18 nt, Human
ugaacuuaaaaugaaagu

SEQ ID NO: 2261744 - RNA, 19 nt, Human
ugaagacucauucuucugu

SEQ ID NO: 2261745 - RNA, 20 nt, Human
ugaagacucauucuucugua

SEQ ID NO: 2261746 - RNA, 22 nt, Human
ugaacuuccugcagguaaacag

SEQ ID NO: 2261747 - RNA, 21 nt, Human
ugaacuuauuuacacauaguu

SEQ ID NO: 2261748 - RNA, 16 nt, Human
ugaacuuauucuguag

SEQ ID NO: 2261749 - RNA, 14 nt, Human
ugaacuucgcauca

SEQ ID NO: 2261750 - RNA, 18 nt, Human
ugaacuucgcaucaaaag

SEQ ID NO: 2261751 - RNA, 19 nt, Human
ugaacuucgcaucaaaaga

SEQ ID NO: 2261752 - RNA, 21 nt, Human
ugaacuucgcaucaaaagaca

SEQ ID NO: 2261753 - RNA, 15 nt, Human
ugaacuucucucaga

SEQ ID NO: 2261754 - RNA, 22 nt, Human
ugaacuucucucagacuuacuu

SEQ ID NO: 2261755 - RNA, 18 nt, Human
ugaacuucucucagacuu

SEQ ID NO: 2261756 - RNA, 19 nt, Human
ugaaugcaccauggucaaa

SEQ ID NO: 2261757 - RNA, 19 nt, Human
ugaauguuuacacucuuug

SEQ ID NO: 2261758 - RNA, 14 nt, Human
ugaaugcauaaaau

SEQ ID NO: 2261759 - RNA, 22 nt, Human
ugaauguuuacacucuuuguaa

SEQ ID NO: 2261760 - RNA, 19 nt, Human
ugaauguuuauuccuugau

SEQ ID NO: 2261761 - RNA, 22 nt, Human
ugaauguuuccaaccuggagua

SEQ ID NO: 2261762 - RNA, 18 nt, Human
ugaaugcaccauggucaa

SEQ ID NO: 2261763 - RNA, 21 nt, Human
ugaauguuuccaaccuggagu

SEQ ID NO: 2261764 - RNA, 11 nt, Human
ugaauuaaaac

SEQ ID NO: 2261765 - RNA, 19 nt, Human
ugaaugcacacuagccucu

SEQ ID NO: 2261766 - RNA, 19 nt, Human
ugaaugauuuccaaagaga

SEQ ID NO: 2261767 - RNA, 16 nt, Human
ugaaugauucaguguu

SEQ ID NO: 2261768 - RNA, 23 nt, Human
ugaaugaugauccuaggcauuug

SEQ ID NO: 2261769 - RNA, 20 nt, Human
ugaaugaauggcuaagcaaa

SEQ ID NO: 2261770 - RNA, 15 nt, Human
ugaaugaauggcuaa

SEQ ID NO: 2261771 - RNA, 16 nt, Human
ugaaugaaccuucugg

SEQ ID NO: 2261772 - RNA, 15 nt, Human
ugaaugaaccuucug

SEQ ID NO: 2261773 - RNA, 15 nt, Human
ugaaugaacacucuu

SEQ ID NO: 2261774 - RNA, 12 nt, Human
ugaaugaacacu

SEQ ID NO: 2261775 - RNA, 11 nt, Human
ugaaugaacac

SEQ ID NO: 2261776 - RNA, 21 nt, Human
ugaaucuugucucaaugcuca

SEQ ID NO: 2261777 - RNA, 23 nt, Human
ugaaucuugucucaaugcucaua

SEQ ID NO: 2261778 - RNA, 16 nt, Human
ugaaucuuggugucua

SEQ ID NO: 2261779 - RNA, 13 nt, Human
ugaaucuugucuc

SEQ ID NO: 2261780 - RNA, 15 nt, Human
ugaaucuugucucaa

SEQ ID NO: 2261781 - RNA, 16 nt, Human
ugaaucuugucucaau

SEQ ID NO: 2261782 - RNA, 19 nt, Human
ugaaucuugucucaaugcu

SEQ ID NO: 2261783 - RNA, 20 nt, Human
ugaaucuugucucaaugcuc

SEQ ID NO: 2261784 - RNA, 14 nt, Human
ugaaucuauuuaag

SEQ ID NO: 2261785 - RNA, 16 nt, Human
ugaaucuauuuaagua

SEQ ID NO: 2261786 - RNA, 18 nt, Human
ugaaucuaugccaaagau

SEQ ID NO: 2261787 - RNA, 19 nt, Human
ugaaucuauuauacuguau

SEQ ID NO: 2261788 - RNA, 21 nt, Human
ugaaucuauuauacuguauua

SEQ ID NO: 2261789 - RNA, 22 nt, Human
ugaaucuauuauacuguauuaa

SEQ ID NO: 2261790 - RNA, 15 nt, Human
ugaaucgcuucucuu

SEQ ID NO: 2261791 - RNA, 15 nt, Human
ugaaucuaagcagca

SEQ ID NO: 2261792 - RNA, 20 nt, Human
ugaaucuaagcagcauuucu

SEQ ID NO: 2261793 - RNA, 15 nt, Human
ugaaucuagcuuauu

SEQ ID NO: 2261794 - RNA, 23 nt, Human
ugaaucuagcuuauuuugaggcu

SEQ ID NO: 2261795 - RNA, 12 nt, Human
ugaaucuaugcc

SEQ ID NO: 2261796 - RNA, 14 nt, Human
ugaaucuaugccaa

SEQ ID NO: 2261797 - RNA, 15 nt, Human
ugaaucuaugccaaa

SEQ ID NO: 2261798 - RNA, 23 nt, Human
ugaaucugauuggacauuuucuu

SEQ ID NO: 2261799 - RNA, 23 nt, Human
ugaaucacguaaagcuagaaaug

SEQ ID NO: 2261800 - RNA, 18 nt, Human
ugaaucagacccuacccc

SEQ ID NO: 2261801 - RNA, 16 nt, Human
ugaaucagacccuacc

SEQ ID NO: 2261802 - RNA, 16 nt, Human
ugaaucaccuaggggu

SEQ ID NO: 2261803 - RNA, 22 nt, Human
ugaaucagacccuaccccacca

SEQ ID NO: 2261804 - RNA, 21 nt, Human
ugaaucagacccuaccccacc

SEQ ID NO: 2261805 - RNA, 19 nt, Human
ugaaucaguauaaacaaag

SEQ ID NO: 2261806 - RNA, 16 nt, Human
ugaaucaguauaaaca

SEQ ID NO: 2261807 - RNA, 22 nt, Human
ugaaucaguauaaacaaaguua

SEQ ID NO: 2261808 - RNA, 21 nt, Human
ugaaucaguauaaacaaaguu

SEQ ID NO: 2261809 - RNA, 20 nt, Human
ugaaucaguauaaacaaagu

SEQ ID NO: 2261810 - RNA, 22 nt, Human
ugaauccuaagggcuggucucu

SEQ ID NO: 2261811 - RNA, 15 nt, Human
ugaauccuaagggcu

SEQ ID NO: 2261812 - RNA, 10 nt, Human
ugaauccuac

SEQ ID NO: 2261813 - RNA, 16 nt, Human
ugaauccuagggccug

SEQ ID NO: 2261814 - RNA, 19 nt, Human
ugaaucaugguuuuucuua

SEQ ID NO: 2261815 - RNA, 21 nt, Human
ugaaucccacgcuucucuuug

SEQ ID NO: 2261816 - RNA, 21 nt, Human
ugaaucccccuugccacccca

SEQ ID NO: 2261817 - RNA, 21 nt, Human
ugaauccucucucuguguuac

SEQ ID NO: 2261818 - RNA, 17 nt, Human
ugaauccucuucuuuau

SEQ ID NO: 2261819 - RNA, 16 nt, Human
ugaauccucucucugu

SEQ ID NO: 2261820 - RNA, 14 nt, Human
ugaauccucucucu

SEQ ID NO: 2261821 - RNA, 17 nt, Human
ugaaucacguaaagcua

SEQ ID NO: 2261822 - RNA, 15 nt, Human
ugaaucaccuagggg

SEQ ID NO: 2261823 - RNA, 22 nt, Human
ugaaucaauaauauauuuucug

SEQ ID NO: 2261824 - RNA, 17 nt, Human
ugaaguuuuacauuguu

SEQ ID NO: 2261825 - RNA, 16 nt, Human
ugaaguuuuacauugu

SEQ ID NO: 2261826 - RNA, 15 nt, Human
ugaaguuuuacauug

SEQ ID NO: 2261827 - RNA, 14 nt, Human
ugaaguuuuacauu

SEQ ID NO: 2261828 - RNA, 18 nt, Human
ugaaguuugaacuucaua

SEQ ID NO: 2261829 - RNA, 21 nt, Human
ugaaguuugaauguuaaauaa

SEQ ID NO: 2261830 - RNA, 16 nt, Human
ugaaguuugaauguua

SEQ ID NO: 2261831 - RNA, 17 nt, Human
ugaaguuugaauguuaa

SEQ ID NO: 2261832 - RNA, 18 nt, Human
ugaaguuugaauguuaaa

SEQ ID NO: 2261833 - RNA, 20 nt, Human
ugaaguuugaauguuaaaua

SEQ ID NO: 2261834 - RNA, 17 nt, Human
ugaaguuuacaaucaaa

SEQ ID NO: 2261835 - RNA, 16 nt, Human
ugaaguuuacauugua

SEQ ID NO: 2261836 - RNA, 20 nt, Human
ugaaguuuacauuguaaaua

SEQ ID NO: 2261837 - RNA, 16 nt, Human
ugaaguuuccuuggcu

SEQ ID NO: 2261838 - RNA, 19 nt, Human
ugaaguuuccuuggcuggu

SEQ ID NO: 2261839 - RNA, 21 nt, Human
ugaaguuuccuuggcuggugc

SEQ ID NO: 2261840 - RNA, 13 nt, Human
ugaaguuucacau

SEQ ID NO: 2261841 - RNA, 14 nt, Human
ugaaguuucacaug

SEQ ID NO: 2261842 - RNA, 14 nt, Human
ugaaguuucacucc

SEQ ID NO: 2261843 - RNA, 17 nt, Human
ugaaguuucacuccgga

SEQ ID NO: 2261844 - RNA, 14 nt, Human
ugaaguuugaaugu

SEQ ID NO: 2261845 - RNA, 15 nt, Human
ugaaguuugaauguu

SEQ ID NO: 2261846 - RNA, 12 nt, Human
ugaaguuugaau

SEQ ID NO: 2261847 - RNA, 13 nt, Human
ugaaguuugaaug

SEQ ID NO: 2261848 - RNA, 19 nt, Human
ugaaggcuucucucugugg

SEQ ID NO: 2261849 - RNA, 14 nt, Human
ugaaguuuacauug

SEQ ID NO: 2261850 - RNA, 16 nt, Human
ugaaggcuucucucug

SEQ ID NO: 2261851 - RNA, 15 nt, Human
ugaaggcuucucucu

SEQ ID NO: 2261852 - RNA, 13 nt, Human
ugaaggcuucucu

SEQ ID NO: 2261853 - RNA, 14 nt, Human
ugaaggcuguacac

SEQ ID NO: 2261854 - RNA, 20 nt, Human
ugaaggcuggguucugaucc

SEQ ID NO: 2261855 - RNA, 21 nt, Human
ugaaggcuggguucugauccu

SEQ ID NO: 2261856 - RNA, 20 nt, Human
uacacagggauguacaaggc

SEQ ID NO: 2261857 - RNA, 11 nt, Human
uacacaguugc

SEQ ID NO: 2261858 - RNA, 23 nt, Human
uacacauagcauguaaugguauc

SEQ ID NO: 2261859 - RNA, 19 nt, Human
uacacauaauuaaaguguc

SEQ ID NO: 2261860 - RNA, 17 nt, Human
uacacaucucagacccu

SEQ ID NO: 2261861 - RNA, 21 nt, Human
uacacauguaucuaugcauuu

SEQ ID NO: 2261862 - RNA, 20 nt, Human
uacacauucggcucccugga

SEQ ID NO: 2261863 - RNA, 18 nt, Human
uacacauucaauaagcau

SEQ ID NO: 2261864 - RNA, 13 nt, Human
uacacucuuauag

SEQ ID NO: 2261865 - RNA, 12 nt, Human
uacacucuuaua

SEQ ID NO: 2261866 - RNA, 20 nt, Human
uacacugaaguuaacagaga

SEQ ID NO: 2261867 - RNA, 16 nt, Human
uacacucuuuguaaga

SEQ ID NO: 2261868 - RNA, 18 nt, Human
uacacugaauauuuauau

SEQ ID NO: 2261869 - RNA, 17 nt, Human
uacacugaauauuuaua

SEQ ID NO: 2261870 - RNA, 16 nt, Human
uacacugacaccuuug

SEQ ID NO: 2261871 - RNA, 23 nt, Human
uacacugacaccuuugcaggcau

SEQ ID NO: 2261872 - RNA, 21 nt, Human
uacacugugcugagucugaag

SEQ ID NO: 2261873 - RNA, 13 nt, Human
uacacacacacac

SEQ ID NO: 2261874 - RNA, 12 nt, Human
uacacacacaca

SEQ ID NO: 2261875 - RNA, 18 nt, Human
uacacacacacacacagc

SEQ ID NO: 2261876 - RNA, 17 nt, Human
uacacacacacacacag

SEQ ID NO: 2261877 - RNA, 16 nt, Human
uacacacacacacaca

SEQ ID NO: 2261878 - RNA, 14 nt, Human
uacacacacacaca

SEQ ID NO: 2261879 - RNA, 21 nt, Human
uacacacacacacacagccac

SEQ ID NO: 2261880 - RNA, 20 nt, Human
uacacacacacacacagcca

SEQ ID NO: 2261881 - RNA, 19 nt, Human
uacacacacacacacagcc

SEQ ID NO: 2261882 - RNA, 16 nt, Human
uacacacucaaaucaa

SEQ ID NO: 2261883 - RNA, 23 nt, Human
uacacaggauccuauucucacca

SEQ ID NO: 2261884 - RNA, 16 nt, Human
uacacagucugcaaga

SEQ ID NO: 2261885 - RNA, 17 nt, Human
uacacagucugcaagau

SEQ ID NO: 2261886 - RNA, 15 nt, Human
uacacagcucuagac

SEQ ID NO: 2261887 - RNA, 16 nt, Human
uacacacgugcaauuu

SEQ ID NO: 2261888 - RNA, 23 nt, Human
uacacacgugcaauuuguuugug

SEQ ID NO: 2261889 - RNA, 15 nt, Human
uacacacugcauguu

SEQ ID NO: 2261890 - RNA, 17 nt, Human
uacacacucaaaucaag

SEQ ID NO: 2261891 - RNA, 12 nt, Human
uacaaccugcuu

SEQ ID NO: 2261892 - RNA, 21 nt, Human
uacaacagauuugugaacuca

SEQ ID NO: 2261893 - RNA, 13 nt, Human
uacaacagugcua

SEQ ID NO: 2261894 - RNA, 14 nt, Human
uacaacagugcuaa

SEQ ID NO: 2261895 - RNA, 20 nt, Human
uacaacagugcuaaaaaugg

SEQ ID NO: 2261896 - RNA, 14 nt, Human
uacaaccaagcucu

SEQ ID NO: 2261897 - RNA, 17 nt, Human
uacaaccaagcucucug

SEQ ID NO: 2261898 - RNA, 22 nt, Human
uacaacaagaguuuauuuccaa

SEQ ID NO: 2261899 - RNA, 12 nt, Human
uacaacagauuu

SEQ ID NO: 2261900 - RNA, 13 nt, Human
uacaacagauuug

SEQ ID NO: 2261901 - RNA, 14 nt, Human
uacaacagauuugu

SEQ ID NO: 2261902 - RNA, 15 nt, Human
uacaacagauuugug

SEQ ID NO: 2261903 - RNA, 16 nt, Human
uacaacagauuuguga

SEQ ID NO: 2261904 - RNA, 17 nt, Human
uacaacagauuugugaa

SEQ ID NO: 2261905 - RNA, 18 nt, Human
uacaacagauuugugaac

SEQ ID NO: 2261906 - RNA, 19 nt, Human
uacaacagauuugugaacu

SEQ ID NO: 2261907 - RNA, 20 nt, Human
uacaacagauuugugaacuc

SEQ ID NO: 2261908 - RNA, 16 nt, Human
uacaaauuuguuauuu

SEQ ID NO: 2261909 - RNA, 16 nt, Human
uacaaauugcuugaaa

SEQ ID NO: 2261910 - RNA, 21 nt, Human
uacaaauugcuuacuuuggaa

SEQ ID NO: 2261911 - RNA, 19 nt, Human
uacaaauugcuugaaagaa

SEQ ID NO: 2261912 - RNA, 19 nt, Human
uacaacaagaguuuauuuc

SEQ ID NO: 2261913 - RNA, 15 nt, Human
uacaaauugcuuacu

SEQ ID NO: 2261914 - RNA, 14 nt, Human
uacaaauuagaaaa

SEQ ID NO: 2261915 - RNA, 15 nt, Human
uacaaauuagaaaau

SEQ ID NO: 2261916 - RNA, 21 nt, Human
uacaaauggacauaggacuca

SEQ ID NO: 2261917 - RNA, 12 nt, Human
uacaaaugucuu

SEQ ID NO: 2261918 - RNA, 13 nt, Human
uacaaauuagaaa

SEQ ID NO: 2261919 - RNA, 18 nt, Human
uacaacuuaaauaauaaa

SEQ ID NO: 2261920 - RNA, 20 nt, Human
uacaacugaguccuuaaaca

SEQ ID NO: 2261921 - RNA, 17 nt, Human
uacaacuuaaguugguc

SEQ ID NO: 2261922 - RNA, 23 nt, Human
uacaacugccucgaaacacagaa

SEQ ID NO: 2261923 - RNA, 14 nt, Human
uacaacugaguccu

SEQ ID NO: 2261924 - RNA, 19 nt, Human
uacaaccaagcucucugca

SEQ ID NO: 2261925 - RNA, 20 nt, Human
uacaaccaagcucucugcau

SEQ ID NO: 2261926 - RNA, 23 nt, Human
uacaaccaagcucucugcaucua

SEQ ID NO: 2261927 - RNA, 14 nt, Human
uacaacuucaagug

SEQ ID NO: 2261928 - RNA, 14 nt, Human
uacaacuucagcag

SEQ ID NO: 2261929 - RNA, 17 nt, Human
uacaagaaaaaaugaau

SEQ ID NO: 2261930 - RNA, 20 nt, Human
uacaauugaacuuaaauaaa

SEQ ID NO: 2261931 - RNA, 14 nt, Human
uacaauugaacuua

SEQ ID NO: 2261932 - RNA, 17 nt, Human
uacaauuguaaaacuga

SEQ ID NO: 2261933 - RNA, 15 nt, Human
uacaauuuacaaagu

SEQ ID NO: 2261934 - RNA, 21 nt, Human
uacaauuguaaaacugaggca

SEQ ID NO: 2261935 - RNA, 22 nt, Human
uacaauuuacaaaguguguauu

SEQ ID NO: 2261936 - RNA, 16 nt, Human
uacaauuuacaaagug

SEQ ID NO: 2261937 - RNA, 17 nt, Human
uacaauuuacaaagugu

SEQ ID NO: 2261938 - RNA, 11 nt, Human
uacacacacac

SEQ ID NO: 2261939 - RNA, 21 nt, Human
uacaauuuucucccaggaagc

SEQ ID NO: 2261940 - RNA, 18 nt, Human
uacaauuuucucccagga

SEQ ID NO: 2261941 - RNA, 19 nt, Human
uacaauuuucucccaggaa

SEQ ID NO: 2261942 - RNA, 11 nt, Human
uaauucuaaag

SEQ ID NO: 2261943 - RNA, 12 nt, Human
uaauucuaaagg

SEQ ID NO: 2261944 - RNA, 13 nt, Human
uaauucuaaggaa

SEQ ID NO: 2261945 - RNA, 11 nt, Human
uaauucuaaau

SEQ ID NO: 2261946 - RNA, 18 nt, Human
uaauucuaaaugaauguu

SEQ ID NO: 2261947 - RNA, 21 nt, Human
uaauucuaaggaauaugagcu

SEQ ID NO: 2261948 - RNA, 12 nt, Human
uaauucucaggc

SEQ ID NO: 2261949 - RNA, 15 nt, Human
uaauucuaugagaua

SEQ ID NO: 2261950 - RNA, 13 nt, Human
uaauuuugugaag

SEQ ID NO: 2261951 - RNA, 17 nt, Human
uaauuagggguugcuaa

SEQ ID NO: 2261952 - RNA, 18 nt, Human
uaauuagggguugcuaag

SEQ ID NO: 2261953 - RNA, 12 nt, Human
uaauuagugcua

SEQ ID NO: 2261954 - RNA, 14 nt, Human
uaauuagugcuaag

SEQ ID NO: 2261955 - RNA, 15 nt, Human
uaauuagugcuaagu

SEQ ID NO: 2261956 - RNA, 16 nt, Human
uaauuagugcuaagug

SEQ ID NO: 2261957 - RNA, 20 nt, Human
uaauuagugcuaagugugaa

SEQ ID NO: 2261958 - RNA, 22 nt, Human
uaauuccucucacuaaacuuua

SEQ ID NO: 2261959 - RNA, 18 nt, Human
uacaaacaaaauuucuau

SEQ ID NO: 2261960 - RNA, 15 nt, Human
uacaaacauauuugu

SEQ ID NO: 2261961 - RNA, 12 nt, Human
uacaaacauauu

SEQ ID NO: 2261962 - RNA, 22 nt, Human
uacaaacaauggaaacugaaug

SEQ ID NO: 2261963 - RNA, 17 nt, Human
uacaaacaccuggacuu

SEQ ID NO: 2261964 - RNA, 12 nt, Human
uacaaacaaugg

SEQ ID NO: 2261965 - RNA, 16 nt, Human
uaauuuuuauauuuga

SEQ ID NO: 2261966 - RNA, 17 nt, Human
uaauuuuuauauuugaa

SEQ ID NO: 2261967 - RNA, 13 nt, Human
uaauuuuuaaagu

SEQ ID NO: 2261968 - RNA, 19 nt, Human
uaauuuuguucuaguuuuc

SEQ ID NO: 2261969 - RNA, 12 nt, Human
uaauuuuuauau

SEQ ID NO: 2261970 - RNA, 15 nt, Human
uaauucucaggccau

SEQ ID NO: 2261971 - RNA, 20 nt, Human
uaauucucaugugauccuuu

SEQ ID NO: 2261972 - RNA, 18 nt, Human
uaauuuugugaagcaaaa

SEQ ID NO: 2261973 - RNA, 17 nt, Human
uacaaacaugugguuaa

SEQ ID NO: 2261974 - RNA, 13 nt, Human
uacaaagaagaca

SEQ ID NO: 2261975 - RNA, 17 nt, Human
uacaaagaaauaacaag

SEQ ID NO: 2261976 - RNA, 14 nt, Human
uacaaagaagacau

SEQ ID NO: 2261977 - RNA, 13 nt, Human
uacaaagaaauaa

SEQ ID NO: 2261978 - RNA, 19 nt, Human
uacaaacucccacuuguca

SEQ ID NO: 2261979 - RNA, 19 nt, Human
uacaaagaagacauguuuu

SEQ ID NO: 2261980 - RNA, 22 nt, Human
uacaaagaagacauguuuuaga

SEQ ID NO: 2261981 - RNA, 15 nt, Human
uacaaagaagacaug

SEQ ID NO: 2261982 - RNA, 16 nt, Human
uacaaagaagacaugu

SEQ ID NO: 2261983 - RNA, 17 nt, Human
uacaaagaagacauguu

SEQ ID NO: 2261984 - RNA, 18 nt, Human
uacaaagaagacauguuu

SEQ ID NO: 2261985 - RNA, 18 nt, Human
uacaaaguagaagucuua

SEQ ID NO: 2261986 - RNA, 14 nt, Human
uacaaaguagaagu

SEQ ID NO: 2261987 - RNA, 13 nt, Human
uacaaagugugua

SEQ ID NO: 2261988 - RNA, 13 nt, Human
uacaaagugaugu

SEQ ID NO: 2261989 - RNA, 15 nt, Human
uacaaaguguguauu

SEQ ID NO: 2261990 - RNA, 19 nt, Human
uacaaaguguguauuaaaa

SEQ ID NO: 2261991 - RNA, 12 nt, Human
uacaaauacucu

SEQ ID NO: 2261992 - RNA, 17 nt, Human
uacaaauacucuuagga

SEQ ID NO: 2261993 - RNA, 19 nt, Human
uacaaauacucuuaggaag

SEQ ID NO: 2261994 - RNA, 23 nt, Human
uacaaauacucuuaggaagagaa

SEQ ID NO: 2261995 - RNA, 16 nt, Human
uacaaaucaaguauuu

SEQ ID NO: 2261996 - RNA, 18 nt, Human
uacaaauauaagaauaaa

SEQ ID NO: 2261997 - RNA, 18 nt, Human
uacaaaguguguauuaaa

SEQ ID NO: 2261998 - RNA, 12 nt, Human
uacaaauauaag

SEQ ID NO: 2261999 - RNA, 14 nt, Human
uacaaauauaagaa

SEQ ID NO: 2262000 - RNA, 16 nt, Human
uacaaauauaagaaua

SEQ ID NO: 2262001 - RNA, 17 nt, Human
uacaaauauaagaauaa

SEQ ID NO: 2262002 - RNA, 13 nt, Human
uacaaaucaauca

SEQ ID NO: 2262003 - RNA, 22 nt, Human
uacauggaauaacauguaauua

SEQ ID NO: 2262004 - RNA, 19 nt, Human
uacauggaauaacauguaa

SEQ ID NO: 2262005 - RNA, 18 nt, Human
uacauggaauaacaugua

SEQ ID NO: 2262006 - RNA, 14 nt, Human
uacauggaauaaca

SEQ ID NO: 2262007 - RNA, 14 nt, Human
uacauuuuuaagug

SEQ ID NO: 2262008 - RNA, 22 nt, Human
uacauggacaauacccccaggc

SEQ ID NO: 2262009 - RNA, 16 nt, Human
uacauggcagaguuug

SEQ ID NO: 2262010 - RNA, 19 nt, Human
uacauggcagaguuugugu

SEQ ID NO: 2262011 - RNA, 22 nt, Human
uacauuuuuaagugcugcauuu

SEQ ID NO: 2262012 - RNA, 19 nt, Human
uacauuuuuaagugcugca

SEQ ID NO: 2262013 - RNA, 14 nt, Human
uacaugcauuugag

SEQ ID NO: 2262014 - RNA, 22 nt, Human
uacaugcauugagcucucucau

SEQ ID NO: 2262015 - RNA, 20 nt, Human
uacaugcauuacugcaugca

SEQ ID NO: 2262016 - RNA, 21 nt, Human
uacaugcauacuucaaaagua

SEQ ID NO: 2262017 - RNA, 14 nt, Human
uacaugccagugac

SEQ ID NO: 2262018 - RNA, 16 nt, Human
uacaugcuuugugaac

SEQ ID NO: 2262019 - RNA, 15 nt, Human
uacaugcuuugugaa

SEQ ID NO: 2262020 - RNA, 15 nt, Human
uacaugcucuuagaa

SEQ ID NO: 2262021 - RNA, 12 nt, Human
uacaugcugcua

SEQ ID NO: 2262022 - RNA, 14 nt, Human
uacaugcugcuaau

SEQ ID NO: 2262023 - RNA, 14 nt, Human
uacaugcauacuuc

SEQ ID NO: 2262024 - RNA, 17 nt, Human
uacaugcauacuucaaa

SEQ ID NO: 2262025 - RNA, 19 nt, Human
uacaugcauacuucaaaag

SEQ ID NO: 2262026 - RNA, 17 nt, Human
uacaugcagcccaugcc

SEQ ID NO: 2262027 - RNA, 14 nt, Human
uacaugcagcccau

SEQ ID NO: 2262028 - RNA, 22 nt, Human
uacaugcagcccaugcccaccu

SEQ ID NO: 2262029 - RNA, 11 nt, Human
uacaugcauac

SEQ ID NO: 2262030 - RNA, 21 nt, Human
uacaugaaacagaaacaaaaa

SEQ ID NO: 2262031 - RNA, 21 nt, Human
uacaugcacuuggcugcauaa

SEQ ID NO: 2262032 - RNA, 22 nt, Human
uacaugcaauuuauuaaaauga

SEQ ID NO: 2262033 - RNA, 15 nt, Human
uacaugaaacagaaa

SEQ ID NO: 2262034 - RNA, 14 nt, Human
uacaugaaacagaa

SEQ ID NO: 2262035 - RNA, 13 nt, Human
uacaugaaacaga

SEQ ID NO: 2262036 - RNA, 12 nt, Human
uacaugaaacag

SEQ ID NO: 2262037 - RNA, 17 nt, Human
uacauaagauaaaugug

SEQ ID NO: 2262038 - RNA, 16 nt, Human
uacauaagauaaaugu

SEQ ID NO: 2262039 - RNA, 20 nt, Human
uacaucuuucacauuggcua

SEQ ID NO: 2262040 - RNA, 17 nt, Human
uacauaaacugacuuua

SEQ ID NO: 2262041 - RNA, 20 nt, Human
uacaucuuuucaacaaguaa

SEQ ID NO: 2262042 - RNA, 17 nt, Human
uacaucuuuuuucacaa

SEQ ID NO: 2262043 - RNA, 18 nt, Human
uacaucuuuuuucacaaa

SEQ ID NO: 2262044 - RNA, 20 nt, Human
uacaucuuuuuucacaaauu

SEQ ID NO: 2262045 - RNA, 16 nt, Human
uacaugaaaacacauu

SEQ ID NO: 2262046 - RNA, 23 nt, Human
uacaugaaaacacauuuuucuua

SEQ ID NO: 2262047 - RNA, 19 nt, Human
uacaugaaaacacauuuuu

SEQ ID NO: 2262048 - RNA, 18 nt, Human
uacaugaaaacacauuuu

SEQ ID NO: 2262049 - RNA, 17 nt, Human
uacaugaaaacacauuu

SEQ ID NO: 2262050 - RNA, 17 nt, Human
uacaguuuguuuacaca

SEQ ID NO: 2262051 - RNA, 17 nt, Human
uacaguuugcuguacua

SEQ ID NO: 2262052 - RNA, 17 nt, Human
uacaguuugucacauga

SEQ ID NO: 2262053 - RNA, 15 nt, Human
uacaguuuguuuaca

SEQ ID NO: 2262054 - RNA, 16 nt, Human
uacaguuuguuuacac

SEQ ID NO: 2262055 - RNA, 21 nt, Human
uacaguuuguuaguaugaggc

SEQ ID NO: 2262056 - RNA, 19 nt, Human
uacaguuuguuaguaugag

SEQ ID NO: 2262057 - RNA, 21 nt, Human
uacauaaaggugguaugugug

SEQ ID NO: 2262058 - RNA, 13 nt, Human
uacauaacugaaa

SEQ ID NO: 2262059 - RNA, 21 nt, Human
uacauaacugaaaaugugcua

SEQ ID NO: 2262060 - RNA, 17 nt, Human
uacauaacugaaaaugu

SEQ ID NO: 2262061 - RNA, 15 nt, Human
uacauaacugaaaau

SEQ ID NO: 2262062 - RNA, 13 nt, Human
uacauaaaggugg

SEQ ID NO: 2262063 - RNA, 16 nt, Human
uacauaaacaaguccu

SEQ ID NO: 2262064 - RNA, 18 nt, Human
uacaggaagguagaaaua

SEQ ID NO: 2262065 - RNA, 13 nt, Human
uacaggaaguacu

SEQ ID NO: 2262066 - RNA, 20 nt, Human
uacagcuugaccgugaggcc

SEQ ID NO: 2262067 - RNA, 21 nt, Human
uacagcuggguggcacugcca

SEQ ID NO: 2262068 - RNA, 24 nt, Human
uacagcuggguggcacugccaugc

SEQ ID NO: 2262069 - RNA, 14 nt, Human
uacagcuguuuaag

SEQ ID NO: 2262070 - RNA, 14 nt, Human
uacagcugccugca

SEQ ID NO: 2262071 - RNA, 20 nt, Human
uacagcuggguggcacugcc

SEQ ID NO: 2262072 - RNA, 13 nt, Human
uacagcugccugc

SEQ ID NO: 2262073 - RNA, 19 nt, Human
uacagcugagcacauucug

SEQ ID NO: 2262074 - RNA, 20 nt, Human
uacagcgagaggcagagaaa

SEQ ID NO: 2262075 - RNA, 16 nt, Human
uacagcgagaggcaga

SEQ ID NO: 2262076 - RNA, 19 nt, Human
uacagcgagaggcagagaa

SEQ ID NO: 2262077 - RNA, 21 nt, Human
uacagcucagaaguuucuucu

SEQ ID NO: 2262078 - RNA, 20 nt, Human
uacacuguuucaaacuuuac

SEQ ID NO: 2262079 - RNA, 22 nt, Human
uacacugugcugagucugaagg

SEQ ID NO: 2262080 - RNA, 23 nt, Human
uacacugugcugagucugaaggc

SEQ ID NO: 2262081 - RNA, 16 nt, Human
uacacuuacacuuuau

SEQ ID NO: 2262082 - RNA, 22 nt, Human
uacacuguuucaaacuuuacua

SEQ ID NO: 2262083 - RNA, 16 nt, Human
uacagcuaaucagcau

SEQ ID NO: 2262084 - RNA, 18 nt, Human
uacagcuaaucagcauuc

SEQ ID NO: 2262085 - RNA, 19 nt, Human
uacacuuacuguuguccua

SEQ ID NO: 2262086 - RNA, 21 nt, Human
uacacuuacuguuguccuaug

SEQ ID NO: 2262087 - RNA, 14 nt, Human
uacacuuacuguug

SEQ ID NO: 2262088 - RNA, 19 nt, Human
uacaguugaaaaacagcug

SEQ ID NO: 2262089 - RNA, 17 nt, Human
uacaguugaaaaacagc

SEQ ID NO: 2262090 - RNA, 16 nt, Human
uacagcuguuuaagau

SEQ ID NO: 2262091 - RNA, 11 nt, Human
uacaguucuuc

SEQ ID NO: 2262092 - RNA, 12 nt, Human
uacaguucuucg

SEQ ID NO: 2262093 - RNA, 15 nt, Human
uacaguuguuggccu

SEQ ID NO: 2262094 - RNA, 19 nt, Human
uacaguuggaaauccaucc

SEQ ID NO: 2262095 - RNA, 16 nt, Human
uacaguuguuggccuc

SEQ ID NO: 2262096 - RNA, 18 nt, Human
uacaguuguuggccuccg

SEQ ID NO: 2262097 - RNA, 18 nt, Human
uacaguucuucgggaaga

SEQ ID NO: 2262098 - RNA, 21 nt, Human
uacaguucuucgggaagagag

SEQ ID NO: 2262099 - RNA, 22 nt, Human
uacaguucuucgggaagagagg

SEQ ID NO: 2262100 - RNA, 20 nt, Human
uacaguugaaaaacagcuga

SEQ ID NO: 2262101 - RNA, 20 nt, Human
uacaguuguuuuuugaaaac

SEQ ID NO: 2262102 - RNA, 12 nt, Human
uacaguuucaaa

SEQ ID NO: 2262103 - RNA, 13 nt, Human
uacaguuucaaaa

SEQ ID NO: 2262104 - RNA, 15 nt, Human
uacaguuugcuguac

SEQ ID NO: 2262105 - RNA, 16 nt, Human
uacaguuugcuguacu

SEQ ID NO: 2262106 - RNA, 21 nt, Human
uacaguuugcuguacuagaga

SEQ ID NO: 2262107 - RNA, 18 nt, Human
uacaguuuguuaguauga

SEQ ID NO: 2262108 - RNA, 15 nt, Human
uacaggagugagcac

SEQ ID NO: 2262109 - RNA, 22 nt, Human
uacaggaaguacuggagaaaau

SEQ ID NO: 2262110 - RNA, 14 nt, Human
uacaggaaguacug

SEQ ID NO: 2262111 - RNA, 15 nt, Human
uacaggaaguacugg

SEQ ID NO: 2262112 - RNA, 23 nt, Human
uacaguucggugagcuacaaaug

SEQ ID NO: 2262113 - RNA, 20 nt, Human
uacaggaugaugacuaugga

SEQ ID NO: 2262114 - RNA, 15 nt, Human
uacugcaagaaaaug

SEQ ID NO: 2262115 - RNA, 17 nt, Human
uacugcagaauacagua

SEQ ID NO: 2262116 - RNA, 14 nt, Human
uacugcaagaaaau

SEQ ID NO: 2262117 - RNA, 19 nt, Human
uacugcaauuaaagugaua

SEQ ID NO: 2262118 - RNA, 22 nt, Human
uacugcagaauacaguaagcug

SEQ ID NO: 2262119 - RNA, 20 nt, Human
uacugcagccuuugccuccc

SEQ ID NO: 2262120 - RNA, 11 nt, Human
uacugccaaag

SEQ ID NO: 2262121 - RNA, 22 nt, Human
uacugcagccuuugccuccccg

SEQ ID NO: 2262122 - RNA, 15 nt, Human
uacugcagcuuuaca

SEQ ID NO: 2262123 - RNA, 13 nt, Human
uacugcaugcacu

SEQ ID NO: 2262124 - RNA, 16 nt, Human
uacucuacccucuuag

SEQ ID NO: 2262125 - RNA, 15 nt, Human
uacugauuguuucau

SEQ ID NO: 2262126 - RNA, 21 nt, Human
uacugauuuccuuuggagcuu

SEQ ID NO: 2262127 - RNA, 13 nt, Human
uacugauuuuugu

SEQ ID NO: 2262128 - RNA, 17 nt, Human
uacugauuuuuguaaga

SEQ ID NO: 2262129 - RNA, 15 nt, Human
uacugauuuuuguga

SEQ ID NO: 2262130 - RNA, 17 nt, Human
uacugauuuuugugauu

SEQ ID NO: 2262131 - RNA, 18 nt, Human
uacugcaaaugucaucag

SEQ ID NO: 2262132 - RNA, 19 nt, Human
uacugcccggggcagcugc

SEQ ID NO: 2262133 - RNA, 23 nt, Human
uacugcccaauaugcaguucugc

SEQ ID NO: 2262134 - RNA, 20 nt, Human
uacugccauucacuucauaa

SEQ ID NO: 2262135 - RNA, 22 nt, Human
uacugcccggggcagcugccag

SEQ ID NO: 2262136 - RNA, 22 nt, Human
uacugcccuccagcucuuuccu

SEQ ID NO: 2262137 - RNA, 23 nt, Human
uacugcccuccagcucuuuccuc

SEQ ID NO: 2262138 - RNA, 14 nt, Human
uacugccuauuuua

SEQ ID NO: 2262139 - RNA, 21 nt, Human
uacugccuauuuuaauaaaca

SEQ ID NO: 2262140 - RNA, 19 nt, Human
uacugcccaggccugccug

SEQ ID NO: 2262141 - RNA, 20 nt, Human
uacugcccaggccugccugu

SEQ ID NO: 2262142 - RNA, 21 nt, Human
uacugcccaggccugccuguu

SEQ ID NO: 2262143 - RNA, 22 nt, Human
uacugcccaggccugccuguuc

SEQ ID NO: 2262144 - RNA, 14 nt, Human
uacugccacucuuu

SEQ ID NO: 2262145 - RNA, 12 nt, Human
uacugccagaug

SEQ ID NO: 2262146 - RNA, 14 nt, Human
uacugccagaugcu

SEQ ID NO: 2262147 - RNA, 15 nt, Human
uacugccagaugcug

SEQ ID NO: 2262148 - RNA, 16 nt, Human
uacugccagaugcuga

SEQ ID NO: 2262149 - RNA, 17 nt, Human
uacugccagaugcugau

SEQ ID NO: 2262150 - RNA, 18 nt, Human
uacugccagaugcugaug

SEQ ID NO: 2262151 - RNA, 21 nt, Human
uacugccagaugcugauguuc

SEQ ID NO: 2262152 - RNA, 24 nt, Human
uacugccagaugcugauguucagu

SEQ ID NO: 2262153 - RNA, 22 nt, Human
uacucccacucccggccuguca

SEQ ID NO: 2262154 - RNA, 14 nt, Human
uacucccagacacc

SEQ ID NO: 2262155 - RNA, 21 nt, Human
uacuccagugccaacaauccu

SEQ ID NO: 2262156 - RNA, 14 nt, Human
uacuccagugguga

SEQ ID NO: 2262157 - RNA, 19 nt, Human
uacuccaguggugaagaaa

SEQ ID NO: 2262158 - RNA, 20 nt, Human
uacucauucauuuauucauu

SEQ ID NO: 2262159 - RNA, 16 nt, Human
uacuccccuugagcug

SEQ ID NO: 2262160 - RNA, 15 nt, Human
uacuccccuugagcu

SEQ ID NO: 2262161 - RNA, 22 nt, Human
uacucccucaaagcacacguca

SEQ ID NO: 2262162 - RNA, 10 nt, Human
uacuccccuu

SEQ ID NO: 2262163 - RNA, 15 nt, Human
uacuccccuccuuga

SEQ ID NO: 2262164 - RNA, 17 nt, Human
uacuccuaccucagccu

SEQ ID NO: 2262165 - RNA, 16 nt, Human
uacuccuaccucagcc

SEQ ID NO: 2262166 - RNA, 15 nt, Human
uacuccuaccucagc

SEQ ID NO: 2262167 - RNA, 14 nt, Human
uacuccuaccucag

SEQ ID NO: 2262168 - RNA, 12 nt, Human
uacuccucccag

SEQ ID NO: 2262169 - RNA, 22 nt, Human
uacucgaguuacagacaaagcg

SEQ ID NO: 2262170 - RNA, 18 nt, Human
uacucgaguuacagacaa

SEQ ID NO: 2262171 - RNA, 18 nt, Human
uacucauuccccggggcg

SEQ ID NO: 2262172 - RNA, 14 nt, Human
uacucauucaggga

SEQ ID NO: 2262173 - RNA, 20 nt, Human
uacucauguguaugggcaaa

SEQ ID NO: 2262174 - RNA, 22 nt, Human
uacucauguguaugggcaaaaa

SEQ ID NO: 2262175 - RNA, 23 nt, Human
uacuacaguuguuuuuugaaaac

SEQ ID NO: 2262176 - RNA, 12 nt, Human
uacucaugugua

SEQ ID NO: 2262177 - RNA, 13 nt, Human
uacucauguguau

SEQ ID NO: 2262178 - RNA, 14 nt, Human
uacucauguguaug

SEQ ID NO: 2262179 - RNA, 21 nt, Human
uacuacaguuguuuuuugaaa

SEQ ID NO: 2262180 - RNA, 14 nt, Human
uacuacaguuuguu

SEQ ID NO: 2262181 - RNA, 13 nt, Human
uacuacaguuugu

SEQ ID NO: 2262182 - RNA, 15 nt, Human
uacuaaugauguuuu

SEQ ID NO: 2262183 - RNA, 14 nt, Human
uacuaaugauguuu

SEQ ID NO: 2262184 - RNA, 13 nt, Human
uacuaaugauguu

SEQ ID NO: 2262185 - RNA, 16 nt, Human
uacuaaugauguuuuc

SEQ ID NO: 2262186 - RNA, 13 nt, Human
uacuaauuccaca

SEQ ID NO: 2262187 - RNA, 22 nt, Human
uacuaaggaguaaucuguguac

SEQ ID NO: 2262188 - RNA, 23 nt, Human
uacuaaggaguaaucuguguaca

SEQ ID NO: 2262189 - RNA, 16 nt, Human
uacuacaaaaaaguug

SEQ ID NO: 2262190 - RNA, 16 nt, Human
uacuaauuuucuagau

SEQ ID NO: 2262191 - RNA, 16 nt, Human
uacuaauuccacaccu

SEQ ID NO: 2262192 - RNA, 22 nt, Human
uacuacaguccucccaucucac

SEQ ID NO: 2262193 - RNA, 18 nt, Human
uacuguggaaaagaaaca

SEQ ID NO: 2262194 - RNA, 12 nt, Human
uacuguggagga

SEQ ID NO: 2262195 - RNA, 14 nt, Human
uacuguggaggaag

SEQ ID NO: 2262196 - RNA, 16 nt, Human
uacuguggaggaagga

SEQ ID NO: 2262197 - RNA, 18 nt, Human
uacuguggaggaaggauu

SEQ ID NO: 2262198 - RNA, 23 nt, Human
uacuguggaggaaggauuguaaa

SEQ ID NO: 2262199 - RNA, 23 nt, Human
uacugugugugugaaugaacacu

SEQ ID NO: 2262200 - RNA, 22 nt, Human
uacugugugugugaaugaacac

SEQ ID NO: 2262201 - RNA, 22 nt, Human
uacuguggaggaaggauuguaa

SEQ ID NO: 2262202 - RNA, 19 nt, Human
uacuguguuccuggcaaua

SEQ ID NO: 2262203 - RNA, 16 nt, Human
uacuguguuccuggca

SEQ ID NO: 2262204 - RNA, 13 nt, Human
uacuguguuucag

SEQ ID NO: 2262205 - RNA, 14 nt, Human
uacuguguuccugg

SEQ ID NO: 2262206 - RNA, 13 nt, Human
uacuguguuccug

SEQ ID NO: 2262207 - RNA, 12 nt, Human
uacuguguuccu

SEQ ID NO: 2262208 - RNA, 22 nt, Human
uacuguguuccuggcaauagug

SEQ ID NO: 2262209 - RNA, 15 nt, Human
uacuguuaaaggaaa

SEQ ID NO: 2262210 - RNA, 16 nt, Human
uacuguuaaaggaaaa

SEQ ID NO: 2262211 - RNA, 14 nt, Human
uacugucucacuga

SEQ ID NO: 2262212 - RNA, 22 nt, Human
uacugucucacugaaacauuua

SEQ ID NO: 2262213 - RNA, 21 nt, Human
uacugucuucaguaagccgug

SEQ ID NO: 2262214 - RNA, 22 nt, Human
uacugucugguuuuaacaauuu

SEQ ID NO: 2262215 - RNA, 15 nt, Human
uacugugaaacuggc

SEQ ID NO: 2262216 - RNA, 16 nt, Human
uacugucugguuuuaa

SEQ ID NO: 2262217 - RNA, 19 nt, Human
uacugucugguuuuaacaa

SEQ ID NO: 2262218 - RNA, 20 nt, Human
uacugucugguuuuaacaau

SEQ ID NO: 2262219 - RNA, 21 nt, Human
uacugucugguuuuaacaauu

SEQ ID NO: 2262220 - RNA, 20 nt, Human
uacuguggaaaaauauuuaa

SEQ ID NO: 2262221 - RNA, 19 nt, Human
uacuguggaaaaauauuua

SEQ ID NO: 2262222 - RNA, 16 nt, Human
uacuguggaaaaauau

SEQ ID NO: 2262223 - RNA, 18 nt, Human
uacugugcuggagccacu

SEQ ID NO: 2262224 - RNA, 13 nt, Human
uacugugacugau

SEQ ID NO: 2262225 - RNA, 15 nt, Human
uacugugcuggagcc

SEQ ID NO: 2262226 - RNA, 16 nt, Human
uacugugcuggagcca

SEQ ID NO: 2262227 - RNA, 16 nt, Human
uacuguccuacccacc

SEQ ID NO: 2262228 - RNA, 23 nt, Human
uacugucagcuccccucggagaa

SEQ ID NO: 2262229 - RNA, 19 nt, Human
uacugcuagucuuaagaac

SEQ ID NO: 2262230 - RNA, 20 nt, Human
uacugcuacuguaauuuuau

SEQ ID NO: 2262231 - RNA, 22 nt, Human
uacugcuaaguauuucccagca

SEQ ID NO: 2262232 - RNA, 15 nt, Human
uacugcuacuguaau

SEQ ID NO: 2262233 - RNA, 19 nt, Human
uacugcuaaguauuuccca

SEQ ID NO: 2262234 - RNA, 20 nt, Human
uacugcuaaguauuucccag

SEQ ID NO: 2262235 - RNA, 21 nt, Human
uacugcuaaguauuucccagc

SEQ ID NO: 2262236 - RNA, 12 nt, Human
uacugcgacuuu

SEQ ID NO: 2262237 - RNA, 16 nt, Human
uacugcgacuuucugc

SEQ ID NO: 2262238 - RNA, 17 nt, Human
uacugcgacuuucugcc

SEQ ID NO: 2262239 - RNA, 18 nt, Human
uacugcgacuuucugccu

SEQ ID NO: 2262240 - RNA, 19 nt, Human
uacugcgacuuucugccug

SEQ ID NO: 2262241 - RNA, 20 nt, Human
uacugcgacuuucugccugg

SEQ ID NO: 2262242 - RNA, 21 nt, Human
uacugcgacuuucugccugga

SEQ ID NO: 2262243 - RNA, 22 nt, Human
uacugcgacuuucugccuggag

SEQ ID NO: 2262244 - RNA, 13 nt, Human
uacuuaauaaauu

SEQ ID NO: 2262245 - RNA, 17 nt, Human
uacuugaagggccagag

SEQ ID NO: 2262246 - RNA, 16 nt, Human
uacuugaagggccaga

SEQ ID NO: 2262247 - RNA, 15 nt, Human
uacuugaagggccag

SEQ ID NO: 2262248 - RNA, 14 nt, Human
uacuugaagggcca

SEQ ID NO: 2262249 - RNA, 12 nt, Human
uacuugaagggc

SEQ ID NO: 2262250 - RNA, 11 nt, Human
uacuugaaggg

SEQ ID NO: 2262251 - RNA, 18 nt, Human
uacuuaaaugaaagcaug

SEQ ID NO: 2262252 - RNA, 17 nt, Human
uacuuaaaugaaagcau

SEQ ID NO: 2262253 - RNA, 19 nt, Human
uacuguuugucuucucccc

SEQ ID NO: 2262254 - RNA, 12 nt, Human
uacuuaaagauu

SEQ ID NO: 2262255 - RNA, 14 nt, Human
uacuuaaagauuua

SEQ ID NO: 2262256 - RNA, 19 nt, Human
uacuuaaagauuuaucaaa

SEQ ID NO: 2262257 - RNA, 20 nt, Human
uacuuaaauggaaaaaauga

SEQ ID NO: 2262258 - RNA, 13 nt, Human
uacuuaacuauuc

SEQ ID NO: 2262259 - RNA, 13 nt, Human
uacuguuucuguc

SEQ ID NO: 2262260 - RNA, 12 nt, Human
uacuguuugucu

SEQ ID NO: 2262261 - RNA, 20 nt, Human
uacuguuugucuucucccca

SEQ ID NO: 2262262 - RNA, 13 nt, Human
uacuuguggacac

SEQ ID NO: 2262263 - RNA, 20 nt, Human
uacuugucaauauuuaaaca

SEQ ID NO: 2262264 - RNA, 11 nt, Human
uacuugucaau

SEQ ID NO: 2262265 - RNA, 13 nt, Human
uacuugucaauau

SEQ ID NO: 2262266 - RNA, 15 nt, Human
uacuugucaaagaag

SEQ ID NO: 2262267 - RNA, 16 nt, Human
uacuugucaaagaagg

SEQ ID NO: 2262268 - RNA, 18 nt, Human
uacuugucaaagaagguu

SEQ ID NO: 2262269 - RNA, 19 nt, Human
uacuugaagggccagagcc

SEQ ID NO: 2262270 - RNA, 18 nt, Human
uacuugaagggccagagc

SEQ ID NO: 2262271 - RNA, 20 nt, Human
uacuugaagggccagagcca

SEQ ID NO: 2262272 - RNA, 14 nt, Human
uacuugucaaagaa

SEQ ID NO: 2262273 - RNA, 13 nt, Human
uacuugcucuuga

SEQ ID NO: 2262274 - RNA, 14 nt, Human
uacuugcucuugau

SEQ ID NO: 2262275 - RNA, 18 nt, Human
uacuugcucuugaugccu

SEQ ID NO: 2262276 - RNA, 19 nt, Human
uacuugcucuugaugccug

SEQ ID NO: 2262277 - RNA, 13 nt, Human
uaccuucauuuca

SEQ ID NO: 2262278 - RNA, 14 nt, Human
uaccuucauuucag

SEQ ID NO: 2262279 - RNA, 20 nt, Human
uaccuuccagucaggaugac

SEQ ID NO: 2262280 - RNA, 20 nt, Human
uaccuucaauaaaguaucua

SEQ ID NO: 2262281 - RNA, 17 nt, Human
uaccuucaauaaaguau

SEQ ID NO: 2262282 - RNA, 16 nt, Human
uaccuucaauaaagua

SEQ ID NO: 2262283 - RNA, 14 nt, Human
uaccuucaauaaag

SEQ ID NO: 2262284 - RNA, 13 nt, Human
uaccuucaauaaa

SEQ ID NO: 2262285 - RNA, 21 nt, Human
uaccuuagauuagcucuggac

SEQ ID NO: 2262286 - RNA, 22 nt, Human
uaccuuagauuagcucuggacc

SEQ ID NO: 2262287 - RNA, 21 nt, Human
uaccuuuugaggagccccagc

SEQ ID NO: 2262288 - RNA, 12 nt, Human
uaccuuccaguc

SEQ ID NO: 2262289 - RNA, 21 nt, Human
uaccuuuuaacaccugaugug

SEQ ID NO: 2262290 - RNA, 16 nt, Human
uaccuuuuaauuaaug

SEQ ID NO: 2262291 - RNA, 13 nt, Human
uaccuuuuuuaga

SEQ ID NO: 2262292 - RNA, 22 nt, Human
uaccuuuuuuagaguugauacu

SEQ ID NO: 2262293 - RNA, 19 nt, Human
uaccuuuuuuagaguugau

SEQ ID NO: 2262294 - RNA, 11 nt, Human
uaccuccuccu

SEQ ID NO: 2262295 - RNA, 13 nt, Human
uaccuccugagaa

SEQ ID NO: 2262296 - RNA, 17 nt, Human
uaccuccucagggaugg

SEQ ID NO: 2262297 - RNA, 23 nt, Human
uaccuccucagggauggccguug

SEQ ID NO: 2262298 - RNA, 16 nt, Human
uaccuccugcccagga

SEQ ID NO: 2262299 - RNA, 15 nt, Human
uaccuccugcccagg

SEQ ID NO: 2262300 - RNA, 14 nt, Human
uaccuccugucucu

SEQ ID NO: 2262301 - RNA, 15 nt, Human
uaccuccugucucug

SEQ ID NO: 2262302 - RNA, 13 nt, Human
uaccuccugccca

SEQ ID NO: 2262303 - RNA, 11 nt, Human
uaccuccugcc

SEQ ID NO: 2262304 - RNA, 14 nt, Human
uaccuccugagaaa

SEQ ID NO: 2262305 - RNA, 18 nt, Human
uaccucggugccuuccuc

SEQ ID NO: 2262306 - RNA, 17 nt, Human
uaccucucuuauagaau

SEQ ID NO: 2262307 - RNA, 21 nt, Human
uaccucucuuauagaauauuu

SEQ ID NO: 2262308 - RNA, 23 nt, Human
uaccucucuuauagaauauuuau

SEQ ID NO: 2262309 - RNA, 14 nt, Human
uaccucugauaccu

SEQ ID NO: 2262310 - RNA, 15 nt, Human
uaccucugauaccuc

SEQ ID NO: 2262311 - RNA, 17 nt, Human
uaccucugauaccucaa

SEQ ID NO: 2262312 - RNA, 21 nt, Human
uaccucuugagccuugaacuu

SEQ ID NO: 2262313 - RNA, 17 nt, Human
uaccucuuauugcaaaa

SEQ ID NO: 2262314 - RNA, 22 nt, Human
uaccuuacuguggaggaaggau

SEQ ID NO: 2262315 - RNA, 16 nt, Human
uaccuuagauuagcuc

SEQ ID NO: 2262316 - RNA, 20 nt, Human
uaccuuagauuagcucugga

SEQ ID NO: 2262317 - RNA, 12 nt, Human
uaccucugugug

SEQ ID NO: 2262318 - RNA, 14 nt, Human
uaccucugugugcu

SEQ ID NO: 2262319 - RNA, 14 nt, Human
uaccucuuagcuga

SEQ ID NO: 2262320 - RNA, 15 nt, Human
uaccucuuagcugag

SEQ ID NO: 2262321 - RNA, 16 nt, Human
uaccucuuagcugagu

SEQ ID NO: 2262322 - RNA, 14 nt, Human
uaccucuuauugca

SEQ ID NO: 2262323 - RNA, 15 nt, Human
uacuaagaaaagaua

SEQ ID NO: 2262324 - RNA, 14 nt, Human
uacuaagaagaaaa

SEQ ID NO: 2262325 - RNA, 15 nt, Human
uacuaagaagaaaau

SEQ ID NO: 2262326 - RNA, 15 nt, Human
uacuaaagaaagauu

SEQ ID NO: 2262327 - RNA, 16 nt, Human
uacuaaagaaagauua

SEQ ID NO: 2262328 - RNA, 13 nt, Human
uacuaacuuuccu

SEQ ID NO: 2262329 - RNA, 23 nt, Human
uacuaacaaucagcuccuuccug

SEQ ID NO: 2262330 - RNA, 18 nt, Human
uacuaaacauuuuguuau

SEQ ID NO: 2262331 - RNA, 14 nt, Human
uacuaaagaaagau

SEQ ID NO: 2262332 - RNA, 14 nt, Human
uacuaaggaaucuu

SEQ ID NO: 2262333 - RNA, 20 nt, Human
uacuaagcauagcaaacaga

SEQ ID NO: 2262334 - RNA, 18 nt, Human
uacuaaggaguaaucugu

SEQ ID NO: 2262335 - RNA, 22 nt, Human
uacuaagcuuugccagcugcug

SEQ ID NO: 2262336 - RNA, 15 nt, Human
uacuaagaugacauu

SEQ ID NO: 2262337 - RNA, 19 nt, Human
uacuaagaugacauugcua

SEQ ID NO: 2262338 - RNA, 21 nt, Human
uacuaauagacaauuuauuau

SEQ ID NO: 2262339 - RNA, 20 nt, Human
uacuaauagacaauuuauua

SEQ ID NO: 2262340 - RNA, 21 nt, Human
uaccuuuuuugauaaaguuuc

SEQ ID NO: 2262341 - RNA, 20 nt, Human
uaccuuuuuauuugcaugug

SEQ ID NO: 2262342 - RNA, 17 nt, Human
uaccuuuuuuauacaua

SEQ ID NO: 2262343 - RNA, 16 nt, Human
uaccuuuuuuauacau

SEQ ID NO: 2262344 - RNA, 13 nt, Human
uaccuuuuuuaua

SEQ ID NO: 2262345 - RNA, 18 nt, Human
uacgaaaagaggggaaga

SEQ ID NO: 2262346 - RNA, 21 nt, Human
uacgaaaagaggggaagagac

SEQ ID NO: 2262347 - RNA, 17 nt, Human
uaccuaauuagagcaga

SEQ ID NO: 2262348 - RNA, 20 nt, Human
uaccuaauuagagcagauga

SEQ ID NO: 2262349 - RNA, 23 nt, Human
uaccuacauguauuuguuugcau

SEQ ID NO: 2262350 - RNA, 13 nt, Human
uaccuacauguau

SEQ ID NO: 2262351 - RNA, 15 nt, Human
uaccuacauacaauu

SEQ ID NO: 2262352 - RNA, 15 nt, Human
uaccuaauuagagca

SEQ ID NO: 2262353 - RNA, 22 nt, Human
uaccuaaacagauauaaauggc

SEQ ID NO: 2262354 - RNA, 15 nt, Human
uaccuaacauuauuu

SEQ ID NO: 2262355 - RNA, 21 nt, Human
uaccuaaaagagauuucaaga

SEQ ID NO: 2262356 - RNA, 14 nt, Human
uaccuaaacagaua

SEQ ID NO: 2262357 - RNA, 15 nt, Human
uaccuaaacagauau

SEQ ID NO: 2262358 - RNA, 19 nt, Human
uaccuaaacagauauaaau

SEQ ID NO: 2262359 - RNA, 18 nt, Human
uaccuaccacagugucug

SEQ ID NO: 2262360 - RNA, 17 nt, Human
uaccuaccacagugucu

SEQ ID NO: 2262361 - RNA, 16 nt, Human
uaccuaccacaguguc

SEQ ID NO: 2262362 - RNA, 20 nt, Human
uaccuaccacagugucugua

SEQ ID NO: 2262363 - RNA, 13 nt, Human
uaccuacuuugac

SEQ ID NO: 2262364 - RNA, 13 nt, Human
uaccuagauuuac

SEQ ID NO: 2262365 - RNA, 21 nt, Human
uaccuacuuugacuuuuugca

SEQ ID NO: 2262366 - RNA, 14 nt, Human
uaccuacuuugacu

SEQ ID NO: 2262367 - RNA, 16 nt, Human
uaccuaucaucuuaag

SEQ ID NO: 2262368 - RNA, 19 nt, Human
uaccuauaaaguaaagcua

SEQ ID NO: 2262369 - RNA, 15 nt, Human
uaccucaggcaggaa

SEQ ID NO: 2262370 - RNA, 14 nt, Human
uaccucaggcagga

SEQ ID NO: 2262371 - RNA, 17 nt, Human
uaccucaggcagcucaa

SEQ ID NO: 2262372 - RNA, 18 nt, Human
uaccucaggcagcucaag

SEQ ID NO: 2262373 - RNA, 14 nt, Human
uaccucaggcagcu

SEQ ID NO: 2262374 - RNA, 16 nt, Human
uaccucaggcagcuca

SEQ ID NO: 2262375 - RNA, 13 nt, Human
uaccuccucaggg

SEQ ID NO: 2262376 - RNA, 15 nt, Human
uaccuccucagggau

SEQ ID NO: 2262377 - RNA, 21 nt, Human
uaccucagguugcugguugcu

SEQ ID NO: 2262378 - RNA, 12 nt, Human
uaccucagguug

SEQ ID NO: 2262379 - RNA, 14 nt, Human
uaccucagguugcu

SEQ ID NO: 2262380 - RNA, 20 nt, Human
uaccucagguugcugguugc

SEQ ID NO: 2262381 - RNA, 13 nt, Human
uaccucagucagu

SEQ ID NO: 2262382 - RNA, 14 nt, Human
uaccucagccuaga

SEQ ID NO: 2262383 - RNA, 12 nt, Human
uaccucagccua

SEQ ID NO: 2262384 - RNA, 16 nt, Human
uaccucagccuagacc

SEQ ID NO: 2262385 - RNA, 18 nt, Human
uaccucacccugcuacac

SEQ ID NO: 2262386 - RNA, 15 nt, Human
uaccucacugggguc

SEQ ID NO: 2262387 - RNA, 11 nt, Human
uaccucagccu

SEQ ID NO: 2262388 - RNA, 15 nt, Human
uaccucacccugcua

SEQ ID NO: 2262389 - RNA, 16 nt, Human
uaccuagauuuacagc

SEQ ID NO: 2262390 - RNA, 23 nt, Human
uaccuauauaauaaagcuacuga

SEQ ID NO: 2262391 - RNA, 13 nt, Human
uaccuauguaaca

SEQ ID NO: 2262392 - RNA, 20 nt, Human
uaccuauuuucauuguaaaa

SEQ ID NO: 2262393 - RNA, 13 nt, Human
uaccuauuuucau

SEQ ID NO: 2262394 - RNA, 17 nt, Human
uaccucaaccuauggua

SEQ ID NO: 2262395 - RNA, 22 nt, Human
uaccucaacccccauuucuauu

SEQ ID NO: 2262396 - RNA, 16 nt, Human
uacauggccaguguga

SEQ ID NO: 2262397 - RNA, 22 nt, Human
uacauggcagaguuuguguguu

SEQ ID NO: 2262398 - RNA, 14 nt, Human
uacauuuuuacaau

SEQ ID NO: 2262399 - RNA, 15 nt, Human
uacauuuuuacaaua

SEQ ID NO: 2262400 - RNA, 16 nt, Human
uacauuuuuacaauaa

SEQ ID NO: 2262401 - RNA, 23 nt, Human
uacauuuuuaagugcugcauuua

SEQ ID NO: 2262402 - RNA, 21 nt, Human
uacauuuuuacaauaaauaau

SEQ ID NO: 2262403 - RNA, 17 nt, Human
uacauuuuuacaauaaa

SEQ ID NO: 2262404 - RNA, 19 nt, Human
uacauuuuuacaauaaaua

SEQ ID NO: 2262405 - RNA, 15 nt, Human
uacccacugcucugg

SEQ ID NO: 2262406 - RNA, 22 nt, Human
uaccaaaaaucucaauauuuca

SEQ ID NO: 2262407 - RNA, 16 nt, Human
uacccagagaagcccc

SEQ ID NO: 2262408 - RNA, 21 nt, Human
uacccacuucuaaauagcaau

SEQ ID NO: 2262409 - RNA, 18 nt, Human
uacccagagaagccccuu

SEQ ID NO: 2262410 - RNA, 19 nt, Human
uacccagagaagccccuuc

SEQ ID NO: 2262411 - RNA, 21 nt, Human
uacccagagaagccccuuccc

SEQ ID NO: 2262412 - RNA, 15 nt, Human
uacccagagaauaua

SEQ ID NO: 2262413 - RNA, 20 nt, Human
uacccagagaauauauacau

SEQ ID NO: 2262414 - RNA, 13 nt, Human
uacccagagcauu

SEQ ID NO: 2262415 - RNA, 14 nt, Human
uacccagccaucug

SEQ ID NO: 2262416 - RNA, 23 nt, Human
uaccuaaaaggaaaucucacccc

SEQ ID NO: 2262417 - RNA, 22 nt, Human
uaccuaaaaggaaaucucaccc

SEQ ID NO: 2262418 - RNA, 19 nt, Human
uaccuaaaaggaaaucuca

SEQ ID NO: 2262419 - RNA, 14 nt, Human
uaccguuucuuccc

SEQ ID NO: 2262420 - RNA, 15 nt, Human
uaccguuucuucccu

SEQ ID NO: 2262421 - RNA, 22 nt, Human
uaccuaacgaaguauccuucag

SEQ ID NO: 2262422 - RNA, 22 nt, Human
uaccgagucucuucuccacugg

SEQ ID NO: 2262423 - RNA, 14 nt, Human
uaccgcguuguaaa

SEQ ID NO: 2262424 - RNA, 16 nt, Human
uaccgcguuguaaaau

SEQ ID NO: 2262425 - RNA, 15 nt, Human
uaccgcguuguaaaa

SEQ ID NO: 2262426 - RNA, 19 nt, Human
uaccgugagcgacaaagau

SEQ ID NO: 2262427 - RNA, 20 nt, Human
uacccagccaucugcccagg

SEQ ID NO: 2262428 - RNA, 23 nt, Human
uacccagccaucugcccaggggu

SEQ ID NO: 2262429 - RNA, 16 nt, Human
uacccagccaucugcc

SEQ ID NO: 2262430 - RNA, 17 nt, Human
uacccagccaucugccc

SEQ ID NO: 2262431 - RNA, 18 nt, Human
uacccagccaucugccca

SEQ ID NO: 2262432 - RNA, 19 nt, Human
uacccagccaucugcccag

SEQ ID NO: 2262433 - RNA, 17 nt, Human
uaccgaaaccuugccuu

SEQ ID NO: 2262434 - RNA, 18 nt, Human
uaccgaaaccuugccuuu

SEQ ID NO: 2262435 - RNA, 19 nt, Human
uaccgaaaccuugccuuuc

SEQ ID NO: 2262436 - RNA, 17 nt, Human
uaccgagucucuucucc

SEQ ID NO: 2262437 - RNA, 18 nt, Human
uaccgagucucuucucca

SEQ ID NO: 2262438 - RNA, 21 nt, Human
uaccgagucucuucuccacug

SEQ ID NO: 2262439 - RNA, 17 nt, Human
uagaccuuguuacuucu

SEQ ID NO: 2262440 - RNA, 19 nt, Human
uagaccuuguuacuucuga

SEQ ID NO: 2262441 - RNA, 23 nt, Human
uagacuaaggccauuauuguacu

SEQ ID NO: 2262442 - RNA, 19 nt, Human
uagacucaucuuacuguac

SEQ ID NO: 2262443 - RNA, 17 nt, Human
uagacucaucuuacugu

SEQ ID NO: 2262444 - RNA, 18 nt, Human
uagacucaucuuacugua

SEQ ID NO: 2262445 - RNA, 21 nt, Human
uagacucaucuuacuguaccu

SEQ ID NO: 2262446 - RNA, 18 nt, Human
uagacuucgacucaggau

SEQ ID NO: 2262447 - RNA, 18 nt, Human
uagacuuaauagaaacau

SEQ ID NO: 2262448 - RNA, 20 nt, Human
uagacuucgacucaggaucc

SEQ ID NO: 2262449 - RNA, 22 nt, Human
uagacuucgacucaggauccag

SEQ ID NO: 2262450 - RNA, 19 nt, Human
uagacuucugcuuuccaca

SEQ ID NO: 2262451 - RNA, 22 nt, Human
uagacuucugcuuuccacaccu

SEQ ID NO: 2262452 - RNA, 23 nt, Human
uagacuguugggguggguauaaa

SEQ ID NO: 2262453 - RNA, 17 nt, Human
uagacucuuacuuuuua

SEQ ID NO: 2262454 - RNA, 20 nt, Human
uagacucuuacuuuuuaaaa

SEQ ID NO: 2262455 - RNA, 13 nt, Human
uagacucuuacuu

SEQ ID NO: 2262456 - RNA, 16 nt, Human
uagacucuuacuuuuu

SEQ ID NO: 2262457 - RNA, 23 nt, Human
uagaccauuuaucugggauuaug

SEQ ID NO: 2262458 - RNA, 15 nt, Human
uagacccaucuucuu

SEQ ID NO: 2262459 - RNA, 20 nt, Human
uagacccacuggacucaccu

SEQ ID NO: 2262460 - RNA, 22 nt, Human
uagaccacaaauagugcucgcu

SEQ ID NO: 2262461 - RNA, 21 nt, Human
uagaauucccucucucugacu

SEQ ID NO: 2262462 - RNA, 16 nt, Human
uagaauuccuucaggg

SEQ ID NO: 2262463 - RNA, 23 nt, Human
uagaauuccuucagggugaugcc

SEQ ID NO: 2262464 - RNA, 16 nt, Human
uagaauucuagugcug

SEQ ID NO: 2262465 - RNA, 18 nt, Human
uagaauucuagugcugcu

SEQ ID NO: 2262466 - RNA, 19 nt, Human
uagaauucuagugcugcug

SEQ ID NO: 2262467 - RNA, 20 nt, Human
uagaauucuagugcugcuga

SEQ ID NO: 2262468 - RNA, 22 nt, Human
uagaauucuagugcugcugaag

SEQ ID NO: 2262469 - RNA, 11 nt, Human
uagagacaggg

SEQ ID NO: 2262470 - RNA, 22 nt, Human
uagagaaggacccggaggggcc

SEQ ID NO: 2262471 - RNA, 19 nt, Human
uagagaaguauacauaagu

SEQ ID NO: 2262472 - RNA, 13 nt, Human
uagagaaggaccc

SEQ ID NO: 2262473 - RNA, 21 nt, Human
uagagacagaagcaggcugga

SEQ ID NO: 2262474 - RNA, 23 nt, Human
uagagguaccagcaauauguaaa

SEQ ID NO: 2262475 - RNA, 14 nt, Human
uagagacagaagca

SEQ ID NO: 2262476 - RNA, 15 nt, Human
uagagacagaagcag

SEQ ID NO: 2262477 - RNA, 18 nt, Human
uagagacagaagcaggcu

SEQ ID NO: 2262478 - RNA, 15 nt, Human
uagagguucaaagau

SEQ ID NO: 2262479 - RNA, 14 nt, Human
uagagguucaaaga

SEQ ID NO: 2262480 - RNA, 12 nt, Human
uagagugggagc

SEQ ID NO: 2262481 - RNA, 15 nt, Human
uagagugagggccug

SEQ ID NO: 2262482 - RNA, 16 nt, Human
uagagugagggccuga

SEQ ID NO: 2262483 - RNA, 15 nt, Human
uagagugucuuucca

SEQ ID NO: 2262484 - RNA, 19 nt, Human
uagagugagggccugaggu

SEQ ID NO: 2262485 - RNA, 13 nt, Human
uagaguccucacu

SEQ ID NO: 2262486 - RNA, 16 nt, Human
uagaggugagggaagc

SEQ ID NO: 2262487 - RNA, 20 nt, Human
uagaguccucacucccaguc

SEQ ID NO: 2262488 - RNA, 17 nt, Human
uagagucugaacagcug

SEQ ID NO: 2262489 - RNA, 14 nt, Human
uagaguccucacuc

SEQ ID NO: 2262490 - RNA, 17 nt, Human
uagaguugauacuacag

SEQ ID NO: 2262491 - RNA, 14 nt, Human
uagaguugauacua

SEQ ID NO: 2262492 - RNA, 13 nt, Human
uagaguuagacug

SEQ ID NO: 2262493 - RNA, 14 nt, Human
uagaguuagacugu

SEQ ID NO: 2262494 - RNA, 16 nt, Human
uagaguuaagaagcug

SEQ ID NO: 2262495 - RNA, 17 nt, Human
uagaguuaagaagcugu

SEQ ID NO: 2262496 - RNA, 19 nt, Human
uagaguuaagaagcuguug

SEQ ID NO: 2262497 - RNA, 23 nt, Human
uagaguuaagaagcuguuguaca

SEQ ID NO: 2262498 - RNA, 16 nt, Human
uagaguguuguugaga

SEQ ID NO: 2262499 - RNA, 18 nt, Human
uagaguguuguugagaau

SEQ ID NO: 2262500 - RNA, 15 nt, Human
uagaguuaacaauga

SEQ ID NO: 2262501 - RNA, 17 nt, Human
uagaguuaacaaugaua

SEQ ID NO: 2262502 - RNA, 12 nt, Human
uagaguuaagaa

SEQ ID NO: 2262503 - RNA, 13 nt, Human
uagaguuaagaag

SEQ ID NO: 2262504 - RNA, 15 nt, Human
uagaguuaagaagcu

SEQ ID NO: 2262505 - RNA, 13 nt, Human
uacuuguucaaaa

SEQ ID NO: 2262506 - RNA, 23 nt, Human
uacuuguggacuaaaagauauaa

SEQ ID NO: 2262507 - RNA, 20 nt, Human
uacuuguggacuaaaagaua

SEQ ID NO: 2262508 - RNA, 22 nt, Human
uacuuguggacuaaaagauaua

SEQ ID NO: 2262509 - RNA, 22 nt, Human
uacuuguucaaaauauguucuu

SEQ ID NO: 2262510 - RNA, 14 nt, Human
uacuuguggacaca

SEQ ID NO: 2262511 - RNA, 15 nt, Human
uacuuguggacuaaa

SEQ ID NO: 2262512 - RNA, 16 nt, Human
uacuuguggacuaaaa

SEQ ID NO: 2262513 - RNA, 19 nt, Human
uacuuguggacuaaaagau

SEQ ID NO: 2262514 - RNA, 20 nt, Human
uagaagugggccaggacagg

SEQ ID NO: 2262515 - RNA, 16 nt, Human
uagaagugggccagga

SEQ ID NO: 2262516 - RNA, 20 nt, Human
uagaaguggaccaggacagg

SEQ ID NO: 2262517 - RNA, 19 nt, Human
uagaaguggaccaggacag

SEQ ID NO: 2262518 - RNA, 18 nt, Human
uagaaguggaccaggaca

SEQ ID NO: 2262519 - RNA, 16 nt, Human
uagaaguggaccagga

SEQ ID NO: 2262520 - RNA, 21 nt, Human
uacuuuaaaggaaaaaauguu

SEQ ID NO: 2262521 - RNA, 14 nt, Human
uacuuuaaaggaaa

SEQ ID NO: 2262522 - RNA, 15 nt, Human
uacuuuaaaggaaaa

SEQ ID NO: 2262523 - RNA, 20 nt, Human
uacuuuaaaggaaaaaaugu

SEQ ID NO: 2262524 - RNA, 18 nt, Human
uagaauauaauuaucgga

SEQ ID NO: 2262525 - RNA, 15 nt, Human
uagaauauaauuauc

SEQ ID NO: 2262526 - RNA, 23 nt, Human
uagaauaguguucugcaaaaaua

SEQ ID NO: 2262527 - RNA, 12 nt, Human
uagaauauuuau

SEQ ID NO: 2262528 - RNA, 15 nt, Human
uagaauauuuauuac

SEQ ID NO: 2262529 - RNA, 19 nt, Human
uagaauauuuauuaccucu

SEQ ID NO: 2262530 - RNA, 21 nt, Human
uagaaucagccuaggggucag

SEQ ID NO: 2262531 - RNA, 14 nt, Human
uagaauccaaacuu

SEQ ID NO: 2262532 - RNA, 20 nt, Human
uagaauauuuauuaccucug

SEQ ID NO: 2262533 - RNA, 16 nt, Human
uagaauauccuacuuc

SEQ ID NO: 2262534 - RNA, 19 nt, Human
uagaagugggccaggacag

SEQ ID NO: 2262535 - RNA, 15 nt, Human
uagaaguuacugaau

SEQ ID NO: 2262536 - RNA, 20 nt, Human
uagaaguuacugaaugcacc

SEQ ID NO: 2262537 - RNA, 16 nt, Human
uagaaguuacugaaug

SEQ ID NO: 2262538 - RNA, 18 nt, Human
uagaaguuguuugucauc

SEQ ID NO: 2262539 - RNA, 13 nt, Human
uagaaguuuuugu

SEQ ID NO: 2262540 - RNA, 14 nt, Human
uagaaguuuuugua

SEQ ID NO: 2262541 - RNA, 16 nt, Human
uagaaguuuuuguacu

SEQ ID NO: 2262542 - RNA, 18 nt, Human
uagaaguuuuuguacugu

SEQ ID NO: 2262543 - RNA, 22 nt, Human
uagaaguuuuuguacuguaaag

SEQ ID NO: 2262544 - RNA, 14 nt, Human
uagaauaaaauugu

SEQ ID NO: 2262545 - RNA, 23 nt, Human
uagaauaccacaggaaccacaag

SEQ ID NO: 2262546 - RNA, 15 nt, Human
uagaauaaaauugua

SEQ ID NO: 2262547 - RNA, 19 nt, Human
uagaauaaaauuguaaaau

SEQ ID NO: 2262548 - RNA, 12 nt, Human
uagaauuauuua

SEQ ID NO: 2262549 - RNA, 15 nt, Human
uagaauuauuuaaac

SEQ ID NO: 2262550 - RNA, 15 nt, Human
uagaauucccucucu

SEQ ID NO: 2262551 - RNA, 19 nt, Human
uagaauucccucucucuga

SEQ ID NO: 2262552 - RNA, 20 nt, Human
uagaauucccucucucugac

SEQ ID NO: 2262553 - RNA, 16 nt, Human
uagaauuauuuaaaca

SEQ ID NO: 2262554 - RNA, 23 nt, Human
uagaauuaguggcacuugcuuuu

SEQ ID NO: 2262555 - RNA, 18 nt, Human
uagaauuaacacaugauc

SEQ ID NO: 2262556 - RNA, 16 nt, Human
uagaauuaacacauga

SEQ ID NO: 2262557 - RNA, 15 nt, Human
uagaauuaacacaug

SEQ ID NO: 2262558 - RNA, 17 nt, Human
uagaaugaaaacucauu

SEQ ID NO: 2262559 - RNA, 12 nt, Human
uagaaucuggag

SEQ ID NO: 2262560 - RNA, 12 nt, Human
uagaaugaaaau

SEQ ID NO: 2262561 - RNA, 20 nt, Human
uagaaugaaaauuguauguu

SEQ ID NO: 2262562 - RNA, 21 nt, Human
uagaaugauuucaugcuaucu

SEQ ID NO: 2262563 - RNA, 23 nt, Human
uagaauccaaacuuggauuuuug

SEQ ID NO: 2262564 - RNA, 15 nt, Human
uagaauccaaacuug

SEQ ID NO: 2262565 - RNA, 16 nt, Human
uagaaugauuucaugc

SEQ ID NO: 2262566 - RNA, 18 nt, Human
uagaauguguuuucugaa

SEQ ID NO: 2262567 - RNA, 20 nt, Human
uagaauguguuuucugaaua

SEQ ID NO: 2262568 - RNA, 13 nt, Human
uagaauguguuuu

SEQ ID NO: 2262569 - RNA, 22 nt, Human
uagaauguauuguaccuuuuaa

SEQ ID NO: 2262570 - RNA, 17 nt, Human
uagaauguauuguaccu

SEQ ID NO: 2262571 - RNA, 18 nt, Human
uagaauguauuguaccuu

SEQ ID NO: 2262572 - RNA, 13 nt, Human
uagaauguauugu

SEQ ID NO: 2262573 - RNA, 16 nt, Human
uagaauguauuguacc

SEQ ID NO: 2262574 - RNA, 19 nt, Human
uagccgagagccugcuccc

SEQ ID NO: 2262575 - RNA, 19 nt, Human
uagccgggcaugguggcgc

SEQ ID NO: 2262576 - RNA, 18 nt, Human
uagccgagagccugcucc

SEQ ID NO: 2262577 - RNA, 17 nt, Human
uagccgagagccugcuc

SEQ ID NO: 2262578 - RNA, 15 nt, Human
uagccgagagccugc

SEQ ID NO: 2262579 - RNA, 14 nt, Human
uagccgagagccug

SEQ ID NO: 2262580 - RNA, 17 nt, Human
uagccgaccucagccuu

SEQ ID NO: 2262581 - RNA, 16 nt, Human
uagccgaccucagccu

SEQ ID NO: 2262582 - RNA, 12 nt, Human
uagcccgccugc

SEQ ID NO: 2262583 - RNA, 16 nt, Human
uagccuaggugacaga

SEQ ID NO: 2262584 - RNA, 20 nt, Human
uagccuaacacacuccaaga

SEQ ID NO: 2262585 - RNA, 18 nt, Human
uagcccccaggcugcugg

SEQ ID NO: 2262586 - RNA, 18 nt, Human
uagcccccacccacuucc

SEQ ID NO: 2262587 - RNA, 15 nt, Human
uagcccccacccacu

SEQ ID NO: 2262588 - RNA, 19 nt, Human
uagcccccaggcugcugga

SEQ ID NO: 2262589 - RNA, 15 nt, Human
uagcccccuggccuc

SEQ ID NO: 2262590 - RNA, 18 nt, Human
uagcccccuggccucugu

SEQ ID NO: 2262591 - RNA, 17 nt, Human
uagcccccuggccucug

SEQ ID NO: 2262592 - RNA, 16 nt, Human
uagcccccuggccucu

SEQ ID NO: 2262593 - RNA, 18 nt, Human
uagccccuuagcccccac

SEQ ID NO: 2262594 - RNA, 15 nt, Human
uagcccgaauacaaa

SEQ ID NO: 2262595 - RNA, 16 nt, Human
uagcccgaauacaaac

SEQ ID NO: 2262596 - RNA, 16 nt, Human
uagccccucuccugga

SEQ ID NO: 2262597 - RNA, 20 nt, Human
uagcaugacaagccccaggc

SEQ ID NO: 2262598 - RNA, 18 nt, Human
uagcaugacaagccccag

SEQ ID NO: 2262599 - RNA, 17 nt, Human
uagcaugacaagcccca

SEQ ID NO: 2262600 - RNA, 16 nt, Human
uagcaugacaagcccc

SEQ ID NO: 2262601 - RNA, 22 nt, Human
uagcaugacaagccccaggcag

SEQ ID NO: 2262602 - RNA, 21 nt, Human
uagcaugacaagccccaggca

SEQ ID NO: 2262603 - RNA, 16 nt, Human
uagcaugacauuucuu

SEQ ID NO: 2262604 - RNA, 15 nt, Human
uagcaugacauuucu

SEQ ID NO: 2262605 - RNA, 19 nt, Human
uagcaugaggccacugcug

SEQ ID NO: 2262606 - RNA, 22 nt, Human
uagccaggguguggcccugcca

SEQ ID NO: 2262607 - RNA, 16 nt, Human
uagccaguugaauuua

SEQ ID NO: 2262608 - RNA, 13 nt, Human
uagccccauaauu

SEQ ID NO: 2262609 - RNA, 13 nt, Human
uagccaggaucau

SEQ ID NO: 2262610 - RNA, 15 nt, Human
uagccaggaucaugg

SEQ ID NO: 2262611 - RNA, 18 nt, Human
uagccaggaucauggugu

SEQ ID NO: 2262612 - RNA, 20 nt, Human
uagccaggaucaugguguaa

SEQ ID NO: 2262613 - RNA, 22 nt, Human
uagccaggaucaugguguaaua

SEQ ID NO: 2262614 - RNA, 23 nt, Human
uagccaggaucaugguguaauaa

SEQ ID NO: 2262615 - RNA, 22 nt, Human
uagccagggggacuagccccug

SEQ ID NO: 2262616 - RNA, 18 nt, Human
uagccagcugcuccccag

SEQ ID NO: 2262617 - RNA, 15 nt, Human
uagccagcugcuccc

SEQ ID NO: 2262618 - RNA, 14 nt, Human
uagccagcugcucc

SEQ ID NO: 2262619 - RNA, 20 nt, Human
uagccagcacacagggcagu

SEQ ID NO: 2262620 - RNA, 19 nt, Human
uagccagcacuuguauaua

SEQ ID NO: 2262621 - RNA, 20 nt, Human
uagccuaauacaacauguag

SEQ ID NO: 2262622 - RNA, 17 nt, Human
uagccugggccacaggg

SEQ ID NO: 2262623 - RNA, 14 nt, Human
uagccugggguggg

SEQ ID NO: 2262624 - RNA, 22 nt, Human
uagccuggauauuauucuugua

SEQ ID NO: 2262625 - RNA, 20 nt, Human
uagccugugccucugggacu

SEQ ID NO: 2262626 - RNA, 18 nt, Human
uagccugugccucuggga

SEQ ID NO: 2262627 - RNA, 11 nt, Human
uagcucaguuu

SEQ ID NO: 2262628 - RNA, 12 nt, Human
uagcucauucuc

SEQ ID NO: 2262629 - RNA, 20 nt, Human
uagcucaggugucccugcac

SEQ ID NO: 2262630 - RNA, 21 nt, Human
uagcucaggugucccugcacu

SEQ ID NO: 2262631 - RNA, 11 nt, Human
uagcugagugu

SEQ ID NO: 2262632 - RNA, 17 nt, Human
uagcugagcgugguggc

SEQ ID NO: 2262633 - RNA, 21 nt, Human
uagcugaugaacuuauucugu

SEQ ID NO: 2262634 - RNA, 23 nt, Human
uagcugaugaacuuauucuguag

SEQ ID NO: 2262635 - RNA, 12 nt, Human
uagcugcagaac

SEQ ID NO: 2262636 - RNA, 11 nt, Human
uagcugcagaa

SEQ ID NO: 2262637 - RNA, 21 nt, Human
uagcugcauccuccaagaauc

SEQ ID NO: 2262638 - RNA, 17 nt, Human
uagcugcaaaggacaga

SEQ ID NO: 2262639 - RNA, 23 nt, Human
uagcugcacagggcagcugggcc

SEQ ID NO: 2262640 - RNA, 16 nt, Human
uagcugcaaaggacag

SEQ ID NO: 2262641 - RNA, 21 nt, Human
uagcugacccagccccuugag

SEQ ID NO: 2262642 - RNA, 23 nt, Human
uagcugacccagccccuugagaa

SEQ ID NO: 2262643 - RNA, 12 nt, Human
uagcucaguuua

SEQ ID NO: 2262644 - RNA, 12 nt, Human
uagcugggacua

SEQ ID NO: 2262645 - RNA, 15 nt, Human
uagcugggacuacag

SEQ ID NO: 2262646 - RNA, 17 nt, Human
uagcugggacuacaggc

SEQ ID NO: 2262647 - RNA, 19 nt, Human
uagcugggacuacaggcac

SEQ ID NO: 2262648 - RNA, 11 nt, Human
uagauagaaau

SEQ ID NO: 2262649 - RNA, 21 nt, Human
uagauagaaauaaauagcuau

SEQ ID NO: 2262650 - RNA, 12 nt, Human
uagauagaaaua

SEQ ID NO: 2262651 - RNA, 23 nt, Human
uagauagaaauaaauagcuauau

SEQ ID NO: 2262652 - RNA, 14 nt, Human
uagauaggccaugg

SEQ ID NO: 2262653 - RNA, 16 nt, Human
uagauacuguaucaug

SEQ ID NO: 2262654 - RNA, 17 nt, Human
uagaguuagacuguugg

SEQ ID NO: 2262655 - RNA, 15 nt, Human
uagaguuagacuguu

SEQ ID NO: 2262656 - RNA, 16 nt, Human
uagaguuagacuguug

SEQ ID NO: 2262657 - RNA, 21 nt, Human
uagauuacccccucauuguuu

SEQ ID NO: 2262658 - RNA, 17 nt, Human
uagauuauggagcuuuu

SEQ ID NO: 2262659 - RNA, 20 nt, Human
uagauuagaucuuuuaagcc

SEQ ID NO: 2262660 - RNA, 14 nt, Human
uagauuagcucugg

SEQ ID NO: 2262661 - RNA, 15 nt, Human
uagauuagcucugga

SEQ ID NO: 2262662 - RNA, 16 nt, Human
uagauuauggagcuuu

SEQ ID NO: 2262663 - RNA, 16 nt, Human
uagauuagcucuggac

SEQ ID NO: 2262664 - RNA, 18 nt, Human
uagauuagcucuggacca

SEQ ID NO: 2262665 - RNA, 24 nt, Human
uagauuuggcuccucugcuucuca

SEQ ID NO: 2262666 - RNA, 12 nt, Human
uagauuugaccu

SEQ ID NO: 2262667 - RNA, 13 nt, Human
uagauuugaccua

SEQ ID NO: 2262668 - RNA, 20 nt, Human
uagauuuggcuccucugcuu

SEQ ID NO: 2262669 - RNA, 15 nt, Human
uagauuuauuucauc

SEQ ID NO: 2262670 - RNA, 14 nt, Human
uagauuuauuucau

SEQ ID NO: 2262671 - RNA, 23 nt, Human
uagauuccccauugccuccuccu

SEQ ID NO: 2262672 - RNA, 14 nt, Human
uagcauaucugccu

SEQ ID NO: 2262673 - RNA, 16 nt, Human
uagcauaucugccuuu

SEQ ID NO: 2262674 - RNA, 17 nt, Human
uagcauaucugccuuua

SEQ ID NO: 2262675 - RNA, 22 nt, Human
uagcaggacugaauugucccca

SEQ ID NO: 2262676 - RNA, 12 nt, Human
uagcagcuggac

SEQ ID NO: 2262677 - RNA, 17 nt, Human
uagcaggagaggagagc

SEQ ID NO: 2262678 - RNA, 19 nt, Human
uagcaggagaggagagcca

SEQ ID NO: 2262679 - RNA, 21 nt, Human
uagcaggagaggagagccaga

SEQ ID NO: 2262680 - RNA, 22 nt, Human
uagcaggagaggagagccagag

SEQ ID NO: 2262681 - RNA, 14 nt, Human
uagcauaugaguuu

SEQ ID NO: 2262682 - RNA, 12 nt, Human
uagcauaucaau

SEQ ID NO: 2262683 - RNA, 18 nt, Human
uagcauaucugccuuuau

SEQ ID NO: 2262684 - RNA, 21 nt, Human
uagcauaucugccuuuauugu

SEQ ID NO: 2262685 - RNA, 22 nt, Human
uagcauaucugccuuuauugug

SEQ ID NO: 2262686 - RNA, 23 nt, Human
uagcauaucugccuuuauugugu

SEQ ID NO: 2262687 - RNA, 13 nt, Human
uagcaucuucugg

SEQ ID NO: 2262688 - RNA, 16 nt, Human
uagcaucuucuggagu

SEQ ID NO: 2262689 - RNA, 22 nt, Human
uagcaucuucuggagucuccag

SEQ ID NO: 2262690 - RNA, 23 nt, Human
uagcaucuucuggagucuccagu

SEQ ID NO: 2262691 - RNA, 22 nt, Human
uagcagcggaacaaggagucag

SEQ ID NO: 2262692 - RNA, 11 nt, Human
uagcagggaaa

SEQ ID NO: 2262693 - RNA, 14 nt, Human
uagcagcuaucucu

SEQ ID NO: 2262694 - RNA, 10 nt, Human
uagcagcugg

SEQ ID NO: 2262695 - RNA, 11 nt, Human
uagcagcugga

SEQ ID NO: 2262696 - RNA, 14 nt, Human
uagcagcuuccaga

SEQ ID NO: 2262697 - RNA, 15 nt, Human
uagcagcuuccagau

SEQ ID NO: 2262698 - RNA, 19 nt, Human
uagcauacguacacauuuu

SEQ ID NO: 2262699 - RNA, 18 nt, Human
uagcauacguacacauuu

SEQ ID NO: 2262700 - RNA, 17 nt, Human
uagcauacguacacauu

SEQ ID NO: 2262701 - RNA, 16 nt, Human
uagcauacguacacau

SEQ ID NO: 2262702 - RNA, 16 nt, Human
uaguagcccuuucugu

SEQ ID NO: 2262703 - RNA, 14 nt, Human
uaguagcauguuga

SEQ ID NO: 2262704 - RNA, 17 nt, Human
uaguagcccuuucugug

SEQ ID NO: 2262705 - RNA, 18 nt, Human
uaguagcccuuucugugu

SEQ ID NO: 2262706 - RNA, 19 nt, Human
uaguagcccuuucugugug

SEQ ID NO: 2262707 - RNA, 18 nt, Human
uaguaugaggcauuuguu

SEQ ID NO: 2262708 - RNA, 17 nt, Human
uaguaugaggcauuugu

SEQ ID NO: 2262709 - RNA, 12 nt, Human
uaguagauuuua

SEQ ID NO: 2262710 - RNA, 12 nt, Human
uagguucuaaaa

SEQ ID NO: 2262711 - RNA, 15 nt, Human
uagguucagccaagg

SEQ ID NO: 2262712 - RNA, 17 nt, Human
uaggugugggggaagca

SEQ ID NO: 2262713 - RNA, 13 nt, Human
uagguguggggga

SEQ ID NO: 2262714 - RNA, 16 nt, Human
uaggugucauuuccau

SEQ ID NO: 2262715 - RNA, 22 nt, Human
uagguuaauuccaauuauauga

SEQ ID NO: 2262716 - RNA, 22 nt, Human
uagguguugauuuucuguugua

SEQ ID NO: 2262717 - RNA, 17 nt, Human
uagguuaaaaaaaggca

SEQ ID NO: 2262718 - RNA, 14 nt, Human
uagguucagccaag

SEQ ID NO: 2262719 - RNA, 23 nt, Human
uaggugggccagccccucccacc

SEQ ID NO: 2262720 - RNA, 21 nt, Human
uaggugggccagccccuccca

SEQ ID NO: 2262721 - RNA, 20 nt, Human
uaggugggccagccccuccc

SEQ ID NO: 2262722 - RNA, 19 nt, Human
uaggugggccagccccucc

SEQ ID NO: 2262723 - RNA, 16 nt, Human
uaggugggccagcccc

SEQ ID NO: 2262724 - RNA, 16 nt, Human
uagguggcaaggcugu

SEQ ID NO: 2262725 - RNA, 15 nt, Human
uagguggcaaggcug

SEQ ID NO: 2262726 - RNA, 19 nt, Human
uaggugugacugaauuucu

SEQ ID NO: 2262727 - RNA, 23 nt, Human
uaggugugacugaauuucuuuug

SEQ ID NO: 2262728 - RNA, 21 nt, Human
uaggugugacugaauuucuuu

SEQ ID NO: 2262729 - RNA, 19 nt, Human
uaggcuggagcccagggag

SEQ ID NO: 2262730 - RNA, 16 nt, Human
uaggcuggagcccagg

SEQ ID NO: 2262731 - RNA, 16 nt, Human
uaggcugguggcccag

SEQ ID NO: 2262732 - RNA, 15 nt, Human
uaggcugguggccca

SEQ ID NO: 2262733 - RNA, 19 nt, Human
uaggcugguggcccaggac

SEQ ID NO: 2262734 - RNA, 18 nt, Human
uaggcugguggcccagga

SEQ ID NO: 2262735 - RNA, 18 nt, Human
uaggcuuaguuugugugu

SEQ ID NO: 2262736 - RNA, 21 nt, Human
uagcugucugcucagacagaa

SEQ ID NO: 2262737 - RNA, 16 nt, Human
uagcuguauugaauca

SEQ ID NO: 2262738 - RNA, 17 nt, Human
uagcugucuagaguagc

SEQ ID NO: 2262739 - RNA, 12 nt, Human
uaggcuggagaa

SEQ ID NO: 2262740 - RNA, 14 nt, Human
uaggcuggagaagc

SEQ ID NO: 2262741 - RNA, 15 nt, Human
uaggcuggagaagcu

SEQ ID NO: 2262742 - RNA, 17 nt, Human
uaggcuggagaagcuca

SEQ ID NO: 2262743 - RNA, 19 nt, Human
uaggcuggagaagcucacc

SEQ ID NO: 2262744 - RNA, 21 nt, Human
uaggcuggagaagcucaccca

SEQ ID NO: 2262745 - RNA, 20 nt, Human
uagcugguuggagagcuaga

SEQ ID NO: 2262746 - RNA, 14 nt, Human
uagcuggugguuuc

SEQ ID NO: 2262747 - RNA, 17 nt, Human
uagcuggugguuucacg

SEQ ID NO: 2262748 - RNA, 23 nt, Human
uagcugcauccuccaagaaucua

SEQ ID NO: 2262749 - RNA, 20 nt, Human
uagcugggggugggccaggc

SEQ ID NO: 2262750 - RNA, 22 nt, Human
uagcuggucuuauuuguaaagc

SEQ ID NO: 2262751 - RNA, 22 nt, Human
uagcugguuuccucauuccuga

SEQ ID NO: 2262752 - RNA, 12 nt, Human
uagcuguaaggc

SEQ ID NO: 2262753 - RNA, 19 nt, Human
uagcuguaaggcaugaagg

SEQ ID NO: 2262754 - RNA, 17 nt, Human
uagcuguaaggcaugaa

SEQ ID NO: 2262755 - RNA, 15 nt, Human
uagcugucuagagua

SEQ ID NO: 2262756 - RNA, 12 nt, Human
uagcuguauuga

SEQ ID NO: 2262757 - RNA, 14 nt, Human
uagcuguauugaau

SEQ ID NO: 2262758 - RNA, 12 nt, Human
uagcuguacaaa

SEQ ID NO: 2262759 - RNA, 16 nt, Human
uagcuguacaaauaua

SEQ ID NO: 2262760 - RNA, 18 nt, Human
uagcuguacaaauauaag

SEQ ID NO: 2262761 - RNA, 16 nt, Human
uagguggaucaccuga

SEQ ID NO: 2262762 - RNA, 21 nt, Human
uaggucuuaauacacacaguu

SEQ ID NO: 2262763 - RNA, 23 nt, Human
uaggugcuacaaaaacacagcaa

SEQ ID NO: 2262764 - RNA, 22 nt, Human
uaggugcuacaaaaacacagca

SEQ ID NO: 2262765 - RNA, 20 nt, Human
uaggugcuacaaaaacacag

SEQ ID NO: 2262766 - RNA, 15 nt, Human
uaggucucaauaccu

SEQ ID NO: 2262767 - RNA, 11 nt, Human
uagggaaaaac

SEQ ID NO: 2262768 - RNA, 17 nt, Human
uaggucugauauucaaa

SEQ ID NO: 2262769 - RNA, 19 nt, Human
uaggucucggacuaagccu

SEQ ID NO: 2262770 - RNA, 14 nt, Human
uaggucucuucccc

SEQ ID NO: 2262771 - RNA, 11 nt, Human
uaggugacaga

SEQ ID NO: 2262772 - RNA, 16 nt, Human
uaggugacagagugag

SEQ ID NO: 2262773 - RNA, 14 nt, Human
uaguugaacugaua

SEQ ID NO: 2262774 - RNA, 15 nt, Human
uaguucuuuggaaau

SEQ ID NO: 2262775 - RNA, 18 nt, Human
uaguugaacugauaguua

SEQ ID NO: 2262776 - RNA, 20 nt, Human
uaguugaacugauaguuacu

SEQ ID NO: 2262777 - RNA, 22 nt, Human
uaguugaacugauaguuacugu

SEQ ID NO: 2262778 - RNA, 23 nt, Human
uaguggggucucccucuccugcc

SEQ ID NO: 2262779 - RNA, 13 nt, Human
uaguggucuuugu

SEQ ID NO: 2262780 - RNA, 14 nt, Human
uaguggucuuugua

SEQ ID NO: 2262781 - RNA, 15 nt, Human
uaguggucuuuguaa

SEQ ID NO: 2262782 - RNA, 22 nt, Human
uaguggggucucccucuccugc

SEQ ID NO: 2262783 - RNA, 21 nt, Human
uaguggggucucccucuccug

SEQ ID NO: 2262784 - RNA, 20 nt, Human
uaguggggucucccucuccu

SEQ ID NO: 2262785 - RNA, 18 nt, Human
uaguggggucucccucuc

SEQ ID NO: 2262786 - RNA, 16 nt, Human
uaguggucuuuguaag

SEQ ID NO: 2262787 - RNA, 18 nt, Human
uaguggucuuuguaagag

SEQ ID NO: 2262788 - RNA, 21 nt, Human
uaguuguuugauucagacagc

SEQ ID NO: 2262789 - RNA, 22 nt, Human
uaguuguuugauucagacagcu

SEQ ID NO: 2262790 - RNA, 16 nt, Human
uaguugagccagcaga

SEQ ID NO: 2262791 - RNA, 20 nt, Human
uaguuguuugauucagacag

SEQ ID NO: 2262792 - RNA, 16 nt, Human
uaguaugguggcuggg

SEQ ID NO: 2262793 - RNA, 15 nt, Human
uaguaugaggcauuu

SEQ ID NO: 2262794 - RNA, 17 nt, Human
uaguauuguccaggucu

SEQ ID NO: 2262795 - RNA, 20 nt, Human
uaguggcuuaaaacaacacu

SEQ ID NO: 2262796 - RNA, 13 nt, Human
uaguggcugucca

SEQ ID NO: 2262797 - RNA, 14 nt, Human
uaguggcuucaaaa

SEQ ID NO: 2262798 - RNA, 20 nt, Human
uaguggcuucauuagagcag

SEQ ID NO: 2262799 - RNA, 18 nt, Human
uagugggcaccccacugc

SEQ ID NO: 2262800 - RNA, 16 nt, Human
uaguauuuauuuaaug

SEQ ID NO: 2262801 - RNA, 23 nt, Human
uaguggauuacugccauucacuu

SEQ ID NO: 2262802 - RNA, 14 nt, Human
uauaaacacuauau

SEQ ID NO: 2262803 - RNA, 14 nt, Human
uaguuucuuuggga

SEQ ID NO: 2262804 - RNA, 17 nt, Human
uauaaacaucacacaca

SEQ ID NO: 2262805 - RNA, 18 nt, Human
uauaaacaucacacacac

SEQ ID NO: 2262806 - RNA, 22 nt, Human
uauaaacaugcuugcauuauau

SEQ ID NO: 2262807 - RNA, 14 nt, Human
uauaaacaucacac

SEQ ID NO: 2262808 - RNA, 15 nt, Human
uaguuugauuaaauu

SEQ ID NO: 2262809 - RNA, 17 nt, Human
uaguuuaccucuuuaaa

SEQ ID NO: 2262810 - RNA, 20 nt, Human
uaguuucuguucuguggaaa

SEQ ID NO: 2262811 - RNA, 12 nt, Human
uaguuucuugug

SEQ ID NO: 2262812 - RNA, 21 nt, Human
uaguuugauuaaauucuugca

SEQ ID NO: 2262813 - RNA, 16 nt, Human
uaguuugauuaaauuc

SEQ ID NO: 2262814 - RNA, 11 nt, Human
uauaaacuuua

SEQ ID NO: 2262815 - RNA, 15 nt, Human
uauaaaccuaaaaaa

SEQ ID NO: 2262816 - RNA, 16 nt, Human
uauaaaccuaaaaaag

SEQ ID NO: 2262817 - RNA, 14 nt, Human
uauaaacuuuaccu

SEQ ID NO: 2262818 - RNA, 13 nt, Human
uauaaacuuuacc

SEQ ID NO: 2262819 - RNA, 17 nt, Human
uauaaacuuuaccuuuu

SEQ ID NO: 2262820 - RNA, 18 nt, Human
uauaaaccuaaaaaagau

SEQ ID NO: 2262821 - RNA, 19 nt, Human
uauaaaccuaaaaaagaua

SEQ ID NO: 2262822 - RNA, 20 nt, Human
uauaaaccuaaaaaagauau

SEQ ID NO: 2262823 - RNA, 19 nt, Human
uauaaaccucuaauuuauu

SEQ ID NO: 2262824 - RNA, 16 nt, Human
uauaaacuuuaccuuu

SEQ ID NO: 2262825 - RNA, 15 nt, Human
uauaaacuuuaccuu

SEQ ID NO: 2262826 - RNA, 11 nt, Human
uauagaaaugc

SEQ ID NO: 2262827 - RNA, 17 nt, Human
uauagaacugaaugaga

SEQ ID NO: 2262828 - RNA, 18 nt, Human
uauagaacugaaugagaa

SEQ ID NO: 2262829 - RNA, 16 nt, Human
uauagacccgaggaaa

SEQ ID NO: 2262830 - RNA, 15 nt, Human
uauagagauaugcag

SEQ ID NO: 2262831 - RNA, 17 nt, Human
uauagagauaugcagaa

SEQ ID NO: 2262832 - RNA, 21 nt, Human
uauagagauaugcagaaggaa

SEQ ID NO: 2262833 - RNA, 11 nt, Human
uauagacucua

SEQ ID NO: 2262834 - RNA, 16 nt, Human
uauagacaaauaauaa

SEQ ID NO: 2262835 - RNA, 21 nt, Human
uauagaauauuuauuaccucu

SEQ ID NO: 2262836 - RNA, 15 nt, Human
uauagaauauuuauu

SEQ ID NO: 2262837 - RNA, 16 nt, Human
uauaaagguugacaau

SEQ ID NO: 2262838 - RNA, 23 nt, Human
uauaaacuuagugcggacaaguu

SEQ ID NO: 2262839 - RNA, 22 nt, Human
uauaaaccucuaauuuauuuug

SEQ ID NO: 2262840 - RNA, 19 nt, Human
uauaaacuaucaguuuguc

SEQ ID NO: 2262841 - RNA, 15 nt, Human
uauaaaguaaagcua

SEQ ID NO: 2262842 - RNA, 16 nt, Human
uauaaaguaaagcuaa

SEQ ID NO: 2262843 - RNA, 18 nt, Human
uauaaaguaguccuguga

SEQ ID NO: 2262844 - RNA, 16 nt, Human
uauaaaguaguccugu

SEQ ID NO: 2262845 - RNA, 18 nt, Human
uauaaauaaauauauaua

SEQ ID NO: 2262846 - RNA, 16 nt, Human
uauaaauaaauauaua

SEQ ID NO: 2262847 - RNA, 17 nt, Human
uauaaauaaauauauau

SEQ ID NO: 2262848 - RNA, 12 nt, Human
uauaaauaaaua

SEQ ID NO: 2262849 - RNA, 13 nt, Human
uauaaauaaauau

SEQ ID NO: 2262850 - RNA, 14 nt, Human
uauaaauaaauaua

SEQ ID NO: 2262851 - RNA, 15 nt, Human
uauaaauaaauauau

SEQ ID NO: 2262852 - RNA, 19 nt, Human
uauacuuuuuucuuauuua

SEQ ID NO: 2262853 - RNA, 21 nt, Human
uauacuuuuuucuuauuuaac

SEQ ID NO: 2262854 - RNA, 17 nt, Human
uauacuuuuuucuuauu

SEQ ID NO: 2262855 - RNA, 14 nt, Human
uauagaaacacgaa

SEQ ID NO: 2262856 - RNA, 13 nt, Human
uauaaauaggaga

SEQ ID NO: 2262857 - RNA, 17 nt, Human
uauaaauaggagaggau

SEQ ID NO: 2262858 - RNA, 11 nt, Human
uauacuuuuuu

SEQ ID NO: 2262859 - RNA, 20 nt, Human
uauagucccagcuacucaga

SEQ ID NO: 2262860 - RNA, 13 nt, Human
uauaguccagcuu

SEQ ID NO: 2262861 - RNA, 18 nt, Human
uauagugauguaaucuug

SEQ ID NO: 2262862 - RNA, 13 nt, Human
uauagugauguaa

SEQ ID NO: 2262863 - RNA, 23 nt, Human
uauaguuuuacuuuuaaacugug

SEQ ID NO: 2262864 - RNA, 22 nt, Human
uauaguuuuacuuuuaaacugu

SEQ ID NO: 2262865 - RNA, 12 nt, Human
uauauaaaaaga

SEQ ID NO: 2262866 - RNA, 18 nt, Human
uauauaaaaagaaaagau

SEQ ID NO: 2262867 - RNA, 19 nt, Human
uauauaaaaagaaaagaua

SEQ ID NO: 2262868 - RNA, 20 nt, Human
uauauaaaaagaaaagauaa

SEQ ID NO: 2262869 - RNA, 23 nt, Human
uauauaaaaagaaaagauaaaga

SEQ ID NO: 2262870 - RNA, 16 nt, Human
uauauaaaauaaauau

SEQ ID NO: 2262871 - RNA, 17 nt, Human
uauauaaaauaaauaua

SEQ ID NO: 2262872 - RNA, 18 nt, Human
uauauaaaauaaauauau

SEQ ID NO: 2262873 - RNA, 19 nt, Human
uauauaaaauaaauauaua

SEQ ID NO: 2262874 - RNA, 22 nt, Human
uauauaaaauaaauauauauaa

SEQ ID NO: 2262875 - RNA, 13 nt, Human
uauaguauaucug

SEQ ID NO: 2262876 - RNA, 18 nt, Human
uauaguauaucuggacaa

SEQ ID NO: 2262877 - RNA, 21 nt, Human
uauagaggcuagcuucugcuu

SEQ ID NO: 2262878 - RNA, 22 nt, Human
uauagagauguuuuuaaaaguu

SEQ ID NO: 2262879 - RNA, 18 nt, Human
uauagguuuuguuugcua

SEQ ID NO: 2262880 - RNA, 20 nt, Human
uauagguuuuguuugcuauc

SEQ ID NO: 2262881 - RNA, 23 nt, Human
uauauaaaggaaaaaagagaagu

SEQ ID NO: 2262882 - RNA, 23 nt, Human
uauauaaaauaaauauauauaaa

SEQ ID NO: 2262883 - RNA, 21 nt, Human
uauauaaaauauuuucauaca

SEQ ID NO: 2262884 - RNA, 14 nt, Human
uauauaaaccuaaa

SEQ ID NO: 2262885 - RNA, 15 nt, Human
uauauaaaccuaaaa

SEQ ID NO: 2262886 - RNA, 17 nt, Human
uauauaaaccuaaaaaa

SEQ ID NO: 2262887 - RNA, 21 nt, Human
uauauaaaccuaaaaaagaua

SEQ ID NO: 2262888 - RNA, 22 nt, Human
uauauaaaccuaaaaaagauau

SEQ ID NO: 2262889 - RNA, 17 nt, Human
uauauaacaaugcugua

SEQ ID NO: 2262890 - RNA, 19 nt, Human
uauauaacaaugcuguauu

SEQ ID NO: 2262891 - RNA, 15 nt, Human
uauaucuguauauaa

SEQ ID NO: 2262892 - RNA, 17 nt, Human
uauaucugcuguccaga

SEQ ID NO: 2262893 - RNA, 16 nt, Human
uauaucugcuucagug

SEQ ID NO: 2262894 - RNA, 17 nt, Human
uauaucugcuucagugg

SEQ ID NO: 2262895 - RNA, 14 nt, Human
uauaucuguauaua

SEQ ID NO: 2262896 - RNA, 12 nt, Human
uauaucuuguuu

SEQ ID NO: 2262897 - RNA, 13 nt, Human
uauaucugcuguc

SEQ ID NO: 2262898 - RNA, 18 nt, Human
uauauaagauggaagcuu

SEQ ID NO: 2262899 - RNA, 22 nt, Human
uauauaagauggaagcuuccag

SEQ ID NO: 2262900 - RNA, 18 nt, Human
uauaugaagaaaaucacu

SEQ ID NO: 2262901 - RNA, 14 nt, Human
uauaucuuuuucca

SEQ ID NO: 2262902 - RNA, 14 nt, Human
uauaugcuucuguu

SEQ ID NO: 2262903 - RNA, 19 nt, Human
uauaugaagaaaaucacuu

SEQ ID NO: 2262904 - RNA, 16 nt, Human
uauaugcuucuguuuu

SEQ ID NO: 2262905 - RNA, 19 nt, Human
uauauggaugauucagaaa

SEQ ID NO: 2262906 - RNA, 16 nt, Human
uauauggaugauucag

SEQ ID NO: 2262907 - RNA, 18 nt, Human
uauauggaugauucagaa

SEQ ID NO: 2262908 - RNA, 13 nt, Human
uauauggauaaug

SEQ ID NO: 2262909 - RNA, 20 nt, Human
uauauuugaaauauugacuu

SEQ ID NO: 2262910 - RNA, 14 nt, Human
uauauuugcuuuuu

SEQ ID NO: 2262911 - RNA, 22 nt, Human
uauauuugggccugcuccagac

SEQ ID NO: 2262912 - RNA, 20 nt, Human
uauauuuguaaauuuaugug

SEQ ID NO: 2262913 - RNA, 12 nt, Human
uauauuuguaca

SEQ ID NO: 2262914 - RNA, 13 nt, Human
uauauuuguacaa

SEQ ID NO: 2262915 - RNA, 15 nt, Human
uauauuuguacaaaa

SEQ ID NO: 2262916 - RNA, 23 nt, Human
uauauuuucaugacuuuuccaug

SEQ ID NO: 2262917 - RNA, 21 nt, Human
uauauuugugauagcacuuuc

SEQ ID NO: 2262918 - RNA, 14 nt, Human
uauauuuguacaaa

SEQ ID NO: 2262919 - RNA, 24 nt, Human
uauauuuucaugacuuuuccaugu

SEQ ID NO: 2262920 - RNA, 13 nt, Human
uauauuuugggaa

SEQ ID NO: 2262921 - RNA, 12 nt, Human
uauauuuuggga

SEQ ID NO: 2262922 - RNA, 14 nt, Human
uauauuuucuguuu

SEQ ID NO: 2262923 - RNA, 15 nt, Human
uauauuuuuaagaua

SEQ ID NO: 2262924 - RNA, 20 nt, Human
uauauuuuuaagauaauaau

SEQ ID NO: 2262925 - RNA, 17 nt, Human
uauauuuuuaagauaau

SEQ ID NO: 2262926 - RNA, 19 nt, Human
uauauuuuuaagauaauaa

SEQ ID NO: 2262927 - RNA, 13 nt, Human
uauauuuuuauau

SEQ ID NO: 2262928 - RNA, 21 nt, Human
uauauuuuuuguuaaaugauu

SEQ ID NO: 2262929 - RNA, 19 nt, Human
uaucaaaacuuucuuuucu

SEQ ID NO: 2262930 - RNA, 15 nt, Human
uaucauggagugacg

SEQ ID NO: 2262931 - RNA, 18 nt, Human
uaucaugccccuguacuc

SEQ ID NO: 2262932 - RNA, 12 nt, Human
uaucauggucuc

SEQ ID NO: 2262933 - RNA, 12 nt, Human
uaucaugcauuc

SEQ ID NO: 2262934 - RNA, 14 nt, Human
uaucaugcccugug

SEQ ID NO: 2262935 - RNA, 19 nt, Human
uaucaugcauguccuguaa

SEQ ID NO: 2262936 - RNA, 17 nt, Human
uaucaugcauguccugu

SEQ ID NO: 2262937 - RNA, 17 nt, Human
uaucauggucucaguca

SEQ ID NO: 2262938 - RNA, 20 nt, Human
uaucauguguaaucaauaaa

SEQ ID NO: 2262939 - RNA, 22 nt, Human
uaucauguguaaucaauaaacg

SEQ ID NO: 2262940 - RNA, 12 nt, Human
uaucauuaaagu

SEQ ID NO: 2262941 - RNA, 13 nt, Human
uaucauuaaaguu

SEQ ID NO: 2262942 - RNA, 14 nt, Human
uaucauuaaaguuc

SEQ ID NO: 2262943 - RNA, 13 nt, Human
uaucauucaagug

SEQ ID NO: 2262944 - RNA, 14 nt, Human
uaucauucaagugu

SEQ ID NO: 2262945 - RNA, 18 nt, Human
uaucauagaaauguaacu

SEQ ID NO: 2262946 - RNA, 23 nt, Human
uaucauagaaauguaacuuuugu

SEQ ID NO: 2262947 - RNA, 15 nt, Human
uaucaucaguauuga

SEQ ID NO: 2262948 - RNA, 14 nt, Human
uaucaucaguauug

SEQ ID NO: 2262949 - RNA, 21 nt, Human
uaucaucagcauaccuuuauu

SEQ ID NO: 2262950 - RNA, 15 nt, Human
uaucauauugguauu

SEQ ID NO: 2262951 - RNA, 17 nt, Human
uaucaugcaaaugcugu

SEQ ID NO: 2262952 - RNA, 16 nt, Human
uaucaugcaaaugcug

SEQ ID NO: 2262953 - RNA, 15 nt, Human
uaucaugcaaaugcu

SEQ ID NO: 2262954 - RNA, 16 nt, Human
uaucaugagugaauaa

SEQ ID NO: 2262955 - RNA, 17 nt, Human
uaucaugacaaagacug

SEQ ID NO: 2262956 - RNA, 16 nt, Human
uaucaucaguauugaa

SEQ ID NO: 2262957 - RNA, 13 nt, Human
uaucaugacaugu

SEQ ID NO: 2262958 - RNA, 14 nt, Human
uaucaugacauguu

SEQ ID NO: 2262959 - RNA, 20 nt, Human
uaucaaacagaauuuuaaag

SEQ ID NO: 2262960 - RNA, 14 nt, Human
uaucaaaagaaaga

SEQ ID NO: 2262961 - RNA, 19 nt, Human
uaucaggugcugccaucca

SEQ ID NO: 2262962 - RNA, 13 nt, Human
uaucaaacugaag

SEQ ID NO: 2262963 - RNA, 16 nt, Human
uaucaaacugaagcca

SEQ ID NO: 2262964 - RNA, 9 nt, Human
uaucaguag

SEQ ID NO: 2262965 - RNA, 20 nt, Human
uaucaggugcugccauccag

SEQ ID NO: 2262966 - RNA, 23 nt, Human
uaucaguuugcuagcagaaaucu

SEQ ID NO: 2262967 - RNA, 22 nt, Human
uaucagucauaacuaaauaaag

SEQ ID NO: 2262968 - RNA, 21 nt, Human
uaucagucaauauuuuuagau

SEQ ID NO: 2262969 - RNA, 20 nt, Human
uaucagucaauauuuuuaga

SEQ ID NO: 2262970 - RNA, 20 nt, Human
uaucaguuuguccuguagag

SEQ ID NO: 2262971 - RNA, 15 nt, Human
uaucauagaaaugua

SEQ ID NO: 2262972 - RNA, 14 nt, Human
uaucauagaaaugu

SEQ ID NO: 2262973 - RNA, 16 nt, Human
uaauaaauauuuaugu

SEQ ID NO: 2262974 - RNA, 15 nt, Human
uaauaaauauuuaug

SEQ ID NO: 2262975 - RNA, 23 nt, Human
uaaguguauuuuucaauaaagca

SEQ ID NO: 2262976 - RNA, 12 nt, Human
uaauaaauauga

SEQ ID NO: 2262977 - RNA, 22 nt, Human
uaagugugaacuggacccuguu

SEQ ID NO: 2262978 - RNA, 12 nt, Human
uaauaaagcugu

SEQ ID NO: 2262979 - RNA, 18 nt, Human
uaauaagcuaaagaggcu

SEQ ID NO: 2262980 - RNA, 13 nt, Human
uaauaauauaugu

SEQ ID NO: 2262981 - RNA, 22 nt, Human
uaauaauauacuuguggacuaa

SEQ ID NO: 2262982 - RNA, 19 nt, Human
uaauaaauauuuuugccau

SEQ ID NO: 2262983 - RNA, 21 nt, Human
uaauaacugugaaguuuacau

SEQ ID NO: 2262984 - RNA, 19 nt, Human
uaauaagaaugguugccuu

SEQ ID NO: 2262985 - RNA, 12 nt, Human
uaauaagacaua

SEQ ID NO: 2262986 - RNA, 14 nt, Human
uaauaagacauaac

SEQ ID NO: 2262987 - RNA, 17 nt, Human
uaauaagacauaacguu

SEQ ID NO: 2262988 - RNA, 19 nt, Human
uaauaagacauaacguuuu

SEQ ID NO: 2262989 - RNA, 20 nt, Human
uaauaagacauaacguuuuu

SEQ ID NO: 2262990 - RNA, 22 nt, Human
uaauaagacauaacguuuuucc

SEQ ID NO: 2262991 - RNA, 13 nt, Human
uaaguguauuuuu

SEQ ID NO: 2262992 - RNA, 18 nt, Human
uaaguguacauaugugcu

SEQ ID NO: 2262993 - RNA, 21 nt, Human
uaagugcguguguagaguuaa

SEQ ID NO: 2262994 - RNA, 14 nt, Human
uaaguguacauaug

SEQ ID NO: 2262995 - RNA, 20 nt, Human
uaaguguauuuuucaauaaa

SEQ ID NO: 2262996 - RNA, 18 nt, Human
uaaguguauuuuucaaua

SEQ ID NO: 2262997 - RNA, 12 nt, Human
uaagugugaacu

SEQ ID NO: 2262998 - RNA, 14 nt, Human
uaagugugaacugg

SEQ ID NO: 2262999 - RNA, 15 nt, Human
uaagugugaacugga

SEQ ID NO: 2263000 - RNA, 15 nt, Human
uaaguggugugugua

SEQ ID NO: 2263001 - RNA, 12 nt, Human
uaagugcuguau

SEQ ID NO: 2263002 - RNA, 23 nt, Human
uaagugcguguguagaguuaaga

SEQ ID NO: 2263003 - RNA, 16 nt, Human
uaagugguguguguau

SEQ ID NO: 2263004 - RNA, 22 nt, Human
uaagugcugcauuuaaaagaua

SEQ ID NO: 2263005 - RNA, 18 nt, Human
uaagugcugcauuuaaaa

SEQ ID NO: 2263006 - RNA, 16 nt, Human
uaagugcugcauuuaa

SEQ ID NO: 2263007 - RNA, 15 nt, Human
uaagugcugcauuua

SEQ ID NO: 2263008 - RNA, 22 nt, Human
uaagugccaggauggaaugaug

SEQ ID NO: 2263009 - RNA, 16 nt, Human
uaagugauuguaugaa

SEQ ID NO: 2263010 - RNA, 18 nt, Human
uaagugauuuuuuugucc

SEQ ID NO: 2263011 - RNA, 14 nt, Human
uaagugcacaacau

SEQ ID NO: 2263012 - RNA, 22 nt, Human
uaagugcacaacauuacaggga

SEQ ID NO: 2263013 - RNA, 14 nt, Human
uaagugcugcauuu

SEQ ID NO: 2263014 - RNA, 13 nt, Human
uaagugccuucca

SEQ ID NO: 2263015 - RNA, 14 nt, Human
uaagugccuuccau

SEQ ID NO: 2263016 - RNA, 16 nt, Human
uaagugccuuccaugu

SEQ ID NO: 2263017 - RNA, 16 nt, Human
uaagugcguguguaga

SEQ ID NO: 2263018 - RNA, 17 nt, Human
uaagugcguguguagag

SEQ ID NO: 2263019 - RNA, 18 nt, Human
uaagugcguguguagagu

SEQ ID NO: 2263020 - RNA, 19 nt, Human
uaagugcguguguagaguu

SEQ ID NO: 2263021 - RNA, 22 nt, Human
uaagugauugcugguuuuaguu

SEQ ID NO: 2263022 - RNA, 12 nt, Human
uaagugagagag

SEQ ID NO: 2263023 - RNA, 23 nt, Human
uaagugaggaugaaaaaauaaca

SEQ ID NO: 2263024 - RNA, 16 nt, Human
uaagugaaaaggucau

SEQ ID NO: 2263025 - RNA, 13 nt, Human
uaagugaaauaag

SEQ ID NO: 2263026 - RNA, 22 nt, Human
uaagucuuaucaagcagccaag

SEQ ID NO: 2263027 - RNA, 20 nt, Human
uaagucuuaucaagcagcca

SEQ ID NO: 2263028 - RNA, 21 nt, Human
uaagucuguuuuaugacuuca

SEQ ID NO: 2263029 - RNA, 20 nt, Human
uaagucuguuuuaugacuuc

SEQ ID NO: 2263030 - RNA, 19 nt, Human
uaagucuguuuuaugacuu

SEQ ID NO: 2263031 - RNA, 16 nt, Human
uaagucuguuuuauga

SEQ ID NO: 2263032 - RNA, 13 nt, Human
uaagucuguuuua

SEQ ID NO: 2263033 - RNA, 20 nt, Human
uaaguccuugcaagaaucag

SEQ ID NO: 2263034 - RNA, 22 nt, Human
uaagucauguuccuucaagauc

SEQ ID NO: 2263035 - RNA, 19 nt, Human
uaagucauguuccuucaag

SEQ ID NO: 2263036 - RNA, 21 nt, Human
uaagucauguuccuucaagau

SEQ ID NO: 2263037 - RNA, 18 nt, Human
uaagucuaaauauuuccu

SEQ ID NO: 2263038 - RNA, 15 nt, Human
uaaguccuuuaugug

SEQ ID NO: 2263039 - RNA, 17 nt, Human
uaaguccuuuaugugga

SEQ ID NO: 2263040 - RNA, 20 nt, Human
uaaguccuuuauguggaaaa

SEQ ID NO: 2263041 - RNA, 18 nt, Human
uaaggucauuaccacagg

SEQ ID NO: 2263042 - RNA, 13 nt, Human
uaaggguuuuaga

SEQ ID NO: 2263043 - RNA, 21 nt, Human
uaagguaccuuucacauagag

SEQ ID NO: 2263044 - RNA, 20 nt, Human
uaaggguuaguuuacaauca

SEQ ID NO: 2263045 - RNA, 15 nt, Human
uaaggguuaagaaaa

SEQ ID NO: 2263046 - RNA, 17 nt, Human
uaaggguaucuggugac

SEQ ID NO: 2263047 - RNA, 22 nt, Human
uaagggcuggucucugcugaag

SEQ ID NO: 2263048 - RNA, 13 nt, Human
uaagggcagaguc

SEQ ID NO: 2263049 - RNA, 14 nt, Human
uaagggcagaguca

SEQ ID NO: 2263050 - RNA, 16 nt, Human
uaaggggcccggccag

SEQ ID NO: 2263051 - RNA, 13 nt, Human
uaaggggcagcuu

SEQ ID NO: 2263052 - RNA, 14 nt, Human
uaagggagaaaaaa

SEQ ID NO: 2263053 - RNA, 20 nt, Human
uaagggacauguuuugauaa

SEQ ID NO: 2263054 - RNA, 21 nt, Human
uaagggaaggaacucuggcuu

SEQ ID NO: 2263055 - RNA, 13 nt, Human
uaagggaagaauu

SEQ ID NO: 2263056 - RNA, 15 nt, Human
uaaggugugcucuga

SEQ ID NO: 2263057 - RNA, 13 nt, Human
uaaggugccuucu

SEQ ID NO: 2263058 - RNA, 12 nt, Human
uaaggugcaguu

SEQ ID NO: 2263059 - RNA, 20 nt, Human
uaagguggguacgggagggu

SEQ ID NO: 2263060 - RNA, 20 nt, Human
uaaggugauauauuuaaaaa

SEQ ID NO: 2263061 - RNA, 18 nt, Human
uaaggugauauauuuaaa

SEQ ID NO: 2263062 - RNA, 19 nt, Human
uaaggugaaggugaaucua

SEQ ID NO: 2263063 - RNA, 17 nt, Human
uaagucaaccugccuga

SEQ ID NO: 2263064 - RNA, 15 nt, Human
uaagucaaccugccu

SEQ ID NO: 2263065 - RNA, 17 nt, Human
uaaguauuugaaacuga

SEQ ID NO: 2263066 - RNA, 14 nt, Human
uaaguauuucccag

SEQ ID NO: 2263067 - RNA, 15 nt, Human
uaagccaugggagac

SEQ ID NO: 2263068 - RNA, 19 nt, Human
uaagccauucugacucaua

SEQ ID NO: 2263069 - RNA, 20 nt, Human
uaagccauucugacucauau

SEQ ID NO: 2263070 - RNA, 16 nt, Human
uaagccccagcaagca

SEQ ID NO: 2263071 - RNA, 17 nt, Human
uaagccccagcaagcaa

SEQ ID NO: 2263072 - RNA, 22 nt, Human
uaagccccagcaagcaauccua

SEQ ID NO: 2263073 - RNA, 12 nt, Human
uaagaggcaggg

SEQ ID NO: 2263074 - RNA, 15 nt, Human
uaagaggcagggucu

SEQ ID NO: 2263075 - RNA, 14 nt, Human
uaagcccuugaaga

SEQ ID NO: 2263076 - RNA, 15 nt, Human
uaagccuaccugcuc

SEQ ID NO: 2263077 - RNA, 16 nt, Human
uaagccuaaaaguggg

SEQ ID NO: 2263078 - RNA, 16 nt, Human
uaagccucauauuuaa

SEQ ID NO: 2263079 - RNA, 17 nt, Human
uaagccuaccugcucuc

SEQ ID NO: 2263080 - RNA, 17 nt, Human
uaagccucauauuuaaa

SEQ ID NO: 2263081 - RNA, 13 nt, Human
uaagcccccgcug

SEQ ID NO: 2263082 - RNA, 19 nt, Human
uaagcccucuuccaucaug

SEQ ID NO: 2263083 - RNA, 11 nt, Human
uaagcccuguc

SEQ ID NO: 2263084 - RNA, 16 nt, Human
uaagcccugucgagac

SEQ ID NO: 2263085 - RNA, 20 nt, Human
uaagcccugucgagacacuu

SEQ ID NO: 2263086 - RNA, 22 nt, Human
uaagcccugucgagacacuugc

SEQ ID NO: 2263087 - RNA, 22 nt, Human
uaagcuaacccccuucuacuga

SEQ ID NO: 2263088 - RNA, 16 nt, Human
uaagcuaacccccuuc

SEQ ID NO: 2263089 - RNA, 21 nt, Human
uaagcuaaagaggcugaaaga

SEQ ID NO: 2263090 - RNA, 13 nt, Human
uaaggcugaggaa

SEQ ID NO: 2263091 - RNA, 20 nt, Human
uaaggcugaggaaaggccag

SEQ ID NO: 2263092 - RNA, 21 nt, Human
uaaggcugcaagguuuaggcu

SEQ ID NO: 2263093 - RNA, 14 nt, Human
uaagggaaauagaa

SEQ ID NO: 2263094 - RNA, 20 nt, Human
uaaggauuuuaugcuuuaaa

SEQ ID NO: 2263095 - RNA, 22 nt, Human
uaaggauuuuaugcuuuaaaca

SEQ ID NO: 2263096 - RNA, 14 nt, Human
uaaggcaaucaugg

SEQ ID NO: 2263097 - RNA, 14 nt, Human
uaagcuauucagua

SEQ ID NO: 2263098 - RNA, 15 nt, Human
uaaggauugugauau

SEQ ID NO: 2263099 - RNA, 19 nt, Human
uaaggauuuuaugcuuuaa

SEQ ID NO: 2263100 - RNA, 17 nt, Human
uaaggauuuuaugcuuu

SEQ ID NO: 2263101 - RNA, 13 nt, Human
uaaggauuuuaug

SEQ ID NO: 2263102 - RNA, 12 nt, Human
uaaggauuuuau

SEQ ID NO: 2263103 - RNA, 16 nt, Human
uaaggauguucuagca

SEQ ID NO: 2263104 - RNA, 22 nt, Human
uaauuagagcagaugaccccuc

SEQ ID NO: 2263105 - RNA, 20 nt, Human
uaauuaaguacuauguauca

SEQ ID NO: 2263106 - RNA, 17 nt, Human
uaauuaaguacuaugua

SEQ ID NO: 2263107 - RNA, 14 nt, Human
uaauuaaguacuau

SEQ ID NO: 2263108 - RNA, 11 nt, Human
uaauguuuccu

SEQ ID NO: 2263109 - RNA, 13 nt, Human
uaauguuugcuau

SEQ ID NO: 2263110 - RNA, 14 nt, Human
uaauuaaaaaauuu

SEQ ID NO: 2263111 - RNA, 12 nt, Human
uaauguuugcua

SEQ ID NO: 2263112 - RNA, 21 nt, Human
uaauguuacugaucaugcauu

SEQ ID NO: 2263113 - RNA, 15 nt, Human
uaauguuacugauca

SEQ ID NO: 2263114 - RNA, 19 nt, Human
uaaugguaccagauaaaau

SEQ ID NO: 2263115 - RNA, 17 nt, Human
uaaugguaccagauaaa

SEQ ID NO: 2263116 - RNA, 18 nt, Human
uaaugguaccagauaaaa

SEQ ID NO: 2263117 - RNA, 23 nt, Human
uaauguuacugaucaugcauugu

SEQ ID NO: 2263118 - RNA, 22 nt, Human
uaauguucugaauaauuucuua

SEQ ID NO: 2263119 - RNA, 20 nt, Human
uaauguucugaauaauuucu

SEQ ID NO: 2263120 - RNA, 22 nt, Human
uaaugggguccuggccauccca

SEQ ID NO: 2263121 - RNA, 18 nt, Human
uaauggguuucauauuuc

SEQ ID NO: 2263122 - RNA, 14 nt, Human
uaaugguaccagau

SEQ ID NO: 2263123 - RNA, 16 nt, Human
uaaugguaccagauaa

SEQ ID NO: 2263124 - RNA, 18 nt, Human
uaaugggguccuggccau

SEQ ID NO: 2263125 - RNA, 17 nt, Human
uaaugggguccuggcca

SEQ ID NO: 2263126 - RNA, 15 nt, Human
uaaugggguccuggc

SEQ ID NO: 2263127 - RNA, 21 nt, Human
uaauggggguagcagcuggac

SEQ ID NO: 2263128 - RNA, 18 nt, Human
uaaugggcuuagagcagu

SEQ ID NO: 2263129 - RNA, 15 nt, Human
uaaugggauuuucuu

SEQ ID NO: 2263130 - RNA, 15 nt, Human
uaauggggguagcag

SEQ ID NO: 2263131 - RNA, 17 nt, Human
uaauggggguagcagcu

SEQ ID NO: 2263132 - RNA, 18 nt, Human
uaauggggguagcagcug

SEQ ID NO: 2263133 - RNA, 20 nt, Human
uaauggggguagcagcugga

SEQ ID NO: 2263134 - RNA, 20 nt, Human
uaauguuguaugucuuguuu

SEQ ID NO: 2263135 - RNA, 21 nt, Human
uaauguuguaugucuuguuua

SEQ ID NO: 2263136 - RNA, 14 nt, Human
uaauguuguuauuu

SEQ ID NO: 2263137 - RNA, 18 nt, Human
uaauguuguuauuuaaag

SEQ ID NO: 2263138 - RNA, 22 nt, Human
uaauguuucaaacauauauaac

SEQ ID NO: 2263139 - RNA, 20 nt, Human
uaaugcuaaagaaaaaguca

SEQ ID NO: 2263140 - RNA, 23 nt, Human
uaaugcgugcauaccacuuuugu

SEQ ID NO: 2263141 - RNA, 22 nt, Human
uaaugcgugcauaccacuuuug

SEQ ID NO: 2263142 - RNA, 19 nt, Human
uaaugcgugcauaccacuu

SEQ ID NO: 2263143 - RNA, 15 nt, Human
uaaugcgugcauacc

SEQ ID NO: 2263144 - RNA, 23 nt, Human
uaaugauaacuggaaacuucagc

SEQ ID NO: 2263145 - RNA, 17 nt, Human
uaaugauaacuggaaac

SEQ ID NO: 2263146 - RNA, 22 nt, Human
uaaugauaacuggaaacuucag

SEQ ID NO: 2263147 - RNA, 17 nt, Human
uaaugcuguugccucau

SEQ ID NO: 2263148 - RNA, 14 nt, Human
uaaugcuguugccu

SEQ ID NO: 2263149 - RNA, 18 nt, Human
uaaugcuccuuguuccua

SEQ ID NO: 2263150 - RNA, 13 nt, Human
uaaugcuccuugu

SEQ ID NO: 2263151 - RNA, 16 nt, Human
uaaugcuacgugugau

SEQ ID NO: 2263152 - RNA, 17 nt, Human
uaaugcuacgugugauu

SEQ ID NO: 2263153 - RNA, 18 nt, Human
uaaugcuacgugugauuu

SEQ ID NO: 2263154 - RNA, 22 nt, Human
uaaugcuacgugugauuuuucu

SEQ ID NO: 2263155 - RNA, 13 nt, Human
uaaugcuacuguc

SEQ ID NO: 2263156 - RNA, 15 nt, Human
uaaugcuacugucuc

SEQ ID NO: 2263157 - RNA, 16 nt, Human
uaaugcuguugccuca

SEQ ID NO: 2263158 - RNA, 19 nt, Human
uaaugcuuagagaauguuc

SEQ ID NO: 2263159 - RNA, 20 nt, Human
uaaugcuuagagaauguucu

SEQ ID NO: 2263160 - RNA, 21 nt, Human
uaaugcuucuuucauuuucug

SEQ ID NO: 2263161 - RNA, 14 nt, Human
uaaugcuuuuauau

SEQ ID NO: 2263162 - RNA, 15 nt, Human
uaauggggcggugag

SEQ ID NO: 2263163 - RNA, 23 nt, Human
uaauggccggcuggaaaugcugg

SEQ ID NO: 2263164 - RNA, 21 nt, Human
uaauggccaugguacccccuu

SEQ ID NO: 2263165 - RNA, 17 nt, Human
uaauggccggcuggaaa

SEQ ID NO: 2263166 - RNA, 16 nt, Human
uaauggccaugguacc

SEQ ID NO: 2263167 - RNA, 19 nt, Human
uaauggccaugguaccccc

SEQ ID NO: 2263168 - RNA, 19 nt, Human
uaauggacaugagauaaug

SEQ ID NO: 2263169 - RNA, 23 nt, Human
uaauggacaugagauaauguuag

SEQ ID NO: 2263170 - RNA, 14 nt, Human
uaaucccugggcau

SEQ ID NO: 2263171 - RNA, 17 nt, Human
uaaucccgauucacccu

SEQ ID NO: 2263172 - RNA, 20 nt, Human
uaaucccugggcauugcuuu

SEQ ID NO: 2263173 - RNA, 19 nt, Human
uaaucccugggcauugcuu

SEQ ID NO: 2263174 - RNA, 19 nt, Human
uaauccgaaucucuuuuug

SEQ ID NO: 2263175 - RNA, 22 nt, Human
uaaucccugggcauugcuuucc

SEQ ID NO: 2263176 - RNA, 21 nt, Human
uaauccgaaucucuuuuugcu

SEQ ID NO: 2263177 - RNA, 13 nt, Human
uaaucuaaaugga

SEQ ID NO: 2263178 - RNA, 12 nt, Human
uaaucuaaaugg

SEQ ID NO: 2263179 - RNA, 20 nt, Human
uaauccucuaggaggucucu

SEQ ID NO: 2263180 - RNA, 20 nt, Human
uaauauuaaggaagacaaug

SEQ ID NO: 2263181 - RNA, 21 nt, Human
uaauccccaguaaaauugcca

SEQ ID NO: 2263182 - RNA, 23 nt, Human
uaauauggcucuucauaauucua

SEQ ID NO: 2263183 - RNA, 15 nt, Human
uaauaugggcauugu

SEQ ID NO: 2263184 - RNA, 18 nt, Human
uaauaugggcauuguagu

SEQ ID NO: 2263185 - RNA, 16 nt, Human
uaauauuaaauauaug

SEQ ID NO: 2263186 - RNA, 17 nt, Human
uaaucuggacuccucug

SEQ ID NO: 2263187 - RNA, 18 nt, Human
uaaucuggacuccucugu

SEQ ID NO: 2263188 - RNA, 16 nt, Human
uaaucuauuggguuca

SEQ ID NO: 2263189 - RNA, 21 nt, Human
uaaucugcaaagaaugagaag

SEQ ID NO: 2263190 - RNA, 15 nt, Human
uaaucuggacuccuc

SEQ ID NO: 2263191 - RNA, 22 nt, Human
uaaucuacuccuuguaaagacu

SEQ ID NO: 2263192 - RNA, 17 nt, Human
uaaucuaauucuaagga

SEQ ID NO: 2263193 - RNA, 14 nt, Human
uaaucuagaacaca

SEQ ID NO: 2263194 - RNA, 22 nt, Human
uaaucuagaacacaggcaaaau

SEQ ID NO: 2263195 - RNA, 17 nt, Human
uaaucuagauaucgacu

SEQ ID NO: 2263196 - RNA, 22 nt, Human
uaaucuagauaucgacuuguuu

SEQ ID NO: 2263197 - RNA, 19 nt, Human
uaaucuggacuccucuguc

SEQ ID NO: 2263198 - RNA, 20 nt, Human
uaaucuggacuccucugucc

SEQ ID NO: 2263199 - RNA, 21 nt, Human
uaaucuggacuccucugucca

SEQ ID NO: 2263200 - RNA, 22 nt, Human
uaaucuggacuccucuguccag

SEQ ID NO: 2263201 - RNA, 17 nt, Human
uaaucugggaagggaag

SEQ ID NO: 2263202 - RNA, 16 nt, Human
uaaucuguagggcugg

SEQ ID NO: 2263203 - RNA, 17 nt, Human
uaaucuguagggcugga

SEQ ID NO: 2263204 - RNA, 20 nt, Human
uaaucuguagggcuggaccu

SEQ ID NO: 2263205 - RNA, 23 nt, Human
uaaucugggccagaauuucaaac

SEQ ID NO: 2263206 - RNA, 18 nt, Human
uaaucugggccagaauuu

SEQ ID NO: 2263207 - RNA, 15 nt, Human
uaauaucaauagaag

SEQ ID NO: 2263208 - RNA, 13 nt, Human
uaauaaugugaau

SEQ ID NO: 2263209 - RNA, 20 nt, Human
uaauaaucuuauuagggaga

SEQ ID NO: 2263210 - RNA, 14 nt, Human
uaauaauguuucaa

SEQ ID NO: 2263211 - RNA, 16 nt, Human
uaauaauauauguuua

SEQ ID NO: 2263212 - RNA, 23 nt, Human
uaauaaucauuggauucugagag

SEQ ID NO: 2263213 - RNA, 23 nt, Human
uaauaaucuuauuagggagaaaa

SEQ ID NO: 2263214 - RNA, 15 nt, Human
uaauaauguuuaaua

SEQ ID NO: 2263215 - RNA, 23 nt, Human
uaauaucaucaguauugaagcau

SEQ ID NO: 2263216 - RNA, 17 nt, Human
uaauaucccuacaugua

SEQ ID NO: 2263217 - RNA, 18 nt, Human
uaauaucccuacauguau

SEQ ID NO: 2263218 - RNA, 12 nt, Human
uaauaugagaau

SEQ ID NO: 2263219 - RNA, 16 nt, Human
uaauaugaaaacuuau

SEQ ID NO: 2263220 - RNA, 15 nt, Human
uaauaugaaaacuua

SEQ ID NO: 2263221 - RNA, 14 nt, Human
uaauaugaaaacuu

SEQ ID NO: 2263222 - RNA, 18 nt, Human
uaauaugcugccaaauuu

SEQ ID NO: 2263223 - RNA, 10 nt, Human
uaauaugcau

SEQ ID NO: 2263224 - RNA, 16 nt, Human
uaauaugcugccaaau

SEQ ID NO: 2263225 - RNA, 19 nt, Human
uaauaugcacacauuuuuu

SEQ ID NO: 2263226 - RNA, 22 nt, Human
uaauauggccacaguagucuug

SEQ ID NO: 2263227 - RNA, 15 nt, Human
uaauauggcaaaaau

SEQ ID NO: 2263228 - RNA, 16 nt, Human
uaauauggcaaaaaug

SEQ ID NO: 2263229 - RNA, 18 nt, Human
uaauauggcaaaaauggc

SEQ ID NO: 2263230 - RNA, 22 nt, Human
uaauauggcucuucauaauucu

SEQ ID NO: 2263231 - RNA, 18 nt, Human
uaauaugcacacauuuuu

SEQ ID NO: 2263232 - RNA, 17 nt, Human
uaauaugcacacauuuu

SEQ ID NO: 2263233 - RNA, 16 nt, Human
uaauaugcacacauuu

SEQ ID NO: 2263234 - RNA, 15 nt, Human
uaauaugcacacauu

SEQ ID NO: 2263235 - RNA, 18 nt, Human
uaaccccgggcggguggc

SEQ ID NO: 2263236 - RNA, 15 nt, Human
uaaccccaggccccg

SEQ ID NO: 2263237 - RNA, 15 nt, Human
uaaccccgggcgggu

SEQ ID NO: 2263238 - RNA, 12 nt, Human
uaaccccaggcc

SEQ ID NO: 2263239 - RNA, 13 nt, Human
uaaccccaggccc

SEQ ID NO: 2263240 - RNA, 14 nt, Human
uaaccccaggcccc

SEQ ID NO: 2263241 - RNA, 16 nt, Human
uaaccccuuuccugcg

SEQ ID NO: 2263242 - RNA, 23 nt, Human
uaacccgcucaucacuggaugaa

SEQ ID NO: 2263243 - RNA, 13 nt, Human
uaaccccuuuccu

SEQ ID NO: 2263244 - RNA, 12 nt, Human
uaaccccuuucc

SEQ ID NO: 2263245 - RNA, 20 nt, Human
uaacccuggugguugcuguu

SEQ ID NO: 2263246 - RNA, 18 nt, Human
uaacccucccauggcacc

SEQ ID NO: 2263247 - RNA, 17 nt, Human
uaacccuuaucaccagc

SEQ ID NO: 2263248 - RNA, 16 nt, Human
uaacuauguugauaaa

SEQ ID NO: 2263249 - RNA, 19 nt, Human
uaacuccagugauguucuu

SEQ ID NO: 2263250 - RNA, 15 nt, Human
uaacuccccacccca

SEQ ID NO: 2263251 - RNA, 16 nt, Human
uaacucaccuaacuca

SEQ ID NO: 2263252 - RNA, 17 nt, Human
uaacuauugcccagguu

SEQ ID NO: 2263253 - RNA, 19 nt, Human
uaacuauuuuauuuucuaa

SEQ ID NO: 2263254 - RNA, 14 nt, Human
uaacucaauauuuu

SEQ ID NO: 2263255 - RNA, 22 nt, Human
uaacucaauauuuuccaugaaa

SEQ ID NO: 2263256 - RNA, 22 nt, Human
uaacucuaauucccauuuugca

SEQ ID NO: 2263257 - RNA, 23 nt, Human
uaacucuaaaagauccuuuuuaa

SEQ ID NO: 2263258 - RNA, 17 nt, Human
uaacucuaaaagauccu

SEQ ID NO: 2263259 - RNA, 18 nt, Human
uaacucuaaaagauccuu

SEQ ID NO: 2263260 - RNA, 21 nt, Human
uaacucugcacuacuccucug

SEQ ID NO: 2263261 - RNA, 14 nt, Human
uaacuccuucuugu

SEQ ID NO: 2263262 - RNA, 14 nt, Human
uaacucuaaaagau

SEQ ID NO: 2263263 - RNA, 16 nt, Human
uaacucuaaaagaucc

SEQ ID NO: 2263264 - RNA, 21 nt, Human
uaacugaaaaugugcuauacu

SEQ ID NO: 2263265 - RNA, 20 nt, Human
uaacugaaaaugugcuauac

SEQ ID NO: 2263266 - RNA, 14 nt, Human
uaacucugucuuca

SEQ ID NO: 2263267 - RNA, 11 nt, Human
uaacucugucu

SEQ ID NO: 2263268 - RNA, 14 nt, Human
uaacucuugucuau

SEQ ID NO: 2263269 - RNA, 15 nt, Human
uaacucugucuucac

SEQ ID NO: 2263270 - RNA, 16 nt, Human
uaacucuugucuauuu

SEQ ID NO: 2263271 - RNA, 14 nt, Human
uaacugaaaaugug

SEQ ID NO: 2263272 - RNA, 16 nt, Human
uaacugaaggagaagg

SEQ ID NO: 2263273 - RNA, 15 nt, Human
uaacugaaggagaag

SEQ ID NO: 2263274 - RNA, 14 nt, Human
uaacugaaggagaa

SEQ ID NO: 2263275 - RNA, 13 nt, Human
uaacugacaacuu

SEQ ID NO: 2263276 - RNA, 15 nt, Human
uaaccauuaaaacug

SEQ ID NO: 2263277 - RNA, 18 nt, Human
uaaccauugucuuguucu

SEQ ID NO: 2263278 - RNA, 19 nt, Human
uaaccauugucuuguucug

SEQ ID NO: 2263279 - RNA, 20 nt, Human
uaaccauugucuuguucugu

SEQ ID NO: 2263280 - RNA, 23 nt, Human
uaaccauugucuuguucugugau

SEQ ID NO: 2263281 - RNA, 17 nt, Human
uaaccaucacugguugc

SEQ ID NO: 2263282 - RNA, 19 nt, Human
uaaccccagcucccuagga

SEQ ID NO: 2263283 - RNA, 13 nt, Human
uaaccccagcucc

SEQ ID NO: 2263284 - RNA, 11 nt, Human
uaaccccaccc

SEQ ID NO: 2263285 - RNA, 13 nt, Human
uaacccagauuuu

SEQ ID NO: 2263286 - RNA, 14 nt, Human
uaacccaacucucc

SEQ ID NO: 2263287 - RNA, 14 nt, Human
uaaccauuugcacu

SEQ ID NO: 2263288 - RNA, 16 nt, Human
uaacccaacucuccug

SEQ ID NO: 2263289 - RNA, 16 nt, Human
uaaccacuucagcuga

SEQ ID NO: 2263290 - RNA, 13 nt, Human
uaaccagaucauu

SEQ ID NO: 2263291 - RNA, 23 nt, Human
uaaccaguguuguggauuuaaca

SEQ ID NO: 2263292 - RNA, 17 nt, Human
uaaccaggggccaugaa

SEQ ID NO: 2263293 - RNA, 20 nt, Human
uaaccacgucugucuucaca

SEQ ID NO: 2263294 - RNA, 20 nt, Human
uaaccacuuaaaaaaugucc

SEQ ID NO: 2263295 - RNA, 19 nt, Human
uaaccacuuaaaaaauguc

SEQ ID NO: 2263296 - RNA, 19 nt, Human
uaaccacgucugucuucac

SEQ ID NO: 2263297 - RNA, 15 nt, Human
uaaccacggaaaaga

SEQ ID NO: 2263298 - RNA, 17 nt, Human
uaaccaaaaagaccaga

SEQ ID NO: 2263299 - RNA, 20 nt, Human
uaaccaaaaagaccagacua

SEQ ID NO: 2263300 - RNA, 22 nt, Human
uaacauucuguaaaaugucugu

SEQ ID NO: 2263301 - RNA, 20 nt, Human
uaacauuggguccugggucu

SEQ ID NO: 2263302 - RNA, 16 nt, Human
uaacauuucaagggca

SEQ ID NO: 2263303 - RNA, 13 nt, Human
uaacauuuuaaau

SEQ ID NO: 2263304 - RNA, 21 nt, Human
uaacauuuuaaauaaaagaaa

SEQ ID NO: 2263305 - RNA, 20 nt, Human
uaacauugggaaaucuuaua

SEQ ID NO: 2263306 - RNA, 15 nt, Human
uaacacuuuacaaug

SEQ ID NO: 2263307 - RNA, 11 nt, Human
uaacagaaagg

SEQ ID NO: 2263308 - RNA, 21 nt, Human
uaacagaaagggcaacaauaa

SEQ ID NO: 2263309 - RNA, 23 nt, Human
uaacagaaagggcaacaauaaaa

SEQ ID NO: 2263310 - RNA, 11 nt, Human
uaacagaaaug

SEQ ID NO: 2263311 - RNA, 21 nt, Human
uaagaaacacacugaggcagg

SEQ ID NO: 2263312 - RNA, 20 nt, Human
uaagaaacacacugaggcag

SEQ ID NO: 2263313 - RNA, 21 nt, Human
uaagaaacaacucuuugagaa

SEQ ID NO: 2263314 - RNA, 20 nt, Human
uaagaaacaacucuuugaga

SEQ ID NO: 2263315 - RNA, 23 nt, Human
uaagaaaauauuuugucuaaaau

SEQ ID NO: 2263316 - RNA, 21 nt, Human
uaagaaaagauacgacuuuau

SEQ ID NO: 2263317 - RNA, 12 nt, Human
uaagaaaagauu

SEQ ID NO: 2263318 - RNA, 14 nt, Human
uaagaaaagauuuu

SEQ ID NO: 2263319 - RNA, 17 nt, Human
uaagaaaauauuuuguc

SEQ ID NO: 2263320 - RNA, 20 nt, Human
uaagaaaauauuuugucuaa

SEQ ID NO: 2263321 - RNA, 21 nt, Human
uaagaaaauauuuugucuaaa

SEQ ID NO: 2263322 - RNA, 22 nt, Human
uaagaaaauauuuugucuaaaa

SEQ ID NO: 2263323 - RNA, 19 nt, Human
uaagaaaagauuuuaauca

SEQ ID NO: 2263324 - RNA, 21 nt, Human
uaagaaaauaucacuugucaa

SEQ ID NO: 2263325 - RNA, 23 nt, Human
uaagaaacacacugaggcaggga

SEQ ID NO: 2263326 - RNA, 18 nt, Human
uaagaaacccagacugaa

SEQ ID NO: 2263327 - RNA, 24 nt, Human
uaagaaaucuaguauuucaugcug

SEQ ID NO: 2263328 - RNA, 17 nt, Human
uaagaggcagaaaauug

SEQ ID NO: 2263329 - RNA, 21 nt, Human
uaagaggacauaauggggucc

SEQ ID NO: 2263330 - RNA, 20 nt, Human
uaagaggcagaaaauugcac

SEQ ID NO: 2263331 - RNA, 23 nt, Human
uaagaggcagaaaauugcacaau

SEQ ID NO: 2263332 - RNA, 15 nt, Human
uaagaggcagcguga

SEQ ID NO: 2263333 - RNA, 14 nt, Human
uaagagagaaugag

SEQ ID NO: 2263334 - RNA, 23 nt, Human
uaagagagaaugagagacacacu

SEQ ID NO: 2263335 - RNA, 22 nt, Human
uaagaacaaagagaaaaaauac

SEQ ID NO: 2263336 - RNA, 19 nt, Human
uaagaaccuuuugagugcc

SEQ ID NO: 2263337 - RNA, 14 nt, Human
uaagaaccuggaac

SEQ ID NO: 2263338 - RNA, 21 nt, Human
uaagagacagucaccccagga

SEQ ID NO: 2263339 - RNA, 13 nt, Human
uaagagagaauga

SEQ ID NO: 2263340 - RNA, 20 nt, Human
uaagaaaaaauaacacacau

SEQ ID NO: 2263341 - RNA, 18 nt, Human
uaagaaaaaggaugcaca

SEQ ID NO: 2263342 - RNA, 16 nt, Human
uaagaaaaaggaugca

SEQ ID NO: 2263343 - RNA, 16 nt, Human
uaagaaaacaucacug

SEQ ID NO: 2263344 - RNA, 16 nt, Human
uaagaaaaaucauguu

SEQ ID NO: 2263345 - RNA, 14 nt, Human
uaagaaaagagaua

SEQ ID NO: 2263346 - RNA, 16 nt, Human
uaagaaaagauguaga

SEQ ID NO: 2263347 - RNA, 18 nt, Human
uaagaaaagagauauuuu

SEQ ID NO: 2263348 - RNA, 22 nt, Human
uaagaaaagagauauuuuaaaa

SEQ ID NO: 2263349 - RNA, 14 nt, Human
uaagaaaaaucaug

SEQ ID NO: 2263350 - RNA, 17 nt, Human
uaagaaaaaucauguuu

SEQ ID NO: 2263351 - RNA, 23 nt, Human
uaagaaaaaggaugcacagaguu

SEQ ID NO: 2263352 - RNA, 19 nt, Human
uaagaaaaaggaugcacag

SEQ ID NO: 2263353 - RNA, 22 nt, Human
uaacuggaagcauguaggagaa

SEQ ID NO: 2263354 - RNA, 18 nt, Human
uaacugugaaguuuacau

SEQ ID NO: 2263355 - RNA, 22 nt, Human
uaacuguuaaauugcuguguau

SEQ ID NO: 2263356 - RNA, 17 nt, Human
uaacuguuauuuauaau

SEQ ID NO: 2263357 - RNA, 16 nt, Human
uaacuguuauuuauaa

SEQ ID NO: 2263358 - RNA, 20 nt, Human
uaacuuuuguaaauacacau

SEQ ID NO: 2263359 - RNA, 13 nt, Human
uaacuuuuguaag

SEQ ID NO: 2263360 - RNA, 18 nt, Human
uaacuuuuguaagacaaa

SEQ ID NO: 2263361 - RNA, 18 nt, Human
uaacuggagccccaucag

SEQ ID NO: 2263362 - RNA, 17 nt, Human
uaacugugaaguuuaca

SEQ ID NO: 2263363 - RNA, 15 nt, Human
uaacuggaaacuuca

SEQ ID NO: 2263364 - RNA, 21 nt, Human
uaacaccagguuuauggaaaa

SEQ ID NO: 2263365 - RNA, 19 nt, Human
uaacacauuuuguauaauu

SEQ ID NO: 2263366 - RNA, 14 nt, Human
uaacaccugaugug

SEQ ID NO: 2263367 - RNA, 16 nt, Human
uaacaccugaugugua

SEQ ID NO: 2263368 - RNA, 17 nt, Human
uaacaccugauguguac

SEQ ID NO: 2263369 - RNA, 15 nt, Human
uaacacuggccccua

SEQ ID NO: 2263370 - RNA, 13 nt, Human
uaacacuggcccc

SEQ ID NO: 2263371 - RNA, 16 nt, Human
uaacacuauaaagguu

SEQ ID NO: 2263372 - RNA, 19 nt, Human
uaacacuauguuuauuuac

SEQ ID NO: 2263373 - RNA, 14 nt, Human
uaacacuauuuuau

SEQ ID NO: 2263374 - RNA, 15 nt, Human
uaacacuauuuuaug

SEQ ID NO: 2263375 - RNA, 12 nt, Human
uaaauuuguaag

SEQ ID NO: 2263376 - RNA, 13 nt, Human
uaaauuuguaagu

SEQ ID NO: 2263377 - RNA, 15 nt, Human
uaaauuuguaaguuu

SEQ ID NO: 2263378 - RNA, 16 nt, Human
uaaauuuguaaguuuc

SEQ ID NO: 2263379 - RNA, 17 nt, Human
uaaauuuguaaguuuca

SEQ ID NO: 2263380 - RNA, 18 nt, Human
uaaauuuguaaguuucag

SEQ ID NO: 2263381 - RNA, 19 nt, Human
uaaauuuguaaguuucagg

SEQ ID NO: 2263382 - RNA, 20 nt, Human
uaaauuuguaaguuucaggu

SEQ ID NO: 2263383 - RNA, 23 nt, Human
uaaauuuguaaguuucaggugac

SEQ ID NO: 2263384 - RNA, 22 nt, Human
uaacacauuaucgggagcagug

SEQ ID NO: 2263385 - RNA, 14 nt, Human
uaacacauuuugua

SEQ ID NO: 2263386 - RNA, 17 nt, Human
uaacacauuugauucug

SEQ ID NO: 2263387 - RNA, 17 nt, Human
uaacacauuuuguauaa

SEQ ID NO: 2263388 - RNA, 18 nt, Human
uaacacauuuuguauaau

SEQ ID NO: 2263389 - RNA, 23 nt, Human
uaacacauuuuguauaauuguau

SEQ ID NO: 2263390 - RNA, 18 nt, Human
uaacaccaugauuaacca

SEQ ID NO: 2263391 - RNA, 17 nt, Human
uaaauuuauuucaaaaa

SEQ ID NO: 2263392 - RNA, 17 nt, Human
uaaauuuccccaacagu

SEQ ID NO: 2263393 - RNA, 18 nt, Human
uaaauuuccccaacagug

SEQ ID NO: 2263394 - RNA, 19 nt, Human
uaaauuuccccaacagugu

SEQ ID NO: 2263395 - RNA, 15 nt, Human
uaaauuuauuucaaa

SEQ ID NO: 2263396 - RNA, 18 nt, Human
uaaauuuauuuacugcua

SEQ ID NO: 2263397 - RNA, 15 nt, Human
uaaauuuauuuacug

SEQ ID NO: 2263398 - RNA, 14 nt, Human
uaaauuuauuuacu

SEQ ID NO: 2263399 - RNA, 22 nt, Human
uaaauugaaucaguauaaacaa

SEQ ID NO: 2263400 - RNA, 19 nt, Human
uaaauugaaucaguauaaa

SEQ ID NO: 2263401 - RNA, 22 nt, Human
uaaauuugaauguuaagcagau

SEQ ID NO: 2263402 - RNA, 22 nt, Human
uaaauuuccccaacagugugaa

SEQ ID NO: 2263403 - RNA, 14 nt, Human
uaaauuugaauguu

SEQ ID NO: 2263404 - RNA, 20 nt, Human
uaaauuuccccaacagugug

SEQ ID NO: 2263405 - RNA, 21 nt, Human
uaaauuuccccaacaguguga

SEQ ID NO: 2263406 - RNA, 23 nt, Human
uaaauuuccccaacagugugaag

SEQ ID NO: 2263407 - RNA, 20 nt, Human
uaaauugacacuuaaaaaug

SEQ ID NO: 2263408 - RNA, 23 nt, Human
uaaauugacacuuaaaaaugguu

SEQ ID NO: 2263409 - RNA, 12 nt, Human
uaaauugaauaa

SEQ ID NO: 2263410 - RNA, 13 nt, Human
uaaauugaauaau

SEQ ID NO: 2263411 - RNA, 16 nt, Human
uaaauugaauaauggu

SEQ ID NO: 2263412 - RNA, 17 nt, Human
uaaauugaauaauggua

SEQ ID NO: 2263413 - RNA, 13 nt, Human
uaaauuuauguga

SEQ ID NO: 2263414 - RNA, 14 nt, Human
uaaauuccacugga

SEQ ID NO: 2263415 - RNA, 13 nt, Human
uaaauuccacugg

SEQ ID NO: 2263416 - RNA, 14 nt, Human
uaaauucaguccua

SEQ ID NO: 2263417 - RNA, 18 nt, Human
uaaauucaguccuaagaa

SEQ ID NO: 2263418 - RNA, 13 nt, Human
uaaauucauuuua

SEQ ID NO: 2263419 - RNA, 20 nt, Human
uaaauucauuuuaauuuugu

SEQ ID NO: 2263420 - RNA, 16 nt, Human
uaaauuccacuggacu

SEQ ID NO: 2263421 - RNA, 14 nt, Human
uaaauuccucuuug

SEQ ID NO: 2263422 - RNA, 12 nt, Human
uaaauuccucuu

SEQ ID NO: 2263423 - RNA, 16 nt, Human
uaaauucuugcaaagu

SEQ ID NO: 2263424 - RNA, 19 nt, Human
uaaauuccucuuugcuuug

SEQ ID NO: 2263425 - RNA, 18 nt, Human
uaaauuccucuuugcuuu

SEQ ID NO: 2263426 - RNA, 17 nt, Human
uaaauuccucuuugcuu

SEQ ID NO: 2263427 - RNA, 16 nt, Human
uaaauuccucuuugcu

SEQ ID NO: 2263428 - RNA, 20 nt, Human
uaaauuccucuuugcuuugc

SEQ ID NO: 2263429 - RNA, 22 nt, Human
uaaauucuugcaaaguaucccu

SEQ ID NO: 2263430 - RNA, 18 nt, Human
uaaauucuugcaaaguau

SEQ ID NO: 2263431 - RNA, 17 nt, Human
uaaauucuugcaaagua

SEQ ID NO: 2263432 - RNA, 23 nt, Human
uaaauucagauauauuuuucaca

SEQ ID NO: 2263433 - RNA, 20 nt, Human
uaaauucagauauauuuuuc

SEQ ID NO: 2263434 - RNA, 18 nt, Human
uaaauucagauauauuuu

SEQ ID NO: 2263435 - RNA, 17 nt, Human
uaaauucacaauagaaa

SEQ ID NO: 2263436 - RNA, 22 nt, Human
uaaauucaccuagucuaaggau

SEQ ID NO: 2263437 - RNA, 18 nt, Human
uaaauucacaaacuuuua

SEQ ID NO: 2263438 - RNA, 23 nt, Human
uaaauucaaccacuguaaaauga

SEQ ID NO: 2263439 - RNA, 16 nt, Human
uaaauucacaaacuuu

SEQ ID NO: 2263440 - RNA, 23 nt, Human
uaaaugugcauucuuuuaaaaga

SEQ ID NO: 2263441 - RNA, 20 nt, Human
uaaauucaaccacuguaaaa

SEQ ID NO: 2263442 - RNA, 11 nt, Human
uaaauuauuuu

SEQ ID NO: 2263443 - RNA, 16 nt, Human
uaaaugugcuuuuaaa

SEQ ID NO: 2263444 - RNA, 16 nt, Human
uaaaugugcauucuuu

SEQ ID NO: 2263445 - RNA, 21 nt, Human
uaaaugugcauucuuuuaaaa

SEQ ID NO: 2263446 - RNA, 12 nt, Human
uaaaugucuaau

SEQ ID NO: 2263447 - RNA, 15 nt, Human
uaaaugucuaaugua

SEQ ID NO: 2263448 - RNA, 16 nt, Human
uaaaugucuaauguau

SEQ ID NO: 2263449 - RNA, 12 nt, Human
uaaaugucuguu

SEQ ID NO: 2263450 - RNA, 21 nt, Human
uaaaugucuuuuuuuuaaugu

SEQ ID NO: 2263451 - RNA, 22 nt, Human
uaaaugucuuuuuuuuaaugug

SEQ ID NO: 2263452 - RNA, 23 nt, Human
uaaaugucuuuuuuuuaaugugc

SEQ ID NO: 2263453 - RNA, 19 nt, Human
uaaaugugaugaauacugu

SEQ ID NO: 2263454 - RNA, 16 nt, Human
uaaaugugccuucauu

SEQ ID NO: 2263455 - RNA, 12 nt, Human
uaaauggccuca

SEQ ID NO: 2263456 - RNA, 16 nt, Human
uaaauggccucaugug

SEQ ID NO: 2263457 - RNA, 22 nt, Human
uaaauggccucauguggcugga

SEQ ID NO: 2263458 - RNA, 16 nt, Human
uaaauggaaccacucu

SEQ ID NO: 2263459 - RNA, 13 nt, Human
uaaaugcuauuuu

SEQ ID NO: 2263460 - RNA, 14 nt, Human
uaaaugcuauuuuu

SEQ ID NO: 2263461 - RNA, 15 nt, Human
uaaaugcuauuuuuu

SEQ ID NO: 2263462 - RNA, 23 nt, Human
uaaaugcuauuuuuuauuuuacu

SEQ ID NO: 2263463 - RNA, 17 nt, Human
uaaaugcuuuaugcaaa

SEQ ID NO: 2263464 - RNA, 21 nt, Human
uaaaugcuuugugugauugaa

SEQ ID NO: 2263465 - RNA, 17 nt, Human
uaaauggaaaaaaugau

SEQ ID NO: 2263466 - RNA, 14 nt, Human
uaaaugcccagccc

SEQ ID NO: 2263467 - RNA, 15 nt, Human
uaaaugcccagcccc

SEQ ID NO: 2263468 - RNA, 16 nt, Human
uaaaugcccagccccu

SEQ ID NO: 2263469 - RNA, 17 nt, Human
uaaaugcccagccccuu

SEQ ID NO: 2263470 - RNA, 17 nt, Human
uaaaguucugaguguuu

SEQ ID NO: 2263471 - RNA, 23 nt, Human
uaaaguucuguacucaaauguag

SEQ ID NO: 2263472 - RNA, 17 nt, Human
uaaaguugguaaaccuu

SEQ ID NO: 2263473 - RNA, 16 nt, Human
uaaaguugguaaaccu

SEQ ID NO: 2263474 - RNA, 17 nt, Human
uaaaguuuacaguaaau

SEQ ID NO: 2263475 - RNA, 23 nt, Human
uaaaguuuacaguaaauaaauug

SEQ ID NO: 2263476 - RNA, 13 nt, Human
uaaaguuuacagu

SEQ ID NO: 2263477 - RNA, 14 nt, Human
uaaaguuuacagua

SEQ ID NO: 2263478 - RNA, 16 nt, Human
uaaaguuuacaguaaa

SEQ ID NO: 2263479 - RNA, 13 nt, Human
uaaaugcccagcc

SEQ ID NO: 2263480 - RNA, 11 nt, Human
uaaauggcugc

SEQ ID NO: 2263481 - RNA, 23 nt, Human
uaaauggccucauguggcuggaa

SEQ ID NO: 2263482 - RNA, 20 nt, Human
uaaauggcuuccuggcaaua

SEQ ID NO: 2263483 - RNA, 17 nt, Human
uaaaugggggugcauuu

SEQ ID NO: 2263484 - RNA, 14 nt, Human
uaaaugggggugca

SEQ ID NO: 2263485 - RNA, 17 nt, Human
uaaauggucgcccagga

SEQ ID NO: 2263486 - RNA, 14 nt, Human
uaaaugguauagca

SEQ ID NO: 2263487 - RNA, 16 nt, Human
uaaauggguagagaaa

SEQ ID NO: 2263488 - RNA, 17 nt, Human
uaaauggggcucacaaa

SEQ ID NO: 2263489 - RNA, 14 nt, Human
uaaaugguuaaaag

SEQ ID NO: 2263490 - RNA, 20 nt, Human
uaaaugguauagcaaauguu

SEQ ID NO: 2263491 - RNA, 15 nt, Human
uaaaugguguacaua

SEQ ID NO: 2263492 - RNA, 16 nt, Human
uaaaugguguacauaa

SEQ ID NO: 2263493 - RNA, 17 nt, Human
uaaaugguguacauaau

SEQ ID NO: 2263494 - RNA, 19 nt, Human
uaaaugggggugcauuuga

SEQ ID NO: 2263495 - RNA, 18 nt, Human
uaaaugggggugcauuug

SEQ ID NO: 2263496 - RNA, 16 nt, Human
uaaauguagguaugaa

SEQ ID NO: 2263497 - RNA, 21 nt, Human
uaaaugguguacauaauguau

SEQ ID NO: 2263498 - RNA, 16 nt, Human
uaaauguaaagauauu

SEQ ID NO: 2263499 - RNA, 13 nt, Human
uaaauguaaagau

SEQ ID NO: 2263500 - RNA, 19 nt, Human
uaaauguaacagucugauc

SEQ ID NO: 2263501 - RNA, 17 nt, Human
uaaauguaacagucuga

SEQ ID NO: 2263502 - RNA, 18 nt, Human
uaaauguaacagucugau

SEQ ID NO: 2263503 - RNA, 17 nt, Human
uaaauguaaagauauuu

SEQ ID NO: 2263504 - RNA, 13 nt, Human
uaaauguaacagu

SEQ ID NO: 2263505 - RNA, 14 nt, Human
uaaauguaacaguc

SEQ ID NO: 2263506 - RNA, 19 nt, Human
uaaauguaucuuauucaca

SEQ ID NO: 2263507 - RNA, 20 nt, Human
uaaaugucuaguuguaacac

SEQ ID NO: 2263508 - RNA, 22 nt, Human
uaaaugucucuuuaaugucaca

SEQ ID NO: 2263509 - RNA, 16 nt, Human
uaaaccaaaaacugaa

SEQ ID NO: 2263510 - RNA, 21 nt, Human
uaaacauugguucuuguauua

SEQ ID NO: 2263511 - RNA, 18 nt, Human
uaaacauugaaguaauga

SEQ ID NO: 2263512 - RNA, 22 nt, Human
uaaacauuaaucaaucaucugu

SEQ ID NO: 2263513 - RNA, 20 nt, Human
uaaacauuaguguucauagc

SEQ ID NO: 2263514 - RNA, 16 nt, Human
uaaacaugguuacaau

SEQ ID NO: 2263515 - RNA, 13 nt, Human
uaaacauguguuu

SEQ ID NO: 2263516 - RNA, 18 nt, Human
uaaacaugguuacaauca

SEQ ID NO: 2263517 - RNA, 12 nt, Human
uaaacauguguu

SEQ ID NO: 2263518 - RNA, 15 nt, Human
uaaacauguguuuua

SEQ ID NO: 2263519 - RNA, 12 nt, Human
uaaacuguguuu

SEQ ID NO: 2263520 - RNA, 20 nt, Human
uaaacuguguggacugugau

SEQ ID NO: 2263521 - RNA, 13 nt, Human
uaaacugugugca

SEQ ID NO: 2263522 - RNA, 22 nt, Human
uaaacuguguauuccaagacau

SEQ ID NO: 2263523 - RNA, 17 nt, Human
uaaacuguguauuccaa

SEQ ID NO: 2263524 - RNA, 18 nt, Human
uaaacuguguacauaacu

SEQ ID NO: 2263525 - RNA, 15 nt, Human
uaaacuguguacaua

SEQ ID NO: 2263526 - RNA, 19 nt, Human
uaaacauugguucuuguau

SEQ ID NO: 2263527 - RNA, 14 nt, Human
uaaacugugcacca

SEQ ID NO: 2263528 - RNA, 12 nt, Human
uaaacugugcac

SEQ ID NO: 2263529 - RNA, 22 nt, Human
uaaacuuagugcggacaaguuu

SEQ ID NO: 2263530 - RNA, 20 nt, Human
uaaacuucauggucaugggu

SEQ ID NO: 2263531 - RNA, 13 nt, Human
uaaacuguguuua

SEQ ID NO: 2263532 - RNA, 22 nt, Human
uaaacuguguggacugugaugc

SEQ ID NO: 2263533 - RNA, 20 nt, Human
uaaacuuagaauaaaauugu

SEQ ID NO: 2263534 - RNA, 21 nt, Human
uaaacuuagaauaaaauugua

SEQ ID NO: 2263535 - RNA, 22 nt, Human
uaaacuugguuuuuaaaaaacu

SEQ ID NO: 2263536 - RNA, 18 nt, Human
uaaacuuccccaucuucu

SEQ ID NO: 2263537 - RNA, 14 nt, Human
uaaacuucucugaa

SEQ ID NO: 2263538 - RNA, 17 nt, Human
uaaacuucucugaaggg

SEQ ID NO: 2263539 - RNA, 20 nt, Human
uaaacuucucugaagggagg

SEQ ID NO: 2263540 - RNA, 21 nt, Human
uaaacuucucugaagggaggu

SEQ ID NO: 2263541 - RNA, 17 nt, Human
uaaacuuuuuuuugaga

SEQ ID NO: 2263542 - RNA, 18 nt, Human
uaaacuuuuuuuugagaa

SEQ ID NO: 2263543 - RNA, 17 nt, Human
uaaagaaaaagucaucc

SEQ ID NO: 2263544 - RNA, 20 nt, Human
uaaaaucuuggcacagaaac

SEQ ID NO: 2263545 - RNA, 19 nt, Human
uaaacaagaccacguuucu

SEQ ID NO: 2263546 - RNA, 20 nt, Human
uaaacaagaccacguuucua

SEQ ID NO: 2263547 - RNA, 22 nt, Human
uaaacaagaccacguuucuaaa

SEQ ID NO: 2263548 - RNA, 21 nt, Human
uaaacaagaccacguuucuaa

SEQ ID NO: 2263549 - RNA, 16 nt, Human
uaaaaucuugaaaaug

SEQ ID NO: 2263550 - RNA, 19 nt, Human
uaaaaucuuggcacagaaa

SEQ ID NO: 2263551 - RNA, 13 nt, Human
uaaaaucuuaaac

SEQ ID NO: 2263552 - RNA, 14 nt, Human
uaaaaucugucacg

SEQ ID NO: 2263553 - RNA, 13 nt, Human
uaaaaucugucac

SEQ ID NO: 2263554 - RNA, 19 nt, Human
uaaaaucauguacauuucu

SEQ ID NO: 2263555 - RNA, 18 nt, Human
uaaaaucauguacauuuc

SEQ ID NO: 2263556 - RNA, 15 nt, Human
uaaaaucauguacau

SEQ ID NO: 2263557 - RNA, 23 nt, Human
uaaaaucagccaauuauguuaaa

SEQ ID NO: 2263558 - RNA, 17 nt, Human
uaaacauccuucaagaa

SEQ ID NO: 2263559 - RNA, 17 nt, Human
uaaacauccaauauuuu

SEQ ID NO: 2263560 - RNA, 20 nt, Human
uaaacauccaauauuuucuu

SEQ ID NO: 2263561 - RNA, 15 nt, Human
uaaacaucacacaca

SEQ ID NO: 2263562 - RNA, 18 nt, Human
uaaacacccuucacauac

SEQ ID NO: 2263563 - RNA, 16 nt, Human
uaaacaucacacacac

SEQ ID NO: 2263564 - RNA, 18 nt, Human
uaaacacucuugaaaaau

SEQ ID NO: 2263565 - RNA, 15 nt, Human
uaaacacucuugaaa

SEQ ID NO: 2263566 - RNA, 17 nt, Human
uaaacacucuugaaaaa

SEQ ID NO: 2263567 - RNA, 18 nt, Human
uaaacacgccugcaaacg

SEQ ID NO: 2263568 - RNA, 22 nt, Human
uaaacacccaugaaucaaagac

SEQ ID NO: 2263569 - RNA, 23 nt, Human
uaaacacccaugaaucaaagaca

SEQ ID NO: 2263570 - RNA, 15 nt, Human
uaaaguuagucuacu

SEQ ID NO: 2263571 - RNA, 18 nt, Human
uaaaguguuucuguuauu

SEQ ID NO: 2263572 - RNA, 16 nt, Human
uaaaguuagucuacuc

SEQ ID NO: 2263573 - RNA, 20 nt, Human
uaaaguuagucuacucuuaa

SEQ ID NO: 2263574 - RNA, 17 nt, Human
uaaaguguguuucuaug

SEQ ID NO: 2263575 - RNA, 23 nt, Human
uaaaguguccauugacauguaca

SEQ ID NO: 2263576 - RNA, 18 nt, Human
uaaaguguggucccaaca

SEQ ID NO: 2263577 - RNA, 20 nt, Human
uaaaguguggucccaacagg

SEQ ID NO: 2263578 - RNA, 17 nt, Human
uaaaguguguuguugcu

SEQ ID NO: 2263579 - RNA, 18 nt, Human
uaaaguguguuguugcuu

SEQ ID NO: 2263580 - RNA, 17 nt, Human
uaaaguguuucuguuau

SEQ ID NO: 2263581 - RNA, 16 nt, Human
uaaaguuacuuuguca

SEQ ID NO: 2263582 - RNA, 20 nt, Human
uaaaggccucuuccuugcug

SEQ ID NO: 2263583 - RNA, 18 nt, Human
uaaaguguccauugacau

SEQ ID NO: 2263584 - RNA, 20 nt, Human
uaaaguguccauugacaugu

SEQ ID NO: 2263585 - RNA, 21 nt, Human
uaaaguguccauugacaugua

SEQ ID NO: 2263586 - RNA, 22 nt, Human
uaaaguguccauugacauguac

SEQ ID NO: 2263587 - RNA, 17 nt, Human
uaaaggcuaccuuugua

SEQ ID NO: 2263588 - RNA, 14 nt, Human
uaaaguguuugaaa

SEQ ID NO: 2263589 - RNA, 21 nt, Human
uaaagcugccuguaguuagga

SEQ ID NO: 2263590 - RNA, 18 nt, Human
uaaagcugccuguaguua

SEQ ID NO: 2263591 - RNA, 23 nt, Human
uaaagcugccuguaguuaggaaa

SEQ ID NO: 2263592 - RNA, 19 nt, Human
uaaagcuugcaacaaaauu

SEQ ID NO: 2263593 - RNA, 17 nt, Human
uaaagcugccuguaguu

SEQ ID NO: 2263594 - RNA, 16 nt, Human
uaaagcugccuguagu

SEQ ID NO: 2263595 - RNA, 14 nt, Human
uaaagcugaaaacu

SEQ ID NO: 2263596 - RNA, 20 nt, Human
uaaagccugaguuugcuuuc

SEQ ID NO: 2263597 - RNA, 16 nt, Human
uaaaggaaaugauuga

SEQ ID NO: 2263598 - RNA, 13 nt, Human
uaaaggaaaugau

SEQ ID NO: 2263599 - RNA, 15 nt, Human
uaaaggcuaccuuug

SEQ ID NO: 2263600 - RNA, 21 nt, Human
uaaaggcccuaucuguuuaca

SEQ ID NO: 2263601 - RNA, 18 nt, Human
uaaagaaaaucucuguga

SEQ ID NO: 2263602 - RNA, 12 nt, Human
uaaagaaaacug

SEQ ID NO: 2263603 - RNA, 19 nt, Human
uaaagaaaauaucugaaau

SEQ ID NO: 2263604 - RNA, 12 nt, Human
uaaagaaagaga

SEQ ID NO: 2263605 - RNA, 14 nt, Human
uaaagaaagagaga

SEQ ID NO: 2263606 - RNA, 13 nt, Human
uaaagaaagagag

SEQ ID NO: 2263607 - RNA, 23 nt, Human
uaaagcaauaauggucccaucca

SEQ ID NO: 2263608 - RNA, 23 nt, Human
uaaagcaacugucuauuucugcu

SEQ ID NO: 2263609 - RNA, 20 nt, Human
uaaagcaacuguuaugaaau

SEQ ID NO: 2263610 - RNA, 22 nt, Human
uaaagcaacuguuaugaaauaa

SEQ ID NO: 2263611 - RNA, 17 nt, Human
uaaagcaauaugcauuu

SEQ ID NO: 2263612 - RNA, 15 nt, Human
uaaagcaauaugcau

SEQ ID NO: 2263613 - RNA, 11 nt, Human
uaaagcaauuu

SEQ ID NO: 2263614 - RNA, 12 nt, Human
uaaagcaauuuu

SEQ ID NO: 2263615 - RNA, 13 nt, Human
uaaagcaauuuuc

SEQ ID NO: 2263616 - RNA, 14 nt, Human
uaaagcaauuuucc

SEQ ID NO: 2263617 - RNA, 15 nt, Human
uaaagcaauuuuccu

SEQ ID NO: 2263618 - RNA, 16 nt, Human
uaaagcaauuuuccuu

SEQ ID NO: 2263619 - RNA, 17 nt, Human
uaaagcaauuuuccuug

SEQ ID NO: 2263620 - RNA, 19 nt, Human
uaaagcaauuuuccuugaa

SEQ ID NO: 2263621 - RNA, 20 nt, Human
uaaagcaauuuuccuugaag

SEQ ID NO: 2263622 - RNA, 21 nt, Human
uaaagcaauuuuccuugaagc

SEQ ID NO: 2263623 - RNA, 22 nt, Human
uaaagcaauuuuccuugaagcc

SEQ ID NO: 2263624 - RNA, 23 nt, Human
uaaagcaauuuuccuugaagccg

SEQ ID NO: 2263625 - RNA, 20 nt, Human
uaaagcagagggacuuugua

SEQ ID NO: 2263626 - RNA, 22 nt, Human
uaaagcacagucugaugacaca

SEQ ID NO: 2263627 - RNA, 12 nt, Human
uaaagccuccuc

SEQ ID NO: 2263628 - RNA, 18 nt, Human
uaaagcaggcagaacuca

SEQ ID NO: 2263629 - RNA, 19 nt, Human
uaaagcagcguuucuauga

SEQ ID NO: 2263630 - RNA, 17 nt, Human
uaaagcagcguuucuau

SEQ ID NO: 2263631 - RNA, 16 nt, Human
uaaagcagcguuucua

SEQ ID NO: 2263632 - RNA, 12 nt, Human
uaaaacauguaa

SEQ ID NO: 2263633 - RNA, 14 nt, Human
uaaaacauguaaua

SEQ ID NO: 2263634 - RNA, 13 nt, Human
uaaaacauuaaga

SEQ ID NO: 2263635 - RNA, 12 nt, Human
uaaaacauuaau

SEQ ID NO: 2263636 - RNA, 14 nt, Human
uaaaacauuaagaa

SEQ ID NO: 2263637 - RNA, 16 nt, Human
uaaaacauuaagaaaa

SEQ ID NO: 2263638 - RNA, 17 nt, Human
uaaaacauuaagaaaau

SEQ ID NO: 2263639 - RNA, 17 nt, Human
uaaaacauuuucacaca

SEQ ID NO: 2263640 - RNA, 15 nt, Human
uaaaacauuuucaca

SEQ ID NO: 2263641 - RNA, 16 nt, Human
uaaaacauuuuaaaug

SEQ ID NO: 2263642 - RNA, 17 nt, Human
uaaaacauuuuaaaugg

SEQ ID NO: 2263643 - RNA, 18 nt, Human
uaaaacauuuuaaaugga

SEQ ID NO: 2263644 - RNA, 21 nt, Human
uaaaacauuuuaaauggacag

SEQ ID NO: 2263645 - RNA, 14 nt, Human
uaaaacauuuuaaa

SEQ ID NO: 2263646 - RNA, 18 nt, Human
uaaaacauuuucacacaa

SEQ ID NO: 2263647 - RNA, 22 nt, Human
uaaaacauuuuaaauggacaga

SEQ ID NO: 2263648 - RNA, 11 nt, Human
uaaaaccaaag

SEQ ID NO: 2263649 - RNA, 13 nt, Human
uaaaaccacagca

SEQ ID NO: 2263650 - RNA, 18 nt, Human
uaaaagagguuuuucuua

SEQ ID NO: 2263651 - RNA, 18 nt, Human
uaaaagagauuucaagag

SEQ ID NO: 2263652 - RNA, 20 nt, Human
uaaaagagauuucaagagau

SEQ ID NO: 2263653 - RNA, 13 nt, Human
uaaaaccaaagag

SEQ ID NO: 2263654 - RNA, 16 nt, Human
uaaaagagauuucaag

SEQ ID NO: 2263655 - RNA, 17 nt, Human
uaaaagagauuucaaga

SEQ ID NO: 2263656 - RNA, 23 nt, Human
uaaaagauaacaagaucuuucag

SEQ ID NO: 2263657 - RNA, 12 nt, Human
uaaaagauauaa

SEQ ID NO: 2263658 - RNA, 13 nt, Human
uaaaagauauaag

SEQ ID NO: 2263659 - RNA, 16 nt, Human
uaaaagauauaagugc

SEQ ID NO: 2263660 - RNA, 21 nt, Human
uaaaagauacaguuacucaga

SEQ ID NO: 2263661 - RNA, 12 nt, Human
uaaaagauucau

SEQ ID NO: 2263662 - RNA, 14 nt, Human
uaaaagauucauuu

SEQ ID NO: 2263663 - RNA, 19 nt, Human
uaaaagauucauuuuuaau

SEQ ID NO: 2263664 - RNA, 20 nt, Human
uaaaagauucauuuuuaauc

SEQ ID NO: 2263665 - RNA, 18 nt, Human
uaaaagauauaagugcug

SEQ ID NO: 2263666 - RNA, 19 nt, Human
uaaaagauauaagugcugu

SEQ ID NO: 2263667 - RNA, 20 nt, Human
uaaaagauauaagugcugua

SEQ ID NO: 2263668 - RNA, 21 nt, Human
uaaaagauauaagugcuguau

SEQ ID NO: 2263669 - RNA, 20 nt, Human
uaaaagauacaguuacucag

SEQ ID NO: 2263670 - RNA, 17 nt, Human
uaaaagauacaguuacu

SEQ ID NO: 2263671 - RNA, 14 nt, Human
uaaaagauacaguu

SEQ ID NO: 2263672 - RNA, 17 nt, Human
uaaaagauaaauauuau

SEQ ID NO: 2263673 - RNA, 21 nt, Human
uaaaagagguuuuucuuaaau

SEQ ID NO: 2263674 - RNA, 19 nt, Human
uaaaagagguuuuucuuaa

SEQ ID NO: 2263675 - RNA, 11 nt, Human
uaaaagcacac

SEQ ID NO: 2263676 - RNA, 17 nt, Human
uaaaagcaauuccaacc

SEQ ID NO: 2263677 - RNA, 21 nt, Human
uaaaaggaaaucucaccccau

SEQ ID NO: 2263678 - RNA, 19 nt, Human
uaaaaggaagccaaagagu

SEQ ID NO: 2263679 - RNA, 21 nt, Human
uaaaagcagcaucugcuaaua

SEQ ID NO: 2263680 - RNA, 20 nt, Human
uaaaagcagcaucugcuaau

SEQ ID NO: 2263681 - RNA, 11 nt, Human
uaaaagcagca

SEQ ID NO: 2263682 - RNA, 12 nt, Human
uaaaaggagcca

SEQ ID NO: 2263683 - RNA, 14 nt, Human
uaaaaggaagccaa

SEQ ID NO: 2263684 - RNA, 15 nt, Human
uaaaaggccaaaccu

SEQ ID NO: 2263685 - RNA, 19 nt, Human
uaaaaggcaaauguguaca

SEQ ID NO: 2263686 - RNA, 18 nt, Human
uaaaaggcaaauguguac

SEQ ID NO: 2263687 - RNA, 21 nt, Human
uaaaagguaugcaaucaaauc

SEQ ID NO: 2263688 - RNA, 20 nt, Human
uaaaaggccaaaccucuguu

SEQ ID NO: 2263689 - RNA, 18 nt, Human
uaaaaggccaaaccucug

SEQ ID NO: 2263690 - RNA, 19 nt, Human
uaaaagggauuacccaagc

SEQ ID NO: 2263691 - RNA, 20 nt, Human
uaaaagggauuacccaagca

SEQ ID NO: 2263692 - RNA, 21 nt, Human
uaaaagggauuacccaagcaa

SEQ ID NO: 2263693 - RNA, 20 nt, Human
uaaaagggcucuuuagccag

SEQ ID NO: 2263694 - RNA, 12 nt, Human
uaaaaggugacc

SEQ ID NO: 2263695 - RNA, 19 nt, Human
uaaaaggugaccaaugaug

SEQ ID NO: 2263696 - RNA, 22 nt, Human
uaaaagguauuaaauugauguu

SEQ ID NO: 2263697 - RNA, 13 nt, Human
uaaaaucauuucu

SEQ ID NO: 2263698 - RNA, 10 nt, Human
uaaaaucauu

SEQ ID NO: 2263699 - RNA, 15 nt, Human
uaaaauccauacauu

SEQ ID NO: 2263700 - RNA, 17 nt, Human
uaaaauccauacauuug

SEQ ID NO: 2263701 - RNA, 22 nt, Human
uaaaaucauuucugcaucagcu

SEQ ID NO: 2263702 - RNA, 18 nt, Human
uaaaaucauuucugcauc

SEQ ID NO: 2263703 - RNA, 14 nt, Human
uaaaacagaagccu

SEQ ID NO: 2263704 - RNA, 21 nt, Human
uaaaacacaccuaagagaaaa

SEQ ID NO: 2263705 - RNA, 19 nt, Human
uaaaacacuuccauaaucu

SEQ ID NO: 2263706 - RNA, 19 nt, Human
uaaaacagacacuggcaug

SEQ ID NO: 2263707 - RNA, 18 nt, Human
uaaaacagacacuggcau

SEQ ID NO: 2263708 - RNA, 17 nt, Human
uaaaacagacacuggca

SEQ ID NO: 2263709 - RNA, 15 nt, Human
uaaaacagacacugg

SEQ ID NO: 2263710 - RNA, 13 nt, Human
uaaaacagacacu

SEQ ID NO: 2263711 - RNA, 18 nt, Human
uaaaacaauauuguuucu

SEQ ID NO: 2263712 - RNA, 14 nt, Human
uaaaacaauauugu

SEQ ID NO: 2263713 - RNA, 23 nt, Human
uaaaacaauaaaauuuuuuuuca

SEQ ID NO: 2263714 - RNA, 17 nt, Human
uaaaacacaacaucuuu

SEQ ID NO: 2263715 - RNA, 22 nt, Human
uaaaacacaacaucuuuuucua

SEQ ID NO: 2263716 - RNA, 23 nt, Human
uaaaacacaacaucuuuuucuac

SEQ ID NO: 2263717 - RNA, 15 nt, Human
uaaaacaacacucac

SEQ ID NO: 2263718 - RNA, 22 nt, Human
uaaaacaagcacuaaacaaaga

SEQ ID NO: 2263719 - RNA, 16 nt, Human
uaaaacaaaagcucau

SEQ ID NO: 2263720 - RNA, 17 nt, Human
uaaaacaaaauuuguuu

SEQ ID NO: 2263721 - RNA, 23 nt, Human
uaaaaauuguuucaaaauaaaaa

SEQ ID NO: 2263722 - RNA, 15 nt, Human
uaaaaauucugaaug

SEQ ID NO: 2263723 - RNA, 17 nt, Human
uaaaaauugugaucaga

SEQ ID NO: 2263724 - RNA, 22 nt, Human
uaaaaauuguuaauuuuuccua

SEQ ID NO: 2263725 - RNA, 21 nt, Human
uaaaaauguaaauauucuaua

SEQ ID NO: 2263726 - RNA, 19 nt, Human
uaaaaauguaaauauucua

SEQ ID NO: 2263727 - RNA, 20 nt, Human
uaaaaauguaaauauucuau

SEQ ID NO: 2263728 - RNA, 14 nt, Human
uaaaaauucugaau

SEQ ID NO: 2263729 - RNA, 17 nt, Human
uaaaaauucugaaugua

SEQ ID NO: 2263730 - RNA, 22 nt, Human
uaaaaauguuaaaauguauucu

SEQ ID NO: 2263731 - RNA, 17 nt, Human
guuuuuaauaaagacag

SEQ ID NO: 2263732 - RNA, 21 nt, Human
guuuuuaaggguuuguggaaa

SEQ ID NO: 2263733 - RNA, 18 nt, Human
guuuuuaauauaaagccu

SEQ ID NO: 2263734 - RNA, 13 nt, Human
guuuuuaagcugu

SEQ ID NO: 2263735 - RNA, 14 nt, Human
guuuuuaagcuguu

SEQ ID NO: 2263736 - RNA, 15 nt, Human
guuuuuaagcuguuu

SEQ ID NO: 2263737 - RNA, 19 nt, Human
guuuuuaagcuguuuccau

SEQ ID NO: 2263738 - RNA, 15 nt, Human
guuuuguuugcuauc

SEQ ID NO: 2263739 - RNA, 18 nt, Human
guuuuguuugcuaucuua

SEQ ID NO: 2263740 - RNA, 19 nt, Human
guuuuguuuccuuucacug

SEQ ID NO: 2263741 - RNA, 21 nt, Human
uaaaaacaaagaaauuaugug

SEQ ID NO: 2263742 - RNA, 17 nt, Human
uaaaaacaaagaaauua

SEQ ID NO: 2263743 - RNA, 13 nt, Human
guuuuuacccaua

SEQ ID NO: 2263744 - RNA, 14 nt, Human
guuuuuacccauau

SEQ ID NO: 2263745 - RNA, 16 nt, Human
guuuuuacccauaucc

SEQ ID NO: 2263746 - RNA, 18 nt, Human
guuuuuacccauaucccc

SEQ ID NO: 2263747 - RNA, 20 nt, Human
guuuuuacccauauccccuc

SEQ ID NO: 2263748 - RNA, 22 nt, Human
uaaaaacaaaggagauaaaucu

SEQ ID NO: 2263749 - RNA, 16 nt, Human
uaaaaacagcauugcu

SEQ ID NO: 2263750 - RNA, 16 nt, Human
uaaaaagaaacaagau

SEQ ID NO: 2263751 - RNA, 18 nt, Human
uaaaaagaaacaagaugc

SEQ ID NO: 2263752 - RNA, 19 nt, Human
uaaaaagaaacaagaugcu

SEQ ID NO: 2263753 - RNA, 21 nt, Human
uaaaaagacauucuuccaaaa

SEQ ID NO: 2263754 - RNA, 19 nt, Human
uaaaaagagagaaaacuua

SEQ ID NO: 2263755 - RNA, 20 nt, Human
uaaaaagagagaaaacuuau

SEQ ID NO: 2263756 - RNA, 13 nt, Human
uaaaaagaaggaa

SEQ ID NO: 2263757 - RNA, 20 nt, Human
uaaaaagaaggaaaaugauc

SEQ ID NO: 2263758 - RNA, 21 nt, Human
uaaaaagaaggaaaaugaucu

SEQ ID NO: 2263759 - RNA, 20 nt, Human
uaaaaagauugaaguauuuu

SEQ ID NO: 2263760 - RNA, 18 nt, Human
uaaaaagauugaaguauu

SEQ ID NO: 2263761 - RNA, 14 nt, Human
uaaaaagaucacuu

SEQ ID NO: 2263762 - RNA, 13 nt, Human
uaaaaauguaaau

SEQ ID NO: 2263763 - RNA, 18 nt, Human
uaaaaauguaaauauucu

SEQ ID NO: 2263764 - RNA, 13 nt, Human
uaaaaagauuugu

SEQ ID NO: 2263765 - RNA, 19 nt, Human
uaaaaaugguuuaaauggu

SEQ ID NO: 2263766 - RNA, 18 nt, Human
uaaaaaugguuuaaaugg

SEQ ID NO: 2263767 - RNA, 23 nt, Human
guugucaauauuaaauacagaca

SEQ ID NO: 2263768 - RNA, 16 nt, Human
guugucaauauuaaau

SEQ ID NO: 2263769 - RNA, 17 nt, Human
guugucaauauuaaaua

SEQ ID NO: 2263770 - RNA, 19 nt, Human
guugucaauauuaaauaca

SEQ ID NO: 2263771 - RNA, 21 nt, Human
guugucaauauuaaauacaga

SEQ ID NO: 2263772 - RNA, 17 nt, Human
guuggcugggcccagaa

SEQ ID NO: 2263773 - RNA, 15 nt, Human
guugucaauauuaaa

SEQ ID NO: 2263774 - RNA, 22 nt, Human
guugucaagucucugcuggccc

SEQ ID NO: 2263775 - RNA, 17 nt, Human
guugucaagucucugcu

SEQ ID NO: 2263776 - RNA, 19 nt, Human
guuggcugggggccucagu

SEQ ID NO: 2263777 - RNA, 15 nt, Human
guuguccuaugggag

SEQ ID NO: 2263778 - RNA, 16 nt, Human
guuguccuccccuugg

SEQ ID NO: 2263779 - RNA, 19 nt, Human
guuguccuccccuugggcg

SEQ ID NO: 2263780 - RNA, 20 nt, Human
guugucauugcuguuguccc

SEQ ID NO: 2263781 - RNA, 22 nt, Human
guuguccaauuguugacaguuc

SEQ ID NO: 2263782 - RNA, 13 nt, Human
guugucccucugc

SEQ ID NO: 2263783 - RNA, 17 nt, Human
guugucccucugcuacg

SEQ ID NO: 2263784 - RNA, 12 nt, Human
guugucagcuga

SEQ ID NO: 2263785 - RNA, 20 nt, Human
guuggccccugcccggcugc

SEQ ID NO: 2263786 - RNA, 13 nt, Human
guuggccugcacu

SEQ ID NO: 2263787 - RNA, 13 nt, Human
guuggccucugca

SEQ ID NO: 2263788 - RNA, 17 nt, Human
guuggcccaagcucuug

SEQ ID NO: 2263789 - RNA, 13 nt, Human
guuggccccugcc

SEQ ID NO: 2263790 - RNA, 14 nt, Human
guuggccccugccc

SEQ ID NO: 2263791 - RNA, 20 nt, Human
guuggcugacuuccacaccu

SEQ ID NO: 2263792 - RNA, 13 nt, Human
guuggccuccggc

SEQ ID NO: 2263793 - RNA, 18 nt, Human
guuggcgagaggaggggc

SEQ ID NO: 2263794 - RNA, 19 nt, Human
guuggcgcacccuccccuc

SEQ ID NO: 2263795 - RNA, 21 nt, Human
guuggcgcacccuccccuccc

SEQ ID NO: 2263796 - RNA, 16 nt, Human
guuggcugggcccaga

SEQ ID NO: 2263797 - RNA, 14 nt, Human
guuggcugggccca

SEQ ID NO: 2263798 - RNA, 13 nt, Human
guuggcugggccc

SEQ ID NO: 2263799 - RNA, 17 nt, Human
guuggcugggaacucac

SEQ ID NO: 2263800 - RNA, 14 nt, Human
guuggcuggaugaa

SEQ ID NO: 2263801 - RNA, 12 nt, Human
guuggcuggccu

SEQ ID NO: 2263802 - RNA, 13 nt, Human
guuggcuggccuu

SEQ ID NO: 2263803 - RNA, 12 nt, Human
guuggcuggggg

SEQ ID NO: 2263804 - RNA, 22 nt, Human
guugugaggccuggccaggcac

SEQ ID NO: 2263805 - RNA, 16 nt, Human
guugugccccuuucca

SEQ ID NO: 2263806 - RNA, 17 nt, Human
guugugcaaauuaacag

SEQ ID NO: 2263807 - RNA, 20 nt, Human
guugugaguuuaccuuguau

SEQ ID NO: 2263808 - RNA, 21 nt, Human
guugugauagcuaacauuuua

SEQ ID NO: 2263809 - RNA, 18 nt, Human
guugugaccugaaguuca

SEQ ID NO: 2263810 - RNA, 17 nt, Human
guugugaccuuaguguu

SEQ ID NO: 2263811 - RNA, 13 nt, Human
guugugaggccug

SEQ ID NO: 2263812 - RNA, 14 nt, Human
guugugaggccugg

SEQ ID NO: 2263813 - RNA, 13 nt, Human
guugugaccugaa

SEQ ID NO: 2263814 - RNA, 17 nt, Human
guugugaccugaaguuc

SEQ ID NO: 2263815 - RNA, 14 nt, Human
guugugaauguugu

SEQ ID NO: 2263816 - RNA, 22 nt, Human
guugucugaagucacugcacag

SEQ ID NO: 2263817 - RNA, 19 nt, Human
guugucugaagucacugca

SEQ ID NO: 2263818 - RNA, 13 nt, Human
guugucucccugg

SEQ ID NO: 2263819 - RNA, 14 nt, Human
guugucucccuggc

SEQ ID NO: 2263820 - RNA, 18 nt, Human
guugucucuagagcaggg

SEQ ID NO: 2263821 - RNA, 15 nt, Human
guugucucccuggcc

SEQ ID NO: 2263822 - RNA, 16 nt, Human
guugucucccuggccc

SEQ ID NO: 2263823 - RNA, 17 nt, Human
guugucucccuggcccu

SEQ ID NO: 2263824 - RNA, 19 nt, Human
guugucucccuggcccuca

SEQ ID NO: 2263825 - RNA, 15 nt, Human
guuguuaauaaaagu

SEQ ID NO: 2263826 - RNA, 19 nt, Human
guuguuaaugaaaauguca

SEQ ID NO: 2263827 - RNA, 18 nt, Human
guuguuaaugaaaauguc

SEQ ID NO: 2263828 - RNA, 17 nt, Human
guuguuaaugaaaaugu

SEQ ID NO: 2263829 - RNA, 16 nt, Human
guuguuaaugaaaaug

SEQ ID NO: 2263830 - RNA, 22 nt, Human
guugugugugggaguguguaau

SEQ ID NO: 2263831 - RNA, 14 nt, Human
guuguguugucacc

SEQ ID NO: 2263832 - RNA, 12 nt, Human
guuguguuguca

SEQ ID NO: 2263833 - RNA, 16 nt, Human
guugugugugggagug

SEQ ID NO: 2263834 - RNA, 14 nt, Human
guugugugugggag

SEQ ID NO: 2263835 - RNA, 13 nt, Human
guuguguguggga

SEQ ID NO: 2263836 - RNA, 12 nt, Human
guuguguguggg

SEQ ID NO: 2263837 - RNA, 14 nt, Human
guugugguuaaucu

SEQ ID NO: 2263838 - RNA, 16 nt, Human
guuguguacguggaga

SEQ ID NO: 2263839 - RNA, 16 nt, Human
guugugggugggagag

SEQ ID NO: 2263840 - RNA, 17 nt, Human
guuguggugcugacaaa

SEQ ID NO: 2263841 - RNA, 14 nt, Human
guuguguauagaug

SEQ ID NO: 2263842 - RNA, 21 nt, Human
guuguggagagugcaacagua

SEQ ID NO: 2263843 - RNA, 19 nt, Human
guuguggaaagccucugcu

SEQ ID NO: 2263844 - RNA, 15 nt, Human
guugugggugggaga

SEQ ID NO: 2263845 - RNA, 22 nt, Human
guuguggauuuaacagaaaugu

SEQ ID NO: 2263846 - RNA, 15 nt, Human
guuucccauaauuuu

SEQ ID NO: 2263847 - RNA, 16 nt, Human
guuucauucuccugcc

SEQ ID NO: 2263848 - RNA, 19 nt, Human
guuucauguuuugugacua

SEQ ID NO: 2263849 - RNA, 15 nt, Human
guuucauucuccugc

SEQ ID NO: 2263850 - RNA, 18 nt, Human
guuucauguuuugugacu

SEQ ID NO: 2263851 - RNA, 14 nt, Human
guuucauauuucuu

SEQ ID NO: 2263852 - RNA, 16 nt, Human
guuucauccuuuucau

SEQ ID NO: 2263853 - RNA, 18 nt, Human
guuucauguaauccucaa

SEQ ID NO: 2263854 - RNA, 21 nt, Human
guuucagugucaaauaaacac

SEQ ID NO: 2263855 - RNA, 23 nt, Human
guuucagugucaaauaaacacug

SEQ ID NO: 2263856 - RNA, 14 nt, Human
guuucaggugacau

SEQ ID NO: 2263857 - RNA, 15 nt, Human
guuucaggugacaug

SEQ ID NO: 2263858 - RNA, 16 nt, Human
guuucaggugacaugu

SEQ ID NO: 2263859 - RNA, 20 nt, Human
guuucaggugacaugugaaa

SEQ ID NO: 2263860 - RNA, 18 nt, Human
guuucauacucuagauuu

SEQ ID NO: 2263861 - RNA, 22 nt, Human
guuucagugucaaauaaacacu

SEQ ID NO: 2263862 - RNA, 17 nt, Human
guuucauacucuagauu

SEQ ID NO: 2263863 - RNA, 13 nt, Human
guuucauauuucu

SEQ ID NO: 2263864 - RNA, 19 nt, Human
guuuauaucucucaugcau

SEQ ID NO: 2263865 - RNA, 14 nt, Human
guuuaucauucaag

SEQ ID NO: 2263866 - RNA, 15 nt, Human
guuuaucauucaagu

SEQ ID NO: 2263867 - RNA, 16 nt, Human
guuuaucauucaagug

SEQ ID NO: 2263868 - RNA, 17 nt, Human
guuuaucauucaagugu

SEQ ID NO: 2263869 - RNA, 20 nt, Human
guuuaucauucaaguguaaa

SEQ ID NO: 2263870 - RNA, 15 nt, Human
guuuauaccuuugcc

SEQ ID NO: 2263871 - RNA, 18 nt, Human
guuuaguggcucaacauu

SEQ ID NO: 2263872 - RNA, 15 nt, Human
guuuaguuaaaugag

SEQ ID NO: 2263873 - RNA, 12 nt, Human
guuuauauaaau

SEQ ID NO: 2263874 - RNA, 20 nt, Human
guuuauagcaaacuuggaau

SEQ ID NO: 2263875 - RNA, 20 nt, Human
guuuauagagggccaagacu

SEQ ID NO: 2263876 - RNA, 21 nt, Human
guuuauagagggccaagacuu

SEQ ID NO: 2263877 - RNA, 20 nt, Human
guuuauauaagcuuguauuc

SEQ ID NO: 2263878 - RNA, 19 nt, Human
guuuaggaacuacugagga

SEQ ID NO: 2263879 - RNA, 20 nt, Human
guuuagcuggaaaaguaugu

SEQ ID NO: 2263880 - RNA, 21 nt, Human
guuuagcuggaaaaguauguu

SEQ ID NO: 2263881 - RNA, 16 nt, Human
guuguuauggaaacug

SEQ ID NO: 2263882 - RNA, 19 nt, Human
guuguuacuaacuaaacuc

SEQ ID NO: 2263883 - RNA, 20 nt, Human
guuguuacuaacuaaacucu

SEQ ID NO: 2263884 - RNA, 21 nt, Human
guuguuacuaacuaaacucuc

SEQ ID NO: 2263885 - RNA, 15 nt, Human
guuguuacauuuuua

SEQ ID NO: 2263886 - RNA, 14 nt, Human
guuguuacauuuuu

SEQ ID NO: 2263887 - RNA, 11 nt, Human
guuguuucuuu

SEQ ID NO: 2263888 - RNA, 13 nt, Human
guuguuucuuucu

SEQ ID NO: 2263889 - RNA, 14 nt, Human
guuguuucuuucua

SEQ ID NO: 2263890 - RNA, 15 nt, Human
guuguuucuuucuag

SEQ ID NO: 2263891 - RNA, 20 nt, Human
guuguuugauucagacagcu

SEQ ID NO: 2263892 - RNA, 24 nt, Human
guuguuguuaaugaaaaugucaga

SEQ ID NO: 2263893 - RNA, 16 nt, Human
guuguuguuaaauauc

SEQ ID NO: 2263894 - RNA, 20 nt, Human
guuguuuacuuaaagauuua

SEQ ID NO: 2263895 - RNA, 13 nt, Human
guuuacuauuuua

SEQ ID NO: 2263896 - RNA, 23 nt, Human
guuuaccuuuuaauuaaugaaau

SEQ ID NO: 2263897 - RNA, 16 nt, Human
guuuagaagaagugug

SEQ ID NO: 2263898 - RNA, 15 nt, Human
guuuagauaauacac

SEQ ID NO: 2263899 - RNA, 14 nt, Human
guuuagauaauaca

SEQ ID NO: 2263900 - RNA, 16 nt, Human
guuuaccugugaaaua

SEQ ID NO: 2263901 - RNA, 12 nt, Human
guuuaccuugua

SEQ ID NO: 2263902 - RNA, 16 nt, Human
guuuaccugaauaaau

SEQ ID NO: 2263903 - RNA, 22 nt, Human
guuuaccugaauaaaugguagu

SEQ ID NO: 2263904 - RNA, 20 nt, Human
guuuacuaugccugugucuu

SEQ ID NO: 2263905 - RNA, 17 nt, Human
guuuacuaugccugugu

SEQ ID NO: 2263906 - RNA, 16 nt, Human
guuuacuaugccugug

SEQ ID NO: 2263907 - RNA, 22 nt, Human
guuuacuagggaucccucaucu

SEQ ID NO: 2263908 - RNA, 22 nt, Human
guuguuugaugcauuaaaagaa

SEQ ID NO: 2263909 - RNA, 18 nt, Human
guuguuugagaaauuaag

SEQ ID NO: 2263910 - RNA, 20 nt, Human
guuuucccuugaggaaacaa

SEQ ID NO: 2263911 - RNA, 22 nt, Human
guuuuccuauaauauaauaaau

SEQ ID NO: 2263912 - RNA, 17 nt, Human
guuuuccuaaaugcagu

SEQ ID NO: 2263913 - RNA, 16 nt, Human
guuuuccuaaaugcag

SEQ ID NO: 2263914 - RNA, 21 nt, Human
guuuucccugaccucccucua

SEQ ID NO: 2263915 - RNA, 23 nt, Human
guuuucccgagcaaagucuaaag

SEQ ID NO: 2263916 - RNA, 17 nt, Human
guuuuccauuguuugaa

SEQ ID NO: 2263917 - RNA, 17 nt, Human
guuuuccccucccuggg

SEQ ID NO: 2263918 - RNA, 22 nt, Human
guuuucccgagcaaagucuaaa

SEQ ID NO: 2263919 - RNA, 13 nt, Human
guuuuccugaaga

SEQ ID NO: 2263920 - RNA, 22 nt, Human
guuuuccucccuucugcuacug

SEQ ID NO: 2263921 - RNA, 18 nt, Human
guuuuccucccuucugcu

SEQ ID NO: 2263922 - RNA, 15 nt, Human
guuuuccucccuucu

SEQ ID NO: 2263923 - RNA, 13 nt, Human
guuuuccucccuu

SEQ ID NO: 2263924 - RNA, 14 nt, Human
guuuuccucccuuc

SEQ ID NO: 2263925 - RNA, 17 nt, Human
guuuucagacucagacu

SEQ ID NO: 2263926 - RNA, 13 nt, Human
guuuuccaugaaa

SEQ ID NO: 2263927 - RNA, 18 nt, Human
guuuuccaugaaaacguu

SEQ ID NO: 2263928 - RNA, 17 nt, Human
guuuuccaugaaaacgu

SEQ ID NO: 2263929 - RNA, 15 nt, Human
guuuuccaugaaaac

SEQ ID NO: 2263930 - RNA, 14 nt, Human
guuuuccaugaaaa

SEQ ID NO: 2263931 - RNA, 20 nt, Human
guuuuccagguuuaagcugu

SEQ ID NO: 2263932 - RNA, 19 nt, Human
guuuuccaugaguccccug

SEQ ID NO: 2263933 - RNA, 20 nt, Human
guuuuccaugaguccccugu

SEQ ID NO: 2263934 - RNA, 16 nt, Human
guuuuguaagaugcug

SEQ ID NO: 2263935 - RNA, 17 nt, Human
guuuuguaagaugcugg

SEQ ID NO: 2263936 - RNA, 23 nt, Human
guuuuguaagaugcuggguuggu

SEQ ID NO: 2263937 - RNA, 16 nt, Human
guuuugguugcuuuaa

SEQ ID NO: 2263938 - RNA, 17 nt, Human
guuuuggugguuuuagu

SEQ ID NO: 2263939 - RNA, 21 nt, Human
guuuugguaucuguucuuuaa

SEQ ID NO: 2263940 - RNA, 18 nt, Human
guuuuguaagaugcuggg

SEQ ID NO: 2263941 - RNA, 14 nt, Human
guuuuguuccccuc

SEQ ID NO: 2263942 - RNA, 15 nt, Human
guuuuguuccccucc

SEQ ID NO: 2263943 - RNA, 16 nt, Human
guuuuguuccccuccu

SEQ ID NO: 2263944 - RNA, 17 nt, Human
guuuuguuccccuccuc

SEQ ID NO: 2263945 - RNA, 15 nt, Human
guuuuguucuuuaaa

SEQ ID NO: 2263946 - RNA, 22 nt, Human
guuuuguuccccuccuccacuc

SEQ ID NO: 2263947 - RNA, 20 nt, Human
guuuuguuccccuccuccac

SEQ ID NO: 2263948 - RNA, 21 nt, Human
guuuuguuccccuccuccacu

SEQ ID NO: 2263949 - RNA, 14 nt, Human
guuuguuuguuuca

SEQ ID NO: 2263950 - RNA, 15 nt, Human
guuuuaaaaaaauaa

SEQ ID NO: 2263951 - RNA, 19 nt, Human
guuuuaaaaaaauaaaaca

SEQ ID NO: 2263952 - RNA, 17 nt, Human
guuuguuacauagguau

SEQ ID NO: 2263953 - RNA, 21 nt, Human
guuuguguguugucuugaaag

SEQ ID NO: 2263954 - RNA, 14 nt, Human
guuuguucaucugu

SEQ ID NO: 2263955 - RNA, 20 nt, Human
guuuguuucugaaagggacg

SEQ ID NO: 2263956 - RNA, 24 nt, Human
guuuuaaaauaaaaauucugaaug

SEQ ID NO: 2263957 - RNA, 21 nt, Human
guuuuaaaauaaaaauucuga

SEQ ID NO: 2263958 - RNA, 22 nt, Human
guuuuaaaaaaauaaaacauuu

SEQ ID NO: 2263959 - RNA, 20 nt, Human
guuuuaaaaaaauaaaacau

SEQ ID NO: 2263960 - RNA, 21 nt, Human
guuuuaaaaaaauaaaacauu

SEQ ID NO: 2263961 - RNA, 15 nt, Human
guuuuaaaaugagaa

SEQ ID NO: 2263962 - RNA, 16 nt, Human
guuuuaaaaugagaaa

SEQ ID NO: 2263963 - RNA, 14 nt, Human
guuuucagacucag

SEQ ID NO: 2263964 - RNA, 21 nt, Human
guuuucagaaccucuucccca

SEQ ID NO: 2263965 - RNA, 20 nt, Human
guuuucagaaccucuucccc

SEQ ID NO: 2263966 - RNA, 19 nt, Human
guuuucagaaccucuuccc

SEQ ID NO: 2263967 - RNA, 13 nt, Human
guuuucaaugaug

SEQ ID NO: 2263968 - RNA, 11 nt, Human
guuuucacucu

SEQ ID NO: 2263969 - RNA, 12 nt, Human
guuuucacucuu

SEQ ID NO: 2263970 - RNA, 17 nt, Human
guuuucaaaauaaaaau

SEQ ID NO: 2263971 - RNA, 20 nt, Human
guuuucaaaauuguuacaaa

SEQ ID NO: 2263972 - RNA, 21 nt, Human
guuuuauuuuuuauuguuuuc

SEQ ID NO: 2263973 - RNA, 18 nt, Human
guuuucaagucaaauuaa

SEQ ID NO: 2263974 - RNA, 17 nt, Human
guuuucaagucaaauua

SEQ ID NO: 2263975 - RNA, 15 nt, Human
guuuucaagucaaau

SEQ ID NO: 2263976 - RNA, 13 nt, Human
guuuucaagucaa

SEQ ID NO: 2263977 - RNA, 13 nt, Human
guuuguggcuggg

SEQ ID NO: 2263978 - RNA, 22 nt, Human
guuuguggcugggggcaggagg

SEQ ID NO: 2263979 - RNA, 20 nt, Human
guuuguggcugggggcagga

SEQ ID NO: 2263980 - RNA, 22 nt, Human
guuuguguauuuacgcuuugau

SEQ ID NO: 2263981 - RNA, 13 nt, Human
guuugugugucuu

SEQ ID NO: 2263982 - RNA, 14 nt, Human
guuugugugucuua

SEQ ID NO: 2263983 - RNA, 15 nt, Human
guuugugugucuuaa

SEQ ID NO: 2263984 - RNA, 22 nt, Human
guuugguucacuuacagauagu

SEQ ID NO: 2263985 - RNA, 15 nt, Human
guuuguguguugucu

SEQ ID NO: 2263986 - RNA, 20 nt, Human
guuuguguguugucucuuga

SEQ ID NO: 2263987 - RNA, 18 nt, Human
guuuguuucugaaaggga

SEQ ID NO: 2263988 - RNA, 16 nt, Human
guuuguggccucagaa

SEQ ID NO: 2263989 - RNA, 13 nt, Human
guuuguaugugug

SEQ ID NO: 2263990 - RNA, 15 nt, Human
guuuguggccucaga

SEQ ID NO: 2263991 - RNA, 18 nt, Human
guuugucgcucaugugug

SEQ ID NO: 2263992 - RNA, 13 nt, Human
guuugucauuagc

SEQ ID NO: 2263993 - RNA, 17 nt, Human
guuugucacaugaaaca

SEQ ID NO: 2263994 - RNA, 15 nt, Human
guuugucauuagccu

SEQ ID NO: 2263995 - RNA, 21 nt, Human
guuugucauuagccugaguag

SEQ ID NO: 2263996 - RNA, 13 nt, Human
guuuguauauugu

SEQ ID NO: 2263997 - RNA, 16 nt, Human
guuuguauaacuucuu

SEQ ID NO: 2263998 - RNA, 14 nt, Human
guuuguauguauaa

SEQ ID NO: 2263999 - RNA, 16 nt, Human
guuuguauguauaauu

SEQ ID NO: 2264000 - RNA, 20 nt, Human
guuuguauguguguagacaa

SEQ ID NO: 2264001 - RNA, 15 nt, Human
guuugguguguuccc

SEQ ID NO: 2264002 - RNA, 15 nt, Human
guuuguauaacuucu

SEQ ID NO: 2264003 - RNA, 17 nt, Human
guuugguauuguauuua

SEQ ID NO: 2264004 - RNA, 18 nt, Human
guuugguauuguauuuau

SEQ ID NO: 2264005 - RNA, 20 nt, Human
guuuguaaauuaacuuuuau

SEQ ID NO: 2264006 - RNA, 23 nt, Human
guuuggucugggacuuccuugcu

SEQ ID NO: 2264007 - RNA, 22 nt, Human
guuugguggggguagagcugau

SEQ ID NO: 2264008 - RNA, 16 nt, Human
guuuggguauauucau

SEQ ID NO: 2264009 - RNA, 18 nt, Human
guuuggggcgaggcagag

SEQ ID NO: 2264010 - RNA, 15 nt, Human
guuugguauuguauu

SEQ ID NO: 2264011 - RNA, 11 nt, Human
guuuggggcga

SEQ ID NO: 2264012 - RNA, 16 nt, Human
guuuggggcgaggcag

SEQ ID NO: 2264013 - RNA, 17 nt, Human
guuuggggcgaggcaga

SEQ ID NO: 2264014 - RNA, 16 nt, Human
guuugauucagacagc

SEQ ID NO: 2264015 - RNA, 20 nt, Human
guuugauucagacagcugcc

SEQ ID NO: 2264016 - RNA, 21 nt, Human
guuugauucagacagcugccu

SEQ ID NO: 2264017 - RNA, 20 nt, Human
guuugagaagaaaacaucua

SEQ ID NO: 2264018 - RNA, 15 nt, Human
guuugagaagcacug

SEQ ID NO: 2264019 - RNA, 18 nt, Human
guuugagacacugguuua

SEQ ID NO: 2264020 - RNA, 22 nt, Human
guuuccucuaguucuuuguuca

SEQ ID NO: 2264021 - RNA, 20 nt, Human
guuuccucauuccugaaaga

SEQ ID NO: 2264022 - RNA, 22 nt, Human
guuuccucaggcugcuggagga

SEQ ID NO: 2264023 - RNA, 19 nt, Human
guuuccucaggcugcugga

SEQ ID NO: 2264024 - RNA, 18 nt, Human
guuuccucaggcugcugg

SEQ ID NO: 2264025 - RNA, 18 nt, Human
guuuccucuaguucuuug

SEQ ID NO: 2264026 - RNA, 21 nt, Human
guuucccauaauuuucuucau

SEQ ID NO: 2264027 - RNA, 20 nt, Human
guuucccauaauuuucuuca

SEQ ID NO: 2264028 - RNA, 19 nt, Human
guuucccaucccacugcuc

SEQ ID NO: 2264029 - RNA, 21 nt, Human
guuucccaucccacugcuccc

SEQ ID NO: 2264030 - RNA, 16 nt, Human
guuuccucaggcugcu

SEQ ID NO: 2264031 - RNA, 14 nt, Human
guuuccucaggcug

SEQ ID NO: 2264032 - RNA, 16 nt, Human
guuucuuuaguuuuug

SEQ ID NO: 2264033 - RNA, 18 nt, Human
guuucuuuguaaugaaaa

SEQ ID NO: 2264034 - RNA, 11 nt, Human
guuucuuccaa

SEQ ID NO: 2264035 - RNA, 23 nt, Human
guuucuucauccggcagccugga

SEQ ID NO: 2264036 - RNA, 20 nt, Human
guuucuucaacaggagaauu

SEQ ID NO: 2264037 - RNA, 13 nt, Human
guuucuuccaaag

SEQ ID NO: 2264038 - RNA, 13 nt, Human
guuucuuagcuuu

SEQ ID NO: 2264039 - RNA, 16 nt, Human
guuucuuagcuuuuua

SEQ ID NO: 2264040 - RNA, 18 nt, Human
guuugagaucagccuggg

SEQ ID NO: 2264041 - RNA, 19 nt, Human
guuugacuagaugauggau

SEQ ID NO: 2264042 - RNA, 16 nt, Human
guuugaaacaaagaag

SEQ ID NO: 2264043 - RNA, 23 nt, Human
guuugauuaaauucuugcaaagu

SEQ ID NO: 2264044 - RNA, 17 nt, Human
guuugagaucagccugg

SEQ ID NO: 2264045 - RNA, 18 nt, Human
guuugacuagaugaugga

SEQ ID NO: 2264046 - RNA, 16 nt, Human
guuugacuagaugaug

SEQ ID NO: 2264047 - RNA, 17 nt, Human
guuugaauguuaaauaa

SEQ ID NO: 2264048 - RNA, 17 nt, Human
guuucuuuuguauguaa

SEQ ID NO: 2264049 - RNA, 20 nt, Human
guuucuuuuguauguaaaug

SEQ ID NO: 2264050 - RNA, 21 nt, Human
guuucuuuuguauguaaaugu

SEQ ID NO: 2264051 - RNA, 16 nt, Human
guuucuuuagcaguuu

SEQ ID NO: 2264052 - RNA, 17 nt, Human
guuucuuuaagaaagua

SEQ ID NO: 2264053 - RNA, 19 nt, Human
guuucuuuguaaugaaaac

SEQ ID NO: 2264054 - RNA, 15 nt, Human
guuugaaacaaagaa

SEQ ID NO: 2264055 - RNA, 15 nt, Human
guuugaauguuaaau

SEQ ID NO: 2264056 - RNA, 16 nt, Human
guuugaauguuaaaua

SEQ ID NO: 2264057 - RNA, 17 nt, Human
guuugaaacaaagaagg

SEQ ID NO: 2264058 - RNA, 14 nt, Human
guuugaaaucuuuu

SEQ ID NO: 2264059 - RNA, 16 nt, Human
guuccucgcccugggu

SEQ ID NO: 2264060 - RNA, 15 nt, Human
guuccucgcccuggg

SEQ ID NO: 2264061 - RNA, 13 nt, Human
guuccucgcccug

SEQ ID NO: 2264062 - RNA, 23 nt, Human
guuccuccccuccuccuggacuc

SEQ ID NO: 2264063 - RNA, 18 nt, Human
guuccuauugucauuaaa

SEQ ID NO: 2264064 - RNA, 12 nt, Human
guuccucugccu

SEQ ID NO: 2264065 - RNA, 13 nt, Human
guuccucugccug

SEQ ID NO: 2264066 - RNA, 14 nt, Human
guuccucugccugc

SEQ ID NO: 2264067 - RNA, 16 nt, Human
guuccucugccugccc

SEQ ID NO: 2264068 - RNA, 15 nt, Human
guuccucugccugcc

SEQ ID NO: 2264069 - RNA, 13 nt, Human
guuccucuuugca

SEQ ID NO: 2264070 - RNA, 15 nt, Human
guuccugcaaugaag

SEQ ID NO: 2264071 - RNA, 14 nt, Human
guuccucuuugcau

SEQ ID NO: 2264072 - RNA, 21 nt, Human
guuccugaauucuauuugcug

SEQ ID NO: 2264073 - RNA, 19 nt, Human
guuccugcggagugaagag

SEQ ID NO: 2264074 - RNA, 20 nt, Human
guuccugcggagugaagagg

SEQ ID NO: 2264075 - RNA, 16 nt, Human
guuccugaaccugaug

SEQ ID NO: 2264076 - RNA, 12 nt, Human
guuccugcaugc

SEQ ID NO: 2264077 - RNA, 12 nt, Human
guuccuggcaau

SEQ ID NO: 2264078 - RNA, 13 nt, Human
guuccuggcaaua

SEQ ID NO: 2264079 - RNA, 21 nt, Human
guuccuggcaauaguguguuc

SEQ ID NO: 2264080 - RNA, 14 nt, Human
guuccuggcaguuu

SEQ ID NO: 2264081 - RNA, 15 nt, Human
guuccuuacugcaga

SEQ ID NO: 2264082 - RNA, 14 nt, Human
guuccuuacugcag

SEQ ID NO: 2264083 - RNA, 13 nt, Human
guuccuuagaccu

SEQ ID NO: 2264084 - RNA, 23 nt, Human
guuccuggcaguuuaaaaaaauu

SEQ ID NO: 2264085 - RNA, 19 nt, Human
guuccuaagagugcugggc

SEQ ID NO: 2264086 - RNA, 15 nt, Human
guuccuagaguagag

SEQ ID NO: 2264087 - RNA, 16 nt, Human
guuccuagccaccgcc

SEQ ID NO: 2264088 - RNA, 22 nt, Human
guuccucauuagcauuuugcua

SEQ ID NO: 2264089 - RNA, 22 nt, Human
guuccuauggcuggccacugca

SEQ ID NO: 2264090 - RNA, 14 nt, Human
guuccuauugucau

SEQ ID NO: 2264091 - RNA, 15 nt, Human
guuccuauugucauu

SEQ ID NO: 2264092 - RNA, 16 nt, Human
guuccagcucuuugaa

SEQ ID NO: 2264093 - RNA, 14 nt, Human
guuccagcucuuug

SEQ ID NO: 2264094 - RNA, 17 nt, Human
guuccagggucccucug

SEQ ID NO: 2264095 - RNA, 19 nt, Human
guuccagggucccucugug

SEQ ID NO: 2264096 - RNA, 12 nt, Human
guuccagcucuu

SEQ ID NO: 2264097 - RNA, 15 nt, Human
guuccagccugccac

SEQ ID NO: 2264098 - RNA, 20 nt, Human
guuccagggucccucugugu

SEQ ID NO: 2264099 - RNA, 21 nt, Human
guuccagggucccucugugua

SEQ ID NO: 2264100 - RNA, 14 nt, Human
guuccuaauccucu

SEQ ID NO: 2264101 - RNA, 20 nt, Human
guuccacgucccccuggggc

SEQ ID NO: 2264102 - RNA, 21 nt, Human
guuccacgucccccuggggcu

SEQ ID NO: 2264103 - RNA, 16 nt, Human
guuccacguguuuuau

SEQ ID NO: 2264104 - RNA, 12 nt, Human
guuccacuaacc

SEQ ID NO: 2264105 - RNA, 17 nt, Human
guuccaccaucaagcca

SEQ ID NO: 2264106 - RNA, 20 nt, Human
guuccaccaucaagccacca

SEQ ID NO: 2264107 - RNA, 13 nt, Human
guuccacugagcu

SEQ ID NO: 2264108 - RNA, 14 nt, Human
guuccacugagcuc

SEQ ID NO: 2264109 - RNA, 18 nt, Human
guuccacugagcuccaug

SEQ ID NO: 2264110 - RNA, 15 nt, Human
guuccacugagcucc

SEQ ID NO: 2264111 - RNA, 16 nt, Human
guuccacugagcucca

SEQ ID NO: 2264112 - RNA, 21 nt, Human
guuccagcaauucuccugccu

SEQ ID NO: 2264113 - RNA, 20 nt, Human
guuccagcaauucuccugcc

SEQ ID NO: 2264114 - RNA, 23 nt, Human
guuccagcaauucuccugccuca

SEQ ID NO: 2264115 - RNA, 14 nt, Human
guuccagcaccaca

SEQ ID NO: 2264116 - RNA, 14 nt, Human
guuccagccugcca

SEQ ID NO: 2264117 - RNA, 13 nt, Human
guuccagccugcc

SEQ ID NO: 2264118 - RNA, 23 nt, Human
guucauuguaauguuacugauca

SEQ ID NO: 2264119 - RNA, 22 nt, Human
guucauuguaauguuacugauc

SEQ ID NO: 2264120 - RNA, 21 nt, Human
guucauuguaauguuacugau

SEQ ID NO: 2264121 - RNA, 20 nt, Human
guucauuguaauguuacuga

SEQ ID NO: 2264122 - RNA, 13 nt, Human
guucauuuccuca

SEQ ID NO: 2264123 - RNA, 13 nt, Human
guucauuugugua

SEQ ID NO: 2264124 - RNA, 19 nt, Human
guucauuguaauguuacug

SEQ ID NO: 2264125 - RNA, 18 nt, Human
guucauuguaauguuacu

SEQ ID NO: 2264126 - RNA, 14 nt, Human
guucauuguaaugu

SEQ ID NO: 2264127 - RNA, 16 nt, Human
guucauugcacuuuga

SEQ ID NO: 2264128 - RNA, 20 nt, Human
guucauuaaagcaugaaugg

SEQ ID NO: 2264129 - RNA, 16 nt, Human
guucauuaaagcauga

SEQ ID NO: 2264130 - RNA, 15 nt, Human
guucauuauuggaau

SEQ ID NO: 2264131 - RNA, 15 nt, Human
guucauguuugcuuc

SEQ ID NO: 2264132 - RNA, 22 nt, Human
guucauuauuggaauuaaccug

SEQ ID NO: 2264133 - RNA, 14 nt, Human
guuccaagacauug

SEQ ID NO: 2264134 - RNA, 13 nt, Human
guuccaagacauu

SEQ ID NO: 2264135 - RNA, 17 nt, Human
guuccaaccacugaauc

SEQ ID NO: 2264136 - RNA, 15 nt, Human
guuccaaaugaaugu

SEQ ID NO: 2264137 - RNA, 19 nt, Human
guuccaaaugaauguuguc

SEQ ID NO: 2264138 - RNA, 20 nt, Human
guucauuucaaauacaucuu

SEQ ID NO: 2264139 - RNA, 17 nt, Human
guucauuuugagcugaa

SEQ ID NO: 2264140 - RNA, 19 nt, Human
guuccaagacauugucaau

SEQ ID NO: 2264141 - RNA, 17 nt, Human
guuccaagacauuguca

SEQ ID NO: 2264142 - RNA, 16 nt, Human
guuccaagacauuguc

SEQ ID NO: 2264143 - RNA, 15 nt, Human
guuccaagacauugu

SEQ ID NO: 2264144 - RNA, 21 nt, Human
guuccaagacauugucaauaa

SEQ ID NO: 2264145 - RNA, 14 nt, Human
guuccaauaaacag

SEQ ID NO: 2264146 - RNA, 15 nt, Human
guuccaauaaacagg

SEQ ID NO: 2264147 - RNA, 15 nt, Human
guucagccaagguuu

SEQ ID NO: 2264148 - RNA, 15 nt, Human
guucagccccuccuc

SEQ ID NO: 2264149 - RNA, 14 nt, Human
guucagccccuccu

SEQ ID NO: 2264150 - RNA, 19 nt, Human
guucauauuccauauuuau

SEQ ID NO: 2264151 - RNA, 12 nt, Human
guucagccaagg

SEQ ID NO: 2264152 - RNA, 18 nt, Human
guucagcacugucccuug

SEQ ID NO: 2264153 - RNA, 17 nt, Human
guucagcaccacccuag

SEQ ID NO: 2264154 - RNA, 14 nt, Human
guucagcacugucc

SEQ ID NO: 2264155 - RNA, 16 nt, Human
guucagcaccacccua

SEQ ID NO: 2264156 - RNA, 16 nt, Human
guucagauugcuuuga

SEQ ID NO: 2264157 - RNA, 15 nt, Human
guucagcacuguccc

SEQ ID NO: 2264158 - RNA, 16 nt, Human
guucagcacugucccu

SEQ ID NO: 2264159 - RNA, 22 nt, Human
guucagcacugucccuugccuc

SEQ ID NO: 2264160 - RNA, 17 nt, Human
guucaucauccuaagcu

SEQ ID NO: 2264161 - RNA, 16 nt, Human
guucaucaaugaauga

SEQ ID NO: 2264162 - RNA, 19 nt, Human
guucauccaauccucacug

SEQ ID NO: 2264163 - RNA, 18 nt, Human
guucauccaauccucacu

SEQ ID NO: 2264164 - RNA, 15 nt, Human
guucauccaauccuc

SEQ ID NO: 2264165 - RNA, 16 nt, Human
guucagccccuccucu

SEQ ID NO: 2264166 - RNA, 21 nt, Human
guucauccaauccucacuggg

SEQ ID NO: 2264167 - RNA, 20 nt, Human
guucauccaauccucacugg

SEQ ID NO: 2264168 - RNA, 16 nt, Human
guucauccauucuauu

SEQ ID NO: 2264169 - RNA, 22 nt, Human
guucauccaauccucacugggu

SEQ ID NO: 2264170 - RNA, 17 nt, Human
guucaucguauaacaca

SEQ ID NO: 2264171 - RNA, 18 nt, Human
guucaucuugaauuguaa

SEQ ID NO: 2264172 - RNA, 12 nt, Human
guucaucuugaa

SEQ ID NO: 2264173 - RNA, 13 nt, Human
guucaucuugaau

SEQ ID NO: 2264174 - RNA, 20 nt, Human
guucaucugagcaagagcug

SEQ ID NO: 2264175 - RNA, 12 nt, Human
guucaugagaau

SEQ ID NO: 2264176 - RNA, 19 nt, Human
guucaugagaaucuauauu

SEQ ID NO: 2264177 - RNA, 16 nt, Human
guucaugccaccaugg

SEQ ID NO: 2264178 - RNA, 14 nt, Human
guucaugagaaucu

SEQ ID NO: 2264179 - RNA, 14 nt, Human
guucauguuugcuu

SEQ ID NO: 2264180 - RNA, 24 nt, Human
guucauguuugcuucauaaaugaa

SEQ ID NO: 2264181 - RNA, 16 nt, Human
guucacuucaucuucu

SEQ ID NO: 2264182 - RNA, 21 nt, Human
guucacuucaucuucucagcu

SEQ ID NO: 2264183 - RNA, 17 nt, Human
guucagaaaugcugccu

SEQ ID NO: 2264184 - RNA, 18 nt, Human
guucagaaaugcugccug

SEQ ID NO: 2264185 - RNA, 20 nt, Human
guucacuuuugacaaaggca

SEQ ID NO: 2264186 - RNA, 16 nt, Human
guucacuuuugacaaa

SEQ ID NO: 2264187 - RNA, 19 nt, Human
guucagaaaugcugccugc

SEQ ID NO: 2264188 - RNA, 21 nt, Human
guucagaaaugcugccugccu

SEQ ID NO: 2264189 - RNA, 17 nt, Human
guucagagacucagggc

SEQ ID NO: 2264190 - RNA, 16 nt, Human
guucagagacucaggg

SEQ ID NO: 2264191 - RNA, 22 nt, Human
guucagagacucagggccccag

SEQ ID NO: 2264192 - RNA, 12 nt, Human
guucaccccucc

SEQ ID NO: 2264193 - RNA, 14 nt, Human
guucaccccuccac

SEQ ID NO: 2264194 - RNA, 16 nt, Human
guucaccccuccaccc

SEQ ID NO: 2264195 - RNA, 12 nt, Human
guucaccagccu

SEQ ID NO: 2264196 - RNA, 11 nt, Human
guucaccagcc

SEQ ID NO: 2264197 - RNA, 16 nt, Human
guucacccacagggcu

SEQ ID NO: 2264198 - RNA, 12 nt, Human
guucacauuuuu

SEQ ID NO: 2264199 - RNA, 22 nt, Human
guucaccuugaagaaccucuca

SEQ ID NO: 2264200 - RNA, 19 nt, Human
guucacgugcagcucaagg

SEQ ID NO: 2264201 - RNA, 24 nt, Human
guucacucuacuuagcaugucccu

SEQ ID NO: 2264202 - RNA, 15 nt, Human
guucacuaaagcagu

SEQ ID NO: 2264203 - RNA, 19 nt, Human
guucacugcaaccuccgcc

SEQ ID NO: 2264204 - RNA, 24 nt, Human
guucacucuuggagccugcagagc

SEQ ID NO: 2264205 - RNA, 20 nt, Human
guucacucuuggagccugca

SEQ ID NO: 2264206 - RNA, 17 nt, Human
guucacucuuggagccu

SEQ ID NO: 2264207 - RNA, 19 nt, Human
guucacucuuggagccugc

SEQ ID NO: 2264208 - RNA, 18 nt, Human
guucacucuuggagccug

SEQ ID NO: 2264209 - RNA, 19 nt, Human
guucaaggccauccuuccc

SEQ ID NO: 2264210 - RNA, 20 nt, Human
guucaaguaauucugcuguc

SEQ ID NO: 2264211 - RNA, 23 nt, Human
guucaagugauucucaugccuca

SEQ ID NO: 2264212 - RNA, 18 nt, Human
guucaaucucccgcugcu

SEQ ID NO: 2264213 - RNA, 18 nt, Human
guucaauaauaaauauuu

SEQ ID NO: 2264214 - RNA, 18 nt, Human
guucaaggccauccuucc

SEQ ID NO: 2264215 - RNA, 13 nt, Human
guuauuauaauug

SEQ ID NO: 2264216 - RNA, 14 nt, Human
guuauuauaauugu

SEQ ID NO: 2264217 - RNA, 16 nt, Human
guuauuauaauuguau

SEQ ID NO: 2264218 - RNA, 18 nt, Human
guuauuauaauuguauca

SEQ ID NO: 2264219 - RNA, 20 nt, Human
guucaagcgauucuucugcu

SEQ ID NO: 2264220 - RNA, 23 nt, Human
guucaauucucauuugucacaca

SEQ ID NO: 2264221 - RNA, 13 nt, Human
guucaauuagaau

SEQ ID NO: 2264222 - RNA, 20 nt, Human
guucaaugaucuagguuuaa

SEQ ID NO: 2264223 - RNA, 21 nt, Human
guucaaugaucuagguuuaac

SEQ ID NO: 2264224 - RNA, 22 nt, Human
guucaaugaucuagguuuaacu

SEQ ID NO: 2264225 - RNA, 17 nt, Human
guucaauggcugcugaa

SEQ ID NO: 2264226 - RNA, 16 nt, Human
guucaauucucauuug

SEQ ID NO: 2264227 - RNA, 10 nt, Human
guucaaugau

SEQ ID NO: 2264228 - RNA, 12 nt, Human
guucaaugaucu

SEQ ID NO: 2264229 - RNA, 13 nt, Human
guucaaugaucua

SEQ ID NO: 2264230 - RNA, 14 nt, Human
guucaaugaucuag

SEQ ID NO: 2264231 - RNA, 17 nt, Human
guucaaugaucuagguu

SEQ ID NO: 2264232 - RNA, 19 nt, Human
guucaaugaucuagguuua

SEQ ID NO: 2264233 - RNA, 23 nt, Human
guuauggaaacuguugccagaga

SEQ ID NO: 2264234 - RNA, 13 nt, Human
guuaugcugugac

SEQ ID NO: 2264235 - RNA, 22 nt, Human
guuaugcaagggacuguguguu

SEQ ID NO: 2264236 - RNA, 20 nt, Human
guuaugauuuuuuuuucaua

SEQ ID NO: 2264237 - RNA, 21 nt, Human
guuauguaaaaggccaaaccu

SEQ ID NO: 2264238 - RNA, 19 nt, Human
guuaugcggucuagggaau

SEQ ID NO: 2264239 - RNA, 15 nt, Human
guuaugguguuucuc

SEQ ID NO: 2264240 - RNA, 22 nt, Human
guuaugugaaugaucucucuga

SEQ ID NO: 2264241 - RNA, 19 nt, Human
guuauuaaaaaucucaaau

SEQ ID NO: 2264242 - RNA, 19 nt, Human
guucaagcgauucuucugc

SEQ ID NO: 2264243 - RNA, 21 nt, Human
guuauuacccagaguuuuuau

SEQ ID NO: 2264244 - RNA, 22 nt, Human
guuauuaaacguaugcauguga

SEQ ID NO: 2264245 - RNA, 21 nt, Human
guuauuagggugguauuuagu

SEQ ID NO: 2264246 - RNA, 22 nt, Human
guuauuagagauuaccuccuga

SEQ ID NO: 2264247 - RNA, 19 nt, Human
guuauguguguauauguau

SEQ ID NO: 2264248 - RNA, 14 nt, Human
guuauguguguaua

SEQ ID NO: 2264249 - RNA, 21 nt, Human
guuauuaaacguaugcaugug

SEQ ID NO: 2264250 - RNA, 21 nt, Human
guuaucccuuccuuuuagccu

SEQ ID NO: 2264251 - RNA, 14 nt, Human
guuaucgaaauaac

SEQ ID NO: 2264252 - RNA, 15 nt, Human
guuaucgaaauaaca

SEQ ID NO: 2264253 - RNA, 17 nt, Human
guuaucgaaauaacaau

SEQ ID NO: 2264254 - RNA, 15 nt, Human
guuaucuaaaagaaa

SEQ ID NO: 2264255 - RNA, 23 nt, Human
guuaucgaaauaacaauguuaag

SEQ ID NO: 2264256 - RNA, 18 nt, Human
guuaucgaaauaacaaug

SEQ ID NO: 2264257 - RNA, 21 nt, Human
guuaucgaaauaacaauguua

SEQ ID NO: 2264258 - RNA, 16 nt, Human
guuaucuaaaagaaau

SEQ ID NO: 2264259 - RNA, 12 nt, Human
guuaucucugug

SEQ ID NO: 2264260 - RNA, 13 nt, Human
guuaucucugugu

SEQ ID NO: 2264261 - RNA, 14 nt, Human
guuaucucuguguu

SEQ ID NO: 2264262 - RNA, 21 nt, Human
guuaugacuccagaauuuccc

SEQ ID NO: 2264263 - RNA, 12 nt, Human
guuaugaauauu

SEQ ID NO: 2264264 - RNA, 23 nt, Human
guuaugaauauuuacguuuuugu

SEQ ID NO: 2264265 - RNA, 15 nt, Human
guuaugaaauaaaga

SEQ ID NO: 2264266 - RNA, 20 nt, Human
guuaugaaauucacccccuu

SEQ ID NO: 2264267 - RNA, 22 nt, Human
guuauagagggucuaagauuca

SEQ ID NO: 2264268 - RNA, 17 nt, Human
guuauaggucacuccug

SEQ ID NO: 2264269 - RNA, 15 nt, Human
guuauaguauaucug

SEQ ID NO: 2264270 - RNA, 16 nt, Human
guuauaguauaucugg

SEQ ID NO: 2264271 - RNA, 19 nt, Human
guuauaguauaucuggaca

SEQ ID NO: 2264272 - RNA, 10 nt, Human
guuauauaaa

SEQ ID NO: 2264273 - RNA, 13 nt, Human
guuauauaaaugg

SEQ ID NO: 2264274 - RNA, 12 nt, Human
guuauauaaaug

SEQ ID NO: 2264275 - RNA, 13 nt, Human
guuauauagguuu

SEQ ID NO: 2264276 - RNA, 20 nt, Human
guuauauuuuacuacugugg

SEQ ID NO: 2264277 - RNA, 19 nt, Human
guuauauugaaaaaauaga

SEQ ID NO: 2264278 - RNA, 17 nt, Human
guuauauauuuuuugua

SEQ ID NO: 2264279 - RNA, 14 nt, Human
guuauaucaacaga

SEQ ID NO: 2264280 - RNA, 23 nt, Human
guuaucaaacuucagcuguacuu

SEQ ID NO: 2264281 - RNA, 20 nt, Human
guuaucaccgugggcucccu

SEQ ID NO: 2264282 - RNA, 22 nt, Human
guuaucaccgugggcucccuga

SEQ ID NO: 2264283 - RNA, 13 nt, Human
guuacuauaugcc

SEQ ID NO: 2264284 - RNA, 16 nt, Human
guuacuagguaacuuc

SEQ ID NO: 2264285 - RNA, 23 nt, Human
guuacuaauuggccucuuuaaga

SEQ ID NO: 2264286 - RNA, 15 nt, Human
guuacuacaugcacu

SEQ ID NO: 2264287 - RNA, 22 nt, Human
guuacuaaguuuuuauggcuuu

SEQ ID NO: 2264288 - RNA, 23 nt, Human
guuacgcacacguacuuaaauga

SEQ ID NO: 2264289 - RNA, 21 nt, Human
guuaccugaucaaugacagag

SEQ ID NO: 2264290 - RNA, 16 nt, Human
guuacuaacuaaacuc

SEQ ID NO: 2264291 - RNA, 17 nt, Human
guuacuaacuaaacucu

SEQ ID NO: 2264292 - RNA, 13 nt, Human
guuacuaagaaga

SEQ ID NO: 2264293 - RNA, 14 nt, Human
guuacuaagaagaa

SEQ ID NO: 2264294 - RNA, 14 nt, Human
guuacucugaaggg

SEQ ID NO: 2264295 - RNA, 11 nt, Human
guuacucugaa

SEQ ID NO: 2264296 - RNA, 22 nt, Human
guuacucuccaaccuggacaac

SEQ ID NO: 2264297 - RNA, 18 nt, Human
guuacucuccaaccugga

SEQ ID NO: 2264298 - RNA, 17 nt, Human
guuacucuccaaccugg

SEQ ID NO: 2264299 - RNA, 18 nt, Human
guuacucagcccugggcc

SEQ ID NO: 2264300 - RNA, 17 nt, Human
guuacucagcccugggc

SEQ ID NO: 2264301 - RNA, 16 nt, Human
guuacucagcccuggg

SEQ ID NO: 2264302 - RNA, 14 nt, Human
guuacucuccaacc

SEQ ID NO: 2264303 - RNA, 22 nt, Human
guuacuccagugccaacaaucc

SEQ ID NO: 2264304 - RNA, 16 nt, Human
guuacuccagugccaa

SEQ ID NO: 2264305 - RNA, 15 nt, Human
guuacucagcccugg

SEQ ID NO: 2264306 - RNA, 14 nt, Human
guuacucagcccug

SEQ ID NO: 2264307 - RNA, 13 nt, Human
guuacucagcccu

SEQ ID NO: 2264308 - RNA, 12 nt, Human
guuacucagccc

SEQ ID NO: 2264309 - RNA, 20 nt, Human
guuacuagguaacuucauau

SEQ ID NO: 2264310 - RNA, 14 nt, Human
guuacuaucugcuu

SEQ ID NO: 2264311 - RNA, 15 nt, Human
guuacucagaauucu

SEQ ID NO: 2264312 - RNA, 16 nt, Human
guuaguuucuuuggga

SEQ ID NO: 2264313 - RNA, 22 nt, Human
guuaguuucuccaagcaggaca

SEQ ID NO: 2264314 - RNA, 16 nt, Human
guuaguuucuccaagc

SEQ ID NO: 2264315 - RNA, 19 nt, Human
guuaguuucuccaagcagg

SEQ ID NO: 2264316 - RNA, 14 nt, Human
guuaguuuuuacuu

SEQ ID NO: 2264317 - RNA, 12 nt, Human
guuauaaaagug

SEQ ID NO: 2264318 - RNA, 13 nt, Human
guuaguucccaac

SEQ ID NO: 2264319 - RNA, 15 nt, Human
guuauaaagauacag

SEQ ID NO: 2264320 - RNA, 14 nt, Human
guuauaaagauaca

SEQ ID NO: 2264321 - RNA, 14 nt, Human
guuauaaaagugau

SEQ ID NO: 2264322 - RNA, 22 nt, Human
guuauaaaagugauuguuggca

SEQ ID NO: 2264323 - RNA, 19 nt, Human
guuauacugucgguuuuuu

SEQ ID NO: 2264324 - RNA, 18 nt, Human
guuauaaaucaaugucac

SEQ ID NO: 2264325 - RNA, 17 nt, Human
guuauaaaucaauguca

SEQ ID NO: 2264326 - RNA, 16 nt, Human
guuauaaaagugauug

SEQ ID NO: 2264327 - RNA, 10 nt, Human
guuaccuaau

SEQ ID NO: 2264328 - RNA, 19 nt, Human
guuaccuaauuagagcaga

SEQ ID NO: 2264329 - RNA, 16 nt, Human
guuaccuacuuugacu

SEQ ID NO: 2264330 - RNA, 13 nt, Human
guuaccuacuuug

SEQ ID NO: 2264331 - RNA, 13 nt, Human
guuacccagagaa

SEQ ID NO: 2264332 - RNA, 20 nt, Human
guuacccaguaacucaucug

SEQ ID NO: 2264333 - RNA, 17 nt, Human
guuacccuccuguaaau

SEQ ID NO: 2264334 - RNA, 17 nt, Human
guuaccuccuauaaacu

SEQ ID NO: 2264335 - RNA, 15 nt, Human
guuaccuccuauaaa

SEQ ID NO: 2264336 - RNA, 22 nt, Human
guuaccugaaaacacugugcac

SEQ ID NO: 2264337 - RNA, 23 nt, Human
guuaccucugccucagaaaacaa

SEQ ID NO: 2264338 - RNA, 15 nt, Human
guuaccaugucacug

SEQ ID NO: 2264339 - RNA, 18 nt, Human
guuaccaugucacugugg

SEQ ID NO: 2264340 - RNA, 21 nt, Human
guuacauuuuuaagugcugca

SEQ ID NO: 2264341 - RNA, 23 nt, Human
guuaccauuuugggguacccacu

SEQ ID NO: 2264342 - RNA, 19 nt, Human
guuacauaagauaaaugug

SEQ ID NO: 2264343 - RNA, 18 nt, Human
guuacauaagauaaaugu

SEQ ID NO: 2264344 - RNA, 19 nt, Human
guuacaugcauacuucaaa

SEQ ID NO: 2264345 - RNA, 17 nt, Human
guuacaucacaguguuu

SEQ ID NO: 2264346 - RNA, 13 nt, Human
guuacauuaaugu

SEQ ID NO: 2264347 - RNA, 14 nt, Human
guuacauuaauguu

SEQ ID NO: 2264348 - RNA, 16 nt, Human
guuacauuaauguuaa

SEQ ID NO: 2264349 - RNA, 23 nt, Human
guuacaugcauacuucaaaagua

SEQ ID NO: 2264350 - RNA, 21 nt, Human
guuacaugcauacuucaaaag

SEQ ID NO: 2264351 - RNA, 22 nt, Human
guuacaugcauacuucaaaagu

SEQ ID NO: 2264352 - RNA, 22 nt, Human
guuacaggcaccgagaauguug

SEQ ID NO: 2264353 - RNA, 21 nt, Human
guuacagccuguuaguaacau

SEQ ID NO: 2264354 - RNA, 18 nt, Human
guuacagccuguuaguaa

SEQ ID NO: 2264355 - RNA, 19 nt, Human
guuacagcgagaggcagag

SEQ ID NO: 2264356 - RNA, 21 nt, Human
guuacagcgagaggcagagaa

SEQ ID NO: 2264357 - RNA, 15 nt, Human
guuacagacaaagcg

SEQ ID NO: 2264358 - RNA, 17 nt, Human
guuacagacaaagcgug

SEQ ID NO: 2264359 - RNA, 16 nt, Human
guugaagacagagcua

SEQ ID NO: 2264360 - RNA, 21 nt, Human
guugaacugauaguuacuguu

SEQ ID NO: 2264361 - RNA, 15 nt, Human
guugaagaggaaggg

SEQ ID NO: 2264362 - RNA, 15 nt, Human
guugaaagaguccua

SEQ ID NO: 2264363 - RNA, 22 nt, Human
guugaaaauucaaaaaguguuu

SEQ ID NO: 2264364 - RNA, 20 nt, Human
guugaaauuauguauguuua

SEQ ID NO: 2264365 - RNA, 15 nt, Human
guugaaugacaacag

SEQ ID NO: 2264366 - RNA, 17 nt, Human
guugaauacuuuuuaca

SEQ ID NO: 2264367 - RNA, 13 nt, Human
guugaauacuuuu

SEQ ID NO: 2264368 - RNA, 16 nt, Human
guugaauggccugccu

SEQ ID NO: 2264369 - RNA, 19 nt, Human
guugaaugacaacagaagc

SEQ ID NO: 2264370 - RNA, 13 nt, Human
guugaagcucugg

SEQ ID NO: 2264371 - RNA, 22 nt, Human
guugaagcuaagauuuagagau

SEQ ID NO: 2264372 - RNA, 14 nt, Human
guugaagcucuggu

SEQ ID NO: 2264373 - RNA, 14 nt, Human
guugaagccuuugu

SEQ ID NO: 2264374 - RNA, 13 nt, Human
guugaagccuuug

SEQ ID NO: 2264375 - RNA, 17 nt, Human
guugauguuggcuggga

SEQ ID NO: 2264376 - RNA, 17 nt, Human
guugauggguucuaauu

SEQ ID NO: 2264377 - RNA, 16 nt, Human
guugauguuggcuggg

SEQ ID NO: 2264378 - RNA, 21 nt, Human
guugauggugguauguuuuca

SEQ ID NO: 2264379 - RNA, 20 nt, Human
guugauggugguauguuuuc

SEQ ID NO: 2264380 - RNA, 23 nt, Human
guugauuucagcaccuacagugu

SEQ ID NO: 2264381 - RNA, 14 nt, Human
guugauugcuaaau

SEQ ID NO: 2264382 - RNA, 15 nt, Human
guugauugcuaaaug

SEQ ID NO: 2264383 - RNA, 16 nt, Human
guugauugcuaaaugu

SEQ ID NO: 2264384 - RNA, 17 nt, Human
guugauugcuaaaugua

SEQ ID NO: 2264385 - RNA, 12 nt, Human
guugauugcuaa

SEQ ID NO: 2264386 - RNA, 13 nt, Human
guugauugcuaaa

SEQ ID NO: 2264387 - RNA, 23 nt, Human
guugauucgguauccccccaucu

SEQ ID NO: 2264388 - RNA, 22 nt, Human
guugauugcuaaauguaacagu

SEQ ID NO: 2264389 - RNA, 18 nt, Human
guugauugcuaaauguaa

SEQ ID NO: 2264390 - RNA, 20 nt, Human
guugauugcuaaauguaaca

SEQ ID NO: 2264391 - RNA, 18 nt, Human
guugauuucuuuccagag

SEQ ID NO: 2264392 - RNA, 14 nt, Human
guugcaacuuugua

SEQ ID NO: 2264393 - RNA, 17 nt, Human
guugcaaguacugcugu

SEQ ID NO: 2264394 - RNA, 23 nt, Human
guugcaaggccgcuguucaccca

SEQ ID NO: 2264395 - RNA, 17 nt, Human
guugcaaggccgcuguu

SEQ ID NO: 2264396 - RNA, 16 nt, Human
guugcaaggccgcugu

SEQ ID NO: 2264397 - RNA, 20 nt, Human
guugcacacccacucagcuc

SEQ ID NO: 2264398 - RNA, 22 nt, Human
guugcaauagaacagagaaaga

SEQ ID NO: 2264399 - RNA, 16 nt, Human
guugcacagcuaugaa

SEQ ID NO: 2264400 - RNA, 15 nt, Human
guugcaaggccgcug

SEQ ID NO: 2264401 - RNA, 15 nt, Human
guugcaaacucagcc

SEQ ID NO: 2264402 - RNA, 13 nt, Human
guugcaaccacug

SEQ ID NO: 2264403 - RNA, 14 nt, Human
guugcaaccacugc

SEQ ID NO: 2264404 - RNA, 16 nt, Human
guugcaacuuuguaua

SEQ ID NO: 2264405 - RNA, 19 nt, Human
guugccaaauauguccugg

SEQ ID NO: 2264406 - RNA, 20 nt, Human
guugccaaauauguccuggg

SEQ ID NO: 2264407 - RNA, 18 nt, Human
guugccaaacagccacac

SEQ ID NO: 2264408 - RNA, 17 nt, Human
guugccaaacagccaca

SEQ ID NO: 2264409 - RNA, 20 nt, Human
guugcauuaaaaaugcauau

SEQ ID NO: 2264410 - RNA, 13 nt, Human
guugcagugagcu

SEQ ID NO: 2264411 - RNA, 16 nt, Human
guugcaugauguauuu

SEQ ID NO: 2264412 - RNA, 20 nt, Human
guugcaugucgugaccaacu

SEQ ID NO: 2264413 - RNA, 15 nt, Human
guugcagugagcuga

SEQ ID NO: 2264414 - RNA, 19 nt, Human
guugcacuuggccucugga

SEQ ID NO: 2264415 - RNA, 19 nt, Human
guugcacuuaugauuucau

SEQ ID NO: 2264416 - RNA, 14 nt, Human
guugcacugauauu

SEQ ID NO: 2264417 - RNA, 15 nt, Human
guugcaggaccucag

SEQ ID NO: 2264418 - RNA, 13 nt, Human
guugcacccagcc

SEQ ID NO: 2264419 - RNA, 14 nt, Human
guugcacccagccc

SEQ ID NO: 2264420 - RNA, 15 nt, Human
guugcacccagcccu

SEQ ID NO: 2264421 - RNA, 16 nt, Human
guugcacccagcccug

SEQ ID NO: 2264422 - RNA, 17 nt, Human
guugcacccagcccugg

SEQ ID NO: 2264423 - RNA, 18 nt, Human
guugcacccagcccuggu

SEQ ID NO: 2264424 - RNA, 20 nt, Human
guugcacccagcccuggucu

SEQ ID NO: 2264425 - RNA, 23 nt, Human
guugcacccagcccuggucucag

SEQ ID NO: 2264426 - RNA, 14 nt, Human
guuggauuuuuguc

SEQ ID NO: 2264427 - RNA, 18 nt, Human
guuggauuuauaaaugcu

SEQ ID NO: 2264428 - RNA, 21 nt, Human
guuggauuuauaaaugcuauu

SEQ ID NO: 2264429 - RNA, 14 nt, Human
guuggcaaaaaggc

SEQ ID NO: 2264430 - RNA, 20 nt, Human
guuggauuuuugucuugugu

SEQ ID NO: 2264431 - RNA, 12 nt, Human
guuggauuuguu

SEQ ID NO: 2264432 - RNA, 18 nt, Human
guuggcaaaaaggcagga

SEQ ID NO: 2264433 - RNA, 23 nt, Human
guuggccaaagccaaagcuaggc

SEQ ID NO: 2264434 - RNA, 16 nt, Human
guuggcagugagugag

SEQ ID NO: 2264435 - RNA, 22 nt, Human
guuggcagugagugagccuggc

SEQ ID NO: 2264436 - RNA, 23 nt, Human
guuggcagugagugagccuggcu

SEQ ID NO: 2264437 - RNA, 20 nt, Human
guuggcacucacagaccugg

SEQ ID NO: 2264438 - RNA, 15 nt, Human
guuggcacucacaga

SEQ ID NO: 2264439 - RNA, 19 nt, Human
guuggcacucacagaccug

SEQ ID NO: 2264440 - RNA, 13 nt, Human
guuggcaggcugg

SEQ ID NO: 2264441 - RNA, 14 nt, Human
guuggcaggcuggc

SEQ ID NO: 2264442 - RNA, 15 nt, Human
guuggcaggcuggcc

SEQ ID NO: 2264443 - RNA, 16 nt, Human
guuggcaggcuggcca

SEQ ID NO: 2264444 - RNA, 17 nt, Human
guuggcaggcuggccag

SEQ ID NO: 2264445 - RNA, 20 nt, Human
guuggcaggcuggccagucc

SEQ ID NO: 2264446 - RNA, 13 nt, Human
guuggccaggcug

SEQ ID NO: 2264447 - RNA, 20 nt, Human
guuggccacgucuuccuucu

SEQ ID NO: 2264448 - RNA, 14 nt, Human
guuggccaggcugc

SEQ ID NO: 2264449 - RNA, 15 nt, Human
guuggccaggcuggu

SEQ ID NO: 2264450 - RNA, 14 nt, Human
guuggccaggcugg

SEQ ID NO: 2264451 - RNA, 17 nt, Human
guuggccaggcuggucu

SEQ ID NO: 2264452 - RNA, 18 nt, Human
guuggccaggcuggucuc

SEQ ID NO: 2264453 - RNA, 19 nt, Human
guuggccaggcugcucuug

SEQ ID NO: 2264454 - RNA, 19 nt, Human
guuggccaggcuggucuca

SEQ ID NO: 2264455 - RNA, 14 nt, Human
guuggccaguguga

SEQ ID NO: 2264456 - RNA, 15 nt, Human
guugccagagaugga

SEQ ID NO: 2264457 - RNA, 11 nt, Human
guugccagaga

SEQ ID NO: 2264458 - RNA, 17 nt, Human
guugccagagauggagg

SEQ ID NO: 2264459 - RNA, 16 nt, Human
guugccacaggccucc

SEQ ID NO: 2264460 - RNA, 17 nt, Human
guugccacaggccuccc

SEQ ID NO: 2264461 - RNA, 19 nt, Human
guugccacaggccucccug

SEQ ID NO: 2264462 - RNA, 12 nt, Human
guugcccaggca

SEQ ID NO: 2264463 - RNA, 14 nt, Human
guugcccaggcagg

SEQ ID NO: 2264464 - RNA, 12 nt, Human
guuggagccugc

SEQ ID NO: 2264465 - RNA, 22 nt, Human
guuggagagcuagaaccuggag

SEQ ID NO: 2264466 - RNA, 14 nt, Human
guuggagccugcag

SEQ ID NO: 2264467 - RNA, 16 nt, Human
guuggagccugcaggg

SEQ ID NO: 2264468 - RNA, 19 nt, Human
guuggagccugcagggugg

SEQ ID NO: 2264469 - RNA, 13 nt, Human
guuggaucuucaa

SEQ ID NO: 2264470 - RNA, 19 nt, Human
guuggagagcuagaaccug

SEQ ID NO: 2264471 - RNA, 20 nt, Human
guuggacccgcucuggacca

SEQ ID NO: 2264472 - RNA, 15 nt, Human
guuggacccgcucug

SEQ ID NO: 2264473 - RNA, 16 nt, Human
guuggacccgcucugg

SEQ ID NO: 2264474 - RNA, 17 nt, Human
guuggacccgcucugga

SEQ ID NO: 2264475 - RNA, 18 nt, Human
guuggacccgcucuggac

SEQ ID NO: 2264476 - RNA, 13 nt, Human
guugccagucacc

SEQ ID NO: 2264477 - RNA, 14 nt, Human
guugccagucaccc

SEQ ID NO: 2264478 - RNA, 16 nt, Human
guugccacaggacaca

SEQ ID NO: 2264479 - RNA, 15 nt, Human
guugccacaggacac

SEQ ID NO: 2264480 - RNA, 12 nt, Human
guugccacaggc

SEQ ID NO: 2264481 - RNA, 15 nt, Human
guugccacaggccuc

SEQ ID NO: 2264482 - RNA, 14 nt, Human
guugccacaggaca

SEQ ID NO: 2264483 - RNA, 13 nt, Human
guugccacaggac

SEQ ID NO: 2264484 - RNA, 13 nt, Human
guugccaagcugg

SEQ ID NO: 2264485 - RNA, 11 nt, Human
guugccacagg

SEQ ID NO: 2264486 - RNA, 21 nt, Human
guugccaaauauguccugggg

SEQ ID NO: 2264487 - RNA, 15 nt, Human
guugccaagcuccaa

SEQ ID NO: 2264488 - RNA, 18 nt, Human
guugccaagcuccaagcc

SEQ ID NO: 2264489 - RNA, 19 nt, Human
guugccaagcuccaagccc

SEQ ID NO: 2264490 - RNA, 16 nt, Human
guugccagucaccccg

SEQ ID NO: 2264491 - RNA, 17 nt, Human
guugccagucaccccgg

SEQ ID NO: 2264492 - RNA, 18 nt, Human
guugccagucaccccggc

SEQ ID NO: 2264493 - RNA, 23 nt, Human
guugccagucaccccggccaccu

SEQ ID NO: 2264494 - RNA, 13 nt, Human
guucugacuugac

SEQ ID NO: 2264495 - RNA, 23 nt, Human
guucugacauuaacaguuuucca

SEQ ID NO: 2264496 - RNA, 21 nt, Human
guucugacauuaacaguuuuc

SEQ ID NO: 2264497 - RNA, 17 nt, Human
guucugacauuaacagu

SEQ ID NO: 2264498 - RNA, 16 nt, Human
guucugacauuaacag

SEQ ID NO: 2264499 - RNA, 15 nt, Human
guucugacauuaaca

SEQ ID NO: 2264500 - RNA, 20 nt, Human
guucugaauaugcugcucau

SEQ ID NO: 2264501 - RNA, 14 nt, Human
guucucuucuugaa

SEQ ID NO: 2264502 - RNA, 15 nt, Human
guucugaauaauuuc

SEQ ID NO: 2264503 - RNA, 16 nt, Human
guucugaauaauuucu

SEQ ID NO: 2264504 - RNA, 18 nt, Human
guucugaauaauuucuua

SEQ ID NO: 2264505 - RNA, 14 nt, Human
guucugaagaagau

SEQ ID NO: 2264506 - RNA, 15 nt, Human
guucugaagaagaug

SEQ ID NO: 2264507 - RNA, 18 nt, Human
guucuaauuuuggaugga

SEQ ID NO: 2264508 - RNA, 19 nt, Human
guucuaagucuuuccauug

SEQ ID NO: 2264509 - RNA, 17 nt, Human
guucuaagucuuuccau

SEQ ID NO: 2264510 - RNA, 12 nt, Human
guucugaagaag

SEQ ID NO: 2264511 - RNA, 13 nt, Human
guucugaagaaga

SEQ ID NO: 2264512 - RNA, 14 nt, Human
guucugaguguuuu

SEQ ID NO: 2264513 - RNA, 17 nt, Human
guucugaugaugugccu

SEQ ID NO: 2264514 - RNA, 18 nt, Human
guucugaugaugugccug

SEQ ID NO: 2264515 - RNA, 22 nt, Human
guucugagauuauuuuaaucua

SEQ ID NO: 2264516 - RNA, 19 nt, Human
guucugauccuaguuccac

SEQ ID NO: 2264517 - RNA, 18 nt, Human
guucugauuagaaaugac

SEQ ID NO: 2264518 - RNA, 16 nt, Human
guucugauuagaaaug

SEQ ID NO: 2264519 - RNA, 14 nt, Human
guucugauuagaaa

SEQ ID NO: 2264520 - RNA, 13 nt, Human
guucugauuagaa

SEQ ID NO: 2264521 - RNA, 20 nt, Human
guucugauuagaaaugacca

SEQ ID NO: 2264522 - RNA, 16 nt, Human
guucugcaaaaauauu

SEQ ID NO: 2264523 - RNA, 16 nt, Human
guucugcacacagcac

SEQ ID NO: 2264524 - RNA, 15 nt, Human
guucugcacacagca

SEQ ID NO: 2264525 - RNA, 15 nt, Human
guucugccugccagc

SEQ ID NO: 2264526 - RNA, 13 nt, Human
guucugccugcca

SEQ ID NO: 2264527 - RNA, 23 nt, Human
guucugccugccagcugcacuga

SEQ ID NO: 2264528 - RNA, 22 nt, Human
guucugccugccagcugcacug

SEQ ID NO: 2264529 - RNA, 19 nt, Human
guucugccugccagcugca

SEQ ID NO: 2264530 - RNA, 17 nt, Human
guucugccugccagcug

SEQ ID NO: 2264531 - RNA, 22 nt, Human
guucgacgagacggucgagcag

SEQ ID NO: 2264532 - RNA, 19 nt, Human
guucgagaccaaccugacc

SEQ ID NO: 2264533 - RNA, 14 nt, Human
guucgacucagccu

SEQ ID NO: 2264534 - RNA, 16 nt, Human
guucgacucagccuca

SEQ ID NO: 2264535 - RNA, 23 nt, Human
guuccuugaucuguauauacaau

SEQ ID NO: 2264536 - RNA, 20 nt, Human
guuccuucuggugucugcuu

SEQ ID NO: 2264537 - RNA, 17 nt, Human
guuccuuccucugagcc

SEQ ID NO: 2264538 - RNA, 19 nt, Human
guuccuuccucugagccuu

SEQ ID NO: 2264539 - RNA, 18 nt, Human
guuccuuccucugagccu

SEQ ID NO: 2264540 - RNA, 16 nt, Human
guucgagaccagccug

SEQ ID NO: 2264541 - RNA, 17 nt, Human
guucgagaccagccugg

SEQ ID NO: 2264542 - RNA, 19 nt, Human
guucgagaccagccuggcc

SEQ ID NO: 2264543 - RNA, 18 nt, Human
guucgagaccagccuggc

SEQ ID NO: 2264544 - RNA, 20 nt, Human
guucgagaccagccuggcca

SEQ ID NO: 2264545 - RNA, 16 nt, Human
guucgagaccagucug

SEQ ID NO: 2264546 - RNA, 19 nt, Human
guucgagaccagucuggcc

SEQ ID NO: 2264547 - RNA, 17 nt, Human
guucguggaaagggugc

SEQ ID NO: 2264548 - RNA, 13 nt, Human
guucguucuguuu

SEQ ID NO: 2264549 - RNA, 13 nt, Human
guucguagcuuuc

SEQ ID NO: 2264550 - RNA, 16 nt, Human
guucgggugugcaaug

SEQ ID NO: 2264551 - RNA, 18 nt, Human
guucggauuuggggugga

SEQ ID NO: 2264552 - RNA, 20 nt, Human
guucgcauggucacacacug

SEQ ID NO: 2264553 - RNA, 14 nt, Human
guucgcauggucac

SEQ ID NO: 2264554 - RNA, 23 nt, Human
guucuaaagauggaaaaaccacc

SEQ ID NO: 2264555 - RNA, 17 nt, Human
guucuaaagauggaaaa

SEQ ID NO: 2264556 - RNA, 20 nt, Human
guucuaaagauggaaaaacc

SEQ ID NO: 2264557 - RNA, 14 nt, Human
guucuaaagaugga

SEQ ID NO: 2264558 - RNA, 14 nt, Human
guucguucuguuua

SEQ ID NO: 2264559 - RNA, 19 nt, Human
guucuaaaaauugugauca

SEQ ID NO: 2264560 - RNA, 16 nt, Human
guucuaagucuuucca

SEQ ID NO: 2264561 - RNA, 19 nt, Human
guugaaaauuauuuuaaac

SEQ ID NO: 2264562 - RNA, 18 nt, Human
guugaaaauucaaaaagu

SEQ ID NO: 2264563 - RNA, 23 nt, Human
guugaaaagacuccaaagaaaug

SEQ ID NO: 2264564 - RNA, 22 nt, Human
guugaaaagacuccaaagaaau

SEQ ID NO: 2264565 - RNA, 17 nt, Human
guugaaaagacuccaaa

SEQ ID NO: 2264566 - RNA, 17 nt, Human
guugaaaaacagcugag

SEQ ID NO: 2264567 - RNA, 13 nt, Human
guucuuuuaaagg

SEQ ID NO: 2264568 - RNA, 21 nt, Human
guucuuuguucauagcccagu

SEQ ID NO: 2264569 - RNA, 22 nt, Human
guucuuugggccagacaugcca

SEQ ID NO: 2264570 - RNA, 17 nt, Human
guucuuugggccagaca

SEQ ID NO: 2264571 - RNA, 13 nt, Human
guucuuuguucau

SEQ ID NO: 2264572 - RNA, 20 nt, Human
guucuuuguucauagcccag

SEQ ID NO: 2264573 - RNA, 16 nt, Human
guucuuugggccagac

SEQ ID NO: 2264574 - RNA, 15 nt, Human
guucuuugggccaga

SEQ ID NO: 2264575 - RNA, 18 nt, Human
guucuuuggaaggaguga

SEQ ID NO: 2264576 - RNA, 16 nt, Human
guucuuucuuccucug

SEQ ID NO: 2264577 - RNA, 17 nt, Human
guucuuucuuccucugc

SEQ ID NO: 2264578 - RNA, 18 nt, Human
guucuuucuuccucugcu

SEQ ID NO: 2264579 - RNA, 19 nt, Human
guucuuucuuccucugcug

SEQ ID NO: 2264580 - RNA, 14 nt, Human
guucuuucuuccuc

SEQ ID NO: 2264581 - RNA, 15 nt, Human
guucuuucuuccucu

SEQ ID NO: 2264582 - RNA, 15 nt, Human
guucuuucuggaguc

SEQ ID NO: 2264583 - RNA, 20 nt, Human
guucuuuccaaaguacacug

SEQ ID NO: 2264584 - RNA, 18 nt, Human
guucuuuccaaaguacac

SEQ ID NO: 2264585 - RNA, 14 nt, Human
guucuuuccaaagu

SEQ ID NO: 2264586 - RNA, 13 nt, Human
guucuuuccaaag

SEQ ID NO: 2264587 - RNA, 23 nt, Human
guucuggcccucaccccugcccu

SEQ ID NO: 2264588 - RNA, 21 nt, Human
guucuggcccucaccccugcc

SEQ ID NO: 2264589 - RNA, 20 nt, Human
guucuggcugccccaaccug

SEQ ID NO: 2264590 - RNA, 22 nt, Human
guucuggcugccccaaccugcu

SEQ ID NO: 2264591 - RNA, 15 nt, Human
guucuggcccucacc

SEQ ID NO: 2264592 - RNA, 16 nt, Human
guucuggccagaaugc

SEQ ID NO: 2264593 - RNA, 11 nt, Human
guucugggaca

SEQ ID NO: 2264594 - RNA, 12 nt, Human
guucugggacac

SEQ ID NO: 2264595 - RNA, 14 nt, Human
guucugggacacag

SEQ ID NO: 2264596 - RNA, 15 nt, Human
guucugggacacagu

SEQ ID NO: 2264597 - RNA, 16 nt, Human
guucugggacacaguu

SEQ ID NO: 2264598 - RNA, 23 nt, Human
guucugggacacaguucaauucu

SEQ ID NO: 2264599 - RNA, 17 nt, Human
guucuuuaggagauuuu

SEQ ID NO: 2264600 - RNA, 18 nt, Human
guucuuucacccuuuucu

SEQ ID NO: 2264601 - RNA, 23 nt, Human
guucuggcagaguugaagacaga

SEQ ID NO: 2264602 - RNA, 22 nt, Human
guucugcuccucuccaggcacc

SEQ ID NO: 2264603 - RNA, 13 nt, Human
guucugcuggccu

SEQ ID NO: 2264604 - RNA, 16 nt, Human
guucugcuccucucca

SEQ ID NO: 2264605 - RNA, 17 nt, Human
guucugcuccucuccag

SEQ ID NO: 2264606 - RNA, 18 nt, Human
guucugcuccucuccagg

SEQ ID NO: 2264607 - RNA, 19 nt, Human
guucugcuccucuccaggc

SEQ ID NO: 2264608 - RNA, 11 nt, Human
guucugcuccu

SEQ ID NO: 2264609 - RNA, 13 nt, Human
guucugcuccucu

SEQ ID NO: 2264610 - RNA, 14 nt, Human
guucugcuccucuc

SEQ ID NO: 2264611 - RNA, 15 nt, Human
guucugcuccucucc

SEQ ID NO: 2264612 - RNA, 22 nt, Human
guucugcaaaaauauuuauaaa

SEQ ID NO: 2264613 - RNA, 15 nt, Human
guucugcucaucauu

SEQ ID NO: 2264614 - RNA, 23 nt, Human
guucugcucaucauucucugucu

SEQ ID NO: 2264615 - RNA, 18 nt, Human
guucugcucaucauucuc

SEQ ID NO: 2264616 - RNA, 12 nt, Human
guucuggcucuu

SEQ ID NO: 2264617 - RNA, 13 nt, Human
guucuggccagaa

SEQ ID NO: 2264618 - RNA, 12 nt, Human
guucuggccaga

SEQ ID NO: 2264619 - RNA, 14 nt, Human
guucugcuggccug

SEQ ID NO: 2264620 - RNA, 16 nt, Human
guucugcuggccugga

SEQ ID NO: 2264621 - RNA, 19 nt, Human
guucugcuggccuggaucu

SEQ ID NO: 2264622 - RNA, 16 nt, Human
guucuggcucuuccag

SEQ ID NO: 2264623 - RNA, 20 nt, Human
guucuggcucuuccaggcug

SEQ ID NO: 2264624 - RNA, 20 nt, Human
guggcucacgugugugacuc

SEQ ID NO: 2264625 - RNA, 23 nt, Human
guggcucacgccuguaaucccag

SEQ ID NO: 2264626 - RNA, 22 nt, Human
guggcucacgccuguaauccca

SEQ ID NO: 2264627 - RNA, 14 nt, Human
guggcuccccucua

SEQ ID NO: 2264628 - RNA, 12 nt, Human
guggcuccccuc

SEQ ID NO: 2264629 - RNA, 19 nt, Human
guggcucaugccuguaauc

SEQ ID NO: 2264630 - RNA, 15 nt, Human
guggcuccagcacca

SEQ ID NO: 2264631 - RNA, 15 nt, Human
guggcucagccagca

SEQ ID NO: 2264632 - RNA, 14 nt, Human
guggcucaugccug

SEQ ID NO: 2264633 - RNA, 23 nt, Human
guggcuccccucuauuuagcaug

SEQ ID NO: 2264634 - RNA, 22 nt, Human
guggcuccccucuauuuagcau

SEQ ID NO: 2264635 - RNA, 18 nt, Human
guggcuccuaucuguguu

SEQ ID NO: 2264636 - RNA, 20 nt, Human
guggcuccuaucuguguuuu

SEQ ID NO: 2264637 - RNA, 13 nt, Human
guggcuccucccg

SEQ ID NO: 2264638 - RNA, 20 nt, Human
guggcuccucccggugccca

SEQ ID NO: 2264639 - RNA, 16 nt, Human
guggcugcccacacac

SEQ ID NO: 2264640 - RNA, 18 nt, Human
guggcugcggcacccuug

SEQ ID NO: 2264641 - RNA, 17 nt, Human
guggcugcuagcacuug

SEQ ID NO: 2264642 - RNA, 20 nt, Human
guggcugccucauuuagaga

SEQ ID NO: 2264643 - RNA, 16 nt, Human
guggcugccucauuua

SEQ ID NO: 2264644 - RNA, 13 nt, Human
guggcuccuuccc

SEQ ID NO: 2264645 - RNA, 19 nt, Human
guggcugcuagcacuugga

SEQ ID NO: 2264646 - RNA, 12 nt, Human
guggcugcugcc

SEQ ID NO: 2264647 - RNA, 16 nt, Human
guggcugcugcccagg

SEQ ID NO: 2264648 - RNA, 13 nt, Human
guggcugcugccc

SEQ ID NO: 2264649 - RNA, 15 nt, Human
guggcugcugcccag

SEQ ID NO: 2264650 - RNA, 12 nt, Human
guggcugcuuca

SEQ ID NO: 2264651 - RNA, 14 nt, Human
guggcugcuucaag

SEQ ID NO: 2264652 - RNA, 21 nt, Human
gugcuaauaacagugcauauu

SEQ ID NO: 2264653 - RNA, 21 nt, Human
gugcuacaaaaacacagcaag

SEQ ID NO: 2264654 - RNA, 18 nt, Human
guggcuagucaagcuccu

SEQ ID NO: 2264655 - RNA, 12 nt, Human
guggcuaggcag

SEQ ID NO: 2264656 - RNA, 19 nt, Human
guggcuagucagagagagu

SEQ ID NO: 2264657 - RNA, 17 nt, Human
guggcuagucagagaga

SEQ ID NO: 2264658 - RNA, 23 nt, Human
guggcuagucaagcuccuccucc

SEQ ID NO: 2264659 - RNA, 22 nt, Human
guggcuagucaagcuccuccuc

SEQ ID NO: 2264660 - RNA, 21 nt, Human
guggcuagucaagcuccuccu

SEQ ID NO: 2264661 - RNA, 20 nt, Human
guggcuagucaagcuccucc

SEQ ID NO: 2264662 - RNA, 19 nt, Human
guggcuagucaagcuccuc

SEQ ID NO: 2264663 - RNA, 14 nt, Human
guggcucacgccug

SEQ ID NO: 2264664 - RNA, 13 nt, Human
gugcuaauuuuga

SEQ ID NO: 2264665 - RNA, 15 nt, Human
gugcuaauuuugaaa

SEQ ID NO: 2264666 - RNA, 20 nt, Human
gugcuacaaaaacacagcaa

SEQ ID NO: 2264667 - RNA, 15 nt, Human
gugcuacaaaaacac

SEQ ID NO: 2264668 - RNA, 19 nt, Human
guggcuucauuagagcagg

SEQ ID NO: 2264669 - RNA, 20 nt, Human
guggcuucauuagagcaggc

SEQ ID NO: 2264670 - RNA, 18 nt, Human
guggcuucccgcucagcc

SEQ ID NO: 2264671 - RNA, 19 nt, Human
guggcuucccgcucagccc

SEQ ID NO: 2264672 - RNA, 20 nt, Human
guggcuucccgcucagcccu

SEQ ID NO: 2264673 - RNA, 16 nt, Human
gugggcacccacccug

SEQ ID NO: 2264674 - RNA, 20 nt, Human
gugggcacccacccugggac

SEQ ID NO: 2264675 - RNA, 17 nt, Human
gugggcaaacaggcagu

SEQ ID NO: 2264676 - RNA, 21 nt, Human
guggcuucauuagagcaggcg

SEQ ID NO: 2264677 - RNA, 23 nt, Human
gugggcacgcugugggcaggugg

SEQ ID NO: 2264678 - RNA, 20 nt, Human
gugggcacgcugugggcagg

SEQ ID NO: 2264679 - RNA, 21 nt, Human
gugggcacgcugugggcaggu

SEQ ID NO: 2264680 - RNA, 13 nt, Human
gugggcaggaaaa

SEQ ID NO: 2264681 - RNA, 14 nt, Human
gugggcaggaaaag

SEQ ID NO: 2264682 - RNA, 12 nt, Human
gugggcaggugg

SEQ ID NO: 2264683 - RNA, 20 nt, Human
guggcuuacuacauguggga

SEQ ID NO: 2264684 - RNA, 17 nt, Human
guggcuguccagugccc

SEQ ID NO: 2264685 - RNA, 18 nt, Human
guggcuguccagugccca

SEQ ID NO: 2264686 - RNA, 19 nt, Human
guggcuguccagugcccau

SEQ ID NO: 2264687 - RNA, 22 nt, Human
guggcuuaaaacaacacucaca

SEQ ID NO: 2264688 - RNA, 22 nt, Human
guggcugggggcaggagggccc

SEQ ID NO: 2264689 - RNA, 17 nt, Human
guggcugggggcaggag

SEQ ID NO: 2264690 - RNA, 18 nt, Human
guggcuggguuuacacgc

SEQ ID NO: 2264691 - RNA, 15 nt, Human
guggcugguccaggg

SEQ ID NO: 2264692 - RNA, 19 nt, Human
guggcugucagcaggaagc

SEQ ID NO: 2264693 - RNA, 15 nt, Human
guggcuguccagugc

SEQ ID NO: 2264694 - RNA, 15 nt, Human
guggcugucagcagg

SEQ ID NO: 2264695 - RNA, 14 nt, Human
guggcugucagcag

SEQ ID NO: 2264696 - RNA, 21 nt, Human
guggcuggguccaggggaugg

SEQ ID NO: 2264697 - RNA, 17 nt, Human
guggcugguccagggcu

SEQ ID NO: 2264698 - RNA, 16 nt, Human
guggcugggggcagga

SEQ ID NO: 2264699 - RNA, 11 nt, Human
guggcuggggg

SEQ ID NO: 2264700 - RNA, 20 nt, Human
guggcuggaagauccugcgg

SEQ ID NO: 2264701 - RNA, 19 nt, Human
guggcuggguuggagggug

SEQ ID NO: 2264702 - RNA, 23 nt, Human
guggcugcuucaaggauccugag

SEQ ID NO: 2264703 - RNA, 17 nt, Human
guggcuggaucugugag

SEQ ID NO: 2264704 - RNA, 12 nt, Human
guggcuggaaga

SEQ ID NO: 2264705 - RNA, 17 nt, Human
guggcuggaagauccug

SEQ ID NO: 2264706 - RNA, 15 nt, Human
guggcugcuucaagg

SEQ ID NO: 2264707 - RNA, 16 nt, Human
guggcugcuucaagga

SEQ ID NO: 2264708 - RNA, 19 nt, Human
guggcugcuucaaggaucc

SEQ ID NO: 2264709 - RNA, 22 nt, Human
guggcugcuucaaggauccuga

SEQ ID NO: 2264710 - RNA, 13 nt, Human
guggggagggccg

SEQ ID NO: 2264711 - RNA, 17 nt, Human
guggggagacugggcug

SEQ ID NO: 2264712 - RNA, 11 nt, Human
guggggacagg

SEQ ID NO: 2264713 - RNA, 14 nt, Human
gugggcuugauucu

SEQ ID NO: 2264714 - RNA, 13 nt, Human
guggggacagggc

SEQ ID NO: 2264715 - RNA, 17 nt, Human
guggggauuucucccag

SEQ ID NO: 2264716 - RNA, 18 nt, Human
guggggcaagauuuuccu

SEQ ID NO: 2264717 - RNA, 16 nt, Human
guggggauuucuccca

SEQ ID NO: 2264718 - RNA, 15 nt, Human
guggggauugcccau

SEQ ID NO: 2264719 - RNA, 19 nt, Human
guggggaucucaggggcug

SEQ ID NO: 2264720 - RNA, 18 nt, Human
guggggaucucaggggcu

SEQ ID NO: 2264721 - RNA, 22 nt, Human
guggggacguccugccaccugg

SEQ ID NO: 2264722 - RNA, 11 nt, Human
guggggagggg

SEQ ID NO: 2264723 - RNA, 13 nt, Human
guggggaggggcg

SEQ ID NO: 2264724 - RNA, 13 nt, Human
guggggaggggcu

SEQ ID NO: 2264725 - RNA, 18 nt, Human
gugggcugagcccuggca

SEQ ID NO: 2264726 - RNA, 18 nt, Human
gugggcucugugcaguca

SEQ ID NO: 2264727 - RNA, 19 nt, Human
gugggcugcacucugugcc

SEQ ID NO: 2264728 - RNA, 20 nt, Human
gugggcugcacucugugccc

SEQ ID NO: 2264729 - RNA, 21 nt, Human
gugggcugcacucugugccca

SEQ ID NO: 2264730 - RNA, 15 nt, Human
gugggcugcaucugg

SEQ ID NO: 2264731 - RNA, 13 nt, Human
gugggcugugagu

SEQ ID NO: 2264732 - RNA, 16 nt, Human
gugggcuucccagugg

SEQ ID NO: 2264733 - RNA, 22 nt, Human
gugggcuucccaguggcugcug

SEQ ID NO: 2264734 - RNA, 23 nt, Human
gugggcuucccaguggcugcugc

SEQ ID NO: 2264735 - RNA, 14 nt, Human
gugggcugugagug

SEQ ID NO: 2264736 - RNA, 22 nt, Human
gugggcuggugacccagucaga

SEQ ID NO: 2264737 - RNA, 15 nt, Human
guggggaccucaggc

SEQ ID NO: 2264738 - RNA, 18 nt, Human
guggggaccucaggccug

SEQ ID NO: 2264739 - RNA, 12 nt, Human
guggggcagcac

SEQ ID NO: 2264740 - RNA, 14 nt, Human
guggggcagcacag

SEQ ID NO: 2264741 - RNA, 19 nt, Human
guggggcagcacagagagg

SEQ ID NO: 2264742 - RNA, 23 nt, Human
guggggcagcacagagagggggc

SEQ ID NO: 2264743 - RNA, 13 nt, Human
guggggcagcuug

SEQ ID NO: 2264744 - RNA, 17 nt, Human
guggggcagcuugaggg

SEQ ID NO: 2264745 - RNA, 16 nt, Human
guggguuuucuuccca

SEQ ID NO: 2264746 - RNA, 21 nt, Human
guggguuuucaucaagacugg

SEQ ID NO: 2264747 - RNA, 12 nt, Human
gugguaacccug

SEQ ID NO: 2264748 - RNA, 23 nt, Human
guggguuucuaaagcugccagcc

SEQ ID NO: 2264749 - RNA, 16 nt, Human
gugggugguggggagg

SEQ ID NO: 2264750 - RNA, 16 nt, Human
guggguuauucuggag

SEQ ID NO: 2264751 - RNA, 14 nt, Human
guggggccagguca

SEQ ID NO: 2264752 - RNA, 12 nt, Human
guggguggugga

SEQ ID NO: 2264753 - RNA, 16 nt, Human
gugggugguggaucug

SEQ ID NO: 2264754 - RNA, 14 nt, Human
guggguggugggga

SEQ ID NO: 2264755 - RNA, 19 nt, Human
gugggcgggcagcacagca

SEQ ID NO: 2264756 - RNA, 19 nt, Human
gugggcggcacagccuucu

SEQ ID NO: 2264757 - RNA, 18 nt, Human
gugggcgggcagcacagc

SEQ ID NO: 2264758 - RNA, 18 nt, Human
gugggcgugagaccugcc

SEQ ID NO: 2264759 - RNA, 22 nt, Human
gugggcgugagaccugccccuc

SEQ ID NO: 2264760 - RNA, 21 nt, Human
gugggcgugagaccugccccu

SEQ ID NO: 2264761 - RNA, 13 nt, Human
gugggcggcagag

SEQ ID NO: 2264762 - RNA, 16 nt, Human
gugggcggcagagagg

SEQ ID NO: 2264763 - RNA, 15 nt, Human
gugggccuugcuggg

SEQ ID NO: 2264764 - RNA, 17 nt, Human
gugggccuugcugggga

SEQ ID NO: 2264765 - RNA, 18 nt, Human
gugggccuugcuggggac

SEQ ID NO: 2264766 - RNA, 20 nt, Human
gugggccuuguccccugccu

SEQ ID NO: 2264767 - RNA, 19 nt, Human
gugggccuucagggaguga

SEQ ID NO: 2264768 - RNA, 12 nt, Human
gugggcuaagca

SEQ ID NO: 2264769 - RNA, 17 nt, Human
gugggcguggucacugc

SEQ ID NO: 2264770 - RNA, 14 nt, Human
gugggcuaauuaaa

SEQ ID NO: 2264771 - RNA, 15 nt, Human
gugggcuaguugggc

SEQ ID NO: 2264772 - RNA, 16 nt, Human
gugggcugagcccugg

SEQ ID NO: 2264773 - RNA, 15 nt, Human
gugggcugagcccug

SEQ ID NO: 2264774 - RNA, 14 nt, Human
gugggcugagcccu

SEQ ID NO: 2264775 - RNA, 13 nt, Human
gugggcugagccc

SEQ ID NO: 2264776 - RNA, 15 nt, Human
gugggcucccugacu

SEQ ID NO: 2264777 - RNA, 14 nt, Human
gugggcucccugac

SEQ ID NO: 2264778 - RNA, 13 nt, Human
gugggcucccuga

SEQ ID NO: 2264779 - RNA, 17 nt, Human
gugggccagugugggaa

SEQ ID NO: 2264780 - RNA, 11 nt, Human
gugggcccagg

SEQ ID NO: 2264781 - RNA, 17 nt, Human
gugggccagucugugga

SEQ ID NO: 2264782 - RNA, 18 nt, Human
gugggccagucuguggau

SEQ ID NO: 2264783 - RNA, 18 nt, Human
gugggcccuccgacagcc

SEQ ID NO: 2264784 - RNA, 22 nt, Human
gugggcccaggaccagcugggg

SEQ ID NO: 2264785 - RNA, 23 nt, Human
gugggcccaggaccagcuggggc

SEQ ID NO: 2264786 - RNA, 14 nt, Human
gugggcccaggacc

SEQ ID NO: 2264787 - RNA, 19 nt, Human
gugggcccaggaccagcug

SEQ ID NO: 2264788 - RNA, 20 nt, Human
gugggcccaggaccagcugg

SEQ ID NO: 2264789 - RNA, 21 nt, Human
gugggcccaggaccagcuggg

SEQ ID NO: 2264790 - RNA, 19 nt, Human
gugggccucaaggacuuga

SEQ ID NO: 2264791 - RNA, 11 nt, Human
gugggccucug

SEQ ID NO: 2264792 - RNA, 23 nt, Human
gugggccuccucuguccagggcc

SEQ ID NO: 2264793 - RNA, 20 nt, Human
gugggccuccucuguccagg

SEQ ID NO: 2264794 - RNA, 15 nt, Human
gugggccuccucugu

SEQ ID NO: 2264795 - RNA, 13 nt, Human
gugggccuggcca

SEQ ID NO: 2264796 - RNA, 23 nt, Human
gugggccucugguuuggggcgag

SEQ ID NO: 2264797 - RNA, 12 nt, Human
gugggccucugg

SEQ ID NO: 2264798 - RNA, 22 nt, Human
gugggccucugguuuggggcga

SEQ ID NO: 2264799 - RNA, 17 nt, Human
gugggccagccccuccc

SEQ ID NO: 2264800 - RNA, 15 nt, Human
gugggccagccccuc

SEQ ID NO: 2264801 - RNA, 13 nt, Human
gugggccagcccc

SEQ ID NO: 2264802 - RNA, 12 nt, Human
gugggccagccc

SEQ ID NO: 2264803 - RNA, 20 nt, Human
gugggcauugauggggaagg

SEQ ID NO: 2264804 - RNA, 17 nt, Human
gugggccaacaaagaac

SEQ ID NO: 2264805 - RNA, 20 nt, Human
gugggcaggugggagcuuga

SEQ ID NO: 2264806 - RNA, 17 nt, Human
gugggcaggugguggca

SEQ ID NO: 2264807 - RNA, 18 nt, Human
gugggcaggugguggcac

SEQ ID NO: 2264808 - RNA, 18 nt, Human
gugggccaggacaggccc

SEQ ID NO: 2264809 - RNA, 14 nt, Human
gugggccaggacag

SEQ ID NO: 2264810 - RNA, 19 nt, Human
gugggccagccccucccac

SEQ ID NO: 2264811 - RNA, 15 nt, Human
gugggccagucugug

SEQ ID NO: 2264812 - RNA, 16 nt, Human
gugggccagucugugg

SEQ ID NO: 2264813 - RNA, 17 nt, Human
gugggcccaaugcacuu

SEQ ID NO: 2264814 - RNA, 15 nt, Human
guguacuuaacuauu

SEQ ID NO: 2264815 - RNA, 16 nt, Human
guguacguggagaggg

SEQ ID NO: 2264816 - RNA, 20 nt, Human
guguacguggagagggauga

SEQ ID NO: 2264817 - RNA, 22 nt, Human
guguacauggaauaacauguaa

SEQ ID NO: 2264818 - RNA, 17 nt, Human
guguacccccgcccagg

SEQ ID NO: 2264819 - RNA, 17 nt, Human
guguaccauuugccucc

SEQ ID NO: 2264820 - RNA, 19 nt, Human
guguacccccgcccaggcu

SEQ ID NO: 2264821 - RNA, 15 nt, Human
guguagaguuaagaa

SEQ ID NO: 2264822 - RNA, 19 nt, Human
guguagaagcauuccuucu

SEQ ID NO: 2264823 - RNA, 23 nt, Human
guguagaagcauuccuucuuuga

SEQ ID NO: 2264824 - RNA, 13 nt, Human
guguagaagcauu

SEQ ID NO: 2264825 - RNA, 14 nt, Human
guguagaagcauuc

SEQ ID NO: 2264826 - RNA, 17 nt, Human
guguagaagcauuccuu

SEQ ID NO: 2264827 - RNA, 20 nt, Human
guguagaguuaagaagcugu

SEQ ID NO: 2264828 - RNA, 17 nt, Human
guguagaguuaagaagc

SEQ ID NO: 2264829 - RNA, 18 nt, Human
guguagaguuaagaagcu

SEQ ID NO: 2264830 - RNA, 14 nt, Human
guguagccaagguc

SEQ ID NO: 2264831 - RNA, 17 nt, Human
guguagccuugcccgga

SEQ ID NO: 2264832 - RNA, 16 nt, Human
guguagccuugcccgg

SEQ ID NO: 2264833 - RNA, 14 nt, Human
guguagccugugca

SEQ ID NO: 2264834 - RNA, 13 nt, Human
guguacagucuug

SEQ ID NO: 2264835 - RNA, 16 nt, Human
guguacagucuuguau

SEQ ID NO: 2264836 - RNA, 22 nt, Human
guguacagucuuguauuaaguu

SEQ ID NO: 2264837 - RNA, 12 nt, Human
guguacagugug

SEQ ID NO: 2264838 - RNA, 14 nt, Human
guguacauaacuga

SEQ ID NO: 2264839 - RNA, 17 nt, Human
guguacauggaauaaca

SEQ ID NO: 2264840 - RNA, 16 nt, Human
guguacauaacugaaa

SEQ ID NO: 2264841 - RNA, 12 nt, Human
guguacauaugu

SEQ ID NO: 2264842 - RNA, 15 nt, Human
guguacauaugugcu

SEQ ID NO: 2264843 - RNA, 19 nt, Human
guguacaucccauguaaca

SEQ ID NO: 2264844 - RNA, 22 nt, Human
guguacaucccauguaacagaa

SEQ ID NO: 2264845 - RNA, 23 nt, Human
guguaaucauuucuugggcccuc

SEQ ID NO: 2264846 - RNA, 20 nt, Human
guguaauuuaaaauugugau

SEQ ID NO: 2264847 - RNA, 23 nt, Human
guguaauuuaaaauugugaugug

SEQ ID NO: 2264848 - RNA, 22 nt, Human
guguaauuuaaaauugugaugu

SEQ ID NO: 2264849 - RNA, 18 nt, Human
guguacagaauucugcua

SEQ ID NO: 2264850 - RNA, 15 nt, Human
guguacacgggacug

SEQ ID NO: 2264851 - RNA, 21 nt, Human
guguacacgggacugacgcaa

SEQ ID NO: 2264852 - RNA, 19 nt, Human
guguacacugacaccuuug

SEQ ID NO: 2264853 - RNA, 23 nt, Human
guguaauuuuguucuaguuuuca

SEQ ID NO: 2264854 - RNA, 13 nt, Human
guguacaaagaaa

SEQ ID NO: 2264855 - RNA, 13 nt, Human
guguaauuucuuu

SEQ ID NO: 2264856 - RNA, 15 nt, Human
guguaauuucuuugc

SEQ ID NO: 2264857 - RNA, 19 nt, Human
guguaugcuacuacaaaaa

SEQ ID NO: 2264858 - RNA, 20 nt, Human
guguauggagagaaaacaga

SEQ ID NO: 2264859 - RNA, 19 nt, Human
guguauggaaauaaaugua

SEQ ID NO: 2264860 - RNA, 16 nt, Human
guguaugugcgugugu

SEQ ID NO: 2264861 - RNA, 22 nt, Human
guguauggguguguguuugugu

SEQ ID NO: 2264862 - RNA, 16 nt, Human
guguaugggugugugu

SEQ ID NO: 2264863 - RNA, 23 nt, Human
gugucccaugacccaccccugug

SEQ ID NO: 2264864 - RNA, 19 nt, Human
gugucccaugacccacccc

SEQ ID NO: 2264865 - RNA, 21 nt, Human
gugucccaugacccaccccug

SEQ ID NO: 2264866 - RNA, 22 nt, Human
gugucccaugacccaccccugu

SEQ ID NO: 2264867 - RNA, 13 nt, Human
guguccccuccac

SEQ ID NO: 2264868 - RNA, 14 nt, Human
gugucccccucugu

SEQ ID NO: 2264869 - RNA, 18 nt, Human
gugucccccucuguccag

SEQ ID NO: 2264870 - RNA, 13 nt, Human
gugucccugcacu

SEQ ID NO: 2264871 - RNA, 16 nt, Human
gugucccugcacuugc

SEQ ID NO: 2264872 - RNA, 18 nt, Human
gugucccugcacuugcag

SEQ ID NO: 2264873 - RNA, 15 nt, Human
guguaggcagacaca

SEQ ID NO: 2264874 - RNA, 17 nt, Human
guguaguugaacugaua

SEQ ID NO: 2264875 - RNA, 15 nt, Human
guguaguugaacuga

SEQ ID NO: 2264876 - RNA, 18 nt, Human
guguauagaaguagauua

SEQ ID NO: 2264877 - RNA, 14 nt, Human
guguagcuuugcuc

SEQ ID NO: 2264878 - RNA, 12 nt, Human
guguaggcagac

SEQ ID NO: 2264879 - RNA, 13 nt, Human
guguaggcagaca

SEQ ID NO: 2264880 - RNA, 14 nt, Human
guguaggcagacac

SEQ ID NO: 2264881 - RNA, 16 nt, Human
guguaugacuaaagag

SEQ ID NO: 2264882 - RNA, 18 nt, Human
guguaucguaaccagcca

SEQ ID NO: 2264883 - RNA, 15 nt, Human
guguaugacuaaaga

SEQ ID NO: 2264884 - RNA, 13 nt, Human
guguauccugggg

SEQ ID NO: 2264885 - RNA, 14 nt, Human
guguauccuggggc

SEQ ID NO: 2264886 - RNA, 15 nt, Human
guguauccuggggcu

SEQ ID NO: 2264887 - RNA, 20 nt, Human
guguauccuggggcucccuu

SEQ ID NO: 2264888 - RNA, 16 nt, Human
guguauccauuaucau

SEQ ID NO: 2264889 - RNA, 20 nt, Human
guguauccauuaucaugugu

SEQ ID NO: 2264890 - RNA, 22 nt, Human
guguauccauuaucauguguaa

SEQ ID NO: 2264891 - RNA, 23 nt, Human
guguauccauuaucauguguaau

SEQ ID NO: 2264892 - RNA, 21 nt, Human
guguauccccccccuguauag

SEQ ID NO: 2264893 - RNA, 22 nt, Human
guguauccccccccuguauagu

SEQ ID NO: 2264894 - RNA, 14 nt, Human
guguauauguaugu

SEQ ID NO: 2264895 - RNA, 14 nt, Human
guguauacaugcca

SEQ ID NO: 2264896 - RNA, 13 nt, Human
guguauaucagaa

SEQ ID NO: 2264897 - RNA, 17 nt, Human
guguauauguaugugug

SEQ ID NO: 2264898 - RNA, 14 nt, Human
gugguauagaaaug

SEQ ID NO: 2264899 - RNA, 16 nt, Human
gugguauccugugaca

SEQ ID NO: 2264900 - RNA, 19 nt, Human
gugguaugaucacggcuca

SEQ ID NO: 2264901 - RNA, 15 nt, Human
gugguaugugugugu

SEQ ID NO: 2264902 - RNA, 12 nt, Human
gugguaugugug

SEQ ID NO: 2264903 - RNA, 20 nt, Human
gugguauccugugacaugua

SEQ ID NO: 2264904 - RNA, 22 nt, Human
guggucaaaccgcacucaccca

SEQ ID NO: 2264905 - RNA, 15 nt, Human
guggucacagcggag

SEQ ID NO: 2264906 - RNA, 16 nt, Human
guggucacagcggagg

SEQ ID NO: 2264907 - RNA, 18 nt, Human
guggucacagcggaggug

SEQ ID NO: 2264908 - RNA, 22 nt, Human
guggucacagcggaggugugga

SEQ ID NO: 2264909 - RNA, 20 nt, Human
gugguacacacagauuacug

SEQ ID NO: 2264910 - RNA, 16 nt, Human
gugguaagcucuggcu

SEQ ID NO: 2264911 - RNA, 17 nt, Human
gugguagagugugccug

SEQ ID NO: 2264912 - RNA, 14 nt, Human
gugguacccucugg

SEQ ID NO: 2264913 - RNA, 18 nt, Human
guggucugaauguucuga

SEQ ID NO: 2264914 - RNA, 17 nt, Human
guggucugaauguucug

SEQ ID NO: 2264915 - RNA, 14 nt, Human
guggucugaauguu

SEQ ID NO: 2264916 - RNA, 13 nt, Human
guggucugaaugu

SEQ ID NO: 2264917 - RNA, 15 nt, Human
gugguccugagaccu

SEQ ID NO: 2264918 - RNA, 17 nt, Human
guggucuccuuggaaau

SEQ ID NO: 2264919 - RNA, 12 nt, Human
gugguccugacu

SEQ ID NO: 2264920 - RNA, 13 nt, Human
gugguccccaaca

SEQ ID NO: 2264921 - RNA, 23 nt, Human
guggucccaacaggaggacaauu

SEQ ID NO: 2264922 - RNA, 24 nt, Human
guggucccaacaggaggacaauuc

SEQ ID NO: 2264923 - RNA, 18 nt, Human
guggucuccacuggggau

SEQ ID NO: 2264924 - RNA, 17 nt, Human
guggucccaccccacac

SEQ ID NO: 2264925 - RNA, 18 nt, Human
gugguccuaaucuucuga

SEQ ID NO: 2264926 - RNA, 16 nt, Human
guggucauuaagcauu

SEQ ID NO: 2264927 - RNA, 22 nt, Human
guggucaggcguagaucaccag

SEQ ID NO: 2264928 - RNA, 18 nt, Human
gugguccauggaaugcuu

SEQ ID NO: 2264929 - RNA, 14 nt, Human
guggucacugcugu

SEQ ID NO: 2264930 - RNA, 15 nt, Human
guggucacugcuguc

SEQ ID NO: 2264931 - RNA, 14 nt, Human
guggucccacccca

SEQ ID NO: 2264932 - RNA, 15 nt, Human
guggucccaccccac

SEQ ID NO: 2264933 - RNA, 16 nt, Human
guggucccaccccaca

SEQ ID NO: 2264934 - RNA, 21 nt, Human
guguaaucauuucuugggccc

SEQ ID NO: 2264935 - RNA, 19 nt, Human
guguaaucauuucuugggc

SEQ ID NO: 2264936 - RNA, 17 nt, Human
guguaaucaauaaacga

SEQ ID NO: 2264937 - RNA, 19 nt, Human
guguaaucaauaaacgauu

SEQ ID NO: 2264938 - RNA, 14 nt, Human
guguaauaagacau

SEQ ID NO: 2264939 - RNA, 14 nt, Human
guguaaucaauaaa

SEQ ID NO: 2264940 - RNA, 15 nt, Human
guguaaucaauaaac

SEQ ID NO: 2264941 - RNA, 16 nt, Human
guguaaucaauaaacg

SEQ ID NO: 2264942 - RNA, 22 nt, Human
guguaagugugaguaagagcug

SEQ ID NO: 2264943 - RNA, 13 nt, Human
guguaauaagaca

SEQ ID NO: 2264944 - RNA, 15 nt, Human
guguaauaagacaua

SEQ ID NO: 2264945 - RNA, 21 nt, Human
guguaaguauucuuauuuaau

SEQ ID NO: 2264946 - RNA, 21 nt, Human
guguaaguagauaggccaugg

SEQ ID NO: 2264947 - RNA, 19 nt, Human
guggugcgaucuggguuca

SEQ ID NO: 2264948 - RNA, 13 nt, Human
guggugagaucau

SEQ ID NO: 2264949 - RNA, 19 nt, Human
guggugaucaauuaaaugu

SEQ ID NO: 2264950 - RNA, 23 nt, Human
guggugagcagaaguggagcugg

SEQ ID NO: 2264951 - RNA, 16 nt, Human
guggucugcaggcagg

SEQ ID NO: 2264952 - RNA, 18 nt, Human
guggucugcucgggccca

SEQ ID NO: 2264953 - RNA, 15 nt, Human
guggucugcaggcag

SEQ ID NO: 2264954 - RNA, 24 nt, Human
guggucugaauguucugacauuaa

SEQ ID NO: 2264955 - RNA, 14 nt, Human
guggucugcaggca

SEQ ID NO: 2264956 - RNA, 23 nt, Human
guggucugaauguucugacauua

SEQ ID NO: 2264957 - RNA, 20 nt, Human
guggucugaauguucugaca

SEQ ID NO: 2264958 - RNA, 13 nt, Human
guggucuguuggc

SEQ ID NO: 2264959 - RNA, 19 nt, Human
guggucugcucgggcccag

SEQ ID NO: 2264960 - RNA, 22 nt, Human
guggucugcucgggcccaggcc

SEQ ID NO: 2264961 - RNA, 17 nt, Human
guggucuguuggcaggc

SEQ ID NO: 2264962 - RNA, 19 nt, Human
guggucuguuggcaggcug

SEQ ID NO: 2264963 - RNA, 17 nt, Human
guggucuuucuggagag

SEQ ID NO: 2264964 - RNA, 16 nt, Human
guggucuuucuggaga

SEQ ID NO: 2264965 - RNA, 15 nt, Human
guggucuuuguaaga

SEQ ID NO: 2264966 - RNA, 19 nt, Human
guggucuuuguaagagugu

SEQ ID NO: 2264967 - RNA, 15 nt, Human
guggugaagaaaacu

SEQ ID NO: 2264968 - RNA, 20 nt, Human
guggucuguuggcaggcugg

SEQ ID NO: 2264969 - RNA, 21 nt, Human
guggucuguuggcaggcuggc

SEQ ID NO: 2264970 - RNA, 22 nt, Human
guggucuguuggcaggcuggcc

SEQ ID NO: 2264971 - RNA, 23 nt, Human
guggucuguuggcaggcuggcca

SEQ ID NO: 2264972 - RNA, 14 nt, Human
guggugaccucugc

SEQ ID NO: 2264973 - RNA, 17 nt, Human
guggugaccucugccug

SEQ ID NO: 2264974 - RNA, 21 nt, Human
guggugagaggcauccaguau

SEQ ID NO: 2264975 - RNA, 15 nt, Human
guguuuuuaacucaa

SEQ ID NO: 2264976 - RNA, 18 nt, Human
guguuuuucauaaagcag

SEQ ID NO: 2264977 - RNA, 14 nt, Human
guguuuuuguaaag

SEQ ID NO: 2264978 - RNA, 15 nt, Human
guguuuuugaaauau

SEQ ID NO: 2264979 - RNA, 19 nt, Human
guguuuuucugcuuuugaa

SEQ ID NO: 2264980 - RNA, 21 nt, Human
guguuuuuguaaagugugguc

SEQ ID NO: 2264981 - RNA, 14 nt, Human
guguuuuucugcuu

SEQ ID NO: 2264982 - RNA, 14 nt, Human
guguuuucauaaua

SEQ ID NO: 2264983 - RNA, 13 nt, Human
guguuuucauaau

SEQ ID NO: 2264984 - RNA, 15 nt, Human
guguuuuaauuuaaa

SEQ ID NO: 2264985 - RNA, 18 nt, Human
guguucuggugaggccuu

SEQ ID NO: 2264986 - RNA, 16 nt, Human
guguucugauuagaaa

SEQ ID NO: 2264987 - RNA, 14 nt, Human
guguucucucuuau

SEQ ID NO: 2264988 - RNA, 14 nt, Human
guguuuuaauuuaa

SEQ ID NO: 2264989 - RNA, 16 nt, Human
guguuuucauaauaaa

SEQ ID NO: 2264990 - RNA, 15 nt, Human
guguuuucauaauaa

SEQ ID NO: 2264991 - RNA, 13 nt, Human
guguuuucugaau

SEQ ID NO: 2264992 - RNA, 19 nt, Human
guguuuucugaauaacauu

SEQ ID NO: 2264993 - RNA, 12 nt, Human
guguuuugcugu

SEQ ID NO: 2264994 - RNA, 18 nt, Human
guguuuucugaauaacau

SEQ ID NO: 2264995 - RNA, 23 nt, Human
guguucaaggccauccuucccug

SEQ ID NO: 2264996 - RNA, 17 nt, Human
guguuauuuaaagaaga

SEQ ID NO: 2264997 - RNA, 17 nt, Human
guguuauuuaaaugagu

SEQ ID NO: 2264998 - RNA, 16 nt, Human
guguuauuuaaagaag

SEQ ID NO: 2264999 - RNA, 15 nt, Human
guguuccaacaacca

SEQ ID NO: 2265000 - RNA, 17 nt, Human
guguucccauuucagcu

SEQ ID NO: 2265001 - RNA, 19 nt, Human
guguuccccaucugggucc

SEQ ID NO: 2265002 - RNA, 12 nt, Human
guguucauacau

SEQ ID NO: 2265003 - RNA, 17 nt, Human
guguucauacauuugag

SEQ ID NO: 2265004 - RNA, 18 nt, Human
guguuccuggcaauagug

SEQ ID NO: 2265005 - RNA, 15 nt, Human
guguuccuggcaaua

SEQ ID NO: 2265006 - RNA, 10 nt, Human
guguuccugg

SEQ ID NO: 2265007 - RNA, 23 nt, Human
guguuccccuuccacugagggca

SEQ ID NO: 2265008 - RNA, 22 nt, Human
guguuccccuuccacugagggc

SEQ ID NO: 2265009 - RNA, 19 nt, Human
guguuccccuuccacugag

SEQ ID NO: 2265010 - RNA, 18 nt, Human
guguuccccuuccacuga

SEQ ID NO: 2265011 - RNA, 21 nt, Human
guguucccauuucagcugauc

SEQ ID NO: 2265012 - RNA, 19 nt, Human
guguuccuggcaguuuaaa

SEQ ID NO: 2265013 - RNA, 11 nt, Human
guguucuccuu

SEQ ID NO: 2265014 - RNA, 16 nt, Human
guguucuccuuuuccu

SEQ ID NO: 2265015 - RNA, 18 nt, Human
guguguuuucauaauaaa

SEQ ID NO: 2265016 - RNA, 20 nt, Human
guguguuuugagaguauauu

SEQ ID NO: 2265017 - RNA, 21 nt, Human
guguguuuugagaguauauua

SEQ ID NO: 2265018 - RNA, 17 nt, Human
guguguuuucauaauaa

SEQ ID NO: 2265019 - RNA, 14 nt, Human
guguguuuguguga

SEQ ID NO: 2265020 - RNA, 19 nt, Human
guguguuuuaaaaugagaa

SEQ ID NO: 2265021 - RNA, 13 nt, Human
guguguuuuaaaa

SEQ ID NO: 2265022 - RNA, 16 nt, Human
guguguuuuaaaauga

SEQ ID NO: 2265023 - RNA, 19 nt, Human
guguuaaaugaaauuguaa

SEQ ID NO: 2265024 - RNA, 21 nt, Human
guguuaaaugugaugaauacu

SEQ ID NO: 2265025 - RNA, 14 nt, Human
guguguuuuucaua

SEQ ID NO: 2265026 - RNA, 18 nt, Human
guguuaaucaauuuaaac

SEQ ID NO: 2265027 - RNA, 16 nt, Human
guguuaaucauuucau

SEQ ID NO: 2265028 - RNA, 15 nt, Human
guguuaaucaauuua

SEQ ID NO: 2265029 - RNA, 19 nt, Human
guguuaauacuaguuguga

SEQ ID NO: 2265030 - RNA, 14 nt, Human
guguuacuaaguuu

SEQ ID NO: 2265031 - RNA, 16 nt, Human
guguuaccugaaaaca

SEQ ID NO: 2265032 - RNA, 23 nt, Human
guguuacccaguaacucaucugu

SEQ ID NO: 2265033 - RNA, 12 nt, Human
guguuacuaagu

SEQ ID NO: 2265034 - RNA, 20 nt, Human
guguuauaauggguaauaua

SEQ ID NO: 2265035 - RNA, 24 nt, Human
guguuaggccuggcacagugucug

SEQ ID NO: 2265036 - RNA, 12 nt, Human
guguuaguuccc

SEQ ID NO: 2265037 - RNA, 23 nt, Human
guguuagggaagggccugccaca

SEQ ID NO: 2265038 - RNA, 18 nt, Human
guguuaugacuccagaau

SEQ ID NO: 2265039 - RNA, 15 nt, Human
guguuacuguaauuc

SEQ ID NO: 2265040 - RNA, 14 nt, Human
guguuaggccuggc

SEQ ID NO: 2265041 - RNA, 19 nt, Human
guguuacuguaauuccuca

SEQ ID NO: 2265042 - RNA, 22 nt, Human
guguuagggaagggccugccac

SEQ ID NO: 2265043 - RNA, 16 nt, Human
guguuagggaagggcc

SEQ ID NO: 2265044 - RNA, 15 nt, Human
guguuaggccuggca

SEQ ID NO: 2265045 - RNA, 18 nt, Human
guguuaggccuggcacag

SEQ ID NO: 2265046 - RNA, 19 nt, Human
guguuaggccuggcacagu

SEQ ID NO: 2265047 - RNA, 21 nt, Human
guguuaggccuggcacagugu

SEQ ID NO: 2265048 - RNA, 21 nt, Human
guuaacuauuuuauuuucuaa

SEQ ID NO: 2265049 - RNA, 20 nt, Human
guuaaccagaauaaaguucu

SEQ ID NO: 2265050 - RNA, 17 nt, Human
guuaaccucagugucau

SEQ ID NO: 2265051 - RNA, 23 nt, Human
guuaacagagacagauaacucuc

SEQ ID NO: 2265052 - RNA, 12 nt, Human
guuaacagauuu

SEQ ID NO: 2265053 - RNA, 19 nt, Human
guuaacacauuuuguauaa

SEQ ID NO: 2265054 - RNA, 23 nt, Human
guuaacacauuuuguauaauugu

SEQ ID NO: 2265055 - RNA, 13 nt, Human
guuaacacauuuu

SEQ ID NO: 2265056 - RNA, 15 nt, Human
guuaacacauuuugu

SEQ ID NO: 2265057 - RNA, 16 nt, Human
guuaacacauuuugua

SEQ ID NO: 2265058 - RNA, 18 nt, Human
guuaacacauuuuguaua

SEQ ID NO: 2265059 - RNA, 22 nt, Human
guuaaauauuuacauaugaaau

SEQ ID NO: 2265060 - RNA, 16 nt, Human
guuaaauauuuacaua

SEQ ID NO: 2265061 - RNA, 15 nt, Human
guuaaauauuuacau

SEQ ID NO: 2265062 - RNA, 13 nt, Human
guuaaauauuuac

SEQ ID NO: 2265063 - RNA, 15 nt, Human
guuaaaugaaauugu

SEQ ID NO: 2265064 - RNA, 17 nt, Human
guuaaaugaaauuguaa

SEQ ID NO: 2265065 - RNA, 18 nt, Human
guuaaaugaaauuguaaa

SEQ ID NO: 2265066 - RNA, 20 nt, Human
guuaaaugaaauuguaaaac

SEQ ID NO: 2265067 - RNA, 19 nt, Human
guuaaauuuguaaguuuca

SEQ ID NO: 2265068 - RNA, 23 nt, Human
guuaaauuuguaaguuucaggug

SEQ ID NO: 2265069 - RNA, 12 nt, Human
guuaacacauuu

SEQ ID NO: 2265070 - RNA, 14 nt, Human
guuaacaaugauau

SEQ ID NO: 2265071 - RNA, 17 nt, Human
guuaaauugcuguguau

SEQ ID NO: 2265072 - RNA, 17 nt, Human
guuaaauuucuggaccu

SEQ ID NO: 2265073 - RNA, 13 nt, Human
guuaaauuuguaa

SEQ ID NO: 2265074 - RNA, 14 nt, Human
guuaaauuuguaag

SEQ ID NO: 2265075 - RNA, 15 nt, Human
guuaaauuuguaagu

SEQ ID NO: 2265076 - RNA, 16 nt, Human
guuaaauuuguaaguu

SEQ ID NO: 2265077 - RNA, 17 nt, Human
guuaaauuuguaaguuu

SEQ ID NO: 2265078 - RNA, 18 nt, Human
guuaaauuuguaaguuuc

SEQ ID NO: 2265079 - RNA, 16 nt, Human
guuacacauuuuucag

SEQ ID NO: 2265080 - RNA, 23 nt, Human
guuaacuuuaagacugagcaccu

SEQ ID NO: 2265081 - RNA, 13 nt, Human
guuaagaagcugu

SEQ ID NO: 2265082 - RNA, 17 nt, Human
guuaacuuuaagacuga

SEQ ID NO: 2265083 - RNA, 18 nt, Human
guuaacugagugccuuuu

SEQ ID NO: 2265084 - RNA, 16 nt, Human
guuacacuaaaaggug

SEQ ID NO: 2265085 - RNA, 15 nt, Human
guuacacuaaaaggu

SEQ ID NO: 2265086 - RNA, 17 nt, Human
guuacacauuuuucaga

SEQ ID NO: 2265087 - RNA, 22 nt, Human
guuacacuggaggagagaagaa

SEQ ID NO: 2265088 - RNA, 23 nt, Human
guuacacuggaggagagaagaau

SEQ ID NO: 2265089 - RNA, 13 nt, Human
guuacacuugugc

SEQ ID NO: 2265090 - RNA, 12 nt, Human
guuacagaaagu

SEQ ID NO: 2265091 - RNA, 13 nt, Human
guuacagacaaag

SEQ ID NO: 2265092 - RNA, 13 nt, Human
guuacagaaagug

SEQ ID NO: 2265093 - RNA, 19 nt, Human
guuacagaaaguggugcuc

SEQ ID NO: 2265094 - RNA, 21 nt, Human
guuacagaaaguggugcucag

SEQ ID NO: 2265095 - RNA, 22 nt, Human
guuacagaaaguggugcucagu

SEQ ID NO: 2265096 - RNA, 19 nt, Human
guuaaacuuacuuaguguu

SEQ ID NO: 2265097 - RNA, 15 nt, Human
guuaaagcugccggc

SEQ ID NO: 2265098 - RNA, 17 nt, Human
guuaaacucgcucacug

SEQ ID NO: 2265099 - RNA, 23 nt, Human
guuaaacuagcauaucugccuuu

SEQ ID NO: 2265100 - RNA, 15 nt, Human
guuaaaauuccaucc

SEQ ID NO: 2265101 - RNA, 21 nt, Human
guuaaaccauccauguauuuu

SEQ ID NO: 2265102 - RNA, 15 nt, Human
guuaaacuagcauau

SEQ ID NO: 2265103 - RNA, 19 nt, Human
guuaaacuagcauaucugc

SEQ ID NO: 2265104 - RNA, 20 nt, Human
guuaaacuagcauaucugcc

SEQ ID NO: 2265105 - RNA, 21 nt, Human
guuaaacuagcauaucugccu

SEQ ID NO: 2265106 - RNA, 22 nt, Human
guuaaacuagcauaucugccuu

SEQ ID NO: 2265107 - RNA, 12 nt, Human
guuaaauauuua

SEQ ID NO: 2265108 - RNA, 21 nt, Human
guuaaauagaguauaugcacu

SEQ ID NO: 2265109 - RNA, 19 nt, Human
guuaaauagaguauaugca

SEQ ID NO: 2265110 - RNA, 20 nt, Human
guuaaauagaguauaugcac

SEQ ID NO: 2265111 - RNA, 22 nt, Human
guuaaauaaauuguauauucac

SEQ ID NO: 2265112 - RNA, 20 nt, Human
guuaaauaaauuguauauuc

SEQ ID NO: 2265113 - RNA, 21 nt, Human
guuaaauaaauuguauauuca

SEQ ID NO: 2265114 - RNA, 20 nt, Human
guuaaagucagugggaacgu

SEQ ID NO: 2265115 - RNA, 13 nt, Human
guuaaaggaaaaa

SEQ ID NO: 2265116 - RNA, 23 nt, Human
guuaaaggcucgauuuuguaucu

SEQ ID NO: 2265117 - RNA, 13 nt, Human
guuaaauaaauug

SEQ ID NO: 2265118 - RNA, 17 nt, Human
guuaaauaaauuguaua

SEQ ID NO: 2265119 - RNA, 18 nt, Human
guuaaauaaauuguauau

SEQ ID NO: 2265120 - RNA, 19 nt, Human
guuaaauaaauuguauauu

SEQ ID NO: 2265121 - RNA, 12 nt, Human
guuaaaacuguc

SEQ ID NO: 2265122 - RNA, 14 nt, Human
guuaaaagagguuu

SEQ ID NO: 2265123 - RNA, 20 nt, Human
guuaaaaaaaggcauuguuu

SEQ ID NO: 2265124 - RNA, 16 nt, Human
guuaaaagaugaaaau

SEQ ID NO: 2265125 - RNA, 14 nt, Human
guuaaaagaugaaa

SEQ ID NO: 2265126 - RNA, 21 nt, Human
guuaaaauaacuaguguugcu

SEQ ID NO: 2265127 - RNA, 21 nt, Human
guuaaaagagguuuuucuuaa

SEQ ID NO: 2265128 - RNA, 20 nt, Human
guuaaaagagguuuuucuua

SEQ ID NO: 2265129 - RNA, 14 nt, Human
guuaaacauugaag

SEQ ID NO: 2265130 - RNA, 22 nt, Human
guuaaaauaccagccaguaaau

SEQ ID NO: 2265131 - RNA, 20 nt, Human
guuaaaagaugaaaauauuu

SEQ ID NO: 2265132 - RNA, 13 nt, Human
gugugcucuucuu

SEQ ID NO: 2265133 - RNA, 17 nt, Human
gugugcucuucuucuuu

SEQ ID NO: 2265134 - RNA, 14 nt, Human
gugugcuggaggac

SEQ ID NO: 2265135 - RNA, 11 nt, Human
gugugcuggga

SEQ ID NO: 2265136 - RNA, 19 nt, Human
guguggaaauuaagaagaa

SEQ ID NO: 2265137 - RNA, 22 nt, Human
gugugcuuuaugcugaaacaga

SEQ ID NO: 2265138 - RNA, 18 nt, Human
gugugcuuuaugcugaaa

SEQ ID NO: 2265139 - RNA, 12 nt, Human
gugugcugggag

SEQ ID NO: 2265140 - RNA, 19 nt, Human
gugugcugggagcuccacu

SEQ ID NO: 2265141 - RNA, 15 nt, Human
gugugcucugaucau

SEQ ID NO: 2265142 - RNA, 22 nt, Human
gugugcucugaucauccacugu

SEQ ID NO: 2265143 - RNA, 12 nt, Human
gugugcucugau

SEQ ID NO: 2265144 - RNA, 16 nt, Human
gugugcguguuugcac

SEQ ID NO: 2265145 - RNA, 18 nt, Human
gugugcucaggagcccug

SEQ ID NO: 2265146 - RNA, 19 nt, Human
gugugcucaggagcccugg

SEQ ID NO: 2265147 - RNA, 18 nt, Human
gugugccugcagccccgc

SEQ ID NO: 2265148 - RNA, 13 nt, Human
gugugccugucug

SEQ ID NO: 2265149 - RNA, 22 nt, Human
gugugccugucuguuacacugg

SEQ ID NO: 2265150 - RNA, 16 nt, Human
gugugcucaggagccc

SEQ ID NO: 2265151 - RNA, 17 nt, Human
gugugcucaggagcccu

SEQ ID NO: 2265152 - RNA, 16 nt, Human
gugugccugcagcccc

SEQ ID NO: 2265153 - RNA, 15 nt, Human
gugugccugcagccc

SEQ ID NO: 2265154 - RNA, 14 nt, Human
gugugccugcagcc

SEQ ID NO: 2265155 - RNA, 13 nt, Human
gugugccugcagc

SEQ ID NO: 2265156 - RNA, 16 nt, Human
gugugccccccauccu

SEQ ID NO: 2265157 - RNA, 17 nt, Human
gugugccccccauccug

SEQ ID NO: 2265158 - RNA, 18 nt, Human
gugugccccccauccugg

SEQ ID NO: 2265159 - RNA, 19 nt, Human
gugugccccccauccuggc

SEQ ID NO: 2265160 - RNA, 20 nt, Human
gugugccccccauccuggcc

SEQ ID NO: 2265161 - RNA, 21 nt, Human
gugugccccccauccuggccc

SEQ ID NO: 2265162 - RNA, 22 nt, Human
gugugccccccauccuggccca

SEQ ID NO: 2265163 - RNA, 23 nt, Human
gugugccccccauccuggcccau

SEQ ID NO: 2265164 - RNA, 15 nt, Human
guguggcugaggagg

SEQ ID NO: 2265165 - RNA, 20 nt, Human
guguggcugaggaggccucc

SEQ ID NO: 2265166 - RNA, 16 nt, Human
gugugggaagggagag

SEQ ID NO: 2265167 - RNA, 13 nt, Human
gugugggaaggga

SEQ ID NO: 2265168 - RNA, 14 nt, Human
gugugggcuguguc

SEQ ID NO: 2265169 - RNA, 17 nt, Human
gugugggaguguguaau

SEQ ID NO: 2265170 - RNA, 19 nt, Human
guguggcucacguguguga

SEQ ID NO: 2265171 - RNA, 14 nt, Human
guguggcccugcca

SEQ ID NO: 2265172 - RNA, 15 nt, Human
guguggccccuucac

SEQ ID NO: 2265173 - RNA, 12 nt, Human
guguggcagugg

SEQ ID NO: 2265174 - RNA, 15 nt, Human
guguggcuccccucu

SEQ ID NO: 2265175 - RNA, 13 nt, Human
guguggcugagga

SEQ ID NO: 2265176 - RNA, 14 nt, Human
guguggcuccuucc

SEQ ID NO: 2265177 - RNA, 14 nt, Human
guguggcagugguu

SEQ ID NO: 2265178 - RNA, 13 nt, Human
guguggagaagcg

SEQ ID NO: 2265179 - RNA, 15 nt, Human
guguggacugugaug

SEQ ID NO: 2265180 - RNA, 18 nt, Human
guguggacucaaguccuu

SEQ ID NO: 2265181 - RNA, 20 nt, Human
guguggaaauuaagaagaaa

SEQ ID NO: 2265182 - RNA, 16 nt, Human
guguggacugugaugc

SEQ ID NO: 2265183 - RNA, 22 nt, Human
guguggagaagccacaggccug

SEQ ID NO: 2265184 - RNA, 23 nt, Human
guguggagaagccacaggccuga

SEQ ID NO: 2265185 - RNA, 21 nt, Human
guguggagaagcggcuggcag

SEQ ID NO: 2265186 - RNA, 14 nt, Human
guguguuugugauu

SEQ ID NO: 2265187 - RNA, 22 nt, Human
guguguuuaaauaaaguaucau

SEQ ID NO: 2265188 - RNA, 14 nt, Human
guguguuucacuuu

SEQ ID NO: 2265189 - RNA, 16 nt, Human
guguguuuaugugugu

SEQ ID NO: 2265190 - RNA, 12 nt, Human
guguguuuuaaa

SEQ ID NO: 2265191 - RNA, 15 nt, Human
guguguuucugaucu

SEQ ID NO: 2265192 - RNA, 15 nt, Human
guguguuuaugugug

SEQ ID NO: 2265193 - RNA, 14 nt, Human
guguguuuaugugu

SEQ ID NO: 2265194 - RNA, 15 nt, Human
guguguugccacagg

SEQ ID NO: 2265195 - RNA, 14 nt, Human
guguguugucucuu

SEQ ID NO: 2265196 - RNA, 16 nt, Human
guguguugucucuuga

SEQ ID NO: 2265197 - RNA, 13 nt, Human
guguguugucuug

SEQ ID NO: 2265198 - RNA, 16 nt, Human
guguguugucuugaaa

SEQ ID NO: 2265199 - RNA, 18 nt, Human
guguguugucuugaaaga

SEQ ID NO: 2265200 - RNA, 17 nt, Human
guguguuguguguggga

SEQ ID NO: 2265201 - RNA, 15 nt, Human
guguguuuaaauaaa

SEQ ID NO: 2265202 - RNA, 16 nt, Human
guguguuuaaauaaag

SEQ ID NO: 2265203 - RNA, 18 nt, Human
guguguuuaaauaaagua

SEQ ID NO: 2265204 - RNA, 19 nt, Human
guguguuuaaauaaaguau

SEQ ID NO: 2265205 - RNA, 14 nt, Human
guguguugugugug

SEQ ID NO: 2265206 - RNA, 12 nt, Human
guguguugugug

SEQ ID NO: 2265207 - RNA, 14 nt, Human
gugucugcacccag

SEQ ID NO: 2265208 - RNA, 22 nt, Human
gugucugagcccucaaagugag

SEQ ID NO: 2265209 - RNA, 19 nt, Human
gugucucuuuucucuuucu

SEQ ID NO: 2265210 - RNA, 18 nt, Human
gugucucuuuucucuuuc

SEQ ID NO: 2265211 - RNA, 21 nt, Human
gugucucggagggauuccccu

SEQ ID NO: 2265212 - RNA, 22 nt, Human
gugucucuugguccugcugcag

SEQ ID NO: 2265213 - RNA, 15 nt, Human
gugucugcucaguaa

SEQ ID NO: 2265214 - RNA, 22 nt, Human
gugucucuuuucucuuucuccu

SEQ ID NO: 2265215 - RNA, 21 nt, Human
gugucugcacccagggguggg

SEQ ID NO: 2265216 - RNA, 14 nt, Human
gugucuggcugcag

SEQ ID NO: 2265217 - RNA, 18 nt, Human
gugucucuugguccugcu

SEQ ID NO: 2265218 - RNA, 19 nt, Human
gugucucuugguccugcug

SEQ ID NO: 2265219 - RNA, 20 nt, Human
gugucucuugguccugcugc

SEQ ID NO: 2265220 - RNA, 21 nt, Human
gugucucuugguccugcugca

SEQ ID NO: 2265221 - RNA, 22 nt, Human
gugugcacacacaccacacaua

SEQ ID NO: 2265222 - RNA, 20 nt, Human
gugugcacaaauauuuauuu

SEQ ID NO: 2265223 - RNA, 17 nt, Human
gugugcacuaaggggcc

SEQ ID NO: 2265224 - RNA, 16 nt, Human
gugugcaccaggguug

SEQ ID NO: 2265225 - RNA, 14 nt, Human
gugugauuuuucug

SEQ ID NO: 2265226 - RNA, 16 nt, Human
gugugcaaguauguga

SEQ ID NO: 2265227 - RNA, 16 nt, Human
gugugcaagugugugc

SEQ ID NO: 2265228 - RNA, 19 nt, Human
gugugcaaugucugaguga

SEQ ID NO: 2265229 - RNA, 20 nt, Human
gugugcaugugugugcucag

SEQ ID NO: 2265230 - RNA, 18 nt, Human
gugugcaugugugugcuc

SEQ ID NO: 2265231 - RNA, 16 nt, Human
gugugcauugcuguga

SEQ ID NO: 2265232 - RNA, 21 nt, Human
gugugccauagaguuuaacac

SEQ ID NO: 2265233 - RNA, 12 nt, Human
gugugcaugugu

SEQ ID NO: 2265234 - RNA, 21 nt, Human
gugugcauauuguacacuuuu

SEQ ID NO: 2265235 - RNA, 22 nt, Human
gugugcauauuguacacuuuuu

SEQ ID NO: 2265236 - RNA, 23 nt, Human
gugugcacuaaggggcccggcca

SEQ ID NO: 2265237 - RNA, 22 nt, Human
gugugcaccuuaccaacuuucu

SEQ ID NO: 2265238 - RNA, 13 nt, Human
gugugcagugaag

SEQ ID NO: 2265239 - RNA, 14 nt, Human
gugugcauauugua

SEQ ID NO: 2265240 - RNA, 15 nt, Human
gugugcauauuguac

SEQ ID NO: 2265241 - RNA, 16 nt, Human
gugugcauauuguaca

SEQ ID NO: 2265242 - RNA, 18 nt, Human
gugugcauauuguacacu

SEQ ID NO: 2265243 - RNA, 19 nt, Human
gugugaucccaagugccag

SEQ ID NO: 2265244 - RNA, 17 nt, Human
gugugaucccaagugcc

SEQ ID NO: 2265245 - RNA, 14 nt, Human
gugugaucgucuga

SEQ ID NO: 2265246 - RNA, 17 nt, Human
gugugaugaacuuucuc

SEQ ID NO: 2265247 - RNA, 22 nt, Human
gugugaugaacuuucucuucau

SEQ ID NO: 2265248 - RNA, 16 nt, Human
gugugauugaaucuga

SEQ ID NO: 2265249 - RNA, 23 nt, Human
gugugauugacagcuuugcugcu

SEQ ID NO: 2265250 - RNA, 21 nt, Human
gugugauugggaauaaauaug

SEQ ID NO: 2265251 - RNA, 21 nt, Human
gugugauugacagcuuugcug

SEQ ID NO: 2265252 - RNA, 16 nt, Human
gugugauugacagcuu

SEQ ID NO: 2265253 - RNA, 20 nt, Human
gugugagucaccaagcccag

SEQ ID NO: 2265254 - RNA, 11 nt, Human
gugugagugug

SEQ ID NO: 2265255 - RNA, 17 nt, Human
gugucuggauucccagg

SEQ ID NO: 2265256 - RNA, 21 nt, Human
gugucuggauucccaggauga

SEQ ID NO: 2265257 - RNA, 14 nt, Human
gugugagugugugc

SEQ ID NO: 2265258 - RNA, 23 nt, Human
gugucgcucugcuggccuggccg

SEQ ID NO: 2265259 - RNA, 15 nt, Human
gugucguagccaagg

SEQ ID NO: 2265260 - RNA, 16 nt, Human
guguccuuucccucca

SEQ ID NO: 2265261 - RNA, 20 nt, Human
guguccuugugcaugagcua

SEQ ID NO: 2265262 - RNA, 19 nt, Human
guguccuugcaccugcauc

SEQ ID NO: 2265263 - RNA, 14 nt, Human
guguccuugugcau

SEQ ID NO: 2265264 - RNA, 17 nt, Human
gugucuaaaaacaccaa

SEQ ID NO: 2265265 - RNA, 14 nt, Human
gugucuaaaaacac

SEQ ID NO: 2265266 - RNA, 17 nt, Human
guguccuuucccuccac

SEQ ID NO: 2265267 - RNA, 13 nt, Human
gugucuaaacugc

SEQ ID NO: 2265268 - RNA, 19 nt, Human
gugucuaggcaggaccugu

SEQ ID NO: 2265269 - RNA, 14 nt, Human
gugucuacagagaa

SEQ ID NO: 2265270 - RNA, 21 nt, Human
gugucuccaaccccccagcac

SEQ ID NO: 2265271 - RNA, 18 nt, Human
gugucuccaaccccccag

SEQ ID NO: 2265272 - RNA, 19 nt, Human
gugucuccaaccccccagc

SEQ ID NO: 2265273 - RNA, 14 nt, Human
gugucucuuggucc

SEQ ID NO: 2265274 - RNA, 22 nt, Human
gugucucaguccaccugagcug

SEQ ID NO: 2265275 - RNA, 13 nt, Human
gugucuccaaccc

SEQ ID NO: 2265276 - RNA, 17 nt, Human
gugucuccaacccccca

SEQ ID NO: 2265277 - RNA, 17 nt, Human
gugucucccuucauccu

SEQ ID NO: 2265278 - RNA, 14 nt, Human
guguccggucccug

SEQ ID NO: 2265279 - RNA, 23 nt, Human
gugucccugcacuugcagacucu

SEQ ID NO: 2265280 - RNA, 14 nt, Human
guguccuaggagua

SEQ ID NO: 2265281 - RNA, 20 nt, Human
guguccccuccacugucaca

SEQ ID NO: 2265282 - RNA, 15 nt, Human
guguccucacggugc

SEQ ID NO: 2265283 - RNA, 13 nt, Human
guguccugaccac

SEQ ID NO: 2265284 - RNA, 16 nt, Human
guguccugaccacccu

SEQ ID NO: 2265285 - RNA, 17 nt, Human
guguccugaccacccuc

SEQ ID NO: 2265286 - RNA, 18 nt, Human
guguccugaccacccucc

SEQ ID NO: 2265287 - RNA, 20 nt, Human
guguccugaccacccucccc

SEQ ID NO: 2265288 - RNA, 13 nt, Human
guguccuggugcu

SEQ ID NO: 2265289 - RNA, 16 nt, Human
guguccuggugcucuc

SEQ ID NO: 2265290 - RNA, 18 nt, Human
guguccuugcaccugcau

SEQ ID NO: 2265291 - RNA, 17 nt, Human
guguccuugcaccugca

SEQ ID NO: 2265292 - RNA, 12 nt, Human
guguccuucccu

SEQ ID NO: 2265293 - RNA, 15 nt, Human
guguccuucccugca

SEQ ID NO: 2265294 - RNA, 16 nt, Human
guguccuuagaacauu

SEQ ID NO: 2265295 - RNA, 23 nt, Human
guguccuggugcucucugccacu

SEQ ID NO: 2265296 - RNA, 21 nt, Human
guguccuguaguugcguggac

SEQ ID NO: 2265297 - RNA, 15 nt, Human
gugucgggcaugaca

SEQ ID NO: 2265298 - RNA, 19 nt, Human
gugaauuucuucacuguug

SEQ ID NO: 2265299 - RNA, 13 nt, Human
gugaauuugaaug

SEQ ID NO: 2265300 - RNA, 19 nt, Human
gugaauugugaccaaguua

SEQ ID NO: 2265301 - RNA, 23 nt, Human
gugaauugccugcagagagaagc

SEQ ID NO: 2265302 - RNA, 20 nt, Human
gugaauugccugcagagaga

SEQ ID NO: 2265303 - RNA, 22 nt, Human
gugaauugccugcagagagaag

SEQ ID NO: 2265304 - RNA, 22 nt, Human
gugaauucuugaaggaaaauga

SEQ ID NO: 2265305 - RNA, 18 nt, Human
gugaauuugaaugaaaaa

SEQ ID NO: 2265306 - RNA, 16 nt, Human
gugaauuugaaugaaa

SEQ ID NO: 2265307 - RNA, 14 nt, Human
gugaauuugaauga

SEQ ID NO: 2265308 - RNA, 20 nt, Human
gugacaaggauugcuacugu

SEQ ID NO: 2265309 - RNA, 15 nt, Human
gugaauggauuggau

SEQ ID NO: 2265310 - RNA, 20 nt, Human
gugaauggauuggauuauuu

SEQ ID NO: 2265311 - RNA, 14 nt, Human
gugaauggauugga

SEQ ID NO: 2265312 - RNA, 21 nt, Human
gugaaugcugggacucagccu

SEQ ID NO: 2265313 - RNA, 18 nt, Human
gugaauucuugaaggaaa

SEQ ID NO: 2265314 - RNA, 21 nt, Human
gugaaugaugauccuaggcau

SEQ ID NO: 2265315 - RNA, 13 nt, Human
gugaaugcuggga

SEQ ID NO: 2265316 - RNA, 15 nt, Human
gugaaugcugggacu

SEQ ID NO: 2265317 - RNA, 20 nt, Human
gugaaugcugggacucagcc

SEQ ID NO: 2265318 - RNA, 18 nt, Human
gugaacaaagcagccacg

SEQ ID NO: 2265319 - RNA, 18 nt, Human
gugaacaaaagaugcucu

SEQ ID NO: 2265320 - RNA, 17 nt, Human
gugaacaaagcagccac

SEQ ID NO: 2265321 - RNA, 21 nt, Human
gugaacaaauuuacagagaca

SEQ ID NO: 2265322 - RNA, 19 nt, Human
gugaacaaaagaugcucuu

SEQ ID NO: 2265323 - RNA, 15 nt, Human
gugaaucuaaaagcu

SEQ ID NO: 2265324 - RNA, 13 nt, Human
gugaaugaacacu

SEQ ID NO: 2265325 - RNA, 13 nt, Human
gugaacacaucag

SEQ ID NO: 2265326 - RNA, 15 nt, Human
gucuuguacaugugu

SEQ ID NO: 2265327 - RNA, 13 nt, Human
gucuuuuuuugua

SEQ ID NO: 2265328 - RNA, 17 nt, Human
gucuuuuuuuguauuau

SEQ ID NO: 2265329 - RNA, 21 nt, Human
gucuuuuuuuguauuauaaaa

SEQ ID NO: 2265330 - RNA, 16 nt, Human
gucuuuuuuuuaaugu

SEQ ID NO: 2265331 - RNA, 17 nt, Human
gucuuuuuuuuaaugug

SEQ ID NO: 2265332 - RNA, 18 nt, Human
gucuuuuuuuuaaugugc

SEQ ID NO: 2265333 - RNA, 19 nt, Human
gucuuuuuuuuaaugugcu

SEQ ID NO: 2265334 - RNA, 22 nt, Human
gucuuuuuuuuaaugugcugug

SEQ ID NO: 2265335 - RNA, 15 nt, Human
gugaaaaaaaaaaug

SEQ ID NO: 2265336 - RNA, 14 nt, Human
gugaaaaaaaaaau

SEQ ID NO: 2265337 - RNA, 15 nt, Human
gugaaaacaagugcu

SEQ ID NO: 2265338 - RNA, 18 nt, Human
gugaaaaaaaaaaugcug

SEQ ID NO: 2265339 - RNA, 19 nt, Human
gugaaaacaagugcuggca

SEQ ID NO: 2265340 - RNA, 22 nt, Human
gugacagacuccugaggacagc

SEQ ID NO: 2265341 - RNA, 15 nt, Human
gugaccuucugggaa

SEQ ID NO: 2265342 - RNA, 17 nt, Human
gugacgccugcccuccc

SEQ ID NO: 2265343 - RNA, 15 nt, Human
gugacgcugaauaaa

SEQ ID NO: 2265344 - RNA, 17 nt, Human
gugacgcugaauaaaug

SEQ ID NO: 2265345 - RNA, 18 nt, Human
gugacgcugaauaaaugu

SEQ ID NO: 2265346 - RNA, 19 nt, Human
gugacggucccacacuggu

SEQ ID NO: 2265347 - RNA, 22 nt, Human
gugacggucccacacuggugac

SEQ ID NO: 2265348 - RNA, 19 nt, Human
gugacgcugaauaaauguc

SEQ ID NO: 2265349 - RNA, 13 nt, Human
gugacggucccac

SEQ ID NO: 2265350 - RNA, 15 nt, Human
gugacggucccacac

SEQ ID NO: 2265351 - RNA, 15 nt, Human
gugaccucugccuga

SEQ ID NO: 2265352 - RNA, 22 nt, Human
gugaccuuccaagagccugaga

SEQ ID NO: 2265353 - RNA, 21 nt, Human
gugaccuuccaagagccugag

SEQ ID NO: 2265354 - RNA, 12 nt, Human
gugaccucugcc

SEQ ID NO: 2265355 - RNA, 15 nt, Human
gugacagaggcagcc

SEQ ID NO: 2265356 - RNA, 13 nt, Human
gugaccucugccu

SEQ ID NO: 2265357 - RNA, 14 nt, Human
gugaccucugccug

SEQ ID NO: 2265358 - RNA, 17 nt, Human
gugacaaggccccagag

SEQ ID NO: 2265359 - RNA, 14 nt, Human
gugacaaggcccca

SEQ ID NO: 2265360 - RNA, 13 nt, Human
gugacaaggcccc

SEQ ID NO: 2265361 - RNA, 23 nt, Human
gugacaagcuccuggucuugaga

SEQ ID NO: 2265362 - RNA, 19 nt, Human
gugacaaggccccagagac

SEQ ID NO: 2265363 - RNA, 18 nt, Human
gugacaaggccccagaga

SEQ ID NO: 2265364 - RNA, 12 nt, Human
gugacaauaaaa

SEQ ID NO: 2265365 - RNA, 16 nt, Human
gugacaauuuuguaca

SEQ ID NO: 2265366 - RNA, 14 nt, Human
gugacaauaaaaca

SEQ ID NO: 2265367 - RNA, 21 nt, Human
gugacacuucagagagcuggu

SEQ ID NO: 2265368 - RNA, 20 nt, Human
gugacacuucagagagcugg

SEQ ID NO: 2265369 - RNA, 18 nt, Human
gugacacuucagagagcu

SEQ ID NO: 2265370 - RNA, 22 nt, Human
gugacacagcagcuucaccaga

SEQ ID NO: 2265371 - RNA, 15 nt, Human
gugacagacaggcuc

SEQ ID NO: 2265372 - RNA, 16 nt, Human
gugacagacaggcucu

SEQ ID NO: 2265373 - RNA, 23 nt, Human
gugacaccagccuuucucccagg

SEQ ID NO: 2265374 - RNA, 12 nt, Human
gugacacagcag

SEQ ID NO: 2265375 - RNA, 19 nt, Human
gugacacagcagcuucacc

SEQ ID NO: 2265376 - RNA, 22 nt, Human
gugacacuucagagagcuggua

SEQ ID NO: 2265377 - RNA, 23 nt, Human
gugacagaccacaucuuuaucug

SEQ ID NO: 2265378 - RNA, 17 nt, Human
gugacagacaggcucuu

SEQ ID NO: 2265379 - RNA, 15 nt, Human
gugacagacuccuga

SEQ ID NO: 2265380 - RNA, 16 nt, Human
gugacagacuccugag

SEQ ID NO: 2265381 - RNA, 19 nt, Human
gugacagacuccugaggac

SEQ ID NO: 2265382 - RNA, 20 nt, Human
gugacagacuccugaggaca

SEQ ID NO: 2265383 - RNA, 12 nt, Human
gugacagaggca

SEQ ID NO: 2265384 - RNA, 13 nt, Human
gugacagaggcag

SEQ ID NO: 2265385 - RNA, 14 nt, Human
gugacagaggcagc

SEQ ID NO: 2265386 - RNA, 13 nt, Human
gugaucaaagcca

SEQ ID NO: 2265387 - RNA, 17 nt, Human
gugaucaauuaaaugua

SEQ ID NO: 2265388 - RNA, 18 nt, Human
gugaucaauaaaauguga

SEQ ID NO: 2265389 - RNA, 19 nt, Human
gugaucaauaaaaugugau

SEQ ID NO: 2265390 - RNA, 17 nt, Human
gugaucaauaaaaugug

SEQ ID NO: 2265391 - RNA, 16 nt, Human
gugaucaauaaaaugu

SEQ ID NO: 2265392 - RNA, 22 nt, Human
gugauccacccaccucagccuc

SEQ ID NO: 2265393 - RNA, 17 nt, Human
gugaucacagcagcuuc

SEQ ID NO: 2265394 - RNA, 20 nt, Human
gugaucagaccauaauguua

SEQ ID NO: 2265395 - RNA, 20 nt, Human
gugauacccauagcuuccau

SEQ ID NO: 2265396 - RNA, 13 nt, Human
gugauagcacuuu

SEQ ID NO: 2265397 - RNA, 14 nt, Human
gugauagcacuuuc

SEQ ID NO: 2265398 - RNA, 18 nt, Human
gugauagcuaacauuuua

SEQ ID NO: 2265399 - RNA, 22 nt, Human
gugauagucuuuugcuuuuggc

SEQ ID NO: 2265400 - RNA, 19 nt, Human
gugauauaaguguguguuu

SEQ ID NO: 2265401 - RNA, 13 nt, Human
gugauauggagcc

SEQ ID NO: 2265402 - RNA, 16 nt, Human
gugauauggcagaaga

SEQ ID NO: 2265403 - RNA, 19 nt, Human
gugauauggcagaagacac

SEQ ID NO: 2265404 - RNA, 13 nt, Human
gugauauauuuaa

SEQ ID NO: 2265405 - RNA, 21 nt, Human
gugauauauaaguguacauau

SEQ ID NO: 2265406 - RNA, 23 nt, Human
gugauauauaaguguacauaugu

SEQ ID NO: 2265407 - RNA, 15 nt, Human
gugagugugugcaag

SEQ ID NO: 2265408 - RNA, 14 nt, Human
gugaguucucaggg

SEQ ID NO: 2265409 - RNA, 15 nt, Human
gugaguucucagggc

SEQ ID NO: 2265410 - RNA, 17 nt, Human
gugaguucucagggcuc

SEQ ID NO: 2265411 - RNA, 18 nt, Human
gugaguucucagggcucc

SEQ ID NO: 2265412 - RNA, 20 nt, Human
gugaguucucagggcuccug

SEQ ID NO: 2265413 - RNA, 13 nt, Human
gugagugugugca

SEQ ID NO: 2265414 - RNA, 23 nt, Human
gugaguguguccaagugugugug

SEQ ID NO: 2265415 - RNA, 22 nt, Human
gugaguguguccaagugugugu

SEQ ID NO: 2265416 - RNA, 16 nt, Human
gugaguguggcucccc

SEQ ID NO: 2265417 - RNA, 17 nt, Human
gugaguuacagcgagag

SEQ ID NO: 2265418 - RNA, 17 nt, Human
gugaguugauagcacag

SEQ ID NO: 2265419 - RNA, 20 nt, Human
gugaguuuaguaaggcugug

SEQ ID NO: 2265420 - RNA, 15 nt, Human
gugaguuugagcugc

SEQ ID NO: 2265421 - RNA, 17 nt, Human
gugaguuugagcugccu

SEQ ID NO: 2265422 - RNA, 21 nt, Human
gugaguuugagcugccuuccc

SEQ ID NO: 2265423 - RNA, 20 nt, Human
gugauacaacuucaagugca

SEQ ID NO: 2265424 - RNA, 14 nt, Human
gugauaaacuuugc

SEQ ID NO: 2265425 - RNA, 13 nt, Human
gugauaaacuuug

SEQ ID NO: 2265426 - RNA, 17 nt, Human
gugauacaaugcugugc

SEQ ID NO: 2265427 - RNA, 18 nt, Human
gugaguuugagcugccuu

SEQ ID NO: 2265428 - RNA, 15 nt, Human
gugauacaaugcugu

SEQ ID NO: 2265429 - RNA, 19 nt, Human
gugaggaugggaaggaggg

SEQ ID NO: 2265430 - RNA, 17 nt, Human
gugaggaugggaaggag

SEQ ID NO: 2265431 - RNA, 21 nt, Human
gugaggauggccucugcuaag

SEQ ID NO: 2265432 - RNA, 16 nt, Human
gugagcggagaucgca

SEQ ID NO: 2265433 - RNA, 22 nt, Human
gugaggaugucacucagaugga

SEQ ID NO: 2265434 - RNA, 18 nt, Human
gugaggaugucacucaga

SEQ ID NO: 2265435 - RNA, 15 nt, Human
gugaggaugucuggg

SEQ ID NO: 2265436 - RNA, 16 nt, Human
gugaguguaaguguga

SEQ ID NO: 2265437 - RNA, 15 nt, Human
gugaguguggcuccc

SEQ ID NO: 2265438 - RNA, 18 nt, Human
gugaggagcuugaaaccc

SEQ ID NO: 2265439 - RNA, 17 nt, Human
gugaggaugaaaaaaua

SEQ ID NO: 2265440 - RNA, 15 nt, Human
gugaggagcugcugg

SEQ ID NO: 2265441 - RNA, 17 nt, Human
gugaggagcugcuggcu

SEQ ID NO: 2265442 - RNA, 14 nt, Human
gugagccuuggcug

SEQ ID NO: 2265443 - RNA, 18 nt, Human
gugaggagcugcuggcuu

SEQ ID NO: 2265444 - RNA, 13 nt, Human
gugaggagcuggg

SEQ ID NO: 2265445 - RNA, 21 nt, Human
gugagccgcaucuucuccauc

SEQ ID NO: 2265446 - RNA, 18 nt, Human
gugagccgcaucuucucc

SEQ ID NO: 2265447 - RNA, 12 nt, Human
gugagccgcauc

SEQ ID NO: 2265448 - RNA, 17 nt, Human
gugagccccugguccug

SEQ ID NO: 2265449 - RNA, 13 nt, Human
gugagccuggcuc

SEQ ID NO: 2265450 - RNA, 14 nt, Human
gugagccuggcucu

SEQ ID NO: 2265451 - RNA, 16 nt, Human
gugagccuggcucuug

SEQ ID NO: 2265452 - RNA, 23 nt, Human
gugagccuggcucuugugcugga

SEQ ID NO: 2265453 - RNA, 19 nt, Human
gugagccgagaucacgcca

SEQ ID NO: 2265454 - RNA, 14 nt, Human
gugagccacugcac

SEQ ID NO: 2265455 - RNA, 15 nt, Human
gugacucacccaagc

SEQ ID NO: 2265456 - RNA, 20 nt, Human
gugagccagguaaugaggga

SEQ ID NO: 2265457 - RNA, 15 nt, Human
gugagcccagcuggg

SEQ ID NO: 2265458 - RNA, 20 nt, Human
gugagcccagcugggucagg

SEQ ID NO: 2265459 - RNA, 18 nt, Human
gugagcccagcuggguca

SEQ ID NO: 2265460 - RNA, 18 nt, Human
gugagcccauggcccucc

SEQ ID NO: 2265461 - RNA, 17 nt, Human
gugagcccauggcccuc

SEQ ID NO: 2265462 - RNA, 14 nt, Human
gugagccccugguc

SEQ ID NO: 2265463 - RNA, 15 nt, Human
gugagccacugcacc

SEQ ID NO: 2265464 - RNA, 20 nt, Human
gugagccacugcaccgggcc

SEQ ID NO: 2265465 - RNA, 15 nt, Human
gugacuauauagaga

SEQ ID NO: 2265466 - RNA, 17 nt, Human
gugacuauauagagaug

SEQ ID NO: 2265467 - RNA, 20 nt, Human
gugacuauauagagauguuu

SEQ ID NO: 2265468 - RNA, 14 nt, Human
gugacuaugaacuu

SEQ ID NO: 2265469 - RNA, 21 nt, Human
gugacuauggagcugagcagg

SEQ ID NO: 2265470 - RNA, 22 nt, Human
gugacuaauuguauaacagguu

SEQ ID NO: 2265471 - RNA, 23 nt, Human
gugacuaauuguauaacagguua

SEQ ID NO: 2265472 - RNA, 18 nt, Human
gugacuaauuguauaaca

SEQ ID NO: 2265473 - RNA, 19 nt, Human
gugacuaauuguauaacag

SEQ ID NO: 2265474 - RNA, 20 nt, Human
gugacuaauuguauaacagg

SEQ ID NO: 2265475 - RNA, 21 nt, Human
gugacuaauuguauaacaggu

SEQ ID NO: 2265476 - RNA, 15 nt, Human
gugacuaauuguaua

SEQ ID NO: 2265477 - RNA, 17 nt, Human
gugacuaauuguauaac

SEQ ID NO: 2265478 - RNA, 13 nt, Human
gugcccccuccuc

SEQ ID NO: 2265479 - RNA, 14 nt, Human
gugcccccuccucu

SEQ ID NO: 2265480 - RNA, 17 nt, Human
gugcccccuccucuccc

SEQ ID NO: 2265481 - RNA, 18 nt, Human
gugcccccuccucuccca

SEQ ID NO: 2265482 - RNA, 20 nt, Human
gugcccccuccucucccauc

SEQ ID NO: 2265483 - RNA, 14 nt, Human
gugcccccucuacc

SEQ ID NO: 2265484 - RNA, 17 nt, Human
gugcccccucuaccauu

SEQ ID NO: 2265485 - RNA, 19 nt, Human
gugccccugcugccucccc

SEQ ID NO: 2265486 - RNA, 13 nt, Human
gugccccugcugc

SEQ ID NO: 2265487 - RNA, 16 nt, Human
gugccccgccuccccg

SEQ ID NO: 2265488 - RNA, 17 nt, Human
gugccccgccuccccga

SEQ ID NO: 2265489 - RNA, 13 nt, Human
gugccccuagcuu

SEQ ID NO: 2265490 - RNA, 20 nt, Human
gugccccccuugccagacau

SEQ ID NO: 2265491 - RNA, 13 nt, Human
gugccccccuugc

SEQ ID NO: 2265492 - RNA, 20 nt, Human
gugcccaagaauagaugcug

SEQ ID NO: 2265493 - RNA, 17 nt, Human
gugccaggcccggggcu

SEQ ID NO: 2265494 - RNA, 13 nt, Human
gugccaggcccgg

SEQ ID NO: 2265495 - RNA, 12 nt, Human
gugccaggcccg

SEQ ID NO: 2265496 - RNA, 23 nt, Human
gugccaggacuccccaggccagg

SEQ ID NO: 2265497 - RNA, 21 nt, Human
gugccaggauggaaugauggg

SEQ ID NO: 2265498 - RNA, 20 nt, Human
gugccaggcccggggcuggc

SEQ ID NO: 2265499 - RNA, 19 nt, Human
gugccaggcccggggcugg

SEQ ID NO: 2265500 - RNA, 16 nt, Human
gugccagggcagcacu

SEQ ID NO: 2265501 - RNA, 16 nt, Human
gugccagguccuugcc

SEQ ID NO: 2265502 - RNA, 20 nt, Human
gugccagguuuucugggugu

SEQ ID NO: 2265503 - RNA, 14 nt, Human
gugccaugugccag

SEQ ID NO: 2265504 - RNA, 16 nt, Human
gugccaugugccaggu

SEQ ID NO: 2265505 - RNA, 23 nt, Human
gugccuucuuauucucacuccac

SEQ ID NO: 2265506 - RNA, 19 nt, Human
gugccuucuuauucucacu

SEQ ID NO: 2265507 - RNA, 23 nt, Human
gugccuuccuguuuuucacauuu

SEQ ID NO: 2265508 - RNA, 22 nt, Human
gugccuuccaugucggccucua

SEQ ID NO: 2265509 - RNA, 20 nt, Human
gugccuucgcgguggaaggc

SEQ ID NO: 2265510 - RNA, 14 nt, Human
gugccuuuugccau

SEQ ID NO: 2265511 - RNA, 23 nt, Human
gugccuuggagggucccaagcug

SEQ ID NO: 2265512 - RNA, 19 nt, Human
gugccuuggggaauuuccu

SEQ ID NO: 2265513 - RNA, 19 nt, Human
gugccuuuugcaccccucc

SEQ ID NO: 2265514 - RNA, 21 nt, Human
gugcgaucuggguucacugca

SEQ ID NO: 2265515 - RNA, 22 nt, Human
gugccuuuugcaccccucccau

SEQ ID NO: 2265516 - RNA, 21 nt, Human
gugccuuuugcaccccuccca

SEQ ID NO: 2265517 - RNA, 18 nt, Human
gugccuuuuuucacggaa

SEQ ID NO: 2265518 - RNA, 22 nt, Human
gugccuuuuuucacggaaguuu

SEQ ID NO: 2265519 - RNA, 16 nt, Human
gugcgaccccaucugc

SEQ ID NO: 2265520 - RNA, 18 nt, Human
gugcgaccccaucugccc

SEQ ID NO: 2265521 - RNA, 20 nt, Human
gugcgaccccaucugcccag

SEQ ID NO: 2265522 - RNA, 22 nt, Human
gugccuuccauaauuaugacag

SEQ ID NO: 2265523 - RNA, 17 nt, Human
gugccuuccauaauuau

SEQ ID NO: 2265524 - RNA, 20 nt, Human
gugccuuccaugucggccuc

SEQ ID NO: 2265525 - RNA, 21 nt, Human
gugccuuccaugucggccucu

SEQ ID NO: 2265526 - RNA, 15 nt, Human
gugccuuccauaauu

SEQ ID NO: 2265527 - RNA, 12 nt, Human
gugccuuccaac

SEQ ID NO: 2265528 - RNA, 12 nt, Human
gugccuuccaua

SEQ ID NO: 2265529 - RNA, 14 nt, Human
gugccuucauuugg

SEQ ID NO: 2265530 - RNA, 12 nt, Human
gugccuucauuu

SEQ ID NO: 2265531 - RNA, 11 nt, Human
gugccuucauu

SEQ ID NO: 2265532 - RNA, 14 nt, Human
gugcccucgcugcu

SEQ ID NO: 2265533 - RNA, 20 nt, Human
gugcccuccacagccgcagc

SEQ ID NO: 2265534 - RNA, 15 nt, Human
gugccuucagcucua

SEQ ID NO: 2265535 - RNA, 20 nt, Human
gugccccugcugccucccca

SEQ ID NO: 2265536 - RNA, 14 nt, Human
gugcggccuuuggc

SEQ ID NO: 2265537 - RNA, 19 nt, Human
gugcggcagggacacccga

SEQ ID NO: 2265538 - RNA, 15 nt, Human
gugcgugaaacacac

SEQ ID NO: 2265539 - RNA, 14 nt, Human
gugcgugaaacaca

SEQ ID NO: 2265540 - RNA, 14 nt, Human
gugcggcugugcag

SEQ ID NO: 2265541 - RNA, 15 nt, Human
gugcgguggcucacg

SEQ ID NO: 2265542 - RNA, 15 nt, Human
gugcguccacgagcu

SEQ ID NO: 2265543 - RNA, 22 nt, Human
gugcgcugacaaccaccgcucc

SEQ ID NO: 2265544 - RNA, 22 nt, Human
gugcgccgagucugucucuguc

SEQ ID NO: 2265545 - RNA, 23 nt, Human
gugcgagugugugcaugugugug

SEQ ID NO: 2265546 - RNA, 14 nt, Human
gugcgagugugugc

SEQ ID NO: 2265547 - RNA, 15 nt, Human
gugcgauucuggaua

SEQ ID NO: 2265548 - RNA, 14 nt, Human
gugcgccuacagga

SEQ ID NO: 2265549 - RNA, 16 nt, Human
gugcuaaauuuucagu

SEQ ID NO: 2265550 - RNA, 20 nt, Human
gugcuaagugugaacuggac

SEQ ID NO: 2265551 - RNA, 17 nt, Human
gugcuaauaacagugca

SEQ ID NO: 2265552 - RNA, 17 nt, Human
gugcuaagugugaacug

SEQ ID NO: 2265553 - RNA, 18 nt, Human
gugcuaagugugaacugg

SEQ ID NO: 2265554 - RNA, 13 nt, Human
gugcuaaguguga

SEQ ID NO: 2265555 - RNA, 14 nt, Human
gugcuaagugugaa

SEQ ID NO: 2265556 - RNA, 16 nt, Human
gugcuaagugugaacu

SEQ ID NO: 2265557 - RNA, 21 nt, Human
gugcgugaaacacaccaggcu

SEQ ID NO: 2265558 - RNA, 12 nt, Human
gugcgugcucag

SEQ ID NO: 2265559 - RNA, 12 nt, Human
gugcguggguga

SEQ ID NO: 2265560 - RNA, 14 nt, Human
gugcgugggugaag

SEQ ID NO: 2265561 - RNA, 13 nt, Human
gugcgugugugca

SEQ ID NO: 2265562 - RNA, 13 nt, Human
gugcgugugucca

SEQ ID NO: 2265563 - RNA, 14 nt, Human
gugcguguuugcac

SEQ ID NO: 2265564 - RNA, 13 nt, Human
gugcuaaaaaugg

SEQ ID NO: 2265565 - RNA, 13 nt, Human
gugcguguguaga

SEQ ID NO: 2265566 - RNA, 15 nt, Human
gugcguguguagagu

SEQ ID NO: 2265567 - RNA, 17 nt, Human
gugcguguguagaguua

SEQ ID NO: 2265568 - RNA, 23 nt, Human
gugcuaaccacgucugucuucac

SEQ ID NO: 2265569 - RNA, 13 nt, Human
gugcuaaauuuuc

SEQ ID NO: 2265570 - RNA, 22 nt, Human
gugcuaaauggucgcccaggag

SEQ ID NO: 2265571 - RNA, 14 nt, Human
gugcuaaaaauggg

SEQ ID NO: 2265572 - RNA, 18 nt, Human
gugcuaaaaaugggacuu

SEQ ID NO: 2265573 - RNA, 21 nt, Human
gugcuaaaaaugggacuucuu

SEQ ID NO: 2265574 - RNA, 22 nt, Human
gugcuaaaaaugggacuucuuu

SEQ ID NO: 2265575 - RNA, 17 nt, Human
gugcagcauaugaggau

SEQ ID NO: 2265576 - RNA, 15 nt, Human
gugcagcauaugagg

SEQ ID NO: 2265577 - RNA, 18 nt, Human
gugcagagugcccagaac

SEQ ID NO: 2265578 - RNA, 16 nt, Human
gugcagagugcccaga

SEQ ID NO: 2265579 - RNA, 17 nt, Human
gugcagaugagguugcu

SEQ ID NO: 2265580 - RNA, 19 nt, Human
gugcagcccguguggcccc

SEQ ID NO: 2265581 - RNA, 22 nt, Human
gugcagccccgccuccaggcca

SEQ ID NO: 2265582 - RNA, 19 nt, Human
gugcagcccccacugccuu

SEQ ID NO: 2265583 - RNA, 21 nt, Human
gugcagcccguguggccccuu

SEQ ID NO: 2265584 - RNA, 20 nt, Human
gugcagcccguguggccccu

SEQ ID NO: 2265585 - RNA, 17 nt, Human
gugcagccgcugagcga

SEQ ID NO: 2265586 - RNA, 23 nt, Human
gugcagcucaaggaaaggccuga

SEQ ID NO: 2265587 - RNA, 22 nt, Human
gugcagcucaaggaaaggccug

SEQ ID NO: 2265588 - RNA, 18 nt, Human
gugcagccgcugagcgag

SEQ ID NO: 2265589 - RNA, 15 nt, Human
gugcagccuguccug

SEQ ID NO: 2265590 - RNA, 21 nt, Human
gugcagccuguccugggcugg

SEQ ID NO: 2265591 - RNA, 20 nt, Human
gugcaguggugcgaucuggg

SEQ ID NO: 2265592 - RNA, 23 nt, Human
gugcaguggugcgaucuggguuc

SEQ ID NO: 2265593 - RNA, 23 nt, Human
gugcagcugauuuuaacaauaac

SEQ ID NO: 2265594 - RNA, 18 nt, Human
gugcagcugauuuuaaca

SEQ ID NO: 2265595 - RNA, 15 nt, Human
gugcagcuucugucc

SEQ ID NO: 2265596 - RNA, 16 nt, Human
gugcagcuucuguccu

SEQ ID NO: 2265597 - RNA, 16 nt, Human
gugcagcugauuuuaa

SEQ ID NO: 2265598 - RNA, 14 nt, Human
gugcagcugauuuu

SEQ ID NO: 2265599 - RNA, 13 nt, Human
gugcagcugauuu

SEQ ID NO: 2265600 - RNA, 12 nt, Human
gugcagcugauu

SEQ ID NO: 2265601 - RNA, 17 nt, Human
gugcagcuucuguccug

SEQ ID NO: 2265602 - RNA, 15 nt, Human
gugcaggcuggcacc

SEQ ID NO: 2265603 - RNA, 22 nt, Human
gugcaguucccccaaccucaga

SEQ ID NO: 2265604 - RNA, 18 nt, Human
gugcaggccugcucaggg

SEQ ID NO: 2265605 - RNA, 24 nt, Human
gugcaguucccccaaccucagacu

SEQ ID NO: 2265606 - RNA, 19 nt, Human
gugcaguucuaguuugcau

SEQ ID NO: 2265607 - RNA, 20 nt, Human
gugcaguucuaguuugcauu

SEQ ID NO: 2265608 - RNA, 15 nt, Human
gugcaguugacagca

SEQ ID NO: 2265609 - RNA, 22 nt, Human
gugcauaccacuuuuguucuug

SEQ ID NO: 2265610 - RNA, 20 nt, Human
gugcaguugacagcaggugg

SEQ ID NO: 2265611 - RNA, 19 nt, Human
gugcaguugacagcaggug

SEQ ID NO: 2265612 - RNA, 16 nt, Human
gugcauauuccuuucu

SEQ ID NO: 2265613 - RNA, 21 nt, Human
gugcauauuccuuucuaucau

SEQ ID NO: 2265614 - RNA, 13 nt, Human
gugcaucucagcc

SEQ ID NO: 2265615 - RNA, 12 nt, Human
gugcauccaaag

SEQ ID NO: 2265616 - RNA, 20 nt, Human
gugcauauuguacacuuuuu

SEQ ID NO: 2265617 - RNA, 13 nt, Human
gugcauauuguac

SEQ ID NO: 2265618 - RNA, 14 nt, Human
gugcauauuguaca

SEQ ID NO: 2265619 - RNA, 15 nt, Human
gugcauauuguacac

SEQ ID NO: 2265620 - RNA, 18 nt, Human
gugcauauuguacacuuu

SEQ ID NO: 2265621 - RNA, 18 nt, Human
gugcauccgggggcagcu

SEQ ID NO: 2265622 - RNA, 20 nt, Human
gugcauccgggggcagcucu

SEQ ID NO: 2265623 - RNA, 22 nt, Human
gugccagccgugaugcucaggc

SEQ ID NO: 2265624 - RNA, 13 nt, Human
gugccagccuucc

SEQ ID NO: 2265625 - RNA, 19 nt, Human
gugccagccuuccucugca

SEQ ID NO: 2265626 - RNA, 16 nt, Human
gugccaggaccaguca

SEQ ID NO: 2265627 - RNA, 13 nt, Human
gugccaggaccag

SEQ ID NO: 2265628 - RNA, 18 nt, Human
gugccagccuuccucugc

SEQ ID NO: 2265629 - RNA, 17 nt, Human
gugccaggacuccccag

SEQ ID NO: 2265630 - RNA, 18 nt, Human
gugccaggacuccccagg

SEQ ID NO: 2265631 - RNA, 21 nt, Human
gugccaggacuccccaggcca

SEQ ID NO: 2265632 - RNA, 23 nt, Human
gugauccacccaccucagccucc

SEQ ID NO: 2265633 - RNA, 24 nt, Human
gugauccacccaccucagccuccc

SEQ ID NO: 2265634 - RNA, 18 nt, Human
gugauuuacgcucauugu

SEQ ID NO: 2265635 - RNA, 18 nt, Human
gugauuuagaacuguaug

SEQ ID NO: 2265636 - RNA, 21 nt, Human
gugauuuagaacuguauguca

SEQ ID NO: 2265637 - RNA, 23 nt, Human
gugauuuagaacuguaugucaga

SEQ ID NO: 2265638 - RNA, 19 nt, Human
gugauuucagagagggcag

SEQ ID NO: 2265639 - RNA, 18 nt, Human
gugauuucccguggcccc

SEQ ID NO: 2265640 - RNA, 20 nt, Human
gugauuucccguggccccag

SEQ ID NO: 2265641 - RNA, 21 nt, Human
gugauuucccguggccccagc

SEQ ID NO: 2265642 - RNA, 23 nt, Human
gugauuucccguggccccagccu

SEQ ID NO: 2265643 - RNA, 12 nt, Human
gugauuuucauu

SEQ ID NO: 2265644 - RNA, 18 nt, Human
gugauuuuaacucugucu

SEQ ID NO: 2265645 - RNA, 17 nt, Human
gugauuuuaacucuguc

SEQ ID NO: 2265646 - RNA, 16 nt, Human
gugauuuuaacucugu

SEQ ID NO: 2265647 - RNA, 14 nt, Human
gugauuuuaacucu

SEQ ID NO: 2265648 - RNA, 13 nt, Human
gugauuugacugu

SEQ ID NO: 2265649 - RNA, 22 nt, Human
gugauuucccguggccccagcc

SEQ ID NO: 2265650 - RNA, 14 nt, Human
gugauuugacuguu

SEQ ID NO: 2265651 - RNA, 19 nt, Human
gugauuugacuguuuuuac

SEQ ID NO: 2265652 - RNA, 21 nt, Human
gugauuugacuguuuuuaccc

SEQ ID NO: 2265653 - RNA, 22 nt, Human
gugauuugacuguuuuuaccca

SEQ ID NO: 2265654 - RNA, 18 nt, Human
gugauuuuuguaauuuuu

SEQ ID NO: 2265655 - RNA, 13 nt, Human
gugauuuuuguaa

SEQ ID NO: 2265656 - RNA, 20 nt, Human
gugcaaaacagcguuuaaga

SEQ ID NO: 2265657 - RNA, 21 nt, Human
gugcaaaaagcugaguauggu

SEQ ID NO: 2265658 - RNA, 19 nt, Human
gugauuuuaacucugucuu

SEQ ID NO: 2265659 - RNA, 14 nt, Human
gugauuuuuuucuu

SEQ ID NO: 2265660 - RNA, 14 nt, Human
gugauuuuuuuguc

SEQ ID NO: 2265661 - RNA, 15 nt, Human
gugcacugcccaugg

SEQ ID NO: 2265662 - RNA, 20 nt, Human
gugcacugcccauggacagg

SEQ ID NO: 2265663 - RNA, 19 nt, Human
gugcacugcccauggacag

SEQ ID NO: 2265664 - RNA, 21 nt, Human
gugcacugcccauggacaggc

SEQ ID NO: 2265665 - RNA, 15 nt, Human
gugcagacuggaggg

SEQ ID NO: 2265666 - RNA, 23 nt, Human
gugcagacuggaggggacgcugg

SEQ ID NO: 2265667 - RNA, 23 nt, Human
gugcagaggaaguggaaggcauc

SEQ ID NO: 2265668 - RNA, 14 nt, Human
gugcagacuggagg

SEQ ID NO: 2265669 - RNA, 16 nt, Human
gugcagaaaacauugu

SEQ ID NO: 2265670 - RNA, 17 nt, Human
gugcagaaaacauuguu

SEQ ID NO: 2265671 - RNA, 13 nt, Human
gugcacugucacu

SEQ ID NO: 2265672 - RNA, 15 nt, Human
gugcacugucacuuu

SEQ ID NO: 2265673 - RNA, 23 nt, Human
gugcacugucacuuugcucuggg

SEQ ID NO: 2265674 - RNA, 14 nt, Human
gugcagaaaacauu

SEQ ID NO: 2265675 - RNA, 15 nt, Human
gugcagaaaacauug

SEQ ID NO: 2265676 - RNA, 15 nt, Human
gucuucucaggcucu

SEQ ID NO: 2265677 - RNA, 21 nt, Human
gucuuaaaaaguggaaaaaua

SEQ ID NO: 2265678 - RNA, 23 nt, Human
gucuucucauagcauuaacuaau

SEQ ID NO: 2265679 - RNA, 20 nt, Human
gucuucucauagcauuaacu

SEQ ID NO: 2265680 - RNA, 19 nt, Human
gucuucucauagcauuaac

SEQ ID NO: 2265681 - RNA, 17 nt, Human
gucuucucauagcauua

SEQ ID NO: 2265682 - RNA, 16 nt, Human
gucuucucauagcauu

SEQ ID NO: 2265683 - RNA, 22 nt, Human
gucuucucaggcucugcccugc

SEQ ID NO: 2265684 - RNA, 19 nt, Human
gucuucucaggcucugccc

SEQ ID NO: 2265685 - RNA, 18 nt, Human
gucuucucaggcucugcc

SEQ ID NO: 2265686 - RNA, 20 nt, Human
gucuucuccaccacgcuggg

SEQ ID NO: 2265687 - RNA, 17 nt, Human
gucuucuccaccacgcu

SEQ ID NO: 2265688 - RNA, 12 nt, Human
gucuucucccca

SEQ ID NO: 2265689 - RNA, 13 nt, Human
gucuucuccccag

SEQ ID NO: 2265690 - RNA, 16 nt, Human
gucuugaacuccuggc

SEQ ID NO: 2265691 - RNA, 17 nt, Human
gucuugaacuccuggcc

SEQ ID NO: 2265692 - RNA, 17 nt, Human
gucuucuuugcccacaa

SEQ ID NO: 2265693 - RNA, 14 nt, Human
gucuucuucagggu

SEQ ID NO: 2265694 - RNA, 16 nt, Human
gucuucuuacaugcau

SEQ ID NO: 2265695 - RNA, 13 nt, Human
gucuucugccugu

SEQ ID NO: 2265696 - RNA, 14 nt, Human
gucuucugccuguu

SEQ ID NO: 2265697 - RNA, 15 nt, Human
gucuucugccuguua

SEQ ID NO: 2265698 - RNA, 17 nt, Human
gucuucugccuguuaua

SEQ ID NO: 2265699 - RNA, 20 nt, Human
gucuucuuugcccacaaugc

SEQ ID NO: 2265700 - RNA, 12 nt, Human
gucuugaaagau

SEQ ID NO: 2265701 - RNA, 15 nt, Human
gucuugaaugucuuu

SEQ ID NO: 2265702 - RNA, 17 nt, Human
gucuugaaugucuuuug

SEQ ID NO: 2265703 - RNA, 19 nt, Human
gucuugaaugucuuuugaa

SEQ ID NO: 2265704 - RNA, 21 nt, Human
gucuugaacuccuggccucaa

SEQ ID NO: 2265705 - RNA, 18 nt, Human
gucuugaacuccuggccu

SEQ ID NO: 2265706 - RNA, 20 nt, Human
gucuugaacuccuggccuca

SEQ ID NO: 2265707 - RNA, 16 nt, Human
gucuugcaauggcagc

SEQ ID NO: 2265708 - RNA, 17 nt, Human
gucuugcaauggcagcc

SEQ ID NO: 2265709 - RNA, 18 nt, Human
gucuugcaauggcagccu

SEQ ID NO: 2265710 - RNA, 19 nt, Human
gucuugcaauggcagccuu

SEQ ID NO: 2265711 - RNA, 22 nt, Human
gucuugcuauggggagaaaaga

SEQ ID NO: 2265712 - RNA, 18 nt, Human
gucuugcuaccucaguca

SEQ ID NO: 2265713 - RNA, 14 nt, Human
gucuuggacacugu

SEQ ID NO: 2265714 - RNA, 15 nt, Human
gucuuggacacugua

SEQ ID NO: 2265715 - RNA, 18 nt, Human
gucuugaugaccaaaguc

SEQ ID NO: 2265716 - RNA, 23 nt, Human
gucuugcaauggcagccuuggca

SEQ ID NO: 2265717 - RNA, 20 nt, Human
gucuugcaauggcagccuug

SEQ ID NO: 2265718 - RNA, 21 nt, Human
gucuugcaauggcagccuugg

SEQ ID NO: 2265719 - RNA, 15 nt, Human
gucuugguauucuua

SEQ ID NO: 2265720 - RNA, 19 nt, Human
gucuugguuccagccugcc

SEQ ID NO: 2265721 - RNA, 17 nt, Human
gucuugguuccagccug

SEQ ID NO: 2265722 - RNA, 16 nt, Human
gucuuuuuucacuaca

SEQ ID NO: 2265723 - RNA, 16 nt, Human
gucuugguuccagccu

SEQ ID NO: 2265724 - RNA, 21 nt, Human
gucuugggcagagcuggcucu

SEQ ID NO: 2265725 - RNA, 22 nt, Human
gucuugggcagagcuggcucug

SEQ ID NO: 2265726 - RNA, 16 nt, Human
gucuugggcagagcug

SEQ ID NO: 2265727 - RNA, 16 nt, Human
gucuugggaaauauga

SEQ ID NO: 2265728 - RNA, 21 nt, Human
gucuugggaaauaugaaugcc

SEQ ID NO: 2265729 - RNA, 19 nt, Human
gucuugggcagagcuggcu

SEQ ID NO: 2265730 - RNA, 20 nt, Human
gucuugggcagagcuggcuc

SEQ ID NO: 2265731 - RNA, 18 nt, Human
gucuuggacacuguacaa

SEQ ID NO: 2265732 - RNA, 17 nt, Human
gucuuggagcugagccu

SEQ ID NO: 2265733 - RNA, 20 nt, Human
gucuuggcagcaccugucuc

SEQ ID NO: 2265734 - RNA, 18 nt, Human
gucuuggagcugagccuc

SEQ ID NO: 2265735 - RNA, 23 nt, Human
gucuuggagcugagccucucacc

SEQ ID NO: 2265736 - RNA, 22 nt, Human
gucuuggcagcaccugucuccu

SEQ ID NO: 2265737 - RNA, 15 nt, Human
gucuuggcggcagca

SEQ ID NO: 2265738 - RNA, 16 nt, Human
gucuuggcggcagcag

SEQ ID NO: 2265739 - RNA, 18 nt, Human
gucuuggcggcagcagcc

SEQ ID NO: 2265740 - RNA, 23 nt, Human
gucuuggcggcagcagccaucau

SEQ ID NO: 2265741 - RNA, 16 nt, Human
gucuuggcuuucaugu

SEQ ID NO: 2265742 - RNA, 20 nt, Human
gucuuggcuuucauguuauu

SEQ ID NO: 2265743 - RNA, 14 nt, Human
gucuguuuuccuuu

SEQ ID NO: 2265744 - RNA, 16 nt, Human
gucuguuuuccuuucu

SEQ ID NO: 2265745 - RNA, 20 nt, Human
gucuguuuuccuuucucacc

SEQ ID NO: 2265746 - RNA, 21 nt, Human
gucuguuuuccuuucucaccg

SEQ ID NO: 2265747 - RNA, 12 nt, Human
gucuguuuuccu

SEQ ID NO: 2265748 - RNA, 15 nt, Human
gucuguuuuaugacu

SEQ ID NO: 2265749 - RNA, 13 nt, Human
gucuguuuuauga

SEQ ID NO: 2265750 - RNA, 22 nt, Human
gucuguuggcaggcuggccagu

SEQ ID NO: 2265751 - RNA, 20 nt, Human
gucuguuggcaggcuggcca

SEQ ID NO: 2265752 - RNA, 21 nt, Human
gucuguuggcaggcuggccag

SEQ ID NO: 2265753 - RNA, 17 nt, Human
gucuguuuauaaacauu

SEQ ID NO: 2265754 - RNA, 13 nt, Human
gucuguucuugaa

SEQ ID NO: 2265755 - RNA, 15 nt, Human
gucuguucuugaagc

SEQ ID NO: 2265756 - RNA, 14 nt, Human
gucuguuggcaggc

SEQ ID NO: 2265757 - RNA, 16 nt, Human
gucuguuggcaggcug

SEQ ID NO: 2265758 - RNA, 18 nt, Human
gucuguuggcaggcuggc

SEQ ID NO: 2265759 - RNA, 19 nt, Human
gucuguuggcaggcuggcc

SEQ ID NO: 2265760 - RNA, 17 nt, Human
gucuguucuuuccaaag

SEQ ID NO: 2265761 - RNA, 14 nt, Human
gucuguucuuucca

SEQ ID NO: 2265762 - RNA, 16 nt, Human
gucuguuaacuuaaua

SEQ ID NO: 2265763 - RNA, 14 nt, Human
gucuguuacacugg

SEQ ID NO: 2265764 - RNA, 15 nt, Human
gucuguuaccauguc

SEQ ID NO: 2265765 - RNA, 22 nt, Human
gucuguguugcgugucgugggu

SEQ ID NO: 2265766 - RNA, 14 nt, Human
gucuguguuuuaau

SEQ ID NO: 2265767 - RNA, 17 nt, Human
gucuguucacuuuuccu

SEQ ID NO: 2265768 - RNA, 21 nt, Human
gucuguuccccauggccacuu

SEQ ID NO: 2265769 - RNA, 16 nt, Human
gucuguuaugcuguga

SEQ ID NO: 2265770 - RNA, 20 nt, Human
gucuguuaccaugucacugu

SEQ ID NO: 2265771 - RNA, 12 nt, Human
gucuguuagcca

SEQ ID NO: 2265772 - RNA, 20 nt, Human
gucuguguuccaaccacuga

SEQ ID NO: 2265773 - RNA, 22 nt, Human
gucuguguguuuaugugugugu

SEQ ID NO: 2265774 - RNA, 21 nt, Human
gucuguguguuuaugugugug

SEQ ID NO: 2265775 - RNA, 11 nt, Human
gucuguguguu

SEQ ID NO: 2265776 - RNA, 17 nt, Human
gucugugugcaagugug

SEQ ID NO: 2265777 - RNA, 20 nt, Human
gucugugugaugaacuuucu

SEQ ID NO: 2265778 - RNA, 21 nt, Human
gucuguggcuuucagccucug

SEQ ID NO: 2265779 - RNA, 20 nt, Human
gucuguggcuuucagccucu

SEQ ID NO: 2265780 - RNA, 13 nt, Human
gucuguggaucag

SEQ ID NO: 2265781 - RNA, 12 nt, Human
gucugugcugag

SEQ ID NO: 2265782 - RNA, 13 nt, Human
gucugugcugagg

SEQ ID NO: 2265783 - RNA, 14 nt, Human
gucugugcugaggc

SEQ ID NO: 2265784 - RNA, 20 nt, Human
gucuguguguguguaugugg

SEQ ID NO: 2265785 - RNA, 16 nt, Human
gucuguguguguguau

SEQ ID NO: 2265786 - RNA, 12 nt, Human
gucugugugugu

SEQ ID NO: 2265787 - RNA, 11 nt, Human
gucugugugug

SEQ ID NO: 2265788 - RNA, 11 nt, Human
gucugccaggg

SEQ ID NO: 2265789 - RNA, 12 nt, Human
gucugccagggc

SEQ ID NO: 2265790 - RNA, 13 nt, Human
gucugccagggcc

SEQ ID NO: 2265791 - RNA, 18 nt, Human
gucugccagccagcagcc

SEQ ID NO: 2265792 - RNA, 17 nt, Human
gucugccagccagcagc

SEQ ID NO: 2265793 - RNA, 23 nt, Human
gucugagacucucuuaggagcag

SEQ ID NO: 2265794 - RNA, 22 nt, Human
gucugucuucacagcucugugu

SEQ ID NO: 2265795 - RNA, 16 nt, Human
gucugucuucacagcu

SEQ ID NO: 2265796 - RNA, 18 nt, Human
gucugcuauauuuucaug

SEQ ID NO: 2265797 - RNA, 15 nt, Human
gucugcuauauuuuc

SEQ ID NO: 2265798 - RNA, 17 nt, Human
gucugcuauauuuucau

SEQ ID NO: 2265799 - RNA, 10 nt, Human
gucugcccuu

SEQ ID NO: 2265800 - RNA, 11 nt, Human
gucugccucuu

SEQ ID NO: 2265801 - RNA, 17 nt, Human
gucugcccuucacccca

SEQ ID NO: 2265802 - RNA, 12 nt, Human
gucugugcuagg

SEQ ID NO: 2265803 - RNA, 21 nt, Human
gucugugaauuggaccauccu

SEQ ID NO: 2265804 - RNA, 18 nt, Human
gucugugccauuuuguau

SEQ ID NO: 2265805 - RNA, 23 nt, Human
gucugugagaugcuagaacuccc

SEQ ID NO: 2265806 - RNA, 22 nt, Human
gucugugagaugcuagaacucc

SEQ ID NO: 2265807 - RNA, 21 nt, Human
gucugugagaugcuagaacuc

SEQ ID NO: 2265808 - RNA, 17 nt, Human
gucugugagaugcuaga

SEQ ID NO: 2265809 - RNA, 16 nt, Human
gucugugagaugcuag

SEQ ID NO: 2265810 - RNA, 15 nt, Human
gucugugagaugcua

SEQ ID NO: 2265811 - RNA, 19 nt, Human
gucucgugguaggacugua

SEQ ID NO: 2265812 - RNA, 12 nt, Human
gucucuagagca

SEQ ID NO: 2265813 - RNA, 16 nt, Human
gucucaggagcauggg

SEQ ID NO: 2265814 - RNA, 12 nt, Human
gucucaggagca

SEQ ID NO: 2265815 - RNA, 13 nt, Human
gucucgugguagg

SEQ ID NO: 2265816 - RNA, 15 nt, Human
gucucaggaccuagg

SEQ ID NO: 2265817 - RNA, 22 nt, Human
gucucagcagcgaccaccccug

SEQ ID NO: 2265818 - RNA, 13 nt, Human
gucucagccuccc

SEQ ID NO: 2265819 - RNA, 22 nt, Human
gucucacugugggaaggccagc

SEQ ID NO: 2265820 - RNA, 23 nt, Human
gucucacugugggaaggccagcu

SEQ ID NO: 2265821 - RNA, 21 nt, Human
gucucagcagcgaccaccccu

SEQ ID NO: 2265822 - RNA, 18 nt, Human
gucucuagugcugugaaa

SEQ ID NO: 2265823 - RNA, 17 nt, Human
gucucuagugcugugaa

SEQ ID NO: 2265824 - RNA, 16 nt, Human
gucucuagugcuguga

SEQ ID NO: 2265825 - RNA, 14 nt, Human
gucucuagugcugu

SEQ ID NO: 2265826 - RNA, 18 nt, Human
gucucuagagcagggauu

SEQ ID NO: 2265827 - RNA, 14 nt, Human
gucucuagccacuu

SEQ ID NO: 2265828 - RNA, 16 nt, Human
gucucuagccacuuug

SEQ ID NO: 2265829 - RNA, 13 nt, Human
gucucuaggcugg

SEQ ID NO: 2265830 - RNA, 14 nt, Human
gucucuaggcuggg

SEQ ID NO: 2265831 - RNA, 15 nt, Human
gucucuaggcugggg

SEQ ID NO: 2265832 - RNA, 15 nt, Human
gucucucucucucua

SEQ ID NO: 2265833 - RNA, 23 nt, Human
gucucucucccauggagccccag

SEQ ID NO: 2265834 - RNA, 14 nt, Human
gucucucucucucu

SEQ ID NO: 2265835 - RNA, 17 nt, Human
gucucuaggcuggggaa

SEQ ID NO: 2265836 - RNA, 13 nt, Human
gucucucucccau

SEQ ID NO: 2265837 - RNA, 16 nt, Human
gucucucucccaugga

SEQ ID NO: 2265838 - RNA, 17 nt, Human
gucucucucccauggag

SEQ ID NO: 2265839 - RNA, 15 nt, Human
gucucacucugucgc

SEQ ID NO: 2265840 - RNA, 16 nt, Human
gucucacucugucgcc

SEQ ID NO: 2265841 - RNA, 18 nt, Human
gucucacucugucgccca

SEQ ID NO: 2265842 - RNA, 19 nt, Human
gucucacucugucgcccag

SEQ ID NO: 2265843 - RNA, 22 nt, Human
gucucacucugucgcccagucu

SEQ ID NO: 2265844 - RNA, 23 nt, Human
gucucacgggcaugggcacuccc

SEQ ID NO: 2265845 - RNA, 15 nt, Human
gucucacugaaacau

SEQ ID NO: 2265846 - RNA, 21 nt, Human
gucucacugaaacauuuaaau

SEQ ID NO: 2265847 - RNA, 12 nt, Human
gucucugcugaa

SEQ ID NO: 2265848 - RNA, 18 nt, Human
gucucugccggcucuuuc

SEQ ID NO: 2265849 - RNA, 12 nt, Human
gucucugccucc

SEQ ID NO: 2265850 - RNA, 12 nt, Human
gucucugcugcc

SEQ ID NO: 2265851 - RNA, 13 nt, Human
gucucugcugccg

SEQ ID NO: 2265852 - RNA, 14 nt, Human
gucucugcugccgc

SEQ ID NO: 2265853 - RNA, 17 nt, Human
gucucugccggcucuuu

SEQ ID NO: 2265854 - RNA, 18 nt, Human
gucucugccucccucacc

SEQ ID NO: 2265855 - RNA, 17 nt, Human
gucucugcuggcccagc

SEQ ID NO: 2265856 - RNA, 16 nt, Human
gucucugcuggcccag

SEQ ID NO: 2265857 - RNA, 15 nt, Human
gucucugcuggccca

SEQ ID NO: 2265858 - RNA, 13 nt, Human
gucucugcuggcc

SEQ ID NO: 2265859 - RNA, 17 nt, Human
gucucuggaauuugaaa

SEQ ID NO: 2265860 - RNA, 15 nt, Human
gucucugaagugaaa

SEQ ID NO: 2265861 - RNA, 13 nt, Human
gucucugagcauu

SEQ ID NO: 2265862 - RNA, 21 nt, Human
gucucugaagugaaacugcuu

SEQ ID NO: 2265863 - RNA, 14 nt, Human
gucucugagggcuu

SEQ ID NO: 2265864 - RNA, 21 nt, Human
gucucugagggcuuccuuugg

SEQ ID NO: 2265865 - RNA, 19 nt, Human
gucucucucucucuacaaa

SEQ ID NO: 2265866 - RNA, 21 nt, Human
gucucucuggggccacacaga

SEQ ID NO: 2265867 - RNA, 20 nt, Human
gucucugcuggcccagccaa

SEQ ID NO: 2265868 - RNA, 16 nt, Human
gucucuggcaguucug

SEQ ID NO: 2265869 - RNA, 21 nt, Human
gucucuggcaguucuggaaug

SEQ ID NO: 2265870 - RNA, 12 nt, Human
gucucuggccug

SEQ ID NO: 2265871 - RNA, 13 nt, Human
gucucuggccugu

SEQ ID NO: 2265872 - RNA, 21 nt, Human
gucucuggauuauauuaugaa

SEQ ID NO: 2265873 - RNA, 18 nt, Human
gucucuucuccacuggau

SEQ ID NO: 2265874 - RNA, 17 nt, Human
gucucugguuccucccc

SEQ ID NO: 2265875 - RNA, 16 nt, Human
gucucugguuccuccc

SEQ ID NO: 2265876 - RNA, 23 nt, Human
gucucuugagggagcuuagccaa

SEQ ID NO: 2265877 - RNA, 13 nt, Human
gucucuugaggga

SEQ ID NO: 2265878 - RNA, 13 nt, Human
gucugacuguuuc

SEQ ID NO: 2265879 - RNA, 22 nt, Human
gucucuucugagcuauuucauc

SEQ ID NO: 2265880 - RNA, 14 nt, Human
gucucuucugagcu

SEQ ID NO: 2265881 - RNA, 15 nt, Human
gucgggggcuggccu

SEQ ID NO: 2265882 - RNA, 18 nt, Human
gucgggaguucgagacca

SEQ ID NO: 2265883 - RNA, 23 nt, Human
gucggguuuuauuguuuaaaauc

SEQ ID NO: 2265884 - RNA, 14 nt, Human
gucggcugaccaug

SEQ ID NO: 2265885 - RNA, 17 nt, Human
gucggcugaccaugcuc

SEQ ID NO: 2265886 - RNA, 18 nt, Human
gucggcugaccaugcuca

SEQ ID NO: 2265887 - RNA, 16 nt, Human
gucgggcaugacacga

SEQ ID NO: 2265888 - RNA, 14 nt, Human
gucggaggcuuggg

SEQ ID NO: 2265889 - RNA, 17 nt, Human
gucggaggcuugggacc

SEQ ID NO: 2265890 - RNA, 16 nt, Human
gucggaggcuugggac

SEQ ID NO: 2265891 - RNA, 20 nt, Human
gucggccucuaaccccaggc

SEQ ID NO: 2265892 - RNA, 21 nt, Human
gucggccucuaaccccaggcc

SEQ ID NO: 2265893 - RNA, 22 nt, Human
gucggccucuaaccccaggccc

SEQ ID NO: 2265894 - RNA, 23 nt, Human
gucggccucuaaccccaggcccc

SEQ ID NO: 2265895 - RNA, 17 nt, Human
guccuuagaacauuuua

SEQ ID NO: 2265896 - RNA, 21 nt, Human
gucggaaaacaugcuacacac

SEQ ID NO: 2265897 - RNA, 18 nt, Human
gucccugccccagcaaga

SEQ ID NO: 2265898 - RNA, 15 nt, Human
gucccugccaaugga

SEQ ID NO: 2265899 - RNA, 11 nt, Human
gucccugccaa

SEQ ID NO: 2265900 - RNA, 14 nt, Human
gucccugccaaugg

SEQ ID NO: 2265901 - RNA, 21 nt, Human
guccuuaccagcagagcaccu

SEQ ID NO: 2265902 - RNA, 15 nt, Human
guccuuagaacauuu

SEQ ID NO: 2265903 - RNA, 12 nt, Human
gucccugccuca

SEQ ID NO: 2265904 - RNA, 18 nt, Human
guccuuaccagcagagca

SEQ ID NO: 2265905 - RNA, 19 nt, Human
guccuuaccagcagagcac

SEQ ID NO: 2265906 - RNA, 18 nt, Human
gucucacuauguugccca

SEQ ID NO: 2265907 - RNA, 11 nt, Human
gucucacucug

SEQ ID NO: 2265908 - RNA, 19 nt, Human
gucucacuauguugcccag

SEQ ID NO: 2265909 - RNA, 23 nt, Human
gucuaaauauuuccuuaaacugu

SEQ ID NO: 2265910 - RNA, 15 nt, Human
gucuaaaugcugaaa

SEQ ID NO: 2265911 - RNA, 16 nt, Human
gucuaaauauuuccuu

SEQ ID NO: 2265912 - RNA, 13 nt, Human
gucuaaauauuuc

SEQ ID NO: 2265913 - RNA, 13 nt, Human
gucuaaauuugaa

SEQ ID NO: 2265914 - RNA, 11 nt, Human
gucuaaaguuu

SEQ ID NO: 2265915 - RNA, 15 nt, Human
gucuaaaguuuacag

SEQ ID NO: 2265916 - RNA, 16 nt, Human
gucuaaaguuuacagu

SEQ ID NO: 2265917 - RNA, 17 nt, Human
gucuaaaguuuacagua

SEQ ID NO: 2265918 - RNA, 16 nt, Human
gucuaaauaaguuugc

SEQ ID NO: 2265919 - RNA, 21 nt, Human
gucuaagauaguaacaaugaa

SEQ ID NO: 2265920 - RNA, 22 nt, Human
gucguggcagauaaucagccuc

SEQ ID NO: 2265921 - RNA, 15 nt, Human
gucguggcagauaau

SEQ ID NO: 2265922 - RNA, 23 nt, Human
gucguggcagauaaucagccucu

SEQ ID NO: 2265923 - RNA, 17 nt, Human
gucguggggugugcugg

SEQ ID NO: 2265924 - RNA, 18 nt, Human
gucgugccuguguccaug

SEQ ID NO: 2265925 - RNA, 17 nt, Human
gucguggagaugucuuc

SEQ ID NO: 2265926 - RNA, 17 nt, Human
gucgugagcucuuguga

SEQ ID NO: 2265927 - RNA, 17 nt, Human
gucgucgcacagucucu

SEQ ID NO: 2265928 - RNA, 12 nt, Human
gucgugccugug

SEQ ID NO: 2265929 - RNA, 19 nt, Human
gucgucgcacagucucucu

SEQ ID NO: 2265930 - RNA, 21 nt, Human
gucgugccuccuuccaccucc

SEQ ID NO: 2265931 - RNA, 13 nt, Human
gucgugccugugu

SEQ ID NO: 2265932 - RNA, 14 nt, Human
gucgugccuguguc

SEQ ID NO: 2265933 - RNA, 15 nt, Human
gucgugccugugucc

SEQ ID NO: 2265934 - RNA, 17 nt, Human
gucgugccuguguccau

SEQ ID NO: 2265935 - RNA, 17 nt, Human
gucggggggacagcucc

SEQ ID NO: 2265936 - RNA, 16 nt, Human
gucgggggcuggccua

SEQ ID NO: 2265937 - RNA, 20 nt, Human
gucguagccaaggugggcug

SEQ ID NO: 2265938 - RNA, 15 nt, Human
gucgucgcacagucu

SEQ ID NO: 2265939 - RNA, 18 nt, Human
gucgucaaagcugaaaug

SEQ ID NO: 2265940 - RNA, 22 nt, Human
guauuuucccccuuuucugcau

SEQ ID NO: 2265941 - RNA, 11 nt, Human
guauuuuccug

SEQ ID NO: 2265942 - RNA, 16 nt, Human
guauuuuccuguaaaa

SEQ ID NO: 2265943 - RNA, 17 nt, Human
guauuuuauuguaacag

SEQ ID NO: 2265944 - RNA, 16 nt, Human
guauuuuccaagugug

SEQ ID NO: 2265945 - RNA, 17 nt, Human
guauuuuccaagugugc

SEQ ID NO: 2265946 - RNA, 20 nt, Human
guauuuuccaagugugcaua

SEQ ID NO: 2265947 - RNA, 13 nt, Human
guauuuucuuucu

SEQ ID NO: 2265948 - RNA, 15 nt, Human
guauuuucuuucucu

SEQ ID NO: 2265949 - RNA, 17 nt, Human
guauuuuggagaaauua

SEQ ID NO: 2265950 - RNA, 18 nt, Human
guauuuuguauuguuuca

SEQ ID NO: 2265951 - RNA, 18 nt, Human
guauuuucuuucucuacu

SEQ ID NO: 2265952 - RNA, 14 nt, Human
guauuuuggagaaa

SEQ ID NO: 2265953 - RNA, 21 nt, Human
guauuuuaguaagagauuccu

SEQ ID NO: 2265954 - RNA, 19 nt, Human
guauuuuaggcagggauuu

SEQ ID NO: 2265955 - RNA, 14 nt, Human
guauuuuacuaaua

SEQ ID NO: 2265956 - RNA, 22 nt, Human
guauuuuaucuuugauucuccu

SEQ ID NO: 2265957 - RNA, 13 nt, Human
guauuuuauugua

SEQ ID NO: 2265958 - RNA, 23 nt, Human
guauuuuaucuuugauucuccuu

SEQ ID NO: 2265959 - RNA, 22 nt, Human
guauuaaguuguuaauaaaagu

SEQ ID NO: 2265960 - RNA, 16 nt, Human
guauuaagaaugaaau

SEQ ID NO: 2265961 - RNA, 14 nt, Human
guauuaauauucau

SEQ ID NO: 2265962 - RNA, 13 nt, Human
guauuacacugua

SEQ ID NO: 2265963 - RNA, 13 nt, Human
guauuuuaaucac

SEQ ID NO: 2265964 - RNA, 20 nt, Human
guauuuuaaaagaaugauua

SEQ ID NO: 2265965 - RNA, 17 nt, Human
gucaagucucugcuggc

SEQ ID NO: 2265966 - RNA, 14 nt, Human
gucaagucucugcu

SEQ ID NO: 2265967 - RNA, 13 nt, Human
gucaagucaacca

SEQ ID NO: 2265968 - RNA, 15 nt, Human
gucaaguaagaagac

SEQ ID NO: 2265969 - RNA, 14 nt, Human
gucaaguaagaaga

SEQ ID NO: 2265970 - RNA, 19 nt, Human
guauuuuguuuuugucuua

SEQ ID NO: 2265971 - RNA, 15 nt, Human
gucaagugaaaaagg

SEQ ID NO: 2265972 - RNA, 22 nt, Human
gucaauaaaauccauacauuug

SEQ ID NO: 2265973 - RNA, 21 nt, Human
gucaagucucugcuggcccag

SEQ ID NO: 2265974 - RNA, 20 nt, Human
gucaauacaguacaggcagc

SEQ ID NO: 2265975 - RNA, 19 nt, Human
gucaauacaguacaggcag

SEQ ID NO: 2265976 - RNA, 23 nt, Human
gucaauaaaauccauacauuugu

SEQ ID NO: 2265977 - RNA, 17 nt, Human
gucaccaccuucccagc

SEQ ID NO: 2265978 - RNA, 16 nt, Human
gucaccaccuucccag

SEQ ID NO: 2265979 - RNA, 15 nt, Human
gucaccaccuuccca

SEQ ID NO: 2265980 - RNA, 14 nt, Human
gucaccaccuuccc

SEQ ID NO: 2265981 - RNA, 11 nt, Human
gucaccaccuu

SEQ ID NO: 2265982 - RNA, 13 nt, Human
gucaccaccucuc

SEQ ID NO: 2265983 - RNA, 20 nt, Human
gucaccaccuucccagcucu

SEQ ID NO: 2265984 - RNA, 19 nt, Human
gucaccaccuucccagcuc

SEQ ID NO: 2265985 - RNA, 22 nt, Human
gucaccaccuucccagcucucc

SEQ ID NO: 2265986 - RNA, 15 nt, Human
gucaccaucucaggc

SEQ ID NO: 2265987 - RNA, 18 nt, Human
gucaccaggaauguuaaa

SEQ ID NO: 2265988 - RNA, 16 nt, Human
gucaccagcuccuccc

SEQ ID NO: 2265989 - RNA, 23 nt, Human
gucaccaggaauguuaaagucag

SEQ ID NO: 2265990 - RNA, 14 nt, Human
gucaccagcuccuc

SEQ ID NO: 2265991 - RNA, 21 nt, Human
gucaauacaguacaggcagca

SEQ ID NO: 2265992 - RNA, 14 nt, Human
gucaauauuaaaua

SEQ ID NO: 2265993 - RNA, 15 nt, Human
gucaauauuaaauac

SEQ ID NO: 2265994 - RNA, 16 nt, Human
gucaauauuaaauaca

SEQ ID NO: 2265995 - RNA, 17 nt, Human
gucaauauuaaauacag

SEQ ID NO: 2265996 - RNA, 18 nt, Human
gucaauauuaaauacaga

SEQ ID NO: 2265997 - RNA, 20 nt, Human
gucaauauuaaauacagaca

SEQ ID NO: 2265998 - RNA, 22 nt, Human
gucaauauuaaauacagacacu

SEQ ID NO: 2265999 - RNA, 16 nt, Human
gucaauccccucauuc

SEQ ID NO: 2266000 - RNA, 13 nt, Human
gucaauauuuaaa

SEQ ID NO: 2266001 - RNA, 22 nt, Human
gucaauccaagagucugaugau

SEQ ID NO: 2266002 - RNA, 23 nt, Human
gucaauauuaaauacagacacua

SEQ ID NO: 2266003 - RNA, 12 nt, Human
gucaauauuuaa

SEQ ID NO: 2266004 - RNA, 16 nt, Human
gucaauccugugggug

SEQ ID NO: 2266005 - RNA, 15 nt, Human
gucaauccugugggu

SEQ ID NO: 2266006 - RNA, 22 nt, Human
gucaauccccucauucaggaaa

SEQ ID NO: 2266007 - RNA, 17 nt, Human
gucaauccccucauuca

SEQ ID NO: 2266008 - RNA, 19 nt, Human
gucaauccugugggugaag

SEQ ID NO: 2266009 - RNA, 15 nt, Human
gucaaugcagccccc

SEQ ID NO: 2266010 - RNA, 22 nt, Human
gucacuacucacagucucuuua

SEQ ID NO: 2266011 - RNA, 17 nt, Human
gucacuacucacagucu

SEQ ID NO: 2266012 - RNA, 14 nt, Human
gucacuacucacag

SEQ ID NO: 2266013 - RNA, 23 nt, Human
gucacuacgugacuguggcacac

SEQ ID NO: 2266014 - RNA, 23 nt, Human
gucacucagauggaaccgcagga

SEQ ID NO: 2266015 - RNA, 14 nt, Human
gucacucauugcug

SEQ ID NO: 2266016 - RNA, 24 nt, Human
gucacucauugcugagccucugcu

SEQ ID NO: 2266017 - RNA, 11 nt, Human
gucacucccaa

SEQ ID NO: 2266018 - RNA, 14 nt, Human
gucacucccaagcc

SEQ ID NO: 2266019 - RNA, 23 nt, Human
gucacucauugcugagccucugc

SEQ ID NO: 2266020 - RNA, 22 nt, Human
gucacucauugcugagccucug

SEQ ID NO: 2266021 - RNA, 21 nt, Human
gucacucauugcugagccucu

SEQ ID NO: 2266022 - RNA, 20 nt, Human
gucacucauugcugagccuc

SEQ ID NO: 2266023 - RNA, 19 nt, Human
gucacucauugcugagccu

SEQ ID NO: 2266024 - RNA, 18 nt, Human
gucacucauugcugagcc

SEQ ID NO: 2266025 - RNA, 15 nt, Human
gucaccccuccagga

SEQ ID NO: 2266026 - RNA, 20 nt, Human
gucaccccuccaggaaugau

SEQ ID NO: 2266027 - RNA, 22 nt, Human
gucaccccggccaccugcggug

SEQ ID NO: 2266028 - RNA, 17 nt, Human
gucaccccggccaccug

SEQ ID NO: 2266029 - RNA, 18 nt, Human
gucaccccggccaccugc

SEQ ID NO: 2266030 - RNA, 21 nt, Human
gucacuccuggggccucuugg

SEQ ID NO: 2266031 - RNA, 13 nt, Human
gucacuccugggg

SEQ ID NO: 2266032 - RNA, 12 nt, Human
gucacuccuggg

SEQ ID NO: 2266033 - RNA, 18 nt, Human
gucacucccaagcccccu

SEQ ID NO: 2266034 - RNA, 22 nt, Human
gucacucuggcagcucagagag

SEQ ID NO: 2266035 - RNA, 18 nt, Human
gucagacgccugaggaac

SEQ ID NO: 2266036 - RNA, 17 nt, Human
gucagacgccugaggaa

SEQ ID NO: 2266037 - RNA, 16 nt, Human
gucagacgccugagga

SEQ ID NO: 2266038 - RNA, 17 nt, Human
gucacucuggcagcuca

SEQ ID NO: 2266039 - RNA, 19 nt, Human
gucacucuggcagcucaga

SEQ ID NO: 2266040 - RNA, 12 nt, Human
gucacucuggca

SEQ ID NO: 2266041 - RNA, 13 nt, Human
gucacucuggcag

SEQ ID NO: 2266042 - RNA, 14 nt, Human
gucacucuggcagc

SEQ ID NO: 2266043 - RNA, 16 nt, Human
gucacucuggcagcuc

SEQ ID NO: 2266044 - RNA, 13 nt, Human
gucagagcuggga

SEQ ID NO: 2266045 - RNA, 13 nt, Human
gucagaggauggc

SEQ ID NO: 2266046 - RNA, 12 nt, Human
gucagagcuggg

SEQ ID NO: 2266047 - RNA, 14 nt, Human
gucagaggauggcc

SEQ ID NO: 2266048 - RNA, 15 nt, Human
gucagaggauggcca

SEQ ID NO: 2266049 - RNA, 16 nt, Human
gucagaggauggccag

SEQ ID NO: 2266050 - RNA, 19 nt, Human
gucagaggauggccagugu

SEQ ID NO: 2266051 - RNA, 14 nt, Human
gucagagcugggag

SEQ ID NO: 2266052 - RNA, 21 nt, Human
gucagagaggagucagagaga

SEQ ID NO: 2266053 - RNA, 19 nt, Human
gucagagaggagucagaga

SEQ ID NO: 2266054 - RNA, 15 nt, Human
gucagagccugcagu

SEQ ID NO: 2266055 - RNA, 16 nt, Human
gucagagccugcaguu

SEQ ID NO: 2266056 - RNA, 18 nt, Human
gucagacuggcuggcugc

SEQ ID NO: 2266057 - RNA, 14 nt, Human
gucagacuggcugg

SEQ ID NO: 2266058 - RNA, 24 nt, Human
gucagacugcugggacuggccagg

SEQ ID NO: 2266059 - RNA, 22 nt, Human
gucagacugcugggacuggcca

SEQ ID NO: 2266060 - RNA, 20 nt, Human
gucagacugcugggacuggc

SEQ ID NO: 2266061 - RNA, 16 nt, Human
gucagacugcugggac

SEQ ID NO: 2266062 - RNA, 15 nt, Human
gucagacugcuggga

SEQ ID NO: 2266063 - RNA, 14 nt, Human
gucagacugcuggg

SEQ ID NO: 2266064 - RNA, 17 nt, Human
gucagagaggagucaga

SEQ ID NO: 2266065 - RNA, 12 nt, Human
gucagagagaau

SEQ ID NO: 2266066 - RNA, 15 nt, Human
gucagacuuuaaaga

SEQ ID NO: 2266067 - RNA, 16 nt, Human
gucagagacugcugug

SEQ ID NO: 2266068 - RNA, 16 nt, Human
gucagacuuuaaagaa

SEQ ID NO: 2266069 - RNA, 22 nt, Human
gucagacuggcuggcugcagug

SEQ ID NO: 2266070 - RNA, 14 nt, Human
gucagagccugcag

SEQ ID NO: 2266071 - RNA, 15 nt, Human
gucagauacaaugua

SEQ ID NO: 2266072 - RNA, 20 nt, Human
gucagaggauggccaguguc

SEQ ID NO: 2266073 - RNA, 21 nt, Human
gucagaggauggccagugucu

SEQ ID NO: 2266074 - RNA, 21 nt, Human
gucagaggcuaauucugcaga

SEQ ID NO: 2266075 - RNA, 19 nt, Human
gucagcuacuaaugauguu

SEQ ID NO: 2266076 - RNA, 20 nt, Human
gucagcaaaaagcaaaauca

SEQ ID NO: 2266077 - RNA, 22 nt, Human
gucagcaaaaagcaaaaucauu

SEQ ID NO: 2266078 - RNA, 21 nt, Human
gucagauuuccagucuccacc

SEQ ID NO: 2266079 - RNA, 15 nt, Human
gucagcaaaaagcaa

SEQ ID NO: 2266080 - RNA, 16 nt, Human
gucagcaaaaagcaaa

SEQ ID NO: 2266081 - RNA, 19 nt, Human
gucagcuccccucggagaa

SEQ ID NO: 2266082 - RNA, 14 nt, Human
gucagauuuccagu

SEQ ID NO: 2266083 - RNA, 18 nt, Human
gucagaugggaagacaug

SEQ ID NO: 2266084 - RNA, 22 nt, Human
gucagaugcugugcaaauguua

SEQ ID NO: 2266085 - RNA, 21 nt, Human
guccaccaugggguccuacca

SEQ ID NO: 2266086 - RNA, 13 nt, Human
guccacaggaagu

SEQ ID NO: 2266087 - RNA, 13 nt, Human
guccacccaggag

SEQ ID NO: 2266088 - RNA, 12 nt, Human
guccacccagga

SEQ ID NO: 2266089 - RNA, 23 nt, Human
guccacccaggagccccgaggcc

SEQ ID NO: 2266090 - RNA, 21 nt, Human
guccaccuggccccaugucuc

SEQ ID NO: 2266091 - RNA, 14 nt, Human
guccacccagcaaa

SEQ ID NO: 2266092 - RNA, 20 nt, Human
guccacccaccuaugugcca

SEQ ID NO: 2266093 - RNA, 11 nt, Human
guccacccagc

SEQ ID NO: 2266094 - RNA, 22 nt, Human
guccaccugagcugccauccag

SEQ ID NO: 2266095 - RNA, 15 nt, Human
guccacggcucuagg

SEQ ID NO: 2266096 - RNA, 16 nt, Human
guccacucccagugcu

SEQ ID NO: 2266097 - RNA, 12 nt, Human
guccacucccag

SEQ ID NO: 2266098 - RNA, 15 nt, Human
guccacucccagugc

SEQ ID NO: 2266099 - RNA, 18 nt, Human
guccacgacugucuccau

SEQ ID NO: 2266100 - RNA, 16 nt, Human
guccacgacugucucc

SEQ ID NO: 2266101 - RNA, 15 nt, Human
guccacgacugucuc

SEQ ID NO: 2266102 - RNA, 22 nt, Human
guccagagagagaagugccccu

SEQ ID NO: 2266103 - RNA, 21 nt, Human
guccagaccuuguucacacuc

SEQ ID NO: 2266104 - RNA, 20 nt, Human
guccagagagagaagugccc

SEQ ID NO: 2266105 - RNA, 12 nt, Human
guccacugucac

SEQ ID NO: 2266106 - RNA, 16 nt, Human
guccagacagccugua

SEQ ID NO: 2266107 - RNA, 23 nt, Human
guccagagagagaagugccccug

SEQ ID NO: 2266108 - RNA, 15 nt, Human
guccagauuuacacu

SEQ ID NO: 2266109 - RNA, 17 nt, Human
guccagauuuacacugg

SEQ ID NO: 2266110 - RNA, 19 nt, Human
guccagauuuacacuggga

SEQ ID NO: 2266111 - RNA, 18 nt, Human
guccagggcuagugacuu

SEQ ID NO: 2266112 - RNA, 11 nt, Human
guccaggggau

SEQ ID NO: 2266113 - RNA, 14 nt, Human
guccaggggccccu

SEQ ID NO: 2266114 - RNA, 18 nt, Human
guccaggggccccuccag

SEQ ID NO: 2266115 - RNA, 19 nt, Human
guccaggggccccuccagc

SEQ ID NO: 2266116 - RNA, 13 nt, Human
guccagccugggc

SEQ ID NO: 2266117 - RNA, 11 nt, Human
guccagccugg

SEQ ID NO: 2266118 - RNA, 20 nt, Human
guccagggcccugagcucgg

SEQ ID NO: 2266119 - RNA, 22 nt, Human
guccagccgccauugccaccag

SEQ ID NO: 2266120 - RNA, 20 nt, Human
guccagccgccauugccacc

SEQ ID NO: 2266121 - RNA, 18 nt, Human
guccagcccuggcugaag

SEQ ID NO: 2266122 - RNA, 19 nt, Human
guccagcccuggcugaagg

SEQ ID NO: 2266123 - RNA, 20 nt, Human
guccagcccuggcugaagga

SEQ ID NO: 2266124 - RNA, 23 nt, Human
guccagcccuggcugaaggacug

SEQ ID NO: 2266125 - RNA, 22 nt, Human
guccagauuuacacugggagag

SEQ ID NO: 2266126 - RNA, 21 nt, Human
guccagauuuacacugggaga

SEQ ID NO: 2266127 - RNA, 14 nt, Human
guccagcccuggcu

SEQ ID NO: 2266128 - RNA, 16 nt, Human
guccagcccuggcuga

SEQ ID NO: 2266129 - RNA, 17 nt, Human
guccagcccuggcugaa

SEQ ID NO: 2266130 - RNA, 21 nt, Human
gucccaccuuggcugcaggga

SEQ ID NO: 2266131 - RNA, 16 nt, Human
guccagucucuucugc

SEQ ID NO: 2266132 - RNA, 23 nt, Human
guccaggggccccuccagcuugu

SEQ ID NO: 2266133 - RNA, 20 nt, Human
guccaggggccccuccagcu

SEQ ID NO: 2266134 - RNA, 21 nt, Human
guccaggggccccuccagcuu

SEQ ID NO: 2266135 - RNA, 22 nt, Human
gucauugcuguugucccucugc

SEQ ID NO: 2266136 - RNA, 23 nt, Human
gucagcaaaaagcaaaaucauuu

SEQ ID NO: 2266137 - RNA, 18 nt, Human
gucauugcuguugucccu

SEQ ID NO: 2266138 - RNA, 14 nt, Human
gucauuggcuuuau

SEQ ID NO: 2266139 - RNA, 17 nt, Human
gucauuggcuuuauccu

SEQ ID NO: 2266140 - RNA, 21 nt, Human
gucauuaugagaggcaaugau

SEQ ID NO: 2266141 - RNA, 22 nt, Human
gucauuauagaucccccagacu

SEQ ID NO: 2266142 - RNA, 19 nt, Human
gucauuauccuugcuauga

SEQ ID NO: 2266143 - RNA, 13 nt, Human
gucauuagccuga

SEQ ID NO: 2266144 - RNA, 16 nt, Human
gucauuagacuccucc

SEQ ID NO: 2266145 - RNA, 19 nt, Human
gucauuagccugaguagaa

SEQ ID NO: 2266146 - RNA, 21 nt, Human
gucauuagccugaguagaaag

SEQ ID NO: 2266147 - RNA, 15 nt, Human
gucauucaauaaauu

SEQ ID NO: 2266148 - RNA, 14 nt, Human
gucauucagaaaaa

SEQ ID NO: 2266149 - RNA, 16 nt, Human
gucauucguucugugg

SEQ ID NO: 2266150 - RNA, 17 nt, Human
gucagcuacuaaugaug

SEQ ID NO: 2266151 - RNA, 16 nt, Human
gucagcucccuucucu

SEQ ID NO: 2266152 - RNA, 23 nt, Human
gucagcuccccucggagaagagc

SEQ ID NO: 2266153 - RNA, 22 nt, Human
gucagcuccccucggagaagag

SEQ ID NO: 2266154 - RNA, 21 nt, Human
gucagcuccccucggagaaga

SEQ ID NO: 2266155 - RNA, 22 nt, Human
gucauuaaaauaaauaaaugca

SEQ ID NO: 2266156 - RNA, 18 nt, Human
gucagcuuugccuuccac

SEQ ID NO: 2266157 - RNA, 14 nt, Human
gucauuaaaauaaa

SEQ ID NO: 2266158 - RNA, 12 nt, Human
gucauuaaaggu

SEQ ID NO: 2266159 - RNA, 11 nt, Human
gucauuaaaug

SEQ ID NO: 2266160 - RNA, 23 nt, Human
gucagcuuugccuuccacgcugu

SEQ ID NO: 2266161 - RNA, 17 nt, Human
gucagcuuugccuucca

SEQ ID NO: 2266162 - RNA, 16 nt, Human
gucagcuuugccuucc

SEQ ID NO: 2266163 - RNA, 20 nt, Human
gucagcuugcugcccuaggc

SEQ ID NO: 2266164 - RNA, 16 nt, Human
gucagcuugcugcccu

SEQ ID NO: 2266165 - RNA, 15 nt, Human
gucagcucccuucuc

SEQ ID NO: 2266166 - RNA, 19 nt, Human
gucccuccacguucacccc

SEQ ID NO: 2266167 - RNA, 20 nt, Human
gucccuccacguucaccccu

SEQ ID NO: 2266168 - RNA, 21 nt, Human
gucccuccacguucaccccuc

SEQ ID NO: 2266169 - RNA, 23 nt, Human
gucccucaaaugacccaaagacc

SEQ ID NO: 2266170 - RNA, 12 nt, Human
gucccucccacc

SEQ ID NO: 2266171 - RNA, 15 nt, Human
gucccuaugcauauc

SEQ ID NO: 2266172 - RNA, 22 nt, Human
gucccuauguauuugcaguuca

SEQ ID NO: 2266173 - RNA, 20 nt, Human
gucccucaaaugacccaaag

SEQ ID NO: 2266174 - RNA, 23 nt, Human
gucccuccgggaccuggugcugc

SEQ ID NO: 2266175 - RNA, 21 nt, Human
gucccucccaccucugugacc

SEQ ID NO: 2266176 - RNA, 12 nt, Human
gucccuccuggg

SEQ ID NO: 2266177 - RNA, 13 nt, Human
gucccuccuggga

SEQ ID NO: 2266178 - RNA, 14 nt, Human
gucccuccugggau

SEQ ID NO: 2266179 - RNA, 21 nt, Human
gucccuccugggaucugcucg

SEQ ID NO: 2266180 - RNA, 16 nt, Human
gucccucccccuuguc

SEQ ID NO: 2266181 - RNA, 17 nt, Human
gucccucccaccucugu

SEQ ID NO: 2266182 - RNA, 18 nt, Human
gucccucccaccucugug

SEQ ID NO: 2266183 - RNA, 13 nt, Human
gucccucccaccu

SEQ ID NO: 2266184 - RNA, 14 nt, Human
gucccucccaccuc

SEQ ID NO: 2266185 - RNA, 15 nt, Human
gucccucccaccucu

SEQ ID NO: 2266186 - RNA, 16 nt, Human
gucccucccaccucug

SEQ ID NO: 2266187 - RNA, 21 nt, Human
gucccuacaccccuccccugc

SEQ ID NO: 2266188 - RNA, 16 nt, Human
gucccuacaccccucc

SEQ ID NO: 2266189 - RNA, 21 nt, Human
gucccuaccgagucucuucuc

SEQ ID NO: 2266190 - RNA, 22 nt, Human
gucccuaccgagucucuucucc

SEQ ID NO: 2266191 - RNA, 23 nt, Human
gucccuaccgagucucuucucca

SEQ ID NO: 2266192 - RNA, 18 nt, Human
gucccuaauaaagcugug

SEQ ID NO: 2266193 - RNA, 20 nt, Human
gucccuaauaaagcugugug

SEQ ID NO: 2266194 - RNA, 14 nt, Human
gucccucucaggca

SEQ ID NO: 2266195 - RNA, 13 nt, Human
gucccucucaggc

SEQ ID NO: 2266196 - RNA, 21 nt, Human
gucccucucggaaggcuggcu

SEQ ID NO: 2266197 - RNA, 16 nt, Human
gucccucucaggcaug

SEQ ID NO: 2266198 - RNA, 14 nt, Human
gucccucugcccca

SEQ ID NO: 2266199 - RNA, 11 nt, Human
gucccucugcc

SEQ ID NO: 2266200 - RNA, 21 nt, Human
gucccucugccccauccucca

SEQ ID NO: 2266201 - RNA, 20 nt, Human
gucccucugccccauccucc

SEQ ID NO: 2266202 - RNA, 11 nt, Human
gucccucugug

SEQ ID NO: 2266203 - RNA, 12 nt, Human
gucccucugugu

SEQ ID NO: 2266204 - RNA, 13 nt, Human
gucccucugugua

SEQ ID NO: 2266205 - RNA, 18 nt, Human
gucccugacucucuguga

SEQ ID NO: 2266206 - RNA, 17 nt, Human
gucccugacucucugug

SEQ ID NO: 2266207 - RNA, 18 nt, Human
gucccugaggcagguccc

SEQ ID NO: 2266208 - RNA, 16 nt, Human
gucccugaagagaagg

SEQ ID NO: 2266209 - RNA, 14 nt, Human
gucccucuguguau

SEQ ID NO: 2266210 - RNA, 22 nt, Human
gucccucuguguauuugcuuuu

SEQ ID NO: 2266211 - RNA, 20 nt, Human
gucccugacucucugugacc

SEQ ID NO: 2266212 - RNA, 22 nt, Human
gucccugaggcagguccccaga

SEQ ID NO: 2266213 - RNA, 16 nt, Human
gucccugcacuugcag

SEQ ID NO: 2266214 - RNA, 19 nt, Human
gucccugcacuugcagacu

SEQ ID NO: 2266215 - RNA, 21 nt, Human
gucccugcacuugcagacucu

SEQ ID NO: 2266216 - RNA, 20 nt, Human
gucccaccuuggcugcaggg

SEQ ID NO: 2266217 - RNA, 22 nt, Human
gucccacgaauuugcuggggaa

SEQ ID NO: 2266218 - RNA, 23 nt, Human
gucccaccuuggcugcagggagu

SEQ ID NO: 2266219 - RNA, 12 nt, Human
gucccaggcaga

SEQ ID NO: 2266220 - RNA, 20 nt, Human
gucccacgaauuugcugggg

SEQ ID NO: 2266221 - RNA, 17 nt, Human
gucccacuaucugggug

SEQ ID NO: 2266222 - RNA, 15 nt, Human
gucccaggcugagcc

SEQ ID NO: 2266223 - RNA, 17 nt, Human
gucccaggcugagccuc

SEQ ID NO: 2266224 - RNA, 16 nt, Human
gucccaggcugagccu

SEQ ID NO: 2266225 - RNA, 19 nt, Human
gucccaggcugagccucag

SEQ ID NO: 2266226 - RNA, 18 nt, Human
gucccaggcugagccuca

SEQ ID NO: 2266227 - RNA, 21 nt, Human
gucccaggcugagccucaguc

SEQ ID NO: 2266228 - RNA, 14 nt, Human
gucccauauccugc

SEQ ID NO: 2266229 - RNA, 20 nt, Human
gucccaggagcugcccagag

SEQ ID NO: 2266230 - RNA, 16 nt, Human
gucccaugacccaccc

SEQ ID NO: 2266231 - RNA, 17 nt, Human
gucccaugacccacccc

SEQ ID NO: 2266232 - RNA, 18 nt, Human
gucccaugacccaccccu

SEQ ID NO: 2266233 - RNA, 19 nt, Human
gucccaugacccaccccug

SEQ ID NO: 2266234 - RNA, 20 nt, Human
gucccaugacccaccccugu

SEQ ID NO: 2266235 - RNA, 22 nt, Human
gucccaugacccaccccugugc

SEQ ID NO: 2266236 - RNA, 23 nt, Human
gucccaugacccaccccugugcu

SEQ ID NO: 2266237 - RNA, 15 nt, Human
gucccauauccugcc

SEQ ID NO: 2266238 - RNA, 16 nt, Human
gucccauauccugccu

SEQ ID NO: 2266239 - RNA, 18 nt, Human
gucccauauccugccuca

SEQ ID NO: 2266240 - RNA, 13 nt, Human
gucccauccaggc

SEQ ID NO: 2266241 - RNA, 14 nt, Human
gucccauccaggca

SEQ ID NO: 2266242 - RNA, 15 nt, Human
gucccauccaggcag

SEQ ID NO: 2266243 - RNA, 16 nt, Human
gucccauccaggcagu

SEQ ID NO: 2266244 - RNA, 17 nt, Human
gucccauccaggcaguc

SEQ ID NO: 2266245 - RNA, 23 nt, Human
gucccauggacacuccagugcca

SEQ ID NO: 2266246 - RNA, 17 nt, Human
gucccaugaucccugug

SEQ ID NO: 2266247 - RNA, 21 nt, Human
gucccauggacacuccagugc

SEQ ID NO: 2266248 - RNA, 22 nt, Human
gucccauggacacuccagugcc

SEQ ID NO: 2266249 - RNA, 13 nt, Human
gucccauguggug

SEQ ID NO: 2266250 - RNA, 24 nt, Human
guccccacacuccuacaccuaacu

SEQ ID NO: 2266251 - RNA, 21 nt, Human
guccccaagauucacaccuga

SEQ ID NO: 2266252 - RNA, 11 nt, Human
guccccacacu

SEQ ID NO: 2266253 - RNA, 12 nt, Human
guccccacacuc

SEQ ID NO: 2266254 - RNA, 22 nt, Human
guccccaaauccgaaccuccuc

SEQ ID NO: 2266255 - RNA, 18 nt, Human
guccccaaaccugcaagg

SEQ ID NO: 2266256 - RNA, 17 nt, Human
guccccaaaccugcaag

SEQ ID NO: 2266257 - RNA, 16 nt, Human
gucccauuucucacug

SEQ ID NO: 2266258 - RNA, 18 nt, Human
gucccauuucucacugag

SEQ ID NO: 2266259 - RNA, 16 nt, Human
gucccuaauaaagcug

SEQ ID NO: 2266260 - RNA, 17 nt, Human
gucccuaauaaagcugu

SEQ ID NO: 2266261 - RNA, 12 nt, Human
guccccaccccu

SEQ ID NO: 2266262 - RNA, 14 nt, Human
guccccaccccugc

SEQ ID NO: 2266263 - RNA, 15 nt, Human
guccccaccccugcc

SEQ ID NO: 2266264 - RNA, 16 nt, Human
guccccaccccugccc

SEQ ID NO: 2266265 - RNA, 17 nt, Human
guccccaccccugcccc

SEQ ID NO: 2266266 - RNA, 17 nt, Human
guccccaccgcagacag

SEQ ID NO: 2266267 - RNA, 23 nt, Human
guagauguucagauugcuuugau

SEQ ID NO: 2266268 - RNA, 21 nt, Human
guagaugugcauuuuugugaa

SEQ ID NO: 2266269 - RNA, 21 nt, Human
guagaugggagggaggcucag

SEQ ID NO: 2266270 - RNA, 17 nt, Human
guagaugggagggaggc

SEQ ID NO: 2266271 - RNA, 17 nt, Human
guagaucagagcagcag

SEQ ID NO: 2266272 - RNA, 21 nt, Human
guagaugaaaaagcauguaca

SEQ ID NO: 2266273 - RNA, 22 nt, Human
guagaugaaaaagcauguacag

SEQ ID NO: 2266274 - RNA, 23 nt, Human
guagaugaaaaagcauguacagu

SEQ ID NO: 2266275 - RNA, 13 nt, Human
guagauagaaaua

SEQ ID NO: 2266276 - RNA, 19 nt, Human
guagauauuuuuucugaau

SEQ ID NO: 2266277 - RNA, 17 nt, Human
guagaucaccagaauaa

SEQ ID NO: 2266278 - RNA, 19 nt, Human
guagaucaccagaauaaac

SEQ ID NO: 2266279 - RNA, 17 nt, Human
guagaucaguggucucc

SEQ ID NO: 2266280 - RNA, 12 nt, Human
guagauagaaau

SEQ ID NO: 2266281 - RNA, 20 nt, Human
guagaguuugaaggagguga

SEQ ID NO: 2266282 - RNA, 14 nt, Human
guagauagaaauaa

SEQ ID NO: 2266283 - RNA, 15 nt, Human
guagagugugccuga

SEQ ID NO: 2266284 - RNA, 18 nt, Human
gcuauaggugcuacaaaa

SEQ ID NO: 2266285 - RNA, 19 nt, Human
gcuauaggcuggagaagcu

SEQ ID NO: 2266286 - RNA, 12 nt, Human
guagaguuaaga

SEQ ID NO: 2266287 - RNA, 14 nt, Human
guagaguuaagaag

SEQ ID NO: 2266288 - RNA, 15 nt, Human
guagaguuaagaagc

SEQ ID NO: 2266289 - RNA, 16 nt, Human
guagaguuaagaagcu

SEQ ID NO: 2266290 - RNA, 17 nt, Human
guagaguuaagaagcug

SEQ ID NO: 2266291 - RNA, 18 nt, Human
guagaguuaagaagcugu

SEQ ID NO: 2266292 - RNA, 13 nt, Human
guagcacuuacug

SEQ ID NO: 2266293 - RNA, 11 nt, Human
guagcagcugg

SEQ ID NO: 2266294 - RNA, 12 nt, Human
guagcagcugga

SEQ ID NO: 2266295 - RNA, 13 nt, Human
guagcagcuggac

SEQ ID NO: 2266296 - RNA, 14 nt, Human
guagcagcuggacu

SEQ ID NO: 2266297 - RNA, 15 nt, Human
guagcaguagaugca

SEQ ID NO: 2266298 - RNA, 17 nt, Human
guagcagguaccacuga

SEQ ID NO: 2266299 - RNA, 15 nt, Human
guagcagggaaaaua

SEQ ID NO: 2266300 - RNA, 20 nt, Human
guagcaaguucuagagaaga

SEQ ID NO: 2266301 - RNA, 21 nt, Human
guagcaaguucuagagaagag

SEQ ID NO: 2266302 - RNA, 16 nt, Human
guagauuuauuucauc

SEQ ID NO: 2266303 - RNA, 12 nt, Human
guagauuuauuu

SEQ ID NO: 2266304 - RNA, 19 nt, Human
guagauucuguggaacaag

SEQ ID NO: 2266305 - RNA, 13 nt, Human
guagauucugugg

SEQ ID NO: 2266306 - RNA, 16 nt, Human
guagauucuguggaac

SEQ ID NO: 2266307 - RNA, 21 nt, Human
guagauuuuaaaaguuauuaa

SEQ ID NO: 2266308 - RNA, 21 nt, Human
guagauuuauuucaucauauu

SEQ ID NO: 2266309 - RNA, 19 nt, Human
guagauuuauuucaucaua

SEQ ID NO: 2266310 - RNA, 16 nt, Human
guagauuuucuuuaaa

SEQ ID NO: 2266311 - RNA, 14 nt, Human
guagauuuuccaaa

SEQ ID NO: 2266312 - RNA, 13 nt, Human
guagauuuucuuu

SEQ ID NO: 2266313 - RNA, 15 nt, Human
guagauuuucuuuaa

SEQ ID NO: 2266314 - RNA, 13 nt, Human
guagcauuucauu

SEQ ID NO: 2266315 - RNA, 15 nt, Human
guagcauuucauucu

SEQ ID NO: 2266316 - RNA, 12 nt, Human
guagcaugagag

SEQ ID NO: 2266317 - RNA, 16 nt, Human
guagcaucuucuggag

SEQ ID NO: 2266318 - RNA, 13 nt, Human
guagcauacauuu

SEQ ID NO: 2266319 - RNA, 18 nt, Human
guagcagguaccacugau

SEQ ID NO: 2266320 - RNA, 15 nt, Human
guagcauuacagugg

SEQ ID NO: 2266321 - RNA, 21 nt, Human
guagcauguugagccaggccu

SEQ ID NO: 2266322 - RNA, 19 nt, Human
guagccaaggugggcugag

SEQ ID NO: 2266323 - RNA, 18 nt, Human
guagccaaggugggcuga

SEQ ID NO: 2266324 - RNA, 17 nt, Human
guagcauuucauucuuc

SEQ ID NO: 2266325 - RNA, 19 nt, Human
guagcauuucauucuucuc

SEQ ID NO: 2266326 - RNA, 14 nt, Human
guagccaaagguuc

SEQ ID NO: 2266327 - RNA, 18 nt, Human
guagccagcacacagggc

SEQ ID NO: 2266328 - RNA, 15 nt, Human
guagccagcacacag

SEQ ID NO: 2266329 - RNA, 20 nt, Human
guagcccacucugcucgccu

SEQ ID NO: 2266330 - RNA, 16 nt, Human
guagcccacucugcuc

SEQ ID NO: 2266331 - RNA, 15 nt, Human
guagccaugggacca

SEQ ID NO: 2266332 - RNA, 21 nt, Human
guagcccacacuugagaggau

SEQ ID NO: 2266333 - RNA, 17 nt, Human
guagcccccuggccucu

SEQ ID NO: 2266334 - RNA, 16 nt, Human
guagcccccuggccuc

SEQ ID NO: 2266335 - RNA, 21 nt, Human
guagccagcacacagggcagu

SEQ ID NO: 2266336 - RNA, 19 nt, Human
guagccagcacacagggca

SEQ ID NO: 2266337 - RNA, 19 nt, Human
guagccagggggacuagcc

SEQ ID NO: 2266338 - RNA, 22 nt, Human
guagccagggggacuagccccu

SEQ ID NO: 2266339 - RNA, 23 nt, Human
guagccaggguguggcccugcca

SEQ ID NO: 2266340 - RNA, 23 nt, Human
guagccagggggacuagccccug

SEQ ID NO: 2266341 - RNA, 20 nt, Human
guagccaucccaugaacaca

SEQ ID NO: 2266342 - RNA, 23 nt, Human
guagccaucccaugaacacacug

SEQ ID NO: 2266343 - RNA, 14 nt, Human
guagccaugggacc

SEQ ID NO: 2266344 - RNA, 23 nt, Human
guagggcgggaggauguucuggg

SEQ ID NO: 2266345 - RNA, 21 nt, Human
guagggcugccaccaagguga

SEQ ID NO: 2266346 - RNA, 12 nt, Human
guagggcugacu

SEQ ID NO: 2266347 - RNA, 13 nt, Human
guagggagggcgg

SEQ ID NO: 2266348 - RNA, 21 nt, Human
guagggcgggaggauguucug

SEQ ID NO: 2266349 - RNA, 22 nt, Human
guagggcgggaggauguucugg

SEQ ID NO: 2266350 - RNA, 15 nt, Human
guagcccgccugcca

SEQ ID NO: 2266351 - RNA, 23 nt, Human
guagcccccuggccucugugccu

SEQ ID NO: 2266352 - RNA, 19 nt, Human
guagcccccuggccucugu

SEQ ID NO: 2266353 - RNA, 18 nt, Human
guagcccccuggccucug

SEQ ID NO: 2266354 - RNA, 15 nt, Human
guagggaacucuggg

SEQ ID NO: 2266355 - RNA, 17 nt, Human
guaggcucaacuaggga

SEQ ID NO: 2266356 - RNA, 19 nt, Human
guaggcucaacuagggagu

SEQ ID NO: 2266357 - RNA, 23 nt, Human
guaggcuccugccaguguggaac

SEQ ID NO: 2266358 - RNA, 16 nt, Human
guagggcgggaggaug

SEQ ID NO: 2266359 - RNA, 17 nt, Human
guagucaagauuguguu

SEQ ID NO: 2266360 - RNA, 13 nt, Human
guagucccagcua

SEQ ID NO: 2266361 - RNA, 12 nt, Human
guagucccagcu

SEQ ID NO: 2266362 - RNA, 22 nt, Human
guaguccucauaaaaagcaaaa

SEQ ID NO: 2266363 - RNA, 12 nt, Human
guaguccuguga

SEQ ID NO: 2266364 - RNA, 23 nt, Human
guaguccgugcugacagcugcuc

SEQ ID NO: 2266365 - RNA, 22 nt, Human
guaguccgugcugacagcugcu

SEQ ID NO: 2266366 - RNA, 16 nt, Human
guaguccgugcugaca

SEQ ID NO: 2266367 - RNA, 12 nt, Human
guagucccagcc

SEQ ID NO: 2266368 - RNA, 18 nt, Human
guagucucauuacuuuug

SEQ ID NO: 2266369 - RNA, 12 nt, Human
guagucuugaug

SEQ ID NO: 2266370 - RNA, 14 nt, Human
guagucucugugcu

SEQ ID NO: 2266371 - RNA, 14 nt, Human
guagugagauagca

SEQ ID NO: 2266372 - RNA, 16 nt, Human
guagucuugaugacca

SEQ ID NO: 2266373 - RNA, 14 nt, Human
guaguguuggagaa

SEQ ID NO: 2266374 - RNA, 15 nt, Human
guaguguuggagaag

SEQ ID NO: 2266375 - RNA, 12 nt, Human
guauacaugcca

SEQ ID NO: 2266376 - RNA, 21 nt, Human
guauacaguggauuaauuaaa

SEQ ID NO: 2266377 - RNA, 15 nt, Human
guauacuguaggcac

SEQ ID NO: 2266378 - RNA, 15 nt, Human
guauaccugauuuuu

SEQ ID NO: 2266379 - RNA, 22 nt, Human
guauaauuuuuuaaaguuacuu

SEQ ID NO: 2266380 - RNA, 19 nt, Human
guauacaacccuggcauua

SEQ ID NO: 2266381 - RNA, 18 nt, Human
guauaauuguaucguaua

SEQ ID NO: 2266382 - RNA, 17 nt, Human
guauaauucacauugua

SEQ ID NO: 2266383 - RNA, 21 nt, Human
guagggucaggccacggcagc

SEQ ID NO: 2266384 - RNA, 22 nt, Human
guagggucaggccacggcagcc

SEQ ID NO: 2266385 - RNA, 14 nt, Human
guagggugggccuu

SEQ ID NO: 2266386 - RNA, 17 nt, Human
guaggguaaggugccuu

SEQ ID NO: 2266387 - RNA, 22 nt, Human
guaggguaauuaguaacaugug

SEQ ID NO: 2266388 - RNA, 15 nt, Human
guaggggugugugug

SEQ ID NO: 2266389 - RNA, 20 nt, Human
guaggggucaaagaaaugcu

SEQ ID NO: 2266390 - RNA, 22 nt, Human
guaggggagggguugccacagg

SEQ ID NO: 2266391 - RNA, 23 nt, Human
guagguaucauuuucugcauuua

SEQ ID NO: 2266392 - RNA, 15 nt, Human
guagguucagccaag

SEQ ID NO: 2266393 - RNA, 16 nt, Human
guagguucagccaagg

SEQ ID NO: 2266394 - RNA, 23 nt, Human
guaggguuuaauccccaguaaaa

SEQ ID NO: 2266395 - RNA, 16 nt, Human
guaggguuauaauaau

SEQ ID NO: 2266396 - RNA, 22 nt, Human
guagggugggccuucagggagu

SEQ ID NO: 2266397 - RNA, 17 nt, Human
guagggugggccuucag

SEQ ID NO: 2266398 - RNA, 18 nt, Human
guaguagggucaggccac

SEQ ID NO: 2266399 - RNA, 16 nt, Human
guaguauaaagaaaag

SEQ ID NO: 2266400 - RNA, 22 nt, Human
guaguagucucauuacuuuuga

SEQ ID NO: 2266401 - RNA, 14 nt, Human
guaguaucaaauau

SEQ ID NO: 2266402 - RNA, 13 nt, Human
guaguaugauggg

SEQ ID NO: 2266403 - RNA, 14 nt, Human
guagucaggugccu

SEQ ID NO: 2266404 - RNA, 22 nt, Human
guaguacuccugcaaaauuuua

SEQ ID NO: 2266405 - RNA, 17 nt, Human
guaguagcccuuucugu

SEQ ID NO: 2266406 - RNA, 20 nt, Human
guaguagcccuuucugugug

SEQ ID NO: 2266407 - RNA, 21 nt, Human
guaguagcccuuucugugugc

SEQ ID NO: 2266408 - RNA, 21 nt, Human
guaguacuccugcaaaauuuu

SEQ ID NO: 2266409 - RNA, 19 nt, Human
guaguaccaaaugcuuuaa

SEQ ID NO: 2266410 - RNA, 15 nt, Human
guaguaauugacaug

SEQ ID NO: 2266411 - RNA, 16 nt, Human
guaguaccaaaugcuu

SEQ ID NO: 2266412 - RNA, 14 nt, Human
guagguugggagaa

SEQ ID NO: 2266413 - RNA, 17 nt, Human
guagguucagccaaggu

SEQ ID NO: 2266414 - RNA, 20 nt, Human
guagguuggaagcuagcucc

SEQ ID NO: 2266415 - RNA, 19 nt, Human
guaguaaaaauuaaaaaaa

SEQ ID NO: 2266416 - RNA, 23 nt, Human
guauguuuuuguguauuuguuaa

SEQ ID NO: 2266417 - RNA, 15 nt, Human
guauuaaaaaaaaca

SEQ ID NO: 2266418 - RNA, 19 nt, Human
guauguuuuuguguauuug

SEQ ID NO: 2266419 - RNA, 22 nt, Human
guauuaaaaaaaacaaaaagaa

SEQ ID NO: 2266420 - RNA, 19 nt, Human
guauuaaaaaaaacaaaaa

SEQ ID NO: 2266421 - RNA, 13 nt, Human
guauuaaagacag

SEQ ID NO: 2266422 - RNA, 18 nt, Human
guauuaagaaaaucuauu

SEQ ID NO: 2266423 - RNA, 18 nt, Human
guauguuguccaauuguu

SEQ ID NO: 2266424 - RNA, 21 nt, Human
guauguuguccaauuguugac

SEQ ID NO: 2266425 - RNA, 14 nt, Human
guauguuugcacac

SEQ ID NO: 2266426 - RNA, 16 nt, Human
guauguuuuagcaugu

SEQ ID NO: 2266427 - RNA, 14 nt, Human
guauguuuuagcau

SEQ ID NO: 2266428 - RNA, 21 nt, Human
guauguuugcacacuugugug

SEQ ID NO: 2266429 - RNA, 16 nt, Human
guauguguuugugugu

SEQ ID NO: 2266430 - RNA, 17 nt, Human
guauguguuugugugug

SEQ ID NO: 2266431 - RNA, 18 nt, Human
guauguuaagcucuuuau

SEQ ID NO: 2266432 - RNA, 17 nt, Human
guauguugaagccuuug

SEQ ID NO: 2266433 - RNA, 13 nt, Human
guauguugucaaa

SEQ ID NO: 2266434 - RNA, 16 nt, Human
guauguugucaaagag

SEQ ID NO: 2266435 - RNA, 17 nt, Human
guauguugucaaagaga

SEQ ID NO: 2266436 - RNA, 11 nt, Human
guauguugucc

SEQ ID NO: 2266437 - RNA, 21 nt, Human
guaugaucacggcucacugca

SEQ ID NO: 2266438 - RNA, 14 nt, Human
guauguguguaugg

SEQ ID NO: 2266439 - RNA, 13 nt, Human
guauguguguaga

SEQ ID NO: 2266440 - RNA, 15 nt, Human
guauguguguguaug

SEQ ID NO: 2266441 - RNA, 18 nt, Human
guauguguguguaugcua

SEQ ID NO: 2266442 - RNA, 16 nt, Human
guauguguguguaugc

SEQ ID NO: 2266443 - RNA, 17 nt, Human
guauguuagugcaaauu

SEQ ID NO: 2266444 - RNA, 20 nt, Human
guaugaucacggcucacugc

SEQ ID NO: 2266445 - RNA, 21 nt, Human
guaugagucaaugugcagugu

SEQ ID NO: 2266446 - RNA, 14 nt, Human
guaugagcugaggg

SEQ ID NO: 2266447 - RNA, 20 nt, Human
guaugagucaaugugcagug

SEQ ID NO: 2266448 - RNA, 20 nt, Human
guaugaggcauuuguuugaa

SEQ ID NO: 2266449 - RNA, 17 nt, Human
guaugaggcauuuguuu

SEQ ID NO: 2266450 - RNA, 14 nt, Human
guaucugggaacug

SEQ ID NO: 2266451 - RNA, 16 nt, Human
guaucuguaucucucu

SEQ ID NO: 2266452 - RNA, 18 nt, Human
guaucugcaggcagacac

SEQ ID NO: 2266453 - RNA, 19 nt, Human
guaucugcaggcagacacg

SEQ ID NO: 2266454 - RNA, 16 nt, Human
guaucugcaggcagac

SEQ ID NO: 2266455 - RNA, 17 nt, Human
guaucugcaggcagaca

SEQ ID NO: 2266456 - RNA, 19 nt, Human
guaucuggugacuuuccuc

SEQ ID NO: 2266457 - RNA, 12 nt, Human
guaucugagcag

SEQ ID NO: 2266458 - RNA, 12 nt, Human
guaucuggugac

SEQ ID NO: 2266459 - RNA, 22 nt, Human
guaugaaagauggcugugccuc

SEQ ID NO: 2266460 - RNA, 23 nt, Human
guaugaaagauggcugugccucu

SEQ ID NO: 2266461 - RNA, 16 nt, Human
guaucuuuuuucaaaa

SEQ ID NO: 2266462 - RNA, 23 nt, Human
guaucuuguuuuuccacuacugc

SEQ ID NO: 2266463 - RNA, 21 nt, Human
guaucuugggggacagggcug

SEQ ID NO: 2266464 - RNA, 15 nt, Human
guaucuguucuuuaa

SEQ ID NO: 2266465 - RNA, 14 nt, Human
guaucuucauguau

SEQ ID NO: 2266466 - RNA, 20 nt, Human
guaugacuaaagagagaaug

SEQ ID NO: 2266467 - RNA, 12 nt, Human
guaugagcugag

SEQ ID NO: 2266468 - RNA, 18 nt, Human
guaugacuaaagagagaa

SEQ ID NO: 2266469 - RNA, 14 nt, Human
guaugacuaaagag

SEQ ID NO: 2266470 - RNA, 15 nt, Human
guaugaaugcagugg

SEQ ID NO: 2266471 - RNA, 21 nt, Human
guaugaaucuaugccaaagau

SEQ ID NO: 2266472 - RNA, 16 nt, Human
guaugaaucuaugcca

SEQ ID NO: 2266473 - RNA, 20 nt, Human
guaugaaucuaugccaaaga

SEQ ID NO: 2266474 - RNA, 15 nt, Human
guaugaaucuaugcc

SEQ ID NO: 2266475 - RNA, 15 nt, Human
guaugaggcauuugu

SEQ ID NO: 2266476 - RNA, 13 nt, Human
guaugaggcauuu

SEQ ID NO: 2266477 - RNA, 18 nt, Human
guaugaauaaagacaccu

SEQ ID NO: 2266478 - RNA, 19 nt, Human
guaugaauaaagacaccua

SEQ ID NO: 2266479 - RNA, 14 nt, Human
guaucuagcaauca

SEQ ID NO: 2266480 - RNA, 13 nt, Human
guaucuagugcag

SEQ ID NO: 2266481 - RNA, 17 nt, Human
guaucuagugcagcuga

SEQ ID NO: 2266482 - RNA, 16 nt, Human
guaucuagugcagcug

SEQ ID NO: 2266483 - RNA, 15 nt, Human
guaucuagugcagcu

SEQ ID NO: 2266484 - RNA, 24 nt, Human
guaucuagcaaucacaacacuggc

SEQ ID NO: 2266485 - RNA, 20 nt, Human
guaucuagacccaucuucuu

SEQ ID NO: 2266486 - RNA, 16 nt, Human
guaucguaaccagcca

SEQ ID NO: 2266487 - RNA, 17 nt, Human
guaucguaaccagccag

SEQ ID NO: 2266488 - RNA, 15 nt, Human
guaucguauagcugu

SEQ ID NO: 2266489 - RNA, 16 nt, Human
guaucguauagcugua

SEQ ID NO: 2266490 - RNA, 17 nt, Human
guaucggagacagugau

SEQ ID NO: 2266491 - RNA, 15 nt, Human
guaucguaaccagcc

SEQ ID NO: 2266492 - RNA, 15 nt, Human
guaucggagacagug

SEQ ID NO: 2266493 - RNA, 14 nt, Human
guaucggagacagu

SEQ ID NO: 2266494 - RNA, 15 nt, Human
guaucgauguuaugu

SEQ ID NO: 2266495 - RNA, 20 nt, Human
guauccugugacauguaaca

SEQ ID NO: 2266496 - RNA, 18 nt, Human
guauccugggggacccaa

SEQ ID NO: 2266497 - RNA, 15 nt, Human
guaucuccucgcaag

SEQ ID NO: 2266498 - RNA, 20 nt, Human
guaucucggaccuuucagcu

SEQ ID NO: 2266499 - RNA, 17 nt, Human
guaucucugaagcaugu

SEQ ID NO: 2266500 - RNA, 19 nt, Human
guaucucugaagcauguuu

SEQ ID NO: 2266501 - RNA, 20 nt, Human
guaucucugaagcauguuuc

SEQ ID NO: 2266502 - RNA, 11 nt, Human
guaucugaagg

SEQ ID NO: 2266503 - RNA, 14 nt, Human
guaucugaaggaga

SEQ ID NO: 2266504 - RNA, 18 nt, Human
guaucuagugcagcugau

SEQ ID NO: 2266505 - RNA, 20 nt, Human
guaucuauauauguguaugu

SEQ ID NO: 2266506 - RNA, 17 nt, Human
guaucuaugcauuuucu

SEQ ID NO: 2266507 - RNA, 14 nt, Human
guaucuccaggauu

SEQ ID NO: 2266508 - RNA, 13 nt, Human
guaucuccaggau

SEQ ID NO: 2266509 - RNA, 14 nt, Human
guauaucagaaaag

SEQ ID NO: 2266510 - RNA, 19 nt, Human
guauaucagaaaagggaag

SEQ ID NO: 2266511 - RNA, 17 nt, Human
guauaucuggacaagcc

SEQ ID NO: 2266512 - RNA, 22 nt, Human
guauaugucaagccauaauugu

SEQ ID NO: 2266513 - RNA, 18 nt, Human
guauaucuggacaagcca

SEQ ID NO: 2266514 - RNA, 21 nt, Human
guauaucuggacaagccaacu

SEQ ID NO: 2266515 - RNA, 17 nt, Human
guauauguaugugugua

SEQ ID NO: 2266516 - RNA, 16 nt, Human
guauauguaugugugu

SEQ ID NO: 2266517 - RNA, 13 nt, Human
guauccuggggcu

SEQ ID NO: 2266518 - RNA, 17 nt, Human
guauccuggggcucccu

SEQ ID NO: 2266519 - RNA, 23 nt, Human
guauccuccagguuuuucaauua

SEQ ID NO: 2266520 - RNA, 13 nt, Human
guauaugucucag

SEQ ID NO: 2266521 - RNA, 15 nt, Human
guauaugucucaggu

SEQ ID NO: 2266522 - RNA, 21 nt, Human
guauaugucucaggucccugc

SEQ ID NO: 2266523 - RNA, 16 nt, Human
guauauguugggugca

SEQ ID NO: 2266524 - RNA, 15 nt, Human
guauauagcccagcc

SEQ ID NO: 2266525 - RNA, 12 nt, Human
guauauacuuuu

SEQ ID NO: 2266526 - RNA, 20 nt, Human
guauauaaugguuucaaaga

SEQ ID NO: 2266527 - RNA, 14 nt, Human
guauauauagaauc

SEQ ID NO: 2266528 - RNA, 13 nt, Human
guauauacuuuuu

SEQ ID NO: 2266529 - RNA, 21 nt, Human
guauauauaugccaugaugga

SEQ ID NO: 2266530 - RNA, 20 nt, Human
guauauauaugccaugaugg

SEQ ID NO: 2266531 - RNA, 12 nt, Human
guauauaugugu

SEQ ID NO: 2266532 - RNA, 22 nt, Human
guauauaucugcuucaguggag

SEQ ID NO: 2266533 - RNA, 13 nt, Human
guauauaugugug

SEQ ID NO: 2266534 - RNA, 14 nt, Human
guauauaugugugu

SEQ ID NO: 2266535 - RNA, 16 nt, Human
guauauauguguguuu

SEQ ID NO: 2266536 - RNA, 18 nt, Human
guauauauguguguuuaa

SEQ ID NO: 2266537 - RNA, 19 nt, Human
guauauauguguguuuaaa

SEQ ID NO: 2266538 - RNA, 20 nt, Human
guauauauguguguuuaaau

SEQ ID NO: 2266539 - RNA, 13 nt, Human
guauauauuccca

SEQ ID NO: 2266540 - RNA, 14 nt, Human
guauauauucccaa

SEQ ID NO: 2266541 - RNA, 16 nt, Human
guauauacgcaucuau

SEQ ID NO: 2266542 - RNA, 22 nt, Human
guauauaaaggaaaaaagagaa

SEQ ID NO: 2266543 - RNA, 12 nt, Human
guauaguugcuu

SEQ ID NO: 2266544 - RNA, 16 nt, Human
guauaguugcuugccu

SEQ ID NO: 2266545 - RNA, 18 nt, Human
guauaguugcuugccuga

SEQ ID NO: 2266546 - RNA, 17 nt, Human
guauaguugcuugccug

SEQ ID NO: 2266547 - RNA, 16 nt, Human
guauauaaaauauuuu

SEQ ID NO: 2266548 - RNA, 18 nt, Human
guauagguagauguucag

SEQ ID NO: 2266549 - RNA, 19 nt, Human
guauaguuaggauagcauu

SEQ ID NO: 2266550 - RNA, 13 nt, Human
guauaguguaaaa

SEQ ID NO: 2266551 - RNA, 14 nt, Human
guauaguguaaaau

SEQ ID NO: 2266552 - RNA, 15 nt, Human
guauaguguaaaaua

SEQ ID NO: 2266553 - RNA, 16 nt, Human
guauaguguaaaauaa

SEQ ID NO: 2266554 - RNA, 14 nt, Human
guauagaaaugcug

SEQ ID NO: 2266555 - RNA, 15 nt, Human
guauagaaaugcugg

SEQ ID NO: 2266556 - RNA, 22 nt, Human
guauagaaaugcugguuuuuca

SEQ ID NO: 2266557 - RNA, 23 nt, Human
guauagaaaugcugguuuuucag

SEQ ID NO: 2266558 - RNA, 19 nt, Human
guauaguacuggcauggua

SEQ ID NO: 2266559 - RNA, 19 nt, Human
guauagcuguauugaauca

SEQ ID NO: 2266560 - RNA, 23 nt, Human
guauagcuguauugaaucaugua

SEQ ID NO: 2266561 - RNA, 15 nt, Human
guauagcuguauuga

SEQ ID NO: 2266562 - RNA, 16 nt, Human
guauagcuguauugaa

SEQ ID NO: 2266563 - RNA, 17 nt, Human
guauagcuguauugaau

SEQ ID NO: 2266564 - RNA, 14 nt, Human
guauagcuguauug

SEQ ID NO: 2266565 - RNA, 16 nt, Human
guauagaugcaagaua

SEQ ID NO: 2266566 - RNA, 16 nt, Human
guauagacuccugaaa

SEQ ID NO: 2266567 - RNA, 15 nt, Human
guauagagauaugca

SEQ ID NO: 2266568 - RNA, 14 nt, Human
guauagaugcaaga

SEQ ID NO: 2266569 - RNA, 18 nt, Human
guauagaugcaagauauu

SEQ ID NO: 2266570 - RNA, 21 nt, Human
uuucuucaacaucaauguuca

SEQ ID NO: 2266571 - RNA, 18 nt, Human
uuucuucaacaucaaugu

SEQ ID NO: 2266572 - RNA, 16 nt, Human
uuucuucaugcaauga

SEQ ID NO: 2266573 - RNA, 21 nt, Human
uuucuucacuguugaaaauua

SEQ ID NO: 2266574 - RNA, 14 nt, Human
uuucuucccaucac

SEQ ID NO: 2266575 - RNA, 22 nt, Human
uuucuucaugcaaugacaucuu

SEQ ID NO: 2266576 - RNA, 19 nt, Human
uuucuucaugcaaugacau

SEQ ID NO: 2266577 - RNA, 18 nt, Human
uuucuucaugcaaugaca

SEQ ID NO: 2266578 - RNA, 18 nt, Human
uuucuucccuguauuuuc

SEQ ID NO: 2266579 - RNA, 11 nt, Human
uuucuuccucu

SEQ ID NO: 2266580 - RNA, 13 nt, Human
uuucuuccucugc

SEQ ID NO: 2266581 - RNA, 12 nt, Human
uuucuucucccu

SEQ ID NO: 2266582 - RNA, 14 nt, Human
uuucuuccucugcu

SEQ ID NO: 2266583 - RNA, 16 nt, Human
uuucuuccucugcuga

SEQ ID NO: 2266584 - RNA, 12 nt, Human
uuucuucuauuu

SEQ ID NO: 2266585 - RNA, 23 nt, Human
uuucuucuguauuuuuuuuucua

SEQ ID NO: 2266586 - RNA, 13 nt, Human
uuucuucucugcu

SEQ ID NO: 2266587 - RNA, 13 nt, Human
uuucuucucccuc

SEQ ID NO: 2266588 - RNA, 17 nt, Human
uuucuuaucuucugcaa

SEQ ID NO: 2266589 - RNA, 18 nt, Human
uuucuuauuuaacuuaac

SEQ ID NO: 2266590 - RNA, 16 nt, Human
uuucuuagugccugug

SEQ ID NO: 2266591 - RNA, 17 nt, Human
uuucuuauuucauuucu

SEQ ID NO: 2266592 - RNA, 23 nt, Human
uuucuuagggaaggauacaaaag

SEQ ID NO: 2266593 - RNA, 18 nt, Human
uuucuuagggaaggauac

SEQ ID NO: 2266594 - RNA, 16 nt, Human
uuucuuaaacaaaugu

SEQ ID NO: 2266595 - RNA, 12 nt, Human
uuucuguuuucu

SEQ ID NO: 2266596 - RNA, 23 nt, Human
uuucuguugucauugcuguuguc

SEQ ID NO: 2266597 - RNA, 16 nt, Human
uuucuuaaaccuucag

SEQ ID NO: 2266598 - RNA, 19 nt, Human
uuucuuagcuuuuuaauug

SEQ ID NO: 2266599 - RNA, 20 nt, Human
uuucuuagcuuuuuaauugu

SEQ ID NO: 2266600 - RNA, 21 nt, Human
uuucuuagcuuuuuaauuguu

SEQ ID NO: 2266601 - RNA, 22 nt, Human
uuucuuagcuuuuuaauuguug

SEQ ID NO: 2266602 - RNA, 14 nt, Human
uuucuguugccaca

SEQ ID NO: 2266603 - RNA, 13 nt, Human
uuucuguugucau

SEQ ID NO: 2266604 - RNA, 17 nt, Human
uuucuguugucauugcu

SEQ ID NO: 2266605 - RNA, 18 nt, Human
uuucuguugucauugcug

SEQ ID NO: 2266606 - RNA, 18 nt, Human
uuucuguuuccuuuuuua

SEQ ID NO: 2266607 - RNA, 15 nt, Human
uuucuguugaaguuu

SEQ ID NO: 2266608 - RNA, 20 nt, Human
uuucugaccaaucacugagu

SEQ ID NO: 2266609 - RNA, 15 nt, Human
uuucuguugguguau

SEQ ID NO: 2266610 - RNA, 16 nt, Human
uuucuugcagaucaaa

SEQ ID NO: 2266611 - RNA, 23 nt, Human
uuucuugccaaugaggucugaaa

SEQ ID NO: 2266612 - RNA, 21 nt, Human
uuucuugaucaacaucuuuuc

SEQ ID NO: 2266613 - RNA, 22 nt, Human
uuucuugacucuuguuuucagu

SEQ ID NO: 2266614 - RNA, 22 nt, Human
uuucuugagguacucugcacau

SEQ ID NO: 2266615 - RNA, 12 nt, Human
uuucuucuuccc

SEQ ID NO: 2266616 - RNA, 13 nt, Human
uuucuucuucccu

SEQ ID NO: 2266617 - RNA, 14 nt, Human
uuugaacucuucaa

SEQ ID NO: 2266618 - RNA, 15 nt, Human
uuugaacugauaaag

SEQ ID NO: 2266619 - RNA, 19 nt, Human
uuugaacugauaaagauga

SEQ ID NO: 2266620 - RNA, 17 nt, Human
uuugaacugauaaagau

SEQ ID NO: 2266621 - RNA, 21 nt, Human
uuugaacucagaucugucuga

SEQ ID NO: 2266622 - RNA, 12 nt, Human
uuucuugccucu

SEQ ID NO: 2266623 - RNA, 16 nt, Human
uuugaacucagaucug

SEQ ID NO: 2266624 - RNA, 18 nt, Human
uuugaagaacaugugaga

SEQ ID NO: 2266625 - RNA, 17 nt, Human
uuugaagaacaugugag

SEQ ID NO: 2266626 - RNA, 15 nt, Human
uuugaagaggaaaau

SEQ ID NO: 2266627 - RNA, 19 nt, Human
uuugaagaaugaacaaauu

SEQ ID NO: 2266628 - RNA, 17 nt, Human
uuugaauccaugcuugg

SEQ ID NO: 2266629 - RNA, 19 nt, Human
uuugaaucaauaauauauu

SEQ ID NO: 2266630 - RNA, 16 nt, Human
uuugaaucuugucuca

SEQ ID NO: 2266631 - RNA, 18 nt, Human
uuugaaucuugucucaau

SEQ ID NO: 2266632 - RNA, 12 nt, Human
uuugaaucuugu

SEQ ID NO: 2266633 - RNA, 19 nt, Human
uuugaauccucucucugug

SEQ ID NO: 2266634 - RNA, 22 nt, Human
uuugaagaugccgcauuuggau

SEQ ID NO: 2266635 - RNA, 19 nt, Human
uuugaauauaaacacuaua

SEQ ID NO: 2266636 - RNA, 18 nt, Human
uuugaaucaucaagucuu

SEQ ID NO: 2266637 - RNA, 13 nt, Human
uuaccaagaagcc

SEQ ID NO: 2266638 - RNA, 14 nt, Human
uuaccaagaagccu

SEQ ID NO: 2266639 - RNA, 13 nt, Human
uuaccaacuuucu

SEQ ID NO: 2266640 - RNA, 20 nt, Human
uuaccaaccuguuaccuacu

SEQ ID NO: 2266641 - RNA, 14 nt, Human
uuaccaacuuucug

SEQ ID NO: 2266642 - RNA, 15 nt, Human
uuaccaacuuucugu

SEQ ID NO: 2266643 - RNA, 16 nt, Human
uuaccaacuuucugua

SEQ ID NO: 2266644 - RNA, 18 nt, Human
uuaccaacuuucuguaaa

SEQ ID NO: 2266645 - RNA, 17 nt, Human
uuaccacagacauacua

SEQ ID NO: 2266646 - RNA, 14 nt, Human
uuaccacagacaua

SEQ ID NO: 2266647 - RNA, 18 nt, Human
uuacauuuuuacaauaaa

SEQ ID NO: 2266648 - RNA, 16 nt, Human
uuacauuuuuacaaua

SEQ ID NO: 2266649 - RNA, 17 nt, Human
uuacauuuuuacaauaa

SEQ ID NO: 2266650 - RNA, 13 nt, Human
uuaccaaccuguu

SEQ ID NO: 2266651 - RNA, 12 nt, Human
uuaccaaccugu

SEQ ID NO: 2266652 - RNA, 13 nt, Human
uuacauuuuuaca

SEQ ID NO: 2266653 - RNA, 14 nt, Human
uuacauuuuuacaa

SEQ ID NO: 2266654 - RNA, 15 nt, Human
uuacauuuuuacaau

SEQ ID NO: 2266655 - RNA, 21 nt, Human
uuacauuuuuacaauaaauaa

SEQ ID NO: 2266656 - RNA, 21 nt, Human
uuuccucaggcugcuggagga

SEQ ID NO: 2266657 - RNA, 12 nt, Human
uuuccucaucug

SEQ ID NO: 2266658 - RNA, 14 nt, Human
uuuccucaucuguc

SEQ ID NO: 2266659 - RNA, 13 nt, Human
uuaccacccccac

SEQ ID NO: 2266660 - RNA, 12 nt, Human
uuaccaccccca

SEQ ID NO: 2266661 - RNA, 15 nt, Human
uuaccacccccacac

SEQ ID NO: 2266662 - RNA, 14 nt, Human
uuuccuccccagca

SEQ ID NO: 2266663 - RNA, 12 nt, Human
uuuccuccccag

SEQ ID NO: 2266664 - RNA, 19 nt, Human
uuuccucauuccugaaaga

SEQ ID NO: 2266665 - RNA, 16 nt, Human
uuuccucaucugucca

SEQ ID NO: 2266666 - RNA, 16 nt, Human
uuuccuccccagcagg

SEQ ID NO: 2266667 - RNA, 11 nt, Human
uuuccucccuu

SEQ ID NO: 2266668 - RNA, 13 nt, Human
uuuccucccucag

SEQ ID NO: 2266669 - RNA, 17 nt, Human
uuuccucccuucugcua

SEQ ID NO: 2266670 - RNA, 14 nt, Human
uuuccucccuucug

SEQ ID NO: 2266671 - RNA, 13 nt, Human
uuuccucccuucu

SEQ ID NO: 2266672 - RNA, 12 nt, Human
uuuccucccuuc

SEQ ID NO: 2266673 - RNA, 13 nt, Human
uuuccugcccugg

SEQ ID NO: 2266674 - RNA, 12 nt, Human
uuuccugcccug

SEQ ID NO: 2266675 - RNA, 16 nt, Human
uuuccugaggcugggc

SEQ ID NO: 2266676 - RNA, 17 nt, Human
uuuccugcccuuccuca

SEQ ID NO: 2266677 - RNA, 16 nt, Human
uuuccugccuucuucu

SEQ ID NO: 2266678 - RNA, 17 nt, Human
uuuccugccuucuucuu

SEQ ID NO: 2266679 - RNA, 16 nt, Human
uuuccuggacacucag

SEQ ID NO: 2266680 - RNA, 20 nt, Human
uuuccuggacacucagaccu

SEQ ID NO: 2266681 - RNA, 20 nt, Human
uuuccuggacauccucuucu

SEQ ID NO: 2266682 - RNA, 21 nt, Human
uuuccuggacauccucuucug

SEQ ID NO: 2266683 - RNA, 16 nt, Human
uuucuacuuuuaaaga

SEQ ID NO: 2266684 - RNA, 22 nt, Human
uuucuacuuugaagucauacca

SEQ ID NO: 2266685 - RNA, 18 nt, Human
uuucuacuuugaagucau

SEQ ID NO: 2266686 - RNA, 15 nt, Human
uuucuacucugaacu

SEQ ID NO: 2266687 - RNA, 17 nt, Human
uuucuacucugaacuaa

SEQ ID NO: 2266688 - RNA, 23 nt, Human
uuucuacucgaguuacagacaaa

SEQ ID NO: 2266689 - RNA, 15 nt, Human
uuucuagacuuucug

SEQ ID NO: 2266690 - RNA, 16 nt, Human
uuucuagacuuucugu

SEQ ID NO: 2266691 - RNA, 16 nt, Human
uuucuagacuugugcu

SEQ ID NO: 2266692 - RNA, 21 nt, Human
uuucuagaauuuaucacacuu

SEQ ID NO: 2266693 - RNA, 22 nt, Human
uuucuagaacaucccugccagc

SEQ ID NO: 2266694 - RNA, 20 nt, Human
uuucuagaacaucccugcca

SEQ ID NO: 2266695 - RNA, 12 nt, Human
uuucuaaaguaa

SEQ ID NO: 2266696 - RNA, 14 nt, Human
uuucuaaaguaaaa

SEQ ID NO: 2266697 - RNA, 21 nt, Human
uuucuaaaggcuaccuuugua

SEQ ID NO: 2266698 - RNA, 20 nt, Human
uuucuaaaggcuaccuuugu

SEQ ID NO: 2266699 - RNA, 15 nt, Human
uuucugaaguggacu

SEQ ID NO: 2266700 - RNA, 15 nt, Human
uuucugagaaagacu

SEQ ID NO: 2266701 - RNA, 20 nt, Human
uuucuguucuuucuggcuau

SEQ ID NO: 2266702 - RNA, 17 nt, Human
uuucucuguauaguacu

SEQ ID NO: 2266703 - RNA, 13 nt, Human
uuucugagaaaga

SEQ ID NO: 2266704 - RNA, 20 nt, Human
uuucucugggguauuugggg

SEQ ID NO: 2266705 - RNA, 20 nt, Human
uuucucugauuugcaaaaaa

SEQ ID NO: 2266706 - RNA, 11 nt, Human
uuucucugcca

SEQ ID NO: 2266707 - RNA, 21 nt, Human
uuuuaaagaccugacaccuuu

SEQ ID NO: 2266708 - RNA, 13 nt, Human
uuuuaaagacaug

SEQ ID NO: 2266709 - RNA, 20 nt, Human
uuuuaaagagugaaaaauga

SEQ ID NO: 2266710 - RNA, 18 nt, Human
uuuuaaauauuuuuucuu

SEQ ID NO: 2266711 - RNA, 12 nt, Human
uuuuaaaugcac

SEQ ID NO: 2266712 - RNA, 11 nt, Human
uuuuaaaugca

SEQ ID NO: 2266713 - RNA, 19 nt, Human
uuuuaaauggguagagaaa

SEQ ID NO: 2266714 - RNA, 19 nt, Human
uuuuaaaugcauaaaugca

SEQ ID NO: 2266715 - RNA, 21 nt, Human
uuuuaaaugcaccuggaauau

SEQ ID NO: 2266716 - RNA, 21 nt, Human
uuuuaaauuauaacuuaaaau

SEQ ID NO: 2266717 - RNA, 13 nt, Human
uuuuaauuaaaua

SEQ ID NO: 2266718 - RNA, 19 nt, Human
uuuuaaugugcuguguaaa

SEQ ID NO: 2266719 - RNA, 21 nt, Human
uuuuaaugugcuguguaaagu

SEQ ID NO: 2266720 - RNA, 13 nt, Human
uuuuaaugugcug

SEQ ID NO: 2266721 - RNA, 15 nt, Human
uuuuaaugugcugug

SEQ ID NO: 2266722 - RNA, 17 nt, Human
uuuuaaugugcugugua

SEQ ID NO: 2266723 - RNA, 18 nt, Human
uuuuaaugugcuguguaa

SEQ ID NO: 2266724 - RNA, 11 nt, Human
uuuuaaugugc

SEQ ID NO: 2266725 - RNA, 12 nt, Human
uuuuaaugugcu

SEQ ID NO: 2266726 - RNA, 20 nt, Human
uuuuaauggggguagcagcu

SEQ ID NO: 2266727 - RNA, 22 nt, Human
uuuuaauggggguagcagcugg

SEQ ID NO: 2266728 - RNA, 23 nt, Human
uuuuaauggggguagcagcugga

SEQ ID NO: 2266729 - RNA, 17 nt, Human
uuuuaaugcuccaaaug

SEQ ID NO: 2266730 - RNA, 16 nt, Human
uuuuaaucaugaaauu

SEQ ID NO: 2266731 - RNA, 20 nt, Human
uuuuaaucaugaaauuacuu

SEQ ID NO: 2266732 - RNA, 22 nt, Human
uuuuaaucagacaaaguaauuc

SEQ ID NO: 2266733 - RNA, 12 nt, Human
uuuuaaucauga

SEQ ID NO: 2266734 - RNA, 14 nt, Human
uuuuaaucaugaaa

SEQ ID NO: 2266735 - RNA, 21 nt, Human
uuuuaauagaauauaauuauc

SEQ ID NO: 2266736 - RNA, 18 nt, Human
uuuuaauagaauaaaaua

SEQ ID NO: 2266737 - RNA, 14 nt, Human
uuuuaauauaaauu

SEQ ID NO: 2266738 - RNA, 12 nt, Human
uuuuaauacagg

SEQ ID NO: 2266739 - RNA, 19 nt, Human
uuuuaacaauaacuacugu

SEQ ID NO: 2266740 - RNA, 20 nt, Human
uuuuaauaauguuucaaaca

SEQ ID NO: 2266741 - RNA, 13 nt, Human
uuuuaaauuuuau

SEQ ID NO: 2266742 - RNA, 16 nt, Human
uuuuaacaaaagcaag

SEQ ID NO: 2266743 - RNA, 20 nt, Human
uuuuaacaaaagcaagacug

SEQ ID NO: 2266744 - RNA, 14 nt, Human
uuuguucuuuuuau

SEQ ID NO: 2266745 - RNA, 15 nt, Human
uuuguucuucuuaaa

SEQ ID NO: 2266746 - RNA, 21 nt, Human
uuuguucuggcucuuccaggc

SEQ ID NO: 2266747 - RNA, 19 nt, Human
uuuguuccccuccuccacu

SEQ ID NO: 2266748 - RNA, 16 nt, Human
uuuguucuaguuuuca

SEQ ID NO: 2266749 - RNA, 20 nt, Human
uuuguucgcauggucacaca

SEQ ID NO: 2266750 - RNA, 22 nt, Human
uuuguaaaaacagcauugcuuu

SEQ ID NO: 2266751 - RNA, 21 nt, Human
uuuguaaaagaacaguaaaca

SEQ ID NO: 2266752 - RNA, 23 nt, Human
uuuguaaaagaacaguaaacauu

SEQ ID NO: 2266753 - RNA, 17 nt, Human
uuuguauaguaaaguga

SEQ ID NO: 2266754 - RNA, 22 nt, Human
uuuguaucugcaggcagacacg

SEQ ID NO: 2266755 - RNA, 20 nt, Human
uuuguaucucugaagcaugu

SEQ ID NO: 2266756 - RNA, 21 nt, Human
uuuguaucucugaagcauguu

SEQ ID NO: 2266757 - RNA, 13 nt, Human
uuuguaucugaag

SEQ ID NO: 2266758 - RNA, 21 nt, Human
uuuguaucugcaggcagacac

SEQ ID NO: 2266759 - RNA, 15 nt, Human
uuuguauaguugcuu

SEQ ID NO: 2266760 - RNA, 21 nt, Human
uuuguauaguugcuugccuga

SEQ ID NO: 2266761 - RNA, 12 nt, Human
uuuguauauugu

SEQ ID NO: 2266762 - RNA, 16 nt, Human
uuuguauauuauuucu

SEQ ID NO: 2266763 - RNA, 16 nt, Human
uuuuaaaaguuauuaa

SEQ ID NO: 2266764 - RNA, 12 nt, Human
uuuuaaaaguuu

SEQ ID NO: 2266765 - RNA, 17 nt, Human
uuuuaaagaaugcucuu

SEQ ID NO: 2266766 - RNA, 18 nt, Human
uuuuaaaaguuucaaugu

SEQ ID NO: 2266767 - RNA, 13 nt, Human
uuuuaaaaguuuc

SEQ ID NO: 2266768 - RNA, 15 nt, Human
uuuuaaaaguuucaa

SEQ ID NO: 2266769 - RNA, 18 nt, Human
uuuuaaagacuuuuauga

SEQ ID NO: 2266770 - RNA, 15 nt, Human
uuuguugaaauuaug

SEQ ID NO: 2266771 - RNA, 19 nt, Human
uuuguucucagcucccccu

SEQ ID NO: 2266772 - RNA, 21 nt, Human
uuuuaaaagaaugauuaugaa

SEQ ID NO: 2266773 - RNA, 20 nt, Human
uuuuaaaagaugcaauguag

SEQ ID NO: 2266774 - RNA, 14 nt, Human
uuuuaaaagacaag

SEQ ID NO: 2266775 - RNA, 15 nt, Human
uuuuaaaagacaaga

SEQ ID NO: 2266776 - RNA, 23 nt, Human
uuuuaaaagacaagacuucagua

SEQ ID NO: 2266777 - RNA, 21 nt, Human
uuugaaucuugucucaaugcu

SEQ ID NO: 2266778 - RNA, 14 nt, Human
uuugaaugaaaaau

SEQ ID NO: 2266779 - RNA, 13 nt, Human
uuugaaugaaaaa

SEQ ID NO: 2266780 - RNA, 23 nt, Human
uuugaaugaaaaauuuaagcauu

SEQ ID NO: 2266781 - RNA, 22 nt, Human
uuugaaugaaaaauuuaagcau

SEQ ID NO: 2266782 - RNA, 21 nt, Human
uuugaaugaaaaauuuaagca

SEQ ID NO: 2266783 - RNA, 15 nt, Human
uuugaaugaaaaauu

SEQ ID NO: 2266784 - RNA, 24 nt, Human
uuugaaugaaaaauuuaagcauug

SEQ ID NO: 2266785 - RNA, 14 nt, Human
uuugaaugacaaag

SEQ ID NO: 2266786 - RNA, 13 nt, Human
uuugaaugcauuu

SEQ ID NO: 2266787 - RNA, 16 nt, Human
uuugaaugcuuccuga

SEQ ID NO: 2266788 - RNA, 22 nt, Human
uuugaaugugauuuuaaagagu

SEQ ID NO: 2266789 - RNA, 22 nt, Human
uuugaauguaugcuucauacag

SEQ ID NO: 2266790 - RNA, 17 nt, Human
uuugaauguaugcuuca

SEQ ID NO: 2266791 - RNA, 14 nt, Human
uuugaaugcauuuu

SEQ ID NO: 2266792 - RNA, 16 nt, Human
uuugaaugcauuuugu

SEQ ID NO: 2266793 - RNA, 15 nt, Human
uuugcauauguauga

SEQ ID NO: 2266794 - RNA, 15 nt, Human
uuugcaucugaaaau

SEQ ID NO: 2266795 - RNA, 21 nt, Human
uuugaauguuaaauaaauugu

SEQ ID NO: 2266796 - RNA, 20 nt, Human
uuugaauguuauuuguuauu

SEQ ID NO: 2266797 - RNA, 22 nt, Human
uuugaauguuaaauaaauugua

SEQ ID NO: 2266798 - RNA, 13 nt, Human
uuugaauguuaaa

SEQ ID NO: 2266799 - RNA, 16 nt, Human
uuugaauguuaaauaa

SEQ ID NO: 2266800 - RNA, 18 nt, Human
uuugaauguuaaauaaau

SEQ ID NO: 2266801 - RNA, 22 nt, Human
uuugcuuuuccuuuguuuuuau

SEQ ID NO: 2266802 - RNA, 18 nt, Human
uuugcuuugcuuucugcu

SEQ ID NO: 2266803 - RNA, 15 nt, Human
uuugcuuugcuuucu

SEQ ID NO: 2266804 - RNA, 15 nt, Human
uuugcuuucugcuca

SEQ ID NO: 2266805 - RNA, 15 nt, Human
uuugcuuugcccagc

SEQ ID NO: 2266806 - RNA, 12 nt, Human
uuugcuuuuucu

SEQ ID NO: 2266807 - RNA, 14 nt, Human
uuugcuuuuucuga

SEQ ID NO: 2266808 - RNA, 14 nt, Human
uuugcuuuuugcua

SEQ ID NO: 2266809 - RNA, 12 nt, Human
uuuggaaugcuu

SEQ ID NO: 2266810 - RNA, 14 nt, Human
uuuggaauuuugug

SEQ ID NO: 2266811 - RNA, 16 nt, Human
uuugcuuugugauuuu

SEQ ID NO: 2266812 - RNA, 15 nt, Human
uuugcuuugugauuu

SEQ ID NO: 2266813 - RNA, 21 nt, Human
uuugcauggaauuuguaaguu

SEQ ID NO: 2266814 - RNA, 18 nt, Human
uuugcauggcacuugcau

SEQ ID NO: 2266815 - RNA, 20 nt, Human
uuugcauggcacuugcaucu

SEQ ID NO: 2266816 - RNA, 22 nt, Human
uuugcauggcacuugcaucugu

SEQ ID NO: 2266817 - RNA, 21 nt, Human
uuugcaugugaaaaucaaaua

SEQ ID NO: 2266818 - RNA, 14 nt, Human
uuugcauguuccac

SEQ ID NO: 2266819 - RNA, 23 nt, Human
uuugcauggcacuugcaucugug

SEQ ID NO: 2266820 - RNA, 22 nt, Human
uuugcauggcuccagaaauguc

SEQ ID NO: 2266821 - RNA, 14 nt, Human
uuuggucugggacu

SEQ ID NO: 2266822 - RNA, 20 nt, Human
uuuggucuuuaaugaaaagc

SEQ ID NO: 2266823 - RNA, 21 nt, Human
uuuggucuuuuuuuguauuau

SEQ ID NO: 2266824 - RNA, 20 nt, Human
uuuggauauaggucagugag

SEQ ID NO: 2266825 - RNA, 20 nt, Human
uuuggaguccccucaccucc

SEQ ID NO: 2266826 - RNA, 19 nt, Human
uuuggaugggagugagaca

SEQ ID NO: 2266827 - RNA, 21 nt, Human
uuuggaugggagugagacaga

SEQ ID NO: 2266828 - RNA, 21 nt, Human
uuuggaauuuugugcccccau

SEQ ID NO: 2266829 - RNA, 11 nt, Human
uuuggaaugug

SEQ ID NO: 2266830 - RNA, 18 nt, Human
uuuggagaguuuccugaa

SEQ ID NO: 2266831 - RNA, 20 nt, Human
uuuggagucagacagaugug

SEQ ID NO: 2266832 - RNA, 14 nt, Human
uuuggaggugcuua

SEQ ID NO: 2266833 - RNA, 17 nt, Human
uuuggaguccccucacc

SEQ ID NO: 2266834 - RNA, 21 nt, Human
uuuguaaaaacagcauugcuu

SEQ ID NO: 2266835 - RNA, 21 nt, Human
uuugguuuuguuccccuccuc

SEQ ID NO: 2266836 - RNA, 16 nt, Human
uuugguuuuguucccc

SEQ ID NO: 2266837 - RNA, 19 nt, Human
uuugguuuuguuccccucc

SEQ ID NO: 2266838 - RNA, 13 nt, Human
uuuguauaaaaua

SEQ ID NO: 2266839 - RNA, 14 nt, Human
uuuguauaaaauaa

SEQ ID NO: 2266840 - RNA, 16 nt, Human
uuuguauaaaauaauu

SEQ ID NO: 2266841 - RNA, 15 nt, Human
uuugguggcuuugca

SEQ ID NO: 2266842 - RNA, 20 nt, Human
uuugguggggguagagcuga

SEQ ID NO: 2266843 - RNA, 15 nt, Human
uuugguggagauaaa

SEQ ID NO: 2266844 - RNA, 14 nt, Human
uuugguuuuguucc

SEQ ID NO: 2266845 - RNA, 15 nt, Human
uuugguuuuguuccc

SEQ ID NO: 2266846 - RNA, 22 nt, Human
uuuuuccuuguccccacacucc

SEQ ID NO: 2266847 - RNA, 17 nt, Human
uuuuuccuuguauuuaa

SEQ ID NO: 2266848 - RNA, 11 nt, Human
uuuuuccuuuu

SEQ ID NO: 2266849 - RNA, 18 nt, Human
uuuuucuaaaacuaaaua

SEQ ID NO: 2266850 - RNA, 22 nt, Human
uuuuucuaaaacuaaauagcau

SEQ ID NO: 2266851 - RNA, 11 nt, Human
uuuuuccuuua

SEQ ID NO: 2266852 - RNA, 16 nt, Human
uuuuuccuucccuucu

SEQ ID NO: 2266853 - RNA, 19 nt, Human
uuuuuccuucagugccuua

SEQ ID NO: 2266854 - RNA, 11 nt, Human
uuuuucucuaa

SEQ ID NO: 2266855 - RNA, 19 nt, Human
uuuuucucuaggaaauauu

SEQ ID NO: 2266856 - RNA, 15 nt, Human
uuuuucuaagagaag

SEQ ID NO: 2266857 - RNA, 16 nt, Human
uuuuucuaagagaagu

SEQ ID NO: 2266858 - RNA, 18 nt, Human
uuuuucuacuuuuaaaga

SEQ ID NO: 2266859 - RNA, 16 nt, Human
uuuuucucaaaguuuu

SEQ ID NO: 2266860 - RNA, 19 nt, Human
uuuuucucaugaaucugca

SEQ ID NO: 2266861 - RNA, 18 nt, Human
uuuuucucaaaguuuuga

SEQ ID NO: 2266862 - RNA, 14 nt, Human
uuuuucucccucug

SEQ ID NO: 2266863 - RNA, 14 nt, Human
uuuuuccuguccuu

SEQ ID NO: 2266864 - RNA, 18 nt, Human
uuuuuccuagcccucuca

SEQ ID NO: 2266865 - RNA, 17 nt, Human
uuuuuaagguuauuuau

SEQ ID NO: 2266866 - RNA, 20 nt, Human
uuuuuccuuaauccagcuga

SEQ ID NO: 2266867 - RNA, 15 nt, Human
uuuuuccuuaaucca

SEQ ID NO: 2266868 - RNA, 11 nt, Human
uuuuuccuuca

SEQ ID NO: 2266869 - RNA, 16 nt, Human
uuuuuaaguauuuaua

SEQ ID NO: 2266870 - RNA, 23 nt, Human
uuuuuaagcuguaaaaagagaga

SEQ ID NO: 2266871 - RNA, 18 nt, Human
uuuuuaagcuguuuccau

SEQ ID NO: 2266872 - RNA, 18 nt, Human
uuuuuaagccuuaaagga

SEQ ID NO: 2266873 - RNA, 13 nt, Human
uuuuuaagauuuu

SEQ ID NO: 2266874 - RNA, 16 nt, Human
uuuuuaagauuuuucu

SEQ ID NO: 2266875 - RNA, 14 nt, Human
uuuuuaagcuguaa

SEQ ID NO: 2266876 - RNA, 18 nt, Human
uuuuuaaaguuacuuugu

SEQ ID NO: 2266877 - RNA, 20 nt, Human
uuuuuaagauaauaauauau

SEQ ID NO: 2266878 - RNA, 11 nt, Human
uuuuuaaaugc

SEQ ID NO: 2266879 - RNA, 13 nt, Human
uuuuugaaaacau

SEQ ID NO: 2266880 - RNA, 14 nt, Human
uuuuugaaauaaua

SEQ ID NO: 2266881 - RNA, 23 nt, Human
uuuuugaaaggcauguuccucug

SEQ ID NO: 2266882 - RNA, 17 nt, Human
uuuuucuuuauaaacuu

SEQ ID NO: 2266883 - RNA, 16 nt, Human
uuuuucuuuauaaacu

SEQ ID NO: 2266884 - RNA, 13 nt, Human
uuuuucuuuauaa

SEQ ID NO: 2266885 - RNA, 14 nt, Human
uuuuucuuuaagau

SEQ ID NO: 2266886 - RNA, 13 nt, Human
uuuuucuuguaau

SEQ ID NO: 2266887 - RNA, 18 nt, Human
uuuuucugacuccagugg

SEQ ID NO: 2266888 - RNA, 11 nt, Human
uuuuucugauu

SEQ ID NO: 2266889 - RNA, 12 nt, Human
uuuuuuguuuca

SEQ ID NO: 2266890 - RNA, 13 nt, Human
uuuuuuguauuau

SEQ ID NO: 2266891 - RNA, 23 nt, Human
uuuuuuggggauaugcuuaguaa

SEQ ID NO: 2266892 - RNA, 15 nt, Human
uuuuuugcaagugaa

SEQ ID NO: 2266893 - RNA, 12 nt, Human
uuuuuugauaaa

SEQ ID NO: 2266894 - RNA, 13 nt, Human
uuuuuuguuucau

SEQ ID NO: 2266895 - RNA, 14 nt, Human
uuuuguaauuuaaa

SEQ ID NO: 2266896 - RNA, 15 nt, Human
uuuuguaauuauugu

SEQ ID NO: 2266897 - RNA, 19 nt, Human
uuuuguagagccagggucu

SEQ ID NO: 2266898 - RNA, 22 nt, Human
uuuuguaggggucaaagaaaug

SEQ ID NO: 2266899 - RNA, 14 nt, Human
uuuuguagaugaaa

SEQ ID NO: 2266900 - RNA, 23 nt, Human
uuuuguaggggucaaagaaaugc

SEQ ID NO: 2266901 - RNA, 17 nt, Human
uuuuguaauuauuguga

SEQ ID NO: 2266902 - RNA, 13 nt, Human
uuuuguacuguaa

SEQ ID NO: 2266903 - RNA, 16 nt, Human
uuuuguacuguaaaga

SEQ ID NO: 2266904 - RNA, 17 nt, Human
uuuuguacuguaaagag

SEQ ID NO: 2266905 - RNA, 15 nt, Human
uuuuguauaauugua

SEQ ID NO: 2266906 - RNA, 16 nt, Human
uuuuguauaauuguau

SEQ ID NO: 2266907 - RNA, 17 nt, Human
uuuuguauaguaaagug

SEQ ID NO: 2266908 - RNA, 16 nt, Human
uuuuguauaguaaagu

SEQ ID NO: 2266909 - RNA, 18 nt, Human
uuuuguauaguaaaguga

SEQ ID NO: 2266910 - RNA, 23 nt, Human
uuuuguauaguuguggacauuua

SEQ ID NO: 2266911 - RNA, 14 nt, Human
uuuuguauguaaau

SEQ ID NO: 2266912 - RNA, 14 nt, Human
uuuuguaucuacau

SEQ ID NO: 2266913 - RNA, 13 nt, Human
uuuuguauauauc

SEQ ID NO: 2266914 - RNA, 19 nt, Human
uuuuguaucuacaucuuuu

SEQ ID NO: 2266915 - RNA, 14 nt, Human
uuuuguaagacaaa

SEQ ID NO: 2266916 - RNA, 13 nt, Human
uuuuguaaagugu

SEQ ID NO: 2266917 - RNA, 15 nt, Human
uuuuguaagaugcug

SEQ ID NO: 2266918 - RNA, 20 nt, Human
uuuuguaagaugcuggguug

SEQ ID NO: 2266919 - RNA, 15 nt, Human
uuuuguaaagaugcc

SEQ ID NO: 2266920 - RNA, 21 nt, Human
uuuuguaaagaugccggguuu

SEQ ID NO: 2266921 - RNA, 18 nt, Human
uuuuguaaacucaaaaua

SEQ ID NO: 2266922 - RNA, 20 nt, Human
uuuuggugguuuuagugauu

SEQ ID NO: 2266923 - RNA, 15 nt, Human
uuuugguugaauaaa

SEQ ID NO: 2266924 - RNA, 16 nt, Human
uuuugguucuuaguuc

SEQ ID NO: 2266925 - RNA, 20 nt, Human
uuuugguugaauaaacuaga

SEQ ID NO: 2266926 - RNA, 15 nt, Human
uuuugguugcuuuaa

SEQ ID NO: 2266927 - RNA, 20 nt, Human
uuuugguuuuguuccccucc

SEQ ID NO: 2266928 - RNA, 16 nt, Human
uuuugguuuuguuccc

SEQ ID NO: 2266929 - RNA, 14 nt, Human
uuuugguuuuguuc

SEQ ID NO: 2266930 - RNA, 22 nt, Human
uuuugguugucaauauuaaaua

SEQ ID NO: 2266931 - RNA, 22 nt, Human
uuuugguuugcagaugacaaaa

SEQ ID NO: 2266932 - RNA, 16 nt, Human
uuuugguugcuuuaau

SEQ ID NO: 2266933 - RNA, 12 nt, Human
uuuugguuguau

SEQ ID NO: 2266934 - RNA, 20 nt, Human
uuuugguuguauucuuugau

SEQ ID NO: 2266935 - RNA, 20 nt, Human
uuuuuaaaguguuucuguua

SEQ ID NO: 2266936 - RNA, 16 nt, Human
uuuuuaaauaaaagca

SEQ ID NO: 2266937 - RNA, 18 nt, Human
uuuuuaaagacuuuuaug

SEQ ID NO: 2266938 - RNA, 12 nt, Human
uuuuuaaagacu

SEQ ID NO: 2266939 - RNA, 13 nt, Human
uuuuuaaagacuu

SEQ ID NO: 2266940 - RNA, 17 nt, Human
uuuuuaaagacagaguc

SEQ ID NO: 2266941 - RNA, 16 nt, Human
uuuuuaaaauuuuaau

SEQ ID NO: 2266942 - RNA, 17 nt, Human
uuuuuaaaauauuuauu

SEQ ID NO: 2266943 - RNA, 16 nt, Human
uuuuuaaaauauuuau

SEQ ID NO: 2266944 - RNA, 17 nt, Human
uuuuuaaaauaucuuuu

SEQ ID NO: 2266945 - RNA, 19 nt, Human
uuuuuaaaaguuucaaugu

SEQ ID NO: 2266946 - RNA, 22 nt, Human
uuuuuaaaaguuucaaugugau

SEQ ID NO: 2266947 - RNA, 20 nt, Human
uuuuuaaaaaugcaaauccu

SEQ ID NO: 2266948 - RNA, 23 nt, Human
uuuuuaaaaaucauaaacugugu

SEQ ID NO: 2266949 - RNA, 12 nt, Human
uuuugucuugaa

SEQ ID NO: 2266950 - RNA, 13 nt, Human
uuuugucuugaau

SEQ ID NO: 2266951 - RNA, 18 nt, Human
uuuugugaaaaugucaaa

SEQ ID NO: 2266952 - RNA, 18 nt, Human
uuuuuaaaaaagaaacau

SEQ ID NO: 2266953 - RNA, 13 nt, Human
uuuugucuugugu

SEQ ID NO: 2266954 - RNA, 13 nt, Human
uuuugucuuauau

SEQ ID NO: 2266955 - RNA, 18 nt, Human
uuuuguauuuuuaauggg

SEQ ID NO: 2266956 - RNA, 22 nt, Human
uuuugucgaauuuuuauuauuu

SEQ ID NO: 2266957 - RNA, 18 nt, Human
uuuugucauuuucuccau

SEQ ID NO: 2266958 - RNA, 16 nt, Human
uuuugucauauaagau

SEQ ID NO: 2266959 - RNA, 10 nt, Human
uuuuguauuu

SEQ ID NO: 2266960 - RNA, 19 nt, Human
uuuuguauuuuccaagugu

SEQ ID NO: 2266961 - RNA, 15 nt, Human
uuuuguauuuuuaau

SEQ ID NO: 2266962 - RNA, 17 nt, Human
uuuuguauucucugagc

SEQ ID NO: 2266963 - RNA, 20 nt, Human
uuuuguauguaaaugugcau

SEQ ID NO: 2266964 - RNA, 16 nt, Human
uuuuggauuguauauu

SEQ ID NO: 2266965 - RNA, 16 nt, Human
uuuuggaugcagugcu

SEQ ID NO: 2266966 - RNA, 18 nt, Human
uuuugacacuauaucugu

SEQ ID NO: 2266967 - RNA, 13 nt, Human
uuuugaauguuau

SEQ ID NO: 2266968 - RNA, 16 nt, Human
uuuugacacuauaucu

SEQ ID NO: 2266969 - RNA, 19 nt, Human
uuuugacacuauaucugua

SEQ ID NO: 2266970 - RNA, 19 nt, Human
uuuuggcacugagauauuu

SEQ ID NO: 2266971 - RNA, 19 nt, Human
uuuuggcaaacgcuaaaga

SEQ ID NO: 2266972 - RNA, 19 nt, Human
uuuuggcaaaacucuacuu

SEQ ID NO: 2266973 - RNA, 16 nt, Human
uuuuggccaaaguguu

SEQ ID NO: 2266974 - RNA, 15 nt, Human
uuuuggccaaagugu

SEQ ID NO: 2266975 - RNA, 17 nt, Human
uuuuggccaaaguguua

SEQ ID NO: 2266976 - RNA, 22 nt, Human
uuuugaaugcuuccugacaauc

SEQ ID NO: 2266977 - RNA, 18 nt, Human
uuuugaaugguguuguau

SEQ ID NO: 2266978 - RNA, 14 nt, Human
uuuugaauguuauu

SEQ ID NO: 2266979 - RNA, 16 nt, Human
uuuugaauccaugcuu

SEQ ID NO: 2266980 - RNA, 18 nt, Human
uuuugaaugcuuccugac

SEQ ID NO: 2266981 - RNA, 20 nt, Human
uuuugacaaggggcaguggu

SEQ ID NO: 2266982 - RNA, 13 nt, Human
uuuucuuuucuau

SEQ ID NO: 2266983 - RNA, 13 nt, Human
uuuugaaucaaua

SEQ ID NO: 2266984 - RNA, 22 nt, Human
uuuugggcuccuuuuucucccu

SEQ ID NO: 2266985 - RNA, 18 nt, Human
uuuuggggaagugaggaa

SEQ ID NO: 2266986 - RNA, 23 nt, Human
uuuuggggggccccccuccuugc

SEQ ID NO: 2266987 - RNA, 18 nt, Human
uuuuggggauaugcuuag

SEQ ID NO: 2266988 - RNA, 21 nt, Human
uuuuggggauaugcuuaguaa

SEQ ID NO: 2266989 - RNA, 19 nt, Human
uuuugguaaagacuggcuu

SEQ ID NO: 2266990 - RNA, 19 nt, Human
uuuugggguuguguuguca

SEQ ID NO: 2266991 - RNA, 19 nt, Human
uuuuggcccccgagcuggg

SEQ ID NO: 2266992 - RNA, 22 nt, Human
uuuuggcugaaauucuccugga

SEQ ID NO: 2266993 - RNA, 14 nt, Human
uuuuggcugcugaa

SEQ ID NO: 2266994 - RNA, 15 nt, Human
uuuuggucuguguga

SEQ ID NO: 2266995 - RNA, 18 nt, Human
uuuuggucuggagggaag

SEQ ID NO: 2266996 - RNA, 17 nt, Human
uuuugguauuacacugu

SEQ ID NO: 2266997 - RNA, 19 nt, Human
uuuugguacuuauuacugc

SEQ ID NO: 2266998 - RNA, 23 nt, Human
uuuugguauuacacuguauuugu

SEQ ID NO: 2266999 - RNA, 21 nt, Human
uuuugguccaaguugugcuua

SEQ ID NO: 2267000 - RNA, 14 nt, Human
uuuuggucauugua

SEQ ID NO: 2267001 - RNA, 13 nt, Human
uuuucuacagugg

SEQ ID NO: 2267002 - RNA, 15 nt, Human
uuuucuaagagaagu

SEQ ID NO: 2267003 - RNA, 15 nt, Human
uuuucuaaugugguu

SEQ ID NO: 2267004 - RNA, 21 nt, Human
uuuucuaaugugguuauuucu

SEQ ID NO: 2267005 - RNA, 13 nt, Human
uuuucuaagagaa

SEQ ID NO: 2267006 - RNA, 18 nt, Human
uuuucuaaaguaaaaaca

SEQ ID NO: 2267007 - RNA, 14 nt, Human
uuuucuuugaaauu

SEQ ID NO: 2267008 - RNA, 17 nt, Human
uuuucuuugaaugcuuu

SEQ ID NO: 2267009 - RNA, 13 nt, Human
uuuucuacaguua

SEQ ID NO: 2267010 - RNA, 14 nt, Human
uuuucuacaguggu

SEQ ID NO: 2267011 - RNA, 18 nt, Human
uuuucuacagugguuuua

SEQ ID NO: 2267012 - RNA, 16 nt, Human
uuuucuacccuagcca

SEQ ID NO: 2267013 - RNA, 17 nt, Human
uuuucuacccuagccau

SEQ ID NO: 2267014 - RNA, 16 nt, Human
uuuucuuuguguagcu

SEQ ID NO: 2267015 - RNA, 19 nt, Human
uuuucuuuguguagcuuug

SEQ ID NO: 2267016 - RNA, 12 nt, Human
uuuucuuugugu

SEQ ID NO: 2267017 - RNA, 20 nt, Human
uuuuaauucaccaaaguauu

SEQ ID NO: 2267018 - RNA, 23 nt, Human
uuuuaauuauuauuuauauaugu

SEQ ID NO: 2267019 - RNA, 17 nt, Human
uuuuaauuauuauucuu

SEQ ID NO: 2267020 - RNA, 20 nt, Human
uuuuaauuauuauuuauaua

SEQ ID NO: 2267021 - RNA, 22 nt, Human
uuuuaauuaaugaaauaucugu

SEQ ID NO: 2267022 - RNA, 13 nt, Human
uuuuaauuaaaug

SEQ ID NO: 2267023 - RNA, 11 nt, Human
uuuuaauuauu

SEQ ID NO: 2267024 - RNA, 16 nt, Human
uuuuaauuauuauucu

SEQ ID NO: 2267025 - RNA, 15 nt, Human
uuuuaauugauuauu

SEQ ID NO: 2267026 - RNA, 18 nt, Human
uuuuaauuccaugaaucg

SEQ ID NO: 2267027 - RNA, 11 nt, Human
uuuuaauucca

SEQ ID NO: 2267028 - RNA, 18 nt, Human
uuuuaauuccaauaugau

SEQ ID NO: 2267029 - RNA, 19 nt, Human
uuuuaauuccaauaugaug

SEQ ID NO: 2267030 - RNA, 22 nt, Human
uuuuaauuccaauaugaugacu

SEQ ID NO: 2267031 - RNA, 15 nt, Human
uuuuaauuccaugaa

SEQ ID NO: 2267032 - RNA, 21 nt, Human
uuuuaauuccaugaaucgcuu

SEQ ID NO: 2267033 - RNA, 17 nt, Human
uuuuaauuuacaaaaau

SEQ ID NO: 2267034 - RNA, 14 nt, Human
uuuuccugaaaacc

SEQ ID NO: 2267035 - RNA, 16 nt, Human
gccucccuggucccuu

SEQ ID NO: 2267036 - RNA, 21 nt, Human
gccucccuguugaagcucugg

SEQ ID NO: 2267037 - RNA, 20 nt, Human
gccucccuguugaagcucug

SEQ ID NO: 2267038 - RNA, 20 nt, Human
gccucccgaguagcugggac

SEQ ID NO: 2267039 - RNA, 18 nt, Human
gccucccgaguagcuggg

SEQ ID NO: 2267040 - RNA, 19 nt, Human
gccucccgaguagcuggga

SEQ ID NO: 2267041 - RNA, 17 nt, Human
gccucccaucacccgcu

SEQ ID NO: 2267042 - RNA, 17 nt, Human
gccucccgaguagcugg

SEQ ID NO: 2267043 - RNA, 16 nt, Human
gccuccguauuucaga

SEQ ID NO: 2267044 - RNA, 23 nt, Human
gccuccggcgucagccuccagcc

SEQ ID NO: 2267045 - RNA, 20 nt, Human
gccuccggcgucagccucca

SEQ ID NO: 2267046 - RNA, 21 nt, Human
gccuccggcgucagccuccag

SEQ ID NO: 2267047 - RNA, 12 nt, Human
gccuccggccuc

SEQ ID NO: 2267048 - RNA, 16 nt, Human
gccuccggccuccccu

SEQ ID NO: 2267049 - RNA, 17 nt, Human
gccuccggcgucagccu

SEQ ID NO: 2267050 - RNA, 18 nt, Human
gccuccggcgucagccuc

SEQ ID NO: 2267051 - RNA, 19 nt, Human
gccuccggcgucagccucc

SEQ ID NO: 2267052 - RNA, 16 nt, Human
gccuccgagagggaga

SEQ ID NO: 2267053 - RNA, 18 nt, Human
gccuccgagagggagaga

SEQ ID NO: 2267054 - RNA, 23 nt, Human
gccucccuucaugcauggaaauu

SEQ ID NO: 2267055 - RNA, 15 nt, Human
gccuccgagagggag

SEQ ID NO: 2267056 - RNA, 22 nt, Human
gccucccuucaugcauggaaau

SEQ ID NO: 2267057 - RNA, 20 nt, Human
gccucccuucaugcauggaa

SEQ ID NO: 2267058 - RNA, 18 nt, Human
gccucccuucaugcaugg

SEQ ID NO: 2267059 - RNA, 15 nt, Human
gccucccuucaugca

SEQ ID NO: 2267060 - RNA, 19 nt, Human
gccucucauuccagaggaa

SEQ ID NO: 2267061 - RNA, 19 nt, Human
gccucucaucaacugaaug

SEQ ID NO: 2267062 - RNA, 18 nt, Human
gccucucaucaacugaau

SEQ ID NO: 2267063 - RNA, 21 nt, Human
gccuccucacccccagcuuug

SEQ ID NO: 2267064 - RNA, 16 nt, Human
gccucucaucaacuga

SEQ ID NO: 2267065 - RNA, 14 nt, Human
gccuccucaccccc

SEQ ID NO: 2267066 - RNA, 20 nt, Human
gccuccuacagcccaccugg

SEQ ID NO: 2267067 - RNA, 19 nt, Human
gccuccucacccccagcuu

SEQ ID NO: 2267068 - RNA, 18 nt, Human
gccuccucacccccagcu

SEQ ID NO: 2267069 - RNA, 17 nt, Human
gccuccucacccccagc

SEQ ID NO: 2267070 - RNA, 16 nt, Human
gccuccucacccccag

SEQ ID NO: 2267071 - RNA, 13 nt, Human
gccucccacuggg

SEQ ID NO: 2267072 - RNA, 16 nt, Human
gccucaagucacuccc

SEQ ID NO: 2267073 - RNA, 15 nt, Human
gccucccaaaugagc

SEQ ID NO: 2267074 - RNA, 14 nt, Human
gccucccacugggg

SEQ ID NO: 2267075 - RNA, 10 nt, Human
gccucccagc

SEQ ID NO: 2267076 - RNA, 14 nt, Human
gccucccagccugg

SEQ ID NO: 2267077 - RNA, 13 nt, Human
gccucccagccug

SEQ ID NO: 2267078 - RNA, 14 nt, Human
gccucccaucaccc

SEQ ID NO: 2267079 - RNA, 16 nt, Human
gccucccaucacccgc

SEQ ID NO: 2267080 - RNA, 16 nt, Human
gccucccaacucaccc

SEQ ID NO: 2267081 - RNA, 17 nt, Human
gccucccaacucacccc

SEQ ID NO: 2267082 - RNA, 18 nt, Human
gccucccaacucacccca

SEQ ID NO: 2267083 - RNA, 19 nt, Human
gccucccaacucaccccag

SEQ ID NO: 2267084 - RNA, 21 nt, Human
gccucacaguccuuaccagca

SEQ ID NO: 2267085 - RNA, 18 nt, Human
gccucacaguccuuacca

SEQ ID NO: 2267086 - RNA, 15 nt, Human
gccucagcauccugg

SEQ ID NO: 2267087 - RNA, 16 nt, Human
gccucagcauccuggc

SEQ ID NO: 2267088 - RNA, 18 nt, Human
gccucccaaagugcuggg

SEQ ID NO: 2267089 - RNA, 19 nt, Human
gccucccaaagugcuggga

SEQ ID NO: 2267090 - RNA, 13 nt, Human
gccucccaacuca

SEQ ID NO: 2267091 - RNA, 20 nt, Human
gccucucauuccagaggaag

SEQ ID NO: 2267092 - RNA, 13 nt, Human
gccucucucaggc

SEQ ID NO: 2267093 - RNA, 14 nt, Human
gccucucucaggcc

SEQ ID NO: 2267094 - RNA, 17 nt, Human
gccucugacacacagcu

SEQ ID NO: 2267095 - RNA, 18 nt, Human
gccucugacacacagcuc

SEQ ID NO: 2267096 - RNA, 16 nt, Human
gccucucucaggccaa

SEQ ID NO: 2267097 - RNA, 12 nt, Human
gccucucuccca

SEQ ID NO: 2267098 - RNA, 16 nt, Human
gccucucucccagucu

SEQ ID NO: 2267099 - RNA, 19 nt, Human
gccucugacacacagcucu

SEQ ID NO: 2267100 - RNA, 20 nt, Human
gccucugacacacagcucug

SEQ ID NO: 2267101 - RNA, 21 nt, Human
gccucugacacacagcucugu

SEQ ID NO: 2267102 - RNA, 13 nt, Human
gccucucucccag

SEQ ID NO: 2267103 - RNA, 15 nt, Human
gccucucucccaguc

SEQ ID NO: 2267104 - RNA, 13 nt, Human
gccucugaccccu

SEQ ID NO: 2267105 - RNA, 14 nt, Human
gccucugaccccuc

SEQ ID NO: 2267106 - RNA, 15 nt, Human
gccucugaccccucc

SEQ ID NO: 2267107 - RNA, 16 nt, Human
gccucugaccccuccu

SEQ ID NO: 2267108 - RNA, 17 nt, Human
gccucugaccccuccuc

SEQ ID NO: 2267109 - RNA, 18 nt, Human
gccucugaccccuccuca

SEQ ID NO: 2267110 - RNA, 14 nt, Human
gccucugcacuccc

SEQ ID NO: 2267111 - RNA, 22 nt, Human
gccucugagggaaagcccagaa

SEQ ID NO: 2267112 - RNA, 19 nt, Human
gccucugacuuaagcugcc

SEQ ID NO: 2267113 - RNA, 19 nt, Human
gccucugaccccuccucac

SEQ ID NO: 2267114 - RNA, 20 nt, Human
gccucugaccccuccucacu

SEQ ID NO: 2267115 - RNA, 21 nt, Human
gccucugaccccuccucacug

SEQ ID NO: 2267116 - RNA, 22 nt, Human
gccucugaccccuccucacugg

SEQ ID NO: 2267117 - RNA, 15 nt, Human
gccucugagauuugg

SEQ ID NO: 2267118 - RNA, 23 nt, Human
gccugagggcgaggggagggugg

SEQ ID NO: 2267119 - RNA, 22 nt, Human
gccugagggccccucugcccag

SEQ ID NO: 2267120 - RNA, 20 nt, Human
gccugagggccccucugccc

SEQ ID NO: 2267121 - RNA, 21 nt, Human
gccugagggccccucugccca

SEQ ID NO: 2267122 - RNA, 16 nt, Human
gccugagggccccucu

SEQ ID NO: 2267123 - RNA, 17 nt, Human
gccugagggccccucug

SEQ ID NO: 2267124 - RNA, 18 nt, Human
gccugagggccccucugc

SEQ ID NO: 2267125 - RNA, 19 nt, Human
gccugagggccccucugcc

SEQ ID NO: 2267126 - RNA, 22 nt, Human
gccugagaggcaggcauagagg

SEQ ID NO: 2267127 - RNA, 15 nt, Human
gccugagggccccuc

SEQ ID NO: 2267128 - RNA, 16 nt, Human
gccugagaggcaggca

SEQ ID NO: 2267129 - RNA, 18 nt, Human
gccugagaggcaggcaua

SEQ ID NO: 2267130 - RNA, 19 nt, Human
gccugagaggcaggcauag

SEQ ID NO: 2267131 - RNA, 20 nt, Human
gccugagaggcaggcauaga

SEQ ID NO: 2267132 - RNA, 12 nt, Human
gccugagggugg

SEQ ID NO: 2267133 - RNA, 14 nt, Human
gccugaggguggag

SEQ ID NO: 2267134 - RNA, 15 nt, Human
gccugaggguggaga

SEQ ID NO: 2267135 - RNA, 17 nt, Human
gccugaggguggagacu

SEQ ID NO: 2267136 - RNA, 21 nt, Human
gccugaggucaggaguucaag

SEQ ID NO: 2267137 - RNA, 17 nt, Human
gccugaggucucgcuga

SEQ ID NO: 2267138 - RNA, 21 nt, Human
gccugaggucucgcugaugcu

SEQ ID NO: 2267139 - RNA, 16 nt, Human
gccugaggucuggcug

SEQ ID NO: 2267140 - RNA, 18 nt, Human
gccugaggucuggcugcu

SEQ ID NO: 2267141 - RNA, 19 nt, Human
gccugaggucuggcugcuu

SEQ ID NO: 2267142 - RNA, 20 nt, Human
gccugaggucuggcugcuug

SEQ ID NO: 2267143 - RNA, 13 nt, Human
gccugcaagggag

SEQ ID NO: 2267144 - RNA, 15 nt, Human
gccugcaagggagug

SEQ ID NO: 2267145 - RNA, 20 nt, Human
gccugcaaacgcugccugcc

SEQ ID NO: 2267146 - RNA, 19 nt, Human
gccugcaaacgcugccugc

SEQ ID NO: 2267147 - RNA, 21 nt, Human
gccugcaaacgcugccugccc

SEQ ID NO: 2267148 - RNA, 21 nt, Human
gccugcaaacucacugcucaa

SEQ ID NO: 2267149 - RNA, 21 nt, Human
gccugaguagaaaggccuuua

SEQ ID NO: 2267150 - RNA, 16 nt, Human
gccugaguagaaaggc

SEQ ID NO: 2267151 - RNA, 13 nt, Human
gccugaggucugu

SEQ ID NO: 2267152 - RNA, 18 nt, Human
gccugaggucuguacguu

SEQ ID NO: 2267153 - RNA, 16 nt, Human
gccucugccccgucuc

SEQ ID NO: 2267154 - RNA, 15 nt, Human
gccucugccccgucu

SEQ ID NO: 2267155 - RNA, 23 nt, Human
gccucugccaaaggaugugauau

SEQ ID NO: 2267156 - RNA, 15 nt, Human
gccucugcauucagg

SEQ ID NO: 2267157 - RNA, 17 nt, Human
gccucugcaaaggaaau

SEQ ID NO: 2267158 - RNA, 20 nt, Human
gccucugagggaaagcccag

SEQ ID NO: 2267159 - RNA, 12 nt, Human
gccucugccucu

SEQ ID NO: 2267160 - RNA, 13 nt, Human
gccucugccucug

SEQ ID NO: 2267161 - RNA, 18 nt, Human
gccucugccucugacaca

SEQ ID NO: 2267162 - RNA, 13 nt, Human
gccugaccuugag

SEQ ID NO: 2267163 - RNA, 13 nt, Human
gccugagaggcag

SEQ ID NO: 2267164 - RNA, 14 nt, Human
gccugagaggcagg

SEQ ID NO: 2267165 - RNA, 15 nt, Human
gccugagaggcaggc

SEQ ID NO: 2267166 - RNA, 22 nt, Human
gccugagaagagagaucaaaug

SEQ ID NO: 2267167 - RNA, 20 nt, Human
gccggucugcaagucagagg

SEQ ID NO: 2267168 - RNA, 17 nt, Human
gccggugagaauaagag

SEQ ID NO: 2267169 - RNA, 18 nt, Human
gccggucugcaagucaga

SEQ ID NO: 2267170 - RNA, 19 nt, Human
gccggucugcaagucagag

SEQ ID NO: 2267171 - RNA, 14 nt, Human
gccguaccccaccc

SEQ ID NO: 2267172 - RNA, 14 nt, Human
gccgguuugaguga

SEQ ID NO: 2267173 - RNA, 22 nt, Human
gccguaccccacccucagcacc

SEQ ID NO: 2267174 - RNA, 15 nt, Human
gccguaccccacccu

SEQ ID NO: 2267175 - RNA, 16 nt, Human
gccguaccccacccuc

SEQ ID NO: 2267176 - RNA, 18 nt, Human
gccguaccccacccucag

SEQ ID NO: 2267177 - RNA, 19 nt, Human
gccguaccccacccucagc

SEQ ID NO: 2267178 - RNA, 18 nt, Human
gccgucagccaaauguaa

SEQ ID NO: 2267179 - RNA, 15 nt, Human
gccgucuaccugagg

SEQ ID NO: 2267180 - RNA, 21 nt, Human
gccguccucccgggcccuccc

SEQ ID NO: 2267181 - RNA, 19 nt, Human
gccguccucccgggcccuc

SEQ ID NO: 2267182 - RNA, 20 nt, Human
gccguccucccgggcccucc

SEQ ID NO: 2267183 - RNA, 14 nt, Human
gccguccucccggg

SEQ ID NO: 2267184 - RNA, 18 nt, Human
gccguccucccgggcccu

SEQ ID NO: 2267185 - RNA, 16 nt, Human
gccgucuaccugaggg

SEQ ID NO: 2267186 - RNA, 17 nt, Human
gccgucuaccugagggg

SEQ ID NO: 2267187 - RNA, 20 nt, Human
gccguggggccgccgccucu

SEQ ID NO: 2267188 - RNA, 23 nt, Human
gccguggggccgccgccucuuuc

SEQ ID NO: 2267189 - RNA, 20 nt, Human
gccguguaaccauggaccca

SEQ ID NO: 2267190 - RNA, 14 nt, Human
gccgugcccugccc

SEQ ID NO: 2267191 - RNA, 20 nt, Human
gccgugcucgccccagcagg

SEQ ID NO: 2267192 - RNA, 15 nt, Human
gccgugggccugggg

SEQ ID NO: 2267193 - RNA, 21 nt, Human
gccguggcuucccgcucagcc

SEQ ID NO: 2267194 - RNA, 22 nt, Human
gccguggcuucccgcucagccc

SEQ ID NO: 2267195 - RNA, 15 nt, Human
gccguggcuucccgc

SEQ ID NO: 2267196 - RNA, 19 nt, Human
gccguggcuucccgcucag

SEQ ID NO: 2267197 - RNA, 21 nt, Human
gccgugcucgccccagcaggu

SEQ ID NO: 2267198 - RNA, 17 nt, Human
gccgugcucgccccagc

SEQ ID NO: 2267199 - RNA, 14 nt, Human
gccgugccuucagc

SEQ ID NO: 2267200 - RNA, 15 nt, Human
gccgugccuucagcu

SEQ ID NO: 2267201 - RNA, 17 nt, Human
gccgugccuucagcucu

SEQ ID NO: 2267202 - RNA, 19 nt, Human
gccgugccuucagcucuac

SEQ ID NO: 2267203 - RNA, 20 nt, Human
gccguuacucuccaaccugg

SEQ ID NO: 2267204 - RNA, 18 nt, Human
gccguuacucuccaaccu

SEQ ID NO: 2267205 - RNA, 15 nt, Human
gccguuacucuccaa

SEQ ID NO: 2267206 - RNA, 14 nt, Human
gccguuacucucca

SEQ ID NO: 2267207 - RNA, 16 nt, Human
gccgugguccuuuggg

SEQ ID NO: 2267208 - RNA, 18 nt, Human
gccguugaagaggaaggg

SEQ ID NO: 2267209 - RNA, 16 nt, Human
gccuaacaccagcguu

SEQ ID NO: 2267210 - RNA, 15 nt, Human
gccuaugaucccagc

SEQ ID NO: 2267211 - RNA, 18 nt, Human
gccuaugaucccagcacu

SEQ ID NO: 2267212 - RNA, 14 nt, Human
gccuaugcacauau

SEQ ID NO: 2267213 - RNA, 23 nt, Human
gccuaugcacauauggacucugc

SEQ ID NO: 2267214 - RNA, 20 nt, Human
gccuaugcacauauggacuc

SEQ ID NO: 2267215 - RNA, 22 nt, Human
gccuaugcacauauggacucug

SEQ ID NO: 2267216 - RNA, 18 nt, Human
gccucaaccuccugggcu

SEQ ID NO: 2267217 - RNA, 19 nt, Human
gccucaaccuccugggcua

SEQ ID NO: 2267218 - RNA, 22 nt, Human
gccuaugugcaugcagcaucua

SEQ ID NO: 2267219 - RNA, 22 nt, Human
gccuauuaguaguuaauucugu

SEQ ID NO: 2267220 - RNA, 15 nt, Human
gccuauuauauuaaa

SEQ ID NO: 2267221 - RNA, 20 nt, Human
gccuauuauauuaaaauaug

SEQ ID NO: 2267222 - RNA, 16 nt, Human
gccucacagaagaaua

SEQ ID NO: 2267223 - RNA, 13 nt, Human
gccucaaggacuu

SEQ ID NO: 2267224 - RNA, 15 nt, Human
gccuauucccacacc

SEQ ID NO: 2267225 - RNA, 17 nt, Human
gccucaaccuccugggc

SEQ ID NO: 2267226 - RNA, 13 nt, Human
gccucacaguccu

SEQ ID NO: 2267227 - RNA, 17 nt, Human
gccucacaguccuuacc

SEQ ID NO: 2267228 - RNA, 13 nt, Human
gccgcaccccaga

SEQ ID NO: 2267229 - RNA, 17 nt, Human
gccgcaagucugcagcc

SEQ ID NO: 2267230 - RNA, 16 nt, Human
gccgcaauacaggaac

SEQ ID NO: 2267231 - RNA, 16 nt, Human
gccgcaccccagagug

SEQ ID NO: 2267232 - RNA, 15 nt, Human
gccgcaccccagagu

SEQ ID NO: 2267233 - RNA, 23 nt, Human
gccgcaccccagagugugggaag

SEQ ID NO: 2267234 - RNA, 11 nt, Human
gccgcagcccu

SEQ ID NO: 2267235 - RNA, 13 nt, Human
gccgcagcccugc

SEQ ID NO: 2267236 - RNA, 12 nt, Human
gccgcagagcug

SEQ ID NO: 2267237 - RNA, 23 nt, Human
gccggccucucuggccucccacc

SEQ ID NO: 2267238 - RNA, 12 nt, Human
gccgcagcccug

SEQ ID NO: 2267239 - RNA, 11 nt, Human
gccgaccucag

SEQ ID NO: 2267240 - RNA, 22 nt, Human
gccgaccgaggcuggagcuggc

SEQ ID NO: 2267241 - RNA, 22 nt, Human
gccgagaucacgccacugcacu

SEQ ID NO: 2267242 - RNA, 20 nt, Human
gccgagaucacgccacugca

SEQ ID NO: 2267243 - RNA, 21 nt, Human
gccgagaucacgccacugcac

SEQ ID NO: 2267244 - RNA, 22 nt, Human
gccgggaacagacaacagaagu

SEQ ID NO: 2267245 - RNA, 18 nt, Human
gccgggaccccgagccug

SEQ ID NO: 2267246 - RNA, 23 nt, Human
gccgggaccccgagccuggcucc

SEQ ID NO: 2267247 - RNA, 19 nt, Human
gccgggaccccgagccugg

SEQ ID NO: 2267248 - RNA, 20 nt, Human
gccgggaacagacaacagaa

SEQ ID NO: 2267249 - RNA, 17 nt, Human
gccggcggcccaagccc

SEQ ID NO: 2267250 - RNA, 19 nt, Human
gccggcuucaugccagcua

SEQ ID NO: 2267251 - RNA, 22 nt, Human
gccggcuggaaaugcugggcug

SEQ ID NO: 2267252 - RNA, 17 nt, Human
gccggcgagcccugugg

SEQ ID NO: 2267253 - RNA, 15 nt, Human
gccggcgagcccugu

SEQ ID NO: 2267254 - RNA, 18 nt, Human
gccggcgagcccugugga

SEQ ID NO: 2267255 - RNA, 13 nt, Human
gccggcuggaaau

SEQ ID NO: 2267256 - RNA, 19 nt, Human
gccgggcgugguggcgggc

SEQ ID NO: 2267257 - RNA, 12 nt, Human
gccgggccuggg

SEQ ID NO: 2267258 - RNA, 21 nt, Human
gccgggcgcgguggcucacgc

SEQ ID NO: 2267259 - RNA, 14 nt, Human
gccgguaccuggga

SEQ ID NO: 2267260 - RNA, 20 nt, Human
gccgggcgugguggugagug

SEQ ID NO: 2267261 - RNA, 16 nt, Human
gcccugcuuugggcug

SEQ ID NO: 2267262 - RNA, 18 nt, Human
gcccugcuuugggcugcc

SEQ ID NO: 2267263 - RNA, 21 nt, Human
gcccugcuggccgccucaccc

SEQ ID NO: 2267264 - RNA, 22 nt, Human
gcccugcuggccgccucacccc

SEQ ID NO: 2267265 - RNA, 23 nt, Human
gcccugcuggccgccucaccccc

SEQ ID NO: 2267266 - RNA, 11 nt, Human
gcccugcuggc

SEQ ID NO: 2267267 - RNA, 14 nt, Human
gcccugcuggccgc

SEQ ID NO: 2267268 - RNA, 18 nt, Human
gcccugcuggccgccuca

SEQ ID NO: 2267269 - RNA, 20 nt, Human
gcccugcuggccgccucacc

SEQ ID NO: 2267270 - RNA, 14 nt, Human
gcccuucucuccag

SEQ ID NO: 2267271 - RNA, 16 nt, Human
gcccuucucuccagcc

SEQ ID NO: 2267272 - RNA, 17 nt, Human
gcccuucucuccagccc

SEQ ID NO: 2267273 - RNA, 18 nt, Human
gcccuucucuccagcccc

SEQ ID NO: 2267274 - RNA, 16 nt, Human
gcccuuggaggccagc

SEQ ID NO: 2267275 - RNA, 16 nt, Human
gcccuugccuccccau

SEQ ID NO: 2267276 - RNA, 12 nt, Human
gcccuuguccca

SEQ ID NO: 2267277 - RNA, 24 nt, Human
gcccuugucccacucaagccaagc

SEQ ID NO: 2267278 - RNA, 21 nt, Human
gcccuugucccacucaagcca

SEQ ID NO: 2267279 - RNA, 13 nt, Human
gcccuugucugag

SEQ ID NO: 2267280 - RNA, 14 nt, Human
gcccuugcccugac

SEQ ID NO: 2267281 - RNA, 15 nt, Human
gcccuugcccugacc

SEQ ID NO: 2267282 - RNA, 16 nt, Human
gcccuugcccugaccu

SEQ ID NO: 2267283 - RNA, 18 nt, Human
gcccuugcccugaccucc

SEQ ID NO: 2267284 - RNA, 21 nt, Human
gcccuugcccugaccucccag

SEQ ID NO: 2267285 - RNA, 13 nt, Human
gcccuugccuccc

SEQ ID NO: 2267286 - RNA, 14 nt, Human
gcccuugccucccc

SEQ ID NO: 2267287 - RNA, 12 nt, Human
gcccuuggccag

SEQ ID NO: 2267288 - RNA, 22 nt, Human
gccgaagaaggguccuucccuc

SEQ ID NO: 2267289 - RNA, 19 nt, Human
gccgaagaaggguccuucc

SEQ ID NO: 2267290 - RNA, 12 nt, Human
gccgaaccagga

SEQ ID NO: 2267291 - RNA, 19 nt, Human
gccgaaccaggagcugcuc

SEQ ID NO: 2267292 - RNA, 17 nt, Human
gccgaccagagccccac

SEQ ID NO: 2267293 - RNA, 14 nt, Human
gccgaaugugcagg

SEQ ID NO: 2267294 - RNA, 14 nt, Human
gccgaccagagccc

SEQ ID NO: 2267295 - RNA, 19 nt, Human
gccgaagcucuggcugaac

SEQ ID NO: 2267296 - RNA, 20 nt, Human
gccgaauccccucccuguca

SEQ ID NO: 2267297 - RNA, 15 nt, Human
gccgaaugcccucag

SEQ ID NO: 2267298 - RNA, 12 nt, Human
gccgaagcucug

SEQ ID NO: 2267299 - RNA, 14 nt, Human
gccgaagcucuggc

SEQ ID NO: 2267300 - RNA, 17 nt, Human
gccgaagcucuggcuga

SEQ ID NO: 2267301 - RNA, 15 nt, Human
gcgaaccaauauuug

SEQ ID NO: 2267302 - RNA, 19 nt, Human
gcgacagagcgagagucug

SEQ ID NO: 2267303 - RNA, 12 nt, Human
gcgacagugaga

SEQ ID NO: 2267304 - RNA, 21 nt, Human
gcgccgcaaaccacacuggac

SEQ ID NO: 2267305 - RNA, 23 nt, Human
gcgccggcaaaacuuuggcacug

SEQ ID NO: 2267306 - RNA, 17 nt, Human
gcgccggcgggcgggcc

SEQ ID NO: 2267307 - RNA, 13 nt, Human
gcgccgucuccag

SEQ ID NO: 2267308 - RNA, 15 nt, Human
gcgccgucuccaggg

SEQ ID NO: 2267309 - RNA, 19 nt, Human
gcgccgcaaaccacacugg

SEQ ID NO: 2267310 - RNA, 23 nt, Human
gcgacagagcgagagucugucuc

SEQ ID NO: 2267311 - RNA, 15 nt, Human
gcgccuacaggagug

SEQ ID NO: 2267312 - RNA, 22 nt, Human
gcgccgucuccaggggcugcuu

SEQ ID NO: 2267313 - RNA, 18 nt, Human
gcgccggcgggcgggccg

SEQ ID NO: 2267314 - RNA, 19 nt, Human
gcgccgugaguucucaggg

SEQ ID NO: 2267315 - RNA, 23 nt, Human
gcgccgugaguucucagggcucc

SEQ ID NO: 2267316 - RNA, 16 nt, Human
gcgccuuucccaacuc

SEQ ID NO: 2267317 - RNA, 20 nt, Human
gcgcgagggccucaaaggcc

SEQ ID NO: 2267318 - RNA, 15 nt, Human
gcgccuuucccaacu

SEQ ID NO: 2267319 - RNA, 14 nt, Human
gcgccuuucccaac

SEQ ID NO: 2267320 - RNA, 20 nt, Human
gcgccgugaguucucagggc

SEQ ID NO: 2267321 - RNA, 22 nt, Human
gcgccgugaguucucagggcuc

SEQ ID NO: 2267322 - RNA, 11 nt, Human
gcggacagcca

SEQ ID NO: 2267323 - RNA, 13 nt, Human
gcggacagccacg

SEQ ID NO: 2267324 - RNA, 16 nt, Human
gcgcuacccacuucua

SEQ ID NO: 2267325 - RNA, 13 nt, Human
gcgcuacccacuu

SEQ ID NO: 2267326 - RNA, 13 nt, Human
gcgcucagggcca

SEQ ID NO: 2267327 - RNA, 22 nt, Human
gcgcucagggccaugcugaggc

SEQ ID NO: 2267328 - RNA, 14 nt, Human
gcgcgccacucgcu

SEQ ID NO: 2267329 - RNA, 13 nt, Human
gcgcggccagccc

SEQ ID NO: 2267330 - RNA, 14 nt, Human
gcgcggccagcccc

SEQ ID NO: 2267331 - RNA, 15 nt, Human
gcgcggccagccccg

SEQ ID NO: 2267332 - RNA, 16 nt, Human
gcgcggccagccccgg

SEQ ID NO: 2267333 - RNA, 15 nt, Human
gcgcgucccccugcc

SEQ ID NO: 2267334 - RNA, 21 nt, Human
gcgcggccagccccggcccug

SEQ ID NO: 2267335 - RNA, 23 nt, Human
gcgcggccagccccggcccuggg

SEQ ID NO: 2267336 - RNA, 17 nt, Human
gcgcggggagcccgucg

SEQ ID NO: 2267337 - RNA, 17 nt, Human
gcgucgcccucccaggc

SEQ ID NO: 2267338 - RNA, 21 nt, Human
gcguagaucaccagaauaaac

SEQ ID NO: 2267339 - RNA, 15 nt, Human
gcguagaaguuuuug

SEQ ID NO: 2267340 - RNA, 19 nt, Human
gcgucucauacucaccuca

SEQ ID NO: 2267341 - RNA, 14 nt, Human
gcgguuuggggagc

SEQ ID NO: 2267342 - RNA, 18 nt, Human
gcggugggcacccacccu

SEQ ID NO: 2267343 - RNA, 18 nt, Human
gcgguggaaggcccgagg

SEQ ID NO: 2267344 - RNA, 14 nt, Human
gcgguggcccuguc

SEQ ID NO: 2267345 - RNA, 15 nt, Human
gcgguggcccugucc

SEQ ID NO: 2267346 - RNA, 23 nt, Human
gcgguuaugaaauucacccccuu

SEQ ID NO: 2267347 - RNA, 20 nt, Human
gcgggucacaggagggaggg

SEQ ID NO: 2267348 - RNA, 19 nt, Human
gcgggucacaggagggagg

SEQ ID NO: 2267349 - RNA, 21 nt, Human
gcgggugaacaaagcagccac

SEQ ID NO: 2267350 - RNA, 22 nt, Human
gcgggugaacaaagcagccacg

SEQ ID NO: 2267351 - RNA, 14 nt, Human
gcgguggaaggccc

SEQ ID NO: 2267352 - RNA, 13 nt, Human
gcggggggaggga

SEQ ID NO: 2267353 - RNA, 15 nt, Human
gcgggggccagggaa

SEQ ID NO: 2267354 - RNA, 15 nt, Human
gcgggucacaggagg

SEQ ID NO: 2267355 - RNA, 13 nt, Human
gcgggucacagga

SEQ ID NO: 2267356 - RNA, 20 nt, Human
gcgggccccucaucgcgucc

SEQ ID NO: 2267357 - RNA, 20 nt, Human
gcgggcgccuguagucccag

SEQ ID NO: 2267358 - RNA, 15 nt, Human
gcgggccagccaggc

SEQ ID NO: 2267359 - RNA, 16 nt, Human
gcgggccagccaggcg

SEQ ID NO: 2267360 - RNA, 19 nt, Human
gcgggccagccaggcgggc

SEQ ID NO: 2267361 - RNA, 21 nt, Human
gcgggccagccaggcgggcuc

SEQ ID NO: 2267362 - RNA, 16 nt, Human
gcgggcagcacagcaa

SEQ ID NO: 2267363 - RNA, 15 nt, Human
gcgggcagcacagca

SEQ ID NO: 2267364 - RNA, 20 nt, Human
gcgggccaaggacugccgac

SEQ ID NO: 2267365 - RNA, 17 nt, Human
gcgggccaaggacugcc

SEQ ID NO: 2267366 - RNA, 15 nt, Human
gcgggccaaggacug

SEQ ID NO: 2267367 - RNA, 13 nt, Human
gcgggccaaggac

SEQ ID NO: 2267368 - RNA, 15 nt, Human
gcggacagccacggc

SEQ ID NO: 2267369 - RNA, 16 nt, Human
gcgcucagggccaugc

SEQ ID NO: 2267370 - RNA, 15 nt, Human
gcgggaugguccugg

SEQ ID NO: 2267371 - RNA, 17 nt, Human
gcgggaugguccugggg

SEQ ID NO: 2267372 - RNA, 16 nt, Human
gcgggaugguccuggg

SEQ ID NO: 2267373 - RNA, 20 nt, Human
gcgggcaccuauagucccag

SEQ ID NO: 2267374 - RNA, 14 nt, Human
gcgggcagcacagc

SEQ ID NO: 2267375 - RNA, 15 nt, Human
gcuaaagcccagaga

SEQ ID NO: 2267376 - RNA, 16 nt, Human
gcuaagaauauuugaa

SEQ ID NO: 2267377 - RNA, 17 nt, Human
gcuaagaauauuugaau

SEQ ID NO: 2267378 - RNA, 13 nt, Human
gcuaagagggagg

SEQ ID NO: 2267379 - RNA, 14 nt, Human
gcuaaagagcccuu

SEQ ID NO: 2267380 - RNA, 13 nt, Human
gcuaaagaaaaag

SEQ ID NO: 2267381 - RNA, 19 nt, Human
gcuaaagcaauaugcauuu

SEQ ID NO: 2267382 - RNA, 17 nt, Human
gcuaaagcaauaugcau

SEQ ID NO: 2267383 - RNA, 18 nt, Human
gcuaaagagcccuugccu

SEQ ID NO: 2267384 - RNA, 22 nt, Human
gcuaaagagcccuugccucccc

SEQ ID NO: 2267385 - RNA, 23 nt, Human
gcuaaagagcccuugccucccca

SEQ ID NO: 2267386 - RNA, 11 nt, Human
gcgucuccugu

SEQ ID NO: 2267387 - RNA, 20 nt, Human
gcgucuccuguuuuucuggg

SEQ ID NO: 2267388 - RNA, 21 nt, Human
gcgucuggaaguccaaugugg

SEQ ID NO: 2267389 - RNA, 21 nt, Human
gcgucuccuguuuuucugggu

SEQ ID NO: 2267390 - RNA, 17 nt, Human
gcgucuggaggggcccc

SEQ ID NO: 2267391 - RNA, 18 nt, Human
gcgucugucuucaagggc

SEQ ID NO: 2267392 - RNA, 17 nt, Human
gcgucuguucccccuuc

SEQ ID NO: 2267393 - RNA, 18 nt, Human
gcgucuggaggggccccu

SEQ ID NO: 2267394 - RNA, 20 nt, Human
gcgucuggaggggccccugc

SEQ ID NO: 2267395 - RNA, 21 nt, Human
gcgucuggaggggccccugcu

SEQ ID NO: 2267396 - RNA, 23 nt, Human
gcgucuggaggggccccugcuuc

SEQ ID NO: 2267397 - RNA, 16 nt, Human
gcgucuguucccccuu

SEQ ID NO: 2267398 - RNA, 21 nt, Human
gcuacaggaagcaccccaugc

SEQ ID NO: 2267399 - RNA, 20 nt, Human
gcuacaggaagcaccccaug

SEQ ID NO: 2267400 - RNA, 19 nt, Human
gcuacaggaagcaccccau

SEQ ID NO: 2267401 - RNA, 20 nt, Human
gcuaagagcuagcgcugccg

SEQ ID NO: 2267402 - RNA, 16 nt, Human
gcuacacagaucacag

SEQ ID NO: 2267403 - RNA, 14 nt, Human
gcuacacagggaug

SEQ ID NO: 2267404 - RNA, 14 nt, Human
gcuacacaggggaa

SEQ ID NO: 2267405 - RNA, 18 nt, Human
gcuaagagcuagcgcugc

SEQ ID NO: 2267406 - RNA, 20 nt, Human
gcuaagagggagggagggcu

SEQ ID NO: 2267407 - RNA, 20 nt, Human
gcuacacacugcauguuugu

SEQ ID NO: 2267408 - RNA, 13 nt, Human
gcuacacacugca

SEQ ID NO: 2267409 - RNA, 12 nt, Human
gcuacagguuac

SEQ ID NO: 2267410 - RNA, 23 nt, Human
gcuacaggggaagguggccucug

SEQ ID NO: 2267411 - RNA, 14 nt, Human
gcuacagguuacaa

SEQ ID NO: 2267412 - RNA, 23 nt, Human
gcuacaggaagcaccccaugcca

SEQ ID NO: 2267413 - RNA, 22 nt, Human
gcuacaggaagcaccccaugcc

SEQ ID NO: 2267414 - RNA, 15 nt, Human
gcuacagguuacaac

SEQ ID NO: 2267415 - RNA, 16 nt, Human
gcuacagguuacaaca

SEQ ID NO: 2267416 - RNA, 18 nt, Human
gcuacagguuacaacaga

SEQ ID NO: 2267417 - RNA, 19 nt, Human
gcuacagguuacaacagau

SEQ ID NO: 2267418 - RNA, 20 nt, Human
gcuacagguuacaacagauu

SEQ ID NO: 2267419 - RNA, 20 nt, Human
gcuaccuuuguauucucucc

SEQ ID NO: 2267420 - RNA, 16 nt, Human
gcuaccuuuguauucu

SEQ ID NO: 2267421 - RNA, 19 nt, Human
gcuagaacucccuuucaac

SEQ ID NO: 2267422 - RNA, 20 nt, Human
gcuaccuugugacccagcac

SEQ ID NO: 2267423 - RNA, 23 nt, Human
gcuauagacccgaggaaacucag

SEQ ID NO: 2267424 - RNA, 19 nt, Human
gcuauagacccgaggaaac

SEQ ID NO: 2267425 - RNA, 22 nt, Human
gcuagcuucugcuuuucugccc

SEQ ID NO: 2267426 - RNA, 17 nt, Human
gcuauagccuggggugg

SEQ ID NO: 2267427 - RNA, 22 nt, Human
gcuaggaaauccaggguggugg

SEQ ID NO: 2267428 - RNA, 16 nt, Human
gcuaggaacacuccuu

SEQ ID NO: 2267429 - RNA, 18 nt, Human
gcuauagcuacaggaagc

SEQ ID NO: 2267430 - RNA, 16 nt, Human
gcuauagcuacaggaa

SEQ ID NO: 2267431 - RNA, 16 nt, Human
gcuauaggcuggagaa

SEQ ID NO: 2267432 - RNA, 16 nt, Human
gcuauagcucaggacc

SEQ ID NO: 2267433 - RNA, 17 nt, Human
gcuauagcucaggaccu

SEQ ID NO: 2267434 - RNA, 13 nt, Human
gcuauaggugcua

SEQ ID NO: 2267435 - RNA, 20 nt, Human
gcuagaagugggccaggaca

SEQ ID NO: 2267436 - RNA, 17 nt, Human
gcuagaaggccacaugu

SEQ ID NO: 2267437 - RNA, 13 nt, Human
gcuagaaggccac

SEQ ID NO: 2267438 - RNA, 15 nt, Human
gcuagaaggccacau

SEQ ID NO: 2267439 - RNA, 21 nt, Human
gcuaccuugugacccagcacu

SEQ ID NO: 2267440 - RNA, 14 nt, Human
gcuagaagcuggag

SEQ ID NO: 2267441 - RNA, 15 nt, Human
gcuagaagcuggagg

SEQ ID NO: 2267442 - RNA, 21 nt, Human
gcuagaagugggccaggacag

SEQ ID NO: 2267443 - RNA, 17 nt, Human
gcuagaauauccuacuu

SEQ ID NO: 2267444 - RNA, 19 nt, Human
gcuagaaucuggagagcua

SEQ ID NO: 2267445 - RNA, 22 nt, Human
gcuagaauucccucucucugac

SEQ ID NO: 2267446 - RNA, 15 nt, Human
gcuagcuucugcuuu

SEQ ID NO: 2267447 - RNA, 19 nt, Human
gcuaggaaauccagggugg

SEQ ID NO: 2267448 - RNA, 17 nt, Human
gcuagcuucugcuuuuc

SEQ ID NO: 2267449 - RNA, 18 nt, Human
gcuagcuucugcuuuucu

SEQ ID NO: 2267450 - RNA, 23 nt, Human
gcuagcuucugcuuuucugcccu

SEQ ID NO: 2267451 - RNA, 15 nt, Human
gcuaggaacacuccu

SEQ ID NO: 2267452 - RNA, 16 nt, Human
gccuuuggcagaguuc

SEQ ID NO: 2267453 - RNA, 13 nt, Human
gccuuuggcaggu

SEQ ID NO: 2267454 - RNA, 15 nt, Human
gccuuuggcaggugc

SEQ ID NO: 2267455 - RNA, 13 nt, Human
gccuuuggcuuca

SEQ ID NO: 2267456 - RNA, 13 nt, Human
gccuuuggcucug

SEQ ID NO: 2267457 - RNA, 15 nt, Human
gccuuuggcucugga

SEQ ID NO: 2267458 - RNA, 23 nt, Human
gcgaaaggauguaaacagugccu

SEQ ID NO: 2267459 - RNA, 23 nt, Human
gcgacaaugcaaaccaucauuga

SEQ ID NO: 2267460 - RNA, 16 nt, Human
gccuuuggcucuggag

SEQ ID NO: 2267461 - RNA, 19 nt, Human
gccuuuuuucacggaaguu

SEQ ID NO: 2267462 - RNA, 20 nt, Human
gccuuuuuucacggaaguuu

SEQ ID NO: 2267463 - RNA, 23 nt, Human
gccuuuuuucacggaaguuuuca

SEQ ID NO: 2267464 - RNA, 23 nt, Human
gccuuggauaaugcuguugccuc

SEQ ID NO: 2267465 - RNA, 19 nt, Human
gccuuggauaaugcuguug

SEQ ID NO: 2267466 - RNA, 21 nt, Human
gccuuggagggucccaagcug

SEQ ID NO: 2267467 - RNA, 21 nt, Human
gccuuggauaaugcuguugcc

SEQ ID NO: 2267468 - RNA, 20 nt, Human
gccuuggccuccccugcuga

SEQ ID NO: 2267469 - RNA, 12 nt, Human
gccuuggcucag

SEQ ID NO: 2267470 - RNA, 16 nt, Human
gccuuggcucagacau

SEQ ID NO: 2267471 - RNA, 15 nt, Human
gccuuggcucagaca

SEQ ID NO: 2267472 - RNA, 14 nt, Human
gccuuggcucagac

SEQ ID NO: 2267473 - RNA, 16 nt, Human
gccuuugaccugccuc

SEQ ID NO: 2267474 - RNA, 14 nt, Human
gccuuugagacagu

SEQ ID NO: 2267475 - RNA, 19 nt, Human
gccuuugagacaguuucuu

SEQ ID NO: 2267476 - RNA, 20 nt, Human
gccuuugagacaguuucuua

SEQ ID NO: 2267477 - RNA, 21 nt, Human
gccuuugagacaguuucuuag

SEQ ID NO: 2267478 - RNA, 23 nt, Human
gccuuugagcccacaaagccuua

SEQ ID NO: 2267479 - RNA, 17 nt, Human
gccuuugaucagguggg

SEQ ID NO: 2267480 - RNA, 22 nt, Human
gccuuugaguuuccucaggcug

SEQ ID NO: 2267481 - RNA, 23 nt, Human
gccuuugagacaguuucuuagcu

SEQ ID NO: 2267482 - RNA, 18 nt, Human
gccuuugagcccacaaag

SEQ ID NO: 2267483 - RNA, 15 nt, Human
gccuuugccuccccg

SEQ ID NO: 2267484 - RNA, 20 nt, Human
gccuuuggaugaccagaaca

SEQ ID NO: 2267485 - RNA, 13 nt, Human
gccuuugcuccuc

SEQ ID NO: 2267486 - RNA, 22 nt, Human
gccuuuggaaacagcucgacuu

SEQ ID NO: 2267487 - RNA, 22 nt, Human
gccuuccacgcugucuccagac

SEQ ID NO: 2267488 - RNA, 19 nt, Human
gccuuccacgcugucucca

SEQ ID NO: 2267489 - RNA, 13 nt, Human
gccuucauuaccu

SEQ ID NO: 2267490 - RNA, 12 nt, Human
gccuuccagggg

SEQ ID NO: 2267491 - RNA, 13 nt, Human
gccuucaucuccc

SEQ ID NO: 2267492 - RNA, 17 nt, Human
gccuuauccucugaucu

SEQ ID NO: 2267493 - RNA, 21 nt, Human
gccuucagggagugagggauu

SEQ ID NO: 2267494 - RNA, 13 nt, Human
gccuucagggagu

SEQ ID NO: 2267495 - RNA, 16 nt, Human
gccuuauggaacacuc

SEQ ID NO: 2267496 - RNA, 18 nt, Human
gccuuauggaacacucug

SEQ ID NO: 2267497 - RNA, 19 nt, Human
gccuuauggaacacucuga

SEQ ID NO: 2267498 - RNA, 20 nt, Human
gccuuauggaacacucugag

SEQ ID NO: 2267499 - RNA, 23 nt, Human
gccuuccacgcugucuccagacc

SEQ ID NO: 2267500 - RNA, 22 nt, Human
gccuuccacuuggcuacacagg

SEQ ID NO: 2267501 - RNA, 13 nt, Human
gccuuccucugca

SEQ ID NO: 2267502 - RNA, 16 nt, Human
gccuuccucugcagcu

SEQ ID NO: 2267503 - RNA, 17 nt, Human
gccuuccucugcagcug

SEQ ID NO: 2267504 - RNA, 19 nt, Human
gccuuccucugcagcugac

SEQ ID NO: 2267505 - RNA, 20 nt, Human
gccuuccucugcagcugacc

SEQ ID NO: 2267506 - RNA, 21 nt, Human
gccuuccucugcagcugaccu

SEQ ID NO: 2267507 - RNA, 18 nt, Human
gccuuccagcacccugca

SEQ ID NO: 2267508 - RNA, 21 nt, Human
gccuuccaggggugggacacc

SEQ ID NO: 2267509 - RNA, 15 nt, Human
gccuuccaggggugg

SEQ ID NO: 2267510 - RNA, 16 nt, Human
gccuuccagggguggg

SEQ ID NO: 2267511 - RNA, 23 nt, Human
gccuucgauacaccgggccugga

SEQ ID NO: 2267512 - RNA, 19 nt, Human
gccuuccugcccuacagag

SEQ ID NO: 2267513 - RNA, 11 nt, Human
gccuuccuugc

SEQ ID NO: 2267514 - RNA, 19 nt, Human
gccuugcuaccucaagggg

SEQ ID NO: 2267515 - RNA, 22 nt, Human
gccuugcucccaaccccacacg

SEQ ID NO: 2267516 - RNA, 14 nt, Human
gccuugcuggacgg

SEQ ID NO: 2267517 - RNA, 19 nt, Human
gccuuggaaguugcauggc

SEQ ID NO: 2267518 - RNA, 19 nt, Human
gccuuggagggucccaagc

SEQ ID NO: 2267519 - RNA, 20 nt, Human
gccuuggagggucccaagcu

SEQ ID NO: 2267520 - RNA, 18 nt, Human
gccuucgauacaccgggc

SEQ ID NO: 2267521 - RNA, 22 nt, Human
gccuucgauacaccgggccugg

SEQ ID NO: 2267522 - RNA, 19 nt, Human
gccuuccuguuuuucacau

SEQ ID NO: 2267523 - RNA, 13 nt, Human
gccuuccuugcua

SEQ ID NO: 2267524 - RNA, 22 nt, Human
gccugggguggggucaugcccu

SEQ ID NO: 2267525 - RNA, 17 nt, Human
gccugguccucacacuc

SEQ ID NO: 2267526 - RNA, 14 nt, Human
gccuggggucugga

SEQ ID NO: 2267527 - RNA, 16 nt, Human
gccuggggugggguca

SEQ ID NO: 2267528 - RNA, 14 nt, Human
gccugggguggggu

SEQ ID NO: 2267529 - RNA, 13 nt, Human
gccugguggcagc

SEQ ID NO: 2267530 - RNA, 13 nt, Human
gccuggugcagug

SEQ ID NO: 2267531 - RNA, 19 nt, Human
gccugguggcagcugcggu

SEQ ID NO: 2267532 - RNA, 21 nt, Human
gccugguggcagcugcggucc

SEQ ID NO: 2267533 - RNA, 18 nt, Human
gccugguggcagcugcgg

SEQ ID NO: 2267534 - RNA, 13 nt, Human
gccuggugcugcu

SEQ ID NO: 2267535 - RNA, 14 nt, Human
gccugguggcagcu

SEQ ID NO: 2267536 - RNA, 22 nt, Human
gccugggggcugggcagaggaa

SEQ ID NO: 2267537 - RNA, 21 nt, Human
gccugggggugccaggaccag

SEQ ID NO: 2267538 - RNA, 15 nt, Human
gccugccaguccuag

SEQ ID NO: 2267539 - RNA, 22 nt, Human
gccugggguaccaagagacucc

SEQ ID NO: 2267540 - RNA, 17 nt, Human
gccugggggugccagga

SEQ ID NO: 2267541 - RNA, 16 nt, Human
gccugggggugccagg

SEQ ID NO: 2267542 - RNA, 18 nt, Human
gccugccagcugcacuga

SEQ ID NO: 2267543 - RNA, 14 nt, Human
gccugccaguccua

SEQ ID NO: 2267544 - RNA, 16 nt, Human
gccugccaguccuagc

SEQ ID NO: 2267545 - RNA, 23 nt, Human
gccugccacucaggcccaaagcc

SEQ ID NO: 2267546 - RNA, 15 nt, Human
gccugccagcugcac

SEQ ID NO: 2267547 - RNA, 14 nt, Human
gccugccagcugca

SEQ ID NO: 2267548 - RNA, 15 nt, Human
gccugccacucaggc

SEQ ID NO: 2267549 - RNA, 15 nt, Human
gccugcaauuucaua

SEQ ID NO: 2267550 - RNA, 23 nt, Human
gccuuaucuccaagaccagagau

SEQ ID NO: 2267551 - RNA, 22 nt, Human
gccuuaucuugcaccccaaagc

SEQ ID NO: 2267552 - RNA, 15 nt, Human
gccuuauccucugau

SEQ ID NO: 2267553 - RNA, 16 nt, Human
gccuuauccucugauc

SEQ ID NO: 2267554 - RNA, 17 nt, Human
gccuuaaaaccaaagag

SEQ ID NO: 2267555 - RNA, 13 nt, Human
gccuuaucaagug

SEQ ID NO: 2267556 - RNA, 14 nt, Human
gccuuaucaagugu

SEQ ID NO: 2267557 - RNA, 17 nt, Human
gccuuaucaagugucuu

SEQ ID NO: 2267558 - RNA, 19 nt, Human
gccuuaucaagugucuucc

SEQ ID NO: 2267559 - RNA, 20 nt, Human
gccuuaucaagugucuucca

SEQ ID NO: 2267560 - RNA, 13 nt, Human
gccuuauccucug

SEQ ID NO: 2267561 - RNA, 10 nt, Human
gccuuaugga

SEQ ID NO: 2267562 - RNA, 14 nt, Human
gccuuauggaacac

SEQ ID NO: 2267563 - RNA, 17 nt, Human
gccuuagaaccuuucuu

SEQ ID NO: 2267564 - RNA, 19 nt, Human
gccuuagaagucacacagu

SEQ ID NO: 2267565 - RNA, 17 nt, Human
gccuuagaagucacaca

SEQ ID NO: 2267566 - RNA, 18 nt, Human
gccuuagaagucacacag

SEQ ID NO: 2267567 - RNA, 12 nt, Human
gccuuaaaacuu

SEQ ID NO: 2267568 - RNA, 14 nt, Human
gccuuaaaaccaaa

SEQ ID NO: 2267569 - RNA, 13 nt, Human
gccuuaaaacuuu

SEQ ID NO: 2267570 - RNA, 20 nt, Human
gccuuacacaaugguuuucu

SEQ ID NO: 2267571 - RNA, 18 nt, Human
gccuuacccucauguucu

SEQ ID NO: 2267572 - RNA, 21 nt, Human
gccuuacacaaugguuuucuu

SEQ ID NO: 2267573 - RNA, 15 nt, Human
gccuggugggccucc

SEQ ID NO: 2267574 - RNA, 13 nt, Human
gccuggugggccu

SEQ ID NO: 2267575 - RNA, 12 nt, Human
gccuguuuaaga

SEQ ID NO: 2267576 - RNA, 20 nt, Human
gccuguuuuagaagguucuc

SEQ ID NO: 2267577 - RNA, 20 nt, Human
gccugguggaaggaggcgca

SEQ ID NO: 2267578 - RNA, 13 nt, Human
gccuguuuaagag

SEQ ID NO: 2267579 - RNA, 14 nt, Human
gccagcugcacuga

SEQ ID NO: 2267580 - RNA, 20 nt, Human
gccagcugcacugaugcugc

SEQ ID NO: 2267581 - RNA, 22 nt, Human
gccagccuggcuucuggagccc

SEQ ID NO: 2267582 - RNA, 21 nt, Human
gccagccuggcuucuggagcc

SEQ ID NO: 2267583 - RNA, 20 nt, Human
gccagccuggcuucuggagc

SEQ ID NO: 2267584 - RNA, 15 nt, Human
gccagcucuguauca

SEQ ID NO: 2267585 - RNA, 23 nt, Human
gccagcucuguaucaggacccag

SEQ ID NO: 2267586 - RNA, 11 nt, Human
gccagccuggc

SEQ ID NO: 2267587 - RNA, 17 nt, Human
gccagccuccucuggac

SEQ ID NO: 2267588 - RNA, 19 nt, Human
gccagccugcuccuuccca

SEQ ID NO: 2267589 - RNA, 15 nt, Human
gccagccuccucugg

SEQ ID NO: 2267590 - RNA, 16 nt, Human
gccagccuccucugga

SEQ ID NO: 2267591 - RNA, 19 nt, Human
gccagccuggcuucuggag

SEQ ID NO: 2267592 - RNA, 18 nt, Human
gccagccuggcuucugga

SEQ ID NO: 2267593 - RNA, 17 nt, Human
gccagccuggcuucugg

SEQ ID NO: 2267594 - RNA, 16 nt, Human
gccagccuggcuucug

SEQ ID NO: 2267595 - RNA, 12 nt, Human
gccagccuggcu

SEQ ID NO: 2267596 - RNA, 17 nt, Human
gccagcugccccagcca

SEQ ID NO: 2267597 - RNA, 15 nt, Human
gccagcugccgacca

SEQ ID NO: 2267598 - RNA, 18 nt, Human
gccagcugccccagccag

SEQ ID NO: 2267599 - RNA, 20 nt, Human
gccagcugccgaccagagcc

SEQ ID NO: 2267600 - RNA, 17 nt, Human
gccagcugcuugggcuu

SEQ ID NO: 2267601 - RNA, 18 nt, Human
gccagcugcuugggcuuc

SEQ ID NO: 2267602 - RNA, 20 nt, Human
gccagcugcuugggcuucau

SEQ ID NO: 2267603 - RNA, 12 nt, Human
gccaggaagcca

SEQ ID NO: 2267604 - RNA, 13 nt, Human
gccaggaagccag

SEQ ID NO: 2267605 - RNA, 14 nt, Human
gccaggaagccagc

SEQ ID NO: 2267606 - RNA, 19 nt, Human
gccaggcuccuuccugucu

SEQ ID NO: 2267607 - RNA, 18 nt, Human
gccaggcuccuuccuguc

SEQ ID NO: 2267608 - RNA, 15 nt, Human
gccaggcuccuuccu

SEQ ID NO: 2267609 - RNA, 14 nt, Human
gccaggcuccuucc

SEQ ID NO: 2267610 - RNA, 21 nt, Human
gccaggcuccuuccugucuuc

SEQ ID NO: 2267611 - RNA, 20 nt, Human
gccaggcuccuuccugucuu

SEQ ID NO: 2267612 - RNA, 12 nt, Human
gccaggcucugu

SEQ ID NO: 2267613 - RNA, 16 nt, Human
gccaggcgagaugggg

SEQ ID NO: 2267614 - RNA, 16 nt, Human
gccaggcgggcucaag

SEQ ID NO: 2267615 - RNA, 19 nt, Human
gccaggagccuccugcccu

SEQ ID NO: 2267616 - RNA, 20 nt, Human
gccaggagccuccugcccuu

SEQ ID NO: 2267617 - RNA, 14 nt, Human
gccaggagccuccu

SEQ ID NO: 2267618 - RNA, 16 nt, Human
gccaggagccuccugc

SEQ ID NO: 2267619 - RNA, 19 nt, Human
gccaggacugagccccgca

SEQ ID NO: 2267620 - RNA, 15 nt, Human
gccaggagcaaaugu

SEQ ID NO: 2267621 - RNA, 20 nt, Human
gccaggagcaaauguuucug

SEQ ID NO: 2267622 - RNA, 22 nt, Human
gccaggagcaaauguuucugca

SEQ ID NO: 2267623 - RNA, 15 nt, Human
gccaggacuccccag

SEQ ID NO: 2267624 - RNA, 22 nt, Human
gccaggaccagucaaccugggc

SEQ ID NO: 2267625 - RNA, 15 nt, Human
gccaggacaggcccg

SEQ ID NO: 2267626 - RNA, 14 nt, Human
gccaggacaggccc

SEQ ID NO: 2267627 - RNA, 22 nt, Human
gccaggaauuucccaggacccu

SEQ ID NO: 2267628 - RNA, 21 nt, Human
gccaggaauuucccaggaccc

SEQ ID NO: 2267629 - RNA, 23 nt, Human
gccaggaauuucccaggacccug

SEQ ID NO: 2267630 - RNA, 17 nt, Human
gccaggacuccccaggc

SEQ ID NO: 2267631 - RNA, 19 nt, Human
gccaggacuccccaggcca

SEQ ID NO: 2267632 - RNA, 21 nt, Human
gccaggacuccccaggccagg

SEQ ID NO: 2267633 - RNA, 22 nt, Human
gccaggacuccccaggccaggc

SEQ ID NO: 2267634 - RNA, 15 nt, Human
gccaggacugagccc

SEQ ID NO: 2267635 - RNA, 16 nt, Human
gccaggacugagcccc

SEQ ID NO: 2267636 - RNA, 17 nt, Human
gccaggacugagccccg

SEQ ID NO: 2267637 - RNA, 15 nt, Human
gccaggaagccagca

SEQ ID NO: 2267638 - RNA, 20 nt, Human
gccaggaauuucccaggacc

SEQ ID NO: 2267639 - RNA, 19 nt, Human
gccaggaauuucccaggac

SEQ ID NO: 2267640 - RNA, 18 nt, Human
gccaggaauuucccagga

SEQ ID NO: 2267641 - RNA, 17 nt, Human
gccaggaauuucccagg

SEQ ID NO: 2267642 - RNA, 14 nt, Human
gccagaggccccca

SEQ ID NO: 2267643 - RNA, 21 nt, Human
gccagagauccaaaagaagcc

SEQ ID NO: 2267644 - RNA, 21 nt, Human
gccagagagccuggugcugcu

SEQ ID NO: 2267645 - RNA, 13 nt, Human
gccagagauccaa

SEQ ID NO: 2267646 - RNA, 20 nt, Human
gccagagauccaaaagaagc

SEQ ID NO: 2267647 - RNA, 16 nt, Human
gccagagauccaaaag

SEQ ID NO: 2267648 - RNA, 22 nt, Human
gccagaggcucguugacuggcu

SEQ ID NO: 2267649 - RNA, 24 nt, Human
gccagaggcccccagcccagggcu

SEQ ID NO: 2267650 - RNA, 20 nt, Human
gccagaggcccccagcccag

SEQ ID NO: 2267651 - RNA, 23 nt, Human
gccagaggcccccagcccagggc

SEQ ID NO: 2267652 - RNA, 15 nt, Human
gccagaggcccccag

SEQ ID NO: 2267653 - RNA, 16 nt, Human
gccagaggcccccagc

SEQ ID NO: 2267654 - RNA, 18 nt, Human
gccagaggcccccagccc

SEQ ID NO: 2267655 - RNA, 19 nt, Human
gccagaggcccccagccca

SEQ ID NO: 2267656 - RNA, 16 nt, Human
gccagauccucuuggu

SEQ ID NO: 2267657 - RNA, 15 nt, Human
gccagauccucuugg

SEQ ID NO: 2267658 - RNA, 14 nt, Human
gccagaugcaccag

SEQ ID NO: 2267659 - RNA, 17 nt, Human
gccagagggagugacag

SEQ ID NO: 2267660 - RNA, 12 nt, Human
gccagaggcugg

SEQ ID NO: 2267661 - RNA, 13 nt, Human
gccagaggcuggg

SEQ ID NO: 2267662 - RNA, 20 nt, Human
gccagauccagccugggguc

SEQ ID NO: 2267663 - RNA, 17 nt, Human
gccagauccagccuggg

SEQ ID NO: 2267664 - RNA, 16 nt, Human
gccagauccagccugg

SEQ ID NO: 2267665 - RNA, 15 nt, Human
gccagauccagccug

SEQ ID NO: 2267666 - RNA, 18 nt, Human
gccagccgugaugcucag

SEQ ID NO: 2267667 - RNA, 20 nt, Human
gccagccgugaugcucaggc

SEQ ID NO: 2267668 - RNA, 21 nt, Human
gccagccgugaugcucaggcu

SEQ ID NO: 2267669 - RNA, 18 nt, Human
gccagccuccgagaggga

SEQ ID NO: 2267670 - RNA, 20 nt, Human
gccagccuccgagagggaga

SEQ ID NO: 2267671 - RNA, 21 nt, Human
gccagccuccgagagggagag

SEQ ID NO: 2267672 - RNA, 12 nt, Human
gccagccuccuc

SEQ ID NO: 2267673 - RNA, 13 nt, Human
gccagccuccucu

SEQ ID NO: 2267674 - RNA, 14 nt, Human
gccagccuccucug

SEQ ID NO: 2267675 - RNA, 22 nt, Human
gccagccgagauagccaaggcc

SEQ ID NO: 2267676 - RNA, 19 nt, Human
gccagauucuuuccugagg

SEQ ID NO: 2267677 - RNA, 15 nt, Human
gccagaugcaccagc

SEQ ID NO: 2267678 - RNA, 20 nt, Human
gccagauucuuuccugaggc

SEQ ID NO: 2267679 - RNA, 24 nt, Human
gccagauucuuuccugaggcuggg

SEQ ID NO: 2267680 - RNA, 13 nt, Human
gccagauuucacu

SEQ ID NO: 2267681 - RNA, 18 nt, Human
gccaaggccuucuccucc

SEQ ID NO: 2267682 - RNA, 14 nt, Human
gccaaggccuucuc

SEQ ID NO: 2267683 - RNA, 15 nt, Human
gccaaggccuucucc

SEQ ID NO: 2267684 - RNA, 16 nt, Human
gccaacacucaagaag

SEQ ID NO: 2267685 - RNA, 18 nt, Human
gccaaggccgaagcucug

SEQ ID NO: 2267686 - RNA, 19 nt, Human
gccaaggccgaagcucugg

SEQ ID NO: 2267687 - RNA, 20 nt, Human
gccaaggccgaagcucuggc

SEQ ID NO: 2267688 - RNA, 21 nt, Human
gccacuccagaccccuggcuu

SEQ ID NO: 2267689 - RNA, 20 nt, Human
gccacuccagaccccuggcu

SEQ ID NO: 2267690 - RNA, 21 nt, Human
gccaaggccagaguggccugg

SEQ ID NO: 2267691 - RNA, 20 nt, Human
gccaaggccagaguggccug

SEQ ID NO: 2267692 - RNA, 19 nt, Human
gccaacagaagcuuccauu

SEQ ID NO: 2267693 - RNA, 24 nt, Human
gccaaggccaaaggaagcacaugc

SEQ ID NO: 2267694 - RNA, 14 nt, Human
gccaaauuuuggcc

SEQ ID NO: 2267695 - RNA, 23 nt, Human
gccaaauuauuuguguaauagaa

SEQ ID NO: 2267696 - RNA, 13 nt, Human
gccaacaaagcug

SEQ ID NO: 2267697 - RNA, 15 nt, Human
gccaacaaagcuguu

SEQ ID NO: 2267698 - RNA, 18 nt, Human
gccaaauuauuuguguaa

SEQ ID NO: 2267699 - RNA, 19 nt, Human
gccaaauuauuuguguaau

SEQ ID NO: 2267700 - RNA, 14 nt, Human
gccaacaccaggga

SEQ ID NO: 2267701 - RNA, 18 nt, Human
gccaacaaagcuguugau

SEQ ID NO: 2267702 - RNA, 16 nt, Human
gccaacaacuucucca

SEQ ID NO: 2267703 - RNA, 20 nt, Human
gccaacacgcaccugccuca

SEQ ID NO: 2267704 - RNA, 17 nt, Human
gccaacacgcaccugcc

SEQ ID NO: 2267705 - RNA, 17 nt, Human
gccaacagaagcuucca

SEQ ID NO: 2267706 - RNA, 20 nt, Human
gccaacacucaagaagcagg

SEQ ID NO: 2267707 - RNA, 23 nt, Human
gccaacacgcaccugccucagga

SEQ ID NO: 2267708 - RNA, 21 nt, Human
gccaacacgcaccugccucag

SEQ ID NO: 2267709 - RNA, 20 nt, Human
gccaaggccaaaggaagcac

SEQ ID NO: 2267710 - RNA, 20 nt, Human
gccacugcaccgggccacag

SEQ ID NO: 2267711 - RNA, 21 nt, Human
gccacugcaccgggccacaga

SEQ ID NO: 2267712 - RNA, 22 nt, Human
gccacuccagaccccuggcuuu

SEQ ID NO: 2267713 - RNA, 21 nt, Human
gccacuccgagaggugggcca

SEQ ID NO: 2267714 - RNA, 17 nt, Human
gccacuccucugacuca

SEQ ID NO: 2267715 - RNA, 15 nt, Human
gccacuccucugacu

SEQ ID NO: 2267716 - RNA, 14 nt, Human
gccacuccucugac

SEQ ID NO: 2267717 - RNA, 13 nt, Human
gccacuccucuga

SEQ ID NO: 2267718 - RNA, 19 nt, Human
gccacugcaccgggccaca

SEQ ID NO: 2267719 - RNA, 21 nt, Human
gccacuccucugacucagggc

SEQ ID NO: 2267720 - RNA, 22 nt, Human
gccacucccggcacuccaugcu

SEQ ID NO: 2267721 - RNA, 20 nt, Human
gccagagacggaagccuuuu

SEQ ID NO: 2267722 - RNA, 22 nt, Human
gccagagacacaagccuucggc

SEQ ID NO: 2267723 - RNA, 22 nt, Human
gccacugcaccgggccacagag

SEQ ID NO: 2267724 - RNA, 21 nt, Human
gccagagacacaagccuucgg

SEQ ID NO: 2267725 - RNA, 21 nt, Human
gccaucugggcuccuccaggg

SEQ ID NO: 2267726 - RNA, 15 nt, Human
gccaucugugggcac

SEQ ID NO: 2267727 - RNA, 13 nt, Human
gccaucugugggc

SEQ ID NO: 2267728 - RNA, 12 nt, Human
gccaucuguggg

SEQ ID NO: 2267729 - RNA, 17 nt, Human
gccaucugugggcacgc

SEQ ID NO: 2267730 - RNA, 17 nt, Human
gccaucuuccagguggg

SEQ ID NO: 2267731 - RNA, 14 nt, Human
gccaucuucccagc

SEQ ID NO: 2267732 - RNA, 14 nt, Human
gccaucuugguaaa

SEQ ID NO: 2267733 - RNA, 15 nt, Human
gccaucuugguaaau

SEQ ID NO: 2267734 - RNA, 16 nt, Human
gccaucuugguaaauu

SEQ ID NO: 2267735 - RNA, 22 nt, Human
gccaucuugguaaauuucccca

SEQ ID NO: 2267736 - RNA, 19 nt, Human
gccauccggcccccagagc

SEQ ID NO: 2267737 - RNA, 22 nt, Human
gccauccggcccccagagcgcc

SEQ ID NO: 2267738 - RNA, 18 nt, Human
gccauccucaaacacugc

SEQ ID NO: 2267739 - RNA, 19 nt, Human
gccauccucaaacacugca

SEQ ID NO: 2267740 - RNA, 20 nt, Human
gccauccucaaacacugcag

SEQ ID NO: 2267741 - RNA, 21 nt, Human
gccauccucaaacacugcagg

SEQ ID NO: 2267742 - RNA, 23 nt, Human
gccauccucaaacacugcaggca

SEQ ID NO: 2267743 - RNA, 14 nt, Human
gccauccagguuca

SEQ ID NO: 2267744 - RNA, 21 nt, Human
gccaucauguuuacagaggac

SEQ ID NO: 2267745 - RNA, 17 nt, Human
gccaucauguuuacaga

SEQ ID NO: 2267746 - RNA, 20 nt, Human
gccauccaaauaagaaaccu

SEQ ID NO: 2267747 - RNA, 19 nt, Human
gccaucaucaguggagcca

SEQ ID NO: 2267748 - RNA, 21 nt, Human
gccauccaaauaagaaaccua

SEQ ID NO: 2267749 - RNA, 14 nt, Human
gccaucccucgugg

SEQ ID NO: 2267750 - RNA, 21 nt, Human
gccaucccucgugguccccaa

SEQ ID NO: 2267751 - RNA, 17 nt, Human
gccaugccucagcccug

SEQ ID NO: 2267752 - RNA, 21 nt, Human
gccaugccucagcccugaccc

SEQ ID NO: 2267753 - RNA, 20 nt, Human
gccaugcgcccccuccgccc

SEQ ID NO: 2267754 - RNA, 14 nt, Human
gccaugcuccuggc

SEQ ID NO: 2267755 - RNA, 13 nt, Human
gccaugccucagc

SEQ ID NO: 2267756 - RNA, 14 nt, Human
gccaugccucagcc

SEQ ID NO: 2267757 - RNA, 20 nt, Human
gccaugauucgcccaaagcc

SEQ ID NO: 2267758 - RNA, 17 nt, Human
gccaugauguggagugg

SEQ ID NO: 2267759 - RNA, 22 nt, Human
gccaugauguggaguggggcag

SEQ ID NO: 2267760 - RNA, 21 nt, Human
gccaugauggugcugaccucu

SEQ ID NO: 2267761 - RNA, 22 nt, Human
gccaugauggugcugaccucug

SEQ ID NO: 2267762 - RNA, 15 nt, Human
gccaugauguggagu

SEQ ID NO: 2267763 - RNA, 20 nt, Human
gccaugaggaguugcuguuu

SEQ ID NO: 2267764 - RNA, 20 nt, Human
gccaugaggaacaaggcaag

SEQ ID NO: 2267765 - RNA, 19 nt, Human
gccaugaggccucagugga

SEQ ID NO: 2267766 - RNA, 16 nt, Human
gccaugaggccucagu

SEQ ID NO: 2267767 - RNA, 20 nt, Human
gccaugaggccucaguggac

SEQ ID NO: 2267768 - RNA, 22 nt, Human
gccaugauggaaauauuuauuu

SEQ ID NO: 2267769 - RNA, 23 nt, Human
gccaugauggcaacagaucugga

SEQ ID NO: 2267770 - RNA, 21 nt, Human
gccaugauggcaacagaucug

SEQ ID NO: 2267771 - RNA, 19 nt, Human
gccaugauggcaacagauc

SEQ ID NO: 2267772 - RNA, 17 nt, Human
gccaugauggcaacaga

SEQ ID NO: 2267773 - RNA, 13 nt, Human
gccaggcuggucu

SEQ ID NO: 2267774 - RNA, 23 nt, Human
gccaggcugggucgcccuggacu

SEQ ID NO: 2267775 - RNA, 17 nt, Human
gccaggcugggucgccc

SEQ ID NO: 2267776 - RNA, 17 nt, Human
gccaggcugaccacagc

SEQ ID NO: 2267777 - RNA, 16 nt, Human
gccaggcugaccacag

SEQ ID NO: 2267778 - RNA, 15 nt, Human
gccaggcugaccaca

SEQ ID NO: 2267779 - RNA, 16 nt, Human
gccaggcucugugcug

SEQ ID NO: 2267780 - RNA, 20 nt, Human
gccaggcucugugcugaccc

SEQ ID NO: 2267781 - RNA, 15 nt, Human
gccaggcuggucuca

SEQ ID NO: 2267782 - RNA, 20 nt, Human
gccaggcugaccacagcaca

SEQ ID NO: 2267783 - RNA, 21 nt, Human
gccaggcucugugcugacccu

SEQ ID NO: 2267784 - RNA, 19 nt, Human
gccaggcugaccacagcac

SEQ ID NO: 2267785 - RNA, 18 nt, Human
gccaggcugaccacagca

SEQ ID NO: 2267786 - RNA, 19 nt, Human
gccaguaacgcgucuuccu

SEQ ID NO: 2267787 - RNA, 23 nt, Human
gccaguaaaugggggugcauuug

SEQ ID NO: 2267788 - RNA, 17 nt, Human
gccaguccugccuggcc

SEQ ID NO: 2267789 - RNA, 16 nt, Human
gccaguccugccuggc

SEQ ID NO: 2267790 - RNA, 23 nt, Human
gccaucaucuccugccuuccucc

SEQ ID NO: 2267791 - RNA, 19 nt, Human
gccaucauaggaagggacc

SEQ ID NO: 2267792 - RNA, 14 nt, Human
gccaguccugccug

SEQ ID NO: 2267793 - RNA, 19 nt, Human
gccaguccuagcugcacag

SEQ ID NO: 2267794 - RNA, 22 nt, Human
gccaguccuagcugcacagggc

SEQ ID NO: 2267795 - RNA, 13 nt, Human
gccagucccaggg

SEQ ID NO: 2267796 - RNA, 16 nt, Human
gccagucccaggggca

SEQ ID NO: 2267797 - RNA, 16 nt, Human
gccaguccuagcugca

SEQ ID NO: 2267798 - RNA, 22 nt, Human
gccagucccugaggcagguccc

SEQ ID NO: 2267799 - RNA, 16 nt, Human
gccagucccugaggca

SEQ ID NO: 2267800 - RNA, 21 nt, Human
gccagucaccccggccaccug

SEQ ID NO: 2267801 - RNA, 13 nt, Human
gccaguccaggcu

SEQ ID NO: 2267802 - RNA, 14 nt, Human
gccaguccaggcug

SEQ ID NO: 2267803 - RNA, 20 nt, Human
gccaguccaggcugccgugg

SEQ ID NO: 2267804 - RNA, 21 nt, Human
gccaguccaggcugccguggg

SEQ ID NO: 2267805 - RNA, 21 nt, Human
gccaguaucuauauaugugua

SEQ ID NO: 2267806 - RNA, 23 nt, Human
gccaguaagggaaauagaaaaac

SEQ ID NO: 2267807 - RNA, 22 nt, Human
gccaguaucuauauauguguau

SEQ ID NO: 2267808 - RNA, 23 nt, Human
gccaguaucuauauauguguaug

SEQ ID NO: 2267809 - RNA, 20 nt, Human
gccaguaacgcgucuuccug

SEQ ID NO: 2267810 - RNA, 21 nt, Human
gccaguaacgcgucuuccuga

SEQ ID NO: 2267811 - RNA, 22 nt, Human
gccaguaacgcgucuuccugag

SEQ ID NO: 2267812 - RNA, 21 nt, Human
gccaguaagggaaauagaaaa

SEQ ID NO: 2267813 - RNA, 15 nt, Human
gcccaaguccaaaug

SEQ ID NO: 2267814 - RNA, 16 nt, Human
gcccaaguccaaaugu

SEQ ID NO: 2267815 - RNA, 19 nt, Human
gcccaaguccaaauguuua

SEQ ID NO: 2267816 - RNA, 13 nt, Human
gcccaagucccug

SEQ ID NO: 2267817 - RNA, 20 nt, Human
gcccacauagugaugguucc

SEQ ID NO: 2267818 - RNA, 15 nt, Human
gcccacaucccaggc

SEQ ID NO: 2267819 - RNA, 14 nt, Human
gcccacaucccagg

SEQ ID NO: 2267820 - RNA, 21 nt, Human
gcccaccaacaucccauugcc

SEQ ID NO: 2267821 - RNA, 13 nt, Human
gcccaccagagcu

SEQ ID NO: 2267822 - RNA, 14 nt, Human
gcccaccagagcug

SEQ ID NO: 2267823 - RNA, 14 nt, Human
gcccaccagugacu

SEQ ID NO: 2267824 - RNA, 13 nt, Human
gcccaccccaccc

SEQ ID NO: 2267825 - RNA, 16 nt, Human
gcccacauuggaccca

SEQ ID NO: 2267826 - RNA, 17 nt, Human
gcccaccaacaucccau

SEQ ID NO: 2267827 - RNA, 20 nt, Human
gcccaagcucagaaggcucu

SEQ ID NO: 2267828 - RNA, 20 nt, Human
gcccaagcccgacuugcugu

SEQ ID NO: 2267829 - RNA, 12 nt, Human
gcccaagcucuu

SEQ ID NO: 2267830 - RNA, 15 nt, Human
gcccaaggcggcccc

SEQ ID NO: 2267831 - RNA, 16 nt, Human
gcccaaggcggccccu

SEQ ID NO: 2267832 - RNA, 19 nt, Human
gcccaagggaucugguccu

SEQ ID NO: 2267833 - RNA, 18 nt, Human
gcccaagggaucuggucc

SEQ ID NO: 2267834 - RNA, 15 nt, Human
gcccaagggaucugg

SEQ ID NO: 2267835 - RNA, 23 nt, Human
gcccaagggaaagaaaaggaagg

SEQ ID NO: 2267836 - RNA, 17 nt, Human
gcccaaggcggccccuc

SEQ ID NO: 2267837 - RNA, 18 nt, Human
gcccaaggcggccccucc

SEQ ID NO: 2267838 - RNA, 15 nt, Human
gcccaagccagaggc

SEQ ID NO: 2267839 - RNA, 13 nt, Human
gcccaagaugcuu

SEQ ID NO: 2267840 - RNA, 16 nt, Human
gcccaagccagaggcu

SEQ ID NO: 2267841 - RNA, 17 nt, Human
gcccaagccagaggcug

SEQ ID NO: 2267842 - RNA, 18 nt, Human
gcccaagccagaggcugg

SEQ ID NO: 2267843 - RNA, 21 nt, Human
gcccaagccagaggcuggguu

SEQ ID NO: 2267844 - RNA, 23 nt, Human
gcccaagccagaggcuggguuca

SEQ ID NO: 2267845 - RNA, 24 nt, Human
gccaugcuccuggcccacugcauc

SEQ ID NO: 2267846 - RNA, 19 nt, Human
gccaugggcacugugggua

SEQ ID NO: 2267847 - RNA, 15 nt, Human
gccaugggccuccug

SEQ ID NO: 2267848 - RNA, 16 nt, Human
gccaugggccuccugu

SEQ ID NO: 2267849 - RNA, 23 nt, Human
gcccaagacagaugccccagagc

SEQ ID NO: 2267850 - RNA, 21 nt, Human
gcccaagacagaugccccaga

SEQ ID NO: 2267851 - RNA, 20 nt, Human
gcccaagacagaugccccag

SEQ ID NO: 2267852 - RNA, 19 nt, Human
gcccaagacagaugcccca

SEQ ID NO: 2267853 - RNA, 21 nt, Human
gcccaagaauagaugcugacu

SEQ ID NO: 2267854 - RNA, 22 nt, Human
gcccaagaauagaugcugacug

SEQ ID NO: 2267855 - RNA, 24 nt, Human
gcccaaccugcucuccucuugcca

SEQ ID NO: 2267856 - RNA, 16 nt, Human
gccaugguacccccuu

SEQ ID NO: 2267857 - RNA, 17 nt, Human
gccaugguacccccuuc

SEQ ID NO: 2267858 - RNA, 19 nt, Human
gccaugguacccccuucug

SEQ ID NO: 2267859 - RNA, 14 nt, Human
gccaugguaccccc

SEQ ID NO: 2267860 - RNA, 13 nt, Human
gcccaccccccuc

SEQ ID NO: 2267861 - RNA, 13 nt, Human
gcccaccuggcca

SEQ ID NO: 2267862 - RNA, 14 nt, Human
gcccaccuggccac

SEQ ID NO: 2267863 - RNA, 16 nt, Human
gcccaccuggccaccu

SEQ ID NO: 2267864 - RNA, 17 nt, Human
gcccaccuggccaccug

SEQ ID NO: 2267865 - RNA, 18 nt, Human
gcccaccuggccaccuga

SEQ ID NO: 2267866 - RNA, 19 nt, Human
gcccaccuggccaccugag

SEQ ID NO: 2267867 - RNA, 20 nt, Human
gcccaccuggccaccugagg

SEQ ID NO: 2267868 - RNA, 14 nt, Human
gcccaccccccuca

SEQ ID NO: 2267869 - RNA, 15 nt, Human
gcccaccuggccucu

SEQ ID NO: 2267870 - RNA, 16 nt, Human
gcccaccuggccucug

SEQ ID NO: 2267871 - RNA, 17 nt, Human
gcccaccuggccucugc

SEQ ID NO: 2267872 - RNA, 20 nt, Human
gcccaccuggccucugcacu

SEQ ID NO: 2267873 - RNA, 21 nt, Human
gcccaccuggccucugcacuc

SEQ ID NO: 2267874 - RNA, 24 nt, Human
gcccaccuggccucugcacucccc

SEQ ID NO: 2267875 - RNA, 21 nt, Human
gcccagacacagaagaggcug

SEQ ID NO: 2267876 - RNA, 18 nt, Human
gcccagaaaaggacagaa

SEQ ID NO: 2267877 - RNA, 17 nt, Human
gcccagaaugaggcugc

SEQ ID NO: 2267878 - RNA, 16 nt, Human
gcccagaaugaggcug

SEQ ID NO: 2267879 - RNA, 20 nt, Human
gcccagaauaaguuauugca

SEQ ID NO: 2267880 - RNA, 23 nt, Human
gcccagaauaaguuauugcaguu

SEQ ID NO: 2267881 - RNA, 22 nt, Human
gcccaccugucaaacaaagcca

SEQ ID NO: 2267882 - RNA, 22 nt, Human
gcccacuugucccacuaucugg

SEQ ID NO: 2267883 - RNA, 16 nt, Human
gcccagaaaaggacag

SEQ ID NO: 2267884 - RNA, 16 nt, Human
gcccagaauaaguuau

SEQ ID NO: 2267885 - RNA, 19 nt, Human
gcccagaaaaggacagaaa

SEQ ID NO: 2267886 - RNA, 14 nt, Human
gcccacuucugcca

SEQ ID NO: 2267887 - RNA, 13 nt, Human
gcccaccuuggcu

SEQ ID NO: 2267888 - RNA, 15 nt, Human
gcccaccuuggcuca

SEQ ID NO: 2267889 - RNA, 16 nt, Human
gcccaccuuggcucaa

SEQ ID NO: 2267890 - RNA, 17 nt, Human
gcccaccuuggcucaag

SEQ ID NO: 2267891 - RNA, 21 nt, Human
gcccucccaggcucucaacag

SEQ ID NO: 2267892 - RNA, 12 nt, Human
gcccucccaggc

SEQ ID NO: 2267893 - RNA, 14 nt, Human
gcccucccaucccg

SEQ ID NO: 2267894 - RNA, 13 nt, Human
gcccuccccagag

SEQ ID NO: 2267895 - RNA, 15 nt, Human
gcccuccccagagca

SEQ ID NO: 2267896 - RNA, 16 nt, Human
gcccuccccagagcac

SEQ ID NO: 2267897 - RNA, 22 nt, Human
gcccuccaucccgacauggacc

SEQ ID NO: 2267898 - RNA, 16 nt, Human
gcccuccaucccgaca

SEQ ID NO: 2267899 - RNA, 21 nt, Human
gcccuccaucuaaacugcccc

SEQ ID NO: 2267900 - RNA, 21 nt, Human
gcccuccacgccggcucuucc

SEQ ID NO: 2267901 - RNA, 20 nt, Human
gcccuccaucuaaacugccc

SEQ ID NO: 2267902 - RNA, 21 nt, Human
gcccuccagcucuuuccuccu

SEQ ID NO: 2267903 - RNA, 17 nt, Human
gcccuccagcucuuucc

SEQ ID NO: 2267904 - RNA, 23 nt, Human
gcccuccacagccgcagccuccc

SEQ ID NO: 2267905 - RNA, 17 nt, Human
gcccuccacaucccuga

SEQ ID NO: 2267906 - RNA, 20 nt, Human
gcccuccacagccgcagccu

SEQ ID NO: 2267907 - RNA, 14 nt, Human
gcccuccacagccg

SEQ ID NO: 2267908 - RNA, 15 nt, Human
gcccuccaaaagcac

SEQ ID NO: 2267909 - RNA, 19 nt, Human
gcccgggcgcggccagccc

SEQ ID NO: 2267910 - RNA, 14 nt, Human
gcccuccaaaagca

SEQ ID NO: 2267911 - RNA, 22 nt, Human
gcccuccaagaccuucuccuuc

SEQ ID NO: 2267912 - RNA, 23 nt, Human
gcccuccaagaccuucuccuuca

SEQ ID NO: 2267913 - RNA, 22 nt, Human
gcccucauggccccucugaccu

SEQ ID NO: 2267914 - RNA, 18 nt, Human
gcccucauggccccucug

SEQ ID NO: 2267915 - RNA, 19 nt, Human
gcccucauggccccucuga

SEQ ID NO: 2267916 - RNA, 18 nt, Human
gcccgggcgcggccagcc

SEQ ID NO: 2267917 - RNA, 23 nt, Human
gcccgggaaggucaccagcacca

SEQ ID NO: 2267918 - RNA, 14 nt, Human
gcccgggagcugcu

SEQ ID NO: 2267919 - RNA, 19 nt, Human
gcccgggagcugcugcccu

SEQ ID NO: 2267920 - RNA, 19 nt, Human
gcccuccaagaccuucucc

SEQ ID NO: 2267921 - RNA, 21 nt, Human
gcccuccaagaccuucuccuu

SEQ ID NO: 2267922 - RNA, 19 nt, Human
gcccgcacccccacccuuu

SEQ ID NO: 2267923 - RNA, 21 nt, Human
gcccgcacccccacccuuugg

SEQ ID NO: 2267924 - RNA, 17 nt, Human
gcccgcacccccacccu

SEQ ID NO: 2267925 - RNA, 16 nt, Human
gcccgcacccccaccc

SEQ ID NO: 2267926 - RNA, 15 nt, Human
gcccgcacccccacc

SEQ ID NO: 2267927 - RNA, 14 nt, Human
gcccggcugguuuu

SEQ ID NO: 2267928 - RNA, 18 nt, Human
gcccgggaaggucaccag

SEQ ID NO: 2267929 - RNA, 20 nt, Human
gcccgggaaggucaccagca

SEQ ID NO: 2267930 - RNA, 17 nt, Human
gcccuccuacccugcgc

SEQ ID NO: 2267931 - RNA, 23 nt, Human
gcccuccgccauucucaagcccu

SEQ ID NO: 2267932 - RNA, 23 nt, Human
gcccucccuuggaaaccugcccu

SEQ ID NO: 2267933 - RNA, 14 nt, Human
gcccuccgacagcc

SEQ ID NO: 2267934 - RNA, 18 nt, Human
gcccuccgacagcccccu

SEQ ID NO: 2267935 - RNA, 22 nt, Human
gcccuccgacagcccccucugc

SEQ ID NO: 2267936 - RNA, 21 nt, Human
gcccucccuguuccccagaga

SEQ ID NO: 2267937 - RNA, 19 nt, Human
gcccucccuuggaaaccug

SEQ ID NO: 2267938 - RNA, 21 nt, Human
gcccucccuuggaaaccugcc

SEQ ID NO: 2267939 - RNA, 22 nt, Human
gcccucccuguuccccagagaa

SEQ ID NO: 2267940 - RNA, 21 nt, Human
gcccucccuguccuccucgga

SEQ ID NO: 2267941 - RNA, 18 nt, Human
gcccucccuguccuccuc

SEQ ID NO: 2267942 - RNA, 16 nt, Human
gcccucccuguccucc

SEQ ID NO: 2267943 - RNA, 14 nt, Human
gcccucccuguccu

SEQ ID NO: 2267944 - RNA, 20 nt, Human
gcccucccuguuccccagag

SEQ ID NO: 2267945 - RNA, 18 nt, Human
gcccucccuguuccccag

SEQ ID NO: 2267946 - RNA, 21 nt, Human
gcccucccugccccucccuuc

SEQ ID NO: 2267947 - RNA, 18 nt, Human
gcccuccccauggagcca

SEQ ID NO: 2267948 - RNA, 17 nt, Human
gcccuccccaucccaug

SEQ ID NO: 2267949 - RNA, 17 nt, Human
gcccuccccagagcacu

SEQ ID NO: 2267950 - RNA, 19 nt, Human
gcccuccccagagcacugg

SEQ ID NO: 2267951 - RNA, 13 nt, Human
gcccucugcccac

SEQ ID NO: 2267952 - RNA, 16 nt, Human
gcccucugcccacucc

SEQ ID NO: 2267953 - RNA, 18 nt, Human
gcccucugcccacucccu

SEQ ID NO: 2267954 - RNA, 19 nt, Human
gcccucugcccacucccug

SEQ ID NO: 2267955 - RNA, 17 nt, Human
gcccugacccuguggaa

SEQ ID NO: 2267956 - RNA, 17 nt, Human
gcccugacauuggagcc

SEQ ID NO: 2267957 - RNA, 12 nt, Human
gcccugaccucc

SEQ ID NO: 2267958 - RNA, 13 nt, Human
gcccugaccuccc

SEQ ID NO: 2267959 - RNA, 15 nt, Human
gcccugaccucccag

SEQ ID NO: 2267960 - RNA, 16 nt, Human
gcccugaccucccagc

SEQ ID NO: 2267961 - RNA, 17 nt, Human
gcccugaccucccagcc

SEQ ID NO: 2267962 - RNA, 14 nt, Human
gcccugacccugug

SEQ ID NO: 2267963 - RNA, 13 nt, Human
gcccugagcucgg

SEQ ID NO: 2267964 - RNA, 19 nt, Human
gcccugaccucccagcccu

SEQ ID NO: 2267965 - RNA, 16 nt, Human
gcccugagcucggugg

SEQ ID NO: 2267966 - RNA, 15 nt, Human
gcccugagcucggug

SEQ ID NO: 2267967 - RNA, 14 nt, Human
gcccugagcuuucu

SEQ ID NO: 2267968 - RNA, 13 nt, Human
gcccugcagaggg

SEQ ID NO: 2267969 - RNA, 14 nt, Human
gcccugcagagggc

SEQ ID NO: 2267970 - RNA, 22 nt, Human
gcccugagcucgguggacccag

SEQ ID NO: 2267971 - RNA, 15 nt, Human
gcccugcagagggca

SEQ ID NO: 2267972 - RNA, 15 nt, Human
gccccuuuacggaca

SEQ ID NO: 2267973 - RNA, 20 nt, Human
gccccuuuacggacaccccc

SEQ ID NO: 2267974 - RNA, 22 nt, Human
gccccuuuacggacacccccuc

SEQ ID NO: 2267975 - RNA, 20 nt, Human
gccccuugcucuccccugcc

SEQ ID NO: 2267976 - RNA, 23 nt, Human
gccccuucugcucagcucugggc

SEQ ID NO: 2267977 - RNA, 20 nt, Human
gccccuucugcucagcucug

SEQ ID NO: 2267978 - RNA, 19 nt, Human
gccccuucugcucagcucu

SEQ ID NO: 2267979 - RNA, 21 nt, Human
gccccuuuuuacuccccuuga

SEQ ID NO: 2267980 - RNA, 23 nt, Human
gccccuuuuucauauguugcuca

SEQ ID NO: 2267981 - RNA, 20 nt, Human
gccccuuuuuacuccccuug

SEQ ID NO: 2267982 - RNA, 19 nt, Human
gccccuuuuuacuccccuu

SEQ ID NO: 2267983 - RNA, 18 nt, Human
gccccuuuuuacuccccu

SEQ ID NO: 2267984 - RNA, 16 nt, Human
gccccuuuuuacuccc

SEQ ID NO: 2267985 - RNA, 21 nt, Human
gccccuuuucacucccuccau

SEQ ID NO: 2267986 - RNA, 12 nt, Human
gcccgacagccu

SEQ ID NO: 2267987 - RNA, 14 nt, Human
gcccgacagccugg

SEQ ID NO: 2267988 - RNA, 15 nt, Human
gcccgacagccuggc

SEQ ID NO: 2267989 - RNA, 13 nt, Human
gcccgaauacaaa

SEQ ID NO: 2267990 - RNA, 21 nt, Human
gcccgaauacaaacaccugga

SEQ ID NO: 2267991 - RNA, 22 nt, Human
gcccgagcuggugcauuacaga

SEQ ID NO: 2267992 - RNA, 14 nt, Human
gcccgcacagagcu

SEQ ID NO: 2267993 - RNA, 22 nt, Human
gccccuguuaccuaauuagagc

SEQ ID NO: 2267994 - RNA, 18 nt, Human
gccccuguggagacuggg

SEQ ID NO: 2267995 - RNA, 13 nt, Human
gccccuguucucu

SEQ ID NO: 2267996 - RNA, 19 nt, Human
gccccugucuagagaggga

SEQ ID NO: 2267997 - RNA, 18 nt, Human
gccccugucuagagaggg

SEQ ID NO: 2267998 - RNA, 22 nt, Human
gccccuggguggguggugggga

SEQ ID NO: 2267999 - RNA, 17 nt, Human
gccccuguauggcacug

SEQ ID NO: 2268000 - RNA, 16 nt, Human
gccccugguccugagg

SEQ ID NO: 2268001 - RNA, 21 nt, Human
gccccugggucagucuggugg

SEQ ID NO: 2268002 - RNA, 20 nt, Human
gccccugggugggugguggg

SEQ ID NO: 2268003 - RNA, 21 nt, Human
gccccuggguggguggugggg

SEQ ID NO: 2268004 - RNA, 17 nt, Human
gccccuguucuggcaga

SEQ ID NO: 2268005 - RNA, 18 nt, Human
gccccuucugcucagcuc

SEQ ID NO: 2268006 - RNA, 17 nt, Human
gccccuucugcucagcu

SEQ ID NO: 2268007 - RNA, 15 nt, Human
gccccuucugcucag

SEQ ID NO: 2268008 - RNA, 14 nt, Human
gccccuucugcuca

SEQ ID NO: 2268009 - RNA, 18 nt, Human
gccccucuugccccccac

SEQ ID NO: 2268010 - RNA, 16 nt, Human
gccccucuugcccccc

SEQ ID NO: 2268011 - RNA, 13 nt, Human
gccccucuugccc

SEQ ID NO: 2268012 - RNA, 21 nt, Human
gccccucugcccagcuugggc

SEQ ID NO: 2268013 - RNA, 20 nt, Human
gccccucuggucgcuccugc

SEQ ID NO: 2268014 - RNA, 22 nt, Human
gccccucuggucgcuccugccc

SEQ ID NO: 2268015 - RNA, 21 nt, Human
gccccucuugccccccacccc

SEQ ID NO: 2268016 - RNA, 19 nt, Human
gccccucuugccccccacc

SEQ ID NO: 2268017 - RNA, 16 nt, Human
gccccugaacaagaau

SEQ ID NO: 2268018 - RNA, 22 nt, Human
gccccugagacaaauggaggcc

SEQ ID NO: 2268019 - RNA, 16 nt, Human
gccccugagaucucug

SEQ ID NO: 2268020 - RNA, 22 nt, Human
gccccugggcuuggccugcugu

SEQ ID NO: 2268021 - RNA, 23 nt, Human
gccccugggcuuggccugcugug

SEQ ID NO: 2268022 - RNA, 18 nt, Human
gccccugggcuuggccug

SEQ ID NO: 2268023 - RNA, 19 nt, Human
gccccugggcuuggccugc

SEQ ID NO: 2268024 - RNA, 20 nt, Human
gccccugggcuuggccugcu

SEQ ID NO: 2268025 - RNA, 21 nt, Human
gccccugggcuuggccugcug

SEQ ID NO: 2268026 - RNA, 21 nt, Human
gccccucccccaacccccacc

SEQ ID NO: 2268027 - RNA, 15 nt, Human
gccccucccccaacc

SEQ ID NO: 2268028 - RNA, 12 nt, Human
gccccuccccca

SEQ ID NO: 2268029 - RNA, 15 nt, Human
gccccucccaccaca

SEQ ID NO: 2268030 - RNA, 14 nt, Human
gccccucccaccac

SEQ ID NO: 2268031 - RNA, 13 nt, Human
gccccucccacca

SEQ ID NO: 2268032 - RNA, 12 nt, Human
gccccucccacc

SEQ ID NO: 2268033 - RNA, 17 nt, Human
gccccucaccugggcac

SEQ ID NO: 2268034 - RNA, 20 nt, Human
gccccucaccugggcaccug

SEQ ID NO: 2268035 - RNA, 14 nt, Human
gccccucaccuggg

SEQ ID NO: 2268036 - RNA, 16 nt, Human
gccccucagggucccu

SEQ ID NO: 2268037 - RNA, 18 nt, Human
gccccucagggucccugg

SEQ ID NO: 2268038 - RNA, 16 nt, Human
gccccucccgccccuu

SEQ ID NO: 2268039 - RNA, 16 nt, Human
gccccucccaccacag

SEQ ID NO: 2268040 - RNA, 13 nt, Human
gccccucccgccc

SEQ ID NO: 2268041 - RNA, 23 nt, Human
gccccucccccaacccccacccc

SEQ ID NO: 2268042 - RNA, 22 nt, Human
gccccucccccaacccccaccc

SEQ ID NO: 2268043 - RNA, 16 nt, Human
gccccucccccugcca

SEQ ID NO: 2268044 - RNA, 20 nt, Human
gccccucugcccagcuuggg

SEQ ID NO: 2268045 - RNA, 14 nt, Human
gccccucuggucgc

SEQ ID NO: 2268046 - RNA, 18 nt, Human
gccccucuggucgcuccu

SEQ ID NO: 2268047 - RNA, 19 nt, Human
gccccucuggucgcuccug

SEQ ID NO: 2268048 - RNA, 22 nt, Human
gcccccuucucccacacugcua

SEQ ID NO: 2268049 - RNA, 20 nt, Human
gcccccuucucccacacugc

SEQ ID NO: 2268050 - RNA, 16 nt, Human
gcccccuuucagaugu

SEQ ID NO: 2268051 - RNA, 18 nt, Human
gcccccuuucagaugucu

SEQ ID NO: 2268052 - RNA, 23 nt, Human
gcccccuuucagaugucuucugc

SEQ ID NO: 2268053 - RNA, 19 nt, Human
gcccccuucucccacacug

SEQ ID NO: 2268054 - RNA, 18 nt, Human
gcccccuucucccacacu

SEQ ID NO: 2268055 - RNA, 17 nt, Human
gcccccuucucccacac

SEQ ID NO: 2268056 - RNA, 16 nt, Human
gcccccuucucccaca

SEQ ID NO: 2268057 - RNA, 15 nt, Human
gcccccuucucccac

SEQ ID NO: 2268058 - RNA, 15 nt, Human
gccccgaggccuucu

SEQ ID NO: 2268059 - RNA, 21 nt, Human
gcccccuuugggcccagggac

SEQ ID NO: 2268060 - RNA, 18 nt, Human
gcccccuuugggcccagg

SEQ ID NO: 2268061 - RNA, 19 nt, Human
gcccccuuugggcccaggg

SEQ ID NO: 2268062 - RNA, 18 nt, Human
gccccgaggccuucucug

SEQ ID NO: 2268063 - RNA, 14 nt, Human
gccccucagggucc

SEQ ID NO: 2268064 - RNA, 18 nt, Human
gccccucacccugccuua

SEQ ID NO: 2268065 - RNA, 21 nt, Human
gccccgaggacccagacccag

SEQ ID NO: 2268066 - RNA, 22 nt, Human
gccccgaggacccagacccagu

SEQ ID NO: 2268067 - RNA, 17 nt, Human
gccccgaggacccagac

SEQ ID NO: 2268068 - RNA, 18 nt, Human
gccccgaggacccagacc

SEQ ID NO: 2268069 - RNA, 19 nt, Human
gccccgaggacccagaccc

SEQ ID NO: 2268070 - RNA, 12 nt, Human
gcccccugcccu

SEQ ID NO: 2268071 - RNA, 18 nt, Human
gcccccugccccccagcc

SEQ ID NO: 2268072 - RNA, 14 nt, Human
gcccccugcccucc

SEQ ID NO: 2268073 - RNA, 19 nt, Human
gcccccugcccuccccucu

SEQ ID NO: 2268074 - RNA, 17 nt, Human
gcccccaccccggggac

SEQ ID NO: 2268075 - RNA, 21 nt, Human
gcccccaccccggggacccug

SEQ ID NO: 2268076 - RNA, 22 nt, Human
gcccccaccccggggacccugu

SEQ ID NO: 2268077 - RNA, 14 nt, Human
gcccccugcccccc

SEQ ID NO: 2268078 - RNA, 21 nt, Human
gcccccaccacuaggacucug

SEQ ID NO: 2268079 - RNA, 22 nt, Human
gcccccaccacggccacuggcc

SEQ ID NO: 2268080 - RNA, 17 nt, Human
gcccccacccacuuccc

SEQ ID NO: 2268081 - RNA, 14 nt, Human
gcccccaagccugc

SEQ ID NO: 2268082 - RNA, 15 nt, Human
gcccccacagugcug

SEQ ID NO: 2268083 - RNA, 23 nt, Human
gcccccacagaaagacugagcuc

SEQ ID NO: 2268084 - RNA, 22 nt, Human
gcccccugguggacaguccugg

SEQ ID NO: 2268085 - RNA, 21 nt, Human
gcccccugguggacaguccug

SEQ ID NO: 2268086 - RNA, 23 nt, Human
gcccccugguggacaguccuggg

SEQ ID NO: 2268087 - RNA, 19 nt, Human
gcccccuggccucugugcc

SEQ ID NO: 2268088 - RNA, 17 nt, Human
gcccccuggccucugug

SEQ ID NO: 2268089 - RNA, 13 nt, Human
gcccccuggucuc

SEQ ID NO: 2268090 - RNA, 14 nt, Human
gcccccuggucucu

SEQ ID NO: 2268091 - RNA, 16 nt, Human
gcccccuggucucugg

SEQ ID NO: 2268092 - RNA, 17 nt, Human
gcccccuggucucuggu

SEQ ID NO: 2268093 - RNA, 15 nt, Human
gcccccugcuggcuc

SEQ ID NO: 2268094 - RNA, 20 nt, Human
gcccccugcuggcucuucug

SEQ ID NO: 2268095 - RNA, 13 nt, Human
gcccccugcuggc

SEQ ID NO: 2268096 - RNA, 16 nt, Human
gcccccuggccucugu

SEQ ID NO: 2268097 - RNA, 15 nt, Human
gcccccuggccucug

SEQ ID NO: 2268098 - RNA, 14 nt, Human
gcccccuggccucu

SEQ ID NO: 2268099 - RNA, 13 nt, Human
gcccccuggccuc

SEQ ID NO: 2268100 - RNA, 22 nt, Human
gccccauucuuuuguaauuuaa

SEQ ID NO: 2268101 - RNA, 20 nt, Human
gccccauuuauccaccucca

SEQ ID NO: 2268102 - RNA, 23 nt, Human
gccccauucuuuuguaauuuaaa

SEQ ID NO: 2268103 - RNA, 15 nt, Human
gcccccaaauaagaa

SEQ ID NO: 2268104 - RNA, 15 nt, Human
gccccauucugccug

SEQ ID NO: 2268105 - RNA, 14 nt, Human
gccccauucugccu

SEQ ID NO: 2268106 - RNA, 16 nt, Human
gccccaugucucucag

SEQ ID NO: 2268107 - RNA, 15 nt, Human
gccccaugucucuca

SEQ ID NO: 2268108 - RNA, 18 nt, Human
gccccaugucucucagaa

SEQ ID NO: 2268109 - RNA, 15 nt, Human
gccccauuccuggga

SEQ ID NO: 2268110 - RNA, 12 nt, Human
gccccauuccug

SEQ ID NO: 2268111 - RNA, 13 nt, Human
gccccauccucug

SEQ ID NO: 2268112 - RNA, 14 nt, Human
gccccauccucugu

SEQ ID NO: 2268113 - RNA, 22 nt, Human
gccccauccucuguacagagcc

SEQ ID NO: 2268114 - RNA, 16 nt, Human
gccccaugcuggagcc

SEQ ID NO: 2268115 - RNA, 17 nt, Human
gccccaugcuggagccu

SEQ ID NO: 2268116 - RNA, 18 nt, Human
gccccaugcuggagccug

SEQ ID NO: 2268117 - RNA, 19 nt, Human
gccccaugcuggagccugu

SEQ ID NO: 2268118 - RNA, 20 nt, Human
gccccaugcuggagccugug

SEQ ID NO: 2268119 - RNA, 21 nt, Human
gccccaugcuggagccugugu

SEQ ID NO: 2268120 - RNA, 22 nt, Human
gccccaugcuggagccugugua

SEQ ID NO: 2268121 - RNA, 23 nt, Human
gccccaugcuggagccuguguaa

SEQ ID NO: 2268122 - RNA, 22 nt, Human
gccccaggcagggccaacccuu

SEQ ID NO: 2268123 - RNA, 14 nt, Human
gccccaggccucug

SEQ ID NO: 2268124 - RNA, 12 nt, Human
gccccaggccug

SEQ ID NO: 2268125 - RNA, 11 nt, Human
gccccagccag

SEQ ID NO: 2268126 - RNA, 10 nt, Human
gccccagcca

SEQ ID NO: 2268127 - RNA, 19 nt, Human
gccccagcacuaacguaaa

SEQ ID NO: 2268128 - RNA, 23 nt, Human
gccccagcacuaaagcaguggac

SEQ ID NO: 2268129 - RNA, 19 nt, Human
gccccagcacuaaagcagu

SEQ ID NO: 2268130 - RNA, 17 nt, Human
gccccagcacuaaagca

SEQ ID NO: 2268131 - RNA, 12 nt, Human
gccccagcacua

SEQ ID NO: 2268132 - RNA, 20 nt, Human
gccccagaucaccagcccgg

SEQ ID NO: 2268133 - RNA, 13 nt, Human
gccccagcacagc

SEQ ID NO: 2268134 - RNA, 20 nt, Human
gccccagcacagcuugaccu

SEQ ID NO: 2268135 - RNA, 12 nt, Human
gccccagaggcc

SEQ ID NO: 2268136 - RNA, 15 nt, Human
gccccagaggccucu

SEQ ID NO: 2268137 - RNA, 19 nt, Human
gccccagaggccucucucu

SEQ ID NO: 2268138 - RNA, 17 nt, Human
gccccagauaccagccc

SEQ ID NO: 2268139 - RNA, 19 nt, Human
gccccagauaccagccccu

SEQ ID NO: 2268140 - RNA, 20 nt, Human
gccccagauaccagccccug

SEQ ID NO: 2268141 - RNA, 18 nt, Human
gccccagaucaccagccc

SEQ ID NO: 2268142 - RNA, 19 nt, Human
gccccagaucaccagcccg

SEQ ID NO: 2268143 - RNA, 21 nt, Human
gccccagggucuucccuaccu

SEQ ID NO: 2268144 - RNA, 20 nt, Human
gccccagggucuucccuacc

SEQ ID NO: 2268145 - RNA, 17 nt, Human
gccccagggucuucccu

SEQ ID NO: 2268146 - RNA, 16 nt, Human
gccccagggucuuccc

SEQ ID NO: 2268147 - RNA, 18 nt, Human
gccccagggcuacccucc

SEQ ID NO: 2268148 - RNA, 16 nt, Human
gccccagggcuacccu

SEQ ID NO: 2268149 - RNA, 15 nt, Human
gccccaggccugaaa

SEQ ID NO: 2268150 - RNA, 23 nt, Human
gccccagggucuucccuaccuca

SEQ ID NO: 2268151 - RNA, 13 nt, Human
gccccagucagcc

SEQ ID NO: 2268152 - RNA, 14 nt, Human
gccccagucagccu

SEQ ID NO: 2268153 - RNA, 15 nt, Human
gccccagucagccuc

SEQ ID NO: 2268154 - RNA, 16 nt, Human
gccccagucagccucu

SEQ ID NO: 2268155 - RNA, 12 nt, Human
gccccagugccc

SEQ ID NO: 2268156 - RNA, 14 nt, Human
gccccagugccaag

SEQ ID NO: 2268157 - RNA, 23 nt, Human
gccccagucagccucucucccag

SEQ ID NO: 2268158 - RNA, 19 nt, Human
gccccaguggcuguucugg

SEQ ID NO: 2268159 - RNA, 17 nt, Human
gccccagucagccucuc

SEQ ID NO: 2268160 - RNA, 18 nt, Human
gccccagucagccucucu

SEQ ID NO: 2268161 - RNA, 20 nt, Human
gccccagucagccucucucc

SEQ ID NO: 2268162 - RNA, 22 nt, Human
gccccagucagccucucuccca

SEQ ID NO: 2268163 - RNA, 13 nt, Human
gccccagugccca

SEQ ID NO: 2268164 - RNA, 14 nt, Human
gccccagugcccac

SEQ ID NO: 2268165 - RNA, 15 nt, Human
gccccaucagcucca

SEQ ID NO: 2268166 - RNA, 18 nt, Human
gccccaguucaaucuccc

SEQ ID NO: 2268167 - RNA, 16 nt, Human
gccccaucagcuccag

SEQ ID NO: 2268168 - RNA, 17 nt, Human
gccccaucagcuccagc

SEQ ID NO: 2268169 - RNA, 21 nt, Human
gccccauaauuuuuuuuuucc

SEQ ID NO: 2268170 - RNA, 19 nt, Human
gccccaguuguauuuauuu

SEQ ID NO: 2268171 - RNA, 18 nt, Human
gccccaucccaaacccuu

SEQ ID NO: 2268172 - RNA, 18 nt, Human
gccccauccuccagcagg

SEQ ID NO: 2268173 - RNA, 17 nt, Human
gccccauccuccagcag

SEQ ID NO: 2268174 - RNA, 16 nt, Human
gccccauccuccagca

SEQ ID NO: 2268175 - RNA, 14 nt, Human
gccccauccuccag

SEQ ID NO: 2268176 - RNA, 14 nt, Human
gccccaucagugcu

SEQ ID NO: 2268177 - RNA, 19 nt, Human
gccccaucaggacucuugu

SEQ ID NO: 2268178 - RNA, 15 nt, Human
gcccaggcuggagug

SEQ ID NO: 2268179 - RNA, 20 nt, Human
gcccaggcuggagugcaaug

SEQ ID NO: 2268180 - RNA, 13 nt, Human
gcccaggccuccu

SEQ ID NO: 2268181 - RNA, 18 nt, Human
gcccagagcaggaagcau

SEQ ID NO: 2268182 - RNA, 21 nt, Human
gcccaggccgggguggagcau

SEQ ID NO: 2268183 - RNA, 22 nt, Human
gcccaggccgggguggagcaug

SEQ ID NO: 2268184 - RNA, 23 nt, Human
gcccaggccgggguggagcaugg

SEQ ID NO: 2268185 - RNA, 13 nt, Human
gcccaggccccuu

SEQ ID NO: 2268186 - RNA, 21 nt, Human
gcccagagaggguggugaccu

SEQ ID NO: 2268187 - RNA, 15 nt, Human
gcccagagagggugg

SEQ ID NO: 2268188 - RNA, 18 nt, Human
gcccagagaugccuccac

SEQ ID NO: 2268189 - RNA, 17 nt, Human
gcccagagaugccucca

SEQ ID NO: 2268190 - RNA, 16 nt, Human
gcccagagaugccucc

SEQ ID NO: 2268191 - RNA, 22 nt, Human
gcccagagaugggacugggagg

SEQ ID NO: 2268192 - RNA, 14 nt, Human
gcccagagcaggaa

SEQ ID NO: 2268193 - RNA, 15 nt, Human
gcccagagcaggaag

SEQ ID NO: 2268194 - RNA, 16 nt, Human
gcccagagcaggaagc

SEQ ID NO: 2268195 - RNA, 21 nt, Human
gcccagagaugggacugggag

SEQ ID NO: 2268196 - RNA, 22 nt, Human
gcccagagaugccuccaccgcu

SEQ ID NO: 2268197 - RNA, 20 nt, Human
gcccagagaugccuccaccg

SEQ ID NO: 2268198 - RNA, 19 nt, Human
gcccagagaugccuccacc

SEQ ID NO: 2268199 - RNA, 23 nt, Human
gcccaggccccugccacccuggg

SEQ ID NO: 2268200 - RNA, 22 nt, Human
gcccagggccacucugccucug

SEQ ID NO: 2268201 - RNA, 18 nt, Human
gcccagggcuccugcacu

SEQ ID NO: 2268202 - RNA, 15 nt, Human
gcccagggcuccugc

SEQ ID NO: 2268203 - RNA, 16 nt, Human
gcccagggcuccugca

SEQ ID NO: 2268204 - RNA, 20 nt, Human
gcccagggccacucugccuc

SEQ ID NO: 2268205 - RNA, 19 nt, Human
gcccagggccacucugccu

SEQ ID NO: 2268206 - RNA, 12 nt, Human
gcccagggcucc

SEQ ID NO: 2268207 - RNA, 14 nt, Human
gcccagggcuccug

SEQ ID NO: 2268208 - RNA, 23 nt, Human
gcccagggagcggaaagcagcuc

SEQ ID NO: 2268209 - RNA, 21 nt, Human
gcccagggagcggaaagcagc

SEQ ID NO: 2268210 - RNA, 18 nt, Human
gcccagggccacucugcc

SEQ ID NO: 2268211 - RNA, 15 nt, Human
gcccagggccacucu

SEQ ID NO: 2268212 - RNA, 13 nt, Human
gcccagggccacu

SEQ ID NO: 2268213 - RNA, 20 nt, Human
gcccagggagcggaaagcag

SEQ ID NO: 2268214 - RNA, 17 nt, Human
gcccagggagcggaaag

SEQ ID NO: 2268215 - RNA, 16 nt, Human
gcccagggagcggaaa

SEQ ID NO: 2268216 - RNA, 19 nt, Human
gcccagggagaggccauga

SEQ ID NO: 2268217 - RNA, 18 nt, Human
gcccagggagaggccaug

SEQ ID NO: 2268218 - RNA, 24 nt, Human
gcccagggacaccagccaggcucu

SEQ ID NO: 2268219 - RNA, 22 nt, Human
gcccagggacaccagccaggcu

SEQ ID NO: 2268220 - RNA, 23 nt, Human
gcccagggacaccagccaggcuc

SEQ ID NO: 2268221 - RNA, 14 nt, Human
gcccaagucccugu

SEQ ID NO: 2268222 - RNA, 13 nt, Human
gcccaggcuggcc

SEQ ID NO: 2268223 - RNA, 14 nt, Human
gcccaggcuggcca

SEQ ID NO: 2268224 - RNA, 15 nt, Human
gcccaggcuggccag

SEQ ID NO: 2268225 - RNA, 16 nt, Human
gcccaggcuggccagc

SEQ ID NO: 2268226 - RNA, 17 nt, Human
gcccaggcuggccagcc

SEQ ID NO: 2268227 - RNA, 18 nt, Human
gcccaggcuggccagccc

SEQ ID NO: 2268228 - RNA, 21 nt, Human
gcccagggacaccagccaggc

SEQ ID NO: 2268229 - RNA, 12 nt, Human
gcccaggcuggc

SEQ ID NO: 2268230 - RNA, 19 nt, Human
gcccaggcuggagugcagu

SEQ ID NO: 2268231 - RNA, 20 nt, Human
gcccaggcuggagugcagug

SEQ ID NO: 2268232 - RNA, 22 nt, Human
gcccaucacaggguugggccca

SEQ ID NO: 2268233 - RNA, 21 nt, Human
gcccaucacaggguugggccc

SEQ ID NO: 2268234 - RNA, 17 nt, Human
gcccaucacaggguugg

SEQ ID NO: 2268235 - RNA, 13 nt, Human
gcccaucacaggg

SEQ ID NO: 2268236 - RNA, 17 nt, Human
gcccaucaauuauagaa

SEQ ID NO: 2268237 - RNA, 14 nt, Human
gccccacccugggc

SEQ ID NO: 2268238 - RNA, 22 nt, Human
gcccaucaguguacccccgccc

SEQ ID NO: 2268239 - RNA, 20 nt, Human
gcccaucaguguacccccgc

SEQ ID NO: 2268240 - RNA, 21 nt, Human
gcccaucaguguacccccgcc

SEQ ID NO: 2268241 - RNA, 15 nt, Human
gccccacccugggcc

SEQ ID NO: 2268242 - RNA, 16 nt, Human
gccccacccugggccc

SEQ ID NO: 2268243 - RNA, 19 nt, Human
gccccacccugggcccugg

SEQ ID NO: 2268244 - RNA, 20 nt, Human
gccccacccugggcccuggg

SEQ ID NO: 2268245 - RNA, 16 nt, Human
gcccaggguuccccca

SEQ ID NO: 2268246 - RNA, 23 nt, Human
gcccaggguggacuuagaaagca

SEQ ID NO: 2268247 - RNA, 14 nt, Human
gcccaggguggacu

SEQ ID NO: 2268248 - RNA, 16 nt, Human
gcccaguuucagggcu

SEQ ID NO: 2268249 - RNA, 17 nt, Human
gcccaguuucagggcua

SEQ ID NO: 2268250 - RNA, 15 nt, Human
gcccaguuucugccu

SEQ ID NO: 2268251 - RNA, 17 nt, Human
gcccaguuucugccucu

SEQ ID NO: 2268252 - RNA, 21 nt, Human
gcccaguuucugccucugagg

SEQ ID NO: 2268253 - RNA, 22 nt, Human
gcccaggggugcccccuccucu

SEQ ID NO: 2268254 - RNA, 19 nt, Human
gcccaggggugcccccucc

SEQ ID NO: 2268255 - RNA, 20 nt, Human
gcccaggggugcccccuccu

SEQ ID NO: 2268256 - RNA, 14 nt, Human
gcccaggggugccc

SEQ ID NO: 2268257 - RNA, 15 nt, Human
gcccaggggugcccc

SEQ ID NO: 2268258 - RNA, 17 nt, Human
gcccaggggugcccccu

SEQ ID NO: 2268259 - RNA, 18 nt, Human
gcccaggggugcccccuc

SEQ ID NO: 2268260 - RNA, 20 nt, Human
gcccaggggcccacagggaa

SEQ ID NO: 2268261 - RNA, 16 nt, Human
gcccaggggagcccuc

SEQ ID NO: 2268262 - RNA, 19 nt, Human
gcccaggggcccacaggga

SEQ ID NO: 2268263 - RNA, 15 nt, Human
gcccaggggagcccu

SEQ ID NO: 2268264 - RNA, 23 nt, Human
gccccagagcuguuuauggccuc

SEQ ID NO: 2268265 - RNA, 22 nt, Human
gccccagagcuguuuauggccu

SEQ ID NO: 2268266 - RNA, 14 nt, Human
gccccagagcuguu

SEQ ID NO: 2268267 - RNA, 13 nt, Human
gccccagagcugu

SEQ ID NO: 2268268 - RNA, 12 nt, Human
gccccagagcug

SEQ ID NO: 2268269 - RNA, 17 nt, Human
gccccagagacucagag

SEQ ID NO: 2268270 - RNA, 22 nt, Human
gccccagagcaggguguuggga

SEQ ID NO: 2268271 - RNA, 15 nt, Human
gccccagagacucag

SEQ ID NO: 2268272 - RNA, 11 nt, Human
gccccagagac

SEQ ID NO: 2268273 - RNA, 18 nt, Human
gccccagaaggcagggaa

SEQ ID NO: 2268274 - RNA, 15 nt, Human
gccccacuggggaaa

SEQ ID NO: 2268275 - RNA, 14 nt, Human
gccccacuggggaa

SEQ ID NO: 2268276 - RNA, 13 nt, Human
gccccacugggga

SEQ ID NO: 2268277 - RNA, 15 nt, Human
gccccagaaggcagg

SEQ ID NO: 2268278 - RNA, 20 nt, Human
gccccaccuuuauuaaaauc

SEQ ID NO: 2268279 - RNA, 15 nt, Human
gccccaccuuuauua

SEQ ID NO: 2268280 - RNA, 24 nt, Human
gccccacccugggcccugggcugg

SEQ ID NO: 2268281 - RNA, 22 nt, Human
gccccacccugggcccugggcu

SEQ ID NO: 2268282 - RNA, 23 nt, Human
gccccacccugggcccugggcug

SEQ ID NO: 2268283 - RNA, 23 nt, Human
gccccaccuuuauuaaaaucuua

SEQ ID NO: 2268284 - RNA, 21 nt, Human
gccccaccuuuauuaaaaucu

SEQ ID NO: 2268285 - RNA, 15 nt, Human
gcaagccccugcucc

SEQ ID NO: 2268286 - RNA, 23 nt, Human
gcaagcccuguugacacaggucu

SEQ ID NO: 2268287 - RNA, 15 nt, Human
gcaagcccuguugac

SEQ ID NO: 2268288 - RNA, 13 nt, Human
gcaagauauuuau

SEQ ID NO: 2268289 - RNA, 20 nt, Human
gcaagccuguaaucccagcu

SEQ ID NO: 2268290 - RNA, 19 nt, Human
gcaagcuagaaccuggagg

SEQ ID NO: 2268291 - RNA, 13 nt, Human
gcaagcucccaag

SEQ ID NO: 2268292 - RNA, 19 nt, Human
gcaagccuguaaucccagc

SEQ ID NO: 2268293 - RNA, 24 nt, Human
gcaagccugcguucuugugacaga

SEQ ID NO: 2268294 - RNA, 11 nt, Human
gcaagccugcg

SEQ ID NO: 2268295 - RNA, 20 nt, Human
gcaagcauuuauguuuauuu

SEQ ID NO: 2268296 - RNA, 13 nt, Human
gcaagaggggugg

SEQ ID NO: 2268297 - RNA, 22 nt, Human
gcaagaggggguggaggggugu

SEQ ID NO: 2268298 - RNA, 23 nt, Human
gcaagaggggguggaggggugug

SEQ ID NO: 2268299 - RNA, 17 nt, Human
gcaagagggguggagac

SEQ ID NO: 2268300 - RNA, 10 nt, Human
gcaagccaga

SEQ ID NO: 2268301 - RNA, 18 nt, Human
gcaaggagauuuacaacu

SEQ ID NO: 2268302 - RNA, 19 nt, Human
gcaagcucccaagggaugg

SEQ ID NO: 2268303 - RNA, 22 nt, Human
gcaaggacuacguuaagggaag

SEQ ID NO: 2268304 - RNA, 13 nt, Human
gcaaggaggcugg

SEQ ID NO: 2268305 - RNA, 14 nt, Human
gcaaggaggcuggc

SEQ ID NO: 2268306 - RNA, 15 nt, Human
gcaaggaggcuggcu

SEQ ID NO: 2268307 - RNA, 16 nt, Human
gcaaggaggcuggcug

SEQ ID NO: 2268308 - RNA, 19 nt, Human
gcaaggaggcuggcugggg

SEQ ID NO: 2268309 - RNA, 20 nt, Human
gcaaggaggcuggcuggggc

SEQ ID NO: 2268310 - RNA, 14 nt, Human
gcaaggcaccugca

SEQ ID NO: 2268311 - RNA, 11 nt, Human
gcaaggcaggu

SEQ ID NO: 2268312 - RNA, 13 nt, Human
gcaaggcaggugc

SEQ ID NO: 2268313 - RNA, 18 nt, Human
gcaaggcaggugccucca

SEQ ID NO: 2268314 - RNA, 19 nt, Human
gcaaggcaggugccuccag

SEQ ID NO: 2268315 - RNA, 20 nt, Human
gcaaggcaggugccuccagg

SEQ ID NO: 2268316 - RNA, 18 nt, Human
gcaaggguucccucaaga

SEQ ID NO: 2268317 - RNA, 16 nt, Human
gcaaggggaaaaucuc

SEQ ID NO: 2268318 - RNA, 16 nt, Human
gcaaggguucccucaa

SEQ ID NO: 2268319 - RNA, 14 nt, Human
gcaagggugauggg

SEQ ID NO: 2268320 - RNA, 15 nt, Human
gcaaggggaaaaucu

SEQ ID NO: 2268321 - RNA, 14 nt, Human
gcaagggcucccca

SEQ ID NO: 2268322 - RNA, 15 nt, Human
gcaagggccaugcug

SEQ ID NO: 2268323 - RNA, 19 nt, Human
gcaagggccaugcugaagg

SEQ ID NO: 2268324 - RNA, 13 nt, Human
gcaaggcugucaa

SEQ ID NO: 2268325 - RNA, 21 nt, Human
gcaaggccgcuguucacccac

SEQ ID NO: 2268326 - RNA, 20 nt, Human
gcaaggccgcuguucaccca

SEQ ID NO: 2268327 - RNA, 11 nt, Human
gcaaggcuguc

SEQ ID NO: 2268328 - RNA, 21 nt, Human
gcaaggcaggugccuccaggu

SEQ ID NO: 2268329 - RNA, 22 nt, Human
gcaaggcaggugccuccaggug

SEQ ID NO: 2268330 - RNA, 17 nt, Human
gcaaucaaaucugcuuu

SEQ ID NO: 2268331 - RNA, 18 nt, Human
gcaauccacaaucugaca

SEQ ID NO: 2268332 - RNA, 19 nt, Human
gcaauauuuccucauguga

SEQ ID NO: 2268333 - RNA, 15 nt, Human
gcaaucaaaucugcu

SEQ ID NO: 2268334 - RNA, 15 nt, Human
gcaaugaccuuucaa

SEQ ID NO: 2268335 - RNA, 17 nt, Human
gcaaugaccuuucaaua

SEQ ID NO: 2268336 - RNA, 20 nt, Human
gcaaugaccuuucaauagga

SEQ ID NO: 2268337 - RNA, 22 nt, Human
gcaaugaccuuucaauaggaaa

SEQ ID NO: 2268338 - RNA, 14 nt, Human
gcaaugauuacucu

SEQ ID NO: 2268339 - RNA, 17 nt, Human
gcaaugauguccagaag

SEQ ID NO: 2268340 - RNA, 10 nt, Human
gcaauccuaa

SEQ ID NO: 2268341 - RNA, 15 nt, Human
gcaaugauguccaga

SEQ ID NO: 2268342 - RNA, 16 nt, Human
gcaaugauuacucuuu

SEQ ID NO: 2268343 - RNA, 11 nt, Human
gcaaugcauuu

SEQ ID NO: 2268344 - RNA, 19 nt, Human
gcaaugccaucaucuccug

SEQ ID NO: 2268345 - RNA, 18 nt, Human
gcaaugccaucaucuccu

SEQ ID NO: 2268346 - RNA, 15 nt, Human
gcaaugccaucaucu

SEQ ID NO: 2268347 - RNA, 22 nt, Human
gcaauccauguuaguuuuuacu

SEQ ID NO: 2268348 - RNA, 21 nt, Human
gcaauccauguuaguuuuuac

SEQ ID NO: 2268349 - RNA, 20 nt, Human
gcaauccauguuaguuuuua

SEQ ID NO: 2268350 - RNA, 13 nt, Human
gcaauccauguua

SEQ ID NO: 2268351 - RNA, 17 nt, Human
gcaaugaugaaugagaa

SEQ ID NO: 2268352 - RNA, 16 nt, Human
gcaaugaugaaugaga

SEQ ID NO: 2268353 - RNA, 23 nt, Human
gcaaugaccuuucaauaggaaaa

SEQ ID NO: 2268354 - RNA, 13 nt, Human
gcaaugcuggcug

SEQ ID NO: 2268355 - RNA, 14 nt, Human
gcaaugcuggcugu

SEQ ID NO: 2268356 - RNA, 22 nt, Human
gcaaugcuggcuguuggcuggg

SEQ ID NO: 2268357 - RNA, 23 nt, Human
gcaaugcuggcuguuggcugggg

SEQ ID NO: 2268358 - RNA, 14 nt, Human
gcaacagagugaga

SEQ ID NO: 2268359 - RNA, 13 nt, Human
gcaacagaaaaaa

SEQ ID NO: 2268360 - RNA, 19 nt, Human
gcaacagagugagacccug

SEQ ID NO: 2268361 - RNA, 13 nt, Human
gcaacagaucugg

SEQ ID NO: 2268362 - RNA, 12 nt, Human
gcaacagaucug

SEQ ID NO: 2268363 - RNA, 17 nt, Human
gcaacacucuauauuua

SEQ ID NO: 2268364 - RNA, 22 nt, Human
gcaaauccuugugggaaaagaa

SEQ ID NO: 2268365 - RNA, 19 nt, Human
gcaaauccuaugugauuuu

SEQ ID NO: 2268366 - RNA, 17 nt, Human
gcaaauccuaugugauu

SEQ ID NO: 2268367 - RNA, 23 nt, Human
gcaaauccuaugugauuuuaacu

SEQ ID NO: 2268368 - RNA, 17 nt, Human
gcaagaaagaaacccga

SEQ ID NO: 2268369 - RNA, 22 nt, Human
gcaacagaucuggaaccucagc

SEQ ID NO: 2268370 - RNA, 20 nt, Human
gcaacagaucuggaaccuca

SEQ ID NO: 2268371 - RNA, 18 nt, Human
gcaacagaucuggaaccu

SEQ ID NO: 2268372 - RNA, 17 nt, Human
gcaacagaucuggaacc

SEQ ID NO: 2268373 - RNA, 16 nt, Human
gcaacagaucuggaac

SEQ ID NO: 2268374 - RNA, 14 nt, Human
gcaacagaucugga

SEQ ID NO: 2268375 - RNA, 14 nt, Human
gcaagaaggaauug

SEQ ID NO: 2268376 - RNA, 20 nt, Human
gauuuucuuuaaaagaaugg

SEQ ID NO: 2268377 - RNA, 19 nt, Human
gcaagaagaucacgcuccc

SEQ ID NO: 2268378 - RNA, 21 nt, Human
gcaagaagaucacgcuccccg

SEQ ID NO: 2268379 - RNA, 17 nt, Human
gcaagaauugaagcagg

SEQ ID NO: 2268380 - RNA, 23 nt, Human
gcaagagccuugguguccaccug

SEQ ID NO: 2268381 - RNA, 22 nt, Human
gcaagagccuugguguccaccu

SEQ ID NO: 2268382 - RNA, 20 nt, Human
gcaagaggggguggaggggu

SEQ ID NO: 2268383 - RNA, 13 nt, Human
gcaagagccuugg

SEQ ID NO: 2268384 - RNA, 14 nt, Human
gcaagagagauguu

SEQ ID NO: 2268385 - RNA, 17 nt, Human
gcaagagagauguuuug

SEQ ID NO: 2268386 - RNA, 19 nt, Human
gcaagagaauugcuugaac

SEQ ID NO: 2268387 - RNA, 20 nt, Human
gcaagagacucuggccucca

SEQ ID NO: 2268388 - RNA, 18 nt, Human
gcaagacuguugcucaaa

SEQ ID NO: 2268389 - RNA, 15 nt, Human
gcaagaauuugaucg

SEQ ID NO: 2268390 - RNA, 23 nt, Human
gcaagacgcugugcugcccugcc

SEQ ID NO: 2268391 - RNA, 14 nt, Human
gcaagacgcugugc

SEQ ID NO: 2268392 - RNA, 20 nt, Human
gcaagacgcugugcugcccu

SEQ ID NO: 2268393 - RNA, 21 nt, Human
gcaagacgcugugcugcccug

SEQ ID NO: 2268394 - RNA, 22 nt, Human
gcaagacgcugugcugcccugc

SEQ ID NO: 2268395 - RNA, 18 nt, Human
gcaaagguggcucuccag

SEQ ID NO: 2268396 - RNA, 21 nt, Human
gcaaagguuccaacuguauau

SEQ ID NO: 2268397 - RNA, 23 nt, Human
gcaaaggggucccauagagguga

SEQ ID NO: 2268398 - RNA, 20 nt, Human
gcaaaggggucccauagagg

SEQ ID NO: 2268399 - RNA, 16 nt, Human
gcaaaguaucccuacu

SEQ ID NO: 2268400 - RNA, 22 nt, Human
gcaaagggcugaaagccauuug

SEQ ID NO: 2268401 - RNA, 20 nt, Human
gcaaaggggcugaaagaaca

SEQ ID NO: 2268402 - RNA, 15 nt, Human
gcaaagggcugaaag

SEQ ID NO: 2268403 - RNA, 19 nt, Human
gcaaagggcugaaagccau

SEQ ID NO: 2268404 - RNA, 22 nt, Human
gcaaagccccaugcuggagccu

SEQ ID NO: 2268405 - RNA, 23 nt, Human
gcaaagccccaugcuggagccug

SEQ ID NO: 2268406 - RNA, 22 nt, Human
gcaaaucagaaacuugugaagu

SEQ ID NO: 2268407 - RNA, 20 nt, Human
gcaaaucagaaacuugugaa

SEQ ID NO: 2268408 - RNA, 18 nt, Human
gcaaaucaguuacuaaga

SEQ ID NO: 2268409 - RNA, 15 nt, Human
gcaaaucauagcugg

SEQ ID NO: 2268410 - RNA, 15 nt, Human
gcaaauccuauguga

SEQ ID NO: 2268411 - RNA, 20 nt, Human
gcaaauccuugugggaaaag

SEQ ID NO: 2268412 - RNA, 15 nt, Human
gcaaaucagaaacuu

SEQ ID NO: 2268413 - RNA, 13 nt, Human
gcaaaucagaaac

SEQ ID NO: 2268414 - RNA, 12 nt, Human
gcaaaucaaugc

SEQ ID NO: 2268415 - RNA, 19 nt, Human
gcaaagguuccaacuguau

SEQ ID NO: 2268416 - RNA, 15 nt, Human
gauuuuugucuugug

SEQ ID NO: 2268417 - RNA, 13 nt, Human
gauuuuugccucu

SEQ ID NO: 2268418 - RNA, 17 nt, Human
gcaaaauugauguguuu

SEQ ID NO: 2268419 - RNA, 15 nt, Human
gauuuuuguaagaca

SEQ ID NO: 2268420 - RNA, 17 nt, Human
gcaaacacacaaaggua

SEQ ID NO: 2268421 - RNA, 16 nt, Human
gcaaaauuuuauagcu

SEQ ID NO: 2268422 - RNA, 21 nt, Human
gcaaaauuugaugccaggaca

SEQ ID NO: 2268423 - RNA, 22 nt, Human
gcaaaauuugaugccaggacac

SEQ ID NO: 2268424 - RNA, 10 nt, Human
gcaaaauuuc

SEQ ID NO: 2268425 - RNA, 21 nt, Human
gcaaaauuguuuuugguugga

SEQ ID NO: 2268426 - RNA, 15 nt, Human
gcaaaauuugaugcc

SEQ ID NO: 2268427 - RNA, 20 nt, Human
gcaaaauuugaugccaggac

SEQ ID NO: 2268428 - RNA, 17 nt, Human
gcaaaauugcaaaucuu

SEQ ID NO: 2268429 - RNA, 13 nt, Human
gcaaaauugcaaa

SEQ ID NO: 2268430 - RNA, 12 nt, Human
gcaaagcauuga

SEQ ID NO: 2268431 - RNA, 13 nt, Human
gcaaagcccagcu

SEQ ID NO: 2268432 - RNA, 21 nt, Human
gcaaagcccagcuugaaaccu

SEQ ID NO: 2268433 - RNA, 18 nt, Human
gcaaagccccaugcugga

SEQ ID NO: 2268434 - RNA, 19 nt, Human
gcaaagccccaugcuggag

SEQ ID NO: 2268435 - RNA, 20 nt, Human
gcaaagccccaugcuggagc

SEQ ID NO: 2268436 - RNA, 21 nt, Human
gcaaagccccaugcuggagcc

SEQ ID NO: 2268437 - RNA, 23 nt, Human
gcaaagcacugacuucuaaguaa

SEQ ID NO: 2268438 - RNA, 23 nt, Human
gcaaacagaggaagaauuuguua

SEQ ID NO: 2268439 - RNA, 22 nt, Human
gauuuccagucuccaccaggaa

SEQ ID NO: 2268440 - RNA, 18 nt, Human
gauuuccagccagggcug

SEQ ID NO: 2268441 - RNA, 19 nt, Human
gauuuccagccagggcugc

SEQ ID NO: 2268442 - RNA, 23 nt, Human
gauugcacguggccucuugagca

SEQ ID NO: 2268443 - RNA, 19 nt, Human
gauugcacguggccucuug

SEQ ID NO: 2268444 - RNA, 20 nt, Human
gauugcacguggccucuuga

SEQ ID NO: 2268445 - RNA, 22 nt, Human
gauugcaauuugcacaaguuuu

SEQ ID NO: 2268446 - RNA, 15 nt, Human
gauugcacguggccu

SEQ ID NO: 2268447 - RNA, 16 nt, Human
gauugcacguggccuc

SEQ ID NO: 2268448 - RNA, 17 nt, Human
gauugcacguggccucu

SEQ ID NO: 2268449 - RNA, 16 nt, Human
gauuucccguggcccc

SEQ ID NO: 2268450 - RNA, 18 nt, Human
gauuucccguggccccag

SEQ ID NO: 2268451 - RNA, 21 nt, Human
gauuucccguggccccagccu

SEQ ID NO: 2268452 - RNA, 22 nt, Human
gauuucccguggccccagccug

SEQ ID NO: 2268453 - RNA, 15 nt, Human
gauuuccguuaaaau

SEQ ID NO: 2268454 - RNA, 20 nt, Human
gauuucucccagcucuagac

SEQ ID NO: 2268455 - RNA, 11 nt, Human
gauuucuccca

SEQ ID NO: 2268456 - RNA, 18 nt, Human
gauuuccguuaaaauacc

SEQ ID NO: 2268457 - RNA, 17 nt, Human
gauuucugcagguucuu

SEQ ID NO: 2268458 - RNA, 13 nt, Human
gauuucugccuuc

SEQ ID NO: 2268459 - RNA, 16 nt, Human
gauuucugccuuccuu

SEQ ID NO: 2268460 - RNA, 17 nt, Human
gauuugcauugaacaca

SEQ ID NO: 2268461 - RNA, 15 nt, Human
gauuugccugugcca

SEQ ID NO: 2268462 - RNA, 21 nt, Human
gauuugcauugaacacaaacu

SEQ ID NO: 2268463 - RNA, 17 nt, Human
gauuucugccuuccuug

SEQ ID NO: 2268464 - RNA, 19 nt, Human
gauuucuguuuagauaaua

SEQ ID NO: 2268465 - RNA, 11 nt, Human
gauuucuguuu

SEQ ID NO: 2268466 - RNA, 21 nt, Human
gauuugcugggcaguuuuucu

SEQ ID NO: 2268467 - RNA, 12 nt, Human
gauuuggaaaaa

SEQ ID NO: 2268468 - RNA, 23 nt, Human
gauuugcucagugucuggcugca

SEQ ID NO: 2268469 - RNA, 15 nt, Human
gauuuggaagggaaa

SEQ ID NO: 2268470 - RNA, 20 nt, Human
gauuuggggcucagaguggg

SEQ ID NO: 2268471 - RNA, 23 nt, Human
gauuugggcuggaacagauucac

SEQ ID NO: 2268472 - RNA, 19 nt, Human
gauuugguguacaauucag

SEQ ID NO: 2268473 - RNA, 13 nt, Human
gauuuggggugga

SEQ ID NO: 2268474 - RNA, 12 nt, Human
gauuugggcugg

SEQ ID NO: 2268475 - RNA, 22 nt, Human
gauuuggucaacacuaacauga

SEQ ID NO: 2268476 - RNA, 20 nt, Human
gauuuuuaccguuucuuccc

SEQ ID NO: 2268477 - RNA, 18 nt, Human
gauuuucuauuguuacuc

SEQ ID NO: 2268478 - RNA, 13 nt, Human
gauuuucuuuaaa

SEQ ID NO: 2268479 - RNA, 21 nt, Human
gauuuuccuuuuuuauacaca

SEQ ID NO: 2268480 - RNA, 12 nt, Human
gauuuucuauug

SEQ ID NO: 2268481 - RNA, 17 nt, Human
gauuuucuauuguuacu

SEQ ID NO: 2268482 - RNA, 22 nt, Human
gauuuucuauuguuacucuggu

SEQ ID NO: 2268483 - RNA, 16 nt, Human
gauuuucuuuaaaaga

SEQ ID NO: 2268484 - RNA, 12 nt, Human
gauuuuucucaa

SEQ ID NO: 2268485 - RNA, 13 nt, Human
gauuuuucucaaa

SEQ ID NO: 2268486 - RNA, 18 nt, Human
gauuuuucucaaaguuuu

SEQ ID NO: 2268487 - RNA, 23 nt, Human
gauuuuucuggagguugauaacu

SEQ ID NO: 2268488 - RNA, 18 nt, Human
gauuuuccuuuuuuauac

SEQ ID NO: 2268489 - RNA, 19 nt, Human
gauuuuccuuuuuuauaca

SEQ ID NO: 2268490 - RNA, 13 nt, Human
gauuuuccaaaug

SEQ ID NO: 2268491 - RNA, 15 nt, Human
gauuuuccugaaaac

SEQ ID NO: 2268492 - RNA, 11 nt, Human
gauuugugaac

SEQ ID NO: 2268493 - RNA, 14 nt, Human
gauuugucccaggu

SEQ ID NO: 2268494 - RNA, 14 nt, Human
gauuuguacugaaa

SEQ ID NO: 2268495 - RNA, 20 nt, Human
gauuugugaacucagccaag

SEQ ID NO: 2268496 - RNA, 19 nt, Human
gauuuuaugcuuuaaacau

SEQ ID NO: 2268497 - RNA, 14 nt, Human
gauuuuaugcuuua

SEQ ID NO: 2268498 - RNA, 15 nt, Human
gauuuuauuugacaa

SEQ ID NO: 2268499 - RNA, 19 nt, Human
gauuuucaaagcuuuuucc

SEQ ID NO: 2268500 - RNA, 18 nt, Human
gauuuucaaagcuuuuuc

SEQ ID NO: 2268501 - RNA, 19 nt, Human
gauucauauuuacuucuua

SEQ ID NO: 2268502 - RNA, 18 nt, Human
gauucauauuuacuucuu

SEQ ID NO: 2268503 - RNA, 17 nt, Human
gauucauauuuacuucu

SEQ ID NO: 2268504 - RNA, 18 nt, Human
gauucagauuguuaucua

SEQ ID NO: 2268505 - RNA, 19 nt, Human
gauucauaguaacuucuua

SEQ ID NO: 2268506 - RNA, 17 nt, Human
gauuccagguggcauca

SEQ ID NO: 2268507 - RNA, 18 nt, Human
gauucccaagcucugcuc

SEQ ID NO: 2268508 - RNA, 22 nt, Human
gauuccauuuggcagagcuucu

SEQ ID NO: 2268509 - RNA, 19 nt, Human
gauuccagagaguggcucc

SEQ ID NO: 2268510 - RNA, 20 nt, Human
gauuccagagaguggcuccu

SEQ ID NO: 2268511 - RNA, 22 nt, Human
gauuccagagaguggcuccucc

SEQ ID NO: 2268512 - RNA, 15 nt, Human
gauucagcucugcaa

SEQ ID NO: 2268513 - RNA, 13 nt, Human
gauucagcucugc

SEQ ID NO: 2268514 - RNA, 23 nt, Human
gauggggucucacaguguugccc

SEQ ID NO: 2268515 - RNA, 19 nt, Human
gauucagacagcugccugg

SEQ ID NO: 2268516 - RNA, 21 nt, Human
gaugggggagucugaagcaga

SEQ ID NO: 2268517 - RNA, 22 nt, Human
gaugggggaacucagauccagg

SEQ ID NO: 2268518 - RNA, 20 nt, Human
gaugggggaacucagaucca

SEQ ID NO: 2268519 - RNA, 19 nt, Human
gaugggggaacucagaucc

SEQ ID NO: 2268520 - RNA, 16 nt, Human
gaugggggaacucaga

SEQ ID NO: 2268521 - RNA, 17 nt, Human
gaugggggaaagcacag

SEQ ID NO: 2268522 - RNA, 21 nt, Human
gaugggggaaagcacaggugg

SEQ ID NO: 2268523 - RNA, 23 nt, Human
gauggggcugcaccggcuggccu

SEQ ID NO: 2268524 - RNA, 21 nt, Human
gauuccuuugaagaggaaaau

SEQ ID NO: 2268525 - RNA, 17 nt, Human
gauuccuuugaagagga

SEQ ID NO: 2268526 - RNA, 18 nt, Human
gauucgcccaaagccaga

SEQ ID NO: 2268527 - RNA, 13 nt, Human
gauucggcugucu

SEQ ID NO: 2268528 - RNA, 16 nt, Human
gauucgguaucccccc

SEQ ID NO: 2268529 - RNA, 17 nt, Human
gauucgguaucccccca

SEQ ID NO: 2268530 - RNA, 12 nt, Human
gauucuuuccug

SEQ ID NO: 2268531 - RNA, 21 nt, Human
gauucccaagcucugcuccuc

SEQ ID NO: 2268532 - RNA, 13 nt, Human
gauuccuuccugu

SEQ ID NO: 2268533 - RNA, 15 nt, Human
gauuccuuccuguuc

SEQ ID NO: 2268534 - RNA, 19 nt, Human
gauucccaagcucugcucc

SEQ ID NO: 2268535 - RNA, 20 nt, Human
gauucccaagcucugcuccu

SEQ ID NO: 2268536 - RNA, 20 nt, Human
gauugcaacaggcugggcuu

SEQ ID NO: 2268537 - RNA, 18 nt, Human
gauucuuuccugaggcug

SEQ ID NO: 2268538 - RNA, 16 nt, Human
gauucuuuccugaggc

SEQ ID NO: 2268539 - RNA, 17 nt, Human
gauucuuuccugaggcu

SEQ ID NO: 2268540 - RNA, 23 nt, Human
gauugcaccacugcacuccagcc

SEQ ID NO: 2268541 - RNA, 16 nt, Human
gauugcaccacugcac

SEQ ID NO: 2268542 - RNA, 21 nt, Human
gauugcaacaggcugggcuuc

SEQ ID NO: 2268543 - RNA, 14 nt, Human
gauugcaauuugca

SEQ ID NO: 2268544 - RNA, 21 nt, Human
gauugcaauuugcacaaguuu

SEQ ID NO: 2268545 - RNA, 20 nt, Human
gaugacaugcacucagcucu

SEQ ID NO: 2268546 - RNA, 14 nt, Human
gaugacagagcgag

SEQ ID NO: 2268547 - RNA, 14 nt, Human
gaugacauugcuaa

SEQ ID NO: 2268548 - RNA, 15 nt, Human
gaugacauugcuaag

SEQ ID NO: 2268549 - RNA, 16 nt, Human
gaugacauugcuaaga

SEQ ID NO: 2268550 - RNA, 18 nt, Human
gaugacauugcuaagaug

SEQ ID NO: 2268551 - RNA, 21 nt, Human
gaugacauugcuaagaugcuc

SEQ ID NO: 2268552 - RNA, 20 nt, Human
gaugacaacuggaauaguuu

SEQ ID NO: 2268553 - RNA, 16 nt, Human
gaugaaguuuuacauu

SEQ ID NO: 2268554 - RNA, 17 nt, Human
gaugacaacuucccagu

SEQ ID NO: 2268555 - RNA, 18 nt, Human
gaugacaugugacuccua

SEQ ID NO: 2268556 - RNA, 16 nt, Human
gaugcaccaccaagcc

SEQ ID NO: 2268557 - RNA, 13 nt, Human
gaugcaccagccc

SEQ ID NO: 2268558 - RNA, 22 nt, Human
gaugcacagaguuguuacauuu

SEQ ID NO: 2268559 - RNA, 21 nt, Human
gaugcacagaguuguuacauu

SEQ ID NO: 2268560 - RNA, 21 nt, Human
gaugcagcauuuuguauuugu

SEQ ID NO: 2268561 - RNA, 23 nt, Human
gaugcagagagccauuuugugaa

SEQ ID NO: 2268562 - RNA, 23 nt, Human
gaugcagagguaaaagugugagc

SEQ ID NO: 2268563 - RNA, 16 nt, Human
gaugcagcauuaugau

SEQ ID NO: 2268564 - RNA, 12 nt, Human
gaugcagccuca

SEQ ID NO: 2268565 - RNA, 19 nt, Human
gaugcagccucacaguccu

SEQ ID NO: 2268566 - RNA, 17 nt, Human
gaugcagcaaaauguga

SEQ ID NO: 2268567 - RNA, 14 nt, Human
gaugcagccucaca

SEQ ID NO: 2268568 - RNA, 17 nt, Human
gaugccacacagagugg

SEQ ID NO: 2268569 - RNA, 22 nt, Human
gaugccaaccucuggagcaaug

SEQ ID NO: 2268570 - RNA, 15 nt, Human
gaugccacaccaagc

SEQ ID NO: 2268571 - RNA, 16 nt, Human
gaugccacaccaagcu

SEQ ID NO: 2268572 - RNA, 19 nt, Human
gaugccacaccaagcugug

SEQ ID NO: 2268573 - RNA, 21 nt, Human
gaugccacaccaagcugugcc

SEQ ID NO: 2268574 - RNA, 22 nt, Human
gaugccacaccaagcugugcca

SEQ ID NO: 2268575 - RNA, 21 nt, Human
gaugccaagaaguuuaaggaa

SEQ ID NO: 2268576 - RNA, 15 nt, Human
gaugccaaccucugg

SEQ ID NO: 2268577 - RNA, 15 nt, Human
gaugccacacaagga

SEQ ID NO: 2268578 - RNA, 19 nt, Human
gaugccaauauuaaaucug

SEQ ID NO: 2268579 - RNA, 20 nt, Human
gaugccaaguuguuugagaa

SEQ ID NO: 2268580 - RNA, 13 nt, Human
gauggccugagaa

SEQ ID NO: 2268581 - RNA, 14 nt, Human
gauggccuggccag

SEQ ID NO: 2268582 - RNA, 20 nt, Human
gauggcaaagaaggagagca

SEQ ID NO: 2268583 - RNA, 14 nt, Human
gauggcgcuaggca

SEQ ID NO: 2268584 - RNA, 20 nt, Human
gauggccuggccagggccug

SEQ ID NO: 2268585 - RNA, 21 nt, Human
gauggccuggccagggccugg

SEQ ID NO: 2268586 - RNA, 14 nt, Human
gauggcgggugggg

SEQ ID NO: 2268587 - RNA, 15 nt, Human
gauggcggguggggg

SEQ ID NO: 2268588 - RNA, 16 nt, Human
gauggcgggugggggu

SEQ ID NO: 2268589 - RNA, 22 nt, Human
gauggauucucagauauuuaua

SEQ ID NO: 2268590 - RNA, 19 nt, Human
gauggauucucagauauuu

SEQ ID NO: 2268591 - RNA, 18 nt, Human
gauggauucucagauauu

SEQ ID NO: 2268592 - RNA, 16 nt, Human
gauggauucucagaua

SEQ ID NO: 2268593 - RNA, 19 nt, Human
gauggauuugccugugcca

SEQ ID NO: 2268594 - RNA, 14 nt, Human
gauggauuugccug

SEQ ID NO: 2268595 - RNA, 17 nt, Human
gauggauucuccacuca

SEQ ID NO: 2268596 - RNA, 15 nt, Human
gauggauuugaagca

SEQ ID NO: 2268597 - RNA, 22 nt, Human
gauggauuuccagccaaagccu

SEQ ID NO: 2268598 - RNA, 14 nt, Human
gauggauucucaga

SEQ ID NO: 2268599 - RNA, 22 nt, Human
gauggauuccaaccccaacucc

SEQ ID NO: 2268600 - RNA, 12 nt, Human
gauggauuccaa

SEQ ID NO: 2268601 - RNA, 21 nt, Human
gauggauuccaaccccaacuc

SEQ ID NO: 2268602 - RNA, 23 nt, Human
gauggaugccaauauuaaaucug

SEQ ID NO: 2268603 - RNA, 20 nt, Human
gaugccugguggcagcugcg

SEQ ID NO: 2268604 - RNA, 18 nt, Human
gaugccugguggcagcug

SEQ ID NO: 2268605 - RNA, 19 nt, Human
gaugccugguggcagcugc

SEQ ID NO: 2268606 - RNA, 21 nt, Human
gauggcuaaaaccaucauagu

SEQ ID NO: 2268607 - RNA, 19 nt, Human
gauggcgugggcugcguga

SEQ ID NO: 2268608 - RNA, 13 nt, Human
gauggcuccucuc

SEQ ID NO: 2268609 - RNA, 12 nt, Human
gauggcuccucu

SEQ ID NO: 2268610 - RNA, 21 nt, Human
gauggcuaguaucaaaagaaa

SEQ ID NO: 2268611 - RNA, 13 nt, Human
gauggcugugccu

SEQ ID NO: 2268612 - RNA, 17 nt, Human
gauggcugugccucugc

SEQ ID NO: 2268613 - RNA, 18 nt, Human
gauggcugugccucugcc

SEQ ID NO: 2268614 - RNA, 19 nt, Human
gauggcugugccucugccu

SEQ ID NO: 2268615 - RNA, 20 nt, Human
gauggcugugccucugccug

SEQ ID NO: 2268616 - RNA, 14 nt, Human
gauggcuccucuca

SEQ ID NO: 2268617 - RNA, 13 nt, Human
gauggggcccugc

SEQ ID NO: 2268618 - RNA, 14 nt, Human
gauggggcccugcc

SEQ ID NO: 2268619 - RNA, 22 nt, Human
gauggggcccugccuccuuugu

SEQ ID NO: 2268620 - RNA, 19 nt, Human
gaugaagcaaacacauuaa

SEQ ID NO: 2268621 - RNA, 16 nt, Human
gaugaagcaaacacau

SEQ ID NO: 2268622 - RNA, 15 nt, Human
gaugaagcaaacaca

SEQ ID NO: 2268623 - RNA, 21 nt, Human
gaugaagagugagagggcaug

SEQ ID NO: 2268624 - RNA, 17 nt, Human
gaugaacuuauucugua

SEQ ID NO: 2268625 - RNA, 19 nt, Human
gaugaacuuauucuguaga

SEQ ID NO: 2268626 - RNA, 13 nt, Human
gaugaacuuucuc

SEQ ID NO: 2268627 - RNA, 14 nt, Human
gaugaagagugaga

SEQ ID NO: 2268628 - RNA, 20 nt, Human
gaugaagaaaagugggccag

SEQ ID NO: 2268629 - RNA, 19 nt, Human
gaugaaagagaaggugggu

SEQ ID NO: 2268630 - RNA, 14 nt, Human
gaugaaagaggagg

SEQ ID NO: 2268631 - RNA, 18 nt, Human
gaugaaauaacuccuucu

SEQ ID NO: 2268632 - RNA, 19 nt, Human
gaugaaaucuuacagcugg

SEQ ID NO: 2268633 - RNA, 20 nt, Human
gaugaaaucuuacagcuggg

SEQ ID NO: 2268634 - RNA, 18 nt, Human
gaugaacucuuagaaaug

SEQ ID NO: 2268635 - RNA, 22 nt, Human
gaugaacucuuagaaaugaagg

SEQ ID NO: 2268636 - RNA, 17 nt, Human
gaugaaaauauuuaaag

SEQ ID NO: 2268637 - RNA, 14 nt, Human
gaugaaaauauuug

SEQ ID NO: 2268638 - RNA, 14 nt, Human
gaugaaaauauuua

SEQ ID NO: 2268639 - RNA, 15 nt, Human
gaucuuuguggccaa

SEQ ID NO: 2268640 - RNA, 16 nt, Human
gaugaaaauauuuaaa

SEQ ID NO: 2268641 - RNA, 15 nt, Human
gaugaaaauauuuaa

SEQ ID NO: 2268642 - RNA, 18 nt, Human
gaucugugccccaugccu

SEQ ID NO: 2268643 - RNA, 14 nt, Human
gaucugugccccau

SEQ ID NO: 2268644 - RNA, 19 nt, Human
gaucugugcccagagaugg

SEQ ID NO: 2268645 - RNA, 18 nt, Human
gaucugugcuuuccagcu

SEQ ID NO: 2268646 - RNA, 19 nt, Human
gaucugugcuuuccagcuc

SEQ ID NO: 2268647 - RNA, 17 nt, Human
gaucuguuuugaaggca

SEQ ID NO: 2268648 - RNA, 13 nt, Human
gaucuguuuugaa

SEQ ID NO: 2268649 - RNA, 20 nt, Human
gaucugugcuuuccagcuca

SEQ ID NO: 2268650 - RNA, 23 nt, Human
gaucugugcuuuccagcucaccc

SEQ ID NO: 2268651 - RNA, 14 nt, Human
gaucuguugcaaac

SEQ ID NO: 2268652 - RNA, 21 nt, Human
gaucuguugcaaacucagccu

SEQ ID NO: 2268653 - RNA, 13 nt, Human
gaucugugcccca

SEQ ID NO: 2268654 - RNA, 16 nt, Human
gaucugugcccagaga

SEQ ID NO: 2268655 - RNA, 21 nt, Human
gaucugugaggggcucucuca

SEQ ID NO: 2268656 - RNA, 13 nt, Human
gaucucagguucu

SEQ ID NO: 2268657 - RNA, 17 nt, Human
gaucucaggggcuguuu

SEQ ID NO: 2268658 - RNA, 18 nt, Human
gaucucaggggcuguuug

SEQ ID NO: 2268659 - RNA, 19 nt, Human
gaucucaggggcuguuuga

SEQ ID NO: 2268660 - RNA, 20 nt, Human
gaucuguuguguacguggag

SEQ ID NO: 2268661 - RNA, 18 nt, Human
gaucuguuuugaaggcaa

SEQ ID NO: 2268662 - RNA, 13 nt, Human
gaucuuuggacag

SEQ ID NO: 2268663 - RNA, 16 nt, Human
gaucuuuguggccaag

SEQ ID NO: 2268664 - RNA, 14 nt, Human
gaucuuuguggcca

SEQ ID NO: 2268665 - RNA, 11 nt, Human
gaucuuugugg

SEQ ID NO: 2268666 - RNA, 21 nt, Human
gaucuuuggacagaagcagcu

SEQ ID NO: 2268667 - RNA, 18 nt, Human
gaucuuugcagacaggca

SEQ ID NO: 2268668 - RNA, 17 nt, Human
gaucuuugcagacaggc

SEQ ID NO: 2268669 - RNA, 21 nt, Human
gaucgcggcggagcuggcccc

SEQ ID NO: 2268670 - RNA, 23 nt, Human
gaucgcgccacuacacuccagcc

SEQ ID NO: 2268671 - RNA, 17 nt, Human
gaucggagccuccucuc

SEQ ID NO: 2268672 - RNA, 22 nt, Human
gaucggaggcuugucagagcug

SEQ ID NO: 2268673 - RNA, 20 nt, Human
gaucggagccuccucucuca

SEQ ID NO: 2268674 - RNA, 17 nt, Human
gauccugcggguggggc

SEQ ID NO: 2268675 - RNA, 18 nt, Human
gauccugcggguggggcu

SEQ ID NO: 2268676 - RNA, 23 nt, Human
gaucgugccguuacucuccaacc

SEQ ID NO: 2268677 - RNA, 22 nt, Human
gaucgugacgcugaauaaaugu

SEQ ID NO: 2268678 - RNA, 19 nt, Human
gaucgugacgcugaauaaa

SEQ ID NO: 2268679 - RNA, 20 nt, Human
gaucgugacgcugaauaaau

SEQ ID NO: 2268680 - RNA, 18 nt, Human
gaucgugcuaaauuuuca

SEQ ID NO: 2268681 - RNA, 16 nt, Human
gaucgugacgcugaau

SEQ ID NO: 2268682 - RNA, 18 nt, Human
gaucgucugacugguguu

SEQ ID NO: 2268683 - RNA, 16 nt, Human
gaucuaucaauaguca

SEQ ID NO: 2268684 - RNA, 15 nt, Human
gaucgugcuaaauuu

SEQ ID NO: 2268685 - RNA, 14 nt, Human
gaucucaggggcug

SEQ ID NO: 2268686 - RNA, 14 nt, Human
gauccccagcuguu

SEQ ID NO: 2268687 - RNA, 13 nt, Human
gauccccucagga

SEQ ID NO: 2268688 - RNA, 14 nt, Human
gauccccucaggac

SEQ ID NO: 2268689 - RNA, 21 nt, Human
gaucccgccucuucuucuuca

SEQ ID NO: 2268690 - RNA, 15 nt, Human
gaucccuagcuguga

SEQ ID NO: 2268691 - RNA, 17 nt, Human
gauccccucaggacugc

SEQ ID NO: 2268692 - RNA, 15 nt, Human
gaucccucauccuca

SEQ ID NO: 2268693 - RNA, 16 nt, Human
gaucccucauccucau

SEQ ID NO: 2268694 - RNA, 21 nt, Human
gaucccuagcugugaccucuc

SEQ ID NO: 2268695 - RNA, 19 nt, Human
gaucccuagcugugaccuc

SEQ ID NO: 2268696 - RNA, 13 nt, Human
gauccuggaaauc

SEQ ID NO: 2268697 - RNA, 21 nt, Human
gauccugagccagauuucacu

SEQ ID NO: 2268698 - RNA, 22 nt, Human
gauccugagccagauuucacuc

SEQ ID NO: 2268699 - RNA, 16 nt, Human
gauaguauugugcaua

SEQ ID NO: 2268700 - RNA, 18 nt, Human
gauaguagcauacauuua

SEQ ID NO: 2268701 - RNA, 14 nt, Human
gauagucuuucagu

SEQ ID NO: 2268702 - RNA, 14 nt, Human
gauagcacuuucua

SEQ ID NO: 2268703 - RNA, 14 nt, Human
gauaguagcuuccu

SEQ ID NO: 2268704 - RNA, 15 nt, Human
gauaguaacaaugaa

SEQ ID NO: 2268705 - RNA, 23 nt, Human
gauagucuuuugcuuuuggcaaa

SEQ ID NO: 2268706 - RNA, 22 nt, Human
gauagucuuucaguuaaggaga

SEQ ID NO: 2268707 - RNA, 18 nt, Human
gaucaaggagaggaggca

SEQ ID NO: 2268708 - RNA, 23 nt, Human
gauagugggcaccccacugcaau

SEQ ID NO: 2268709 - RNA, 16 nt, Human
gaucacgccacugcac

SEQ ID NO: 2268710 - RNA, 18 nt, Human
gaucacgccacugcacua

SEQ ID NO: 2268711 - RNA, 19 nt, Human
gaucaauaaaaugugauuu

SEQ ID NO: 2268712 - RNA, 12 nt, Human
gaucaaugacag

SEQ ID NO: 2268713 - RNA, 13 nt, Human
gaucaaugaaaug

SEQ ID NO: 2268714 - RNA, 14 nt, Human
gaucaaugacagag

SEQ ID NO: 2268715 - RNA, 18 nt, Human
gaucaaugacagagccuu

SEQ ID NO: 2268716 - RNA, 22 nt, Human
gaucaauggcgcagugccucug

SEQ ID NO: 2268717 - RNA, 23 nt, Human
gaucaauggcgcagugccucugg

SEQ ID NO: 2268718 - RNA, 21 nt, Human
gaucaauaaaaugugauuuuu

SEQ ID NO: 2268719 - RNA, 18 nt, Human
gaucaauaaaaugugauu

SEQ ID NO: 2268720 - RNA, 14 nt, Human
gaucaauaaaaugu

SEQ ID NO: 2268721 - RNA, 24 nt, Human
gaucacgccacugcacuccagccu

SEQ ID NO: 2268722 - RNA, 23 nt, Human
gaucacgccacugcacuccagcc

SEQ ID NO: 2268723 - RNA, 16 nt, Human
gaucaauuaaauguag

SEQ ID NO: 2268724 - RNA, 15 nt, Human
gaucaauuaaaugua

SEQ ID NO: 2268725 - RNA, 12 nt, Human
gaucacggcuca

SEQ ID NO: 2268726 - RNA, 23 nt, Human
gaucagauugcaugugacucuga

SEQ ID NO: 2268727 - RNA, 19 nt, Human
gaucagcaaaccggggccu

SEQ ID NO: 2268728 - RNA, 15 nt, Human
gaucagauugcaugu

SEQ ID NO: 2268729 - RNA, 13 nt, Human
gaucacgcucccc

SEQ ID NO: 2268730 - RNA, 14 nt, Human
gaucacgcuccccg

SEQ ID NO: 2268731 - RNA, 22 nt, Human
gaucacgcuccccgccuguucc

SEQ ID NO: 2268732 - RNA, 15 nt, Human
gaucagccugggcaa

SEQ ID NO: 2268733 - RNA, 12 nt, Human
gaucagccuggg

SEQ ID NO: 2268734 - RNA, 14 nt, Human
gaucagguggggag

SEQ ID NO: 2268735 - RNA, 13 nt, Human
gaucaggugggga

SEQ ID NO: 2268736 - RNA, 11 nt, Human
gaucaggucau

SEQ ID NO: 2268737 - RNA, 22 nt, Human
gaucagucugauucccaagcuc

SEQ ID NO: 2268738 - RNA, 15 nt, Human
gaucauuuucccccc

SEQ ID NO: 2268739 - RNA, 14 nt, Human
gaucauuuuccccc

SEQ ID NO: 2268740 - RNA, 18 nt, Human
gaucauuuguuggaauga

SEQ ID NO: 2268741 - RNA, 20 nt, Human
gaucauugugaaauuauuca

SEQ ID NO: 2268742 - RNA, 14 nt, Human
gaucauugugaaau

SEQ ID NO: 2268743 - RNA, 14 nt, Human
gaucauuaucagcc

SEQ ID NO: 2268744 - RNA, 23 nt, Human
gaucauuuuccccccacucuccc

SEQ ID NO: 2268745 - RNA, 21 nt, Human
gaucauuugcccuuaaggaca

SEQ ID NO: 2268746 - RNA, 14 nt, Human
gauccccaagugug

SEQ ID NO: 2268747 - RNA, 18 nt, Human
gauccccaagugugaaca

SEQ ID NO: 2268748 - RNA, 20 nt, Human
gauccccaagugugaacaaa

SEQ ID NO: 2268749 - RNA, 19 nt, Human
gaucauuuuccccccacuc

SEQ ID NO: 2268750 - RNA, 18 nt, Human
gaucauuuuccccccacu

SEQ ID NO: 2268751 - RNA, 13 nt, Human
gaucauuuucuua

SEQ ID NO: 2268752 - RNA, 20 nt, Human
gauccccaagccuggcaagg

SEQ ID NO: 2268753 - RNA, 18 nt, Human
gaucaguuauaaguagca

SEQ ID NO: 2268754 - RNA, 20 nt, Human
gaucaguguaccauuugccu

SEQ ID NO: 2268755 - RNA, 23 nt, Human
gaucaguccuuugaucaguauaa

SEQ ID NO: 2268756 - RNA, 23 nt, Human
gaucagugggccuccaaggaggg

SEQ ID NO: 2268757 - RNA, 20 nt, Human
gaucaguauaauuuuuuaaa

SEQ ID NO: 2268758 - RNA, 17 nt, Human
gaucauccacugugcca

SEQ ID NO: 2268759 - RNA, 19 nt, Human
gaucauccacugugccaug

SEQ ID NO: 2268760 - RNA, 16 nt, Human
gaucauccacugugcc

SEQ ID NO: 2268761 - RNA, 21 nt, Human
gaucauccuuuccagcaugag

SEQ ID NO: 2268762 - RNA, 21 nt, Human
gaucauccacugugccaugug

SEQ ID NO: 2268763 - RNA, 14 nt, Human
gaucaugguguaau

SEQ ID NO: 2268764 - RNA, 14 nt, Human
gaucauggcaucca

SEQ ID NO: 2268765 - RNA, 15 nt, Human
gaucaugguguaaua

SEQ ID NO: 2268766 - RNA, 18 nt, Human
gaucaugguguaauaaga

SEQ ID NO: 2268767 - RNA, 20 nt, Human
gaucaugguguaauaagaca

SEQ ID NO: 2268768 - RNA, 21 nt, Human
gaucaugguguaauaagacau

SEQ ID NO: 2268769 - RNA, 23 nt, Human
gaucaugguguaauaagacauaa

SEQ ID NO: 2268770 - RNA, 15 nt, Human
gaucaugcauuguug

SEQ ID NO: 2268771 - RNA, 14 nt, Human
gaucaugcauuguu

SEQ ID NO: 2268772 - RNA, 13 nt, Human
gaucaugcauugu

SEQ ID NO: 2268773 - RNA, 12 nt, Human
gaucaugcauug

SEQ ID NO: 2268774 - RNA, 22 nt, Human
gauaagaguagaaacugcaggg

SEQ ID NO: 2268775 - RNA, 23 nt, Human
gauaagguaccuuucacauagag

SEQ ID NO: 2268776 - RNA, 22 nt, Human
gauaaauauuauauuauauaua

SEQ ID NO: 2268777 - RNA, 18 nt, Human
gauaaauaaucggcccac

SEQ ID NO: 2268778 - RNA, 16 nt, Human
gauaaaguuucucaga

SEQ ID NO: 2268779 - RNA, 14 nt, Human
gauaaaguuucuca

SEQ ID NO: 2268780 - RNA, 15 nt, Human
gauaaaguuucucag

SEQ ID NO: 2268781 - RNA, 15 nt, Human
gauaaauauuauauu

SEQ ID NO: 2268782 - RNA, 16 nt, Human
gauaaauaacuuuuuu

SEQ ID NO: 2268783 - RNA, 21 nt, Human
gauaaauaacuuuuuuuuaag

SEQ ID NO: 2268784 - RNA, 22 nt, Human
gauaaauaguuuaugauuccac

SEQ ID NO: 2268785 - RNA, 22 nt, Human
gauaaagaugcaaggaccagga

SEQ ID NO: 2268786 - RNA, 13 nt, Human
gauaaagaugauc

SEQ ID NO: 2268787 - RNA, 20 nt, Human
gaggaagcgugaaggccgag

SEQ ID NO: 2268788 - RNA, 19 nt, Human
gaggaagcccuaagacguc

SEQ ID NO: 2268789 - RNA, 22 nt, Human
gaggaagcagaauaaagcaauu

SEQ ID NO: 2268790 - RNA, 22 nt, Human
gaggaagccagguccacggucu

SEQ ID NO: 2268791 - RNA, 16 nt, Human
gauaaagauuucuuga

SEQ ID NO: 2268792 - RNA, 13 nt, Human
gauaaagauuucu

SEQ ID NO: 2268793 - RNA, 19 nt, Human
gauaaaguugguaaaccuu

SEQ ID NO: 2268794 - RNA, 17 nt, Human
gauaaagccacugaaaa

SEQ ID NO: 2268795 - RNA, 19 nt, Human
gauaaagccacugaaaauu

SEQ ID NO: 2268796 - RNA, 15 nt, Human
gauaaaguaguaaaa

SEQ ID NO: 2268797 - RNA, 17 nt, Human
gauaaaguaguaaaaau

SEQ ID NO: 2268798 - RNA, 13 nt, Human
gaggaaggaaacc

SEQ ID NO: 2268799 - RNA, 19 nt, Human
gaggaaggaaacccagcuc

SEQ ID NO: 2268800 - RNA, 20 nt, Human
gaggaaggaaacccagcucu

SEQ ID NO: 2268801 - RNA, 21 nt, Human
gaggaaggaaacccagcucug

SEQ ID NO: 2268802 - RNA, 19 nt, Human
gauagcacugagcaaagca

SEQ ID NO: 2268803 - RNA, 12 nt, Human
gauagcacuuuc

SEQ ID NO: 2268804 - RNA, 20 nt, Human
gauagcacuuucuacaaugu

SEQ ID NO: 2268805 - RNA, 20 nt, Human
gauagcacagacccugcccu

SEQ ID NO: 2268806 - RNA, 13 nt, Human
gauagcagggcau

SEQ ID NO: 2268807 - RNA, 21 nt, Human
gauagcacagacccugcccug

SEQ ID NO: 2268808 - RNA, 22 nt, Human
gauagcacagacccugcccugu

SEQ ID NO: 2268809 - RNA, 18 nt, Human
gauacaggaaaagcugcu

SEQ ID NO: 2268810 - RNA, 22 nt, Human
gauacacugaaguuaacagaga

SEQ ID NO: 2268811 - RNA, 20 nt, Human
gauacacugaaguuaacaga

SEQ ID NO: 2268812 - RNA, 19 nt, Human
gauacaggaaaagcugcug

SEQ ID NO: 2268813 - RNA, 13 nt, Human
gauagaugugugg

SEQ ID NO: 2268814 - RNA, 21 nt, Human
gauagaugcuggcccagggcc

SEQ ID NO: 2268815 - RNA, 20 nt, Human
gauagaugcuggcccagggc

SEQ ID NO: 2268816 - RNA, 18 nt, Human
gauagaugcuggcccagg

SEQ ID NO: 2268817 - RNA, 17 nt, Human
gauagaugcuggcccag

SEQ ID NO: 2268818 - RNA, 16 nt, Human
gauagaugcuggccca

SEQ ID NO: 2268819 - RNA, 12 nt, Human
gauagaugcugg

SEQ ID NO: 2268820 - RNA, 19 nt, Human
gauacaccgggccuggaga

SEQ ID NO: 2268821 - RNA, 16 nt, Human
gauaaguguauuuuuc

SEQ ID NO: 2268822 - RNA, 21 nt, Human
gauacacccaaaguaucagga

SEQ ID NO: 2268823 - RNA, 23 nt, Human
gauagauaggucagugcaaauac

SEQ ID NO: 2268824 - RNA, 22 nt, Human
gauaauacaccacuacauucug

SEQ ID NO: 2268825 - RNA, 21 nt, Human
gauaauacaccacuacauucu

SEQ ID NO: 2268826 - RNA, 18 nt, Human
gauaauacaccacuacau

SEQ ID NO: 2268827 - RNA, 14 nt, Human
gauaauacaccacu

SEQ ID NO: 2268828 - RNA, 13 nt, Human
gcagguccccaga

SEQ ID NO: 2268829 - RNA, 17 nt, Human
gcaggugaccuucuggg

SEQ ID NO: 2268830 - RNA, 19 nt, Human
gcaggucuugaacuccugg

SEQ ID NO: 2268831 - RNA, 20 nt, Human
gcaggucuugaacuccuggc

SEQ ID NO: 2268832 - RNA, 19 nt, Human
gcagguagccagggggacu

SEQ ID NO: 2268833 - RNA, 21 nt, Human
gcagguagccagggggacuag

SEQ ID NO: 2268834 - RNA, 21 nt, Human
gcaggucaacagcuaugcugg

SEQ ID NO: 2268835 - RNA, 22 nt, Human
gcagguccaggguuugaguuca

SEQ ID NO: 2268836 - RNA, 14 nt, Human
gcagguaccacuga

SEQ ID NO: 2268837 - RNA, 15 nt, Human
gcagguaaacaguuc

SEQ ID NO: 2268838 - RNA, 16 nt, Human
gcagguaaacuccugu

SEQ ID NO: 2268839 - RNA, 14 nt, Human
gcaggguguuggga

SEQ ID NO: 2268840 - RNA, 15 nt, Human
gcagggugggaugga

SEQ ID NO: 2268841 - RNA, 17 nt, Human
gcaggguggugcuggga

SEQ ID NO: 2268842 - RNA, 18 nt, Human
gcaggguggugcugggac

SEQ ID NO: 2268843 - RNA, 19 nt, Human
gcaggguggugcugggacu

SEQ ID NO: 2268844 - RNA, 22 nt, Human
gcagggugcaguaucaugcccu

SEQ ID NO: 2268845 - RNA, 15 nt, Human
gcaggguggugcugg

SEQ ID NO: 2268846 - RNA, 15 nt, Human
gcaguggacaccagg

SEQ ID NO: 2268847 - RNA, 17 nt, Human
gcagugccucuggucug

SEQ ID NO: 2268848 - RNA, 15 nt, Human
gcagugccuuccaua

SEQ ID NO: 2268849 - RNA, 15 nt, Human
gcagugcaggcacag

SEQ ID NO: 2268850 - RNA, 18 nt, Human
gcagugcaggcacaguau

SEQ ID NO: 2268851 - RNA, 23 nt, Human
gcagugccccuagcuuagagccu

SEQ ID NO: 2268852 - RNA, 13 nt, Human
gcagugccucugg

SEQ ID NO: 2268853 - RNA, 16 nt, Human
gcagugcaugcugucc

SEQ ID NO: 2268854 - RNA, 20 nt, Human
gcagugcaagagacucuggc

SEQ ID NO: 2268855 - RNA, 22 nt, Human
gcagugcaagagacucuggccu

SEQ ID NO: 2268856 - RNA, 23 nt, Human
gcagugcaagagacucuggccuc

SEQ ID NO: 2268857 - RNA, 19 nt, Human
gcaggugaccuucugggaa

SEQ ID NO: 2268858 - RNA, 17 nt, Human
gcaggugagcaaccagu

SEQ ID NO: 2268859 - RNA, 15 nt, Human
gcagugcaugcuguc

SEQ ID NO: 2268860 - RNA, 21 nt, Human
gcagggccccaggcauugcca

SEQ ID NO: 2268861 - RNA, 17 nt, Human
gcagggccuagcugcua

SEQ ID NO: 2268862 - RNA, 20 nt, Human
gcagggccuagcugcuacaa

SEQ ID NO: 2268863 - RNA, 19 nt, Human
gcagggcucagcggggaca

SEQ ID NO: 2268864 - RNA, 21 nt, Human
gcagggcucagcggggacagc

SEQ ID NO: 2268865 - RNA, 19 nt, Human
gcagggccaacccuucucc

SEQ ID NO: 2268866 - RNA, 22 nt, Human
gcagggcaucuccugugcaugg

SEQ ID NO: 2268867 - RNA, 14 nt, Human
gcagggccaggacu

SEQ ID NO: 2268868 - RNA, 15 nt, Human
gcagggccaggacug

SEQ ID NO: 2268869 - RNA, 19 nt, Human
gcagggccaggacugagcc

SEQ ID NO: 2268870 - RNA, 21 nt, Human
gcagggcaucuccugugcaug

SEQ ID NO: 2268871 - RNA, 19 nt, Human
gcagggcaucuccugugca

SEQ ID NO: 2268872 - RNA, 15 nt, Human
gcagggcaucuccug

SEQ ID NO: 2268873 - RNA, 14 nt, Human
gcagggcaucuccu

SEQ ID NO: 2268874 - RNA, 13 nt, Human
gcagggcagucau

SEQ ID NO: 2268875 - RNA, 15 nt, Human
gcaggcagccaggcc

SEQ ID NO: 2268876 - RNA, 16 nt, Human
gcaggcagccaggcca

SEQ ID NO: 2268877 - RNA, 13 nt, Human
gcaggggccugga

SEQ ID NO: 2268878 - RNA, 14 nt, Human
gcaggggccuggag

SEQ ID NO: 2268879 - RNA, 21 nt, Human
gcagggccuagcugcuacaaa

SEQ ID NO: 2268880 - RNA, 24 nt, Human
gcaggggauggcguggucaagcac

SEQ ID NO: 2268881 - RNA, 14 nt, Human
gcagggcucagcgg

SEQ ID NO: 2268882 - RNA, 22 nt, Human
gcagggcucagcggggacagcu

SEQ ID NO: 2268883 - RNA, 17 nt, Human
gcagggucucacucugu

SEQ ID NO: 2268884 - RNA, 16 nt, Human
gcaggggccuggagau

SEQ ID NO: 2268885 - RNA, 20 nt, Human
gcaggggccuggagauccuc

SEQ ID NO: 2268886 - RNA, 19 nt, Human
gcaggggcguggagggcgu

SEQ ID NO: 2268887 - RNA, 17 nt, Human
gcaggggcuacaagagg

SEQ ID NO: 2268888 - RNA, 19 nt, Human
gcaggggcuacaagaggga

SEQ ID NO: 2268889 - RNA, 12 nt, Human
gcaggggcucug

SEQ ID NO: 2268890 - RNA, 18 nt, Human
gcagggucucacucuguc

SEQ ID NO: 2268891 - RNA, 14 nt, Human
gcagggucugggca

SEQ ID NO: 2268892 - RNA, 17 nt, Human
gcagggucugggcagga

SEQ ID NO: 2268893 - RNA, 20 nt, Human
gcagggucugggcaggacuc

SEQ ID NO: 2268894 - RNA, 15 nt, Human
gcagggucuuuucau

SEQ ID NO: 2268895 - RNA, 16 nt, Human
gcagggucuuuucauc

SEQ ID NO: 2268896 - RNA, 21 nt, Human
gcagggucuuuucaucuggga

SEQ ID NO: 2268897 - RNA, 23 nt, Human
gcagggucuuuucaucugggaaa

SEQ ID NO: 2268898 - RNA, 14 nt, Human
gcaucaaaagacaa

SEQ ID NO: 2268899 - RNA, 14 nt, Human
gcaucaccucaggc

SEQ ID NO: 2268900 - RNA, 17 nt, Human
gcaucaccucaggccag

SEQ ID NO: 2268901 - RNA, 15 nt, Human
gcaucaccucaggcc

SEQ ID NO: 2268902 - RNA, 13 nt, Human
gcaucaaaagaca

SEQ ID NO: 2268903 - RNA, 14 nt, Human
gcauauuuguauag

SEQ ID NO: 2268904 - RNA, 18 nt, Human
gcauauuuguauaguugc

SEQ ID NO: 2268905 - RNA, 23 nt, Human
gcauauuuauagcaauccauguu

SEQ ID NO: 2268906 - RNA, 19 nt, Human
gcauauuuauaaaaauaaa

SEQ ID NO: 2268907 - RNA, 12 nt, Human
gcauaucugccu

SEQ ID NO: 2268908 - RNA, 14 nt, Human
gcauaucugccuuu

SEQ ID NO: 2268909 - RNA, 15 nt, Human
gcauaucugccuuua

SEQ ID NO: 2268910 - RNA, 16 nt, Human
gcauaucugccuuuau

SEQ ID NO: 2268911 - RNA, 18 nt, Human
gcauaucugccuuuauug

SEQ ID NO: 2268912 - RNA, 21 nt, Human
gcauaucugccuuuauugugu

SEQ ID NO: 2268913 - RNA, 22 nt, Human
gcauaucugccuuuauuguguu

SEQ ID NO: 2268914 - RNA, 14 nt, Human
gcauagaaggcagg

SEQ ID NO: 2268915 - RNA, 13 nt, Human
gcauacuuuuuaa

SEQ ID NO: 2268916 - RNA, 15 nt, Human
gcauagaaggcaggu

SEQ ID NO: 2268917 - RNA, 16 nt, Human
gcauagaggcuucucc

SEQ ID NO: 2268918 - RNA, 22 nt, Human
gcauagaggcuucuccgccagc

SEQ ID NO: 2268919 - RNA, 13 nt, Human
gcaguucaccugc

SEQ ID NO: 2268920 - RNA, 22 nt, Human
gcauacuucaaaaguauuuucc

SEQ ID NO: 2268921 - RNA, 15 nt, Human
gcaguugaaaagacu

SEQ ID NO: 2268922 - RNA, 17 nt, Human
gcauagguuuaauaauu

SEQ ID NO: 2268923 - RNA, 18 nt, Human
gcauaguucccauguuaa

SEQ ID NO: 2268924 - RNA, 23 nt, Human
gcauaguauuccauugugugagu

SEQ ID NO: 2268925 - RNA, 22 nt, Human
gcauaguauuccauugugugag

SEQ ID NO: 2268926 - RNA, 21 nt, Human
gcauaguauuccauuguguga

SEQ ID NO: 2268927 - RNA, 20 nt, Human
gcauaguauuccauugugug

SEQ ID NO: 2268928 - RNA, 20 nt, Human
gcauaguaccaaucauuuua

SEQ ID NO: 2268929 - RNA, 16 nt, Human
gcauagaugcagguga

SEQ ID NO: 2268930 - RNA, 21 nt, Human
gcauaggugaucucauuuaau

SEQ ID NO: 2268931 - RNA, 22 nt, Human
gcauagagguaccagcaauaug

SEQ ID NO: 2268932 - RNA, 19 nt, Human
gcauagaugcaggugagcc

SEQ ID NO: 2268933 - RNA, 15 nt, Human
gcauauccugagcca

SEQ ID NO: 2268934 - RNA, 18 nt, Human
gcauauccaccaccuccc

SEQ ID NO: 2268935 - RNA, 16 nt, Human
gcauauccugagccau

SEQ ID NO: 2268936 - RNA, 21 nt, Human
gcauaucagucucugagggcu

SEQ ID NO: 2268937 - RNA, 22 nt, Human
gcauaucagucucugagggcuu

SEQ ID NO: 2268938 - RNA, 14 nt, Human
gcauaucacuugau

SEQ ID NO: 2268939 - RNA, 16 nt, Human
gcagugucuuccauaa

SEQ ID NO: 2268940 - RNA, 15 nt, Human
gcagugucuuccaua

SEQ ID NO: 2268941 - RNA, 14 nt, Human
gcagugucuuccau

SEQ ID NO: 2268942 - RNA, 11 nt, Human
gcagugucuuc

SEQ ID NO: 2268943 - RNA, 12 nt, Human
gcagugugaaaa

SEQ ID NO: 2268944 - RNA, 15 nt, Human
gcagugugaggccag

SEQ ID NO: 2268945 - RNA, 18 nt, Human
gcagugguguggagaagc

SEQ ID NO: 2268946 - RNA, 24 nt, Human
gcagugguuuuggcaaacgcuaaa

SEQ ID NO: 2268947 - RNA, 18 nt, Human
gcagugucaucagaagau

SEQ ID NO: 2268948 - RNA, 18 nt, Human
gcaguguagcccacacuu

SEQ ID NO: 2268949 - RNA, 23 nt, Human
gcaguggugguuuucuguucuuu

SEQ ID NO: 2268950 - RNA, 22 nt, Human
gcaguggugguuuucuguucuu

SEQ ID NO: 2268951 - RNA, 13 nt, Human
gcagugggagcug

SEQ ID NO: 2268952 - RNA, 12 nt, Human
gcagugggagcu

SEQ ID NO: 2268953 - RNA, 14 nt, Human
gcagugggagcugc

SEQ ID NO: 2268954 - RNA, 15 nt, Human
gcagugggagcugcc

SEQ ID NO: 2268955 - RNA, 17 nt, Human
gcaguuauuaacacuaa

SEQ ID NO: 2268956 - RNA, 20 nt, Human
gcagugucuuccauaaugua

SEQ ID NO: 2268957 - RNA, 15 nt, Human
gcaguucugaagaag

SEQ ID NO: 2268958 - RNA, 19 nt, Human
gcaguucugggugcucccu

SEQ ID NO: 2268959 - RNA, 17 nt, Human
gcaguucugaagaagau

SEQ ID NO: 2268960 - RNA, 13 nt, Human
gcauagaaguaaa

SEQ ID NO: 2268961 - RNA, 16 nt, Human
gcaucaaaagacaauu

SEQ ID NO: 2268962 - RNA, 22 nt, Human
gcaucuugguccaggaaaugug

SEQ ID NO: 2268963 - RNA, 22 nt, Human
gcaucuuggggggguggccgcu

SEQ ID NO: 2268964 - RNA, 18 nt, Human
gcaucuuugccuugggcu

SEQ ID NO: 2268965 - RNA, 15 nt, Human
gcaucuuugccuugg

SEQ ID NO: 2268966 - RNA, 13 nt, Human
gcaucuuugccuu

SEQ ID NO: 2268967 - RNA, 14 nt, Human
gcaucuucuccauc

SEQ ID NO: 2268968 - RNA, 17 nt, Human
gcaucuuccagaagugu

SEQ ID NO: 2268969 - RNA, 13 nt, Human
gcaucuucuccau

SEQ ID NO: 2268970 - RNA, 19 nt, Human
gcaucuucuggagucucca

SEQ ID NO: 2268971 - RNA, 20 nt, Human
gcaucuucuggagucuccag

SEQ ID NO: 2268972 - RNA, 23 nt, Human
gcaucuucuggagucuccagugg

SEQ ID NO: 2268973 - RNA, 23 nt, Human
gcaucuuacugaagguaaaauug

SEQ ID NO: 2268974 - RNA, 16 nt, Human
gcaucuuacugaaggu

SEQ ID NO: 2268975 - RNA, 13 nt, Human
gcaucuuccagaa

SEQ ID NO: 2268976 - RNA, 21 nt, Human
gcaucuuccagaagugugauu

SEQ ID NO: 2268977 - RNA, 13 nt, Human
gcaugaagguuuc

SEQ ID NO: 2268978 - RNA, 20 nt, Human
gcaugaacauguacuguucu

SEQ ID NO: 2268979 - RNA, 18 nt, Human
gcaugaaguaauaugcac

SEQ ID NO: 2268980 - RNA, 23 nt, Human
gcaucuuugccuugggcugcucc

SEQ ID NO: 2268981 - RNA, 22 nt, Human
gcaucuuugccuugggcugcuc

SEQ ID NO: 2268982 - RNA, 14 nt, Human
gcaucugaccagca

SEQ ID NO: 2268983 - RNA, 20 nt, Human
gcaucugaccagcagcgccu

SEQ ID NO: 2268984 - RNA, 18 nt, Human
gcaucugaccagcagcgc

SEQ ID NO: 2268985 - RNA, 17 nt, Human
gcaucugaccagcagcg

SEQ ID NO: 2268986 - RNA, 15 nt, Human
gcaucugaccagcag

SEQ ID NO: 2268987 - RNA, 13 nt, Human
gcaucuguucugg

SEQ ID NO: 2268988 - RNA, 12 nt, Human
gcaucugcaccc

SEQ ID NO: 2268989 - RNA, 15 nt, Human
gcaucuuacugaagg

SEQ ID NO: 2268990 - RNA, 17 nt, Human
gcaucugacucacaaga

SEQ ID NO: 2268991 - RNA, 19 nt, Human
gcaucugacucacaagaag

SEQ ID NO: 2268992 - RNA, 21 nt, Human
gcaucucuugaggccaggagu

SEQ ID NO: 2268993 - RNA, 20 nt, Human
gcaucucuugaggccaggag

SEQ ID NO: 2268994 - RNA, 18 nt, Human
gcaucucuugaggccagg

SEQ ID NO: 2268995 - RNA, 17 nt, Human
gcaucucuugaggccag

SEQ ID NO: 2268996 - RNA, 16 nt, Human
gcaucugaaaauugau

SEQ ID NO: 2268997 - RNA, 16 nt, Human
gcaucucuugaggcca

SEQ ID NO: 2268998 - RNA, 14 nt, Human
gcaucucuugaggc

SEQ ID NO: 2268999 - RNA, 12 nt, Human
gcaucagcugcu

SEQ ID NO: 2269000 - RNA, 22 nt, Human
gcaucaccuuaggcagggaagu

SEQ ID NO: 2269001 - RNA, 18 nt, Human
gcaucaccuuaggcaggg

SEQ ID NO: 2269002 - RNA, 15 nt, Human
gcaucaccuccacca

SEQ ID NO: 2269003 - RNA, 20 nt, Human
gcaucaccuuaggcagggaa

SEQ ID NO: 2269004 - RNA, 23 nt, Human
gcaugauagacacauaugagggg

SEQ ID NO: 2269005 - RNA, 20 nt, Human
gcaugauguuaaccagaaua

SEQ ID NO: 2269006 - RNA, 22 nt, Human
gcaugaccugugaccagcacug

SEQ ID NO: 2269007 - RNA, 17 nt, Human
gcaugaccugugaccag

SEQ ID NO: 2269008 - RNA, 21 nt, Human
gcaugagggaucacagggccc

SEQ ID NO: 2269009 - RNA, 20 nt, Human
gcaugagggaucacagggcc

SEQ ID NO: 2269010 - RNA, 19 nt, Human
gcaugagggaucacagggc

SEQ ID NO: 2269011 - RNA, 22 nt, Human
gcaugaggaacuagccaccaac

SEQ ID NO: 2269012 - RNA, 21 nt, Human
gcaugaggaacuagccaccaa

SEQ ID NO: 2269013 - RNA, 21 nt, Human
gcaugcucucugcagccagcc

SEQ ID NO: 2269014 - RNA, 18 nt, Human
gcaugcucucugcagcca

SEQ ID NO: 2269015 - RNA, 17 nt, Human
gcaugcucucugcagcc

SEQ ID NO: 2269016 - RNA, 15 nt, Human
gcaugcucucugcag

SEQ ID NO: 2269017 - RNA, 14 nt, Human
gcaugcucucugca

SEQ ID NO: 2269018 - RNA, 13 nt, Human
gcaugcucucugc

SEQ ID NO: 2269019 - RNA, 15 nt, Human
gcaugcggcccagga

SEQ ID NO: 2269020 - RNA, 13 nt, Human
gcaugcuggggca

SEQ ID NO: 2269021 - RNA, 23 nt, Human
gcaugcucucugcagccagccca

SEQ ID NO: 2269022 - RNA, 22 nt, Human
gcaugcucucugcagccagccc

SEQ ID NO: 2269023 - RNA, 15 nt, Human
gcaugcuggggcaag

SEQ ID NO: 2269024 - RNA, 18 nt, Human
gcauggagauagccccac

SEQ ID NO: 2269025 - RNA, 18 nt, Human
gcaugcgggcuuccuccu

SEQ ID NO: 2269026 - RNA, 15 nt, Human
gcaugauuuuguaac

SEQ ID NO: 2269027 - RNA, 15 nt, Human
gcaugcggcccagcc

SEQ ID NO: 2269028 - RNA, 16 nt, Human
gcaugcggcccagccc

SEQ ID NO: 2269029 - RNA, 17 nt, Human
gcaugcggcccagcccg

SEQ ID NO: 2269030 - RNA, 18 nt, Human
gcaugcggcccagcccgg

SEQ ID NO: 2269031 - RNA, 19 nt, Human
gcaugcggcccagcccggc

SEQ ID NO: 2269032 - RNA, 20 nt, Human
gcaugcggcccagcccggcu

SEQ ID NO: 2269033 - RNA, 24 nt, Human
gcauggaguguguauuguucccag

SEQ ID NO: 2269034 - RNA, 23 nt, Human
gcauggaguguguauuguuccca

SEQ ID NO: 2269035 - RNA, 22 nt, Human
gcauggaguguguauuguuccc

SEQ ID NO: 2269036 - RNA, 20 nt, Human
gcauggauauaguuuuacuu

SEQ ID NO: 2269037 - RNA, 21 nt, Human
gcauggauguuuuagccauug

SEQ ID NO: 2269038 - RNA, 20 nt, Human
gcauggaguguguauuguuc

SEQ ID NO: 2269039 - RNA, 19 nt, Human
gcauggaguguguauuguu

SEQ ID NO: 2269040 - RNA, 18 nt, Human
gcauggaguguguauugu

SEQ ID NO: 2269041 - RNA, 17 nt, Human
gcauggaguguguauug

SEQ ID NO: 2269042 - RNA, 16 nt, Human
gcaugcugcuggacag

SEQ ID NO: 2269043 - RNA, 12 nt, Human
gcauggagcugg

SEQ ID NO: 2269044 - RNA, 15 nt, Human
gcauggagcuggccg

SEQ ID NO: 2269045 - RNA, 15 nt, Human
gcauggcacuugcau

SEQ ID NO: 2269046 - RNA, 20 nt, Human
gcauggcacuugcaucugug

SEQ ID NO: 2269047 - RNA, 20 nt, Human
gcauggcaaggacugcaggg

SEQ ID NO: 2269048 - RNA, 15 nt, Human
gcauguucucugagg

SEQ ID NO: 2269049 - RNA, 21 nt, Human
gcauguucucugaggacacua

SEQ ID NO: 2269050 - RNA, 22 nt, Human
gcauguucucugaggacacuaa

SEQ ID NO: 2269051 - RNA, 13 nt, Human
gcauuauauuuau

SEQ ID NO: 2269052 - RNA, 14 nt, Human
gccaaaaaaagaca

SEQ ID NO: 2269053 - RNA, 21 nt, Human
gcauuuuugugaaaugaaaac

SEQ ID NO: 2269054 - RNA, 18 nt, Human
gcauuuuugugaaaugaa

SEQ ID NO: 2269055 - RNA, 17 nt, Human
gcauuuuugcaggagca

SEQ ID NO: 2269056 - RNA, 21 nt, Human
gcauuuuugauuuaugcaugg

SEQ ID NO: 2269057 - RNA, 16 nt, Human
gcauuuuugcaggagc

SEQ ID NO: 2269058 - RNA, 20 nt, Human
gcauuuuugauuuaugcaug

SEQ ID NO: 2269059 - RNA, 18 nt, Human
gcauuuuguuugguauug

SEQ ID NO: 2269060 - RNA, 21 nt, Human
gcauuuuguuugguauuguau

SEQ ID NO: 2269061 - RNA, 23 nt, Human
gcauuuuguuugguauuguauuu

SEQ ID NO: 2269062 - RNA, 18 nt, Human
gcauuuguuugaacugau

SEQ ID NO: 2269063 - RNA, 16 nt, Human
gccaaaaaaagacagg

SEQ ID NO: 2269064 - RNA, 15 nt, Human
gccaaacccugucug

SEQ ID NO: 2269065 - RNA, 22 nt, Human
gccaaacccaugaggcaauguc

SEQ ID NO: 2269066 - RNA, 13 nt, Human
gccaaaccucugu

SEQ ID NO: 2269067 - RNA, 18 nt, Human
gccaaacccuugucagug

SEQ ID NO: 2269068 - RNA, 14 nt, Human
gccaaacucaccug

SEQ ID NO: 2269069 - RNA, 16 nt, Human
gccaaacucaccugcc

SEQ ID NO: 2269070 - RNA, 19 nt, Human
gccaaagccuccuccagcc

SEQ ID NO: 2269071 - RNA, 16 nt, Human
gccaaagccuccucca

SEQ ID NO: 2269072 - RNA, 13 nt, Human
gccaaagccaaag

SEQ ID NO: 2269073 - RNA, 20 nt, Human
gccaaagccaaagcuaggcc

SEQ ID NO: 2269074 - RNA, 16 nt, Human
gccaaagcuaggccug

SEQ ID NO: 2269075 - RNA, 22 nt, Human
gccaaagcuaggccuggccaga

SEQ ID NO: 2269076 - RNA, 16 nt, Human
gccaaagcuagggugg

SEQ ID NO: 2269077 - RNA, 22 nt, Human
gccaaaccucuguucaguguaa

SEQ ID NO: 2269078 - RNA, 19 nt, Human
gccaaaccucuguucagug

SEQ ID NO: 2269079 - RNA, 17 nt, Human
gccaaaccucuguucag

SEQ ID NO: 2269080 - RNA, 16 nt, Human
gccaaaccucuguuca

SEQ ID NO: 2269081 - RNA, 15 nt, Human
gccaaaccucuguuc

SEQ ID NO: 2269082 - RNA, 14 nt, Human
gccaaaccucuguu

SEQ ID NO: 2269083 - RNA, 20 nt, Human
gccaaagcuaggguggcccu

SEQ ID NO: 2269084 - RNA, 11 nt, Human
gccaaauuauu

SEQ ID NO: 2269085 - RNA, 15 nt, Human
gccaaauuauuugug

SEQ ID NO: 2269086 - RNA, 12 nt, Human
gccaaaggaagc

SEQ ID NO: 2269087 - RNA, 17 nt, Human
gcauuugcugaauacag

SEQ ID NO: 2269088 - RNA, 13 nt, Human
gcauuugugaggc

SEQ ID NO: 2269089 - RNA, 14 nt, Human
gcauuugcugaaua

SEQ ID NO: 2269090 - RNA, 16 nt, Human
gcauuuguuugaacug

SEQ ID NO: 2269091 - RNA, 13 nt, Human
gcauuugcugaau

SEQ ID NO: 2269092 - RNA, 21 nt, Human
gcauuugaggucuguucuuuc

SEQ ID NO: 2269093 - RNA, 23 nt, Human
gcauuugcucuuucaucucugcu

SEQ ID NO: 2269094 - RNA, 14 nt, Human
gcauuugaguuuau

SEQ ID NO: 2269095 - RNA, 19 nt, Human
gcauugaacacaaacugua

SEQ ID NO: 2269096 - RNA, 18 nt, Human
gcauugaacacaaacugu

SEQ ID NO: 2269097 - RNA, 16 nt, Human
gcauugaacacaaacu

SEQ ID NO: 2269098 - RNA, 12 nt, Human
gcauugaacaca

SEQ ID NO: 2269099 - RNA, 20 nt, Human
gcauucuuuuaaaagacaag

SEQ ID NO: 2269100 - RNA, 21 nt, Human
gcauucuuuuaaaagacaaga

SEQ ID NO: 2269101 - RNA, 17 nt, Human
gcauucuugguuggcug

SEQ ID NO: 2269102 - RNA, 13 nt, Human
gcauucuuucugu

SEQ ID NO: 2269103 - RNA, 18 nt, Human
gcauucuuucuguauuga

SEQ ID NO: 2269104 - RNA, 16 nt, Human
gcauucuuuuaaaaga

SEQ ID NO: 2269105 - RNA, 20 nt, Human
gcauucacccagacagcucc

SEQ ID NO: 2269106 - RNA, 19 nt, Human
gcauucacccagacagcuc

SEQ ID NO: 2269107 - RNA, 15 nt, Human
gcauucacccagaca

SEQ ID NO: 2269108 - RNA, 12 nt, Human
gcauucacccag

SEQ ID NO: 2269109 - RNA, 13 nt, Human
gcauucagagagc

SEQ ID NO: 2269110 - RNA, 16 nt, Human
gcauucagagagcagc

SEQ ID NO: 2269111 - RNA, 22 nt, Human
gcauucaauuuauucaagaaaa

SEQ ID NO: 2269112 - RNA, 22 nt, Human
gcauucugccgugugcccucgg

SEQ ID NO: 2269113 - RNA, 20 nt, Human
gcauucugccgugugcccuc

SEQ ID NO: 2269114 - RNA, 21 nt, Human
gcauucuugguuggcuggccu

SEQ ID NO: 2269115 - RNA, 15 nt, Human
gcauuauauaccauu

SEQ ID NO: 2269116 - RNA, 19 nt, Human
gcauuauauaccauuuauc

SEQ ID NO: 2269117 - RNA, 18 nt, Human
gcauuauauuuguaaauu

SEQ ID NO: 2269118 - RNA, 17 nt, Human
gcauuaucuagauacug

SEQ ID NO: 2269119 - RNA, 14 nt, Human
gcauuauugcauua

SEQ ID NO: 2269120 - RNA, 15 nt, Human
gcauuauugcauuau

SEQ ID NO: 2269121 - RNA, 14 nt, Human
gcaggaggauugcu

SEQ ID NO: 2269122 - RNA, 19 nt, Human
gcaggacaacgaggaagcc

SEQ ID NO: 2269123 - RNA, 18 nt, Human
gcaggacaacgaggaagc

SEQ ID NO: 2269124 - RNA, 23 nt, Human
gcaggaggaucacuugaguccag

SEQ ID NO: 2269125 - RNA, 20 nt, Human
gcaggaggaucacuugaguc

SEQ ID NO: 2269126 - RNA, 17 nt, Human
gcaggacaacgaggaag

SEQ ID NO: 2269127 - RNA, 17 nt, Human
gcaggaauguguggcag

SEQ ID NO: 2269128 - RNA, 20 nt, Human
gcaggaaggcugagaggaga

SEQ ID NO: 2269129 - RNA, 23 nt, Human
gcaggaaggagagccugcugcau

SEQ ID NO: 2269130 - RNA, 17 nt, Human
gcaggaaggagagccug

SEQ ID NO: 2269131 - RNA, 16 nt, Human
gcaggaaggagagccu

SEQ ID NO: 2269132 - RNA, 23 nt, Human
gcaggaaaugaaaaugucuugug

SEQ ID NO: 2269133 - RNA, 21 nt, Human
gcaggaaaugaaaaugucuug

SEQ ID NO: 2269134 - RNA, 23 nt, Human
gcaggaaaaggugauauccauuc

SEQ ID NO: 2269135 - RNA, 21 nt, Human
gcagcuuuaaccauuaaaacu

SEQ ID NO: 2269136 - RNA, 22 nt, Human
gcagcuuuaaccauuaaaacug

SEQ ID NO: 2269137 - RNA, 15 nt, Human
gcaggcacauggagg

SEQ ID NO: 2269138 - RNA, 15 nt, Human
gcaggcacagcacag

SEQ ID NO: 2269139 - RNA, 18 nt, Human
gcaggcacagcacaggga

SEQ ID NO: 2269140 - RNA, 20 nt, Human
gcaggcaccuuaguggcuuu

SEQ ID NO: 2269141 - RNA, 15 nt, Human
gcaggcaccuuagug

SEQ ID NO: 2269142 - RNA, 20 nt, Human
gcaggcacucaaugcagcca

SEQ ID NO: 2269143 - RNA, 20 nt, Human
gcaggcagacacggaucuga

SEQ ID NO: 2269144 - RNA, 23 nt, Human
gcaggcagacacggaucugagaa

SEQ ID NO: 2269145 - RNA, 10 nt, Human
gcaggcagac

SEQ ID NO: 2269146 - RNA, 11 nt, Human
gcaggcagaca

SEQ ID NO: 2269147 - RNA, 12 nt, Human
gcaggcagacac

SEQ ID NO: 2269148 - RNA, 13 nt, Human
gcaggcagacacg

SEQ ID NO: 2269149 - RNA, 23 nt, Human
gcaggaggauugcuugagcccag

SEQ ID NO: 2269150 - RNA, 14 nt, Human
gcaggaggccaggc

SEQ ID NO: 2269151 - RNA, 16 nt, Human
gcaggaggccaggccg

SEQ ID NO: 2269152 - RNA, 15 nt, Human
gcaggaggccaggcc

SEQ ID NO: 2269153 - RNA, 22 nt, Human
gcaggaggccccuggcccagcg

SEQ ID NO: 2269154 - RNA, 18 nt, Human
gcaggaggccccuggccc

SEQ ID NO: 2269155 - RNA, 19 nt, Human
gcaggaggccccuggccca

SEQ ID NO: 2269156 - RNA, 17 nt, Human
gcaggaggccaggccgg

SEQ ID NO: 2269157 - RNA, 14 nt, Human
gcaggaggccccug

SEQ ID NO: 2269158 - RNA, 16 nt, Human
gcaggaggccccuggc

SEQ ID NO: 2269159 - RNA, 12 nt, Human
gcaggcagccag

SEQ ID NO: 2269160 - RNA, 13 nt, Human
gcaggcagccagg

SEQ ID NO: 2269161 - RNA, 14 nt, Human
gcaggcagccaggc

SEQ ID NO: 2269162 - RNA, 21 nt, Human
gcagcggggcgaagcccaggc

SEQ ID NO: 2269163 - RNA, 14 nt, Human
gcagcuaguuuucu

SEQ ID NO: 2269164 - RNA, 17 nt, Human
gcagcucaaaggcacag

SEQ ID NO: 2269165 - RNA, 14 nt, Human
gcagcucaaaggca

SEQ ID NO: 2269166 - RNA, 17 nt, Human
gcagcgcggggagcccg

SEQ ID NO: 2269167 - RNA, 14 nt, Human
gcagcucaccucuc

SEQ ID NO: 2269168 - RNA, 17 nt, Human
gcagccuuugccucccc

SEQ ID NO: 2269169 - RNA, 15 nt, Human
gcagccuuuaaugca

SEQ ID NO: 2269170 - RNA, 18 nt, Human
gcagccuuugccuccccg

SEQ ID NO: 2269171 - RNA, 15 nt, Human
gcagcgccuuuccca

SEQ ID NO: 2269172 - RNA, 13 nt, Human
gcagcgaccaccc

SEQ ID NO: 2269173 - RNA, 13 nt, Human
gcagcgccuuucc

SEQ ID NO: 2269174 - RNA, 15 nt, Human
gcagccuuggcaaac

SEQ ID NO: 2269175 - RNA, 15 nt, Human
gcagcucaaaggcac

SEQ ID NO: 2269176 - RNA, 23 nt, Human
gcagcucaagcagcgaccgcccc

SEQ ID NO: 2269177 - RNA, 21 nt, Human
gcagcuugcguuagaaugagg

SEQ ID NO: 2269178 - RNA, 14 nt, Human
gcagcuugccccgg

SEQ ID NO: 2269179 - RNA, 15 nt, Human
gcagcucaccucucc

SEQ ID NO: 2269180 - RNA, 17 nt, Human
gcagcuuuaaacucagg

SEQ ID NO: 2269181 - RNA, 19 nt, Human
gcagcuuuaaacucaggga

SEQ ID NO: 2269182 - RNA, 20 nt, Human
gcagcuuuaaacucagggac

SEQ ID NO: 2269183 - RNA, 21 nt, Human
gcagcuuuaaacucagggaca

SEQ ID NO: 2269184 - RNA, 22 nt, Human
gcagcuuuaaacucagggacag

SEQ ID NO: 2269185 - RNA, 18 nt, Human
gcagcuuuaaccauuaaa

SEQ ID NO: 2269186 - RNA, 22 nt, Human
gcagccuguggcaucuuugccu

SEQ ID NO: 2269187 - RNA, 16 nt, Human
gcagccuguggcaucu

SEQ ID NO: 2269188 - RNA, 14 nt, Human
gcagccuguggcau

SEQ ID NO: 2269189 - RNA, 19 nt, Human
gcagccuguccugggcugg

SEQ ID NO: 2269190 - RNA, 23 nt, Human
gcagccuguccugggcugguggc

SEQ ID NO: 2269191 - RNA, 17 nt, Human
gcagccuggggcuggcc

SEQ ID NO: 2269192 - RNA, 18 nt, Human
gcagccuggguggcuaug

SEQ ID NO: 2269193 - RNA, 14 nt, Human
gcagccuggggcug

SEQ ID NO: 2269194 - RNA, 10 nt, Human
gcagccuggg

SEQ ID NO: 2269195 - RNA, 18 nt, Human
gcagcccuccucaccccg

SEQ ID NO: 2269196 - RNA, 15 nt, Human
gcagcccuccucacc

SEQ ID NO: 2269197 - RNA, 13 nt, Human
gcagcccuccuca

SEQ ID NO: 2269198 - RNA, 13 nt, Human
gcagcccugcuuu

SEQ ID NO: 2269199 - RNA, 14 nt, Human
gcagcccugcagag

SEQ ID NO: 2269200 - RNA, 15 nt, Human
gcagcccugcagagg

SEQ ID NO: 2269201 - RNA, 16 nt, Human
gcagcccugcagaggg

SEQ ID NO: 2269202 - RNA, 17 nt, Human
gcagcccugcagagggc

SEQ ID NO: 2269203 - RNA, 15 nt, Human
gcagauacugucucu

SEQ ID NO: 2269204 - RNA, 18 nt, Human
gcagauaccucacccugc

SEQ ID NO: 2269205 - RNA, 22 nt, Human
gcagauacaggaaaagcugcug

SEQ ID NO: 2269206 - RNA, 19 nt, Human
gcagauaaucagccucuua

SEQ ID NO: 2269207 - RNA, 18 nt, Human
gcagauaaucagccucuu

SEQ ID NO: 2269208 - RNA, 17 nt, Human
gcagauaaucagccucu

SEQ ID NO: 2269209 - RNA, 16 nt, Human
gcagauaaucagccuc

SEQ ID NO: 2269210 - RNA, 20 nt, Human
gcagaguuguaaauauauaa

SEQ ID NO: 2269211 - RNA, 21 nt, Human
gcagaguuguaaauauauaaa

SEQ ID NO: 2269212 - RNA, 23 nt, Human
gcagaguuguaaauauauaaaua

SEQ ID NO: 2269213 - RNA, 18 nt, Human
gcagaguuuccaaaacca

SEQ ID NO: 2269214 - RNA, 20 nt, Human
gcagaguuuguguguugucu

SEQ ID NO: 2269215 - RNA, 24 nt, Human
gcagaguuuguguguugucuugaa

SEQ ID NO: 2269216 - RNA, 23 nt, Human
gcagauuuagugaaagcuagaga

SEQ ID NO: 2269217 - RNA, 20 nt, Human
gcagauuuagugaaagcuag

SEQ ID NO: 2269218 - RNA, 19 nt, Human
gcagauuggagaaacccuu

SEQ ID NO: 2269219 - RNA, 20 nt, Human
gcagauuguguaacaauuuu

SEQ ID NO: 2269220 - RNA, 14 nt, Human
gcagauuggagaaa

SEQ ID NO: 2269221 - RNA, 16 nt, Human
gcagauuugggcugga

SEQ ID NO: 2269222 - RNA, 20 nt, Human
gcagauuuuaggaaaugaau

SEQ ID NO: 2269223 - RNA, 21 nt, Human
gcagauuuucagcaaacucuu

SEQ ID NO: 2269224 - RNA, 19 nt, Human
gcagauucauuuuucuuuc

SEQ ID NO: 2269225 - RNA, 17 nt, Human
gcagauugaaaaggaca

SEQ ID NO: 2269226 - RNA, 20 nt, Human
gcagauucauuuuucuuucu

SEQ ID NO: 2269227 - RNA, 19 nt, Human
gcagacaugugcacuugaa

SEQ ID NO: 2269228 - RNA, 12 nt, Human
gcagacauuguc

SEQ ID NO: 2269229 - RNA, 15 nt, Human
gcagacauugucagc

SEQ ID NO: 2269230 - RNA, 17 nt, Human
gcagacaguuaagagaa

SEQ ID NO: 2269231 - RNA, 13 nt, Human
gcagaccaccccg

SEQ ID NO: 2269232 - RNA, 17 nt, Human
gcagaccaccccgccug

SEQ ID NO: 2269233 - RNA, 21 nt, Human
gcagaccaccccgccugcccu

SEQ ID NO: 2269234 - RNA, 20 nt, Human
gcagaccacgcccguccugc

SEQ ID NO: 2269235 - RNA, 23 nt, Human
gcagaccacgcccguccugccug

SEQ ID NO: 2269236 - RNA, 21 nt, Human
gcagaguugaagacagagcua

SEQ ID NO: 2269237 - RNA, 13 nt, Human
gcagaccucccca

SEQ ID NO: 2269238 - RNA, 15 nt, Human
gcagaccuccccagc

SEQ ID NO: 2269239 - RNA, 16 nt, Human
gcagaccuccccagcc

SEQ ID NO: 2269240 - RNA, 17 nt, Human
gcagaccuccccagccc

SEQ ID NO: 2269241 - RNA, 19 nt, Human
gcagaccuccccagccccu

SEQ ID NO: 2269242 - RNA, 18 nt, Human
gcagauaaacaguaguga

SEQ ID NO: 2269243 - RNA, 20 nt, Human
gcagaguugaagacagagcu

SEQ ID NO: 2269244 - RNA, 13 nt, Human
gcagaguuguaaa

SEQ ID NO: 2269245 - RNA, 14 nt, Human
gcagaguuguaaau

SEQ ID NO: 2269246 - RNA, 16 nt, Human
gcagaguuguaaauau

SEQ ID NO: 2269247 - RNA, 17 nt, Human
gcagaguuguaaauaua

SEQ ID NO: 2269248 - RNA, 14 nt, Human
gcagcacagagagg

SEQ ID NO: 2269249 - RNA, 20 nt, Human
gcagccccgugggguuccuc

SEQ ID NO: 2269250 - RNA, 20 nt, Human
gcagccccuguucuggcaga

SEQ ID NO: 2269251 - RNA, 21 nt, Human
gcagccccuguucuggcagag

SEQ ID NO: 2269252 - RNA, 21 nt, Human
gcagcccguguggccccuuca

SEQ ID NO: 2269253 - RNA, 22 nt, Human
gcagcccuaaggaucucucagg

SEQ ID NO: 2269254 - RNA, 23 nt, Human
gcagcccuaaggaucucucagga

SEQ ID NO: 2269255 - RNA, 24 nt, Human
gcagcccuaaggaucucucaggag

SEQ ID NO: 2269256 - RNA, 20 nt, Human
gcagcccguguggccccuuc

SEQ ID NO: 2269257 - RNA, 19 nt, Human
gcagcccguguggccccuu

SEQ ID NO: 2269258 - RNA, 18 nt, Human
gcagcccguguggccccu

SEQ ID NO: 2269259 - RNA, 17 nt, Human
gcagcccguguggcccc

SEQ ID NO: 2269260 - RNA, 23 nt, Human
gcagccccgcgccuccuuccuug

SEQ ID NO: 2269261 - RNA, 15 nt, Human
gcagcccguguggcc

SEQ ID NO: 2269262 - RNA, 13 nt, Human
gcagcccugcaga

SEQ ID NO: 2269263 - RNA, 13 nt, Human
gcagcccuagagc

SEQ ID NO: 2269264 - RNA, 17 nt, Human
gcagcccuagagccugc

SEQ ID NO: 2269265 - RNA, 18 nt, Human
gcagcccuagagccugcc

SEQ ID NO: 2269266 - RNA, 19 nt, Human
gcagcccuagagccugccu

SEQ ID NO: 2269267 - RNA, 22 nt, Human
gcagcccuagagccugccugga

SEQ ID NO: 2269268 - RNA, 17 nt, Human
gcagccccauucugccu

SEQ ID NO: 2269269 - RNA, 23 nt, Human
gcagcaauaaagcagcguuucua

SEQ ID NO: 2269270 - RNA, 16 nt, Human
gcagcaauaaagcagc

SEQ ID NO: 2269271 - RNA, 18 nt, Human
gcagccccauucugccug

SEQ ID NO: 2269272 - RNA, 19 nt, Human
gcagccccauucugccugc

SEQ ID NO: 2269273 - RNA, 21 nt, Human
gcagccccauucugccugccc

SEQ ID NO: 2269274 - RNA, 24 nt, Human
gcagccccauucugccugcccagg

SEQ ID NO: 2269275 - RNA, 23 nt, Human
gcaccauucugacucgguuucuc

SEQ ID NO: 2269276 - RNA, 22 nt, Human
gcacccaccaucaugucuggcu

SEQ ID NO: 2269277 - RNA, 19 nt, Human
gcacccacccagcacccag

SEQ ID NO: 2269278 - RNA, 16 nt, Human
gcacccgggcucaggg

SEQ ID NO: 2269279 - RNA, 19 nt, Human
gcacccacaagugccacug

SEQ ID NO: 2269280 - RNA, 22 nt, Human
gcacccacccagcacccagcaa

SEQ ID NO: 2269281 - RNA, 18 nt, Human
gcacccggccccugcugg

SEQ ID NO: 2269282 - RNA, 19 nt, Human
gcacccggccccugcuggu

SEQ ID NO: 2269283 - RNA, 15 nt, Human
gcaccauucugacuc

SEQ ID NO: 2269284 - RNA, 17 nt, Human
gcaccauucugacucgg

SEQ ID NO: 2269285 - RNA, 20 nt, Human
gcaccagcuucuccaggcuc

SEQ ID NO: 2269286 - RNA, 16 nt, Human
gcaccagcuucuccag

SEQ ID NO: 2269287 - RNA, 17 nt, Human
gcaccagcuucuccagg

SEQ ID NO: 2269288 - RNA, 18 nt, Human
gcaccagcuucuccaggc

SEQ ID NO: 2269289 - RNA, 19 nt, Human
gcaccagcuucuccaggcu

SEQ ID NO: 2269290 - RNA, 16 nt, Human
gcaccagcagccugga

SEQ ID NO: 2269291 - RNA, 17 nt, Human
gcaccagcgaagggagu

SEQ ID NO: 2269292 - RNA, 18 nt, Human
gcaccagcgaagggagug

SEQ ID NO: 2269293 - RNA, 18 nt, Human
gcaccacuguguauuuaa

SEQ ID NO: 2269294 - RNA, 22 nt, Human
gcaccacugcacuccagccugg

SEQ ID NO: 2269295 - RNA, 21 nt, Human
gcaccacugcacuccagccug

SEQ ID NO: 2269296 - RNA, 23 nt, Human
gcaccacugcacuccagccuggg

SEQ ID NO: 2269297 - RNA, 23 nt, Human
gcaaugccauccucaaacacugc

SEQ ID NO: 2269298 - RNA, 14 nt, Human
gcaccagacaccca

SEQ ID NO: 2269299 - RNA, 15 nt, Human
gcaccagcagccugg

SEQ ID NO: 2269300 - RNA, 12 nt, Human
gcaauggcagcc

SEQ ID NO: 2269301 - RNA, 13 nt, Human
gcaauggcagccu

SEQ ID NO: 2269302 - RNA, 20 nt, Human
gcaccacugcacuccagccu

SEQ ID NO: 2269303 - RNA, 14 nt, Human
gcaauggcagccuu

SEQ ID NO: 2269304 - RNA, 14 nt, Human
gcacggugggccuu

SEQ ID NO: 2269305 - RNA, 12 nt, Human
gcacggcugcug

SEQ ID NO: 2269306 - RNA, 12 nt, Human
gcacggacucuu

SEQ ID NO: 2269307 - RNA, 23 nt, Human
gcacgauguggaaaaaugagaga

SEQ ID NO: 2269308 - RNA, 12 nt, Human
gcacgauuucug

SEQ ID NO: 2269309 - RNA, 23 nt, Human
gcacgaacccaccugcugagaga

SEQ ID NO: 2269310 - RNA, 19 nt, Human
gcacgaacccaccugcuga

SEQ ID NO: 2269311 - RNA, 17 nt, Human
gcacgaacccaccugcu

SEQ ID NO: 2269312 - RNA, 16 nt, Human
gcacgaacccaccugc

SEQ ID NO: 2269313 - RNA, 15 nt, Human
gcacgaacccaccug

SEQ ID NO: 2269314 - RNA, 15 nt, Human
gcacgaaauguuauu

SEQ ID NO: 2269315 - RNA, 19 nt, Human
gcaccuuagacagucccug

SEQ ID NO: 2269316 - RNA, 20 nt, Human
gcaccuugugucuguacacg

SEQ ID NO: 2269317 - RNA, 22 nt, Human
gcaccuugugucuguacacgug

SEQ ID NO: 2269318 - RNA, 21 nt, Human
gcaccuuaccaacuuucugua

SEQ ID NO: 2269319 - RNA, 18 nt, Human
gcaccuuagacagucccu

SEQ ID NO: 2269320 - RNA, 15 nt, Human
gcacccucaggcagg

SEQ ID NO: 2269321 - RNA, 21 nt, Human
gcacccuaguucuaccucagg

SEQ ID NO: 2269322 - RNA, 17 nt, Human
gcacccgggcucaggga

SEQ ID NO: 2269323 - RNA, 21 nt, Human
gcacccgggcucagggaccac

SEQ ID NO: 2269324 - RNA, 22 nt, Human
gcacccgggcucagggaccaca

SEQ ID NO: 2269325 - RNA, 23 nt, Human
gcacccgggcucagggaccacag

SEQ ID NO: 2269326 - RNA, 21 nt, Human
gcaccuggaauauauaaccag

SEQ ID NO: 2269327 - RNA, 18 nt, Human
gcaccuggaauauauaac

SEQ ID NO: 2269328 - RNA, 22 nt, Human
gcaccuggaauauauaaccagu

SEQ ID NO: 2269329 - RNA, 18 nt, Human
gcaccuggcaucgcacca

SEQ ID NO: 2269330 - RNA, 20 nt, Human
gcaccuggcugagccuggcu

SEQ ID NO: 2269331 - RNA, 21 nt, Human
gcaccuggcugagccuggcug

SEQ ID NO: 2269332 - RNA, 20 nt, Human
gcaccuuaccaacuuucugu

SEQ ID NO: 2269333 - RNA, 14 nt, Human
gcaccuuagacagu

SEQ ID NO: 2269334 - RNA, 17 nt, Human
gcaccuuagacaguccc

SEQ ID NO: 2269335 - RNA, 11 nt, Human
gcacugccuga

SEQ ID NO: 2269336 - RNA, 18 nt, Human
gcacugccugauggaccu

SEQ ID NO: 2269337 - RNA, 22 nt, Human
gcacugcuaggcgagugccagg

SEQ ID NO: 2269338 - RNA, 23 nt, Human
gcacugcuaggcgagugccagga

SEQ ID NO: 2269339 - RNA, 20 nt, Human
gcacugcuaggcgagugcca

SEQ ID NO: 2269340 - RNA, 21 nt, Human
gcacugcuaggcgagugccag

SEQ ID NO: 2269341 - RNA, 16 nt, Human
gcacugcuuccaguga

SEQ ID NO: 2269342 - RNA, 18 nt, Human
gcacugcuuccagugagg

SEQ ID NO: 2269343 - RNA, 22 nt, Human
gcacugcuuccagugaggcucu

SEQ ID NO: 2269344 - RNA, 20 nt, Human
gcacugcuuccagugaggcu

SEQ ID NO: 2269345 - RNA, 22 nt, Human
gcacugguggcccgacagccug

SEQ ID NO: 2269346 - RNA, 23 nt, Human
gcacugguggcccgacagccugg

SEQ ID NO: 2269347 - RNA, 24 nt, Human
gcacugguggcccgacagccuggc

SEQ ID NO: 2269348 - RNA, 19 nt, Human
gcacugguggcccgacagc

SEQ ID NO: 2269349 - RNA, 13 nt, Human
gcacgucauggga

SEQ ID NO: 2269350 - RNA, 18 nt, Human
gcacguggagagcuggug

SEQ ID NO: 2269351 - RNA, 16 nt, Human
gcacguggagagcugg

SEQ ID NO: 2269352 - RNA, 15 nt, Human
gcacguggagagcug

SEQ ID NO: 2269353 - RNA, 16 nt, Human
gcacguaguaggguca

SEQ ID NO: 2269354 - RNA, 22 nt, Human
gcacguagcugaggccggaugc

SEQ ID NO: 2269355 - RNA, 20 nt, Human
gcacguaguagggucaggcc

SEQ ID NO: 2269356 - RNA, 21 nt, Human
gcacguaguagggucaggcca

SEQ ID NO: 2269357 - RNA, 19 nt, Human
gcacggugggccuugcugg

SEQ ID NO: 2269358 - RNA, 20 nt, Human
gcacggugggccuugcuggg

SEQ ID NO: 2269359 - RNA, 13 nt, Human
gcacggcugcuga

SEQ ID NO: 2269360 - RNA, 16 nt, Human
gcacggugggccuugc

SEQ ID NO: 2269361 - RNA, 17 nt, Human
gcacggugggccuugcu

SEQ ID NO: 2269362 - RNA, 18 nt, Human
gcacggugggccuugcug

SEQ ID NO: 2269363 - RNA, 23 nt, Human
gcacgugggucuucagggggcca

SEQ ID NO: 2269364 - RNA, 19 nt, Human
gcacguggccucuugagca

SEQ ID NO: 2269365 - RNA, 15 nt, Human
gcacguggccucuug

SEQ ID NO: 2269366 - RNA, 17 nt, Human
gcacguggccucuugag

SEQ ID NO: 2269367 - RNA, 20 nt, Human
gcacguggagagcuggugcc

SEQ ID NO: 2269368 - RNA, 18 nt, Human
gcacguggcauguggccu

SEQ ID NO: 2269369 - RNA, 23 nt, Human
gcacguggcauguggccuguggc

SEQ ID NO: 2269370 - RNA, 13 nt, Human
gcacguggccucu

SEQ ID NO: 2269371 - RNA, 14 nt, Human
gcacguggccucuu

SEQ ID NO: 2269372 - RNA, 21 nt, Human
gcacugcccauggacaggcug

SEQ ID NO: 2269373 - RNA, 14 nt, Human
gcacugccaugcag

SEQ ID NO: 2269374 - RNA, 15 nt, Human
gcacugccaugcagg

SEQ ID NO: 2269375 - RNA, 17 nt, Human
gcacugccaugcagggc

SEQ ID NO: 2269376 - RNA, 18 nt, Human
gcacuuaagagaauauuu

SEQ ID NO: 2269377 - RNA, 19 nt, Human
gcacuuaaggcacucuguu

SEQ ID NO: 2269378 - RNA, 22 nt, Human
gcacuuaacaagcucccaggcc

SEQ ID NO: 2269379 - RNA, 14 nt, Human
gcacuucacagagu

SEQ ID NO: 2269380 - RNA, 15 nt, Human
gcacuucacagagug

SEQ ID NO: 2269381 - RNA, 18 nt, Human
gcacuuauuuaaugccga

SEQ ID NO: 2269382 - RNA, 13 nt, Human
gcacuucacagag

SEQ ID NO: 2269383 - RNA, 16 nt, Human
gcacuuaugauuucau

SEQ ID NO: 2269384 - RNA, 22 nt, Human
gcacuuacugguaggaccaagc

SEQ ID NO: 2269385 - RNA, 17 nt, Human
gcacuuagcuaucagaa

SEQ ID NO: 2269386 - RNA, 19 nt, Human
gcacuuagcuaucagaaga

SEQ ID NO: 2269387 - RNA, 18 nt, Human
gcagaauaaucuuugggu

SEQ ID NO: 2269388 - RNA, 22 nt, Human
gcagaauaaagcaauuuuccuu

SEQ ID NO: 2269389 - RNA, 17 nt, Human
gcagaauacuuuucucu

SEQ ID NO: 2269390 - RNA, 17 nt, Human
gcagaauagcaaggugc

SEQ ID NO: 2269391 - RNA, 23 nt, Human
gcagaauccuaggcuccacccca

SEQ ID NO: 2269392 - RNA, 17 nt, Human
gcagaauguuuuuaaaa

SEQ ID NO: 2269393 - RNA, 17 nt, Human
gcagaauccuggcccuc

SEQ ID NO: 2269394 - RNA, 13 nt, Human
gcagaauguuuuu

SEQ ID NO: 2269395 - RNA, 23 nt, Human
gcacuucauugagaguuuugucu

SEQ ID NO: 2269396 - RNA, 15 nt, Human
gcagaauaaagcaau

SEQ ID NO: 2269397 - RNA, 16 nt, Human
gcagaauaaagcaauu

SEQ ID NO: 2269398 - RNA, 17 nt, Human
gcagaauaaagcaauuu

SEQ ID NO: 2269399 - RNA, 18 nt, Human
gcagaauaaagcaauuuu

SEQ ID NO: 2269400 - RNA, 19 nt, Human
gcagaauaaagcaauuuuc

SEQ ID NO: 2269401 - RNA, 20 nt, Human
gcagaauaaagcaauuuucc

SEQ ID NO: 2269402 - RNA, 21 nt, Human
gcagaauaaagcaauuuuccu

SEQ ID NO: 2269403 - RNA, 23 nt, Human
gcagacaggcaagcaccuccugc

SEQ ID NO: 2269404 - RNA, 20 nt, Human
gcagacaggccccgugaggc

SEQ ID NO: 2269405 - RNA, 15 nt, Human
gcagacagcuccacc

SEQ ID NO: 2269406 - RNA, 19 nt, Human
gcagacacagggacuugaa

SEQ ID NO: 2269407 - RNA, 21 nt, Human
gcagacacagggacuugaagu

SEQ ID NO: 2269408 - RNA, 22 nt, Human
gcagacacagggacuugaaguu

SEQ ID NO: 2269409 - RNA, 19 nt, Human
gcagacaggcaagcaccuc

SEQ ID NO: 2269410 - RNA, 18 nt, Human
gcagacaggaccagggau

SEQ ID NO: 2269411 - RNA, 16 nt, Human
gcagacacagggacuu

SEQ ID NO: 2269412 - RNA, 18 nt, Human
gcagacacagggacuuga

SEQ ID NO: 2269413 - RNA, 12 nt, Human
gcagacaggacc

SEQ ID NO: 2269414 - RNA, 13 nt, Human
gcagacaggacca

SEQ ID NO: 2269415 - RNA, 15 nt, Human
gcagacaggaccagg

SEQ ID NO: 2269416 - RNA, 13 nt, Human
gacacccccucgc

SEQ ID NO: 2269417 - RNA, 17 nt, Human
gacaccccuuauccagg

SEQ ID NO: 2269418 - RNA, 18 nt, Human
gacaccccuuauccagga

SEQ ID NO: 2269419 - RNA, 19 nt, Human
gacaccccuuauccaggac

SEQ ID NO: 2269420 - RNA, 20 nt, Human
gacaccccuuauccaggacu

SEQ ID NO: 2269421 - RNA, 21 nt, Human
gacaccccuuauccaggacuc

SEQ ID NO: 2269422 - RNA, 15 nt, Human
gacacauaugagggg

SEQ ID NO: 2269423 - RNA, 16 nt, Human
gacacauaugaggggg

SEQ ID NO: 2269424 - RNA, 22 nt, Human
gacacauaugcaccuugugucu

SEQ ID NO: 2269425 - RNA, 12 nt, Human
gacacccuguga

SEQ ID NO: 2269426 - RNA, 13 nt, Human
gacacccugugau

SEQ ID NO: 2269427 - RNA, 17 nt, Human
gacacaggcccucccug

SEQ ID NO: 2269428 - RNA, 18 nt, Human
gacacaggcccggcucca

SEQ ID NO: 2269429 - RNA, 20 nt, Human
gacacagggacuugaaguug

SEQ ID NO: 2269430 - RNA, 21 nt, Human
gacacagggacuugaaguugu

SEQ ID NO: 2269431 - RNA, 16 nt, Human
gacacagggacuugaa

SEQ ID NO: 2269432 - RNA, 18 nt, Human
gacacagggacuugaagu

SEQ ID NO: 2269433 - RNA, 19 nt, Human
gacacagggacuugaaguu

SEQ ID NO: 2269434 - RNA, 17 nt, Human
gacacagugaccauacu

SEQ ID NO: 2269435 - RNA, 17 nt, Human
gacacaggucuuuccua

SEQ ID NO: 2269436 - RNA, 16 nt, Human
gacacaggucuuuccu

SEQ ID NO: 2269437 - RNA, 22 nt, Human
gacacaggucuuuccuaaggcu

SEQ ID NO: 2269438 - RNA, 19 nt, Human
gacaccugcaccucccccc

SEQ ID NO: 2269439 - RNA, 17 nt, Human
gacaccugcaccucccc

SEQ ID NO: 2269440 - RNA, 16 nt, Human
gacaccugcaccuccc

SEQ ID NO: 2269441 - RNA, 15 nt, Human
gacaccugcaccucc

SEQ ID NO: 2269442 - RNA, 13 nt, Human
gacaccugcaccu

SEQ ID NO: 2269443 - RNA, 22 nt, Human
gacaccugcaccuccccccacu

SEQ ID NO: 2269444 - RNA, 20 nt, Human
gacaccugcaccucccccca

SEQ ID NO: 2269445 - RNA, 17 nt, Human
gacaccuacugaguggc

SEQ ID NO: 2269446 - RNA, 20 nt, Human
gacaccgggguggugggaac

SEQ ID NO: 2269447 - RNA, 19 nt, Human
gacaccgggccaguaucua

SEQ ID NO: 2269448 - RNA, 22 nt, Human
gacaccgggccaguaucuauau

SEQ ID NO: 2269449 - RNA, 13 nt, Human
gacacccucaacc

SEQ ID NO: 2269450 - RNA, 10 nt, Human
gacacccggc

SEQ ID NO: 2269451 - RNA, 16 nt, Human
gacaccgccacauggc

SEQ ID NO: 2269452 - RNA, 22 nt, Human
gacacccugugauggggcccug

SEQ ID NO: 2269453 - RNA, 23 nt, Human
gacacccugugauggggcccugc

SEQ ID NO: 2269454 - RNA, 12 nt, Human
gacaccuuucau

SEQ ID NO: 2269455 - RNA, 17 nt, Human
gacaccuuugcaggcau

SEQ ID NO: 2269456 - RNA, 15 nt, Human
gacacggggcagugg

SEQ ID NO: 2269457 - RNA, 14 nt, Human
gacacguccacccc

SEQ ID NO: 2269458 - RNA, 19 nt, Human
gacacgaauauugcugaug

SEQ ID NO: 2269459 - RNA, 17 nt, Human
gacacgaauauugcuga

SEQ ID NO: 2269460 - RNA, 18 nt, Human
gacacgaauauugcugau

SEQ ID NO: 2269461 - RNA, 15 nt, Human
gacacuaaccacgcu

SEQ ID NO: 2269462 - RNA, 16 nt, Human
gacacuaaccacgcug

SEQ ID NO: 2269463 - RNA, 17 nt, Human
gacacuaaccacgcugg

SEQ ID NO: 2269464 - RNA, 18 nt, Human
gacacuaaccacgcugga

SEQ ID NO: 2269465 - RNA, 14 nt, Human
gacaccuuggacau

SEQ ID NO: 2269466 - RNA, 15 nt, Human
gacacgaauauugcu

SEQ ID NO: 2269467 - RNA, 18 nt, Human
gacaccuugacagggcac

SEQ ID NO: 2269468 - RNA, 20 nt, Human
gacaccuugacagggcacac

SEQ ID NO: 2269469 - RNA, 15 nt, Human
gacaccuugacaggg

SEQ ID NO: 2269470 - RNA, 17 nt, Human
gacaccuugacagggca

SEQ ID NO: 2269471 - RNA, 15 nt, Human
gacaccugcccugcc

SEQ ID NO: 2269472 - RNA, 14 nt, Human
gacaccugcccugc

SEQ ID NO: 2269473 - RNA, 13 nt, Human
gacaccugcccug

SEQ ID NO: 2269474 - RNA, 22 nt, Human
gacaauuuauauuuaauaaaau

SEQ ID NO: 2269475 - RNA, 15 nt, Human
gacaauugucuuuuu

SEQ ID NO: 2269476 - RNA, 12 nt, Human
gacaauuuauua

SEQ ID NO: 2269477 - RNA, 16 nt, Human
gacaaugcaaaccauc

SEQ ID NO: 2269478 - RNA, 18 nt, Human
gacaaugcaaaccaucau

SEQ ID NO: 2269479 - RNA, 21 nt, Human
gacaaugacuuacuguacaug

SEQ ID NO: 2269480 - RNA, 12 nt, Human
gacaaugcaaac

SEQ ID NO: 2269481 - RNA, 20 nt, Human
gacaaugacuuacuguacau

SEQ ID NO: 2269482 - RNA, 17 nt, Human
gacaaugacuuacugua

SEQ ID NO: 2269483 - RNA, 12 nt, Human
gacacacacaca

SEQ ID NO: 2269484 - RNA, 12 nt, Human
gacacacacacg

SEQ ID NO: 2269485 - RNA, 13 nt, Human
gacacacacacgc

SEQ ID NO: 2269486 - RNA, 14 nt, Human
gacacacacacgca

SEQ ID NO: 2269487 - RNA, 15 nt, Human
gacacacacacgcac

SEQ ID NO: 2269488 - RNA, 22 nt, Human
gacacaagccuucggcgccuua

SEQ ID NO: 2269489 - RNA, 22 nt, Human
gacacaaguggaccuuaggccu

SEQ ID NO: 2269490 - RNA, 20 nt, Human
gacaauuucaaaaaaauaaa

SEQ ID NO: 2269491 - RNA, 19 nt, Human
gacaauuuauuauggcaca

SEQ ID NO: 2269492 - RNA, 13 nt, Human
gacaauuuauuau

SEQ ID NO: 2269493 - RNA, 22 nt, Human
gacacacacacgcacgcacaca

SEQ ID NO: 2269494 - RNA, 23 nt, Human
gacacacacacgcacgcacacac

SEQ ID NO: 2269495 - RNA, 18 nt, Human
gacacacacacgcacgca

SEQ ID NO: 2269496 - RNA, 19 nt, Human
gacacacacacgcacgcac

SEQ ID NO: 2269497 - RNA, 20 nt, Human
gacacacacacgcacgcaca

SEQ ID NO: 2269498 - RNA, 21 nt, Human
gacacacacacgcacgcacac

SEQ ID NO: 2269499 - RNA, 13 nt, Human
gacacacagcucu

SEQ ID NO: 2269500 - RNA, 15 nt, Human
gacacaggcccggcu

SEQ ID NO: 2269501 - RNA, 17 nt, Human
gacacaggcccggcucc

SEQ ID NO: 2269502 - RNA, 22 nt, Human
gacaagguucuucccuuuuaca

SEQ ID NO: 2269503 - RNA, 15 nt, Human
gacaaguggacucag

SEQ ID NO: 2269504 - RNA, 20 nt, Human
gacaagugcugaacagugga

SEQ ID NO: 2269505 - RNA, 20 nt, Human
gacaaguggacucagggcag

SEQ ID NO: 2269506 - RNA, 14 nt, Human
gacaauaaaacauu

SEQ ID NO: 2269507 - RNA, 14 nt, Human
gacaaggccccaga

SEQ ID NO: 2269508 - RNA, 13 nt, Human
gacaaggccccag

SEQ ID NO: 2269509 - RNA, 17 nt, Human
gacaagccccaggcagg

SEQ ID NO: 2269510 - RNA, 16 nt, Human
gacaagccccaggcag

SEQ ID NO: 2269511 - RNA, 17 nt, Human
gacaaggccccagagac

SEQ ID NO: 2269512 - RNA, 16 nt, Human
gacaaggccccagaga

SEQ ID NO: 2269513 - RNA, 23 nt, Human
gacaaggccccagagacucagag

SEQ ID NO: 2269514 - RNA, 21 nt, Human
gacaagguagcccuggccaga

SEQ ID NO: 2269515 - RNA, 14 nt, Human
gacaagguagcccu

SEQ ID NO: 2269516 - RNA, 23 nt, Human
gacaagguagcccuggccagagg

SEQ ID NO: 2269517 - RNA, 21 nt, Human
gacaaucaugaaauaugcauc

SEQ ID NO: 2269518 - RNA, 19 nt, Human
gacaaucaugaaauaugca

SEQ ID NO: 2269519 - RNA, 20 nt, Human
gacaaucaugaaauaugcau

SEQ ID NO: 2269520 - RNA, 16 nt, Human
gacaaugacccagugg

SEQ ID NO: 2269521 - RNA, 17 nt, Human
gacaaucaacucuaaua

SEQ ID NO: 2269522 - RNA, 14 nt, Human
gacaaucagucccc

SEQ ID NO: 2269523 - RNA, 16 nt, Human
gacaaucaguccccuc

SEQ ID NO: 2269524 - RNA, 17 nt, Human
gacaaucaguccccucc

SEQ ID NO: 2269525 - RNA, 18 nt, Human
gacaaucaguccccuccc

SEQ ID NO: 2269526 - RNA, 19 nt, Human
gacaaucaguccccuccca

SEQ ID NO: 2269527 - RNA, 20 nt, Human
gacaaucaguccccucccau

SEQ ID NO: 2269528 - RNA, 19 nt, Human
gacaauaauuucagguuuu

SEQ ID NO: 2269529 - RNA, 13 nt, Human
gacaauaauuuca

SEQ ID NO: 2269530 - RNA, 15 nt, Human
gacaauaaucucacu

SEQ ID NO: 2269531 - RNA, 14 nt, Human
gacaagagauggga

SEQ ID NO: 2269532 - RNA, 20 nt, Human
gacaagagaugggaaugagg

SEQ ID NO: 2269533 - RNA, 16 nt, Human
gacaagacuucaguau

SEQ ID NO: 2269534 - RNA, 19 nt, Human
gacaagacuucaguauguu

SEQ ID NO: 2269535 - RNA, 20 nt, Human
gacaagacuucaguauguug

SEQ ID NO: 2269536 - RNA, 24 nt, Human
gacaagacuucaguauguugucaa

SEQ ID NO: 2269537 - RNA, 16 nt, Human
gaagucuuuguacaga

SEQ ID NO: 2269538 - RNA, 14 nt, Human
gaagucuuuguaca

SEQ ID NO: 2269539 - RNA, 22 nt, Human
gacaaggauugcuacuguccua

SEQ ID NO: 2269540 - RNA, 15 nt, Human
gacaagcucacagac

SEQ ID NO: 2269541 - RNA, 15 nt, Human
gacaagccccaggca

SEQ ID NO: 2269542 - RNA, 23 nt, Human
gacaagccaacuuguaaauacac

SEQ ID NO: 2269543 - RNA, 12 nt, Human
gacaagccccag

SEQ ID NO: 2269544 - RNA, 19 nt, Human
gacaagccaacuuguaaau

SEQ ID NO: 2269545 - RNA, 16 nt, Human
gacaagcacugcuagg

SEQ ID NO: 2269546 - RNA, 22 nt, Human
gacaagccaacuuguaaauaca

SEQ ID NO: 2269547 - RNA, 12 nt, Human
gacaagcagagg

SEQ ID NO: 2269548 - RNA, 19 nt, Human
gacaagcaauuagacaaga

SEQ ID NO: 2269549 - RNA, 18 nt, Human
gacaagagaugggaauga

SEQ ID NO: 2269550 - RNA, 22 nt, Human
gacagcuucucauccugcaggc

SEQ ID NO: 2269551 - RNA, 15 nt, Human
gacagcuugagccgg

SEQ ID NO: 2269552 - RNA, 22 nt, Human
gacagcuugagccgggccccug

SEQ ID NO: 2269553 - RNA, 21 nt, Human
gacagcuucucauccugcagg

SEQ ID NO: 2269554 - RNA, 20 nt, Human
gacaggacgggcuugggcuu

SEQ ID NO: 2269555 - RNA, 15 nt, Human
gacaggaccugacua

SEQ ID NO: 2269556 - RNA, 24 nt, Human
gacaggagaaaugcauccauuccu

SEQ ID NO: 2269557 - RNA, 12 nt, Human
gacaggagaaau

SEQ ID NO: 2269558 - RNA, 11 nt, Human
gacaggagaaa

SEQ ID NO: 2269559 - RNA, 21 nt, Human
gacaggagaccuggcacugga

SEQ ID NO: 2269560 - RNA, 18 nt, Human
gacaggagaccuggcacu

SEQ ID NO: 2269561 - RNA, 17 nt, Human
gacagcugucccuguca

SEQ ID NO: 2269562 - RNA, 16 nt, Human
gacagcugucccuguc

SEQ ID NO: 2269563 - RNA, 15 nt, Human
gacagcugucccugu

SEQ ID NO: 2269564 - RNA, 14 nt, Human
gacagcugucccug

SEQ ID NO: 2269565 - RNA, 19 nt, Human
gacagcugucccugucacc

SEQ ID NO: 2269566 - RNA, 18 nt, Human
gacagcugucccugucac

SEQ ID NO: 2269567 - RNA, 22 nt, Human
gacagcugucccugucaccaag

SEQ ID NO: 2269568 - RNA, 21 nt, Human
gacagcugcuccuagagggag

SEQ ID NO: 2269569 - RNA, 20 nt, Human
gacagcugcuccuagaggga

SEQ ID NO: 2269570 - RNA, 17 nt, Human
gacagcugcuccuagag

SEQ ID NO: 2269571 - RNA, 14 nt, Human
gacagcugcuccua

SEQ ID NO: 2269572 - RNA, 11 nt, Human
gacagcugcuc

SEQ ID NO: 2269573 - RNA, 14 nt, Human
gacagcugccuggg

SEQ ID NO: 2269574 - RNA, 15 nt, Human
gacagcugccuggga

SEQ ID NO: 2269575 - RNA, 14 nt, Human
gacaggcaaugcug

SEQ ID NO: 2269576 - RNA, 16 nt, Human
gacaggcaaugcuggc

SEQ ID NO: 2269577 - RNA, 17 nt, Human
gacaggagggcaagggc

SEQ ID NO: 2269578 - RNA, 16 nt, Human
gacaggaugggggcug

SEQ ID NO: 2269579 - RNA, 24 nt, Human
gacaggcaaugcuggcuguuggcu

SEQ ID NO: 2269580 - RNA, 17 nt, Human
gacaggcaaugcuggcu

SEQ ID NO: 2269581 - RNA, 18 nt, Human
gacaggcauguucucuga

SEQ ID NO: 2269582 - RNA, 19 nt, Human
gacaggcauguucucugag

SEQ ID NO: 2269583 - RNA, 19 nt, Human
gacagccaacuauggccug

SEQ ID NO: 2269584 - RNA, 19 nt, Human
gacagaugccccagagcug

SEQ ID NO: 2269585 - RNA, 18 nt, Human
gacagaugccccagagcu

SEQ ID NO: 2269586 - RNA, 14 nt, Human
gacagaugccccag

SEQ ID NO: 2269587 - RNA, 18 nt, Human
gacagaucaauggcgcag

SEQ ID NO: 2269588 - RNA, 19 nt, Human
gacagaugaaugccgugga

SEQ ID NO: 2269589 - RNA, 20 nt, Human
gacagaugaaugccguggau

SEQ ID NO: 2269590 - RNA, 13 nt, Human
gacagccacggcc

SEQ ID NO: 2269591 - RNA, 22 nt, Human
gacagccaacuauggccugugg

SEQ ID NO: 2269592 - RNA, 12 nt, Human
gacagcugccug

SEQ ID NO: 2269593 - RNA, 13 nt, Human
gacagcugccugg

SEQ ID NO: 2269594 - RNA, 14 nt, Human
gacagacacaggcc

SEQ ID NO: 2269595 - RNA, 15 nt, Human
gacacguccacccca

SEQ ID NO: 2269596 - RNA, 20 nt, Human
gacacuaaccacgcuggacc

SEQ ID NO: 2269597 - RNA, 21 nt, Human
gacacuaaccacgcuggaccu

SEQ ID NO: 2269598 - RNA, 15 nt, Human
gacagacacaggccc

SEQ ID NO: 2269599 - RNA, 16 nt, Human
gacagacacaggcccg

SEQ ID NO: 2269600 - RNA, 23 nt, Human
gacagaucaagcugugagacagu

SEQ ID NO: 2269601 - RNA, 19 nt, Human
gacagaucucugcuuugga

SEQ ID NO: 2269602 - RNA, 21 nt, Human
gacagaucucugcuuuggaaa

SEQ ID NO: 2269603 - RNA, 23 nt, Human
gacagaucucugcuuuggaaauc

SEQ ID NO: 2269604 - RNA, 13 nt, Human
gacaggcagcaga

SEQ ID NO: 2269605 - RNA, 20 nt, Human
gacaggagggcaagggccau

SEQ ID NO: 2269606 - RNA, 23 nt, Human
gacaggaugggggcuggccucug

SEQ ID NO: 2269607 - RNA, 16 nt, Human
gacaggcccaagagau

SEQ ID NO: 2269608 - RNA, 22 nt, Human
gacaggcccaagagaugaagag

SEQ ID NO: 2269609 - RNA, 18 nt, Human
gacaggcccaagagauga

SEQ ID NO: 2269610 - RNA, 15 nt, Human
gacaggcagccugga

SEQ ID NO: 2269611 - RNA, 14 nt, Human
gacaggcagcagag

SEQ ID NO: 2269612 - RNA, 21 nt, Human
gacaggcccaagagaugaaga

SEQ ID NO: 2269613 - RNA, 13 nt, Human
gacaggcucuuag

SEQ ID NO: 2269614 - RNA, 17 nt, Human
gacaggcucuuagcagc

SEQ ID NO: 2269615 - RNA, 18 nt, Human
gacaggcucuuagcagcu

SEQ ID NO: 2269616 - RNA, 19 nt, Human
gacaggcucuuagcagcuu

SEQ ID NO: 2269617 - RNA, 16 nt, Human
gacauacuaaccagca

SEQ ID NO: 2269618 - RNA, 15 nt, Human
gacauacuaaccagc

SEQ ID NO: 2269619 - RNA, 22 nt, Human
gacauaaugggguccuggccau

SEQ ID NO: 2269620 - RNA, 15 nt, Human
gacagggaagagcag

SEQ ID NO: 2269621 - RNA, 16 nt, Human
gacagggaagagcaga

SEQ ID NO: 2269622 - RNA, 23 nt, Human
gacauaacguuuuuccuuuaaaa

SEQ ID NO: 2269623 - RNA, 22 nt, Human
gacaggcuggcuccagaugcag

SEQ ID NO: 2269624 - RNA, 21 nt, Human
gacaggcuggcuccagaugca

SEQ ID NO: 2269625 - RNA, 14 nt, Human
gacaggcuggcucc

SEQ ID NO: 2269626 - RNA, 12 nt, Human
gacaggcuggcu

SEQ ID NO: 2269627 - RNA, 18 nt, Human
gacauagcccaucccugc

SEQ ID NO: 2269628 - RNA, 21 nt, Human
gacauagagagggagaagaag

SEQ ID NO: 2269629 - RNA, 22 nt, Human
gacauagcccaucccugccugg

SEQ ID NO: 2269630 - RNA, 16 nt, Human
gacauaauuucacuga

SEQ ID NO: 2269631 - RNA, 22 nt, Human
gacauagagagggagaagaagu

SEQ ID NO: 2269632 - RNA, 23 nt, Human
gacauacuaaccagcagaaaugc

SEQ ID NO: 2269633 - RNA, 20 nt, Human
gacauauucauuuggaaaua

SEQ ID NO: 2269634 - RNA, 13 nt, Human
gacauauucauuu

SEQ ID NO: 2269635 - RNA, 23 nt, Human
gacauaggccaugaaaaaaauga

SEQ ID NO: 2269636 - RNA, 21 nt, Human
gacaucuucaaagcuugaaga

SEQ ID NO: 2269637 - RNA, 20 nt, Human
gacaucuucaaagcuugaag

SEQ ID NO: 2269638 - RNA, 19 nt, Human
gacaucuuaguauuugcau

SEQ ID NO: 2269639 - RNA, 20 nt, Human
gacaugaagauucuuuccca

SEQ ID NO: 2269640 - RNA, 16 nt, Human
gacaucuuaguauuug

SEQ ID NO: 2269641 - RNA, 16 nt, Human
gacaucucuuugaauu

SEQ ID NO: 2269642 - RNA, 21 nt, Human
gacaucuguuucuaaauguuu

SEQ ID NO: 2269643 - RNA, 22 nt, Human
gacaucuggaaucuggagacca

SEQ ID NO: 2269644 - RNA, 20 nt, Human
gacaucuggaaucuggagac

SEQ ID NO: 2269645 - RNA, 14 nt, Human
gacaucaacagaua

SEQ ID NO: 2269646 - RNA, 19 nt, Human
gacaucuggaaucuggaga

SEQ ID NO: 2269647 - RNA, 18 nt, Human
gacaucuggaaucuggag

SEQ ID NO: 2269648 - RNA, 14 nt, Human
gacaucuggaaucu

SEQ ID NO: 2269649 - RNA, 17 nt, Human
gacaucucugcacccug

SEQ ID NO: 2269650 - RNA, 17 nt, Human
gacauggacccggagcu

SEQ ID NO: 2269651 - RNA, 16 nt, Human
gacauggacccggagc

SEQ ID NO: 2269652 - RNA, 14 nt, Human
gacaugcugacuuu

SEQ ID NO: 2269653 - RNA, 15 nt, Human
gacaugcugaagcca

SEQ ID NO: 2269654 - RNA, 18 nt, Human
gacaugcugaagccaaag

SEQ ID NO: 2269655 - RNA, 19 nt, Human
gacaugcugaagccaaagc

SEQ ID NO: 2269656 - RNA, 17 nt, Human
gacauggagacuccugc

SEQ ID NO: 2269657 - RNA, 19 nt, Human
gacauggagacuccugccc

SEQ ID NO: 2269658 - RNA, 20 nt, Human
gacauggagacuccugcccu

SEQ ID NO: 2269659 - RNA, 22 nt, Human
gacauggagacuccugcccugu

SEQ ID NO: 2269660 - RNA, 14 nt, Human
gacaugcugaagcc

SEQ ID NO: 2269661 - RNA, 23 nt, Human
gacaugcgguagccagcacacag

SEQ ID NO: 2269662 - RNA, 22 nt, Human
gacaugcgguagccagcacaca

SEQ ID NO: 2269663 - RNA, 19 nt, Human
gacaugcgguagccagcac

SEQ ID NO: 2269664 - RNA, 14 nt, Human
gacaugaauaugau

SEQ ID NO: 2269665 - RNA, 18 nt, Human
gacaugcgguagccagca

SEQ ID NO: 2269666 - RNA, 12 nt, Human
gacaugaauaug

SEQ ID NO: 2269667 - RNA, 16 nt, Human
gacauggggaggaagg

SEQ ID NO: 2269668 - RNA, 15 nt, Human
gacauggggaggaag

SEQ ID NO: 2269669 - RNA, 14 nt, Human
gacauggugccuga

SEQ ID NO: 2269670 - RNA, 16 nt, Human
gacauggugccugaga

SEQ ID NO: 2269671 - RNA, 17 nt, Human
gacauggugccugagag

SEQ ID NO: 2269672 - RNA, 18 nt, Human
gacauggugccugagagg

SEQ ID NO: 2269673 - RNA, 19 nt, Human
gacauggugccugagaggc

SEQ ID NO: 2269674 - RNA, 17 nt, Human
gacaugggacauuugcu

SEQ ID NO: 2269675 - RNA, 22 nt, Human
gacaugggacauuugcucaugg

SEQ ID NO: 2269676 - RNA, 15 nt, Human
gacauuuuuucaguc

SEQ ID NO: 2269677 - RNA, 20 nt, Human
gacauuuuuucagucauaua

SEQ ID NO: 2269678 - RNA, 13 nt, Human
gaccaaaccuagc

SEQ ID NO: 2269679 - RNA, 17 nt, Human
gaccaaaccuagccccu

SEQ ID NO: 2269680 - RNA, 13 nt, Human
gaccaaaaucccc

SEQ ID NO: 2269681 - RNA, 17 nt, Human
gaccaaaauccccuucu

SEQ ID NO: 2269682 - RNA, 19 nt, Human
gaccaaaauccccuucuca

SEQ ID NO: 2269683 - RNA, 17 nt, Human
gaccaacauggagaaac

SEQ ID NO: 2269684 - RNA, 23 nt, Human
gaccaaauuccuuggcaugccuu

SEQ ID NO: 2269685 - RNA, 16 nt, Human
gaccaacauggagaaa

SEQ ID NO: 2269686 - RNA, 22 nt, Human
gaccaaauuccuuggcaugccu

SEQ ID NO: 2269687 - RNA, 21 nt, Human
gacaugucuuuucuugcauga

SEQ ID NO: 2269688 - RNA, 17 nt, Human
gacaugucuguucuaca

SEQ ID NO: 2269689 - RNA, 12 nt, Human
gacauguacaga

SEQ ID NO: 2269690 - RNA, 12 nt, Human
gacaugugaaac

SEQ ID NO: 2269691 - RNA, 14 nt, Human
gacaugugaaaccu

SEQ ID NO: 2269692 - RNA, 15 nt, Human
gacaugugaaaccuu

SEQ ID NO: 2269693 - RNA, 18 nt, Human
gacaugugaaaccuuuuu

SEQ ID NO: 2269694 - RNA, 11 nt, Human
gacauguacag

SEQ ID NO: 2269695 - RNA, 15 nt, Human
gacaugucuguucua

SEQ ID NO: 2269696 - RNA, 20 nt, Human
gacauggugccugagaggca

SEQ ID NO: 2269697 - RNA, 21 nt, Human
gacauggugccugagaggcag

SEQ ID NO: 2269698 - RNA, 22 nt, Human
gacauggugccugagaggcagg

SEQ ID NO: 2269699 - RNA, 23 nt, Human
gacauggugccugagaggcaggc

SEQ ID NO: 2269700 - RNA, 17 nt, Human
gacaugucuuuucuugc

SEQ ID NO: 2269701 - RNA, 21 nt, Human
gaccugccaggcagggguggg

SEQ ID NO: 2269702 - RNA, 19 nt, Human
gaccugccaggcaggggug

SEQ ID NO: 2269703 - RNA, 20 nt, Human
gaccugccaggcaggggugg

SEQ ID NO: 2269704 - RNA, 21 nt, Human
gaccugccccuccucucugcc

SEQ ID NO: 2269705 - RNA, 16 nt, Human
gaccugccaggcaggg

SEQ ID NO: 2269706 - RNA, 17 nt, Human
gaccugccaggcagggg

SEQ ID NO: 2269707 - RNA, 18 nt, Human
gaccugccaggcaggggu

SEQ ID NO: 2269708 - RNA, 20 nt, Human
gaccugcaggccaagagcag

SEQ ID NO: 2269709 - RNA, 15 nt, Human
gaccugccaggcagg

SEQ ID NO: 2269710 - RNA, 21 nt, Human
gaccugccccgcccagcugca

SEQ ID NO: 2269711 - RNA, 11 nt, Human
gaccugccucc

SEQ ID NO: 2269712 - RNA, 22 nt, Human
gaccugccucccuucaugcaug

SEQ ID NO: 2269713 - RNA, 13 nt, Human
gaccugccuccug

SEQ ID NO: 2269714 - RNA, 14 nt, Human
gaccugccuccugc

SEQ ID NO: 2269715 - RNA, 15 nt, Human
gaccugccucggccu

SEQ ID NO: 2269716 - RNA, 16 nt, Human
gaccugccuccugccu

SEQ ID NO: 2269717 - RNA, 19 nt, Human
gaccugccuccugccugcc

SEQ ID NO: 2269718 - RNA, 20 nt, Human
gaccugccuccugccugccc

SEQ ID NO: 2269719 - RNA, 22 nt, Human
gaccugccuccugccugccccu

SEQ ID NO: 2269720 - RNA, 13 nt, Human
gaccugcaggcca

SEQ ID NO: 2269721 - RNA, 20 nt, Human
gaccugcacuggggagcccg

SEQ ID NO: 2269722 - RNA, 16 nt, Human
gaccugcacuggggag

SEQ ID NO: 2269723 - RNA, 20 nt, Human
gaccugaggcuccugugcua

SEQ ID NO: 2269724 - RNA, 19 nt, Human
gaccugauuuacaguuuca

SEQ ID NO: 2269725 - RNA, 21 nt, Human
gaccugauccuggaggcccag

SEQ ID NO: 2269726 - RNA, 18 nt, Human
gaccugauccuggaggcc

SEQ ID NO: 2269727 - RNA, 15 nt, Human
gaccugauccuggag

SEQ ID NO: 2269728 - RNA, 14 nt, Human
gaccugauccugga

SEQ ID NO: 2269729 - RNA, 23 nt, Human
gaccugauuucugagcauuuaau

SEQ ID NO: 2269730 - RNA, 18 nt, Human
gaccugaggcccuucucu

SEQ ID NO: 2269731 - RNA, 21 nt, Human
gaccugaggcccuucucucca

SEQ ID NO: 2269732 - RNA, 17 nt, Human
gaccucaggcacuagcc

SEQ ID NO: 2269733 - RNA, 17 nt, Human
gaccucagcugcuucuc

SEQ ID NO: 2269734 - RNA, 18 nt, Human
gaccucaggcacuagccu

SEQ ID NO: 2269735 - RNA, 19 nt, Human
gaccucaggcacuagccuu

SEQ ID NO: 2269736 - RNA, 21 nt, Human
gaccucaggcacuagccuuug

SEQ ID NO: 2269737 - RNA, 14 nt, Human
gaccugaggcuccu

SEQ ID NO: 2269738 - RNA, 18 nt, Human
gaccugaggcuccugugc

SEQ ID NO: 2269739 - RNA, 13 nt, Human
gaccugaggcugu

SEQ ID NO: 2269740 - RNA, 14 nt, Human
gaccugaggcugug

SEQ ID NO: 2269741 - RNA, 15 nt, Human
gaccugaggcugugg

SEQ ID NO: 2269742 - RNA, 17 nt, Human
gaccugaggcugugguc

SEQ ID NO: 2269743 - RNA, 11 nt, Human
gaccucaggcc

SEQ ID NO: 2269744 - RNA, 12 nt, Human
gaccucaggccu

SEQ ID NO: 2269745 - RNA, 13 nt, Human
gaccucaggccug

SEQ ID NO: 2269746 - RNA, 15 nt, Human
gaccugaggcccuuc

SEQ ID NO: 2269747 - RNA, 14 nt, Human
gacccuguggaagc

SEQ ID NO: 2269748 - RNA, 21 nt, Human
gacccugugacauggugccug

SEQ ID NO: 2269749 - RNA, 22 nt, Human
gacccugugacauggugccuga

SEQ ID NO: 2269750 - RNA, 15 nt, Human
gacccuguugcuaag

SEQ ID NO: 2269751 - RNA, 16 nt, Human
gacccuguugcuaagc

SEQ ID NO: 2269752 - RNA, 22 nt, Human
gaccccucaccuugcaacacac

SEQ ID NO: 2269753 - RNA, 20 nt, Human
gacccugugacauggugccu

SEQ ID NO: 2269754 - RNA, 12 nt, Human
gacccugucucu

SEQ ID NO: 2269755 - RNA, 14 nt, Human
gaccccucaccuug

SEQ ID NO: 2269756 - RNA, 13 nt, Human
gaccccucaccuu

SEQ ID NO: 2269757 - RNA, 19 nt, Human
gacccuucccuugagcccu

SEQ ID NO: 2269758 - RNA, 17 nt, Human
gacccuuacagccucug

SEQ ID NO: 2269759 - RNA, 21 nt, Human
gacccuuauuacacggaaaac

SEQ ID NO: 2269760 - RNA, 17 nt, Human
gacccuugacaccugcu

SEQ ID NO: 2269761 - RNA, 21 nt, Human
gacccuguugcuaagccccag

SEQ ID NO: 2269762 - RNA, 20 nt, Human
gacccuuacagccucugacu

SEQ ID NO: 2269763 - RNA, 15 nt, Human
gaccgguacagaaag

SEQ ID NO: 2269764 - RNA, 15 nt, Human
gaccggcggcucgga

SEQ ID NO: 2269765 - RNA, 15 nt, Human
gaccgugaggccaga

SEQ ID NO: 2269766 - RNA, 13 nt, Human
gaccguccucacc

SEQ ID NO: 2269767 - RNA, 14 nt, Human
gaccgugaggccag

SEQ ID NO: 2269768 - RNA, 15 nt, Human
gaccuaccucagguu

SEQ ID NO: 2269769 - RNA, 12 nt, Human
gaccuaccucag

SEQ ID NO: 2269770 - RNA, 13 nt, Human
gaccuaccucagg

SEQ ID NO: 2269771 - RNA, 14 nt, Human
gaccuaccucaggu

SEQ ID NO: 2269772 - RNA, 22 nt, Human
gaccuaaugcuccuuguuccua

SEQ ID NO: 2269773 - RNA, 13 nt, Human
gaccuacaaauca

SEQ ID NO: 2269774 - RNA, 15 nt, Human
gaccuaaugcuccuu

SEQ ID NO: 2269775 - RNA, 14 nt, Human
gaccuaaugcuccu

SEQ ID NO: 2269776 - RNA, 22 nt, Human
gaccuaaaauuugcccucccau

SEQ ID NO: 2269777 - RNA, 20 nt, Human
gaccuaaauggccucaugug

SEQ ID NO: 2269778 - RNA, 21 nt, Human
gaccgugggcggggccuugcg

SEQ ID NO: 2269779 - RNA, 18 nt, Human
gaccgugggcggggccuu

SEQ ID NO: 2269780 - RNA, 20 nt, Human
gaccgugggcggggccuugc

SEQ ID NO: 2269781 - RNA, 16 nt, Human
gaccuaaauggccuca

SEQ ID NO: 2269782 - RNA, 19 nt, Human
gaccuaaaauuugcccucc

SEQ ID NO: 2269783 - RNA, 20 nt, Human
gaccuaaaauuugcccuccc

SEQ ID NO: 2269784 - RNA, 20 nt, Human
gaccucagccuuccccuugc

SEQ ID NO: 2269785 - RNA, 14 nt, Human
gaccucagcugcuu

SEQ ID NO: 2269786 - RNA, 16 nt, Human
gaccucagcugcuucu

SEQ ID NO: 2269787 - RNA, 14 nt, Human
gaccucagccuucc

SEQ ID NO: 2269788 - RNA, 13 nt, Human
gaccucagccuuc

SEQ ID NO: 2269789 - RNA, 19 nt, Human
gaccucagccugugcugcc

SEQ ID NO: 2269790 - RNA, 16 nt, Human
gaccucagccugugcu

SEQ ID NO: 2269791 - RNA, 14 nt, Human
gaccucagccugug

SEQ ID NO: 2269792 - RNA, 13 nt, Human
gaccucagccugu

SEQ ID NO: 2269793 - RNA, 12 nt, Human
gaccucagccug

SEQ ID NO: 2269794 - RNA, 11 nt, Human
gaccucagccu

SEQ ID NO: 2269795 - RNA, 11 nt, Human
gaccucagcca

SEQ ID NO: 2269796 - RNA, 21 nt, Human
gaccucagaguccaggcccca

SEQ ID NO: 2269797 - RNA, 10 nt, Human
gaccucagcc

SEQ ID NO: 2269798 - RNA, 19 nt, Human
gaccucagaguccaggccc

SEQ ID NO: 2269799 - RNA, 18 nt, Human
gaccucagaguccaggcc

SEQ ID NO: 2269800 - RNA, 17 nt, Human
gaccucagaguccaggc

SEQ ID NO: 2269801 - RNA, 14 nt, Human
gaccaacugggccc

SEQ ID NO: 2269802 - RNA, 13 nt, Human
gaccaacugggcc

SEQ ID NO: 2269803 - RNA, 17 nt, Human
gaccaacuagacauucu

SEQ ID NO: 2269804 - RNA, 18 nt, Human
gaccaacuagacauucug

SEQ ID NO: 2269805 - RNA, 19 nt, Human
gaccaacuagacauucugu

SEQ ID NO: 2269806 - RNA, 20 nt, Human
gaccaacuagacauucuguc

SEQ ID NO: 2269807 - RNA, 14 nt, Human
gaccaaccugacca

SEQ ID NO: 2269808 - RNA, 13 nt, Human
gaccaaccugacc

SEQ ID NO: 2269809 - RNA, 18 nt, Human
gaccaacccuguuuccug

SEQ ID NO: 2269810 - RNA, 22 nt, Human
gaccaacauggagaaacccugu

SEQ ID NO: 2269811 - RNA, 21 nt, Human
gaccaacauggagaaacccug

SEQ ID NO: 2269812 - RNA, 16 nt, Human
gaccaacccuguuucc

SEQ ID NO: 2269813 - RNA, 17 nt, Human
gaccaacccuguuuccu

SEQ ID NO: 2269814 - RNA, 14 nt, Human
gaccaagcaggaag

SEQ ID NO: 2269815 - RNA, 16 nt, Human
gaccaagagagaaaga

SEQ ID NO: 2269816 - RNA, 15 nt, Human
gaccaagagagaaag

SEQ ID NO: 2269817 - RNA, 12 nt, Human
gaccaagcagga

SEQ ID NO: 2269818 - RNA, 14 nt, Human
gaccaagagagaaa

SEQ ID NO: 2269819 - RNA, 19 nt, Human
gaccaacugggcccaagac

SEQ ID NO: 2269820 - RNA, 14 nt, Human
gaccaacugucacu

SEQ ID NO: 2269821 - RNA, 18 nt, Human
gaccaagagagaaagaag

SEQ ID NO: 2269822 - RNA, 12 nt, Human
gacccaccccug

SEQ ID NO: 2269823 - RNA, 14 nt, Human
gacccaccccugug

SEQ ID NO: 2269824 - RNA, 11 nt, Human
gacccacugcu

SEQ ID NO: 2269825 - RNA, 22 nt, Human
gacccaccugguggccucugcc

SEQ ID NO: 2269826 - RNA, 17 nt, Human
gacccagcccucauccc

SEQ ID NO: 2269827 - RNA, 15 nt, Human
gacccaccccugugc

SEQ ID NO: 2269828 - RNA, 16 nt, Human
gacccaccccugugcu

SEQ ID NO: 2269829 - RNA, 17 nt, Human
gacccaccccugugcuc

SEQ ID NO: 2269830 - RNA, 18 nt, Human
gacccaccccugugcucc

SEQ ID NO: 2269831 - RNA, 12 nt, Human
gacccacugcuu

SEQ ID NO: 2269832 - RNA, 19 nt, Human
gaccccagcggcugaguca

SEQ ID NO: 2269833 - RNA, 14 nt, Human
gacccagucccugg

SEQ ID NO: 2269834 - RNA, 16 nt, Human
gacccaugcugcccug

SEQ ID NO: 2269835 - RNA, 14 nt, Human
gacccaugcugccc

SEQ ID NO: 2269836 - RNA, 15 nt, Human
gacccaugcugcccu

SEQ ID NO: 2269837 - RNA, 13 nt, Human
gacccaggcuggg

SEQ ID NO: 2269838 - RNA, 19 nt, Human
gacccaggccgcagcucuu

SEQ ID NO: 2269839 - RNA, 14 nt, Human
gacccaggcugggc

SEQ ID NO: 2269840 - RNA, 15 nt, Human
gacccaggcugggca

SEQ ID NO: 2269841 - RNA, 15 nt, Human
gacccagucccuggg

SEQ ID NO: 2269842 - RNA, 11 nt, Human
gacccaggcac

SEQ ID NO: 2269843 - RNA, 16 nt, Human
gacccaggcaccugca

SEQ ID NO: 2269844 - RNA, 11 nt, Human
gacccaggccg

SEQ ID NO: 2269845 - RNA, 13 nt, Human
gacccaggccgca

SEQ ID NO: 2269846 - RNA, 15 nt, Human
gacccaggccgcagc

SEQ ID NO: 2269847 - RNA, 17 nt, Human
gacccaggccgcagcuc

SEQ ID NO: 2269848 - RNA, 22 nt, Human
gacccaggccgcagcucuugcc

SEQ ID NO: 2269849 - RNA, 23 nt, Human
gacccugucucaaaaaaagaaaa

SEQ ID NO: 2269850 - RNA, 16 nt, Human
gacccugcccuguggg

SEQ ID NO: 2269851 - RNA, 13 nt, Human
gacccugcccugu

SEQ ID NO: 2269852 - RNA, 15 nt, Human
gacccugcccugugg

SEQ ID NO: 2269853 - RNA, 19 nt, Human
gacccugaggcccagaggg

SEQ ID NO: 2269854 - RNA, 20 nt, Human
gacccugaggcccagagggc

SEQ ID NO: 2269855 - RNA, 12 nt, Human
gacccugcccug

SEQ ID NO: 2269856 - RNA, 21 nt, Human
gacccugaggcccagagggcc

SEQ ID NO: 2269857 - RNA, 13 nt, Human
gaccccuccaugu

SEQ ID NO: 2269858 - RNA, 23 nt, Human
gaccccucauagcccucacccug

SEQ ID NO: 2269859 - RNA, 18 nt, Human
gacccugaggcccagagg

SEQ ID NO: 2269860 - RNA, 12 nt, Human
gaccccucaccu

SEQ ID NO: 2269861 - RNA, 18 nt, Human
gaccccaucugcccagga

SEQ ID NO: 2269862 - RNA, 22 nt, Human
gaccccucauagcccucacccu

SEQ ID NO: 2269863 - RNA, 20 nt, Human
gaccccgagccuggcuccaa

SEQ ID NO: 2269864 - RNA, 19 nt, Human
gaccccaucugugaauaag

SEQ ID NO: 2269865 - RNA, 16 nt, Human
gaccccaucugugaau

SEQ ID NO: 2269866 - RNA, 15 nt, Human
gaccccaucugccca

SEQ ID NO: 2269867 - RNA, 16 nt, Human
gaccccaucugcccag

SEQ ID NO: 2269868 - RNA, 17 nt, Human
gaccccaucugcccagg

SEQ ID NO: 2269869 - RNA, 12 nt, Human
gaccccagcugg

SEQ ID NO: 2269870 - RNA, 13 nt, Human
gaccccagcuggg

SEQ ID NO: 2269871 - RNA, 14 nt, Human
gaccccagcuggga

SEQ ID NO: 2269872 - RNA, 15 nt, Human
gaccccagcugggag

SEQ ID NO: 2269873 - RNA, 16 nt, Human
gaccccagcugggagg

SEQ ID NO: 2269874 - RNA, 21 nt, Human
gaccccagcugugagccuugg

SEQ ID NO: 2269875 - RNA, 21 nt, Human
gaccccagcugggaggcaaga

SEQ ID NO: 2269876 - RNA, 18 nt, Human
gaccccagcugugagccu

SEQ ID NO: 2269877 - RNA, 22 nt, Human
gaccccagcugugagccuuggc

SEQ ID NO: 2269878 - RNA, 15 nt, Human
gacuaauuguauaac

SEQ ID NO: 2269879 - RNA, 19 nt, Human
gacuaauuguauaacaggu

SEQ ID NO: 2269880 - RNA, 20 nt, Human
gacuaauuguauaacagguu

SEQ ID NO: 2269881 - RNA, 12 nt, Human
gacuaauuucaa

SEQ ID NO: 2269882 - RNA, 21 nt, Human
gacuaauuguauaacagguua

SEQ ID NO: 2269883 - RNA, 22 nt, Human
gacuaauuguauaacagguuau

SEQ ID NO: 2269884 - RNA, 22 nt, Human
gacuaauuucaaaaugcuuuuu

SEQ ID NO: 2269885 - RNA, 13 nt, Human
gacuaauuucaaa

SEQ ID NO: 2269886 - RNA, 18 nt, Human
gacuaauuuaaaaaauaa

SEQ ID NO: 2269887 - RNA, 15 nt, Human
gacuacaccuacgga

SEQ ID NO: 2269888 - RNA, 13 nt, Human
gacuaauuguaua

SEQ ID NO: 2269889 - RNA, 13 nt, Human
gacguuccagccg

SEQ ID NO: 2269890 - RNA, 21 nt, Human
gacuaauuccugcccugccca

SEQ ID NO: 2269891 - RNA, 14 nt, Human
gacguguuuguguu

SEQ ID NO: 2269892 - RNA, 12 nt, Human
gacguuccagcc

SEQ ID NO: 2269893 - RNA, 22 nt, Human
gacguguuaugacuccagaauu

SEQ ID NO: 2269894 - RNA, 17 nt, Human
gacuacucccccaggug

SEQ ID NO: 2269895 - RNA, 12 nt, Human
gacuacaggcac

SEQ ID NO: 2269896 - RNA, 15 nt, Human
gacuagaagggccag

SEQ ID NO: 2269897 - RNA, 16 nt, Human
gacuagaaccuggagg

SEQ ID NO: 2269898 - RNA, 20 nt, Human
gacuagaaccuggagggcug

SEQ ID NO: 2269899 - RNA, 15 nt, Human
gacuagaaccuggag

SEQ ID NO: 2269900 - RNA, 23 nt, Human
gacuacugggcaaagaguguaga

SEQ ID NO: 2269901 - RNA, 20 nt, Human
gacucagggccccagcacua

SEQ ID NO: 2269902 - RNA, 18 nt, Human
gacucagggccccagcac

SEQ ID NO: 2269903 - RNA, 13 nt, Human
gacucagggcucc

SEQ ID NO: 2269904 - RNA, 12 nt, Human
gacucagggcuc

SEQ ID NO: 2269905 - RNA, 19 nt, Human
gacucagggcuccuggguu

SEQ ID NO: 2269906 - RNA, 17 nt, Human
gacucagggcuccuggg

SEQ ID NO: 2269907 - RNA, 16 nt, Human
gacucagggcuccugg

SEQ ID NO: 2269908 - RNA, 14 nt, Human
gacucagggcuccu

SEQ ID NO: 2269909 - RNA, 17 nt, Human
gacucagggccccagca

SEQ ID NO: 2269910 - RNA, 15 nt, Human
gacucagggccccag

SEQ ID NO: 2269911 - RNA, 14 nt, Human
gacucagggcccca

SEQ ID NO: 2269912 - RNA, 21 nt, Human
gacucagggccaugccugccc

SEQ ID NO: 2269913 - RNA, 22 nt, Human
gacucagggccaugccugcccc

SEQ ID NO: 2269914 - RNA, 23 nt, Human
gacucagggcagcgccaggcuga

SEQ ID NO: 2269915 - RNA, 19 nt, Human
gacucagggccaugccugc

SEQ ID NO: 2269916 - RNA, 20 nt, Human
gacucagggccaugccugcc

SEQ ID NO: 2269917 - RNA, 18 nt, Human
gacucagggcagcgccag

SEQ ID NO: 2269918 - RNA, 17 nt, Human
gacucagggcagcgcca

SEQ ID NO: 2269919 - RNA, 23 nt, Human
gacucaggaugcccagggccacu

SEQ ID NO: 2269920 - RNA, 19 nt, Human
gacucaggaugcccagggc

SEQ ID NO: 2269921 - RNA, 18 nt, Human
gacucaggaugcccaggg

SEQ ID NO: 2269922 - RNA, 17 nt, Human
gacucaggaugcccagg

SEQ ID NO: 2269923 - RNA, 16 nt, Human
gacucaggaugcccag

SEQ ID NO: 2269924 - RNA, 15 nt, Human
gacucaggaugccca

SEQ ID NO: 2269925 - RNA, 16 nt, Human
gacucagggcagcgcc

SEQ ID NO: 2269926 - RNA, 13 nt, Human
gacucagggcagc

SEQ ID NO: 2269927 - RNA, 12 nt, Human
gacucagggcag

SEQ ID NO: 2269928 - RNA, 17 nt, Human
gacucaggauccagucc

SEQ ID NO: 2269929 - RNA, 23 nt, Human
gacuagaagggccaguccugccu

SEQ ID NO: 2269930 - RNA, 16 nt, Human
gacuagaauucuagug

SEQ ID NO: 2269931 - RNA, 18 nt, Human
gacuagaauucuagugcu

SEQ ID NO: 2269932 - RNA, 22 nt, Human
gacuagaauucuagugcugcug

SEQ ID NO: 2269933 - RNA, 19 nt, Human
gacuagaauucuagugcug

SEQ ID NO: 2269934 - RNA, 21 nt, Human
gacuagaauucuagugcugcu

SEQ ID NO: 2269935 - RNA, 23 nt, Human
gacuccaugagaagccgugggug

SEQ ID NO: 2269936 - RNA, 20 nt, Human
gacuccaguggggcaagauu

SEQ ID NO: 2269937 - RNA, 22 nt, Human
gacucccauuccugaagaacca

SEQ ID NO: 2269938 - RNA, 13 nt, Human
gacucccauuccu

SEQ ID NO: 2269939 - RNA, 19 nt, Human
gacucccuccucaccucug

SEQ ID NO: 2269940 - RNA, 16 nt, Human
gacucccuccucaccu

SEQ ID NO: 2269941 - RNA, 14 nt, Human
gacucccuccucac

SEQ ID NO: 2269942 - RNA, 13 nt, Human
gacucccuccuca

SEQ ID NO: 2269943 - RNA, 12 nt, Human
gacucccuccuc

SEQ ID NO: 2269944 - RNA, 18 nt, Human
gacuccccaggccaggcc

SEQ ID NO: 2269945 - RNA, 23 nt, Human
gacucccauuccugaagaaccag

SEQ ID NO: 2269946 - RNA, 15 nt, Human
gacuccccaggccag

SEQ ID NO: 2269947 - RNA, 16 nt, Human
gacuccccaggccagg

SEQ ID NO: 2269948 - RNA, 24 nt, Human
gacucccuccucaccucuggacug

SEQ ID NO: 2269949 - RNA, 22 nt, Human
gacucccuuaaaauagaaauaa

SEQ ID NO: 2269950 - RNA, 15 nt, Human
gacuccgcuggaggu

SEQ ID NO: 2269951 - RNA, 23 nt, Human
gacucccuccucaccucuggacu

SEQ ID NO: 2269952 - RNA, 20 nt, Human
gacucccuccucaccucugg

SEQ ID NO: 2269953 - RNA, 14 nt, Human
gacuccugcaggca

SEQ ID NO: 2269954 - RNA, 15 nt, Human
gacuccugcaggcag

SEQ ID NO: 2269955 - RNA, 16 nt, Human
gacuccugcaggcagc

SEQ ID NO: 2269956 - RNA, 15 nt, Human
gacucaguuugucag

SEQ ID NO: 2269957 - RNA, 12 nt, Human
gacucaguguuc

SEQ ID NO: 2269958 - RNA, 21 nt, Human
gacucauauccccuauuuaac

SEQ ID NO: 2269959 - RNA, 15 nt, Human
gacucaguggggagg

SEQ ID NO: 2269960 - RNA, 23 nt, Human
gacucagguuguaguaaagaaau

SEQ ID NO: 2269961 - RNA, 21 nt, Human
gacucagguuguaguaaagaa

SEQ ID NO: 2269962 - RNA, 15 nt, Human
gacucagguugucug

SEQ ID NO: 2269963 - RNA, 16 nt, Human
gacuccagacucucug

SEQ ID NO: 2269964 - RNA, 20 nt, Human
gacuccagccugccuggcag

SEQ ID NO: 2269965 - RNA, 12 nt, Human
gacuccaggaga

SEQ ID NO: 2269966 - RNA, 16 nt, Human
gacuccaggagaggag

SEQ ID NO: 2269967 - RNA, 14 nt, Human
gacuccacccaucc

SEQ ID NO: 2269968 - RNA, 16 nt, Human
gacuccacccauccua

SEQ ID NO: 2269969 - RNA, 17 nt, Human
gacucauucugaaggag

SEQ ID NO: 2269970 - RNA, 20 nt, Human
gacucauucccuagaucuuu

SEQ ID NO: 2269971 - RNA, 16 nt, Human
gacucauucugaagga

SEQ ID NO: 2269972 - RNA, 13 nt, Human
gacucauucugaa

SEQ ID NO: 2269973 - RNA, 12 nt, Human
gaccuggagccc

SEQ ID NO: 2269974 - RNA, 13 nt, Human
gaccuggagcccc

SEQ ID NO: 2269975 - RNA, 14 nt, Human
gaccuggagccccu

SEQ ID NO: 2269976 - RNA, 15 nt, Human
gaccuggagccccug

SEQ ID NO: 2269977 - RNA, 21 nt, Human
gaccugcugagggaccagcca

SEQ ID NO: 2269978 - RNA, 20 nt, Human
gaccugcugagggaccagcc

SEQ ID NO: 2269979 - RNA, 19 nt, Human
gaccugcugagggaccagc

SEQ ID NO: 2269980 - RNA, 23 nt, Human
gaccuugaacuggguacuugugg

SEQ ID NO: 2269981 - RNA, 16 nt, Human
gaccuggagccccugg

SEQ ID NO: 2269982 - RNA, 17 nt, Human
gaccuggagccccuggg

SEQ ID NO: 2269983 - RNA, 18 nt, Human
gaccuggagccccugggu

SEQ ID NO: 2269984 - RNA, 20 nt, Human
gaccuggagccccugggugg

SEQ ID NO: 2269985 - RNA, 15 nt, Human
gaccuggauaacuua

SEQ ID NO: 2269986 - RNA, 17 nt, Human
gaccuggauaacuuagg

SEQ ID NO: 2269987 - RNA, 16 nt, Human
gaccuggcaaggacac

SEQ ID NO: 2269988 - RNA, 17 nt, Human
gaccuggcaaggacaca

SEQ ID NO: 2269989 - RNA, 19 nt, Human
gaccugccucggccuccca

SEQ ID NO: 2269990 - RNA, 18 nt, Human
gaccugccucuucccccu

SEQ ID NO: 2269991 - RNA, 23 nt, Human
gaccugccuccugccugccccuc

SEQ ID NO: 2269992 - RNA, 12 nt, Human
gaccugccugua

SEQ ID NO: 2269993 - RNA, 16 nt, Human
gaccugcggcugcugu

SEQ ID NO: 2269994 - RNA, 20 nt, Human
gaccugcggcugcugugugc

SEQ ID NO: 2269995 - RNA, 19 nt, Human
gaccuugaaggguaaagaa

SEQ ID NO: 2269996 - RNA, 16 nt, Human
gaccuugcaacuucau

SEQ ID NO: 2269997 - RNA, 23 nt, Human
gaccuugcaacuucaugucaacu

SEQ ID NO: 2269998 - RNA, 16 nt, Human
gaccuuguuacuucug

SEQ ID NO: 2269999 - RNA, 21 nt, Human
gaccuuucaauaggaaaaacu

SEQ ID NO: 2270000 - RNA, 14 nt, Human
gaccuuguugcaug

SEQ ID NO: 2270001 - RNA, 20 nt, Human
gaccuuguugcaugauguau

SEQ ID NO: 2270002 - RNA, 17 nt, Human
gaccuuguuacuucuga

SEQ ID NO: 2270003 - RNA, 13 nt, Human
gaccuugugaucu

SEQ ID NO: 2270004 - RNA, 15 nt, Human
gaccuuguucacacu

SEQ ID NO: 2270005 - RNA, 21 nt, Human
gacgaacuuccauggcccuca

SEQ ID NO: 2270006 - RNA, 21 nt, Human
gacgacaagugcugaacagug

SEQ ID NO: 2270007 - RNA, 14 nt, Human
gacgaacuuccaug

SEQ ID NO: 2270008 - RNA, 22 nt, Human
gaccuuuucaacuuggcuuccu

SEQ ID NO: 2270009 - RNA, 21 nt, Human
gaccuuugucaucuuucuucu

SEQ ID NO: 2270010 - RNA, 21 nt, Human
gacgaacauccaaccuuccca

SEQ ID NO: 2270011 - RNA, 17 nt, Human
gaccuuuccugaggaag

SEQ ID NO: 2270012 - RNA, 21 nt, Human
gaccuuuccaccacagccagc

SEQ ID NO: 2270013 - RNA, 23 nt, Human
gaccuuuccaccacagccagcac

SEQ ID NO: 2270014 - RNA, 13 nt, Human
gaccuuuccacca

SEQ ID NO: 2270015 - RNA, 20 nt, Human
gaccuuguuguuguuaaaua

SEQ ID NO: 2270016 - RNA, 17 nt, Human
gaccuuucagcugugaa

SEQ ID NO: 2270017 - RNA, 17 nt, Human
gaccuuuccaccacagc

SEQ ID NO: 2270018 - RNA, 18 nt, Human
gaccuuuccaccacagcc

SEQ ID NO: 2270019 - RNA, 22 nt, Human
gacggcugggcacacgccuccc

SEQ ID NO: 2270020 - RNA, 17 nt, Human
gacggggggccccaguc

SEQ ID NO: 2270021 - RNA, 16 nt, Human
gacggggacuggggau

SEQ ID NO: 2270022 - RNA, 17 nt, Human
gacgggguuucaccaug

SEQ ID NO: 2270023 - RNA, 19 nt, Human
gacgguauuaugcuucuug

SEQ ID NO: 2270024 - RNA, 22 nt, Human
gacggggggccccagucagccu

SEQ ID NO: 2270025 - RNA, 23 nt, Human
gacggggggccccagucagccuc

SEQ ID NO: 2270026 - RNA, 22 nt, Human
gacgcaugcccucaaucccagc

SEQ ID NO: 2270027 - RNA, 19 nt, Human
gacgcagcaggaggccagg

SEQ ID NO: 2270028 - RNA, 23 nt, Human
gacggagucccaccuuggcugca

SEQ ID NO: 2270029 - RNA, 21 nt, Human
gacggagucccaccuuggcug

SEQ ID NO: 2270030 - RNA, 14 nt, Human
gacgaccuuuaccu

SEQ ID NO: 2270031 - RNA, 17 nt, Human
gacgaggcccucgggcc

SEQ ID NO: 2270032 - RNA, 21 nt, Human
gacgaggcccucgggcccagc

SEQ ID NO: 2270033 - RNA, 22 nt, Human
gacgaggcccucgggcccagcc

SEQ ID NO: 2270034 - RNA, 18 nt, Human
gacgaggggugucuuggg

SEQ ID NO: 2270035 - RNA, 14 nt, Human
gacggagucccacc

SEQ ID NO: 2270036 - RNA, 18 nt, Human
gacggagucccaccuugg

SEQ ID NO: 2270037 - RNA, 12 nt, Human
gacgucccucca

SEQ ID NO: 2270038 - RNA, 18 nt, Human
gacgucaagucuccuucc

SEQ ID NO: 2270039 - RNA, 22 nt, Human
gacgucccuccacguucacccc

SEQ ID NO: 2270040 - RNA, 20 nt, Human
gacguaggaacgguaaauuu

SEQ ID NO: 2270041 - RNA, 12 nt, Human
gacguagcugca

SEQ ID NO: 2270042 - RNA, 20 nt, Human
gacguacuccaacagaagaa

SEQ ID NO: 2270043 - RNA, 14 nt, Human
gacgucaagucucc

SEQ ID NO: 2270044 - RNA, 23 nt, Human
gacguaugcuuauuuuaaaauuu

SEQ ID NO: 2270045 - RNA, 21 nt, Human
gacguagcugcaaaggacaga

SEQ ID NO: 2270046 - RNA, 15 nt, Human
gacguaggggagggg

SEQ ID NO: 2270047 - RNA, 17 nt, Human
gacguguuaugacucca

SEQ ID NO: 2270048 - RNA, 20 nt, Human
gacguguuaugacuccagaa

SEQ ID NO: 2270049 - RNA, 15 nt, Human
gacgguucaccagcc

SEQ ID NO: 2270050 - RNA, 17 nt, Human
gacggugcuccaggcag

SEQ ID NO: 2270051 - RNA, 21 nt, Human
gacggugggcauuugugaggc

SEQ ID NO: 2270052 - RNA, 18 nt, Human
gacggugcccaagccaga

SEQ ID NO: 2270053 - RNA, 23 nt, Human
gacggugcccaagccagaggcug

SEQ ID NO: 2270054 - RNA, 16 nt, Human
gacggugcccaagcca

SEQ ID NO: 2270055 - RNA, 23 nt, Human
gacgggugggcggcuggagacca

SEQ ID NO: 2270056 - RNA, 16 nt, Human
gacggugcagucuggg

SEQ ID NO: 2270057 - RNA, 21 nt, Human
gacgguauuaugcuucuugga

SEQ ID NO: 2270058 - RNA, 16 nt, Human
gacggucccacacugg

SEQ ID NO: 2270059 - RNA, 18 nt, Human
gacgguucaccagccucu

SEQ ID NO: 2270060 - RNA, 17 nt, Human
gacgguucaccagccuc

SEQ ID NO: 2270061 - RNA, 19 nt, Human
gacgguucaccagccucuc

SEQ ID NO: 2270062 - RNA, 21 nt, Human
gacguacguaucagcggcccc

SEQ ID NO: 2270063 - RNA, 13 nt, Human
gagccucagcauc

SEQ ID NO: 2270064 - RNA, 17 nt, Human
gagccgugguccuuugg

SEQ ID NO: 2270065 - RNA, 13 nt, Human
gagccgugguccu

SEQ ID NO: 2270066 - RNA, 17 nt, Human
gagccuacccaccccca

SEQ ID NO: 2270067 - RNA, 15 nt, Human
gagccuacccacccc

SEQ ID NO: 2270068 - RNA, 17 nt, Human
gagccucagcauccugg

SEQ ID NO: 2270069 - RNA, 18 nt, Human
gagccucagucucccucc

SEQ ID NO: 2270070 - RNA, 19 nt, Human
gagccucagucucccuccc

SEQ ID NO: 2270071 - RNA, 14 nt, Human
gagccucagcaucc

SEQ ID NO: 2270072 - RNA, 15 nt, Human
gagccucagcauccu

SEQ ID NO: 2270073 - RNA, 22 nt, Human
gagccuccucucucaaacuggg

SEQ ID NO: 2270074 - RNA, 16 nt, Human
gagccucugcucccca

SEQ ID NO: 2270075 - RNA, 13 nt, Human
gagccuccugccc

SEQ ID NO: 2270076 - RNA, 21 nt, Human
gagccucccucaauucccccu

SEQ ID NO: 2270077 - RNA, 20 nt, Human
gagccucccucaauuccccc

SEQ ID NO: 2270078 - RNA, 20 nt, Human
gagccucauccgaggcaggg

SEQ ID NO: 2270079 - RNA, 19 nt, Human
gagccucauccgaggcagg

SEQ ID NO: 2270080 - RNA, 18 nt, Human
gagccucauccgaggcag

SEQ ID NO: 2270081 - RNA, 17 nt, Human
gagccucauccgaggca

SEQ ID NO: 2270082 - RNA, 24 nt, Human
gagccucugucacugcaggcacuc

SEQ ID NO: 2270083 - RNA, 19 nt, Human
gagccugaauuuuguugcu

SEQ ID NO: 2270084 - RNA, 17 nt, Human
gagccucugcuccccag

SEQ ID NO: 2270085 - RNA, 12 nt, Human
gagccucuguca

SEQ ID NO: 2270086 - RNA, 13 nt, Human
gagccucugucac

SEQ ID NO: 2270087 - RNA, 18 nt, Human
gagccucugucacugcag

SEQ ID NO: 2270088 - RNA, 20 nt, Human
gagccucugucacugcaggc

SEQ ID NO: 2270089 - RNA, 21 nt, Human
gagccucugucacugcaggca

SEQ ID NO: 2270090 - RNA, 22 nt, Human
gagccucugucacugcaggcac

SEQ ID NO: 2270091 - RNA, 12 nt, Human
gagccugcaguu

SEQ ID NO: 2270092 - RNA, 10 nt, Human
gagccugagg

SEQ ID NO: 2270093 - RNA, 15 nt, Human
gagccugagggaucu

SEQ ID NO: 2270094 - RNA, 12 nt, Human
gagccugaggga

SEQ ID NO: 2270095 - RNA, 19 nt, Human
gagccgagaucacgccacu

SEQ ID NO: 2270096 - RNA, 20 nt, Human
gagccgagaucacgccacug

SEQ ID NO: 2270097 - RNA, 11 nt, Human
gagcccacugu

SEQ ID NO: 2270098 - RNA, 20 nt, Human
gagcccacugcccacccccu

SEQ ID NO: 2270099 - RNA, 21 nt, Human
gagcccacugcccacccccuc

SEQ ID NO: 2270100 - RNA, 23 nt, Human
gagcccacugcccacccccucaa

SEQ ID NO: 2270101 - RNA, 15 nt, Human
gagcccuugccuccc

SEQ ID NO: 2270102 - RNA, 16 nt, Human
gagcccuugccucccc

SEQ ID NO: 2270103 - RNA, 17 nt, Human
gagcccuugccucccca

SEQ ID NO: 2270104 - RNA, 18 nt, Human
gagcccacuguacuugcu

SEQ ID NO: 2270105 - RNA, 21 nt, Human
gagcccacuguacuugcucuu

SEQ ID NO: 2270106 - RNA, 18 nt, Human
gagcccacgcccccacug

SEQ ID NO: 2270107 - RNA, 19 nt, Human
gagcccacugcccaccccc

SEQ ID NO: 2270108 - RNA, 16 nt, Human
gagcccacaaagccuu

SEQ ID NO: 2270109 - RNA, 21 nt, Human
gagccgagaucacgccacugc

SEQ ID NO: 2270110 - RNA, 22 nt, Human
gagccgagaucacgccacugca

SEQ ID NO: 2270111 - RNA, 22 nt, Human
gagccgcaucuucuccaucugg

SEQ ID NO: 2270112 - RNA, 21 nt, Human
gagccgcaucuucuccaucug

SEQ ID NO: 2270113 - RNA, 22 nt, Human
gagcccuugccuccccauuucc

SEQ ID NO: 2270114 - RNA, 20 nt, Human
gagccgagaucgcgccacug

SEQ ID NO: 2270115 - RNA, 14 nt, Human
gagccgcuggcaga

SEQ ID NO: 2270116 - RNA, 19 nt, Human
gagccgcuggcagaaggga

SEQ ID NO: 2270117 - RNA, 19 nt, Human
gagccgcugugagccccug

SEQ ID NO: 2270118 - RNA, 20 nt, Human
gagccgcugugagccccugg

SEQ ID NO: 2270119 - RNA, 22 nt, Human
gagccggacuuucggaguuggg

SEQ ID NO: 2270120 - RNA, 12 nt, Human
gagccggagccu

SEQ ID NO: 2270121 - RNA, 16 nt, Human
gagccggagccuccag

SEQ ID NO: 2270122 - RNA, 14 nt, Human
gagccgugaugccu

SEQ ID NO: 2270123 - RNA, 20 nt, Human
gagccggguggaucgccuga

SEQ ID NO: 2270124 - RNA, 22 nt, Human
gagccgggucugccucuucugg

SEQ ID NO: 2270125 - RNA, 21 nt, Human
gagccgggucugccucuucug

SEQ ID NO: 2270126 - RNA, 20 nt, Human
gagccgggucugccucuucu

SEQ ID NO: 2270127 - RNA, 17 nt, Human
gagccgggucugccucu

SEQ ID NO: 2270128 - RNA, 22 nt, Human
gagccgggaaagaagagccgga

SEQ ID NO: 2270129 - RNA, 16 nt, Human
gagccgggccccuggg

SEQ ID NO: 2270130 - RNA, 15 nt, Human
gagccgggccccugg

SEQ ID NO: 2270131 - RNA, 13 nt, Human
gagccgggccugg

SEQ ID NO: 2270132 - RNA, 14 nt, Human
gagccgggccuggg

SEQ ID NO: 2270133 - RNA, 20 nt, Human
gagccgggccuggggcuccu

SEQ ID NO: 2270134 - RNA, 22 nt, Human
gagccggggaguuucuuuccug

SEQ ID NO: 2270135 - RNA, 18 nt, Human
gagccggggaguuucuuu

SEQ ID NO: 2270136 - RNA, 19 nt, Human
gagccggggaguuucuuuc

SEQ ID NO: 2270137 - RNA, 15 nt, Human
gagauauauuuuuaa

SEQ ID NO: 2270138 - RNA, 18 nt, Human
gagauaucugagggagga

SEQ ID NO: 2270139 - RNA, 12 nt, Human
gagauauauuuu

SEQ ID NO: 2270140 - RNA, 23 nt, Human
gagcagagaccaucccugaaggc

SEQ ID NO: 2270141 - RNA, 19 nt, Human
gagcagagaccaucccuga

SEQ ID NO: 2270142 - RNA, 21 nt, Human
gagcagagaccaucccugaag

SEQ ID NO: 2270143 - RNA, 18 nt, Human
gagcagagcaagucugca

SEQ ID NO: 2270144 - RNA, 13 nt, Human
gagcagaggcagc

SEQ ID NO: 2270145 - RNA, 21 nt, Human
gagcagccacauuccugaugc

SEQ ID NO: 2270146 - RNA, 22 nt, Human
gagcagccacauuccugaugcu

SEQ ID NO: 2270147 - RNA, 15 nt, Human
gagcagaggggcuga

SEQ ID NO: 2270148 - RNA, 16 nt, Human
gagcagcccuggaguc

SEQ ID NO: 2270149 - RNA, 20 nt, Human
gagcagcccuggagucaugc

SEQ ID NO: 2270150 - RNA, 17 nt, Human
gagcagccucagaacaa

SEQ ID NO: 2270151 - RNA, 15 nt, Human
gagauaauaugagaa

SEQ ID NO: 2270152 - RNA, 21 nt, Human
gagauaauguuagagguuuua

SEQ ID NO: 2270153 - RNA, 18 nt, Human
gagagugcaacaguagca

SEQ ID NO: 2270154 - RNA, 15 nt, Human
gagaguuuugucuug

SEQ ID NO: 2270155 - RNA, 14 nt, Human
gagaguuuuggaug

SEQ ID NO: 2270156 - RNA, 22 nt, Human
gagaguuuugucuugaaugucu

SEQ ID NO: 2270157 - RNA, 17 nt, Human
gagaguuuugucuugaa

SEQ ID NO: 2270158 - RNA, 15 nt, Human
gagauaaaucuagua

SEQ ID NO: 2270159 - RNA, 20 nt, Human
gagauagccaaggccaaagg

SEQ ID NO: 2270160 - RNA, 21 nt, Human
gagauagccaaggccaaagga

SEQ ID NO: 2270161 - RNA, 17 nt, Human
gagcagagaccaucccu

SEQ ID NO: 2270162 - RNA, 18 nt, Human
gagcagagaccaucccug

SEQ ID NO: 2270163 - RNA, 16 nt, Human
gagcagagaccauccc

SEQ ID NO: 2270164 - RNA, 19 nt, Human
gagauagccaaggccaaag

SEQ ID NO: 2270165 - RNA, 21 nt, Human
gagccagcccucccuguccuc

SEQ ID NO: 2270166 - RNA, 20 nt, Human
gagccagcccucccuguccu

SEQ ID NO: 2270167 - RNA, 15 nt, Human
gagccagccugcucc

SEQ ID NO: 2270168 - RNA, 19 nt, Human
gagccagcccucccugucc

SEQ ID NO: 2270169 - RNA, 13 nt, Human
gagccagauuuca

SEQ ID NO: 2270170 - RNA, 18 nt, Human
gagccagcucccucuauu

SEQ ID NO: 2270171 - RNA, 13 nt, Human
gagccagcucccu

SEQ ID NO: 2270172 - RNA, 22 nt, Human
gagccaggccugggucuguguc

SEQ ID NO: 2270173 - RNA, 21 nt, Human
gagccaggccugggucugugu

SEQ ID NO: 2270174 - RNA, 12 nt, Human
gagccaggccug

SEQ ID NO: 2270175 - RNA, 13 nt, Human
gagccaggcacac

SEQ ID NO: 2270176 - RNA, 12 nt, Human
gagccaggcaca

SEQ ID NO: 2270177 - RNA, 13 nt, Human
gagcccaccuugg

SEQ ID NO: 2270178 - RNA, 15 nt, Human
gagcccaccuuggcu

SEQ ID NO: 2270179 - RNA, 17 nt, Human
gagcccaccuuggcuca

SEQ ID NO: 2270180 - RNA, 18 nt, Human
gagccacugcaccgggcc

SEQ ID NO: 2270181 - RNA, 19 nt, Human
gagccacugcaccgggcca

SEQ ID NO: 2270182 - RNA, 15 nt, Human
gagcagccuguggca

SEQ ID NO: 2270183 - RNA, 14 nt, Human
gagcagccuguggc

SEQ ID NO: 2270184 - RNA, 13 nt, Human
gagcagccugugg

SEQ ID NO: 2270185 - RNA, 11 nt, Human
gagcagccugu

SEQ ID NO: 2270186 - RNA, 18 nt, Human
gagcagccuguggcaucu

SEQ ID NO: 2270187 - RNA, 16 nt, Human
gagcagccuguggcau

SEQ ID NO: 2270188 - RNA, 13 nt, Human
gagccacugcacc

SEQ ID NO: 2270189 - RNA, 20 nt, Human
gagccacugcaccgggccac

SEQ ID NO: 2270190 - RNA, 15 nt, Human
gagccagauuucacu

SEQ ID NO: 2270191 - RNA, 18 nt, Human
gagccagauuucacucuc

SEQ ID NO: 2270192 - RNA, 19 nt, Human
gagccagauuucacucucc

SEQ ID NO: 2270193 - RNA, 14 nt, Human
gagcuagcgcugcc

SEQ ID NO: 2270194 - RNA, 18 nt, Human
gagcuagaagcuggagga

SEQ ID NO: 2270195 - RNA, 23 nt, Human
gagcuagcgcugccgcaccccag

SEQ ID NO: 2270196 - RNA, 19 nt, Human
gagcuagcgcugccgcacc

SEQ ID NO: 2270197 - RNA, 18 nt, Human
gagcuagcgcugccgcac

SEQ ID NO: 2270198 - RNA, 17 nt, Human
gagcuagcagcagggag

SEQ ID NO: 2270199 - RNA, 15 nt, Human
gagcuagcagcaggg

SEQ ID NO: 2270200 - RNA, 15 nt, Human
gagccugcaguuauu

SEQ ID NO: 2270201 - RNA, 13 nt, Human
gagccugccugga

SEQ ID NO: 2270202 - RNA, 14 nt, Human
gagccugccuggag

SEQ ID NO: 2270203 - RNA, 15 nt, Human
gagccugccuggagc

SEQ ID NO: 2270204 - RNA, 22 nt, Human
gagcuagaaccuagaagggcua

SEQ ID NO: 2270205 - RNA, 14 nt, Human
gagcuagaaccugg

SEQ ID NO: 2270206 - RNA, 17 nt, Human
gagcuagaaccuggaga

SEQ ID NO: 2270207 - RNA, 19 nt, Human
gagcuagaaccuggagagc

SEQ ID NO: 2270208 - RNA, 17 nt, Human
gagcuagaaccuggagg

SEQ ID NO: 2270209 - RNA, 21 nt, Human
gagcuagaaccuggagggcua

SEQ ID NO: 2270210 - RNA, 15 nt, Human
gagcuagaagcugga

SEQ ID NO: 2270211 - RNA, 21 nt, Human
gagcucagacccccacucuca

SEQ ID NO: 2270212 - RNA, 18 nt, Human
gagcucagagagggcagg

SEQ ID NO: 2270213 - RNA, 20 nt, Human
gagcucagacccccacucuc

SEQ ID NO: 2270214 - RNA, 18 nt, Human
gagcucagacccccacuc

SEQ ID NO: 2270215 - RNA, 14 nt, Human
gagcucagaccccc

SEQ ID NO: 2270216 - RNA, 15 nt, Human
gagcucagaccccca

SEQ ID NO: 2270217 - RNA, 20 nt, Human
gagcucagagagggcaggca

SEQ ID NO: 2270218 - RNA, 21 nt, Human
gagcucagagagggcaggcau

SEQ ID NO: 2270219 - RNA, 22 nt, Human
gagcuccagacccccagcaacc

SEQ ID NO: 2270220 - RNA, 19 nt, Human
gagcuccagacccccagca

SEQ ID NO: 2270221 - RNA, 17 nt, Human
gagcuccagacccccag

SEQ ID NO: 2270222 - RNA, 15 nt, Human
gagcuccagaccccc

SEQ ID NO: 2270223 - RNA, 13 nt, Human
gagcuccagaccc

SEQ ID NO: 2270224 - RNA, 22 nt, Human
gagcuccacucugcuucucuga

SEQ ID NO: 2270225 - RNA, 14 nt, Human
gagcuauguauuaa

SEQ ID NO: 2270226 - RNA, 13 nt, Human
gagcuauugcugu

SEQ ID NO: 2270227 - RNA, 13 nt, Human
gagcuauuuccau

SEQ ID NO: 2270228 - RNA, 18 nt, Human
gagcuauuuccauuccag

SEQ ID NO: 2270229 - RNA, 21 nt, Human
gagcuauuuccauuccagaau

SEQ ID NO: 2270230 - RNA, 19 nt, Human
gagcuauuuccauuccaga

SEQ ID NO: 2270231 - RNA, 20 nt, Human
gagcuauuuccauuccagaa

SEQ ID NO: 2270232 - RNA, 19 nt, Human
gagcucacuguggugucug

SEQ ID NO: 2270233 - RNA, 16 nt, Human
gagcucacucggcacc

SEQ ID NO: 2270234 - RNA, 20 nt, Human
gagcuccagacccccagcaa

SEQ ID NO: 2270235 - RNA, 17 nt, Human
gagcucuugugaggaaa

SEQ ID NO: 2270236 - RNA, 23 nt, Human
gagcucuacccagggccugcagg

SEQ ID NO: 2270237 - RNA, 21 nt, Human
gagcucuacccagggccugca

SEQ ID NO: 2270238 - RNA, 20 nt, Human
gagcucuacccagggccugc

SEQ ID NO: 2270239 - RNA, 15 nt, Human
gagcucuacccaggg

SEQ ID NO: 2270240 - RNA, 14 nt, Human
gagcucuacccagg

SEQ ID NO: 2270241 - RNA, 22 nt, Human
gagcucguguauccuggggcuc

SEQ ID NO: 2270242 - RNA, 23 nt, Human
gagcucguguauccuggggcucc

SEQ ID NO: 2270243 - RNA, 15 nt, Human
gagcucgguggaccc

SEQ ID NO: 2270244 - RNA, 16 nt, Human
gagcucguguauccug

SEQ ID NO: 2270245 - RNA, 18 nt, Human
gagcucguguauccuggg

SEQ ID NO: 2270246 - RNA, 19 nt, Human
gagcucguguauccugggg

SEQ ID NO: 2270247 - RNA, 20 nt, Human
gagcucguguauccuggggc

SEQ ID NO: 2270248 - RNA, 21 nt, Human
gagcucguguauccuggggcu

SEQ ID NO: 2270249 - RNA, 16 nt, Human
gagcucgugggacagu

SEQ ID NO: 2270250 - RNA, 17 nt, Human
gagcugaggcaauucua

SEQ ID NO: 2270251 - RNA, 16 nt, Human
gagcugaggcagcagu

SEQ ID NO: 2270252 - RNA, 17 nt, Human
gagcugaggccacacuc

SEQ ID NO: 2270253 - RNA, 23 nt, Human
gagcugaggggggccgugcccag

SEQ ID NO: 2270254 - RNA, 15 nt, Human
gagcugaguggggga

SEQ ID NO: 2270255 - RNA, 13 nt, Human
gagcugauccaga

SEQ ID NO: 2270256 - RNA, 15 nt, Human
gagcugauccagagc

SEQ ID NO: 2270257 - RNA, 16 nt, Human
gagcugauccagagca

SEQ ID NO: 2270258 - RNA, 20 nt, Human
gagcugauccagagcacaga

SEQ ID NO: 2270259 - RNA, 20 nt, Human
gagcugaaaaaucacauccu

SEQ ID NO: 2270260 - RNA, 21 nt, Human
gagcucuugugaggaaaguca

SEQ ID NO: 2270261 - RNA, 17 nt, Human
gagcugaaaugcugcau

SEQ ID NO: 2270262 - RNA, 22 nt, Human
gagcugaaaaaucacauccugg

SEQ ID NO: 2270263 - RNA, 19 nt, Human
gagcugaacccauuuugag

SEQ ID NO: 2270264 - RNA, 22 nt, Human
gagcugaacccauuuugaguga

SEQ ID NO: 2270265 - RNA, 18 nt, Human
gagcugacacaaaccugc

SEQ ID NO: 2270266 - RNA, 23 nt, Human
gagcugaacccauuuugagugac

SEQ ID NO: 2270267 - RNA, 22 nt, Human
gagcugacacaaaccugccugg

SEQ ID NO: 2270268 - RNA, 23 nt, Human
gagcugacacaaaccugccuggg

SEQ ID NO: 2270269 - RNA, 13 nt, Human
gagcugagcaggg

SEQ ID NO: 2270270 - RNA, 17 nt, Human
gagcugagccucucacc

SEQ ID NO: 2270271 - RNA, 13 nt, Human
gagcugagaugga

SEQ ID NO: 2270272 - RNA, 16 nt, Human
gagcugagcagggaga

SEQ ID NO: 2270273 - RNA, 13 nt, Human
gagcugagaucgu

SEQ ID NO: 2270274 - RNA, 10 nt, Human
gagcugagau

SEQ ID NO: 2270275 - RNA, 16 nt, Human
gagcugacacaggaug

SEQ ID NO: 2270276 - RNA, 17 nt, Human
gagcugacacaggauga

SEQ ID NO: 2270277 - RNA, 18 nt, Human
gaggaaacaacagcuuua

SEQ ID NO: 2270278 - RNA, 14 nt, Human
gaggaaacucaccu

SEQ ID NO: 2270279 - RNA, 22 nt, Human
gaggaaaaguaaccaucacugg

SEQ ID NO: 2270280 - RNA, 21 nt, Human
gaggaaaaguaaggugcaguu

SEQ ID NO: 2270281 - RNA, 22 nt, Human
gaggaaacucaccugcuggccc

SEQ ID NO: 2270282 - RNA, 20 nt, Human
gaggaaacucaccugcuggc

SEQ ID NO: 2270283 - RNA, 17 nt, Human
gaggaaacucaccugcu

SEQ ID NO: 2270284 - RNA, 16 nt, Human
gaggaaagaaugaaag

SEQ ID NO: 2270285 - RNA, 16 nt, Human
gaggaaagcaaaggag

SEQ ID NO: 2270286 - RNA, 17 nt, Human
gaggaaagcaaaggaga

SEQ ID NO: 2270287 - RNA, 22 nt, Human
gaggaaaaaaaucguccaggga

SEQ ID NO: 2270288 - RNA, 18 nt, Human
gagcuuuuuucuuuaaga

SEQ ID NO: 2270289 - RNA, 20 nt, Human
gaggaaaaccaagccguggc

SEQ ID NO: 2270290 - RNA, 21 nt, Human
gaggaaaaccaagccguggcu

SEQ ID NO: 2270291 - RNA, 23 nt, Human
gaggaaaaccaagccguggcuuc

SEQ ID NO: 2270292 - RNA, 15 nt, Human
gagcuuuucuaggcu

SEQ ID NO: 2270293 - RNA, 19 nt, Human
gagcuuugcauguuccacu

SEQ ID NO: 2270294 - RNA, 21 nt, Human
gagcuuugcauguuccacuaa

SEQ ID NO: 2270295 - RNA, 12 nt, Human
gagcuuugcugc

SEQ ID NO: 2270296 - RNA, 13 nt, Human
gagcuuugcugcu

SEQ ID NO: 2270297 - RNA, 14 nt, Human
gagcuuugcugcua

SEQ ID NO: 2270298 - RNA, 17 nt, Human
gagcuuugcugcuacag

SEQ ID NO: 2270299 - RNA, 15 nt, Human
gagcuuggccagaag

SEQ ID NO: 2270300 - RNA, 14 nt, Human
gagcuuggccagaa

SEQ ID NO: 2270301 - RNA, 13 nt, Human
gagcuugggaaug

SEQ ID NO: 2270302 - RNA, 22 nt, Human
gagcuugaaacccguggcgcuu

SEQ ID NO: 2270303 - RNA, 18 nt, Human
gagcuuucaaagaaggaa

SEQ ID NO: 2270304 - RNA, 15 nt, Human
gagcuuucaaagaag

SEQ ID NO: 2270305 - RNA, 22 nt, Human
gagcuuuauguaauaaugugaa

SEQ ID NO: 2270306 - RNA, 20 nt, Human
gagcuugggggaugacuaga

SEQ ID NO: 2270307 - RNA, 17 nt, Human
gagcuuuccauguugcu

SEQ ID NO: 2270308 - RNA, 18 nt, Human
gagcuuuccauguugcug

SEQ ID NO: 2270309 - RNA, 19 nt, Human
gagcuuuccauguugcugc

SEQ ID NO: 2270310 - RNA, 21 nt, Human
gagcuuuccauguugcugcca

SEQ ID NO: 2270311 - RNA, 22 nt, Human
gagcuuucugcuaucaaagagg

SEQ ID NO: 2270312 - RNA, 23 nt, Human
gagcuuucuguccuuuuggcacu

SEQ ID NO: 2270313 - RNA, 21 nt, Human
gagcuuucuguccuuuuggca

SEQ ID NO: 2270314 - RNA, 20 nt, Human
gagcuuugaaaauucagugg

SEQ ID NO: 2270315 - RNA, 21 nt, Human
gaggaagaugggggcaagaag

SEQ ID NO: 2270316 - RNA, 12 nt, Human
gaggaagcagaa

SEQ ID NO: 2270317 - RNA, 19 nt, Human
gaggaagagcaggcacaug

SEQ ID NO: 2270318 - RNA, 17 nt, Human
gaggaagagcaggcaca

SEQ ID NO: 2270319 - RNA, 13 nt, Human
gaggaagagcagg

SEQ ID NO: 2270320 - RNA, 20 nt, Human
gaggaagaagcuuaggcagg

SEQ ID NO: 2270321 - RNA, 17 nt, Human
gaggaagagaaaaaaua

SEQ ID NO: 2270322 - RNA, 13 nt, Human
gaggaagccgcug

SEQ ID NO: 2270323 - RNA, 13 nt, Human
gaggaagcagaau

SEQ ID NO: 2270324 - RNA, 14 nt, Human
gaggaagcagaaua

SEQ ID NO: 2270325 - RNA, 15 nt, Human
gaggaagcagaauaa

SEQ ID NO: 2270326 - RNA, 16 nt, Human
gaggaagcagaauaaa

SEQ ID NO: 2270327 - RNA, 17 nt, Human
gaggaagcagaauaaag

SEQ ID NO: 2270328 - RNA, 19 nt, Human
gaggaagcagaauaaagca

SEQ ID NO: 2270329 - RNA, 20 nt, Human
gaggaagcagaauaaagcaa

SEQ ID NO: 2270330 - RNA, 21 nt, Human
gaggaagcagaauaaagcaau

SEQ ID NO: 2270331 - RNA, 14 nt, Human
gaggaagccgcugg

SEQ ID NO: 2270332 - RNA, 17 nt, Human
gaggaagccgcuggggc

SEQ ID NO: 2270333 - RNA, 18 nt, Human
gaggaagccgcuggggcc

SEQ ID NO: 2270334 - RNA, 20 nt, Human
gaggaacuagccaccaacuc

SEQ ID NO: 2270335 - RNA, 15 nt, Human
gaggaacuguccaga

SEQ ID NO: 2270336 - RNA, 16 nt, Human
gaggaacuguccagag

SEQ ID NO: 2270337 - RNA, 17 nt, Human
gaggaacuguccagaga

SEQ ID NO: 2270338 - RNA, 18 nt, Human
gaggaacuguccagagag

SEQ ID NO: 2270339 - RNA, 19 nt, Human
gaggaagaacggggcucuu

SEQ ID NO: 2270340 - RNA, 19 nt, Human
gaggaacuguccagagagc

SEQ ID NO: 2270341 - RNA, 21 nt, Human
gaggaacuguccagagagcaa

SEQ ID NO: 2270342 - RNA, 23 nt, Human
gaggaagaacggggcucuucuca

SEQ ID NO: 2270343 - RNA, 23 nt, Human
gaggaacuucagacacaaaaguc

SEQ ID NO: 2270344 - RNA, 17 nt, Human
gaggaagaagcuuaggc

SEQ ID NO: 2270345 - RNA, 22 nt, Human
gaggaaccagagccauggacuc

SEQ ID NO: 2270346 - RNA, 18 nt, Human
gaggaaccagagccaugg

SEQ ID NO: 2270347 - RNA, 15 nt, Human
gaggaaccagagcca

SEQ ID NO: 2270348 - RNA, 14 nt, Human
gaggaaccagagcc

SEQ ID NO: 2270349 - RNA, 16 nt, Human
gaggaacaaggcaagg

SEQ ID NO: 2270350 - RNA, 23 nt, Human
gaggaaaggccagcuggcagcag

SEQ ID NO: 2270351 - RNA, 19 nt, Human
gaggaaagguuugagaagc

SEQ ID NO: 2270352 - RNA, 12 nt, Human
gaggaaagucau

SEQ ID NO: 2270353 - RNA, 18 nt, Human
gaggaaagucauuggcuu

SEQ ID NO: 2270354 - RNA, 20 nt, Human
gaggaaagucauuggcuuua

SEQ ID NO: 2270355 - RNA, 14 nt, Human
gaggaaacucagag

SEQ ID NO: 2270356 - RNA, 23 nt, Human
gaggaaacucaccugcuggcccc

SEQ ID NO: 2270357 - RNA, 19 nt, Human
gaggaaaggccagcuggca

SEQ ID NO: 2270358 - RNA, 14 nt, Human
gaggaaaggccagc

SEQ ID NO: 2270359 - RNA, 13 nt, Human
gaggaaaggccag

SEQ ID NO: 2270360 - RNA, 21 nt, Human
gaggaaauaagaaaaaucaug

SEQ ID NO: 2270361 - RNA, 14 nt, Human
gaggaacaaggcaa

SEQ ID NO: 2270362 - RNA, 21 nt, Human
gagagggcaugcgcacaaggc

SEQ ID NO: 2270363 - RNA, 23 nt, Human
gagagggaggucacuggaaaggg

SEQ ID NO: 2270364 - RNA, 14 nt, Human
gagagggcagaggg

SEQ ID NO: 2270365 - RNA, 16 nt, Human
gagagggcaggcauga

SEQ ID NO: 2270366 - RNA, 18 nt, Human
gagagggcaguguuuccu

SEQ ID NO: 2270367 - RNA, 19 nt, Human
gagagccuggugcugcugc

SEQ ID NO: 2270368 - RNA, 19 nt, Human
gagagggaggcaagcccug

SEQ ID NO: 2270369 - RNA, 17 nt, Human
gagagccuggugcugcu

SEQ ID NO: 2270370 - RNA, 13 nt, Human
gagagccuggugc

SEQ ID NO: 2270371 - RNA, 13 nt, Human
gagagccuuccag

SEQ ID NO: 2270372 - RNA, 14 nt, Human
gagagccuuccagg

SEQ ID NO: 2270373 - RNA, 13 nt, Human
gagaggggaacag

SEQ ID NO: 2270374 - RNA, 18 nt, Human
gagaggggaacagacugg

SEQ ID NO: 2270375 - RNA, 21 nt, Human
gagagggugggagugggccca

SEQ ID NO: 2270376 - RNA, 11 nt, Human
gagagggcuuu

SEQ ID NO: 2270377 - RNA, 17 nt, Human
gagaggucuuuuuuaaa

SEQ ID NO: 2270378 - RNA, 13 nt, Human
gagaggugccagc

SEQ ID NO: 2270379 - RNA, 14 nt, Human
gagaggugccagca

SEQ ID NO: 2270380 - RNA, 21 nt, Human
gagaggugccagcaacugaau

SEQ ID NO: 2270381 - RNA, 24 nt, Human
gagaggucaagcccaggaggacug

SEQ ID NO: 2270382 - RNA, 19 nt, Human
gagaggucaagcccaggag

SEQ ID NO: 2270383 - RNA, 18 nt, Human
gagaggucaagcccagga

SEQ ID NO: 2270384 - RNA, 14 nt, Human
gagaggugggccag

SEQ ID NO: 2270385 - RNA, 22 nt, Human
gagaggugggccagucugugga

SEQ ID NO: 2270386 - RNA, 23 nt, Human
gagaggugggccagucuguggau

SEQ ID NO: 2270387 - RNA, 12 nt, Human
gagagguggagc

SEQ ID NO: 2270388 - RNA, 16 nt, Human
gagagguuaaggugca

SEQ ID NO: 2270389 - RNA, 19 nt, Human
gagagguuauaggucacuc

SEQ ID NO: 2270390 - RNA, 14 nt, Human
gagagucugucuca

SEQ ID NO: 2270391 - RNA, 11 nt, Human
gagaguaacuu

SEQ ID NO: 2270392 - RNA, 15 nt, Human
gagagugaacaaauu

SEQ ID NO: 2270393 - RNA, 17 nt, Human
gagauacagaauuuuau

SEQ ID NO: 2270394 - RNA, 19 nt, Human
gagagugaacaaauuuaca

SEQ ID NO: 2270395 - RNA, 14 nt, Human
gagaguuuccugaa

SEQ ID NO: 2270396 - RNA, 15 nt, Human
gagagugagguggaa

SEQ ID NO: 2270397 - RNA, 13 nt, Human
gagagaggcagag

SEQ ID NO: 2270398 - RNA, 13 nt, Human
gagagaggacagc

SEQ ID NO: 2270399 - RNA, 15 nt, Human
gagagaggcagagag

SEQ ID NO: 2270400 - RNA, 18 nt, Human
gagagaagugccccugcu

SEQ ID NO: 2270401 - RNA, 21 nt, Human
gagagaagugccccugcugcc

SEQ ID NO: 2270402 - RNA, 19 nt, Human
gagagacacacugaagaag

SEQ ID NO: 2270403 - RNA, 13 nt, Human
gagagaagugccc

SEQ ID NO: 2270404 - RNA, 16 nt, Human
gagagaaggggaggag

SEQ ID NO: 2270405 - RNA, 17 nt, Human
gagagaaggggaggagg

SEQ ID NO: 2270406 - RNA, 15 nt, Human
gagagaaggggagga

SEQ ID NO: 2270407 - RNA, 12 nt, Human
gagagaagggga

SEQ ID NO: 2270408 - RNA, 20 nt, Human
gagagaaaacuuauuugagu

SEQ ID NO: 2270409 - RNA, 13 nt, Human
gagagaaaauaaa

SEQ ID NO: 2270410 - RNA, 14 nt, Human
gagagaaaauaaaa

SEQ ID NO: 2270411 - RNA, 22 nt, Human
gagacuuuuaaucagacaaagu

SEQ ID NO: 2270412 - RNA, 14 nt, Human
gagagaaaaacaaa

SEQ ID NO: 2270413 - RNA, 17 nt, Human
gagagaagagaaugcac

SEQ ID NO: 2270414 - RNA, 23 nt, Human
gagagaaaacagaccuaaugcuc

SEQ ID NO: 2270415 - RNA, 13 nt, Human
gagagaaaacuua

SEQ ID NO: 2270416 - RNA, 22 nt, Human
gagagaaaacagaccuaaugcu

SEQ ID NO: 2270417 - RNA, 18 nt, Human
gagagaaaacagaccuaa

SEQ ID NO: 2270418 - RNA, 12 nt, Human
gagagaaaauaa

SEQ ID NO: 2270419 - RNA, 11 nt, Human
gagagaaaaua

SEQ ID NO: 2270420 - RNA, 12 nt, Human
gagagaggggaa

SEQ ID NO: 2270421 - RNA, 16 nt, Human
gagagaggcagagagc

SEQ ID NO: 2270422 - RNA, 17 nt, Human
gagagaggcagagagcg

SEQ ID NO: 2270423 - RNA, 23 nt, Human
gagagcaggcuggcagcucucca

SEQ ID NO: 2270424 - RNA, 16 nt, Human
gagagaguugaaccua

SEQ ID NO: 2270425 - RNA, 16 nt, Human
gagagccaccaagagg

SEQ ID NO: 2270426 - RNA, 10 nt, Human
gagagcccag

SEQ ID NO: 2270427 - RNA, 17 nt, Human
gagagccauuuugugaa

SEQ ID NO: 2270428 - RNA, 14 nt, Human
gagagcccagaggu

SEQ ID NO: 2270429 - RNA, 20 nt, Human
gagagccagcccucccuguc

SEQ ID NO: 2270430 - RNA, 14 nt, Human
gagagccagcccuc

SEQ ID NO: 2270431 - RNA, 14 nt, Human
gagagccauuuugu

SEQ ID NO: 2270432 - RNA, 13 nt, Human
gagagccagcccu

SEQ ID NO: 2270433 - RNA, 12 nt, Human
gagagccagccc

SEQ ID NO: 2270434 - RNA, 11 nt, Human
gagagccagcc

SEQ ID NO: 2270435 - RNA, 22 nt, Human
gagagccagagaagugacaggg

SEQ ID NO: 2270436 - RNA, 16 nt, Human
gagagccagaaccugg

SEQ ID NO: 2270437 - RNA, 15 nt, Human
gagagccagagaagu

SEQ ID NO: 2270438 - RNA, 19 nt, Human
gagagccagagaagugaca

SEQ ID NO: 2270439 - RNA, 14 nt, Human
gagagccugcugca

SEQ ID NO: 2270440 - RNA, 13 nt, Human
gagagccugcugc

SEQ ID NO: 2270441 - RNA, 12 nt, Human
gagagccugcug

SEQ ID NO: 2270442 - RNA, 13 nt, Human
gagagccugcugg

SEQ ID NO: 2270443 - RNA, 14 nt, Human
gagagccugcuggc

SEQ ID NO: 2270444 - RNA, 15 nt, Human
gagagccugcuggca

SEQ ID NO: 2270445 - RNA, 23 nt, Human
gagagccugcucccccacccccu

SEQ ID NO: 2270446 - RNA, 11 nt, Human
gagagcccagc

SEQ ID NO: 2270447 - RNA, 21 nt, Human
gagagcccagagguaacagaa

SEQ ID NO: 2270448 - RNA, 23 nt, Human
gagagcccagagguaacagaaca

SEQ ID NO: 2270449 - RNA, 14 nt, Human
gagaccagccuggc

SEQ ID NO: 2270450 - RNA, 18 nt, Human
gagaccaaggcgggagca

SEQ ID NO: 2270451 - RNA, 19 nt, Human
gagaccagccugggcagca

SEQ ID NO: 2270452 - RNA, 16 nt, Human
gagaccagccugggca

SEQ ID NO: 2270453 - RNA, 13 nt, Human
gagaccagccugg

SEQ ID NO: 2270454 - RNA, 23 nt, Human
gagaccaagacucugaaaucuca

SEQ ID NO: 2270455 - RNA, 22 nt, Human
gagaccaagacucugaaaucuc

SEQ ID NO: 2270456 - RNA, 17 nt, Human
gagaccaaccugaccaa

SEQ ID NO: 2270457 - RNA, 16 nt, Human
gagaccaaccugacca

SEQ ID NO: 2270458 - RNA, 12 nt, Human
gagaccaucccu

SEQ ID NO: 2270459 - RNA, 20 nt, Human
gagaccaguugggagcacug

SEQ ID NO: 2270460 - RNA, 21 nt, Human
gagaccaguugggagcacugg

SEQ ID NO: 2270461 - RNA, 22 nt, Human
gagaccaguugggagcacugga

SEQ ID NO: 2270462 - RNA, 16 nt, Human
gagaccagggagccuu

SEQ ID NO: 2270463 - RNA, 14 nt, Human
gagaccaggcaaag

SEQ ID NO: 2270464 - RNA, 17 nt, Human
gagaccaggagggcacu

SEQ ID NO: 2270465 - RNA, 18 nt, Human
gagaccaggcaaagcaag

SEQ ID NO: 2270466 - RNA, 16 nt, Human
gagacucgcgacaaug

SEQ ID NO: 2270467 - RNA, 18 nt, Human
gagacucgcgacaaugca

SEQ ID NO: 2270468 - RNA, 22 nt, Human
gagacuccugcaggcagccagg

SEQ ID NO: 2270469 - RNA, 14 nt, Human
gagacucgagaacu

SEQ ID NO: 2270470 - RNA, 17 nt, Human
gagacuccugcccuguu

SEQ ID NO: 2270471 - RNA, 15 nt, Human
gagacucgagaacuu

SEQ ID NO: 2270472 - RNA, 16 nt, Human
gagacucgagaacuuu

SEQ ID NO: 2270473 - RNA, 17 nt, Human
gagacucgagaacuuuc

SEQ ID NO: 2270474 - RNA, 20 nt, Human
gagacucgagaacuuucauu

SEQ ID NO: 2270475 - RNA, 23 nt, Human
gagacucuguggggccuugguuc

SEQ ID NO: 2270476 - RNA, 12 nt, Human
gagacucugugg

SEQ ID NO: 2270477 - RNA, 19 nt, Human
gagacugcgggaugguccu

SEQ ID NO: 2270478 - RNA, 15 nt, Human
gagacugcccagcua

SEQ ID NO: 2270479 - RNA, 14 nt, Human
gagacucugucuca

SEQ ID NO: 2270480 - RNA, 22 nt, Human
gagacugucucaagagggcacu

SEQ ID NO: 2270481 - RNA, 14 nt, Human
gagacugcuuccca

SEQ ID NO: 2270482 - RNA, 17 nt, Human
gagacugcuucccaucc

SEQ ID NO: 2270483 - RNA, 20 nt, Human
gagacugcuucccauccuac

SEQ ID NO: 2270484 - RNA, 22 nt, Human
gagacugcuucccauccuaccc

SEQ ID NO: 2270485 - RNA, 23 nt, Human
gagacugcgggaugguccugggg

SEQ ID NO: 2270486 - RNA, 22 nt, Human
gagacugcgggaugguccuggg

SEQ ID NO: 2270487 - RNA, 23 nt, Human
gagaccaguugggagcacuggag

SEQ ID NO: 2270488 - RNA, 23 nt, Human
gagacugucucaagagggcacug

SEQ ID NO: 2270489 - RNA, 16 nt, Human
gagacuggagcaucug

SEQ ID NO: 2270490 - RNA, 23 nt, Human
gagacugcuucccauccuacccu

SEQ ID NO: 2270491 - RNA, 12 nt, Human
gagacuggagca

SEQ ID NO: 2270492 - RNA, 17 nt, Human
gagacuguuuugaauuu

SEQ ID NO: 2270493 - RNA, 18 nt, Human
gagacuuagggcaccagg

SEQ ID NO: 2270494 - RNA, 21 nt, Human
gagacuuagggcaccaggggu

SEQ ID NO: 2270495 - RNA, 13 nt, Human
gagacuuguauga

SEQ ID NO: 2270496 - RNA, 14 nt, Human
gagacuugcucucu

SEQ ID NO: 2270497 - RNA, 20 nt, Human
gagacuuccaaaccugacag

SEQ ID NO: 2270498 - RNA, 18 nt, Human
gagacauuccugggcaca

SEQ ID NO: 2270499 - RNA, 14 nt, Human
gagacaugugacau

SEQ ID NO: 2270500 - RNA, 15 nt, Human
gagaccaaccugacc

SEQ ID NO: 2270501 - RNA, 14 nt, Human
gagaccaaccugac

SEQ ID NO: 2270502 - RNA, 19 nt, Human
gagacauuccugggcacag

SEQ ID NO: 2270503 - RNA, 13 nt, Human
gagacaugugaca

SEQ ID NO: 2270504 - RNA, 21 nt, Human
gagacauacuugaagggccag

SEQ ID NO: 2270505 - RNA, 20 nt, Human
gagacauacuugaagggcca

SEQ ID NO: 2270506 - RNA, 18 nt, Human
gagacauacuugaagggc

SEQ ID NO: 2270507 - RNA, 15 nt, Human
gagacauacuugaag

SEQ ID NO: 2270508 - RNA, 13 nt, Human
gagacagccccag

SEQ ID NO: 2270509 - RNA, 14 nt, Human
gagacagccccaga

SEQ ID NO: 2270510 - RNA, 15 nt, Human
gagacagccccagag

SEQ ID NO: 2270511 - RNA, 18 nt, Human
gagacagccccagagcag

SEQ ID NO: 2270512 - RNA, 19 nt, Human
gagacagccccagagcagg

SEQ ID NO: 2270513 - RNA, 21 nt, Human
gagacaguuucuuagcuuuuu

SEQ ID NO: 2270514 - RNA, 22 nt, Human
gagacaguuucuuagcuuuuua

SEQ ID NO: 2270515 - RNA, 24 nt, Human
gagacagcccgggcucugccuccc

SEQ ID NO: 2270516 - RNA, 13 nt, Human
gagacagcucugc

SEQ ID NO: 2270517 - RNA, 18 nt, Human
gagacagcucugcauacu

SEQ ID NO: 2270518 - RNA, 15 nt, Human
gagacagcucugcau

SEQ ID NO: 2270519 - RNA, 14 nt, Human
gagacagcccgggc

SEQ ID NO: 2270520 - RNA, 17 nt, Human
gagacagcccgggcucu

SEQ ID NO: 2270521 - RNA, 18 nt, Human
gagacagcccgggcucug

SEQ ID NO: 2270522 - RNA, 19 nt, Human
gagacagcccgggcucugc

SEQ ID NO: 2270523 - RNA, 20 nt, Human
gagacagcccgggcucugcc

SEQ ID NO: 2270524 - RNA, 21 nt, Human
gagacagcccgggcucugccu

SEQ ID NO: 2270525 - RNA, 22 nt, Human
gagacagcccgggcucugccuc

SEQ ID NO: 2270526 - RNA, 23 nt, Human
gagacagcccgggcucugccucc

SEQ ID NO: 2270527 - RNA, 14 nt, Human
gacuccggcccucc

SEQ ID NO: 2270528 - RNA, 15 nt, Human
gacucgggcuccugu

SEQ ID NO: 2270529 - RNA, 16 nt, Human
gacucgggcuccugug

SEQ ID NO: 2270530 - RNA, 17 nt, Human
gacucgggcuccugugc

SEQ ID NO: 2270531 - RNA, 18 nt, Human
gacucgggcuccugugcc

SEQ ID NO: 2270532 - RNA, 19 nt, Human
gacucgcgacaaugcaaac

SEQ ID NO: 2270533 - RNA, 17 nt, Human
gacuccugcaggcagcc

SEQ ID NO: 2270534 - RNA, 18 nt, Human
gacucgcgacaaugcaaa

SEQ ID NO: 2270535 - RNA, 14 nt, Human
gacuuggaagcucc

SEQ ID NO: 2270536 - RNA, 16 nt, Human
gacucgggggugggga

SEQ ID NO: 2270537 - RNA, 14 nt, Human
gacucggggguggg

SEQ ID NO: 2270538 - RNA, 19 nt, Human
gacucgggcuccugugccc

SEQ ID NO: 2270539 - RNA, 20 nt, Human
gacucgggcuccugugcccu

SEQ ID NO: 2270540 - RNA, 15 nt, Human
gacuuggaagcuccg

SEQ ID NO: 2270541 - RNA, 16 nt, Human
gacuuggaagcuccgc

SEQ ID NO: 2270542 - RNA, 18 nt, Human
gacuuguuuuaugcucag

SEQ ID NO: 2270543 - RNA, 15 nt, Human
gacuuguuuuugcac

SEQ ID NO: 2270544 - RNA, 16 nt, Human
gacuuguuuuugcaca

SEQ ID NO: 2270545 - RNA, 18 nt, Human
gagaaaauaaaaaguuaa

SEQ ID NO: 2270546 - RNA, 21 nt, Human
gagaaaauggacguguuauga

SEQ ID NO: 2270547 - RNA, 14 nt, Human
gagaaacagagaca

SEQ ID NO: 2270548 - RNA, 13 nt, Human
gagaaacagagac

SEQ ID NO: 2270549 - RNA, 17 nt, Human
gagaaacaauaaagaga

SEQ ID NO: 2270550 - RNA, 18 nt, Human
gagaaaauccccauugaa

SEQ ID NO: 2270551 - RNA, 19 nt, Human
gagaaaauaaaaaguuaaa

SEQ ID NO: 2270552 - RNA, 16 nt, Human
gacuugugucucugug

SEQ ID NO: 2270553 - RNA, 13 nt, Human
gacuugugucucu

SEQ ID NO: 2270554 - RNA, 13 nt, Human
gacuuguguccca

SEQ ID NO: 2270555 - RNA, 18 nt, Human
gacuugugucccaugauc

SEQ ID NO: 2270556 - RNA, 13 nt, Human
gacucgguuucuc

SEQ ID NO: 2270557 - RNA, 19 nt, Human
gacuuguauauuuuaagaa

SEQ ID NO: 2270558 - RNA, 19 nt, Human
gagaaacagagacaggccc

SEQ ID NO: 2270559 - RNA, 12 nt, Human
gagaaacccugu

SEQ ID NO: 2270560 - RNA, 21 nt, Human
gagaaaccuuauuguaccucu

SEQ ID NO: 2270561 - RNA, 23 nt, Human
gagaaaccuuauuguaccucucu

SEQ ID NO: 2270562 - RNA, 17 nt, Human
gagaaacucuugagauc

SEQ ID NO: 2270563 - RNA, 18 nt, Human
gagaaagacuauucaaac

SEQ ID NO: 2270564 - RNA, 17 nt, Human
gagaaagacuauucaaa

SEQ ID NO: 2270565 - RNA, 15 nt, Human
gagaaagacuauuca

SEQ ID NO: 2270566 - RNA, 13 nt, Human
gagaaagacuauu

SEQ ID NO: 2270567 - RNA, 19 nt, Human
gagaaccacuacaugcagc

SEQ ID NO: 2270568 - RNA, 18 nt, Human
gagaaccaaaucuggaag

SEQ ID NO: 2270569 - RNA, 13 nt, Human
gagaaccaaaucu

SEQ ID NO: 2270570 - RNA, 17 nt, Human
gagaaccaaaucuggaa

SEQ ID NO: 2270571 - RNA, 22 nt, Human
gagaacacagccgauucaccug

SEQ ID NO: 2270572 - RNA, 14 nt, Human
gagaaauuuauaaa

SEQ ID NO: 2270573 - RNA, 17 nt, Human
gagaacaaacagaucga

SEQ ID NO: 2270574 - RNA, 18 nt, Human
gagaaagugugagcaaac

SEQ ID NO: 2270575 - RNA, 16 nt, Human
gagaaagaggaagcuu

SEQ ID NO: 2270576 - RNA, 20 nt, Human
gagaaagugauuucuagaaa

SEQ ID NO: 2270577 - RNA, 23 nt, Human
gagaaauaaaguuugcuuagaaa

SEQ ID NO: 2270578 - RNA, 20 nt, Human
gagaaauauggacacuuaau

SEQ ID NO: 2270579 - RNA, 18 nt, Human
gagaaagaaguaggcaug

SEQ ID NO: 2270580 - RNA, 18 nt, Human
gagaaagagcacuuaaga

SEQ ID NO: 2270581 - RNA, 19 nt, Human
gagaaagagcacuuaagag

SEQ ID NO: 2270582 - RNA, 13 nt, Human
gagaaagaagaga

SEQ ID NO: 2270583 - RNA, 18 nt, Human
gagaaagaagagacagga

SEQ ID NO: 2270584 - RNA, 23 nt, Human
gagaaaguacuucuccacccugc

SEQ ID NO: 2270585 - RNA, 23 nt, Human
gagaagcaagaaagaaacccgac

SEQ ID NO: 2270586 - RNA, 16 nt, Human
gagaagagggccugug

SEQ ID NO: 2270587 - RNA, 19 nt, Human
gagaagagggccuguggga

SEQ ID NO: 2270588 - RNA, 13 nt, Human
gagaagaggcugg

SEQ ID NO: 2270589 - RNA, 21 nt, Human
gagaagaggcuggugcugugg

SEQ ID NO: 2270590 - RNA, 14 nt, Human
gagaagagggccug

SEQ ID NO: 2270591 - RNA, 15 nt, Human
gagaagagggccugu

SEQ ID NO: 2270592 - RNA, 22 nt, Human
gagaagagcuguucacagccag

SEQ ID NO: 2270593 - RNA, 15 nt, Human
gagaagagcuguuca

SEQ ID NO: 2270594 - RNA, 13 nt, Human
gagaagaacugaa

SEQ ID NO: 2270595 - RNA, 14 nt, Human
gagaagaacugaaa

SEQ ID NO: 2270596 - RNA, 16 nt, Human
gagaagaacugaaauc

SEQ ID NO: 2270597 - RNA, 20 nt, Human
gagaacccugcguggggaca

SEQ ID NO: 2270598 - RNA, 21 nt, Human
gagaacccugcguggggacag

SEQ ID NO: 2270599 - RNA, 20 nt, Human
gagaaccgagcaaagaucaa

SEQ ID NO: 2270600 - RNA, 22 nt, Human
gagaaccgagcaaagaucaaaa

SEQ ID NO: 2270601 - RNA, 23 nt, Human
gagaaccgagcaaagaucaaaau

SEQ ID NO: 2270602 - RNA, 16 nt, Human
gagaauucuuacaugu

SEQ ID NO: 2270603 - RNA, 17 nt, Human
gagaaugagggccaaga

SEQ ID NO: 2270604 - RNA, 13 nt, Human
gagaaugaggguc

SEQ ID NO: 2270605 - RNA, 13 nt, Human
gagaaugagccuc

SEQ ID NO: 2270606 - RNA, 22 nt, Human
gagaaugcacaaacagaggccg

SEQ ID NO: 2270607 - RNA, 20 nt, Human
gagaaugcacaaacagaggc

SEQ ID NO: 2270608 - RNA, 21 nt, Human
gagaaugcacaaacagaggcc

SEQ ID NO: 2270609 - RNA, 22 nt, Human
gagaagccagcuuuccucauca

SEQ ID NO: 2270610 - RNA, 12 nt, Human
gagaagccagga

SEQ ID NO: 2270611 - RNA, 23 nt, Human
gagaagccaggaauuucccagga

SEQ ID NO: 2270612 - RNA, 22 nt, Human
gagaagccaggaauuucccagg

SEQ ID NO: 2270613 - RNA, 20 nt, Human
gagaagccagugcggcaggu

SEQ ID NO: 2270614 - RNA, 11 nt, Human
gagaagccauu

SEQ ID NO: 2270615 - RNA, 15 nt, Human
gagaagccauugucu

SEQ ID NO: 2270616 - RNA, 20 nt, Human
gagaagccauugucuucgga

SEQ ID NO: 2270617 - RNA, 15 nt, Human
gagaagccccuuccc

SEQ ID NO: 2270618 - RNA, 21 nt, Human
gagaagccccuuccccauggg

SEQ ID NO: 2270619 - RNA, 22 nt, Human
gagaagccccuuccccauggga

SEQ ID NO: 2270620 - RNA, 14 nt, Human
gagaagcccgugug

SEQ ID NO: 2270621 - RNA, 15 nt, Human
gagaagcccguguga

SEQ ID NO: 2270622 - RNA, 16 nt, Human
gagaagcccgugugag

SEQ ID NO: 2270623 - RNA, 18 nt, Human
gagacaaaucuaugccac

SEQ ID NO: 2270624 - RNA, 20 nt, Human
gagacacaacaacuccuagg

SEQ ID NO: 2270625 - RNA, 18 nt, Human
gagacacacugaagaagc

SEQ ID NO: 2270626 - RNA, 15 nt, Human
gagacacaagccuuc

SEQ ID NO: 2270627 - RNA, 17 nt, Human
gagacacaagccuucgg

SEQ ID NO: 2270628 - RNA, 16 nt, Human
gagacaaauggaggcc

SEQ ID NO: 2270629 - RNA, 17 nt, Human
gagacaagaaaucccug

SEQ ID NO: 2270630 - RNA, 19 nt, Human
gagacaaacaccucccagg

SEQ ID NO: 2270631 - RNA, 22 nt, Human
gagacaaacaccucccaggaga

SEQ ID NO: 2270632 - RNA, 20 nt, Human
gagacaaacaccucccagga

SEQ ID NO: 2270633 - RNA, 21 nt, Human
gagaauuguaucauuugaaca

SEQ ID NO: 2270634 - RNA, 15 nt, Human
gagaauuguaucauu

SEQ ID NO: 2270635 - RNA, 17 nt, Human
gagaauugggauuacau

SEQ ID NO: 2270636 - RNA, 16 nt, Human
gagaauuuuaaauuau

SEQ ID NO: 2270637 - RNA, 15 nt, Human
gagaauuuuaaauua

SEQ ID NO: 2270638 - RNA, 21 nt, Human
gagaauuucuaccauuucaga

SEQ ID NO: 2270639 - RNA, 22 nt, Human
gagaauucuuacauguuuucuu

SEQ ID NO: 2270640 - RNA, 18 nt, Human
gagaauucuuacauguuu

SEQ ID NO: 2270641 - RNA, 18 nt, Human
gagaauugcuugaaccca

SEQ ID NO: 2270642 - RNA, 14 nt, Human
gagaauugggggcu

SEQ ID NO: 2270643 - RNA, 22 nt, Human
gagacagagaggacgugggcgg

SEQ ID NO: 2270644 - RNA, 16 nt, Human
gagacagaagcaggcu

SEQ ID NO: 2270645 - RNA, 17 nt, Human
gagacacuggccccuca

SEQ ID NO: 2270646 - RNA, 17 nt, Human
gagacacuugccuucuu

SEQ ID NO: 2270647 - RNA, 12 nt, Human
gagacagaagca

SEQ ID NO: 2270648 - RNA, 15 nt, Human
gagacagaagcaggc

SEQ ID NO: 2270649 - RNA, 19 nt, Human
gagacaccugcaccucccc

SEQ ID NO: 2270650 - RNA, 18 nt, Human
gagacaccugcaccuccc

SEQ ID NO: 2270651 - RNA, 17 nt, Human
gagacaccugcaccucc

SEQ ID NO: 2270652 - RNA, 15 nt, Human
gagacaccugcaccu

SEQ ID NO: 2270653 - RNA, 13 nt, Human
gagacaccugcac

SEQ ID NO: 2270654 - RNA, 20 nt, Human
gagacacuaacgacuucagg

SEQ ID NO: 2270655 - RNA, 15 nt, Human
gagacacuggccccu

SEQ ID NO: 2270656 - RNA, 21 nt, Human
gagacaccugcaccucccccc

SEQ ID NO: 2270657 - RNA, 20 nt, Human
gagacaccugcaccuccccc

SEQ ID NO: 2270658 - RNA, 16 nt, Human
gagacacggagcccag

SEQ ID NO: 2270659 - RNA, 19 nt, Human
gagacagaguuuucacucu

SEQ ID NO: 2270660 - RNA, 14 nt, Human
gagacagagcuggu

SEQ ID NO: 2270661 - RNA, 16 nt, Human
gagacagccaacuaug

SEQ ID NO: 2270662 - RNA, 12 nt, Human
gagacagcccgg

SEQ ID NO: 2270663 - RNA, 23 nt, Human
gaacuuucucuucauacuuuuuu

SEQ ID NO: 2270664 - RNA, 21 nt, Human
gaacuuucucuucauacuuuu

SEQ ID NO: 2270665 - RNA, 14 nt, Human
gaacuuugaaggac

SEQ ID NO: 2270666 - RNA, 17 nt, Human
gaagaaagagaaggagc

SEQ ID NO: 2270667 - RNA, 18 nt, Human
gaagaaaggccaucagag

SEQ ID NO: 2270668 - RNA, 21 nt, Human
gaagaaaggccaucagagcaa

SEQ ID NO: 2270669 - RNA, 17 nt, Human
gaagaaaggguguuuuu

SEQ ID NO: 2270670 - RNA, 22 nt, Human
gaacuuugaccucugcagcaau

SEQ ID NO: 2270671 - RNA, 16 nt, Human
gaacuuugaccucugc

SEQ ID NO: 2270672 - RNA, 18 nt, Human
gaagaagcuuaggcaggg

SEQ ID NO: 2270673 - RNA, 16 nt, Human
gaagaagcuuaggcag

SEQ ID NO: 2270674 - RNA, 17 nt, Human
gaagaagcuuaggcagg

SEQ ID NO: 2270675 - RNA, 14 nt, Human
gaagaagcucucuc

SEQ ID NO: 2270676 - RNA, 20 nt, Human
gaagaacauccaaggagaaa

SEQ ID NO: 2270677 - RNA, 17 nt, Human
gaagaacauccaaggag

SEQ ID NO: 2270678 - RNA, 16 nt, Human
gaagaacauccaagga

SEQ ID NO: 2270679 - RNA, 13 nt, Human
gaagaacauagaa

SEQ ID NO: 2270680 - RNA, 13 nt, Human
gaagaaccagucc

SEQ ID NO: 2270681 - RNA, 22 nt, Human
gaagaacaucuuuaugguaaag

SEQ ID NO: 2270682 - RNA, 18 nt, Human
gaagaaaucacagaauca

SEQ ID NO: 2270683 - RNA, 22 nt, Human
gaagaaaucacagaaucauaug

SEQ ID NO: 2270684 - RNA, 15 nt, Human
gaagaaaguggaaaa

SEQ ID NO: 2270685 - RNA, 21 nt, Human
gaagaaaggguguuuuucugu

SEQ ID NO: 2270686 - RNA, 15 nt, Human
gaagaaaucacagaa

SEQ ID NO: 2270687 - RNA, 14 nt, Human
gaagaaauuccugu

SEQ ID NO: 2270688 - RNA, 15 nt, Human
gaagaaauuccugua

SEQ ID NO: 2270689 - RNA, 18 nt, Human
gaagaacacccucuaaau

SEQ ID NO: 2270690 - RNA, 18 nt, Human
gaagaaauuccuguagca

SEQ ID NO: 2270691 - RNA, 22 nt, Human
gaagaaauuccuguagcaucuu

SEQ ID NO: 2270692 - RNA, 24 nt, Human
gaacuuuccacauucagagcuuac

SEQ ID NO: 2270693 - RNA, 14 nt, Human
gaacuuucauuuuu

SEQ ID NO: 2270694 - RNA, 23 nt, Human
gaacuuucauuuuuuuccaggcu

SEQ ID NO: 2270695 - RNA, 17 nt, Human
gaacuuuccaggaaggc

SEQ ID NO: 2270696 - RNA, 15 nt, Human
gaacuuguuuucugg

SEQ ID NO: 2270697 - RNA, 12 nt, Human
gaacuuucauuu

SEQ ID NO: 2270698 - RNA, 13 nt, Human
gaacuuucauuuu

SEQ ID NO: 2270699 - RNA, 17 nt, Human
gaacuugggccacugug

SEQ ID NO: 2270700 - RNA, 18 nt, Human
gaacuuggcgcugccccu

SEQ ID NO: 2270701 - RNA, 17 nt, Human
gaacuuggggaacaagg

SEQ ID NO: 2270702 - RNA, 22 nt, Human
gaacuuggggaguuaagaccug

SEQ ID NO: 2270703 - RNA, 22 nt, Human
gaacuuguaaaggaauuuaaaa

SEQ ID NO: 2270704 - RNA, 18 nt, Human
gaacuuaaauaaauguca

SEQ ID NO: 2270705 - RNA, 15 nt, Human
gaacuuaaauaaaug

SEQ ID NO: 2270706 - RNA, 13 nt, Human
gaacuuaaaauga

SEQ ID NO: 2270707 - RNA, 23 nt, Human
gaacuucgcaucaaaagacaauu

SEQ ID NO: 2270708 - RNA, 13 nt, Human
gaacuucuaauau

SEQ ID NO: 2270709 - RNA, 15 nt, Human
gaacuucuaauauau

SEQ ID NO: 2270710 - RNA, 17 nt, Human
gaacuuaaauaauguga

SEQ ID NO: 2270711 - RNA, 20 nt, Human
gaacuguuguauaaauuuau

SEQ ID NO: 2270712 - RNA, 16 nt, Human
gaacuguuguauaaau

SEQ ID NO: 2270713 - RNA, 15 nt, Human
gaacuguuguauaaa

SEQ ID NO: 2270714 - RNA, 14 nt, Human
gaacuguuguauaa

SEQ ID NO: 2270715 - RNA, 14 nt, Human
gaacuuaaauaaug

SEQ ID NO: 2270716 - RNA, 14 nt, Human
gaacuucuaauaua

SEQ ID NO: 2270717 - RNA, 17 nt, Human
gaacuucucucagacuu

SEQ ID NO: 2270718 - RNA, 17 nt, Human
gaacuuggcgcugcccc

SEQ ID NO: 2270719 - RNA, 15 nt, Human
gaacuccuaaaucaa

SEQ ID NO: 2270720 - RNA, 16 nt, Human
gaacucccuuucaaca

SEQ ID NO: 2270721 - RNA, 17 nt, Human
gaacugugccuuugagu

SEQ ID NO: 2270722 - RNA, 13 nt, Human
gaaccaauauuug

SEQ ID NO: 2270723 - RNA, 20 nt, Human
gaacuguguuucaaguucaa

SEQ ID NO: 2270724 - RNA, 13 nt, Human
gaacuguuguaua

SEQ ID NO: 2270725 - RNA, 16 nt, Human
gaacuccuaaaucaag

SEQ ID NO: 2270726 - RNA, 13 nt, Human
gaacuccugaccu

SEQ ID NO: 2270727 - RNA, 24 nt, Human
gaaccaaguggaccuugagaccac

SEQ ID NO: 2270728 - RNA, 23 nt, Human
gaaccaaguggaccuugagacca

SEQ ID NO: 2270729 - RNA, 20 nt, Human
gaaccacaucuugcucugcu

SEQ ID NO: 2270730 - RNA, 18 nt, Human
gaaccacaucuugcucug

SEQ ID NO: 2270731 - RNA, 14 nt, Human
gaaccacaagacug

SEQ ID NO: 2270732 - RNA, 15 nt, Human
gaaccacaagacugc

SEQ ID NO: 2270733 - RNA, 15 nt, Human
gaagaucuuaaauuu

SEQ ID NO: 2270734 - RNA, 18 nt, Human
gaagaucguuaguaucua

SEQ ID NO: 2270735 - RNA, 13 nt, Human
gaagauccuaccc

SEQ ID NO: 2270736 - RNA, 14 nt, Human
gaagauccugcggg

SEQ ID NO: 2270737 - RNA, 22 nt, Human
gaagauccugcggguggggcuu

SEQ ID NO: 2270738 - RNA, 21 nt, Human
gaagaucauauacgugaaaau

SEQ ID NO: 2270739 - RNA, 16 nt, Human
gaagaucacgcucccc

SEQ ID NO: 2270740 - RNA, 17 nt, Human
gaagaucacgcuccccg

SEQ ID NO: 2270741 - RNA, 15 nt, Human
gaagauccccucagg

SEQ ID NO: 2270742 - RNA, 18 nt, Human
gaagaucacgcuccccgc

SEQ ID NO: 2270743 - RNA, 16 nt, Human
gaagauccccucagga

SEQ ID NO: 2270744 - RNA, 20 nt, Human
gaagauccccucaggacugc

SEQ ID NO: 2270745 - RNA, 17 nt, Human
gaagauccuaaaacaaa

SEQ ID NO: 2270746 - RNA, 18 nt, Human
gaagauaggcucugcaca

SEQ ID NO: 2270747 - RNA, 20 nt, Human
gaagauaggcucugcacaga

SEQ ID NO: 2270748 - RNA, 22 nt, Human
gaagauauaacuauugcccagg

SEQ ID NO: 2270749 - RNA, 14 nt, Human
gaagauaucuugaa

SEQ ID NO: 2270750 - RNA, 21 nt, Human
gaagauauaacuauugcccag

SEQ ID NO: 2270751 - RNA, 14 nt, Human
gaagauauuuuucc

SEQ ID NO: 2270752 - RNA, 16 nt, Human
gaagagugagagggca

SEQ ID NO: 2270753 - RNA, 14 nt, Human
gaagagugagaggg

SEQ ID NO: 2270754 - RNA, 18 nt, Human
gaagaguggguuucacaa

SEQ ID NO: 2270755 - RNA, 17 nt, Human
gaagaguggguuucaca

SEQ ID NO: 2270756 - RNA, 14 nt, Human
gaagaguguacugg

SEQ ID NO: 2270757 - RNA, 15 nt, Human
gaagaguguacuggg

SEQ ID NO: 2270758 - RNA, 17 nt, Human
gaagaguguacuggggg

SEQ ID NO: 2270759 - RNA, 17 nt, Human
gaagauucuccugugcu

SEQ ID NO: 2270760 - RNA, 12 nt, Human
gaagaugggggc

SEQ ID NO: 2270761 - RNA, 18 nt, Human
gaagaugggggcaagaag

SEQ ID NO: 2270762 - RNA, 17 nt, Human
gaagauguagaggagaa

SEQ ID NO: 2270763 - RNA, 13 nt, Human
gaagaugaucaga

SEQ ID NO: 2270764 - RNA, 16 nt, Human
gaagaugaucagaccu

SEQ ID NO: 2270765 - RNA, 21 nt, Human
gaagaugcagcaaaaugugaa

SEQ ID NO: 2270766 - RNA, 14 nt, Human
gaagaugaaucaau

SEQ ID NO: 2270767 - RNA, 13 nt, Human
gaagaugaaagag

SEQ ID NO: 2270768 - RNA, 17 nt, Human
gaagaugaaagaggagg

SEQ ID NO: 2270769 - RNA, 16 nt, Human
gaagauggcauccugu

SEQ ID NO: 2270770 - RNA, 20 nt, Human
gaagauggcauccugugaag

SEQ ID NO: 2270771 - RNA, 14 nt, Human
gaagaugcagcuca

SEQ ID NO: 2270772 - RNA, 13 nt, Human
gaagaugcagcuc

SEQ ID NO: 2270773 - RNA, 20 nt, Human
gaagauuugaugcuggagag

SEQ ID NO: 2270774 - RNA, 22 nt, Human
gaagauuugaugcuggagaggu

SEQ ID NO: 2270775 - RNA, 13 nt, Human
gaagauugugaau

SEQ ID NO: 2270776 - RNA, 14 nt, Human
gaagauucuuuccc

SEQ ID NO: 2270777 - RNA, 18 nt, Human
gaagcauuuacuuugugu

SEQ ID NO: 2270778 - RNA, 17 nt, Human
gaagauugagauguguu

SEQ ID NO: 2270779 - RNA, 22 nt, Human
gaagauugagauguguucacaa

SEQ ID NO: 2270780 - RNA, 16 nt, Human
gaagaguccucugaau

SEQ ID NO: 2270781 - RNA, 14 nt, Human
gaagaguccucuga

SEQ ID NO: 2270782 - RNA, 23 nt, Human
gaagaguaagucaaccugccuga

SEQ ID NO: 2270783 - RNA, 16 nt, Human
gaagaguagcauuuca

SEQ ID NO: 2270784 - RNA, 20 nt, Human
gaagaguagcauuucauucu

SEQ ID NO: 2270785 - RNA, 10 nt, Human
gaagaggacu

SEQ ID NO: 2270786 - RNA, 15 nt, Human
gaagaggaaaaugaa

SEQ ID NO: 2270787 - RNA, 18 nt, Human
gaagaggaaaaugaauaa

SEQ ID NO: 2270788 - RNA, 14 nt, Human
gaagaggaaaauga

SEQ ID NO: 2270789 - RNA, 23 nt, Human
gaagagcuguucacagccagacu

SEQ ID NO: 2270790 - RNA, 17 nt, Human
gaagagcuauuauauaa

SEQ ID NO: 2270791 - RNA, 13 nt, Human
gaagagcuguuca

SEQ ID NO: 2270792 - RNA, 20 nt, Human
gaagagcuguucacagccag

SEQ ID NO: 2270793 - RNA, 15 nt, Human
gaagagcuguucaca

SEQ ID NO: 2270794 - RNA, 12 nt, Human
gaagagccuugc

SEQ ID NO: 2270795 - RNA, 19 nt, Human
gaagaauacaaacauauuu

SEQ ID NO: 2270796 - RNA, 18 nt, Human
gaagaauacaaacauauu

SEQ ID NO: 2270797 - RNA, 16 nt, Human
gaagagccggagccuc

SEQ ID NO: 2270798 - RNA, 18 nt, Human
gaagagccugcaggugcu

SEQ ID NO: 2270799 - RNA, 17 nt, Human
gaagacuucaucccucu

SEQ ID NO: 2270800 - RNA, 19 nt, Human
gaagacuucaucccucugg

SEQ ID NO: 2270801 - RNA, 15 nt, Human
gaagacuucaucccu

SEQ ID NO: 2270802 - RNA, 16 nt, Human
gaagacuucaucccuc

SEQ ID NO: 2270803 - RNA, 13 nt, Human
gaagaaguguguc

SEQ ID NO: 2270804 - RNA, 14 nt, Human
gaagaagucagaga

SEQ ID NO: 2270805 - RNA, 16 nt, Human
gaagaagggcacccua

SEQ ID NO: 2270806 - RNA, 18 nt, Human
gaagaagggagaagaaag

SEQ ID NO: 2270807 - RNA, 19 nt, Human
gaagaagggagaagaaagg

SEQ ID NO: 2270808 - RNA, 14 nt, Human
gaagaagggagaag

SEQ ID NO: 2270809 - RNA, 15 nt, Human
gaagaagggagaaga

SEQ ID NO: 2270810 - RNA, 16 nt, Human
gaagaagggagaagaa

SEQ ID NO: 2270811 - RNA, 17 nt, Human
gaagaagggagaagaaa

SEQ ID NO: 2270812 - RNA, 23 nt, Human
gaaguccccaggccccaggaagc

SEQ ID NO: 2270813 - RNA, 17 nt, Human
gaaguccaauguggcaa

SEQ ID NO: 2270814 - RNA, 14 nt, Human
gaaguccaaugugg

SEQ ID NO: 2270815 - RNA, 23 nt, Human
gaaguccaagcauuuagauguau

SEQ ID NO: 2270816 - RNA, 16 nt, Human
gaaguccccaggcccc

SEQ ID NO: 2270817 - RNA, 17 nt, Human
gaaguccccaggcccca

SEQ ID NO: 2270818 - RNA, 22 nt, Human
gaaguccccuuccaucccagag

SEQ ID NO: 2270819 - RNA, 18 nt, Human
gaagucuuagauguauau

SEQ ID NO: 2270820 - RNA, 18 nt, Human
gaagucgucuuaacucac

SEQ ID NO: 2270821 - RNA, 13 nt, Human
gaagucagagagg

SEQ ID NO: 2270822 - RNA, 15 nt, Human
gaagucacugcacag

SEQ ID NO: 2270823 - RNA, 17 nt, Human
gaaguaagugggguugc

SEQ ID NO: 2270824 - RNA, 16 nt, Human
gaagucaaagcaagga

SEQ ID NO: 2270825 - RNA, 15 nt, Human
gaagucaaagcaagg

SEQ ID NO: 2270826 - RNA, 21 nt, Human
gaaguaauaugcacacauuuu

SEQ ID NO: 2270827 - RNA, 19 nt, Human
gaaguauuuugcuggaaua

SEQ ID NO: 2270828 - RNA, 13 nt, Human
gaagucacacagu

SEQ ID NO: 2270829 - RNA, 20 nt, Human
gaagucaagcccagccacgu

SEQ ID NO: 2270830 - RNA, 20 nt, Human
gaaguaauaugcacacauuu

SEQ ID NO: 2270831 - RNA, 19 nt, Human
gaaguaauaugcacacauu

SEQ ID NO: 2270832 - RNA, 14 nt, Human
gaaguaacaguaac

SEQ ID NO: 2270833 - RNA, 19 nt, Human
gaaguaaccauuugcacug

SEQ ID NO: 2270834 - RNA, 21 nt, Human
gaaggugaggagcuugaaacc

SEQ ID NO: 2270835 - RNA, 20 nt, Human
gaagggggccaugaggccuc

SEQ ID NO: 2270836 - RNA, 16 nt, Human
gaagggggauaugaau

SEQ ID NO: 2270837 - RNA, 14 nt, Human
gaagggggccauga

SEQ ID NO: 2270838 - RNA, 17 nt, Human
gaaggucaccugagccc

SEQ ID NO: 2270839 - RNA, 14 nt, Human
gaaggucaccagca

SEQ ID NO: 2270840 - RNA, 21 nt, Human
gaaggucacucuuccugcaag

SEQ ID NO: 2270841 - RNA, 22 nt, Human
gaagggggccaugaggccucag

SEQ ID NO: 2270842 - RNA, 14 nt, Human
gaaggucggaggcu

SEQ ID NO: 2270843 - RNA, 15 nt, Human
gaaggucggaggcuu

SEQ ID NO: 2270844 - RNA, 16 nt, Human
gaagguccugcuauua

SEQ ID NO: 2270845 - RNA, 23 nt, Human
gaaggucacucuuccugcaagga

SEQ ID NO: 2270846 - RNA, 18 nt, Human
gaaggucggaggcuuggg

SEQ ID NO: 2270847 - RNA, 21 nt, Human
gaaggcauaucagucucugag

SEQ ID NO: 2270848 - RNA, 22 nt, Human
gaaggcagggggaagguggggu

SEQ ID NO: 2270849 - RNA, 17 nt, Human
gaaggcaucagucccua

SEQ ID NO: 2270850 - RNA, 14 nt, Human
gaaggggccagagg

SEQ ID NO: 2270851 - RNA, 17 nt, Human
gaaggggccagaggcuc

SEQ ID NO: 2270852 - RNA, 16 nt, Human
gaaggggccagaggcu

SEQ ID NO: 2270853 - RNA, 23 nt, Human
gaaggggcccugguccuuccagg

SEQ ID NO: 2270854 - RNA, 22 nt, Human
gaaggggccucaccgagugggg

SEQ ID NO: 2270855 - RNA, 13 nt, Human
gaagggggauaug

SEQ ID NO: 2270856 - RNA, 21 nt, Human
gaaggggcgucuguucccccu

SEQ ID NO: 2270857 - RNA, 13 nt, Human
gaagggggcuggg

SEQ ID NO: 2270858 - RNA, 20 nt, Human
gaaggauguacauuuccaaa

SEQ ID NO: 2270859 - RNA, 17 nt, Human
gaaggauguacauuucc

SEQ ID NO: 2270860 - RNA, 16 nt, Human
gaaggauguacauuuc

SEQ ID NO: 2270861 - RNA, 15 nt, Human
gaaggauguacauuu

SEQ ID NO: 2270862 - RNA, 14 nt, Human
gaaggaugagcauu

SEQ ID NO: 2270863 - RNA, 13 nt, Human
gaaggauuguaaa

SEQ ID NO: 2270864 - RNA, 18 nt, Human
gaaggcagggagggccug

SEQ ID NO: 2270865 - RNA, 14 nt, Human
gaaggauuguaaaa

SEQ ID NO: 2270866 - RNA, 21 nt, Human
gaaggcagggggaaggugggg

SEQ ID NO: 2270867 - RNA, 23 nt, Human
gaaggcagggagggccugggccc

SEQ ID NO: 2270868 - RNA, 22 nt, Human
gaaggcagggagggccugggcc

SEQ ID NO: 2270869 - RNA, 20 nt, Human
gaaggcagggagggccuggg

SEQ ID NO: 2270870 - RNA, 22 nt, Human
gaaggaucuguuuuuaaaaauc

SEQ ID NO: 2270871 - RNA, 10 nt, Human
gaaggauccu

SEQ ID NO: 2270872 - RNA, 17 nt, Human
gaaggaggugagggaug

SEQ ID NO: 2270873 - RNA, 10 nt, Human
gaaggauccg

SEQ ID NO: 2270874 - RNA, 16 nt, Human
gaaggaugagcauuua

SEQ ID NO: 2270875 - RNA, 16 nt, Human
gaaggaugccaagaag

SEQ ID NO: 2270876 - RNA, 19 nt, Human
gaaggaggguuagggaggg

SEQ ID NO: 2270877 - RNA, 13 nt, Human
gaaggaggugagg

SEQ ID NO: 2270878 - RNA, 15 nt, Human
gaaggaggugaggga

SEQ ID NO: 2270879 - RNA, 14 nt, Human
gaaggaggcuggcu

SEQ ID NO: 2270880 - RNA, 18 nt, Human
gaaggaggaggaggaggu

SEQ ID NO: 2270881 - RNA, 13 nt, Human
gaagcauuuuaua

SEQ ID NO: 2270882 - RNA, 17 nt, Human
gaagcauuuuauaaauc

SEQ ID NO: 2270883 - RNA, 15 nt, Human
gaagcauuuuauaaa

SEQ ID NO: 2270884 - RNA, 18 nt, Human
gaagccaaaccucuguga

SEQ ID NO: 2270885 - RNA, 10 nt, Human
gaagccaaag

SEQ ID NO: 2270886 - RNA, 14 nt, Human
gaagccgcuggggc

SEQ ID NO: 2270887 - RNA, 13 nt, Human
gaagccaaagagu

SEQ ID NO: 2270888 - RNA, 15 nt, Human
gaagccaacuuggcu

SEQ ID NO: 2270889 - RNA, 17 nt, Human
gaagccaacuuggcuuu

SEQ ID NO: 2270890 - RNA, 12 nt, Human
gaagccaaagaa

SEQ ID NO: 2270891 - RNA, 13 nt, Human
gaagccaaagaaa

SEQ ID NO: 2270892 - RNA, 14 nt, Human
gaagccaaagaaaa

SEQ ID NO: 2270893 - RNA, 16 nt, Human
gaagccaaagaaaaau

SEQ ID NO: 2270894 - RNA, 15 nt, Human
gaagccugcaggagu

SEQ ID NO: 2270895 - RNA, 12 nt, Human
gaagccugcccu

SEQ ID NO: 2270896 - RNA, 13 nt, Human
gaagccugaggcu

SEQ ID NO: 2270897 - RNA, 12 nt, Human
gaagccugaggc

SEQ ID NO: 2270898 - RNA, 21 nt, Human
gaagccucugggucagugguc

SEQ ID NO: 2270899 - RNA, 18 nt, Human
gaagccaacuuggcuuuc

SEQ ID NO: 2270900 - RNA, 14 nt, Human
gaagccgcugcugg

SEQ ID NO: 2270901 - RNA, 13 nt, Human
gaagccucuggga

SEQ ID NO: 2270902 - RNA, 18 nt, Human
gaagccgcuggggccagu

SEQ ID NO: 2270903 - RNA, 20 nt, Human
gaagccgcuggggccaguug

SEQ ID NO: 2270904 - RNA, 15 nt, Human
gaagcuucagaaguu

SEQ ID NO: 2270905 - RNA, 22 nt, Human
gaagcuguuguacauuuaugau

SEQ ID NO: 2270906 - RNA, 16 nt, Human
gaagcuguuguacauu

SEQ ID NO: 2270907 - RNA, 18 nt, Human
gaagcuguuguacauuua

SEQ ID NO: 2270908 - RNA, 19 nt, Human
gaagcuguuguacauuuau

SEQ ID NO: 2270909 - RNA, 21 nt, Human
gaagcuguuguacauuuauga

SEQ ID NO: 2270910 - RNA, 19 nt, Human
gaaggaaacccagcucugg

SEQ ID NO: 2270911 - RNA, 20 nt, Human
gaaggaaacccagcucuggu

SEQ ID NO: 2270912 - RNA, 24 nt, Human
gaagcuguguccuugcaccugcau

SEQ ID NO: 2270913 - RNA, 13 nt, Human
gaagcuguuguac

SEQ ID NO: 2270914 - RNA, 23 nt, Human
gaagcuguguccuugcaccugca

SEQ ID NO: 2270915 - RNA, 14 nt, Human
gaagccuuagccag

SEQ ID NO: 2270916 - RNA, 16 nt, Human
gaagccugcccuuguc

SEQ ID NO: 2270917 - RNA, 13 nt, Human
gaagccuggaaca

SEQ ID NO: 2270918 - RNA, 22 nt, Human
gaagccuguuuuguuggaaggu

SEQ ID NO: 2270919 - RNA, 20 nt, Human
gaagccuguuuuguuggaag

SEQ ID NO: 2270920 - RNA, 19 nt, Human
gaaggacauugcggacagc

SEQ ID NO: 2270921 - RNA, 15 nt, Human
gaaggaauugacuuc

SEQ ID NO: 2270922 - RNA, 19 nt, Human
gaaggaauauauggcagag

SEQ ID NO: 2270923 - RNA, 20 nt, Human
gaaggaauauauggcagagu

SEQ ID NO: 2270924 - RNA, 22 nt, Human
gaaggaauaaauugcuccuuga

SEQ ID NO: 2270925 - RNA, 20 nt, Human
gaaggacauugcggacagcc

SEQ ID NO: 2270926 - RNA, 21 nt, Human
gaaggacauugcggacagcca

SEQ ID NO: 2270927 - RNA, 15 nt, Human
gaaggaggaggagga

SEQ ID NO: 2270928 - RNA, 16 nt, Human
gaaggacaaggcuaga

SEQ ID NO: 2270929 - RNA, 15 nt, Human
gaaggacacuuccug

SEQ ID NO: 2270930 - RNA, 18 nt, Human
gaaggacacuuccugccu

SEQ ID NO: 2270931 - RNA, 17 nt, Human
gaaggacacuuccugcc

SEQ ID NO: 2270932 - RNA, 16 nt, Human
gaaggaccacauuuua

SEQ ID NO: 2270933 - RNA, 20 nt, Human
gaaggaccacauuuuauauu

SEQ ID NO: 2270934 - RNA, 22 nt, Human
gaaggaccacauuuuauauuua

SEQ ID NO: 2270935 - RNA, 22 nt, Human
gaaggacccggaggggccuggc

SEQ ID NO: 2270936 - RNA, 16 nt, Human
gaaggaagugaagagg

SEQ ID NO: 2270937 - RNA, 23 nt, Human
gaaggaaggagacucaccucugc

SEQ ID NO: 2270938 - RNA, 22 nt, Human
gaaggaacucuggcuuccaggu

SEQ ID NO: 2270939 - RNA, 23 nt, Human
gaaggaacucuggcuuccaggua

SEQ ID NO: 2270940 - RNA, 15 nt, Human
gaaggaacucuggcu

SEQ ID NO: 2270941 - RNA, 20 nt, Human
gaaggaacucuggcuuccag

SEQ ID NO: 2270942 - RNA, 23 nt, Human
gaaggaaccaaagcgaauuuuaa

SEQ ID NO: 2270943 - RNA, 19 nt, Human
gaaggaagacuucaucccu

SEQ ID NO: 2270944 - RNA, 13 nt, Human
gaagcuuccaguc

SEQ ID NO: 2270945 - RNA, 16 nt, Human
gaagcuuccaguccaa

SEQ ID NO: 2270946 - RNA, 19 nt, Human
gaaggaaagaaagaaggaa

SEQ ID NO: 2270947 - RNA, 22 nt, Human
gaagcuucuggugaccuuccaa

SEQ ID NO: 2270948 - RNA, 15 nt, Human
gaaggaacguccccu

SEQ ID NO: 2270949 - RNA, 21 nt, Human
gaaggaaacccagcucugguc

SEQ ID NO: 2270950 - RNA, 22 nt, Human
gaaggaaacccagcucuggucc

SEQ ID NO: 2270951 - RNA, 16 nt, Human
gaaagugaaaguccag

SEQ ID NO: 2270952 - RNA, 19 nt, Human
gaaagugaagcaaaucaga

SEQ ID NO: 2270953 - RNA, 13 nt, Human
gaaagugaauuug

SEQ ID NO: 2270954 - RNA, 21 nt, Human
gaaagugauaucccccagccu

SEQ ID NO: 2270955 - RNA, 22 nt, Human
gaaagugauuucuagaaagccu

SEQ ID NO: 2270956 - RNA, 23 nt, Human
gaaagugaauuugaaugaaaaau

SEQ ID NO: 2270957 - RNA, 19 nt, Human
gaaagugaauuugaaugaa

SEQ ID NO: 2270958 - RNA, 17 nt, Human
gaaagugaauuugaaug

SEQ ID NO: 2270959 - RNA, 16 nt, Human
gaaagugaauuugaau

SEQ ID NO: 2270960 - RNA, 21 nt, Human
gaaaguggccaugccacccug

SEQ ID NO: 2270961 - RNA, 21 nt, Human
gaaagugggugagaugcugga

SEQ ID NO: 2270962 - RNA, 23 nt, Human
gaaagugggugagaugcuggaga

SEQ ID NO: 2270963 - RNA, 16 nt, Human
gaaaguggugcucagu

SEQ ID NO: 2270964 - RNA, 18 nt, Human
gaaaguggugcucaguug

SEQ ID NO: 2270965 - RNA, 20 nt, Human
gaaaguggugcucaguugua

SEQ ID NO: 2270966 - RNA, 12 nt, Human
gaaaguguaaag

SEQ ID NO: 2270967 - RNA, 13 nt, Human
gaaaguguaaagc

SEQ ID NO: 2270968 - RNA, 14 nt, Human
gaaaguguaaagca

SEQ ID NO: 2270969 - RNA, 15 nt, Human
gaaaguguaaagcau

SEQ ID NO: 2270970 - RNA, 16 nt, Human
gaaaguguaaagcauu

SEQ ID NO: 2270971 - RNA, 23 nt, Human
gaaaguguaaagcauuccaacaa

SEQ ID NO: 2270972 - RNA, 17 nt, Human
gaaaguuccuuauguau

SEQ ID NO: 2270973 - RNA, 19 nt, Human
gaaaguugcacggcugcug

SEQ ID NO: 2270974 - RNA, 20 nt, Human
gaaaguugcacggcugcuga

SEQ ID NO: 2270975 - RNA, 16 nt, Human
gaaaguuuacaggaaa

SEQ ID NO: 2270976 - RNA, 17 nt, Human
gaaaguuacaaauugcu

SEQ ID NO: 2270977 - RNA, 18 nt, Human
gaaaguugcacggcugcu

SEQ ID NO: 2270978 - RNA, 14 nt, Human
gaaaguuuacagga

SEQ ID NO: 2270979 - RNA, 18 nt, Human
gaaauaaaaccuuucaaa

SEQ ID NO: 2270980 - RNA, 17 nt, Human
gaaauaaaaccuuucaa

SEQ ID NO: 2270981 - RNA, 16 nt, Human
gaaauaaaaccuuuca

SEQ ID NO: 2270982 - RNA, 15 nt, Human
gaaauaaaaccuuuc

SEQ ID NO: 2270983 - RNA, 19 nt, Human
gaaauaaaaggaagccaaa

SEQ ID NO: 2270984 - RNA, 18 nt, Human
gaaauaaaaggaagccaa

SEQ ID NO: 2270985 - RNA, 17 nt, Human
gaaauaaaaggaagcca

SEQ ID NO: 2270986 - RNA, 16 nt, Human
gaaauaaaaggaagcc

SEQ ID NO: 2270987 - RNA, 22 nt, Human
gaaaguuuucagaaccucuucc

SEQ ID NO: 2270988 - RNA, 14 nt, Human
gaaauaaaaccuuu

SEQ ID NO: 2270989 - RNA, 13 nt, Human
gaaaggagacuag

SEQ ID NO: 2270990 - RNA, 23 nt, Human
gaaaggacucugggguuuuuacu

SEQ ID NO: 2270991 - RNA, 14 nt, Human
gaaaggagaggaaa

SEQ ID NO: 2270992 - RNA, 20 nt, Human
gaaaggauguaaacagugcc

SEQ ID NO: 2270993 - RNA, 16 nt, Human
gaaaggaguagaaaaa

SEQ ID NO: 2270994 - RNA, 15 nt, Human
gaaaggaguagaaaa

SEQ ID NO: 2270995 - RNA, 11 nt, Human
gaaaggagacu

SEQ ID NO: 2270996 - RNA, 21 nt, Human
gaaaggacucugggguuuuua

SEQ ID NO: 2270997 - RNA, 21 nt, Human
gaaaggaagugggacuggcac

SEQ ID NO: 2270998 - RNA, 18 nt, Human
gaaaggaagcuccacugu

SEQ ID NO: 2270999 - RNA, 22 nt, Human
gaaaggaagcuccacugucacc

SEQ ID NO: 2271000 - RNA, 14 nt, Human
gaaagucauuggcu

SEQ ID NO: 2271001 - RNA, 17 nt, Human
gaaagucauuggcuuua

SEQ ID NO: 2271002 - RNA, 18 nt, Human
gaaagucauuggcuuuau

SEQ ID NO: 2271003 - RNA, 21 nt, Human
gaaagucauuggcuuuauccu

SEQ ID NO: 2271004 - RNA, 22 nt, Human
gaaagucgaauuaauagcuuuu

SEQ ID NO: 2271005 - RNA, 20 nt, Human
gaaagucagaugcccagagg

SEQ ID NO: 2271006 - RNA, 17 nt, Human
gaaagucagaugcccag

SEQ ID NO: 2271007 - RNA, 16 nt, Human
gaaaggcauucucuga

SEQ ID NO: 2271008 - RNA, 22 nt, Human
gaaaggauguaaacagugccug

SEQ ID NO: 2271009 - RNA, 22 nt, Human
gaaaguacuucuccacccugcu

SEQ ID NO: 2271010 - RNA, 14 nt, Human
gaaaggauucaugu

SEQ ID NO: 2271011 - RNA, 17 nt, Human
gaaaggagaggaaagaa

SEQ ID NO: 2271012 - RNA, 16 nt, Human
gaaagccagugacucc

SEQ ID NO: 2271013 - RNA, 23 nt, Human
gaaagccaggcagguagccaggg

SEQ ID NO: 2271014 - RNA, 17 nt, Human
gaaagccagugacucca

SEQ ID NO: 2271015 - RNA, 19 nt, Human
gaaagccagugacuccagg

SEQ ID NO: 2271016 - RNA, 20 nt, Human
gaaagccagugacuccagga

SEQ ID NO: 2271017 - RNA, 14 nt, Human
gaaagccauuuguu

SEQ ID NO: 2271018 - RNA, 21 nt, Human
gaaagcuugcccuggugccuc

SEQ ID NO: 2271019 - RNA, 11 nt, Human
gaaaggaaaga

SEQ ID NO: 2271020 - RNA, 16 nt, Human
gaaaggaaagaggcuc

SEQ ID NO: 2271021 - RNA, 22 nt, Human
gaaagcauguggcauguucauc

SEQ ID NO: 2271022 - RNA, 14 nt, Human
gaaagccaccucuc

SEQ ID NO: 2271023 - RNA, 15 nt, Human
gaaagccaccucucc

SEQ ID NO: 2271024 - RNA, 18 nt, Human
gaaagccaccucucccuc

SEQ ID NO: 2271025 - RNA, 19 nt, Human
gaaagccaccucucccuca

SEQ ID NO: 2271026 - RNA, 20 nt, Human
gaaagccaccucucccucaa

SEQ ID NO: 2271027 - RNA, 11 nt, Human
gaaagccaggc

SEQ ID NO: 2271028 - RNA, 14 nt, Human
gaaagccaggcagg

SEQ ID NO: 2271029 - RNA, 18 nt, Human
gaaagcauuugaaugcau

SEQ ID NO: 2271030 - RNA, 20 nt, Human
gaaagcauuugaaugcauuu

SEQ ID NO: 2271031 - RNA, 21 nt, Human
gaaagcauuugaaugcauuuu

SEQ ID NO: 2271032 - RNA, 13 nt, Human
gaaagccaccucu

SEQ ID NO: 2271033 - RNA, 21 nt, Human
gaaagcauguggcauguucau

SEQ ID NO: 2271034 - RNA, 21 nt, Human
gaaagcacugcaugaauaaaa

SEQ ID NO: 2271035 - RNA, 12 nt, Human
gaaagcauuuga

SEQ ID NO: 2271036 - RNA, 15 nt, Human
gaaagcacagguggg

SEQ ID NO: 2271037 - RNA, 23 nt, Human
gaaagcacaggugggcuucccag

SEQ ID NO: 2271038 - RNA, 14 nt, Human
gaaagcauuugaau

SEQ ID NO: 2271039 - RNA, 15 nt, Human
gaaagcauuugaaug

SEQ ID NO: 2271040 - RNA, 16 nt, Human
gaaagcauuugaaugc

SEQ ID NO: 2271041 - RNA, 17 nt, Human
gaaagcauuugaaugca

SEQ ID NO: 2271042 - RNA, 23 nt, Human
gaaaccuuuuuuaagauuuuucu

SEQ ID NO: 2271043 - RNA, 21 nt, Human
gaaaccuuuuuuaagauuuuu

SEQ ID NO: 2271044 - RNA, 22 nt, Human
gaaaccuuuuuuaagauuuuuc

SEQ ID NO: 2271045 - RNA, 20 nt, Human
gaaacuaggugcauauuuau

SEQ ID NO: 2271046 - RNA, 18 nt, Human
gaaacucaccugcuggcc

SEQ ID NO: 2271047 - RNA, 21 nt, Human
gaaacucacccccaaggggca

SEQ ID NO: 2271048 - RNA, 20 nt, Human
gaaacucaccauguaaaaga

SEQ ID NO: 2271049 - RNA, 17 nt, Human
gaaacucaccauguaaa

SEQ ID NO: 2271050 - RNA, 19 nt, Human
gaaacuaggugcauauuua

SEQ ID NO: 2271051 - RNA, 23 nt, Human
gaaacucauaauagacuucccac

SEQ ID NO: 2271052 - RNA, 17 nt, Human
gaaacuccacaucugcc

SEQ ID NO: 2271053 - RNA, 18 nt, Human
gaaacuccacaucugccu

SEQ ID NO: 2271054 - RNA, 19 nt, Human
gaaacucuuuuugggcucc

SEQ ID NO: 2271055 - RNA, 14 nt, Human
gaaacugaaugcuc

SEQ ID NO: 2271056 - RNA, 22 nt, Human
gaaacucaccugcuggccccuc

SEQ ID NO: 2271057 - RNA, 21 nt, Human
gaaacucaccugcuggccccu

SEQ ID NO: 2271058 - RNA, 20 nt, Human
gaaacucaccugcuggcccc

SEQ ID NO: 2271059 - RNA, 19 nt, Human
gaaacucaccugcuggccc

SEQ ID NO: 2271060 - RNA, 22 nt, Human
gaaacucagagucggaacggag

SEQ ID NO: 2271061 - RNA, 23 nt, Human
gaaacucaccugcuggccccuca

SEQ ID NO: 2271062 - RNA, 16 nt, Human
gaaacuccacaucugc

SEQ ID NO: 2271063 - RNA, 15 nt, Human
gaaacugccagcaac

SEQ ID NO: 2271064 - RNA, 13 nt, Human
gaaacugccagca

SEQ ID NO: 2271065 - RNA, 22 nt, Human
gaaaaagcaguaacugacaacu

SEQ ID NO: 2271066 - RNA, 17 nt, Human
gaaaaagcacaagaagc

SEQ ID NO: 2271067 - RNA, 16 nt, Human
gaaaaagcacaagaag

SEQ ID NO: 2271068 - RNA, 20 nt, Human
gaaaaaugcccuuaaaucau

SEQ ID NO: 2271069 - RNA, 16 nt, Human
gaaaaaucuaagugau

SEQ ID NO: 2271070 - RNA, 18 nt, Human
gaaaaaugagagaaggga

SEQ ID NO: 2271071 - RNA, 20 nt, Human
gaaaaaucuaagugauauaa

SEQ ID NO: 2271072 - RNA, 16 nt, Human
gaaaaaugagccuggc

SEQ ID NO: 2271073 - RNA, 14 nt, Human
gaaaaauguguaau

SEQ ID NO: 2271074 - RNA, 13 nt, Human
gaaaaauguguaa

SEQ ID NO: 2271075 - RNA, 22 nt, Human
gaaaccuugguguaguugaacu

SEQ ID NO: 2271076 - RNA, 17 nt, Human
gaaaccuuuagggcagc

SEQ ID NO: 2271077 - RNA, 18 nt, Human
gaaaccuuuagggcagcu

SEQ ID NO: 2271078 - RNA, 17 nt, Human
gaaaccuugguguaguu

SEQ ID NO: 2271079 - RNA, 19 nt, Human
gaaaccuuuagggcagcuu

SEQ ID NO: 2271080 - RNA, 20 nt, Human
gaaaccuuuagggcagcuug

SEQ ID NO: 2271081 - RNA, 21 nt, Human
gaaaccuuuagggcagcuugc

SEQ ID NO: 2271082 - RNA, 14 nt, Human
gaaaccuuuuuuaa

SEQ ID NO: 2271083 - RNA, 17 nt, Human
gaaaccuuuuuuaagau

SEQ ID NO: 2271084 - RNA, 18 nt, Human
gaaaccuuuuuuaagauu

SEQ ID NO: 2271085 - RNA, 19 nt, Human
gaaaccuuuuuuaagauuu

SEQ ID NO: 2271086 - RNA, 20 nt, Human
gaaaccuuuuuuaagauuuu

SEQ ID NO: 2271087 - RNA, 14 nt, Human
gaaagcaauaaaug

SEQ ID NO: 2271088 - RNA, 23 nt, Human
gaaagauggcugugccucugccu

SEQ ID NO: 2271089 - RNA, 14 nt, Human
gaaagcagaacagu

SEQ ID NO: 2271090 - RNA, 13 nt, Human
gaaagcagaacag

SEQ ID NO: 2271091 - RNA, 16 nt, Human
gaaagaucaaaagguu

SEQ ID NO: 2271092 - RNA, 22 nt, Human
gaaagauggcugugccucugcc

SEQ ID NO: 2271093 - RNA, 14 nt, Human
gaaagauaacuagg

SEQ ID NO: 2271094 - RNA, 17 nt, Human
gaaagaugagcuuuucu

SEQ ID NO: 2271095 - RNA, 23 nt, Human
gaaagagcacuuaagagaauauu

SEQ ID NO: 2271096 - RNA, 16 nt, Human
gaaagagcacuuaaga

SEQ ID NO: 2271097 - RNA, 18 nt, Human
gaaagagcacuuaagaga

SEQ ID NO: 2271098 - RNA, 21 nt, Human
gaaagagcacuuaagagaaua

SEQ ID NO: 2271099 - RNA, 22 nt, Human
gaaagagcacuuaagagaauau

SEQ ID NO: 2271100 - RNA, 19 nt, Human
gaaagagagagaauucuuu

SEQ ID NO: 2271101 - RNA, 14 nt, Human
gaaagacugagcuc

SEQ ID NO: 2271102 - RNA, 11 nt, Human
gaaagagagaa

SEQ ID NO: 2271103 - RNA, 15 nt, Human
gaaagagagaaaaua

SEQ ID NO: 2271104 - RNA, 14 nt, Human
gaaagagagaaaau

SEQ ID NO: 2271105 - RNA, 13 nt, Human
gaaagagagaaaa

SEQ ID NO: 2271106 - RNA, 12 nt, Human
gaaagagagaaa

SEQ ID NO: 2271107 - RNA, 23 nt, Human
gaaagagagaaaauaaaaaguua

SEQ ID NO: 2271108 - RNA, 22 nt, Human
gaaagagagaaaauaaaaaguu

SEQ ID NO: 2271109 - RNA, 21 nt, Human
gaaagagagaaaauaaaaagu

SEQ ID NO: 2271110 - RNA, 20 nt, Human
gaaagagagaaaauaaaaag

SEQ ID NO: 2271111 - RNA, 18 nt, Human
gaaagagagaaaauaaaa

SEQ ID NO: 2271112 - RNA, 17 nt, Human
gaaagagagaaaauaaa

SEQ ID NO: 2271113 - RNA, 16 nt, Human
gaaagagagaaaauaa

SEQ ID NO: 2271114 - RNA, 15 nt, Human
gaaacugcagggaaa

SEQ ID NO: 2271115 - RNA, 22 nt, Human
gaaacugaggaauuuucuuugu

SEQ ID NO: 2271116 - RNA, 18 nt, Human
gaaacugaggaauuuucu

SEQ ID NO: 2271117 - RNA, 19 nt, Human
gaaagacuauucaaacagu

SEQ ID NO: 2271118 - RNA, 23 nt, Human
gaaagacuauucaaacagucuca

SEQ ID NO: 2271119 - RNA, 22 nt, Human
gaaagacuauucaaacagucuc

SEQ ID NO: 2271120 - RNA, 16 nt, Human
gaaaugagaucaggcu

SEQ ID NO: 2271121 - RNA, 17 nt, Human
gaaaugagaaggcagcc

SEQ ID NO: 2271122 - RNA, 18 nt, Human
gaaaugagaaggcagcca

SEQ ID NO: 2271123 - RNA, 19 nt, Human
gaaaugagaaggcagccac

SEQ ID NO: 2271124 - RNA, 18 nt, Human
gaaaugagaucaggcucu

SEQ ID NO: 2271125 - RNA, 11 nt, Human
gaaaugagcug

SEQ ID NO: 2271126 - RNA, 14 nt, Human
gaaaugaucaguuu

SEQ ID NO: 2271127 - RNA, 18 nt, Human
gaaaugaggucagagccu

SEQ ID NO: 2271128 - RNA, 23 nt, Human
gaaaugcauccauuccucaggga

SEQ ID NO: 2271129 - RNA, 20 nt, Human
gaaaugcauuauuuugaaug

SEQ ID NO: 2271130 - RNA, 16 nt, Human
gaaaugggcagagcag

SEQ ID NO: 2271131 - RNA, 15 nt, Human
gaaaugggcagagca

SEQ ID NO: 2271132 - RNA, 18 nt, Human
gaaauuacuacaaaauuu

SEQ ID NO: 2271133 - RNA, 16 nt, Human
gaaauguguuucugua

SEQ ID NO: 2271134 - RNA, 13 nt, Human
gaaauguguuucu

SEQ ID NO: 2271135 - RNA, 14 nt, Human
gaaauguguuucug

SEQ ID NO: 2271136 - RNA, 13 nt, Human
gaaaugcugccug

SEQ ID NO: 2271137 - RNA, 14 nt, Human
gaaaugcugccugc

SEQ ID NO: 2271138 - RNA, 17 nt, Human
gaaaugcugcauuuuaa

SEQ ID NO: 2271139 - RNA, 18 nt, Human
gaaaugcugauggauaac

SEQ ID NO: 2271140 - RNA, 17 nt, Human
gaaauguacagcaagga

SEQ ID NO: 2271141 - RNA, 17 nt, Human
gaaaugggcagagcaga

SEQ ID NO: 2271142 - RNA, 19 nt, Human
gaaaugggcagagcagaga

SEQ ID NO: 2271143 - RNA, 17 nt, Human
gaaauauauaugugugu

SEQ ID NO: 2271144 - RNA, 14 nt, Human
gaaauauauaugug

SEQ ID NO: 2271145 - RNA, 23 nt, Human
gaaauauauauguguguguaugu

SEQ ID NO: 2271146 - RNA, 20 nt, Human
gaaauaaaggaugugauugu

SEQ ID NO: 2271147 - RNA, 23 nt, Human
gaaauaucaguuacucagcccug

SEQ ID NO: 2271148 - RNA, 12 nt, Human
gaaauaucauuu

SEQ ID NO: 2271149 - RNA, 21 nt, Human
gaaauaucaguuacucagccc

SEQ ID NO: 2271150 - RNA, 20 nt, Human
gaaauaucaguuacucagcc

SEQ ID NO: 2271151 - RNA, 17 nt, Human
gaaauauaggaacuuaa

SEQ ID NO: 2271152 - RNA, 17 nt, Human
gaaauaaaggaugugau

SEQ ID NO: 2271153 - RNA, 23 nt, Human
gaaauaaaaggaagccaaagagu

SEQ ID NO: 2271154 - RNA, 19 nt, Human
gaaaugacuaaaaaacaaa

SEQ ID NO: 2271155 - RNA, 20 nt, Human
gaaaugaaugugugugguuu

SEQ ID NO: 2271156 - RNA, 15 nt, Human
gaaaugagaaggcag

SEQ ID NO: 2271157 - RNA, 14 nt, Human
gaaaugaccaauau

SEQ ID NO: 2271158 - RNA, 15 nt, Human
gaaaugaauuaaagu

SEQ ID NO: 2271159 - RNA, 12 nt, Human
gaaaugaauaua

SEQ ID NO: 2271160 - RNA, 13 nt, Human
gaaaugaaugugu

SEQ ID NO: 2271161 - RNA, 15 nt, Human
gaaaugaaugugugu

SEQ ID NO: 2271162 - RNA, 22 nt, Human
gaaauaucaguuacucagcccu

SEQ ID NO: 2271163 - RNA, 19 nt, Human
gaaauauuuagcaaauaau

SEQ ID NO: 2271164 - RNA, 15 nt, Human
gaaauauuuauuuua

SEQ ID NO: 2271165 - RNA, 16 nt, Human
gaaauauuuauuuuaa

SEQ ID NO: 2271166 - RNA, 19 nt, Human
gaaauaucugaaaauguau

SEQ ID NO: 2271167 - RNA, 18 nt, Human
gaaauaucugaaaaugua

SEQ ID NO: 2271168 - RNA, 13 nt, Human
gaaauaucauuua

SEQ ID NO: 2271169 - RNA, 14 nt, Human
gaaauaucauuuau

SEQ ID NO: 2271170 - RNA, 20 nt, Human
gaaauaucugaaaauguaug

SEQ ID NO: 2271171 - RNA, 13 nt, Human
gaaauauuuauuu

SEQ ID NO: 2271172 - RNA, 16 nt, Human
gaacauguacacuggu

SEQ ID NO: 2271173 - RNA, 16 nt, Human
gaaccaaaucuggaag

SEQ ID NO: 2271174 - RNA, 17 nt, Human
gaaccaaaucuggaagc

SEQ ID NO: 2271175 - RNA, 15 nt, Human
gaaccaacacuaaca

SEQ ID NO: 2271176 - RNA, 24 nt, Human
gaaccaacaaccucaacugccuac

SEQ ID NO: 2271177 - RNA, 19 nt, Human
gaaccaacaaguaaauauu

SEQ ID NO: 2271178 - RNA, 23 nt, Human
gaaccaaagcgaauuuuaaaaga

SEQ ID NO: 2271179 - RNA, 20 nt, Human
gaaccaaagcgaauuuuaaa

SEQ ID NO: 2271180 - RNA, 19 nt, Human
gaacaugugagagguuuga

SEQ ID NO: 2271181 - RNA, 22 nt, Human
gaacauggacuuguauauuugu

SEQ ID NO: 2271182 - RNA, 15 nt, Human
gaacauggagagcua

SEQ ID NO: 2271183 - RNA, 23 nt, Human
gaacaugaaaacagaaaacgguu

SEQ ID NO: 2271184 - RNA, 17 nt, Human
gaacaucuguccuguga

SEQ ID NO: 2271185 - RNA, 15 nt, Human
gaacaucccugccag

SEQ ID NO: 2271186 - RNA, 13 nt, Human
gaacauccuuccu

SEQ ID NO: 2271187 - RNA, 17 nt, Human
gaacauggacuuguaua

SEQ ID NO: 2271188 - RNA, 19 nt, Human
gaacauggacuuguauauu

SEQ ID NO: 2271189 - RNA, 14 nt, Human
gaacaucccugcca

SEQ ID NO: 2271190 - RNA, 14 nt, Human
gaacaguuuguaca

SEQ ID NO: 2271191 - RNA, 19 nt, Human
gaacauccuuccuucccac

SEQ ID NO: 2271192 - RNA, 21 nt, Human
gaacaguguuucccauaauuu

SEQ ID NO: 2271193 - RNA, 18 nt, Human
gaacaguguuucccauaa

SEQ ID NO: 2271194 - RNA, 17 nt, Human
gaacaguguuucccaua

SEQ ID NO: 2271195 - RNA, 16 nt, Human
gaacaguguuucccau

SEQ ID NO: 2271196 - RNA, 24 nt, Human
gaacaguuaccucugccucagaaa

SEQ ID NO: 2271197 - RNA, 12 nt, Human
gaacaguaaaca

SEQ ID NO: 2271198 - RNA, 14 nt, Human
gaacaguaacugcc

SEQ ID NO: 2271199 - RNA, 13 nt, Human
gaacaguaaacau

SEQ ID NO: 2271200 - RNA, 17 nt, Human
gaacagcuucagguuau

SEQ ID NO: 2271201 - RNA, 19 nt, Human
gaacaggcaagugaagaaa

SEQ ID NO: 2271202 - RNA, 14 nt, Human
gaaauuugauuucu

SEQ ID NO: 2271203 - RNA, 18 nt, Human
gaacagauaaucagugug

SEQ ID NO: 2271204 - RNA, 22 nt, Human
gaacagacuggaagcacagcuu

SEQ ID NO: 2271205 - RNA, 15 nt, Human
gaacagcuguaaucu

SEQ ID NO: 2271206 - RNA, 14 nt, Human
gaacagcuucaggu

SEQ ID NO: 2271207 - RNA, 15 nt, Human
gaacagcuucagguu

SEQ ID NO: 2271208 - RNA, 16 nt, Human
gaacagcuucagguua

SEQ ID NO: 2271209 - RNA, 19 nt, Human
gaaauuagcugugugaaau

SEQ ID NO: 2271210 - RNA, 13 nt, Human
gaaauuagggccc

SEQ ID NO: 2271211 - RNA, 16 nt, Human
gaaauuagcuguguga

SEQ ID NO: 2271212 - RNA, 21 nt, Human
gaaauuacuuaucauccacau

SEQ ID NO: 2271213 - RNA, 13 nt, Human
gaaauuagccggg

SEQ ID NO: 2271214 - RNA, 19 nt, Human
gaaauuacuacaaaauuug

SEQ ID NO: 2271215 - RNA, 23 nt, Human
gaaauuaguacuccccuccuuga

SEQ ID NO: 2271216 - RNA, 17 nt, Human
gaaauuauuuaauaaaa

SEQ ID NO: 2271217 - RNA, 17 nt, Human
gaaauucccuucaucug

SEQ ID NO: 2271218 - RNA, 13 nt, Human
gaaauuauuuaau

SEQ ID NO: 2271219 - RNA, 15 nt, Human
gaaauuauuuaauaa

SEQ ID NO: 2271220 - RNA, 18 nt, Human
gaaauuauguauguuuac

SEQ ID NO: 2271221 - RNA, 21 nt, Human
gaaauuauguauguuuacaua

SEQ ID NO: 2271222 - RNA, 13 nt, Human
gaaauuuccagag

SEQ ID NO: 2271223 - RNA, 12 nt, Human
gaaauuccugua

SEQ ID NO: 2271224 - RNA, 15 nt, Human
gaaauuccuguagca

SEQ ID NO: 2271225 - RNA, 22 nt, Human
gaaauucccuucaucuggaacc

SEQ ID NO: 2271226 - RNA, 21 nt, Human
gaaauucccuucaucuggaac

SEQ ID NO: 2271227 - RNA, 11 nt, Human
gaaauuugaau

SEQ ID NO: 2271228 - RNA, 20 nt, Human
gaacacuccaauuaaggauu

SEQ ID NO: 2271229 - RNA, 17 nt, Human
gaacacuccuucacaga

SEQ ID NO: 2271230 - RNA, 20 nt, Human
gaacagacuggaagcacagc

SEQ ID NO: 2271231 - RNA, 19 nt, Human
gaacagacuggaagcacag

SEQ ID NO: 2271232 - RNA, 15 nt, Human
gaacacuccuucaca

SEQ ID NO: 2271233 - RNA, 16 nt, Human
gaacacuccuucacag

SEQ ID NO: 2271234 - RNA, 23 nt, Human
cuuuuaacaccugauguguacau

SEQ ID NO: 2271235 - RNA, 22 nt, Human
cuuuuaaaggggcagaaaaacu

SEQ ID NO: 2271236 - RNA, 19 nt, Human
cuuuuaacaccugaugugu

SEQ ID NO: 2271237 - RNA, 20 nt, Human
cuuuuaacaccugaugugua

SEQ ID NO: 2271238 - RNA, 21 nt, Human
cuuuuaacaccugauguguac

SEQ ID NO: 2271239 - RNA, 16 nt, Human
cuuuuaauacagggua

SEQ ID NO: 2271240 - RNA, 22 nt, Human
cuuuuaauaaacuuuuuuuuga

SEQ ID NO: 2271241 - RNA, 14 nt, Human
cuuuuaaucagaca

SEQ ID NO: 2271242 - RNA, 23 nt, Human
cuuuuaaaggggcagaaaaacuc

SEQ ID NO: 2271243 - RNA, 22 nt, Human
cuuuuaaaagacaagacuucag

SEQ ID NO: 2271244 - RNA, 15 nt, Human
cuuuuaaacugugua

SEQ ID NO: 2271245 - RNA, 13 nt, Human
cuuuuaaacugug

SEQ ID NO: 2271246 - RNA, 12 nt, Human
cuuuuaaacugu

SEQ ID NO: 2271247 - RNA, 17 nt, Human
cuuuuaaaccauuuucu

SEQ ID NO: 2271248 - RNA, 14 nt, Human
cuuuuaaaagacaa

SEQ ID NO: 2271249 - RNA, 16 nt, Human
cuuuuaaaagacaaga

SEQ ID NO: 2271250 - RNA, 20 nt, Human
cuuuuaaaccucaccuuugu

SEQ ID NO: 2271251 - RNA, 16 nt, Human
cuuuggaccuaaucca

SEQ ID NO: 2271252 - RNA, 21 nt, Human
cuuuggaccuaaauggccuca

SEQ ID NO: 2271253 - RNA, 19 nt, Human
cuuuggagaccauuaucag

SEQ ID NO: 2271254 - RNA, 11 nt, Human
cuuuggaagga

SEQ ID NO: 2271255 - RNA, 16 nt, Human
cuuuggagaucaagga

SEQ ID NO: 2271256 - RNA, 23 nt, Human
cuuuggagaucaaggagaggagg

SEQ ID NO: 2271257 - RNA, 13 nt, Human
cuuuggagcuuuu

SEQ ID NO: 2271258 - RNA, 23 nt, Human
cuuuggagcuuuuuucuuuaaga

SEQ ID NO: 2271259 - RNA, 17 nt, Human
cuuuggaccuaauccaa

SEQ ID NO: 2271260 - RNA, 15 nt, Human
cuuuggaaggaguga

SEQ ID NO: 2271261 - RNA, 23 nt, Human
cuuuguuuuuuuuuccuguccuu

SEQ ID NO: 2271262 - RNA, 18 nt, Human
cuuuuaaaacacuuccau

SEQ ID NO: 2271263 - RNA, 16 nt, Human
cuuuguuuuuuuuucc

SEQ ID NO: 2271264 - RNA, 21 nt, Human
cuuuguuuuuuuuuccugucc

SEQ ID NO: 2271265 - RNA, 18 nt, Human
cuuuguuuuuaugaagaa

SEQ ID NO: 2271266 - RNA, 22 nt, Human
cuuuggaguccccucaccuccu

SEQ ID NO: 2271267 - RNA, 14 nt, Human
cuuuggaggccccu

SEQ ID NO: 2271268 - RNA, 14 nt, Human
cuuuggaguccccu

SEQ ID NO: 2271269 - RNA, 16 nt, Human
cuuuggaguccccuca

SEQ ID NO: 2271270 - RNA, 18 nt, Human
cuuuggaguccccucacc

SEQ ID NO: 2271271 - RNA, 21 nt, Human
cuuuucgcaggauucuuccuc

SEQ ID NO: 2271272 - RNA, 20 nt, Human
cuuuucgcaggauucuuccu

SEQ ID NO: 2271273 - RNA, 21 nt, Human
cuuuuccuuggggcaggcagu

SEQ ID NO: 2271274 - RNA, 17 nt, Human
cuuuuccuuggggcagg

SEQ ID NO: 2271275 - RNA, 13 nt, Human
cuuuuccuugggg

SEQ ID NO: 2271276 - RNA, 18 nt, Human
cuuuuccucucucccgga

SEQ ID NO: 2271277 - RNA, 14 nt, Human
cuuuucccuucuuu

SEQ ID NO: 2271278 - RNA, 16 nt, Human
cuuuucacugcuggcu

SEQ ID NO: 2271279 - RNA, 20 nt, Human
cuuuucacugcugcaaggcc

SEQ ID NO: 2271280 - RNA, 16 nt, Human
cuuuuccuauuuguuu

SEQ ID NO: 2271281 - RNA, 19 nt, Human
cuuuuccuauuuucagccc

SEQ ID NO: 2271282 - RNA, 20 nt, Human
cuuuuccuauuuucagccca

SEQ ID NO: 2271283 - RNA, 13 nt, Human
cuuuuccucccuu

SEQ ID NO: 2271284 - RNA, 15 nt, Human
cuuuuccucccuugg

SEQ ID NO: 2271285 - RNA, 23 nt, Human
cuuuuccucccuuggguucugau

SEQ ID NO: 2271286 - RNA, 16 nt, Human
cuuuuccucucucccg

SEQ ID NO: 2271287 - RNA, 12 nt, Human
cuuuucacugcu

SEQ ID NO: 2271288 - RNA, 19 nt, Human
cuuuucacucccuccauca

SEQ ID NO: 2271289 - RNA, 22 nt, Human
cuuuucauuuaggugaggaagc

SEQ ID NO: 2271290 - RNA, 13 nt, Human
cuuuuccaacccu

SEQ ID NO: 2271291 - RNA, 23 nt, Human
cuuuuccaacccucaucaccaac

SEQ ID NO: 2271292 - RNA, 14 nt, Human
cuuuucacauucuu

SEQ ID NO: 2271293 - RNA, 17 nt, Human
cuuuucacauucuuaua

SEQ ID NO: 2271294 - RNA, 19 nt, Human
cuuuucacauucuuauaaa

SEQ ID NO: 2271295 - RNA, 20 nt, Human
cuuuucacauucuuauaaau

SEQ ID NO: 2271296 - RNA, 14 nt, Human
cuuuucacaaauaa

SEQ ID NO: 2271297 - RNA, 15 nt, Human
cuuuucacaaauaaa

SEQ ID NO: 2271298 - RNA, 13 nt, Human
cuuuucacauucu

SEQ ID NO: 2271299 - RNA, 23 nt, Human
cuuuuaauuaaugaaauaucugu

SEQ ID NO: 2271300 - RNA, 20 nt, Human
cuuuucacauagcugucuag

SEQ ID NO: 2271301 - RNA, 12 nt, Human
cuuuucacaaau

SEQ ID NO: 2271302 - RNA, 13 nt, Human
cuuuucacaaaua

SEQ ID NO: 2271303 - RNA, 20 nt, Human
cuuuuaauuaaaugcucauc

SEQ ID NO: 2271304 - RNA, 16 nt, Human
cuuuuaauuaaugaaa

SEQ ID NO: 2271305 - RNA, 19 nt, Human
cuuuuaauuaaugaaauau

SEQ ID NO: 2271306 - RNA, 22 nt, Human
cuuuuaauuaaugaaauaucug

SEQ ID NO: 2271307 - RNA, 18 nt, Human
cuuuuaaugcuccaaaug

SEQ ID NO: 2271308 - RNA, 19 nt, Human
cuuuuaaugcuccaaaugc

SEQ ID NO: 2271309 - RNA, 14 nt, Human
cuuuuaauuaaaug

SEQ ID NO: 2271310 - RNA, 15 nt, Human
cuuuuaauuaaaugc

SEQ ID NO: 2271311 - RNA, 16 nt, Human
cuuuucgccguggcug

SEQ ID NO: 2271312 - RNA, 20 nt, Human
cuuuuccuuggggcaggcag

SEQ ID NO: 2271313 - RNA, 16 nt, Human
cuuuucuuucuaccaa

SEQ ID NO: 2271314 - RNA, 17 nt, Human
cuuuucuuucagccaag

SEQ ID NO: 2271315 - RNA, 14 nt, Human
cuuuugcaaacuuu

SEQ ID NO: 2271316 - RNA, 22 nt, Human
cuuuugauaaucaacugggcug

SEQ ID NO: 2271317 - RNA, 23 nt, Human
cuuuugauaaucaacugggcuga

SEQ ID NO: 2271318 - RNA, 13 nt, Human
cuuuucuuuucuu

SEQ ID NO: 2271319 - RNA, 17 nt, Human
cuuuucuuuucuacccu

SEQ ID NO: 2271320 - RNA, 20 nt, Human
cuuuucuuuucuacccuagc

SEQ ID NO: 2271321 - RNA, 19 nt, Human
cuuuuuacuccccuugagc

SEQ ID NO: 2271322 - RNA, 15 nt, Human
cuuuuuacuccccuu

SEQ ID NO: 2271323 - RNA, 20 nt, Human
cuuuuuaccaaguuucaggu

SEQ ID NO: 2271324 - RNA, 23 nt, Human
cuuuuuaauuguuguuucuuucu

SEQ ID NO: 2271325 - RNA, 22 nt, Human
cuuuuuaauauugauaugcuua

SEQ ID NO: 2271326 - RNA, 17 nt, Human
cuuuuuaauucaccaaa

SEQ ID NO: 2271327 - RNA, 14 nt, Human
cuuuuuaauuguug

SEQ ID NO: 2271328 - RNA, 15 nt, Human
cuuuuuaauuguugu

SEQ ID NO: 2271329 - RNA, 16 nt, Human
cuuuuuaauuguuguu

SEQ ID NO: 2271330 - RNA, 22 nt, Human
cuuuuuaauuguuguuucuuuc

SEQ ID NO: 2271331 - RNA, 15 nt, Human
cuuuuuaauaaaaag

SEQ ID NO: 2271332 - RNA, 14 nt, Human
cuuuuuaauaaaaa

SEQ ID NO: 2271333 - RNA, 20 nt, Human
cuuuuuaauaaaaaggcacc

SEQ ID NO: 2271334 - RNA, 19 nt, Human
cuuuuuaagcuuauuuaau

SEQ ID NO: 2271335 - RNA, 17 nt, Human
cuuuuuaagcuuauuua

SEQ ID NO: 2271336 - RNA, 23 nt, Human
cuuuuuaaauucaguccuaagaa

SEQ ID NO: 2271337 - RNA, 21 nt, Human
cuuuuuaaauguaaagauauu

SEQ ID NO: 2271338 - RNA, 20 nt, Human
cuuuuuaaauguaaagauau

SEQ ID NO: 2271339 - RNA, 19 nt, Human
cuuuuuaaaguguuucugu

SEQ ID NO: 2271340 - RNA, 23 nt, Human
cuuuuuaaaguguuucuguuauu

SEQ ID NO: 2271341 - RNA, 12 nt, Human
cuuuugcacccc

SEQ ID NO: 2271342 - RNA, 14 nt, Human
cuuuugcaccccuc

SEQ ID NO: 2271343 - RNA, 15 nt, Human
cuuuugcaccccucc

SEQ ID NO: 2271344 - RNA, 16 nt, Human
cuuuugcaccccuccc

SEQ ID NO: 2271345 - RNA, 17 nt, Human
cuuuugcaccccuccca

SEQ ID NO: 2271346 - RNA, 18 nt, Human
cuuuugcaccccucccau

SEQ ID NO: 2271347 - RNA, 22 nt, Human
cuuuugcaccugcucucuugua

SEQ ID NO: 2271348 - RNA, 19 nt, Human
cuuuugcaccccucccauu

SEQ ID NO: 2271349 - RNA, 20 nt, Human
cuuuugcaccccucccauua

SEQ ID NO: 2271350 - RNA, 19 nt, Human
cuuuugcaccugcucucuu

SEQ ID NO: 2271351 - RNA, 17 nt, Human
cuuuuuccccaaagucu

SEQ ID NO: 2271352 - RNA, 13 nt, Human
cuuuuuccagagg

SEQ ID NO: 2271353 - RNA, 17 nt, Human
cuuuuuccuugucccca

SEQ ID NO: 2271354 - RNA, 15 nt, Human
cuuuuuuauacauaa

SEQ ID NO: 2271355 - RNA, 17 nt, Human
cuuuuuuauacauaaac

SEQ ID NO: 2271356 - RNA, 16 nt, Human
cuuuuuuauacauaaa

SEQ ID NO: 2271357 - RNA, 22 nt, Human
cuuuuuccagacacuuuuuuga

SEQ ID NO: 2271358 - RNA, 17 nt, Human
cuuuuucauuugccuau

SEQ ID NO: 2271359 - RNA, 13 nt, Human
cuuuuucauuugc

SEQ ID NO: 2271360 - RNA, 15 nt, Human
cuuuuucauuugccu

SEQ ID NO: 2271361 - RNA, 18 nt, Human
cuuuuucauuugccuauu

SEQ ID NO: 2271362 - RNA, 12 nt, Human
cuuuuucauuug

SEQ ID NO: 2271363 - RNA, 19 nt, Human
cuuuuuagggccaggcagg

SEQ ID NO: 2271364 - RNA, 16 nt, Human
gaaaaagaaaaaauau

SEQ ID NO: 2271365 - RNA, 11 nt, Human
gaaaaagaaaa

SEQ ID NO: 2271366 - RNA, 12 nt, Human
cuuuuuucaaaa

SEQ ID NO: 2271367 - RNA, 15 nt, Human
cuuuuuucacaaauu

SEQ ID NO: 2271368 - RNA, 21 nt, Human
cuuuuuucacggaaguuuuca

SEQ ID NO: 2271369 - RNA, 23 nt, Human
cuuuuuuaugugccguguuauug

SEQ ID NO: 2271370 - RNA, 18 nt, Human
cuuuuuuaugugccgugu

SEQ ID NO: 2271371 - RNA, 19 nt, Human
cuuuuuuaucaugugaaau

SEQ ID NO: 2271372 - RNA, 17 nt, Human
cuuuuucucccucugga

SEQ ID NO: 2271373 - RNA, 14 nt, Human
cuuuuucucccucu

SEQ ID NO: 2271374 - RNA, 18 nt, Human
cuuuuucuaaugugguua

SEQ ID NO: 2271375 - RNA, 21 nt, Human
cuuuuucuccagcugggcucu

SEQ ID NO: 2271376 - RNA, 18 nt, Human
cuuuuuuauacauaaaca

SEQ ID NO: 2271377 - RNA, 18 nt, Human
cuuucaugaguuuuuccc

SEQ ID NO: 2271378 - RNA, 22 nt, Human
cuuucaugaguuuuucccagcu

SEQ ID NO: 2271379 - RNA, 17 nt, Human
cuuucauguaaacugug

SEQ ID NO: 2271380 - RNA, 19 nt, Human
cuuucauggggugaugcug

SEQ ID NO: 2271381 - RNA, 21 nt, Human
cuuucauggggugaugcuggg

SEQ ID NO: 2271382 - RNA, 20 nt, Human
cuuucauuaaagcauuuacu

SEQ ID NO: 2271383 - RNA, 21 nt, Human
cuuucauuaaaggcuucucuc

SEQ ID NO: 2271384 - RNA, 21 nt, Human
cuuucauguaaacugugcacc

SEQ ID NO: 2271385 - RNA, 20 nt, Human
cuuucauguaaacugugcac

SEQ ID NO: 2271386 - RNA, 19 nt, Human
cuuucauguaaacugugca

SEQ ID NO: 2271387 - RNA, 17 nt, Human
cuuucauccugacucug

SEQ ID NO: 2271388 - RNA, 18 nt, Human
cuuucauccugacucugc

SEQ ID NO: 2271389 - RNA, 19 nt, Human
cuuucauccugacucugcc

SEQ ID NO: 2271390 - RNA, 20 nt, Human
cuuucauccugacucugccc

SEQ ID NO: 2271391 - RNA, 21 nt, Human
cuuucauccugacucugcccc

SEQ ID NO: 2271392 - RNA, 22 nt, Human
cuuucauccugacucugccccc

SEQ ID NO: 2271393 - RNA, 23 nt, Human
cuuucaagcagucgugccugugu

SEQ ID NO: 2271394 - RNA, 21 nt, Human
cuuucaaagaaggaauucuag

SEQ ID NO: 2271395 - RNA, 18 nt, Human
cuuucaaagaaggaauuc

SEQ ID NO: 2271396 - RNA, 21 nt, Human
cuuucaaauugagagaaugga

SEQ ID NO: 2271397 - RNA, 15 nt, Human
cuuucaaagaaggaa

SEQ ID NO: 2271398 - RNA, 19 nt, Human
cuuucaaaaccuuuugaaa

SEQ ID NO: 2271399 - RNA, 14 nt, Human
cuuucaaaaacaug

SEQ ID NO: 2271400 - RNA, 15 nt, Human
cuuucaaauuucaca

SEQ ID NO: 2271401 - RNA, 14 nt, Human
cuuucaaauuucac

SEQ ID NO: 2271402 - RNA, 14 nt, Human
cuuucaacuugcau

SEQ ID NO: 2271403 - RNA, 19 nt, Human
cuuucaagcagucgugccu

SEQ ID NO: 2271404 - RNA, 20 nt, Human
cuuucaagcagucgugccug

SEQ ID NO: 2271405 - RNA, 22 nt, Human
cuuucaagcagucgugccugug

SEQ ID NO: 2271406 - RNA, 18 nt, Human
cuuuauuuucugguagau

SEQ ID NO: 2271407 - RNA, 13 nt, Human
cuuuauuuucugg

SEQ ID NO: 2271408 - RNA, 20 nt, Human
cuugugugugggcugugagu

SEQ ID NO: 2271409 - RNA, 11 nt, Human
cuuguguguuu

SEQ ID NO: 2271410 - RNA, 21 nt, Human
cuugugugugggcugugagug

SEQ ID NO: 2271411 - RNA, 19 nt, Human
cuugugugugggcugugag

SEQ ID NO: 2271412 - RNA, 23 nt, Human
cuuuauuuuuuaaguauuuauau

SEQ ID NO: 2271413 - RNA, 22 nt, Human
cuuuauuuuuuaaguauuuaua

SEQ ID NO: 2271414 - RNA, 21 nt, Human
cuuuauuuuuuaaguauuuau

SEQ ID NO: 2271415 - RNA, 18 nt, Human
cuuuauuuuuuaaguauu

SEQ ID NO: 2271416 - RNA, 19 nt, Human
cuuuauuuuguguuuagga

SEQ ID NO: 2271417 - RNA, 13 nt, Human
cuugugucugcgu

SEQ ID NO: 2271418 - RNA, 21 nt, Human
cuugugucucugugcuuuuaa

SEQ ID NO: 2271419 - RNA, 12 nt, Human
cuugugucugua

SEQ ID NO: 2271420 - RNA, 14 nt, Human
cuugugucuguaca

SEQ ID NO: 2271421 - RNA, 15 nt, Human
cuugugucuguacac

SEQ ID NO: 2271422 - RNA, 18 nt, Human
cuugugucuguacacgug

SEQ ID NO: 2271423 - RNA, 17 nt, Human
cuugugugguuuggccc

SEQ ID NO: 2271424 - RNA, 21 nt, Human
cuuguggacacagcucuucuc

SEQ ID NO: 2271425 - RNA, 18 nt, Human
cuugugucucugugcuuu

SEQ ID NO: 2271426 - RNA, 17 nt, Human
cuugugucucugugcuu

SEQ ID NO: 2271427 - RNA, 15 nt, Human
cuugugucucugugc

SEQ ID NO: 2271428 - RNA, 14 nt, Human
cuugucaugugaca

SEQ ID NO: 2271429 - RNA, 19 nt, Human
cuuuccguggcacugcaua

SEQ ID NO: 2271430 - RNA, 17 nt, Human
cuuuccguggcacugca

SEQ ID NO: 2271431 - RNA, 16 nt, Human
cuuuccuaaggcugca

SEQ ID NO: 2271432 - RNA, 15 nt, Human
cuuuccuaaauguuu

SEQ ID NO: 2271433 - RNA, 20 nt, Human
cuuuccuagauggcagucac

SEQ ID NO: 2271434 - RNA, 20 nt, Human
cuuuccuaaggcugcaaggu

SEQ ID NO: 2271435 - RNA, 17 nt, Human
cuuuccuaaggcugcaa

SEQ ID NO: 2271436 - RNA, 21 nt, Human
cuuuccuagauggcagucacu

SEQ ID NO: 2271437 - RNA, 18 nt, Human
cuuuccuaucauggagug

SEQ ID NO: 2271438 - RNA, 19 nt, Human
cuuucccccaccagcuaag

SEQ ID NO: 2271439 - RNA, 14 nt, Human
cuuuccccuguggg

SEQ ID NO: 2271440 - RNA, 21 nt, Human
cuuuccgguguuuaagacauu

SEQ ID NO: 2271441 - RNA, 13 nt, Human
cuuuccccugugg

SEQ ID NO: 2271442 - RNA, 20 nt, Human
cuuucccuuuuccauuugaa

SEQ ID NO: 2271443 - RNA, 22 nt, Human
cuuuccacccccucccuggccu

SEQ ID NO: 2271444 - RNA, 9 nt, Human
cuuuccaga

SEQ ID NO: 2271445 - RNA, 12 nt, Human
cuuuccagcuca

SEQ ID NO: 2271446 - RNA, 13 nt, Human
cuuuccagcucac

SEQ ID NO: 2271447 - RNA, 17 nt, Human
cuuucccauggggaggg

SEQ ID NO: 2271448 - RNA, 21 nt, Human
cuuuccagcucaccccccaca

SEQ ID NO: 2271449 - RNA, 13 nt, Human
cuuuccccagccc

SEQ ID NO: 2271450 - RNA, 14 nt, Human
cuuuccccagccca

SEQ ID NO: 2271451 - RNA, 15 nt, Human
cuuuccccagcccag

SEQ ID NO: 2271452 - RNA, 16 nt, Human
cuuuccccagcccagg

SEQ ID NO: 2271453 - RNA, 17 nt, Human
cuuuccccagcccaggg

SEQ ID NO: 2271454 - RNA, 21 nt, Human
cuuuccccaugucucgacuca

SEQ ID NO: 2271455 - RNA, 20 nt, Human
cuuuccccaugucucgacuc

SEQ ID NO: 2271456 - RNA, 15 nt, Human
cuuuccccaugucuc

SEQ ID NO: 2271457 - RNA, 23 nt, Human
cuuuccacccccucccuggccug

SEQ ID NO: 2271458 - RNA, 23 nt, Human
cuuucauuaaaggcuucucucuc

SEQ ID NO: 2271459 - RNA, 21 nt, Human
cuuuccaaaggccauggagag

SEQ ID NO: 2271460 - RNA, 23 nt, Human
cuuuccaaagccaaugugaacag

SEQ ID NO: 2271461 - RNA, 18 nt, Human
cuuuccacuccuccuagc

SEQ ID NO: 2271462 - RNA, 22 nt, Human
cuuuccacggagccacuccucu

SEQ ID NO: 2271463 - RNA, 21 nt, Human
cuuuccacggagccacuccuc

SEQ ID NO: 2271464 - RNA, 14 nt, Human
cuuuccaggaaggc

SEQ ID NO: 2271465 - RNA, 21 nt, Human
cuuuccacuccuccuagccac

SEQ ID NO: 2271466 - RNA, 16 nt, Human
cuuuccaaaugcccag

SEQ ID NO: 2271467 - RNA, 22 nt, Human
cuuuccaaaguacacuguuuca

SEQ ID NO: 2271468 - RNA, 16 nt, Human
cuuucauuuacugugg

SEQ ID NO: 2271469 - RNA, 17 nt, Human
cuuucauuuacuguggc

SEQ ID NO: 2271470 - RNA, 20 nt, Human
cuuuccaaagccaaugugaa

SEQ ID NO: 2271471 - RNA, 16 nt, Human
cuuuccaaaguacacu

SEQ ID NO: 2271472 - RNA, 17 nt, Human
cuuucuuuaccugagac

SEQ ID NO: 2271473 - RNA, 18 nt, Human
cuuucuuuaccugagacc

SEQ ID NO: 2271474 - RNA, 17 nt, Human
cuuucuuucuaacucca

SEQ ID NO: 2271475 - RNA, 15 nt, Human
cuuucuuucuuagaa

SEQ ID NO: 2271476 - RNA, 16 nt, Human
cuuucuuucuuagaaa

SEQ ID NO: 2271477 - RNA, 17 nt, Human
cuuucuuucuuagaaau

SEQ ID NO: 2271478 - RNA, 21 nt, Human
cuuucuuuucgccguggcugc

SEQ ID NO: 2271479 - RNA, 23 nt, Human
cuuucuuugggaauauuugaauc

SEQ ID NO: 2271480 - RNA, 18 nt, Human
cuuucuuugggaauauuu

SEQ ID NO: 2271481 - RNA, 20 nt, Human
cuuucuuugggaauauuuga

SEQ ID NO: 2271482 - RNA, 21 nt, Human
cuuucuuugggaauauuugaa

SEQ ID NO: 2271483 - RNA, 22 nt, Human
cuuucuuugggaauauuugaau

SEQ ID NO: 2271484 - RNA, 16 nt, Human
cuuugaaaugaauaua

SEQ ID NO: 2271485 - RNA, 14 nt, Human
cuuugaaauguguu

SEQ ID NO: 2271486 - RNA, 18 nt, Human
cuuugaaauguguuucug

SEQ ID NO: 2271487 - RNA, 21 nt, Human
cuuugaaauguguuucuguau

SEQ ID NO: 2271488 - RNA, 22 nt, Human
cuuugaaauguguuucuguaua

SEQ ID NO: 2271489 - RNA, 23 nt, Human
cuuugaaauguguuucuguauaa

SEQ ID NO: 2271490 - RNA, 19 nt, Human
cuuugaaauagucugugug

SEQ ID NO: 2271491 - RNA, 22 nt, Human
cuuucuuuucuggaauguaauc

SEQ ID NO: 2271492 - RNA, 21 nt, Human
cuuugaaauagucugugugaa

SEQ ID NO: 2271493 - RNA, 15 nt, Human
cuuugaaauuguuua

SEQ ID NO: 2271494 - RNA, 13 nt, Human
cuuugaagaggaa

SEQ ID NO: 2271495 - RNA, 14 nt, Human
cuuugaagaggaaa

SEQ ID NO: 2271496 - RNA, 18 nt, Human
cuuugaagaggaaaauga

SEQ ID NO: 2271497 - RNA, 20 nt, Human
cuuugaagaggaaaaugaau

SEQ ID NO: 2271498 - RNA, 22 nt, Human
cuuugaagaggaaaaugaauaa

SEQ ID NO: 2271499 - RNA, 14 nt, Human
cuuugaagcaguug

SEQ ID NO: 2271500 - RNA, 16 nt, Human
cuuugaaggggccuca

SEQ ID NO: 2271501 - RNA, 19 nt, Human
cuuugaagcaguuguguca

SEQ ID NO: 2271502 - RNA, 16 nt, Human
cuuucuguugccacaa

SEQ ID NO: 2271503 - RNA, 15 nt, Human
cuuucuguuggugua

SEQ ID NO: 2271504 - RNA, 14 nt, Human
cuuucuguugucau

SEQ ID NO: 2271505 - RNA, 15 nt, Human
cuuucuguugucauu

SEQ ID NO: 2271506 - RNA, 21 nt, Human
cuuucuguugucauugcuguu

SEQ ID NO: 2271507 - RNA, 22 nt, Human
cuuucuguugucauugcuguug

SEQ ID NO: 2271508 - RNA, 11 nt, Human
cuuucuuagaa

SEQ ID NO: 2271509 - RNA, 13 nt, Human
cuuucuuagaaau

SEQ ID NO: 2271510 - RNA, 14 nt, Human
cuuucuuagaaauu

SEQ ID NO: 2271511 - RNA, 22 nt, Human
cuuucuuacaaggaagguggug

SEQ ID NO: 2271512 - RNA, 17 nt, Human
cuuucuuagaaauuuau

SEQ ID NO: 2271513 - RNA, 17 nt, Human
cuuuccugaggcugggc

SEQ ID NO: 2271514 - RNA, 16 nt, Human
cuuuccugaggcuggg

SEQ ID NO: 2271515 - RNA, 20 nt, Human
cuuuccugaggcugggcucc

SEQ ID NO: 2271516 - RNA, 21 nt, Human
cuuuccugaggcugggcuccc

SEQ ID NO: 2271517 - RNA, 23 nt, Human
cuuugccccaccuuuauuaaaau

SEQ ID NO: 2271518 - RNA, 22 nt, Human
cuuugcccaacaccagccccug

SEQ ID NO: 2271519 - RNA, 20 nt, Human
cuuugcccugguagggcagu

SEQ ID NO: 2271520 - RNA, 19 nt, Human
cuuuggaaagaguaggaag

SEQ ID NO: 2271521 - RNA, 23 nt, Human
cuuuggaaagaguaggaagacuu

SEQ ID NO: 2271522 - RNA, 18 nt, Human
cuuugccagaaagcauaa

SEQ ID NO: 2271523 - RNA, 17 nt, Human
cuuugccagcugcugcu

SEQ ID NO: 2271524 - RNA, 21 nt, Human
cuuugccacccucaugcugug

SEQ ID NO: 2271525 - RNA, 20 nt, Human
cuuugccagcuuuuccuccc

SEQ ID NO: 2271526 - RNA, 18 nt, Human
cuuugccagcugcugcug

SEQ ID NO: 2271527 - RNA, 13 nt, Human
cuuugccagcuuu

SEQ ID NO: 2271528 - RNA, 23 nt, Human
cuuugcacugagggccacacuau

SEQ ID NO: 2271529 - RNA, 16 nt, Human
cuuugcacugauauau

SEQ ID NO: 2271530 - RNA, 18 nt, Human
cuuugcccaacaccagcc

SEQ ID NO: 2271531 - RNA, 19 nt, Human
cuuugcccaacaccagccc

SEQ ID NO: 2271532 - RNA, 14 nt, Human
cuuugcccacaaug

SEQ ID NO: 2271533 - RNA, 15 nt, Human
cuuugcccagaaaga

SEQ ID NO: 2271534 - RNA, 16 nt, Human
cuuugcccaacaccag

SEQ ID NO: 2271535 - RNA, 16 nt, Human
cuuugaaugcggccca

SEQ ID NO: 2271536 - RNA, 15 nt, Human
cuuugaaugacaaag

SEQ ID NO: 2271537 - RNA, 13 nt, Human
cuuugaaugcuuu

SEQ ID NO: 2271538 - RNA, 16 nt, Human
cuuugaaugcuuuuug

SEQ ID NO: 2271539 - RNA, 23 nt, Human
cuuugaaugcuuuuugaauguua

SEQ ID NO: 2271540 - RNA, 23 nt, Human
cuuugaauccucucucuguguua

SEQ ID NO: 2271541 - RNA, 19 nt, Human
cuuugaauccucucucugu

SEQ ID NO: 2271542 - RNA, 18 nt, Human
cuuugaauccucucucug

SEQ ID NO: 2271543 - RNA, 16 nt, Human
cuuugaagucauacca

SEQ ID NO: 2271544 - RNA, 17 nt, Human
cuuugaauaaaaaugca

SEQ ID NO: 2271545 - RNA, 18 nt, Human
cuuugaaggggccucacc

SEQ ID NO: 2271546 - RNA, 18 nt, Human
cuuugaauaaaaaugcac

SEQ ID NO: 2271547 - RNA, 14 nt, Human
cuuugcagacaggc

SEQ ID NO: 2271548 - RNA, 15 nt, Human
cuuugcagacaggca

SEQ ID NO: 2271549 - RNA, 14 nt, Human
cuuugcacugaggg

SEQ ID NO: 2271550 - RNA, 15 nt, Human
cuuugcacugagggc

SEQ ID NO: 2271551 - RNA, 16 nt, Human
cuuugcacugagggcc

SEQ ID NO: 2271552 - RNA, 18 nt, Human
cuuugcacugagggccac

SEQ ID NO: 2271553 - RNA, 19 nt, Human
cuuugcacugagggccaca

SEQ ID NO: 2271554 - RNA, 22 nt, Human
cuuugcacugagggccacacua

SEQ ID NO: 2271555 - RNA, 12 nt, Human
cuuugaauuuuc

SEQ ID NO: 2271556 - RNA, 14 nt, Human
cuugcauugcagag

SEQ ID NO: 2271557 - RNA, 12 nt, Human
cuugcauuuuug

SEQ ID NO: 2271558 - RNA, 18 nt, Human
cuugcauugaauauauua

SEQ ID NO: 2271559 - RNA, 14 nt, Human
cuugcauucccagu

SEQ ID NO: 2271560 - RNA, 16 nt, Human
cuugcauucccagugg

SEQ ID NO: 2271561 - RNA, 12 nt, Human
cuugcauuccca

SEQ ID NO: 2271562 - RNA, 17 nt, Human
cuugccaaauauaaaua

SEQ ID NO: 2271563 - RNA, 15 nt, Human
cuugcugccuucugg

SEQ ID NO: 2271564 - RNA, 19 nt, Human
cuugcugccuucuggauuc

SEQ ID NO: 2271565 - RNA, 21 nt, Human
cuugcuggacggggacugggg

SEQ ID NO: 2271566 - RNA, 17 nt, Human
cuugcuggacggggacu

SEQ ID NO: 2271567 - RNA, 20 nt, Human
cuugcugccuucuggauucu

SEQ ID NO: 2271568 - RNA, 21 nt, Human
cuugcauuuuugcaggagcag

SEQ ID NO: 2271569 - RNA, 20 nt, Human
cuugcauuuuugcaggagca

SEQ ID NO: 2271570 - RNA, 14 nt, Human
cuugcauuuuugca

SEQ ID NO: 2271571 - RNA, 13 nt, Human
cuugcauuuuugc

SEQ ID NO: 2271572 - RNA, 15 nt, Human
cuuggacauccuccu

SEQ ID NO: 2271573 - RNA, 16 nt, Human
cuuggacauccuccuc

SEQ ID NO: 2271574 - RNA, 15 nt, Human
cuugcuuuuaaaauc

SEQ ID NO: 2271575 - RNA, 22 nt, Human
cuuggacauccuccucccaccc

SEQ ID NO: 2271576 - RNA, 17 nt, Human
cuuggacauccuccucc

SEQ ID NO: 2271577 - RNA, 19 nt, Human
cuuggacauccuccuccca

SEQ ID NO: 2271578 - RNA, 20 nt, Human
cuuggacauccuccucccac

SEQ ID NO: 2271579 - RNA, 21 nt, Human
cuuggacauccuccucccacc

SEQ ID NO: 2271580 - RNA, 21 nt, Human
cuugcuuguugggauuccuga

SEQ ID NO: 2271581 - RNA, 22 nt, Human
cuugcuuguugggauuccugac

SEQ ID NO: 2271582 - RNA, 15 nt, Human
cuugcuguccuaggc

SEQ ID NO: 2271583 - RNA, 22 nt, Human
cuugcuggacggggacugggga

SEQ ID NO: 2271584 - RNA, 14 nt, Human
cuugcuuggcugcu

SEQ ID NO: 2271585 - RNA, 18 nt, Human
cuugcuuggcugcuuggc

SEQ ID NO: 2271586 - RNA, 14 nt, Human
cuugcuguccuagg

SEQ ID NO: 2271587 - RNA, 16 nt, Human
cuugcuguauaugcag

SEQ ID NO: 2271588 - RNA, 23 nt, Human
cuugcuggggacggggggcccca

SEQ ID NO: 2271589 - RNA, 17 nt, Human
cuugcugguuuucugga

SEQ ID NO: 2271590 - RNA, 13 nt, Human
cuugcuugcuuuu

SEQ ID NO: 2271591 - RNA, 24 nt, Human
cuuggcucacugcaacuucugccu

SEQ ID NO: 2271592 - RNA, 21 nt, Human
cuuggcucaauccucuaagcu

SEQ ID NO: 2271593 - RNA, 12 nt, Human
cuuggcucagac

SEQ ID NO: 2271594 - RNA, 23 nt, Human
cuuggcucaaguccucuuuucug

SEQ ID NO: 2271595 - RNA, 17 nt, Human
cuuggcuacacagggau

SEQ ID NO: 2271596 - RNA, 14 nt, Human
cuuggauugucccc

SEQ ID NO: 2271597 - RNA, 13 nt, Human
cuuggauuguccc

SEQ ID NO: 2271598 - RNA, 12 nt, Human
cuuggcugcagg

SEQ ID NO: 2271599 - RNA, 13 nt, Human
cuuggcugcaggg

SEQ ID NO: 2271600 - RNA, 16 nt, Human
cuuggcucagacaugu

SEQ ID NO: 2271601 - RNA, 14 nt, Human
cuuggcucagacau

SEQ ID NO: 2271602 - RNA, 18 nt, Human
cuuggcucgaaucucugu

SEQ ID NO: 2271603 - RNA, 19 nt, Human
cuuggcucgaaucucugug

SEQ ID NO: 2271604 - RNA, 20 nt, Human
cuuggcucgaaucucugugc

SEQ ID NO: 2271605 - RNA, 21 nt, Human
cuuggcucgaaucucugugcc

SEQ ID NO: 2271606 - RNA, 22 nt, Human
cuuggcucgaaucucugugccu

SEQ ID NO: 2271607 - RNA, 22 nt, Human
cuuggauaaugcuguugccuca

SEQ ID NO: 2271608 - RNA, 18 nt, Human
cuuggauaaugcuguugc

SEQ ID NO: 2271609 - RNA, 12 nt, Human
cuuggagcugag

SEQ ID NO: 2271610 - RNA, 20 nt, Human
cuuggagccugcagagcugc

SEQ ID NO: 2271611 - RNA, 19 nt, Human
cuuggagccugcagagcug

SEQ ID NO: 2271612 - RNA, 23 nt, Human
cuuggauaaugcuguugccucau

SEQ ID NO: 2271613 - RNA, 15 nt, Human
cuuggauguauaugu

SEQ ID NO: 2271614 - RNA, 18 nt, Human
cuuggauguaccugcccc

SEQ ID NO: 2271615 - RNA, 21 nt, Human
cuuggauuauuuuaaaucauu

SEQ ID NO: 2271616 - RNA, 21 nt, Human
cuuggagccccagugccaagc

SEQ ID NO: 2271617 - RNA, 16 nt, Human
cuuggaccucugcucu

SEQ ID NO: 2271618 - RNA, 14 nt, Human
cuuggagccggacu

SEQ ID NO: 2271619 - RNA, 21 nt, Human
cuuggagccggacuuucggag

SEQ ID NO: 2271620 - RNA, 13 nt, Human
cuuggagccugca

SEQ ID NO: 2271621 - RNA, 12 nt, Human
cuuggaccucug

SEQ ID NO: 2271622 - RNA, 13 nt, Human
cuuggaccucugc

SEQ ID NO: 2271623 - RNA, 14 nt, Human
cuuggaccucugcu

SEQ ID NO: 2271624 - RNA, 15 nt, Human
cuuggaccucugcuc

SEQ ID NO: 2271625 - RNA, 18 nt, Human
cuuggagccugcagagcu

SEQ ID NO: 2271626 - RNA, 17 nt, Human
cuuggagccugcagagc

SEQ ID NO: 2271627 - RNA, 16 nt, Human
cuuggagccugcagag

SEQ ID NO: 2271628 - RNA, 15 nt, Human
cuuggagccugcaga

SEQ ID NO: 2271629 - RNA, 22 nt, Human
cuuguauuaaguuguuaauaaa

SEQ ID NO: 2271630 - RNA, 23 nt, Human
cuuguauuaaguuguuaauaaaa

SEQ ID NO: 2271631 - RNA, 13 nt, Human
cuuguauuaugug

SEQ ID NO: 2271632 - RNA, 13 nt, Human
cuuguauuaaguu

SEQ ID NO: 2271633 - RNA, 17 nt, Human
cuuguauuaaguuguua

SEQ ID NO: 2271634 - RNA, 17 nt, Human
cuuguauuaaagacaga

SEQ ID NO: 2271635 - RNA, 14 nt, Human
cuuguauuaagaau

SEQ ID NO: 2271636 - RNA, 23 nt, Human
cuuguauuaaacucuucacaaaa

SEQ ID NO: 2271637 - RNA, 13 nt, Human
cuuguauuaaacu

SEQ ID NO: 2271638 - RNA, 21 nt, Human
cuuguaacuccaccaacccau

SEQ ID NO: 2271639 - RNA, 20 nt, Human
cuuguaaugauauagccaga

SEQ ID NO: 2271640 - RNA, 17 nt, Human
cuuguaacuccaccaac

SEQ ID NO: 2271641 - RNA, 15 nt, Human
cuuguaacuccacca

SEQ ID NO: 2271642 - RNA, 21 nt, Human
cuuguaugaaagauggcugug

SEQ ID NO: 2271643 - RNA, 20 nt, Human
cuuguaucaacacuguuacu

SEQ ID NO: 2271644 - RNA, 21 nt, Human
cuuguaaugauauagccagaa

SEQ ID NO: 2271645 - RNA, 23 nt, Human
cuuguauauuuuaagaaauaaca

SEQ ID NO: 2271646 - RNA, 19 nt, Human
cuuguaucaacacuguuac

SEQ ID NO: 2271647 - RNA, 14 nt, Human
cuuguaacuccacc

SEQ ID NO: 2271648 - RNA, 20 nt, Human
cuuguauuuaaauauuaaau

SEQ ID NO: 2271649 - RNA, 18 nt, Human
cuuguauuuaaauauuaa

SEQ ID NO: 2271650 - RNA, 12 nt, Human
cuuguauuuaaa

SEQ ID NO: 2271651 - RNA, 15 nt, Human
cuuguauuaagaaug

SEQ ID NO: 2271652 - RNA, 18 nt, Human
cuuguauuauguguguuu

SEQ ID NO: 2271653 - RNA, 14 nt, Human
cuuguauuuuguga

SEQ ID NO: 2271654 - RNA, 14 nt, Human
cuugucaaagaagg

SEQ ID NO: 2271655 - RNA, 23 nt, Human
cuugucacugguagaccaaaaua

SEQ ID NO: 2271656 - RNA, 15 nt, Human
cuugucacugguaga

SEQ ID NO: 2271657 - RNA, 17 nt, Human
cuuguggacacagcucu

SEQ ID NO: 2271658 - RNA, 18 nt, Human
cuuguggacacagcucuu

SEQ ID NO: 2271659 - RNA, 15 nt, Human
cuugucagagcuggg

SEQ ID NO: 2271660 - RNA, 14 nt, Human
cuugucagagcugg

SEQ ID NO: 2271661 - RNA, 21 nt, Human
cuugucagagcugggaggggu

SEQ ID NO: 2271662 - RNA, 13 nt, Human
cuugucagagcug

SEQ ID NO: 2271663 - RNA, 13 nt, Human
cuugucaaagaag

SEQ ID NO: 2271664 - RNA, 22 nt, Human
cuugucacugguagaccaaaau

SEQ ID NO: 2271665 - RNA, 20 nt, Human
cuuggcuucaggggaguccc

SEQ ID NO: 2271666 - RNA, 20 nt, Human
cuuggcuguuggcagugagu

SEQ ID NO: 2271667 - RNA, 16 nt, Human
cuuggcuuccuuucuu

SEQ ID NO: 2271668 - RNA, 18 nt, Human
cuuggcuuccuuucuugg

SEQ ID NO: 2271669 - RNA, 23 nt, Human
cuuggcuucucauacguccacca

SEQ ID NO: 2271670 - RNA, 16 nt, Human
cuuggcuucucauacg

SEQ ID NO: 2271671 - RNA, 22 nt, Human
cuuggcuguagaaggagacaga

SEQ ID NO: 2271672 - RNA, 12 nt, Human
cuuggcugugag

SEQ ID NO: 2271673 - RNA, 13 nt, Human
cuuggcugugagg

SEQ ID NO: 2271674 - RNA, 21 nt, Human
cuuggcugugaggccccugga

SEQ ID NO: 2271675 - RNA, 17 nt, Human
cuuggcuguagaaggag

SEQ ID NO: 2271676 - RNA, 16 nt, Human
cuuggcuggugcaccu

SEQ ID NO: 2271677 - RNA, 16 nt, Human
cuuggggaccagagcu

SEQ ID NO: 2271678 - RNA, 14 nt, Human
cuuggcuugcccac

SEQ ID NO: 2271679 - RNA, 14 nt, Human
cuuggcuucuucuu

SEQ ID NO: 2271680 - RNA, 17 nt, Human
cuuggggaccagagcug

SEQ ID NO: 2271681 - RNA, 18 nt, Human
cuuggggaccagagcugc

SEQ ID NO: 2271682 - RNA, 19 nt, Human
cuuggggaccagagcugcc

SEQ ID NO: 2271683 - RNA, 15 nt, Human
cuuggggcaggcagu

SEQ ID NO: 2271684 - RNA, 14 nt, Human
cuuggggcaggcag

SEQ ID NO: 2271685 - RNA, 21 nt, Human
cuuggggauucuuccaucuga

SEQ ID NO: 2271686 - RNA, 19 nt, Human
cuuggggauucuuccaucu

SEQ ID NO: 2271687 - RNA, 20 nt, Human
cuugguuuguaaauuaacuu

SEQ ID NO: 2271688 - RNA, 21 nt, Human
cuuggggaguuaagaccuggc

SEQ ID NO: 2271689 - RNA, 23 nt, Human
cuuggggaguuaagaccuggcag

SEQ ID NO: 2271690 - RNA, 22 nt, Human
cuuggggaguuaagaccuggca

SEQ ID NO: 2271691 - RNA, 21 nt, Human
cuuguaaauagcucagguguc

SEQ ID NO: 2271692 - RNA, 18 nt, Human
cuuguaaagacuguagaa

SEQ ID NO: 2271693 - RNA, 18 nt, Human
cuuguaaaggaauuuaaa

SEQ ID NO: 2271694 - RNA, 14 nt, Human
cuuggcuuucaugu

SEQ ID NO: 2271695 - RNA, 18 nt, Human
cuuguaaaaauuaaaagu

SEQ ID NO: 2271696 - RNA, 14 nt, Human
cuucuuuucacauu

SEQ ID NO: 2271697 - RNA, 16 nt, Human
cuucuuuucacauucu

SEQ ID NO: 2271698 - RNA, 20 nt, Human
cuucuuuucacauucuuaua

SEQ ID NO: 2271699 - RNA, 17 nt, Human
cuucuuuucacauucuu

SEQ ID NO: 2271700 - RNA, 12 nt, Human
cuucuuuugagc

SEQ ID NO: 2271701 - RNA, 13 nt, Human
cuucuuuuacuca

SEQ ID NO: 2271702 - RNA, 19 nt, Human
cuucuuuuaaaccauuuuc

SEQ ID NO: 2271703 - RNA, 13 nt, Human
cuucuuugcuugc

SEQ ID NO: 2271704 - RNA, 15 nt, Human
cuucuuugcuugccu

SEQ ID NO: 2271705 - RNA, 19 nt, Human
cuucuuugcuuugcccagc

SEQ ID NO: 2271706 - RNA, 18 nt, Human
cuucuuuggguaaacgug

SEQ ID NO: 2271707 - RNA, 20 nt, Human
cuucuuuuuauuuucuuuug

SEQ ID NO: 2271708 - RNA, 15 nt, Human
cuucuuuuuauuuuc

SEQ ID NO: 2271709 - RNA, 13 nt, Human
cuucuuuugugaa

SEQ ID NO: 2271710 - RNA, 14 nt, Human
cuucuuuugcucuu

SEQ ID NO: 2271711 - RNA, 14 nt, Human
cuucuuuugauuau

SEQ ID NO: 2271712 - RNA, 13 nt, Human
cuucuuuugauua

SEQ ID NO: 2271713 - RNA, 16 nt, Human
cuucuuuugauuaugu

SEQ ID NO: 2271714 - RNA, 13 nt, Human
cuucuuuugcucu

SEQ ID NO: 2271715 - RNA, 22 nt, Human
cuugaaaugaaaguauaacuga

SEQ ID NO: 2271716 - RNA, 16 nt, Human
cuucuuuuugcuguug

SEQ ID NO: 2271717 - RNA, 21 nt, Human
cuugaaauuaagaaggcaaaa

SEQ ID NO: 2271718 - RNA, 19 nt, Human
cuugaaauauaggaacuua

SEQ ID NO: 2271719 - RNA, 23 nt, Human
cuucuuuuuauuuucuuuuguaa

SEQ ID NO: 2271720 - RNA, 15 nt, Human
cuucuuuuggcuucc

SEQ ID NO: 2271721 - RNA, 15 nt, Human
cuucuuuuugcuguu

SEQ ID NO: 2271722 - RNA, 14 nt, Human
cuucuuuuugcugu

SEQ ID NO: 2271723 - RNA, 12 nt, Human
cugucucuucca

SEQ ID NO: 2271724 - RNA, 14 nt, Human
cugucucugucaug

SEQ ID NO: 2271725 - RNA, 15 nt, Human
cugucucuuccauau

SEQ ID NO: 2271726 - RNA, 16 nt, Human
cugucugaagccaaug

SEQ ID NO: 2271727 - RNA, 19 nt, Human
cugucugaaggacacuucc

SEQ ID NO: 2271728 - RNA, 20 nt, Human
cugucugaaggacacuuccu

SEQ ID NO: 2271729 - RNA, 22 nt, Human
cugucugaaggacacuuccugc

SEQ ID NO: 2271730 - RNA, 13 nt, Human
cugucucuccauc

SEQ ID NO: 2271731 - RNA, 16 nt, Human
cugucucuccaucugu

SEQ ID NO: 2271732 - RNA, 13 nt, Human
cugucucugccuc

SEQ ID NO: 2271733 - RNA, 18 nt, Human
cugucucugccucccuca

SEQ ID NO: 2271734 - RNA, 16 nt, Human
cugucucugccucccu

SEQ ID NO: 2271735 - RNA, 13 nt, Human
cugucucuggccu

SEQ ID NO: 2271736 - RNA, 20 nt, Human
cugucugacaaccucuuggu

SEQ ID NO: 2271737 - RNA, 14 nt, Human
cuucuuuauacugu

SEQ ID NO: 2271738 - RNA, 20 nt, Human
cuucuuuauacuguaauuua

SEQ ID NO: 2271739 - RNA, 22 nt, Human
cuucuuuauaauucuacuuuga

SEQ ID NO: 2271740 - RNA, 13 nt, Human
cuucuuuccacag

SEQ ID NO: 2271741 - RNA, 14 nt, Human
cuucuuugauaaug

SEQ ID NO: 2271742 - RNA, 18 nt, Human
cuucuuugcagccugggu

SEQ ID NO: 2271743 - RNA, 17 nt, Human
cuucuuugauaauguua

SEQ ID NO: 2271744 - RNA, 19 nt, Human
cuucuuugauaauguuaaa

SEQ ID NO: 2271745 - RNA, 21 nt, Human
cuucuuucuuugggaauauuu

SEQ ID NO: 2271746 - RNA, 11 nt, Human
cuucuuuccuc

SEQ ID NO: 2271747 - RNA, 14 nt, Human
cuucuuuccucuuc

SEQ ID NO: 2271748 - RNA, 15 nt, Human
cuucuuuccucuucc

SEQ ID NO: 2271749 - RNA, 16 nt, Human
cuucuuuccucuuccc

SEQ ID NO: 2271750 - RNA, 14 nt, Human
cuucuuucauuuuc

SEQ ID NO: 2271751 - RNA, 19 nt, Human
cuucuuuccacagaagcuc

SEQ ID NO: 2271752 - RNA, 19 nt, Human
cuugaacuccuggccucaa

SEQ ID NO: 2271753 - RNA, 20 nt, Human
cuugaaauuaagaaggcaaa

SEQ ID NO: 2271754 - RNA, 13 nt, Human
cuugaaauuuuaa

SEQ ID NO: 2271755 - RNA, 14 nt, Human
cuugaaauuuuaac

SEQ ID NO: 2271756 - RNA, 19 nt, Human
cuugaaauuuuaaacuaua

SEQ ID NO: 2271757 - RNA, 16 nt, Human
cuugaacuggguacuu

SEQ ID NO: 2271758 - RNA, 19 nt, Human
cuugaacugagcuuggaag

SEQ ID NO: 2271759 - RNA, 17 nt, Human
cuugaacugagcuugga

SEQ ID NO: 2271760 - RNA, 23 nt, Human
cuugaccagcagaucccagcuca

SEQ ID NO: 2271761 - RNA, 15 nt, Human
cuugaccaggccugg

SEQ ID NO: 2271762 - RNA, 17 nt, Human
cuugaccaggccugggc

SEQ ID NO: 2271763 - RNA, 15 nt, Human
cuugaacuuugaccu

SEQ ID NO: 2271764 - RNA, 18 nt, Human
cuugaacuggguacuugu

SEQ ID NO: 2271765 - RNA, 20 nt, Human
cuugaacuggguacuugugg

SEQ ID NO: 2271766 - RNA, 14 nt, Human
cuugaacuccuggc

SEQ ID NO: 2271767 - RNA, 15 nt, Human
cuugaacuccuggcc

SEQ ID NO: 2271768 - RNA, 17 nt, Human
cuugaacuccuggccuc

SEQ ID NO: 2271769 - RNA, 18 nt, Human
cuugaacuccuggccuca

SEQ ID NO: 2271770 - RNA, 20 nt, Human
cuugaacccgggaggcagag

SEQ ID NO: 2271771 - RNA, 19 nt, Human
cuugaacccgggaggcaga

SEQ ID NO: 2271772 - RNA, 14 nt, Human
cuugaacccgggag

SEQ ID NO: 2271773 - RNA, 23 nt, Human
cuugaggucuuuugacaugugga

SEQ ID NO: 2271774 - RNA, 22 nt, Human
cuugaggucuuuugacaugugg

SEQ ID NO: 2271775 - RNA, 18 nt, Human
cuugaggucuuuugacau

SEQ ID NO: 2271776 - RNA, 17 nt, Human
cuugaggucuuuugaca

SEQ ID NO: 2271777 - RNA, 14 nt, Human
cuugaggucuuuug

SEQ ID NO: 2271778 - RNA, 16 nt, Human
cuugagggcccagagc

SEQ ID NO: 2271779 - RNA, 17 nt, Human
cuugagggcccagagca

SEQ ID NO: 2271780 - RNA, 18 nt, Human
cuugagggcccagagcag

SEQ ID NO: 2271781 - RNA, 19 nt, Human
cuugagggcccagagcagg

SEQ ID NO: 2271782 - RNA, 14 nt, Human
cuugaggccaggag

SEQ ID NO: 2271783 - RNA, 17 nt, Human
cuugaggauuuugagua

SEQ ID NO: 2271784 - RNA, 16 nt, Human
cuugagggagcuuagc

SEQ ID NO: 2271785 - RNA, 24 nt, Human
cuugaggcuuagcuuugcucugcc

SEQ ID NO: 2271786 - RNA, 14 nt, Human
cuugagggcccaga

SEQ ID NO: 2271787 - RNA, 22 nt, Human
cuugaggagugugagaaucaaa

SEQ ID NO: 2271788 - RNA, 16 nt, Human
cuugaggauuuugagu

SEQ ID NO: 2271789 - RNA, 14 nt, Human
cuugaggaguguga

SEQ ID NO: 2271790 - RNA, 22 nt, Human
cuugaggaggggcagguaaacu

SEQ ID NO: 2271791 - RNA, 12 nt, Human
cuugagcccagg

SEQ ID NO: 2271792 - RNA, 13 nt, Human
cuugagcucagga

SEQ ID NO: 2271793 - RNA, 22 nt, Human
cuugagccuugaacuuugaccu

SEQ ID NO: 2271794 - RNA, 20 nt, Human
cuugagccuugaacuuugac

SEQ ID NO: 2271795 - RNA, 14 nt, Human
cuugagagggugga

SEQ ID NO: 2271796 - RNA, 21 nt, Human
cuugaccauucuccaccugcc

SEQ ID NO: 2271797 - RNA, 17 nt, Human
cuugaccauucuccacc

SEQ ID NO: 2271798 - RNA, 20 nt, Human
cuugaccauucuccaccugc

SEQ ID NO: 2271799 - RNA, 15 nt, Human
cuugagaugucuucu

SEQ ID NO: 2271800 - RNA, 19 nt, Human
cuugagcaaguuccuucug

SEQ ID NO: 2271801 - RNA, 22 nt, Human
cuugagaguaucaggucuccca

SEQ ID NO: 2271802 - RNA, 20 nt, Human
cuugagaguagaugguuuga

SEQ ID NO: 2271803 - RNA, 13 nt, Human
cuugagcaguggc

SEQ ID NO: 2271804 - RNA, 20 nt, Human
cuugagcaaguuccuucugg

SEQ ID NO: 2271805 - RNA, 21 nt, Human
cuugagcaaguuccuucuggu

SEQ ID NO: 2271806 - RNA, 14 nt, Human
cuugagcaguggcu

SEQ ID NO: 2271807 - RNA, 16 nt, Human
cuugagcaguggcugg

SEQ ID NO: 2271808 - RNA, 21 nt, Human
cuugagcaguggcugguccag

SEQ ID NO: 2271809 - RNA, 13 nt, Human
cuugagccaguaa

SEQ ID NO: 2271810 - RNA, 16 nt, Human
cuugagccaguaauug

SEQ ID NO: 2271811 - RNA, 19 nt, Human
cuugagccuugaacuuuga

SEQ ID NO: 2271812 - RNA, 21 nt, Human
cuugcaugguuuagaaagcuu

SEQ ID NO: 2271813 - RNA, 21 nt, Human
cuugcaugaggcuaguguggu

SEQ ID NO: 2271814 - RNA, 23 nt, Human
cuugcaucaauuuuucuuauuuc

SEQ ID NO: 2271815 - RNA, 18 nt, Human
cuugcagacucuacagag

SEQ ID NO: 2271816 - RNA, 14 nt, Human
cuugcaguagauuu

SEQ ID NO: 2271817 - RNA, 20 nt, Human
cuugcaggucucaacccuuu

SEQ ID NO: 2271818 - RNA, 18 nt, Human
cuugcaguucagcaccac

SEQ ID NO: 2271819 - RNA, 22 nt, Human
cuugcaguagauuuucuuuaaa

SEQ ID NO: 2271820 - RNA, 17 nt, Human
cuugcaguagauuuucu

SEQ ID NO: 2271821 - RNA, 21 nt, Human
cuugcaguagauuuucuuuaa

SEQ ID NO: 2271822 - RNA, 22 nt, Human
cuugcaguucagcaccacccua

SEQ ID NO: 2271823 - RNA, 20 nt, Human
cuugcauaauaagcuaaaga

SEQ ID NO: 2271824 - RNA, 22 nt, Human
cuugcauaauaagcuaaagagg

SEQ ID NO: 2271825 - RNA, 21 nt, Human
cuugcauaauaagcuaaagag

SEQ ID NO: 2271826 - RNA, 22 nt, Human
cuugagugggguuaucucugug

SEQ ID NO: 2271827 - RNA, 23 nt, Human
cuugagugggguuaucucugugu

SEQ ID NO: 2271828 - RNA, 21 nt, Human
cuugagugggguuaucucugu

SEQ ID NO: 2271829 - RNA, 14 nt, Human
cuugcaagaaucag

SEQ ID NO: 2271830 - RNA, 20 nt, Human
cuugcaacuucaugucaacu

SEQ ID NO: 2271831 - RNA, 19 nt, Human
cuugcaacacacagacaca

SEQ ID NO: 2271832 - RNA, 17 nt, Human
cuugcaacacacagaca

SEQ ID NO: 2271833 - RNA, 15 nt, Human
cuugcaacacacaga

SEQ ID NO: 2271834 - RNA, 14 nt, Human
cuugcaacacacag

SEQ ID NO: 2271835 - RNA, 22 nt, Human
cuugcaaaguaucccuacugua

SEQ ID NO: 2271836 - RNA, 21 nt, Human
cuugcacuaaaguauguaaag

SEQ ID NO: 2271837 - RNA, 14 nt, Human
cuugcaccugcauc

SEQ ID NO: 2271838 - RNA, 13 nt, Human
cuugcaccugcau

SEQ ID NO: 2271839 - RNA, 19 nt, Human
cuugcacgcccauguguga

SEQ ID NO: 2271840 - RNA, 14 nt, Human
cuugcaauggcagc

SEQ ID NO: 2271841 - RNA, 18 nt, Human
cuugcaagaaucagugca

SEQ ID NO: 2271842 - RNA, 22 nt, Human
cuugcaagaaucagugcaaaga

SEQ ID NO: 2271843 - RNA, 12 nt, Human
cuugcaccugca

SEQ ID NO: 2271844 - RNA, 18 nt, Human
cugcgcccaguccuucca

SEQ ID NO: 2271845 - RNA, 20 nt, Human
cugcgcccaccccgcucugc

SEQ ID NO: 2271846 - RNA, 22 nt, Human
cugcgcccaccccgcucugcau

SEQ ID NO: 2271847 - RNA, 19 nt, Human
cugcgcccaguccuuccac

SEQ ID NO: 2271848 - RNA, 23 nt, Human
cugcgcccaguccuuccaccucg

SEQ ID NO: 2271849 - RNA, 15 nt, Human
cugcgcccaccccgc

SEQ ID NO: 2271850 - RNA, 17 nt, Human
cugcgcccaccccgcuc

SEQ ID NO: 2271851 - RNA, 18 nt, Human
cugcgcccaccccgcucu

SEQ ID NO: 2271852 - RNA, 20 nt, Human
cugccuucgcuucuugccuc

SEQ ID NO: 2271853 - RNA, 21 nt, Human
cugccuuccuccugggcccuc

SEQ ID NO: 2271854 - RNA, 18 nt, Human
cugccuuccuccugggcc

SEQ ID NO: 2271855 - RNA, 12 nt, Human
cugccuuccuug

SEQ ID NO: 2271856 - RNA, 13 nt, Human
cugccuuccuugc

SEQ ID NO: 2271857 - RNA, 14 nt, Human
cugccuuccuugcu

SEQ ID NO: 2271858 - RNA, 15 nt, Human
cugccuuccuugcua

SEQ ID NO: 2271859 - RNA, 13 nt, Human
cugccuucgcuuc

SEQ ID NO: 2271860 - RNA, 14 nt, Human
cugccuucgcuucu

SEQ ID NO: 2271861 - RNA, 15 nt, Human
cugccuucgcuucuu

SEQ ID NO: 2271862 - RNA, 17 nt, Human
cugccuucgcuucuugc

SEQ ID NO: 2271863 - RNA, 23 nt, Human
cugccugcuuuucacugcugcaa

SEQ ID NO: 2271864 - RNA, 11 nt, Human
cugccuucccu

SEQ ID NO: 2271865 - RNA, 12 nt, Human
cugccuucccua

SEQ ID NO: 2271866 - RNA, 15 nt, Human
cugccuucccuagcu

SEQ ID NO: 2271867 - RNA, 16 nt, Human
cugccuucccuagcuu

SEQ ID NO: 2271868 - RNA, 17 nt, Human
cugccuucccuagcuuu

SEQ ID NO: 2271869 - RNA, 16 nt, Human
cugccuuccuccuggg

SEQ ID NO: 2271870 - RNA, 15 nt, Human
cugccuuccuccugg

SEQ ID NO: 2271871 - RNA, 14 nt, Human
cugccuuccuccug

SEQ ID NO: 2271872 - RNA, 13 nt, Human
cugccuuccuccu

SEQ ID NO: 2271873 - RNA, 22 nt, Human
cugccugcuuuuuauggccugu

SEQ ID NO: 2271874 - RNA, 20 nt, Human
cugccugcuuuucacugcug

SEQ ID NO: 2271875 - RNA, 22 nt, Human
cugccugcuuuucacugcugca

SEQ ID NO: 2271876 - RNA, 23 nt, Human
cugcgguccacccaggagccccg

SEQ ID NO: 2271877 - RNA, 23 nt, Human
cugcgggucacaggagggagggg

SEQ ID NO: 2271878 - RNA, 22 nt, Human
cugcgggucacaggagggaggg

SEQ ID NO: 2271879 - RNA, 18 nt, Human
cugcggugcuaucucccc

SEQ ID NO: 2271880 - RNA, 19 nt, Human
cugcggugcuaucuccccc

SEQ ID NO: 2271881 - RNA, 14 nt, Human
cugcgcccuucccc

SEQ ID NO: 2271882 - RNA, 13 nt, Human
cugcgcccuuccc

SEQ ID NO: 2271883 - RNA, 17 nt, Human
cugcgcccuuaccuucc

SEQ ID NO: 2271884 - RNA, 18 nt, Human
cugcgcccuuaccuuccc

SEQ ID NO: 2271885 - RNA, 13 nt, Human
cugcgcccugggc

SEQ ID NO: 2271886 - RNA, 14 nt, Human
cugcgcccugggcu

SEQ ID NO: 2271887 - RNA, 16 nt, Human
cugcgcccuuccccag

SEQ ID NO: 2271888 - RNA, 19 nt, Human
cugcgccgccgccggaguc

SEQ ID NO: 2271889 - RNA, 15 nt, Human
cugcggggcuuggcu

SEQ ID NO: 2271890 - RNA, 13 nt, Human
cugcgcuugcuuu

SEQ ID NO: 2271891 - RNA, 22 nt, Human
cugcgggcuggguguggucucc

SEQ ID NO: 2271892 - RNA, 21 nt, Human
cugcgggucacaggagggagg

SEQ ID NO: 2271893 - RNA, 15 nt, Human
cugcgggucacagga

SEQ ID NO: 2271894 - RNA, 18 nt, Human
cugcccugcccuagcucc

SEQ ID NO: 2271895 - RNA, 21 nt, Human
cugcccugcccaccuggccuc

SEQ ID NO: 2271896 - RNA, 18 nt, Human
cugccugaagucacacag

SEQ ID NO: 2271897 - RNA, 16 nt, Human
cugccugaagucacac

SEQ ID NO: 2271898 - RNA, 20 nt, Human
cugcccugcccaccuggccu

SEQ ID NO: 2271899 - RNA, 17 nt, Human
cugcccugcccaccugg

SEQ ID NO: 2271900 - RNA, 12 nt, Human
cugccugcccac

SEQ ID NO: 2271901 - RNA, 13 nt, Human
cugccugcccaca

SEQ ID NO: 2271902 - RNA, 21 nt, Human
cugccugccagcugcacugau

SEQ ID NO: 2271903 - RNA, 20 nt, Human
cugccugccagcugcacuga

SEQ ID NO: 2271904 - RNA, 16 nt, Human
cugccugccagcugca

SEQ ID NO: 2271905 - RNA, 15 nt, Human
cugccugccagcugc

SEQ ID NO: 2271906 - RNA, 23 nt, Human
cugccugcagaggucugugcuga

SEQ ID NO: 2271907 - RNA, 16 nt, Human
cugccugccuuggccu

SEQ ID NO: 2271908 - RNA, 18 nt, Human
cugccugcgcccaccccg

SEQ ID NO: 2271909 - RNA, 16 nt, Human
cugccugccugucugu

SEQ ID NO: 2271910 - RNA, 14 nt, Human
cugccugccugucu

SEQ ID NO: 2271911 - RNA, 15 nt, Human
cugccugccugucug

SEQ ID NO: 2271912 - RNA, 12 nt, Human
cugccugccugu

SEQ ID NO: 2271913 - RNA, 23 nt, Human
cugccugccgguaaacacgccug

SEQ ID NO: 2271914 - RNA, 19 nt, Human
cugccugaagucacacagu

SEQ ID NO: 2271915 - RNA, 12 nt, Human
cugcccugccug

SEQ ID NO: 2271916 - RNA, 15 nt, Human
cugccugcaccccug

SEQ ID NO: 2271917 - RNA, 13 nt, Human
cugcccugccuga

SEQ ID NO: 2271918 - RNA, 15 nt, Human
cugcccugccugagg

SEQ ID NO: 2271919 - RNA, 16 nt, Human
cugccugcagaggucu

SEQ ID NO: 2271920 - RNA, 19 nt, Human
cugccugcagaggucugug

SEQ ID NO: 2271921 - RNA, 21 nt, Human
cugccugcagaggucugugcu

SEQ ID NO: 2271922 - RNA, 22 nt, Human
cugccugcagaggucugugcug

SEQ ID NO: 2271923 - RNA, 20 nt, Human
cugccugcaguacuuuaccu

SEQ ID NO: 2271924 - RNA, 21 nt, Human
cugccugcaguacuuuaccuc

SEQ ID NO: 2271925 - RNA, 19 nt, Human
cugcugccuccccaacccu

SEQ ID NO: 2271926 - RNA, 15 nt, Human
cugcugccuccccaa

SEQ ID NO: 2271927 - RNA, 21 nt, Human
cugcugccgccucccagccug

SEQ ID NO: 2271928 - RNA, 14 nt, Human
cugcugccucccca

SEQ ID NO: 2271929 - RNA, 21 nt, Human
cugcugcaggggcucuggaga

SEQ ID NO: 2271930 - RNA, 14 nt, Human
cugcugccugcuuu

SEQ ID NO: 2271931 - RNA, 23 nt, Human
cugcugccugcuuuuuauggccu

SEQ ID NO: 2271932 - RNA, 15 nt, Human
cugcugcaguugcca

SEQ ID NO: 2271933 - RNA, 14 nt, Human
cugcugcaguugcc

SEQ ID NO: 2271934 - RNA, 10 nt, Human
cugcugcagu

SEQ ID NO: 2271935 - RNA, 13 nt, Human
cugcugcaguugc

SEQ ID NO: 2271936 - RNA, 12 nt, Human
cugcucugguua

SEQ ID NO: 2271937 - RNA, 15 nt, Human
cugcucugugcccac

SEQ ID NO: 2271938 - RNA, 19 nt, Human
cugcucuggaauuugcaag

SEQ ID NO: 2271939 - RNA, 19 nt, Human
cugcucuugaacuccugac

SEQ ID NO: 2271940 - RNA, 18 nt, Human
cugcucuugaacuccuga

SEQ ID NO: 2271941 - RNA, 16 nt, Human
cugcucuugaacuccu

SEQ ID NO: 2271942 - RNA, 11 nt, Human
cugcucugccc

SEQ ID NO: 2271943 - RNA, 20 nt, Human
cugcucugaugaagaggagu

SEQ ID NO: 2271944 - RNA, 20 nt, Human
cugcucuccaagucucagug

SEQ ID NO: 2271945 - RNA, 13 nt, Human
cugcucuggaaaa

SEQ ID NO: 2271946 - RNA, 18 nt, Human
cugcucuggaauuugcaa

SEQ ID NO: 2271947 - RNA, 22 nt, Human
cugcucugcccuuguucccuag

SEQ ID NO: 2271948 - RNA, 20 nt, Human
cugcucugcgugucaccugu

SEQ ID NO: 2271949 - RNA, 22 nt, Human
cugcucugcgugucaccugugc

SEQ ID NO: 2271950 - RNA, 21 nt, Human
cugcucugcgugucaccugug

SEQ ID NO: 2271951 - RNA, 17 nt, Human
cugcucccccacccccu

SEQ ID NO: 2271952 - RNA, 14 nt, Human
cugcucccccaccc

SEQ ID NO: 2271953 - RNA, 13 nt, Human
cugcucccccacc

SEQ ID NO: 2271954 - RNA, 12 nt, Human
cugcucccccac

SEQ ID NO: 2271955 - RNA, 16 nt, Human
cugcuccccaggggag

SEQ ID NO: 2271956 - RNA, 19 nt, Human
cugcuccccagcccuggcu

SEQ ID NO: 2271957 - RNA, 20 nt, Human
cugcuccccagcccuggcuc

SEQ ID NO: 2271958 - RNA, 20 nt, Human
cugcuccccagcagcggaac

SEQ ID NO: 2271959 - RNA, 22 nt, Human
cugcucccagcagcccuaagga

SEQ ID NO: 2271960 - RNA, 16 nt, Human
cugcuccccagcccug

SEQ ID NO: 2271961 - RNA, 17 nt, Human
cugcuccccagcccugg

SEQ ID NO: 2271962 - RNA, 18 nt, Human
cugcuccccagcccuggc

SEQ ID NO: 2271963 - RNA, 23 nt, Human
cugcgggugaacaaagcagccac

SEQ ID NO: 2271964 - RNA, 22 nt, Human
cugcgggugaacaaagcagcca

SEQ ID NO: 2271965 - RNA, 22 nt, Human
cugcgguuuguuggaucuucaa

SEQ ID NO: 2271966 - RNA, 14 nt, Human
cugcucccagcagc

SEQ ID NO: 2271967 - RNA, 15 nt, Human
cugcucccagcagcc

SEQ ID NO: 2271968 - RNA, 16 nt, Human
cugcucccagcagccc

SEQ ID NO: 2271969 - RNA, 17 nt, Human
cugcucccagcagcccu

SEQ ID NO: 2271970 - RNA, 21 nt, Human
cugcucccagcagcccuaagg

SEQ ID NO: 2271971 - RNA, 20 nt, Human
cugcggugcuaucuccccca

SEQ ID NO: 2271972 - RNA, 21 nt, Human
cugcggugcuaucucccccag

SEQ ID NO: 2271973 - RNA, 22 nt, Human
cugcggugcuaucucccccagc

SEQ ID NO: 2271974 - RNA, 23 nt, Human
cugcggugcuaucucccccagcc

SEQ ID NO: 2271975 - RNA, 23 nt, Human
cugcuccucuccccagcaaguga

SEQ ID NO: 2271976 - RNA, 22 nt, Human
cugcucccccacccccucccca

SEQ ID NO: 2271977 - RNA, 21 nt, Human
cugcucccccacccccucccc

SEQ ID NO: 2271978 - RNA, 23 nt, Human
cugcucccccacccccuccccag

SEQ ID NO: 2271979 - RNA, 19 nt, Human
cugcuccucuccccagcaa

SEQ ID NO: 2271980 - RNA, 20 nt, Human
cugcuccucuccccagcaag

SEQ ID NO: 2271981 - RNA, 15 nt, Human
cugcucuauuguagc

SEQ ID NO: 2271982 - RNA, 15 nt, Human
cugcucuccgaccag

SEQ ID NO: 2271983 - RNA, 23 nt, Human
cugcucuauuguagcauuucuug

SEQ ID NO: 2271984 - RNA, 21 nt, Human
cugcugguuaacuuguuuggc

SEQ ID NO: 2271985 - RNA, 18 nt, Human
cugcuggugcagagcuga

SEQ ID NO: 2271986 - RNA, 22 nt, Human
cugcuggugcagagcugaagau

SEQ ID NO: 2271987 - RNA, 11 nt, Human
cugcuguccag

SEQ ID NO: 2271988 - RNA, 14 nt, Human
cugcuguccagaca

SEQ ID NO: 2271989 - RNA, 15 nt, Human
cugcuguccagacag

SEQ ID NO: 2271990 - RNA, 16 nt, Human
cugcuguccagacagc

SEQ ID NO: 2271991 - RNA, 17 nt, Human
cugcuguccagacagcc

SEQ ID NO: 2271992 - RNA, 18 nt, Human
cugcuguccagacagccu

SEQ ID NO: 2271993 - RNA, 19 nt, Human
cugcuguccagacagccug

SEQ ID NO: 2271994 - RNA, 20 nt, Human
cugcuguccagacagccugu

SEQ ID NO: 2271995 - RNA, 21 nt, Human
cugcuguccagacagccugua

SEQ ID NO: 2271996 - RNA, 13 nt, Human
cugcuguccccuc

SEQ ID NO: 2271997 - RNA, 14 nt, Human
cugcuguccccucu

SEQ ID NO: 2271998 - RNA, 18 nt, Human
cugcuguccccucuugcc

SEQ ID NO: 2271999 - RNA, 19 nt, Human
cugcuguccccucuugccc

SEQ ID NO: 2272000 - RNA, 19 nt, Human
cugcuuccugucuuuggga

SEQ ID NO: 2272001 - RNA, 17 nt, Human
cugcugucccucccccu

SEQ ID NO: 2272002 - RNA, 20 nt, Human
cugcugucccucccccuugu

SEQ ID NO: 2272003 - RNA, 20 nt, Human
cugcuguccccucuugcccc

SEQ ID NO: 2272004 - RNA, 21 nt, Human
cugcuguccccucuugcccca

SEQ ID NO: 2272005 - RNA, 22 nt, Human
cugcuguccccucuugccccaa

SEQ ID NO: 2272006 - RNA, 23 nt, Human
cugcuguccccucuugccccaac

SEQ ID NO: 2272007 - RNA, 14 nt, Human
cugcuucuccagcc

SEQ ID NO: 2272008 - RNA, 15 nt, Human
cugcuucuccagccu

SEQ ID NO: 2272009 - RNA, 16 nt, Human
cugcuucuccagccug

SEQ ID NO: 2272010 - RNA, 19 nt, Human
cugcuucuccauggccacc

SEQ ID NO: 2272011 - RNA, 18 nt, Human
cugcuucucccacuuggc

SEQ ID NO: 2272012 - RNA, 20 nt, Human
cugcuucucccacuuggcca

SEQ ID NO: 2272013 - RNA, 21 nt, Human
cugcuucucccacuuggccaa

SEQ ID NO: 2272014 - RNA, 16 nt, Human
cugcuucuuaacccca

SEQ ID NO: 2272015 - RNA, 17 nt, Human
cugcuugacaacaucug

SEQ ID NO: 2272016 - RNA, 23 nt, Human
cugcuucucugacuucugccugg

SEQ ID NO: 2272017 - RNA, 21 nt, Human
cugcuucucugacuucugccu

SEQ ID NO: 2272018 - RNA, 22 nt, Human
cugcuucucugacuucugccug

SEQ ID NO: 2272019 - RNA, 13 nt, Human
cugcuucucugac

SEQ ID NO: 2272020 - RNA, 14 nt, Human
cugcuucucugacu

SEQ ID NO: 2272021 - RNA, 15 nt, Human
cugcuucucugacuu

SEQ ID NO: 2272022 - RNA, 16 nt, Human
cugcuucucugacuuc

SEQ ID NO: 2272023 - RNA, 17 nt, Human
cugcuucucugacuucu

SEQ ID NO: 2272024 - RNA, 19 nt, Human
cugcuucucugacuucugc

SEQ ID NO: 2272025 - RNA, 20 nt, Human
cugcuucucugacuucugcc

SEQ ID NO: 2272026 - RNA, 21 nt, Human
cugcuugaggcaacucaucuu

SEQ ID NO: 2272027 - RNA, 20 nt, Human
cugcuugaggcaacucaucu

SEQ ID NO: 2272028 - RNA, 13 nt, Human
cugcuugaggcaa

SEQ ID NO: 2272029 - RNA, 16 nt, Human
cugcuugaggaaaaca

SEQ ID NO: 2272030 - RNA, 14 nt, Human
cugcuugaggaaaa

SEQ ID NO: 2272031 - RNA, 13 nt, Human
cugcuugaggaaa

SEQ ID NO: 2272032 - RNA, 12 nt, Human
cugcuugaggaa

SEQ ID NO: 2272033 - RNA, 19 nt, Human
cugcuggguuuuccuccgg

SEQ ID NO: 2272034 - RNA, 21 nt, Human
cugcuggguggcccauccccc

SEQ ID NO: 2272035 - RNA, 18 nt, Human
cugcuggguggcccaucc

SEQ ID NO: 2272036 - RNA, 19 nt, Human
cugcuggguggcccauccc

SEQ ID NO: 2272037 - RNA, 14 nt, Human
cugcuggguggccc

SEQ ID NO: 2272038 - RNA, 15 nt, Human
cugcuggguggccca

SEQ ID NO: 2272039 - RNA, 16 nt, Human
cugcuggguggcccau

SEQ ID NO: 2272040 - RNA, 17 nt, Human
cugcuggguggcccauc

SEQ ID NO: 2272041 - RNA, 17 nt, Human
cugcuggguguggcgca

SEQ ID NO: 2272042 - RNA, 20 nt, Human
cugcuggucacagccuccuc

SEQ ID NO: 2272043 - RNA, 17 nt, Human
cugcuggucacagccuc

SEQ ID NO: 2272044 - RNA, 18 nt, Human
cugcuggucacagccucc

SEQ ID NO: 2272045 - RNA, 20 nt, Human
cugcugguaauuuguaucug

SEQ ID NO: 2272046 - RNA, 22 nt, Human
cugcugguaauuuguaucugaa

SEQ ID NO: 2272047 - RNA, 15 nt, Human
cugcuggucacagcc

SEQ ID NO: 2272048 - RNA, 16 nt, Human
cugcuggucacagccu

SEQ ID NO: 2272049 - RNA, 16 nt, Human
cugcugguccguggga

SEQ ID NO: 2272050 - RNA, 17 nt, Human
cugcugguccgugggac

SEQ ID NO: 2272051 - RNA, 14 nt, Human
cugcugggcucucc

SEQ ID NO: 2272052 - RNA, 11 nt, Human
cugcugggugg

SEQ ID NO: 2272053 - RNA, 12 nt, Human
cugcuggguggc

SEQ ID NO: 2272054 - RNA, 14 nt, Human
cugcuggguguggc

SEQ ID NO: 2272055 - RNA, 15 nt, Human
cugcuggguguggcg

SEQ ID NO: 2272056 - RNA, 13 nt, Human
cugcuggcugccu

SEQ ID NO: 2272057 - RNA, 14 nt, Human
cugcugcuggcugg

SEQ ID NO: 2272058 - RNA, 14 nt, Human
cugcuggcugccuu

SEQ ID NO: 2272059 - RNA, 15 nt, Human
cugcuggcugccuua

SEQ ID NO: 2272060 - RNA, 17 nt, Human
cugcugggacuggccag

SEQ ID NO: 2272061 - RNA, 16 nt, Human
cugcuggcuugcagug

SEQ ID NO: 2272062 - RNA, 14 nt, Human
cugcuggcuugcag

SEQ ID NO: 2272063 - RNA, 12 nt, Human
cugcuggcugcc

SEQ ID NO: 2272064 - RNA, 19 nt, Human
cugcugggacuggccaggu

SEQ ID NO: 2272065 - RNA, 15 nt, Human
cugcugcugcugcug

SEQ ID NO: 2272066 - RNA, 15 nt, Human
cugcugcuggaucac

SEQ ID NO: 2272067 - RNA, 14 nt, Human
cugcugcugcugug

SEQ ID NO: 2272068 - RNA, 15 nt, Human
cugcugcugcgcccu

SEQ ID NO: 2272069 - RNA, 16 nt, Human
cugcugcugcgcccuu

SEQ ID NO: 2272070 - RNA, 20 nt, Human
cugcugcugcgcccuuaccu

SEQ ID NO: 2272071 - RNA, 16 nt, Human
cugcugcugcugcgcc

SEQ ID NO: 2272072 - RNA, 12 nt, Human
cugcugcuggcu

SEQ ID NO: 2272073 - RNA, 13 nt, Human
cugcugcuggcug

SEQ ID NO: 2272074 - RNA, 20 nt, Human
cugcuugcuugcuuuuuaau

SEQ ID NO: 2272075 - RNA, 22 nt, Human
cugcuugaggcaacucaucuua

SEQ ID NO: 2272076 - RNA, 13 nt, Human
cugcuugauuuuu

SEQ ID NO: 2272077 - RNA, 20 nt, Human
cugcuugauuuuugccucuu

SEQ ID NO: 2272078 - RNA, 20 nt, Human
cugcuuggguggagaagcca

SEQ ID NO: 2272079 - RNA, 21 nt, Human
cugcuuggguggagaagccau

SEQ ID NO: 2272080 - RNA, 14 nt, Human
cugcuuggguggag

SEQ ID NO: 2272081 - RNA, 18 nt, Human
cugcuuggguggagaagc

SEQ ID NO: 2272082 - RNA, 19 nt, Human
cugcuugugaaaggaaaga

SEQ ID NO: 2272083 - RNA, 19 nt, Human
cugcuugggcuucauccuc

SEQ ID NO: 2272084 - RNA, 13 nt, Human
cugcuugggcuuc

SEQ ID NO: 2272085 - RNA, 15 nt, Human
cugcuugggcuucau

SEQ ID NO: 2272086 - RNA, 17 nt, Human
cugcuugggcuucaucc

SEQ ID NO: 2272087 - RNA, 18 nt, Human
cugcuugggcuucauccu

SEQ ID NO: 2272088 - RNA, 19 nt, Human
cuggaaggggcccguggga

SEQ ID NO: 2272089 - RNA, 17 nt, Human
cuggaaggggcccgugg

SEQ ID NO: 2272090 - RNA, 19 nt, Human
cuggaaggggaagggacac

SEQ ID NO: 2272091 - RNA, 16 nt, Human
cuggaagggcagagua

SEQ ID NO: 2272092 - RNA, 15 nt, Human
cuggaagggcuagaa

SEQ ID NO: 2272093 - RNA, 22 nt, Human
cuggaagggcuagaaccuguag

SEQ ID NO: 2272094 - RNA, 19 nt, Human
cuggaaguccaauguggca

SEQ ID NO: 2272095 - RNA, 16 nt, Human
cuggaaguccaaugug

SEQ ID NO: 2272096 - RNA, 18 nt, Human
cuggaagugacuuuggcu

SEQ ID NO: 2272097 - RNA, 15 nt, Human
cuggaagugacuuug

SEQ ID NO: 2272098 - RNA, 22 nt, Human
cuggaagcuguguccuugcacc

SEQ ID NO: 2272099 - RNA, 16 nt, Human
cuggaagcuguguccu

SEQ ID NO: 2272100 - RNA, 17 nt, Human
cuggaaggagugagagg

SEQ ID NO: 2272101 - RNA, 12 nt, Human
cuggaagcugug

SEQ ID NO: 2272102 - RNA, 22 nt, Human
cuggaagcuaauuugcauuaaa

SEQ ID NO: 2272103 - RNA, 22 nt, Human
cuggaagccggcggcccaagcc

SEQ ID NO: 2272104 - RNA, 19 nt, Human
cuggaagcuaauuugcauu

SEQ ID NO: 2272105 - RNA, 18 nt, Human
cuggaagcuaauuugcau

SEQ ID NO: 2272106 - RNA, 17 nt, Human
cuggaagcuaauuugca

SEQ ID NO: 2272107 - RNA, 18 nt, Human
cuggaagccggcggccca

SEQ ID NO: 2272108 - RNA, 17 nt, Human
cuggaagccagcuuucc

SEQ ID NO: 2272109 - RNA, 16 nt, Human
cuggaagccagcuuuc

SEQ ID NO: 2272110 - RNA, 15 nt, Human
cuggaagccagcuuu

SEQ ID NO: 2272111 - RNA, 22 nt, Human
cuggaagccaaaauguaggcuu

SEQ ID NO: 2272112 - RNA, 24 nt, Human
cugcuuuucugcccuggcugcugc

SEQ ID NO: 2272113 - RNA, 17 nt, Human
cugcuuuuggucugugu

SEQ ID NO: 2272114 - RNA, 22 nt, Human
cugcuuugacugagcagacugg

SEQ ID NO: 2272115 - RNA, 20 nt, Human
cugcuuugggaagccgugcu

SEQ ID NO: 2272116 - RNA, 16 nt, Human
cugcuuugggcugccc

SEQ ID NO: 2272117 - RNA, 23 nt, Human
cugcuuugacugagcagacuggu

SEQ ID NO: 2272118 - RNA, 21 nt, Human
cugcuuugcucuucaagaaau

SEQ ID NO: 2272119 - RNA, 13 nt, Human
cugcuuuggaaau

SEQ ID NO: 2272120 - RNA, 15 nt, Human
cugcuuuuggucugu

SEQ ID NO: 2272121 - RNA, 17 nt, Human
cugcuuugggcugcccu

SEQ ID NO: 2272122 - RNA, 19 nt, Human
cugcuuuucugcccuggcu

SEQ ID NO: 2272123 - RNA, 20 nt, Human
cugcuuuucugcccuggcug

SEQ ID NO: 2272124 - RNA, 21 nt, Human
cugcuuuucugcccuggcugc

SEQ ID NO: 2272125 - RNA, 22 nt, Human
cugcuuuucugcccuggcugcu

SEQ ID NO: 2272126 - RNA, 21 nt, Human
cugcuuugacugagcagacug

SEQ ID NO: 2272127 - RNA, 20 nt, Human
cugcuuugacugagcagacu

SEQ ID NO: 2272128 - RNA, 16 nt, Human
cugcuuucuguuguca

SEQ ID NO: 2272129 - RNA, 13 nt, Human
cugcuuguuuccu

SEQ ID NO: 2272130 - RNA, 22 nt, Human
cugcuuggguggagaagccauu

SEQ ID NO: 2272131 - RNA, 19 nt, Human
cugcuugugucccuccugg

SEQ ID NO: 2272132 - RNA, 14 nt, Human
cugcuuguuuccua

SEQ ID NO: 2272133 - RNA, 17 nt, Human
cugcagucuggcugagc

SEQ ID NO: 2272134 - RNA, 20 nt, Human
cugcagucuggcugagcccu

SEQ ID NO: 2272135 - RNA, 21 nt, Human
cugcagucuggcugagcccug

SEQ ID NO: 2272136 - RNA, 9 nt, Human
cugcaguga

SEQ ID NO: 2272137 - RNA, 22 nt, Human
cugcagugaaagacaagcugca

SEQ ID NO: 2272138 - RNA, 21 nt, Human
cugcagucagucaugauggca

SEQ ID NO: 2272139 - RNA, 19 nt, Human
cugcagucacuucguggga

SEQ ID NO: 2272140 - RNA, 22 nt, Human
cugcagucacuucgugggaucu

SEQ ID NO: 2272141 - RNA, 13 nt, Human
cugcagucacagc

SEQ ID NO: 2272142 - RNA, 14 nt, Human
cugcagucacagcu

SEQ ID NO: 2272143 - RNA, 22 nt, Human
cugcagucaucuugaccaagca

SEQ ID NO: 2272144 - RNA, 13 nt, Human
cugcaguccugga

SEQ ID NO: 2272145 - RNA, 21 nt, Human
cugcaguuugagacaggagac

SEQ ID NO: 2272146 - RNA, 19 nt, Human
cugcaguuugagacaggag

SEQ ID NO: 2272147 - RNA, 13 nt, Human
cugcaguugccag

SEQ ID NO: 2272148 - RNA, 16 nt, Human
cugcaguugccaguca

SEQ ID NO: 2272149 - RNA, 19 nt, Human
cugcaggucccuaauaaag

SEQ ID NO: 2272150 - RNA, 20 nt, Human
cugcaggucccuaauaaagc

SEQ ID NO: 2272151 - RNA, 21 nt, Human
cugcaggucccuaauaaagcu

SEQ ID NO: 2272152 - RNA, 22 nt, Human
cugcaggucccuaauaaagcug

SEQ ID NO: 2272153 - RNA, 23 nt, Human
cugcaggucccuaauaaagcugu

SEQ ID NO: 2272154 - RNA, 22 nt, Human
cugcaggguggugcugggacug

SEQ ID NO: 2272155 - RNA, 23 nt, Human
cugcaggguggugcugggacuga

SEQ ID NO: 2272156 - RNA, 14 nt, Human
cugcaggugcugcu

SEQ ID NO: 2272157 - RNA, 17 nt, Human
cugcaggugcugcugcg

SEQ ID NO: 2272158 - RNA, 19 nt, Human
cugcaggugcugcugcgug

SEQ ID NO: 2272159 - RNA, 20 nt, Human
cugcagguucuucuuccuga

SEQ ID NO: 2272160 - RNA, 21 nt, Human
cugcagguucuucuuccugaa

SEQ ID NO: 2272161 - RNA, 17 nt, Human
cugcaguaaaucuuuua

SEQ ID NO: 2272162 - RNA, 14 nt, Human
cugcaguaaaucuu

SEQ ID NO: 2272163 - RNA, 15 nt, Human
cugcagguugggcca

SEQ ID NO: 2272164 - RNA, 20 nt, Human
cugcagguugggccauacug

SEQ ID NO: 2272165 - RNA, 16 nt, Human
cugcaguaugaaaaua

SEQ ID NO: 2272166 - RNA, 17 nt, Human
cugcaguaugaaaauaa

SEQ ID NO: 2272167 - RNA, 15 nt, Human
cugcaguagucucug

SEQ ID NO: 2272168 - RNA, 16 nt, Human
cugcaguagucucugu

SEQ ID NO: 2272169 - RNA, 20 nt, Human
cugcaguagucucugugcuu

SEQ ID NO: 2272170 - RNA, 23 nt, Human
cugcaguagucucugugcuuuga

SEQ ID NO: 2272171 - RNA, 23 nt, Human
cugcagccagcccagcccagcug

SEQ ID NO: 2272172 - RNA, 15 nt, Human
cugcaggggcucugg

SEQ ID NO: 2272173 - RNA, 16 nt, Human
cugcaggggcucugga

SEQ ID NO: 2272174 - RNA, 17 nt, Human
cugcaggggcucuggag

SEQ ID NO: 2272175 - RNA, 22 nt, Human
cugcagccagcccagcccagcu

SEQ ID NO: 2272176 - RNA, 18 nt, Human
cugcagccagcccagccc

SEQ ID NO: 2272177 - RNA, 17 nt, Human
cugcagccagcccagcc

SEQ ID NO: 2272178 - RNA, 16 nt, Human
cugcagccagcccagc

SEQ ID NO: 2272179 - RNA, 15 nt, Human
cugcagccagcccag

SEQ ID NO: 2272180 - RNA, 14 nt, Human
cugcagccagccca

SEQ ID NO: 2272181 - RNA, 12 nt, Human
cugcagccagcc

SEQ ID NO: 2272182 - RNA, 22 nt, Human
cugcagcauguugcugaggagu

SEQ ID NO: 2272183 - RNA, 19 nt, Human
cugcagcaugaccugugac

SEQ ID NO: 2272184 - RNA, 18 nt, Human
cugcagcauguugcugag

SEQ ID NO: 2272185 - RNA, 20 nt, Human
cugcagcauguugcugagga

SEQ ID NO: 2272186 - RNA, 21 nt, Human
cugcagcauguugcugaggag

SEQ ID NO: 2272187 - RNA, 23 nt, Human
cugcagggggugugucugcucag

SEQ ID NO: 2272188 - RNA, 21 nt, Human
cugcaggggcucuggagagaa

SEQ ID NO: 2272189 - RNA, 16 nt, Human
cugcaggguggugcug

SEQ ID NO: 2272190 - RNA, 18 nt, Human
cugcaggguggugcuggg

SEQ ID NO: 2272191 - RNA, 19 nt, Human
cugcaggguggugcuggga

SEQ ID NO: 2272192 - RNA, 20 nt, Human
cugcaggguggugcugggac

SEQ ID NO: 2272193 - RNA, 21 nt, Human
cugcaggguggugcugggacu

SEQ ID NO: 2272194 - RNA, 20 nt, Human
cugcagggggugugucugcu

SEQ ID NO: 2272195 - RNA, 17 nt, Human
cugcagggggugugucu

SEQ ID NO: 2272196 - RNA, 18 nt, Human
cugcaggggcucuggaga

SEQ ID NO: 2272197 - RNA, 19 nt, Human
cugcaggggcucuggagag

SEQ ID NO: 2272198 - RNA, 22 nt, Human
cugcaggggcucuggagagaaa

SEQ ID NO: 2272199 - RNA, 22 nt, Human
cugcagcaugaccugugaccag

SEQ ID NO: 2272200 - RNA, 17 nt, Human
cugcagcaugaccugug

SEQ ID NO: 2272201 - RNA, 11 nt, Human
cugcagcauga

SEQ ID NO: 2272202 - RNA, 18 nt, Human
cugcagcagaggcacugg

SEQ ID NO: 2272203 - RNA, 19 nt, Human
cugcagcagcgguggccuc

SEQ ID NO: 2272204 - RNA, 20 nt, Human
cugcagcagcgguggccucu

SEQ ID NO: 2272205 - RNA, 13 nt, Human
cugcagcagaggc

SEQ ID NO: 2272206 - RNA, 14 nt, Human
cugcagcagaggca

SEQ ID NO: 2272207 - RNA, 23 nt, Human
cugcagaggggaaaccaguguag

SEQ ID NO: 2272208 - RNA, 19 nt, Human
cugcagauuugggcuggaa

SEQ ID NO: 2272209 - RNA, 20 nt, Human
cugcagauuugggcuggaac

SEQ ID NO: 2272210 - RNA, 23 nt, Human
cugcagauuugggcuggaacaga

SEQ ID NO: 2272211 - RNA, 17 nt, Human
cugcagcaauaaagcag

SEQ ID NO: 2272212 - RNA, 11 nt, Human
cugcagguccc

SEQ ID NO: 2272213 - RNA, 12 nt, Human
cugcaggucccu

SEQ ID NO: 2272214 - RNA, 13 nt, Human
cugcaggucccua

SEQ ID NO: 2272215 - RNA, 14 nt, Human
cugcaggucccuaa

SEQ ID NO: 2272216 - RNA, 15 nt, Human
cugcaggucccuaau

SEQ ID NO: 2272217 - RNA, 16 nt, Human
cugcaggucccuaaua

SEQ ID NO: 2272218 - RNA, 17 nt, Human
cugcaggucccuaauaa

SEQ ID NO: 2272219 - RNA, 18 nt, Human
cugcaggucccuaauaaa

SEQ ID NO: 2272220 - RNA, 15 nt, Human
cugcagacucacugu

SEQ ID NO: 2272221 - RNA, 20 nt, Human
cugcagaccuguccuccugg

SEQ ID NO: 2272222 - RNA, 22 nt, Human
cugcagaccuguccuccuggug

SEQ ID NO: 2272223 - RNA, 11 nt, Human
cugcagaccug

SEQ ID NO: 2272224 - RNA, 14 nt, Human
cugcagaccugucc

SEQ ID NO: 2272225 - RNA, 15 nt, Human
cugcagaccuguccu

SEQ ID NO: 2272226 - RNA, 16 nt, Human
cugcagaccuguccuc

SEQ ID NO: 2272227 - RNA, 18 nt, Human
cugcagaccuguccuccu

SEQ ID NO: 2272228 - RNA, 10 nt, Human
cugcagaggg

SEQ ID NO: 2272229 - RNA, 23 nt, Human
cugcagagcugcgggcugggugu

SEQ ID NO: 2272230 - RNA, 11 nt, Human
cugcagaggcc

SEQ ID NO: 2272231 - RNA, 13 nt, Human
cugcagaggccag

SEQ ID NO: 2272232 - RNA, 21 nt, Human
cugcagaggggaaaccagugu

SEQ ID NO: 2272233 - RNA, 21 nt, Human
cugcagaggccagaggccccc

SEQ ID NO: 2272234 - RNA, 17 nt, Human
cugcagaggccagaggc

SEQ ID NO: 2272235 - RNA, 20 nt, Human
cugcagaggccagaggcccc

SEQ ID NO: 2272236 - RNA, 13 nt, Human
cugcagagggcac

SEQ ID NO: 2272237 - RNA, 16 nt, Human
cugcagcaauaaagca

SEQ ID NO: 2272238 - RNA, 15 nt, Human
cugcagcaauaaagc

SEQ ID NO: 2272239 - RNA, 21 nt, Human
cugcacuggaguccagucucu

SEQ ID NO: 2272240 - RNA, 20 nt, Human
cugcacuccggccugaugac

SEQ ID NO: 2272241 - RNA, 18 nt, Human
cugcacuccccugcuggg

SEQ ID NO: 2272242 - RNA, 21 nt, Human
cugcacuccccugcugggugu

SEQ ID NO: 2272243 - RNA, 12 nt, Human
cugcacugucaa

SEQ ID NO: 2272244 - RNA, 16 nt, Human
cugcacuggggagccc

SEQ ID NO: 2272245 - RNA, 22 nt, Human
cugcacuggggagcccgucuca

SEQ ID NO: 2272246 - RNA, 22 nt, Human
cugcagaauuuggguucugccu

SEQ ID NO: 2272247 - RNA, 15 nt, Human
cugcagaccacgccc

SEQ ID NO: 2272248 - RNA, 19 nt, Human
cugcagaaggccaagaauc

SEQ ID NO: 2272249 - RNA, 19 nt, Human
cugcagaaggaaaaaugug

SEQ ID NO: 2272250 - RNA, 20 nt, Human
cugcagaaggaaaaaugugu

SEQ ID NO: 2272251 - RNA, 21 nt, Human
cugcagaaggaaaaaugugua

SEQ ID NO: 2272252 - RNA, 22 nt, Human
cugcagaaggaaaaauguguaa

SEQ ID NO: 2272253 - RNA, 13 nt, Human
cugcagaaggcca

SEQ ID NO: 2272254 - RNA, 14 nt, Human
cugcagaaggccaa

SEQ ID NO: 2272255 - RNA, 15 nt, Human
cugcagaaggccaag

SEQ ID NO: 2272256 - RNA, 16 nt, Human
cugcagaaggccaaga

SEQ ID NO: 2272257 - RNA, 11 nt, Human
cugcacugucc

SEQ ID NO: 2272258 - RNA, 13 nt, Human
cugcacuguccug

SEQ ID NO: 2272259 - RNA, 14 nt, Human
cugcacuguccugc

SEQ ID NO: 2272260 - RNA, 15 nt, Human
cugcacuguccugcu

SEQ ID NO: 2272261 - RNA, 16 nt, Human
cugcacuguccugcuc

SEQ ID NO: 2272262 - RNA, 17 nt, Human
cugcacuguccugcucc

SEQ ID NO: 2272263 - RNA, 14 nt, Human
cugcagaaggaaaa

SEQ ID NO: 2272264 - RNA, 15 nt, Human
cugcagaaggaaaaa

SEQ ID NO: 2272265 - RNA, 23 nt, Human
cugcacuguccugcuccacagug

SEQ ID NO: 2272266 - RNA, 18 nt, Human
cugcacuguccugcucca

SEQ ID NO: 2272267 - RNA, 19 nt, Human
cugcacuguccugcuccac

SEQ ID NO: 2272268 - RNA, 20 nt, Human
cugcacuguccugcuccaca

SEQ ID NO: 2272269 - RNA, 21 nt, Human
cugcacuguccugcuccacag

SEQ ID NO: 2272270 - RNA, 20 nt, Human
cugcacuccagccuggguga

SEQ ID NO: 2272271 - RNA, 20 nt, Human
cugcacuccagucuggguga

SEQ ID NO: 2272272 - RNA, 23 nt, Human
cugcacccuggggccuggaccug

SEQ ID NO: 2272273 - RNA, 18 nt, Human
cugcaccgggccacagag

SEQ ID NO: 2272274 - RNA, 14 nt, Human
cugcacuccccugc

SEQ ID NO: 2272275 - RNA, 13 nt, Human
cugcacuccccug

SEQ ID NO: 2272276 - RNA, 19 nt, Human
cugcacuccccugcugggu

SEQ ID NO: 2272277 - RNA, 20 nt, Human
cugcacuccccugcugggug

SEQ ID NO: 2272278 - RNA, 14 nt, Human
cugcaccgggccac

SEQ ID NO: 2272279 - RNA, 15 nt, Human
cugcaccgggccaca

SEQ ID NO: 2272280 - RNA, 15 nt, Human
cugcaccggcuggcc

SEQ ID NO: 2272281 - RNA, 16 nt, Human
cugcaccggcuggccu

SEQ ID NO: 2272282 - RNA, 22 nt, Human
cugaggcccuucucuccagccc

SEQ ID NO: 2272283 - RNA, 23 nt, Human
cugaggcccuucucuccagcccc

SEQ ID NO: 2272284 - RNA, 21 nt, Human
cugaggccccuucuagguggc

SEQ ID NO: 2272285 - RNA, 16 nt, Human
cugcacccuggggccu

SEQ ID NO: 2272286 - RNA, 21 nt, Human
cugcacccuggggccuggacc

SEQ ID NO: 2272287 - RNA, 22 nt, Human
cugcacccuggggccuggaccu

SEQ ID NO: 2272288 - RNA, 14 nt, Human
cugcaccggcuggc

SEQ ID NO: 2272289 - RNA, 19 nt, Human
cugccacccuaccuguuca

SEQ ID NO: 2272290 - RNA, 11 nt, Human
cugccaccucc

SEQ ID NO: 2272291 - RNA, 21 nt, Human
cugccacccuggggagaaagu

SEQ ID NO: 2272292 - RNA, 14 nt, Human
cugccacccugggg

SEQ ID NO: 2272293 - RNA, 12 nt, Human
cugccacccugg

SEQ ID NO: 2272294 - RNA, 11 nt, Human
cugccagagaa

SEQ ID NO: 2272295 - RNA, 23 nt, Human
cugccagaagauccccucaggac

SEQ ID NO: 2272296 - RNA, 22 nt, Human
cugccagacggcacccacccag

SEQ ID NO: 2272297 - RNA, 19 nt, Human
cugccagacccccuggaga

SEQ ID NO: 2272298 - RNA, 17 nt, Human
cugccagacccccugga

SEQ ID NO: 2272299 - RNA, 17 nt, Human
cugccaccucccugacc

SEQ ID NO: 2272300 - RNA, 18 nt, Human
cugccaccucccugaccc

SEQ ID NO: 2272301 - RNA, 21 nt, Human
cugccagaagauccccucagg

SEQ ID NO: 2272302 - RNA, 22 nt, Human
cugccagaagauccccucagga

SEQ ID NO: 2272303 - RNA, 22 nt, Human
cugccaccuccccuauccaccc

SEQ ID NO: 2272304 - RNA, 14 nt, Human
cugccaccuccccu

SEQ ID NO: 2272305 - RNA, 12 nt, Human
cugccaccuccc

SEQ ID NO: 2272306 - RNA, 13 nt, Human
cugccaccucccc

SEQ ID NO: 2272307 - RNA, 13 nt, Human
cugccaccucccu

SEQ ID NO: 2272308 - RNA, 15 nt, Human
cugccaccucccuga

SEQ ID NO: 2272309 - RNA, 16 nt, Human
cugccaccucccugac

SEQ ID NO: 2272310 - RNA, 16 nt, Human
cugcauaccaaccugg

SEQ ID NO: 2272311 - RNA, 14 nt, Human
cugcauacuuuuua

SEQ ID NO: 2272312 - RNA, 20 nt, Human
cugcauacuuuuuaaaugua

SEQ ID NO: 2272313 - RNA, 15 nt, Human
cugcauaugaaagga

SEQ ID NO: 2272314 - RNA, 15 nt, Human
cugcauaccaaccug

SEQ ID NO: 2272315 - RNA, 14 nt, Human
cugcauacaaucug

SEQ ID NO: 2272316 - RNA, 21 nt, Human
cugcauaguauuccauugugu

SEQ ID NO: 2272317 - RNA, 21 nt, Human
cugcauauguugaauacuuuu

SEQ ID NO: 2272318 - RNA, 14 nt, Human
cugcauauguugaa

SEQ ID NO: 2272319 - RNA, 20 nt, Human
cugcaucaagaugugacaug

SEQ ID NO: 2272320 - RNA, 20 nt, Human
cugccacccaccucccugcc

SEQ ID NO: 2272321 - RNA, 23 nt, Human
cugccacccaccucccugccucc

SEQ ID NO: 2272322 - RNA, 22 nt, Human
cugccacccaccucccugccuc

SEQ ID NO: 2272323 - RNA, 20 nt, Human
cugcaucagcugcugaaaca

SEQ ID NO: 2272324 - RNA, 19 nt, Human
cugccacccaccucccugc

SEQ ID NO: 2272325 - RNA, 15 nt, Human
cugccacccuaccug

SEQ ID NO: 2272326 - RNA, 21 nt, Human
cugccauggaggcacacagcu

SEQ ID NO: 2272327 - RNA, 23 nt, Human
cugccauggaggcacacagcugc

SEQ ID NO: 2272328 - RNA, 21 nt, Human
cugccauggcgugucccucuc

SEQ ID NO: 2272329 - RNA, 14 nt, Human
cugccauggcgugu

SEQ ID NO: 2272330 - RNA, 22 nt, Human
cugccauggcgugucccucucg

SEQ ID NO: 2272331 - RNA, 20 nt, Human
cugccauggaggcacacagc

SEQ ID NO: 2272332 - RNA, 15 nt, Human
cugccauccucccaa

SEQ ID NO: 2272333 - RNA, 21 nt, Human
cugccauccagguucagcuug

SEQ ID NO: 2272334 - RNA, 22 nt, Human
cugccaggaagccagcaggcuc

SEQ ID NO: 2272335 - RNA, 17 nt, Human
cugccagcugcacugau

SEQ ID NO: 2272336 - RNA, 16 nt, Human
cugccagcugcacuga

SEQ ID NO: 2272337 - RNA, 13 nt, Human
cugccagagaagc

SEQ ID NO: 2272338 - RNA, 13 nt, Human
cugccagaugcug

SEQ ID NO: 2272339 - RNA, 20 nt, Human
cugccagagaagcaucggag

SEQ ID NO: 2272340 - RNA, 14 nt, Human
cugccagaugcuga

SEQ ID NO: 2272341 - RNA, 16 nt, Human
cugccagaugcugaug

SEQ ID NO: 2272342 - RNA, 17 nt, Human
cugccagaugcugaugu

SEQ ID NO: 2272343 - RNA, 18 nt, Human
cugccagaugcugauguu

SEQ ID NO: 2272344 - RNA, 15 nt, Human
cugccagcaacgcag

SEQ ID NO: 2272345 - RNA, 23 nt, Human
cugccagaugcugauguucagug

SEQ ID NO: 2272346 - RNA, 17 nt, Human
cugccagcucuguauca

SEQ ID NO: 2272347 - RNA, 21 nt, Human
cugccagaugcugauguucag

SEQ ID NO: 2272348 - RNA, 22 nt, Human
cugccagaugcugauguucagu

SEQ ID NO: 2272349 - RNA, 11 nt, Human
cugccagcugc

SEQ ID NO: 2272350 - RNA, 13 nt, Human
cugccagcugcac

SEQ ID NO: 2272351 - RNA, 12 nt, Human
cugccagcugca

SEQ ID NO: 2272352 - RNA, 13 nt, Human
cugccaggaagcc

SEQ ID NO: 2272353 - RNA, 14 nt, Human
cugccaggaagcca

SEQ ID NO: 2272354 - RNA, 20 nt, Human
cugccaggaagccagcaggc

SEQ ID NO: 2272355 - RNA, 21 nt, Human
cugccaggaagccagcaggcu

SEQ ID NO: 2272356 - RNA, 17 nt, Human
cugcccgagcuggugca

SEQ ID NO: 2272357 - RNA, 13 nt, Human
cugcccgcuccca

SEQ ID NO: 2272358 - RNA, 14 nt, Human
cugcccgcucccag

SEQ ID NO: 2272359 - RNA, 15 nt, Human
cugcccgcucccagu

SEQ ID NO: 2272360 - RNA, 16 nt, Human
cugcccgagcuggugc

SEQ ID NO: 2272361 - RNA, 15 nt, Human
cugcccgagcuggug

SEQ ID NO: 2272362 - RNA, 14 nt, Human
cugcccgagcuggu

SEQ ID NO: 2272363 - RNA, 18 nt, Human
cugccccuguucucuucc

SEQ ID NO: 2272364 - RNA, 21 nt, Human
cugcccgagcuggugcauuac

SEQ ID NO: 2272365 - RNA, 20 nt, Human
cugcccggcaggguccuaga

SEQ ID NO: 2272366 - RNA, 13 nt, Human
cugcccggcaggg

SEQ ID NO: 2272367 - RNA, 16 nt, Human
cugccccuggcucuga

SEQ ID NO: 2272368 - RNA, 13 nt, Human
cugccccuguucu

SEQ ID NO: 2272369 - RNA, 14 nt, Human
cugccccagcucug

SEQ ID NO: 2272370 - RNA, 13 nt, Human
cugcccgagcugg

SEQ ID NO: 2272371 - RNA, 19 nt, Human
cugccccuggcagccccug

SEQ ID NO: 2272372 - RNA, 15 nt, Human
cugccccagcucugg

SEQ ID NO: 2272373 - RNA, 13 nt, Human
cugccccagcucu

SEQ ID NO: 2272374 - RNA, 18 nt, Human
cugccccagcccaagucc

SEQ ID NO: 2272375 - RNA, 19 nt, Human
cugccccagcccaagucca

SEQ ID NO: 2272376 - RNA, 18 nt, Human
cugccccuggcagccccu

SEQ ID NO: 2272377 - RNA, 18 nt, Human
cugcccucguggccagcc

SEQ ID NO: 2272378 - RNA, 19 nt, Human
cugcccucguggccagccc

SEQ ID NO: 2272379 - RNA, 20 nt, Human
cugcccucguggccagcccg

SEQ ID NO: 2272380 - RNA, 23 nt, Human
cugcccucguggccagcccggcu

SEQ ID NO: 2272381 - RNA, 21 nt, Human
cugcccucguggccagcccgg

SEQ ID NO: 2272382 - RNA, 22 nt, Human
cugcccucguggccagcccggc

SEQ ID NO: 2272383 - RNA, 21 nt, Human
cugcccgucuucagccuagcc

SEQ ID NO: 2272384 - RNA, 18 nt, Human
cugcccuacagaggucuc

SEQ ID NO: 2272385 - RNA, 22 nt, Human
cugcccuaaugcgcaggcuggc

SEQ ID NO: 2272386 - RNA, 18 nt, Human
cugcccgucuucagccua

SEQ ID NO: 2272387 - RNA, 17 nt, Human
cugcccgucuucagccu

SEQ ID NO: 2272388 - RNA, 16 nt, Human
cugcccgucuucagcc

SEQ ID NO: 2272389 - RNA, 15 nt, Human
cugcccgucuucagc

SEQ ID NO: 2272390 - RNA, 21 nt, Human
cugcccuaaugcgcaggcugg

SEQ ID NO: 2272391 - RNA, 20 nt, Human
cugcccuaaugcgcaggcug

SEQ ID NO: 2272392 - RNA, 22 nt, Human
cugcccggggcagcugccagag

SEQ ID NO: 2272393 - RNA, 21 nt, Human
cugcccggggcagcugccaga

SEQ ID NO: 2272394 - RNA, 20 nt, Human
cugcccggggcagcugccag

SEQ ID NO: 2272395 - RNA, 19 nt, Human
cugcccggggcagcugcca

SEQ ID NO: 2272396 - RNA, 16 nt, Human
cugcccggggcagcug

SEQ ID NO: 2272397 - RNA, 15 nt, Human
cugcccggggcagcu

SEQ ID NO: 2272398 - RNA, 13 nt, Human
cugcccggggcag

SEQ ID NO: 2272399 - RNA, 21 nt, Human
cugcccgggcgcggccagccc

SEQ ID NO: 2272400 - RNA, 16 nt, Human
cugcccgcucccagug

SEQ ID NO: 2272401 - RNA, 17 nt, Human
cugcccgcucccagugu

SEQ ID NO: 2272402 - RNA, 19 nt, Human
cugcccgcucccagugucu

SEQ ID NO: 2272403 - RNA, 19 nt, Human
cugcccgggcgcggccagc

SEQ ID NO: 2272404 - RNA, 23 nt, Human
cugcccggggcagcugccagaga

SEQ ID NO: 2272405 - RNA, 19 nt, Human
cugcccguaaacacgccug

SEQ ID NO: 2272406 - RNA, 18 nt, Human
cugcccguaaacacgccu

SEQ ID NO: 2272407 - RNA, 21 nt, Human
cugcccguaaacacgccugca

SEQ ID NO: 2272408 - RNA, 18 nt, Human
cugcccgucucucuccca

SEQ ID NO: 2272409 - RNA, 19 nt, Human
cugcccgucucucucccau

SEQ ID NO: 2272410 - RNA, 21 nt, Human
cugcccgucucucucccaugg

SEQ ID NO: 2272411 - RNA, 22 nt, Human
cugcccgucucucucccaugga

SEQ ID NO: 2272412 - RNA, 23 nt, Human
cugcccgucucucucccauggag

SEQ ID NO: 2272413 - RNA, 24 nt, Human
cugcccgucucucucccauggagc

SEQ ID NO: 2272414 - RNA, 17 nt, Human
cugcccacauuggaccc

SEQ ID NO: 2272415 - RNA, 21 nt, Human
cugcccaauuuugcagggagc

SEQ ID NO: 2272416 - RNA, 21 nt, Human
cugcccaauaugcaguucugc

SEQ ID NO: 2272417 - RNA, 16 nt, Human
cugcccaauuggagga

SEQ ID NO: 2272418 - RNA, 16 nt, Human
cugcccacccccucaa

SEQ ID NO: 2272419 - RNA, 19 nt, Human
cugcccacccccucaagcc

SEQ ID NO: 2272420 - RNA, 12 nt, Human
cugcccaccccc

SEQ ID NO: 2272421 - RNA, 13 nt, Human
cugcccacccccu

SEQ ID NO: 2272422 - RNA, 14 nt, Human
cugcccacccccuc

SEQ ID NO: 2272423 - RNA, 15 nt, Human
cugcccacccccuca

SEQ ID NO: 2272424 - RNA, 15 nt, Human
cugccauuucugaga

SEQ ID NO: 2272425 - RNA, 17 nt, Human
cugccauucacuucaua

SEQ ID NO: 2272426 - RNA, 19 nt, Human
cugcccaaccugcucuccu

SEQ ID NO: 2272427 - RNA, 14 nt, Human
cugcccaggccccu

SEQ ID NO: 2272428 - RNA, 15 nt, Human
cugcccaggccccug

SEQ ID NO: 2272429 - RNA, 12 nt, Human
cugcccaccugg

SEQ ID NO: 2272430 - RNA, 20 nt, Human
cugccccaacuccuggaagc

SEQ ID NO: 2272431 - RNA, 18 nt, Human
cugccccaacuccuggaa

SEQ ID NO: 2272432 - RNA, 17 nt, Human
cugccccaacuccugga

SEQ ID NO: 2272433 - RNA, 16 nt, Human
cugccccaacuccugg

SEQ ID NO: 2272434 - RNA, 21 nt, Human
cugccccaacuccuggaagcu

SEQ ID NO: 2272435 - RNA, 14 nt, Human
cugccccaacuccu

SEQ ID NO: 2272436 - RNA, 12 nt, Human
cugcccacccgu

SEQ ID NO: 2272437 - RNA, 17 nt, Human
cugcccaggccugccug

SEQ ID NO: 2272438 - RNA, 12 nt, Human
cugccccaacuc

SEQ ID NO: 2272439 - RNA, 13 nt, Human
cugccccaacucu

SEQ ID NO: 2272440 - RNA, 23 nt, Human
cugccccaccccuccccauuagc

SEQ ID NO: 2272441 - RNA, 13 nt, Human
cugccccagaggc

SEQ ID NO: 2272442 - RNA, 13 nt, Human
cugccccagccag

SEQ ID NO: 2272443 - RNA, 14 nt, Human
cugccccagccaga

SEQ ID NO: 2272444 - RNA, 13 nt, Human
cugccccagccca

SEQ ID NO: 2272445 - RNA, 16 nt, Human
cugccccagcccaagu

SEQ ID NO: 2272446 - RNA, 17 nt, Human
cugccccagcccaaguc

SEQ ID NO: 2272447 - RNA, 16 nt, Human
cugcccaggccccugc

SEQ ID NO: 2272448 - RNA, 18 nt, Human
cugcccaggccccugcca

SEQ ID NO: 2272449 - RNA, 19 nt, Human
cugcccaggccccugccac

SEQ ID NO: 2272450 - RNA, 20 nt, Human
cugcccaggccccugccacc

SEQ ID NO: 2272451 - RNA, 16 nt, Human
cuggcauuacagcugg

SEQ ID NO: 2272452 - RNA, 15 nt, Human
cuggcauuacagcug

SEQ ID NO: 2272453 - RNA, 24 nt, Human
cuggcaugggaaugaaugucagug

SEQ ID NO: 2272454 - RNA, 18 nt, Human
cuggcauuagaauuauuu

SEQ ID NO: 2272455 - RNA, 19 nt, Human
cuggcauuagaauuauuua

SEQ ID NO: 2272456 - RNA, 13 nt, Human
cuggccaccaccc

SEQ ID NO: 2272457 - RNA, 14 nt, Human
cuggccaccacccc

SEQ ID NO: 2272458 - RNA, 16 nt, Human
cuggccaccacccccc

SEQ ID NO: 2272459 - RNA, 19 nt, Human
cuggccaccaccccccacu

SEQ ID NO: 2272460 - RNA, 20 nt, Human
cuggccaccaccccccacuc

SEQ ID NO: 2272461 - RNA, 21 nt, Human
cuggccaccaccccccacucu

SEQ ID NO: 2272462 - RNA, 18 nt, Human
cuggccaccugagguggg

SEQ ID NO: 2272463 - RNA, 20 nt, Human
cuggccaccugaggugggcc

SEQ ID NO: 2272464 - RNA, 21 nt, Human
cuggccaccugaggugggccc

SEQ ID NO: 2272465 - RNA, 22 nt, Human
cuggccaccugaggugggccca

SEQ ID NO: 2272466 - RNA, 13 nt, Human
cuggccagcccca

SEQ ID NO: 2272467 - RNA, 14 nt, Human
cuggccagccccac

SEQ ID NO: 2272468 - RNA, 15 nt, Human
cuggccagccccaca

SEQ ID NO: 2272469 - RNA, 16 nt, Human
cuggccagccccacag

SEQ ID NO: 2272470 - RNA, 13 nt, Human
cuggccaccaggc

SEQ ID NO: 2272471 - RNA, 15 nt, Human
cuggccaccaggcug

SEQ ID NO: 2272472 - RNA, 16 nt, Human
cuggccaccaggcugg

SEQ ID NO: 2272473 - RNA, 17 nt, Human
cuggccaccaggcuggc

SEQ ID NO: 2272474 - RNA, 18 nt, Human
cuggccaccaggcuggcg

SEQ ID NO: 2272475 - RNA, 19 nt, Human
cuggccaccaggcuggcgc

SEQ ID NO: 2272476 - RNA, 20 nt, Human
cuggccaccaggcuggcgca

SEQ ID NO: 2272477 - RNA, 21 nt, Human
cuggccaccaggcuggcgcag

SEQ ID NO: 2272478 - RNA, 22 nt, Human
cuggccaccaggcuggcgcagc

SEQ ID NO: 2272479 - RNA, 23 nt, Human
cuggccaccaggcuggcgcagcc

SEQ ID NO: 2272480 - RNA, 16 nt, Human
cuggccaccucucucc

SEQ ID NO: 2272481 - RNA, 18 nt, Human
cuggccaccucucuccuu

SEQ ID NO: 2272482 - RNA, 11 nt, Human
cuggccaccug

SEQ ID NO: 2272483 - RNA, 15 nt, Human
cuggccaccugaggu

SEQ ID NO: 2272484 - RNA, 16 nt, Human
cuggccaccugaggug

SEQ ID NO: 2272485 - RNA, 17 nt, Human
cuggccaccugaggugg

SEQ ID NO: 2272486 - RNA, 21 nt, Human
cuggcacgguggcucaggccu

SEQ ID NO: 2272487 - RNA, 17 nt, Human
cuggcaccgccuucucu

SEQ ID NO: 2272488 - RNA, 20 nt, Human
cuggcaauaguguguucuga

SEQ ID NO: 2272489 - RNA, 22 nt, Human
cuggcacuauaauguaagcucu

SEQ ID NO: 2272490 - RNA, 16 nt, Human
cuggcacuauaaugua

SEQ ID NO: 2272491 - RNA, 15 nt, Human
cuggcacuauaaugu

SEQ ID NO: 2272492 - RNA, 16 nt, Human
cuggcaugggaaugaa

SEQ ID NO: 2272493 - RNA, 18 nt, Human
cuggcaugggaaugaaug

SEQ ID NO: 2272494 - RNA, 19 nt, Human
cuggcaugggaaugaaugu

SEQ ID NO: 2272495 - RNA, 22 nt, Human
cuggcaugggaaugaaugucag

SEQ ID NO: 2272496 - RNA, 14 nt, Human
cuggcaagaaugug

SEQ ID NO: 2272497 - RNA, 17 nt, Human
cuggcaacaucuuuauc

SEQ ID NO: 2272498 - RNA, 19 nt, Human
cuggcaagcuagaaccugg

SEQ ID NO: 2272499 - RNA, 22 nt, Human
cuggcaagcuagaaccuggagg

SEQ ID NO: 2272500 - RNA, 16 nt, Human
cuggcaaggacacaga

SEQ ID NO: 2272501 - RNA, 24 nt, Human
cuggaaucuggagaccagggagcc

SEQ ID NO: 2272502 - RNA, 19 nt, Human
cuggaaucuggagagcuag

SEQ ID NO: 2272503 - RNA, 20 nt, Human
cuggaaucuggagagcuaga

SEQ ID NO: 2272504 - RNA, 19 nt, Human
cuggcaaagggagcagaac

SEQ ID NO: 2272505 - RNA, 14 nt, Human
cuggcaacaucuuu

SEQ ID NO: 2272506 - RNA, 22 nt, Human
cuggcaaagggagcagaacuga

SEQ ID NO: 2272507 - RNA, 18 nt, Human
cuggcaaagguggcucuc

SEQ ID NO: 2272508 - RNA, 21 nt, Human
cuggcaaagguggcucuccag

SEQ ID NO: 2272509 - RNA, 22 nt, Human
cuggcaaagguggcucuccagu

SEQ ID NO: 2272510 - RNA, 23 nt, Human
cuggaaucaagaugucagacugg

SEQ ID NO: 2272511 - RNA, 23 nt, Human
cuggaaucaggaauauuuuccaa

SEQ ID NO: 2272512 - RNA, 18 nt, Human
cuggaauacaugaaauau

SEQ ID NO: 2272513 - RNA, 20 nt, Human
cuggaagguggggacaggga

SEQ ID NO: 2272514 - RNA, 17 nt, Human
cuggaaucuggagacca

SEQ ID NO: 2272515 - RNA, 19 nt, Human
cuggaaucuggagaccagg

SEQ ID NO: 2272516 - RNA, 18 nt, Human
cuggaaucuggagaccag

SEQ ID NO: 2272517 - RNA, 20 nt, Human
cuggaagugcuaauuuugaa

SEQ ID NO: 2272518 - RNA, 18 nt, Human
cuggaauauauaaccagu

SEQ ID NO: 2272519 - RNA, 16 nt, Human
cuggcacccggccccu

SEQ ID NO: 2272520 - RNA, 17 nt, Human
cuggcacccggccccug

SEQ ID NO: 2272521 - RNA, 18 nt, Human
cuggcacccggccccugc

SEQ ID NO: 2272522 - RNA, 22 nt, Human
cuggcacccggccccugcuggu

SEQ ID NO: 2272523 - RNA, 19 nt, Human
cuggcaauaguguguucug

SEQ ID NO: 2272524 - RNA, 15 nt, Human
cuggcaauagugugu

SEQ ID NO: 2272525 - RNA, 15 nt, Human
cuggcacagggcagu

SEQ ID NO: 2272526 - RNA, 16 nt, Human
cuggcacagggcagug

SEQ ID NO: 2272527 - RNA, 17 nt, Human
cuggcaaggacacagau

SEQ ID NO: 2272528 - RNA, 18 nt, Human
cuggcaaggacacagaug

SEQ ID NO: 2272529 - RNA, 14 nt, Human
cuggccucccacag

SEQ ID NO: 2272530 - RNA, 12 nt, Human
cuggccucccac

SEQ ID NO: 2272531 - RNA, 13 nt, Human
cuggccucccaca

SEQ ID NO: 2272532 - RNA, 16 nt, Human
cuggccucccaaauga

SEQ ID NO: 2272533 - RNA, 12 nt, Human
cuggccucugca

SEQ ID NO: 2272534 - RNA, 22 nt, Human
cuggccucaggugggccgcagg

SEQ ID NO: 2272535 - RNA, 14 nt, Human
cuggccucccaaau

SEQ ID NO: 2272536 - RNA, 13 nt, Human
cuggccuccacag

SEQ ID NO: 2272537 - RNA, 16 nt, Human
cuggccccaugucucu

SEQ ID NO: 2272538 - RNA, 17 nt, Human
cuggccccauggucagc

SEQ ID NO: 2272539 - RNA, 21 nt, Human
cuggccccaggaccuggcugc

SEQ ID NO: 2272540 - RNA, 15 nt, Human
cuggcccccagcugu

SEQ ID NO: 2272541 - RNA, 21 nt, Human
cuggccccaugucucucagaa

SEQ ID NO: 2272542 - RNA, 19 nt, Human
cuggccccaugucucucag

SEQ ID NO: 2272543 - RNA, 23 nt, Human
cuggccucaagugauucuccugc

SEQ ID NO: 2272544 - RNA, 11 nt, Human
cuggccaggca

SEQ ID NO: 2272545 - RNA, 23 nt, Human
cuggccaggauggaggggugguc

SEQ ID NO: 2272546 - RNA, 12 nt, Human
cuggccaggaug

SEQ ID NO: 2272547 - RNA, 22 nt, Human
cuggccaggagcucuucaggcc

SEQ ID NO: 2272548 - RNA, 20 nt, Human
cuggccaggagcucuucagg

SEQ ID NO: 2272549 - RNA, 17 nt, Human
cuggccaggagcucuuc

SEQ ID NO: 2272550 - RNA, 15 nt, Human
cuggccaggagcucu

SEQ ID NO: 2272551 - RNA, 13 nt, Human
cuggccaggagcu

SEQ ID NO: 2272552 - RNA, 12 nt, Human
cuggccaggagc

SEQ ID NO: 2272553 - RNA, 17 nt, Human
cuggccagccccacagc

SEQ ID NO: 2272554 - RNA, 18 nt, Human
cuggccagccccacagcc

SEQ ID NO: 2272555 - RNA, 19 nt, Human
cuggccagccccacagccc

SEQ ID NO: 2272556 - RNA, 20 nt, Human
cuggccagccccacagccca

SEQ ID NO: 2272557 - RNA, 21 nt, Human
cuggccagccccacagcccac

SEQ ID NO: 2272558 - RNA, 22 nt, Human
cuggccaggcagaucugugccc

SEQ ID NO: 2272559 - RNA, 21 nt, Human
cuggccaggcagaucugugcc

SEQ ID NO: 2272560 - RNA, 14 nt, Human
cuggccaggcagau

SEQ ID NO: 2272561 - RNA, 13 nt, Human
cuggccaggcaga

SEQ ID NO: 2272562 - RNA, 14 nt, Human
cuggccagggccug

SEQ ID NO: 2272563 - RNA, 20 nt, Human
cuggccccaggaccuggcug

SEQ ID NO: 2272564 - RNA, 16 nt, Human
cuggccccaggaccug

SEQ ID NO: 2272565 - RNA, 17 nt, Human
cuggccaguccaggcug

SEQ ID NO: 2272566 - RNA, 18 nt, Human
cuggccaguccaggcugc

SEQ ID NO: 2272567 - RNA, 15 nt, Human
cuggccaguccaggc

SEQ ID NO: 2272568 - RNA, 16 nt, Human
cuggccaguccaggcu

SEQ ID NO: 2272569 - RNA, 15 nt, Human
cuggccagggccugg

SEQ ID NO: 2272570 - RNA, 16 nt, Human
cuggccagggccugga

SEQ ID NO: 2272571 - RNA, 23 nt, Human
cuggccagggccuggaagacaga

SEQ ID NO: 2272572 - RNA, 20 nt, Human
cuggccugaggucucgcuga

SEQ ID NO: 2272573 - RNA, 24 nt, Human
cuggccugaggucucgcugaugcu

SEQ ID NO: 2272574 - RNA, 19 nt, Human
cuggccugcacggugggcc

SEQ ID NO: 2272575 - RNA, 15 nt, Human
cuggccugagcuggg

SEQ ID NO: 2272576 - RNA, 18 nt, Human
cuggccugagcugggaug

SEQ ID NO: 2272577 - RNA, 20 nt, Human
cuggccugcugggcucucca

SEQ ID NO: 2272578 - RNA, 19 nt, Human
cuggccugcugggcucucc

SEQ ID NO: 2272579 - RNA, 15 nt, Human
cuggccugcugggcu

SEQ ID NO: 2272580 - RNA, 13 nt, Human
cuggccuggcccc

SEQ ID NO: 2272581 - RNA, 14 nt, Human
cuggccuggccccu

SEQ ID NO: 2272582 - RNA, 13 nt, Human
cuggccucugcac

SEQ ID NO: 2272583 - RNA, 14 nt, Human
cuggccucugcacu

SEQ ID NO: 2272584 - RNA, 16 nt, Human
cuggccugagcuggga

SEQ ID NO: 2272585 - RNA, 16 nt, Human
cuggccuggccccuca

SEQ ID NO: 2272586 - RNA, 17 nt, Human
cuggccuggccccucag

SEQ ID NO: 2272587 - RNA, 15 nt, Human
cuggccuucggccuc

SEQ ID NO: 2272588 - RNA, 21 nt, Human
cuggccuucggccuccauccu

SEQ ID NO: 2272589 - RNA, 18 nt, Human
cuggccuucggccuccau

SEQ ID NO: 2272590 - RNA, 17 nt, Human
cuggccuucggccucca

SEQ ID NO: 2272591 - RNA, 16 nt, Human
cuggccuucggccucc

SEQ ID NO: 2272592 - RNA, 20 nt, Human
cugggaugggaggagaggac

SEQ ID NO: 2272593 - RNA, 15 nt, Human
cugggaugggccugc

SEQ ID NO: 2272594 - RNA, 17 nt, Human
cugggauccuaagggcu

SEQ ID NO: 2272595 - RNA, 17 nt, Human
cugggaugagccgcugu

SEQ ID NO: 2272596 - RNA, 21 nt, Human
cugggaugagccgcugugagc

SEQ ID NO: 2272597 - RNA, 22 nt, Human
cugggaugagccgcugugagcc

SEQ ID NO: 2272598 - RNA, 17 nt, Human
cugggauuacaggugug

SEQ ID NO: 2272599 - RNA, 20 nt, Human
cugggauuacaggugugaac

SEQ ID NO: 2272600 - RNA, 18 nt, Human
cugggauuacagguguga

SEQ ID NO: 2272601 - RNA, 16 nt, Human
cugggauuacaggugu

SEQ ID NO: 2272602 - RNA, 13 nt, Human
cugggauccuaag

SEQ ID NO: 2272603 - RNA, 14 nt, Human
cugggaguccccuu

SEQ ID NO: 2272604 - RNA, 20 nt, Human
cugggaucacauguggacuu

SEQ ID NO: 2272605 - RNA, 18 nt, Human
cugggaugauuggagggg

SEQ ID NO: 2272606 - RNA, 20 nt, Human
cugggaucccucauccucau

SEQ ID NO: 2272607 - RNA, 13 nt, Human
cugggaguccccu

SEQ ID NO: 2272608 - RNA, 18 nt, Human
cugggccccaccaccuag

SEQ ID NO: 2272609 - RNA, 16 nt, Human
cugggccccaccaccu

SEQ ID NO: 2272610 - RNA, 12 nt, Human
cugggccccagc

SEQ ID NO: 2272611 - RNA, 13 nt, Human
cugggccccagcc

SEQ ID NO: 2272612 - RNA, 14 nt, Human
cugggccccagccc

SEQ ID NO: 2272613 - RNA, 15 nt, Human
cugggccccagccca

SEQ ID NO: 2272614 - RNA, 16 nt, Human
cugggccccagcccac

SEQ ID NO: 2272615 - RNA, 18 nt, Human
cugggccccagcccaccc

SEQ ID NO: 2272616 - RNA, 14 nt, Human
cugggccccaccac

SEQ ID NO: 2272617 - RNA, 13 nt, Human
cugggccccacca

SEQ ID NO: 2272618 - RNA, 24 nt, Human
cugggccccaaacgggcugcccug

SEQ ID NO: 2272619 - RNA, 19 nt, Human
cugggccccaguuguauuu

SEQ ID NO: 2272620 - RNA, 11 nt, Human
cugggcccugg

SEQ ID NO: 2272621 - RNA, 15 nt, Human
cugggccccaguugu

SEQ ID NO: 2272622 - RNA, 19 nt, Human
cugggccccagcccacccu

SEQ ID NO: 2272623 - RNA, 20 nt, Human
cugggccccagcccacccuc

SEQ ID NO: 2272624 - RNA, 21 nt, Human
cugggccccagcccacccucc

SEQ ID NO: 2272625 - RNA, 15 nt, Human
cugggccgcugccac

SEQ ID NO: 2272626 - RNA, 16 nt, Human
cugggccgcugccacg

SEQ ID NO: 2272627 - RNA, 13 nt, Human
cugggcccugggc

SEQ ID NO: 2272628 - RNA, 14 nt, Human
cugggcccugggcu

SEQ ID NO: 2272629 - RNA, 15 nt, Human
cugggcccugggcug

SEQ ID NO: 2272630 - RNA, 16 nt, Human
cugggcccugggcugg

SEQ ID NO: 2272631 - RNA, 18 nt, Human
cugggcccugggcuggaa

SEQ ID NO: 2272632 - RNA, 21 nt, Human
cugggaguaguugucuuuccu

SEQ ID NO: 2272633 - RNA, 23 nt, Human
cugggaguaguugucuuuccugg

SEQ ID NO: 2272634 - RNA, 21 nt, Human
cugggaggucaaggcugcagu

SEQ ID NO: 2272635 - RNA, 19 nt, Human
cugggaggucaaggcugca

SEQ ID NO: 2272636 - RNA, 17 nt, Human
cugggaggcucuggagc

SEQ ID NO: 2272637 - RNA, 18 nt, Human
cugggaggcucuggagcc

SEQ ID NO: 2272638 - RNA, 22 nt, Human
cugggaggcaagagggguggag

SEQ ID NO: 2272639 - RNA, 23 nt, Human
cugggaggcaagagggguggaga

SEQ ID NO: 2272640 - RNA, 17 nt, Human
cugggaggcaagagggg

SEQ ID NO: 2272641 - RNA, 18 nt, Human
cugggaggcaagaggggu

SEQ ID NO: 2272642 - RNA, 20 nt, Human
cugggaggcaagaggggugg

SEQ ID NO: 2272643 - RNA, 21 nt, Human
cugggaggcaagaggggugga

SEQ ID NO: 2272644 - RNA, 20 nt, Human
cugggaggcucuggagccca

SEQ ID NO: 2272645 - RNA, 21 nt, Human
cugggaggcucuggagcccac

SEQ ID NO: 2272646 - RNA, 21 nt, Human
cugggaggaagcagguugagg

SEQ ID NO: 2272647 - RNA, 17 nt, Human
cugggaggaauggacag

SEQ ID NO: 2272648 - RNA, 21 nt, Human
cugggagcuccacucugcuuc

SEQ ID NO: 2272649 - RNA, 16 nt, Human
cugggagcuccacucu

SEQ ID NO: 2272650 - RNA, 17 nt, Human
cugggagcuccacucug

SEQ ID NO: 2272651 - RNA, 20 nt, Human
cugggagcuccacucugcuu

SEQ ID NO: 2272652 - RNA, 22 nt, Human
cugggaggaauggacagacaga

SEQ ID NO: 2272653 - RNA, 19 nt, Human
cugggaggaauggacagac

SEQ ID NO: 2272654 - RNA, 14 nt, Human
cugggaggagggag

SEQ ID NO: 2272655 - RNA, 15 nt, Human
cugggaggagggaga

SEQ ID NO: 2272656 - RNA, 16 nt, Human
cugggaggagggagag

SEQ ID NO: 2272657 - RNA, 17 nt, Human
cugggaggagggagagg

SEQ ID NO: 2272658 - RNA, 19 nt, Human
cugggaggagggagaggga

SEQ ID NO: 2272659 - RNA, 20 nt, Human
cugggaggagggagagggag

SEQ ID NO: 2272660 - RNA, 23 nt, Human
cugggaggagggagagggagguc

SEQ ID NO: 2272661 - RNA, 16 nt, Human
cugggagccuacccac

SEQ ID NO: 2272662 - RNA, 22 nt, Human
cugggagccuacccacccccag

SEQ ID NO: 2272663 - RNA, 19 nt, Human
cugggagccuacccacccc

SEQ ID NO: 2272664 - RNA, 19 nt, Human
cugggagauucaagggacc

SEQ ID NO: 2272665 - RNA, 22 nt, Human
cugggagcagcccgcugagugg

SEQ ID NO: 2272666 - RNA, 15 nt, Human
cugggagauucaagg

SEQ ID NO: 2272667 - RNA, 20 nt, Human
cugggagaggugccagcaac

SEQ ID NO: 2272668 - RNA, 23 nt, Human
cugggagaggugccagcaacuga

SEQ ID NO: 2272669 - RNA, 18 nt, Human
cugggagaggugccagca

SEQ ID NO: 2272670 - RNA, 19 nt, Human
cugggagaggugccagcaa

SEQ ID NO: 2272671 - RNA, 13 nt, Human
cuggcuggaguga

SEQ ID NO: 2272672 - RNA, 12 nt, Human
cuggcuggagcc

SEQ ID NO: 2272673 - RNA, 15 nt, Human
cuggcuggagccuag

SEQ ID NO: 2272674 - RNA, 18 nt, Human
cuggcuggagccuagaac

SEQ ID NO: 2272675 - RNA, 15 nt, Human
cuggcuggcacagaa

SEQ ID NO: 2272676 - RNA, 17 nt, Human
cuggcuggcugcaguga

SEQ ID NO: 2272677 - RNA, 15 nt, Human
cuggcuggcugcagu

SEQ ID NO: 2272678 - RNA, 16 nt, Human
cuggcugcugccccca

SEQ ID NO: 2272679 - RNA, 17 nt, Human
cuggcugcugcccccac

SEQ ID NO: 2272680 - RNA, 19 nt, Human
cuggcugcugcccccaccc

SEQ ID NO: 2272681 - RNA, 13 nt, Human
cuggcugcuugcc

SEQ ID NO: 2272682 - RNA, 14 nt, Human
cuggcugcuugccc

SEQ ID NO: 2272683 - RNA, 14 nt, Human
cuggcuggaaggga

SEQ ID NO: 2272684 - RNA, 13 nt, Human
cuggcgcagccaa

SEQ ID NO: 2272685 - RNA, 15 nt, Human
cuggcgcagccaagg

SEQ ID NO: 2272686 - RNA, 19 nt, Human
cuggcgcagccaaggccga

SEQ ID NO: 2272687 - RNA, 16 nt, Human
cuggcgcagccaaggc

SEQ ID NO: 2272688 - RNA, 21 nt, Human
cuggcgccaacaacuucucca

SEQ ID NO: 2272689 - RNA, 22 nt, Human
cuggcgccaacaacuucuccau

SEQ ID NO: 2272690 - RNA, 19 nt, Human
cuggcgccaucgccgggac

SEQ ID NO: 2272691 - RNA, 12 nt, Human
cuggccuguucu

SEQ ID NO: 2272692 - RNA, 16 nt, Human
cuggccuuccugcccu

SEQ ID NO: 2272693 - RNA, 17 nt, Human
cuggccuuccacuuggc

SEQ ID NO: 2272694 - RNA, 14 nt, Human
cuggccuuucauau

SEQ ID NO: 2272695 - RNA, 13 nt, Human
cuggccuuuuccu

SEQ ID NO: 2272696 - RNA, 14 nt, Human
cuggccuuuuccua

SEQ ID NO: 2272697 - RNA, 19 nt, Human
cuggcgacaguuuuccuuc

SEQ ID NO: 2272698 - RNA, 22 nt, Human
cuggcgacacguagcagcuuag

SEQ ID NO: 2272699 - RNA, 20 nt, Human
cuggcgacaguuuuccuucu

SEQ ID NO: 2272700 - RNA, 12 nt, Human
cuggcgcagcca

SEQ ID NO: 2272701 - RNA, 23 nt, Human
cuggcugggacguggcucagcca

SEQ ID NO: 2272702 - RNA, 21 nt, Human
cuggcugggacguggcucagc

SEQ ID NO: 2272703 - RNA, 19 nt, Human
cuggcugggacguggcuca

SEQ ID NO: 2272704 - RNA, 16 nt, Human
cuggcugggacguggc

SEQ ID NO: 2272705 - RNA, 12 nt, Human
cuggcugggacg

SEQ ID NO: 2272706 - RNA, 20 nt, Human
cuggcugguuagagguuccc

SEQ ID NO: 2272707 - RNA, 16 nt, Human
cuggcuguuggcuggg

SEQ ID NO: 2272708 - RNA, 17 nt, Human
cuggcuguuggcugggg

SEQ ID NO: 2272709 - RNA, 20 nt, Human
cuggcuguguucuggugagg

SEQ ID NO: 2272710 - RNA, 19 nt, Human
cuggcugucaguaugacau

SEQ ID NO: 2272711 - RNA, 16 nt, Human
cugggaaacagaggcu

SEQ ID NO: 2272712 - RNA, 15 nt, Human
cugggaaacagaggc

SEQ ID NO: 2272713 - RNA, 19 nt, Human
cugggaaagacauccauaa

SEQ ID NO: 2272714 - RNA, 11 nt, Human
cugggaaacag

SEQ ID NO: 2272715 - RNA, 14 nt, Human
cugggaaaauaccc

SEQ ID NO: 2272716 - RNA, 17 nt, Human
cugggaaaauaccccau

SEQ ID NO: 2272717 - RNA, 23 nt, Human
cuggcuuuucacugcuggcugcc

SEQ ID NO: 2272718 - RNA, 14 nt, Human
cuggcuuuuauuaa

SEQ ID NO: 2272719 - RNA, 22 nt, Human
cuggcuuuuauuaaugcacuuu

SEQ ID NO: 2272720 - RNA, 23 nt, Human
cuggcuuuuauuaaugcacuuuc

SEQ ID NO: 2272721 - RNA, 14 nt, Human
cuggcuuuggcuuc

SEQ ID NO: 2272722 - RNA, 11 nt, Human
cuggcuuuggc

SEQ ID NO: 2272723 - RNA, 15 nt, Human
cuggcuuucuccgac

SEQ ID NO: 2272724 - RNA, 22 nt, Human
cuggcuuucuccgacugcuagg

SEQ ID NO: 2272725 - RNA, 14 nt, Human
cuggcuuugagaag

SEQ ID NO: 2272726 - RNA, 19 nt, Human
cuggcuuguaacuccacca

SEQ ID NO: 2272727 - RNA, 17 nt, Human
cuggcuuguaacuccac

SEQ ID NO: 2272728 - RNA, 20 nt, Human
cuggcuuguaacuccaccaa

SEQ ID NO: 2272729 - RNA, 18 nt, Human
cuggcuguuggcuggggg

SEQ ID NO: 2272730 - RNA, 18 nt, Human
cugggagaaccucaggcu

SEQ ID NO: 2272731 - RNA, 17 nt, Human
cugggagaaccucaggc

SEQ ID NO: 2272732 - RNA, 12 nt, Human
cugggagaggau

SEQ ID NO: 2272733 - RNA, 21 nt, Human
cugggagagccuuccaggggu

SEQ ID NO: 2272734 - RNA, 19 nt, Human
cugggagagccuuccaggg

SEQ ID NO: 2272735 - RNA, 20 nt, Human
cugggagagccuuccagggg

SEQ ID NO: 2272736 - RNA, 16 nt, Human
cugggagaaccucagg

SEQ ID NO: 2272737 - RNA, 15 nt, Human
cugggagaaccucag

SEQ ID NO: 2272738 - RNA, 14 nt, Human
cugggagaaccuca

SEQ ID NO: 2272739 - RNA, 12 nt, Human
cugggagaaccu

SEQ ID NO: 2272740 - RNA, 17 nt, Human
cugggagagccuuccag

SEQ ID NO: 2272741 - RNA, 18 nt, Human
cugggagagccuuccagg

SEQ ID NO: 2272742 - RNA, 17 nt, Human
cuguacauagccuauau

SEQ ID NO: 2272743 - RNA, 21 nt, Human
cuguaccucuugagccuugaa

SEQ ID NO: 2272744 - RNA, 19 nt, Human
cuguaccagcccagauguu

SEQ ID NO: 2272745 - RNA, 15 nt, Human
cuguacauagccuau

SEQ ID NO: 2272746 - RNA, 16 nt, Human
cuguacauagccuaua

SEQ ID NO: 2272747 - RNA, 15 nt, Human
cuguacauuguggga

SEQ ID NO: 2272748 - RNA, 23 nt, Human
cuguacaugaaaacacauuuuuc

SEQ ID NO: 2272749 - RNA, 22 nt, Human
cuguacaugaaaacacauuuuu

SEQ ID NO: 2272750 - RNA, 16 nt, Human
cuguaaguuuugaauu

SEQ ID NO: 2272751 - RNA, 23 nt, Human
cuguacagagcccacgcccccac

SEQ ID NO: 2272752 - RNA, 22 nt, Human
cuguaauuugugauacaaugcu

SEQ ID NO: 2272753 - RNA, 21 nt, Human
cuguaauuugugauacaaugc

SEQ ID NO: 2272754 - RNA, 17 nt, Human
cuguaaggcaugaagga

SEQ ID NO: 2272755 - RNA, 16 nt, Human
cuguaaggcaugaagg

SEQ ID NO: 2272756 - RNA, 17 nt, Human
cuguaauuugugauaca

SEQ ID NO: 2272757 - RNA, 18 nt, Human
cuguaauuugugauacaa

SEQ ID NO: 2272758 - RNA, 14 nt, Human
cuguaagcugaagu

SEQ ID NO: 2272759 - RNA, 23 nt, Human
cugguuccagggucccucugugu

SEQ ID NO: 2272760 - RNA, 18 nt, Human
cuguaaggcaaucauggu

SEQ ID NO: 2272761 - RNA, 20 nt, Human
cugguuaacuuguuuggccu

SEQ ID NO: 2272762 - RNA, 13 nt, Human
cugguuccagggu

SEQ ID NO: 2272763 - RNA, 14 nt, Human
cugguuccaggguc

SEQ ID NO: 2272764 - RNA, 15 nt, Human
cugguuccagggucc

SEQ ID NO: 2272765 - RNA, 16 nt, Human
cugguuccaggguccc

SEQ ID NO: 2272766 - RNA, 18 nt, Human
cugguuccagggucccuc

SEQ ID NO: 2272767 - RNA, 22 nt, Human
cugguuccagggucccucugug

SEQ ID NO: 2272768 - RNA, 20 nt, Human
cugguucaggguuggccccu

SEQ ID NO: 2272769 - RNA, 24 nt, Human
cugguguuucuagcacuggccugc

SEQ ID NO: 2272770 - RNA, 23 nt, Human
cugguuaauauuuauaggucacu

SEQ ID NO: 2272771 - RNA, 22 nt, Human
cugguguuucuagcacuggccu

SEQ ID NO: 2272772 - RNA, 23 nt, Human
cugguguuucuagcacuggccug

SEQ ID NO: 2272773 - RNA, 22 nt, Human
cuggucucagcagcgaccaccc

SEQ ID NO: 2272774 - RNA, 16 nt, Human
cuggucuccucagccu

SEQ ID NO: 2272775 - RNA, 14 nt, Human
cuggucucagcagc

SEQ ID NO: 2272776 - RNA, 20 nt, Human
cuggucucagcagcgaccac

SEQ ID NO: 2272777 - RNA, 21 nt, Human
cuggucucagcagcgaccacc

SEQ ID NO: 2272778 - RNA, 21 nt, Human
cuggucucaaacuccugggcu

SEQ ID NO: 2272779 - RNA, 13 nt, Human
cuggucucagcag

SEQ ID NO: 2272780 - RNA, 12 nt, Human
cugguggcagcu

SEQ ID NO: 2272781 - RNA, 16 nt, Human
cuggucucgaacuccu

SEQ ID NO: 2272782 - RNA, 17 nt, Human
cuggucuccucagccuc

SEQ ID NO: 2272783 - RNA, 16 nt, Human
cugguggcagcucacc

SEQ ID NO: 2272784 - RNA, 17 nt, Human
cuggugugaacuaaacu

SEQ ID NO: 2272785 - RNA, 16 nt, Human
cuggugugaccugagg

SEQ ID NO: 2272786 - RNA, 17 nt, Human
cuggugugaccugaggg

SEQ ID NO: 2272787 - RNA, 18 nt, Human
cuggugugaccugagggc

SEQ ID NO: 2272788 - RNA, 13 nt, Human
cugguggcagcuc

SEQ ID NO: 2272789 - RNA, 14 nt, Human
cugguggcagcuca

SEQ ID NO: 2272790 - RNA, 22 nt, Human
cugguccaaaagauugcugaaa

SEQ ID NO: 2272791 - RNA, 15 nt, Human
cugguccaaaagauu

SEQ ID NO: 2272792 - RNA, 13 nt, Human
cuggucagcccaa

SEQ ID NO: 2272793 - RNA, 12 nt, Human
cuggucagccca

SEQ ID NO: 2272794 - RNA, 17 nt, Human
cugguccagggaagcug

SEQ ID NO: 2272795 - RNA, 15 nt, Human
cugguccagggaagc

SEQ ID NO: 2272796 - RNA, 22 nt, Human
cugguccagggaagcuggccga

SEQ ID NO: 2272797 - RNA, 21 nt, Human
cugguccagggaagcuggccg

SEQ ID NO: 2272798 - RNA, 21 nt, Human
cugguccauagagagcaagac

SEQ ID NO: 2272799 - RNA, 17 nt, Human
cugguccaugauggagu

SEQ ID NO: 2272800 - RNA, 16 nt, Human
cugguccaugauggag

SEQ ID NO: 2272801 - RNA, 19 nt, Human
cugguccaugauggaguca

SEQ ID NO: 2272802 - RNA, 13 nt, Human
cuggucccacuca

SEQ ID NO: 2272803 - RNA, 23 nt, Human
cuggucucaaacucuugaccuca

SEQ ID NO: 2272804 - RNA, 14 nt, Human
cuggucccacucag

SEQ ID NO: 2272805 - RNA, 22 nt, Human
cuggucacugccauggaggcac

SEQ ID NO: 2272806 - RNA, 14 nt, Human
cuggucacugccau

SEQ ID NO: 2272807 - RNA, 21 nt, Human
cugguaguuaguagcauguug

SEQ ID NO: 2272808 - RNA, 23 nt, Human
cuggucacagggcaugccccggc

SEQ ID NO: 2272809 - RNA, 19 nt, Human
cugguaguuaguagcaugu

SEQ ID NO: 2272810 - RNA, 12 nt, Human
cugguagggcag

SEQ ID NO: 2272811 - RNA, 20 nt, Human
cuggucacaggacucugccu

SEQ ID NO: 2272812 - RNA, 21 nt, Human
cuggucacaggacucugccuc

SEQ ID NO: 2272813 - RNA, 22 nt, Human
cuggucacaggacucugccucc

SEQ ID NO: 2272814 - RNA, 23 nt, Human
cuggucacaggacucugccuccu

SEQ ID NO: 2272815 - RNA, 14 nt, Human
cugguagagaugga

SEQ ID NO: 2272816 - RNA, 18 nt, Human
cuggguuuggaccccagc

SEQ ID NO: 2272817 - RNA, 16 nt, Human
cuggguuuggacccca

SEQ ID NO: 2272818 - RNA, 23 nt, Human
cugguagauagaaauaaauagcu

SEQ ID NO: 2272819 - RNA, 15 nt, Human
cugguagauagaaau

SEQ ID NO: 2272820 - RNA, 14 nt, Human
cugguagauagaaa

SEQ ID NO: 2272821 - RNA, 13 nt, Human
cugguagcucagg

SEQ ID NO: 2272822 - RNA, 14 nt, Human
cugguagcucaggu

SEQ ID NO: 2272823 - RNA, 16 nt, Human
cugguagcucaggugg

SEQ ID NO: 2272824 - RNA, 15 nt, Human
cugguagcucaggug

SEQ ID NO: 2272825 - RNA, 15 nt, Human
cugguaggaccaagc

SEQ ID NO: 2272826 - RNA, 17 nt, Human
cugguaggaccaagcau

SEQ ID NO: 2272827 - RNA, 19 nt, Human
cuggucacaggacucugcc

SEQ ID NO: 2272828 - RNA, 18 nt, Human
cugguaggaccaagcauc

SEQ ID NO: 2272829 - RNA, 13 nt, Human
cugguagggcagu

SEQ ID NO: 2272830 - RNA, 17 nt, Human
cugggucugugucucuu

SEQ ID NO: 2272831 - RNA, 16 nt, Human
cugggucugugucucu

SEQ ID NO: 2272832 - RNA, 15 nt, Human
cugggucugugucuc

SEQ ID NO: 2272833 - RNA, 22 nt, Human
cugggucucgcuuuguugccca

SEQ ID NO: 2272834 - RNA, 22 nt, Human
cugggucgcccuggacugugug

SEQ ID NO: 2272835 - RNA, 17 nt, Human
cugggucgcccuggacu

SEQ ID NO: 2272836 - RNA, 18 nt, Human
cugggucgcccuggacug

SEQ ID NO: 2272837 - RNA, 18 nt, Human
cuggguuucucuguauag

SEQ ID NO: 2272838 - RNA, 13 nt, Human
cuggguuucuagc

SEQ ID NO: 2272839 - RNA, 15 nt, Human
cuggguuuggacccc

SEQ ID NO: 2272840 - RNA, 18 nt, Human
cuggguuuaaggggagag

SEQ ID NO: 2272841 - RNA, 22 nt, Human
cuggguuuaaggggagaggaaa

SEQ ID NO: 2272842 - RNA, 22 nt, Human
cuggguuuauuacauggcagug

SEQ ID NO: 2272843 - RNA, 23 nt, Human
cuggguuuauuacauggcagugu

SEQ ID NO: 2272844 - RNA, 13 nt, Human
cuggguuggugca

SEQ ID NO: 2272845 - RNA, 14 nt, Human
cuggguuggugcac

SEQ ID NO: 2272846 - RNA, 15 nt, Human
cuggguuggugcaca

SEQ ID NO: 2272847 - RNA, 16 nt, Human
cuggguuggugcacag

SEQ ID NO: 2272848 - RNA, 19 nt, Human
cuggguuggugcacaguga

SEQ ID NO: 2272849 - RNA, 22 nt, Human
cuggguuggugcacagugauuu

SEQ ID NO: 2272850 - RNA, 15 nt, Human
cuggguuggagggug

SEQ ID NO: 2272851 - RNA, 22 nt, Human
cuggguuggcgcacccuccccu

SEQ ID NO: 2272852 - RNA, 23 nt, Human
cuggguuggcgcacccuccccuc

SEQ ID NO: 2272853 - RNA, 16 nt, Human
cugggucuuucauggg

SEQ ID NO: 2272854 - RNA, 16 nt, Human
cuggguuggcgcaccc

SEQ ID NO: 2272855 - RNA, 18 nt, Human
cuggguuggcgcacccuc

SEQ ID NO: 2272856 - RNA, 20 nt, Human
cuggguuggcgcacccuccc

SEQ ID NO: 2272857 - RNA, 19 nt, Human
cuggguacuuguggacaca

SEQ ID NO: 2272858 - RNA, 21 nt, Human
cugggcuccuaaccuuccugu

SEQ ID NO: 2272859 - RNA, 16 nt, Human
cugggucgcccuggac

SEQ ID NO: 2272860 - RNA, 18 nt, Human
cuggguacuuguggacac

SEQ ID NO: 2272861 - RNA, 16 nt, Human
cuggguacuuguggac

SEQ ID NO: 2272862 - RNA, 14 nt, Human
cuggguacuugugg

SEQ ID NO: 2272863 - RNA, 19 nt, Human
cugggcucccuucccaccu

SEQ ID NO: 2272864 - RNA, 20 nt, Human
cugggccuccucacaacaug

SEQ ID NO: 2272865 - RNA, 20 nt, Human
cugggcucccuucccaccuc

SEQ ID NO: 2272866 - RNA, 21 nt, Human
cugggcucccuucccaccucu

SEQ ID NO: 2272867 - RNA, 22 nt, Human
cugggcucccuucccaccucuc

SEQ ID NO: 2272868 - RNA, 20 nt, Human
cugucuccuuaacacugagc

SEQ ID NO: 2272869 - RNA, 20 nt, Human
cugucucauccccagggguc

SEQ ID NO: 2272870 - RNA, 12 nt, Human
cugucuccagac

SEQ ID NO: 2272871 - RNA, 21 nt, Human
cugucucauccccaggggucc

SEQ ID NO: 2272872 - RNA, 19 nt, Human
cugucucauccccaggggu

SEQ ID NO: 2272873 - RNA, 17 nt, Human
cugucucauccccaggg

SEQ ID NO: 2272874 - RNA, 16 nt, Human
cugucucauccccagg

SEQ ID NO: 2272875 - RNA, 15 nt, Human
cugucucauccccag

SEQ ID NO: 2272876 - RNA, 14 nt, Human
cugucucaucccca

SEQ ID NO: 2272877 - RNA, 13 nt, Human
cugucucaucccc

SEQ ID NO: 2272878 - RNA, 17 nt, Human
cugucucaguuucacuu

SEQ ID NO: 2272879 - RNA, 23 nt, Human
cugucuccuuucaccccagggcc

SEQ ID NO: 2272880 - RNA, 22 nt, Human
cugucuccuuucaccccagggc

SEQ ID NO: 2272881 - RNA, 18 nt, Human
cugucucuacuaaaaaua

SEQ ID NO: 2272882 - RNA, 17 nt, Human
cugucucucaugaaccu

SEQ ID NO: 2272883 - RNA, 13 nt, Human
cugucucucauga

SEQ ID NO: 2272884 - RNA, 17 nt, Human
cugucucuagccacuuu

SEQ ID NO: 2272885 - RNA, 20 nt, Human
cugucucuagccacuuuggu

SEQ ID NO: 2272886 - RNA, 15 nt, Human
cugucucuagccacu

SEQ ID NO: 2272887 - RNA, 22 nt, Human
cugucucaaaaaaagaaaaaga

SEQ ID NO: 2272888 - RNA, 22 nt, Human
cugucccuuggagcuguaaacc

SEQ ID NO: 2272889 - RNA, 13 nt, Human
cuguccucacugc

SEQ ID NO: 2272890 - RNA, 14 nt, Human
cuguccucacugcu

SEQ ID NO: 2272891 - RNA, 16 nt, Human
cuguccucacugcucc

SEQ ID NO: 2272892 - RNA, 15 nt, Human
cuguccuaggccaca

SEQ ID NO: 2272893 - RNA, 13 nt, Human
cugucccuuggag

SEQ ID NO: 2272894 - RNA, 21 nt, Human
cuguccuacucugugucaggu

SEQ ID NO: 2272895 - RNA, 18 nt, Human
cugucucaagagggcacu

SEQ ID NO: 2272896 - RNA, 19 nt, Human
cugucucaagagggcacug

SEQ ID NO: 2272897 - RNA, 20 nt, Human
cugucucaagagggcacugg

SEQ ID NO: 2272898 - RNA, 21 nt, Human
cugucucaagagggcacuggu

SEQ ID NO: 2272899 - RNA, 21 nt, Human
cugucucauccaucaucaugu

SEQ ID NO: 2272900 - RNA, 20 nt, Human
cugucucauccaucaucaug

SEQ ID NO: 2272901 - RNA, 17 nt, Human
cugucucauccaucauc

SEQ ID NO: 2272902 - RNA, 16 nt, Human
cugucucauccaucau

SEQ ID NO: 2272903 - RNA, 15 nt, Human
cugucucauccauca

SEQ ID NO: 2272904 - RNA, 12 nt, Human
cugucucaucca

SEQ ID NO: 2272905 - RNA, 16 nt, Human
cugucucaguuucacu

SEQ ID NO: 2272906 - RNA, 19 nt, Human
cuguccucacugcucccug

SEQ ID NO: 2272907 - RNA, 21 nt, Human
cuguccucacugcucccugaa

SEQ ID NO: 2272908 - RNA, 21 nt, Human
cugucccuaguaaaaauacaa

SEQ ID NO: 2272909 - RNA, 19 nt, Human
cugucccuaguaaaaauac

SEQ ID NO: 2272910 - RNA, 17 nt, Human
cugucccuaggucagcu

SEQ ID NO: 2272911 - RNA, 15 nt, Human
cugucccucaaauga

SEQ ID NO: 2272912 - RNA, 12 nt, Human
cugucccucaca

SEQ ID NO: 2272913 - RNA, 16 nt, Human
cugucccucacagcac

SEQ ID NO: 2272914 - RNA, 13 nt, Human
cugucccucacag

SEQ ID NO: 2272915 - RNA, 13 nt, Human
cugucccucacug

SEQ ID NO: 2272916 - RNA, 12 nt, Human
cugucccucacu

SEQ ID NO: 2272917 - RNA, 23 nt, Human
cugucccucaaaugacccaaaga

SEQ ID NO: 2272918 - RNA, 13 nt, Human
cugucccucccac

SEQ ID NO: 2272919 - RNA, 15 nt, Human
cugucccucccaccu

SEQ ID NO: 2272920 - RNA, 16 nt, Human
cugucccucccaccuc

SEQ ID NO: 2272921 - RNA, 12 nt, Human
cugucccuccgg

SEQ ID NO: 2272922 - RNA, 15 nt, Human
cugucccucccccuu

SEQ ID NO: 2272923 - RNA, 17 nt, Human
cugucccucccaccucu

SEQ ID NO: 2272924 - RNA, 18 nt, Human
cugucccucccaccucug

SEQ ID NO: 2272925 - RNA, 19 nt, Human
cugucccucccaccucugu

SEQ ID NO: 2272926 - RNA, 21 nt, Human
cugucccucccaccucuguga

SEQ ID NO: 2272927 - RNA, 13 nt, Human
cugucccccugac

SEQ ID NO: 2272928 - RNA, 14 nt, Human
cugucccccugaca

SEQ ID NO: 2272929 - RNA, 18 nt, Human
cugucccauggacacucc

SEQ ID NO: 2272930 - RNA, 13 nt, Human
cugucccccagcu

SEQ ID NO: 2272931 - RNA, 14 nt, Human
cugucccccagcuc

SEQ ID NO: 2272932 - RNA, 15 nt, Human
cugucccccagcucu

SEQ ID NO: 2272933 - RNA, 16 nt, Human
cugucccccagcucug

SEQ ID NO: 2272934 - RNA, 17 nt, Human
cugucccccagcucugg

SEQ ID NO: 2272935 - RNA, 18 nt, Human
cugucccccagcucuggu

SEQ ID NO: 2272936 - RNA, 16 nt, Human
cugucccuucucuuaa

SEQ ID NO: 2272937 - RNA, 19 nt, Human
cugucccuucccccauaag

SEQ ID NO: 2272938 - RNA, 23 nt, Human
cugucccucccaccucugugacc

SEQ ID NO: 2272939 - RNA, 21 nt, Human
cugucccuucucuuaauuuaa

SEQ ID NO: 2272940 - RNA, 17 nt, Human
cugucccuucugucccu

SEQ ID NO: 2272941 - RNA, 19 nt, Human
cugucccuucugucccuca

SEQ ID NO: 2272942 - RNA, 18 nt, Human
cugucccuucugucccuc

SEQ ID NO: 2272943 - RNA, 13 nt, Human
cugucccuugccu

SEQ ID NO: 2272944 - RNA, 15 nt, Human
cugucccuugccuca

SEQ ID NO: 2272945 - RNA, 16 nt, Human
cugucccuugccucaa

SEQ ID NO: 2272946 - RNA, 20 nt, Human
cugucccuugccucaaugcc

SEQ ID NO: 2272947 - RNA, 21 nt, Human
cugucccuugccucaaugcca

SEQ ID NO: 2272948 - RNA, 16 nt, Human
cuguccuacucugugu

SEQ ID NO: 2272949 - RNA, 17 nt, Human
cuguccuacucuguguc

SEQ ID NO: 2272950 - RNA, 18 nt, Human
cuguccuacucuguguca

SEQ ID NO: 2272951 - RNA, 20 nt, Human
cuguccuacucugugucagg

SEQ ID NO: 2272952 - RNA, 16 nt, Human
cuguauuugagaauau

SEQ ID NO: 2272953 - RNA, 22 nt, Human
cuguauuugccggugccuagga

SEQ ID NO: 2272954 - RNA, 14 nt, Human
cuguauuuguaucu

SEQ ID NO: 2272955 - RNA, 23 nt, Human
cuguauuuaugugugaggagcug

SEQ ID NO: 2272956 - RNA, 18 nt, Human
cuguauuuaugugugagg

SEQ ID NO: 2272957 - RNA, 15 nt, Human
cuguauuaagccacu

SEQ ID NO: 2272958 - RNA, 15 nt, Human
cuguauguuguccaa

SEQ ID NO: 2272959 - RNA, 18 nt, Human
cuguauguuguccaauug

SEQ ID NO: 2272960 - RNA, 19 nt, Human
cuguauuaagagugaaaau

SEQ ID NO: 2272961 - RNA, 13 nt, Human
cuguauguugucc

SEQ ID NO: 2272962 - RNA, 20 nt, Human
cuguaugucucgugguagga

SEQ ID NO: 2272963 - RNA, 12 nt, Human
cuguaugucaga

SEQ ID NO: 2272964 - RNA, 21 nt, Human
cuguauggaauacaauguaau

SEQ ID NO: 2272965 - RNA, 19 nt, Human
cuguaucccaugagccuca

SEQ ID NO: 2272966 - RNA, 13 nt, Human
cuguauauacuuu

SEQ ID NO: 2272967 - RNA, 18 nt, Human
cuguaucccaugagccuc

SEQ ID NO: 2272968 - RNA, 15 nt, Human
cuguaugauucccag

SEQ ID NO: 2272969 - RNA, 15 nt, Human
cuguauaguacuggc

SEQ ID NO: 2272970 - RNA, 22 nt, Human
cuguaccuuuugaggagcccca

SEQ ID NO: 2272971 - RNA, 22 nt, Human
cuguaccucuugagccuugaac

SEQ ID NO: 2272972 - RNA, 14 nt, Human
cuguaccucugccu

SEQ ID NO: 2272973 - RNA, 21 nt, Human
cuguaccuguuccuuagaccu

SEQ ID NO: 2272974 - RNA, 20 nt, Human
cuguaccuuuugaggagccc

SEQ ID NO: 2272975 - RNA, 14 nt, Human
cuguaucccaugag

SEQ ID NO: 2272976 - RNA, 15 nt, Human
cuguaucccaugagc

SEQ ID NO: 2272977 - RNA, 23 nt, Human
cuguauauacaauaacauaauuu

SEQ ID NO: 2272978 - RNA, 19 nt, Human
cuguauauacaauaacaua

SEQ ID NO: 2272979 - RNA, 18 nt, Human
cuguauauacaauaacau

SEQ ID NO: 2272980 - RNA, 15 nt, Human
cuguauauacaauaa

SEQ ID NO: 2272981 - RNA, 16 nt, Human
cuguauaguuaggaua

SEQ ID NO: 2272982 - RNA, 21 nt, Human
cuguauaguuaggauagcauu

SEQ ID NO: 2272983 - RNA, 18 nt, Human
cuguauauaaaauauuuu

SEQ ID NO: 2272984 - RNA, 16 nt, Human
cuguauauaaaggaaa

SEQ ID NO: 2272985 - RNA, 22 nt, Human
cugucccagugccgagaaggaa

SEQ ID NO: 2272986 - RNA, 17 nt, Human
cugucccauggacacuc

SEQ ID NO: 2272987 - RNA, 19 nt, Human
cugucccauggacacucca

SEQ ID NO: 2272988 - RNA, 13 nt, Human
cugucccaccucu

SEQ ID NO: 2272989 - RNA, 14 nt, Human
cugucccaccucuu

SEQ ID NO: 2272990 - RNA, 16 nt, Human
cugucccacccccacc

SEQ ID NO: 2272991 - RNA, 15 nt, Human
cugucccaccucuuc

SEQ ID NO: 2272992 - RNA, 23 nt, Human
cugucccaccucuucucuuccug

SEQ ID NO: 2272993 - RNA, 19 nt, Human
cugucccagguuaucuggg

SEQ ID NO: 2272994 - RNA, 22 nt, Human
cugucccagguuaucugggcau

SEQ ID NO: 2272995 - RNA, 17 nt, Human
cuguccaggcacugcug

SEQ ID NO: 2272996 - RNA, 16 nt, Human
cuguccagacagccug

SEQ ID NO: 2272997 - RNA, 19 nt, Human
cugucccaccaugcagugc

SEQ ID NO: 2272998 - RNA, 14 nt, Human
cugucccaccccca

SEQ ID NO: 2272999 - RNA, 20 nt, Human
cuguccaggcacugcugccc

SEQ ID NO: 2273000 - RNA, 21 nt, Human
cuguccaggcacugcugccca

SEQ ID NO: 2273001 - RNA, 22 nt, Human
cuguccaggcacugcugcccag

SEQ ID NO: 2273002 - RNA, 18 nt, Human
cuguccaggcacugcugc

SEQ ID NO: 2273003 - RNA, 19 nt, Human
cuguccaggcacugcugcc

SEQ ID NO: 2273004 - RNA, 12 nt, Human
cuguccagacag

SEQ ID NO: 2273005 - RNA, 13 nt, Human
cuguccagacagc

SEQ ID NO: 2273006 - RNA, 15 nt, Human
cuguccagacagccu

SEQ ID NO: 2273007 - RNA, 18 nt, Human
cuguccaaaggaggcugg

SEQ ID NO: 2273008 - RNA, 17 nt, Human
cuguccaaaggaggcug

SEQ ID NO: 2273009 - RNA, 15 nt, Human
cuguccaaacugccu

SEQ ID NO: 2273010 - RNA, 20 nt, Human
cuguccaaacugccuaagcc

SEQ ID NO: 2273011 - RNA, 22 nt, Human
cuguccaaaggaggcuggcagg

SEQ ID NO: 2273012 - RNA, 21 nt, Human
cuguccaaaggaggcuggcag

SEQ ID NO: 2273013 - RNA, 20 nt, Human
cuguccaaaggaggcuggca

SEQ ID NO: 2273014 - RNA, 19 nt, Human
cuguccaaaggaggcuggc

SEQ ID NO: 2273015 - RNA, 23 nt, Human
cuguccaaccuaaccccuuuccu

SEQ ID NO: 2273016 - RNA, 20 nt, Human
cuguccaaccuaaccccuuu

SEQ ID NO: 2273017 - RNA, 16 nt, Human
cuguccaaccuaaccc

SEQ ID NO: 2273018 - RNA, 11 nt, Human
cuguccaagga

SEQ ID NO: 2273019 - RNA, 15 nt, Human
cuguccacacccagc

SEQ ID NO: 2273020 - RNA, 20 nt, Human
cuguccacacccagcucagc

SEQ ID NO: 2273021 - RNA, 13 nt, Human
cuguauuuuaaaa

SEQ ID NO: 2273022 - RNA, 16 nt, Human
cuguauuuuaaaagaa

SEQ ID NO: 2273023 - RNA, 23 nt, Human
cuguauuugugacuaauuguaua

SEQ ID NO: 2273024 - RNA, 20 nt, Human
cuguauuugugacuaauugu

SEQ ID NO: 2273025 - RNA, 21 nt, Human
cuguauuugugacuaauugua

SEQ ID NO: 2273026 - RNA, 23 nt, Human
cuguauuuguaucucugaagcau

SEQ ID NO: 2273027 - RNA, 12 nt, Human
cuguauuuguga

SEQ ID NO: 2273028 - RNA, 13 nt, Human
cuguauuugugac

SEQ ID NO: 2273029 - RNA, 14 nt, Human
cuguauuugugacu

SEQ ID NO: 2273030 - RNA, 15 nt, Human
cuguauuugugacua

SEQ ID NO: 2273031 - RNA, 16 nt, Human
cuguauuugugacuaa

SEQ ID NO: 2273032 - RNA, 17 nt, Human
cuguauuugugacuaau

SEQ ID NO: 2273033 - RNA, 19 nt, Human
cuguauuugugacuaauug

SEQ ID NO: 2273034 - RNA, 19 nt, Human
cucugcuuugacugagcag

SEQ ID NO: 2273035 - RNA, 18 nt, Human
cucugcuugagucagguu

SEQ ID NO: 2273036 - RNA, 17 nt, Human
cucugcuugagucaggu

SEQ ID NO: 2273037 - RNA, 15 nt, Human
cucuggacaggcaug

SEQ ID NO: 2273038 - RNA, 14 nt, Human
cucugcuucucacg

SEQ ID NO: 2273039 - RNA, 23 nt, Human
cucugcuguacauauuugagacu

SEQ ID NO: 2273040 - RNA, 13 nt, Human
cucugcugucuaa

SEQ ID NO: 2273041 - RNA, 12 nt, Human
cucugccugccc

SEQ ID NO: 2273042 - RNA, 13 nt, Human
cucugccugcccc

SEQ ID NO: 2273043 - RNA, 15 nt, Human
cucugccugccccgc

SEQ ID NO: 2273044 - RNA, 14 nt, Human
cucugcuggccugg

SEQ ID NO: 2273045 - RNA, 15 nt, Human
cucugcuggccuggc

SEQ ID NO: 2273046 - RNA, 16 nt, Human
cucugcuggccuggcc

SEQ ID NO: 2273047 - RNA, 17 nt, Human
cucugcuggccuggccg

SEQ ID NO: 2273048 - RNA, 21 nt, Human
cucugcuggccuggccggcaa

SEQ ID NO: 2273049 - RNA, 19 nt, Human
cucugcuugacaacaucug

SEQ ID NO: 2273050 - RNA, 21 nt, Human
cucugcuucucugacuucugc

SEQ ID NO: 2273051 - RNA, 16 nt, Human
cucugcuucucugacu

SEQ ID NO: 2273052 - RNA, 17 nt, Human
cucugcuucucugacuu

SEQ ID NO: 2273053 - RNA, 12 nt, Human
cucugcuucucu

SEQ ID NO: 2273054 - RNA, 13 nt, Human
cucugcuucucug

SEQ ID NO: 2273055 - RNA, 14 nt, Human
cucugcuucucuga

SEQ ID NO: 2273056 - RNA, 15 nt, Human
cucugcuucucugac

SEQ ID NO: 2273057 - RNA, 16 nt, Human
cucucugaaccccucc

SEQ ID NO: 2273058 - RNA, 21 nt, Human
cucucucuucugcuccacccu

SEQ ID NO: 2273059 - RNA, 21 nt, Human
cucugccugaagucacacagu

SEQ ID NO: 2273060 - RNA, 22 nt, Human
cucugccugaagucacacagug

SEQ ID NO: 2273061 - RNA, 22 nt, Human
cucugccugcauucugccgugu

SEQ ID NO: 2273062 - RNA, 11 nt, Human
cucugccugcc

SEQ ID NO: 2273063 - RNA, 16 nt, Human
cucugccugcauucug

SEQ ID NO: 2273064 - RNA, 14 nt, Human
cucugccugcauuc

SEQ ID NO: 2273065 - RNA, 18 nt, Human
cucugccugaaccuucca

SEQ ID NO: 2273066 - RNA, 14 nt, Human
cucucucugacucu

SEQ ID NO: 2273067 - RNA, 20 nt, Human
cucucugaagaugaucauuu

SEQ ID NO: 2273068 - RNA, 18 nt, Human
cucucucuucugcuccac

SEQ ID NO: 2273069 - RNA, 12 nt, Human
cucucucuucug

SEQ ID NO: 2273070 - RNA, 15 nt, Human
cucucucucuccccu

SEQ ID NO: 2273071 - RNA, 15 nt, Human
cucucucucucuccc

SEQ ID NO: 2273072 - RNA, 15 nt, Human
cucucucucuuuccu

SEQ ID NO: 2273073 - RNA, 13 nt, Human
cucucucugacuc

SEQ ID NO: 2273074 - RNA, 15 nt, Human
cucucuccuguccaa

SEQ ID NO: 2273075 - RNA, 15 nt, Human
cucucuccuuugcug

SEQ ID NO: 2273076 - RNA, 19 nt, Human
cucucuccuguccaaccua

SEQ ID NO: 2273077 - RNA, 14 nt, Human
cucucuccugucca

SEQ ID NO: 2273078 - RNA, 20 nt, Human
cucucuccuccugcccaccu

SEQ ID NO: 2273079 - RNA, 20 nt, Human
cucucuccuguacuuuuucc

SEQ ID NO: 2273080 - RNA, 13 nt, Human
cucucuccucccu

SEQ ID NO: 2273081 - RNA, 15 nt, Human
cucucuccuguacuu

SEQ ID NO: 2273082 - RNA, 17 nt, Human
cucucuccuccugccca

SEQ ID NO: 2273083 - RNA, 14 nt, Human
cucucuccuccugc

SEQ ID NO: 2273084 - RNA, 19 nt, Human
cucucuccccucaaagucu

SEQ ID NO: 2273085 - RNA, 22 nt, Human
cucucuccccucaaagucugca

SEQ ID NO: 2273086 - RNA, 15 nt, Human
cucuggcccugccuu

SEQ ID NO: 2273087 - RNA, 18 nt, Human
cucuggccucagccgacu

SEQ ID NO: 2273088 - RNA, 18 nt, Human
cucuggcccugccuucuu

SEQ ID NO: 2273089 - RNA, 19 nt, Human
cucuggaugccugauugcc

SEQ ID NO: 2273090 - RNA, 23 nt, Human
cucuggaugccugauugccaagc

SEQ ID NO: 2273091 - RNA, 12 nt, Human
cucuggccuucg

SEQ ID NO: 2273092 - RNA, 15 nt, Human
cucuggcagcucaga

SEQ ID NO: 2273093 - RNA, 16 nt, Human
cucuggcagcucagag

SEQ ID NO: 2273094 - RNA, 19 nt, Human
cucuggcuagaggccagcc

SEQ ID NO: 2273095 - RNA, 17 nt, Human
cucuggccucccacccg

SEQ ID NO: 2273096 - RNA, 13 nt, Human
cucuggccuccca

SEQ ID NO: 2273097 - RNA, 14 nt, Human
cucuggccucccac

SEQ ID NO: 2273098 - RNA, 15 nt, Human
cucuggccucccacc

SEQ ID NO: 2273099 - RNA, 16 nt, Human
cucuggccucccaccc

SEQ ID NO: 2273100 - RNA, 19 nt, Human
cucuggccuucggccucca

SEQ ID NO: 2273101 - RNA, 16 nt, Human
cucuggcuagaggcca

SEQ ID NO: 2273102 - RNA, 22 nt, Human
cucuggcuagaggccagcccca

SEQ ID NO: 2273103 - RNA, 21 nt, Human
cucuggcuagaggccagcccc

SEQ ID NO: 2273104 - RNA, 20 nt, Human
cucuggcuagaggccagccc

SEQ ID NO: 2273105 - RNA, 16 nt, Human
cucuggcuccagcugg

SEQ ID NO: 2273106 - RNA, 15 nt, Human
cucuggcuccagcug

SEQ ID NO: 2273107 - RNA, 24 nt, Human
cucugcuuugacugagcagacugg

SEQ ID NO: 2273108 - RNA, 14 nt, Human
cucuggaggggagg

SEQ ID NO: 2273109 - RNA, 15 nt, Human
cucuggaggggaggg

SEQ ID NO: 2273110 - RNA, 19 nt, Human
cucuggagcccacuguacu

SEQ ID NO: 2273111 - RNA, 14 nt, Human
cucuggacaggcau

SEQ ID NO: 2273112 - RNA, 16 nt, Human
cucuggacaggcaugu

SEQ ID NO: 2273113 - RNA, 22 nt, Human
cucuggacaggcauguucucug

SEQ ID NO: 2273114 - RNA, 12 nt, Human
cucuggcagcuc

SEQ ID NO: 2273115 - RNA, 14 nt, Human
cucuggcagcucag

SEQ ID NO: 2273116 - RNA, 16 nt, Human
cucuggaguggccacu

SEQ ID NO: 2273117 - RNA, 15 nt, Human
cucuggaguggccac

SEQ ID NO: 2273118 - RNA, 14 nt, Human
cucuggaguggcca

SEQ ID NO: 2273119 - RNA, 12 nt, Human
cucuggaguggc

SEQ ID NO: 2273120 - RNA, 20 nt, Human
cucuggaguggccacuaagc

SEQ ID NO: 2273121 - RNA, 22 nt, Human
cucuggaucaaaguaggcagga

SEQ ID NO: 2273122 - RNA, 15 nt, Human
cucuggaugccugau

SEQ ID NO: 2273123 - RNA, 16 nt, Human
cucuggaggggagggg

SEQ ID NO: 2273124 - RNA, 19 nt, Human
cucuggagggguguggcuc

SEQ ID NO: 2273125 - RNA, 20 nt, Human
cucuggagggguguggcucc

SEQ ID NO: 2273126 - RNA, 21 nt, Human
cucuggagggguguggcuccu

SEQ ID NO: 2273127 - RNA, 13 nt, Human
cucugugugcucc

SEQ ID NO: 2273128 - RNA, 17 nt, Human
cucugugucacuggcug

SEQ ID NO: 2273129 - RNA, 18 nt, Human
cucugugucacuggcugc

SEQ ID NO: 2273130 - RNA, 20 nt, Human
cucugugucacuggcugccu

SEQ ID NO: 2273131 - RNA, 23 nt, Human
cucugugucacuggcugccucca

SEQ ID NO: 2273132 - RNA, 20 nt, Human
cucuguguugugaaugucau

SEQ ID NO: 2273133 - RNA, 19 nt, Human
cucuguguuuguuccuaca

SEQ ID NO: 2273134 - RNA, 17 nt, Human
cucuguucaguguaaau

SEQ ID NO: 2273135 - RNA, 15 nt, Human
cucuguucaguguaa

SEQ ID NO: 2273136 - RNA, 14 nt, Human
cucuguucagugua

SEQ ID NO: 2273137 - RNA, 14 nt, Human
cucuguucauuucc

SEQ ID NO: 2273138 - RNA, 13 nt, Human
cucuguucauuuc

SEQ ID NO: 2273139 - RNA, 15 nt, Human
cucugugucaggugg

SEQ ID NO: 2273140 - RNA, 18 nt, Human
cucuguguauuugcuuuu

SEQ ID NO: 2273141 - RNA, 19 nt, Human
cucuguguauuugcuuuuu

SEQ ID NO: 2273142 - RNA, 13 nt, Human
cucugugucacug

SEQ ID NO: 2273143 - RNA, 16 nt, Human
cucugugucacuggcu

SEQ ID NO: 2273144 - RNA, 17 nt, Human
cucugugggcuggcagu

SEQ ID NO: 2273145 - RNA, 17 nt, Human
cucugugggcugcacuc

SEQ ID NO: 2273146 - RNA, 23 nt, Human
cucugugggcugcacucugugcc

SEQ ID NO: 2273147 - RNA, 13 nt, Human
cucugugggcugc

SEQ ID NO: 2273148 - RNA, 14 nt, Human
cucugugggcugca

SEQ ID NO: 2273149 - RNA, 16 nt, Human
cucugugggcugcacu

SEQ ID NO: 2273150 - RNA, 22 nt, Human
cucugugcuuuuaaaugcauaa

SEQ ID NO: 2273151 - RNA, 18 nt, Human
cucugugcuguggaagca

SEQ ID NO: 2273152 - RNA, 18 nt, Human
cucugugcuuugacucac

SEQ ID NO: 2273153 - RNA, 21 nt, Human
cucugugcuuugacucaccug

SEQ ID NO: 2273154 - RNA, 23 nt, Human
cucugugcuuugacucaccuguu

SEQ ID NO: 2273155 - RNA, 16 nt, Human
cucuguucauuuccuc

SEQ ID NO: 2273156 - RNA, 17 nt, Human
cucuguucauuuccuca

SEQ ID NO: 2273157 - RNA, 14 nt, Human
cucuuacugcaaau

SEQ ID NO: 2273158 - RNA, 20 nt, Human
cucuuacgcccaacccuucc

SEQ ID NO: 2273159 - RNA, 16 nt, Human
cucuuacugcaaaugu

SEQ ID NO: 2273160 - RNA, 18 nt, Human
cucuguucaguguaaaua

SEQ ID NO: 2273161 - RNA, 18 nt, Human
cucuuacgcccaacccuu

SEQ ID NO: 2273162 - RNA, 22 nt, Human
cucuuacgcccaacccuucccc

SEQ ID NO: 2273163 - RNA, 15 nt, Human
cucuuagaaaaacca

SEQ ID NO: 2273164 - RNA, 13 nt, Human
cucuuagaaaaac

SEQ ID NO: 2273165 - RNA, 17 nt, Human
cucuuccacucuccuug

SEQ ID NO: 2273166 - RNA, 19 nt, Human
cucuuacugcaaaugucau

SEQ ID NO: 2273167 - RNA, 14 nt, Human
cucuuacugcuaac

SEQ ID NO: 2273168 - RNA, 22 nt, Human
cucuuacuuuccuuuccccagc

SEQ ID NO: 2273169 - RNA, 23 nt, Human
cucuuacuuuccuuuccccagcc

SEQ ID NO: 2273170 - RNA, 13 nt, Human
cucuuccaggcug

SEQ ID NO: 2273171 - RNA, 14 nt, Human
cucuuccaggcugg

SEQ ID NO: 2273172 - RNA, 15 nt, Human
cucuuccaggcuggg

SEQ ID NO: 2273173 - RNA, 20 nt, Human
cucugugcagucacuggagg

SEQ ID NO: 2273174 - RNA, 21 nt, Human
cucugugagcaucacaguuuu

SEQ ID NO: 2273175 - RNA, 18 nt, Human
cucugugagcaucacagu

SEQ ID NO: 2273176 - RNA, 22 nt, Human
cucugugagcaucacaguuuug

SEQ ID NO: 2273177 - RNA, 17 nt, Human
cucugucuucaccugau

SEQ ID NO: 2273178 - RNA, 22 nt, Human
cucugucugcccuucaccccag

SEQ ID NO: 2273179 - RNA, 13 nt, Human
cucugugagacuc

SEQ ID NO: 2273180 - RNA, 17 nt, Human
cucugugagacucgaga

SEQ ID NO: 2273181 - RNA, 18 nt, Human
cucugugagacucgagaa

SEQ ID NO: 2273182 - RNA, 22 nt, Human
cucugugcccacccuccacucu

SEQ ID NO: 2273183 - RNA, 12 nt, Human
cucugugcccau

SEQ ID NO: 2273184 - RNA, 14 nt, Human
cucugugcccaugg

SEQ ID NO: 2273185 - RNA, 13 nt, Human
cucugugccuucg

SEQ ID NO: 2273186 - RNA, 20 nt, Human
cucugugcccccaucacccu

SEQ ID NO: 2273187 - RNA, 16 nt, Human
cucugugcccaugggc

SEQ ID NO: 2273188 - RNA, 20 nt, Human
cucugugcccaugggcacug

SEQ ID NO: 2273189 - RNA, 22 nt, Human
cucugugcccaugggcacugcu

SEQ ID NO: 2273190 - RNA, 23 nt, Human
cucugugcccaugggcacugcug

SEQ ID NO: 2273191 - RNA, 16 nt, Human
cucugugccuucuuuu

SEQ ID NO: 2273192 - RNA, 15 nt, Human
cucugugccuucuuu

SEQ ID NO: 2273193 - RNA, 15 nt, Human
cucugugcugacccu

SEQ ID NO: 2273194 - RNA, 19 nt, Human
cucugugcugacccuccug

SEQ ID NO: 2273195 - RNA, 20 nt, Human
cucugugcugacccuccugu

SEQ ID NO: 2273196 - RNA, 21 nt, Human
cucugugcugacccuccuguu

SEQ ID NO: 2273197 - RNA, 14 nt, Human
cucugugcugugga

SEQ ID NO: 2273198 - RNA, 15 nt, Human
cucugugcuguggaa

SEQ ID NO: 2273199 - RNA, 13 nt, Human
cucugugcugugu

SEQ ID NO: 2273200 - RNA, 14 nt, Human
cucugucucaugug

SEQ ID NO: 2273201 - RNA, 16 nt, Human
cucugucucaugugug

SEQ ID NO: 2273202 - RNA, 20 nt, Human
cucugucucaugugugcucu

SEQ ID NO: 2273203 - RNA, 23 nt, Human
cucugucucaugugugcucuucu

SEQ ID NO: 2273204 - RNA, 22 nt, Human
cucugucugaguaagaaacaga

SEQ ID NO: 2273205 - RNA, 14 nt, Human
cucugucugcccuu

SEQ ID NO: 2273206 - RNA, 17 nt, Human
cucugucugcccuucac

SEQ ID NO: 2273207 - RNA, 19 nt, Human
cucugggaaauaagagaga

SEQ ID NO: 2273208 - RNA, 23 nt, Human
cucugggaaaugagaaggcagcc

SEQ ID NO: 2273209 - RNA, 15 nt, Human
cucugucucauccau

SEQ ID NO: 2273210 - RNA, 14 nt, Human
cucugucucaucca

SEQ ID NO: 2273211 - RNA, 20 nt, Human
cucugggaaaugagaaggca

SEQ ID NO: 2273212 - RNA, 22 nt, Human
cucugggaaaugagaaggcagc

SEQ ID NO: 2273213 - RNA, 23 nt, Human
cucuggcuggcuaacuggaagca

SEQ ID NO: 2273214 - RNA, 13 nt, Human
cucuggcugggga

SEQ ID NO: 2273215 - RNA, 15 nt, Human
cucuggcuggggagc

SEQ ID NO: 2273216 - RNA, 21 nt, Human
cucuggcugguuuggaaugcu

SEQ ID NO: 2273217 - RNA, 22 nt, Human
cucuggcugguuuggaaugcuu

SEQ ID NO: 2273218 - RNA, 12 nt, Human
cucuggcuucca

SEQ ID NO: 2273219 - RNA, 13 nt, Human
cucuggcuuccag

SEQ ID NO: 2273220 - RNA, 14 nt, Human
cucuggcuuccagg

SEQ ID NO: 2273221 - RNA, 17 nt, Human
cucuggcuuccagguau

SEQ ID NO: 2273222 - RNA, 18 nt, Human
cucuggcuuccagguauc

SEQ ID NO: 2273223 - RNA, 13 nt, Human
cucuggcuggcua

SEQ ID NO: 2273224 - RNA, 21 nt, Human
cucuggcugaacccugugcug

SEQ ID NO: 2273225 - RNA, 19 nt, Human
cucuggcugaacccugugc

SEQ ID NO: 2273226 - RNA, 20 nt, Human
cucuggcugaacccugugcu

SEQ ID NO: 2273227 - RNA, 15 nt, Human
cucuggcugaacccu

SEQ ID NO: 2273228 - RNA, 16 nt, Human
cucuggcugaacccug

SEQ ID NO: 2273229 - RNA, 17 nt, Human
cucuggcugaacccugu

SEQ ID NO: 2273230 - RNA, 18 nt, Human
cucuggcugaacccugug

SEQ ID NO: 2273231 - RNA, 12 nt, Human
cucuggcucuca

SEQ ID NO: 2273232 - RNA, 13 nt, Human
cucuggcucucau

SEQ ID NO: 2273233 - RNA, 16 nt, Human
cucuggcucucauggg

SEQ ID NO: 2273234 - RNA, 22 nt, Human
cucuggcuccagcuggccggga

SEQ ID NO: 2273235 - RNA, 13 nt, Human
cugaacucuccag

SEQ ID NO: 2273236 - RNA, 19 nt, Human
cugaacugauggguuucuc

SEQ ID NO: 2273237 - RNA, 23 nt, Human
cugaagaagcaccaaucaugaau

SEQ ID NO: 2273238 - RNA, 16 nt, Human
cugaagaccucgagca

SEQ ID NO: 2273239 - RNA, 16 nt, Human
cugaacugggaccuuu

SEQ ID NO: 2273240 - RNA, 19 nt, Human
cugaagaauugaaaaacca

SEQ ID NO: 2273241 - RNA, 13 nt, Human
cugaacagcugua

SEQ ID NO: 2273242 - RNA, 12 nt, Human
cugaacagugga

SEQ ID NO: 2273243 - RNA, 17 nt, Human
cugaacggggagaaaag

SEQ ID NO: 2273244 - RNA, 17 nt, Human
cugaacucugacaacag

SEQ ID NO: 2273245 - RNA, 16 nt, Human
cugaacucugacaaca

SEQ ID NO: 2273246 - RNA, 13 nt, Human
cugaacucacuuu

SEQ ID NO: 2273247 - RNA, 18 nt, Human
cugaacucaaacugagga

SEQ ID NO: 2273248 - RNA, 15 nt, Human
cugaacucaaacuga

SEQ ID NO: 2273249 - RNA, 22 nt, Human
cugaacuaauaaaucuguugcc

SEQ ID NO: 2273250 - RNA, 14 nt, Human
cugaaauuucacca

SEQ ID NO: 2273251 - RNA, 13 nt, Human
cugaaauuuuaua

SEQ ID NO: 2273252 - RNA, 14 nt, Human
cugaaauuucagau

SEQ ID NO: 2273253 - RNA, 18 nt, Human
cugaacacuccaauuaag

SEQ ID NO: 2273254 - RNA, 19 nt, Human
cugaacacuuuuguuguaa

SEQ ID NO: 2273255 - RNA, 23 nt, Human
cugaacacuccaauuaaggauuu

SEQ ID NO: 2273256 - RNA, 20 nt, Human
cugaacacuuuuguuguaaa

SEQ ID NO: 2273257 - RNA, 19 nt, Human
cugaaaucucagaauuccu

SEQ ID NO: 2273258 - RNA, 16 nt, Human
cugaaaucugaagacc

SEQ ID NO: 2273259 - RNA, 16 nt, Human
cugaaaugcugcauuu

SEQ ID NO: 2273260 - RNA, 13 nt, Human
cugaaaugaagau

SEQ ID NO: 2273261 - RNA, 20 nt, Human
cugaaauucuccuggagguc

SEQ ID NO: 2273262 - RNA, 13 nt, Human
cugaaauuucaga

SEQ ID NO: 2273263 - RNA, 14 nt, Human
cugaaagccagcug

SEQ ID NO: 2273264 - RNA, 21 nt, Human
cugaaagccacguuccuuacu

SEQ ID NO: 2273265 - RNA, 15 nt, Human
cugaaagcccugagc

SEQ ID NO: 2273266 - RNA, 20 nt, Human
cucuuugaauuuucuguguu

SEQ ID NO: 2273267 - RNA, 17 nt, Human
cucuuugaaugacaaag

SEQ ID NO: 2273268 - RNA, 12 nt, Human
cucuuugaauuu

SEQ ID NO: 2273269 - RNA, 22 nt, Human
cucuuugaaauagucuguguga

SEQ ID NO: 2273270 - RNA, 18 nt, Human
cucuuucuucucugcugc

SEQ ID NO: 2273271 - RNA, 14 nt, Human
cucuuugaaugaca

SEQ ID NO: 2273272 - RNA, 23 nt, Human
cucuuugagauagaagaacugca

SEQ ID NO: 2273273 - RNA, 15 nt, Human
cucuuugagauagaa

SEQ ID NO: 2273274 - RNA, 10 nt, Human
cucuuugaga

SEQ ID NO: 2273275 - RNA, 22 nt, Human
cucuuuccuguuguuguuaaug

SEQ ID NO: 2273276 - RNA, 16 nt, Human
cucuuuccuucuugcc

SEQ ID NO: 2273277 - RNA, 11 nt, Human
cucuuuccuug

SEQ ID NO: 2273278 - RNA, 13 nt, Human
cucuuuccuugcu

SEQ ID NO: 2273279 - RNA, 16 nt, Human
cucuuuccuccuucca

SEQ ID NO: 2273280 - RNA, 19 nt, Human
cucuuucugucccuucugu

SEQ ID NO: 2273281 - RNA, 15 nt, Human
cucuuucuguauaua

SEQ ID NO: 2273282 - RNA, 20 nt, Human
cucuuuccuuggcucccauu

SEQ ID NO: 2273283 - RNA, 14 nt, Human
cucuuucuguauau

SEQ ID NO: 2273284 - RNA, 19 nt, Human
cugaaauauacacacagca

SEQ ID NO: 2273285 - RNA, 18 nt, Human
cugaaauauacacacagc

SEQ ID NO: 2273286 - RNA, 22 nt, Human
cugaaauagacccacaagaggc

SEQ ID NO: 2273287 - RNA, 23 nt, Human
cugaaagccagcugccgaccaga

SEQ ID NO: 2273288 - RNA, 23 nt, Human
cugaaagccauuuguuggggcag

SEQ ID NO: 2273289 - RNA, 23 nt, Human
cugaaagcccugagcuuucugcu

SEQ ID NO: 2273290 - RNA, 19 nt, Human
cugaaagcccugagcuuuc

SEQ ID NO: 2273291 - RNA, 18 nt, Human
cugaaagcccugagcuuu

SEQ ID NO: 2273292 - RNA, 17 nt, Human
cugaaagcccugagcuu

SEQ ID NO: 2273293 - RNA, 16 nt, Human
cugaaagcccugagcu

SEQ ID NO: 2273294 - RNA, 16 nt, Human
cucuucuuuuggcuuc

SEQ ID NO: 2273295 - RNA, 19 nt, Human
cucuucuuuuggcuuccau

SEQ ID NO: 2273296 - RNA, 23 nt, Human
cucuucuuuuaaaccauuuucuu

SEQ ID NO: 2273297 - RNA, 24 nt, Human
cucuucuuuauacuguaauuuagu

SEQ ID NO: 2273298 - RNA, 22 nt, Human
cucuugaaauauaggaacuuaa

SEQ ID NO: 2273299 - RNA, 22 nt, Human
cucuucuuuaaagggauggcaa

SEQ ID NO: 2273300 - RNA, 21 nt, Human
cucuucuuuauacuguaauuu

SEQ ID NO: 2273301 - RNA, 22 nt, Human
cucuucuuuauacuguaauuua

SEQ ID NO: 2273302 - RNA, 14 nt, Human
cucuucuucuuucu

SEQ ID NO: 2273303 - RNA, 18 nt, Human
cucuucuugaacacucau

SEQ ID NO: 2273304 - RNA, 23 nt, Human
cucuucuugaacacucaugcuga

SEQ ID NO: 2273305 - RNA, 19 nt, Human
cucuuggguucaagugauu

SEQ ID NO: 2273306 - RNA, 21 nt, Human
cucuuggguucaagcgauucu

SEQ ID NO: 2273307 - RNA, 19 nt, Human
cucuuggguucaagcgauu

SEQ ID NO: 2273308 - RNA, 15 nt, Human
cucuugaacuccuga

SEQ ID NO: 2273309 - RNA, 23 nt, Human
cucuuccggagauguagcaaaac

SEQ ID NO: 2273310 - RNA, 22 nt, Human
cucuuccggagauguagcaaaa

SEQ ID NO: 2273311 - RNA, 19 nt, Human
cucuuccggagauguagca

SEQ ID NO: 2273312 - RNA, 20 nt, Human
cucuuccgugacgucacugg

SEQ ID NO: 2273313 - RNA, 12 nt, Human
cucuuccuaccc

SEQ ID NO: 2273314 - RNA, 15 nt, Human
cucuuccuacccaac

SEQ ID NO: 2273315 - RNA, 22 nt, Human
cucuuccuacccaaccacucaa

SEQ ID NO: 2273316 - RNA, 19 nt, Human
cucuuccuacccaaccacu

SEQ ID NO: 2273317 - RNA, 20 nt, Human
cucuuccuacccaaccacuc

SEQ ID NO: 2273318 - RNA, 20 nt, Human
cucuuccgaaaaauccucuu

SEQ ID NO: 2273319 - RNA, 22 nt, Human
cucuuccgaaaaauccucuucc

SEQ ID NO: 2273320 - RNA, 23 nt, Human
cucuuccgaaaaauccucuuccu

SEQ ID NO: 2273321 - RNA, 14 nt, Human
cucuguuccccuag

SEQ ID NO: 2273322 - RNA, 13 nt, Human
cucuuccagaauc

SEQ ID NO: 2273323 - RNA, 18 nt, Human
cucuuccagaaucccaag

SEQ ID NO: 2273324 - RNA, 19 nt, Human
cucuucuuaacuuaaauuu

SEQ ID NO: 2273325 - RNA, 23 nt, Human
cucuucugugggugacccagguc

SEQ ID NO: 2273326 - RNA, 16 nt, Human
cucuucugugggugac

SEQ ID NO: 2273327 - RNA, 18 nt, Human
cucuucuucuucagaaga

SEQ ID NO: 2273328 - RNA, 17 nt, Human
cucuucuucuucagaag

SEQ ID NO: 2273329 - RNA, 15 nt, Human
cucuucuucuucaga

SEQ ID NO: 2273330 - RNA, 20 nt, Human
cucuucuugaaauuuuaacc

SEQ ID NO: 2273331 - RNA, 15 nt, Human
cucuucuugaaauuu

SEQ ID NO: 2273332 - RNA, 18 nt, Human
cucuuuaaugucacaggc

SEQ ID NO: 2273333 - RNA, 15 nt, Human
cucuuuaacuucucg

SEQ ID NO: 2273334 - RNA, 16 nt, Human
cucuuguuuucaguuu

SEQ ID NO: 2273335 - RNA, 13 nt, Human
cucuuuaaaaaca

SEQ ID NO: 2273336 - RNA, 13 nt, Human
cucuuguggaugu

SEQ ID NO: 2273337 - RNA, 13 nt, Human
cucuugguccugc

SEQ ID NO: 2273338 - RNA, 15 nt, Human
cucuugguccugcug

SEQ ID NO: 2273339 - RNA, 16 nt, Human
cucuugguccugcugc

SEQ ID NO: 2273340 - RNA, 17 nt, Human
cucuugguccugcugca

SEQ ID NO: 2273341 - RNA, 20 nt, Human
cucuuuaaugucacaggcag

SEQ ID NO: 2273342 - RNA, 21 nt, Human
cucuuuaaugucacaggcagg

SEQ ID NO: 2273343 - RNA, 22 nt, Human
cucuuuaaugucacaggcaggu

SEQ ID NO: 2273344 - RNA, 23 nt, Human
cucuuuaaugucacaggcagguc

SEQ ID NO: 2273345 - RNA, 16 nt, Human
cucuuuaaucuucagu

SEQ ID NO: 2273346 - RNA, 12 nt, Human
cucuuuagccag

SEQ ID NO: 2273347 - RNA, 21 nt, Human
cucuuuagaguuagacuguug

SEQ ID NO: 2273348 - RNA, 18 nt, Human
cucuuuagaguuagacug

SEQ ID NO: 2273349 - RNA, 19 nt, Human
cucuuuagaguuagacugu

SEQ ID NO: 2273350 - RNA, 21 nt, Human
cucuuuaagaguuaguuucuu

SEQ ID NO: 2273351 - RNA, 15 nt, Human
cucuuuagaguuaga

SEQ ID NO: 2273352 - RNA, 17 nt, Human
cucuuuagaguuagacu

SEQ ID NO: 2273353 - RNA, 17 nt, Human
cucuuucccucccuucc

SEQ ID NO: 2273354 - RNA, 13 nt, Human
cucuuucccuccc

SEQ ID NO: 2273355 - RNA, 22 nt, Human
cucuuuauauggccucaagauc

SEQ ID NO: 2273356 - RNA, 17 nt, Human
cucuuuaugacuguuuu

SEQ ID NO: 2273357 - RNA, 22 nt, Human
cugagcgccuccauccaaggcc

SEQ ID NO: 2273358 - RNA, 13 nt, Human
cugagcgccucca

SEQ ID NO: 2273359 - RNA, 15 nt, Human
cugagcgccuccauc

SEQ ID NO: 2273360 - RNA, 15 nt, Human
cugagcgccaggaug

SEQ ID NO: 2273361 - RNA, 17 nt, Human
cugagcgauuauuaucu

SEQ ID NO: 2273362 - RNA, 21 nt, Human
cugagccuuguaauucuaaau

SEQ ID NO: 2273363 - RNA, 20 nt, Human
cugagcgaggagaugcuccu

SEQ ID NO: 2273364 - RNA, 23 nt, Human
cugagcgugcuuuccaaaaccca

SEQ ID NO: 2273365 - RNA, 14 nt, Human
cugagcgcuccugc

SEQ ID NO: 2273366 - RNA, 19 nt, Human
cugagcggaugcaucuggg

SEQ ID NO: 2273367 - RNA, 21 nt, Human
cugagcuauuucaucuauuuu

SEQ ID NO: 2273368 - RNA, 16 nt, Human
cugagcuauuucaucu

SEQ ID NO: 2273369 - RNA, 13 nt, Human
cugagcuauuuca

SEQ ID NO: 2273370 - RNA, 19 nt, Human
cugagcuagaagcuggagg

SEQ ID NO: 2273371 - RNA, 23 nt, Human
cugagcuccucugggcaggaccu

SEQ ID NO: 2273372 - RNA, 20 nt, Human
cugagcuccucugggcagga

SEQ ID NO: 2273373 - RNA, 18 nt, Human
cugagcuccucugggcag

SEQ ID NO: 2273374 - RNA, 17 nt, Human
cugagcuccucugggca

SEQ ID NO: 2273375 - RNA, 16 nt, Human
cugagcuccucugggc

SEQ ID NO: 2273376 - RNA, 15 nt, Human
cugagcuccucuggg

SEQ ID NO: 2273377 - RNA, 14 nt, Human
cugagcuccucugg

SEQ ID NO: 2273378 - RNA, 20 nt, Human
cugagcuccccaccacccca

SEQ ID NO: 2273379 - RNA, 20 nt, Human
cugagcucgguggacccagg

SEQ ID NO: 2273380 - RNA, 18 nt, Human
cugagcucgguggaccca

SEQ ID NO: 2273381 - RNA, 17 nt, Human
cugagcucgguggaccc

SEQ ID NO: 2273382 - RNA, 18 nt, Human
cugagcuccccaccaccc

SEQ ID NO: 2273383 - RNA, 22 nt, Human
cugagcuccaugugcccccucu

SEQ ID NO: 2273384 - RNA, 13 nt, Human
cugagcucacucg

SEQ ID NO: 2273385 - RNA, 17 nt, Human
cugagccuucagucuug

SEQ ID NO: 2273386 - RNA, 14 nt, Human
cugagccuggcugg

SEQ ID NO: 2273387 - RNA, 16 nt, Human
cugagccuggcuggca

SEQ ID NO: 2273388 - RNA, 12 nt, Human
cugagccuucag

SEQ ID NO: 2273389 - RNA, 15 nt, Human
cugagccuuguaauu

SEQ ID NO: 2273390 - RNA, 16 nt, Human
cugagccuuguaauuc

SEQ ID NO: 2273391 - RNA, 20 nt, Human
cugagcgacagugagacucu

SEQ ID NO: 2273392 - RNA, 16 nt, Human
cugagcgacagugaga

SEQ ID NO: 2273393 - RNA, 22 nt, Human
cugagccucagucucccucccu

SEQ ID NO: 2273394 - RNA, 12 nt, Human
cugagccucugc

SEQ ID NO: 2273395 - RNA, 13 nt, Human
cugagccucucac

SEQ ID NO: 2273396 - RNA, 21 nt, Human
cugagccucucaccuguacuc

SEQ ID NO: 2273397 - RNA, 18 nt, Human
cugagccucugcucccca

SEQ ID NO: 2273398 - RNA, 16 nt, Human
cugagccucugcuccc

SEQ ID NO: 2273399 - RNA, 15 nt, Human
cugagccucugcucc

SEQ ID NO: 2273400 - RNA, 14 nt, Human
cugagccucugcuc

SEQ ID NO: 2273401 - RNA, 17 nt, Human
cugagccuggccagccu

SEQ ID NO: 2273402 - RNA, 15 nt, Human
cugagccuggccagc

SEQ ID NO: 2273403 - RNA, 14 nt, Human
cugagccuggccag

SEQ ID NO: 2273404 - RNA, 13 nt, Human
cugagccuggcca

SEQ ID NO: 2273405 - RNA, 22 nt, Human
cugagccucucaccuguacucu

SEQ ID NO: 2273406 - RNA, 16 nt, Human
cugagccagugucagg

SEQ ID NO: 2273407 - RNA, 22 nt, Human
cugagccagugucaggaggaag

SEQ ID NO: 2273408 - RNA, 22 nt, Human
cugagccaguucaguaccugga

SEQ ID NO: 2273409 - RNA, 20 nt, Human
cugagacaaauggaggccug

SEQ ID NO: 2273410 - RNA, 15 nt, Human
cugagccagauuuca

SEQ ID NO: 2273411 - RNA, 18 nt, Human
cugagccagucccagggg

SEQ ID NO: 2273412 - RNA, 19 nt, Human
cugagccagucccaggggc

SEQ ID NO: 2273413 - RNA, 21 nt, Human
cugagccucagucucccuccc

SEQ ID NO: 2273414 - RNA, 16 nt, Human
cugagccucagucucc

SEQ ID NO: 2273415 - RNA, 13 nt, Human
cugagcccuggca

SEQ ID NO: 2273416 - RNA, 12 nt, Human
cugagcccuggc

SEQ ID NO: 2273417 - RNA, 11 nt, Human
cugagcccugg

SEQ ID NO: 2273418 - RNA, 16 nt, Human
cugagcccucaaagug

SEQ ID NO: 2273419 - RNA, 17 nt, Human
cugagcccucaaaguga

SEQ ID NO: 2273420 - RNA, 15 nt, Human
cugagcccuggcagg

SEQ ID NO: 2273421 - RNA, 14 nt, Human
cugagcccuggcag

SEQ ID NO: 2273422 - RNA, 16 nt, Human
cugagacagcccgggc

SEQ ID NO: 2273423 - RNA, 17 nt, Human
cugagacagcccgggcu

SEQ ID NO: 2273424 - RNA, 18 nt, Human
cugagacagcccgggcuc

SEQ ID NO: 2273425 - RNA, 17 nt, Human
cugagccagauuucacu

SEQ ID NO: 2273426 - RNA, 18 nt, Human
cugagccagauuucacuc

SEQ ID NO: 2273427 - RNA, 19 nt, Human
cugagccagauuucacucu

SEQ ID NO: 2273428 - RNA, 20 nt, Human
cugagccagauuucacucuc

SEQ ID NO: 2273429 - RNA, 21 nt, Human
cugagccagauuucacucucc

SEQ ID NO: 2273430 - RNA, 19 nt, Human
cugagcucugcauuugucu

SEQ ID NO: 2273431 - RNA, 22 nt, Human
cugagcucgguggacccaggga

SEQ ID NO: 2273432 - RNA, 17 nt, Human
cugaggaucagaguaau

SEQ ID NO: 2273433 - RNA, 13 nt, Human
cugagcugaggca

SEQ ID NO: 2273434 - RNA, 12 nt, Human
cugagcugaggc

SEQ ID NO: 2273435 - RNA, 18 nt, Human
cugaggauuucaagccug

SEQ ID NO: 2273436 - RNA, 17 nt, Human
cugaggauuucaagccu

SEQ ID NO: 2273437 - RNA, 14 nt, Human
cugaggauuucaag

SEQ ID NO: 2273438 - RNA, 18 nt, Human
cugaggaugagcuggaag

SEQ ID NO: 2273439 - RNA, 22 nt, Human
cugaggauuuaagggauggaaa

SEQ ID NO: 2273440 - RNA, 16 nt, Human
cugaggaugagcugga

SEQ ID NO: 2273441 - RNA, 17 nt, Human
cugaggaugagcuggaa

SEQ ID NO: 2273442 - RNA, 13 nt, Human
cugaggcagacag

SEQ ID NO: 2273443 - RNA, 13 nt, Human
cugaggcacgagc

SEQ ID NO: 2273444 - RNA, 12 nt, Human
cugaggcaagag

SEQ ID NO: 2273445 - RNA, 16 nt, Human
cugaggcaagagaauu

SEQ ID NO: 2273446 - RNA, 13 nt, Human
cugaggaugagcu

SEQ ID NO: 2273447 - RNA, 15 nt, Human
cugaggaugagcugg

SEQ ID NO: 2273448 - RNA, 15 nt, Human
cugaggagugaggaa

SEQ ID NO: 2273449 - RNA, 19 nt, Human
cugaggaucagaguaaucc

SEQ ID NO: 2273450 - RNA, 17 nt, Human
cugaggcagacagcagc

SEQ ID NO: 2273451 - RNA, 16 nt, Human
cugaggcagacagcag

SEQ ID NO: 2273452 - RNA, 15 nt, Human
cugaggcagacagca

SEQ ID NO: 2273453 - RNA, 14 nt, Human
cugaggcagacagc

SEQ ID NO: 2273454 - RNA, 22 nt, Human
cugaggcagacagcagcucagg

SEQ ID NO: 2273455 - RNA, 18 nt, Human
cugaggcagacagcagcu

SEQ ID NO: 2273456 - RNA, 17 nt, Human
cugaggcagcaguguga

SEQ ID NO: 2273457 - RNA, 15 nt, Human
cugaggcagcagugu

SEQ ID NO: 2273458 - RNA, 21 nt, Human
cugaggcagggaaguccccag

SEQ ID NO: 2273459 - RNA, 20 nt, Human
cugaggcagggaagucccca

SEQ ID NO: 2273460 - RNA, 16 nt, Human
cugaggcagggaaguc

SEQ ID NO: 2273461 - RNA, 14 nt, Human
cugaggcagggaag

SEQ ID NO: 2273462 - RNA, 15 nt, Human
cugaggcaggaggau

SEQ ID NO: 2273463 - RNA, 15 nt, Human
cugaggcagaagaau

SEQ ID NO: 2273464 - RNA, 24 nt, Human
cugaggcagcagugugaggccagg

SEQ ID NO: 2273465 - RNA, 23 nt, Human
cugaggcagcagugugaggccag

SEQ ID NO: 2273466 - RNA, 22 nt, Human
cugaggcagcagugugaggcca

SEQ ID NO: 2273467 - RNA, 22 nt, Human
cugaggcagggaaguccccagg

SEQ ID NO: 2273468 - RNA, 12 nt, Human
cugaggccacac

SEQ ID NO: 2273469 - RNA, 20 nt, Human
cugaggccacacucagcaca

SEQ ID NO: 2273470 - RNA, 14 nt, Human
cugaggccacacuc

SEQ ID NO: 2273471 - RNA, 24 nt, Human
cugaggccacacucagcacaaggc

SEQ ID NO: 2273472 - RNA, 21 nt, Human
cugaggccacacucagcacaa

SEQ ID NO: 2273473 - RNA, 19 nt, Human
cugaggcagguccccagac

SEQ ID NO: 2273474 - RNA, 18 nt, Human
cugaggcagguccccaga

SEQ ID NO: 2273475 - RNA, 17 nt, Human
cugaggcagguccccag

SEQ ID NO: 2273476 - RNA, 14 nt, Human
cugaggcagguccc

SEQ ID NO: 2273477 - RNA, 12 nt, Human
cugaggcccaga

SEQ ID NO: 2273478 - RNA, 13 nt, Human
cugaggcccagag

SEQ ID NO: 2273479 - RNA, 14 nt, Human
cugaggcccagagg

SEQ ID NO: 2273480 - RNA, 15 nt, Human
cugaggcccagaggg

SEQ ID NO: 2273481 - RNA, 16 nt, Human
cugaggcccagagggc

SEQ ID NO: 2273482 - RNA, 17 nt, Human
cugaggcccagagggcc

SEQ ID NO: 2273483 - RNA, 18 nt, Human
cugaggcccagagggccu

SEQ ID NO: 2273484 - RNA, 19 nt, Human
cugaggcccagagggccug

SEQ ID NO: 2273485 - RNA, 21 nt, Human
cugaggcccagagggccugca

SEQ ID NO: 2273486 - RNA, 23 nt, Human
cugaggcccagagggccugcaag

SEQ ID NO: 2273487 - RNA, 14 nt, Human
cugaggcccuucuc

SEQ ID NO: 2273488 - RNA, 15 nt, Human
cugaggcccuucucu

SEQ ID NO: 2273489 - RNA, 18 nt, Human
cugaggcccuucucucca

SEQ ID NO: 2273490 - RNA, 19 nt, Human
cugaggcccuucucuccag

SEQ ID NO: 2273491 - RNA, 20 nt, Human
cugaggcccuucucuccagc

SEQ ID NO: 2273492 - RNA, 22 nt, Human
cugagaaucuuuauugagaaag

SEQ ID NO: 2273493 - RNA, 14 nt, Human
cugagaaucuuuau

SEQ ID NO: 2273494 - RNA, 17 nt, Human
cugagaauguaagaacu

SEQ ID NO: 2273495 - RNA, 17 nt, Human
cugagacaaauggaggc

SEQ ID NO: 2273496 - RNA, 22 nt, Human
cugagaauuuaaaaauaagaaa

SEQ ID NO: 2273497 - RNA, 19 nt, Human
cugagaauguaagaacuac

SEQ ID NO: 2273498 - RNA, 15 nt, Human
cugagaauuccaagg

SEQ ID NO: 2273499 - RNA, 16 nt, Human
cugagaauuccaagga

SEQ ID NO: 2273500 - RNA, 14 nt, Human
cugagacagcccgg

SEQ ID NO: 2273501 - RNA, 15 nt, Human
cugagacagcccggg

SEQ ID NO: 2273502 - RNA, 20 nt, Human
cugagaauauaauacuguau

SEQ ID NO: 2273503 - RNA, 23 nt, Human
cugagaauauaauacuguauuug

SEQ ID NO: 2273504 - RNA, 15 nt, Human
cugagaauaagaaag

SEQ ID NO: 2273505 - RNA, 17 nt, Human
cugagaagguccuuaau

SEQ ID NO: 2273506 - RNA, 23 nt, Human
cugagaagguccuuaaugauccg

SEQ ID NO: 2273507 - RNA, 22 nt, Human
cugagaagagagaucaaaugga

SEQ ID NO: 2273508 - RNA, 17 nt, Human
cugagaagauugugaau

SEQ ID NO: 2273509 - RNA, 23 nt, Human
cugagaagagagaucaaauggaa

SEQ ID NO: 2273510 - RNA, 14 nt, Human
cugacuuugcucuu

SEQ ID NO: 2273511 - RNA, 21 nt, Human
cugacuuggggagauggaguu

SEQ ID NO: 2273512 - RNA, 22 nt, Human
cugacuuggggagauggaguuc

SEQ ID NO: 2273513 - RNA, 20 nt, Human
cugacuuggggagauggagu

SEQ ID NO: 2273514 - RNA, 23 nt, Human
cugagaaagacuauucaaacagu

SEQ ID NO: 2273515 - RNA, 22 nt, Human
cugagaaagacuauucaaacag

SEQ ID NO: 2273516 - RNA, 17 nt, Human
cugagaacccugcgugg

SEQ ID NO: 2273517 - RNA, 17 nt, Human
cugagaacacugugaaa

SEQ ID NO: 2273518 - RNA, 22 nt, Human
cugagaacacugugaaaacauu

SEQ ID NO: 2273519 - RNA, 23 nt, Human
cugagaacccugcguggggacag

SEQ ID NO: 2273520 - RNA, 18 nt, Human
cugagaacccugcguggg

SEQ ID NO: 2273521 - RNA, 22 nt, Human
cugagaacccugcguggggaca

SEQ ID NO: 2273522 - RNA, 16 nt, Human
cugacuuugcucuuuc

SEQ ID NO: 2273523 - RNA, 22 nt, Human
cugacuuucauuucuugaggua

SEQ ID NO: 2273524 - RNA, 15 nt, Human
cugacuuugcucuuu

SEQ ID NO: 2273525 - RNA, 11 nt, Human
cugagaacacu

SEQ ID NO: 2273526 - RNA, 15 nt, Human
cugagaacacuguga

SEQ ID NO: 2273527 - RNA, 11 nt, Human
cugagaaauuu

SEQ ID NO: 2273528 - RNA, 14 nt, Human
cugagaaauuuaua

SEQ ID NO: 2273529 - RNA, 21 nt, Human
cugacucugcccccugcuggc

SEQ ID NO: 2273530 - RNA, 19 nt, Human
cugacucugcccccugcug

SEQ ID NO: 2273531 - RNA, 20 nt, Human
cugacucugcccccugcugg

SEQ ID NO: 2273532 - RNA, 20 nt, Human
cugacucugaaaucugaaga

SEQ ID NO: 2273533 - RNA, 12 nt, Human
cugacucugccc

SEQ ID NO: 2273534 - RNA, 14 nt, Human
cugacucugccccc

SEQ ID NO: 2273535 - RNA, 15 nt, Human
cugacucugcccccu

SEQ ID NO: 2273536 - RNA, 16 nt, Human
cugacuguuuucucuu

SEQ ID NO: 2273537 - RNA, 18 nt, Human
cugacucucugugaccug

SEQ ID NO: 2273538 - RNA, 16 nt, Human
cugacucucugugacc

SEQ ID NO: 2273539 - RNA, 14 nt, Human
cugacucucaaauc

SEQ ID NO: 2273540 - RNA, 14 nt, Human
cugacucugaaauc

SEQ ID NO: 2273541 - RNA, 15 nt, Human
cugacucugaaaucu

SEQ ID NO: 2273542 - RNA, 17 nt, Human
cugacucugaaaucuga

SEQ ID NO: 2273543 - RNA, 17 nt, Human
cugacucuuaagaagac

SEQ ID NO: 2273544 - RNA, 17 nt, Human
cugacucacaagaagac

SEQ ID NO: 2273545 - RNA, 21 nt, Human
cugacucacaagaagaccaga

SEQ ID NO: 2273546 - RNA, 14 nt, Human
cugacucagggcuc

SEQ ID NO: 2273547 - RNA, 12 nt, Human
cugacucagggc

SEQ ID NO: 2273548 - RNA, 14 nt, Human
cugacucucuguga

SEQ ID NO: 2273549 - RNA, 13 nt, Human
cugacucucugug

SEQ ID NO: 2273550 - RNA, 21 nt, Human
cugacucuaggugcccuugga

SEQ ID NO: 2273551 - RNA, 21 nt, Human
cugacucgucugacugugugu

SEQ ID NO: 2273552 - RNA, 18 nt, Human
cugacucaacauguuacu

SEQ ID NO: 2273553 - RNA, 13 nt, Human
cugacucacaaga

SEQ ID NO: 2273554 - RNA, 14 nt, Human
cugacucacaagaa

SEQ ID NO: 2273555 - RNA, 15 nt, Human
cugacucacaagaag

SEQ ID NO: 2273556 - RNA, 16 nt, Human
cugacucacaagaaga

SEQ ID NO: 2273557 - RNA, 22 nt, Human
cugacuucaggggcugcccgcu

SEQ ID NO: 2273558 - RNA, 11 nt, Human
cugacuucugc

SEQ ID NO: 2273559 - RNA, 23 nt, Human
cugacuucaucucccaccuagca

SEQ ID NO: 2273560 - RNA, 17 nt, Human
cugacuucaucucccac

SEQ ID NO: 2273561 - RNA, 16 nt, Human
cugacuucuaaguaaa

SEQ ID NO: 2273562 - RNA, 12 nt, Human
cugacuucugcc

SEQ ID NO: 2273563 - RNA, 13 nt, Human
cugacuucugccu

SEQ ID NO: 2273564 - RNA, 14 nt, Human
cugacuucugccug

SEQ ID NO: 2273565 - RNA, 15 nt, Human
cugacuucugccugg

SEQ ID NO: 2273566 - RNA, 16 nt, Human
cugacuucugccugga

SEQ ID NO: 2273567 - RNA, 18 nt, Human
cugacuucugccuggaga

SEQ ID NO: 2273568 - RNA, 19 nt, Human
cugacuucugccuggagac

SEQ ID NO: 2273569 - RNA, 18 nt, Human
cugacuguuuucucuuga

SEQ ID NO: 2273570 - RNA, 14 nt, Human
cugacuucaggggc

SEQ ID NO: 2273571 - RNA, 19 nt, Human
cugacuucaggggcugccc

SEQ ID NO: 2273572 - RNA, 20 nt, Human
cugacuucaggggcugcccg

SEQ ID NO: 2273573 - RNA, 21 nt, Human
cugacuucaggggcugcccgc

SEQ ID NO: 2273574 - RNA, 15 nt, Human
cugacuucuaaguaa

SEQ ID NO: 2273575 - RNA, 13 nt, Human
cugacuucuaagu

SEQ ID NO: 2273576 - RNA, 17 nt, Human
cugacaguccucuccac

SEQ ID NO: 2273577 - RNA, 19 nt, Human
cugacaguccucuccaccu

SEQ ID NO: 2273578 - RNA, 21 nt, Human
cugacaguccucuccaccuag

SEQ ID NO: 2273579 - RNA, 15 nt, Human
cugacagucuugugc

SEQ ID NO: 2273580 - RNA, 21 nt, Human
cugacaggcaaugcuggcugu

SEQ ID NO: 2273581 - RNA, 17 nt, Human
cugacagcugcuccuag

SEQ ID NO: 2273582 - RNA, 15 nt, Human
cugacaggcagccug

SEQ ID NO: 2273583 - RNA, 16 nt, Human
cugacagcugcuccua

SEQ ID NO: 2273584 - RNA, 15 nt, Human
cugacagcugcuccu

SEQ ID NO: 2273585 - RNA, 20 nt, Human
cugacaggcagccuggacau

SEQ ID NO: 2273586 - RNA, 23 nt, Human
cugacaggcagccuggacauaga

SEQ ID NO: 2273587 - RNA, 21 nt, Human
cugacaucuuaguauuugcau

SEQ ID NO: 2273588 - RNA, 15 nt, Human
cugacaugauuccuu

SEQ ID NO: 2273589 - RNA, 14 nt, Human
cugacauccccacu

SEQ ID NO: 2273590 - RNA, 16 nt, Human
cugacaucuguguuuc

SEQ ID NO: 2273591 - RNA, 17 nt, Human
cugacaucuguguuuca

SEQ ID NO: 2273592 - RNA, 21 nt, Human
cugacaucuguguuucaagug

SEQ ID NO: 2273593 - RNA, 16 nt, Human
cugacaucuggaaucu

SEQ ID NO: 2273594 - RNA, 16 nt, Human
cugacaucucugcaau

SEQ ID NO: 2273595 - RNA, 15 nt, Human
cugacaucucugcaa

SEQ ID NO: 2273596 - RNA, 14 nt, Human
cugacaucucugca

SEQ ID NO: 2273597 - RNA, 14 nt, Human
cugacauuaacagu

SEQ ID NO: 2273598 - RNA, 16 nt, Human
cugacaugauuccuuc

SEQ ID NO: 2273599 - RNA, 21 nt, Human
cugacauguggggccagguca

SEQ ID NO: 2273600 - RNA, 21 nt, Human
cugacauuguuggccaaagcc

SEQ ID NO: 2273601 - RNA, 20 nt, Human
cugacaugauuccuuccugu

SEQ ID NO: 2273602 - RNA, 14 nt, Human
cugacauguggggc

SEQ ID NO: 2273603 - RNA, 19 nt, Human
cugacauguggggccaggu

SEQ ID NO: 2273604 - RNA, 14 nt, Human
cugaagaguccucu

SEQ ID NO: 2273605 - RNA, 22 nt, Human
cugaagaggcgggccagccagg

SEQ ID NO: 2273606 - RNA, 23 nt, Human
cugaagaggcgggccagccaggc

SEQ ID NO: 2273607 - RNA, 16 nt, Human
cugaagaguccucuga

SEQ ID NO: 2273608 - RNA, 15 nt, Human
cugaagaguccucug

SEQ ID NO: 2273609 - RNA, 18 nt, Human
cugaagaguccucugaau

SEQ ID NO: 2273610 - RNA, 20 nt, Human
cugaagaguggguuucacaa

SEQ ID NO: 2273611 - RNA, 23 nt, Human
cugaagauauaacuauugcccag

SEQ ID NO: 2273612 - RNA, 16 nt, Human
cugaagaugaucauuu

SEQ ID NO: 2273613 - RNA, 17 nt, Human
cugaagaugaucauuug

SEQ ID NO: 2273614 - RNA, 22 nt, Human
cugaagaugcagcaaaauguga

SEQ ID NO: 2273615 - RNA, 15 nt, Human
cugaagaugcagcuc

SEQ ID NO: 2273616 - RNA, 20 nt, Human
cugaagauggcauccuguga

SEQ ID NO: 2273617 - RNA, 16 nt, Human
cugaagaugcagcuca

SEQ ID NO: 2273618 - RNA, 22 nt, Human
cugaagaugcagcucacuaccc

SEQ ID NO: 2273619 - RNA, 23 nt, Human
cugaagauggcauccugugaagu

SEQ ID NO: 2273620 - RNA, 20 nt, Human
cugacagccucccaccccca

SEQ ID NO: 2273621 - RNA, 17 nt, Human
cugacagccucccaccc

SEQ ID NO: 2273622 - RNA, 12 nt, Human
cugacagcugcu

SEQ ID NO: 2273623 - RNA, 14 nt, Human
cugacagcugcucc

SEQ ID NO: 2273624 - RNA, 13 nt, Human
cugacagcugcuc

SEQ ID NO: 2273625 - RNA, 14 nt, Human
cugacagccuccca

SEQ ID NO: 2273626 - RNA, 13 nt, Human
cugacagccuccc

SEQ ID NO: 2273627 - RNA, 12 nt, Human
cugacagccucc

SEQ ID NO: 2273628 - RNA, 18 nt, Human
cugacagaugucagccga

SEQ ID NO: 2273629 - RNA, 15 nt, Human
cugaccaauauugua

SEQ ID NO: 2273630 - RNA, 18 nt, Human
cugaccaauauuguacag

SEQ ID NO: 2273631 - RNA, 17 nt, Human
cugaccaagagagaaag

SEQ ID NO: 2273632 - RNA, 14 nt, Human
cugaccaagagaga

SEQ ID NO: 2273633 - RNA, 16 nt, Human
cugaccaacauggaga

SEQ ID NO: 2273634 - RNA, 19 nt, Human
cugaccaacaguuccuuca

SEQ ID NO: 2273635 - RNA, 20 nt, Human
cugacauuaacaguuuucca

SEQ ID NO: 2273636 - RNA, 18 nt, Human
cugacauuaacaguuuuc

SEQ ID NO: 2273637 - RNA, 15 nt, Human
cugacauuaacaguu

SEQ ID NO: 2273638 - RNA, 21 nt, Human
cugacauuuggaguguucccc

SEQ ID NO: 2273639 - RNA, 18 nt, Human
cugacauuuggaguguuc

SEQ ID NO: 2273640 - RNA, 22 nt, Human
cugacauuguuggccaaagcca

SEQ ID NO: 2273641 - RNA, 19 nt, Human
cugaccaauauuguacagu

SEQ ID NO: 2273642 - RNA, 20 nt, Human
cugaccaauauuguacaguu

SEQ ID NO: 2273643 - RNA, 21 nt, Human
cugaccaauauuguacaguuu

SEQ ID NO: 2273644 - RNA, 20 nt, Human
cugaccacacuuccugucca

SEQ ID NO: 2273645 - RNA, 19 nt, Human
cugaccacacuuccugucc

SEQ ID NO: 2273646 - RNA, 18 nt, Human
cugaccacacuuccuguc

SEQ ID NO: 2273647 - RNA, 17 nt, Human
cugaccacacuuccugu

SEQ ID NO: 2273648 - RNA, 16 nt, Human
cugaccacacuuccug

SEQ ID NO: 2273649 - RNA, 13 nt, Human
cugaccacacuuc

SEQ ID NO: 2273650 - RNA, 12 nt, Human
cugaccacacuu

SEQ ID NO: 2273651 - RNA, 12 nt, Human
cugacccacugc

SEQ ID NO: 2273652 - RNA, 22 nt, Human
cugacuagaagggccaguccug

SEQ ID NO: 2273653 - RNA, 17 nt, Human
cugacccaggccgcagc

SEQ ID NO: 2273654 - RNA, 23 nt, Human
cugacuagaagggccaguccugc

SEQ ID NO: 2273655 - RNA, 18 nt, Human
cugacuagugaggaaaga

SEQ ID NO: 2273656 - RNA, 16 nt, Human
cugacccaugcugccc

SEQ ID NO: 2273657 - RNA, 14 nt, Human
cugacccaugcugc

SEQ ID NO: 2273658 - RNA, 15 nt, Human
cugacccaugcugcc

SEQ ID NO: 2273659 - RNA, 21 nt, Human
cugacccagccccuugagaaa

SEQ ID NO: 2273660 - RNA, 15 nt, Human
cugacccagccuguu

SEQ ID NO: 2273661 - RNA, 12 nt, Human
cugacccaggcc

SEQ ID NO: 2273662 - RNA, 13 nt, Human
cugacccaggccg

SEQ ID NO: 2273663 - RNA, 14 nt, Human
cugacccaggccgc

SEQ ID NO: 2273664 - RNA, 15 nt, Human
cugacccaggccgca

SEQ ID NO: 2273665 - RNA, 16 nt, Human
cugacccaggccgcag

SEQ ID NO: 2273666 - RNA, 13 nt, Human
cugacccaugcug

SEQ ID NO: 2273667 - RNA, 13 nt, Human
cugacccacugcu

SEQ ID NO: 2273668 - RNA, 14 nt, Human
cugacccacugcuu

SEQ ID NO: 2273669 - RNA, 22 nt, Human
cucucuacuccuaccucagccu

SEQ ID NO: 2273670 - RNA, 16 nt, Human
cucuccuuucuuuuuc

SEQ ID NO: 2273671 - RNA, 21 nt, Human
cucuccuuucuuuuucuucuu

SEQ ID NO: 2273672 - RNA, 20 nt, Human
cucucuacuccuaccucagc

SEQ ID NO: 2273673 - RNA, 19 nt, Human
cucucuacuccuaccucag

SEQ ID NO: 2273674 - RNA, 16 nt, Human
cucucuauagcaccag

SEQ ID NO: 2273675 - RNA, 12 nt, Human
cucucucacucc

SEQ ID NO: 2273676 - RNA, 12 nt, Human
cucucucccagu

SEQ ID NO: 2273677 - RNA, 17 nt, Human
cucucuccagauguuuc

SEQ ID NO: 2273678 - RNA, 14 nt, Human
cucucuccagaugu

SEQ ID NO: 2273679 - RNA, 12 nt, Human
cucucuccagga

SEQ ID NO: 2273680 - RNA, 13 nt, Human
cucucucccaguc

SEQ ID NO: 2273681 - RNA, 19 nt, Human
cucucucccagucuaccca

SEQ ID NO: 2273682 - RNA, 23 nt, Human
cucucucccagucuacccagaga

SEQ ID NO: 2273683 - RNA, 14 nt, Human
cucucucccaugga

SEQ ID NO: 2273684 - RNA, 20 nt, Human
cucucucccauggagcccca

SEQ ID NO: 2273685 - RNA, 14 nt, Human
cucucuccccucaa

SEQ ID NO: 2273686 - RNA, 14 nt, Human
cucucuccacccua

SEQ ID NO: 2273687 - RNA, 21 nt, Human
cucucucaauuuuugguugaa

SEQ ID NO: 2273688 - RNA, 12 nt, Human
cucucuccagau

SEQ ID NO: 2273689 - RNA, 13 nt, Human
cucucucaggcca

SEQ ID NO: 2273690 - RNA, 13 nt, Human
cucuccugccuac

SEQ ID NO: 2273691 - RNA, 12 nt, Human
cucuccuggagg

SEQ ID NO: 2273692 - RNA, 13 nt, Human
cucuccuggagga

SEQ ID NO: 2273693 - RNA, 21 nt, Human
cucuccuguccaaccuaaccc

SEQ ID NO: 2273694 - RNA, 16 nt, Human
cucuccuuucuuucua

SEQ ID NO: 2273695 - RNA, 14 nt, Human
cucuccuuucuuuu

SEQ ID NO: 2273696 - RNA, 14 nt, Human
cucuccuuccugug

SEQ ID NO: 2273697 - RNA, 16 nt, Human
cucuccuuccuggagc

SEQ ID NO: 2273698 - RNA, 14 nt, Human
cucuccucuugcca

SEQ ID NO: 2273699 - RNA, 15 nt, Human
cucuccucuugccac

SEQ ID NO: 2273700 - RNA, 16 nt, Human
cucuccucuugccacu

SEQ ID NO: 2273701 - RNA, 17 nt, Human
cucuccucuugccacug

SEQ ID NO: 2273702 - RNA, 12 nt, Human
cucuccugccua

SEQ ID NO: 2273703 - RNA, 16 nt, Human
cucuccagcuccaaga

SEQ ID NO: 2273704 - RNA, 21 nt, Human
cucuccugauagucuuucagu

SEQ ID NO: 2273705 - RNA, 19 nt, Human
cucuccucuugccacugcc

SEQ ID NO: 2273706 - RNA, 22 nt, Human
cucuccucuugccacugccucu

SEQ ID NO: 2273707 - RNA, 13 nt, Human
cucuccucugcug

SEQ ID NO: 2273708 - RNA, 14 nt, Human
cucuccucugcugc

SEQ ID NO: 2273709 - RNA, 15 nt, Human
cucuccucugcugcu

SEQ ID NO: 2273710 - RNA, 18 nt, Human
cucuccucugcugcuggc

SEQ ID NO: 2273711 - RNA, 14 nt, Human
cucuccccagcaag

SEQ ID NO: 2273712 - RNA, 22 nt, Human
cucuccccagcaagugagagcu

SEQ ID NO: 2273713 - RNA, 24 nt, Human
cucuccccagcaagugagagcugg

SEQ ID NO: 2273714 - RNA, 12 nt, Human
cucuccucugcu

SEQ ID NO: 2273715 - RNA, 15 nt, Human
cucuccacugccuuc

SEQ ID NO: 2273716 - RNA, 14 nt, Human
cucuccagccugac

SEQ ID NO: 2273717 - RNA, 19 nt, Human
cucuccagccccuggaugc

SEQ ID NO: 2273718 - RNA, 14 nt, Human
cucuccagcuccaa

SEQ ID NO: 2273719 - RNA, 15 nt, Human
cucuccagcuccaag

SEQ ID NO: 2273720 - RNA, 23 nt, Human
cucuccaagggcuucugcacccu

SEQ ID NO: 2273721 - RNA, 13 nt, Human
cucuccagcuaua

SEQ ID NO: 2273722 - RNA, 13 nt, Human
cucuccagcucca

SEQ ID NO: 2273723 - RNA, 12 nt, Human
cucuccacugcc

SEQ ID NO: 2273724 - RNA, 14 nt, Human
cucuccacugccuu

SEQ ID NO: 2273725 - RNA, 14 nt, Human
cucuccagccccug

SEQ ID NO: 2273726 - RNA, 11 nt, Human
cucuccacugc

SEQ ID NO: 2273727 - RNA, 21 nt, Human
cucuccaagggcuucugcacc

SEQ ID NO: 2273728 - RNA, 22 nt, Human
cucuccaagggcuucugcaccc

SEQ ID NO: 2273729 - RNA, 17 nt, Human
cucuccaagucucagug

SEQ ID NO: 2273730 - RNA, 15 nt, Human
cucuccagccccugg

SEQ ID NO: 2273731 - RNA, 16 nt, Human
cucuccagccccugga

SEQ ID NO: 2273732 - RNA, 17 nt, Human
cucuccagccccuggau

SEQ ID NO: 2273733 - RNA, 18 nt, Human
cucuccagccccuggaug

SEQ ID NO: 2273734 - RNA, 16 nt, Human
cucuccaaccuggaca

SEQ ID NO: 2273735 - RNA, 12 nt, Human
cucuccaagggc

SEQ ID NO: 2273736 - RNA, 14 nt, Human
cucuccaaccugga

SEQ ID NO: 2273737 - RNA, 15 nt, Human
cucuccaaaaaugca

SEQ ID NO: 2273738 - RNA, 13 nt, Human
cucuccaagggcu

SEQ ID NO: 2273739 - RNA, 14 nt, Human
cucuccaagggcuu

SEQ ID NO: 2273740 - RNA, 15 nt, Human
cucuccaagggcuuc

SEQ ID NO: 2273741 - RNA, 17 nt, Human
cucuccaagggcuucug

SEQ ID NO: 2273742 - RNA, 13 nt, Human
cucuccaaccugg

SEQ ID NO: 2273743 - RNA, 20 nt, Human
cucucauuccccagguggcu

SEQ ID NO: 2273744 - RNA, 16 nt, Human
cucucauuccccaggu

SEQ ID NO: 2273745 - RNA, 21 nt, Human
cucucauuccccagguggcug

SEQ ID NO: 2273746 - RNA, 15 nt, Human
cucucauuccccagg

SEQ ID NO: 2273747 - RNA, 14 nt, Human
cucucauuccccag

SEQ ID NO: 2273748 - RNA, 11 nt, Human
cucucauuccc

SEQ ID NO: 2273749 - RNA, 20 nt, Human
cucucauguuuucaacugcc

SEQ ID NO: 2273750 - RNA, 14 nt, Human
cucucaugaaccuc

SEQ ID NO: 2273751 - RNA, 17 nt, Human
cucucaggccagcugcu

SEQ ID NO: 2273752 - RNA, 18 nt, Human
cucucaggccagcugcuu

SEQ ID NO: 2273753 - RNA, 19 nt, Human
cucucaggccagcugcuug

SEQ ID NO: 2273754 - RNA, 21 nt, Human
cucucaggccagcugcuuggg

SEQ ID NO: 2273755 - RNA, 12 nt, Human
cucucaggccaa

SEQ ID NO: 2273756 - RNA, 20 nt, Human
cucucaggccaaacucaccu

SEQ ID NO: 2273757 - RNA, 21 nt, Human
cucucaggccaaacucaccug

SEQ ID NO: 2273758 - RNA, 22 nt, Human
cucucaggccaaacucaccugc

SEQ ID NO: 2273759 - RNA, 23 nt, Human
cucucaggccaaacucaccugcc

SEQ ID NO: 2273760 - RNA, 13 nt, Human
cucucaggccagc

SEQ ID NO: 2273761 - RNA, 15 nt, Human
cucucaggccagcug

SEQ ID NO: 2273762 - RNA, 21 nt, Human
cucuagugcccuccacagccg

SEQ ID NO: 2273763 - RNA, 16 nt, Human
cucuagugccuucuaa

SEQ ID NO: 2273764 - RNA, 14 nt, Human
cucuagugccuucu

SEQ ID NO: 2273765 - RNA, 13 nt, Human
cucuagugcugug

SEQ ID NO: 2273766 - RNA, 12 nt, Human
cucuagugcugu

SEQ ID NO: 2273767 - RNA, 17 nt, Human
cucuagugcugugaaaa

SEQ ID NO: 2273768 - RNA, 16 nt, Human
cucuagugcugugaaa

SEQ ID NO: 2273769 - RNA, 15 nt, Human
cucuagugcugugaa

SEQ ID NO: 2273770 - RNA, 14 nt, Human
cucuagugcuguga

SEQ ID NO: 2273771 - RNA, 20 nt, Human
cucuagugcugugaaaaaaa

SEQ ID NO: 2273772 - RNA, 19 nt, Human
cucuagugcugugaaaaaa

SEQ ID NO: 2273773 - RNA, 18 nt, Human
cucuagugcugugaaaaa

SEQ ID NO: 2273774 - RNA, 15 nt, Human
cucuaguuugauuaa

SEQ ID NO: 2273775 - RNA, 21 nt, Human
cucuaguuugauuaaauucuu

SEQ ID NO: 2273776 - RNA, 18 nt, Human
cucuaguucuuuguucau

SEQ ID NO: 2273777 - RNA, 13 nt, Human
cucuaguucuuug

SEQ ID NO: 2273778 - RNA, 15 nt, Human
cucuaguucuuuguu

SEQ ID NO: 2273779 - RNA, 20 nt, Human
cucuaguuugauuaaauucu

SEQ ID NO: 2273780 - RNA, 19 nt, Human
cucuaguuugauuaaauuc

SEQ ID NO: 2273781 - RNA, 19 nt, Human
cucuacuccuaccucagcc

SEQ ID NO: 2273782 - RNA, 16 nt, Human
cucuacuccuaccuca

SEQ ID NO: 2273783 - RNA, 21 nt, Human
cucuacuaacaaucagcuccu

SEQ ID NO: 2273784 - RNA, 19 nt, Human
cucuacuaaaaauacagaa

SEQ ID NO: 2273785 - RNA, 16 nt, Human
cucuacuaaaaaugca

SEQ ID NO: 2273786 - RNA, 22 nt, Human
cucuacuaaaaauacaaaaauu

SEQ ID NO: 2273787 - RNA, 15 nt, Human
cucuacuaaaaagaa

SEQ ID NO: 2273788 - RNA, 19 nt, Human
cucuacuaaaaagaaggaa

SEQ ID NO: 2273789 - RNA, 20 nt, Human
cucuacguggcaaauuaacu

SEQ ID NO: 2273790 - RNA, 16 nt, Human
cucuacuuagcauguc

SEQ ID NO: 2273791 - RNA, 17 nt, Human
cucuacuuaauccaaug

SEQ ID NO: 2273792 - RNA, 18 nt, Human
cucuacuuaauccaaugg

SEQ ID NO: 2273793 - RNA, 21 nt, Human
cucuacugggagccuacccac

SEQ ID NO: 2273794 - RNA, 18 nt, Human
cucuacugggagccuacc

SEQ ID NO: 2273795 - RNA, 17 nt, Human
cucuacuuagcaugucc

SEQ ID NO: 2273796 - RNA, 19 nt, Human
cucuacuuagcaugucccu

SEQ ID NO: 2273797 - RNA, 15 nt, Human
cucuacuuaaugaga

SEQ ID NO: 2273798 - RNA, 20 nt, Human
cucuacuuagcaugucccua

SEQ ID NO: 2273799 - RNA, 22 nt, Human
cucuaccauuugcagaguccug

SEQ ID NO: 2273800 - RNA, 20 nt, Human
cucuaccauuugcagagucc

SEQ ID NO: 2273801 - RNA, 18 nt, Human
cucuacccagggccugca

SEQ ID NO: 2273802 - RNA, 17 nt, Human
cucuacccagggccugc

SEQ ID NO: 2273803 - RNA, 14 nt, Human
cucuacccagggcc

SEQ ID NO: 2273804 - RNA, 13 nt, Human
cucuacccagggc

SEQ ID NO: 2273805 - RNA, 20 nt, Human
cucuaccauccccuguagag

SEQ ID NO: 2273806 - RNA, 18 nt, Human
cucuaccagacuguguau

SEQ ID NO: 2273807 - RNA, 20 nt, Human
cucuaccaagcuauccuggc

SEQ ID NO: 2273808 - RNA, 17 nt, Human
cucuacaucuucugccu

SEQ ID NO: 2273809 - RNA, 18 nt, Human
cucuacaucuucugccuu

SEQ ID NO: 2273810 - RNA, 18 nt, Human
cucuacccucccaccccc

SEQ ID NO: 2273811 - RNA, 17 nt, Human
cucuacccucccacccc

SEQ ID NO: 2273812 - RNA, 16 nt, Human
cucuacccucccaccc

SEQ ID NO: 2273813 - RNA, 15 nt, Human
cucuacccucccacc

SEQ ID NO: 2273814 - RNA, 14 nt, Human
cucuacccucccac

SEQ ID NO: 2273815 - RNA, 16 nt, Human
cucuacccauauuaca

SEQ ID NO: 2273816 - RNA, 19 nt, Human
cucuacccauauuacagau

SEQ ID NO: 2273817 - RNA, 20 nt, Human
cucuaccucauaucaguuug

SEQ ID NO: 2273818 - RNA, 22 nt, Human
cucuacccucccacccccuucu

SEQ ID NO: 2273819 - RNA, 22 nt, Human
cucuaccugacacucccuuggg

SEQ ID NO: 2273820 - RNA, 12 nt, Human
cucuaccugaca

SEQ ID NO: 2273821 - RNA, 13 nt, Human
cucuacccuggca

SEQ ID NO: 2273822 - RNA, 13 nt, Human
cucuagccugggc

SEQ ID NO: 2273823 - RNA, 19 nt, Human
cucuagccaaaugguuuaa

SEQ ID NO: 2273824 - RNA, 19 nt, Human
cucuagauuuuguuuugcu

SEQ ID NO: 2273825 - RNA, 20 nt, Human
cucuagauuuuguuuugcuu

SEQ ID NO: 2273826 - RNA, 17 nt, Human
cucuagauuuuguuuug

SEQ ID NO: 2273827 - RNA, 14 nt, Human
cucuagccugggca

SEQ ID NO: 2273828 - RNA, 23 nt, Human
cucuagcugggggugggccaggc

SEQ ID NO: 2273829 - RNA, 20 nt, Human
cucuagcugggggugggcca

SEQ ID NO: 2273830 - RNA, 15 nt, Human
cucuaggaaauauuu

SEQ ID NO: 2273831 - RNA, 12 nt, Human
cucuagaaauuu

SEQ ID NO: 2273832 - RNA, 15 nt, Human
cucuagaagccaagg

SEQ ID NO: 2273833 - RNA, 13 nt, Human
cucuacuuugagg

SEQ ID NO: 2273834 - RNA, 22 nt, Human
cucuagaagccaagggaaaggg

SEQ ID NO: 2273835 - RNA, 18 nt, Human
cucuagaagccaagggaa

SEQ ID NO: 2273836 - RNA, 19 nt, Human
cucuagaagccaagggaaa

SEQ ID NO: 2273837 - RNA, 23 nt, Human
cucuagacaacccugcaaaggac

SEQ ID NO: 2273838 - RNA, 18 nt, Human
cucuagacaacccugcaa

SEQ ID NO: 2273839 - RNA, 17 nt, Human
cucuagacaacccugca

SEQ ID NO: 2273840 - RNA, 23 nt, Human
cucuagaauuuuaagugcuuugu

SEQ ID NO: 2273841 - RNA, 20 nt, Human
cucuagaauuuuaagugcuu

SEQ ID NO: 2273842 - RNA, 21 nt, Human
cucuagacacugccacacagg

SEQ ID NO: 2273843 - RNA, 16 nt, Human
cucuagacacugccac

SEQ ID NO: 2273844 - RNA, 13 nt, Human
cucuagagcaggg

SEQ ID NO: 2273845 - RNA, 16 nt, Human
cucuagagcagggauu

SEQ ID NO: 2273846 - RNA, 23 nt, Human
cucuagggaaaaaccagcgugug

SEQ ID NO: 2273847 - RNA, 14 nt, Human
cucuagggaccccu

SEQ ID NO: 2273848 - RNA, 12 nt, Human
cucuaggcuggg

SEQ ID NO: 2273849 - RNA, 13 nt, Human
cucuaggcugggg

SEQ ID NO: 2273850 - RNA, 14 nt, Human
cucuaggcugggga

SEQ ID NO: 2273851 - RNA, 15 nt, Human
cucuaggcuggggaa

SEQ ID NO: 2273852 - RNA, 17 nt, Human
cucuaggaaauauuuau

SEQ ID NO: 2273853 - RNA, 16 nt, Human
cucuagcugugggggu

SEQ ID NO: 2273854 - RNA, 13 nt, Human
cucuagcuggugg

SEQ ID NO: 2273855 - RNA, 17 nt, Human
cucuagcuggugguuuc

SEQ ID NO: 2273856 - RNA, 18 nt, Human
cucuagcuggugguuuca

SEQ ID NO: 2273857 - RNA, 18 nt, Human
cucuagugcccuccacag

SEQ ID NO: 2273858 - RNA, 14 nt, Human
cucuagugcccucc

SEQ ID NO: 2273859 - RNA, 13 nt, Human
cucuagugcccuc

SEQ ID NO: 2273860 - RNA, 15 nt, Human
cucuagguggggcgg

SEQ ID NO: 2273861 - RNA, 15 nt, Human
cucuaguauuccaga

SEQ ID NO: 2273862 - RNA, 22 nt, Human
cucuaggugcccuuggaggcca

SEQ ID NO: 2273863 - RNA, 13 nt, Human
cucuagguggggc

SEQ ID NO: 2273864 - RNA, 14 nt, Human
cucuagguggggcg

SEQ ID NO: 2273865 - RNA, 16 nt, Human
cucuagggaccccucc

SEQ ID NO: 2273866 - RNA, 18 nt, Human
cucuagggaccccuccuc

SEQ ID NO: 2273867 - RNA, 19 nt, Human
cucuagggaccccuccucc

SEQ ID NO: 2273868 - RNA, 20 nt, Human
cucuagggaccccuccuccc

SEQ ID NO: 2273869 - RNA, 22 nt, Human
cucuagggagggacauggcccc

SEQ ID NO: 2273870 - RNA, 14 nt, Human
cucuagggcagugg

SEQ ID NO: 2273871 - RNA, 17 nt, Human
cucuaggggucaggcuc

SEQ ID NO: 2273872 - RNA, 20 nt, Human
cucuaggggucaggcuccau

SEQ ID NO: 2273873 - RNA, 13 nt, Human
cucuacaaaaagc

SEQ ID NO: 2273874 - RNA, 20 nt, Human
cucggaucaccgagaguagc

SEQ ID NO: 2273875 - RNA, 13 nt, Human
cucggcuccugcu

SEQ ID NO: 2273876 - RNA, 14 nt, Human
cucggcuccugcug

SEQ ID NO: 2273877 - RNA, 15 nt, Human
cucggcuccugcugc

SEQ ID NO: 2273878 - RNA, 17 nt, Human
cucggcuuuucucagcu

SEQ ID NO: 2273879 - RNA, 16 nt, Human
cucggcuccugcugca

SEQ ID NO: 2273880 - RNA, 17 nt, Human
cucggcuccugcugcac

SEQ ID NO: 2273881 - RNA, 18 nt, Human
cucggcuuuucucagcug

SEQ ID NO: 2273882 - RNA, 19 nt, Human
cucggcuccugcugcacca

SEQ ID NO: 2273883 - RNA, 15 nt, Human
cucuaaccccaggcc

SEQ ID NO: 2273884 - RNA, 16 nt, Human
cucuaaccccaggccc

SEQ ID NO: 2273885 - RNA, 17 nt, Human
cucuaaccccaggcccc

SEQ ID NO: 2273886 - RNA, 18 nt, Human
cucuaaccccaggccccg

SEQ ID NO: 2273887 - RNA, 15 nt, Human
cucuaacccuaggca

SEQ ID NO: 2273888 - RNA, 19 nt, Human
cucuaaccccaggccccga

SEQ ID NO: 2273889 - RNA, 21 nt, Human
cucuaaccccaggccccgagg

SEQ ID NO: 2273890 - RNA, 13 nt, Human
cucuacagaggcc

SEQ ID NO: 2273891 - RNA, 22 nt, Human
cucuacagagcuucccugacuc

SEQ ID NO: 2273892 - RNA, 20 nt, Human
cucuacagagcuucccugac

SEQ ID NO: 2273893 - RNA, 18 nt, Human
cucuacagagcuucccug

SEQ ID NO: 2273894 - RNA, 17 nt, Human
cucuacagagcuucccu

SEQ ID NO: 2273895 - RNA, 17 nt, Human
cucuaauuggaagaaau

SEQ ID NO: 2273896 - RNA, 20 nt, Human
cucuaauucccauuuugcaa

SEQ ID NO: 2273897 - RNA, 16 nt, Human
cucuacaaacucccac

SEQ ID NO: 2273898 - RNA, 22 nt, Human
cucuaauuggaagaaauuccug

SEQ ID NO: 2273899 - RNA, 16 nt, Human
cucuaauuuauuuugu

SEQ ID NO: 2273900 - RNA, 14 nt, Human
cucuacacugugaa

SEQ ID NO: 2273901 - RNA, 17 nt, Human
cucuacaacugaguccu

SEQ ID NO: 2273902 - RNA, 23 nt, Human
cucuacaacugaguccuuaaaca

SEQ ID NO: 2273903 - RNA, 16 nt, Human
cucuacaacugagucc

SEQ ID NO: 2273904 - RNA, 17 nt, Human
cucuacaaacucccacu

SEQ ID NO: 2273905 - RNA, 19 nt, Human
cucuacagaggccaugggc

SEQ ID NO: 2273906 - RNA, 21 nt, Human
cucuacagcuaaucagcauuc

SEQ ID NO: 2273907 - RNA, 23 nt, Human
cucuacagagcuucccugacuca

SEQ ID NO: 2273908 - RNA, 15 nt, Human
cucuacaucuucugc

SEQ ID NO: 2273909 - RNA, 14 nt, Human
cucuacagaggcca

SEQ ID NO: 2273910 - RNA, 16 nt, Human
cucuacagaggccaug

SEQ ID NO: 2273911 - RNA, 23 nt, Human
cucggagccucauccgaggcagg

SEQ ID NO: 2273912 - RNA, 22 nt, Human
cucggagccucauccgaggcag

SEQ ID NO: 2273913 - RNA, 16 nt, Human
cucggagccucauccg

SEQ ID NO: 2273914 - RNA, 13 nt, Human
cucggagccucau

SEQ ID NO: 2273915 - RNA, 17 nt, Human
cucggaggaagccccca

SEQ ID NO: 2273916 - RNA, 13 nt, Human
cucggaggaagcc

SEQ ID NO: 2273917 - RNA, 12 nt, Human
cucggaggcccc

SEQ ID NO: 2273918 - RNA, 13 nt, Human
cucggaggcccca

SEQ ID NO: 2273919 - RNA, 15 nt, Human
cucggaggccccaaa

SEQ ID NO: 2273920 - RNA, 14 nt, Human
cucgcuucccccau

SEQ ID NO: 2273921 - RNA, 16 nt, Human
cucgcuguugcugaau

SEQ ID NO: 2273922 - RNA, 13 nt, Human
cucgcuguugcug

SEQ ID NO: 2273923 - RNA, 15 nt, Human
cucgcuguugcugaa

SEQ ID NO: 2273924 - RNA, 18 nt, Human
cucgcuucccccauagcc

SEQ ID NO: 2273925 - RNA, 16 nt, Human
cucgcuucccccauag

SEQ ID NO: 2273926 - RNA, 19 nt, Human
cucgcuucccccauagcca

SEQ ID NO: 2273927 - RNA, 17 nt, Human
cucggaguaucugggaa

SEQ ID NO: 2273928 - RNA, 16 nt, Human
cucggaggcugccccc

SEQ ID NO: 2273929 - RNA, 17 nt, Human
cucggagggauuccccu

SEQ ID NO: 2273930 - RNA, 18 nt, Human
cucggaggccccaaagga

SEQ ID NO: 2273931 - RNA, 12 nt, Human
cucggaggcugc

SEQ ID NO: 2273932 - RNA, 13 nt, Human
cucggaggcugcc

SEQ ID NO: 2273933 - RNA, 15 nt, Human
cucggaggcugcccc

SEQ ID NO: 2273934 - RNA, 21 nt, Human
cucggaguaucugggaacugu

SEQ ID NO: 2273935 - RNA, 20 nt, Human
cucggaguaucugggaacug

SEQ ID NO: 2273936 - RNA, 14 nt, Human
cucggcucacugca

SEQ ID NO: 2273937 - RNA, 19 nt, Human
cucggcuccccaugugucc

SEQ ID NO: 2273938 - RNA, 22 nt, Human
cucggcuccccauguguccugg

SEQ ID NO: 2273939 - RNA, 18 nt, Human
cucggcucacugcauccu

SEQ ID NO: 2273940 - RNA, 17 nt, Human
cucggcucacugcaucc

SEQ ID NO: 2273941 - RNA, 19 nt, Human
cucgcuggacucucagucu

SEQ ID NO: 2273942 - RNA, 12 nt, Human
cucgcuguugcu

SEQ ID NO: 2273943 - RNA, 15 nt, Human
cucgcugcuucugug

SEQ ID NO: 2273944 - RNA, 16 nt, Human
cucgcuggacucucag

SEQ ID NO: 2273945 - RNA, 15 nt, Human
cucgcuggacucuca

SEQ ID NO: 2273946 - RNA, 19 nt, Human
cucgcugccagcucuguau

SEQ ID NO: 2273947 - RNA, 20 nt, Human
cucgcugcugcgcccugggc

SEQ ID NO: 2273948 - RNA, 13 nt, Human
cuccuucaccuuu

SEQ ID NO: 2273949 - RNA, 16 nt, Human
cucgcugccagcucug

SEQ ID NO: 2273950 - RNA, 13 nt, Human
cucgcugccagcu

SEQ ID NO: 2273951 - RNA, 19 nt, Human
cuccuucacagaugggugc

SEQ ID NO: 2273952 - RNA, 20 nt, Human
cuccugugugugcgccuaca

SEQ ID NO: 2273953 - RNA, 18 nt, Human
cuccuguguagcugggau

SEQ ID NO: 2273954 - RNA, 14 nt, Human
cuccuguguacagg

SEQ ID NO: 2273955 - RNA, 14 nt, Human
cuccugugugugcg

SEQ ID NO: 2273956 - RNA, 16 nt, Human
cuccuucacagauggg

SEQ ID NO: 2273957 - RNA, 17 nt, Human
cuccuucacagaugggu

SEQ ID NO: 2273958 - RNA, 21 nt, Human
cucccagguaccagcugcgcu

SEQ ID NO: 2273959 - RNA, 22 nt, Human
cucccagguaccagcugcgcuu

SEQ ID NO: 2273960 - RNA, 17 nt, Human
cucccagguaccagcug

SEQ ID NO: 2273961 - RNA, 18 nt, Human
cucccagguaccagcugc

SEQ ID NO: 2273962 - RNA, 19 nt, Human
cucccagguaccagcugcg

SEQ ID NO: 2273963 - RNA, 16 nt, Human
cucccagguaccagcu

SEQ ID NO: 2273964 - RNA, 24 nt, Human
cucccagguaccagcugcgcuugc

SEQ ID NO: 2273965 - RNA, 11 nt, Human
cucccaucugg

SEQ ID NO: 2273966 - RNA, 21 nt, Human
cucccaucucacacaugagca

SEQ ID NO: 2273967 - RNA, 11 nt, Human
cucccaucugu

SEQ ID NO: 2273968 - RNA, 14 nt, Human
cucccaucugugaa

SEQ ID NO: 2273969 - RNA, 15 nt, Human
cucccaucugugaaa

SEQ ID NO: 2273970 - RNA, 18 nt, Human
cucccaucugugaaagga

SEQ ID NO: 2273971 - RNA, 23 nt, Human
cucccaucugugaaaggaaagag

SEQ ID NO: 2273972 - RNA, 22 nt, Human
cucccaaagugcugggauuaca

SEQ ID NO: 2273973 - RNA, 18 nt, Human
cucccaaagugcugggau

SEQ ID NO: 2273974 - RNA, 16 nt, Human
cucccaacucacccca

SEQ ID NO: 2273975 - RNA, 17 nt, Human
cucccaacucaccccag

SEQ ID NO: 2273976 - RNA, 23 nt, Human
cucccagggccagggcccugcag

SEQ ID NO: 2273977 - RNA, 22 nt, Human
cucccagggccagggcccugca

SEQ ID NO: 2273978 - RNA, 18 nt, Human
cucccaaggcugcgucug

SEQ ID NO: 2273979 - RNA, 21 nt, Human
cucccaaggcugcgucuggag

SEQ ID NO: 2273980 - RNA, 22 nt, Human
cucccaaggcugcgucuggagg

SEQ ID NO: 2273981 - RNA, 19 nt, Human
cucccaggggcuggcuuca

SEQ ID NO: 2273982 - RNA, 22 nt, Human
cucccaacucaccccagcccca

SEQ ID NO: 2273983 - RNA, 17 nt, Human
cucccaaagugcuggga

SEQ ID NO: 2273984 - RNA, 13 nt, Human
cuccaugugggcu

SEQ ID NO: 2273985 - RNA, 22 nt, Human
cuccaugucucugagcauuaga

SEQ ID NO: 2273986 - RNA, 13 nt, Human
cuccaugucucug

SEQ ID NO: 2273987 - RNA, 15 nt, Human
cuccauggcuuccuc

SEQ ID NO: 2273988 - RNA, 16 nt, Human
cuccauggcuuccucc

SEQ ID NO: 2273989 - RNA, 17 nt, Human
cuccauggcuuccuccu

SEQ ID NO: 2273990 - RNA, 18 nt, Human
cuccauggcuuccuccuc

SEQ ID NO: 2273991 - RNA, 19 nt, Human
cuccauggcuuccuccucc

SEQ ID NO: 2273992 - RNA, 20 nt, Human
cuccauggcuuccuccuccc

SEQ ID NO: 2273993 - RNA, 21 nt, Human
cuccauggcuuccuccucccu

SEQ ID NO: 2273994 - RNA, 12 nt, Human
cuccaucuuauu

SEQ ID NO: 2273995 - RNA, 12 nt, Human
cuccaucuguuu

SEQ ID NO: 2273996 - RNA, 17 nt, Human
cuccaucuucagcuucu

SEQ ID NO: 2273997 - RNA, 19 nt, Human
cuccaucuucagcuucuuc

SEQ ID NO: 2273998 - RNA, 16 nt, Human
cuccaucuucuuugca

SEQ ID NO: 2273999 - RNA, 17 nt, Human
cuccaucuucuuugcag

SEQ ID NO: 2274000 - RNA, 17 nt, Human
cuccaugaguuuuuucu

SEQ ID NO: 2274001 - RNA, 21 nt, Human
cuccaugagacacaucuccuc

SEQ ID NO: 2274002 - RNA, 13 nt, Human
cuccaugagcacc

SEQ ID NO: 2274003 - RNA, 16 nt, Human
cuccaucuggcagggu

SEQ ID NO: 2274004 - RNA, 18 nt, Human
cuccaucucucuggcccu

SEQ ID NO: 2274005 - RNA, 13 nt, Human
cuccaucucucug

SEQ ID NO: 2274006 - RNA, 15 nt, Human
cuccaucucucuggc

SEQ ID NO: 2274007 - RNA, 16 nt, Human
cuccaucucucuggcc

SEQ ID NO: 2274008 - RNA, 17 nt, Human
cuccaucucucuggccc

SEQ ID NO: 2274009 - RNA, 16 nt, Human
cuccaucuccacucca

SEQ ID NO: 2274010 - RNA, 12 nt, Human
cuccaucucucu

SEQ ID NO: 2274011 - RNA, 14 nt, Human
cuccaucuccacuc

SEQ ID NO: 2274012 - RNA, 18 nt, Human
cuccauccugaggcucca

SEQ ID NO: 2274013 - RNA, 16 nt, Human
cuccauccugaggcuc

SEQ ID NO: 2274014 - RNA, 11 nt, Human
cuccauccuga

SEQ ID NO: 2274015 - RNA, 17 nt, Human
cucacuauccuacccca

SEQ ID NO: 2274016 - RNA, 22 nt, Human
cucacuaugaaucuauuauacu

SEQ ID NO: 2274017 - RNA, 15 nt, Human
cucacuauggugcca

SEQ ID NO: 2274018 - RNA, 18 nt, Human
cucacuauguugcccagg

SEQ ID NO: 2274019 - RNA, 17 nt, Human
cucacuauggugccaau

SEQ ID NO: 2274020 - RNA, 23 nt, Human
cucacuauggugccaauggaacc

SEQ ID NO: 2274021 - RNA, 21 nt, Human
cuccccaggccguggcugccc

SEQ ID NO: 2274022 - RNA, 21 nt, Human
cuccccaggccaggccaccag

SEQ ID NO: 2274023 - RNA, 12 nt, Human
cuccccaggcca

SEQ ID NO: 2274024 - RNA, 15 nt, Human
cuccccaggccaggc

SEQ ID NO: 2274025 - RNA, 17 nt, Human
cuccccaggccaggcca

SEQ ID NO: 2274026 - RNA, 12 nt, Human
cuccccagcuca

SEQ ID NO: 2274027 - RNA, 14 nt, Human
cuccccugcccugg

SEQ ID NO: 2274028 - RNA, 16 nt, Human
cuccccugcccugcug

SEQ ID NO: 2274029 - RNA, 15 nt, Human
cuccccugcccugcu

SEQ ID NO: 2274030 - RNA, 12 nt, Human
cuccccugcugg

SEQ ID NO: 2274031 - RNA, 20 nt, Human
cuccccagcaagugagagcu

SEQ ID NO: 2274032 - RNA, 15 nt, Human
cuccccagcccuggc

SEQ ID NO: 2274033 - RNA, 16 nt, Human
cuccccagcccuggcu

SEQ ID NO: 2274034 - RNA, 19 nt, Human
cuccccagccccuagccca

SEQ ID NO: 2274035 - RNA, 21 nt, Human
cuccccagccccuagcccagg

SEQ ID NO: 2274036 - RNA, 22 nt, Human
cuccccagccccuagcccagga

SEQ ID NO: 2274037 - RNA, 13 nt, Human
cuccccagcccug

SEQ ID NO: 2274038 - RNA, 15 nt, Human
cuccccagagcacug

SEQ ID NO: 2274039 - RNA, 16 nt, Human
cuccccagagcacugg

SEQ ID NO: 2274040 - RNA, 17 nt, Human
cuccccagagcacuggg

SEQ ID NO: 2274041 - RNA, 20 nt, Human
cuccccagaguuccccaugc

SEQ ID NO: 2274042 - RNA, 13 nt, Human
cuccccagccccu

SEQ ID NO: 2274043 - RNA, 15 nt, Human
cuccccagccccuag

SEQ ID NO: 2274044 - RNA, 17 nt, Human
cuccccagccccuagcc

SEQ ID NO: 2274045 - RNA, 12 nt, Human
cuccccagcaag

SEQ ID NO: 2274046 - RNA, 18 nt, Human
cuccccacaggagcccug

SEQ ID NO: 2274047 - RNA, 16 nt, Human
cuccccacugccuacu

SEQ ID NO: 2274048 - RNA, 19 nt, Human
cuccccacugccuacugca

SEQ ID NO: 2274049 - RNA, 15 nt, Human
cuccccaacccugcc

SEQ ID NO: 2274050 - RNA, 14 nt, Human
cuccccaacccugc

SEQ ID NO: 2274051 - RNA, 12 nt, Human
cuccccaacccu

SEQ ID NO: 2274052 - RNA, 19 nt, Human
cuccccaacccugccccug

SEQ ID NO: 2274053 - RNA, 17 nt, Human
cuccccaacccugcccc

SEQ ID NO: 2274054 - RNA, 20 nt, Human
cuccccaacccugccccugc

SEQ ID NO: 2274055 - RNA, 21 nt, Human
cuccccacacuaaccuggguu

SEQ ID NO: 2274056 - RNA, 12 nt, Human
cuccccaaaaac

SEQ ID NO: 2274057 - RNA, 14 nt, Human
cucccauuucuacu

SEQ ID NO: 2274058 - RNA, 16 nt, Human
cucccauuucuacucu

SEQ ID NO: 2274059 - RNA, 12 nt, Human
cucccauuucua

SEQ ID NO: 2274060 - RNA, 21 nt, Human
cuccccaaaucaauacacuag

SEQ ID NO: 2274061 - RNA, 21 nt, Human
cucccaugaccauacugaggg

SEQ ID NO: 2274062 - RNA, 16 nt, Human
cucccaugaccauacu

SEQ ID NO: 2274063 - RNA, 22 nt, Human
cucccaucugggaguccccuuu

SEQ ID NO: 2274064 - RNA, 12 nt, Human
cucccaucuggg

SEQ ID NO: 2274065 - RNA, 13 nt, Human
cucccaucuggga

SEQ ID NO: 2274066 - RNA, 15 nt, Human
cucccaucugggagu

SEQ ID NO: 2274067 - RNA, 20 nt, Human
cucccaucugggaguccccu

SEQ ID NO: 2274068 - RNA, 17 nt, Human
cucccgaauagcuggga

SEQ ID NO: 2274069 - RNA, 16 nt, Human
cucccgaauagcuggg

SEQ ID NO: 2274070 - RNA, 13 nt, Human
cuccccugcuggg

SEQ ID NO: 2274071 - RNA, 16 nt, Human
cuccccugcugaaggu

SEQ ID NO: 2274072 - RNA, 13 nt, Human
cuccccugcugca

SEQ ID NO: 2274073 - RNA, 15 nt, Human
cuccccugcugcagg

SEQ ID NO: 2274074 - RNA, 16 nt, Human
cuccccugcugcaggg

SEQ ID NO: 2274075 - RNA, 15 nt, Human
cucccgaguagcugg

SEQ ID NO: 2274076 - RNA, 18 nt, Human
cucccgaauagcugggac

SEQ ID NO: 2274077 - RNA, 16 nt, Human
cucccgaguagcuggg

SEQ ID NO: 2274078 - RNA, 17 nt, Human
cucccgaguagcuggga

SEQ ID NO: 2274079 - RNA, 19 nt, Human
cucccgaauagcugggacu

SEQ ID NO: 2274080 - RNA, 18 nt, Human
cucccgaguagcugggac

SEQ ID NO: 2274081 - RNA, 20 nt, Human
cucccgcugcccaggggagc

SEQ ID NO: 2274082 - RNA, 18 nt, Human
cuccccugcugcaggggc

SEQ ID NO: 2274083 - RNA, 13 nt, Human
cucccgcugcugc

SEQ ID NO: 2274084 - RNA, 14 nt, Human
cucccgcugcugcu

SEQ ID NO: 2274085 - RNA, 15 nt, Human
cucccgcugcugcug

SEQ ID NO: 2274086 - RNA, 16 nt, Human
cucccgcugcugcugc

SEQ ID NO: 2274087 - RNA, 12 nt, Human
cucccggcgugg

SEQ ID NO: 2274088 - RNA, 19 nt, Human
cucccggcaugggaaagcc

SEQ ID NO: 2274089 - RNA, 18 nt, Human
cucccggcacuccaugcu

SEQ ID NO: 2274090 - RNA, 17 nt, Human
cucccggcaugggaaag

SEQ ID NO: 2274091 - RNA, 15 nt, Human
cucccggagggcccu

SEQ ID NO: 2274092 - RNA, 19 nt, Human
cucccggagguuggguggg

SEQ ID NO: 2274093 - RNA, 20 nt, Human
cucccggagguugggugggc

SEQ ID NO: 2274094 - RNA, 17 nt, Human
cucccgcugcugcugcu

SEQ ID NO: 2274095 - RNA, 14 nt, Human
cucccggcacucca

SEQ ID NO: 2274096 - RNA, 15 nt, Human
cucccuaccaccucc

SEQ ID NO: 2274097 - RNA, 14 nt, Human
cucccuaccaccuc

SEQ ID NO: 2274098 - RNA, 13 nt, Human
cucccuaccaccu

SEQ ID NO: 2274099 - RNA, 20 nt, Human
cucccggcuaugggggcacu

SEQ ID NO: 2274100 - RNA, 16 nt, Human
cucccggcguggugga

SEQ ID NO: 2274101 - RNA, 22 nt, Human
cucccuagugacccggaggcca

SEQ ID NO: 2274102 - RNA, 23 nt, Human
cucccuagugacccggaggccac

SEQ ID NO: 2274103 - RNA, 22 nt, Human
cucccuaccaccuccccagccu

SEQ ID NO: 2274104 - RNA, 21 nt, Human
cucccuagccagcacuuguau

SEQ ID NO: 2274105 - RNA, 21 nt, Human
cucccuagugacccggaggcc

SEQ ID NO: 2274106 - RNA, 17 nt, Human
cucccuauuuuuuuucu

SEQ ID NO: 2274107 - RNA, 23 nt, Human
cucccuaucuaacccucccaugg

SEQ ID NO: 2274108 - RNA, 19 nt, Human
cuccugccuguagcaguga

SEQ ID NO: 2274109 - RNA, 16 nt, Human
cuccugccuuccuccu

SEQ ID NO: 2274110 - RNA, 14 nt, Human
cuccugccuguagc

SEQ ID NO: 2274111 - RNA, 15 nt, Human
cuccugccuguagca

SEQ ID NO: 2274112 - RNA, 16 nt, Human
cuccugccuguagcag

SEQ ID NO: 2274113 - RNA, 18 nt, Human
cuccugccuguagcagug

SEQ ID NO: 2274114 - RNA, 16 nt, Human
cuccugccgacuccug

SEQ ID NO: 2274115 - RNA, 17 nt, Human
cuccugccgacuccugg

SEQ ID NO: 2274116 - RNA, 14 nt, Human
cuccugccugcccc

SEQ ID NO: 2274117 - RNA, 17 nt, Human
cuccugccugccccucu

SEQ ID NO: 2274118 - RNA, 15 nt, Human
cuccugccucagccu

SEQ ID NO: 2274119 - RNA, 17 nt, Human
cuccugcgcgcaugugc

SEQ ID NO: 2274120 - RNA, 21 nt, Human
cuccugccuucuguccuggug

SEQ ID NO: 2274121 - RNA, 22 nt, Human
cuccugccuucuguccuggugu

SEQ ID NO: 2274122 - RNA, 16 nt, Human
cuccugccuucugucc

SEQ ID NO: 2274123 - RNA, 20 nt, Human
cuccugccuuccuccugggc

SEQ ID NO: 2274124 - RNA, 19 nt, Human
cuccugccuuccuccuggg

SEQ ID NO: 2274125 - RNA, 18 nt, Human
cuccugccuuccuccugg

SEQ ID NO: 2274126 - RNA, 23 nt, Human
cuccugucugccagccagcagcc

SEQ ID NO: 2274127 - RNA, 22 nt, Human
cuccugucugccagccagcagc

SEQ ID NO: 2274128 - RNA, 19 nt, Human
cuccugucugccagccagc

SEQ ID NO: 2274129 - RNA, 17 nt, Human
cuccugucugccagcca

SEQ ID NO: 2274130 - RNA, 10 nt, Human
cuccugucuu

SEQ ID NO: 2274131 - RNA, 14 nt, Human
cuccugucuuccca

SEQ ID NO: 2274132 - RNA, 15 nt, Human
cuccugucuucccag

SEQ ID NO: 2274133 - RNA, 17 nt, Human
cuccugucuucccaggg

SEQ ID NO: 2274134 - RNA, 18 nt, Human
cuccugucuucccagggu

SEQ ID NO: 2274135 - RNA, 19 nt, Human
cuccugucuucccagggua

SEQ ID NO: 2274136 - RNA, 21 nt, Human
cuccugucuucccaggguagc

SEQ ID NO: 2274137 - RNA, 16 nt, Human
cuccugugugugcgcc

SEQ ID NO: 2274138 - RNA, 19 nt, Human
cuccugugugugcgccuac

SEQ ID NO: 2274139 - RNA, 11 nt, Human
cuccuguguaa

SEQ ID NO: 2274140 - RNA, 13 nt, Human
cuccuguguacag

SEQ ID NO: 2274141 - RNA, 21 nt, Human
cuccuguggccccacccuggg

SEQ ID NO: 2274142 - RNA, 22 nt, Human
cuccuguggccccacccugggc

SEQ ID NO: 2274143 - RNA, 20 nt, Human
cuccugugcaugggugaagg

SEQ ID NO: 2274144 - RNA, 17 nt, Human
cuccugugcauggguga

SEQ ID NO: 2274145 - RNA, 11 nt, Human
cuccugugccc

SEQ ID NO: 2274146 - RNA, 14 nt, Human
cuccugugcccaca

SEQ ID NO: 2274147 - RNA, 21 nt, Human
cuccugugcccacaucccagg

SEQ ID NO: 2274148 - RNA, 22 nt, Human
cuccugugcccacaucccaggc

SEQ ID NO: 2274149 - RNA, 12 nt, Human
cuccugugcccu

SEQ ID NO: 2274150 - RNA, 13 nt, Human
cuccugugcccuu

SEQ ID NO: 2274151 - RNA, 17 nt, Human
cuccugugcaacuuucc

SEQ ID NO: 2274152 - RNA, 16 nt, Human
cuccugugcaugggug

SEQ ID NO: 2274153 - RNA, 11 nt, Human
cuccugugcua

SEQ ID NO: 2274154 - RNA, 20 nt, Human
cuccugugcuacuuugccuu

SEQ ID NO: 2274155 - RNA, 13 nt, Human
cuccuguggcccc

SEQ ID NO: 2274156 - RNA, 15 nt, Human
cuccugugcuuuccc

SEQ ID NO: 2274157 - RNA, 19 nt, Human
cuccuguggccccacccug

SEQ ID NO: 2274158 - RNA, 20 nt, Human
cuccuguggccccacccugg

SEQ ID NO: 2274159 - RNA, 15 nt, Human
cuccucuccccucua

SEQ ID NO: 2274160 - RNA, 17 nt, Human
cuccucuccccuaccac

SEQ ID NO: 2274161 - RNA, 18 nt, Human
cuccucuccccuaccacu

SEQ ID NO: 2274162 - RNA, 14 nt, Human
cuccucuccccucu

SEQ ID NO: 2274163 - RNA, 15 nt, Human
cuccugcacuuacuu

SEQ ID NO: 2274164 - RNA, 17 nt, Human
cuccugcacuuacuugc

SEQ ID NO: 2274165 - RNA, 23 nt, Human
cuccucuccccagcccagagaca

SEQ ID NO: 2274166 - RNA, 12 nt, Human
cuccucuccccu

SEQ ID NO: 2274167 - RNA, 14 nt, Human
cuccucuccccuac

SEQ ID NO: 2274168 - RNA, 22 nt, Human
cuccucuccccagcccagagac

SEQ ID NO: 2274169 - RNA, 21 nt, Human
cuccucuccccagcccagaga

SEQ ID NO: 2274170 - RNA, 20 nt, Human
cuccucuccccagcccagag

SEQ ID NO: 2274171 - RNA, 19 nt, Human
cuccucuccccagcccaga

SEQ ID NO: 2274172 - RNA, 18 nt, Human
cuccucuccccagcccag

SEQ ID NO: 2274173 - RNA, 17 nt, Human
cuccucuccccagccca

SEQ ID NO: 2274174 - RNA, 11 nt, Human
cuccugcaggc

SEQ ID NO: 2274175 - RNA, 18 nt, Human
cuccugcacuuacuugcu

SEQ ID NO: 2274176 - RNA, 19 nt, Human
cuccugcacuuacuugcuu

SEQ ID NO: 2274177 - RNA, 20 nt, Human
cuccugcacuuacuugcuua

SEQ ID NO: 2274178 - RNA, 22 nt, Human
cuccugcacuuacuugcuuauu

SEQ ID NO: 2274179 - RNA, 16 nt, Human
cuccugcaggcagcca

SEQ ID NO: 2274180 - RNA, 17 nt, Human
cuccugcaggcagccag

SEQ ID NO: 2274181 - RNA, 22 nt, Human
cuccugcccaggagagccagcc

SEQ ID NO: 2274182 - RNA, 20 nt, Human
cuccugcccaggagagccag

SEQ ID NO: 2274183 - RNA, 17 nt, Human
cuccugcccaggagagc

SEQ ID NO: 2274184 - RNA, 16 nt, Human
cuccugcccaggagag

SEQ ID NO: 2274185 - RNA, 13 nt, Human
cuccugcccaguc

SEQ ID NO: 2274186 - RNA, 14 nt, Human
cuccugcccagucc

SEQ ID NO: 2274187 - RNA, 15 nt, Human
cuccugcccaguccc

SEQ ID NO: 2274188 - RNA, 17 nt, Human
cuccugcccaguccccc

SEQ ID NO: 2274189 - RNA, 15 nt, Human
cuccugcccaggaga

SEQ ID NO: 2274190 - RNA, 14 nt, Human
cuccugcccaggag

SEQ ID NO: 2274191 - RNA, 13 nt, Human
cuccugcccagga

SEQ ID NO: 2274192 - RNA, 12 nt, Human
cuccugcccagg

SEQ ID NO: 2274193 - RNA, 14 nt, Human
cuccugcagaccac

SEQ ID NO: 2274194 - RNA, 18 nt, Human
cuccugcaggcagccagg

SEQ ID NO: 2274195 - RNA, 20 nt, Human
cuccugcaggcagccaggcc

SEQ ID NO: 2274196 - RNA, 18 nt, Human
cuccugcccaguccccca

SEQ ID NO: 2274197 - RNA, 12 nt, Human
cuccugcccugu

SEQ ID NO: 2274198 - RNA, 13 nt, Human
cuccugcccuguu

SEQ ID NO: 2274199 - RNA, 15 nt, Human
cuccugccgacuccu

SEQ ID NO: 2274200 - RNA, 11 nt, Human
cuccugcccuu

SEQ ID NO: 2274201 - RNA, 13 nt, Human
cuccugccucagc

SEQ ID NO: 2274202 - RNA, 14 nt, Human
cuccugccucagcc

SEQ ID NO: 2274203 - RNA, 21 nt, Human
cucccuuuuuauaucccauuu

SEQ ID NO: 2274204 - RNA, 16 nt, Human
cucccuuuuuccuugu

SEQ ID NO: 2274205 - RNA, 18 nt, Human
cucccuuuuuccuugucc

SEQ ID NO: 2274206 - RNA, 20 nt, Human
cucccuuuuuccuugucccc

SEQ ID NO: 2274207 - RNA, 21 nt, Human
cucccuuuuuccuugucccca

SEQ ID NO: 2274208 - RNA, 14 nt, Human
cucccuuugaaaug

SEQ ID NO: 2274209 - RNA, 22 nt, Human
cucccucauuucaggagcagcc

SEQ ID NO: 2274210 - RNA, 14 nt, Human
cucccuuuuuauau

SEQ ID NO: 2274211 - RNA, 15 nt, Human
cuccgaccagacacc

SEQ ID NO: 2274212 - RNA, 22 nt, Human
cuccgaacacccucgaagcgcg

SEQ ID NO: 2274213 - RNA, 22 nt, Human
cucccuuuuuccuuguccccac

SEQ ID NO: 2274214 - RNA, 23 nt, Human
cucccuuuuuccuuguccccaca

SEQ ID NO: 2274215 - RNA, 17 nt, Human
cucccuuucuucccuac

SEQ ID NO: 2274216 - RNA, 13 nt, Human
cucccucauucca

SEQ ID NO: 2274217 - RNA, 23 nt, Human
cucccucagugcccucauuuuau

SEQ ID NO: 2274218 - RNA, 14 nt, Human
cucccucagugccc

SEQ ID NO: 2274219 - RNA, 20 nt, Human
cucccuauuuuuuuucuguu

SEQ ID NO: 2274220 - RNA, 19 nt, Human
cucccuauuuuuuuucugu

SEQ ID NO: 2274221 - RNA, 16 nt, Human
cuccucaccucuggac

SEQ ID NO: 2274222 - RNA, 15 nt, Human
cuccucaccucugga

SEQ ID NO: 2274223 - RNA, 14 nt, Human
cuccucaccucugg

SEQ ID NO: 2274224 - RNA, 13 nt, Human
cuccucaccucug

SEQ ID NO: 2274225 - RNA, 21 nt, Human
cuccucaccucuggacuggcu

SEQ ID NO: 2274226 - RNA, 18 nt, Human
cuccucaccucuggacug

SEQ ID NO: 2274227 - RNA, 22 nt, Human
cuccucaccucuggacuggcua

SEQ ID NO: 2274228 - RNA, 20 nt, Human
cuccucaccucaugcccacc

SEQ ID NO: 2274229 - RNA, 12 nt, Human
cuccucaucccg

SEQ ID NO: 2274230 - RNA, 18 nt, Human
cuccucaccccgucuggg

SEQ ID NO: 2274231 - RNA, 15 nt, Human
cuccucaccccgucu

SEQ ID NO: 2274232 - RNA, 12 nt, Human
cuccucaccuca

SEQ ID NO: 2274233 - RNA, 14 nt, Human
cuccucaccucaug

SEQ ID NO: 2274234 - RNA, 15 nt, Human
cuccucaccucaugc

SEQ ID NO: 2274235 - RNA, 16 nt, Human
cuccucaccucaugcc

SEQ ID NO: 2274236 - RNA, 17 nt, Human
cuccucaccucaugccc

SEQ ID NO: 2274237 - RNA, 19 nt, Human
cuccucaccucaugcccac

SEQ ID NO: 2274238 - RNA, 21 nt, Human
cuccucacccccagcuuugcu

SEQ ID NO: 2274239 - RNA, 20 nt, Human
cuccucacccccagcuuugc

SEQ ID NO: 2274240 - RNA, 15 nt, Human
cuccucacccccagc

SEQ ID NO: 2274241 - RNA, 17 nt, Human
cuccucacccccagcuu

SEQ ID NO: 2274242 - RNA, 23 nt, Human
cuccgccauucucaagcccugca

SEQ ID NO: 2274243 - RNA, 15 nt, Human
cuccgccagccuccu

SEQ ID NO: 2274244 - RNA, 18 nt, Human
cuccgccagccuccucug

SEQ ID NO: 2274245 - RNA, 20 nt, Human
cuccgccagccuccucugga

SEQ ID NO: 2274246 - RNA, 13 nt, Human
cuccgccaggcga

SEQ ID NO: 2274247 - RNA, 21 nt, Human
cuccgccagccuccucuggac

SEQ ID NO: 2274248 - RNA, 23 nt, Human
cuccgccaggcgagauggggugg

SEQ ID NO: 2274249 - RNA, 13 nt, Human
cuccgcccugcca

SEQ ID NO: 2274250 - RNA, 14 nt, Human
cuccgcccugccac

SEQ ID NO: 2274251 - RNA, 17 nt, Human
cuccgcccugccacuca

SEQ ID NO: 2274252 - RNA, 15 nt, Human
cuccgcccugccacu

SEQ ID NO: 2274253 - RNA, 16 nt, Human
cuccgcccugccacuc

SEQ ID NO: 2274254 - RNA, 22 nt, Human
cuccuccagggccacgugccag

SEQ ID NO: 2274255 - RNA, 20 nt, Human
cuccuccagggccacgugcc

SEQ ID NO: 2274256 - RNA, 19 nt, Human
cuccuccagggccacgugc

SEQ ID NO: 2274257 - RNA, 14 nt, Human
cuccuccagggcca

SEQ ID NO: 2274258 - RNA, 13 nt, Human
cuccuccagggug

SEQ ID NO: 2274259 - RNA, 18 nt, Human
cuccuccaugggagaaaa

SEQ ID NO: 2274260 - RNA, 15 nt, Human
cuccuccaugggaga

SEQ ID NO: 2274261 - RNA, 13 nt, Human
cuccuccagggcc

SEQ ID NO: 2274262 - RNA, 11 nt, Human
cuccuccaggg

SEQ ID NO: 2274263 - RNA, 16 nt, Human
cuccuccacucucccc

SEQ ID NO: 2274264 - RNA, 22 nt, Human
cuccuccaccgccauggcuucc

SEQ ID NO: 2274265 - RNA, 23 nt, Human
cuccuccaaaggaagucuaggag

SEQ ID NO: 2274266 - RNA, 18 nt, Human
cuccuccaaaggaagucu

SEQ ID NO: 2274267 - RNA, 15 nt, Human
cuccuccaaaggaag

SEQ ID NO: 2274268 - RNA, 21 nt, Human
cuccuccaagacacuguggac

SEQ ID NO: 2274269 - RNA, 14 nt, Human
cuccucaucucuaa

SEQ ID NO: 2274270 - RNA, 15 nt, Human
cuccucaucccgugu

SEQ ID NO: 2274271 - RNA, 11 nt, Human
cuccucaugua

SEQ ID NO: 2274272 - RNA, 20 nt, Human
cuccucauguacauacccug

SEQ ID NO: 2274273 - RNA, 22 nt, Human
cuccuccagccgccaugcuccu

SEQ ID NO: 2274274 - RNA, 14 nt, Human
cuccuccaaaggcc

SEQ ID NO: 2274275 - RNA, 18 nt, Human
cuccuccaaaggcccccu

SEQ ID NO: 2274276 - RNA, 13 nt, Human
cuccuccaccgcc

SEQ ID NO: 2274277 - RNA, 15 nt, Human
cuccuccaccgccau

SEQ ID NO: 2274278 - RNA, 16 nt, Human
cuccuccaccgccaug

SEQ ID NO: 2274279 - RNA, 18 nt, Human
cuccuccaccgccauggc

SEQ ID NO: 2274280 - RNA, 19 nt, Human
cuccuccaccgccauggcu

SEQ ID NO: 2274281 - RNA, 14 nt, Human
cuccucgcaagcug

SEQ ID NO: 2274282 - RNA, 21 nt, Human
cuccucgagggcagggacuuu

SEQ ID NO: 2274283 - RNA, 15 nt, Human
cuccucgagggcagg

SEQ ID NO: 2274284 - RNA, 17 nt, Human
cuccucgagggcaggga

SEQ ID NO: 2274285 - RNA, 16 nt, Human
cuccucgcaagcuggg

SEQ ID NO: 2274286 - RNA, 15 nt, Human
cuccucgcaagcugg

SEQ ID NO: 2274287 - RNA, 15 nt, Human
cuccucuccccagcc

SEQ ID NO: 2274288 - RNA, 22 nt, Human
cuccucuccccagcaagugaga

SEQ ID NO: 2274289 - RNA, 19 nt, Human
cuccuccuuggugccuggc

SEQ ID NO: 2274290 - RNA, 14 nt, Human
cuccucccggugcc

SEQ ID NO: 2274291 - RNA, 15 nt, Human
cuccucccauguuau

SEQ ID NO: 2274292 - RNA, 14 nt, Human
cuccuccccaaauc

SEQ ID NO: 2274293 - RNA, 17 nt, Human
cuccuccccaaaucaau

SEQ ID NO: 2274294 - RNA, 15 nt, Human
cuccucccggugccc

SEQ ID NO: 2274295 - RNA, 17 nt, Human
cuccucccggugcccaa

SEQ ID NO: 2274296 - RNA, 16 nt, Human
cuccuccuucccaaag

SEQ ID NO: 2274297 - RNA, 22 nt, Human
cgcccacuguccugggcgcccu

SEQ ID NO: 2274298 - RNA, 22 nt, Human
cgcccagagacccaagcugccu

SEQ ID NO: 2274299 - RNA, 20 nt, Human
cgcccaggcuggagugcagu

SEQ ID NO: 2274300 - RNA, 15 nt, Human
cgcccaggcuggcca

SEQ ID NO: 2274301 - RNA, 16 nt, Human
cgcccaggcuggccag

SEQ ID NO: 2274302 - RNA, 17 nt, Human
cgcccaggcuggccagc

SEQ ID NO: 2274303 - RNA, 19 nt, Human
cgcccaggcuggccagccc

SEQ ID NO: 2274304 - RNA, 20 nt, Human
cgcccaggcuggccagcccc

SEQ ID NO: 2274305 - RNA, 22 nt, Human
cgcccaggcuggccagccccac

SEQ ID NO: 2274306 - RNA, 14 nt, Human
cgcccaguccuucc

SEQ ID NO: 2274307 - RNA, 15 nt, Human
cgcccaguccuucca

SEQ ID NO: 2274308 - RNA, 22 nt, Human
cgcccaggcuuagucacugaga

SEQ ID NO: 2274309 - RNA, 15 nt, Human
cgcccccugcccucc

SEQ ID NO: 2274310 - RNA, 19 nt, Human
cgcccccugcccuccccuc

SEQ ID NO: 2274311 - RNA, 16 nt, Human
cgcccaguccuuccac

SEQ ID NO: 2274312 - RNA, 14 nt, Human
cgcccccugcccuc

SEQ ID NO: 2274313 - RNA, 12 nt, Human
cgcccagucugg

SEQ ID NO: 2274314 - RNA, 14 nt, Human
cgccccgccccaca

SEQ ID NO: 2274315 - RNA, 13 nt, Human
cgccccgccccac

SEQ ID NO: 2274316 - RNA, 17 nt, Human
cgccccgccccacauuc

SEQ ID NO: 2274317 - RNA, 19 nt, Human
cgccccucccacagcgcug

SEQ ID NO: 2274318 - RNA, 21 nt, Human
cgccccucauuuaucccucaa

SEQ ID NO: 2274319 - RNA, 21 nt, Human
cgccccucccacagcgcuggc

SEQ ID NO: 2274320 - RNA, 14 nt, Human
cgccccugccaccu

SEQ ID NO: 2274321 - RNA, 15 nt, Human
cgcccugcuccuccc

SEQ ID NO: 2274322 - RNA, 17 nt, Human
cgcccugcuccucccug

SEQ ID NO: 2274323 - RNA, 18 nt, Human
cgcccugcuccucccugg

SEQ ID NO: 2274324 - RNA, 21 nt, Human
cgcccugcuccucccuggcug

SEQ ID NO: 2274325 - RNA, 12 nt, Human
cgcccuggaagc

SEQ ID NO: 2274326 - RNA, 13 nt, Human
cgcccuggaagcc

SEQ ID NO: 2274327 - RNA, 12 nt, Human
cgcccugggcuc

SEQ ID NO: 2274328 - RNA, 16 nt, Human
cgcccuggaagccggc

SEQ ID NO: 2274329 - RNA, 22 nt, Human
cgcccuggaagccggcggccca

SEQ ID NO: 2274330 - RNA, 16 nt, Human
cgcccuggacugugug

SEQ ID NO: 2274331 - RNA, 21 nt, Human
cgcgccaaauaaugucucugu

SEQ ID NO: 2274332 - RNA, 23 nt, Human
cgcgccaaauaaugucucuguga

SEQ ID NO: 2274333 - RNA, 19 nt, Human
cgcgccaaauaaugucucu

SEQ ID NO: 2274334 - RNA, 21 nt, Human
cgcccugggcucgucuuugca

SEQ ID NO: 2274335 - RNA, 22 nt, Human
cgcccugggcucgucuuugcag

SEQ ID NO: 2274336 - RNA, 15 nt, Human
cgcccuuaccuuccc

SEQ ID NO: 2274337 - RNA, 12 nt, Human
cgcccuuccucu

SEQ ID NO: 2274338 - RNA, 13 nt, Human
cgcccuuccucuc

SEQ ID NO: 2274339 - RNA, 17 nt, Human
cgcccuuccucuccacc

SEQ ID NO: 2274340 - RNA, 23 nt, Human
cgccaggggaaaaucagccugcu

SEQ ID NO: 2274341 - RNA, 14 nt, Human
cgccaucccagccc

SEQ ID NO: 2274342 - RNA, 16 nt, Human
cgccaucccagcccca

SEQ ID NO: 2274343 - RNA, 20 nt, Human
cgcccacaggaagccugcag

SEQ ID NO: 2274344 - RNA, 21 nt, Human
cgcccacaggaagccugcagu

SEQ ID NO: 2274345 - RNA, 22 nt, Human
cgcccacaggaagccugcaguc

SEQ ID NO: 2274346 - RNA, 18 nt, Human
cgcccaccccgcucugca

SEQ ID NO: 2274347 - RNA, 19 nt, Human
cgcccaccccgcucugcau

SEQ ID NO: 2274348 - RNA, 13 nt, Human
cgcccaccgcaug

SEQ ID NO: 2274349 - RNA, 16 nt, Human
cgcccaccgcaugccc

SEQ ID NO: 2274350 - RNA, 17 nt, Human
cgcccaccgcaugcccc

SEQ ID NO: 2274351 - RNA, 18 nt, Human
cgcccaccgcaugccccc

SEQ ID NO: 2274352 - RNA, 21 nt, Human
cgcccaccgcaugcccccucg

SEQ ID NO: 2274353 - RNA, 23 nt, Human
cgcccaccgcaugcccccucgug

SEQ ID NO: 2274354 - RNA, 11 nt, Human
cgcccaccucc

SEQ ID NO: 2274355 - RNA, 12 nt, Human
cgcccaccuccc

SEQ ID NO: 2274356 - RNA, 14 nt, Human
cgcccaccucccca

SEQ ID NO: 2274357 - RNA, 12 nt, Human
cgcccacugucc

SEQ ID NO: 2274358 - RNA, 14 nt, Human
cgcccacuguccug

SEQ ID NO: 2274359 - RNA, 15 nt, Human
cgcccacuguccugg

SEQ ID NO: 2274360 - RNA, 16 nt, Human
cgcccacuguccuggg

SEQ ID NO: 2274361 - RNA, 17 nt, Human
cgcccacuguccugggc

SEQ ID NO: 2274362 - RNA, 18 nt, Human
cgcccacuguccugggcg

SEQ ID NO: 2274363 - RNA, 19 nt, Human
cgcccacuguccugggcgc

SEQ ID NO: 2274364 - RNA, 20 nt, Human
cgcccacuguccugggcgcc

SEQ ID NO: 2274365 - RNA, 23 nt, Human
cgccagccuccucuggacggcag

SEQ ID NO: 2274366 - RNA, 15 nt, Human
cgccagcgaacuuga

SEQ ID NO: 2274367 - RNA, 22 nt, Human
cgccagcacagaaacagaggag

SEQ ID NO: 2274368 - RNA, 13 nt, Human
cgccagccuccuc

SEQ ID NO: 2274369 - RNA, 14 nt, Human
cgccagccuccucu

SEQ ID NO: 2274370 - RNA, 15 nt, Human
cgccagccuccucug

SEQ ID NO: 2274371 - RNA, 16 nt, Human
cgccagccuccucugg

SEQ ID NO: 2274372 - RNA, 17 nt, Human
cgccagccuccucugga

SEQ ID NO: 2274373 - RNA, 18 nt, Human
cgccagccuccucuggac

SEQ ID NO: 2274374 - RNA, 21 nt, Human
cgccagccuccucuggacggc

SEQ ID NO: 2274375 - RNA, 14 nt, Human
ccucugccccgucu

SEQ ID NO: 2274376 - RNA, 22 nt, Human
ccucugccccauccuccagcag

SEQ ID NO: 2274377 - RNA, 23 nt, Human
ccucugcccagcuugggcccagc

SEQ ID NO: 2274378 - RNA, 19 nt, Human
ccucugccccauccuccag

SEQ ID NO: 2274379 - RNA, 18 nt, Human
ccucugcccagcuugggc

SEQ ID NO: 2274380 - RNA, 20 nt, Human
ccucugcccagcuugggccc

SEQ ID NO: 2274381 - RNA, 22 nt, Human
cgccagauucuuuccugaggcu

SEQ ID NO: 2274382 - RNA, 20 nt, Human
ccucugccaccuccccuauc

SEQ ID NO: 2274383 - RNA, 11 nt, Human
ccucugccaga

SEQ ID NO: 2274384 - RNA, 23 nt, Human
ccucugccagaagauccccucag

SEQ ID NO: 2274385 - RNA, 11 nt, Human
ccucugcccag

SEQ ID NO: 2274386 - RNA, 13 nt, Human
ccucugcccagcu

SEQ ID NO: 2274387 - RNA, 14 nt, Human
ccucugcccagcuu

SEQ ID NO: 2274388 - RNA, 16 nt, Human
ccucugcccagcuugg

SEQ ID NO: 2274389 - RNA, 17 nt, Human
ccucugcccagcuuggg

SEQ ID NO: 2274390 - RNA, 20 nt, Human
ccucugcccacucccugcaa

SEQ ID NO: 2274391 - RNA, 17 nt, Human
ccucugcccacucccug

SEQ ID NO: 2274392 - RNA, 19 nt, Human
ccucugcccacucccugca

SEQ ID NO: 2274393 - RNA, 15 nt, Human
cgcggcggagcuggc

SEQ ID NO: 2274394 - RNA, 12 nt, Human
cgcggccagccc

SEQ ID NO: 2274395 - RNA, 14 nt, Human
cgcggccagccccg

SEQ ID NO: 2274396 - RNA, 15 nt, Human
cgcggccagccccgg

SEQ ID NO: 2274397 - RNA, 22 nt, Human
cgcggccagccccggcccuggg

SEQ ID NO: 2274398 - RNA, 17 nt, Human
cgcggcggagcuggccc

SEQ ID NO: 2274399 - RNA, 18 nt, Human
cgcggcggagcuggcccc

SEQ ID NO: 2274400 - RNA, 21 nt, Human
cgcggcggagcuggccccgcc

SEQ ID NO: 2274401 - RNA, 22 nt, Human
cgcggcggagcuggccccgccg

SEQ ID NO: 2274402 - RNA, 23 nt, Human
cgcggcggagcuggccccgccgc

SEQ ID NO: 2274403 - RNA, 21 nt, Human
cgcuaaucccgauucacccug

SEQ ID NO: 2274404 - RNA, 22 nt, Human
cgcuaagagggagggagggcuc

SEQ ID NO: 2274405 - RNA, 18 nt, Human
cgcgccacucgcuucccc

SEQ ID NO: 2274406 - RNA, 15 nt, Human
cgcgccacucgcuuc

SEQ ID NO: 2274407 - RNA, 23 nt, Human
cgcgccacuacacuccagccuga

SEQ ID NO: 2274408 - RNA, 22 nt, Human
cgcgccacuacacuccagccug

SEQ ID NO: 2274409 - RNA, 22 nt, Human
cgcgccacucgcuucccccaua

SEQ ID NO: 2274410 - RNA, 20 nt, Human
cgcgccacucgcuuccccca

SEQ ID NO: 2274411 - RNA, 15 nt, Human
cgcgcugccugugug

SEQ ID NO: 2274412 - RNA, 19 nt, Human
cgcgcgucccccugccggc

SEQ ID NO: 2274413 - RNA, 13 nt, Human
cgcgcugccugug

SEQ ID NO: 2274414 - RNA, 19 nt, Human
cgcgccuucucccccccgg

SEQ ID NO: 2274415 - RNA, 23 nt, Human
cgcgccuucucccccccggggcu

SEQ ID NO: 2274416 - RNA, 11 nt, Human
cgcuacccacu

SEQ ID NO: 2274417 - RNA, 19 nt, Human
cgcucagggccaugcugag

SEQ ID NO: 2274418 - RNA, 20 nt, Human
cgcucagggccaugcugagg

SEQ ID NO: 2274419 - RNA, 21 nt, Human
cgcucagggccaugcugaggc

SEQ ID NO: 2274420 - RNA, 22 nt, Human
cgcucagggccaugcugaggcc

SEQ ID NO: 2274421 - RNA, 15 nt, Human
cgcucucuggccuuc

SEQ ID NO: 2274422 - RNA, 14 nt, Human
cgcucucuggccuu

SEQ ID NO: 2274423 - RNA, 16 nt, Human
cgcucagcccucccug

SEQ ID NO: 2274424 - RNA, 21 nt, Human
cgcucagcccucccugccccu

SEQ ID NO: 2274425 - RNA, 12 nt, Human
cgcucagcccuc

SEQ ID NO: 2274426 - RNA, 16 nt, Human
cgcuacccgggaaggg

SEQ ID NO: 2274427 - RNA, 17 nt, Human
cgcuugccacuagggcu

SEQ ID NO: 2274428 - RNA, 22 nt, Human
cgcuucuugccucugugcugug

SEQ ID NO: 2274429 - RNA, 18 nt, Human
cgcuucuugccucugugc

SEQ ID NO: 2274430 - RNA, 19 nt, Human
cgcuucuugccucugugcu

SEQ ID NO: 2274431 - RNA, 18 nt, Human
cgcugugcugcccugccc

SEQ ID NO: 2274432 - RNA, 11 nt, Human
cgcuugccucg

SEQ ID NO: 2274433 - RNA, 13 nt, Human
cgcuugccucggc

SEQ ID NO: 2274434 - RNA, 14 nt, Human
cgcuugccucggcu

SEQ ID NO: 2274435 - RNA, 15 nt, Human
cgcuugccucggcuc

SEQ ID NO: 2274436 - RNA, 16 nt, Human
cgcuugccucggcucc

SEQ ID NO: 2274437 - RNA, 18 nt, Human
cgcuugccucggcuccug

SEQ ID NO: 2274438 - RNA, 20 nt, Human
cgcuugccucggcuccugcu

SEQ ID NO: 2274439 - RNA, 18 nt, Human
cgcuugcuuuucuguauu

SEQ ID NO: 2274440 - RNA, 21 nt, Human
cgcuugccucggcuccugcug

SEQ ID NO: 2274441 - RNA, 22 nt, Human
cgcuugccucggcuccugcugc

SEQ ID NO: 2274442 - RNA, 14 nt, Human
cgcuuggagcagag

SEQ ID NO: 2274443 - RNA, 23 nt, Human
cgcuugccucggcuccugcugca

SEQ ID NO: 2274444 - RNA, 20 nt, Human
cgcuuguccagcgccuagug

SEQ ID NO: 2274445 - RNA, 17 nt, Human
cgcuuguccagcgccua

SEQ ID NO: 2274446 - RNA, 17 nt, Human
cgcuugugcagaaaaca

SEQ ID NO: 2274447 - RNA, 18 nt, Human
cgcuugugcagaaaacau

SEQ ID NO: 2274448 - RNA, 16 nt, Human
cgcuuugauucauagu

SEQ ID NO: 2274449 - RNA, 20 nt, Human
cggaaaacaugcuacacacu

SEQ ID NO: 2274450 - RNA, 15 nt, Human
cggaaaacaugcuac

SEQ ID NO: 2274451 - RNA, 23 nt, Human
cgcugucccuaguaaaaauacaa

SEQ ID NO: 2274452 - RNA, 14 nt, Human
cgcugucuccagac

SEQ ID NO: 2274453 - RNA, 15 nt, Human
cgcugucuccagacc

SEQ ID NO: 2274454 - RNA, 15 nt, Human
cgcugugcugcccug

SEQ ID NO: 2274455 - RNA, 16 nt, Human
cgcugugcugcccugc

SEQ ID NO: 2274456 - RNA, 17 nt, Human
cgcugugcugcccugcc

SEQ ID NO: 2274457 - RNA, 23 nt, Human
cgcugguagagauggaggaggag

SEQ ID NO: 2274458 - RNA, 13 nt, Human
cgcugucacaggc

SEQ ID NO: 2274459 - RNA, 15 nt, Human
cgcugguagagaugg

SEQ ID NO: 2274460 - RNA, 22 nt, Human
cgcugucagccauuccuguucc

SEQ ID NO: 2274461 - RNA, 18 nt, Human
cgcucucuggccuucggc

SEQ ID NO: 2274462 - RNA, 14 nt, Human
cgcugggugguacc

SEQ ID NO: 2274463 - RNA, 19 nt, Human
cgcugggugguacccucug

SEQ ID NO: 2274464 - RNA, 22 nt, Human
cgcugggugguacccucuggag

SEQ ID NO: 2274465 - RNA, 15 nt, Human
cggaaaccuuggugu

SEQ ID NO: 2274466 - RNA, 17 nt, Human
cgggagccgcuggcaga

SEQ ID NO: 2274467 - RNA, 18 nt, Human
cgggagccgcuggcagaa

SEQ ID NO: 2274468 - RNA, 22 nt, Human
cgggagcaucucuugaggccag

SEQ ID NO: 2274469 - RNA, 22 nt, Human
cgggagccaugcgcccccuccg

SEQ ID NO: 2274470 - RNA, 14 nt, Human
cgggagcaucucuu

SEQ ID NO: 2274471 - RNA, 23 nt, Human
cgggagcagugucuuccauaaug

SEQ ID NO: 2274472 - RNA, 20 nt, Human
cgggagcagugucuuccaua

SEQ ID NO: 2274473 - RNA, 15 nt, Human
cgggagcagugucuu

SEQ ID NO: 2274474 - RNA, 14 nt, Human
cgggagcagugucu

SEQ ID NO: 2274475 - RNA, 12 nt, Human
cgggagacagca

SEQ ID NO: 2274476 - RNA, 21 nt, Human
cgggagaaucaugugaacccg

SEQ ID NO: 2274477 - RNA, 16 nt, Human
cgggagaaucauguga

SEQ ID NO: 2274478 - RNA, 22 nt, Human
cggccagccccggcccugggcu

SEQ ID NO: 2274479 - RNA, 23 nt, Human
cggcuggccuggccccucagggu

SEQ ID NO: 2274480 - RNA, 21 nt, Human
cggcuggagaccaugcagagc

SEQ ID NO: 2274481 - RNA, 22 nt, Human
cggcuggagaccaugcagagcg

SEQ ID NO: 2274482 - RNA, 22 nt, Human
cggcuggccuggccccucaggg

SEQ ID NO: 2274483 - RNA, 19 nt, Human
cggcuggccuggccccuca

SEQ ID NO: 2274484 - RNA, 20 nt, Human
cgggaggucgaggcaggagg

SEQ ID NO: 2274485 - RNA, 18 nt, Human
cgggaggucgaggcagga

SEQ ID NO: 2274486 - RNA, 18 nt, Human
cgggaugguccuggggcu

SEQ ID NO: 2274487 - RNA, 16 nt, Human
cgggaugguccugggg

SEQ ID NO: 2274488 - RNA, 17 nt, Human
cgggauuaguacacacu

SEQ ID NO: 2274489 - RNA, 22 nt, Human
cggggacagcuccuucuguccu

SEQ ID NO: 2274490 - RNA, 21 nt, Human
cgggcaccuauagucccagcu

SEQ ID NO: 2274491 - RNA, 19 nt, Human
cgggcaccuauagucccag

SEQ ID NO: 2274492 - RNA, 14 nt, Human
cgggcacucagaag

SEQ ID NO: 2274493 - RNA, 22 nt, Human
cgggcacucagaagacacugau

SEQ ID NO: 2274494 - RNA, 16 nt, Human
cggggugcccacaggc

SEQ ID NO: 2274495 - RNA, 22 nt, Human
cggggugaguccauucucccag

SEQ ID NO: 2274496 - RNA, 17 nt, Human
cgggguccuguggcagg

SEQ ID NO: 2274497 - RNA, 19 nt, Human
cgggguccuguggcaggca

SEQ ID NO: 2274498 - RNA, 23 nt, Human
cggggugaguccauucucccagg

SEQ ID NO: 2274499 - RNA, 20 nt, Human
cggggggccccagucagccu

SEQ ID NO: 2274500 - RNA, 12 nt, Human
cggggggaggga

SEQ ID NO: 2274501 - RNA, 18 nt, Human
cgggggcuggccuaggag

SEQ ID NO: 2274502 - RNA, 22 nt, Human
cggggggccccagucagccucu

SEQ ID NO: 2274503 - RNA, 23 nt, Human
cggggggccccagucagccucuc

SEQ ID NO: 2274504 - RNA, 21 nt, Human
cgggguauccugggggaccca

SEQ ID NO: 2274505 - RNA, 16 nt, Human
cgggguauuuuaggca

SEQ ID NO: 2274506 - RNA, 16 nt, Human
cgggguccuguggcag

SEQ ID NO: 2274507 - RNA, 15 nt, Human
cgggguauccugggg

SEQ ID NO: 2274508 - RNA, 15 nt, Human
cggggggacagcucc

SEQ ID NO: 2274509 - RNA, 13 nt, Human
cgggggcuggccu

SEQ ID NO: 2274510 - RNA, 15 nt, Human
cgggggcuggccuag

SEQ ID NO: 2274511 - RNA, 12 nt, Human
cgggggcuggcc

SEQ ID NO: 2274512 - RNA, 12 nt, Human
cgggggcagcug

SEQ ID NO: 2274513 - RNA, 13 nt, Human
cgggggcagcuga

SEQ ID NO: 2274514 - RNA, 15 nt, Human
cgggggcagagaggg

SEQ ID NO: 2274515 - RNA, 10 nt, Human
cggggcuggg

SEQ ID NO: 2274516 - RNA, 12 nt, Human
cggggcuggguu

SEQ ID NO: 2274517 - RNA, 21 nt, Human
cggggcuggguuggcgcaccc

SEQ ID NO: 2274518 - RNA, 15 nt, Human
cggggcuuggcugag

SEQ ID NO: 2274519 - RNA, 14 nt, Human
cggggcuuggcuga

SEQ ID NO: 2274520 - RNA, 23 nt, Human
cggggcuucaaccuugagacagc

SEQ ID NO: 2274521 - RNA, 22 nt, Human
cggggccuggcgggaugggcca

SEQ ID NO: 2274522 - RNA, 22 nt, Human
cggggccuugcgguauccgccc

SEQ ID NO: 2274523 - RNA, 16 nt, Human
cggggcucuucucauu

SEQ ID NO: 2274524 - RNA, 14 nt, Human
cggggcguuucuuu

SEQ ID NO: 2274525 - RNA, 17 nt, Human
cggggcguuucuuugcc

SEQ ID NO: 2274526 - RNA, 17 nt, Human
cggggcucuucucauuu

SEQ ID NO: 2274527 - RNA, 23 nt, Human
cggggcucuucucauuucacccc

SEQ ID NO: 2274528 - RNA, 18 nt, Human
cggggccucgggaccuca

SEQ ID NO: 2274529 - RNA, 21 nt, Human
cggggaggccaagugcaggcu

SEQ ID NO: 2274530 - RNA, 19 nt, Human
cggggaggccaagugcagg

SEQ ID NO: 2274531 - RNA, 14 nt, Human
cggggaggccaagu

SEQ ID NO: 2274532 - RNA, 13 nt, Human
cggggaggccaag

SEQ ID NO: 2274533 - RNA, 18 nt, Human
cggggagcgcccgcgccc

SEQ ID NO: 2274534 - RNA, 22 nt, Human
cggggaggagagagcagcuucu

SEQ ID NO: 2274535 - RNA, 16 nt, Human
cggggagcccccgccc

SEQ ID NO: 2274536 - RNA, 23 nt, Human
cggggacagcuccuucuguccua

SEQ ID NO: 2274537 - RNA, 12 nt, Human
cgggcagcacag

SEQ ID NO: 2274538 - RNA, 14 nt, Human
cgggcagcacagca

SEQ ID NO: 2274539 - RNA, 12 nt, Human
cggggacccugu

SEQ ID NO: 2274540 - RNA, 14 nt, Human
cggggacccuguga

SEQ ID NO: 2274541 - RNA, 20 nt, Human
cggugagaggggaacagacu

SEQ ID NO: 2274542 - RNA, 21 nt, Human
cggugagaggggaacagacug

SEQ ID NO: 2274543 - RNA, 17 nt, Human
cggugccagguuuucug

SEQ ID NO: 2274544 - RNA, 16 nt, Human
cggugcagucugggug

SEQ ID NO: 2274545 - RNA, 16 nt, Human
cggugagaacucugcc

SEQ ID NO: 2274546 - RNA, 13 nt, Human
cggugcagucugg

SEQ ID NO: 2274547 - RNA, 14 nt, Human
cggugcagucuggg

SEQ ID NO: 2274548 - RNA, 14 nt, Human
cggugcccaagcca

SEQ ID NO: 2274549 - RNA, 15 nt, Human
cggugcccaagccag

SEQ ID NO: 2274550 - RNA, 18 nt, Human
cggugcccaagccagagg

SEQ ID NO: 2274551 - RNA, 20 nt, Human
cggugcccaagccagaggcu

SEQ ID NO: 2274552 - RNA, 17 nt, Human
cggugagcuacaaaugc

SEQ ID NO: 2274553 - RNA, 23 nt, Human
cggucccuugagaccucagccau

SEQ ID NO: 2274554 - RNA, 22 nt, Human
cggucccuugagaccucagcca

SEQ ID NO: 2274555 - RNA, 21 nt, Human
cggucccuugagaccucagcc

SEQ ID NO: 2274556 - RNA, 19 nt, Human
cggucccuugagaccucag

SEQ ID NO: 2274557 - RNA, 18 nt, Human
cgguccccuccgccaggc

SEQ ID NO: 2274558 - RNA, 22 nt, Human
cggucggguuuuauuguuuaaa

SEQ ID NO: 2274559 - RNA, 16 nt, Human
cgguauuaugcuucuu

SEQ ID NO: 2274560 - RNA, 17 nt, Human
cgguauuaugcuucuug

SEQ ID NO: 2274561 - RNA, 18 nt, Human
cgguccaagccugcaacu

SEQ ID NO: 2274562 - RNA, 14 nt, Human
cggucccacacugg

SEQ ID NO: 2274563 - RNA, 21 nt, Human
cggucuaaagugagcucuaug

SEQ ID NO: 2274564 - RNA, 11 nt, Human
cggucucaggc

SEQ ID NO: 2274565 - RNA, 20 nt, Human
cggucugcaagucagaggau

SEQ ID NO: 2274566 - RNA, 16 nt, Human
cggucugcaagucaga

SEQ ID NO: 2274567 - RNA, 19 nt, Human
cggucugcaagucagagga

SEQ ID NO: 2274568 - RNA, 18 nt, Human
cggguggcuagucagaga

SEQ ID NO: 2274569 - RNA, 20 nt, Human
cgggugggcggcacagccuu

SEQ ID NO: 2274570 - RNA, 18 nt, Human
cgggugcucagggcugac

SEQ ID NO: 2274571 - RNA, 15 nt, Human
cggguggcaggugga

SEQ ID NO: 2274572 - RNA, 19 nt, Human
cggguggaucaccugaggu

SEQ ID NO: 2274573 - RNA, 18 nt, Human
cggguggaucaccugagg

SEQ ID NO: 2274574 - RNA, 15 nt, Human
cgggugcucagggcu

SEQ ID NO: 2274575 - RNA, 21 nt, Human
cgggugaacaaagcagccacg

SEQ ID NO: 2274576 - RNA, 22 nt, Human
cgggugugcaaugucugaguga

SEQ ID NO: 2274577 - RNA, 17 nt, Human
cggguugugugucuguu

SEQ ID NO: 2274578 - RNA, 16 nt, Human
cggguugugugucugu

SEQ ID NO: 2274579 - RNA, 16 nt, Human
cggguggggcuugggg

SEQ ID NO: 2274580 - RNA, 20 nt, Human
cggguggggcuuggggcuca

SEQ ID NO: 2274581 - RNA, 19 nt, Human
cgggugggcggcacagccu

SEQ ID NO: 2274582 - RNA, 12 nt, Human
cgggugggggug

SEQ ID NO: 2274583 - RNA, 23 nt, Human
cggguggggguggaauaaaauac

SEQ ID NO: 2274584 - RNA, 11 nt, Human
cgggucacagg

SEQ ID NO: 2274585 - RNA, 12 nt, Human
cgggguggagca

SEQ ID NO: 2274586 - RNA, 18 nt, Human
cgggguggugggaaccau

SEQ ID NO: 2274587 - RNA, 19 nt, Human
cgggucacaggagggaggg

SEQ ID NO: 2274588 - RNA, 15 nt, Human
cgggucaucuguacc

SEQ ID NO: 2274589 - RNA, 20 nt, Human
cgggugaacaaagcagccac

SEQ ID NO: 2274590 - RNA, 22 nt, Human
cgggucaucuguaccucugccu

SEQ ID NO: 2274591 - RNA, 13 nt, Human
cgggucugccucu

SEQ ID NO: 2274592 - RNA, 19 nt, Human
cgggguggugggaaccaug

SEQ ID NO: 2274593 - RNA, 14 nt, Human
cgguccacccagga

SEQ ID NO: 2274594 - RNA, 15 nt, Human
cgguccacccaggag

SEQ ID NO: 2274595 - RNA, 16 nt, Human
cgguccacccaggagc

SEQ ID NO: 2274596 - RNA, 20 nt, Human
cgguccacccaggagccccg

SEQ ID NO: 2274597 - RNA, 19 nt, Human
cggguuuggcgggccaagg

SEQ ID NO: 2274598 - RNA, 20 nt, Human
cgguaaaacaccggagacua

SEQ ID NO: 2274599 - RNA, 23 nt, Human
cggguuuggcgggccaaggacug

SEQ ID NO: 2274600 - RNA, 21 nt, Human
cggguuuuauuguuuaaaauc

SEQ ID NO: 2274601 - RNA, 21 nt, Human
cgguagccagcacacagggca

SEQ ID NO: 2274602 - RNA, 15 nt, Human
cgguagccagcacac

SEQ ID NO: 2274603 - RNA, 22 nt, Human
cgguagccagcacacagggcag

SEQ ID NO: 2274604 - RNA, 18 nt, Human
cgguagguucagccaagg

SEQ ID NO: 2274605 - RNA, 18 nt, Human
cgguauccccccaucuug

SEQ ID NO: 2274606 - RNA, 22 nt, Human
cgguauccccccaucuugcuuc

SEQ ID NO: 2274607 - RNA, 12 nt, Human
cgguacucccau

SEQ ID NO: 2274608 - RNA, 14 nt, Human
cgguauuaugcuuc

SEQ ID NO: 2274609 - RNA, 11 nt, Human
cggcagagagg

SEQ ID NO: 2274610 - RNA, 13 nt, Human
cggcagagaggac

SEQ ID NO: 2274611 - RNA, 13 nt, Human
cggcagcagccau

SEQ ID NO: 2274612 - RNA, 14 nt, Human
cggcagcagccauc

SEQ ID NO: 2274613 - RNA, 15 nt, Human
cggcacccacccagc

SEQ ID NO: 2274614 - RNA, 20 nt, Human
cggcacccacaagugccacu

SEQ ID NO: 2274615 - RNA, 14 nt, Human
cggaauaguuggcu

SEQ ID NO: 2274616 - RNA, 21 nt, Human
cggcacagggucugcucuuuc

SEQ ID NO: 2274617 - RNA, 18 nt, Human
cggaaguuuucaaugaug

SEQ ID NO: 2274618 - RNA, 19 nt, Human
cgcuuuugcuggucacugc

SEQ ID NO: 2274619 - RNA, 21 nt, Human
cggaaaacgguggaggccagg

SEQ ID NO: 2274620 - RNA, 20 nt, Human
cggaaaagguuuuauuuugu

SEQ ID NO: 2274621 - RNA, 13 nt, Human
cggaagagccuug

SEQ ID NO: 2274622 - RNA, 18 nt, Human
cggaaggcuggcugggca

SEQ ID NO: 2274623 - RNA, 23 nt, Human
cggaagcagugccuuccauaauu

SEQ ID NO: 2274624 - RNA, 22 nt, Human
cggaagcagugccuuccauaau

SEQ ID NO: 2274625 - RNA, 20 nt, Human
cggaagcagugccuuccaua

SEQ ID NO: 2274626 - RNA, 14 nt, Human
cggaagcagugccu

SEQ ID NO: 2274627 - RNA, 20 nt, Human
cggaagccuuuuuccccaaa

SEQ ID NO: 2274628 - RNA, 12 nt, Human
cggaagggcaca

SEQ ID NO: 2274629 - RNA, 12 nt, Human
cggaaguuuuca

SEQ ID NO: 2274630 - RNA, 13 nt, Human
cggaaguuuucaa

SEQ ID NO: 2274631 - RNA, 21 nt, Human
cggcaggacaacgaggaagcc

SEQ ID NO: 2274632 - RNA, 13 nt, Human
cggcauggcuggg

SEQ ID NO: 2274633 - RNA, 14 nt, Human
cggcauggcuggga

SEQ ID NO: 2274634 - RNA, 21 nt, Human
cggcaugggaaagccaccucu

SEQ ID NO: 2274635 - RNA, 14 nt, Human
cggcauuccugcuu

SEQ ID NO: 2274636 - RNA, 22 nt, Human
cggcaugggaaagccaccucuc

SEQ ID NO: 2274637 - RNA, 15 nt, Human
cggcauuaaagccau

SEQ ID NO: 2274638 - RNA, 14 nt, Human
cggcauuucaaaug

SEQ ID NO: 2274639 - RNA, 11 nt, Human
cggccaccucu

SEQ ID NO: 2274640 - RNA, 11 nt, Human
cggccaccugc

SEQ ID NO: 2274641 - RNA, 15 nt, Human
cggccaccugcggug

SEQ ID NO: 2274642 - RNA, 16 nt, Human
cggccaccugcggugc

SEQ ID NO: 2274643 - RNA, 17 nt, Human
cggccaccugcggugcu

SEQ ID NO: 2274644 - RNA, 15 nt, Human
cggcccacagcuccc

SEQ ID NO: 2274645 - RNA, 22 nt, Human
cggcccaagcccgacuugcugu

SEQ ID NO: 2274646 - RNA, 22 nt, Human
cggcccacagcucccaccccac

SEQ ID NO: 2274647 - RNA, 19 nt, Human
cggcccacagcucccaccc

SEQ ID NO: 2274648 - RNA, 17 nt, Human
cggcccaggauggcuuu

SEQ ID NO: 2274649 - RNA, 13 nt, Human
cggccccugcugg

SEQ ID NO: 2274650 - RNA, 18 nt, Human
cggccccugcugguucag

SEQ ID NO: 2274651 - RNA, 19 nt, Human
cggccccugcugguucagg

SEQ ID NO: 2274652 - RNA, 12 nt, Human
cggcccacagcu

SEQ ID NO: 2274653 - RNA, 15 nt, Human
cggcccaagcccgac

SEQ ID NO: 2274654 - RNA, 16 nt, Human
cggcccaagcccgacu

SEQ ID NO: 2274655 - RNA, 16 nt, Human
cggccagggagaagcu

SEQ ID NO: 2274656 - RNA, 20 nt, Human
cggccagccccggcccuggg

SEQ ID NO: 2274657 - RNA, 13 nt, Human
cggccaggugggc

SEQ ID NO: 2274658 - RNA, 17 nt, Human
cggccagggagaagcuc

SEQ ID NO: 2274659 - RNA, 24 nt, Human
cggccaggccagagggagugacag

SEQ ID NO: 2274660 - RNA, 15 nt, Human
cggccagccaugucu

SEQ ID NO: 2274661 - RNA, 14 nt, Human
cggccacuggccau

SEQ ID NO: 2274662 - RNA, 16 nt, Human
cggccacuggccaucu

SEQ ID NO: 2274663 - RNA, 12 nt, Human
cggccaccucug

SEQ ID NO: 2274664 - RNA, 13 nt, Human
cggccaccucugc

SEQ ID NO: 2274665 - RNA, 14 nt, Human
cggccaccucugcg

SEQ ID NO: 2274666 - RNA, 23 nt, Human
cggcugagucaugaucucccugc

SEQ ID NO: 2274667 - RNA, 22 nt, Human
cggcugagucaugaucucccug

SEQ ID NO: 2274668 - RNA, 14 nt, Human
cggccucagcaccc

SEQ ID NO: 2274669 - RNA, 20 nt, Human
cggcugagucaugaucuccc

SEQ ID NO: 2274670 - RNA, 12 nt, Human
cggcugcagagg

SEQ ID NO: 2274671 - RNA, 15 nt, Human
cggcugcagaggcca

SEQ ID NO: 2274672 - RNA, 20 nt, Human
cggcugcagaggccagaggc

SEQ ID NO: 2274673 - RNA, 18 nt, Human
cggcugcagcucacccag

SEQ ID NO: 2274674 - RNA, 22 nt, Human
cggcugcagcucacccagcccc

SEQ ID NO: 2274675 - RNA, 12 nt, Human
cggcugcccuuu

SEQ ID NO: 2274676 - RNA, 11 nt, Human
cggcugcccuu

SEQ ID NO: 2274677 - RNA, 15 nt, Human
cggcuggacuuggag

SEQ ID NO: 2274678 - RNA, 11 nt, Human
cggcugcugag

SEQ ID NO: 2274679 - RNA, 18 nt, Human
cggcuggaaaugcugggc

SEQ ID NO: 2274680 - RNA, 20 nt, Human
cggcuggaaaugcugggcug

SEQ ID NO: 2274681 - RNA, 17 nt, Human
cggcuggagaccaugca

SEQ ID NO: 2274682 - RNA, 19 nt, Human
cggccgucuucacucgccc

SEQ ID NO: 2274683 - RNA, 23 nt, Human
cggccggccagccccuggcccca

SEQ ID NO: 2274684 - RNA, 16 nt, Human
cggccggccagccccu

SEQ ID NO: 2274685 - RNA, 14 nt, Human
cggccggccagccc

SEQ ID NO: 2274686 - RNA, 13 nt, Human
cggccgcuccagg

SEQ ID NO: 2274687 - RNA, 14 nt, Human
cggccgcuccaggg

SEQ ID NO: 2274688 - RNA, 15 nt, Human
cggccgcuccagggg

SEQ ID NO: 2274689 - RNA, 17 nt, Human
cggcccagcccggcucc

SEQ ID NO: 2274690 - RNA, 16 nt, Human
cggcccgaucuuucua

SEQ ID NO: 2274691 - RNA, 14 nt, Human
cggccuccauccug

SEQ ID NO: 2274692 - RNA, 12 nt, Human
cggccuccaucc

SEQ ID NO: 2274693 - RNA, 15 nt, Human
cuaacaccagacaga

SEQ ID NO: 2274694 - RNA, 17 nt, Human
cuaacacauuaucggga

SEQ ID NO: 2274695 - RNA, 13 nt, Human
cuaacaccagcgu

SEQ ID NO: 2274696 - RNA, 17 nt, Human
cuaacacagcaugugua

SEQ ID NO: 2274697 - RNA, 16 nt, Human
cuaacacagcaugugu

SEQ ID NO: 2274698 - RNA, 14 nt, Human
cuaacacagcaugu

SEQ ID NO: 2274699 - RNA, 16 nt, Human
cuaacacacagcuccc

SEQ ID NO: 2274700 - RNA, 15 nt, Human
cuaacacuauuuuau

SEQ ID NO: 2274701 - RNA, 16 nt, Human
cuaacacuauuuuaug

SEQ ID NO: 2274702 - RNA, 14 nt, Human
cuaacacccagucu

SEQ ID NO: 2274703 - RNA, 21 nt, Human
cuaacaccagcguuugagggg

SEQ ID NO: 2274704 - RNA, 22 nt, Human
cuaacaaucagcuccuuccugg

SEQ ID NO: 2274705 - RNA, 13 nt, Human
cuaacaaugacau

SEQ ID NO: 2274706 - RNA, 15 nt, Human
cuaacaaugacauuu

SEQ ID NO: 2274707 - RNA, 15 nt, Human
cuaacacacagcucc

SEQ ID NO: 2274708 - RNA, 23 nt, Human
cuaaauuugaauguuaagcagau

SEQ ID NO: 2274709 - RNA, 14 nt, Human
cuaacacuggcccc

SEQ ID NO: 2274710 - RNA, 13 nt, Human
cuaacacuggccc

SEQ ID NO: 2274711 - RNA, 15 nt, Human
cuaacacuggccccu

SEQ ID NO: 2274712 - RNA, 15 nt, Human
cuaacaugauuuggg

SEQ ID NO: 2274713 - RNA, 15 nt, Human
cuaacauggaaguac

SEQ ID NO: 2274714 - RNA, 17 nt, Human
cuaacauggaaguacua

SEQ ID NO: 2274715 - RNA, 21 nt, Human
cuaaauggucgcccaggagac

SEQ ID NO: 2274716 - RNA, 20 nt, Human
cuaaauggucgcccaggaga

SEQ ID NO: 2274717 - RNA, 15 nt, Human
cuaaaugcugaaaaa

SEQ ID NO: 2274718 - RNA, 14 nt, Human
cuaaauguaacagu

SEQ ID NO: 2274719 - RNA, 15 nt, Human
cuaaauguaacaguc

SEQ ID NO: 2274720 - RNA, 16 nt, Human
cuaaauguaacagucu

SEQ ID NO: 2274721 - RNA, 19 nt, Human
cuaaauggucgcccaggag

SEQ ID NO: 2274722 - RNA, 18 nt, Human
cuaaauggucgcccagga

SEQ ID NO: 2274723 - RNA, 17 nt, Human
cuaaauggccucaugug

SEQ ID NO: 2274724 - RNA, 19 nt, Human
cuaaauggccucauguggc

SEQ ID NO: 2274725 - RNA, 16 nt, Human
cuaaauguugaaagau

SEQ ID NO: 2274726 - RNA, 18 nt, Human
cuaaauguaacagucuga

SEQ ID NO: 2274727 - RNA, 19 nt, Human
cuaaauguaacagucugau

SEQ ID NO: 2274728 - RNA, 21 nt, Human
cuaaauguggagaaacuguag

SEQ ID NO: 2274729 - RNA, 14 nt, Human
cuaaauuguaaacu

SEQ ID NO: 2274730 - RNA, 18 nt, Human
cuaaauuguaaacuccug

SEQ ID NO: 2274731 - RNA, 19 nt, Human
cuaaauuacaauugucauu

SEQ ID NO: 2274732 - RNA, 23 nt, Human
cuaaauugacacuuaaaaauggu

SEQ ID NO: 2274733 - RNA, 22 nt, Human
cuaaaugcauauccugagccau

SEQ ID NO: 2274734 - RNA, 12 nt, Human
cuaaauggccuc

SEQ ID NO: 2274735 - RNA, 13 nt, Human
cuaaauggccuca

SEQ ID NO: 2274736 - RNA, 16 nt, Human
cuaaauggccucaugu

SEQ ID NO: 2274737 - RNA, 18 nt, Human
cuaaauggaaccacucua

SEQ ID NO: 2274738 - RNA, 17 nt, Human
cuaaauggaaccacucu

SEQ ID NO: 2274739 - RNA, 16 nt, Human
cuaaauggaaccacuc

SEQ ID NO: 2274740 - RNA, 21 nt, Human
cuaaaugcauauccugagcca

SEQ ID NO: 2274741 - RNA, 16 nt, Human
cuaaaugaauguuuac

SEQ ID NO: 2274742 - RNA, 15 nt, Human
cuaaauggaaccacu

SEQ ID NO: 2274743 - RNA, 20 nt, Human
cuaaaucuccaaaauaaaac

SEQ ID NO: 2274744 - RNA, 15 nt, Human
cuaaaugaauguuua

SEQ ID NO: 2274745 - RNA, 16 nt, Human
cuaaaucuagacucaa

SEQ ID NO: 2274746 - RNA, 15 nt, Human
cuaaauauuuccuua

SEQ ID NO: 2274747 - RNA, 22 nt, Human
cuaaauauuuccuuaaacugug

SEQ ID NO: 2274748 - RNA, 14 nt, Human
cuaaauauuuccuu

SEQ ID NO: 2274749 - RNA, 13 nt, Human
cuaaauauuuccu

SEQ ID NO: 2274750 - RNA, 17 nt, Human
cuaaauccuuuacuguu

SEQ ID NO: 2274751 - RNA, 21 nt, Human
cuaaauccuuuacuguuaguc

SEQ ID NO: 2274752 - RNA, 18 nt, Human
cuaaauauauuuuaagac

SEQ ID NO: 2274753 - RNA, 20 nt, Human
cuaaauauauuuuaagacga

SEQ ID NO: 2274754 - RNA, 17 nt, Human
cuaaauauauuuuaaga

SEQ ID NO: 2274755 - RNA, 17 nt, Human
cuaaacggauuccaaag

SEQ ID NO: 2274756 - RNA, 16 nt, Human
cuaaacggauuccaaa

SEQ ID NO: 2274757 - RNA, 15 nt, Human
cuaaacggauuccaa

SEQ ID NO: 2274758 - RNA, 23 nt, Human
cguuuacaagcccccccuuccac

SEQ ID NO: 2274759 - RNA, 14 nt, Human
cguuuacuaugccu

SEQ ID NO: 2274760 - RNA, 17 nt, Human
cguuuacuaugccugug

SEQ ID NO: 2274761 - RNA, 22 nt, Human
cuaaaaauauuauaacuuaaaa

SEQ ID NO: 2274762 - RNA, 22 nt, Human
cuaaaacuaaauagcauguauu

SEQ ID NO: 2274763 - RNA, 16 nt, Human
cuaaaacuaaauagca

SEQ ID NO: 2274764 - RNA, 17 nt, Human
cuaaaacaauaaaauuu

SEQ ID NO: 2274765 - RNA, 15 nt, Human
cuaaaaccugagcua

SEQ ID NO: 2274766 - RNA, 22 nt, Human
cuaaaaccugagcuagaagcug

SEQ ID NO: 2274767 - RNA, 13 nt, Human
cuaaaaaugcaac

SEQ ID NO: 2274768 - RNA, 22 nt, Human
cuaaaaaugggacuucuuuuca

SEQ ID NO: 2274769 - RNA, 12 nt, Human
cuaaaacaauaa

SEQ ID NO: 2274770 - RNA, 20 nt, Human
cuaaaacaaaagcucaucca

SEQ ID NO: 2274771 - RNA, 22 nt, Human
cguuuaagacuguaaugaaucu

SEQ ID NO: 2274772 - RNA, 13 nt, Human
cguugucucccug

SEQ ID NO: 2274773 - RNA, 16 nt, Human
cguugucucccuggcc

SEQ ID NO: 2274774 - RNA, 17 nt, Human
cguugucucccuggccc

SEQ ID NO: 2274775 - RNA, 18 nt, Human
cguugucucccuggcccu

SEQ ID NO: 2274776 - RNA, 11 nt, Human
cguugugaggg

SEQ ID NO: 2274777 - RNA, 18 nt, Human
cguuguuuacuuaaagau

SEQ ID NO: 2274778 - RNA, 20 nt, Human
cguuguuuacuuaaagauuu

SEQ ID NO: 2274779 - RNA, 16 nt, Human
cguuggagaagcccgu

SEQ ID NO: 2274780 - RNA, 21 nt, Human
cguugggccccagccuucuuu

SEQ ID NO: 2274781 - RNA, 23 nt, Human
cguugcugugggaacgagagggg

SEQ ID NO: 2274782 - RNA, 14 nt, Human
cguuguaaaauaua

SEQ ID NO: 2274783 - RNA, 21 nt, Human
cguuguaaaauauagcuguac

SEQ ID NO: 2274784 - RNA, 24 nt, Human
cguuguaaaauauagcuguacaaa

SEQ ID NO: 2274785 - RNA, 21 nt, Human
cuaaacgagucaauccccuca

SEQ ID NO: 2274786 - RNA, 20 nt, Human
cuaaacgagucaauccccuc

SEQ ID NO: 2274787 - RNA, 18 nt, Human
cuaaaccuuaguacugag

SEQ ID NO: 2274788 - RNA, 19 nt, Human
cuaaaccuuaguacugagu

SEQ ID NO: 2274789 - RNA, 16 nt, Human
cuaaacccaauccaaa

SEQ ID NO: 2274790 - RNA, 17 nt, Human
cuaaaccuuaguacuga

SEQ ID NO: 2274791 - RNA, 19 nt, Human
cuaaacccaauccaaaugg

SEQ ID NO: 2274792 - RNA, 15 nt, Human
cuaaacccaauccaa

SEQ ID NO: 2274793 - RNA, 19 nt, Human
cuaaacaaugcugauuugg

SEQ ID NO: 2274794 - RNA, 16 nt, Human
cuaaacagacuauuua

SEQ ID NO: 2274795 - RNA, 18 nt, Human
cuaaacagacuauuuaac

SEQ ID NO: 2274796 - RNA, 12 nt, Human
cuaaacagauau

SEQ ID NO: 2274797 - RNA, 18 nt, Human
cuaaacauccaauauuuu

SEQ ID NO: 2274798 - RNA, 13 nt, Human
cuaaacagauaua

SEQ ID NO: 2274799 - RNA, 17 nt, Human
cuaaacagauauaaaug

SEQ ID NO: 2274800 - RNA, 17 nt, Human
cuaaacauuuuguuauu

SEQ ID NO: 2274801 - RNA, 19 nt, Human
cuaaacaagaaucagucua

SEQ ID NO: 2274802 - RNA, 23 nt, Human
cuaaaauuugcccucccaucccg

SEQ ID NO: 2274803 - RNA, 17 nt, Human
cuaaaauuuuuaaggac

SEQ ID NO: 2274804 - RNA, 21 nt, Human
cuaaacaagaaucagucuauc

SEQ ID NO: 2274805 - RNA, 14 nt, Human
cuaaacaagauuuu

SEQ ID NO: 2274806 - RNA, 22 nt, Human
cuaaacaagauuuuaaagacau

SEQ ID NO: 2274807 - RNA, 23 nt, Human
cuaaacaagauuuuaaagacaug

SEQ ID NO: 2274808 - RNA, 18 nt, Human
cuaaaauuccacugcguu

SEQ ID NO: 2274809 - RNA, 21 nt, Human
cuaaaauuugcccucccaucc

SEQ ID NO: 2274810 - RNA, 18 nt, Human
cuaaaagagauuucaaga

SEQ ID NO: 2274811 - RNA, 16 nt, Human
cuaaaagauauaagug

SEQ ID NO: 2274812 - RNA, 14 nt, Human
cgugcagcauauga

SEQ ID NO: 2274813 - RNA, 17 nt, Human
cgugcagacuggagggg

SEQ ID NO: 2274814 - RNA, 16 nt, Human
cgugcagacuggaggg

SEQ ID NO: 2274815 - RNA, 22 nt, Human
cgugcaguggugcgaucugggu

SEQ ID NO: 2274816 - RNA, 21 nt, Human
cgugcaguggugcgaucuggg

SEQ ID NO: 2274817 - RNA, 13 nt, Human
cgugcaugugcac

SEQ ID NO: 2274818 - RNA, 21 nt, Human
cgugcauuggaagaccccacc

SEQ ID NO: 2274819 - RNA, 22 nt, Human
cgugcauuggaagaccccaccc

SEQ ID NO: 2274820 - RNA, 23 nt, Human
cgugcauaccacuuuuguucuug

SEQ ID NO: 2274821 - RNA, 21 nt, Human
cgugcauugugcuucuuucuu

SEQ ID NO: 2274822 - RNA, 12 nt, Human
cgugcauugugc

SEQ ID NO: 2274823 - RNA, 15 nt, Human
cgugcauugugcuuc

SEQ ID NO: 2274824 - RNA, 22 nt, Human
cgugcacguggagagcuggugc

SEQ ID NO: 2274825 - RNA, 21 nt, Human
cgugcacguggagagcuggug

SEQ ID NO: 2274826 - RNA, 20 nt, Human
cgugcacguggagagcuggu

SEQ ID NO: 2274827 - RNA, 17 nt, Human
cgugcacguggagagcu

SEQ ID NO: 2274828 - RNA, 18 nt, Human
cgugaaaacggagcugaa

SEQ ID NO: 2274829 - RNA, 18 nt, Human
cgugcacacaccagagcc

SEQ ID NO: 2274830 - RNA, 19 nt, Human
cgugcacacaccagagccc

SEQ ID NO: 2274831 - RNA, 16 nt, Human
cgugcacacaccagag

SEQ ID NO: 2274832 - RNA, 17 nt, Human
cgugaaaacggagcuga

SEQ ID NO: 2274833 - RNA, 16 nt, Human
cgugaaaacggagcug

SEQ ID NO: 2274834 - RNA, 15 nt, Human
cgugaaaacggagcu

SEQ ID NO: 2274835 - RNA, 10 nt, Human
cgucuuugca

SEQ ID NO: 2274836 - RNA, 15 nt, Human
cgucuucagccuagc

SEQ ID NO: 2274837 - RNA, 19 nt, Human
cgucuucuguauacugugg

SEQ ID NO: 2274838 - RNA, 23 nt, Human
cgucuucauuaagcccucuucca

SEQ ID NO: 2274839 - RNA, 17 nt, Human
cgucuugcuugggaagg

SEQ ID NO: 2274840 - RNA, 12 nt, Human
cgucuucauuaa

SEQ ID NO: 2274841 - RNA, 14 nt, Human
cgucuugcuuggga

SEQ ID NO: 2274842 - RNA, 19 nt, Human
cgucuugcuugggaagggg

SEQ ID NO: 2274843 - RNA, 20 nt, Human
cgucugacaggcaaugcugg

SEQ ID NO: 2274844 - RNA, 21 nt, Human
cgucugacaggcaaugcuggc

SEQ ID NO: 2274845 - RNA, 14 nt, Human
cgucuucagccuag

SEQ ID NO: 2274846 - RNA, 13 nt, Human
cgucuucagccua

SEQ ID NO: 2274847 - RNA, 15 nt, Human
cgucugacccucucc

SEQ ID NO: 2274848 - RNA, 20 nt, Human
cgucuuagcaagaaguaaaa

SEQ ID NO: 2274849 - RNA, 23 nt, Human
cgucuuagaaguggaccaggaca

SEQ ID NO: 2274850 - RNA, 22 nt, Human
cgucugacaggcaaugcuggcu

SEQ ID NO: 2274851 - RNA, 20 nt, Human
cggugccuggguggggcugc

SEQ ID NO: 2274852 - RNA, 19 nt, Human
cggugccuggguggggcug

SEQ ID NO: 2274853 - RNA, 23 nt, Human
cggugcccaagccagaggcuggg

SEQ ID NO: 2274854 - RNA, 22 nt, Human
cggugccuuuuuucacggaagu

SEQ ID NO: 2274855 - RNA, 18 nt, Human
cggugcuaucucccccag

SEQ ID NO: 2274856 - RNA, 20 nt, Human
cggugcuaucucccccagcc

SEQ ID NO: 2274857 - RNA, 21 nt, Human
cggugcuaucucccccagccc

SEQ ID NO: 2274858 - RNA, 22 nt, Human
cggugcuaucucccccagcccc

SEQ ID NO: 2274859 - RNA, 17 nt, Human
cgucucaaccccucaca

SEQ ID NO: 2274860 - RNA, 21 nt, Human
cgucuacucauuccccggggc

SEQ ID NO: 2274861 - RNA, 11 nt, Human
cgucucagugu

SEQ ID NO: 2274862 - RNA, 23 nt, Human
cgucucaaaaaaaaaaaaaugca

SEQ ID NO: 2274863 - RNA, 14 nt, Human
cgucuccaggggcu

SEQ ID NO: 2274864 - RNA, 19 nt, Human
cgucuccaggggcugcuuc

SEQ ID NO: 2274865 - RNA, 20 nt, Human
cgucuccaggggcugcuucc

SEQ ID NO: 2274866 - RNA, 21 nt, Human
cgucuccaggggcugcuuccu

SEQ ID NO: 2274867 - RNA, 16 nt, Human
cgucucauacucaccu

SEQ ID NO: 2274868 - RNA, 16 nt, Human
cgucuaccugaggggc

SEQ ID NO: 2274869 - RNA, 20 nt, Human
cguccugccaccuggggcag

SEQ ID NO: 2274870 - RNA, 16 nt, Human
cguccugccaccuggg

SEQ ID NO: 2274871 - RNA, 13 nt, Human
cguccugccugug

SEQ ID NO: 2274872 - RNA, 14 nt, Human
cguccugccaccug

SEQ ID NO: 2274873 - RNA, 16 nt, Human
cguccucgagcaacug

SEQ ID NO: 2274874 - RNA, 13 nt, Human
cguccugccaccu

SEQ ID NO: 2274875 - RNA, 15 nt, Human
cguccuccucuguga

SEQ ID NO: 2274876 - RNA, 14 nt, Human
cguccuccucugug

SEQ ID NO: 2274877 - RNA, 13 nt, Human
cguccuccucugu

SEQ ID NO: 2274878 - RNA, 12 nt, Human
cguccuccucug

SEQ ID NO: 2274879 - RNA, 14 nt, Human
cguccugucagugc

SEQ ID NO: 2274880 - RNA, 16 nt, Human
cguccugccuguggcg

SEQ ID NO: 2274881 - RNA, 14 nt, Human
cguccugccugugg

SEQ ID NO: 2274882 - RNA, 15 nt, Human
cguccugccuguggc

SEQ ID NO: 2274883 - RNA, 16 nt, Human
cguccugucagugccg

SEQ ID NO: 2274884 - RNA, 23 nt, Human
cguccuguccacacccagcucag

SEQ ID NO: 2274885 - RNA, 23 nt, Human
cguggggagggccguaccccacc

SEQ ID NO: 2274886 - RNA, 17 nt, Human
cgugggcucccugacug

SEQ ID NO: 2274887 - RNA, 12 nt, Human
cguggggcagca

SEQ ID NO: 2274888 - RNA, 11 nt, Human
cguggggaggu

SEQ ID NO: 2274889 - RNA, 18 nt, Human
cguggggcagcacagaga

SEQ ID NO: 2274890 - RNA, 18 nt, Human
cguugaagaggaagggca

SEQ ID NO: 2274891 - RNA, 16 nt, Human
cguugaggaugaggcc

SEQ ID NO: 2274892 - RNA, 19 nt, Human
cguugaggaugaggccgcu

SEQ ID NO: 2274893 - RNA, 17 nt, Human
cguugauguuggcuggg

SEQ ID NO: 2274894 - RNA, 18 nt, Human
cguugauguuggcuggga

SEQ ID NO: 2274895 - RNA, 12 nt, Human
cguugcaugucg

SEQ ID NO: 2274896 - RNA, 11 nt, Human
cguugcugugg

SEQ ID NO: 2274897 - RNA, 14 nt, Human
cguugcugugggaa

SEQ ID NO: 2274898 - RNA, 15 nt, Human
cguugcugugggaac

SEQ ID NO: 2274899 - RNA, 17 nt, Human
cgugggcggcagagagg

SEQ ID NO: 2274900 - RNA, 20 nt, Human
cgugggaggcgggaguggag

SEQ ID NO: 2274901 - RNA, 17 nt, Human
cgugggcggggccuugc

SEQ ID NO: 2274902 - RNA, 13 nt, Human
cgugggcucccug

SEQ ID NO: 2274903 - RNA, 22 nt, Human
cgugggaggcgggaguggagug

SEQ ID NO: 2274904 - RNA, 23 nt, Human
cgugggaaccccccucccaccca

SEQ ID NO: 2274905 - RNA, 22 nt, Human
cgugggagacaagaaaucccug

SEQ ID NO: 2274906 - RNA, 17 nt, Human
cgugggagagagacgug

SEQ ID NO: 2274907 - RNA, 17 nt, Human
cgugggagcgugggagg

SEQ ID NO: 2274908 - RNA, 22 nt, Human
cgugggaaccccccucccaccc

SEQ ID NO: 2274909 - RNA, 22 nt, Human
cguggccccagccuggcccagc

SEQ ID NO: 2274910 - RNA, 19 nt, Human
cgugggacggugcccaagc

SEQ ID NO: 2274911 - RNA, 20 nt, Human
cgugggacggugcccaagcc

SEQ ID NO: 2274912 - RNA, 20 nt, Human
cguggcuucccgcucagccc

SEQ ID NO: 2274913 - RNA, 21 nt, Human
cguggcuucccgcucagcccu

SEQ ID NO: 2274914 - RNA, 15 nt, Human
cguggcccagagaag

SEQ ID NO: 2274915 - RNA, 15 nt, Human
cguggccagcccggc

SEQ ID NO: 2274916 - RNA, 11 nt, Human
cguggccagcc

SEQ ID NO: 2274917 - RNA, 13 nt, Human
cguggccagcccg

SEQ ID NO: 2274918 - RNA, 19 nt, Human
cguggccagcccggcuggu

SEQ ID NO: 2274919 - RNA, 16 nt, Human
cguggcccagagaagc

SEQ ID NO: 2274920 - RNA, 12 nt, Human
cguggccccagc

SEQ ID NO: 2274921 - RNA, 13 nt, Human
cguggccccagcc

SEQ ID NO: 2274922 - RNA, 14 nt, Human
cguggccccagccu

SEQ ID NO: 2274923 - RNA, 15 nt, Human
cguggccccagccug

SEQ ID NO: 2274924 - RNA, 16 nt, Human
cguggccccagccugg

SEQ ID NO: 2274925 - RNA, 17 nt, Human
cguggccccagccuggc

SEQ ID NO: 2274926 - RNA, 18 nt, Human
cguggcuucccgcucagc

SEQ ID NO: 2274927 - RNA, 19 nt, Human
cguggcuucccgcucagcc

SEQ ID NO: 2274928 - RNA, 18 nt, Human
cguggccccagccuggcc

SEQ ID NO: 2274929 - RNA, 19 nt, Human
cguggccccagccuggccc

SEQ ID NO: 2274930 - RNA, 20 nt, Human
cguggccccagccuggccca

SEQ ID NO: 2274931 - RNA, 21 nt, Human
cguggccccagccuggcccag

SEQ ID NO: 2274932 - RNA, 13 nt, Human
cguggcaucaccu

SEQ ID NO: 2274933 - RNA, 16 nt, Human
cguggcauagcccaga

SEQ ID NO: 2274934 - RNA, 23 nt, Human
cguggcauagcccagacacagaa

SEQ ID NO: 2274935 - RNA, 16 nt, Human
cguggcauguggccug

SEQ ID NO: 2274936 - RNA, 19 nt, Human
cguggcauguggccugugg

SEQ ID NO: 2274937 - RNA, 20 nt, Human
cguggcauguggccuguggc

SEQ ID NO: 2274938 - RNA, 21 nt, Human
cguggcauguggccuguggcc

SEQ ID NO: 2274939 - RNA, 22 nt, Human
cguggcagauaaucagccucuu

SEQ ID NO: 2274940 - RNA, 21 nt, Human
cguggcagauaaucagccucu

SEQ ID NO: 2274941 - RNA, 20 nt, Human
cguggcagauaaucagccuc

SEQ ID NO: 2274942 - RNA, 17 nt, Human
cguggauugcacguggc

SEQ ID NO: 2274943 - RNA, 22 nt, Human
cguggaggagcagugcaggcac

SEQ ID NO: 2274944 - RNA, 20 nt, Human
cguggaacguuuuuccuguu

SEQ ID NO: 2274945 - RNA, 21 nt, Human
cguggaaagggugcugcuucc

SEQ ID NO: 2274946 - RNA, 15 nt, Human
cguggaaagggugcu

SEQ ID NO: 2274947 - RNA, 13 nt, Human
cguggacucugca

SEQ ID NO: 2274948 - RNA, 16 nt, Human
cguggacucugcacau

SEQ ID NO: 2274949 - RNA, 14 nt, Human
cguggaccuuccug

SEQ ID NO: 2274950 - RNA, 15 nt, Human
cguggaccuuccugc

SEQ ID NO: 2274951 - RNA, 17 nt, Human
cguggaccuuccugcca

SEQ ID NO: 2274952 - RNA, 20 nt, Human
cguggacuccagacucucug

SEQ ID NO: 2274953 - RNA, 16 nt, Human
cguggacaggugugcc

SEQ ID NO: 2274954 - RNA, 22 nt, Human
cguggaggaaugcucccccauc

SEQ ID NO: 2274955 - RNA, 16 nt, Human
cguggaggagcagugc

SEQ ID NO: 2274956 - RNA, 17 nt, Human
cguggaggaggaaggca

SEQ ID NO: 2274957 - RNA, 18 nt, Human
cguggaggaaugcucccc

SEQ ID NO: 2274958 - RNA, 14 nt, Human
cguggagcugccug

SEQ ID NO: 2274959 - RNA, 15 nt, Human
cguggagcugccuga

SEQ ID NO: 2274960 - RNA, 17 nt, Human
cguggagcagaaucagu

SEQ ID NO: 2274961 - RNA, 18 nt, Human
cguggagcagaaucagua

SEQ ID NO: 2274962 - RNA, 21 nt, Human
cguggagagggaugaggugcu

SEQ ID NO: 2274963 - RNA, 13 nt, Human
cguggagagggau

SEQ ID NO: 2274964 - RNA, 15 nt, Human
cguggagaugucuuc

SEQ ID NO: 2274965 - RNA, 16 nt, Human
cguggagaugucuucg

SEQ ID NO: 2274966 - RNA, 20 nt, Human
cguggagagcuggugcccgg

SEQ ID NO: 2274967 - RNA, 12 nt, Human
cguggagaggga

SEQ ID NO: 2274968 - RNA, 17 nt, Human
cguggagagcuggugcc

SEQ ID NO: 2274969 - RNA, 22 nt, Human
cguggacuuggggucagagacu

SEQ ID NO: 2274970 - RNA, 22 nt, Human
cguggacuccagacucucugug

SEQ ID NO: 2274971 - RNA, 15 nt, Human
cguggaacguuuuuc

SEQ ID NO: 2274972 - RNA, 22 nt, Human
cgugcuuguuugcucaccuggg

SEQ ID NO: 2274973 - RNA, 14 nt, Human
cgugcuuccucagu

SEQ ID NO: 2274974 - RNA, 18 nt, Human
cgugcuuagccuccugac

SEQ ID NO: 2274975 - RNA, 20 nt, Human
cgugcuuagccuccugaccu

SEQ ID NO: 2274976 - RNA, 16 nt, Human
cgugcugacagcugcu

SEQ ID NO: 2274977 - RNA, 17 nt, Human
cgugcugacagcugcuc

SEQ ID NO: 2274978 - RNA, 15 nt, Human
cgugcugacagcugc

SEQ ID NO: 2274979 - RNA, 14 nt, Human
cgugcuaaauuuuc

SEQ ID NO: 2274980 - RNA, 16 nt, Human
cgugcuccagccuggc

SEQ ID NO: 2274981 - RNA, 17 nt, Human
cgugcuccagccuggcu

SEQ ID NO: 2274982 - RNA, 18 nt, Human
cgugcuccagccuggcuc

SEQ ID NO: 2274983 - RNA, 19 nt, Human
cgugcucgccccagcaggu

SEQ ID NO: 2274984 - RNA, 20 nt, Human
cgugccagucgcgcugccug

SEQ ID NO: 2274985 - RNA, 23 nt, Human
cgugcuacccccaugcuggaggu

SEQ ID NO: 2274986 - RNA, 19 nt, Human
cgugccaggcccggggcug

SEQ ID NO: 2274987 - RNA, 17 nt, Human
cgugccagucgcgcugc

SEQ ID NO: 2274988 - RNA, 23 nt, Human
cgugccuuuugcaccccucccau

SEQ ID NO: 2274989 - RNA, 13 nt, Human
cgugccaggcccg

SEQ ID NO: 2274990 - RNA, 18 nt, Human
cucaacuagcagauacag

SEQ ID NO: 2274991 - RNA, 19 nt, Human
cucaacucuccuccagagu

SEQ ID NO: 2274992 - RNA, 23 nt, Human
cucaacugccuacuccaaaaugu

SEQ ID NO: 2274993 - RNA, 15 nt, Human
cucaacugccuacuc

SEQ ID NO: 2274994 - RNA, 13 nt, Human
cucaacugccuac

SEQ ID NO: 2274995 - RNA, 19 nt, Human
cucaagagggcacuggugg

SEQ ID NO: 2274996 - RNA, 21 nt, Human
cucaagagggcacugguggcc

SEQ ID NO: 2274997 - RNA, 16 nt, Human
cucaagaggcugaggc

SEQ ID NO: 2274998 - RNA, 14 nt, Human
cucaagaggcugag

SEQ ID NO: 2274999 - RNA, 17 nt, Human
cucaagagggcacuggu

SEQ ID NO: 2275000 - RNA, 19 nt, Human
cucaaggacuugaaagcau

SEQ ID NO: 2275001 - RNA, 18 nt, Human
cucaaggacuugaaagca

SEQ ID NO: 2275002 - RNA, 15 nt, Human
cucaaggacuugaaa

SEQ ID NO: 2275003 - RNA, 14 nt, Human
cucaaggaaagggg

SEQ ID NO: 2275004 - RNA, 10 nt, Human
cucaaggacu

SEQ ID NO: 2275005 - RNA, 17 nt, Human
cucaaggaaaggccuga

SEQ ID NO: 2275006 - RNA, 23 nt, Human
cucaaggaauaaugggcuuagag

SEQ ID NO: 2275007 - RNA, 17 nt, Human
cucaagcugcaucuaga

SEQ ID NO: 2275008 - RNA, 17 nt, Human
cucaagaggcugaggca

SEQ ID NO: 2275009 - RNA, 17 nt, Human
cucaagauacugcuacu

SEQ ID NO: 2275010 - RNA, 22 nt, Human
cucaagauacugcuacuguaau

SEQ ID NO: 2275011 - RNA, 21 nt, Human
cucaagauacugcuacuguaa

SEQ ID NO: 2275012 - RNA, 17 nt, Human
cucaagaucaaugaaau

SEQ ID NO: 2275013 - RNA, 18 nt, Human
cucaagaucaaugaaaug

SEQ ID NO: 2275014 - RNA, 22 nt, Human
cucaagcccugcagucacagcu

SEQ ID NO: 2275015 - RNA, 16 nt, Human
cucaagaugaaggcaa

SEQ ID NO: 2275016 - RNA, 17 nt, Human
cucaagcgauucuccug

SEQ ID NO: 2275017 - RNA, 16 nt, Human
cucaagcgauucuccu

SEQ ID NO: 2275018 - RNA, 13 nt, Human
cucaaccugugau

SEQ ID NO: 2275019 - RNA, 21 nt, Human
cucaaccugugaugaggggag

SEQ ID NO: 2275020 - RNA, 21 nt, Human
cucaaccucuucuggcucaaa

SEQ ID NO: 2275021 - RNA, 18 nt, Human
cucaacguugcuccccau

SEQ ID NO: 2275022 - RNA, 17 nt, Human
cucaacguuacauuuuu

SEQ ID NO: 2275023 - RNA, 16 nt, Human
cucaacguauuguuuc

SEQ ID NO: 2275024 - RNA, 15 nt, Human
cucaacguauuguuu

SEQ ID NO: 2275025 - RNA, 20 nt, Human
cucaacucuccuccagaguc

SEQ ID NO: 2275026 - RNA, 21 nt, Human
cucaacucuccuccagaguca

SEQ ID NO: 2275027 - RNA, 23 nt, Human
cucaaauuaaucuuucuuuaccu

SEQ ID NO: 2275028 - RNA, 12 nt, Human
cucaaccucuuc

SEQ ID NO: 2275029 - RNA, 20 nt, Human
cucaaccucuucuggcucaa

SEQ ID NO: 2275030 - RNA, 18 nt, Human
cucaaccucuucuggcuc

SEQ ID NO: 2275031 - RNA, 14 nt, Human
cucaaccucuucug

SEQ ID NO: 2275032 - RNA, 13 nt, Human
cucaaccucuucu

SEQ ID NO: 2275033 - RNA, 21 nt, Human
cucaaauggggccagauccag

SEQ ID NO: 2275034 - RNA, 20 nt, Human
cucaaauggggccagaucca

SEQ ID NO: 2275035 - RNA, 19 nt, Human
cucaaauggggccagaucc

SEQ ID NO: 2275036 - RNA, 16 nt, Human
cucaaauuaaucuuuc

SEQ ID NO: 2275037 - RNA, 17 nt, Human
cuauuuuggauuguaua

SEQ ID NO: 2275038 - RNA, 12 nt, Human
cuauuuuguaaa

SEQ ID NO: 2275039 - RNA, 22 nt, Human
cucaaaugcucagaccagcucu

SEQ ID NO: 2275040 - RNA, 15 nt, Human
cucaaauggggccag

SEQ ID NO: 2275041 - RNA, 17 nt, Human
cucaaauggggccagau

SEQ ID NO: 2275042 - RNA, 16 nt, Human
cucaaauggggccaga

SEQ ID NO: 2275043 - RNA, 18 nt, Human
cuauuuucauuguaaaac

SEQ ID NO: 2275044 - RNA, 16 nt, Human
cuauuuucauuuucug

SEQ ID NO: 2275045 - RNA, 18 nt, Human
cuauuuugaaaaauuccu

SEQ ID NO: 2275046 - RNA, 23 nt, Human
cuauuuguuuucuucuguauguu

SEQ ID NO: 2275047 - RNA, 21 nt, Human
cuaugagaauugggauuacau

SEQ ID NO: 2275048 - RNA, 12 nt, Human
cuauuuuauucc

SEQ ID NO: 2275049 - RNA, 22 nt, Human
cuauuuuaauaaacacucuuga

SEQ ID NO: 2275050 - RNA, 17 nt, Human
cuauuugucuuucagga

SEQ ID NO: 2275051 - RNA, 22 nt, Human
cuauuuguugaugcuuguguca

SEQ ID NO: 2275052 - RNA, 16 nt, Human
cuauuuguuuucaugg

SEQ ID NO: 2275053 - RNA, 18 nt, Human
cuauuuuaauaaacacuc

SEQ ID NO: 2275054 - RNA, 12 nt, Human
cuauuuggaauu

SEQ ID NO: 2275055 - RNA, 16 nt, Human
cuauuuggaauuuaua

SEQ ID NO: 2275056 - RNA, 22 nt, Human
cuauuugccaugggcuucacug

SEQ ID NO: 2275057 - RNA, 23 nt, Human
cuauuugccaugggcuucacugu

SEQ ID NO: 2275058 - RNA, 14 nt, Human
cuaugcauuugaaa

SEQ ID NO: 2275059 - RNA, 16 nt, Human
cucaccccccacacuc

SEQ ID NO: 2275060 - RNA, 19 nt, Human
cucaccccccacacucacu

SEQ ID NO: 2275061 - RNA, 20 nt, Human
cucaccccccacacucacuc

SEQ ID NO: 2275062 - RNA, 16 nt, Human
cucacccaugugccaa

SEQ ID NO: 2275063 - RNA, 14 nt, Human
cucaccccagcccc

SEQ ID NO: 2275064 - RNA, 12 nt, Human
cucaccccagcc

SEQ ID NO: 2275065 - RNA, 13 nt, Human
cucaccccagccc

SEQ ID NO: 2275066 - RNA, 16 nt, Human
cucaccccgucugggg

SEQ ID NO: 2275067 - RNA, 21 nt, Human
cucacccccucgggucuccuc

SEQ ID NO: 2275068 - RNA, 13 nt, Human
cucaccccggcag

SEQ ID NO: 2275069 - RNA, 21 nt, Human
cucacccccuucuccauccac

SEQ ID NO: 2275070 - RNA, 17 nt, Human
cucaccccugcccuggg

SEQ ID NO: 2275071 - RNA, 16 nt, Human
cucaccccugcccugg

SEQ ID NO: 2275072 - RNA, 15 nt, Human
cucaccccugcccug

SEQ ID NO: 2275073 - RNA, 15 nt, Human
cucaccccgucuggg

SEQ ID NO: 2275074 - RNA, 14 nt, Human
cucaccccugguuc

SEQ ID NO: 2275075 - RNA, 17 nt, Human
cucaccccugguucuca

SEQ ID NO: 2275076 - RNA, 20 nt, Human
cucacccccuucuccaucca

SEQ ID NO: 2275077 - RNA, 19 nt, Human
cucacccccuucuccaucc

SEQ ID NO: 2275078 - RNA, 17 nt, Human
cucacccccuucuccau

SEQ ID NO: 2275079 - RNA, 16 nt, Human
cucacccccuucucca

SEQ ID NO: 2275080 - RNA, 13 nt, Human
cucacccccucgg

SEQ ID NO: 2275081 - RNA, 14 nt, Human
cucacccccucggg

SEQ ID NO: 2275082 - RNA, 15 nt, Human
cucacccccuucucc

SEQ ID NO: 2275083 - RNA, 18 nt, Human
cucaccccugcccuggga

SEQ ID NO: 2275084 - RNA, 13 nt, Human
cucaccccugucc

SEQ ID NO: 2275085 - RNA, 15 nt, Human
cucaccccuguccuc

SEQ ID NO: 2275086 - RNA, 18 nt, Human
cucaccccuguccucacu

SEQ ID NO: 2275087 - RNA, 19 nt, Human
cucaccccuguccucacug

SEQ ID NO: 2275088 - RNA, 20 nt, Human
cucaccccuguccucacugc

SEQ ID NO: 2275089 - RNA, 21 nt, Human
cucaccccuguccucacugcu

SEQ ID NO: 2275090 - RNA, 22 nt, Human
cucaccccuguccucacugcuc

SEQ ID NO: 2275091 - RNA, 19 nt, Human
cucaccccugguucucauc

SEQ ID NO: 2275092 - RNA, 20 nt, Human
cucaccccugguucucaucu

SEQ ID NO: 2275093 - RNA, 21 nt, Human
cucaccccugguucucaucuu

SEQ ID NO: 2275094 - RNA, 23 nt, Human
cucaccccugguucucaucuuuc

SEQ ID NO: 2275095 - RNA, 16 nt, Human
cucacuaggcuucugg

SEQ ID NO: 2275096 - RNA, 13 nt, Human
cucacuaggcuuc

SEQ ID NO: 2275097 - RNA, 17 nt, Human
cucaccccuugccauaa

SEQ ID NO: 2275098 - RNA, 16 nt, Human
cucacuauguugccca

SEQ ID NO: 2275099 - RNA, 17 nt, Human
cucacuauguugcccag

SEQ ID NO: 2275100 - RNA, 21 nt, Human
cucacuaucccggcugcccuu

SEQ ID NO: 2275101 - RNA, 20 nt, Human
cucacuaucccggcugcccu

SEQ ID NO: 2275102 - RNA, 20 nt, Human
cucacuaggcuucugguuga

SEQ ID NO: 2275103 - RNA, 17 nt, Human
cucacuauaccaguaua

SEQ ID NO: 2275104 - RNA, 23 nt, Human
cucacuaggcccccacuugccuc

SEQ ID NO: 2275105 - RNA, 23 nt, Human
cucacauggugcuacgccugcau

SEQ ID NO: 2275106 - RNA, 22 nt, Human
cucacaugucaguaccuucaaa

SEQ ID NO: 2275107 - RNA, 20 nt, Human
cucaccagccccagugccca

SEQ ID NO: 2275108 - RNA, 21 nt, Human
cucaccagccccagugcccac

SEQ ID NO: 2275109 - RNA, 20 nt, Human
cucacauagcuuacaagcca

SEQ ID NO: 2275110 - RNA, 22 nt, Human
cucacaguuccucgcccugggu

SEQ ID NO: 2275111 - RNA, 21 nt, Human
cucacaguuccucgcccuggg

SEQ ID NO: 2275112 - RNA, 20 nt, Human
cucacaucuuucacacuucc

SEQ ID NO: 2275113 - RNA, 23 nt, Human
cucacaguuccucgcccuggguc

SEQ ID NO: 2275114 - RNA, 21 nt, Human
cucacauggugcuacgccugc

SEQ ID NO: 2275115 - RNA, 19 nt, Human
cucaccagccccagugccc

SEQ ID NO: 2275116 - RNA, 13 nt, Human
cucacauuuauau

SEQ ID NO: 2275117 - RNA, 20 nt, Human
cucaaggacuugaaagcauc

SEQ ID NO: 2275118 - RNA, 15 nt, Human
cucaaggccucccac

SEQ ID NO: 2275119 - RNA, 16 nt, Human
cucaaggccucccaca

SEQ ID NO: 2275120 - RNA, 17 nt, Human
cucaaggccucccacag

SEQ ID NO: 2275121 - RNA, 16 nt, Human
cucaaggacuuugcag

SEQ ID NO: 2275122 - RNA, 22 nt, Human
cucaaggacuuugcagccggca

SEQ ID NO: 2275123 - RNA, 18 nt, Human
cucaagugauucuccugc

SEQ ID NO: 2275124 - RNA, 19 nt, Human
cucaagugauucuccugcc

SEQ ID NO: 2275125 - RNA, 20 nt, Human
cucaagugauucuccugccu

SEQ ID NO: 2275126 - RNA, 20 nt, Human
cucacagucucuuuaaucuu

SEQ ID NO: 2275127 - RNA, 18 nt, Human
cucacagugggagccagg

SEQ ID NO: 2275128 - RNA, 19 nt, Human
cucacagucucuuuaaucu

SEQ ID NO: 2275129 - RNA, 18 nt, Human
cucaaggccucccacagu

SEQ ID NO: 2275130 - RNA, 23 nt, Human
cucacaguccuuaccagcagagc

SEQ ID NO: 2275131 - RNA, 21 nt, Human
cucacaguguugcccaggcug

SEQ ID NO: 2275132 - RNA, 17 nt, Human
cucacaguguugcccag

SEQ ID NO: 2275133 - RNA, 19 nt, Human
cucacagugggagccaggg

SEQ ID NO: 2275134 - RNA, 22 nt, Human
cucacagugggagccagggcug

SEQ ID NO: 2275135 - RNA, 20 nt, Human
cucacaguuccucgcccugg

SEQ ID NO: 2275136 - RNA, 19 nt, Human
cucacaguuccucgcccug

SEQ ID NO: 2275137 - RNA, 18 nt, Human
cucacaguuccucgcccu

SEQ ID NO: 2275138 - RNA, 17 nt, Human
cucacaguuccucgccc

SEQ ID NO: 2275139 - RNA, 16 nt, Human
cucacaguuccucgcc

SEQ ID NO: 2275140 - RNA, 13 nt, Human
cucacaguuccuc

SEQ ID NO: 2275141 - RNA, 15 nt, Human
cuaugacugcucccc

SEQ ID NO: 2275142 - RNA, 16 nt, Human
cuaugacugcucccca

SEQ ID NO: 2275143 - RNA, 17 nt, Human
cuaugacugcuccccag

SEQ ID NO: 2275144 - RNA, 11 nt, Human
cuaugagaaaa

SEQ ID NO: 2275145 - RNA, 16 nt, Human
cuaugagaaaagaggc

SEQ ID NO: 2275146 - RNA, 12 nt, Human
cuaugcauuuga

SEQ ID NO: 2275147 - RNA, 11 nt, Human
cuaugcauuug

SEQ ID NO: 2275148 - RNA, 21 nt, Human
cuaugcauuugaaaauuuuga

SEQ ID NO: 2275149 - RNA, 15 nt, Human
cuaggauaucuucuc

SEQ ID NO: 2275150 - RNA, 17 nt, Human
cuaggauaucuucucca

SEQ ID NO: 2275151 - RNA, 23 nt, Human
cuaggagggagacacuggccccu

SEQ ID NO: 2275152 - RNA, 13 nt, Human
cuaggcaggacau

SEQ ID NO: 2275153 - RNA, 22 nt, Human
cuaggcaggacaugcugaagcc

SEQ ID NO: 2275154 - RNA, 13 nt, Human
cuaggauuucaug

SEQ ID NO: 2275155 - RNA, 19 nt, Human
cuaggagcugggaggaaaa

SEQ ID NO: 2275156 - RNA, 16 nt, Human
cuaggagcugggagga

SEQ ID NO: 2275157 - RNA, 15 nt, Human
cuaggagcugggagg

SEQ ID NO: 2275158 - RNA, 13 nt, Human
cuaggagcacugu

SEQ ID NO: 2275159 - RNA, 18 nt, Human
cuaggagauaucugaggg

SEQ ID NO: 2275160 - RNA, 19 nt, Human
cuaggagauaucugaggga

SEQ ID NO: 2275161 - RNA, 21 nt, Human
cuaggagauaucugagggagg

SEQ ID NO: 2275162 - RNA, 23 nt, Human
cuaggagauaucugagggaggag

SEQ ID NO: 2275163 - RNA, 17 nt, Human
cuaggaggucucuaaga

SEQ ID NO: 2275164 - RNA, 13 nt, Human
cuaggagggagac

SEQ ID NO: 2275165 - RNA, 18 nt, Human
cuaggagggagacacugg

SEQ ID NO: 2275166 - RNA, 22 nt, Human
cuaggagggagacacuggcccc

SEQ ID NO: 2275167 - RNA, 22 nt, Human
cuaggacucugaggcucuuucu

SEQ ID NO: 2275168 - RNA, 18 nt, Human
cuaggagaaccaaaucug

SEQ ID NO: 2275169 - RNA, 21 nt, Human
cuaggagaaccaaaucuggaa

SEQ ID NO: 2275170 - RNA, 20 nt, Human
cuaggagaccaaggcgggag

SEQ ID NO: 2275171 - RNA, 16 nt, Human
cuaggagaccaaggcg

SEQ ID NO: 2275172 - RNA, 23 nt, Human
cuaggagaaccaaaucuggaagc

SEQ ID NO: 2275173 - RNA, 18 nt, Human
cuaggacgccacccagca

SEQ ID NO: 2275174 - RNA, 23 nt, Human
cuaggagaaggaggggaaccaga

SEQ ID NO: 2275175 - RNA, 14 nt, Human
cuaggacucugagg

SEQ ID NO: 2275176 - RNA, 12 nt, Human
cuaggacucuga

SEQ ID NO: 2275177 - RNA, 22 nt, Human
cuaggacgccacccagcaaaag

SEQ ID NO: 2275178 - RNA, 16 nt, Human
cuaggacucugaggcu

SEQ ID NO: 2275179 - RNA, 15 nt, Human
cuaggacucugaggc

SEQ ID NO: 2275180 - RNA, 15 nt, Human
cuaggaauucccagc

SEQ ID NO: 2275181 - RNA, 17 nt, Human
cuaggaaugaaauccug

SEQ ID NO: 2275182 - RNA, 16 nt, Human
cuaggaaugaaauccu

SEQ ID NO: 2275183 - RNA, 22 nt, Human
cuaggaccccuccaugugggcu

SEQ ID NO: 2275184 - RNA, 23 nt, Human
cuagcagagcaggggcaggguga

SEQ ID NO: 2275185 - RNA, 19 nt, Human
cuagcagagcaggggcagg

SEQ ID NO: 2275186 - RNA, 19 nt, Human
cuagcagcaccguucugug

SEQ ID NO: 2275187 - RNA, 12 nt, Human
cuagcagcaccg

SEQ ID NO: 2275188 - RNA, 17 nt, Human
cuagcagaaaucuagaa

SEQ ID NO: 2275189 - RNA, 16 nt, Human
cuagcacuuggagcca

SEQ ID NO: 2275190 - RNA, 15 nt, Human
cuagcacuggccugc

SEQ ID NO: 2275191 - RNA, 16 nt, Human
cuagcacuggccugca

SEQ ID NO: 2275192 - RNA, 17 nt, Human
cuaggaaauccagggug

SEQ ID NO: 2275193 - RNA, 16 nt, Human
cuaggaaauccagggu

SEQ ID NO: 2275194 - RNA, 21 nt, Human
cuagcagcaccguucugugca

SEQ ID NO: 2275195 - RNA, 20 nt, Human
cuagcagcaccguucugugc

SEQ ID NO: 2275196 - RNA, 21 nt, Human
cuaggaagacuuuggaaagag

SEQ ID NO: 2275197 - RNA, 11 nt, Human
cuagcagagag

SEQ ID NO: 2275198 - RNA, 22 nt, Human
cuagcagcaccguucugugcac

SEQ ID NO: 2275199 - RNA, 13 nt, Human
cuaggaacacucc

SEQ ID NO: 2275200 - RNA, 15 nt, Human
cuaggaacacuccuu

SEQ ID NO: 2275201 - RNA, 13 nt, Human
cuaggcccccacu

SEQ ID NO: 2275202 - RNA, 15 nt, Human
cuaggcccccacuug

SEQ ID NO: 2275203 - RNA, 16 nt, Human
cuaggcccccacuugc

SEQ ID NO: 2275204 - RNA, 22 nt, Human
cuaguacuugggagaccuguaa

SEQ ID NO: 2275205 - RNA, 17 nt, Human
cuaggccacuccuccaa

SEQ ID NO: 2275206 - RNA, 16 nt, Human
cuaggccacuccucca

SEQ ID NO: 2275207 - RNA, 19 nt, Human
cuaggccacuccuccaaag

SEQ ID NO: 2275208 - RNA, 15 nt, Human
cuaggccacuccucc

SEQ ID NO: 2275209 - RNA, 14 nt, Human
cuaggccacuccuc

SEQ ID NO: 2275210 - RNA, 19 nt, Human
cuaggccacaccaucuccu

SEQ ID NO: 2275211 - RNA, 15 nt, Human
cuaggcaggaccugu

SEQ ID NO: 2275212 - RNA, 16 nt, Human
cuaggcaggaccugug

SEQ ID NO: 2275213 - RNA, 14 nt, Human
cuaggcaucccagg

SEQ ID NO: 2275214 - RNA, 18 nt, Human
cuaggcaucccaggggac

SEQ ID NO: 2275215 - RNA, 15 nt, Human
cuaggcaucccaggg

SEQ ID NO: 2275216 - RNA, 19 nt, Human
cuaggcaucccaggggacc

SEQ ID NO: 2275217 - RNA, 21 nt, Human
cuaggcauuugcugaauacag

SEQ ID NO: 2275218 - RNA, 23 nt, Human
cuaguaucaaaagaaagaaaauc

SEQ ID NO: 2275219 - RNA, 23 nt, Human
cuaguauuccagaccugaagaau

SEQ ID NO: 2275220 - RNA, 17 nt, Human
cuaguaguuccugcuac

SEQ ID NO: 2275221 - RNA, 17 nt, Human
cuaguaucaaaagaaag

SEQ ID NO: 2275222 - RNA, 15 nt, Human
cuaguaucaaaagaa

SEQ ID NO: 2275223 - RNA, 22 nt, Human
cuaguauuucuaugaaauauua

SEQ ID NO: 2275224 - RNA, 19 nt, Human
cuaguauuucuaugaaaua

SEQ ID NO: 2275225 - RNA, 20 nt, Human
cuaguauuucuaugaaauau

SEQ ID NO: 2275226 - RNA, 14 nt, Human
cuaguguugcuugg

SEQ ID NO: 2275227 - RNA, 22 nt, Human
cuaguggucuuuguaagagugu

SEQ ID NO: 2275228 - RNA, 23 nt, Human
cuagugugguguuuccuggcacu

SEQ ID NO: 2275229 - RNA, 21 nt, Human
cuagugugguguuuccuggca

SEQ ID NO: 2275230 - RNA, 22 nt, Human
cuagugugguguuuccuggcac

SEQ ID NO: 2275231 - RNA, 12 nt, Human
cuagugcugcug

SEQ ID NO: 2275232 - RNA, 23 nt, Human
cuaguggggucucccucuccugc

SEQ ID NO: 2275233 - RNA, 14 nt, Human
cuaguggucuuugu

SEQ ID NO: 2275234 - RNA, 15 nt, Human
cuaguggucuuugua

SEQ ID NO: 2275235 - RNA, 16 nt, Human
cuaguggucuuuguaa

SEQ ID NO: 2275236 - RNA, 17 nt, Human
cuaguggucuuuguaag

SEQ ID NO: 2275237 - RNA, 18 nt, Human
cuaguggucuuuguaaga

SEQ ID NO: 2275238 - RNA, 19 nt, Human
cuaguggucuuuguaagag

SEQ ID NO: 2275239 - RNA, 20 nt, Human
cuaguggucuuuguaagagu

SEQ ID NO: 2275240 - RNA, 19 nt, Human
cuagugugguguuuccugg

SEQ ID NO: 2275241 - RNA, 19 nt, Human
cuagugcccuccacagccg

SEQ ID NO: 2275242 - RNA, 18 nt, Human
cuagugcccuccacagcc

SEQ ID NO: 2275243 - RNA, 23 nt, Human
cuagugcagcugauuuuaacaau

SEQ ID NO: 2275244 - RNA, 22 nt, Human
cuagugcagcugauuuuaacaa

SEQ ID NO: 2275245 - RNA, 21 nt, Human
cuagugcagcugauuuuaaca

SEQ ID NO: 2275246 - RNA, 20 nt, Human
cuagugcagcugauuuuaac

SEQ ID NO: 2275247 - RNA, 23 nt, Human
cuagugcccuccacagccgcagc

SEQ ID NO: 2275248 - RNA, 17 nt, Human
cuagugccuucuaaagg

SEQ ID NO: 2275249 - RNA, 13 nt, Human
cuagucuuaagaa

SEQ ID NO: 2275250 - RNA, 16 nt, Human
cuagucucucuggggc

SEQ ID NO: 2275251 - RNA, 19 nt, Human
cuagugcagcugauuuuaa

SEQ ID NO: 2275252 - RNA, 15 nt, Human
cuagugcagcugauu

SEQ ID NO: 2275253 - RNA, 14 nt, Human
cuagugcagcugau

SEQ ID NO: 2275254 - RNA, 22 nt, Human
cuagucccuuccccucccuggc

SEQ ID NO: 2275255 - RNA, 18 nt, Human
cuaguccuauucuauugc

SEQ ID NO: 2275256 - RNA, 20 nt, Human
cuagucguggagaugucuuc

SEQ ID NO: 2275257 - RNA, 21 nt, Human
cuagucguggagaugucuucg

SEQ ID NO: 2275258 - RNA, 15 nt, Human
cuagucuccuuugca

SEQ ID NO: 2275259 - RNA, 19 nt, Human
cuagucuccuuugcacuga

SEQ ID NO: 2275260 - RNA, 20 nt, Human
cuagucuccuuugcacugag

SEQ ID NO: 2275261 - RNA, 21 nt, Human
cuagucuccuuugcacugagg

SEQ ID NO: 2275262 - RNA, 23 nt, Human
cuagucuccuuugcacugagggc

SEQ ID NO: 2275263 - RNA, 20 nt, Human
cuagucucuaucauuaaagu

SEQ ID NO: 2275264 - RNA, 21 nt, Human
cuagucucuaucauuaaaguu

SEQ ID NO: 2275265 - RNA, 22 nt, Human
cuagucucuaucauuaaaguuc

SEQ ID NO: 2275266 - RNA, 13 nt, Human
cuagucucucugg

SEQ ID NO: 2275267 - RNA, 14 nt, Human
cuagucucucuggg

SEQ ID NO: 2275268 - RNA, 23 nt, Human
cuagucccuuccccucccuggcu

SEQ ID NO: 2275269 - RNA, 15 nt, Human
cuaguccuuuacuaa

SEQ ID NO: 2275270 - RNA, 21 nt, Human
cuagucccuuccccucccugg

SEQ ID NO: 2275271 - RNA, 20 nt, Human
cuagucccuuccccucccug

SEQ ID NO: 2275272 - RNA, 21 nt, Human
cuaguauuucaugcugggaau

SEQ ID NO: 2275273 - RNA, 21 nt, Human
cuaucuuauauaguuuacuau

SEQ ID NO: 2275274 - RNA, 17 nt, Human
cuaucuugcucuguaau

SEQ ID NO: 2275275 - RNA, 18 nt, Human
cuaucuugcucuguaauc

SEQ ID NO: 2275276 - RNA, 12 nt, Human
cuaucuuugcca

SEQ ID NO: 2275277 - RNA, 21 nt, Human
cuaucuuagugguuccccacc

SEQ ID NO: 2275278 - RNA, 14 nt, Human
cuaucuuaauuuug

SEQ ID NO: 2275279 - RNA, 15 nt, Human
cuaucuuaauuuugg

SEQ ID NO: 2275280 - RNA, 22 nt, Human
cuaucuuaauuuugguuguauu

SEQ ID NO: 2275281 - RNA, 23 nt, Human
cuaucuuaauuuugguuguauuc

SEQ ID NO: 2275282 - RNA, 13 nt, Human
cuaugaaauauua

SEQ ID NO: 2275283 - RNA, 19 nt, Human
cuaucuuugccacccucau

SEQ ID NO: 2275284 - RNA, 18 nt, Human
cuaucuuugccacccuca

SEQ ID NO: 2275285 - RNA, 15 nt, Human
cuaucuuugccaccc

SEQ ID NO: 2275286 - RNA, 14 nt, Human
cuaucuuugccacc

SEQ ID NO: 2275287 - RNA, 14 nt, Human
cuaugacacaugca

SEQ ID NO: 2275288 - RNA, 17 nt, Human
cuaugaauucuaaguga

SEQ ID NO: 2275289 - RNA, 23 nt, Human
cuaugaaugggcaaaacugaauu

SEQ ID NO: 2275290 - RNA, 21 nt, Human
cuaucuuugccacccucaugc

SEQ ID NO: 2275291 - RNA, 22 nt, Human
cuaugaaugggcaaaacugaau

SEQ ID NO: 2275292 - RNA, 18 nt, Human
cuaugaaauauuauguua

SEQ ID NO: 2275293 - RNA, 21 nt, Human
cuaucaaacugaagccagaaa

SEQ ID NO: 2275294 - RNA, 21 nt, Human
cuaucaaagaccuugugugua

SEQ ID NO: 2275295 - RNA, 20 nt, Human
cuaucaaacugaagccagaa

SEQ ID NO: 2275296 - RNA, 16 nt, Human
cuaucaaacugaagcc

SEQ ID NO: 2275297 - RNA, 20 nt, Human
cuaucaaguauuauaccuuu

SEQ ID NO: 2275298 - RNA, 13 nt, Human
cuaucaaacugaa

SEQ ID NO: 2275299 - RNA, 22 nt, Human
cuauauuuuuuguuaaaugauu

SEQ ID NO: 2275300 - RNA, 21 nt, Human
cuaucuguuuacaguguuccg

SEQ ID NO: 2275301 - RNA, 13 nt, Human
cuaucuuaauuuu

SEQ ID NO: 2275302 - RNA, 17 nt, Human
cuaucuguuuacagugu

SEQ ID NO: 2275303 - RNA, 20 nt, Human
cuaucuguuuacaguguucc

SEQ ID NO: 2275304 - RNA, 23 nt, Human
cuaucaagugugcuuuagcuuga

SEQ ID NO: 2275305 - RNA, 14 nt, Human
cuaucaauagucaa

SEQ ID NO: 2275306 - RNA, 16 nt, Human
cuaucaauagucaaga

SEQ ID NO: 2275307 - RNA, 20 nt, Human
cuaucaauagucaagaaaaa

SEQ ID NO: 2275308 - RNA, 21 nt, Human
cuaucaauagucaagaaaaau

SEQ ID NO: 2275309 - RNA, 18 nt, Human
cuaucaauauauaaauuu

SEQ ID NO: 2275310 - RNA, 14 nt, Human
cuaucacacagugg

SEQ ID NO: 2275311 - RNA, 22 nt, Human
cuauauuguuuucaguguacau

SEQ ID NO: 2275312 - RNA, 19 nt, Human
cuauauuguuugcuaagca

SEQ ID NO: 2275313 - RNA, 23 nt, Human
cuauauuguuuucaguguacaug

SEQ ID NO: 2275314 - RNA, 20 nt, Human
cuauauuuuuuguuaaauga

SEQ ID NO: 2275315 - RNA, 21 nt, Human
cuauauccauguacuguaguu

SEQ ID NO: 2275316 - RNA, 19 nt, Human
cuauauccauguacuguag

SEQ ID NO: 2275317 - RNA, 18 nt, Human
cuauauccauguacugua

SEQ ID NO: 2275318 - RNA, 20 nt, Human
cuauauccauguacuguagu

SEQ ID NO: 2275319 - RNA, 15 nt, Human
cuauaugaaaaacaa

SEQ ID NO: 2275320 - RNA, 13 nt, Human
cuauaucuauaua

SEQ ID NO: 2275321 - RNA, 14 nt, Human
cuauaucuauauau

SEQ ID NO: 2275322 - RNA, 15 nt, Human
cuauaucuguauaua

SEQ ID NO: 2275323 - RNA, 16 nt, Human
cuauaucuguauauaa

SEQ ID NO: 2275324 - RNA, 19 nt, Human
cuauaucuguauauaaaau

SEQ ID NO: 2275325 - RNA, 20 nt, Human
cuauaucuguauauaaaaua

SEQ ID NO: 2275326 - RNA, 15 nt, Human
cuauaugaauuuaaa

SEQ ID NO: 2275327 - RNA, 16 nt, Human
cuauaugaauuuaaau

SEQ ID NO: 2275328 - RNA, 20 nt, Human
cuauaugaauuuaaauauaa

SEQ ID NO: 2275329 - RNA, 23 nt, Human
cuauaugaauuuaaauauaauuc

SEQ ID NO: 2275330 - RNA, 13 nt, Human
cuauaugauuuau

SEQ ID NO: 2275331 - RNA, 16 nt, Human
cuauaugauuuauagu

SEQ ID NO: 2275332 - RNA, 17 nt, Human
cuauaugauuuauaguu

SEQ ID NO: 2275333 - RNA, 18 nt, Human
cuauaugauuuauaguuu

SEQ ID NO: 2275334 - RNA, 19 nt, Human
cuauaugauuuauaguuug

SEQ ID NO: 2275335 - RNA, 19 nt, Human
cuaguucauccaauccuca

SEQ ID NO: 2275336 - RNA, 18 nt, Human
cuaguucauccaauccuc

SEQ ID NO: 2275337 - RNA, 12 nt, Human
cuaguucaucca

SEQ ID NO: 2275338 - RNA, 24 nt, Human
cuaguucauccaauccucacuggg

SEQ ID NO: 2275339 - RNA, 22 nt, Human
cuaguucauccaauccucacug

SEQ ID NO: 2275340 - RNA, 21 nt, Human
cuaguucauccaauccucacu

SEQ ID NO: 2275341 - RNA, 20 nt, Human
cuaguucauccaauccucac

SEQ ID NO: 2275342 - RNA, 22 nt, Human
cuaguuauuacccagaguuuuu

SEQ ID NO: 2275343 - RNA, 16 nt, Human
cuauauccauguacug

SEQ ID NO: 2275344 - RNA, 15 nt, Human
cuauauccauguacu

SEQ ID NO: 2275345 - RNA, 14 nt, Human
cuauauccauguac

SEQ ID NO: 2275346 - RNA, 13 nt, Human
cuauauccaugua

SEQ ID NO: 2275347 - RNA, 12 nt, Human
cuauauccaugu

SEQ ID NO: 2275348 - RNA, 17 nt, Human
cuauauauguguaugua

SEQ ID NO: 2275349 - RNA, 13 nt, Human
cuauauaugugua

SEQ ID NO: 2275350 - RNA, 15 nt, Human
cuauauauguguaug

SEQ ID NO: 2275351 - RNA, 23 nt, Human
cuauauaugugaugaucuaccag

SEQ ID NO: 2275352 - RNA, 18 nt, Human
cuauauaugugaugaucu

SEQ ID NO: 2275353 - RNA, 22 nt, Human
cuauauaguuuauugacaauaa

SEQ ID NO: 2275354 - RNA, 13 nt, Human
cuauauauaauuc

SEQ ID NO: 2275355 - RNA, 16 nt, Human
cuauauaguuuauuga

SEQ ID NO: 2275356 - RNA, 16 nt, Human
cuauauauaauucugu

SEQ ID NO: 2275357 - RNA, 17 nt, Human
cuauauauaauucugua

SEQ ID NO: 2275358 - RNA, 18 nt, Human
cuauauauaauucuguac

SEQ ID NO: 2275359 - RNA, 19 nt, Human
cuauauauaauucuguaca

SEQ ID NO: 2275360 - RNA, 21 nt, Human
cuauauauaauucuguacaua

SEQ ID NO: 2275361 - RNA, 14 nt, Human
cuaguuccaccauc

SEQ ID NO: 2275362 - RNA, 17 nt, Human
cuagaggccagccccac

SEQ ID NO: 2275363 - RNA, 18 nt, Human
cuagaggcagggagggga

SEQ ID NO: 2275364 - RNA, 15 nt, Human
cuagaggcagggagg

SEQ ID NO: 2275365 - RNA, 14 nt, Human
cuagaggcagggag

SEQ ID NO: 2275366 - RNA, 19 nt, Human
cuagaggaaccaaccccca

SEQ ID NO: 2275367 - RNA, 16 nt, Human
cuagagccugccugga

SEQ ID NO: 2275368 - RNA, 17 nt, Human
cuagagccugccuggag

SEQ ID NO: 2275369 - RNA, 18 nt, Human
cuagagccugccuggagc

SEQ ID NO: 2275370 - RNA, 19 nt, Human
cuagagccugccuggagcg

SEQ ID NO: 2275371 - RNA, 18 nt, Human
cuagacucccaagcugga

SEQ ID NO: 2275372 - RNA, 15 nt, Human
cuagagccugccugg

SEQ ID NO: 2275373 - RNA, 22 nt, Human
cuagacucaagguucccagaga

SEQ ID NO: 2275374 - RNA, 23 nt, Human
cuagacucaagguucccagagau

SEQ ID NO: 2275375 - RNA, 19 nt, Human
cuagacgcuucaucccaca

SEQ ID NO: 2275376 - RNA, 22 nt, Human
cuacuuuguccuuuuuguuauu

SEQ ID NO: 2275377 - RNA, 21 nt, Human
cuagacccacuggacucaccu

SEQ ID NO: 2275378 - RNA, 21 nt, Human
cuagacgagcaggcuucuucc

SEQ ID NO: 2275379 - RNA, 20 nt, Human
cuacuuuguccuuuuuguua

SEQ ID NO: 2275380 - RNA, 14 nt, Human
cuacuuuguccuuu

SEQ ID NO: 2275381 - RNA, 20 nt, Human
cuagacgagcaggcuucuuc

SEQ ID NO: 2275382 - RNA, 21 nt, Human
cuagagggaccucucccaggg

SEQ ID NO: 2275383 - RNA, 20 nt, Human
cuagagggaccucucccagg

SEQ ID NO: 2275384 - RNA, 19 nt, Human
cuagagggaccucucccag

SEQ ID NO: 2275385 - RNA, 18 nt, Human
cuagagggaccucuccca

SEQ ID NO: 2275386 - RNA, 21 nt, Human
cuagaggccagccccacccag

SEQ ID NO: 2275387 - RNA, 19 nt, Human
cuagaggcagggaggggac

SEQ ID NO: 2275388 - RNA, 20 nt, Human
cuagaggccagccccaccca

SEQ ID NO: 2275389 - RNA, 19 nt, Human
cuagaggccagccccaccc

SEQ ID NO: 2275390 - RNA, 18 nt, Human
cuagaggccagccccacc

SEQ ID NO: 2275391 - RNA, 16 nt, Human
cuagaggguuccugua

SEQ ID NO: 2275392 - RNA, 15 nt, Human
cuagaggguuccugu

SEQ ID NO: 2275393 - RNA, 19 nt, Human
cuagaggguuccuguagac

SEQ ID NO: 2275394 - RNA, 22 nt, Human
cuagagggauacacugaaguua

SEQ ID NO: 2275395 - RNA, 22 nt, Human
cuagaggggggauuuccagcca

SEQ ID NO: 2275396 - RNA, 22 nt, Human
cuagagggaggggccuaggccu

SEQ ID NO: 2275397 - RNA, 21 nt, Human
cuagagggaggggccuaggcc

SEQ ID NO: 2275398 - RNA, 19 nt, Human
cuagagggaggggccuagg

SEQ ID NO: 2275399 - RNA, 16 nt, Human
cuagagggaggggccu

SEQ ID NO: 2275400 - RNA, 15 nt, Human
cuagagggaggggcc

SEQ ID NO: 2275401 - RNA, 17 nt, Human
cuagagggaccucuccc

SEQ ID NO: 2275402 - RNA, 19 nt, Human
cuagaguccucacucccag

SEQ ID NO: 2275403 - RNA, 16 nt, Human
cuagagucugaacagc

SEQ ID NO: 2275404 - RNA, 19 nt, Human
cuagagucugaacagcugu

SEQ ID NO: 2275405 - RNA, 20 nt, Human
cuagagucugaacagcugua

SEQ ID NO: 2275406 - RNA, 15 nt, Human
cuagaguccucacuc

SEQ ID NO: 2275407 - RNA, 17 nt, Human
cuagaguagaguggagg

SEQ ID NO: 2275408 - RNA, 21 nt, Human
cuagagugaacuugggccacu

SEQ ID NO: 2275409 - RNA, 17 nt, Human
cuagagugaacuugggc

SEQ ID NO: 2275410 - RNA, 15 nt, Human
cuagcaccagggacu

SEQ ID NO: 2275411 - RNA, 13 nt, Human
cuagcacuggccu

SEQ ID NO: 2275412 - RNA, 14 nt, Human
cuagcacuggccug

SEQ ID NO: 2275413 - RNA, 17 nt, Human
cuagcacuuugggaggc

SEQ ID NO: 2275414 - RNA, 19 nt, Human
cuagcaagugagagagaug

SEQ ID NO: 2275415 - RNA, 20 nt, Human
cuagcaaucacaacacuggc

SEQ ID NO: 2275416 - RNA, 22 nt, Human
cuagcaaucacaacacuggcug

SEQ ID NO: 2275417 - RNA, 15 nt, Human
cuagcaagugagaga

SEQ ID NO: 2275418 - RNA, 18 nt, Human
cuagcaagugagagagau

SEQ ID NO: 2275419 - RNA, 20 nt, Human
cuagauucuacauauucuuu

SEQ ID NO: 2275420 - RNA, 24 nt, Human
cuagauugagagaagagacaaaca

SEQ ID NO: 2275421 - RNA, 21 nt, Human
cuagauuuuguuuugcuuuuu

SEQ ID NO: 2275422 - RNA, 18 nt, Human
cuagauuuuguuuugcuu

SEQ ID NO: 2275423 - RNA, 20 nt, Human
cuagauuuuguuuugcuuuu

SEQ ID NO: 2275424 - RNA, 12 nt, Human
cuagauuuuguu

SEQ ID NO: 2275425 - RNA, 13 nt, Human
cuagauuuuguuu

SEQ ID NO: 2275426 - RNA, 17 nt, Human
cuagauuuuguuuugcu

SEQ ID NO: 2275427 - RNA, 13 nt, Human
cuagauuuaugaa

SEQ ID NO: 2275428 - RNA, 21 nt, Human
cuagauccacacacagaggaa

SEQ ID NO: 2275429 - RNA, 19 nt, Human
cuagauccacacacagagg

SEQ ID NO: 2275430 - RNA, 18 nt, Human
cuagauccacacacagag

SEQ ID NO: 2275431 - RNA, 17 nt, Human
cuagauccacacacaga

SEQ ID NO: 2275432 - RNA, 13 nt, Human
cuagauccacaca

SEQ ID NO: 2275433 - RNA, 18 nt, Human
cuagaucaugaagaaccu

SEQ ID NO: 2275434 - RNA, 17 nt, Human
cuagaugaaguuuuaca

SEQ ID NO: 2275435 - RNA, 13 nt, Human
cuagaugucuuua

SEQ ID NO: 2275436 - RNA, 21 nt, Human
cuagauuacccccucauuguu

SEQ ID NO: 2275437 - RNA, 17 nt, Human
cuagauggugcugagaa

SEQ ID NO: 2275438 - RNA, 16 nt, Human
cuagauggugcugaga

SEQ ID NO: 2275439 - RNA, 15 nt, Human
cuagauggugcugag

SEQ ID NO: 2275440 - RNA, 14 nt, Human
cuagauggugcuga

SEQ ID NO: 2275441 - RNA, 22 nt, Human
cuagauggugcugagaagcuuu

SEQ ID NO: 2275442 - RNA, 19 nt, Human
cuagauggugcugagaagc

SEQ ID NO: 2275443 - RNA, 13 nt, Human
cuagauggugcug

SEQ ID NO: 2275444 - RNA, 20 nt, Human
cuagaugggcaugggguggg

SEQ ID NO: 2275445 - RNA, 18 nt, Human
cuagauggcuccucucag

SEQ ID NO: 2275446 - RNA, 16 nt, Human
cuagauggcuccucuc

SEQ ID NO: 2275447 - RNA, 15 nt, Human
cuagauggcuccucu

SEQ ID NO: 2275448 - RNA, 14 nt, Human
cuagauggcuccuc

SEQ ID NO: 2275449 - RNA, 16 nt, Human
cuagauggcagucacu

SEQ ID NO: 2275450 - RNA, 20 nt, Human
cuacugugugugugaaugaa

SEQ ID NO: 2275451 - RNA, 19 nt, Human
cuacugugugugugaauga

SEQ ID NO: 2275452 - RNA, 17 nt, Human
cuacugugugugugaau

SEQ ID NO: 2275453 - RNA, 20 nt, Human
cuacuguggaaaaauauuua

SEQ ID NO: 2275454 - RNA, 18 nt, Human
cuacuguggaaaaauauu

SEQ ID NO: 2275455 - RNA, 17 nt, Human
cuacuguggaaaaauau

SEQ ID NO: 2275456 - RNA, 15 nt, Human
cuacuguggaaaaau

SEQ ID NO: 2275457 - RNA, 22 nt, Human
cuacuguggaaaaauauuuaag

SEQ ID NO: 2275458 - RNA, 21 nt, Human
cuacuguggaaaaauauuuaa

SEQ ID NO: 2275459 - RNA, 15 nt, Human
cuacuguguguguga

SEQ ID NO: 2275460 - RNA, 14 nt, Human
cuacuguguuccug

SEQ ID NO: 2275461 - RNA, 13 nt, Human
cuacuguguuccu

SEQ ID NO: 2275462 - RNA, 12 nt, Human
cuacuguguucc

SEQ ID NO: 2275463 - RNA, 19 nt, Human
cuacuguguuccuggcaau

SEQ ID NO: 2275464 - RNA, 15 nt, Human
cuacuguguuccugg

SEQ ID NO: 2275465 - RNA, 20 nt, Human
cuacuguguuccuggcaaua

SEQ ID NO: 2275466 - RNA, 20 nt, Human
cuacuuccuccuccccacuu

SEQ ID NO: 2275467 - RNA, 17 nt, Human
cuacuuccuccucccca

SEQ ID NO: 2275468 - RNA, 19 nt, Human
cuacuuccuccuccccacu

SEQ ID NO: 2275469 - RNA, 20 nt, Human
cuacuuccugugacuucagc

SEQ ID NO: 2275470 - RNA, 16 nt, Human
cuacuucccucaccca

SEQ ID NO: 2275471 - RNA, 20 nt, Human
cuacuuccccuuccuaauuc

SEQ ID NO: 2275472 - RNA, 13 nt, Human
cuacuuccuccuc

SEQ ID NO: 2275473 - RNA, 15 nt, Human
cuacuuccccuuccu

SEQ ID NO: 2275474 - RNA, 14 nt, Human
cuacuuccccuucc

SEQ ID NO: 2275475 - RNA, 15 nt, Human
cuacuuuaagcacua

SEQ ID NO: 2275476 - RNA, 13 nt, Human
cuacuugggccau

SEQ ID NO: 2275477 - RNA, 12 nt, Human
cuacuugggagg

SEQ ID NO: 2275478 - RNA, 19 nt, Human
cuacuugggaggcugagau

SEQ ID NO: 2275479 - RNA, 21 nt, Human
cuacuuugacuuuuugcauuu

SEQ ID NO: 2275480 - RNA, 20 nt, Human
cuacuuugacuuuuugcauu

SEQ ID NO: 2275481 - RNA, 19 nt, Human
cuacuuugacuuuuugcau

SEQ ID NO: 2275482 - RNA, 18 nt, Human
cuacuuugacuuuuugca

SEQ ID NO: 2275483 - RNA, 15 nt, Human
cuacuugagaggcug

SEQ ID NO: 2275484 - RNA, 22 nt, Human
cuacuucuuugcuuugcccagc

SEQ ID NO: 2275485 - RNA, 22 nt, Human
cuacuucuuuugcucuuagcug

SEQ ID NO: 2275486 - RNA, 18 nt, Human
cuacuugggaggcugaga

SEQ ID NO: 2275487 - RNA, 15 nt, Human
cuacuugggaggcug

SEQ ID NO: 2275488 - RNA, 17 nt, Human
cuacugacuuucucagc

SEQ ID NO: 2275489 - RNA, 20 nt, Human
cuacugacauguggggccag

SEQ ID NO: 2275490 - RNA, 14 nt, Human
cuacugacaugugg

SEQ ID NO: 2275491 - RNA, 15 nt, Human
cuacugacauguggg

SEQ ID NO: 2275492 - RNA, 14 nt, Human
cuacugaggugcua

SEQ ID NO: 2275493 - RNA, 21 nt, Human
cuacucuuaaguuucucagcu

SEQ ID NO: 2275494 - RNA, 22 nt, Human
cuacucuuaaguuucucagcuc

SEQ ID NO: 2275495 - RNA, 16 nt, Human
cuacucuuaagccauc

SEQ ID NO: 2275496 - RNA, 17 nt, Human
cuacucuuaagccaucu

SEQ ID NO: 2275497 - RNA, 18 nt, Human
cuacucuuaagccaucuu

SEQ ID NO: 2275498 - RNA, 22 nt, Human
cuacucuuaagccaucuuggua

SEQ ID NO: 2275499 - RNA, 14 nt, Human
cuacuguggaaaaa

SEQ ID NO: 2275500 - RNA, 13 nt, Human
cuacugugacuga

SEQ ID NO: 2275501 - RNA, 22 nt, Human
cuacuguaauaaagaugauugu

SEQ ID NO: 2275502 - RNA, 17 nt, Human
cuacuggucuuguggaa

SEQ ID NO: 2275503 - RNA, 21 nt, Human
cuacuguaagcaagaaaaaua

SEQ ID NO: 2275504 - RNA, 17 nt, Human
cuacuguaauuugugau

SEQ ID NO: 2275505 - RNA, 21 nt, Human
cuacuguaaggcaaucauggu

SEQ ID NO: 2275506 - RNA, 16 nt, Human
cuacuguaauuuguga

SEQ ID NO: 2275507 - RNA, 22 nt, Human
cuacucuguuccuucacauccu

SEQ ID NO: 2275508 - RNA, 15 nt, Human
cuacucuuaagccau

SEQ ID NO: 2275509 - RNA, 19 nt, Human
cuacucuguuccuucacau

SEQ ID NO: 2275510 - RNA, 16 nt, Human
cuacucuguuccuuca

SEQ ID NO: 2275511 - RNA, 15 nt, Human
cuacucuguuccuuc

SEQ ID NO: 2275512 - RNA, 16 nt, Human
cuacucugugucaggu

SEQ ID NO: 2275513 - RNA, 21 nt, Human
cuacucugugucagguggggc

SEQ ID NO: 2275514 - RNA, 14 nt, Human
cuacccgggaaggg

SEQ ID NO: 2275515 - RNA, 15 nt, Human
cuacccgggaagggg

SEQ ID NO: 2275516 - RNA, 20 nt, Human
cuacccgggaagggggcugg

SEQ ID NO: 2275517 - RNA, 21 nt, Human
cuacccgggaagggggcuggg

SEQ ID NO: 2275518 - RNA, 13 nt, Human
cuaaugucuucau

SEQ ID NO: 2275519 - RNA, 22 nt, Human
cuaauguauuuuauuguaacag

SEQ ID NO: 2275520 - RNA, 19 nt, Human
cuaaugucuucauuucauu

SEQ ID NO: 2275521 - RNA, 21 nt, Human
cuaaugucuucauuucauugu

SEQ ID NO: 2275522 - RNA, 22 nt, Human
cuaaugucuucauuucauugua

SEQ ID NO: 2275523 - RNA, 19 nt, Human
cuaaugugccuaguucuuu

SEQ ID NO: 2275524 - RNA, 19 nt, Human
cuaaugugguuauuucucu

SEQ ID NO: 2275525 - RNA, 14 nt, Human
cuaauuaauaaauu

SEQ ID NO: 2275526 - RNA, 20 nt, Human
cuaauguuuaugagccagac

SEQ ID NO: 2275527 - RNA, 18 nt, Human
cuaauguuuaugagccag

SEQ ID NO: 2275528 - RNA, 17 nt, Human
cuaauguuuaugagcca

SEQ ID NO: 2275529 - RNA, 22 nt, Human
cuacaagagcagccuguggcau

SEQ ID NO: 2275530 - RNA, 21 nt, Human
cuacaagagcagccuguggca

SEQ ID NO: 2275531 - RNA, 23 nt, Human
cuacaagagcagccuguggcauc

SEQ ID NO: 2275532 - RNA, 17 nt, Human
cuacaagcuaaaauuag

SEQ ID NO: 2275533 - RNA, 19 nt, Human
cuacaagcuaaaauuagau

SEQ ID NO: 2275534 - RNA, 20 nt, Human
cuacaagagcagccuguggc

SEQ ID NO: 2275535 - RNA, 19 nt, Human
cuacaagagcagccugugg

SEQ ID NO: 2275536 - RNA, 18 nt, Human
cuacaagagcagccugug

SEQ ID NO: 2275537 - RNA, 17 nt, Human
cuacaagagcagccugu

SEQ ID NO: 2275538 - RNA, 15 nt, Human
cuacaagagcagccu

SEQ ID NO: 2275539 - RNA, 15 nt, Human
cuacaagacacagug

SEQ ID NO: 2275540 - RNA, 19 nt, Human
cuaauguaauaacugugaa

SEQ ID NO: 2275541 - RNA, 14 nt, Human
cuaauguacugcau

SEQ ID NO: 2275542 - RNA, 13 nt, Human
cuaaugauguuuu

SEQ ID NO: 2275543 - RNA, 12 nt, Human
cuaaugauguuu

SEQ ID NO: 2275544 - RNA, 15 nt, Human
cuaauguauuuuauu

SEQ ID NO: 2275545 - RNA, 17 nt, Human
cuaauguauuuuauugu

SEQ ID NO: 2275546 - RNA, 18 nt, Human
cuaauguauuuuauugua

SEQ ID NO: 2275547 - RNA, 19 nt, Human
cuaauguauuuuauuguaa

SEQ ID NO: 2275548 - RNA, 20 nt, Human
cuaauguauuuuauuguaac

SEQ ID NO: 2275549 - RNA, 21 nt, Human
cuaauguauuuuauuguaaca

SEQ ID NO: 2275550 - RNA, 16 nt, Human
cuaauguacugcauau

SEQ ID NO: 2275551 - RNA, 19 nt, Human
cuaaugaaugcauaaaaug

SEQ ID NO: 2275552 - RNA, 22 nt, Human
cuaaugaaugcauaaaauguua

SEQ ID NO: 2275553 - RNA, 23 nt, Human
cuaaugaagggaaaggauauuuu

SEQ ID NO: 2275554 - RNA, 18 nt, Human
cuaaugaagggaaaggau

SEQ ID NO: 2275555 - RNA, 22 nt, Human
cuaaugacaucaccacaguuua

SEQ ID NO: 2275556 - RNA, 15 nt, Human
cuaaucuucagggca

SEQ ID NO: 2275557 - RNA, 22 nt, Human
cuaaucuucagggcacugcugc

SEQ ID NO: 2275558 - RNA, 21 nt, Human
cuaaucuguagggcuggaccu

SEQ ID NO: 2275559 - RNA, 22 nt, Human
cuaaucuguagggcuggaccua

SEQ ID NO: 2275560 - RNA, 20 nt, Human
cuaaucccugggcauugcuu

SEQ ID NO: 2275561 - RNA, 19 nt, Human
cuaaucccugggcauugcu

SEQ ID NO: 2275562 - RNA, 18 nt, Human
cuaaucccgauucacccu

SEQ ID NO: 2275563 - RNA, 23 nt, Human
cuaauccaggcagauccaggacu

SEQ ID NO: 2275564 - RNA, 20 nt, Human
cuaauccaggcagauccagg

SEQ ID NO: 2275565 - RNA, 19 nt, Human
cuaauccaggcagauccag

SEQ ID NO: 2275566 - RNA, 18 nt, Human
cuaauccaggcagaucca

SEQ ID NO: 2275567 - RNA, 19 nt, Human
cuaaucagcauucucacuc

SEQ ID NO: 2275568 - RNA, 17 nt, Human
cuaauccaggcagaucc

SEQ ID NO: 2275569 - RNA, 17 nt, Human
cuaaucagcauucucac

SEQ ID NO: 2275570 - RNA, 22 nt, Human
cuaaucuauuggguucauuauu

SEQ ID NO: 2275571 - RNA, 18 nt, Human
cuaaucuauuggguucau

SEQ ID NO: 2275572 - RNA, 17 nt, Human
cuaaucuauuggguuca

SEQ ID NO: 2275573 - RNA, 14 nt, Human
cuaaucuauugggu

SEQ ID NO: 2275574 - RNA, 20 nt, Human
cuaaucuauuggguucauua

SEQ ID NO: 2275575 - RNA, 19 nt, Human
cuaaucuauuggguucauu

SEQ ID NO: 2275576 - RNA, 21 nt, Human
cuaaucuauuggguucauuau

SEQ ID NO: 2275577 - RNA, 13 nt, Human
cuaaucuguaggg

SEQ ID NO: 2275578 - RNA, 14 nt, Human
cuaaucuguagggc

SEQ ID NO: 2275579 - RNA, 18 nt, Human
cuaaucuguagggcugga

SEQ ID NO: 2275580 - RNA, 23 nt, Human
cuaaucccugggcauugcuuucc

SEQ ID NO: 2275581 - RNA, 15 nt, Human
cuaaucgaacuauga

SEQ ID NO: 2275582 - RNA, 22 nt, Human
cuaaucccugggcauugcuuuc

SEQ ID NO: 2275583 - RNA, 21 nt, Human
cuaaucccugggcauugcuuu

SEQ ID NO: 2275584 - RNA, 16 nt, Human
cuaauccucuuuuucu

SEQ ID NO: 2275585 - RNA, 19 nt, Human
cuaaucuagauaucgacuu

SEQ ID NO: 2275586 - RNA, 18 nt, Human
cuaaucuauggucgggag

SEQ ID NO: 2275587 - RNA, 20 nt, Human
cuaaucuauggucgggagac

SEQ ID NO: 2275588 - RNA, 14 nt, Human
cuaauauuuuaugu

SEQ ID NO: 2275589 - RNA, 16 nt, Human
cuaauauuuauugcuu

SEQ ID NO: 2275590 - RNA, 17 nt, Human
cuaauauuuauugcuuu

SEQ ID NO: 2275591 - RNA, 18 nt, Human
cuaauauuuauugcuuua

SEQ ID NO: 2275592 - RNA, 13 nt, Human
cuaauauuaaaaa

SEQ ID NO: 2275593 - RNA, 14 nt, Human
cuaauauuaaaaau

SEQ ID NO: 2275594 - RNA, 16 nt, Human
cuaauauuaaaaauau

SEQ ID NO: 2275595 - RNA, 18 nt, Human
cuaauauuaaaaauaugg

SEQ ID NO: 2275596 - RNA, 13 nt, Human
cuaauaaagcugu

SEQ ID NO: 2275597 - RNA, 16 nt, Human
cuaaggugugcucuga

SEQ ID NO: 2275598 - RNA, 17 nt, Human
cuaagguggauuuucau

SEQ ID NO: 2275599 - RNA, 20 nt, Human
cuaauaaaauuuaaaagucu

SEQ ID NO: 2275600 - RNA, 12 nt, Human
cuaauaaagcug

SEQ ID NO: 2275601 - RNA, 21 nt, Human
cuaauaaaauuuaaaagucuu

SEQ ID NO: 2275602 - RNA, 15 nt, Human
cuacacugacacugg

SEQ ID NO: 2275603 - RNA, 23 nt, Human
cuacaauuuucucccaggaagcu

SEQ ID NO: 2275604 - RNA, 17 nt, Human
cuacacuccagccuggg

SEQ ID NO: 2275605 - RNA, 21 nt, Human
cuacagacuucuccagaccca

SEQ ID NO: 2275606 - RNA, 16 nt, Human
cuacagacuucuccag

SEQ ID NO: 2275607 - RNA, 15 nt, Human
cuacagaggccaugg

SEQ ID NO: 2275608 - RNA, 18 nt, Human
cuacagagcuucccugac

SEQ ID NO: 2275609 - RNA, 17 nt, Human
cuacagagcuucccuga

SEQ ID NO: 2275610 - RNA, 16 nt, Human
cuacagagcuucccug

SEQ ID NO: 2275611 - RNA, 22 nt, Human
cuacagagaaccuggaguuccu

SEQ ID NO: 2275612 - RNA, 16 nt, Human
cuacaauuuaaagcaa

SEQ ID NO: 2275613 - RNA, 19 nt, Human
cuacaaugugaacuuuauu

SEQ ID NO: 2275614 - RNA, 17 nt, Human
cuacaaugugaacuuua

SEQ ID NO: 2275615 - RNA, 13 nt, Human
cuacaaugugaac

SEQ ID NO: 2275616 - RNA, 18 nt, Human
cuacaaugugaacuuuau

SEQ ID NO: 2275617 - RNA, 15 nt, Human
cuacaauuuucuccc

SEQ ID NO: 2275618 - RNA, 16 nt, Human
cuacaauuuucuccca

SEQ ID NO: 2275619 - RNA, 20 nt, Human
cuacaauuuucucccaggaa

SEQ ID NO: 2275620 - RNA, 15 nt, Human
cuacacacugcaugu

SEQ ID NO: 2275621 - RNA, 13 nt, Human
cuacacacugcau

SEQ ID NO: 2275622 - RNA, 18 nt, Human
cuacacuccagccugagc

SEQ ID NO: 2275623 - RNA, 17 nt, Human
cuacacuccagccugag

SEQ ID NO: 2275624 - RNA, 16 nt, Human
cuacacuccagugaga

SEQ ID NO: 2275625 - RNA, 18 nt, Human
cuacacugugcugagucu

SEQ ID NO: 2275626 - RNA, 17 nt, Human
cuacacuccagugagac

SEQ ID NO: 2275627 - RNA, 15 nt, Human
cuacccgcagaguuc

SEQ ID NO: 2275628 - RNA, 17 nt, Human
cuacccgcaucuucugu

SEQ ID NO: 2275629 - RNA, 20 nt, Human
cuaccccugaucugacaucc

SEQ ID NO: 2275630 - RNA, 11 nt, Human
cuaccccuccc

SEQ ID NO: 2275631 - RNA, 13 nt, Human
cuaccccucccag

SEQ ID NO: 2275632 - RNA, 15 nt, Human
cuaccccucccagcu

SEQ ID NO: 2275633 - RNA, 18 nt, Human
cuaccccucccagcugac

SEQ ID NO: 2275634 - RNA, 16 nt, Human
cuaccccucccagcug

SEQ ID NO: 2275635 - RNA, 17 nt, Human
cuaccccucccagcuga

SEQ ID NO: 2275636 - RNA, 12 nt, Human
cuacccaggugc

SEQ ID NO: 2275637 - RNA, 15 nt, Human
cuaccccgcagacac

SEQ ID NO: 2275638 - RNA, 20 nt, Human
cuaccccgcagacaccuugg

SEQ ID NO: 2275639 - RNA, 22 nt, Human
cuacccacuucuaaauagcaau

SEQ ID NO: 2275640 - RNA, 16 nt, Human
cuacccacuucuaaau

SEQ ID NO: 2275641 - RNA, 11 nt, Human
cuacccagggc

SEQ ID NO: 2275642 - RNA, 18 nt, Human
cuacccagagaagccccu

SEQ ID NO: 2275643 - RNA, 21 nt, Human
cuacccagagaagccccuucc

SEQ ID NO: 2275644 - RNA, 19 nt, Human
cuacccagggccugcagga

SEQ ID NO: 2275645 - RNA, 16 nt, Human
cuacccagggccugca

SEQ ID NO: 2275646 - RNA, 15 nt, Human
cuacccagggccugc

SEQ ID NO: 2275647 - RNA, 14 nt, Human
cuacccagggccug

SEQ ID NO: 2275648 - RNA, 20 nt, Human
cuacccagcgagcccuggug

SEQ ID NO: 2275649 - RNA, 19 nt, Human
cuacccagcgagcccuggu

SEQ ID NO: 2275650 - RNA, 15 nt, Human
cuaccagguguucua

SEQ ID NO: 2275651 - RNA, 19 nt, Human
cuaccagcgcccgcugggc

SEQ ID NO: 2275652 - RNA, 20 nt, Human
cuaccagcgcccgcugggcu

SEQ ID NO: 2275653 - RNA, 21 nt, Human
cuaccagcgcccgcugggcug

SEQ ID NO: 2275654 - RNA, 22 nt, Human
cuaccagcgcccgcugggcuga

SEQ ID NO: 2275655 - RNA, 12 nt, Human
cuaccacuccug

SEQ ID NO: 2275656 - RNA, 14 nt, Human
cuaccacuccugcc

SEQ ID NO: 2275657 - RNA, 20 nt, Human
cuacagagcuucccugacuc

SEQ ID NO: 2275658 - RNA, 17 nt, Human
cuaccagcgcccgcugg

SEQ ID NO: 2275659 - RNA, 16 nt, Human
cuaccagacuguguau

SEQ ID NO: 2275660 - RNA, 20 nt, Human
cuaccagacuguguauucau

SEQ ID NO: 2275661 - RNA, 17 nt, Human
cuaccacuccugccaag

SEQ ID NO: 2275662 - RNA, 18 nt, Human
cuaccacugucuucuuca

SEQ ID NO: 2275663 - RNA, 17 nt, Human
cuacccacccuccuuuc

SEQ ID NO: 2275664 - RNA, 14 nt, Human
cuacccacuucuaa

SEQ ID NO: 2275665 - RNA, 23 nt, Human
cuacccacguucucacacccacc

SEQ ID NO: 2275666 - RNA, 14 nt, Human
cuaccaucagggac

SEQ ID NO: 2275667 - RNA, 15 nt, Human
cuaccaucagggaca

SEQ ID NO: 2275668 - RNA, 16 nt, Human
cuaccaucagggacag

SEQ ID NO: 2275669 - RNA, 18 nt, Human
cuaccaucagggacagga

SEQ ID NO: 2275670 - RNA, 22 nt, Human
cuacccacccuccuuucaccac

SEQ ID NO: 2275671 - RNA, 19 nt, Human
cuaaggucauuaccacagg

SEQ ID NO: 2275672 - RNA, 18 nt, Human
cuaaggguguaaguaauu

SEQ ID NO: 2275673 - RNA, 15 nt, Human
cuaaggugugcucug

SEQ ID NO: 2275674 - RNA, 22 nt, Human
cuaaggggcccggccagccaug

SEQ ID NO: 2275675 - RNA, 18 nt, Human
cuaaggggcccggccagc

SEQ ID NO: 2275676 - RNA, 13 nt, Human
cuaaggggcccgg

SEQ ID NO: 2275677 - RNA, 12 nt, Human
cuaaggggcccg

SEQ ID NO: 2275678 - RNA, 23 nt, Human
cuaagggagagugguauuugcag

SEQ ID NO: 2275679 - RNA, 17 nt, Human
cuaagggagagugguau

SEQ ID NO: 2275680 - RNA, 22 nt, Human
cuaagggagagugguauuugca

SEQ ID NO: 2275681 - RNA, 12 nt, Human
cuaaggaucucu

SEQ ID NO: 2275682 - RNA, 15 nt, Human
cuaaggaucucucag

SEQ ID NO: 2275683 - RNA, 17 nt, Human
cuaaggaucucucagga

SEQ ID NO: 2275684 - RNA, 18 nt, Human
cuaaggaucucucaggag

SEQ ID NO: 2275685 - RNA, 20 nt, Human
cuaaggaucucucaggagca

SEQ ID NO: 2275686 - RNA, 23 nt, Human
cuaaggaucucucaggagcacag

SEQ ID NO: 2275687 - RNA, 17 nt, Human
cuaaggaugcuaaaccu

SEQ ID NO: 2275688 - RNA, 18 nt, Human
cuaaggaugcuaaaccuu

SEQ ID NO: 2275689 - RNA, 20 nt, Human
cuaaggaugcuaaaccuuag

SEQ ID NO: 2275690 - RNA, 20 nt, Human
cuaaggaugucacagggcca

SEQ ID NO: 2275691 - RNA, 18 nt, Human
cuaaggaugucacagggc

SEQ ID NO: 2275692 - RNA, 19 nt, Human
cuaaggaugucacagggcc

SEQ ID NO: 2275693 - RNA, 14 nt, Human
cuaaggcugaacuu

SEQ ID NO: 2275694 - RNA, 17 nt, Human
cuaagccuuuccauaag

SEQ ID NO: 2275695 - RNA, 22 nt, Human
cuaagcggaccagccucccugu

SEQ ID NO: 2275696 - RNA, 15 nt, Human
cuaagcuaacccccu

SEQ ID NO: 2275697 - RNA, 14 nt, Human
cuaagcuaggaaug

SEQ ID NO: 2275698 - RNA, 20 nt, Human
cuaagccugaaggggcgucu

SEQ ID NO: 2275699 - RNA, 17 nt, Human
cuaagccugaaggggcg

SEQ ID NO: 2275700 - RNA, 14 nt, Human
cuaagccuccuuuu

SEQ ID NO: 2275701 - RNA, 16 nt, Human
cuaagccuaccugcuc

SEQ ID NO: 2275702 - RNA, 17 nt, Human
cuaagccuaccugcucu

SEQ ID NO: 2275703 - RNA, 20 nt, Human
cuaagccuaccugcucucca

SEQ ID NO: 2275704 - RNA, 23 nt, Human
cuaagccuaccugcucuccaagu

SEQ ID NO: 2275705 - RNA, 15 nt, Human
cuaagccccagcaag

SEQ ID NO: 2275706 - RNA, 16 nt, Human
cuaagccccagcaagc

SEQ ID NO: 2275707 - RNA, 17 nt, Human
cuaagccccagcaagca

SEQ ID NO: 2275708 - RNA, 19 nt, Human
cuaagccccagcaagcaau

SEQ ID NO: 2275709 - RNA, 14 nt, Human
cuaagcccccgcug

SEQ ID NO: 2275710 - RNA, 18 nt, Human
cuaagcccccgcuguaau

SEQ ID NO: 2275711 - RNA, 22 nt, Human
cuaagcccccgcuguaaugaaa

SEQ ID NO: 2275712 - RNA, 12 nt, Human
cuaagcccuguc

SEQ ID NO: 2275713 - RNA, 20 nt, Human
cuaagcccugucgagacacu

SEQ ID NO: 2275714 - RNA, 21 nt, Human
cuaagcccugucgagacacuu

SEQ ID NO: 2275715 - RNA, 14 nt, Human
cuaagccuaccugc

SEQ ID NO: 2275716 - RNA, 21 nt, Human
cuaagcuauucaguaauaacu

SEQ ID NO: 2275717 - RNA, 19 nt, Human
cuaagcuauucaguaauaa

SEQ ID NO: 2275718 - RNA, 22 nt, Human
cuaagcuaggaaugaaauccug

SEQ ID NO: 2275719 - RNA, 17 nt, Human
cuaagcuaggaaugaaa

SEQ ID NO: 2275720 - RNA, 20 nt, Human
cuaagcacgggccauaugaa

SEQ ID NO: 2275721 - RNA, 23 nt, Human
cuaagcacgggccauaugaauaa

SEQ ID NO: 2275722 - RNA, 18 nt, Human
cuaagcaaaaugugauau

SEQ ID NO: 2275723 - RNA, 15 nt, Human
cuaagcaaaauguga

SEQ ID NO: 2275724 - RNA, 18 nt, Human
cuaagccaagggccucuu

SEQ ID NO: 2275725 - RNA, 20 nt, Human
cuaagccacucuuccaaagg

SEQ ID NO: 2275726 - RNA, 14 nt, Human
cuaagccaagggcc

SEQ ID NO: 2275727 - RNA, 11 nt, Human
cuaagccaagg

SEQ ID NO: 2275728 - RNA, 21 nt, Human
cuaagcauagcaaacagagga

SEQ ID NO: 2275729 - RNA, 19 nt, Human
cuaagcagcauuucugaag

SEQ ID NO: 2275730 - RNA, 23 nt, Human
cuaagcagaggaggggccgcugc

SEQ ID NO: 2275731 - RNA, 17 nt, Human
cuaagcagcauuucuga

SEQ ID NO: 2275732 - RNA, 20 nt, Human
cuaagcagaggaggggccgc

SEQ ID NO: 2275733 - RNA, 19 nt, Human
cuaagcagaggaggggccg

SEQ ID NO: 2275734 - RNA, 18 nt, Human
cuaagcagaggaggggcc

SEQ ID NO: 2275735 - RNA, 16 nt, Human
cuaagcagaggagggg

SEQ ID NO: 2275736 - RNA, 15 nt, Human
cuaagcagaggaggg

SEQ ID NO: 2275737 - RNA, 14 nt, Human
cuaagcagaggagg

SEQ ID NO: 2275738 - RNA, 13 nt, Human
cuaagcagaggag

SEQ ID NO: 2275739 - RNA, 12 nt, Human
cuaagcagagga

SEQ ID NO: 2275740 - RNA, 21 nt, Human
cuaaccagggaagcugucccu

SEQ ID NO: 2275741 - RNA, 17 nt, Human
cuaaccagcagaaaugc

SEQ ID NO: 2275742 - RNA, 14 nt, Human
cuaagcaaaaugug

SEQ ID NO: 2275743 - RNA, 21 nt, Human
cuaaccacgucugucuucaca

SEQ ID NO: 2275744 - RNA, 20 nt, Human
cuaaccacgucugucuucac

SEQ ID NO: 2275745 - RNA, 15 nt, Human
cuaacauuauuuauu

SEQ ID NO: 2275746 - RNA, 16 nt, Human
cuaaccagcagaaaug

SEQ ID NO: 2275747 - RNA, 17 nt, Human
cuaacaugcccuguuca

SEQ ID NO: 2275748 - RNA, 17 nt, Human
cuaaccacgcuggaccu

SEQ ID NO: 2275749 - RNA, 16 nt, Human
cuaagccuuuccauaa

SEQ ID NO: 2275750 - RNA, 14 nt, Human
cccuaaaagcacac

SEQ ID NO: 2275751 - RNA, 17 nt, Human
cccuaaaguguauuuuu

SEQ ID NO: 2275752 - RNA, 12 nt, Human
cccuaaacugua

SEQ ID NO: 2275753 - RNA, 22 nt, Human
cccuaaaguguauuuuuuuacu

SEQ ID NO: 2275754 - RNA, 14 nt, Human
cccguuucuggugg

SEQ ID NO: 2275755 - RNA, 12 nt, Human
cccguuucucca

SEQ ID NO: 2275756 - RNA, 16 nt, Human
cccguuucuccaccua

SEQ ID NO: 2275757 - RNA, 12 nt, Human
cccguggcccca

SEQ ID NO: 2275758 - RNA, 13 nt, Human
cccguggccccag

SEQ ID NO: 2275759 - RNA, 14 nt, Human
cccguggccccagc

SEQ ID NO: 2275760 - RNA, 15 nt, Human
cccguggccccagcc

SEQ ID NO: 2275761 - RNA, 17 nt, Human
cccguugucucccuggc

SEQ ID NO: 2275762 - RNA, 19 nt, Human
cccguugucucccuggccc

SEQ ID NO: 2275763 - RNA, 20 nt, Human
cccguugucucccuggcccu

SEQ ID NO: 2275764 - RNA, 22 nt, Human
cccguugucucccuggcccuca

SEQ ID NO: 2275765 - RNA, 18 nt, Human
cccgugcagacuggaggg

SEQ ID NO: 2275766 - RNA, 11 nt, Human
cccguggcccc

SEQ ID NO: 2275767 - RNA, 15 nt, Human
cccgugcagacugga

SEQ ID NO: 2275768 - RNA, 21 nt, Human
cccgugaggaugucacucaga

SEQ ID NO: 2275769 - RNA, 13 nt, Human
cccgugcagacug

SEQ ID NO: 2275770 - RNA, 22 nt, Human
cccgugacagacuccugaggac

SEQ ID NO: 2275771 - RNA, 18 nt, Human
cccgucuucagccuagcc

SEQ ID NO: 2275772 - RNA, 18 nt, Human
cccgugacagacuccuga

SEQ ID NO: 2275773 - RNA, 17 nt, Human
cccgucuucagccuagc

SEQ ID NO: 2275774 - RNA, 16 nt, Human
cccgucuucagccuag

SEQ ID NO: 2275775 - RNA, 15 nt, Human
cccgucuucagccua

SEQ ID NO: 2275776 - RNA, 14 nt, Human
cccgucuucagccu

SEQ ID NO: 2275777 - RNA, 13 nt, Human
cccgucuucagcc

SEQ ID NO: 2275778 - RNA, 16 nt, Human
cccggcaggguccuag

SEQ ID NO: 2275779 - RNA, 13 nt, Human
cccggcagacgcc

SEQ ID NO: 2275780 - RNA, 14 nt, Human
cccggauucuggga

SEQ ID NO: 2275781 - RNA, 20 nt, Human
cccggagcuaacacuggccc

SEQ ID NO: 2275782 - RNA, 18 nt, Human
cccggagguugggugggc

SEQ ID NO: 2275783 - RNA, 16 nt, Human
cccggauucugggagg

SEQ ID NO: 2275784 - RNA, 21 nt, Human
cccggagcuaacacuggcccc

SEQ ID NO: 2275785 - RNA, 19 nt, Human
cccggagauuggacggccu

SEQ ID NO: 2275786 - RNA, 17 nt, Human
cccggaggggccuggca

SEQ ID NO: 2275787 - RNA, 18 nt, Human
cccggaggggccuggcag

SEQ ID NO: 2275788 - RNA, 21 nt, Human
cccuaaggucauuaccacagg

SEQ ID NO: 2275789 - RNA, 19 nt, Human
cccuaaggaucucucagga

SEQ ID NO: 2275790 - RNA, 17 nt, Human
cccuagaaacuuccaaa

SEQ ID NO: 2275791 - RNA, 18 nt, Human
cccuacuucuuuugcucu

SEQ ID NO: 2275792 - RNA, 19 nt, Human
cccuacuucuuuugcucuu

SEQ ID NO: 2275793 - RNA, 15 nt, Human
cccuaauaaagcugu

SEQ ID NO: 2275794 - RNA, 18 nt, Human
cccuaauaaagcugugug

SEQ ID NO: 2275795 - RNA, 17 nt, Human
cccuaagccaagggccu

SEQ ID NO: 2275796 - RNA, 19 nt, Human
cccuaagacuccucggccu

SEQ ID NO: 2275797 - RNA, 12 nt, Human
cccuaauaaagc

SEQ ID NO: 2275798 - RNA, 13 nt, Human
cccuaauaaagcu

SEQ ID NO: 2275799 - RNA, 14 nt, Human
cccuaauaaagcug

SEQ ID NO: 2275800 - RNA, 19 nt, Human
cccuagaggguuccuguag

SEQ ID NO: 2275801 - RNA, 22 nt, Human
cccuagaucuuucuauuccaaa

SEQ ID NO: 2275802 - RNA, 17 nt, Human
cccuagccagcacuugu

SEQ ID NO: 2275803 - RNA, 13 nt, Human
cccuagccauucc

SEQ ID NO: 2275804 - RNA, 15 nt, Human
cccuagccauuccug

SEQ ID NO: 2275805 - RNA, 19 nt, Human
cccuagaaucagccuaggg

SEQ ID NO: 2275806 - RNA, 15 nt, Human
cccuagagccugccu

SEQ ID NO: 2275807 - RNA, 18 nt, Human
cccuagagccugccugga

SEQ ID NO: 2275808 - RNA, 16 nt, Human
cccuagaguguuguug

SEQ ID NO: 2275809 - RNA, 20 nt, Human
cccuagagccugccuggagc

SEQ ID NO: 2275810 - RNA, 21 nt, Human
cccuagagccugccuggagcg

SEQ ID NO: 2275811 - RNA, 15 nt, Human
cccucagggucccug

SEQ ID NO: 2275812 - RNA, 22 nt, Human
cccucagggaucuugcauuccc

SEQ ID NO: 2275813 - RNA, 18 nt, Human
cccuagccauuccuggua

SEQ ID NO: 2275814 - RNA, 13 nt, Human
cccuagcccagga

SEQ ID NO: 2275815 - RNA, 16 nt, Human
cccuagcccaggagag

SEQ ID NO: 2275816 - RNA, 17 nt, Human
cccuagcccaggagaga

SEQ ID NO: 2275817 - RNA, 16 nt, Human
cccucagggucccugg

SEQ ID NO: 2275818 - RNA, 17 nt, Human
cccucagggucccuggu

SEQ ID NO: 2275819 - RNA, 18 nt, Human
cccucagggucccuggug

SEQ ID NO: 2275820 - RNA, 19 nt, Human
cccucagggucccuggugg

SEQ ID NO: 2275821 - RNA, 21 nt, Human
cccuccccuaaugccugcgga

SEQ ID NO: 2275822 - RNA, 14 nt, Human
cccuccccggcccu

SEQ ID NO: 2275823 - RNA, 19 nt, Human
cccuccccggcccuaccag

SEQ ID NO: 2275824 - RNA, 16 nt, Human
cccuccccgcccuuuu

SEQ ID NO: 2275825 - RNA, 17 nt, Human
cccuccccgcccuuuuu

SEQ ID NO: 2275826 - RNA, 17 nt, Human
cccuccccgcacccccc

SEQ ID NO: 2275827 - RNA, 16 nt, Human
cccuccccgcaccccc

SEQ ID NO: 2275828 - RNA, 13 nt, Human
cccucccccuugu

SEQ ID NO: 2275829 - RNA, 15 nt, Human
cccucccccuugucc

SEQ ID NO: 2275830 - RNA, 13 nt, Human
cccucccccuucu

SEQ ID NO: 2275831 - RNA, 17 nt, Human
cccucccccuucuccca

SEQ ID NO: 2275832 - RNA, 12 nt, Human
cccucccccuug

SEQ ID NO: 2275833 - RNA, 13 nt, Human
cccucccacacac

SEQ ID NO: 2275834 - RNA, 14 nt, Human
cccucccccugcca

SEQ ID NO: 2275835 - RNA, 19 nt, Human
cccuccaucuaaacugccc

SEQ ID NO: 2275836 - RNA, 12 nt, Human
cccucccacaca

SEQ ID NO: 2275837 - RNA, 17 nt, Human
cccuccaugugggcuag

SEQ ID NO: 2275838 - RNA, 15 nt, Human
cccuccaucccgaca

SEQ ID NO: 2275839 - RNA, 20 nt, Human
cccuccagcuuguggagccc

SEQ ID NO: 2275840 - RNA, 15 nt, Human
cccuccagcuugugg

SEQ ID NO: 2275841 - RNA, 16 nt, Human
cccuccacagccgcag

SEQ ID NO: 2275842 - RNA, 17 nt, Human
cccuccaaaagcacuua

SEQ ID NO: 2275843 - RNA, 18 nt, Human
cccuccaaaagcacuuac

SEQ ID NO: 2275844 - RNA, 15 nt, Human
cccuccaauccugcc

SEQ ID NO: 2275845 - RNA, 16 nt, Human
cccuccaauccugccc

SEQ ID NO: 2275846 - RNA, 13 nt, Human
cccucccucuuuc

SEQ ID NO: 2275847 - RNA, 23 nt, Human
cccucccucuacugggagccuac

SEQ ID NO: 2275848 - RNA, 12 nt, Human
cccuccccuccc

SEQ ID NO: 2275849 - RNA, 22 nt, Human
cccuccccggcccuaccagcgc

SEQ ID NO: 2275850 - RNA, 16 nt, Human
cccuccccuccccugc

SEQ ID NO: 2275851 - RNA, 17 nt, Human
cccuccccuccccugcu

SEQ ID NO: 2275852 - RNA, 14 nt, Human
cccuccccucucuu

SEQ ID NO: 2275853 - RNA, 15 nt, Human
cccuccccucucuug

SEQ ID NO: 2275854 - RNA, 16 nt, Human
cccuccccucucuugc

SEQ ID NO: 2275855 - RNA, 16 nt, Human
cccuccgccaggcgag

SEQ ID NO: 2275856 - RNA, 20 nt, Human
cccuccgauccuuccuccca

SEQ ID NO: 2275857 - RNA, 14 nt, Human
cccuccgccauucu

SEQ ID NO: 2275858 - RNA, 23 nt, Human
cccucccuuggaaaccugcccug

SEQ ID NO: 2275859 - RNA, 16 nt, Human
cccucccuuucucccc

SEQ ID NO: 2275860 - RNA, 13 nt, Human
cccucccuuucuc

SEQ ID NO: 2275861 - RNA, 14 nt, Human
cccucccuuucucc

SEQ ID NO: 2275862 - RNA, 12 nt, Human
cccucccuugga

SEQ ID NO: 2275863 - RNA, 19 nt, Human
cccucccuuggaaaccugc

SEQ ID NO: 2275864 - RNA, 21 nt, Human
cccucccuuggaaaccugccc

SEQ ID NO: 2275865 - RNA, 22 nt, Human
cccucccuuggaaaccugcccu

SEQ ID NO: 2275866 - RNA, 11 nt, Human
cccucccuguc

SEQ ID NO: 2275867 - RNA, 16 nt, Human
cccucccuggguucag

SEQ ID NO: 2275868 - RNA, 19 nt, Human
cccucccuguuccccagag

SEQ ID NO: 2275869 - RNA, 13 nt, Human
cccucccuccucu

SEQ ID NO: 2275870 - RNA, 13 nt, Human
cccucccuggguu

SEQ ID NO: 2275871 - RNA, 13 nt, Human
cccucccuguccu

SEQ ID NO: 2275872 - RNA, 20 nt, Human
cccucccuguuccccagaga

SEQ ID NO: 2275873 - RNA, 14 nt, Human
cccucccuucaacc

SEQ ID NO: 2275874 - RNA, 12 nt, Human
cccucaugcugu

SEQ ID NO: 2275875 - RNA, 22 nt, Human
cccucauccucauacccacccc

SEQ ID NO: 2275876 - RNA, 17 nt, Human
cccucaucucucugccc

SEQ ID NO: 2275877 - RNA, 21 nt, Human
cccucaucgcguccuccuacc

SEQ ID NO: 2275878 - RNA, 13 nt, Human
cccucaucucucc

SEQ ID NO: 2275879 - RNA, 14 nt, Human
cccucaucuguccc

SEQ ID NO: 2275880 - RNA, 13 nt, Human
cccucaucugucc

SEQ ID NO: 2275881 - RNA, 17 nt, Human
cccucauucaggaaaac

SEQ ID NO: 2275882 - RNA, 15 nt, Human
cccuccaaaagcacu

SEQ ID NO: 2275883 - RNA, 16 nt, Human
cccucauuucaggagc

SEQ ID NO: 2275884 - RNA, 19 nt, Human
cccucauuggcucuugaac

SEQ ID NO: 2275885 - RNA, 21 nt, Human
cccuccaagaccuucuccuuc

SEQ ID NO: 2275886 - RNA, 16 nt, Human
cccucauucaggaaaa

SEQ ID NO: 2275887 - RNA, 15 nt, Human
cccucauucaggaaa

SEQ ID NO: 2275888 - RNA, 12 nt, Human
cccucauuaaug

SEQ ID NO: 2275889 - RNA, 22 nt, Human
cccucauuccaccuucccaugc

SEQ ID NO: 2275890 - RNA, 21 nt, Human
cccucaucuuucaucaaucau

SEQ ID NO: 2275891 - RNA, 21 nt, Human
cccucauggccccucugaccu

SEQ ID NO: 2275892 - RNA, 16 nt, Human
cccucauggccccucu

SEQ ID NO: 2275893 - RNA, 17 nt, Human
cccucauggccccucug

SEQ ID NO: 2275894 - RNA, 20 nt, Human
cccucagucuggcccuuccu

SEQ ID NO: 2275895 - RNA, 21 nt, Human
cccucagggucccugguggca

SEQ ID NO: 2275896 - RNA, 19 nt, Human
cccucaguuucccuaucuc

SEQ ID NO: 2275897 - RNA, 15 nt, Human
cccucauagcccuca

SEQ ID NO: 2275898 - RNA, 13 nt, Human
cccucauagcccu

SEQ ID NO: 2275899 - RNA, 19 nt, Human
cccucauagcccucacccu

SEQ ID NO: 2275900 - RNA, 17 nt, Human
cccucaucccgagcacc

SEQ ID NO: 2275901 - RNA, 22 nt, Human
cccucaucaccaacgucugugc

SEQ ID NO: 2275902 - RNA, 17 nt, Human
cccucauccucauaccc

SEQ ID NO: 2275903 - RNA, 20 nt, Human
cccucauccucauacccacc

SEQ ID NO: 2275904 - RNA, 21 nt, Human
cccgcggggacauugggaagg

SEQ ID NO: 2275905 - RNA, 19 nt, Human
cccgcucagcccucccugc

SEQ ID NO: 2275906 - RNA, 15 nt, Human
cccgcgccuccuucc

SEQ ID NO: 2275907 - RNA, 17 nt, Human
cccgcgcccgcgcccuc

SEQ ID NO: 2275908 - RNA, 19 nt, Human
cccgcgcgcgucccccugc

SEQ ID NO: 2275909 - RNA, 22 nt, Human
cccgcuaagagggagggagggc

SEQ ID NO: 2275910 - RNA, 22 nt, Human
cccgccuggcagaacugagcuc

SEQ ID NO: 2275911 - RNA, 17 nt, Human
cccgccuggcagaacug

SEQ ID NO: 2275912 - RNA, 13 nt, Human
cccgccuguuccc

SEQ ID NO: 2275913 - RNA, 17 nt, Human
cccgccugcccucaugg

SEQ ID NO: 2275914 - RNA, 14 nt, Human
cccgccuguucccc

SEQ ID NO: 2275915 - RNA, 17 nt, Human
cccgcugaguggacugg

SEQ ID NO: 2275916 - RNA, 19 nt, Human
cccgcugaguggacuggag

SEQ ID NO: 2275917 - RNA, 12 nt, Human
cccgcucuggac

SEQ ID NO: 2275918 - RNA, 14 nt, Human
cccgcucuggacca

SEQ ID NO: 2275919 - RNA, 22 nt, Human
cccgcugcccaggggagcccuc

SEQ ID NO: 2275920 - RNA, 12 nt, Human
cccgcugcugcu

SEQ ID NO: 2275921 - RNA, 15 nt, Human
cccgcugcugcugcu

SEQ ID NO: 2275922 - RNA, 16 nt, Human
cccgcugcugcugcug

SEQ ID NO: 2275923 - RNA, 14 nt, Human
cccgcuuggcuucu

SEQ ID NO: 2275924 - RNA, 18 nt, Human
cccgcuuguccagcgccu

SEQ ID NO: 2275925 - RNA, 15 nt, Human
cccgcuuguccagcg

SEQ ID NO: 2275926 - RNA, 14 nt, Human
cccgcuuguccagc

SEQ ID NO: 2275927 - RNA, 16 nt, Human
cccgcuuggcuucuuc

SEQ ID NO: 2275928 - RNA, 14 nt, Human
cccggaacaagccu

SEQ ID NO: 2275929 - RNA, 20 nt, Human
cccgcuuucuugcugguugu

SEQ ID NO: 2275930 - RNA, 23 nt, Human
cccggaagccaaaccucugugag

SEQ ID NO: 2275931 - RNA, 12 nt, Human
cccgcucccagu

SEQ ID NO: 2275932 - RNA, 13 nt, Human
cccgcucccagug

SEQ ID NO: 2275933 - RNA, 14 nt, Human
cccgcucccagugu

SEQ ID NO: 2275934 - RNA, 23 nt, Human
cccgcucagcccucccugccccu

SEQ ID NO: 2275935 - RNA, 21 nt, Human
cccgcucuacaucuucugccu

SEQ ID NO: 2275936 - RNA, 15 nt, Human
cccgcucccaguguc

SEQ ID NO: 2275937 - RNA, 23 nt, Human
cccgcucccagugucuuccugug

SEQ ID NO: 2275938 - RNA, 13 nt, Human
cccgcucugcaug

SEQ ID NO: 2275939 - RNA, 14 nt, Human
cccgcucugcaugc

SEQ ID NO: 2275940 - RNA, 22 nt, Human
cccgcucugcaugcggcccagc

SEQ ID NO: 2275941 - RNA, 11 nt, Human
cccgcucugga

SEQ ID NO: 2275942 - RNA, 22 nt, Human
cccgcaaugugcccccagacgc

SEQ ID NO: 2275943 - RNA, 19 nt, Human
cccgcacagagcuggggcu

SEQ ID NO: 2275944 - RNA, 17 nt, Human
cccgcacccccacccuu

SEQ ID NO: 2275945 - RNA, 16 nt, Human
cccgcacccccacccu

SEQ ID NO: 2275946 - RNA, 13 nt, Human
cccgcacccccac

SEQ ID NO: 2275947 - RNA, 13 nt, Human
cccgccugcccuc

SEQ ID NO: 2275948 - RNA, 14 nt, Human
cccgccugcccuca

SEQ ID NO: 2275949 - RNA, 18 nt, Human
cccgcaaugugcccccag

SEQ ID NO: 2275950 - RNA, 20 nt, Human
cccgcaaacccccuuugugc

SEQ ID NO: 2275951 - RNA, 19 nt, Human
cccgcaaacccccuuugug

SEQ ID NO: 2275952 - RNA, 23 nt, Human
cccgaugcugcuuuccccugugg

SEQ ID NO: 2275953 - RNA, 13 nt, Human
cccgaucuuucua

SEQ ID NO: 2275954 - RNA, 14 nt, Human
cccgaugcugcuuu

SEQ ID NO: 2275955 - RNA, 15 nt, Human
cccgaugcugcuuuc

SEQ ID NO: 2275956 - RNA, 16 nt, Human
cccgaugcugcuuucc

SEQ ID NO: 2275957 - RNA, 20 nt, Human
cccgaugcugcuuuccccug

SEQ ID NO: 2275958 - RNA, 22 nt, Human
cccgaugcugcuuuccccugug

SEQ ID NO: 2275959 - RNA, 13 nt, Human
cccgaggcccgca

SEQ ID NO: 2275960 - RNA, 16 nt, Human
cccgaguuuccccaga

SEQ ID NO: 2275961 - RNA, 19 nt, Human
cccgaguuuggucccuggg

SEQ ID NO: 2275962 - RNA, 23 nt, Human
cccgagucauucguucuguggag

SEQ ID NO: 2275963 - RNA, 20 nt, Human
cccgaggccuucucugaagg

SEQ ID NO: 2275964 - RNA, 12 nt, Human
cccgaggcccgc

SEQ ID NO: 2275965 - RNA, 22 nt, Human
cccgaggacgcucccugcucca

SEQ ID NO: 2275966 - RNA, 15 nt, Human
cccgaggcccgcaug

SEQ ID NO: 2275967 - RNA, 15 nt, Human
cccgaggccuucucu

SEQ ID NO: 2275968 - RNA, 14 nt, Human
ccccuuauccagga

SEQ ID NO: 2275969 - RNA, 15 nt, Human
ccccuuauccaggac

SEQ ID NO: 2275970 - RNA, 16 nt, Human
ccccuuauccaggacu

SEQ ID NO: 2275971 - RNA, 23 nt, Human
ccccuucacuucugaccacacuu

SEQ ID NO: 2275972 - RNA, 22 nt, Human
ccccuucacuucugaccacacu

SEQ ID NO: 2275973 - RNA, 19 nt, Human
ccccuucacuucugaccac

SEQ ID NO: 2275974 - RNA, 17 nt, Human
ccccuucacuucugacc

SEQ ID NO: 2275975 - RNA, 14 nt, Human
ccccuucacaaagc

SEQ ID NO: 2275976 - RNA, 20 nt, Human
ccccuguucuggcagaguug

SEQ ID NO: 2275977 - RNA, 14 nt, Human
ccccuuaccacugc

SEQ ID NO: 2275978 - RNA, 18 nt, Human
ccccugucuagagaggga

SEQ ID NO: 2275979 - RNA, 14 nt, Human
ccccugucuagaga

SEQ ID NO: 2275980 - RNA, 23 nt, Human
ccccuuccccacugccugcccac

SEQ ID NO: 2275981 - RNA, 16 nt, Human
ccccuuccccauggga

SEQ ID NO: 2275982 - RNA, 14 nt, Human
ccccuucagugccc

SEQ ID NO: 2275983 - RNA, 13 nt, Human
ccccuucagugcc

SEQ ID NO: 2275984 - RNA, 12 nt, Human
ccccuucccccu

SEQ ID NO: 2275985 - RNA, 14 nt, Human
ccccuucccugcaa

SEQ ID NO: 2275986 - RNA, 18 nt, Human
ccccuucccugcaaacau

SEQ ID NO: 2275987 - RNA, 13 nt, Human
ccccuucccugca

SEQ ID NO: 2275988 - RNA, 17 nt, Human
ccccuuccuacucccag

SEQ ID NO: 2275989 - RNA, 12 nt, Human
ccccuggccucc

SEQ ID NO: 2275990 - RNA, 19 nt, Human
cccgaggacccagacccag

SEQ ID NO: 2275991 - RNA, 22 nt, Human
ccccuuccuaauuccacagcug

SEQ ID NO: 2275992 - RNA, 21 nt, Human
ccccuuccuaauuccacagcu

SEQ ID NO: 2275993 - RNA, 20 nt, Human
ccccuuccuaauuccacagc

SEQ ID NO: 2275994 - RNA, 14 nt, Human
ccccuguacuccag

SEQ ID NO: 2275995 - RNA, 19 nt, Human
ccccugggggcucucaugu

SEQ ID NO: 2275996 - RNA, 18 nt, Human
ccccugguucucaucuuu

SEQ ID NO: 2275997 - RNA, 23 nt, Human
ccccuggugguucacucuuggag

SEQ ID NO: 2275998 - RNA, 15 nt, Human
ccccugguucucauc

SEQ ID NO: 2275999 - RNA, 19 nt, Human
ccccuggggcuucuccuga

SEQ ID NO: 2276000 - RNA, 20 nt, Human
ccccuggggcuucuccugac

SEQ ID NO: 2276001 - RNA, 22 nt, Human
ccccuguccccgcacugggcuu

SEQ ID NO: 2276002 - RNA, 17 nt, Human
ccccuguccccucagcu

SEQ ID NO: 2276003 - RNA, 20 nt, Human
ccccuguccccucagcucca

SEQ ID NO: 2276004 - RNA, 13 nt, Human
ccccuguccucac

SEQ ID NO: 2276005 - RNA, 14 nt, Human
ccccuguccucacu

SEQ ID NO: 2276006 - RNA, 15 nt, Human
ccccuguccucacug

SEQ ID NO: 2276007 - RNA, 16 nt, Human
ccccuguccucacugc

SEQ ID NO: 2276008 - RNA, 12 nt, Human
ccccuguccuga

SEQ ID NO: 2276009 - RNA, 23 nt, Human
ccccugggcucugccccagcucu

SEQ ID NO: 2276010 - RNA, 21 nt, Human
ccccugggcucugccccagcu

SEQ ID NO: 2276011 - RNA, 17 nt, Human
ccccuggcccagcggcc

SEQ ID NO: 2276012 - RNA, 16 nt, Human
ccccugggcuuggccu

SEQ ID NO: 2276013 - RNA, 18 nt, Human
ccccugggcuuggccugc

SEQ ID NO: 2276014 - RNA, 19 nt, Human
ccccugggcuuggccugcu

SEQ ID NO: 2276015 - RNA, 23 nt, Human
ccccugggcuuggccugcuguga

SEQ ID NO: 2276016 - RNA, 20 nt, Human
ccccugggcuuggccugcug

SEQ ID NO: 2276017 - RNA, 21 nt, Human
ccccugggcuuggccugcugu

SEQ ID NO: 2276018 - RNA, 22 nt, Human
ccccugggcuuggccugcugug

SEQ ID NO: 2276019 - RNA, 18 nt, Human
ccccuggggcuucuccug

SEQ ID NO: 2276020 - RNA, 15 nt, Human
ccccugggcucugcc

SEQ ID NO: 2276021 - RNA, 13 nt, Human
ccccugggcucug

SEQ ID NO: 2276022 - RNA, 11 nt, Human
ccccugggcuc

SEQ ID NO: 2276023 - RNA, 22 nt, Human
ccccuggcuuuucacugcuggc

SEQ ID NO: 2276024 - RNA, 23 nt, Human
ccccuggcuuuucacugcuggcu

SEQ ID NO: 2276025 - RNA, 15 nt, Human
ccccuggcccagcgg

SEQ ID NO: 2276026 - RNA, 16 nt, Human
ccccuggcccagcggc

SEQ ID NO: 2276027 - RNA, 22 nt, Human
ccccuggcccagcggccccucc

SEQ ID NO: 2276028 - RNA, 19 nt, Human
ccccagggucuucccuacc

SEQ ID NO: 2276029 - RNA, 22 nt, Human
ccccaggguugaggggaccaag

SEQ ID NO: 2276030 - RNA, 16 nt, Human
ccccagggucuucccu

SEQ ID NO: 2276031 - RNA, 17 nt, Human
ccccagguccagcucug

SEQ ID NO: 2276032 - RNA, 21 nt, Human
ccccagguccagcucuggagg

SEQ ID NO: 2276033 - RNA, 22 nt, Human
ccccagguccagcucuggaggg

SEQ ID NO: 2276034 - RNA, 22 nt, Human
ccccaggugguuauggagaggg

SEQ ID NO: 2276035 - RNA, 14 nt, Human
ccccaggugccagu

SEQ ID NO: 2276036 - RNA, 23 nt, Human
ccccagguggcugacccaguccc

SEQ ID NO: 2276037 - RNA, 21 nt, Human
ccccagguggcugacccaguc

SEQ ID NO: 2276038 - RNA, 20 nt, Human
ccccagguggcugacccagu

SEQ ID NO: 2276039 - RNA, 13 nt, Human
ccccagguggcug

SEQ ID NO: 2276040 - RNA, 11 nt, Human
ccccuggccca

SEQ ID NO: 2276041 - RNA, 13 nt, Human
ccccuggcccagc

SEQ ID NO: 2276042 - RNA, 14 nt, Human
ccccuggcccagcg

SEQ ID NO: 2276043 - RNA, 15 nt, Human
ccccuggcagccccu

SEQ ID NO: 2276044 - RNA, 12 nt, Human
ccccuggcagcc

SEQ ID NO: 2276045 - RNA, 14 nt, Human
ccccuggcagcccc

SEQ ID NO: 2276046 - RNA, 22 nt, Human
ccccaggggucccagccacccc

SEQ ID NO: 2276047 - RNA, 19 nt, Human
ccccaggggucccagccac

SEQ ID NO: 2276048 - RNA, 17 nt, Human
ccccaggggucccagcc

SEQ ID NO: 2276049 - RNA, 19 nt, Human
ccccaggggaaagaugagc

SEQ ID NO: 2276050 - RNA, 20 nt, Human
ccccaggggaaagaugagcu

SEQ ID NO: 2276051 - RNA, 21 nt, Human
ccccagggccugagccuggcc

SEQ ID NO: 2276052 - RNA, 19 nt, Human
ccccagggccugagccugg

SEQ ID NO: 2276053 - RNA, 16 nt, Human
ccccaggggaaaauga

SEQ ID NO: 2276054 - RNA, 17 nt, Human
ccccaggggaaaaugaa

SEQ ID NO: 2276055 - RNA, 18 nt, Human
ccccaggggaaaaugaag

SEQ ID NO: 2276056 - RNA, 12 nt, Human
ccccagggcacu

SEQ ID NO: 2276057 - RNA, 22 nt, Human
ccccagggcacuucacagagug

SEQ ID NO: 2276058 - RNA, 20 nt, Human
ccccagggcacuucacagag

SEQ ID NO: 2276059 - RNA, 21 nt, Human
ccccagggcacuucacagagu

SEQ ID NO: 2276060 - RNA, 16 nt, Human
ccccagggccugagcc

SEQ ID NO: 2276061 - RNA, 15 nt, Human
ccccagggccugagc

SEQ ID NO: 2276062 - RNA, 14 nt, Human
ccccagggccugag

SEQ ID NO: 2276063 - RNA, 12 nt, Human
ccccaggaggcc

SEQ ID NO: 2276064 - RNA, 13 nt, Human
ccccaggacuggg

SEQ ID NO: 2276065 - RNA, 14 nt, Human
ccccaggacugggc

SEQ ID NO: 2276066 - RNA, 16 nt, Human
ccccaggacugggcca

SEQ ID NO: 2276067 - RNA, 22 nt, Human
ccccaggacugggccacuucug

SEQ ID NO: 2276068 - RNA, 21 nt, Human
ccccaggaccuggcugccaua

SEQ ID NO: 2276069 - RNA, 20 nt, Human
ccccaggaccuggcugccau

SEQ ID NO: 2276070 - RNA, 17 nt, Human
ccccaggaccuggcugc

SEQ ID NO: 2276071 - RNA, 15 nt, Human
ccccaggaccuggcu

SEQ ID NO: 2276072 - RNA, 21 nt, Human
ccccaggaccagcucaggaca

SEQ ID NO: 2276073 - RNA, 19 nt, Human
ccccaggaccagcucagga

SEQ ID NO: 2276074 - RNA, 18 nt, Human
ccccaggaccagcucagg

SEQ ID NO: 2276075 - RNA, 21 nt, Human
ccccagcugggaggcaagagg

SEQ ID NO: 2276076 - RNA, 22 nt, Human
ccccagcugggaggcaagaggg

SEQ ID NO: 2276077 - RNA, 23 nt, Human
ccccacacuuguuccagcucuuu

SEQ ID NO: 2276078 - RNA, 11 nt, Human
ccccacagccc

SEQ ID NO: 2276079 - RNA, 12 nt, Human
ccccacagccca

SEQ ID NO: 2276080 - RNA, 13 nt, Human
ccccacagcccac

SEQ ID NO: 2276081 - RNA, 15 nt, Human
ccccacagcccacgu

SEQ ID NO: 2276082 - RNA, 16 nt, Human
ccccacagcccacguc

SEQ ID NO: 2276083 - RNA, 19 nt, Human
ccccacagcccacguccug

SEQ ID NO: 2276084 - RNA, 23 nt, Human
ccccacaggagguggucugggac

SEQ ID NO: 2276085 - RNA, 22 nt, Human
ccccacagcccacguccuguca

SEQ ID NO: 2276086 - RNA, 21 nt, Human
ccccacagcccacguccuguc

SEQ ID NO: 2276087 - RNA, 23 nt, Human
ccccaccacgauguggcccuggc

SEQ ID NO: 2276088 - RNA, 12 nt, Human
ccccaccaccua

SEQ ID NO: 2276089 - RNA, 14 nt, Human
ccccaccaccccag

SEQ ID NO: 2276090 - RNA, 19 nt, Human
ccccaccaagggcgcaaga

SEQ ID NO: 2276091 - RNA, 21 nt, Human
ccccaccaagggcgcaagagu

SEQ ID NO: 2276092 - RNA, 16 nt, Human
ccccagccccauccca

SEQ ID NO: 2276093 - RNA, 17 nt, Human
ccccaccacuucuuuua

SEQ ID NO: 2276094 - RNA, 17 nt, Human
ccccagcccccuuuggg

SEQ ID NO: 2276095 - RNA, 23 nt, Human
ccccagcccccuuugggcccagg

SEQ ID NO: 2276096 - RNA, 15 nt, Human
ccccagccccauccu

SEQ ID NO: 2276097 - RNA, 15 nt, Human
ccccagccccuagcc

SEQ ID NO: 2276098 - RNA, 13 nt, Human
ccccagccccggg

SEQ ID NO: 2276099 - RNA, 18 nt, Human
ccccagccccuagcccag

SEQ ID NO: 2276100 - RNA, 20 nt, Human
ccccagccccuagcccagga

SEQ ID NO: 2276101 - RNA, 22 nt, Human
ccccagccccuagcccaggaga

SEQ ID NO: 2276102 - RNA, 17 nt, Human
ccccagcucuggcuucc

SEQ ID NO: 2276103 - RNA, 22 nt, Human
ccccagccuggcccagcucccc

SEQ ID NO: 2276104 - RNA, 19 nt, Human
ccccagccuggcccagcuc

SEQ ID NO: 2276105 - RNA, 21 nt, Human
ccccagccuggcccagcuccc

SEQ ID NO: 2276106 - RNA, 15 nt, Human
ccccagccuggccca

SEQ ID NO: 2276107 - RNA, 16 nt, Human
ccccagccuggcccag

SEQ ID NO: 2276108 - RNA, 17 nt, Human
ccccagccuggcccagc

SEQ ID NO: 2276109 - RNA, 18 nt, Human
ccccagccuggcccagcu

SEQ ID NO: 2276110 - RNA, 13 nt, Human
ccccagccugcua

SEQ ID NO: 2276111 - RNA, 11 nt, Human
ccccagccugg

SEQ ID NO: 2276112 - RNA, 12 nt, Human
ccccagccuggc

SEQ ID NO: 2276113 - RNA, 13 nt, Human
ccccagccuggcc

SEQ ID NO: 2276114 - RNA, 21 nt, Human
ccccagcuggggccaggcugg

SEQ ID NO: 2276115 - RNA, 22 nt, Human
ccccagcuggggccaggcuggg

SEQ ID NO: 2276116 - RNA, 14 nt, Human
ccccagcucuggug

SEQ ID NO: 2276117 - RNA, 22 nt, Human
ccccagcucuggugagucuugg

SEQ ID NO: 2276118 - RNA, 10 nt, Human
ccccagcuga

SEQ ID NO: 2276119 - RNA, 16 nt, Human
ccccagcugacaugga

SEQ ID NO: 2276120 - RNA, 13 nt, Human
ccccagcugcuug

SEQ ID NO: 2276121 - RNA, 10 nt, Human
ccccagcugg

SEQ ID NO: 2276122 - RNA, 11 nt, Human
ccccagcuggc

SEQ ID NO: 2276123 - RNA, 12 nt, Human
ccccagcuggcc

SEQ ID NO: 2276124 - RNA, 13 nt, Human
ccccagcuggccc

SEQ ID NO: 2276125 - RNA, 21 nt, Human
ccccagcuggcccgugacaga

SEQ ID NO: 2276126 - RNA, 11 nt, Human
ccccagcuggg

SEQ ID NO: 2276127 - RNA, 12 nt, Human
ccccagcuggga

SEQ ID NO: 2276128 - RNA, 13 nt, Human
ccccagcugggag

SEQ ID NO: 2276129 - RNA, 14 nt, Human
ccccagcugggagg

SEQ ID NO: 2276130 - RNA, 15 nt, Human
ccccagcugggaggc

SEQ ID NO: 2276131 - RNA, 19 nt, Human
cccgcaccccccaagcugu

SEQ ID NO: 2276132 - RNA, 15 nt, Human
cccugccagugccuu

SEQ ID NO: 2276133 - RNA, 14 nt, Human
cccugccagugccu

SEQ ID NO: 2276134 - RNA, 14 nt, Human
cccugccagggcag

SEQ ID NO: 2276135 - RNA, 20 nt, Human
cccugccaucauguuuacag

SEQ ID NO: 2276136 - RNA, 12 nt, Human
cccugccagggc

SEQ ID NO: 2276137 - RNA, 18 nt, Human
cccugccaucuucccagc

SEQ ID NO: 2276138 - RNA, 19 nt, Human
cccugccaucuucccagca

SEQ ID NO: 2276139 - RNA, 13 nt, Human
cccugccaucuuc

SEQ ID NO: 2276140 - RNA, 14 nt, Human
cccugccaucuucc

SEQ ID NO: 2276141 - RNA, 16 nt, Human
cccugccaucuuccca

SEQ ID NO: 2276142 - RNA, 17 nt, Human
cccugccaucuucccag

SEQ ID NO: 2276143 - RNA, 14 nt, Human
cccugccuccuuug

SEQ ID NO: 2276144 - RNA, 11 nt, Human
cccugccucuc

SEQ ID NO: 2276145 - RNA, 18 nt, Human
cccugccucucugcaggu

SEQ ID NO: 2276146 - RNA, 16 nt, Human
cccugccuccuuugug

SEQ ID NO: 2276147 - RNA, 23 nt, Human
cccugccuccuuugugaggaagc

SEQ ID NO: 2276148 - RNA, 17 nt, Human
cccugccacccugggga

SEQ ID NO: 2276149 - RNA, 18 nt, Human
cccugccacccuggggag

SEQ ID NO: 2276150 - RNA, 22 nt, Human
cccugccaggagcuuuggaccu

SEQ ID NO: 2276151 - RNA, 15 nt, Human
cccugccaccaggcc

SEQ ID NO: 2276152 - RNA, 14 nt, Human
cccugccaccuccc

SEQ ID NO: 2276153 - RNA, 17 nt, Human
cccugccaccucccuga

SEQ ID NO: 2276154 - RNA, 12 nt, Human
cccugccacccu

SEQ ID NO: 2276155 - RNA, 21 nt, Human
cccugcauucuuucuguauug

SEQ ID NO: 2276156 - RNA, 14 nt, Human
cccugccaccaggc

SEQ ID NO: 2276157 - RNA, 14 nt, Human
cccugccacccugg

SEQ ID NO: 2276158 - RNA, 15 nt, Human
cccugccacccuggg

SEQ ID NO: 2276159 - RNA, 20 nt, Human
cccugaucaagucaccggag

SEQ ID NO: 2276160 - RNA, 19 nt, Human
cccugauaacaaccuggag

SEQ ID NO: 2276161 - RNA, 23 nt, Human
cccugaguggaucuccaaggacc

SEQ ID NO: 2276162 - RNA, 18 nt, Human
cccugauaacaaccugga

SEQ ID NO: 2276163 - RNA, 16 nt, Human
cccucucaggcaugcc

SEQ ID NO: 2276164 - RNA, 22 nt, Human
cccugaguggaucuccaaggac

SEQ ID NO: 2276165 - RNA, 21 nt, Human
cccucucaggcaugccugugu

SEQ ID NO: 2276166 - RNA, 21 nt, Human
cccugaguggaucuccaagga

SEQ ID NO: 2276167 - RNA, 14 nt, Human
cccucucagcucca

SEQ ID NO: 2276168 - RNA, 17 nt, Human
cccucucagcuccaggu

SEQ ID NO: 2276169 - RNA, 23 nt, Human
cccugauuuaggagaagccagga

SEQ ID NO: 2276170 - RNA, 21 nt, Human
cccugauuuaggagaagccag

SEQ ID NO: 2276171 - RNA, 21 nt, Human
cccugaucugacauccccacu

SEQ ID NO: 2276172 - RNA, 22 nt, Human
cccugaucugacauccccacuc

SEQ ID NO: 2276173 - RNA, 15 nt, Human
cccugauccugugaa

SEQ ID NO: 2276174 - RNA, 19 nt, Human
cccugauuacaccagccuc

SEQ ID NO: 2276175 - RNA, 19 nt, Human
cccucuagaaauuuuucag

SEQ ID NO: 2276176 - RNA, 15 nt, Human
cccucuauuuagcau

SEQ ID NO: 2276177 - RNA, 17 nt, Human
cccucucacugucugag

SEQ ID NO: 2276178 - RNA, 12 nt, Human
cccucucagagc

SEQ ID NO: 2276179 - RNA, 21 nt, Human
cccucucagagcuacuugggc

SEQ ID NO: 2276180 - RNA, 13 nt, Human
cccucucagcucc

SEQ ID NO: 2276181 - RNA, 18 nt, Human
cccuccgccaggcgagau

SEQ ID NO: 2276182 - RNA, 15 nt, Human
cccucuacagagcuu

SEQ ID NO: 2276183 - RNA, 13 nt, Human
cccuccgcccugc

SEQ ID NO: 2276184 - RNA, 21 nt, Human
cccucuacagagcuucccuga

SEQ ID NO: 2276185 - RNA, 18 nt, Human
cccucuacagagcuuccc

SEQ ID NO: 2276186 - RNA, 20 nt, Human
cccucuacugggagccuacc

SEQ ID NO: 2276187 - RNA, 17 nt, Human
cccucuacugggagccu

SEQ ID NO: 2276188 - RNA, 20 nt, Human
cccugcagagggcacagaaa

SEQ ID NO: 2276189 - RNA, 18 nt, Human
cccugcagagggcacaga

SEQ ID NO: 2276190 - RNA, 22 nt, Human
cccugcacuugcagacucuaca

SEQ ID NO: 2276191 - RNA, 12 nt, Human
cccugcagaggg

SEQ ID NO: 2276192 - RNA, 19 nt, Human
cccugcaaaaugagacccu

SEQ ID NO: 2276193 - RNA, 18 nt, Human
cccugauuugcugggcag

SEQ ID NO: 2276194 - RNA, 20 nt, Human
cccugcaaaaggacucucag

SEQ ID NO: 2276195 - RNA, 18 nt, Human
cccugcaaaaggacucuc

SEQ ID NO: 2276196 - RNA, 22 nt, Human
cccugcaaccugauugugucuc

SEQ ID NO: 2276197 - RNA, 16 nt, Human
cccugcaaccugauug

SEQ ID NO: 2276198 - RNA, 13 nt, Human
cccugcugguuca

SEQ ID NO: 2276199 - RNA, 23 nt, Human
cccugccugagggccccucugcc

SEQ ID NO: 2276200 - RNA, 19 nt, Human
cccugccugagggccccuc

SEQ ID NO: 2276201 - RNA, 20 nt, Human
cccugccugagggccccucu

SEQ ID NO: 2276202 - RNA, 21 nt, Human
cccugccugagggccccucug

SEQ ID NO: 2276203 - RNA, 22 nt, Human
cccugccugagggccccucugc

SEQ ID NO: 2276204 - RNA, 16 nt, Human
cccugccucucugcag

SEQ ID NO: 2276205 - RNA, 12 nt, Human
cccugccucuca

SEQ ID NO: 2276206 - RNA, 13 nt, Human
cccugccucuguu

SEQ ID NO: 2276207 - RNA, 13 nt, Human
cccugccugaggg

SEQ ID NO: 2276208 - RNA, 21 nt, Human
cccugccucucugcagguccc

SEQ ID NO: 2276209 - RNA, 22 nt, Human
cccugccucucugcaggucccu

SEQ ID NO: 2276210 - RNA, 19 nt, Human
cccugcugguucaggguug

SEQ ID NO: 2276211 - RNA, 20 nt, Human
cccugcugguucaggguugg

SEQ ID NO: 2276212 - RNA, 23 nt, Human
cccugcuuugggcugcccuggug

SEQ ID NO: 2276213 - RNA, 10 nt, Human
cccugcuguc

SEQ ID NO: 2276214 - RNA, 22 nt, Human
cccugcuuugggcugcccuggu

SEQ ID NO: 2276215 - RNA, 23 nt, Human
cccugccuggggcgggccccuca

SEQ ID NO: 2276216 - RNA, 21 nt, Human
cccuggacugugugcucagga

SEQ ID NO: 2276217 - RNA, 21 nt, Human
cccuggagaggcccucuggag

SEQ ID NO: 2276218 - RNA, 13 nt, Human
cccuggagagaag

SEQ ID NO: 2276219 - RNA, 13 nt, Human
cccuggagaguuc

SEQ ID NO: 2276220 - RNA, 21 nt, Human
cccuggagaguucaauggcug

SEQ ID NO: 2276221 - RNA, 18 nt, Human
cccuggaacugucucuca

SEQ ID NO: 2276222 - RNA, 15 nt, Human
cccuggaacugucuc

SEQ ID NO: 2276223 - RNA, 22 nt, Human
cccugguggcagugggagcugc

SEQ ID NO: 2276224 - RNA, 16 nt, Human
cccuggugggccaaca

SEQ ID NO: 2276225 - RNA, 23 nt, Human
cccugguggagaaagcacugacc

SEQ ID NO: 2276226 - RNA, 19 nt, Human
cccugguggacaguccugg

SEQ ID NO: 2276227 - RNA, 18 nt, Human
cccugguggacaguccug

SEQ ID NO: 2276228 - RNA, 17 nt, Human
cccugguggacaguccu

SEQ ID NO: 2276229 - RNA, 21 nt, Human
cccugguggacaguccuggga

SEQ ID NO: 2276230 - RNA, 20 nt, Human
cccugguggacaguccuggg

SEQ ID NO: 2276231 - RNA, 23 nt, Human
cccugguggacaguccugggaga

SEQ ID NO: 2276232 - RNA, 20 nt, Human
cccugguggagaaagcacug

SEQ ID NO: 2276233 - RNA, 18 nt, Human
cccugggggaagcccugg

SEQ ID NO: 2276234 - RNA, 17 nt, Human
cccugggggaagcccug

SEQ ID NO: 2276235 - RNA, 19 nt, Human
cccuggggcuucuccugac

SEQ ID NO: 2276236 - RNA, 21 nt, Human
cccuggggcuucuccugaccc

SEQ ID NO: 2276237 - RNA, 21 nt, Human
cccuggggcuaggcuggagcc

SEQ ID NO: 2276238 - RNA, 15 nt, Human
cccuggggcuucucc

SEQ ID NO: 2276239 - RNA, 18 nt, Human
cccuggggcuucuccuga

SEQ ID NO: 2276240 - RNA, 20 nt, Human
cccugggggaagcccuggau

SEQ ID NO: 2276241 - RNA, 19 nt, Human
cccugggggaagcccugga

SEQ ID NO: 2276242 - RNA, 17 nt, Human
cccugggugggcucugu

SEQ ID NO: 2276243 - RNA, 18 nt, Human
cccugggugggcucugug

SEQ ID NO: 2276244 - RNA, 20 nt, Human
cccugggugggcucugugca

SEQ ID NO: 2276245 - RNA, 17 nt, Human
cccuggugcugccacac

SEQ ID NO: 2276246 - RNA, 21 nt, Human
cccuggugcugccacacuuca

SEQ ID NO: 2276247 - RNA, 22 nt, Human
cccugggugggugguggggagg

SEQ ID NO: 2276248 - RNA, 16 nt, Human
cccuggguggguggug

SEQ ID NO: 2276249 - RNA, 21 nt, Human
cccugggugggugguggggag

SEQ ID NO: 2276250 - RNA, 23 nt, Human
cccugggugggugguggggaggg

SEQ ID NO: 2276251 - RNA, 14 nt, Human
cccugggccccacc

SEQ ID NO: 2276252 - RNA, 12 nt, Human
cccuggaagccg

SEQ ID NO: 2276253 - RNA, 15 nt, Human
cccugggauguccac

SEQ ID NO: 2276254 - RNA, 13 nt, Human
cccuggaggugcc

SEQ ID NO: 2276255 - RNA, 17 nt, Human
cccugggaggcucugga

SEQ ID NO: 2276256 - RNA, 18 nt, Human
cccugggaggcucuggag

SEQ ID NO: 2276257 - RNA, 23 nt, Human
cccuggagccagacucuggucuu

SEQ ID NO: 2276258 - RNA, 12 nt, Human
cccuggagccca

SEQ ID NO: 2276259 - RNA, 13 nt, Human
cccuggagccaga

SEQ ID NO: 2276260 - RNA, 14 nt, Human
cccuggagccagac

SEQ ID NO: 2276261 - RNA, 20 nt, Human
cccuggagccagacucuggu

SEQ ID NO: 2276262 - RNA, 21 nt, Human
cccuggagccagacucugguc

SEQ ID NO: 2276263 - RNA, 16 nt, Human
cccuggagccaacugc

SEQ ID NO: 2276264 - RNA, 22 nt, Human
cccuggagaguucaauggcugc

SEQ ID NO: 2276265 - RNA, 23 nt, Human
cccuggagaguucaauggcugcu

SEQ ID NO: 2276266 - RNA, 19 nt, Human
cccuggagccaacugcugc

SEQ ID NO: 2276267 - RNA, 20 nt, Human
cccuggagccaacugcugcu

SEQ ID NO: 2276268 - RNA, 21 nt, Human
cccuggagccaacugcugcuu

SEQ ID NO: 2276269 - RNA, 22 nt, Human
cccuggagccaacugcugcuuu

SEQ ID NO: 2276270 - RNA, 15 nt, Human
cccugggaggcucug

SEQ ID NO: 2276271 - RNA, 19 nt, Human
cccuggaggcacugaagug

SEQ ID NO: 2276272 - RNA, 16 nt, Human
cccugggaggcucugg

SEQ ID NO: 2276273 - RNA, 14 nt, Human
cccugguggcagcu

SEQ ID NO: 2276274 - RNA, 21 nt, Human
ccucagagugcaagccccugc

SEQ ID NO: 2276275 - RNA, 14 nt, Human
ccucagagugcaag

SEQ ID NO: 2276276 - RNA, 16 nt, Human
ccucagaucuucugug

SEQ ID NO: 2276277 - RNA, 13 nt, Human
ccucagcaccccu

SEQ ID NO: 2276278 - RNA, 19 nt, Human
ccucagcaccccugucucu

SEQ ID NO: 2276279 - RNA, 14 nt, Human
ccucagcaccccuu

SEQ ID NO: 2276280 - RNA, 19 nt, Human
ccucagaguccaggcccca

SEQ ID NO: 2276281 - RNA, 13 nt, Human
ccucagcccugac

SEQ ID NO: 2276282 - RNA, 15 nt, Human
ccucagcccugaccc

SEQ ID NO: 2276283 - RNA, 23 nt, Human
ccucagccccucuugccccccac

SEQ ID NO: 2276284 - RNA, 20 nt, Human
ccucagccccucuugccccc

SEQ ID NO: 2276285 - RNA, 19 nt, Human
ccucagccccucuugcccc

SEQ ID NO: 2276286 - RNA, 18 nt, Human
ccucagccccucuugccc

SEQ ID NO: 2276287 - RNA, 16 nt, Human
ccucagccccucuugc

SEQ ID NO: 2276288 - RNA, 14 nt, Human
ccucagccccucuu

SEQ ID NO: 2276289 - RNA, 13 nt, Human
ccucagccccucu

SEQ ID NO: 2276290 - RNA, 23 nt, Human
ccucagccauucacugcccccag

SEQ ID NO: 2276291 - RNA, 21 nt, Human
ccucagccaugaggaguugcu

SEQ ID NO: 2276292 - RNA, 16 nt, Human
ccucagccauucacug

SEQ ID NO: 2276293 - RNA, 16 nt, Human
ccucagccaugaggag

SEQ ID NO: 2276294 - RNA, 20 nt, Human
ccucagcaccccuuccaugu

SEQ ID NO: 2276295 - RNA, 22 nt, Human
ccucagcaccccuuccaugugg

SEQ ID NO: 2276296 - RNA, 17 nt, Human
ccucagccagagaagcu

SEQ ID NO: 2276297 - RNA, 15 nt, Human
ccucagcaccccuuc

SEQ ID NO: 2276298 - RNA, 16 nt, Human
ccucagcaccccuucc

SEQ ID NO: 2276299 - RNA, 17 nt, Human
ccucagcaccccuucca

SEQ ID NO: 2276300 - RNA, 18 nt, Human
ccucagcaccccuuccau

SEQ ID NO: 2276301 - RNA, 16 nt, Human
ccucagcccugacccu

SEQ ID NO: 2276302 - RNA, 17 nt, Human
ccucagcccugacccug

SEQ ID NO: 2276303 - RNA, 23 nt, Human
ccucaggccugggggcugggcag

SEQ ID NO: 2276304 - RNA, 18 nt, Human
ccucagcccugacccugu

SEQ ID NO: 2276305 - RNA, 12 nt, Human
ccucaggcugcu

SEQ ID NO: 2276306 - RNA, 19 nt, Human
ccucagcccgccaagguag

SEQ ID NO: 2276307 - RNA, 17 nt, Human
ccucaggcugcuggagg

SEQ ID NO: 2276308 - RNA, 16 nt, Human
ccucaggcugcuggag

SEQ ID NO: 2276309 - RNA, 15 nt, Human
ccucaggcugcugga

SEQ ID NO: 2276310 - RNA, 14 nt, Human
ccucaggcugcugg

SEQ ID NO: 2276311 - RNA, 21 nt, Human
ccucagggacagagacaccug

SEQ ID NO: 2276312 - RNA, 20 nt, Human
ccucagggacagagacaccu

SEQ ID NO: 2276313 - RNA, 11 nt, Human
ccucagggaca

SEQ ID NO: 2276314 - RNA, 18 nt, Human
ccucaggcugcuggagga

SEQ ID NO: 2276315 - RNA, 17 nt, Human
ccucaggcuuccuuggc

SEQ ID NO: 2276316 - RNA, 16 nt, Human
ccucaggcuuccuugg

SEQ ID NO: 2276317 - RNA, 23 nt, Human
ccucagggacagagacaccugca

SEQ ID NO: 2276318 - RNA, 22 nt, Human
ccucagggacagagacaccugc

SEQ ID NO: 2276319 - RNA, 24 nt, Human
ccucagggacagagacaccugcac

SEQ ID NO: 2276320 - RNA, 16 nt, Human
ccucagggucccuggu

SEQ ID NO: 2276321 - RNA, 17 nt, Human
ccucagggucccuggug

SEQ ID NO: 2276322 - RNA, 20 nt, Human
ccucagggucccugguggca

SEQ ID NO: 2276323 - RNA, 23 nt, Human
ccucagggaucuugcauucccag

SEQ ID NO: 2276324 - RNA, 22 nt, Human
ccucagggucccugguggcagc

SEQ ID NO: 2276325 - RNA, 15 nt, Human
ccucacaucuuucac

SEQ ID NO: 2276326 - RNA, 17 nt, Human
ccucacagcuggccguc

SEQ ID NO: 2276327 - RNA, 16 nt, Human
ccucacaucuuucaca

SEQ ID NO: 2276328 - RNA, 13 nt, Human
ccucaccaggggc

SEQ ID NO: 2276329 - RNA, 14 nt, Human
ccucaccaggggca

SEQ ID NO: 2276330 - RNA, 19 nt, Human
ccucaccaggggcaggcac

SEQ ID NO: 2276331 - RNA, 15 nt, Human
ccucacccugagccc

SEQ ID NO: 2276332 - RNA, 18 nt, Human
ccucacccugagccccuu

SEQ ID NO: 2276333 - RNA, 21 nt, Human
ccucacccugagccccuuccu

SEQ ID NO: 2276334 - RNA, 23 nt, Human
ccucaccaggggcaggcacagca

SEQ ID NO: 2276335 - RNA, 20 nt, Human
ccucaccaggggcaggcaca

SEQ ID NO: 2276336 - RNA, 22 nt, Human
ccucaccaggggcaggcacagc

SEQ ID NO: 2276337 - RNA, 14 nt, Human
ccucacccuggggc

SEQ ID NO: 2276338 - RNA, 18 nt, Human
ccucaccgagugggggca

SEQ ID NO: 2276339 - RNA, 14 nt, Human
ccucacccugccuu

SEQ ID NO: 2276340 - RNA, 23 nt, Human
ccucacccugagccccuuccuug

SEQ ID NO: 2276341 - RNA, 11 nt, Human
ccucacccugc

SEQ ID NO: 2276342 - RNA, 15 nt, Human
ccucacccugccuua

SEQ ID NO: 2276343 - RNA, 22 nt, Human
ccucacccugccuuaucuugca

SEQ ID NO: 2276344 - RNA, 20 nt, Human
ccucacucccuucccauaag

SEQ ID NO: 2276345 - RNA, 14 nt, Human
ccucacucccuucu

SEQ ID NO: 2276346 - RNA, 13 nt, Human
ccucaccuccucu

SEQ ID NO: 2276347 - RNA, 23 nt, Human
ccucaccucaugcccacccccug

SEQ ID NO: 2276348 - RNA, 17 nt, Human
ccucacuauucaaguau

SEQ ID NO: 2276349 - RNA, 12 nt, Human
ccucaccucaug

SEQ ID NO: 2276350 - RNA, 14 nt, Human
ccucaccucaugcc

SEQ ID NO: 2276351 - RNA, 15 nt, Human
ccucaccucaugccc

SEQ ID NO: 2276352 - RNA, 16 nt, Human
ccucaccucaugccca

SEQ ID NO: 2276353 - RNA, 17 nt, Human
ccucaccucaugcccac

SEQ ID NO: 2276354 - RNA, 19 nt, Human
ccucaccucaugcccaccc

SEQ ID NO: 2276355 - RNA, 22 nt, Human
ccucaccucaugcccacccccu

SEQ ID NO: 2276356 - RNA, 12 nt, Human
ccucacuccugu

SEQ ID NO: 2276357 - RNA, 17 nt, Human
ccucacucuggccucag

SEQ ID NO: 2276358 - RNA, 15 nt, Human
ccucacucuugccaa

SEQ ID NO: 2276359 - RNA, 13 nt, Human
ccucacuccuguu

SEQ ID NO: 2276360 - RNA, 19 nt, Human
ccucacucccuucuaccug

SEQ ID NO: 2276361 - RNA, 20 nt, Human
ccucacucccuucuaccugc

SEQ ID NO: 2276362 - RNA, 21 nt, Human
ccucacucccuucuaccugcc

SEQ ID NO: 2276363 - RNA, 22 nt, Human
ccucacucccuucuaccugcca

SEQ ID NO: 2276364 - RNA, 21 nt, Human
ccucacuggguggggugagga

SEQ ID NO: 2276365 - RNA, 14 nt, Human
ccucacuggguggg

SEQ ID NO: 2276366 - RNA, 13 nt, Human
ccucacugggugg

SEQ ID NO: 2276367 - RNA, 12 nt, Human
ccucacugggug

SEQ ID NO: 2276368 - RNA, 23 nt, Human
ccucacugggguccuggggccuc

SEQ ID NO: 2276369 - RNA, 20 nt, Human
ccucacugggguccuggggc

SEQ ID NO: 2276370 - RNA, 19 nt, Human
ccucacugggguccugggg

SEQ ID NO: 2276371 - RNA, 18 nt, Human
ccucacuggccaucccuc

SEQ ID NO: 2276372 - RNA, 22 nt, Human
ccucacuggccaucccucgugg

SEQ ID NO: 2276373 - RNA, 16 nt, Human
ccucacucuugccaac

SEQ ID NO: 2276374 - RNA, 17 nt, Human
ccucacucuugccaacc

SEQ ID NO: 2276375 - RNA, 18 nt, Human
ccucacugaaaacaucug

SEQ ID NO: 2276376 - RNA, 20 nt, Human
ccucacugaaaacaucugga

SEQ ID NO: 2276377 - RNA, 17 nt, Human
ccucacugaaugccuca

SEQ ID NO: 2276378 - RNA, 16 nt, Human
ccucacugcucccuga

SEQ ID NO: 2276379 - RNA, 17 nt, Human
ccucacugcucccugaa

SEQ ID NO: 2276380 - RNA, 19 nt, Human
ccucacugcucccugaagc

SEQ ID NO: 2276381 - RNA, 21 nt, Human
ccucacugcucccugaagcca

SEQ ID NO: 2276382 - RNA, 14 nt, Human
ccucacuggaugaa

SEQ ID NO: 2276383 - RNA, 12 nt, Human
ccucacuggcca

SEQ ID NO: 2276384 - RNA, 15 nt, Human
ccucacuggccaucc

SEQ ID NO: 2276385 - RNA, 17 nt, Human
ccucacuggccaucccu

SEQ ID NO: 2276386 - RNA, 19 nt, Human
ccucagacuuaccaggaag

SEQ ID NO: 2276387 - RNA, 22 nt, Human
ccucagacuuaccaggaagcag

SEQ ID NO: 2276388 - RNA, 17 nt, Human
ccucagacuuaccagga

SEQ ID NO: 2276389 - RNA, 19 nt, Human
ccucacuuccauacagcuc

SEQ ID NO: 2276390 - RNA, 21 nt, Human
ccucacuuccauacagcucua

SEQ ID NO: 2276391 - RNA, 14 nt, Human
ccucacuugaaugu

SEQ ID NO: 2276392 - RNA, 16 nt, Human
ccucacuguugaauuu

SEQ ID NO: 2276393 - RNA, 18 nt, Human
ccucagaguccaggcccc

SEQ ID NO: 2276394 - RNA, 17 nt, Human
ccucagaguccaggccc

SEQ ID NO: 2276395 - RNA, 16 nt, Human
ccucagaguccaggcc

SEQ ID NO: 2276396 - RNA, 15 nt, Human
ccucagaguccaggc

SEQ ID NO: 2276397 - RNA, 13 nt, Human
ccucagaguccag

SEQ ID NO: 2276398 - RNA, 16 nt, Human
ccucagagccaccccu

SEQ ID NO: 2276399 - RNA, 11 nt, Human
ccucacacagc

SEQ ID NO: 2276400 - RNA, 12 nt, Human
ccucacacuggg

SEQ ID NO: 2276401 - RNA, 15 nt, Human
ccucacacugggacu

SEQ ID NO: 2276402 - RNA, 13 nt, Human
ccucacacuggga

SEQ ID NO: 2276403 - RNA, 14 nt, Human
ccucacacucaccc

SEQ ID NO: 2276404 - RNA, 17 nt, Human
ccuauugugauuugacu

SEQ ID NO: 2276405 - RNA, 18 nt, Human
ccuauugugauuugacug

SEQ ID NO: 2276406 - RNA, 21 nt, Human
ccuauugugauuugacuguuu

SEQ ID NO: 2276407 - RNA, 16 nt, Human
ccuauucucaccagga

SEQ ID NO: 2276408 - RNA, 19 nt, Human
ccuauucucaccaggaagg

SEQ ID NO: 2276409 - RNA, 15 nt, Human
ccuauucucgggcug

SEQ ID NO: 2276410 - RNA, 22 nt, Human
ccuauugcaaagguuccaacug

SEQ ID NO: 2276411 - RNA, 13 nt, Human
ccuauugucauua

SEQ ID NO: 2276412 - RNA, 15 nt, Human
ccuauugucauuaaa

SEQ ID NO: 2276413 - RNA, 12 nt, Human
ccuauugugauu

SEQ ID NO: 2276414 - RNA, 13 nt, Human
ccuauugugauuu

SEQ ID NO: 2276415 - RNA, 14 nt, Human
ccuauugugauuug

SEQ ID NO: 2276416 - RNA, 15 nt, Human
ccuauugugauuuga

SEQ ID NO: 2276417 - RNA, 24 nt, Human
ccucacaguccuuaccagcagagc

SEQ ID NO: 2276418 - RNA, 22 nt, Human
ccucacagccucugaccccucc

SEQ ID NO: 2276419 - RNA, 23 nt, Human
ccucacagccucugaccccuccu

SEQ ID NO: 2276420 - RNA, 18 nt, Human
ccucacagccucugaccc

SEQ ID NO: 2276421 - RNA, 19 nt, Human
ccucacagccucugacccc

SEQ ID NO: 2276422 - RNA, 20 nt, Human
ccucacagccucugaccccu

SEQ ID NO: 2276423 - RNA, 21 nt, Human
ccucacagccucugaccccuc

SEQ ID NO: 2276424 - RNA, 23 nt, Human
ccucacaguccuuaccagcagag

SEQ ID NO: 2276425 - RNA, 15 nt, Human
ccucacagcacagag

SEQ ID NO: 2276426 - RNA, 19 nt, Human
ccucacagcacagagaaga

SEQ ID NO: 2276427 - RNA, 12 nt, Human
ccucacagccuc

SEQ ID NO: 2276428 - RNA, 13 nt, Human
ccucacagccucu

SEQ ID NO: 2276429 - RNA, 14 nt, Human
ccucacagccucug

SEQ ID NO: 2276430 - RNA, 15 nt, Human
ccucacagccucuga

SEQ ID NO: 2276431 - RNA, 16 nt, Human
ccucacagccucugac

SEQ ID NO: 2276432 - RNA, 17 nt, Human
ccuauuagagaagagau

SEQ ID NO: 2276433 - RNA, 14 nt, Human
ccuauucccacacc

SEQ ID NO: 2276434 - RNA, 21 nt, Human
ccuauucccacaccuccacag

SEQ ID NO: 2276435 - RNA, 22 nt, Human
ccuauucccacaccuccacagu

SEQ ID NO: 2276436 - RNA, 15 nt, Human
ccuauuccuccuggg

SEQ ID NO: 2276437 - RNA, 22 nt, Human
ccuauucuauugcaguuauaga

SEQ ID NO: 2276438 - RNA, 11 nt, Human
ccuauucucac

SEQ ID NO: 2276439 - RNA, 13 nt, Human
ccuauucucacca

SEQ ID NO: 2276440 - RNA, 15 nt, Human
ccuauucucaccagg

SEQ ID NO: 2276441 - RNA, 21 nt, Human
ccuauucaguucccagaauca

SEQ ID NO: 2276442 - RNA, 16 nt, Human
ccuauuagagaagaga

SEQ ID NO: 2276443 - RNA, 22 nt, Human
ccuauguuuuuguucaaagcca

SEQ ID NO: 2276444 - RNA, 11 nt, Human
ccuauguguaa

SEQ ID NO: 2276445 - RNA, 23 nt, Human
ccuaugugauuuuaacucugucu

SEQ ID NO: 2276446 - RNA, 22 nt, Human
ccuaugugauuuuaacucuguc

SEQ ID NO: 2276447 - RNA, 22 nt, Human
ccuaucuguuuacaguguuccg

SEQ ID NO: 2276448 - RNA, 20 nt, Human
ccuaucucgugggagagcca

SEQ ID NO: 2276449 - RNA, 17 nt, Human
ccuaucucgugggagag

SEQ ID NO: 2276450 - RNA, 18 nt, Human
ccuaucucgugggagagc

SEQ ID NO: 2276451 - RNA, 16 nt, Human
ccuaucucgugggaga

SEQ ID NO: 2276452 - RNA, 21 nt, Human
ccuaguggggucucccucucc

SEQ ID NO: 2276453 - RNA, 17 nt, Human
ccuauccacccagccca

SEQ ID NO: 2276454 - RNA, 16 nt, Human
ccuauccacccagccc

SEQ ID NO: 2276455 - RNA, 20 nt, Human
ccuaguggggucucccucuc

SEQ ID NO: 2276456 - RNA, 19 nt, Human
ccuaguggggucucccucu

SEQ ID NO: 2276457 - RNA, 18 nt, Human
ccuaguggggucucccuc

SEQ ID NO: 2276458 - RNA, 17 nt, Human
ccuaguggggucucccu

SEQ ID NO: 2276459 - RNA, 23 nt, Human
ccuaguggcuguccagugcccau

SEQ ID NO: 2276460 - RNA, 19 nt, Human
ccuagugacccggaggcca

SEQ ID NO: 2276461 - RNA, 20 nt, Human
ccuagugacccggaggccac

SEQ ID NO: 2276462 - RNA, 15 nt, Human
ccuaguggcugucca

SEQ ID NO: 2276463 - RNA, 16 nt, Human
ccuaguggcuguccag

SEQ ID NO: 2276464 - RNA, 17 nt, Human
ccuaguggcuguccagu

SEQ ID NO: 2276465 - RNA, 18 nt, Human
ccuaguggcuguccagug

SEQ ID NO: 2276466 - RNA, 19 nt, Human
ccuaguggcuguccagugc

SEQ ID NO: 2276467 - RNA, 21 nt, Human
ccuaguggcuguccagugccc

SEQ ID NO: 2276468 - RNA, 21 nt, Human
ccuauccacccagcccauucu

SEQ ID NO: 2276469 - RNA, 18 nt, Human
ccuauccacccagcccau

SEQ ID NO: 2276470 - RNA, 18 nt, Human
ccuaucuaacccucccau

SEQ ID NO: 2276471 - RNA, 19 nt, Human
ccuauccugguuuuuguag

SEQ ID NO: 2276472 - RNA, 15 nt, Human
ccuaggugacagagu

SEQ ID NO: 2276473 - RNA, 14 nt, Human
ccuagucucuauca

SEQ ID NO: 2276474 - RNA, 23 nt, Human
ccuagugaaggcuucucucugug

SEQ ID NO: 2276475 - RNA, 16 nt, Human
ccuagucucuaucauu

SEQ ID NO: 2276476 - RNA, 18 nt, Human
ccuagugacccggaggcc

SEQ ID NO: 2276477 - RNA, 22 nt, Human
ccuagugaaggcuucucucugu

SEQ ID NO: 2276478 - RNA, 21 nt, Human
ccuagugaaggcuucucucug

SEQ ID NO: 2276479 - RNA, 19 nt, Human
ccuagugaaggcuucucuc

SEQ ID NO: 2276480 - RNA, 18 nt, Human
ccuagugaaggcuucucu

SEQ ID NO: 2276481 - RNA, 15 nt, Human
ccuagucucuaucau

SEQ ID NO: 2276482 - RNA, 21 nt, Human
ccuagucucuaucauuaaagu

SEQ ID NO: 2276483 - RNA, 22 nt, Human
ccucaggugagaagcagaggaa

SEQ ID NO: 2276484 - RNA, 16 nt, Human
ccuaaaccaaaaacug

SEQ ID NO: 2276485 - RNA, 22 nt, Human
ccguuacucuccaaccuggaca

SEQ ID NO: 2276486 - RNA, 14 nt, Human
ccuaaaauuugccc

SEQ ID NO: 2276487 - RNA, 22 nt, Human
ccuaaaauuugcccucccaucc

SEQ ID NO: 2276488 - RNA, 23 nt, Human
ccuaaacagauauaaauggcugg

SEQ ID NO: 2276489 - RNA, 18 nt, Human
ccguuagcuccuguggcc

SEQ ID NO: 2276490 - RNA, 13 nt, Human
ccuaaacauauga

SEQ ID NO: 2276491 - RNA, 16 nt, Human
ccuaaaauucagugga

SEQ ID NO: 2276492 - RNA, 13 nt, Human
ccguuagcuccug

SEQ ID NO: 2276493 - RNA, 14 nt, Human
ccguuagcuccugu

SEQ ID NO: 2276494 - RNA, 15 nt, Human
ccguuagcuccugug

SEQ ID NO: 2276495 - RNA, 17 nt, Human
ccguuagcuccuguggc

SEQ ID NO: 2276496 - RNA, 17 nt, Human
ccguuacucuccaaccu

SEQ ID NO: 2276497 - RNA, 14 nt, Human
ccguuacucuccaa

SEQ ID NO: 2276498 - RNA, 13 nt, Human
ccguuacucucca

SEQ ID NO: 2276499 - RNA, 21 nt, Human
ccguguguucuccgucccugc

SEQ ID NO: 2276500 - RNA, 16 nt, Human
ccguggccccagccug

SEQ ID NO: 2276501 - RNA, 17 nt, Human
ccguggccccagccugg

SEQ ID NO: 2276502 - RNA, 15 nt, Human
ccuacagaggucucu

SEQ ID NO: 2276503 - RNA, 17 nt, Human
ccuacagaggucucugc

SEQ ID NO: 2276504 - RNA, 23 nt, Human
ccuacagaggucucugccggcuc

SEQ ID NO: 2276505 - RNA, 18 nt, Human
ccuaacacagcaugugua

SEQ ID NO: 2276506 - RNA, 13 nt, Human
ccuaacaccagcg

SEQ ID NO: 2276507 - RNA, 14 nt, Human
ccuaaauggccuca

SEQ ID NO: 2276508 - RNA, 18 nt, Human
ccuaaauggccucaugug

SEQ ID NO: 2276509 - RNA, 15 nt, Human
ccuacagcccaccug

SEQ ID NO: 2276510 - RNA, 19 nt, Human
ccuacagcuugaccgugag

SEQ ID NO: 2276511 - RNA, 22 nt, Human
ccuacaguugaaaaacagcuga

SEQ ID NO: 2276512 - RNA, 21 nt, Human
ccuacagcuuugaucccugac

SEQ ID NO: 2276513 - RNA, 20 nt, Human
ccuacagcuuugaucccuga

SEQ ID NO: 2276514 - RNA, 17 nt, Human
ccuacagcuuugauccc

SEQ ID NO: 2276515 - RNA, 16 nt, Human
ccuacagauagucaaa

SEQ ID NO: 2276516 - RNA, 14 nt, Human
ccuacagccccuuu

SEQ ID NO: 2276517 - RNA, 16 nt, Human
ccuagacccuccuccu

SEQ ID NO: 2276518 - RNA, 19 nt, Human
ccuagacuguaaaccucuc

SEQ ID NO: 2276519 - RNA, 19 nt, Human
ccuagaaguuacugaaugc

SEQ ID NO: 2276520 - RNA, 23 nt, Human
ccuagaaguuacugaaugcacca

SEQ ID NO: 2276521 - RNA, 21 nt, Human
ccuagaagagugugaaaagga

SEQ ID NO: 2276522 - RNA, 13 nt, Human
ccuagaagggcua

SEQ ID NO: 2276523 - RNA, 22 nt, Human
ccuagaagggcuagaaccugga

SEQ ID NO: 2276524 - RNA, 13 nt, Human
ccuaggugacaga

SEQ ID NO: 2276525 - RNA, 22 nt, Human
ccuagguauaauucacauugua

SEQ ID NO: 2276526 - RNA, 22 nt, Human
ccuagaaacguuuggaacaauc

SEQ ID NO: 2276527 - RNA, 15 nt, Human
ccuagaaauacaugg

SEQ ID NO: 2276528 - RNA, 21 nt, Human
ccuagaaauuccccacccuga

SEQ ID NO: 2276529 - RNA, 13 nt, Human
ccuacuuccccuu

SEQ ID NO: 2276530 - RNA, 16 nt, Human
ccuacuuccccuuccu

SEQ ID NO: 2276531 - RNA, 18 nt, Human
ccuacccacccuccuuuc

SEQ ID NO: 2276532 - RNA, 19 nt, Human
ccuacccauccccgcagug

SEQ ID NO: 2276533 - RNA, 14 nt, Human
ccuacccauccccg

SEQ ID NO: 2276534 - RNA, 17 nt, Human
ccuaccccaauuccuug

SEQ ID NO: 2276535 - RNA, 18 nt, Human
ccuaccccaauuccuugu

SEQ ID NO: 2276536 - RNA, 17 nt, Human
ccuacccacaccucugc

SEQ ID NO: 2276537 - RNA, 18 nt, Human
ccuacccacaccucugcc

SEQ ID NO: 2276538 - RNA, 19 nt, Human
ccuacccacaccucugcca

SEQ ID NO: 2276539 - RNA, 20 nt, Human
ccuacccacaccucugccag

SEQ ID NO: 2276540 - RNA, 19 nt, Human
ccuacuguaauuugugaua

SEQ ID NO: 2276541 - RNA, 12 nt, Human
ccuaccccacac

SEQ ID NO: 2276542 - RNA, 19 nt, Human
ccuaccccaauuccuugua

SEQ ID NO: 2276543 - RNA, 11 nt, Human
ccuaccccaca

SEQ ID NO: 2276544 - RNA, 13 nt, Human
ccuacccacccuc

SEQ ID NO: 2276545 - RNA, 17 nt, Human
ccuaccaauagauuccc

SEQ ID NO: 2276546 - RNA, 18 nt, Human
ccuaccaauagauucccc

SEQ ID NO: 2276547 - RNA, 18 nt, Human
ccuacaugcuuugugaac

SEQ ID NO: 2276548 - RNA, 22 nt, Human
ccuacauguauuuguuugcaua

SEQ ID NO: 2276549 - RNA, 17 nt, Human
ccuacaugcuuugugaa

SEQ ID NO: 2276550 - RNA, 19 nt, Human
ccuacaugaaacagaaaca

SEQ ID NO: 2276551 - RNA, 22 nt, Human
ccuacaguuggaaauccaucca

SEQ ID NO: 2276552 - RNA, 12 nt, Human
ccguuauuaaaa

SEQ ID NO: 2276553 - RNA, 17 nt, Human
cccuuucagaugucuuc

SEQ ID NO: 2276554 - RNA, 19 nt, Human
cccuuucagaugucuucug

SEQ ID NO: 2276555 - RNA, 20 nt, Human
cccuuucagaugucuucugc

SEQ ID NO: 2276556 - RNA, 21 nt, Human
cccuuuagccaaacccuuguc

SEQ ID NO: 2276557 - RNA, 23 nt, Human
cccuugucugagaugcugguaau

SEQ ID NO: 2276558 - RNA, 13 nt, Human
cccuuguucucua

SEQ ID NO: 2276559 - RNA, 12 nt, Human
cccuugugugug

SEQ ID NO: 2276560 - RNA, 13 nt, Human
cccuugucugaga

SEQ ID NO: 2276561 - RNA, 14 nt, Human
cccuugucugagau

SEQ ID NO: 2276562 - RNA, 17 nt, Human
cccuugugcguggguga

SEQ ID NO: 2276563 - RNA, 22 nt, Human
cccuuguggucccaccccacac

SEQ ID NO: 2276564 - RNA, 15 nt, Human
cccuugucccacuca

SEQ ID NO: 2276565 - RNA, 12 nt, Human
cccuugucugag

SEQ ID NO: 2276566 - RNA, 12 nt, Human
cccuuggccugu

SEQ ID NO: 2276567 - RNA, 14 nt, Human
cccuuggccucaga

SEQ ID NO: 2276568 - RNA, 11 nt, Human
cccuuggccag

SEQ ID NO: 2276569 - RNA, 17 nt, Human
cccuugguggcaagagc

SEQ ID NO: 2276570 - RNA, 22 nt, Human
cccuugguuaggcauuguggga

SEQ ID NO: 2276571 - RNA, 23 nt, Human
cccuugguuaggcauugugggaa

SEQ ID NO: 2276572 - RNA, 11 nt, Human
cccuucuuuuu

SEQ ID NO: 2276573 - RNA, 21 nt, Human
cccuuccuaauuccacagcug

SEQ ID NO: 2276574 - RNA, 17 nt, Human
cccuugaaauuuuaaac

SEQ ID NO: 2276575 - RNA, 15 nt, Human
cccuugacaccgggg

SEQ ID NO: 2276576 - RNA, 19 nt, Human
cccuucuuuuucuucuuuu

SEQ ID NO: 2276577 - RNA, 13 nt, Human
cccuucuuuccuc

SEQ ID NO: 2276578 - RNA, 14 nt, Human
cccuucuuuccucu

SEQ ID NO: 2276579 - RNA, 13 nt, Human
cccuuggccucag

SEQ ID NO: 2276580 - RNA, 12 nt, Human
cccuuggccuca

SEQ ID NO: 2276581 - RNA, 17 nt, Human
cccuuggaggcugucuu

SEQ ID NO: 2276582 - RNA, 18 nt, Human
cccuuggaggccagccag

SEQ ID NO: 2276583 - RNA, 17 nt, Human
cccuuggaggccagcca

SEQ ID NO: 2276584 - RNA, 17 nt, Human
cccuuggauuguccccg

SEQ ID NO: 2276585 - RNA, 15 nt, Human
cccuuggaggccagc

SEQ ID NO: 2276586 - RNA, 13 nt, Human
cccuuggaggcca

SEQ ID NO: 2276587 - RNA, 16 nt, Human
cccuuggacuugagga

SEQ ID NO: 2276588 - RNA, 23 nt, Human
cccuugacgucaagucuccuucc

SEQ ID NO: 2276589 - RNA, 15 nt, Human
cccuugacaccugcu

SEQ ID NO: 2276590 - RNA, 18 nt, Human
cccugguuauauucucac

SEQ ID NO: 2276591 - RNA, 22 nt, Human
cccugguguuucuagcacuggc

SEQ ID NO: 2276592 - RNA, 20 nt, Human
cccugguguuucuagcacug

SEQ ID NO: 2276593 - RNA, 21 nt, Human
cccugguguuucuagcacugg

SEQ ID NO: 2276594 - RNA, 19 nt, Human
cccugguuauauucucacg

SEQ ID NO: 2276595 - RNA, 14 nt, Human
cccugguucucauc

SEQ ID NO: 2276596 - RNA, 13 nt, Human
cccuggugguuca

SEQ ID NO: 2276597 - RNA, 16 nt, Human
cccuggugguugcugu

SEQ ID NO: 2276598 - RNA, 12 nt, Human
cccugguguuuc

SEQ ID NO: 2276599 - RNA, 23 nt, Human
cccuggugggccaacaaagaaca

SEQ ID NO: 2276600 - RNA, 13 nt, Human
cccuguucacucu

SEQ ID NO: 2276601 - RNA, 18 nt, Human
cccuguguugucucuaga

SEQ ID NO: 2276602 - RNA, 21 nt, Human
cccuguguugucucuagagca

SEQ ID NO: 2276603 - RNA, 13 nt, Human
cccuguguugucu

SEQ ID NO: 2276604 - RNA, 15 nt, Human
cccuguguugucucu

SEQ ID NO: 2276605 - RNA, 16 nt, Human
cccuguguugucucua

SEQ ID NO: 2276606 - RNA, 17 nt, Human
cccuguguugucucuag

SEQ ID NO: 2276607 - RNA, 13 nt, Human
cccuucagugccc

SEQ ID NO: 2276608 - RNA, 21 nt, Human
cccuucaguacccucucagcu

SEQ ID NO: 2276609 - RNA, 19 nt, Human
cccuucaguacccucucag

SEQ ID NO: 2276610 - RNA, 20 nt, Human
cccuucaguacccucucagc

SEQ ID NO: 2276611 - RNA, 17 nt, Human
cccuucagugcccacca

SEQ ID NO: 2276612 - RNA, 15 nt, Human
cccuucaucuccagg

SEQ ID NO: 2276613 - RNA, 14 nt, Human
cccuucaucuggaa

SEQ ID NO: 2276614 - RNA, 16 nt, Human
cccuucaucuggaacc

SEQ ID NO: 2276615 - RNA, 23 nt, Human
cccuucacuucugaccacacuuc

SEQ ID NO: 2276616 - RNA, 17 nt, Human
cccuucaguacccucuc

SEQ ID NO: 2276617 - RNA, 23 nt, Human
cccuguguugucucuagagcagg

SEQ ID NO: 2276618 - RNA, 17 nt, Human
cccuguucagcuacucc

SEQ ID NO: 2276619 - RNA, 19 nt, Human
cccuguucagcuacuccca

SEQ ID NO: 2276620 - RNA, 14 nt, Human
cccuguucacucua

SEQ ID NO: 2276621 - RNA, 22 nt, Human
cccuguucacucuacuuagcau

SEQ ID NO: 2276622 - RNA, 11 nt, Human
cccuucauuug

SEQ ID NO: 2276623 - RNA, 16 nt, Human
cccuucaugcauggaa

SEQ ID NO: 2276624 - RNA, 12 nt, Human
cccuucccaccu

SEQ ID NO: 2276625 - RNA, 13 nt, Human
cccuucccaccuc

SEQ ID NO: 2276626 - RNA, 23 nt, Human
cccuucccacaggacauuucucu

SEQ ID NO: 2276627 - RNA, 18 nt, Human
cccuucaucuccagggag

SEQ ID NO: 2276628 - RNA, 16 nt, Human
cccuucccacuggagg

SEQ ID NO: 2276629 - RNA, 14 nt, Human
cccuucccacagga

SEQ ID NO: 2276630 - RNA, 19 nt, Human
cccuucccuugagcccucu

SEQ ID NO: 2276631 - RNA, 15 nt, Human
cccuuccccauggga

SEQ ID NO: 2276632 - RNA, 21 nt, Human
cccuuccccacugccugccca

SEQ ID NO: 2276633 - RNA, 14 nt, Human
cccuuccccauggg

SEQ ID NO: 2276634 - RNA, 11 nt, Human
cccuuccccau

SEQ ID NO: 2276635 - RNA, 12 nt, Human
cccuuccccacu

SEQ ID NO: 2276636 - RNA, 21 nt, Human
cccuucccaugacccaggcug

SEQ ID NO: 2276637 - RNA, 18 nt, Human
cccuucccaucucuuccu

SEQ ID NO: 2276638 - RNA, 20 nt, Human
cccuuccuaauuccacagcu

SEQ ID NO: 2276639 - RNA, 19 nt, Human
cccuuccuaauuccacagc

SEQ ID NO: 2276640 - RNA, 14 nt, Human
cccuuccuaauucc

SEQ ID NO: 2276641 - RNA, 13 nt, Human
cccuuccuaauuc

SEQ ID NO: 2276642 - RNA, 21 nt, Human
ccggagauuggacggccugau

SEQ ID NO: 2276643 - RNA, 20 nt, Human
ccggagauuggacggccuga

SEQ ID NO: 2276644 - RNA, 19 nt, Human
ccggagauuggacggccug

SEQ ID NO: 2276645 - RNA, 17 nt, Human
ccggagauuggacggcc

SEQ ID NO: 2276646 - RNA, 17 nt, Human
ccggagauguagcaaaa

SEQ ID NO: 2276647 - RNA, 14 nt, Human
ccggagauguagca

SEQ ID NO: 2276648 - RNA, 14 nt, Human
ccggagaggaccgg

SEQ ID NO: 2276649 - RNA, 20 nt, Human
ccggacugcaagcagggcuc

SEQ ID NO: 2276650 - RNA, 20 nt, Human
ccggacuuucggaguugggg

SEQ ID NO: 2276651 - RNA, 15 nt, Human
ccggacuuuucugca

SEQ ID NO: 2276652 - RNA, 16 nt, Human
ccggacuuuucugcaa

SEQ ID NO: 2276653 - RNA, 23 nt, Human
ccggacuuucggaguuggggguc

SEQ ID NO: 2276654 - RNA, 15 nt, Human
ccggauccugggugg

SEQ ID NO: 2276655 - RNA, 17 nt, Human
ccggaguccacucccag

SEQ ID NO: 2276656 - RNA, 15 nt, Human
ccggagugagaagcu

SEQ ID NO: 2276657 - RNA, 20 nt, Human
ccggauggcggacaccuggc

SEQ ID NO: 2276658 - RNA, 13 nt, Human
ccggaugugcuuu

SEQ ID NO: 2276659 - RNA, 14 nt, Human
ccggaugugcuuuu

SEQ ID NO: 2276660 - RNA, 15 nt, Human
ccggaugugcuuuuc

SEQ ID NO: 2276661 - RNA, 16 nt, Human
ccggauuggcuugugu

SEQ ID NO: 2276662 - RNA, 22 nt, Human
ccggauuggcuuguguguuuca

SEQ ID NO: 2276663 - RNA, 17 nt, Human
ccggcaaccccaguucu

SEQ ID NO: 2276664 - RNA, 20 nt, Human
ccggcaaccccaguucugcu

SEQ ID NO: 2276665 - RNA, 18 nt, Human
ccggagauguagcaaaac

SEQ ID NO: 2276666 - RNA, 17 nt, Human
ccggagcaaacucugcu

SEQ ID NO: 2276667 - RNA, 18 nt, Human
ccggagcaaacucugcug

SEQ ID NO: 2276668 - RNA, 19 nt, Human
ccggagcaaacucugcugu

SEQ ID NO: 2276669 - RNA, 17 nt, Human
ccggaggggccuggcag

SEQ ID NO: 2276670 - RNA, 17 nt, Human
ccggagguagagguugu

SEQ ID NO: 2276671 - RNA, 18 nt, Human
ccggaggguguuuaugua

SEQ ID NO: 2276672 - RNA, 14 nt, Human
ccggagccuccagc

SEQ ID NO: 2276673 - RNA, 16 nt, Human
ccggagccuccagcug

SEQ ID NO: 2276674 - RNA, 21 nt, Human
ccggaggggccuggcagccgu

SEQ ID NO: 2276675 - RNA, 23 nt, Human
ccggcaaccccaguucugcuccu

SEQ ID NO: 2276676 - RNA, 21 nt, Human
ccggcaaccccaguucugcuc

SEQ ID NO: 2276677 - RNA, 22 nt, Human
ccggcaaccccaguucugcucc

SEQ ID NO: 2276678 - RNA, 22 nt, Human
ccgggaaagaagagccggagcc

SEQ ID NO: 2276679 - RNA, 17 nt, Human
ccgggaagggggcuggg

SEQ ID NO: 2276680 - RNA, 20 nt, Human
ccggggcagcugccagagaa

SEQ ID NO: 2276681 - RNA, 19 nt, Human
ccggggcagcugccagaga

SEQ ID NO: 2276682 - RNA, 18 nt, Human
ccggggcagcugccagag

SEQ ID NO: 2276683 - RNA, 23 nt, Human
ccggggaggagagagcagcuucu

SEQ ID NO: 2276684 - RNA, 15 nt, Human
ccggggaggggcgcu

SEQ ID NO: 2276685 - RNA, 22 nt, Human
ccggggaguuucuuuccugccu

SEQ ID NO: 2276686 - RNA, 15 nt, Human
ccggggacagaggcc

SEQ ID NO: 2276687 - RNA, 15 nt, Human
ccggggacccuguga

SEQ ID NO: 2276688 - RNA, 15 nt, Human
ccggggagcgcccgc

SEQ ID NO: 2276689 - RNA, 18 nt, Human
ccggucccuugagaccuc

SEQ ID NO: 2276690 - RNA, 12 nt, Human
ccgggagagggg

SEQ ID NO: 2276691 - RNA, 15 nt, Human
ccgggagcugcugcc

SEQ ID NO: 2276692 - RNA, 12 nt, Human
ccgggacuccag

SEQ ID NO: 2276693 - RNA, 23 nt, Human
ccgggagccugaucaccugcccu

SEQ ID NO: 2276694 - RNA, 16 nt, Human
ccgggagccugaucac

SEQ ID NO: 2276695 - RNA, 23 nt, Human
ccguggcaucaccuuaggcaggg

SEQ ID NO: 2276696 - RNA, 15 nt, Human
ccguggcacugcaua

SEQ ID NO: 2276697 - RNA, 13 nt, Human
ccguggccccagc

SEQ ID NO: 2276698 - RNA, 14 nt, Human
ccguggccccagcc

SEQ ID NO: 2276699 - RNA, 15 nt, Human
ccguggccccagccu

SEQ ID NO: 2276700 - RNA, 19 nt, Human
ccguggauugcacguggcc

SEQ ID NO: 2276701 - RNA, 20 nt, Human
ccguggauugcacguggccu

SEQ ID NO: 2276702 - RNA, 22 nt, Human
ccguggauugcacguggccucu

SEQ ID NO: 2276703 - RNA, 23 nt, Human
ccguggauugcacguggccucuu

SEQ ID NO: 2276704 - RNA, 23 nt, Human
ccguggagaugggaugcuugccu

SEQ ID NO: 2276705 - RNA, 16 nt, Human
ccguggaggaggaagg

SEQ ID NO: 2276706 - RNA, 20 nt, Human
ccguggaggaggaaggcaag

SEQ ID NO: 2276707 - RNA, 22 nt, Human
ccguggaggaggaaggcaagag

SEQ ID NO: 2276708 - RNA, 14 nt, Human
ccguggaccuuccu

SEQ ID NO: 2276709 - RNA, 15 nt, Human
ccguggaccuuccug

SEQ ID NO: 2276710 - RNA, 16 nt, Human
ccguggaccuuccugc

SEQ ID NO: 2276711 - RNA, 17 nt, Human
ccguggaccuuccugcc

SEQ ID NO: 2276712 - RNA, 23 nt, Human
ccguggaggaggaaggcaagagg

SEQ ID NO: 2276713 - RNA, 17 nt, Human
ccggucugcaagucaga

SEQ ID NO: 2276714 - RNA, 19 nt, Human
ccggucugcaagucagagg

SEQ ID NO: 2276715 - RNA, 20 nt, Human
ccggucugcaagucagagga

SEQ ID NO: 2276716 - RNA, 21 nt, Human
ccggucugcaagucagaggau

SEQ ID NO: 2276717 - RNA, 22 nt, Human
ccggucccuugagaccucagcc

SEQ ID NO: 2276718 - RNA, 20 nt, Human
ccggucccuugagaccucag

SEQ ID NO: 2276719 - RNA, 23 nt, Human
ccggucccuugagaccucagcca

SEQ ID NO: 2276720 - RNA, 16 nt, Human
ccggucugcaagucag

SEQ ID NO: 2276721 - RNA, 17 nt, Human
ccggugugccugcagcc

SEQ ID NO: 2276722 - RNA, 16 nt, Human
ccggugugccugcagc

SEQ ID NO: 2276723 - RNA, 15 nt, Human
ccggugugccugcag

SEQ ID NO: 2276724 - RNA, 11 nt, Human
ccgguguccuu

SEQ ID NO: 2276725 - RNA, 11 nt, Human
ccucucccagg

SEQ ID NO: 2276726 - RNA, 12 nt, Human
ccucucccagga

SEQ ID NO: 2276727 - RNA, 14 nt, Human
ccucucccaggacc

SEQ ID NO: 2276728 - RNA, 13 nt, Human
ccucucccaggac

SEQ ID NO: 2276729 - RNA, 22 nt, Human
ccucucccauugucccucugcc

SEQ ID NO: 2276730 - RNA, 15 nt, Human
ccucuccccagcaag

SEQ ID NO: 2276731 - RNA, 16 nt, Human
ccucuccauaacccca

SEQ ID NO: 2276732 - RNA, 18 nt, Human
ccucuccauaaccccacc

SEQ ID NO: 2276733 - RNA, 19 nt, Human
ccucuccauaaccccaccc

SEQ ID NO: 2276734 - RNA, 22 nt, Human
ccucuccauaaccccacccuug

SEQ ID NO: 2276735 - RNA, 14 nt, Human
ccucuccaucuuca

SEQ ID NO: 2276736 - RNA, 16 nt, Human
ccucuccaucuucagc

SEQ ID NO: 2276737 - RNA, 19 nt, Human
ccucuccaucuucagcuuc

SEQ ID NO: 2276738 - RNA, 17 nt, Human
ccucuacuaaaaagaag

SEQ ID NO: 2276739 - RNA, 24 nt, Human
ccucuacagagcuucccugacuca

SEQ ID NO: 2276740 - RNA, 21 nt, Human
ccucuacagagcuucccugac

SEQ ID NO: 2276741 - RNA, 20 nt, Human
ccucuacagagcuucccuga

SEQ ID NO: 2276742 - RNA, 20 nt, Human
ccucuacuuaaugagauagu

SEQ ID NO: 2276743 - RNA, 14 nt, Human
ccucuacugggagc

SEQ ID NO: 2276744 - RNA, 14 nt, Human
ccucuccagcuaua

SEQ ID NO: 2276745 - RNA, 11 nt, Human
ccucuccaggc

SEQ ID NO: 2276746 - RNA, 12 nt, Human
ccucuccaggca

SEQ ID NO: 2276747 - RNA, 13 nt, Human
ccucuccaggcac

SEQ ID NO: 2276748 - RNA, 14 nt, Human
ccucuccaggcacc

SEQ ID NO: 2276749 - RNA, 17 nt, Human
ccucuccaggcacccuu

SEQ ID NO: 2276750 - RNA, 21 nt, Human
ccucucccugacccuguauau

SEQ ID NO: 2276751 - RNA, 12 nt, Human
ccucucccugac

SEQ ID NO: 2276752 - RNA, 15 nt, Human
ccucucccugacccu

SEQ ID NO: 2276753 - RNA, 15 nt, Human
ccucucccuggcccu

SEQ ID NO: 2276754 - RNA, 13 nt, Human
ccucucccuggcc

SEQ ID NO: 2276755 - RNA, 13 nt, Human
ccucucccuugga

SEQ ID NO: 2276756 - RNA, 22 nt, Human
ccucucccuuggauuguccccg

SEQ ID NO: 2276757 - RNA, 10 nt, Human
ccucucccug

SEQ ID NO: 2276758 - RNA, 23 nt, Human
ccucucccgucagggcccaaguc

SEQ ID NO: 2276759 - RNA, 11 nt, Human
ccucucccuca

SEQ ID NO: 2276760 - RNA, 17 nt, Human
ccucucccucaacaagg

SEQ ID NO: 2276761 - RNA, 22 nt, Human
ccucucccucaacaagggagag

SEQ ID NO: 2276762 - RNA, 14 nt, Human
ccucuccccaagac

SEQ ID NO: 2276763 - RNA, 17 nt, Human
ccucucccgucagggcc

SEQ ID NO: 2276764 - RNA, 19 nt, Human
ccucucccgucagggccca

SEQ ID NO: 2276765 - RNA, 22 nt, Human
ccucucccgucagggcccaagu

SEQ ID NO: 2276766 - RNA, 17 nt, Human
ccucuccccagcccaga

SEQ ID NO: 2276767 - RNA, 22 nt, Human
ccucucccgccagacuguuaga

SEQ ID NO: 2276768 - RNA, 22 nt, Human
ccucuccccaagacuugguguc

SEQ ID NO: 2276769 - RNA, 12 nt, Human
ccucuccccagc

SEQ ID NO: 2276770 - RNA, 16 nt, Human
ccucuccccagcccag

SEQ ID NO: 2276771 - RNA, 14 nt, Human
ccucuccccagccc

SEQ ID NO: 2276772 - RNA, 20 nt, Human
ccucuccccagcaagugaga

SEQ ID NO: 2276773 - RNA, 21 nt, Human
ccuccuccagccgccaugcuc

SEQ ID NO: 2276774 - RNA, 16 nt, Human
ccuccucccacccggc

SEQ ID NO: 2276775 - RNA, 19 nt, Human
ccuccucuaagguugggca

SEQ ID NO: 2276776 - RNA, 21 nt, Human
ccuccuccuucccaaaggacu

SEQ ID NO: 2276777 - RNA, 19 nt, Human
ccuccucccacccggcugc

SEQ ID NO: 2276778 - RNA, 23 nt, Human
ccuccucccacccggcugcagag

SEQ ID NO: 2276779 - RNA, 13 nt, Human
ccuccuccuuccc

SEQ ID NO: 2276780 - RNA, 14 nt, Human
ccuccuugccuccu

SEQ ID NO: 2276781 - RNA, 23 nt, Human
ccuccuucucugucucaugugug

SEQ ID NO: 2276782 - RNA, 16 nt, Human
ccuccucucugcccua

SEQ ID NO: 2276783 - RNA, 19 nt, Human
ccuccucucccaucccccu

SEQ ID NO: 2276784 - RNA, 15 nt, Human
ccuccuucucugucu

SEQ ID NO: 2276785 - RNA, 17 nt, Human
ccuccuucucugucuca

SEQ ID NO: 2276786 - RNA, 22 nt, Human
ccuccuucucugucucaugugu

SEQ ID NO: 2276787 - RNA, 13 nt, Human
ccuccucucccau

SEQ ID NO: 2276788 - RNA, 14 nt, Human
ccuccucucccauc

SEQ ID NO: 2276789 - RNA, 15 nt, Human
ccuccucucccaucc

SEQ ID NO: 2276790 - RNA, 16 nt, Human
ccuccucucccauccc

SEQ ID NO: 2276791 - RNA, 15 nt, Human
ccuccucucugcccu

SEQ ID NO: 2276792 - RNA, 13 nt, Human
ccuccucucugcc

SEQ ID NO: 2276793 - RNA, 18 nt, Human
ccucuacagagcuucccu

SEQ ID NO: 2276794 - RNA, 19 nt, Human
ccucuaagguugggcaggg

SEQ ID NO: 2276795 - RNA, 19 nt, Human
ccucuaagccacucuucca

SEQ ID NO: 2276796 - RNA, 17 nt, Human
ccucguggccagcccgg

SEQ ID NO: 2276797 - RNA, 14 nt, Human
ccucuaagccacuc

SEQ ID NO: 2276798 - RNA, 14 nt, Human
ccucgugccagucg

SEQ ID NO: 2276799 - RNA, 14 nt, Human
ccucguggccagcc

SEQ ID NO: 2276800 - RNA, 15 nt, Human
ccucguggccagccc

SEQ ID NO: 2276801 - RNA, 16 nt, Human
ccucguggccagcccg

SEQ ID NO: 2276802 - RNA, 13 nt, Human
ccucguggccagc

SEQ ID NO: 2276803 - RNA, 12 nt, Human
ccucgugccagu

SEQ ID NO: 2276804 - RNA, 13 nt, Human
ccucgugccaguc

SEQ ID NO: 2276805 - RNA, 20 nt, Human
ccuccuugccuccuguguaa

SEQ ID NO: 2276806 - RNA, 15 nt, Human
ccuccuugcucugca

SEQ ID NO: 2276807 - RNA, 18 nt, Human
ccuccuugcucugcaggc

SEQ ID NO: 2276808 - RNA, 22 nt, Human
ccuccuugcucugcaggcaccu

SEQ ID NO: 2276809 - RNA, 19 nt, Human
ccuccuugccuccugugua

SEQ ID NO: 2276810 - RNA, 18 nt, Human
ccuccuugccuccugugu

SEQ ID NO: 2276811 - RNA, 17 nt, Human
ccuccuugccuccugug

SEQ ID NO: 2276812 - RNA, 15 nt, Human
ccuccuuggugccug

SEQ ID NO: 2276813 - RNA, 12 nt, Human
ccuccuugggca

SEQ ID NO: 2276814 - RNA, 20 nt, Human
ccuccuugggcacuuuuuaa

SEQ ID NO: 2276815 - RNA, 17 nt, Human
ccuccuuggugccuggc

SEQ ID NO: 2276816 - RNA, 15 nt, Human
ccuccuuguccaccc

SEQ ID NO: 2276817 - RNA, 16 nt, Human
ccuccuuguccaccca

SEQ ID NO: 2276818 - RNA, 19 nt, Human
ccucguccucccccugcca

SEQ ID NO: 2276819 - RNA, 17 nt, Human
ccucguccucccccugc

SEQ ID NO: 2276820 - RNA, 16 nt, Human
ccucguccucccccug

SEQ ID NO: 2276821 - RNA, 15 nt, Human
ccucguccucccccu

SEQ ID NO: 2276822 - RNA, 21 nt, Human
ccucguccucccccugccagu

SEQ ID NO: 2276823 - RNA, 20 nt, Human
ccucguccucccccugccag

SEQ ID NO: 2276824 - RNA, 20 nt, Human
ccucugaaugaaccuucugg

SEQ ID NO: 2276825 - RNA, 12 nt, Human
ccucuccugccu

SEQ ID NO: 2276826 - RNA, 14 nt, Human
ccucugacacacag

SEQ ID NO: 2276827 - RNA, 19 nt, Human
ccucugacacacagcucug

SEQ ID NO: 2276828 - RNA, 20 nt, Human
ccucugacacacagcucugu

SEQ ID NO: 2276829 - RNA, 18 nt, Human
ccucuccucauguucugc

SEQ ID NO: 2276830 - RNA, 13 nt, Human
ccucucccuguug

SEQ ID NO: 2276831 - RNA, 13 nt, Human
ccucuccgagcug

SEQ ID NO: 2276832 - RNA, 13 nt, Human
ccucugacacaca

SEQ ID NO: 2276833 - RNA, 11 nt, Human
ccucuccugcc

SEQ ID NO: 2276834 - RNA, 19 nt, Human
ccucugaaacccuggacca

SEQ ID NO: 2276835 - RNA, 16 nt, Human
ccucugaaacccugga

SEQ ID NO: 2276836 - RNA, 12 nt, Human
ccucugaccuau

SEQ ID NO: 2276837 - RNA, 20 nt, Human
ccucugaccccuccucacug

SEQ ID NO: 2276838 - RNA, 22 nt, Human
ccucugaccccuccucacuggc

SEQ ID NO: 2276839 - RNA, 14 nt, Human
ccucugaccugcac

SEQ ID NO: 2276840 - RNA, 16 nt, Human
ccucugaccugcacug

SEQ ID NO: 2276841 - RNA, 13 nt, Human
ccucugaccccuc

SEQ ID NO: 2276842 - RNA, 14 nt, Human
ccucugaccccucc

SEQ ID NO: 2276843 - RNA, 15 nt, Human
ccucugaccccuccu

SEQ ID NO: 2276844 - RNA, 16 nt, Human
ccucugaccccuccuc

SEQ ID NO: 2276845 - RNA, 17 nt, Human
ccucugaccccuccuca

SEQ ID NO: 2276846 - RNA, 18 nt, Human
ccucugaccccuccucac

SEQ ID NO: 2276847 - RNA, 19 nt, Human
ccucugaccccuccucacu

SEQ ID NO: 2276848 - RNA, 21 nt, Human
ccucugacacacagcucuguc

SEQ ID NO: 2276849 - RNA, 17 nt, Human
ccucugaccugcaggcc

SEQ ID NO: 2276850 - RNA, 16 nt, Human
ccucugaccugcaggc

SEQ ID NO: 2276851 - RNA, 15 nt, Human
ccucugaccugcagg

SEQ ID NO: 2276852 - RNA, 17 nt, Human
ccucugaccugcacugg

SEQ ID NO: 2276853 - RNA, 20 nt, Human
ccucugaccugcaggccaag

SEQ ID NO: 2276854 - RNA, 19 nt, Human
ccucugaccugcaggccaa

SEQ ID NO: 2276855 - RNA, 16 nt, Human
ccucugacucagggcu

SEQ ID NO: 2276856 - RNA, 12 nt, Human
ccucugacucag

SEQ ID NO: 2276857 - RNA, 22 nt, Human
ccucugacuuaagcugccucaa

SEQ ID NO: 2276858 - RNA, 19 nt, Human
ccucugagaauuccaagga

SEQ ID NO: 2276859 - RNA, 22 nt, Human
ccucugacucagggcuccuggg

SEQ ID NO: 2276860 - RNA, 21 nt, Human
ccucugacucagggcuccugg

SEQ ID NO: 2276861 - RNA, 19 nt, Human
ccucugacucagggcuccu

SEQ ID NO: 2276862 - RNA, 17 nt, Human
ccucugacucagggcuc

SEQ ID NO: 2276863 - RNA, 14 nt, Human
ccucugauaccuca

SEQ ID NO: 2276864 - RNA, 19 nt, Human
ccucugauacccagagcau

SEQ ID NO: 2276865 - RNA, 20 nt, Human
ccucugauacccagagcauu

SEQ ID NO: 2276866 - RNA, 22 nt, Human
ccucugagggaaagcccagaaa

SEQ ID NO: 2276867 - RNA, 19 nt, Human
ccucugagucaccaucuua

SEQ ID NO: 2276868 - RNA, 15 nt, Human
ccucugauacccaga

SEQ ID NO: 2276869 - RNA, 18 nt, Human
ccucugauacccagagca

SEQ ID NO: 2276870 - RNA, 15 nt, Human
ccucugauaccucaa

SEQ ID NO: 2276871 - RNA, 16 nt, Human
ccucugaucuccaugg

SEQ ID NO: 2276872 - RNA, 15 nt, Human
ccucugcacuccccu

SEQ ID NO: 2276873 - RNA, 16 nt, Human
ccucugcacuccccug

SEQ ID NO: 2276874 - RNA, 17 nt, Human
ccucugcacuccccugc

SEQ ID NO: 2276875 - RNA, 19 nt, Human
ccucugagccccugggacu

SEQ ID NO: 2276876 - RNA, 14 nt, Human
ccucugagcuuugc

SEQ ID NO: 2276877 - RNA, 15 nt, Human
ccucugagcuuugca

SEQ ID NO: 2276878 - RNA, 17 nt, Human
ccucugagcuuugcaug

SEQ ID NO: 2276879 - RNA, 12 nt, Human
ccucugagccuu

SEQ ID NO: 2276880 - RNA, 11 nt, Human
ccucugagccu

SEQ ID NO: 2276881 - RNA, 13 nt, Human
ccucugaggcuga

SEQ ID NO: 2276882 - RNA, 18 nt, Human
ccucugaggcuggauccu

SEQ ID NO: 2276883 - RNA, 17 nt, Human
ccucugaggcuguagga

SEQ ID NO: 2276884 - RNA, 20 nt, Human
ccucugagggaaagcccaga

SEQ ID NO: 2276885 - RNA, 21 nt, Human
ccucugagggaaagcccagaa

SEQ ID NO: 2276886 - RNA, 11 nt, Human
ccucugaggcu

SEQ ID NO: 2276887 - RNA, 16 nt, Human
ccucugccaccucccc

SEQ ID NO: 2276888 - RNA, 15 nt, Human
ccucugccaccuccc

SEQ ID NO: 2276889 - RNA, 14 nt, Human
ccucugccaccucc

SEQ ID NO: 2276890 - RNA, 13 nt, Human
ccucugccaccuc

SEQ ID NO: 2276891 - RNA, 12 nt, Human
ccucugccaccu

SEQ ID NO: 2276892 - RNA, 19 nt, Human
ccucugcagcaauaaagca

SEQ ID NO: 2276893 - RNA, 13 nt, Human
ccucugcccacuc

SEQ ID NO: 2276894 - RNA, 16 nt, Human
ccucugcccacucccu

SEQ ID NO: 2276895 - RNA, 18 nt, Human
ccucugcagcaauaaagc

SEQ ID NO: 2276896 - RNA, 14 nt, Human
ccucugcagcaaua

SEQ ID NO: 2276897 - RNA, 23 nt, Human
ccucugcacuccccugcugggug

SEQ ID NO: 2276898 - RNA, 18 nt, Human
ccucugcacuccccugcu

SEQ ID NO: 2276899 - RNA, 17 nt, Human
ccucuagaaauuuuuca

SEQ ID NO: 2276900 - RNA, 23 nt, Human
ccucagugucauuuaugaaaaga

SEQ ID NO: 2276901 - RNA, 23 nt, Human
ccucaguuuaauccuucuaguuu

SEQ ID NO: 2276902 - RNA, 15 nt, Human
ccuccacuccuuccu

SEQ ID NO: 2276903 - RNA, 16 nt, Human
ccuccacuccuuccug

SEQ ID NO: 2276904 - RNA, 15 nt, Human
ccucaguuucccuau

SEQ ID NO: 2276905 - RNA, 19 nt, Human
ccucaguuuuaucauuuuc

SEQ ID NO: 2276906 - RNA, 14 nt, Human
ccuccacucucccc

SEQ ID NO: 2276907 - RNA, 17 nt, Human
ccuccacucucccccac

SEQ ID NO: 2276908 - RNA, 22 nt, Human
ccucaguucccuuggccucaga

SEQ ID NO: 2276909 - RNA, 21 nt, Human
ccucaguucccuuggccucag

SEQ ID NO: 2276910 - RNA, 20 nt, Human
ccucaguucccuuggccuca

SEQ ID NO: 2276911 - RNA, 19 nt, Human
ccucaguucccuuggccuc

SEQ ID NO: 2276912 - RNA, 18 nt, Human
ccucaguucccuuggccu

SEQ ID NO: 2276913 - RNA, 17 nt, Human
ccucaguucccuuggcc

SEQ ID NO: 2276914 - RNA, 16 nt, Human
ccucaguucccuuggc

SEQ ID NO: 2276915 - RNA, 15 nt, Human
ccucaguucccuugg

SEQ ID NO: 2276916 - RNA, 12 nt, Human
ccucagugucau

SEQ ID NO: 2276917 - RNA, 11 nt, Human
ccucaguguca

SEQ ID NO: 2276918 - RNA, 23 nt, Human
ccucaguggacuuuccacccccu

SEQ ID NO: 2276919 - RNA, 13 nt, Human
ccucaguguauuu

SEQ ID NO: 2276920 - RNA, 21 nt, Human
ccucaguggacuuuccacccc

SEQ ID NO: 2276921 - RNA, 23 nt, Human
ccucagggauggccguuggccac

SEQ ID NO: 2276922 - RNA, 20 nt, Human
ccucaggugagaagcagagg

SEQ ID NO: 2276923 - RNA, 18 nt, Human
ccucaggugagaagcaga

SEQ ID NO: 2276924 - RNA, 17 nt, Human
ccucaggugagaagcag

SEQ ID NO: 2276925 - RNA, 13 nt, Human
ccuccaggcaaaa

SEQ ID NO: 2276926 - RNA, 23 nt, Human
ccuccagggcuggacugaggccu

SEQ ID NO: 2276927 - RNA, 15 nt, Human
ccuccaggaaccaca

SEQ ID NO: 2276928 - RNA, 22 nt, Human
ccuccaggaaugaucucuucuu

SEQ ID NO: 2276929 - RNA, 21 nt, Human
ccuccagcuuguggagcccca

SEQ ID NO: 2276930 - RNA, 22 nt, Human
ccuccagcuuguggagccccac

SEQ ID NO: 2276931 - RNA, 12 nt, Human
ccuccagcuucu

SEQ ID NO: 2276932 - RNA, 21 nt, Human
ccuccagcuucugguacucuc

SEQ ID NO: 2276933 - RNA, 19 nt, Human
ccuccagcuuguggagccc

SEQ ID NO: 2276934 - RNA, 20 nt, Human
ccuccagcuucaggcaggcc

SEQ ID NO: 2276935 - RNA, 19 nt, Human
ccuccagcucuuuccuccu

SEQ ID NO: 2276936 - RNA, 17 nt, Human
ccuccagcucuuuccuc

SEQ ID NO: 2276937 - RNA, 22 nt, Human
ccuccagcucuuuccuccuucc

SEQ ID NO: 2276938 - RNA, 16 nt, Human
ccuccagcucuuuccu

SEQ ID NO: 2276939 - RNA, 15 nt, Human
ccuccagcucuuucc

SEQ ID NO: 2276940 - RNA, 12 nt, Human
ccuccacuguca

SEQ ID NO: 2276941 - RNA, 13 nt, Human
ccuccacugucac

SEQ ID NO: 2276942 - RNA, 13 nt, Human
ccuccacucuccu

SEQ ID NO: 2276943 - RNA, 19 nt, Human
ccuccacucucccccaccc

SEQ ID NO: 2276944 - RNA, 22 nt, Human
ccuccacucucccccacccccu

SEQ ID NO: 2276945 - RNA, 12 nt, Human
ccuccagaagcc

SEQ ID NO: 2276946 - RNA, 22 nt, Human
ccuccagaacucacuggggccu

SEQ ID NO: 2276947 - RNA, 21 nt, Human
ccuccagaacucacuggggcc

SEQ ID NO: 2276948 - RNA, 13 nt, Human
ccuccagaagccu

SEQ ID NO: 2276949 - RNA, 17 nt, Human
ccuccagaagccucugg

SEQ ID NO: 2276950 - RNA, 14 nt, Human
ccuccaucccgaca

SEQ ID NO: 2276951 - RNA, 19 nt, Human
ccuccauauuuucuuuaaa

SEQ ID NO: 2276952 - RNA, 15 nt, Human
ccuccaucccgacau

SEQ ID NO: 2276953 - RNA, 19 nt, Human
ccuccagguuuuucaauua

SEQ ID NO: 2276954 - RNA, 20 nt, Human
ccuccagguuuuucaauuaa

SEQ ID NO: 2276955 - RNA, 22 nt, Human
ccuccagguuuuucaauuaaac

SEQ ID NO: 2276956 - RNA, 23 nt, Human
ccuccaguccaaggaaaccacag

SEQ ID NO: 2276957 - RNA, 21 nt, Human
ccuccagguuuuucaauuaaa

SEQ ID NO: 2276958 - RNA, 17 nt, Human
ccuccaggugcacaagc

SEQ ID NO: 2276959 - RNA, 17 nt, Human
ccuccagggugugugcu

SEQ ID NO: 2276960 - RNA, 17 nt, Human
ccuccagguuuuucaau

SEQ ID NO: 2276961 - RNA, 18 nt, Human
ccuccagguuuuucaauu

SEQ ID NO: 2276962 - RNA, 11 nt, Human
ccuccaggugc

SEQ ID NO: 2276963 - RNA, 12 nt, Human
ccuccaggugca

SEQ ID NO: 2276964 - RNA, 12 nt, Human
ccuccauguggg

SEQ ID NO: 2276965 - RNA, 15 nt, Human
ccuccaugugggcua

SEQ ID NO: 2276966 - RNA, 17 nt, Human
ccucccaaagugcuggg

SEQ ID NO: 2276967 - RNA, 14 nt, Human
ccucccaacucacc

SEQ ID NO: 2276968 - RNA, 11 nt, Human
ccuccauggga

SEQ ID NO: 2276969 - RNA, 19 nt, Human
ccuccaugcugccuccaga

SEQ ID NO: 2276970 - RNA, 16 nt, Human
ccuccaugcugccucc

SEQ ID NO: 2276971 - RNA, 13 nt, Human
ccuccauccugag

SEQ ID NO: 2276972 - RNA, 12 nt, Human
ccuccauccuga

SEQ ID NO: 2276973 - RNA, 23 nt, Human
ccucccaaagugcugggauuaca

SEQ ID NO: 2276974 - RNA, 18 nt, Human
ccuccccccacugcaggc

SEQ ID NO: 2276975 - RNA, 17 nt, Human
ccuccccccacugcagg

SEQ ID NO: 2276976 - RNA, 15 nt, Human
ccucccaacucaccc

SEQ ID NO: 2276977 - RNA, 20 nt, Human
ccuccccccacugcaggccc

SEQ ID NO: 2276978 - RNA, 16 nt, Human
ccucccccgccacucc

SEQ ID NO: 2276979 - RNA, 17 nt, Human
ccucccccucccccuuc

SEQ ID NO: 2276980 - RNA, 17 nt, Human
ccucccccgccacuccu

SEQ ID NO: 2276981 - RNA, 19 nt, Human
ccucccccccaugcacugu

SEQ ID NO: 2276982 - RNA, 17 nt, Human
ccucccccccaugcacu

SEQ ID NO: 2276983 - RNA, 16 nt, Human
ccucccccccaugcac

SEQ ID NO: 2276984 - RNA, 15 nt, Human
ccucccccccaugca

SEQ ID NO: 2276985 - RNA, 13 nt, Human
ccucccccugcca

SEQ ID NO: 2276986 - RNA, 14 nt, Human
ccucccccugccag

SEQ ID NO: 2276987 - RNA, 17 nt, Human
ccucccccugccagugc

SEQ ID NO: 2276988 - RNA, 15 nt, Human
ccucccccugccagu

SEQ ID NO: 2276989 - RNA, 16 nt, Human
ccucccccugccagga

SEQ ID NO: 2276990 - RNA, 19 nt, Human
ccucccccugccagugccu

SEQ ID NO: 2276991 - RNA, 18 nt, Human
ccucccccugccagugcc

SEQ ID NO: 2276992 - RNA, 20 nt, Human
ccucccccugccagugccuu

SEQ ID NO: 2276993 - RNA, 15 nt, Human
ccucccccuucuccc

SEQ ID NO: 2276994 - RNA, 12 nt, Human
ccucccccuucu

SEQ ID NO: 2276995 - RNA, 22 nt, Human
ccuccccuauccacccagccca

SEQ ID NO: 2276996 - RNA, 18 nt, Human
ccuccccuauccacccag

SEQ ID NO: 2276997 - RNA, 17 nt, Human
ccuccccuauccaccca

SEQ ID NO: 2276998 - RNA, 15 nt, Human
ccuccccuauccacc

SEQ ID NO: 2276999 - RNA, 13 nt, Human
ccuccccuaucca

SEQ ID NO: 2277000 - RNA, 21 nt, Human
ccuccccggcccuaccagcgc

SEQ ID NO: 2277001 - RNA, 23 nt, Human
ccuccccggcucgagcaguccug

SEQ ID NO: 2277002 - RNA, 16 nt, Human
ccuccccgcccuuuuu

SEQ ID NO: 2277003 - RNA, 22 nt, Human
ccucccccuucucccaccccug

SEQ ID NO: 2277004 - RNA, 14 nt, Human
ccuccccggcccua

SEQ ID NO: 2277005 - RNA, 21 nt, Human
ccuccccgcaccccccaagcu

SEQ ID NO: 2277006 - RNA, 15 nt, Human
ccuccccgcaccccc

SEQ ID NO: 2277007 - RNA, 15 nt, Human
ccuccccugcccugg

SEQ ID NO: 2277008 - RNA, 14 nt, Human
ccuccccugcccua

SEQ ID NO: 2277009 - RNA, 13 nt, Human
ccuccccugcccu

SEQ ID NO: 2277010 - RNA, 14 nt, Human
ccuccccugccauu

SEQ ID NO: 2277011 - RNA, 18 nt, Human
ccucccgaauagcuggga

SEQ ID NO: 2277012 - RNA, 18 nt, Human
ccuccccugccagggcag

SEQ ID NO: 2277013 - RNA, 16 nt, Human
ccuccccugccagggc

SEQ ID NO: 2277014 - RNA, 13 nt, Human
ccuccccugccag

SEQ ID NO: 2277015 - RNA, 17 nt, Human
ccuccccugccaccagg

SEQ ID NO: 2277016 - RNA, 12 nt, Human
ccuccccugcca

SEQ ID NO: 2277017 - RNA, 14 nt, Human
ccuccccugaggcu

SEQ ID NO: 2277018 - RNA, 22 nt, Human
ccuccccugaggcucagggaaa

SEQ ID NO: 2277019 - RNA, 13 nt, Human
ccuccccugccac

SEQ ID NO: 2277020 - RNA, 14 nt, Human
ccuccccugccacc

SEQ ID NO: 2277021 - RNA, 13 nt, Human
ccuccccucacag

SEQ ID NO: 2277022 - RNA, 15 nt, Human
ccuccccucacagcc

SEQ ID NO: 2277023 - RNA, 16 nt, Human
ccuccccucacagccu

SEQ ID NO: 2277024 - RNA, 21 nt, Human
ccuccccucacagccucugac

SEQ ID NO: 2277025 - RNA, 18 nt, Human
ccuccccucacagccucu

SEQ ID NO: 2277026 - RNA, 19 nt, Human
ccuccccucacagccucug

SEQ ID NO: 2277027 - RNA, 15 nt, Human
ccuccccuccccugc

SEQ ID NO: 2277028 - RNA, 16 nt, Human
ccuccccuccccugcu

SEQ ID NO: 2277029 - RNA, 19 nt, Human
ccuccccuccccugcugca

SEQ ID NO: 2277030 - RNA, 14 nt, Human
ccuccccuccccug

SEQ ID NO: 2277031 - RNA, 15 nt, Human
ccuccccuccuccug

SEQ ID NO: 2277032 - RNA, 23 nt, Human
ccuccccucucuugcacccgccu

SEQ ID NO: 2277033 - RNA, 13 nt, Human
ccuccccucccgu

SEQ ID NO: 2277034 - RNA, 15 nt, Human
ccuccccucccgucu

SEQ ID NO: 2277035 - RNA, 12 nt, Human
ccuccuccagcc

SEQ ID NO: 2277036 - RNA, 16 nt, Human
ccuccuccacucuccc

SEQ ID NO: 2277037 - RNA, 20 nt, Human
ccuccucacuggccaucccu

SEQ ID NO: 2277038 - RNA, 14 nt, Human
ccuccucacuggcc

SEQ ID NO: 2277039 - RNA, 15 nt, Human
ccuccucacuggcca

SEQ ID NO: 2277040 - RNA, 17 nt, Human
ccuccucacuggccauc

SEQ ID NO: 2277041 - RNA, 19 nt, Human
ccuccucacuggccauccc

SEQ ID NO: 2277042 - RNA, 14 nt, Human
ccuccucacucccu

SEQ ID NO: 2277043 - RNA, 22 nt, Human
ccuccucaccucaugcccaccc

SEQ ID NO: 2277044 - RNA, 22 nt, Human
ccuccucaccucuggacuggcu

SEQ ID NO: 2277045 - RNA, 21 nt, Human
ccuccucaccucuggacuggc

SEQ ID NO: 2277046 - RNA, 16 nt, Human
ccuccucaccucugga

SEQ ID NO: 2277047 - RNA, 11 nt, Human
ccuccucagau

SEQ ID NO: 2277048 - RNA, 15 nt, Human
ccuccucaccucugg

SEQ ID NO: 2277049 - RNA, 14 nt, Human
ccuccucaccucug

SEQ ID NO: 2277050 - RNA, 13 nt, Human
ccuccucaccucu

SEQ ID NO: 2277051 - RNA, 17 nt, Human
ccuccucaccucaugcc

SEQ ID NO: 2277052 - RNA, 19 nt, Human
ccuccucaccucaugccca

SEQ ID NO: 2277053 - RNA, 19 nt, Human
ccucccucugaccugcagg

SEQ ID NO: 2277054 - RNA, 14 nt, Human
ccucccucugaggc

SEQ ID NO: 2277055 - RNA, 19 nt, Human
ccucccucugaggcuguag

SEQ ID NO: 2277056 - RNA, 21 nt, Human
ccucccucugaggcuguagga

SEQ ID NO: 2277057 - RNA, 16 nt, Human
ccuccucaccucaugc

SEQ ID NO: 2277058 - RNA, 18 nt, Human
ccucccucugaccugcag

SEQ ID NO: 2277059 - RNA, 14 nt, Human
ccucccucugaccu

SEQ ID NO: 2277060 - RNA, 22 nt, Human
ccucccucucucuucugcucca

SEQ ID NO: 2277061 - RNA, 20 nt, Human
ccucccucucucuucugcuc

SEQ ID NO: 2277062 - RNA, 13 nt, Human
ccucccucuuucc

SEQ ID NO: 2277063 - RNA, 21 nt, Human
ccucccuccugccgacuccug

SEQ ID NO: 2277064 - RNA, 15 nt, Human
ccucccuccugccga

SEQ ID NO: 2277065 - RNA, 12 nt, Human
ccucccuccugc

SEQ ID NO: 2277066 - RNA, 18 nt, Human
ccucccucucucuucugc

SEQ ID NO: 2277067 - RNA, 13 nt, Human
ccucccucucucu

SEQ ID NO: 2277068 - RNA, 13 nt, Human
ccucccucuaauu

SEQ ID NO: 2277069 - RNA, 17 nt, Human
ccucccgaguagcuggg

SEQ ID NO: 2277070 - RNA, 18 nt, Human
ccucccgaguagcuggga

SEQ ID NO: 2277071 - RNA, 16 nt, Human
ccuccccugcccuggu

SEQ ID NO: 2277072 - RNA, 12 nt, Human
ccuccccugcug

SEQ ID NO: 2277073 - RNA, 16 nt, Human
ccuccccugcugaagg

SEQ ID NO: 2277074 - RNA, 13 nt, Human
ccuccccugcugc

SEQ ID NO: 2277075 - RNA, 14 nt, Human
ccuccccugcugca

SEQ ID NO: 2277076 - RNA, 21 nt, Human
ccucccgaauagcugggacua

SEQ ID NO: 2277077 - RNA, 19 nt, Human
ccucccgaauagcugggac

SEQ ID NO: 2277078 - RNA, 20 nt, Human
ccucccgaauagcugggacu

SEQ ID NO: 2277079 - RNA, 16 nt, Human
cccaugaaucaaagac

SEQ ID NO: 2277080 - RNA, 14 nt, Human
cccaugccugucca

SEQ ID NO: 2277081 - RNA, 19 nt, Human
cccaugccuguccagccug

SEQ ID NO: 2277082 - RNA, 16 nt, Human
cccaugccuguccagc

SEQ ID NO: 2277083 - RNA, 20 nt, Human
cccaugagccucagcauccu

SEQ ID NO: 2277084 - RNA, 15 nt, Human
cccaugagccucagc

SEQ ID NO: 2277085 - RNA, 16 nt, Human
cccaugagccucagca

SEQ ID NO: 2277086 - RNA, 20 nt, Human
cccaugccuguccagccugg

SEQ ID NO: 2277087 - RNA, 17 nt, Human
cccaugggcucugacag

SEQ ID NO: 2277088 - RNA, 19 nt, Human
cccauggggagggauucug

SEQ ID NO: 2277089 - RNA, 14 nt, Human
cccaugcugcccug

SEQ ID NO: 2277090 - RNA, 12 nt, Human
cccaugcugccc

SEQ ID NO: 2277091 - RNA, 13 nt, Human
cccaugcugcccu

SEQ ID NO: 2277092 - RNA, 21 nt, Human
cccaucuaugucccuugcugu

SEQ ID NO: 2277093 - RNA, 13 nt, Human
cccaucucacaca

SEQ ID NO: 2277094 - RNA, 18 nt, Human
cccaucucacacaugagc

SEQ ID NO: 2277095 - RNA, 20 nt, Human
cccaucucaugccccuggcu

SEQ ID NO: 2277096 - RNA, 22 nt, Human
cccaugaagacaggacagugcu

SEQ ID NO: 2277097 - RNA, 19 nt, Human
cccaugaagacaggacagu

SEQ ID NO: 2277098 - RNA, 18 nt, Human
cccaugaagacaggacag

SEQ ID NO: 2277099 - RNA, 12 nt, Human
cccaucuugcuu

SEQ ID NO: 2277100 - RNA, 20 nt, Human
cccaugaacacacugugucc

SEQ ID NO: 2277101 - RNA, 22 nt, Human
cccaugaacuuaaaaugaaagu

SEQ ID NO: 2277102 - RNA, 20 nt, Human
cccaucugugaaaggaaaga

SEQ ID NO: 2277103 - RNA, 16 nt, Human
cccaucugugaauaag

SEQ ID NO: 2277104 - RNA, 13 nt, Human
cccaucugugaau

SEQ ID NO: 2277105 - RNA, 14 nt, Human
cccaucucaugccc

SEQ ID NO: 2277106 - RNA, 16 nt, Human
cccaugucucucagaa

SEQ ID NO: 2277107 - RNA, 19 nt, Human
cccaugucgcgcucagcau

SEQ ID NO: 2277108 - RNA, 17 nt, Human
cccaugucucgacucau

SEQ ID NO: 2277109 - RNA, 16 nt, Human
cccaugucucgacuca

SEQ ID NO: 2277110 - RNA, 23 nt, Human
cccauguauuuaucucuauuuaa

SEQ ID NO: 2277111 - RNA, 18 nt, Human
cccaugucgcgcucagca

SEQ ID NO: 2277112 - RNA, 23 nt, Human
cccauguagcccccuggccucug

SEQ ID NO: 2277113 - RNA, 22 nt, Human
cccauguagcccccuggccucu

SEQ ID NO: 2277114 - RNA, 21 nt, Human
cccauguagcccccuggccuc

SEQ ID NO: 2277115 - RNA, 15 nt, Human
cccauguagcccccu

SEQ ID NO: 2277116 - RNA, 14 nt, Human
cccauguagccccc

SEQ ID NO: 2277117 - RNA, 17 nt, Human
cccauguaacagaaagg

SEQ ID NO: 2277118 - RNA, 12 nt, Human
ccccaaagcccc

SEQ ID NO: 2277119 - RNA, 22 nt, Human
ccccaaagagccuggagaagcu

SEQ ID NO: 2277120 - RNA, 16 nt, Human
cccauuaggacaauca

SEQ ID NO: 2277121 - RNA, 15 nt, Human
ccccaaagagccugg

SEQ ID NO: 2277122 - RNA, 19 nt, Human
ccccaaagagccuggagaa

SEQ ID NO: 2277123 - RNA, 16 nt, Human
cccauuagcaaaaauu

SEQ ID NO: 2277124 - RNA, 21 nt, Human
cccauuaggacaaucaguccc

SEQ ID NO: 2277125 - RNA, 18 nt, Human
cccauuagaccaagcuug

SEQ ID NO: 2277126 - RNA, 15 nt, Human
cccauguuucucugg

SEQ ID NO: 2277127 - RNA, 20 nt, Human
cccaugugugagugugugca

SEQ ID NO: 2277128 - RNA, 19 nt, Human
cccaugugugagugugugc

SEQ ID NO: 2277129 - RNA, 14 nt, Human
cccaugugugagug

SEQ ID NO: 2277130 - RNA, 21 nt, Human
cccauguguccugguucccgu

SEQ ID NO: 2277131 - RNA, 13 nt, Human
cccaugugccaag

SEQ ID NO: 2277132 - RNA, 23 nt, Human
ccccaacccugccccugccccgu

SEQ ID NO: 2277133 - RNA, 18 nt, Human
ccccaacccugccccugc

SEQ ID NO: 2277134 - RNA, 17 nt, Human
ccccaacccugccccug

SEQ ID NO: 2277135 - RNA, 15 nt, Human
ccccaacccugcccc

SEQ ID NO: 2277136 - RNA, 13 nt, Human
ccccaacccugcc

SEQ ID NO: 2277137 - RNA, 17 nt, Human
ccccaaccccugaggaa

SEQ ID NO: 2277138 - RNA, 14 nt, Human
ccccaaccccugag

SEQ ID NO: 2277139 - RNA, 16 nt, Human
ccccaaccccugagga

SEQ ID NO: 2277140 - RNA, 22 nt, Human
ccccacacuuguuccagcucuu

SEQ ID NO: 2277141 - RNA, 18 nt, Human
ccccacacuggggugccg

SEQ ID NO: 2277142 - RNA, 15 nt, Human
ccccaacuccuggaa

SEQ ID NO: 2277143 - RNA, 13 nt, Human
ccccacacugggg

SEQ ID NO: 2277144 - RNA, 14 nt, Human
ccccaacuccugga

SEQ ID NO: 2277145 - RNA, 13 nt, Human
ccccaacuccugg

SEQ ID NO: 2277146 - RNA, 14 nt, Human
ccccaaccugcuga

SEQ ID NO: 2277147 - RNA, 17 nt, Human
ccccaaauaagaaggga

SEQ ID NO: 2277148 - RNA, 18 nt, Human
ccccaaauaagaagggau

SEQ ID NO: 2277149 - RNA, 11 nt, Human
ccccaaauccg

SEQ ID NO: 2277150 - RNA, 15 nt, Human
ccccaaaucaauaca

SEQ ID NO: 2277151 - RNA, 20 nt, Human
ccccaaagagccuggagaag

SEQ ID NO: 2277152 - RNA, 19 nt, Human
ccccaaaggaaaaagcaca

SEQ ID NO: 2277153 - RNA, 16 nt, Human
ccccaaagcuuuccug

SEQ ID NO: 2277154 - RNA, 18 nt, Human
ccccaaagcuuuccugcc

SEQ ID NO: 2277155 - RNA, 19 nt, Human
ccccaaagcuuuccugccc

SEQ ID NO: 2277156 - RNA, 21 nt, Human
ccccaaagcuuuccugcccca

SEQ ID NO: 2277157 - RNA, 13 nt, Human
ccccaacccccac

SEQ ID NO: 2277158 - RNA, 23 nt, Human
ccccaacccccagcacccgggcu

SEQ ID NO: 2277159 - RNA, 13 nt, Human
ccccaaccccuga

SEQ ID NO: 2277160 - RNA, 13 nt, Human
ccccaaccccagc

SEQ ID NO: 2277161 - RNA, 14 nt, Human
ccccaaccccagcc

SEQ ID NO: 2277162 - RNA, 23 nt, Human
ccccaaauccgaaccuccucugu

SEQ ID NO: 2277163 - RNA, 19 nt, Human
ccccaaauccgaaccuccu

SEQ ID NO: 2277164 - RNA, 21 nt, Human
ccccaaauggaaaugggcaga

SEQ ID NO: 2277165 - RNA, 14 nt, Human
cccaguccuuccac

SEQ ID NO: 2277166 - RNA, 21 nt, Human
cccaguccuggccuggcuucu

SEQ ID NO: 2277167 - RNA, 22 nt, Human
cccaguccuggccuggcuucuc

SEQ ID NO: 2277168 - RNA, 16 nt, Human
cccaguccuuccaccu

SEQ ID NO: 2277169 - RNA, 17 nt, Human
cccaguccuuccaccuc

SEQ ID NO: 2277170 - RNA, 10 nt, Human
cccagucugg

SEQ ID NO: 2277171 - RNA, 18 nt, Human
cccagucuggaaugcagu

SEQ ID NO: 2277172 - RNA, 19 nt, Human
cccagucuggaaugcagug

SEQ ID NO: 2277173 - RNA, 15 nt, Human
cccagugccgagaag

SEQ ID NO: 2277174 - RNA, 22 nt, Human
cccagugcccccacugaccaga

SEQ ID NO: 2277175 - RNA, 20 nt, Human
cccagucucuggcaguucug

SEQ ID NO: 2277176 - RNA, 20 nt, Human
cccagugcccccacugacca

SEQ ID NO: 2277177 - RNA, 19 nt, Human
cccagugcccccacugacc

SEQ ID NO: 2277178 - RNA, 21 nt, Human
cccagugcccacaggaucagu

SEQ ID NO: 2277179 - RNA, 14 nt, Human
cccagugcccccac

SEQ ID NO: 2277180 - RNA, 16 nt, Human
cccagucuacccagag

SEQ ID NO: 2277181 - RNA, 15 nt, Human
cccagucucuggcag

SEQ ID NO: 2277182 - RNA, 23 nt, Human
cccaguccuggccuggcuucucc

SEQ ID NO: 2277183 - RNA, 15 nt, Human
cccagucuacccaga

SEQ ID NO: 2277184 - RNA, 17 nt, Human
cccagucuacccagaga

SEQ ID NO: 2277185 - RNA, 17 nt, Human
cccagugucuuccugug

SEQ ID NO: 2277186 - RNA, 18 nt, Human
cccagugucuuccugugg

SEQ ID NO: 2277187 - RNA, 21 nt, Human
cccagugucaaguugugcuug

SEQ ID NO: 2277188 - RNA, 22 nt, Human
cccagugucaaguugugcuugu

SEQ ID NO: 2277189 - RNA, 15 nt, Human
cccagugucuuccug

SEQ ID NO: 2277190 - RNA, 16 nt, Human
cccagugucuuccugu

SEQ ID NO: 2277191 - RNA, 22 nt, Human
cccaguucaggagucccaagga

SEQ ID NO: 2277192 - RNA, 22 nt, Human
cccaguucaacucauggagaug

SEQ ID NO: 2277193 - RNA, 19 nt, Human
cccaguucaggagucccaa

SEQ ID NO: 2277194 - RNA, 20 nt, Human
cccagugucuuccugugggg

SEQ ID NO: 2277195 - RNA, 14 nt, Human
cccaguucacccug

SEQ ID NO: 2277196 - RNA, 14 nt, Human
cccaguuagcucuc

SEQ ID NO: 2277197 - RNA, 16 nt, Human
cccaguggcugcugcc

SEQ ID NO: 2277198 - RNA, 17 nt, Human
cccaguggcugcugccc

SEQ ID NO: 2277199 - RNA, 15 nt, Human
cccaguggcugcugc

SEQ ID NO: 2277200 - RNA, 18 nt, Human
cccaguggcugcugccca

SEQ ID NO: 2277201 - RNA, 21 nt, Human
cccaguggcugcugcccaggc

SEQ ID NO: 2277202 - RNA, 18 nt, Human
cccaguggcuguucugga

SEQ ID NO: 2277203 - RNA, 12 nt, Human
cccagugggagg

SEQ ID NO: 2277204 - RNA, 15 nt, Human
cccagugggaggcgc

SEQ ID NO: 2277205 - RNA, 16 nt, Human
cccagugggaggcgcg

SEQ ID NO: 2277206 - RNA, 20 nt, Human
cccagugggaggcgcgagcc

SEQ ID NO: 2277207 - RNA, 14 nt, Human
cccagugggagggg

SEQ ID NO: 2277208 - RNA, 20 nt, Human
cccagugguuccuaauccuc

SEQ ID NO: 2277209 - RNA, 16 nt, Human
cccagugggaggggca

SEQ ID NO: 2277210 - RNA, 17 nt, Human
cccagugggaggggcag

SEQ ID NO: 2277211 - RNA, 18 nt, Human
cccagugggaggggcagg

SEQ ID NO: 2277212 - RNA, 19 nt, Human
cccagugggaggggcaggc

SEQ ID NO: 2277213 - RNA, 20 nt, Human
cccagugggaggggcaggcu

SEQ ID NO: 2277214 - RNA, 21 nt, Human
cccagugggaggggcaggcug

SEQ ID NO: 2277215 - RNA, 22 nt, Human
cccagugggaggggcaggcuga

SEQ ID NO: 2277216 - RNA, 23 nt, Human
cccagucccugggggaagcccug

SEQ ID NO: 2277217 - RNA, 13 nt, Human
cccaguccuggcc

SEQ ID NO: 2277218 - RNA, 14 nt, Human
cccaguccuggccu

SEQ ID NO: 2277219 - RNA, 15 nt, Human
cccaguccuggccug

SEQ ID NO: 2277220 - RNA, 16 nt, Human
cccaguccuggccugg

SEQ ID NO: 2277221 - RNA, 17 nt, Human
cccaguccuggccuggc

SEQ ID NO: 2277222 - RNA, 20 nt, Human
cccaguccuggccuggcuuc

SEQ ID NO: 2277223 - RNA, 16 nt, Human
cccagucccuggggga

SEQ ID NO: 2277224 - RNA, 14 nt, Human
cccagucccugggg

SEQ ID NO: 2277225 - RNA, 13 nt, Human
cccagucccuggg

SEQ ID NO: 2277226 - RNA, 12 nt, Human
cccagucccugg

SEQ ID NO: 2277227 - RNA, 20 nt, Human
cccagucccccaaccccagc

SEQ ID NO: 2277228 - RNA, 22 nt, Human
cccagucccccaaccccagccg

SEQ ID NO: 2277229 - RNA, 13 nt, Human
cccaguccccgug

SEQ ID NO: 2277230 - RNA, 23 nt, Human
cccaguccccgugccccgccucc

SEQ ID NO: 2277231 - RNA, 14 nt, Human
cccaguaagccacu

SEQ ID NO: 2277232 - RNA, 20 nt, Human
cccaguaccuccugucucug

SEQ ID NO: 2277233 - RNA, 21 nt, Human
cccaguaccuccugucucugg

SEQ ID NO: 2277234 - RNA, 22 nt, Human
cccaguaccuccugucucuggc

SEQ ID NO: 2277235 - RNA, 21 nt, Human
cccaguccccaccccugcccc

SEQ ID NO: 2277236 - RNA, 23 nt, Human
cccaguccccaccccugccccca

SEQ ID NO: 2277237 - RNA, 14 nt, Human
cccagucccccaac

SEQ ID NO: 2277238 - RNA, 18 nt, Human
cccaguaaaauugccaua

SEQ ID NO: 2277239 - RNA, 15 nt, Human
cccaguaacucaucu

SEQ ID NO: 2277240 - RNA, 14 nt, Human
cccaguaccuccug

SEQ ID NO: 2277241 - RNA, 13 nt, Human
cccagguuucuau

SEQ ID NO: 2277242 - RNA, 17 nt, Human
cccagguaccagcugcg

SEQ ID NO: 2277243 - RNA, 19 nt, Human
cccagguaccagcugcgcu

SEQ ID NO: 2277244 - RNA, 12 nt, Human
cccaguaaaauu

SEQ ID NO: 2277245 - RNA, 13 nt, Human
cccaguaaaauug

SEQ ID NO: 2277246 - RNA, 16 nt, Human
cccaguaaaauugcca

SEQ ID NO: 2277247 - RNA, 17 nt, Human
cccaguaaaauugccau

SEQ ID NO: 2277248 - RNA, 14 nt, Human
cccaggucauggaa

SEQ ID NO: 2277249 - RNA, 14 nt, Human
cccagguccagcuc

SEQ ID NO: 2277250 - RNA, 13 nt, Human
cccagguuucugg

SEQ ID NO: 2277251 - RNA, 19 nt, Human
cccagguuucuggucucua

SEQ ID NO: 2277252 - RNA, 22 nt, Human
cccagguuucuggucucuaggc

SEQ ID NO: 2277253 - RNA, 18 nt, Human
cccaggguucccccagcc

SEQ ID NO: 2277254 - RNA, 14 nt, Human
cccagguaagcagg

SEQ ID NO: 2277255 - RNA, 17 nt, Human
cccagguaagcaggagg

SEQ ID NO: 2277256 - RNA, 19 nt, Human
cccagguaagcaggaggag

SEQ ID NO: 2277257 - RNA, 14 nt, Human
cccagguaccagcu

SEQ ID NO: 2277258 - RNA, 15 nt, Human
cccagguaccagcug

SEQ ID NO: 2277259 - RNA, 16 nt, Human
cccagguaccagcugc

SEQ ID NO: 2277260 - RNA, 19 nt, Human
cccaggguuaauagggccu

SEQ ID NO: 2277261 - RNA, 18 nt, Human
cccaggguucaguccuca

SEQ ID NO: 2277262 - RNA, 19 nt, Human
cccagggugggaagggcua

SEQ ID NO: 2277263 - RNA, 17 nt, Human
cccaggcauuccccagg

SEQ ID NO: 2277264 - RNA, 18 nt, Human
cccaggcauuccccagga

SEQ ID NO: 2277265 - RNA, 23 nt, Human
cccaggcaggucuugaacuccug

SEQ ID NO: 2277266 - RNA, 15 nt, Human
cccaggcauucccca

SEQ ID NO: 2277267 - RNA, 15 nt, Human
cccaggaggccagcc

SEQ ID NO: 2277268 - RNA, 16 nt, Human
cccaggaggccagccu

SEQ ID NO: 2277269 - RNA, 20 nt, Human
cccagcuacucaggaggcug

SEQ ID NO: 2277270 - RNA, 15 nt, Human
cccagcuacucagga

SEQ ID NO: 2277271 - RNA, 15 nt, Human
cccagcuacuuggga

SEQ ID NO: 2277272 - RNA, 16 nt, Human
cccagcuacuugggaa

SEQ ID NO: 2277273 - RNA, 17 nt, Human
cccagcuauaccugugc

SEQ ID NO: 2277274 - RNA, 18 nt, Human
cccagcuacuugggaagc

SEQ ID NO: 2277275 - RNA, 19 nt, Human
cccagcuacuugggaagcu

SEQ ID NO: 2277276 - RNA, 15 nt, Human
cccagcucagagggu

SEQ ID NO: 2277277 - RNA, 14 nt, Human
cccagcucagaggg

SEQ ID NO: 2277278 - RNA, 12 nt, Human
cccagcucagca

SEQ ID NO: 2277279 - RNA, 23 nt, Human
cccagcucucccucuggcccugc

SEQ ID NO: 2277280 - RNA, 12 nt, Human
cccagcucugaa

SEQ ID NO: 2277281 - RNA, 21 nt, Human
cccagcuaugguucucucgca

SEQ ID NO: 2277282 - RNA, 20 nt, Human
cccagcuauaccugugccuc

SEQ ID NO: 2277283 - RNA, 11 nt, Human
cccagcucaau

SEQ ID NO: 2277284 - RNA, 14 nt, Human
cccagcuacucagg

SEQ ID NO: 2277285 - RNA, 23 nt, Human
cccagccuucuuugcuugccucu

SEQ ID NO: 2277286 - RNA, 21 nt, Human
cccagccuuggcaucuagagc

SEQ ID NO: 2277287 - RNA, 14 nt, Human
cccagcgagcccug

SEQ ID NO: 2277288 - RNA, 21 nt, Human
cccaggacaccacacccagcc

SEQ ID NO: 2277289 - RNA, 22 nt, Human
cccaggacaccacacccagccu

SEQ ID NO: 2277290 - RNA, 23 nt, Human
cccaggacaccacacccagccuc

SEQ ID NO: 2277291 - RNA, 18 nt, Human
cccagcucugguccauag

SEQ ID NO: 2277292 - RNA, 15 nt, Human
cccagcucuggucca

SEQ ID NO: 2277293 - RNA, 16 nt, Human
cccagcucugguccau

SEQ ID NO: 2277294 - RNA, 13 nt, Human
cccagcucuggcu

SEQ ID NO: 2277295 - RNA, 22 nt, Human
cccagcucugaaaccaguguua

SEQ ID NO: 2277296 - RNA, 14 nt, Human
cccagcucugaaac

SEQ ID NO: 2277297 - RNA, 12 nt, Human
cccagcucuggu

SEQ ID NO: 2277298 - RNA, 13 nt, Human
cccagcucugguc

SEQ ID NO: 2277299 - RNA, 14 nt, Human
cccagcucuggucc

SEQ ID NO: 2277300 - RNA, 23 nt, Human
cccaggagagccagcccucccug

SEQ ID NO: 2277301 - RNA, 22 nt, Human
cccaggagagccagcccucccu

SEQ ID NO: 2277302 - RNA, 21 nt, Human
cccaggagagccagcccuccc

SEQ ID NO: 2277303 - RNA, 19 nt, Human
cccaggagagccagcccuc

SEQ ID NO: 2277304 - RNA, 18 nt, Human
cccaggagagccagcccu

SEQ ID NO: 2277305 - RNA, 15 nt, Human
cccaggagagccagc

SEQ ID NO: 2277306 - RNA, 14 nt, Human
cccaggagagccag

SEQ ID NO: 2277307 - RNA, 20 nt, Human
cccaggagagagaaagccag

SEQ ID NO: 2277308 - RNA, 17 nt, Human
cccaggagacaguucaa

SEQ ID NO: 2277309 - RNA, 15 nt, Human
cccaggagacaguuc

SEQ ID NO: 2277310 - RNA, 13 nt, Human
cccaggagagaga

SEQ ID NO: 2277311 - RNA, 14 nt, Human
cccaggagagagaa

SEQ ID NO: 2277312 - RNA, 15 nt, Human
cccaggagagagaaa

SEQ ID NO: 2277313 - RNA, 16 nt, Human
cccaggagagagaaag

SEQ ID NO: 2277314 - RNA, 12 nt, Human
cccaggacuggg

SEQ ID NO: 2277315 - RNA, 13 nt, Human
cccaggacugggc

SEQ ID NO: 2277316 - RNA, 14 nt, Human
cccaggacugggcc

SEQ ID NO: 2277317 - RNA, 15 nt, Human
cccaggacugggcca

SEQ ID NO: 2277318 - RNA, 23 nt, Human
cccaggacggggccggccaggug

SEQ ID NO: 2277319 - RNA, 15 nt, Human
cccaggacggggccg

SEQ ID NO: 2277320 - RNA, 17 nt, Human
cccaggacggggccggc

SEQ ID NO: 2277321 - RNA, 19 nt, Human
cccaggacggggccggcca

SEQ ID NO: 2277322 - RNA, 22 nt, Human
cccaggacggggccggccaggu

SEQ ID NO: 2277323 - RNA, 13 nt, Human
cccaggagccccg

SEQ ID NO: 2277324 - RNA, 14 nt, Human
cccaggagccccga

SEQ ID NO: 2277325 - RNA, 18 nt, Human
cccaggagcauccaccuc

SEQ ID NO: 2277326 - RNA, 22 nt, Human
cccaggagcauccaccuccuuc

SEQ ID NO: 2277327 - RNA, 14 nt, Human
cccaggaggccagc

SEQ ID NO: 2277328 - RNA, 16 nt, Human
cccaggaccccugagu

SEQ ID NO: 2277329 - RNA, 22 nt, Human
cccaggaccagcuggggcgugg

SEQ ID NO: 2277330 - RNA, 19 nt, Human
cccaggaccagcuggggcg

SEQ ID NO: 2277331 - RNA, 21 nt, Human
cccaggaccagcuggggcgug

SEQ ID NO: 2277332 - RNA, 23 nt, Human
cccaggacccugaaggggccaug

SEQ ID NO: 2277333 - RNA, 13 nt, Human
cccaggacccuga

SEQ ID NO: 2277334 - RNA, 12 nt, Human
cccaggacccug

SEQ ID NO: 2277335 - RNA, 11 nt, Human
cccaggacccu

SEQ ID NO: 2277336 - RNA, 16 nt, Human
cccaggaccuggcugc

SEQ ID NO: 2277337 - RNA, 15 nt, Human
cccaggacgcuucug

SEQ ID NO: 2277338 - RNA, 16 nt, Human
cccaggacgcuucuga

SEQ ID NO: 2277339 - RNA, 17 nt, Human
cccaggacgcuucugaa

SEQ ID NO: 2277340 - RNA, 18 nt, Human
cccaggacgcuucugaau

SEQ ID NO: 2277341 - RNA, 19 nt, Human
cccaggacgcuucugaaug

SEQ ID NO: 2277342 - RNA, 20 nt, Human
cccaggacgcuucugaaugc

SEQ ID NO: 2277343 - RNA, 18 nt, Human
cccaggaccuggcugcca

SEQ ID NO: 2277344 - RNA, 22 nt, Human
cccaggaccagcucaggacaga

SEQ ID NO: 2277345 - RNA, 21 nt, Human
cccaggaccagcucaggacag

SEQ ID NO: 2277346 - RNA, 15 nt, Human
cccaggaccagcugg

SEQ ID NO: 2277347 - RNA, 16 nt, Human
cccaggaccagcuggg

SEQ ID NO: 2277348 - RNA, 17 nt, Human
cccaggaccagcugggg

SEQ ID NO: 2277349 - RNA, 18 nt, Human
cccaggaccagcuggggc

SEQ ID NO: 2277350 - RNA, 20 nt, Human
cccaggaccagcucaggaca

SEQ ID NO: 2277351 - RNA, 17 nt, Human
cccaggaccagcucagg

SEQ ID NO: 2277352 - RNA, 16 nt, Human
cccaggaccagcucag

SEQ ID NO: 2277353 - RNA, 15 nt, Human
cccaggaccagcuca

SEQ ID NO: 2277354 - RNA, 14 nt, Human
cccaggaccagcuc

SEQ ID NO: 2277355 - RNA, 13 nt, Human
cccaggaccagcu

SEQ ID NO: 2277356 - RNA, 12 nt, Human
cccaggaccagc

SEQ ID NO: 2277357 - RNA, 15 nt, Human
cccagccucuaggga

SEQ ID NO: 2277358 - RNA, 18 nt, Human
cccagccucccugaagcc

SEQ ID NO: 2277359 - RNA, 17 nt, Human
cccagccucccugaagc

SEQ ID NO: 2277360 - RNA, 16 nt, Human
cccagccucccugaag

SEQ ID NO: 2277361 - RNA, 21 nt, Human
cccagccucuucuagagccgu

SEQ ID NO: 2277362 - RNA, 17 nt, Human
cccagccuggcccagcu

SEQ ID NO: 2277363 - RNA, 15 nt, Human
cccagccucuggcau

SEQ ID NO: 2277364 - RNA, 18 nt, Human
cccagccuggcccagcuc

SEQ ID NO: 2277365 - RNA, 19 nt, Human
cccagccuggcccagcucc

SEQ ID NO: 2277366 - RNA, 20 nt, Human
cccagccuggcccagcuccc

SEQ ID NO: 2277367 - RNA, 22 nt, Human
cccagccuggcccagcuccccc

SEQ ID NO: 2277368 - RNA, 18 nt, Human
cccagccuccaagcucca

SEQ ID NO: 2277369 - RNA, 20 nt, Human
cccagccuccaagcuccauc

SEQ ID NO: 2277370 - RNA, 12 nt, Human
cccagccucagu

SEQ ID NO: 2277371 - RNA, 16 nt, Human
cccagccucaguccuc

SEQ ID NO: 2277372 - RNA, 22 nt, Human
cccagccucaguccuccccuca

SEQ ID NO: 2277373 - RNA, 23 nt, Human
cccagcccuccuuaucaaaggac

SEQ ID NO: 2277374 - RNA, 16 nt, Human
cccagcccucaucccg

SEQ ID NO: 2277375 - RNA, 15 nt, Human
cccagcccucauccc

SEQ ID NO: 2277376 - RNA, 14 nt, Human
cccagcccucaucc

SEQ ID NO: 2277377 - RNA, 16 nt, Human
cccagcccggcuccca

SEQ ID NO: 2277378 - RNA, 17 nt, Human
cccagcccuauggaugu

SEQ ID NO: 2277379 - RNA, 16 nt, Human
cccagcccccuuuggg

SEQ ID NO: 2277380 - RNA, 21 nt, Human
cccagcccccuuugggcccag

SEQ ID NO: 2277381 - RNA, 20 nt, Human
cccagcccggaccuuggcag

SEQ ID NO: 2277382 - RNA, 14 nt, Human
cccagcccggcucc

SEQ ID NO: 2277383 - RNA, 19 nt, Human
cccagcccucaucccgagc

SEQ ID NO: 2277384 - RNA, 18 nt, Human
cccagcccuauggaugug

SEQ ID NO: 2277385 - RNA, 10 nt, Human
cccagcccug

SEQ ID NO: 2277386 - RNA, 11 nt, Human
cccagcccugc

SEQ ID NO: 2277387 - RNA, 12 nt, Human
cccagcccugcu

SEQ ID NO: 2277388 - RNA, 13 nt, Human
cccagcccugcug

SEQ ID NO: 2277389 - RNA, 14 nt, Human
cccagcccugcugg

SEQ ID NO: 2277390 - RNA, 15 nt, Human
cccagcccugcuggc

SEQ ID NO: 2277391 - RNA, 16 nt, Human
cccagcccugcuggcc

SEQ ID NO: 2277392 - RNA, 20 nt, Human
cccagcccugcuggccgccu

SEQ ID NO: 2277393 - RNA, 19 nt, Human
cccagcccugcuggccgcc

SEQ ID NO: 2277394 - RNA, 11 nt, Human
cccagcccugg

SEQ ID NO: 2277395 - RNA, 12 nt, Human
cccagcccuggc

SEQ ID NO: 2277396 - RNA, 11 nt, Human
cccagccucag

SEQ ID NO: 2277397 - RNA, 18 nt, Human
cccagccccauccucugu

SEQ ID NO: 2277398 - RNA, 19 nt, Human
cccagccccauccucugua

SEQ ID NO: 2277399 - RNA, 12 nt, Human
cccagcccccac

SEQ ID NO: 2277400 - RNA, 16 nt, Human
cccagcccccacagug

SEQ ID NO: 2277401 - RNA, 17 nt, Human
cccagcccccacagugc

SEQ ID NO: 2277402 - RNA, 24 nt, Human
cccagcccccacagugcugucuga

SEQ ID NO: 2277403 - RNA, 15 nt, Human
cccagcccccuuugg

SEQ ID NO: 2277404 - RNA, 22 nt, Human
cccagcccccuuugggcccagg

SEQ ID NO: 2277405 - RNA, 13 nt, Human
cccagccccaucc

SEQ ID NO: 2277406 - RNA, 14 nt, Human
cccagccccauccc

SEQ ID NO: 2277407 - RNA, 14 nt, Human
cccagccccauccu

SEQ ID NO: 2277408 - RNA, 15 nt, Human
cccagccccauccuc

SEQ ID NO: 2277409 - RNA, 17 nt, Human
cccagcaacccuccuau

SEQ ID NO: 2277410 - RNA, 13 nt, Human
cccagcaacccuc

SEQ ID NO: 2277411 - RNA, 20 nt, Human
cccagcaacacaagcuggaa

SEQ ID NO: 2277412 - RNA, 22 nt, Human
cccagcaacacaagcuggaagc

SEQ ID NO: 2277413 - RNA, 21 nt, Human
cccagcaacccuccuaucacc

SEQ ID NO: 2277414 - RNA, 19 nt, Human
cccagcaacccuccuauca

SEQ ID NO: 2277415 - RNA, 16 nt, Human
cccagcaacuccaacu

SEQ ID NO: 2277416 - RNA, 17 nt, Human
cccagccccaaugaaca

SEQ ID NO: 2277417 - RNA, 11 nt, Human
cccagccccau

SEQ ID NO: 2277418 - RNA, 12 nt, Human
cccagccccauc

SEQ ID NO: 2277419 - RNA, 18 nt, Human
cccagauuuugcuguaua

SEQ ID NO: 2277420 - RNA, 21 nt, Human
cccagauuuugcuguauauuu

SEQ ID NO: 2277421 - RNA, 19 nt, Human
cccagauuuugcuguauau

SEQ ID NO: 2277422 - RNA, 15 nt, Human
cccagcaacacaagc

SEQ ID NO: 2277423 - RNA, 13 nt, Human
cccagccccaaug

SEQ ID NO: 2277424 - RNA, 16 nt, Human
cccagaggcugcccca

SEQ ID NO: 2277425 - RNA, 17 nt, Human
cccagauuggcucacac

SEQ ID NO: 2277426 - RNA, 14 nt, Human
cccagaggccucuc

SEQ ID NO: 2277427 - RNA, 19 nt, Human
cccagauuggcucacacug

SEQ ID NO: 2277428 - RNA, 20 nt, Human
cccagauuggcucacacuga

SEQ ID NO: 2277429 - RNA, 21 nt, Human
cccagauuggcucacacugag

SEQ ID NO: 2277430 - RNA, 22 nt, Human
cccagauuggcucacacugaga

SEQ ID NO: 2277431 - RNA, 11 nt, Human
cccagagcugu

SEQ ID NO: 2277432 - RNA, 13 nt, Human
cccagagcuguuu

SEQ ID NO: 2277433 - RNA, 21 nt, Human
cccagagcuguggacuuuguu

SEQ ID NO: 2277434 - RNA, 17 nt, Human
cccagagcccagcucca

SEQ ID NO: 2277435 - RNA, 16 nt, Human
cccagagcccagcucc

SEQ ID NO: 2277436 - RNA, 15 nt, Human
cccagagcccagcuc

SEQ ID NO: 2277437 - RNA, 13 nt, Human
cccagagcccagc

SEQ ID NO: 2277438 - RNA, 12 nt, Human
cccagagcccag

SEQ ID NO: 2277439 - RNA, 15 nt, Human
cccagagcagggugu

SEQ ID NO: 2277440 - RNA, 21 nt, Human
cccagagcauuacgugagcca

SEQ ID NO: 2277441 - RNA, 22 nt, Human
cccagagcauuacgugagccag

SEQ ID NO: 2277442 - RNA, 22 nt, Human
cccagagcuguuuauggccuca

SEQ ID NO: 2277443 - RNA, 21 nt, Human
cccagagcuguuuauggccuc

SEQ ID NO: 2277444 - RNA, 23 nt, Human
cccagagcuguuuauggccucag

SEQ ID NO: 2277445 - RNA, 21 nt, Human
cccagaggaaggggccagagg

SEQ ID NO: 2277446 - RNA, 24 nt, Human
cccagaggaaggggccagaggcuc

SEQ ID NO: 2277447 - RNA, 23 nt, Human
cccagaggaaggggccagaggcu

SEQ ID NO: 2277448 - RNA, 22 nt, Human
cccagaggaaggggccagaggc

SEQ ID NO: 2277449 - RNA, 16 nt, Human
cccagaggauugcugc

SEQ ID NO: 2277450 - RNA, 15 nt, Human
cccagaggagggcag

SEQ ID NO: 2277451 - RNA, 23 nt, Human
cccagauugcaacaggcugggcu

SEQ ID NO: 2277452 - RNA, 18 nt, Human
cccaggaggccagccuug

SEQ ID NO: 2277453 - RNA, 20 nt, Human
cccagacucagacauuggca

SEQ ID NO: 2277454 - RNA, 16 nt, Human
cccagacucagacauu

SEQ ID NO: 2277455 - RNA, 13 nt, Human
cccagacucagac

SEQ ID NO: 2277456 - RNA, 12 nt, Human
cccagacucaga

SEQ ID NO: 2277457 - RNA, 21 nt, Human
cccagaccccucuggccagga

SEQ ID NO: 2277458 - RNA, 14 nt, Human
cccagaccugccuc

SEQ ID NO: 2277459 - RNA, 18 nt, Human
cccagaccugccucuucc

SEQ ID NO: 2277460 - RNA, 22 nt, Human
cccagaccuguuagcagacagg

SEQ ID NO: 2277461 - RNA, 21 nt, Human
cccagaccuguuagcagacag

SEQ ID NO: 2277462 - RNA, 21 nt, Human
cccagaccuuuuauccacuua

SEQ ID NO: 2277463 - RNA, 15 nt, Human
cccagacgaugucuu

SEQ ID NO: 2277464 - RNA, 17 nt, Human
cccagacgaugucuuca

SEQ ID NO: 2277465 - RNA, 21 nt, Human
cccagagaugggacugggagg

SEQ ID NO: 2277466 - RNA, 23 nt, Human
cccagagaugccuccaccgcugc

SEQ ID NO: 2277467 - RNA, 21 nt, Human
cccagagaugccuccaccgcu

SEQ ID NO: 2277468 - RNA, 20 nt, Human
cccagagaugggacugggag

SEQ ID NO: 2277469 - RNA, 12 nt, Human
cccagagcacug

SEQ ID NO: 2277470 - RNA, 14 nt, Human
cccagagcaggaag

SEQ ID NO: 2277471 - RNA, 16 nt, Human
cccagagcaggaagca

SEQ ID NO: 2277472 - RNA, 16 nt, Human
cccagagcaggaggcc

SEQ ID NO: 2277473 - RNA, 19 nt, Human
cccagagcaggaggccccu

SEQ ID NO: 2277474 - RNA, 21 nt, Human
cccagagcaggaggccccugg

SEQ ID NO: 2277475 - RNA, 23 nt, Human
cccagagcaggaggccccuggcc

SEQ ID NO: 2277476 - RNA, 14 nt, Human
cccagagcagggug

SEQ ID NO: 2277477 - RNA, 20 nt, Human
cccagagaugccuccaccgc

SEQ ID NO: 2277478 - RNA, 19 nt, Human
cccagagaugccuccaccg

SEQ ID NO: 2277479 - RNA, 18 nt, Human
cccagagaugccuccacc

SEQ ID NO: 2277480 - RNA, 17 nt, Human
cccagagaugccuccac

SEQ ID NO: 2277481 - RNA, 16 nt, Human
cccagagaugccucca

SEQ ID NO: 2277482 - RNA, 14 nt, Human
cccagagaugccuc

SEQ ID NO: 2277483 - RNA, 21 nt, Human
cccagagaggaaucagacuuc

SEQ ID NO: 2277484 - RNA, 19 nt, Human
cccagagaggaaucagacu

SEQ ID NO: 2277485 - RNA, 15 nt, Human
cccagagaggaauca

SEQ ID NO: 2277486 - RNA, 19 nt, Human
cccagacagacaucucugc

SEQ ID NO: 2277487 - RNA, 15 nt, Human
cccagacacagaaga

SEQ ID NO: 2277488 - RNA, 15 nt, Human
cccacgcccccacug

SEQ ID NO: 2277489 - RNA, 18 nt, Human
cccagaaugccuccugca

SEQ ID NO: 2277490 - RNA, 21 nt, Human
cccagacagcucccucugccu

SEQ ID NO: 2277491 - RNA, 20 nt, Human
cccagacagcucccucugcc

SEQ ID NO: 2277492 - RNA, 16 nt, Human
cccagacagcucccuc

SEQ ID NO: 2277493 - RNA, 14 nt, Human
cccagacagcuccc

SEQ ID NO: 2277494 - RNA, 13 nt, Human
cccagacagcucc

SEQ ID NO: 2277495 - RNA, 12 nt, Human
cccagacagcuc

SEQ ID NO: 2277496 - RNA, 20 nt, Human
cccagacagacaucucugca

SEQ ID NO: 2277497 - RNA, 23 nt, Human
cccagacagacaucucugcaccc

SEQ ID NO: 2277498 - RNA, 20 nt, Human
cccagaccccucuggccagg

SEQ ID NO: 2277499 - RNA, 19 nt, Human
cccagaccccucuggccag

SEQ ID NO: 2277500 - RNA, 18 nt, Human
cccagaccccucuggcca

SEQ ID NO: 2277501 - RNA, 14 nt, Human
cccagacccagugg

SEQ ID NO: 2277502 - RNA, 13 nt, Human
cccagacccagug

SEQ ID NO: 2277503 - RNA, 16 nt, Human
cccacgagggucagga

SEQ ID NO: 2277504 - RNA, 17 nt, Human
cccaccuggccaccuga

SEQ ID NO: 2277505 - RNA, 20 nt, Human
cccaccuggccaccugaggu

SEQ ID NO: 2277506 - RNA, 13 nt, Human
cccacgcccccac

SEQ ID NO: 2277507 - RNA, 14 nt, Human
cccacgcccccacu

SEQ ID NO: 2277508 - RNA, 17 nt, Human
ccauuccauuuaucuuu

SEQ ID NO: 2277509 - RNA, 14 nt, Human
ccauucccugccug

SEQ ID NO: 2277510 - RNA, 15 nt, Human
ccauucccugccugg

SEQ ID NO: 2277511 - RNA, 20 nt, Human
ccauucccugccuggggcgg

SEQ ID NO: 2277512 - RNA, 16 nt, Human
ccauuccucagggaca

SEQ ID NO: 2277513 - RNA, 13 nt, Human
ccauuccucaggg

SEQ ID NO: 2277514 - RNA, 12 nt, Human
ccauuccucagg

SEQ ID NO: 2277515 - RNA, 22 nt, Human
ccauuccucaccuuuucccggg

SEQ ID NO: 2277516 - RNA, 16 nt, Human
ccauuccugaagaacc

SEQ ID NO: 2277517 - RNA, 13 nt, Human
ccauuccugaaga

SEQ ID NO: 2277518 - RNA, 16 nt, Human
ccauuccagaauaucu

SEQ ID NO: 2277519 - RNA, 20 nt, Human
ccauucauuccauucuggaa

SEQ ID NO: 2277520 - RNA, 18 nt, Human
ccauucauuccauucugg

SEQ ID NO: 2277521 - RNA, 17 nt, Human
ccaugugguggcacagg

SEQ ID NO: 2277522 - RNA, 18 nt, Human
ccaugugguggcacaggc

SEQ ID NO: 2277523 - RNA, 18 nt, Human
ccauguuggccaggcugg

SEQ ID NO: 2277524 - RNA, 15 nt, Human
ccauguuggccaggc

SEQ ID NO: 2277525 - RNA, 19 nt, Human
ccauguuggccaggcuggu

SEQ ID NO: 2277526 - RNA, 21 nt, Human
ccauguuggccaggcuggucu

SEQ ID NO: 2277527 - RNA, 22 nt, Human
ccauuccuggaaaccacagucc

SEQ ID NO: 2277528 - RNA, 22 nt, Human
ccauuccugggaaauauucccu

SEQ ID NO: 2277529 - RNA, 17 nt, Human
ccauuccugguacccag

SEQ ID NO: 2277530 - RNA, 20 nt, Human
ccauuccugguacccagcca

SEQ ID NO: 2277531 - RNA, 21 nt, Human
ccauuccugguacccagccau

SEQ ID NO: 2277532 - RNA, 19 nt, Human
cccaccugcugagagaccc

SEQ ID NO: 2277533 - RNA, 13 nt, Human
cccaccugcugag

SEQ ID NO: 2277534 - RNA, 12 nt, Human
cccaccugcuga

SEQ ID NO: 2277535 - RNA, 12 nt, Human
cccaccuggcca

SEQ ID NO: 2277536 - RNA, 13 nt, Human
cccaccuggccac

SEQ ID NO: 2277537 - RNA, 15 nt, Human
cccaccuggccaccu

SEQ ID NO: 2277538 - RNA, 16 nt, Human
cccaccuggccaccug

SEQ ID NO: 2277539 - RNA, 12 nt, Human
cccaccuggccu

SEQ ID NO: 2277540 - RNA, 15 nt, Human
cccaccuggccucug

SEQ ID NO: 2277541 - RNA, 16 nt, Human
cccaccuuggcugcag

SEQ ID NO: 2277542 - RNA, 17 nt, Human
cccaccuuggcugcagg

SEQ ID NO: 2277543 - RNA, 19 nt, Human
cccaccuuggcugcaggga

SEQ ID NO: 2277544 - RNA, 20 nt, Human
cccaccuuggcugcagggag

SEQ ID NO: 2277545 - RNA, 14 nt, Human
ccaugcgcccccuc

SEQ ID NO: 2277546 - RNA, 20 nt, Human
ccaugcgcccccuccgcccu

SEQ ID NO: 2277547 - RNA, 13 nt, Human
ccaugcuccuggc

SEQ ID NO: 2277548 - RNA, 18 nt, Human
ccaugccuguccagccug

SEQ ID NO: 2277549 - RNA, 19 nt, Human
ccaugccuguccagccugg

SEQ ID NO: 2277550 - RNA, 17 nt, Human
ccaugccuguccagccu

SEQ ID NO: 2277551 - RNA, 14 nt, Human
ccaugccuguccag

SEQ ID NO: 2277552 - RNA, 13 nt, Human
ccaugccugucca

SEQ ID NO: 2277553 - RNA, 17 nt, Human
ccaugccugagggugga

SEQ ID NO: 2277554 - RNA, 18 nt, Human
ccaugccugaggguggag

SEQ ID NO: 2277555 - RNA, 22 nt, Human
ccaugaaaaugcaacaacaugu

SEQ ID NO: 2277556 - RNA, 23 nt, Human
ccaugaaaacguuuuauuguguu

SEQ ID NO: 2277557 - RNA, 21 nt, Human
ccaugaaaacguuuuauugug

SEQ ID NO: 2277558 - RNA, 20 nt, Human
ccaugaaaacguuuuauugu

SEQ ID NO: 2277559 - RNA, 19 nt, Human
ccaugaaaacguuuuauug

SEQ ID NO: 2277560 - RNA, 21 nt, Human
ccaugaaaaaaaugaucccca

SEQ ID NO: 2277561 - RNA, 13 nt, Human
ccaugaaacaaag

SEQ ID NO: 2277562 - RNA, 12 nt, Human
ccaugaacacac

SEQ ID NO: 2277563 - RNA, 16 nt, Human
ccaugaacacacugug

SEQ ID NO: 2277564 - RNA, 17 nt, Human
ccaugaacacacugugu

SEQ ID NO: 2277565 - RNA, 21 nt, Human
ccaugaacacacuguguccug

SEQ ID NO: 2277566 - RNA, 22 nt, Human
ccaugaacacacuguguccugg

SEQ ID NO: 2277567 - RNA, 15 nt, Human
ccaugaaccaagacc

SEQ ID NO: 2277568 - RNA, 16 nt, Human
ccaugaacagaaaaca

SEQ ID NO: 2277569 - RNA, 22 nt, Human
ccaugaacagaaaacauucuga

SEQ ID NO: 2277570 - RNA, 12 nt, Human
ccaugccugagg

SEQ ID NO: 2277571 - RNA, 13 nt, Human
ccaugccugaggg

SEQ ID NO: 2277572 - RNA, 14 nt, Human
ccaugccugagggu

SEQ ID NO: 2277573 - RNA, 15 nt, Human
ccaugccugagggug

SEQ ID NO: 2277574 - RNA, 16 nt, Human
ccaugccugagggugg

SEQ ID NO: 2277575 - RNA, 18 nt, Human
ccaugcuccuggcccacu

SEQ ID NO: 2277576 - RNA, 15 nt, Human
ccaugcuccuggccc

SEQ ID NO: 2277577 - RNA, 15 nt, Human
ccaugcugcccugug

SEQ ID NO: 2277578 - RNA, 15 nt, Human
ccaugcugaggccug

SEQ ID NO: 2277579 - RNA, 22 nt, Human
ccaugccugccccccucaucuc

SEQ ID NO: 2277580 - RNA, 13 nt, Human
ccaugcugaaggg

SEQ ID NO: 2277581 - RNA, 16 nt, Human
ccaugcugaggccugg

SEQ ID NO: 2277582 - RNA, 17 nt, Human
ccaugcugaggccuggg

SEQ ID NO: 2277583 - RNA, 15 nt, Human
ccaugcuugggugua

SEQ ID NO: 2277584 - RNA, 21 nt, Human
ccaugcuuagucacugccugc

SEQ ID NO: 2277585 - RNA, 22 nt, Human
ccaugcuuagucacugccugca

SEQ ID NO: 2277586 - RNA, 18 nt, Human
ccaugcuuagucacugcc

SEQ ID NO: 2277587 - RNA, 19 nt, Human
ccaugcuuagucacugccu

SEQ ID NO: 2277588 - RNA, 20 nt, Human
ccaugcuuagucacugccug

SEQ ID NO: 2277589 - RNA, 14 nt, Human
ccaugcugccucca

SEQ ID NO: 2277590 - RNA, 16 nt, Human
ccaugcugaagggacc

SEQ ID NO: 2277591 - RNA, 16 nt, Human
ccaugcugcccuguga

SEQ ID NO: 2277592 - RNA, 17 nt, Human
ccaugcugcccugugag

SEQ ID NO: 2277593 - RNA, 23 nt, Human
ccauggcaccuucagacuuugcu

SEQ ID NO: 2277594 - RNA, 23 nt, Human
ccauggcacucuauguucuaaga

SEQ ID NO: 2277595 - RNA, 13 nt, Human
ccaugugccaggu

SEQ ID NO: 2277596 - RNA, 15 nt, Human
ccauggcccucauua

SEQ ID NO: 2277597 - RNA, 16 nt, Human
ccaugugccugaucca

SEQ ID NO: 2277598 - RNA, 21 nt, Human
ccaugugccugauccagccuc

SEQ ID NO: 2277599 - RNA, 13 nt, Human
ccauguuggccag

SEQ ID NO: 2277600 - RNA, 14 nt, Human
ccauguuggccagg

SEQ ID NO: 2277601 - RNA, 13 nt, Human
ccauggaggcaca

SEQ ID NO: 2277602 - RNA, 17 nt, Human
ccauggagccccagccc

SEQ ID NO: 2277603 - RNA, 18 nt, Human
ccauggagccccagcccc

SEQ ID NO: 2277604 - RNA, 19 nt, Human
ccauggagccccagccccc

SEQ ID NO: 2277605 - RNA, 20 nt, Human
ccauggagccccagcccccu

SEQ ID NO: 2277606 - RNA, 21 nt, Human
ccauggaggcacacagcugca

SEQ ID NO: 2277607 - RNA, 17 nt, Human
ccauggaggcacacagc

SEQ ID NO: 2277608 - RNA, 20 nt, Human
ccauggaggcacacagcugc

SEQ ID NO: 2277609 - RNA, 22 nt, Human
ccauggagccagcucccucuau

SEQ ID NO: 2277610 - RNA, 12 nt, Human
ccauggagcccc

SEQ ID NO: 2277611 - RNA, 13 nt, Human
ccauggagcccca

SEQ ID NO: 2277612 - RNA, 14 nt, Human
ccauggagccccag

SEQ ID NO: 2277613 - RNA, 15 nt, Human
ccauggagccccagc

SEQ ID NO: 2277614 - RNA, 16 nt, Human
ccauggagccccagcc

SEQ ID NO: 2277615 - RNA, 18 nt, Human
ccauggagccagcucccu

SEQ ID NO: 2277616 - RNA, 17 nt, Human
ccauggagccagcuccc

SEQ ID NO: 2277617 - RNA, 14 nt, Human
ccauggagccagcu

SEQ ID NO: 2277618 - RNA, 19 nt, Human
ccauggagagcuggagccu

SEQ ID NO: 2277619 - RNA, 22 nt, Human
ccauggagagcuggagccuggu

SEQ ID NO: 2277620 - RNA, 17 nt, Human
ccauggagacaagaagg

SEQ ID NO: 2277621 - RNA, 15 nt, Human
ccauggagagcugga

SEQ ID NO: 2277622 - RNA, 18 nt, Human
ccauggagagcuggagcc

SEQ ID NO: 2277623 - RNA, 21 nt, Human
ccauggacacuccagugccag

SEQ ID NO: 2277624 - RNA, 15 nt, Human
ccauggacaggcugg

SEQ ID NO: 2277625 - RNA, 14 nt, Human
ccauggacaggcug

SEQ ID NO: 2277626 - RNA, 18 nt, Human
ccauggaaugcuugaaaa

SEQ ID NO: 2277627 - RNA, 15 nt, Human
ccauggacacuccag

SEQ ID NO: 2277628 - RNA, 17 nt, Human
ccauggacacuccagug

SEQ ID NO: 2277629 - RNA, 19 nt, Human
ccauggacacuccagugcc

SEQ ID NO: 2277630 - RNA, 12 nt, Human
ccauggaaccug

SEQ ID NO: 2277631 - RNA, 15 nt, Human
ccauggaaugcuuga

SEQ ID NO: 2277632 - RNA, 14 nt, Human
ccauggaaugcuug

SEQ ID NO: 2277633 - RNA, 14 nt, Human
ccauggacacucca

SEQ ID NO: 2277634 - RNA, 20 nt, Human
cccagagcuguuuauggccu

SEQ ID NO: 2277635 - RNA, 11 nt, Human
ccagccuggcc

SEQ ID NO: 2277636 - RNA, 10 nt, Human
ccagccuggc

SEQ ID NO: 2277637 - RNA, 12 nt, Human
ccagccuggcca

SEQ ID NO: 2277638 - RNA, 12 nt, Human
ccagccuggccc

SEQ ID NO: 2277639 - RNA, 13 nt, Human
ccagccuggccca

SEQ ID NO: 2277640 - RNA, 14 nt, Human
ccagccuggcccag

SEQ ID NO: 2277641 - RNA, 15 nt, Human
ccagccuggcccagc

SEQ ID NO: 2277642 - RNA, 12 nt, Human
ccagccugagca

SEQ ID NO: 2277643 - RNA, 11 nt, Human
ccagccugagc

SEQ ID NO: 2277644 - RNA, 19 nt, Human
ccagccucuguuccccuag

SEQ ID NO: 2277645 - RNA, 19 nt, Human
ccagccuggacccccagcu

SEQ ID NO: 2277646 - RNA, 18 nt, Human
ccagccuggacccccagc

SEQ ID NO: 2277647 - RNA, 20 nt, Human
ccagccuggagaugaaaucu

SEQ ID NO: 2277648 - RNA, 13 nt, Human
ccagccuggagau

SEQ ID NO: 2277649 - RNA, 12 nt, Human
ccagcucucagc

SEQ ID NO: 2277650 - RNA, 20 nt, Human
ccagccuggcccagcucccc

SEQ ID NO: 2277651 - RNA, 16 nt, Human
ccagccuggcccagcu

SEQ ID NO: 2277652 - RNA, 17 nt, Human
ccagccuggcccagcuc

SEQ ID NO: 2277653 - RNA, 18 nt, Human
ccagccuggcccagcucc

SEQ ID NO: 2277654 - RNA, 19 nt, Human
ccagccuggcccagcuccc

SEQ ID NO: 2277655 - RNA, 16 nt, Human
ccagcucucccucugg

SEQ ID NO: 2277656 - RNA, 14 nt, Human
ccagcucucccucu

SEQ ID NO: 2277657 - RNA, 15 nt, Human
ccagcucucagccaa

SEQ ID NO: 2277658 - RNA, 14 nt, Human
ccagcucucagcca

SEQ ID NO: 2277659 - RNA, 13 nt, Human
ccagcucucagcc

SEQ ID NO: 2277660 - RNA, 21 nt, Human
ccagcucucccucuggcccug

SEQ ID NO: 2277661 - RNA, 20 nt, Human
ccagcucucccucuggcccu

SEQ ID NO: 2277662 - RNA, 18 nt, Human
ccagcucucccucuggcc

SEQ ID NO: 2277663 - RNA, 17 nt, Human
ccagcucucccucuggc

SEQ ID NO: 2277664 - RNA, 23 nt, Human
ccagcucucccucuggcccugcc

SEQ ID NO: 2277665 - RNA, 22 nt, Human
ccagcucucccucuggcccugc

SEQ ID NO: 2277666 - RNA, 15 nt, Human
ccagcucugaaacca

SEQ ID NO: 2277667 - RNA, 22 nt, Human
ccagcugacccugguucucucu

SEQ ID NO: 2277668 - RNA, 20 nt, Human
ccagcugagcgccaggaugg

SEQ ID NO: 2277669 - RNA, 17 nt, Human
ccagcugagcgccagga

SEQ ID NO: 2277670 - RNA, 15 nt, Human
ccagcugagcgccag

SEQ ID NO: 2277671 - RNA, 23 nt, Human
ccagcugacaguccucuccaccu

SEQ ID NO: 2277672 - RNA, 15 nt, Human
ccagcugacaguccu

SEQ ID NO: 2277673 - RNA, 20 nt, Human
ccagcugacaguccucucca

SEQ ID NO: 2277674 - RNA, 21 nt, Human
ccagcugacaguccucuccac

SEQ ID NO: 2277675 - RNA, 22 nt, Human
ccagcugacaguccucuccacc

SEQ ID NO: 2277676 - RNA, 21 nt, Human
ccagcucugaaaccaguguua

SEQ ID NO: 2277677 - RNA, 20 nt, Human
ccagcucugaaaccaguguu

SEQ ID NO: 2277678 - RNA, 21 nt, Human
ccagcucuguaucaggaccca

SEQ ID NO: 2277679 - RNA, 18 nt, Human
ccagcucuguaucaggac

SEQ ID NO: 2277680 - RNA, 14 nt, Human
ccagcucuguauca

SEQ ID NO: 2277681 - RNA, 14 nt, Human
ccagcucuggaggg

SEQ ID NO: 2277682 - RNA, 21 nt, Human
ccagcugaaauacugaggggu

SEQ ID NO: 2277683 - RNA, 17 nt, Human
ccagcucuuuccuccuu

SEQ ID NO: 2277684 - RNA, 16 nt, Human
ccagcucuuuccuccu

SEQ ID NO: 2277685 - RNA, 14 nt, Human
ccagcucuuuccuc

SEQ ID NO: 2277686 - RNA, 19 nt, Human
ccagcucuucuccccaggu

SEQ ID NO: 2277687 - RNA, 23 nt, Human
ccagcugcaccugccagccuggc

SEQ ID NO: 2277688 - RNA, 22 nt, Human
ccagcugcaccugccagccugg

SEQ ID NO: 2277689 - RNA, 20 nt, Human
ccagcugcaccugccagccu

SEQ ID NO: 2277690 - RNA, 19 nt, Human
ccagcugcaccugccagcc

SEQ ID NO: 2277691 - RNA, 18 nt, Human
ccagcugcaccugccagc

SEQ ID NO: 2277692 - RNA, 17 nt, Human
ccagcugcaccugccag

SEQ ID NO: 2277693 - RNA, 13 nt, Human
ccagcugcuuggg

SEQ ID NO: 2277694 - RNA, 15 nt, Human
ccagcugcuugggcu

SEQ ID NO: 2277695 - RNA, 20 nt, Human
ccagcuggccgggagccuga

SEQ ID NO: 2277696 - RNA, 14 nt, Human
ccagcuggccggga

SEQ ID NO: 2277697 - RNA, 12 nt, Human
ccagcuggccgg

SEQ ID NO: 2277698 - RNA, 13 nt, Human
ccagcugcacuga

SEQ ID NO: 2277699 - RNA, 19 nt, Human
ccagcuggcccgugacaga

SEQ ID NO: 2277700 - RNA, 16 nt, Human
ccagcugcuugggcuu

SEQ ID NO: 2277701 - RNA, 18 nt, Human
ccagcugcuugggcuuca

SEQ ID NO: 2277702 - RNA, 22 nt, Human
ccagcugggaggcaagaggggu

SEQ ID NO: 2277703 - RNA, 11 nt, Human
ccagcugggcu

SEQ ID NO: 2277704 - RNA, 12 nt, Human
ccagcugggcuc

SEQ ID NO: 2277705 - RNA, 14 nt, Human
ccagcugggaggca

SEQ ID NO: 2277706 - RNA, 16 nt, Human
ccagcugggaggcaag

SEQ ID NO: 2277707 - RNA, 19 nt, Human
ccagcugggaggcaagagg

SEQ ID NO: 2277708 - RNA, 21 nt, Human
ccagcugggaggcaagagggg

SEQ ID NO: 2277709 - RNA, 12 nt, Human
ccagcugggagg

SEQ ID NO: 2277710 - RNA, 16 nt, Human
ccagcuggguuggaaa

SEQ ID NO: 2277711 - RNA, 17 nt, Human
ccagcuggguuggaaaa

SEQ ID NO: 2277712 - RNA, 17 nt, Human
ccagcugggucaggcag

SEQ ID NO: 2277713 - RNA, 16 nt, Human
ccagcugggucaggca

SEQ ID NO: 2277714 - RNA, 14 nt, Human
ccagcugggcucug

SEQ ID NO: 2277715 - RNA, 15 nt, Human
ccagcugggcucugc

SEQ ID NO: 2277716 - RNA, 21 nt, Human
ccagcuggggcguggggaggg

SEQ ID NO: 2277717 - RNA, 14 nt, Human
ccagcugugagccu

SEQ ID NO: 2277718 - RNA, 18 nt, Human
ccagcugggucaggcagg

SEQ ID NO: 2277719 - RNA, 22 nt, Human
ccagcuggggcguggggagggc

SEQ ID NO: 2277720 - RNA, 21 nt, Human
ccagcuggugagugaugcggc

SEQ ID NO: 2277721 - RNA, 18 nt, Human
ccagcugugcucuggaca

SEQ ID NO: 2277722 - RNA, 20 nt, Human
ccagcugugcucuggacagg

SEQ ID NO: 2277723 - RNA, 21 nt, Human
ccagcugugcucuggacaggc

SEQ ID NO: 2277724 - RNA, 21 nt, Human
ccagccucucuugguuuccuu

SEQ ID NO: 2277725 - RNA, 15 nt, Human
ccagccucuccccug

SEQ ID NO: 2277726 - RNA, 22 nt, Human
ccagccucuccccugauuacac

SEQ ID NO: 2277727 - RNA, 17 nt, Human
ccagccucuagggaccc

SEQ ID NO: 2277728 - RNA, 20 nt, Human
ccagccucuagggaccccuc

SEQ ID NO: 2277729 - RNA, 13 nt, Human
ccagccucucccc

SEQ ID NO: 2277730 - RNA, 14 nt, Human
ccagccucuccccu

SEQ ID NO: 2277731 - RNA, 24 nt, Human
ccagccucugagccccugggacug

SEQ ID NO: 2277732 - RNA, 21 nt, Human
ccagccucugagccccuggga

SEQ ID NO: 2277733 - RNA, 19 nt, Human
ccagccucugagccccugg

SEQ ID NO: 2277734 - RNA, 22 nt, Human
ccagccucucuugguuuccuuc

SEQ ID NO: 2277735 - RNA, 15 nt, Human
ccagccucuggcauu

SEQ ID NO: 2277736 - RNA, 11 nt, Human
ccagccucugu

SEQ ID NO: 2277737 - RNA, 15 nt, Human
ccagccucuguuccc

SEQ ID NO: 2277738 - RNA, 16 nt, Human
ccagccucgucuucau

SEQ ID NO: 2277739 - RNA, 15 nt, Human
ccagccucuagggac

SEQ ID NO: 2277740 - RNA, 23 nt, Human
ccagccuccucuggacggcaggc

SEQ ID NO: 2277741 - RNA, 16 nt, Human
ccacacacacagaaaa

SEQ ID NO: 2277742 - RNA, 15 nt, Human
ccacacacacagaaa

SEQ ID NO: 2277743 - RNA, 14 nt, Human
ccacacacacagaa

SEQ ID NO: 2277744 - RNA, 13 nt, Human
ccacacacacaga

SEQ ID NO: 2277745 - RNA, 19 nt, Human
ccaggagaaccacuacaug

SEQ ID NO: 2277746 - RNA, 21 nt, Human
ccaggacuuauuuaaacucug

SEQ ID NO: 2277747 - RNA, 14 nt, Human
ccaggacugggcca

SEQ ID NO: 2277748 - RNA, 17 nt, Human
ccaggacugggccacuu

SEQ ID NO: 2277749 - RNA, 12 nt, Human
ccaggacugggc

SEQ ID NO: 2277750 - RNA, 13 nt, Human
ccaggacugggcc

SEQ ID NO: 2277751 - RNA, 14 nt, Human
ccaggacugagccc

SEQ ID NO: 2277752 - RNA, 15 nt, Human
ccaggacugagcccc

SEQ ID NO: 2277753 - RNA, 16 nt, Human
ccaggacugagccccg

SEQ ID NO: 2277754 - RNA, 19 nt, Human
ccaggacugagccccgcag

SEQ ID NO: 2277755 - RNA, 19 nt, Human
ccaggacggggccggccag

SEQ ID NO: 2277756 - RNA, 16 nt, Human
ccaggacggggccggc

SEQ ID NO: 2277757 - RNA, 18 nt, Human
ccaggacggggccggcca

SEQ ID NO: 2277758 - RNA, 19 nt, Human
ccaggacgcuucugaaugc

SEQ ID NO: 2277759 - RNA, 20 nt, Human
ccaggacgcuucugaaugcu

SEQ ID NO: 2277760 - RNA, 22 nt, Human
ccaggacgcuucugaaugcugc

SEQ ID NO: 2277761 - RNA, 23 nt, Human
ccaggacgcuucugaaugcugcu

SEQ ID NO: 2277762 - RNA, 13 nt, Human
ccaggacugagcc

SEQ ID NO: 2277763 - RNA, 23 nt, Human
ccaggagaaccacuacaugcagc

SEQ ID NO: 2277764 - RNA, 21 nt, Human
ccaggagaaccacuacaugca

SEQ ID NO: 2277765 - RNA, 12 nt, Human
ccaggagaacug

SEQ ID NO: 2277766 - RNA, 19 nt, Human
ccaggagcaaauguuucug

SEQ ID NO: 2277767 - RNA, 23 nt, Human
ccaggagcaaauguuucugcagu

SEQ ID NO: 2277768 - RNA, 12 nt, Human
ccaggagcagcc

SEQ ID NO: 2277769 - RNA, 13 nt, Human
ccaggagcagcca

SEQ ID NO: 2277770 - RNA, 23 nt, Human
ccagcuguggguacagagagguc

SEQ ID NO: 2277771 - RNA, 22 nt, Human
ccagcuguggguacagagaggu

SEQ ID NO: 2277772 - RNA, 19 nt, Human
ccagcugugagccuuggcu

SEQ ID NO: 2277773 - RNA, 20 nt, Human
ccagcugugagccuuggcug

SEQ ID NO: 2277774 - RNA, 15 nt, Human
ccagcugugagccuu

SEQ ID NO: 2277775 - RNA, 16 nt, Human
ccagcugugagccuug

SEQ ID NO: 2277776 - RNA, 17 nt, Human
ccagcugugagccuugg

SEQ ID NO: 2277777 - RNA, 18 nt, Human
ccagcugugagccuuggc

SEQ ID NO: 2277778 - RNA, 22 nt, Human
ccagcugugcucuggacaggca

SEQ ID NO: 2277779 - RNA, 23 nt, Human
ccagcugugcucuggacaggcau

SEQ ID NO: 2277780 - RNA, 14 nt, Human
ccaggaagccagca

SEQ ID NO: 2277781 - RNA, 15 nt, Human
ccaggaagccagcag

SEQ ID NO: 2277782 - RNA, 17 nt, Human
ccaggaagccagcaggc

SEQ ID NO: 2277783 - RNA, 19 nt, Human
ccaggaagccagcaggcuc

SEQ ID NO: 2277784 - RNA, 23 nt, Human
ccaggacccugaaggggccauga

SEQ ID NO: 2277785 - RNA, 19 nt, Human
ccaggacccugaaggggcc

SEQ ID NO: 2277786 - RNA, 18 nt, Human
ccaggacccugaaggggc

SEQ ID NO: 2277787 - RNA, 17 nt, Human
ccaggaccuggcugcca

SEQ ID NO: 2277788 - RNA, 15 nt, Human
ccaggaccuggcugc

SEQ ID NO: 2277789 - RNA, 18 nt, Human
ccaggaccuggcugccau

SEQ ID NO: 2277790 - RNA, 15 nt, Human
ccaggacgcuucuga

SEQ ID NO: 2277791 - RNA, 16 nt, Human
ccaggacgcuucugaa

SEQ ID NO: 2277792 - RNA, 17 nt, Human
ccaggacgcuucugaau

SEQ ID NO: 2277793 - RNA, 18 nt, Human
ccaggacgcuucugaaug

SEQ ID NO: 2277794 - RNA, 16 nt, Human
ccaggaccagcucagg

SEQ ID NO: 2277795 - RNA, 15 nt, Human
ccaggaccagcucag

SEQ ID NO: 2277796 - RNA, 14 nt, Human
ccaggaccagcuca

SEQ ID NO: 2277797 - RNA, 13 nt, Human
ccaggaccagcuc

SEQ ID NO: 2277798 - RNA, 20 nt, Human
ccaggaccagcucaggacag

SEQ ID NO: 2277799 - RNA, 17 nt, Human
ccaggaccagcucagga

SEQ ID NO: 2277800 - RNA, 14 nt, Human
ccaggaccagcugg

SEQ ID NO: 2277801 - RNA, 15 nt, Human
ccaggaccagcuggg

SEQ ID NO: 2277802 - RNA, 16 nt, Human
ccaggaccagcugggg

SEQ ID NO: 2277803 - RNA, 16 nt, Human
ccaggacccugaaggg

SEQ ID NO: 2277804 - RNA, 14 nt, Human
ccaggacccugaag

SEQ ID NO: 2277805 - RNA, 15 nt, Human
ccaggaccaucaucc

SEQ ID NO: 2277806 - RNA, 18 nt, Human
ccaggaccagcuggggcg

SEQ ID NO: 2277807 - RNA, 23 nt, Human
ccaggaccagucaaccugggcaa

SEQ ID NO: 2277808 - RNA, 14 nt, Human
ccaggccagaggga

SEQ ID NO: 2277809 - RNA, 21 nt, Human
ccaggccagagggagugacag

SEQ ID NO: 2277810 - RNA, 14 nt, Human
ccaggagcagccac

SEQ ID NO: 2277811 - RNA, 21 nt, Human
ccaggccccugccacccuggg

SEQ ID NO: 2277812 - RNA, 23 nt, Human
ccaggccccugccacccugggga

SEQ ID NO: 2277813 - RNA, 19 nt, Human
ccaggccccugccacccug

SEQ ID NO: 2277814 - RNA, 11 nt, Human
ccaggccagcc

SEQ ID NO: 2277815 - RNA, 12 nt, Human
ccaggccagccu

SEQ ID NO: 2277816 - RNA, 13 nt, Human
ccaggccagccuc

SEQ ID NO: 2277817 - RNA, 14 nt, Human
ccaggccagccucc

SEQ ID NO: 2277818 - RNA, 15 nt, Human
ccaggccagccuccg

SEQ ID NO: 2277819 - RNA, 16 nt, Human
ccaggccagccuccga

SEQ ID NO: 2277820 - RNA, 19 nt, Human
ccaggccagccuccgagag

SEQ ID NO: 2277821 - RNA, 23 nt, Human
ccaggccagccuccgagagggag

SEQ ID NO: 2277822 - RNA, 20 nt, Human
ccaggcccggggcuggcggc

SEQ ID NO: 2277823 - RNA, 21 nt, Human
ccaggccucagucucccuucu

SEQ ID NO: 2277824 - RNA, 13 nt, Human
ccaggccuccuac

SEQ ID NO: 2277825 - RNA, 18 nt, Human
ccaggccuccuacagcuu

SEQ ID NO: 2277826 - RNA, 19 nt, Human
ccaggccuccuacagcuug

SEQ ID NO: 2277827 - RNA, 16 nt, Human
ccaggcccggggcugg

SEQ ID NO: 2277828 - RNA, 20 nt, Human
ccaggccagccuccgagagg

SEQ ID NO: 2277829 - RNA, 15 nt, Human
ccaggcccggggcug

SEQ ID NO: 2277830 - RNA, 16 nt, Human
ccaggcccucugccca

SEQ ID NO: 2277831 - RNA, 17 nt, Human
ccaggcccucugcccac

SEQ ID NO: 2277832 - RNA, 18 nt, Human
ccaggcccucugcccacu

SEQ ID NO: 2277833 - RNA, 19 nt, Human
ccaggcccucugcccacuc

SEQ ID NO: 2277834 - RNA, 14 nt, Human
ccagggagaagcuc

SEQ ID NO: 2277835 - RNA, 13 nt, Human
ccagggagaagcu

SEQ ID NO: 2277836 - RNA, 15 nt, Human
ccagggagaagcucc

SEQ ID NO: 2277837 - RNA, 21 nt, Human
ccagggagacagagcucacaa

SEQ ID NO: 2277838 - RNA, 23 nt, Human
ccagggacagaggggguggccuc

SEQ ID NO: 2277839 - RNA, 22 nt, Human
ccagggacagaggccccagccu

SEQ ID NO: 2277840 - RNA, 21 nt, Human
ccagggacagaggccccagcc

SEQ ID NO: 2277841 - RNA, 23 nt, Human
ccagggacagaggccccagccuc

SEQ ID NO: 2277842 - RNA, 20 nt, Human
ccagggacagaggccccagc

SEQ ID NO: 2277843 - RNA, 18 nt, Human
ccagggacagaggcccca

SEQ ID NO: 2277844 - RNA, 13 nt, Human
ccagggacagagg

SEQ ID NO: 2277845 - RNA, 23 nt, Human
ccagggacaccagccaggcucug

SEQ ID NO: 2277846 - RNA, 16 nt, Human
ccagggaaguccccga

SEQ ID NO: 2277847 - RNA, 17 nt, Human
ccagggaagugcucuga

SEQ ID NO: 2277848 - RNA, 18 nt, Human
ccagggaagugcucugau

SEQ ID NO: 2277849 - RNA, 14 nt, Human
ccagggacaccagc

SEQ ID NO: 2277850 - RNA, 15 nt, Human
ccagggacaccagcc

SEQ ID NO: 2277851 - RNA, 16 nt, Human
ccagggacaccagcca

SEQ ID NO: 2277852 - RNA, 17 nt, Human
ccagggacaccagccag

SEQ ID NO: 2277853 - RNA, 18 nt, Human
ccagggacaccagccagg

SEQ ID NO: 2277854 - RNA, 20 nt, Human
ccagggacaccagccaggcu

SEQ ID NO: 2277855 - RNA, 21 nt, Human
ccagggacaccagccaggcuc

SEQ ID NO: 2277856 - RNA, 22 nt, Human
ccagggacaccagccaggcucu

SEQ ID NO: 2277857 - RNA, 13 nt, Human
ccagggagaccga

SEQ ID NO: 2277858 - RNA, 20 nt, Human
ccagugccuuaccuccugcc

SEQ ID NO: 2277859 - RNA, 19 nt, Human
ccagugccuuaccuccugc

SEQ ID NO: 2277860 - RNA, 18 nt, Human
ccagugccuuaccuccug

SEQ ID NO: 2277861 - RNA, 17 nt, Human
ccagugccuuaccuccu

SEQ ID NO: 2277862 - RNA, 23 nt, Human
ccagugccuuaccuccugcccag

SEQ ID NO: 2277863 - RNA, 15 nt, Human
ccagugcgauucugg

SEQ ID NO: 2277864 - RNA, 22 nt, Human
ccagugccuuaccuccugccca

SEQ ID NO: 2277865 - RNA, 21 nt, Human
ccagugccuuaccuccugccc

SEQ ID NO: 2277866 - RNA, 16 nt, Human
ccagugcgauucugga

SEQ ID NO: 2277867 - RNA, 14 nt, Human
ccagugcggcaggu

SEQ ID NO: 2277868 - RNA, 13 nt, Human
ccagugggaagau

SEQ ID NO: 2277869 - RNA, 21 nt, Human
ccaguggcugcugcccaggcc

SEQ ID NO: 2277870 - RNA, 17 nt, Human
ccaguggcuguucugga

SEQ ID NO: 2277871 - RNA, 11 nt, Human
ccagugggagg

SEQ ID NO: 2277872 - RNA, 14 nt, Human
ccagugggaggcgc

SEQ ID NO: 2277873 - RNA, 12 nt, Human
ccagugggaggg

SEQ ID NO: 2277874 - RNA, 13 nt, Human
ccagugggagggg

SEQ ID NO: 2277875 - RNA, 19 nt, Human
ccaguggcugcugcccagg

SEQ ID NO: 2277876 - RNA, 15 nt, Human
ccagugcggcagguu

SEQ ID NO: 2277877 - RNA, 22 nt, Human
ccagugggaggggcaggcugac

SEQ ID NO: 2277878 - RNA, 23 nt, Human
ccagugggaggggcaggcugaca

SEQ ID NO: 2277879 - RNA, 14 nt, Human
ccagugggaggggc

SEQ ID NO: 2277880 - RNA, 15 nt, Human
ccagugggaggggca

SEQ ID NO: 2277881 - RNA, 16 nt, Human
ccagugggaggggcag

SEQ ID NO: 2277882 - RNA, 17 nt, Human
ccagugggaggggcagg

SEQ ID NO: 2277883 - RNA, 18 nt, Human
ccagugggaggggcaggc

SEQ ID NO: 2277884 - RNA, 19 nt, Human
ccagugggaggggcaggcu

SEQ ID NO: 2277885 - RNA, 20 nt, Human
ccagugggaggggcaggcug

SEQ ID NO: 2277886 - RNA, 21 nt, Human
ccagugggaggggcaggcuga

SEQ ID NO: 2277887 - RNA, 18 nt, Human
ccaggccuuaucuccaag

SEQ ID NO: 2277888 - RNA, 22 nt, Human
ccaggcgagagacuuguggccu

SEQ ID NO: 2277889 - RNA, 20 nt, Human
ccaggccugggucugugucu

SEQ ID NO: 2277890 - RNA, 19 nt, Human
ccaggccugggucuguguc

SEQ ID NO: 2277891 - RNA, 18 nt, Human
ccaggccugggucugugu

SEQ ID NO: 2277892 - RNA, 17 nt, Human
ccaggccugggucugug

SEQ ID NO: 2277893 - RNA, 16 nt, Human
ccaggccugggucugu

SEQ ID NO: 2277894 - RNA, 13 nt, Human
ccaggccugggcc

SEQ ID NO: 2277895 - RNA, 17 nt, Human
ccaggccugggccagag

SEQ ID NO: 2277896 - RNA, 16 nt, Human
ccaggccucuuggcag

SEQ ID NO: 2277897 - RNA, 18 nt, Human
ccaggccucuuggcaguc

SEQ ID NO: 2277898 - RNA, 19 nt, Human
ccaggccucuuggcaguca

SEQ ID NO: 2277899 - RNA, 13 nt, Human
ccaggccucugug

SEQ ID NO: 2277900 - RNA, 15 nt, Human
ccaggccucuguguc

SEQ ID NO: 2277901 - RNA, 16 nt, Human
ccaggccucugugucc

SEQ ID NO: 2277902 - RNA, 17 nt, Human
ccaggccucuguguccu

SEQ ID NO: 2277903 - RNA, 18 nt, Human
ccaggccucuguguccuu

SEQ ID NO: 2277904 - RNA, 12 nt, Human
ccaggccugccu

SEQ ID NO: 2277905 - RNA, 19 nt, Human
ccaggccugaaagaggcug

SEQ ID NO: 2277906 - RNA, 17 nt, Human
ccaucauuauaaacgug

SEQ ID NO: 2277907 - RNA, 16 nt, Human
ccauccugaggcucca

SEQ ID NO: 2277908 - RNA, 21 nt, Human
ccauccucuguacagagccca

SEQ ID NO: 2277909 - RNA, 15 nt, Human
ccauccugaggcucc

SEQ ID NO: 2277910 - RNA, 18 nt, Human
ccaucacuggagcaccag

SEQ ID NO: 2277911 - RNA, 14 nt, Human
ccaucacuggagca

SEQ ID NO: 2277912 - RNA, 18 nt, Human
ccaucagaaacacccuca

SEQ ID NO: 2277913 - RNA, 20 nt, Human
ccaucauguuuacagaggac

SEQ ID NO: 2277914 - RNA, 22 nt, Human
ccaucauguuuacagaggacag

SEQ ID NO: 2277915 - RNA, 20 nt, Human
ccaucagaaacacccucaca

SEQ ID NO: 2277916 - RNA, 14 nt, Human
ccaucaugucuggc

SEQ ID NO: 2277917 - RNA, 16 nt, Human
ccaucaugucuggcua

SEQ ID NO: 2277918 - RNA, 18 nt, Human
ccaucuuugcagguugcu

SEQ ID NO: 2277919 - RNA, 22 nt, Human
ccaucuccaagaaugcugaaac

SEQ ID NO: 2277920 - RNA, 14 nt, Human
ccaucuugguaaau

SEQ ID NO: 2277921 - RNA, 17 nt, Human
ccaucuugguaaauuuc

SEQ ID NO: 2277922 - RNA, 20 nt, Human
ccaucucauguaucaucugg

SEQ ID NO: 2277923 - RNA, 16 nt, Human
ccaucuccaagaaugc

SEQ ID NO: 2277924 - RNA, 18 nt, Human
ccaucuccaagaaugcug

SEQ ID NO: 2277925 - RNA, 19 nt, Human
ccaucuccaagaaugcuga

SEQ ID NO: 2277926 - RNA, 21 nt, Human
ccaucuccaagaaugcugaaa

SEQ ID NO: 2277927 - RNA, 18 nt, Human
ccaucuccacccccagcu

SEQ ID NO: 2277928 - RNA, 21 nt, Human
ccaucucaggccaccugcccc

SEQ ID NO: 2277929 - RNA, 20 nt, Human
ccaucucaggccaccugccc

SEQ ID NO: 2277930 - RNA, 18 nt, Human
ccaucucaggccaccugc

SEQ ID NO: 2277931 - RNA, 17 nt, Human
ccaucucaggccaccug

SEQ ID NO: 2277932 - RNA, 16 nt, Human
ccaucucaggccaccu

SEQ ID NO: 2277933 - RNA, 23 nt, Human
ccaucucaggccaccugcccccu

SEQ ID NO: 2277934 - RNA, 22 nt, Human
ccaucucaggccaccugccccc

SEQ ID NO: 2277935 - RNA, 21 nt, Human
ccaucucaugccccuggcugg

SEQ ID NO: 2277936 - RNA, 20 nt, Human
ccaucucaugccccuggcug

SEQ ID NO: 2277937 - RNA, 20 nt, Human
ccauccuucccugucugcca

SEQ ID NO: 2277938 - RNA, 20 nt, Human
ccauccuuucugccucucaa

SEQ ID NO: 2277939 - RNA, 16 nt, Human
ccauccuuucugccuc

SEQ ID NO: 2277940 - RNA, 17 nt, Human
ccauccuuucugccucu

SEQ ID NO: 2277941 - RNA, 14 nt, Human
ccauccuggcccau

SEQ ID NO: 2277942 - RNA, 16 nt, Human
ccauccuggcccauca

SEQ ID NO: 2277943 - RNA, 17 nt, Human
ccauccuggcccaucag

SEQ ID NO: 2277944 - RNA, 14 nt, Human
ccauccugucccac

SEQ ID NO: 2277945 - RNA, 16 nt, Human
ccauccugucccacca

SEQ ID NO: 2277946 - RNA, 17 nt, Human
ccauccugucccaccau

SEQ ID NO: 2277947 - RNA, 22 nt, Human
ccaucgccgggacuccagaacc

SEQ ID NO: 2277948 - RNA, 14 nt, Human
ccaucgcugugugu

SEQ ID NO: 2277949 - RNA, 12 nt, Human
ccaucgccggga

SEQ ID NO: 2277950 - RNA, 16 nt, Human
ccaucgcugucaucuc

SEQ ID NO: 2277951 - RNA, 22 nt, Human
ccauauucagugcuguggccug

SEQ ID NO: 2277952 - RNA, 12 nt, Human
ccauauuuauuc

SEQ ID NO: 2277953 - RNA, 15 nt, Human
ccaucaaaaauauuc

SEQ ID NO: 2277954 - RNA, 17 nt, Human
ccaucaacaaaaauugu

SEQ ID NO: 2277955 - RNA, 19 nt, Human
ccaucaaaaugcuuuuuau

SEQ ID NO: 2277956 - RNA, 16 nt, Human
ccaucaaaaugcuuuu

SEQ ID NO: 2277957 - RNA, 18 nt, Human
ccaucaacaaaaauuguc

SEQ ID NO: 2277958 - RNA, 12 nt, Human
ccaucacccgcu

SEQ ID NO: 2277959 - RNA, 16 nt, Human
ccaucacgccugugca

SEQ ID NO: 2277960 - RNA, 19 nt, Human
ccaucacgcggccgagaca

SEQ ID NO: 2277961 - RNA, 21 nt, Human
ccauagcaagauugcuuaaaa

SEQ ID NO: 2277962 - RNA, 18 nt, Human
ccauagcaagauugcuua

SEQ ID NO: 2277963 - RNA, 16 nt, Human
ccauagaguuuaacac

SEQ ID NO: 2277964 - RNA, 17 nt, Human
ccauagaguuuaacaca

SEQ ID NO: 2277965 - RNA, 17 nt, Human
ccaguggucucacaugg

SEQ ID NO: 2277966 - RNA, 13 nt, Human
ccauagaguuuaa

SEQ ID NO: 2277967 - RNA, 15 nt, Human
ccagugguauccugu

SEQ ID NO: 2277968 - RNA, 13 nt, Human
ccaguggucucac

SEQ ID NO: 2277969 - RNA, 23 nt, Human
ccauagagagcaagacgcugugc

SEQ ID NO: 2277970 - RNA, 18 nt, Human
ccauagccaccccagaaa

SEQ ID NO: 2277971 - RNA, 21 nt, Human
ccauagaugggucuggcugag

SEQ ID NO: 2277972 - RNA, 15 nt, Human
ccauagcuccugcuc

SEQ ID NO: 2277973 - RNA, 19 nt, Human
ccauauuaccacagacaua

SEQ ID NO: 2277974 - RNA, 15 nt, Human
ccauauucuguuggc

SEQ ID NO: 2277975 - RNA, 18 nt, Human
ccauauucuguuggccag

SEQ ID NO: 2277976 - RNA, 16 nt, Human
ccauagcuccugcucc

SEQ ID NO: 2277977 - RNA, 23 nt, Human
ccauguuggccaggcuggucuca

SEQ ID NO: 2277978 - RNA, 16 nt, Human
ccaucgcuguguguua

SEQ ID NO: 2277979 - RNA, 21 nt, Human
caugcgcccccuccgcccugc

SEQ ID NO: 2277980 - RNA, 23 nt, Human
caugcgcccccuccgcccugcca

SEQ ID NO: 2277981 - RNA, 14 nt, Human
caugcgcucagggc

SEQ ID NO: 2277982 - RNA, 20 nt, Human
caugccuuccagcacccugc

SEQ ID NO: 2277983 - RNA, 21 nt, Human
caugccuuccagcacccugca

SEQ ID NO: 2277984 - RNA, 19 nt, Human
caugccuuccagcacccug

SEQ ID NO: 2277985 - RNA, 15 nt, Human
caugccuuccagcac

SEQ ID NO: 2277986 - RNA, 13 nt, Human
caugccuuccagc

SEQ ID NO: 2277987 - RNA, 23 nt, Human
caugccugugugacaucaguggc

SEQ ID NO: 2277988 - RNA, 14 nt, Human
caugccuggcuucg

SEQ ID NO: 2277989 - RNA, 21 nt, Human
caugccuguccagccugggca

SEQ ID NO: 2277990 - RNA, 23 nt, Human
caugccuguccagccugggcagc

SEQ ID NO: 2277991 - RNA, 20 nt, Human
caugccuguccagccugggc

SEQ ID NO: 2277992 - RNA, 18 nt, Human
caugccuguccagccugg

SEQ ID NO: 2277993 - RNA, 17 nt, Human
caugccuguccagccug

SEQ ID NO: 2277994 - RNA, 16 nt, Human
caugccuguccagccu

SEQ ID NO: 2277995 - RNA, 20 nt, Human
caugccugccccccucaucu

SEQ ID NO: 2277996 - RNA, 13 nt, Human
caugccuggcuuc

SEQ ID NO: 2277997 - RNA, 20 nt, Human
caugccugccccaaacaaau

SEQ ID NO: 2277998 - RNA, 16 nt, Human
caugccugagggugga

SEQ ID NO: 2277999 - RNA, 20 nt, Human
caugccugaggguggagacu

SEQ ID NO: 2278000 - RNA, 23 nt, Human
caugccuggauggggcugcaccg

SEQ ID NO: 2278001 - RNA, 18 nt, Human
caugccuggauggggcug

SEQ ID NO: 2278002 - RNA, 21 nt, Human
caugccuggauggggcugcac

SEQ ID NO: 2278003 - RNA, 17 nt, Human
caugcguguuucugacu

SEQ ID NO: 2278004 - RNA, 13 nt, Human
caugcgcacaagg

SEQ ID NO: 2278005 - RNA, 16 nt, Human
caugcguguuucugac

SEQ ID NO: 2278006 - RNA, 21 nt, Human
caugcgguagccagcacacag

SEQ ID NO: 2278007 - RNA, 19 nt, Human
caugcgguagccagcacac

SEQ ID NO: 2278008 - RNA, 17 nt, Human
caugcgguagccagcac

SEQ ID NO: 2278009 - RNA, 16 nt, Human
caugcgguagccagca

SEQ ID NO: 2278010 - RNA, 15 nt, Human
caugcgguagccagc

SEQ ID NO: 2278011 - RNA, 14 nt, Human
caugcgguagccag

SEQ ID NO: 2278012 - RNA, 13 nt, Human
caugcgguagcca

SEQ ID NO: 2278013 - RNA, 15 nt, Human
caugcgcucagggcc

SEQ ID NO: 2278014 - RNA, 22 nt, Human
caugcugucccuuacgugaguc

SEQ ID NO: 2278015 - RNA, 23 nt, Human
caugcugucuacacuaagagaga

SEQ ID NO: 2278016 - RNA, 22 nt, Human
caugcuaauauaaguuucuuug

SEQ ID NO: 2278017 - RNA, 15 nt, Human
cauggacagaagaag

SEQ ID NO: 2278018 - RNA, 21 nt, Human
cauggacagaagaaggcagca

SEQ ID NO: 2278019 - RNA, 14 nt, Human
cauggacacuccag

SEQ ID NO: 2278020 - RNA, 18 nt, Human
cauggacacuccagugcc

SEQ ID NO: 2278021 - RNA, 19 nt, Human
cauggacacuccagugcca

SEQ ID NO: 2278022 - RNA, 18 nt, Human
cauggacaggcuggcucc

SEQ ID NO: 2278023 - RNA, 16 nt, Human
cauggacaggcuggcu

SEQ ID NO: 2278024 - RNA, 15 nt, Human
cauggacaggcuggc

SEQ ID NO: 2278025 - RNA, 14 nt, Human
cauggacaggcugg

SEQ ID NO: 2278026 - RNA, 18 nt, Human
cauggacaugaucuucuu

SEQ ID NO: 2278027 - RNA, 12 nt, Human
cauggacuugua

SEQ ID NO: 2278028 - RNA, 13 nt, Human
cauggacuuguau

SEQ ID NO: 2278029 - RNA, 16 nt, Human
cauggacuuguauauu

SEQ ID NO: 2278030 - RNA, 22 nt, Human
cauggacuuguauauuuguaca

SEQ ID NO: 2278031 - RNA, 19 nt, Human
cauggaacucauuccugcc

SEQ ID NO: 2278032 - RNA, 17 nt, Human
cauggaacucauuccug

SEQ ID NO: 2278033 - RNA, 21 nt, Human
cauggaacucauuccugccug

SEQ ID NO: 2278034 - RNA, 13 nt, Human
cauggaagauuga

SEQ ID NO: 2278035 - RNA, 16 nt, Human
cauggaauaacaugua

SEQ ID NO: 2278036 - RNA, 12 nt, Human
cauggacacucc

SEQ ID NO: 2278037 - RNA, 21 nt, Human
cauggaaugguuauaaaagug

SEQ ID NO: 2278038 - RNA, 22 nt, Human
cauggaaugguuauaaaaguga

SEQ ID NO: 2278039 - RNA, 15 nt, Human
cauggaaugcuugaa

SEQ ID NO: 2278040 - RNA, 18 nt, Human
cauggaaugcuugaaaaa

SEQ ID NO: 2278041 - RNA, 21 nt, Human
cauggaaugcuugaaaaaugu

SEQ ID NO: 2278042 - RNA, 20 nt, Human
cauggaaugcuugaaaaaug

SEQ ID NO: 2278043 - RNA, 14 nt, Human
cauggaaugguuau

SEQ ID NO: 2278044 - RNA, 15 nt, Human
cauggaaugguuaua

SEQ ID NO: 2278045 - RNA, 17 nt, Human
cauggaaugguuauaaa

SEQ ID NO: 2278046 - RNA, 19 nt, Human
caugcugugauugugccua

SEQ ID NO: 2278047 - RNA, 16 nt, Human
caugcuguugauugcu

SEQ ID NO: 2278048 - RNA, 17 nt, Human
caugcuguugauugcua

SEQ ID NO: 2278049 - RNA, 18 nt, Human
caugcuguugauugcuaa

SEQ ID NO: 2278050 - RNA, 19 nt, Human
caugcuguugauugcuaaa

SEQ ID NO: 2278051 - RNA, 20 nt, Human
caugcuguugauugcuaaau

SEQ ID NO: 2278052 - RNA, 21 nt, Human
caugcuguugauugcuaaaug

SEQ ID NO: 2278053 - RNA, 22 nt, Human
caugcuguugauugcuaaaugu

SEQ ID NO: 2278054 - RNA, 23 nt, Human
caugcuguugauugcuaaaugua

SEQ ID NO: 2278055 - RNA, 15 nt, Human
caugcuuagucacug

SEQ ID NO: 2278056 - RNA, 16 nt, Human
caugcuuagucacugc

SEQ ID NO: 2278057 - RNA, 17 nt, Human
caugcuuagucacugcc

SEQ ID NO: 2278058 - RNA, 21 nt, Human
caugcuuagucacugccugca

SEQ ID NO: 2278059 - RNA, 18 nt, Human
caugcuuagucacugccu

SEQ ID NO: 2278060 - RNA, 19 nt, Human
caugcuuagucacugccug

SEQ ID NO: 2278061 - RNA, 16 nt, Human
cauggaacucauuccu

SEQ ID NO: 2278062 - RNA, 20 nt, Human
cauggaaguacuauaauuua

SEQ ID NO: 2278063 - RNA, 22 nt, Human
cauggaaguacuauaauuuacc

SEQ ID NO: 2278064 - RNA, 12 nt, Human
cauggauguuuu

SEQ ID NO: 2278065 - RNA, 19 nt, Human
cauggaugggggaacucag

SEQ ID NO: 2278066 - RNA, 22 nt, Human
cauggauguuuuagccauuguu

SEQ ID NO: 2278067 - RNA, 22 nt, Human
cauggcaccuucagacuuugcu

SEQ ID NO: 2278068 - RNA, 20 nt, Human
cauggcaccaaagccaccag

SEQ ID NO: 2278069 - RNA, 19 nt, Human
cauggcaccaaagccacca

SEQ ID NO: 2278070 - RNA, 18 nt, Human
caugggaaugaaugucag

SEQ ID NO: 2278071 - RNA, 13 nt, Human
cauggcagaaggc

SEQ ID NO: 2278072 - RNA, 16 nt, Human
cauggcacuugcaucu

SEQ ID NO: 2278073 - RNA, 18 nt, Human
cauggcacuugcaucugu

SEQ ID NO: 2278074 - RNA, 23 nt, Human
cauggcaccuucagacuuugcuu

SEQ ID NO: 2278075 - RNA, 17 nt, Human
cauggaguguguauugu

SEQ ID NO: 2278076 - RNA, 14 nt, Human
cauggaguguguau

SEQ ID NO: 2278077 - RNA, 22 nt, Human
cauggaguguguauuguuccca

SEQ ID NO: 2278078 - RNA, 20 nt, Human
cauggaguguguauuguucc

SEQ ID NO: 2278079 - RNA, 18 nt, Human
cauggaguguguauuguu

SEQ ID NO: 2278080 - RNA, 21 nt, Human
cauggaguguguauuguuccc

SEQ ID NO: 2278081 - RNA, 15 nt, Human
cauggaugagagucc

SEQ ID NO: 2278082 - RNA, 18 nt, Human
cauggauauaguuuuacu

SEQ ID NO: 2278083 - RNA, 16 nt, Human
cauggaguauauguca

SEQ ID NO: 2278084 - RNA, 20 nt, Human
cauggagagcuggagccugg

SEQ ID NO: 2278085 - RNA, 21 nt, Human
cauggagagcuggagccuggu

SEQ ID NO: 2278086 - RNA, 15 nt, Human
cauggagaagcagaa

SEQ ID NO: 2278087 - RNA, 12 nt, Human
cauggagaaguu

SEQ ID NO: 2278088 - RNA, 17 nt, Human
cauggagaaguuaucag

SEQ ID NO: 2278089 - RNA, 15 nt, Human
cauggagacuccugc

SEQ ID NO: 2278090 - RNA, 16 nt, Human
cauggagacuccugcc

SEQ ID NO: 2278091 - RNA, 19 nt, Human
cauggagacuccugcccug

SEQ ID NO: 2278092 - RNA, 20 nt, Human
cauggagacuccugcccugu

SEQ ID NO: 2278093 - RNA, 21 nt, Human
cauggagacuccugcccuguu

SEQ ID NO: 2278094 - RNA, 14 nt, Human
cauggagagcuaga

SEQ ID NO: 2278095 - RNA, 13 nt, Human
cauggagagcugg

SEQ ID NO: 2278096 - RNA, 14 nt, Human
cauggagagcugga

SEQ ID NO: 2278097 - RNA, 16 nt, Human
cauggagagcuggagc

SEQ ID NO: 2278098 - RNA, 17 nt, Human
cauggagagcuggagcc

SEQ ID NO: 2278099 - RNA, 17 nt, Human
cauggagguuugaagau

SEQ ID NO: 2278100 - RNA, 21 nt, Human
cauggagauagccccacagga

SEQ ID NO: 2278101 - RNA, 10 nt, Human
cauggagcca

SEQ ID NO: 2278102 - RNA, 20 nt, Human
cauggagaaacccugucucu

SEQ ID NO: 2278103 - RNA, 17 nt, Human
cauggagaaacccuguc

SEQ ID NO: 2278104 - RNA, 16 nt, Human
cauggagaaacccugu

SEQ ID NO: 2278105 - RNA, 15 nt, Human
cauggagaaacccug

SEQ ID NO: 2278106 - RNA, 14 nt, Human
cauggagaaacccu

SEQ ID NO: 2278107 - RNA, 11 nt, Human
cauggagaaac

SEQ ID NO: 2278108 - RNA, 17 nt, Human
cauggacuuguauauuu

SEQ ID NO: 2278109 - RNA, 11 nt, Human
cauggacuuug

SEQ ID NO: 2278110 - RNA, 13 nt, Human
cauggacuuuguu

SEQ ID NO: 2278111 - RNA, 16 nt, Human
cauggucagcccuagg

SEQ ID NO: 2278112 - RNA, 19 nt, Human
cauggucagcccuagggug

SEQ ID NO: 2278113 - RNA, 21 nt, Human
cauggucacacacugaugcuu

SEQ ID NO: 2278114 - RNA, 17 nt, Human
cauggucacacacugau

SEQ ID NO: 2278115 - RNA, 16 nt, Human
cauggggugggccucu

SEQ ID NO: 2278116 - RNA, 17 nt, Human
cauggggugggccucug

SEQ ID NO: 2278117 - RNA, 18 nt, Human
cauggggugggccucugg

SEQ ID NO: 2278118 - RNA, 19 nt, Human
cauggggugggccucuggu

SEQ ID NO: 2278119 - RNA, 19 nt, Human
caugggggcagggcaugac

SEQ ID NO: 2278120 - RNA, 14 nt, Human
caugggggcagggc

SEQ ID NO: 2278121 - RNA, 13 nt, Human
caugggggcaggg

SEQ ID NO: 2278122 - RNA, 15 nt, Human
caugggguaggagga

SEQ ID NO: 2278123 - RNA, 19 nt, Human
cauggggugaugcugggcu

SEQ ID NO: 2278124 - RNA, 13 nt, Human
cauggggugggcc

SEQ ID NO: 2278125 - RNA, 15 nt, Human
cauggggugggccuc

SEQ ID NO: 2278126 - RNA, 19 nt, Human
cauggcacuugcaucugug

SEQ ID NO: 2278127 - RNA, 11 nt, Human
cauggggaggg

SEQ ID NO: 2278128 - RNA, 20 nt, Human
cauggggagggauucugguu

SEQ ID NO: 2278129 - RNA, 19 nt, Human
cauggggcugauuguauuu

SEQ ID NO: 2278130 - RNA, 23 nt, Human
cauggggagggauucugguucca

SEQ ID NO: 2278131 - RNA, 17 nt, Human
cauggggcugggcagcu

SEQ ID NO: 2278132 - RNA, 16 nt, Human
caugggccuccugugu

SEQ ID NO: 2278133 - RNA, 17 nt, Human
caugggccuccugugug

SEQ ID NO: 2278134 - RNA, 22 nt, Human
cauggcagaauaaucuuugggu

SEQ ID NO: 2278135 - RNA, 21 nt, Human
cauggcagaauaaucuuuggg

SEQ ID NO: 2278136 - RNA, 17 nt, Human
caugggcccaggaaugc

SEQ ID NO: 2278137 - RNA, 15 nt, Human
caugggccuccugug

SEQ ID NO: 2278138 - RNA, 22 nt, Human
caugggaaugaaugucagugug

SEQ ID NO: 2278139 - RNA, 17 nt, Human
caugggacagggaggac

SEQ ID NO: 2278140 - RNA, 19 nt, Human
caugccucagcccugaccc

SEQ ID NO: 2278141 - RNA, 20 nt, Human
caugccucagcccugacccu

SEQ ID NO: 2278142 - RNA, 13 nt, Human
caugccuggaugg

SEQ ID NO: 2278143 - RNA, 11 nt, Human
caugccugagg

SEQ ID NO: 2278144 - RNA, 13 nt, Human
caugccugagggu

SEQ ID NO: 2278145 - RNA, 15 nt, Human
caugccugagggugg

SEQ ID NO: 2278146 - RNA, 16 nt, Human
caugccucucucaggc

SEQ ID NO: 2278147 - RNA, 17 nt, Human
caugccucucucaggcc

SEQ ID NO: 2278148 - RNA, 18 nt, Human
caugccucucucaggcca

SEQ ID NO: 2278149 - RNA, 19 nt, Human
caugccucucucaggccaa

SEQ ID NO: 2278150 - RNA, 11 nt, Human
caugccucagc

SEQ ID NO: 2278151 - RNA, 14 nt, Human
caugccucagcccu

SEQ ID NO: 2278152 - RNA, 16 nt, Human
caugccucagcccuga

SEQ ID NO: 2278153 - RNA, 14 nt, Human
caugccgggcgcag

SEQ ID NO: 2278154 - RNA, 23 nt, Human
caugcccugugcaaccucuuggc

SEQ ID NO: 2278155 - RNA, 20 nt, Human
caugcccuguucagcuacuc

SEQ ID NO: 2278156 - RNA, 14 nt, Human
caugccucucucag

SEQ ID NO: 2278157 - RNA, 15 nt, Human
caugccucucucagg

SEQ ID NO: 2278158 - RNA, 21 nt, Human
caugcccggcuaauuuuugua

SEQ ID NO: 2278159 - RNA, 16 nt, Human
caugccccuggcuggg

SEQ ID NO: 2278160 - RNA, 15 nt, Human
caugccccuggcugg

SEQ ID NO: 2278161 - RNA, 19 nt, Human
caugccccggccaccucug

SEQ ID NO: 2278162 - RNA, 20 nt, Human
caugccccggccaccucugc

SEQ ID NO: 2278163 - RNA, 21 nt, Human
caugccccggccaccucugcg

SEQ ID NO: 2278164 - RNA, 14 nt, Human
caugccccuggcug

SEQ ID NO: 2278165 - RNA, 19 nt, Human
caugcccugugcaaccucu

SEQ ID NO: 2278166 - RNA, 18 nt, Human
caugcccugugcaaccuc

SEQ ID NO: 2278167 - RNA, 14 nt, Human
caugcccugugcaa

SEQ ID NO: 2278168 - RNA, 17 nt, Human
caugcccuccucuccca

SEQ ID NO: 2278169 - RNA, 15 nt, Human
caugcccuccucucc

SEQ ID NO: 2278170 - RNA, 14 nt, Human
caugcccuccucuc

SEQ ID NO: 2278171 - RNA, 13 nt, Human
caugcccuccucu

SEQ ID NO: 2278172 - RNA, 20 nt, Human
caugcccuccucucccauug

SEQ ID NO: 2278173 - RNA, 15 nt, Human
caugcagcugcaccc

SEQ ID NO: 2278174 - RNA, 21 nt, Human
caugcagcugcacccucccuc

SEQ ID NO: 2278175 - RNA, 12 nt, Human
caugcauaaaua

SEQ ID NO: 2278176 - RNA, 20 nt, Human
caugcagcugcacccucccu

SEQ ID NO: 2278177 - RNA, 13 nt, Human
caugcauaaauau

SEQ ID NO: 2278178 - RNA, 15 nt, Human
caugcauaaauaugc

SEQ ID NO: 2278179 - RNA, 16 nt, Human
caugcauaaauaugca

SEQ ID NO: 2278180 - RNA, 17 nt, Human
caugcauaaauaugcag

SEQ ID NO: 2278181 - RNA, 18 nt, Human
caugcauaaauaugcagu

SEQ ID NO: 2278182 - RNA, 19 nt, Human
caugcauaaauaugcagug

SEQ ID NO: 2278183 - RNA, 14 nt, Human
caugcauacacaca

SEQ ID NO: 2278184 - RNA, 13 nt, Human
caugcauacacac

SEQ ID NO: 2278185 - RNA, 12 nt, Human
caugcauacaca

SEQ ID NO: 2278186 - RNA, 11 nt, Human
caugcauacac

SEQ ID NO: 2278187 - RNA, 22 nt, Human
caugcauaaauaugcagugaua

SEQ ID NO: 2278188 - RNA, 16 nt, Human
caugcauacuucaaaa

SEQ ID NO: 2278189 - RNA, 17 nt, Human
caugcauacuucaaaag

SEQ ID NO: 2278190 - RNA, 20 nt, Human
caugcauacuucaaaaguau

SEQ ID NO: 2278191 - RNA, 15 nt, Human
caugcauacuucaaa

SEQ ID NO: 2278192 - RNA, 23 nt, Human
caugcauacacacacacacacag

SEQ ID NO: 2278193 - RNA, 16 nt, Human
caugcauacacacaca

SEQ ID NO: 2278194 - RNA, 15 nt, Human
caugcauacacacac

SEQ ID NO: 2278195 - RNA, 14 nt, Human
caugcaucaaguua

SEQ ID NO: 2278196 - RNA, 16 nt, Human
caugcaucuccaccug

SEQ ID NO: 2278197 - RNA, 17 nt, Human
caugcaucuccaccugc

SEQ ID NO: 2278198 - RNA, 18 nt, Human
caugcaucuccaccugcu

SEQ ID NO: 2278199 - RNA, 15 nt, Human
caugcaucuccaccu

SEQ ID NO: 2278200 - RNA, 21 nt, Human
caugcauacuucaaaaguauu

SEQ ID NO: 2278201 - RNA, 17 nt, Human
caugcaucuuacugaag

SEQ ID NO: 2278202 - RNA, 16 nt, Human
caugcaucuuacugaa

SEQ ID NO: 2278203 - RNA, 14 nt, Human
caugcaucuuacug

SEQ ID NO: 2278204 - RNA, 15 nt, Human
caucuuguguuuuau

SEQ ID NO: 2278205 - RNA, 21 nt, Human
caugcccaccugcccaucaca

SEQ ID NO: 2278206 - RNA, 23 nt, Human
caugcccacccccugcccugcac

SEQ ID NO: 2278207 - RNA, 22 nt, Human
caugcccagucgauaucucacu

SEQ ID NO: 2278208 - RNA, 13 nt, Human
caugccccccuca

SEQ ID NO: 2278209 - RNA, 14 nt, Human
caugccccccucaa

SEQ ID NO: 2278210 - RNA, 19 nt, Human
caugccccccucaaaccuc

SEQ ID NO: 2278211 - RNA, 21 nt, Human
caugccccccucaaaccuccu

SEQ ID NO: 2278212 - RNA, 23 nt, Human
caugccccccucaaaccuccucu

SEQ ID NO: 2278213 - RNA, 15 nt, Human
caugcccccucgugc

SEQ ID NO: 2278214 - RNA, 13 nt, Human
caugccccugaac

SEQ ID NO: 2278215 - RNA, 16 nt, Human
caugcccccucgugcc

SEQ ID NO: 2278216 - RNA, 17 nt, Human
caugcccccucgugcca

SEQ ID NO: 2278217 - RNA, 19 nt, Human
caugcccccucgugccagu

SEQ ID NO: 2278218 - RNA, 15 nt, Human
caugcccccuuucag

SEQ ID NO: 2278219 - RNA, 16 nt, Human
caugccccggccaccu

SEQ ID NO: 2278220 - RNA, 17 nt, Human
caugccccggccaccuc

SEQ ID NO: 2278221 - RNA, 18 nt, Human
caugccccggccaccucu

SEQ ID NO: 2278222 - RNA, 17 nt, Human
caugcccaccugcccau

SEQ ID NO: 2278223 - RNA, 16 nt, Human
caugcccaccugccca

SEQ ID NO: 2278224 - RNA, 14 nt, Human
caugcccaccugcc

SEQ ID NO: 2278225 - RNA, 13 nt, Human
caugcccaccugc

SEQ ID NO: 2278226 - RNA, 15 nt, Human
caugcccacccccug

SEQ ID NO: 2278227 - RNA, 16 nt, Human
caugcccacccccugc

SEQ ID NO: 2278228 - RNA, 17 nt, Human
caugcccacccccugcc

SEQ ID NO: 2278229 - RNA, 18 nt, Human
caugcccacccccugccc

SEQ ID NO: 2278230 - RNA, 19 nt, Human
caugcccacccccugcccu

SEQ ID NO: 2278231 - RNA, 20 nt, Human
caugcccacccccugcccug

SEQ ID NO: 2278232 - RNA, 21 nt, Human
caugcccacccccugcccugc

SEQ ID NO: 2278233 - RNA, 22 nt, Human
caugcccacccccugcccugca

SEQ ID NO: 2278234 - RNA, 19 nt, Human
caugcauuuugcagcagug

SEQ ID NO: 2278235 - RNA, 17 nt, Human
caugccagugacacuuc

SEQ ID NO: 2278236 - RNA, 13 nt, Human
caugcccaccccc

SEQ ID NO: 2278237 - RNA, 20 nt, Human
caugcauuuugcagcaguga

SEQ ID NO: 2278238 - RNA, 22 nt, Human
caugcauuguugagguggucug

SEQ ID NO: 2278239 - RNA, 20 nt, Human
caugcauuguugaggugguc

SEQ ID NO: 2278240 - RNA, 17 nt, Human
caugcauuguugaggug

SEQ ID NO: 2278241 - RNA, 14 nt, Human
caugcauucauaca

SEQ ID NO: 2278242 - RNA, 11 nt, Human
caugcauuguu

SEQ ID NO: 2278243 - RNA, 20 nt, Human
caugcauuacugcaugcacu

SEQ ID NO: 2278244 - RNA, 17 nt, Human
caugcauuacugcaugc

SEQ ID NO: 2278245 - RNA, 15 nt, Human
caugcauuacugcau

SEQ ID NO: 2278246 - RNA, 17 nt, Human
caugcauggaaauuccc

SEQ ID NO: 2278247 - RNA, 16 nt, Human
caugcauguccuguaa

SEQ ID NO: 2278248 - RNA, 15 nt, Human
caugcauggaaauuc

SEQ ID NO: 2278249 - RNA, 21 nt, Human
caugcauguccuguaaagguu

SEQ ID NO: 2278250 - RNA, 14 nt, Human
caugcaugugcuug

SEQ ID NO: 2278251 - RNA, 18 nt, Human
caugcauguuaugcuuua

SEQ ID NO: 2278252 - RNA, 18 nt, Human
caugcauguccuguaaag

SEQ ID NO: 2278253 - RNA, 17 nt, Human
caugcauguccuguaaa

SEQ ID NO: 2278254 - RNA, 19 nt, Human
caugccacuacacuccagc

SEQ ID NO: 2278255 - RNA, 21 nt, Human
caugccaccauggccagccaa

SEQ ID NO: 2278256 - RNA, 21 nt, Human
caugccagcuacuuccuccuc

SEQ ID NO: 2278257 - RNA, 18 nt, Human
caugccaagcacugugcu

SEQ ID NO: 2278258 - RNA, 14 nt, Human
caugcauuuugcag

SEQ ID NO: 2278259 - RNA, 17 nt, Human
caugcauuugaggucaa

SEQ ID NO: 2278260 - RNA, 21 nt, Human
caugccacaaggacuuccugu

SEQ ID NO: 2278261 - RNA, 17 nt, Human
caugccacaaggacuuc

SEQ ID NO: 2278262 - RNA, 20 nt, Human
caugccagcuuaucucaggg

SEQ ID NO: 2278263 - RNA, 19 nt, Human
caugccagcuuaucucagg

SEQ ID NO: 2278264 - RNA, 17 nt, Human
caugugaaaaucaaaua

SEQ ID NO: 2278265 - RNA, 19 nt, Human
caugugaaaaucaaauaca

SEQ ID NO: 2278266 - RNA, 12 nt, Human
caugugaaaccu

SEQ ID NO: 2278267 - RNA, 13 nt, Human
caugugaaaccuu

SEQ ID NO: 2278268 - RNA, 14 nt, Human
caugugaaaccuuu

SEQ ID NO: 2278269 - RNA, 18 nt, Human
caugugaaaccuuuuuua

SEQ ID NO: 2278270 - RNA, 15 nt, Human
caugugaaaucauuc

SEQ ID NO: 2278271 - RNA, 16 nt, Human
caugugaaaucauuca

SEQ ID NO: 2278272 - RNA, 17 nt, Human
caugugaaaucauucau

SEQ ID NO: 2278273 - RNA, 14 nt, Human
caugucuuuucuug

SEQ ID NO: 2278274 - RNA, 19 nt, Human
caugucuuuucuugcauga

SEQ ID NO: 2278275 - RNA, 21 nt, Human
caugucuuuucuugcaugagg

SEQ ID NO: 2278276 - RNA, 23 nt, Human
caugucuuuucuugcaugaggcu

SEQ ID NO: 2278277 - RNA, 21 nt, Human
cauguaauuaaguacuaugua

SEQ ID NO: 2278278 - RNA, 18 nt, Human
cauguaauuaaguacuau

SEQ ID NO: 2278279 - RNA, 15 nt, Human
cauguacaaaaccau

SEQ ID NO: 2278280 - RNA, 14 nt, Human
cauguaaucaguuu

SEQ ID NO: 2278281 - RNA, 23 nt, Human
cauguacaaaaucgauuggcuuu

SEQ ID NO: 2278282 - RNA, 21 nt, Human
cauguacaaaaucgauuggcu

SEQ ID NO: 2278283 - RNA, 13 nt, Human
cauguacagagaa

SEQ ID NO: 2278284 - RNA, 22 nt, Human
cauguacagagaacuaacacua

SEQ ID NO: 2278285 - RNA, 10 nt, Human
cauguacagu

SEQ ID NO: 2278286 - RNA, 11 nt, Human
cauguacagug

SEQ ID NO: 2278287 - RNA, 15 nt, Human
cauguacaguguucu

SEQ ID NO: 2278288 - RNA, 19 nt, Human
cauguacaguguucuguuu

SEQ ID NO: 2278289 - RNA, 20 nt, Human
cauguacaguguucuguuua

SEQ ID NO: 2278290 - RNA, 21 nt, Human
cauguacaguguucuguuuaa

SEQ ID NO: 2278291 - RNA, 22 nt, Human
cauguacaguguucuguuuaau

SEQ ID NO: 2278292 - RNA, 18 nt, Human
caugucgccucugcauuc

SEQ ID NO: 2278293 - RNA, 20 nt, Human
caugucgccucugcauucag

SEQ ID NO: 2278294 - RNA, 23 nt, Human
caugucuuguacauguguagccu

SEQ ID NO: 2278295 - RNA, 19 nt, Human
caugucgcgcucagcaugc

SEQ ID NO: 2278296 - RNA, 22 nt, Human
caugucgcgcucagcaugcauc

SEQ ID NO: 2278297 - RNA, 22 nt, Human
cauguccuuguguguuuugaga

SEQ ID NO: 2278298 - RNA, 21 nt, Human
cauguccuuagcacagggggg

SEQ ID NO: 2278299 - RNA, 17 nt, Human
caugucgcgcucagcau

SEQ ID NO: 2278300 - RNA, 14 nt, Human
caugucgccucugc

SEQ ID NO: 2278301 - RNA, 15 nt, Human
caugucgccucugca

SEQ ID NO: 2278302 - RNA, 19 nt, Human
cauguccuuguguguuuug

SEQ ID NO: 2278303 - RNA, 15 nt, Human
cauguacaugaagaa

SEQ ID NO: 2278304 - RNA, 14 nt, Human
cauggugccugaga

SEQ ID NO: 2278305 - RNA, 13 nt, Human
cauggugccugag

SEQ ID NO: 2278306 - RNA, 22 nt, Human
cauggugccccaggaccagcuc

SEQ ID NO: 2278307 - RNA, 20 nt, Human
cauggugccccaggaccagc

SEQ ID NO: 2278308 - RNA, 19 nt, Human
cauggugccccaggaccag

SEQ ID NO: 2278309 - RNA, 18 nt, Human
cauggugccccaggacca

SEQ ID NO: 2278310 - RNA, 17 nt, Human
cauggugccccaggacc

SEQ ID NO: 2278311 - RNA, 16 nt, Human
cauggugccccaggac

SEQ ID NO: 2278312 - RNA, 20 nt, Human
caugguccgguguccuuuuc

SEQ ID NO: 2278313 - RNA, 16 nt, Human
cauggugaauuaauca

SEQ ID NO: 2278314 - RNA, 17 nt, Human
caugguccgguguccuu

SEQ ID NO: 2278315 - RNA, 19 nt, Human
cauggugcaguugacagca

SEQ ID NO: 2278316 - RNA, 21 nt, Human
cauggugcaguugacagcagg

SEQ ID NO: 2278317 - RNA, 15 nt, Human
cauggugccccagga

SEQ ID NO: 2278318 - RNA, 20 nt, Human
cauggugacuuuugaaaaga

SEQ ID NO: 2278319 - RNA, 16 nt, Human
cauggucggaaaacau

SEQ ID NO: 2278320 - RNA, 22 nt, Human
cauggugugaaagucagaugcc

SEQ ID NO: 2278321 - RNA, 12 nt, Human
cauggugucugg

SEQ ID NO: 2278322 - RNA, 23 nt, Human
cauggugugaaagucagaugccc

SEQ ID NO: 2278323 - RNA, 18 nt, Human
cauggugugaucgucuga

SEQ ID NO: 2278324 - RNA, 15 nt, Human
cauggugccugagag

SEQ ID NO: 2278325 - RNA, 16 nt, Human
cauggugccugagagg

SEQ ID NO: 2278326 - RNA, 17 nt, Human
cauggugccugagaggc

SEQ ID NO: 2278327 - RNA, 15 nt, Human
caugguguaauaaga

SEQ ID NO: 2278328 - RNA, 16 nt, Human
caugguguaauaagac

SEQ ID NO: 2278329 - RNA, 18 nt, Human
caugguguaauaagacau

SEQ ID NO: 2278330 - RNA, 19 nt, Human
caugguguaauaagacaua

SEQ ID NO: 2278331 - RNA, 21 nt, Human
caugguguaauaagacauaac

SEQ ID NO: 2278332 - RNA, 14 nt, Human
caugguugagaaau

SEQ ID NO: 2278333 - RNA, 19 nt, Human
caugguuaagguaaaguaa

SEQ ID NO: 2278334 - RNA, 21 nt, Human
caugguuacaaucauugcuga

SEQ ID NO: 2278335 - RNA, 22 nt, Human
caugguguaauaagacauaacg

SEQ ID NO: 2278336 - RNA, 22 nt, Human
cauguaauaaaaaguauauguu

SEQ ID NO: 2278337 - RNA, 23 nt, Human
cauguaauauaaagauguuaaaa

SEQ ID NO: 2278338 - RNA, 21 nt, Human
cauguaauaaaaaguauaugu

SEQ ID NO: 2278339 - RNA, 12 nt, Human
cauguaauaaaa

SEQ ID NO: 2278340 - RNA, 21 nt, Human
cauguaaugguaucuuaaagu

SEQ ID NO: 2278341 - RNA, 14 nt, Human
cauguaauccucaa

SEQ ID NO: 2278342 - RNA, 18 nt, Human
cauguaagcugaaaauau

SEQ ID NO: 2278343 - RNA, 23 nt, Human
cauguaagcugaaaauauggcaa

SEQ ID NO: 2278344 - RNA, 17 nt, Human
cauguaagcugaaaaua

SEQ ID NO: 2278345 - RNA, 16 nt, Human
cauguaaauuuuguau

SEQ ID NO: 2278346 - RNA, 16 nt, Human
caugguugagaaauga

SEQ ID NO: 2278347 - RNA, 13 nt, Human
cauguaacagaaa

SEQ ID NO: 2278348 - RNA, 14 nt, Human
cauguaacagaaag

SEQ ID NO: 2278349 - RNA, 15 nt, Human
cauguaacagaaagg

SEQ ID NO: 2278350 - RNA, 17 nt, Human
cauguaacagaaagggc

SEQ ID NO: 2278351 - RNA, 17 nt, Human
caugugguuaaugccau

SEQ ID NO: 2278352 - RNA, 21 nt, Human
cauguggugggacagggaccc

SEQ ID NO: 2278353 - RNA, 12 nt, Human
caugugguggga

SEQ ID NO: 2278354 - RNA, 23 nt, Human
caugugguggcacaggcccccuu

SEQ ID NO: 2278355 - RNA, 23 nt, Human
cauguggggccaggucacccuuu

SEQ ID NO: 2278356 - RNA, 18 nt, Human
cauguggggccaggucac

SEQ ID NO: 2278357 - RNA, 22 nt, Human
caugugguggcacaggcccccu

SEQ ID NO: 2278358 - RNA, 20 nt, Human
caugugguuuauagagggcc

SEQ ID NO: 2278359 - RNA, 15 nt, Human
caugugguuuauaga

SEQ ID NO: 2278360 - RNA, 22 nt, Human
caugugguuaaugccauggaca

SEQ ID NO: 2278361 - RNA, 13 nt, Human
caugugugcgugu

SEQ ID NO: 2278362 - RNA, 17 nt, Human
caugugugcucuucuuc

SEQ ID NO: 2278363 - RNA, 19 nt, Human
caugugugcgagugugugc

SEQ ID NO: 2278364 - RNA, 17 nt, Human
caugugugcgagugugu

SEQ ID NO: 2278365 - RNA, 18 nt, Human
caugugugcaacagggua

SEQ ID NO: 2278366 - RNA, 16 nt, Human
cauguguaaucaauaa

SEQ ID NO: 2278367 - RNA, 17 nt, Human
cauguguaaucaauaaa

SEQ ID NO: 2278368 - RNA, 21 nt, Human
caugugugagugugugcaagu

SEQ ID NO: 2278369 - RNA, 12 nt, Human
caugugggagcu

SEQ ID NO: 2278370 - RNA, 13 nt, Human
cauguggcuggaa

SEQ ID NO: 2278371 - RNA, 15 nt, Human
cauguggcuggaaga

SEQ ID NO: 2278372 - RNA, 14 nt, Human
cauguggggccagg

SEQ ID NO: 2278373 - RNA, 15 nt, Human
cauguggggccaggu

SEQ ID NO: 2278374 - RNA, 17 nt, Human
cauguggggccagguca

SEQ ID NO: 2278375 - RNA, 17 nt, Human
cauguggaauauaaaga

SEQ ID NO: 2278376 - RNA, 23 nt, Human
cauguggaaagugaauuugaaug

SEQ ID NO: 2278377 - RNA, 22 nt, Human
cauguggaaagugaauuugaau

SEQ ID NO: 2278378 - RNA, 21 nt, Human
cauguggaaagugaauuugaa

SEQ ID NO: 2278379 - RNA, 20 nt, Human
cauguggaaagugaauuuga

SEQ ID NO: 2278380 - RNA, 18 nt, Human
cauguggaaagugaauuu

SEQ ID NO: 2278381 - RNA, 15 nt, Human
cauguggagaaagga

SEQ ID NO: 2278382 - RNA, 19 nt, Human
cauguggagaaaggaguga

SEQ ID NO: 2278383 - RNA, 14 nt, Human
cauguggccugugg

SEQ ID NO: 2278384 - RNA, 12 nt, Human
cauguggcugga

SEQ ID NO: 2278385 - RNA, 13 nt, Human
caugugaagaggg

SEQ ID NO: 2278386 - RNA, 21 nt, Human
caugugacuccuaugaucuca

SEQ ID NO: 2278387 - RNA, 18 nt, Human
caugugaccacucugucu

SEQ ID NO: 2278388 - RNA, 12 nt, Human
caugugacucug

SEQ ID NO: 2278389 - RNA, 21 nt, Human
caugugccagguuuuuggucu

SEQ ID NO: 2278390 - RNA, 24 nt, Human
caugugccagggcaaugaugaaug

SEQ ID NO: 2278391 - RNA, 16 nt, Human
cauguggaaagugaau

SEQ ID NO: 2278392 - RNA, 17 nt, Human
cauguggaaagugaauu

SEQ ID NO: 2278393 - RNA, 22 nt, Human
caugugccagggcaaugaugaa

SEQ ID NO: 2278394 - RNA, 15 nt, Human
caugugcacaugcac

SEQ ID NO: 2278395 - RNA, 13 nt, Human
caugugacauuua

SEQ ID NO: 2278396 - RNA, 14 nt, Human
caugugacauuuau

SEQ ID NO: 2278397 - RNA, 16 nt, Human
caugugacauuuauau

SEQ ID NO: 2278398 - RNA, 16 nt, Human
caugugaccacucugu

SEQ ID NO: 2278399 - RNA, 16 nt, Human
caugugacacauaugc

SEQ ID NO: 2278400 - RNA, 12 nt, Human
caugugacauuu

SEQ ID NO: 2278401 - RNA, 14 nt, Human
caugugacacauau

SEQ ID NO: 2278402 - RNA, 15 nt, Human
caugugacacauaug

SEQ ID NO: 2278403 - RNA, 12 nt, Human
caugugacacau

SEQ ID NO: 2278404 - RNA, 13 nt, Human
caugugacacaua

SEQ ID NO: 2278405 - RNA, 21 nt, Human
caugugaaaccuuuuuuaaga

SEQ ID NO: 2278406 - RNA, 22 nt, Human
caugugaaaccuuuuuuaagau

SEQ ID NO: 2278407 - RNA, 24 nt, Human
caugugaaaccuuuuuuaagauuu

SEQ ID NO: 2278408 - RNA, 15 nt, Human
caugugaacccggga

SEQ ID NO: 2278409 - RNA, 23 nt, Human
cauguuugauguaucugagcagg

SEQ ID NO: 2278410 - RNA, 22 nt, Human
cauguuucuuuguaaugaaaac

SEQ ID NO: 2278411 - RNA, 20 nt, Human
cauguuugagcucagacccc

SEQ ID NO: 2278412 - RNA, 19 nt, Human
cauguuugagcucagaccc

SEQ ID NO: 2278413 - RNA, 18 nt, Human
cauguuuuaaagcuugcu

SEQ ID NO: 2278414 - RNA, 23 nt, Human
cauguuugagcucagacccccac

SEQ ID NO: 2278415 - RNA, 12 nt, Human
cauguuuuaaca

SEQ ID NO: 2278416 - RNA, 14 nt, Human
cauguuuuaacaaa

SEQ ID NO: 2278417 - RNA, 13 nt, Human
cauguuuuaacaa

SEQ ID NO: 2278418 - RNA, 18 nt, Human
cauguuugagcucagacc

SEQ ID NO: 2278419 - RNA, 16 nt, Human
cauguuugagcucaga

SEQ ID NO: 2278420 - RNA, 21 nt, Human
caugugugugcaagugugugc

SEQ ID NO: 2278421 - RNA, 15 nt, Human
cauguuugugauuga

SEQ ID NO: 2278422 - RNA, 23 nt, Human
cauguuuuagacaaauacucaug

SEQ ID NO: 2278423 - RNA, 20 nt, Human
cauguuuuaacaaaaaccaa

SEQ ID NO: 2278424 - RNA, 17 nt, Human
cauguuuuaacaaaaac

SEQ ID NO: 2278425 - RNA, 16 nt, Human
cauguuuuaacaaaaa

SEQ ID NO: 2278426 - RNA, 15 nt, Human
cauguuuuaacaaaa

SEQ ID NO: 2278427 - RNA, 15 nt, Human
cauguuuucaacugc

SEQ ID NO: 2278428 - RNA, 17 nt, Human
cauguuuucaacugcca

SEQ ID NO: 2278429 - RNA, 16 nt, Human
cauguuuucaacugcc

SEQ ID NO: 2278430 - RNA, 18 nt, Human
cauguuuuccagcuccuc

SEQ ID NO: 2278431 - RNA, 15 nt, Human
cauguuuuccauugu

SEQ ID NO: 2278432 - RNA, 17 nt, Human
cauguuuuccauuguuu

SEQ ID NO: 2278433 - RNA, 21 nt, Human
cauguuuuccauuguuugaaa

SEQ ID NO: 2278434 - RNA, 14 nt, Human
cauguuuugugacu

SEQ ID NO: 2278435 - RNA, 12 nt, Human
cauguuuuguau

SEQ ID NO: 2278436 - RNA, 14 nt, Human
cauguuuuccguga

SEQ ID NO: 2278437 - RNA, 21 nt, Human
cauguuuucugaaaauauaac

SEQ ID NO: 2278438 - RNA, 13 nt, Human
cauguuuugauaa

SEQ ID NO: 2278439 - RNA, 14 nt, Human
cauguuuugauaaa

SEQ ID NO: 2278440 - RNA, 17 nt, Human
cauguuuugauaaagua

SEQ ID NO: 2278441 - RNA, 18 nt, Human
cauguuuugauaaaguag

SEQ ID NO: 2278442 - RNA, 15 nt, Human
caugugugugcucag

SEQ ID NO: 2278443 - RNA, 15 nt, Human
caugugugugcaagu

SEQ ID NO: 2278444 - RNA, 23 nt, Human
cauguguguccacgacugucucc

SEQ ID NO: 2278445 - RNA, 14 nt, Human
caugugugcugaac

SEQ ID NO: 2278446 - RNA, 18 nt, Human
caugugugcucuucuucu

SEQ ID NO: 2278447 - RNA, 20 nt, Human
caugugugcucuucuucuuu

SEQ ID NO: 2278448 - RNA, 14 nt, Human
cauguguggacuca

SEQ ID NO: 2278449 - RNA, 12 nt, Human
caugugugucca

SEQ ID NO: 2278450 - RNA, 22 nt, Human
cauguguguccacgacugucuc

SEQ ID NO: 2278451 - RNA, 21 nt, Human
cauguguguccacgacugucu

SEQ ID NO: 2278452 - RNA, 20 nt, Human
cauguuucuuuguaaugaaa

SEQ ID NO: 2278453 - RNA, 21 nt, Human
cauguuucuuuguaaugaaaa

SEQ ID NO: 2278454 - RNA, 18 nt, Human
cauguuuuucuucucccu

SEQ ID NO: 2278455 - RNA, 22 nt, Human
cauuaaagcauuuacuuugaau

SEQ ID NO: 2278456 - RNA, 12 nt, Human
cauuaaagccau

SEQ ID NO: 2278457 - RNA, 18 nt, Human
cauuaaagcauuuacuuu

SEQ ID NO: 2278458 - RNA, 24 nt, Human
cauuaaaggcuucucucucaccag

SEQ ID NO: 2278459 - RNA, 17 nt, Human
cauuaaaggcuucucuc

SEQ ID NO: 2278460 - RNA, 18 nt, Human
cauuaaaggcuucucucu

SEQ ID NO: 2278461 - RNA, 21 nt, Human
cauuaaagucgagcuuuucua

SEQ ID NO: 2278462 - RNA, 13 nt, Human
cauuaaauucaca

SEQ ID NO: 2278463 - RNA, 21 nt, Human
cauuaaaggcuucucucucac

SEQ ID NO: 2278464 - RNA, 12 nt, Human
cauuaaaguucu

SEQ ID NO: 2278465 - RNA, 15 nt, Human
cauguuuuguuuacg

SEQ ID NO: 2278466 - RNA, 21 nt, Human
cauuaaagccugaguuugcuu

SEQ ID NO: 2278467 - RNA, 15 nt, Human
cauguuuugugacua

SEQ ID NO: 2278468 - RNA, 17 nt, Human
cauguuuugugacuaua

SEQ ID NO: 2278469 - RNA, 23 nt, Human
cauguuuugugacuauauagaga

SEQ ID NO: 2278470 - RNA, 17 nt, Human
cauuaauauuugcugac

SEQ ID NO: 2278471 - RNA, 18 nt, Human
cauuaaucaaucaucugu

SEQ ID NO: 2278472 - RNA, 16 nt, Human
cauuaauauuugcuga

SEQ ID NO: 2278473 - RNA, 20 nt, Human
cauuaacaguuuuccaugaa

SEQ ID NO: 2278474 - RNA, 14 nt, Human
cauuaauaauaaau

SEQ ID NO: 2278475 - RNA, 17 nt, Human
cauuaacaguuuuccau

SEQ ID NO: 2278476 - RNA, 16 nt, Human
cauuaacaguuuucca

SEQ ID NO: 2278477 - RNA, 13 nt, Human
cauuaacaguuuu

SEQ ID NO: 2278478 - RNA, 21 nt, Human
cauuaaauucacaaacuuuua

SEQ ID NO: 2278479 - RNA, 18 nt, Human
cauuaaauucacaaacuu

SEQ ID NO: 2278480 - RNA, 17 nt, Human
cauuaaauucacaaacu

SEQ ID NO: 2278481 - RNA, 14 nt, Human
cauuaaauucacaa

SEQ ID NO: 2278482 - RNA, 23 nt, Human
cauuaccagacgguucaccagcc

SEQ ID NO: 2278483 - RNA, 17 nt, Human
cauuaccgcguuguaaa

SEQ ID NO: 2278484 - RNA, 20 nt, Human
cauuaccagacgguucacca

SEQ ID NO: 2278485 - RNA, 20 nt, Human
cauuaauuauuauugcuguu

SEQ ID NO: 2278486 - RNA, 22 nt, Human
cauuaccucagugagaagccag

SEQ ID NO: 2278487 - RNA, 21 nt, Human
cauuaccucagugagaagcca

SEQ ID NO: 2278488 - RNA, 21 nt, Human
cauuaauuauuauugcuguug

SEQ ID NO: 2278489 - RNA, 19 nt, Human
cauuaauuauuauugcugu

SEQ ID NO: 2278490 - RNA, 23 nt, Human
cauuaauguuaauucagcacuga

SEQ ID NO: 2278491 - RNA, 13 nt, Human
cauuaauguuaau

SEQ ID NO: 2278492 - RNA, 21 nt, Human
cauuaauguuaauucagcacu

SEQ ID NO: 2278493 - RNA, 22 nt, Human
cauuaaucaaucaucuguguga

SEQ ID NO: 2278494 - RNA, 23 nt, Human
cauuaaucaaucaucugugugaa

SEQ ID NO: 2278495 - RNA, 22 nt, Human
cauuauuuauucagcuucauuu

SEQ ID NO: 2278496 - RNA, 13 nt, Human
cauuauuugcaug

SEQ ID NO: 2278497 - RNA, 19 nt, Human
cauuauuugcauguuaccu

SEQ ID NO: 2278498 - RNA, 14 nt, Human
cauuauuugcaugu

SEQ ID NO: 2278499 - RNA, 17 nt, Human
cauuagcaguuugcuuu

SEQ ID NO: 2278500 - RNA, 13 nt, Human
cauuacgugagcc

SEQ ID NO: 2278501 - RNA, 17 nt, Human
cauuaccuuacugugga

SEQ ID NO: 2278502 - RNA, 16 nt, Human
cauuacgugagccagg

SEQ ID NO: 2278503 - RNA, 18 nt, Human
cauuagaccaagcuuguc

SEQ ID NO: 2278504 - RNA, 17 nt, Human
cauuacgugagccaggu

SEQ ID NO: 2278505 - RNA, 13 nt, Human
cauuaccuuacug

SEQ ID NO: 2278506 - RNA, 20 nt, Human
cauuaccuuacuguggagga

SEQ ID NO: 2278507 - RNA, 18 nt, Human
cauuaccgcguuguaaaa

SEQ ID NO: 2278508 - RNA, 22 nt, Human
cauuaccgcguuguaaaauaua

SEQ ID NO: 2278509 - RNA, 23 nt, Human
cauuagagcaggcguucagcuca

SEQ ID NO: 2278510 - RNA, 13 nt, Human
cauuagagcaggc

SEQ ID NO: 2278511 - RNA, 14 nt, Human
cauuagagcaggcg

SEQ ID NO: 2278512 - RNA, 19 nt, Human
cauuagagcccauuucaau

SEQ ID NO: 2278513 - RNA, 11 nt, Human
cauuagagcag

SEQ ID NO: 2278514 - RNA, 12 nt, Human
cauuagagcagg

SEQ ID NO: 2278515 - RNA, 17 nt, Human
cauuagacuccuccucc

SEQ ID NO: 2278516 - RNA, 15 nt, Human
cauuagacuccuccu

SEQ ID NO: 2278517 - RNA, 16 nt, Human
cauuagacuccuccuc

SEQ ID NO: 2278518 - RNA, 17 nt, Human
ccaagacauugucaaua

SEQ ID NO: 2278519 - RNA, 16 nt, Human
ccaagacauugucaau

SEQ ID NO: 2278520 - RNA, 12 nt, Human
ccaagacauugu

SEQ ID NO: 2278521 - RNA, 19 nt, Human
ccaagaccuguugguucca

SEQ ID NO: 2278522 - RNA, 14 nt, Human
ccaagagaugaaga

SEQ ID NO: 2278523 - RNA, 23 nt, Human
ccaagacucccucgucgagcugg

SEQ ID NO: 2278524 - RNA, 19 nt, Human
ccaagagcagaggcagcga

SEQ ID NO: 2278525 - RNA, 12 nt, Human
ccaagagaugaa

SEQ ID NO: 2278526 - RNA, 12 nt, Human
ccaagagccuga

SEQ ID NO: 2278527 - RNA, 11 nt, Human
ccaacccuucu

SEQ ID NO: 2278528 - RNA, 13 nt, Human
ccaacccuucucc

SEQ ID NO: 2278529 - RNA, 21 nt, Human
ccaacccuucuccucuuguaa

SEQ ID NO: 2278530 - RNA, 14 nt, Human
ccaacccuucccca

SEQ ID NO: 2278531 - RNA, 18 nt, Human
ccaaccuaaccccuuucc

SEQ ID NO: 2278532 - RNA, 14 nt, Human
ccaaccuccugacc

SEQ ID NO: 2278533 - RNA, 17 nt, Human
ccaacccugccccugcc

SEQ ID NO: 2278534 - RNA, 18 nt, Human
ccaacccuggcacccagg

SEQ ID NO: 2278535 - RNA, 13 nt, Human
ccaacccugucug

SEQ ID NO: 2278536 - RNA, 12 nt, Human
ccaacccugucu

SEQ ID NO: 2278537 - RNA, 14 nt, Human
ccaacccugucugu

SEQ ID NO: 2278538 - RNA, 16 nt, Human
ccaacccuguuuccug

SEQ ID NO: 2278539 - RNA, 18 nt, Human
ccaacccuguuuccugag

SEQ ID NO: 2278540 - RNA, 12 nt, Human
ccaacccuuccc

SEQ ID NO: 2278541 - RNA, 16 nt, Human
ccaacccugccccugc

SEQ ID NO: 2278542 - RNA, 15 nt, Human
ccaacccugccccug

SEQ ID NO: 2278543 - RNA, 14 nt, Human
ccaacccugccccu

SEQ ID NO: 2278544 - RNA, 15 nt, Human
ccaacauggugaaac

SEQ ID NO: 2278545 - RNA, 23 nt, Human
ccaacauggagaaacccugucuc

SEQ ID NO: 2278546 - RNA, 22 nt, Human
ccaacauggagaaacccugucu

SEQ ID NO: 2278547 - RNA, 15 nt, Human
ccaacauggagaaac

SEQ ID NO: 2278548 - RNA, 15 nt, Human
ccaacccucaucacc

SEQ ID NO: 2278549 - RNA, 21 nt, Human
ccaacaucccauugcccuggu

SEQ ID NO: 2278550 - RNA, 20 nt, Human
ccaacaucccauugcccugg

SEQ ID NO: 2278551 - RNA, 16 nt, Human
ccaacaucucccuccc

SEQ ID NO: 2278552 - RNA, 17 nt, Human
ccaacaucgugaaaccc

SEQ ID NO: 2278553 - RNA, 13 nt, Human
ccaacccucauca

SEQ ID NO: 2278554 - RNA, 22 nt, Human
ccaaccugaccaacauggagaa

SEQ ID NO: 2278555 - RNA, 12 nt, Human
ccaaccugcuga

SEQ ID NO: 2278556 - RNA, 14 nt, Human
ccaaccuggacaac

SEQ ID NO: 2278557 - RNA, 17 nt, Human
ccaaccuggggagccag

SEQ ID NO: 2278558 - RNA, 13 nt, Human
ccaaccuggacaa

SEQ ID NO: 2278559 - RNA, 14 nt, Human
ccaaccuggggggc

SEQ ID NO: 2278560 - RNA, 16 nt, Human
ccaaccuguaauaaau

SEQ ID NO: 2278561 - RNA, 17 nt, Human
ccaaccuguaauaaaua

SEQ ID NO: 2278562 - RNA, 16 nt, Human
ccaaccugaccaacau

SEQ ID NO: 2278563 - RNA, 13 nt, Human
ccaaccugaccaa

SEQ ID NO: 2278564 - RNA, 17 nt, Human
ccaaccugcaaagaucu

SEQ ID NO: 2278565 - RNA, 19 nt, Human
ccaaccugcaaagaucugu

SEQ ID NO: 2278566 - RNA, 18 nt, Human
ccaaccugcaaagaucug

SEQ ID NO: 2278567 - RNA, 12 nt, Human
ccaaccugacca

SEQ ID NO: 2278568 - RNA, 14 nt, Human
ccaaccucuggagc

SEQ ID NO: 2278569 - RNA, 13 nt, Human
ccaaccucuggag

SEQ ID NO: 2278570 - RNA, 15 nt, Human
ccaaccuguuaccua

SEQ ID NO: 2278571 - RNA, 18 nt, Human
ccaaccuguaauaaauau

SEQ ID NO: 2278572 - RNA, 19 nt, Human
ccaaccuguaauaaauaug

SEQ ID NO: 2278573 - RNA, 20 nt, Human
ccaaccuguaauaaauauga

SEQ ID NO: 2278574 - RNA, 21 nt, Human
ccaaccuguaauaaauaugag

SEQ ID NO: 2278575 - RNA, 23 nt, Human
ccaagacagaugccccagagcug

SEQ ID NO: 2278576 - RNA, 22 nt, Human
ccaaccuguaauaaauaugagu

SEQ ID NO: 2278577 - RNA, 12 nt, Human
ccaaccuuccca

SEQ ID NO: 2278578 - RNA, 23 nt, Human
ccaaccuuagauguucuaagucu

SEQ ID NO: 2278579 - RNA, 24 nt, Human
ccaagacagaugccccagagcugu

SEQ ID NO: 2278580 - RNA, 21 nt, Human
ccaagacaugucuguucuaca

SEQ ID NO: 2278581 - RNA, 11 nt, Human
ccaagacauug

SEQ ID NO: 2278582 - RNA, 23 nt, Human
ccaagacaugucuguucuacaua

SEQ ID NO: 2278583 - RNA, 15 nt, Human
ccaagaccuucuccu

SEQ ID NO: 2278584 - RNA, 22 nt, Human
ccaaauucuuucaguggcuacc

SEQ ID NO: 2278585 - RNA, 15 nt, Human
ccaaauucuuucagu

SEQ ID NO: 2278586 - RNA, 22 nt, Human
ccaaagaguagaauugcauuga

SEQ ID NO: 2278587 - RNA, 21 nt, Human
ccaaagauauauacacaggau

SEQ ID NO: 2278588 - RNA, 14 nt, Human
ccaaagcagacagc

SEQ ID NO: 2278589 - RNA, 13 nt, Human
ccaaagcagacag

SEQ ID NO: 2278590 - RNA, 12 nt, Human
ccaaagcagggu

SEQ ID NO: 2278591 - RNA, 15 nt, Human
ccaaagcagggucug

SEQ ID NO: 2278592 - RNA, 16 nt, Human
ccaaagcagggucugg

SEQ ID NO: 2278593 - RNA, 13 nt, Human
ccaacaccaggga

SEQ ID NO: 2278594 - RNA, 16 nt, Human
ccaacaccagccccug

SEQ ID NO: 2278595 - RNA, 17 nt, Human
ccaacaccagccccugc

SEQ ID NO: 2278596 - RNA, 18 nt, Human
ccaacaccagccccugcc

SEQ ID NO: 2278597 - RNA, 14 nt, Human
ccaacacgagcagg

SEQ ID NO: 2278598 - RNA, 20 nt, Human
ccaaauuccuuggcaugccu

SEQ ID NO: 2278599 - RNA, 23 nt, Human
ccaaauuccuuggcaugccuucc

SEQ ID NO: 2278600 - RNA, 22 nt, Human
ccaaauugcuccuaagcuucaa

SEQ ID NO: 2278601 - RNA, 20 nt, Human
ccaaauugcugggauuacag

SEQ ID NO: 2278602 - RNA, 15 nt, Human
ccaacaccagccccu

SEQ ID NO: 2278603 - RNA, 19 nt, Human
ccaacagucaaaacagaga

SEQ ID NO: 2278604 - RNA, 20 nt, Human
ccaacacccugucuaaaaaa

SEQ ID NO: 2278605 - RNA, 19 nt, Human
ccaacagguggcaggacca

SEQ ID NO: 2278606 - RNA, 23 nt, Human
ccaacagguggcaggaccaggac

SEQ ID NO: 2278607 - RNA, 12 nt, Human
ccaacagugagu

SEQ ID NO: 2278608 - RNA, 20 nt, Human
ccaacagugagucugucagc

SEQ ID NO: 2278609 - RNA, 12 nt, Human
ccaacaguguga

SEQ ID NO: 2278610 - RNA, 13 nt, Human
ccaacagugugaa

SEQ ID NO: 2278611 - RNA, 14 nt, Human
ccaacagugugaag

SEQ ID NO: 2278612 - RNA, 15 nt, Human
ccaacagugugaagu

SEQ ID NO: 2278613 - RNA, 16 nt, Human
ccaacagugugaaguu

SEQ ID NO: 2278614 - RNA, 19 nt, Human
ccaacagugugaaguuaga

SEQ ID NO: 2278615 - RNA, 22 nt, Human
ccaacagugugaaguuagaauu

SEQ ID NO: 2278616 - RNA, 20 nt, Human
ccaacaguguuaggccuggc

SEQ ID NO: 2278617 - RNA, 21 nt, Human
ccaacaguguuaggccuggca

SEQ ID NO: 2278618 - RNA, 12 nt, Human
ccaacaccaggg

SEQ ID NO: 2278619 - RNA, 22 nt, Human
ccaacaccagccccugccccag

SEQ ID NO: 2278620 - RNA, 18 nt, Human
ccaacacccaucuguuuu

SEQ ID NO: 2278621 - RNA, 18 nt, Human
ccaacagguggcaggacc

SEQ ID NO: 2278622 - RNA, 16 nt, Human
ccaacacgcaccugcc

SEQ ID NO: 2278623 - RNA, 21 nt, Human
ccaacacgagcaggcuacugu

SEQ ID NO: 2278624 - RNA, 12 nt, Human
ccaacaguuccu

SEQ ID NO: 2278625 - RNA, 23 nt, Human
ccaacaguguuaggccuggcaca

SEQ ID NO: 2278626 - RNA, 14 nt, Human
ccaacauacuccca

SEQ ID NO: 2278627 - RNA, 16 nt, Human
ccaacaucaacaucuu

SEQ ID NO: 2278628 - RNA, 17 nt, Human
ccaacaucccauugccc

SEQ ID NO: 2278629 - RNA, 13 nt, Human
ccaaagaugcagc

SEQ ID NO: 2278630 - RNA, 14 nt, Human
ccaaagaugcagcc

SEQ ID NO: 2278631 - RNA, 9 nt, Human
ccaaagagu

SEQ ID NO: 2278632 - RNA, 17 nt, Human
ccaaagagggcuuccuc

SEQ ID NO: 2278633 - RNA, 19 nt, Human
ccaaagagggcuuccucua

SEQ ID NO: 2278634 - RNA, 22 nt, Human
ccaaagagccuggagaagcuga

SEQ ID NO: 2278635 - RNA, 16 nt, Human
ccaaagagggcuuccu

SEQ ID NO: 2278636 - RNA, 22 nt, Human
ccaagagcugaggcaauucuaa

SEQ ID NO: 2278637 - RNA, 16 nt, Human
ccaagagccugagagu

SEQ ID NO: 2278638 - RNA, 13 nt, Human
ccaagaggcugca

SEQ ID NO: 2278639 - RNA, 12 nt, Human
ccaagaggcugc

SEQ ID NO: 2278640 - RNA, 18 nt, Human
ccaagcaggaagcucaga

SEQ ID NO: 2278641 - RNA, 17 nt, Human
ccaagcaggaagcucag

SEQ ID NO: 2278642 - RNA, 14 nt, Human
ccaagcaggaagcu

SEQ ID NO: 2278643 - RNA, 13 nt, Human
ccaagcaggaagc

SEQ ID NO: 2278644 - RNA, 12 nt, Human
ccaagcaggaag

SEQ ID NO: 2278645 - RNA, 18 nt, Human
ccaagcagccaagcuccu

SEQ ID NO: 2278646 - RNA, 18 nt, Human
ccaagcaggaaaugaaaa

SEQ ID NO: 2278647 - RNA, 16 nt, Human
ccaagcagccaagcuc

SEQ ID NO: 2278648 - RNA, 12 nt, Human
ccaagcagccaa

SEQ ID NO: 2278649 - RNA, 23 nt, Human
ccaagcagagguugggaggccau

SEQ ID NO: 2278650 - RNA, 20 nt, Human
ccaagcaggaagcucagacu

SEQ ID NO: 2278651 - RNA, 14 nt, Human
ccaagccguggcuu

SEQ ID NO: 2278652 - RNA, 14 nt, Human
ccaagcaggacaug

SEQ ID NO: 2278653 - RNA, 15 nt, Human
ccaagccguggcuuc

SEQ ID NO: 2278654 - RNA, 16 nt, Human
ccaagccguggcuucc

SEQ ID NO: 2278655 - RNA, 17 nt, Human
ccaagccguggcuuccc

SEQ ID NO: 2278656 - RNA, 21 nt, Human
ccaagccguggcuucccgcuc

SEQ ID NO: 2278657 - RNA, 14 nt, Human
ccaagcuccaucuc

SEQ ID NO: 2278658 - RNA, 13 nt, Human
ccaaggccagguu

SEQ ID NO: 2278659 - RNA, 13 nt, Human
ccaagcagggagg

SEQ ID NO: 2278660 - RNA, 16 nt, Human
ccaaggccgaagcucu

SEQ ID NO: 2278661 - RNA, 17 nt, Human
ccaaggccgaagcucug

SEQ ID NO: 2278662 - RNA, 20 nt, Human
ccaaggccgaagcucuggcu

SEQ ID NO: 2278663 - RNA, 18 nt, Human
ccaaggcuagaaccaccu

SEQ ID NO: 2278664 - RNA, 18 nt, Human
ccaaggccgaagcucugg

SEQ ID NO: 2278665 - RNA, 14 nt, Human
ccaaggccuucucc

SEQ ID NO: 2278666 - RNA, 16 nt, Human
ccaaggccuucuccuc

SEQ ID NO: 2278667 - RNA, 14 nt, Human
ccaaggcggccccu

SEQ ID NO: 2278668 - RNA, 15 nt, Human
ccaaggcggccccuc

SEQ ID NO: 2278669 - RNA, 21 nt, Human
ccaaggcggccccucccgccc

SEQ ID NO: 2278670 - RNA, 23 nt, Human
ccaagccguggcuucccgcucag

SEQ ID NO: 2278671 - RNA, 16 nt, Human
ccaagcucagaaggcu

SEQ ID NO: 2278672 - RNA, 13 nt, Human
ccaagcuccaagc

SEQ ID NO: 2278673 - RNA, 19 nt, Human
ccaagcucaggaccaggca

SEQ ID NO: 2278674 - RNA, 20 nt, Human
ccaagcucaggaccaggcaa

SEQ ID NO: 2278675 - RNA, 15 nt, Human
ccaagcuccaagccc

SEQ ID NO: 2278676 - RNA, 17 nt, Human
ccaagcuccaagcccca

SEQ ID NO: 2278677 - RNA, 12 nt, Human
ccaagcucccag

SEQ ID NO: 2278678 - RNA, 13 nt, Human
ccaagcucccagg

SEQ ID NO: 2278679 - RNA, 17 nt, Human
ccaaggcugcgucugga

SEQ ID NO: 2278680 - RNA, 16 nt, Human
ccaaggcggccccucc

SEQ ID NO: 2278681 - RNA, 23 nt, Human
ccaaggcguccgcgcgccagcac

SEQ ID NO: 2278682 - RNA, 16 nt, Human
ccaaggcucugagcaa

SEQ ID NO: 2278683 - RNA, 19 nt, Human
ccaaggcugauuaaaccaa

SEQ ID NO: 2278684 - RNA, 14 nt, Human
ccaaggcuggggga

SEQ ID NO: 2278685 - RNA, 18 nt, Human
ccaaggcugcgucuggag

SEQ ID NO: 2278686 - RNA, 19 nt, Human
ccaaggcugcgucuggagg

SEQ ID NO: 2278687 - RNA, 20 nt, Human
ccaaggcugcgucuggaggg

SEQ ID NO: 2278688 - RNA, 22 nt, Human
ccaaggcuucuccaauucugcc

SEQ ID NO: 2278689 - RNA, 23 nt, Human
ccaaggugggcugagcccuggca

SEQ ID NO: 2278690 - RNA, 20 nt, Human
ccaaggugggcugagcccug

SEQ ID NO: 2278691 - RNA, 18 nt, Human
ccaaggugggcugagccc

SEQ ID NO: 2278692 - RNA, 17 nt, Human
ccaaggugggcugagcc

SEQ ID NO: 2278693 - RNA, 20 nt, Human
ccaagguggguagaucacga

SEQ ID NO: 2278694 - RNA, 13 nt, Human
ccaagguggucug

SEQ ID NO: 2278695 - RNA, 15 nt, Human
ccaagguggucugcu

SEQ ID NO: 2278696 - RNA, 23 nt, Human
ccaagguggucugcucgggccca

SEQ ID NO: 2278697 - RNA, 20 nt, Human
ccaagguuuaaacuucucug

SEQ ID NO: 2278698 - RNA, 21 nt, Human
ccaagguuuaaacuucucuga

SEQ ID NO: 2278699 - RNA, 12 nt, Human
ccaagugugugu

SEQ ID NO: 2278700 - RNA, 22 nt, Human
ccaagugugcauauuguacacu

SEQ ID NO: 2278701 - RNA, 20 nt, Human
ccaagugugcauauuguaca

SEQ ID NO: 2278702 - RNA, 21 nt, Human
ccaagugugcauauuguacac

SEQ ID NO: 2278703 - RNA, 14 nt, Human
ccaagugugugugc

SEQ ID NO: 2278704 - RNA, 13 nt, Human
ccaagugugugug

SEQ ID NO: 2278705 - RNA, 15 nt, Human
ccaaguuauaaauca

SEQ ID NO: 2278706 - RNA, 20 nt, Human
ccaauauucauagcagcuua

SEQ ID NO: 2278707 - RNA, 18 nt, Human
ccaagugggggcagaggg

SEQ ID NO: 2278708 - RNA, 15 nt, Human
ccaaguggggugcug

SEQ ID NO: 2278709 - RNA, 16 nt, Human
ccaaguggggugcugg

SEQ ID NO: 2278710 - RNA, 22 nt, Human
ccaaguggggugcugggaggag

SEQ ID NO: 2278711 - RNA, 14 nt, Human
ccaaguggugccua

SEQ ID NO: 2278712 - RNA, 14 nt, Human
ccaagugugaacaa

SEQ ID NO: 2278713 - RNA, 10 nt, Human
ccaagugugc

SEQ ID NO: 2278714 - RNA, 19 nt, Human
ccaagugugcauauuguac

SEQ ID NO: 2278715 - RNA, 16 nt, Human
ccaagugggggcagag

SEQ ID NO: 2278716 - RNA, 19 nt, Human
ccaaguggcagagcuugga

SEQ ID NO: 2278717 - RNA, 17 nt, Human
ccaaguggcagagcuug

SEQ ID NO: 2278718 - RNA, 18 nt, Human
ccaaguggcagagcuugg

SEQ ID NO: 2278719 - RNA, 16 nt, Human
ccaaguggcucccaca

SEQ ID NO: 2278720 - RNA, 16 nt, Human
ccaagugcaggcuggc

SEQ ID NO: 2278721 - RNA, 14 nt, Human
ccaagugccagagg

SEQ ID NO: 2278722 - RNA, 15 nt, Human
ccaagugccagaggu

SEQ ID NO: 2278723 - RNA, 16 nt, Human
ccaagugccagaggug

SEQ ID NO: 2278724 - RNA, 17 nt, Human
ccaagugccagaggugg

SEQ ID NO: 2278725 - RNA, 18 nt, Human
ccaagugccagagguggg

SEQ ID NO: 2278726 - RNA, 21 nt, Human
ccaagugccagaggugggcag

SEQ ID NO: 2278727 - RNA, 22 nt, Human
ccaagugccagaggugggcagg

SEQ ID NO: 2278728 - RNA, 19 nt, Human
ccaagugcaggcuggcacc

SEQ ID NO: 2278729 - RNA, 14 nt, Human
ccaagugcaggcug

SEQ ID NO: 2278730 - RNA, 18 nt, Human
ccaagugaacacuagcca

SEQ ID NO: 2278731 - RNA, 13 nt, Human
ccaaguggcuccc

SEQ ID NO: 2278732 - RNA, 13 nt, Human
ccaaguggcagag

SEQ ID NO: 2278733 - RNA, 14 nt, Human
ccaaguggcagagc

SEQ ID NO: 2278734 - RNA, 15 nt, Human
ccaaguggcagagcu

SEQ ID NO: 2278735 - RNA, 22 nt, Human
ccaagugccagucuugugucug

SEQ ID NO: 2278736 - RNA, 16 nt, Human
ccaagugccagucuug

SEQ ID NO: 2278737 - RNA, 20 nt, Human
ccaaguggaccuugagacca

SEQ ID NO: 2278738 - RNA, 23 nt, Human
ccaagugccagaggugggcaggu

SEQ ID NO: 2278739 - RNA, 22 nt, Human
ccacaaagccuuaucaaguguc

SEQ ID NO: 2278740 - RNA, 23 nt, Human
ccacaaagccuuaucaagugucu

SEQ ID NO: 2278741 - RNA, 18 nt, Human
ccacaaaggagagcuagc

SEQ ID NO: 2278742 - RNA, 18 nt, Human
ccacaacccuguuuuaua

SEQ ID NO: 2278743 - RNA, 13 nt, Human
ccacaacacacag

SEQ ID NO: 2278744 - RNA, 22 nt, Human
ccacaacuccugucuaacugcu

SEQ ID NO: 2278745 - RNA, 16 nt, Human
ccacaagacccuugug

SEQ ID NO: 2278746 - RNA, 13 nt, Human
ccacaagagccca

SEQ ID NO: 2278747 - RNA, 22 nt, Human
ccacaagaaaugaaagcaggga

SEQ ID NO: 2278748 - RNA, 16 nt, Human
ccacaagaaaugaaag

SEQ ID NO: 2278749 - RNA, 17 nt, Human
ccaauuuuucugcacug

SEQ ID NO: 2278750 - RNA, 13 nt, Human
ccaauuuuucugc

SEQ ID NO: 2278751 - RNA, 14 nt, Human
ccaauuuuucugca

SEQ ID NO: 2278752 - RNA, 23 nt, Human
ccacaaaauaaccaauccuggac

SEQ ID NO: 2278753 - RNA, 13 nt, Human
ccacaaaaauuga

SEQ ID NO: 2278754 - RNA, 20 nt, Human
ccacaaagcacaguuugaac

SEQ ID NO: 2278755 - RNA, 14 nt, Human
ccacaaagccuuau

SEQ ID NO: 2278756 - RNA, 20 nt, Human
ccaauuuguaaaaacagcau

SEQ ID NO: 2278757 - RNA, 16 nt, Human
ccaauuucagacuccc

SEQ ID NO: 2278758 - RNA, 18 nt, Human
ccaauucuuacaaacaug

SEQ ID NO: 2278759 - RNA, 19 nt, Human
ccaauucuuacaaacaugu

SEQ ID NO: 2278760 - RNA, 20 nt, Human
ccaaguuauaaaucaauguc

SEQ ID NO: 2278761 - RNA, 17 nt, Human
ccaagugugugugcgug

SEQ ID NO: 2278762 - RNA, 22 nt, Human
ccaauauuggagcauaucaaaa

SEQ ID NO: 2278763 - RNA, 19 nt, Human
ccaauuucaaguuccaagu

SEQ ID NO: 2278764 - RNA, 21 nt, Human
ccaauuguugacaguucugaa

SEQ ID NO: 2278765 - RNA, 22 nt, Human
ccaauuguugacaguucugaag

SEQ ID NO: 2278766 - RNA, 13 nt, Human
ccaauuggaggaa

SEQ ID NO: 2278767 - RNA, 20 nt, Human
ccaauuguugacaguucuga

SEQ ID NO: 2278768 - RNA, 14 nt, Human
ccaauauuguacag

SEQ ID NO: 2278769 - RNA, 15 nt, Human
ccaauauuguacagu

SEQ ID NO: 2278770 - RNA, 16 nt, Human
ccaauauuguacaguu

SEQ ID NO: 2278771 - RNA, 18 nt, Human
ccaauauuguacaguuuu

SEQ ID NO: 2278772 - RNA, 21 nt, Human
ccacaagauucccagagacag

SEQ ID NO: 2278773 - RNA, 20 nt, Human
ccacaagauucccagagaca

SEQ ID NO: 2278774 - RNA, 19 nt, Human
ccacaagauucccagagac

SEQ ID NO: 2278775 - RNA, 18 nt, Human
ccacaagauucccagaga

SEQ ID NO: 2278776 - RNA, 24 nt, Human
ccacaagauucccagagacaggaa

SEQ ID NO: 2278777 - RNA, 17 nt, Human
ccacaagauucccagag

SEQ ID NO: 2278778 - RNA, 16 nt, Human
ccacaagauucccaga

SEQ ID NO: 2278779 - RNA, 15 nt, Human
ccacaagauucccag

SEQ ID NO: 2278780 - RNA, 21 nt, Human
ccacaagaaauuugauuucua

SEQ ID NO: 2278781 - RNA, 15 nt, Human
ccacaagaaauuuga

SEQ ID NO: 2278782 - RNA, 16 nt, Human
ccacaagaaauuugau

SEQ ID NO: 2278783 - RNA, 20 nt, Human
ccacaagagcccaggccucc

SEQ ID NO: 2278784 - RNA, 21 nt, Human
ccacaagagcccaggccuccu

SEQ ID NO: 2278785 - RNA, 16 nt, Human
ccacaagagcccaggc

SEQ ID NO: 2278786 - RNA, 17 nt, Human
ccacaagagcccaggcc

SEQ ID NO: 2278787 - RNA, 18 nt, Human
ccacaagagcccaggccu

SEQ ID NO: 2278788 - RNA, 19 nt, Human
ccacaagagcccaggccuc

SEQ ID NO: 2278789 - RNA, 20 nt, Human
ccacaaguuaaauaaaucau

SEQ ID NO: 2278790 - RNA, 15 nt, Human
ccacaaguuaaauaa

SEQ ID NO: 2278791 - RNA, 21 nt, Human
ccacaaggacuuccuguccag

SEQ ID NO: 2278792 - RNA, 17 nt, Human
ccacaaggacuuccugu

SEQ ID NO: 2278793 - RNA, 17 nt, Human
ccacaaggcuguugcau

SEQ ID NO: 2278794 - RNA, 21 nt, Human
ccacaaguggugguaacccug

SEQ ID NO: 2278795 - RNA, 15 nt, Human
ccacaagugguggua

SEQ ID NO: 2278796 - RNA, 13 nt, Human
ccacacacacaca

SEQ ID NO: 2278797 - RNA, 15 nt, Human
ccacacacacacaca

SEQ ID NO: 2278798 - RNA, 14 nt, Human
ccacacacacacac

SEQ ID NO: 2278799 - RNA, 12 nt, Human
ccacacacacag

SEQ ID NO: 2278800 - RNA, 24 nt, Human
ccacacacacacacaugcauacac

SEQ ID NO: 2278801 - RNA, 21 nt, Human
ccacacacacacacaugcaua

SEQ ID NO: 2278802 - RNA, 17 nt, Human
ccacacacacacacaug

SEQ ID NO: 2278803 - RNA, 22 nt, Human
ccacacaaggauagaugcuggc

SEQ ID NO: 2278804 - RNA, 11 nt, Human
ccacacacaca

SEQ ID NO: 2278805 - RNA, 20 nt, Human
ccacaauauaaaacuguacu

SEQ ID NO: 2278806 - RNA, 22 nt, Human
ccacaaguggugguaacccugg

SEQ ID NO: 2278807 - RNA, 21 nt, Human
ccacaauaaagaucgccccca

SEQ ID NO: 2278808 - RNA, 20 nt, Human
ccacacaaggauagaugcug

SEQ ID NO: 2278809 - RNA, 23 nt, Human
ccacaauccuauucucgggcuga

SEQ ID NO: 2278810 - RNA, 20 nt, Human
ccacaaucuuaaggggcagc

SEQ ID NO: 2278811 - RNA, 19 nt, Human
cauuuuguuugguauugua

SEQ ID NO: 2278812 - RNA, 20 nt, Human
cauuuuguuugguauuguau

SEQ ID NO: 2278813 - RNA, 21 nt, Human
cauuuuguuugguauuguauu

SEQ ID NO: 2278814 - RNA, 22 nt, Human
cauuuuguuugguauuguauuu

SEQ ID NO: 2278815 - RNA, 23 nt, Human
cauuuuguuugguauuguauuua

SEQ ID NO: 2278816 - RNA, 15 nt, Human
cauuuuggugagaaa

SEQ ID NO: 2278817 - RNA, 23 nt, Human
cauuuugggguacccacugcucu

SEQ ID NO: 2278818 - RNA, 19 nt, Human
cauuuuuaguagagacagg

SEQ ID NO: 2278819 - RNA, 18 nt, Human
cauuuuuaguagagacag

SEQ ID NO: 2278820 - RNA, 20 nt, Human
cauuuuuaagugcugcauuu

SEQ ID NO: 2278821 - RNA, 15 nt, Human
cauuuuuaagugcug

SEQ ID NO: 2278822 - RNA, 24 nt, Human
cauuuugcuaaaugugaaugauga

SEQ ID NO: 2278823 - RNA, 20 nt, Human
cauuuugccaaaauuauuaa

SEQ ID NO: 2278824 - RNA, 15 nt, Human
cauuuugcuauugua

SEQ ID NO: 2278825 - RNA, 17 nt, Human
cauuuugcuauuguaaa

SEQ ID NO: 2278826 - RNA, 19 nt, Human
cauuuugcuauuguaaaua

SEQ ID NO: 2278827 - RNA, 21 nt, Human
cauuuugcuaaaugugaauga

SEQ ID NO: 2278828 - RNA, 18 nt, Human
cauuuugcuaaaugugaa

SEQ ID NO: 2278829 - RNA, 20 nt, Human
cauuuuggaaguuuucagga

SEQ ID NO: 2278830 - RNA, 18 nt, Human
cauuuuggaaguuuucag

SEQ ID NO: 2278831 - RNA, 20 nt, Human
cauuuuggagaguuuccuga

SEQ ID NO: 2278832 - RNA, 22 nt, Human
cauuuuggaaguuuucaggacu

SEQ ID NO: 2278833 - RNA, 22 nt, Human
cauuuuggagaguuuccugaaa

SEQ ID NO: 2278834 - RNA, 20 nt, Human
cauuuugggguacccacugc

SEQ ID NO: 2278835 - RNA, 21 nt, Human
cauuuugggguacccacugcu

SEQ ID NO: 2278836 - RNA, 22 nt, Human
cauuuugggguacccacugcuc

SEQ ID NO: 2278837 - RNA, 12 nt, Human
cauuuucugugg

SEQ ID NO: 2278838 - RNA, 14 nt, Human
cauuuuauugcuug

SEQ ID NO: 2278839 - RNA, 21 nt, Human
cauuuuauuuuauuaugcaug

SEQ ID NO: 2278840 - RNA, 19 nt, Human
cauuuuauuuuauuaugca

SEQ ID NO: 2278841 - RNA, 22 nt, Human
cauuuuaauuuauuaauugcuu

SEQ ID NO: 2278842 - RNA, 19 nt, Human
cauuuuaauuuuaaccaaa

SEQ ID NO: 2278843 - RNA, 16 nt, Human
cauuuuauaugucaaa

SEQ ID NO: 2278844 - RNA, 19 nt, Human
cauuuuauaugucaaagca

SEQ ID NO: 2278845 - RNA, 13 nt, Human
cauuuuauugcuu

SEQ ID NO: 2278846 - RNA, 22 nt, Human
cauuuugcagcagugagucucu

SEQ ID NO: 2278847 - RNA, 20 nt, Human
cauuuugcagcagugagucu

SEQ ID NO: 2278848 - RNA, 18 nt, Human
cauuuugcagcagugagu

SEQ ID NO: 2278849 - RNA, 16 nt, Human
cauuuugcagcaguga

SEQ ID NO: 2278850 - RNA, 13 nt, Human
cauuuugcauuca

SEQ ID NO: 2278851 - RNA, 15 nt, Human
cauuuugcauucaaa

SEQ ID NO: 2278852 - RNA, 13 nt, Human
cauuuugccaaaa

SEQ ID NO: 2278853 - RNA, 15 nt, Human
cauuuugccaaaauu

SEQ ID NO: 2278854 - RNA, 15 nt, Human
cauuuugcagcagug

SEQ ID NO: 2278855 - RNA, 17 nt, Human
cauuuugcaaaauuucc

SEQ ID NO: 2278856 - RNA, 15 nt, Human
cauuuugcaaaauuu

SEQ ID NO: 2278857 - RNA, 14 nt, Human
cauuuugcaaaauu

SEQ ID NO: 2278858 - RNA, 13 nt, Human
cauuuugcaaaau

SEQ ID NO: 2278859 - RNA, 12 nt, Human
cauuuugcaaaa

SEQ ID NO: 2278860 - RNA, 17 nt, Human
cauuuugagugacucga

SEQ ID NO: 2278861 - RNA, 20 nt, Human
cauuuugagugacucgaggg

SEQ ID NO: 2278862 - RNA, 14 nt, Human
cauuuugaccuacu

SEQ ID NO: 2278863 - RNA, 21 nt, Human
cauuuugagcugaaaugcugc

SEQ ID NO: 2278864 - RNA, 22 nt, Human
cauuuugagcugaaaugcugca

SEQ ID NO: 2278865 - RNA, 23 nt, Human
cauuuugagcugaaaugcugcau

SEQ ID NO: 2278866 - RNA, 22 nt, Human
cauuuucuucagagagcuaaau

SEQ ID NO: 2278867 - RNA, 15 nt, Human
cauuuuaaauaaaag

SEQ ID NO: 2278868 - RNA, 16 nt, Human
cauuuuaaauaaaaga

SEQ ID NO: 2278869 - RNA, 17 nt, Human
cauuuuaaauaaaagaa

SEQ ID NO: 2278870 - RNA, 17 nt, Human
cauuuuaaauggacaga

SEQ ID NO: 2278871 - RNA, 13 nt, Human
cauuuuaaauaaa

SEQ ID NO: 2278872 - RNA, 23 nt, Human
cauuugagaaaugcauauuguau

SEQ ID NO: 2278873 - RNA, 16 nt, Human
cauuuuaacuuuauca

SEQ ID NO: 2278874 - RNA, 17 nt, Human
cauuuuaauuauuauuc

SEQ ID NO: 2278875 - RNA, 16 nt, Human
cauuuuaacaucugag

SEQ ID NO: 2278876 - RNA, 18 nt, Human
cauuuuaaauaaaagaaa

SEQ ID NO: 2278877 - RNA, 12 nt, Human
cauuuuaaaugg

SEQ ID NO: 2278878 - RNA, 15 nt, Human
cauuuuauauuagaa

SEQ ID NO: 2278879 - RNA, 23 nt, Human
cauuuuaauuuauuaauugcuuu

SEQ ID NO: 2278880 - RNA, 14 nt, Human
cauuuuaauucauc

SEQ ID NO: 2278881 - RNA, 15 nt, Human
cauuuuaaauggaca

SEQ ID NO: 2278882 - RNA, 22 nt, Human
cauuugaggucuguucuuucca

SEQ ID NO: 2278883 - RNA, 16 nt, Human
cauuugcucauggaau

SEQ ID NO: 2278884 - RNA, 15 nt, Human
cauuugcucauggaa

SEQ ID NO: 2278885 - RNA, 14 nt, Human
cauuugcucaugga

SEQ ID NO: 2278886 - RNA, 13 nt, Human
ccaaacgccuccc

SEQ ID NO: 2278887 - RNA, 22 nt, Human
ccaaaccugcaagggcucccca

SEQ ID NO: 2278888 - RNA, 21 nt, Human
ccaaaccucuguucaguguaa

SEQ ID NO: 2278889 - RNA, 15 nt, Human
ccaaaccugacagau

SEQ ID NO: 2278890 - RNA, 14 nt, Human
ccaaacugccuaag

SEQ ID NO: 2278891 - RNA, 19 nt, Human
ccaaacugccuaagcccuc

SEQ ID NO: 2278892 - RNA, 18 nt, Human
ccaaacuuggauuuuuga

SEQ ID NO: 2278893 - RNA, 17 nt, Human
ccaaagaaauguaaggg

SEQ ID NO: 2278894 - RNA, 18 nt, Human
ccaaagagccuggagaag

SEQ ID NO: 2278895 - RNA, 20 nt, Human
ccaaagagccuggagaagcu

SEQ ID NO: 2278896 - RNA, 14 nt, Human
ccaaagagccugga

SEQ ID NO: 2278897 - RNA, 15 nt, Human
ccaaagagccuggag

SEQ ID NO: 2278898 - RNA, 16 nt, Human
ccaaagagccuggaga

SEQ ID NO: 2278899 - RNA, 17 nt, Human
ccaaagagccuggagaa

SEQ ID NO: 2278900 - RNA, 17 nt, Human
ccaaagagacuggagca

SEQ ID NO: 2278901 - RNA, 21 nt, Human
ccaaagagacuggagcaucug

SEQ ID NO: 2278902 - RNA, 20 nt, Human
ccaaagagacuggagcaucu

SEQ ID NO: 2278903 - RNA, 12 nt, Human
ccaaagagccug

SEQ ID NO: 2278904 - RNA, 16 nt, Human
ccaaacuuggauuuuu

SEQ ID NO: 2278905 - RNA, 20 nt, Human
cauuuuuaguagagacaggg

SEQ ID NO: 2278906 - RNA, 21 nt, Human
ccaaaauaaaacuuuuuaaaa

SEQ ID NO: 2278907 - RNA, 18 nt, Human
ccaaaauaaaacuuuuua

SEQ ID NO: 2278908 - RNA, 14 nt, Human
ccaaaccuagcccc

SEQ ID NO: 2278909 - RNA, 17 nt, Human
ccaaaccgccagcgaac

SEQ ID NO: 2278910 - RNA, 19 nt, Human
ccaaaccuccaaaacuccu

SEQ ID NO: 2278911 - RNA, 20 nt, Human
ccaaaccucuguucagugua

SEQ ID NO: 2278912 - RNA, 17 nt, Human
ccaaaccucuguucagu

SEQ ID NO: 2278913 - RNA, 14 nt, Human
ccaaaccucuguuc

SEQ ID NO: 2278914 - RNA, 13 nt, Human
ccaaaccucuguu

SEQ ID NO: 2278915 - RNA, 12 nt, Human
ccaaaccucugu

SEQ ID NO: 2278916 - RNA, 11 nt, Human
ccaaaccucug

SEQ ID NO: 2278917 - RNA, 17 nt, Human
ccaaaccucugugagca

SEQ ID NO: 2278918 - RNA, 17 nt, Human
ccaaaauaagaaaagau

SEQ ID NO: 2278919 - RNA, 16 nt, Human
ccaaaauaagaaaaga

SEQ ID NO: 2278920 - RNA, 14 nt, Human
ccaaaauaagaaaa

SEQ ID NO: 2278921 - RNA, 17 nt, Human
ccaaaaguuuuccugag

SEQ ID NO: 2278922 - RNA, 18 nt, Human
ccaaaaguuuuccugaga

SEQ ID NO: 2278923 - RNA, 18 nt, Human
ccaaaauaagaaaagaug

SEQ ID NO: 2278924 - RNA, 20 nt, Human
ccaaaaucauaagauauuuu

SEQ ID NO: 2278925 - RNA, 16 nt, Human
ccaaaauccccuucuc

SEQ ID NO: 2278926 - RNA, 15 nt, Human
ccaaagagugauagu

SEQ ID NO: 2278927 - RNA, 16 nt, Human
cauuugagcagggcuc

SEQ ID NO: 2278928 - RNA, 17 nt, Human
cauuugaggucuguucu

SEQ ID NO: 2278929 - RNA, 19 nt, Human
cauuugaggucuguucuuu

SEQ ID NO: 2278930 - RNA, 18 nt, Human
cauuugaggucuguucuu

SEQ ID NO: 2278931 - RNA, 14 nt, Human
cauuugagcagggc

SEQ ID NO: 2278932 - RNA, 23 nt, Human
cauuugacugaagaugcagcuca

SEQ ID NO: 2278933 - RNA, 12 nt, Human
cauuugaaugca

SEQ ID NO: 2278934 - RNA, 12 nt, Human
cauuugagaaau

SEQ ID NO: 2278935 - RNA, 15 nt, Human
cauuugagaaaugca

SEQ ID NO: 2278936 - RNA, 17 nt, Human
cauuugagaaaugcaua

SEQ ID NO: 2278937 - RNA, 18 nt, Human
cauuugagaaaugcauau

SEQ ID NO: 2278938 - RNA, 22 nt, Human
cauuugagaaaugcauauugua

SEQ ID NO: 2278939 - RNA, 13 nt, Human
cauuugaaugcau

SEQ ID NO: 2278940 - RNA, 12 nt, Human
cauuucuuagac

SEQ ID NO: 2278941 - RNA, 14 nt, Human
cauuugaaugcauu

SEQ ID NO: 2278942 - RNA, 15 nt, Human
cauuugaaugcauuu

SEQ ID NO: 2278943 - RNA, 18 nt, Human
cauuugaaugcauuuugu

SEQ ID NO: 2278944 - RNA, 23 nt, Human
cauuugaaugcauuuuguuuggu

SEQ ID NO: 2278945 - RNA, 23 nt, Human
cauuucuuccacaagagcccagg

SEQ ID NO: 2278946 - RNA, 16 nt, Human
cauuucucugggguau

SEQ ID NO: 2278947 - RNA, 15 nt, Human
cauuucucuuacugc

SEQ ID NO: 2278948 - RNA, 18 nt, Human
cauuucucuuacugcaaa

SEQ ID NO: 2278949 - RNA, 20 nt, Human
cauuucuccuuugauaaaau

SEQ ID NO: 2278950 - RNA, 14 nt, Human
cauuucucuggggu

SEQ ID NO: 2278951 - RNA, 14 nt, Human
cauuucugaagugg

SEQ ID NO: 2278952 - RNA, 22 nt, Human
cauuucugaguuucauucuccu

SEQ ID NO: 2278953 - RNA, 21 nt, Human
cauuucuuccacaagagccca

SEQ ID NO: 2278954 - RNA, 23 nt, Human
cauuucugcaucagcugcugaaa

SEQ ID NO: 2278955 - RNA, 23 nt, Human
cauuucuauuuauuuacugagcu

SEQ ID NO: 2278956 - RNA, 20 nt, Human
cauuuccccagaccugagcu

SEQ ID NO: 2278957 - RNA, 16 nt, Human
cauuuccccagaccug

SEQ ID NO: 2278958 - RNA, 13 nt, Human
cauuuccccagac

SEQ ID NO: 2278959 - RNA, 20 nt, Human
cauuucccaucugcaccccu

SEQ ID NO: 2278960 - RNA, 19 nt, Human
cauuucuauuucuccucca

SEQ ID NO: 2278961 - RNA, 12 nt, Human
cauuucucaugu

SEQ ID NO: 2278962 - RNA, 12 nt, Human
cauuucucacug

SEQ ID NO: 2278963 - RNA, 13 nt, Human
cauuucucacuga

SEQ ID NO: 2278964 - RNA, 15 nt, Human
cauuucucuaagaga

SEQ ID NO: 2278965 - RNA, 21 nt, Human
cauuucucauguuuuccauug

SEQ ID NO: 2278966 - RNA, 23 nt, Human
cauuuagagaacuguggccguua

SEQ ID NO: 2278967 - RNA, 19 nt, Human
cauuuccacaccaagcagc

SEQ ID NO: 2278968 - RNA, 14 nt, Human
cauuucccaucugc

SEQ ID NO: 2278969 - RNA, 15 nt, Human
cauuucccaucugca

SEQ ID NO: 2278970 - RNA, 17 nt, Human
cauuucccaucugcacc

SEQ ID NO: 2278971 - RNA, 19 nt, Human
cauuuaaagcuuauuaaaa

SEQ ID NO: 2278972 - RNA, 17 nt, Human
cauuuacuuuguguuca

SEQ ID NO: 2278973 - RNA, 21 nt, Human
cauuuacuuuguguucaccuu

SEQ ID NO: 2278974 - RNA, 17 nt, Human
cauugcacagggagacg

SEQ ID NO: 2278975 - RNA, 23 nt, Human
cauugagaacugcauauguuucg

SEQ ID NO: 2278976 - RNA, 19 nt, Human
cauugagaacugcauaugu

SEQ ID NO: 2278977 - RNA, 18 nt, Human
cauugagaacugcauaug

SEQ ID NO: 2278978 - RNA, 18 nt, Human
cauugagaguuuugucuu

SEQ ID NO: 2278979 - RNA, 18 nt, Human
cauugcacuccagccugg

SEQ ID NO: 2278980 - RNA, 16 nt, Human
cauugcacuccagccu

SEQ ID NO: 2278981 - RNA, 17 nt, Human
cauugcacuccagccug

SEQ ID NO: 2278982 - RNA, 16 nt, Human
cauugcauauaacuua

SEQ ID NO: 2278983 - RNA, 15 nt, Human
cauugcacucuagcc

SEQ ID NO: 2278984 - RNA, 18 nt, Human
cauugcacucuagccugg

SEQ ID NO: 2278985 - RNA, 20 nt, Human
cauugcacucuagccugggc

SEQ ID NO: 2278986 - RNA, 12 nt, Human
cauuuaaaauga

SEQ ID NO: 2278987 - RNA, 21 nt, Human
cauuuaaaagauacaguuacu

SEQ ID NO: 2278988 - RNA, 17 nt, Human
cauuuaaaaugauuaga

SEQ ID NO: 2278989 - RNA, 18 nt, Human
cauuuaaaaugauuagaa

SEQ ID NO: 2278990 - RNA, 13 nt, Human
cauuuaaaaugau

SEQ ID NO: 2278991 - RNA, 14 nt, Human
cauuuaaaaugauu

SEQ ID NO: 2278992 - RNA, 15 nt, Human
cauuuaaaaugauua

SEQ ID NO: 2278993 - RNA, 16 nt, Human
cauuuaaaaugauuag

SEQ ID NO: 2278994 - RNA, 16 nt, Human
cauugaaagagaacca

SEQ ID NO: 2278995 - RNA, 19 nt, Human
cauugaaaucuuuuugcuu

SEQ ID NO: 2278996 - RNA, 19 nt, Human
cauugaaagagaaccaguu

SEQ ID NO: 2278997 - RNA, 18 nt, Human
cauugaaauucugagaaa

SEQ ID NO: 2278998 - RNA, 22 nt, Human
cauugaaagagaaccaguuuca

SEQ ID NO: 2278999 - RNA, 15 nt, Human
cauugaacacaaacu

SEQ ID NO: 2279000 - RNA, 14 nt, Human
cauugaacacaaac

SEQ ID NO: 2279001 - RNA, 18 nt, Human
cauugaacacaaacugua

SEQ ID NO: 2279002 - RNA, 17 nt, Human
cauugaacacaaacugu

SEQ ID NO: 2279003 - RNA, 16 nt, Human
cauugaacacaaacug

SEQ ID NO: 2279004 - RNA, 22 nt, Human
cauugaccgcgacuaauuucaa

SEQ ID NO: 2279005 - RNA, 21 nt, Human
cauugaccgcgacuaauuuca

SEQ ID NO: 2279006 - RNA, 14 nt, Human
cauugacauguaca

SEQ ID NO: 2279007 - RNA, 15 nt, Human
cauugacauguacag

SEQ ID NO: 2279008 - RNA, 16 nt, Human
cauugacauguacaga

SEQ ID NO: 2279009 - RNA, 17 nt, Human
cauugacauguacagag

SEQ ID NO: 2279010 - RNA, 19 nt, Human
cauugacauguacagagaa

SEQ ID NO: 2279011 - RNA, 21 nt, Human
cauugacauguacagagaacu

SEQ ID NO: 2279012 - RNA, 22 nt, Human
cauugacauguacagagaacua

SEQ ID NO: 2279013 - RNA, 22 nt, Human
cauugacuaucaaacugaagcc

SEQ ID NO: 2279014 - RNA, 19 nt, Human
cauugacuaucaaacugaa

SEQ ID NO: 2279015 - RNA, 18 nt, Human
cauugacuaucaaacuga

SEQ ID NO: 2279016 - RNA, 13 nt, Human
cauugaccugagg

SEQ ID NO: 2279017 - RNA, 22 nt, Human
cauugaccugaggcccuucucu

SEQ ID NO: 2279018 - RNA, 12 nt, Human
cauauuucaauu

SEQ ID NO: 2279019 - RNA, 22 nt, Human
cauauuuauagcaauccauguu

SEQ ID NO: 2279020 - RNA, 17 nt, Human
cauauuuauaaaaauaa

SEQ ID NO: 2279021 - RNA, 15 nt, Human
cauauuugagacuag

SEQ ID NO: 2279022 - RNA, 16 nt, Human
cauauuuuauagaacu

SEQ ID NO: 2279023 - RNA, 13 nt, Human
cauauuuuagcua

SEQ ID NO: 2279024 - RNA, 17 nt, Human
cauauuuacuucuuaua

SEQ ID NO: 2279025 - RNA, 16 nt, Human
cauauuuacuucuuau

SEQ ID NO: 2279026 - RNA, 20 nt, Human
cauauuuacuucuuauacau

SEQ ID NO: 2279027 - RNA, 12 nt, Human
cauauuuauaaa

SEQ ID NO: 2279028 - RNA, 14 nt, Human
cauauuuacuucuu

SEQ ID NO: 2279029 - RNA, 13 nt, Human
cauaugccugggc

SEQ ID NO: 2279030 - RNA, 16 nt, Human
cauaugcaccuugugu

SEQ ID NO: 2279031 - RNA, 17 nt, Human
cauaugcaccuuguguc

SEQ ID NO: 2279032 - RNA, 18 nt, Human
cauaugcaccuugugucu

SEQ ID NO: 2279033 - RNA, 19 nt, Human
cauaugcaccuugugucug

SEQ ID NO: 2279034 - RNA, 20 nt, Human
cauaugcaccuugugucugu

SEQ ID NO: 2279035 - RNA, 21 nt, Human
cauaugcaccuugugucugua

SEQ ID NO: 2279036 - RNA, 23 nt, Human
cauaugcaccuugugucuguaca

SEQ ID NO: 2279037 - RNA, 13 nt, Human
cauauuuuguaua

SEQ ID NO: 2279038 - RNA, 17 nt, Human
cauauuuuauucuuuua

SEQ ID NO: 2279039 - RNA, 19 nt, Human
cauauuuugauuauuguau

SEQ ID NO: 2279040 - RNA, 18 nt, Human
cauauuuucaccauuuga

SEQ ID NO: 2279041 - RNA, 17 nt, Human
cauauuuuauagaacuu

SEQ ID NO: 2279042 - RNA, 18 nt, Human
caucaaaaacuuuggagu

SEQ ID NO: 2279043 - RNA, 20 nt, Human
cauauuuugauuauuguauu

SEQ ID NO: 2279044 - RNA, 19 nt, Human
caucacaggguugggccca

SEQ ID NO: 2279045 - RNA, 20 nt, Human
caucacagggcagagccggg

SEQ ID NO: 2279046 - RNA, 15 nt, Human
caucacagggcagag

SEQ ID NO: 2279047 - RNA, 13 nt, Human
caucacagggcag

SEQ ID NO: 2279048 - RNA, 22 nt, Human
caucacaggacacggggcagug

SEQ ID NO: 2279049 - RNA, 17 nt, Human
caucacagcuaacaauu

SEQ ID NO: 2279050 - RNA, 12 nt, Human
caucacacacac

SEQ ID NO: 2279051 - RNA, 11 nt, Human
caucacacaca

SEQ ID NO: 2279052 - RNA, 18 nt, Human
caucaauguucauuguaa

SEQ ID NO: 2279053 - RNA, 14 nt, Human
caucaauguucauu

SEQ ID NO: 2279054 - RNA, 11 nt, Human
caucaauguuc

SEQ ID NO: 2279055 - RNA, 15 nt, Human
caucaaucauuguac

SEQ ID NO: 2279056 - RNA, 16 nt, Human
caucaaucauuguaca

SEQ ID NO: 2279057 - RNA, 20 nt, Human
caucaaucauuguacaguuu

SEQ ID NO: 2279058 - RNA, 16 nt, Human
caucaauguucauugu

SEQ ID NO: 2279059 - RNA, 15 nt, Human
caucaauguucauug

SEQ ID NO: 2279060 - RNA, 22 nt, Human
caucaauugaauggucagcguu

SEQ ID NO: 2279061 - RNA, 16 nt, Human
caucaauuauagaaag

SEQ ID NO: 2279062 - RNA, 23 nt, Human
caucaaguuauugacaaacucuc

SEQ ID NO: 2279063 - RNA, 14 nt, Human
caucaaucauugua

SEQ ID NO: 2279064 - RNA, 19 nt, Human
caucaauauugucauuccu

SEQ ID NO: 2279065 - RNA, 22 nt, Human
caucaaguuauugacaaacucu

SEQ ID NO: 2279066 - RNA, 21 nt, Human
caucaaguuauugacaaacuc

SEQ ID NO: 2279067 - RNA, 18 nt, Human
caucaaugaaugaaugaa

SEQ ID NO: 2279068 - RNA, 17 nt, Human
caucaaacucuuaguua

SEQ ID NO: 2279069 - RNA, 20 nt, Human
caucaaaagacaauucuuua

SEQ ID NO: 2279070 - RNA, 15 nt, Human
caucaaaaugcuuuu

SEQ ID NO: 2279071 - RNA, 13 nt, Human
caucaaaaugcuu

SEQ ID NO: 2279072 - RNA, 12 nt, Human
caucaaaagaca

SEQ ID NO: 2279073 - RNA, 14 nt, Human
caucaaaagacaau

SEQ ID NO: 2279074 - RNA, 15 nt, Human
caucaaaagacaauu

SEQ ID NO: 2279075 - RNA, 16 nt, Human
caucaaaagacaauuc

SEQ ID NO: 2279076 - RNA, 18 nt, Human
caucaaaagacaauucuu

SEQ ID NO: 2279077 - RNA, 19 nt, Human
caucaaaagacaauucuuu

SEQ ID NO: 2279078 - RNA, 22 nt, Human
caucaaaagacaauucuuuaua

SEQ ID NO: 2279079 - RNA, 15 nt, Human
caucaagacuggaag

SEQ ID NO: 2279080 - RNA, 16 nt, Human
caucaagacuggaagg

SEQ ID NO: 2279081 - RNA, 23 nt, Human
caucaaagaggcugaggcuggca

SEQ ID NO: 2279082 - RNA, 11 nt, Human
caucaaagagg

SEQ ID NO: 2279083 - RNA, 14 nt, Human
caucaagaugugac

SEQ ID NO: 2279084 - RNA, 23 nt, Human
caucaagcacagaaggaggagga

SEQ ID NO: 2279085 - RNA, 21 nt, Human
caucaagcacagaaggaggag

SEQ ID NO: 2279086 - RNA, 18 nt, Human
caucaagcacagaaggag

SEQ ID NO: 2279087 - RNA, 16 nt, Human
caucaaggcacugccu

SEQ ID NO: 2279088 - RNA, 17 nt, Human
caucaaggcacugccug

SEQ ID NO: 2279089 - RNA, 18 nt, Human
caucaaggcacugccuga

SEQ ID NO: 2279090 - RNA, 22 nt, Human
caucaagucuuucacauuuaaa

SEQ ID NO: 2279091 - RNA, 16 nt, Human
cauaucagucucugag

SEQ ID NO: 2279092 - RNA, 18 nt, Human
cauauccccuauuuaaca

SEQ ID NO: 2279093 - RNA, 18 nt, Human
cauauccaguauuguucc

SEQ ID NO: 2279094 - RNA, 16 nt, Human
cauauccaccaccucc

SEQ ID NO: 2279095 - RNA, 14 nt, Human
cauauccugagcca

SEQ ID NO: 2279096 - RNA, 18 nt, Human
cauauccccucucccccc

SEQ ID NO: 2279097 - RNA, 23 nt, Human
cauauccugagccaucggugaaa

SEQ ID NO: 2279098 - RNA, 20 nt, Human
cauaugacucacaugaugca

SEQ ID NO: 2279099 - RNA, 13 nt, Human
cauaugaggaugc

SEQ ID NO: 2279100 - RNA, 15 nt, Human
cauauccugagccau

SEQ ID NO: 2279101 - RNA, 22 nt, Human
cauaugacucacaugaugcaua

SEQ ID NO: 2279102 - RNA, 14 nt, Human
cauaugagugugga

SEQ ID NO: 2279103 - RNA, 17 nt, Human
cauaugaguguggaagc

SEQ ID NO: 2279104 - RNA, 19 nt, Human
cauaugaguguggaagccg

SEQ ID NO: 2279105 - RNA, 23 nt, Human
cauaugauugugcacauacuuga

SEQ ID NO: 2279106 - RNA, 15 nt, Human
cauaugauucugcuu

SEQ ID NO: 2279107 - RNA, 23 nt, Human
cauaugaguuucauagcuaagaa

SEQ ID NO: 2279108 - RNA, 14 nt, Human
cauaugauucugcu

SEQ ID NO: 2279109 - RNA, 21 nt, Human
cauaugauguacauguacuga

SEQ ID NO: 2279110 - RNA, 15 nt, Human
cauaugauguacaug

SEQ ID NO: 2279111 - RNA, 17 nt, Human
cauaugauguacaugua

SEQ ID NO: 2279112 - RNA, 22 nt, Human
cauauauauguuuuaagaggca

SEQ ID NO: 2279113 - RNA, 13 nt, Human
cauaucaguugag

SEQ ID NO: 2279114 - RNA, 19 nt, Human
cauaucaccucauggccua

SEQ ID NO: 2279115 - RNA, 23 nt, Human
cauaucaaaaaguauuaaaacua

SEQ ID NO: 2279116 - RNA, 17 nt, Human
cauauauaucuaucuua

SEQ ID NO: 2279117 - RNA, 18 nt, Human
cauauauaacuagcuaga

SEQ ID NO: 2279118 - RNA, 17 nt, Human
cauauacagcucagaag

SEQ ID NO: 2279119 - RNA, 24 nt, Human
cauauaaguuugaaggaaacaguu

SEQ ID NO: 2279120 - RNA, 15 nt, Human
cauauaauguuguua

SEQ ID NO: 2279121 - RNA, 22 nt, Human
cauauaaguuugaaggaaacag

SEQ ID NO: 2279122 - RNA, 23 nt, Human
cauauaaguuugaaggaaacagu

SEQ ID NO: 2279123 - RNA, 17 nt, Human
cauauaauguuguuauu

SEQ ID NO: 2279124 - RNA, 18 nt, Human
cauauaauguuguuauuu

SEQ ID NO: 2279125 - RNA, 19 nt, Human
cauaguucccauguuaaau

SEQ ID NO: 2279126 - RNA, 22 nt, Human
cauaguggcuuaaaacaacacu

SEQ ID NO: 2279127 - RNA, 23 nt, Human
cauaguggacauuguuggcagca

SEQ ID NO: 2279128 - RNA, 15 nt, Human
cauaguggugcagag

SEQ ID NO: 2279129 - RNA, 19 nt, Human
cauauaaacaucacacaca

SEQ ID NO: 2279130 - RNA, 17 nt, Human
cauaguuuuuacugaac

SEQ ID NO: 2279131 - RNA, 15 nt, Human
cauauaaguuugaag

SEQ ID NO: 2279132 - RNA, 20 nt, Human
cauauaaguuugaaggaaac

SEQ ID NO: 2279133 - RNA, 21 nt, Human
cauauaaguuugaaggaaaca

SEQ ID NO: 2279134 - RNA, 20 nt, Human
cauauaaacaucacacacac

SEQ ID NO: 2279135 - RNA, 19 nt, Human
cauauaaacuuuuuaaaga

SEQ ID NO: 2279136 - RNA, 18 nt, Human
cauaguaugguggcuggg

SEQ ID NO: 2279137 - RNA, 19 nt, Human
cauaguaugguggcugggu

SEQ ID NO: 2279138 - RNA, 20 nt, Human
cauaguaugguggcuggguu

SEQ ID NO: 2279139 - RNA, 22 nt, Human
cauagugaugguuccccuguuc

SEQ ID NO: 2279140 - RNA, 17 nt, Human
cauagaggugagggaag

SEQ ID NO: 2279141 - RNA, 23 nt, Human
cauagaggcuucuccgccagccu

SEQ ID NO: 2279142 - RNA, 21 nt, Human
cauagaggugagggaagccug

SEQ ID NO: 2279143 - RNA, 19 nt, Human
cauagaggcuucuccgcca

SEQ ID NO: 2279144 - RNA, 20 nt, Human
cauagaggcuucuccgccag

SEQ ID NO: 2279145 - RNA, 21 nt, Human
cauagaggcuucuccgccagc

SEQ ID NO: 2279146 - RNA, 22 nt, Human
cauagaggcuucuccgccagcc

SEQ ID NO: 2279147 - RNA, 22 nt, Human
cauagagagggagaagaaguca

SEQ ID NO: 2279148 - RNA, 17 nt, Human
cauagagaucauccuuu

SEQ ID NO: 2279149 - RNA, 12 nt, Human
cauagaggcuuc

SEQ ID NO: 2279150 - RNA, 15 nt, Human
cauagaggcuucucc

SEQ ID NO: 2279151 - RNA, 14 nt, Human
cauagaguuuaaca

SEQ ID NO: 2279152 - RNA, 15 nt, Human
cauagaguuuaacac

SEQ ID NO: 2279153 - RNA, 18 nt, Human
cauagaguuuaacacaag

SEQ ID NO: 2279154 - RNA, 23 nt, Human
cauagaucagcaaaccggggccu

SEQ ID NO: 2279155 - RNA, 13 nt, Human
cauacuuaucucu

SEQ ID NO: 2279156 - RNA, 16 nt, Human
cauacuuaucucucug

SEQ ID NO: 2279157 - RNA, 17 nt, Human
cauacugugcuggagcc

SEQ ID NO: 2279158 - RNA, 18 nt, Human
cauacugugcuggagcca

SEQ ID NO: 2279159 - RNA, 19 nt, Human
cauacugugcuggagccac

SEQ ID NO: 2279160 - RNA, 13 nt, Human
cauacuggccugg

SEQ ID NO: 2279161 - RNA, 15 nt, Human
cauacuggccuggac

SEQ ID NO: 2279162 - RNA, 18 nt, Human
cauacuggccuggacugu

SEQ ID NO: 2279163 - RNA, 22 nt, Human
cauacuggccuggacuguuuuc

SEQ ID NO: 2279164 - RNA, 11 nt, Human
cauacugcugu

SEQ ID NO: 2279165 - RNA, 20 nt, Human
cauacugagggaccaacugg

SEQ ID NO: 2279166 - RNA, 23 nt, Human
cauacucuagauuuuguuuugcu

SEQ ID NO: 2279167 - RNA, 12 nt, Human
cauacuggccuc

SEQ ID NO: 2279168 - RNA, 13 nt, Human
cauacuggccucg

SEQ ID NO: 2279169 - RNA, 15 nt, Human
cauacuggccucgcc

SEQ ID NO: 2279170 - RNA, 16 nt, Human
cauacuggccucgccu

SEQ ID NO: 2279171 - RNA, 17 nt, Human
cauacuggccucgccug

SEQ ID NO: 2279172 - RNA, 18 nt, Human
cauacuggccucgccugg

SEQ ID NO: 2279173 - RNA, 19 nt, Human
cauacuggccucgccuggc

SEQ ID NO: 2279174 - RNA, 20 nt, Human
cauacuggccucgccuggcc

SEQ ID NO: 2279175 - RNA, 21 nt, Human
cauacuggccucgccuggccu

SEQ ID NO: 2279176 - RNA, 22 nt, Human
cauacuggccucgccuggccug

SEQ ID NO: 2279177 - RNA, 20 nt, Human
cauacuccuuccaucaaaua

SEQ ID NO: 2279178 - RNA, 23 nt, Human
cauacuccaucaguuagagcuga

SEQ ID NO: 2279179 - RNA, 18 nt, Human
cauacuaucuacucuccu

SEQ ID NO: 2279180 - RNA, 19 nt, Human
cauacugagggaccaacug

SEQ ID NO: 2279181 - RNA, 15 nt, Human
cauacugagggacca

SEQ ID NO: 2279182 - RNA, 17 nt, Human
cauacucuagauuuugu

SEQ ID NO: 2279183 - RNA, 22 nt, Human
cauacucuagauuuuguuuugc

SEQ ID NO: 2279184 - RNA, 11 nt, Human
cauacucugcu

SEQ ID NO: 2279185 - RNA, 16 nt, Human
cauacucccaucugug

SEQ ID NO: 2279186 - RNA, 15 nt, Human
cauacucccaucugu

SEQ ID NO: 2279187 - RNA, 18 nt, Human
cauacucccaucugugaa

SEQ ID NO: 2279188 - RNA, 20 nt, Human
cauacucccaucugugaaag

SEQ ID NO: 2279189 - RNA, 15 nt, Human
cauagacccucucaa

SEQ ID NO: 2279190 - RNA, 16 nt, Human
cauagacccucucaag

SEQ ID NO: 2279191 - RNA, 18 nt, Human
cauagagagggagaagaa

SEQ ID NO: 2279192 - RNA, 19 nt, Human
cauagagagggagaagaag

SEQ ID NO: 2279193 - RNA, 23 nt, Human
cauagagagcaagacgcugugcu

SEQ ID NO: 2279194 - RNA, 19 nt, Human
cauagagagcaagacgcug

SEQ ID NO: 2279195 - RNA, 21 nt, Human
cauagagagcaagacgcugug

SEQ ID NO: 2279196 - RNA, 14 nt, Human
cauagaaggcaggu

SEQ ID NO: 2279197 - RNA, 23 nt, Human
cauagaaauguaacuuuuguaag

SEQ ID NO: 2279198 - RNA, 14 nt, Human
cauagaauaaaauu

SEQ ID NO: 2279199 - RNA, 16 nt, Human
cauagaaggcagguga

SEQ ID NO: 2279200 - RNA, 20 nt, Human
cauagaauaaaauuuuuaau

SEQ ID NO: 2279201 - RNA, 22 nt, Human
cauacuuuuuaaauguaaagau

SEQ ID NO: 2279202 - RNA, 14 nt, Human
cauacuuuccugua

SEQ ID NO: 2279203 - RNA, 17 nt, Human
cauacuuucauccugac

SEQ ID NO: 2279204 - RNA, 21 nt, Human
cauacuuucauccugacucug

SEQ ID NO: 2279205 - RNA, 22 nt, Human
cauacuuucauccugacucugc

SEQ ID NO: 2279206 - RNA, 12 nt, Human
cauacuuugucu

SEQ ID NO: 2279207 - RNA, 20 nt, Human
cauacuuuuuaaauguaaag

SEQ ID NO: 2279208 - RNA, 16 nt, Human
cauacuuuuuaaaugu

SEQ ID NO: 2279209 - RNA, 13 nt, Human
cauacuuugucug

SEQ ID NO: 2279210 - RNA, 14 nt, Human
cauacuuugucuga

SEQ ID NO: 2279211 - RNA, 16 nt, Human
cauacuuugucugaaa

SEQ ID NO: 2279212 - RNA, 18 nt, Human
cauacuuugucugaaaaa

SEQ ID NO: 2279213 - RNA, 18 nt, Human
cauacuucaugaaauccu

SEQ ID NO: 2279214 - RNA, 19 nt, Human
cauacuucaaaaguauuuu

SEQ ID NO: 2279215 - RNA, 22 nt, Human
cauacuucaaaaguauuuuccu

SEQ ID NO: 2279216 - RNA, 13 nt, Human
cauacuugaaggg

SEQ ID NO: 2279217 - RNA, 18 nt, Human
cauacuuaucucucugug

SEQ ID NO: 2279218 - RNA, 20 nt, Human
cauacuuaucucucugugcu

SEQ ID NO: 2279219 - RNA, 22 nt, Human
cauacuuaucucucugugcugu

SEQ ID NO: 2279220 - RNA, 14 nt, Human
cauacuucaaaagu

SEQ ID NO: 2279221 - RNA, 15 nt, Human
cauacuucaaaagua

SEQ ID NO: 2279222 - RNA, 16 nt, Human
cauacuucaaaaguau

SEQ ID NO: 2279223 - RNA, 17 nt, Human
cauacuucaaaaguauu

SEQ ID NO: 2279224 - RNA, 18 nt, Human
cauacuucaaaaguauuu

SEQ ID NO: 2279225 - RNA, 23 nt, Human
cauacuugaagggccagagccag

SEQ ID NO: 2279226 - RNA, 14 nt, Human
cauacuuucauccu

SEQ ID NO: 2279227 - RNA, 22 nt, Human
cauacuugaagggccagagcca

SEQ ID NO: 2279228 - RNA, 21 nt, Human
cauacuugaagggccagagcc

SEQ ID NO: 2279229 - RNA, 20 nt, Human
cauacuugaagggccagagc

SEQ ID NO: 2279230 - RNA, 18 nt, Human
cauacuugaagggccaga

SEQ ID NO: 2279231 - RNA, 17 nt, Human
cauacuugaagggccag

SEQ ID NO: 2279232 - RNA, 14 nt, Human
cauacuugaagggc

SEQ ID NO: 2279233 - RNA, 12 nt, Human
caucucaggggc

SEQ ID NO: 2279234 - RNA, 15 nt, Human
caucucaggggccag

SEQ ID NO: 2279235 - RNA, 16 nt, Human
caucucaggggccaga

SEQ ID NO: 2279236 - RNA, 19 nt, Human
caucucaggggccagagga

SEQ ID NO: 2279237 - RNA, 22 nt, Human
caucucaggccaccugcccccu

SEQ ID NO: 2279238 - RNA, 21 nt, Human
caucucaggccaccugccccc

SEQ ID NO: 2279239 - RNA, 20 nt, Human
caucucaggccaccugcccc

SEQ ID NO: 2279240 - RNA, 17 nt, Human
caucucaggccaccugc

SEQ ID NO: 2279241 - RNA, 18 nt, Human
caucucaggccucccuca

SEQ ID NO: 2279242 - RNA, 17 nt, Human
caucucauuccaacuuc

SEQ ID NO: 2279243 - RNA, 23 nt, Human
caucucauguaucaucuggauag

SEQ ID NO: 2279244 - RNA, 22 nt, Human
caucucauucaaaccccacccu

SEQ ID NO: 2279245 - RNA, 14 nt, Human
caucuccaagaaug

SEQ ID NO: 2279246 - RNA, 18 nt, Human
caucucagugcuguaaaa

SEQ ID NO: 2279247 - RNA, 22 nt, Human
caucucaugccccuggcuggga

SEQ ID NO: 2279248 - RNA, 20 nt, Human
caucucauguaucaucugga

SEQ ID NO: 2279249 - RNA, 15 nt, Human
caucucaggccaccu

SEQ ID NO: 2279250 - RNA, 14 nt, Human
caucucaggccacc

SEQ ID NO: 2279251 - RNA, 19 nt, Human
caucucacuggaugcaaag

SEQ ID NO: 2279252 - RNA, 18 nt, Human
caucucagacccuuuagc

SEQ ID NO: 2279253 - RNA, 20 nt, Human
caucucagccuaccaugaga

SEQ ID NO: 2279254 - RNA, 13 nt, Human
caucucagcccac

SEQ ID NO: 2279255 - RNA, 22 nt, Human
caucucaaggaauaaugggcuu

SEQ ID NO: 2279256 - RNA, 20 nt, Human
caucucacacaugagcauca

SEQ ID NO: 2279257 - RNA, 19 nt, Human
caucuaugucccuugcugu

SEQ ID NO: 2279258 - RNA, 16 nt, Human
caucuaucucaauccu

SEQ ID NO: 2279259 - RNA, 14 nt, Human
caucuauuucugag

SEQ ID NO: 2279260 - RNA, 13 nt, Human
caucuauuucuga

SEQ ID NO: 2279261 - RNA, 20 nt, Human
caucuauucucuccaaaaau

SEQ ID NO: 2279262 - RNA, 13 nt, Human
caucuauucucuc

SEQ ID NO: 2279263 - RNA, 14 nt, Human
caucuauaaauugu

SEQ ID NO: 2279264 - RNA, 15 nt, Human
caucuaucucaaucc

SEQ ID NO: 2279265 - RNA, 20 nt, Human
caucuaucucaucuaucuca

SEQ ID NO: 2279266 - RNA, 14 nt, Human
caucuauaaagaag

SEQ ID NO: 2279267 - RNA, 13 nt, Human
caucuaguuuuaa

SEQ ID NO: 2279268 - RNA, 22 nt, Human
caucuagugagcagucaggaaa

SEQ ID NO: 2279269 - RNA, 16 nt, Human
caucucaaccaucccc

SEQ ID NO: 2279270 - RNA, 14 nt, Human
caucucaaccaucc

SEQ ID NO: 2279271 - RNA, 15 nt, Human
caucuauuucugaga

SEQ ID NO: 2279272 - RNA, 16 nt, Human
caucuauuucugagaa

SEQ ID NO: 2279273 - RNA, 16 nt, Human
caucuauuuuggauug

SEQ ID NO: 2279274 - RNA, 14 nt, Human
caucuauuuuggau

SEQ ID NO: 2279275 - RNA, 16 nt, Human
caucucacacaugagc

SEQ ID NO: 2279276 - RNA, 17 nt, Human
caucucacacaugagca

SEQ ID NO: 2279277 - RNA, 20 nt, Human
cauccuccguccagccgcca

SEQ ID NO: 2279278 - RNA, 19 nt, Human
cauccuccguccagccgcc

SEQ ID NO: 2279279 - RNA, 13 nt, Human
cauccuccuccca

SEQ ID NO: 2279280 - RNA, 16 nt, Human
cauccuccucccaccc

SEQ ID NO: 2279281 - RNA, 20 nt, Human
cauccuccucccacccggcu

SEQ ID NO: 2279282 - RNA, 15 nt, Human
cauccucuguacaga

SEQ ID NO: 2279283 - RNA, 18 nt, Human
cauccucuguacagagcc

SEQ ID NO: 2279284 - RNA, 14 nt, Human
caucuaauaaaaaa

SEQ ID NO: 2279285 - RNA, 23 nt, Human
caucuaauagcggguuacuuuca

SEQ ID NO: 2279286 - RNA, 16 nt, Human
caucuaagccugaagg

SEQ ID NO: 2279287 - RNA, 12 nt, Human
caucuaagccug

SEQ ID NO: 2279288 - RNA, 21 nt, Human
cauccucuguacagagcccac

SEQ ID NO: 2279289 - RNA, 19 nt, Human
cauccucuguacagagccc

SEQ ID NO: 2279290 - RNA, 18 nt, Human
caucuagcaaauguuaug

SEQ ID NO: 2279291 - RNA, 14 nt, Human
caucuagcaaaugu

SEQ ID NO: 2279292 - RNA, 19 nt, Human
caucuagagcuugaugcca

SEQ ID NO: 2279293 - RNA, 17 nt, Human
caucuagguaaauuaca

SEQ ID NO: 2279294 - RNA, 18 nt, Human
caucuagguaaauuacag

SEQ ID NO: 2279295 - RNA, 14 nt, Human
caucuagugagcag

SEQ ID NO: 2279296 - RNA, 15 nt, Human
caucuacccuccgau

SEQ ID NO: 2279297 - RNA, 14 nt, Human
caucuacucccaag

SEQ ID NO: 2279298 - RNA, 16 nt, Human
caucuagagcuugaug

SEQ ID NO: 2279299 - RNA, 19 nt, Human
caucuacucccaaguaugg

SEQ ID NO: 2279300 - RNA, 19 nt, Human
caucuagaggcuuccuuca

SEQ ID NO: 2279301 - RNA, 12 nt, Human
caucuaggauuu

SEQ ID NO: 2279302 - RNA, 23 nt, Human
caucuagaggcuuccuucauuuc

SEQ ID NO: 2279303 - RNA, 22 nt, Human
caucuagaggcuuccuucauuu

SEQ ID NO: 2279304 - RNA, 21 nt, Human
caucuagaggcuuccuucauu

SEQ ID NO: 2279305 - RNA, 20 nt, Human
caucuagaggcuuccuucau

SEQ ID NO: 2279306 - RNA, 20 nt, Human
cauccuaaucauccaaugcu

SEQ ID NO: 2279307 - RNA, 13 nt, Human
cauccuacccucg

SEQ ID NO: 2279308 - RNA, 15 nt, Human
cauccuacccucggg

SEQ ID NO: 2279309 - RNA, 19 nt, Human
cauccuacccucgggccca

SEQ ID NO: 2279310 - RNA, 23 nt, Human
cauccuacccucgggcccaccug

SEQ ID NO: 2279311 - RNA, 16 nt, Human
cauccuacaagacaca

SEQ ID NO: 2279312 - RNA, 15 nt, Human
cauccucauacccac

SEQ ID NO: 2279313 - RNA, 16 nt, Human
cauccucauacccacc

SEQ ID NO: 2279314 - RNA, 21 nt, Human
cauccuacccucgggcccacc

SEQ ID NO: 2279315 - RNA, 13 nt, Human
cauccuagucucu

SEQ ID NO: 2279316 - RNA, 20 nt, Human
cauccuagucucuaucauua

SEQ ID NO: 2279317 - RNA, 16 nt, Human
cauccuaucagccugu

SEQ ID NO: 2279318 - RNA, 24 nt, Human
cauccuaucagccugucucuucca

SEQ ID NO: 2279319 - RNA, 15 nt, Human
cauccuaugcaauau

SEQ ID NO: 2279320 - RNA, 16 nt, Human
cauccucaaacacugc

SEQ ID NO: 2279321 - RNA, 17 nt, Human
cauccucaaacacugca

SEQ ID NO: 2279322 - RNA, 18 nt, Human
cauccucaaacacugcag

SEQ ID NO: 2279323 - RNA, 19 nt, Human
cauccucaaacacugcagg

SEQ ID NO: 2279324 - RNA, 16 nt, Human
cauccuccguccagcc

SEQ ID NO: 2279325 - RNA, 21 nt, Human
cauccuccccuucccugcaaa

SEQ ID NO: 2279326 - RNA, 20 nt, Human
cauccuccccuucccugcaa

SEQ ID NO: 2279327 - RNA, 20 nt, Human
cauccuccgccucccggguu

SEQ ID NO: 2279328 - RNA, 19 nt, Human
cauccuccccuucccugca

SEQ ID NO: 2279329 - RNA, 16 nt, Human
cauccuccccuucccu

SEQ ID NO: 2279330 - RNA, 15 nt, Human
cauccuccccuuccc

SEQ ID NO: 2279331 - RNA, 14 nt, Human
cauccuccccuucc

SEQ ID NO: 2279332 - RNA, 13 nt, Human
cauccuccccuuc

SEQ ID NO: 2279333 - RNA, 12 nt, Human
cauccuccccuu

SEQ ID NO: 2279334 - RNA, 11 nt, Human
cauccuccuca

SEQ ID NO: 2279335 - RNA, 12 nt, Human
cauccuccucag

SEQ ID NO: 2279336 - RNA, 15 nt, Human
cauccuccucagauc

SEQ ID NO: 2279337 - RNA, 16 nt, Human
cauccuccucagaucu

SEQ ID NO: 2279338 - RNA, 18 nt, Human
cauccuccucagaucuuc

SEQ ID NO: 2279339 - RNA, 19 nt, Human
cauccuccucagaucuucu

SEQ ID NO: 2279340 - RNA, 13 nt, Human
cauccucccaagg

SEQ ID NO: 2279341 - RNA, 12 nt, Human
cauccuccagcu

SEQ ID NO: 2279342 - RNA, 13 nt, Human
cauccuccagcuu

SEQ ID NO: 2279343 - RNA, 14 nt, Human
cauccuccagcuuc

SEQ ID NO: 2279344 - RNA, 15 nt, Human
cauccuccagcuucu

SEQ ID NO: 2279345 - RNA, 17 nt, Human
cauccuccagcuucugg

SEQ ID NO: 2279346 - RNA, 14 nt, Human
cauccuccagcagg

SEQ ID NO: 2279347 - RNA, 13 nt, Human
cauccuccagcag

SEQ ID NO: 2279348 - RNA, 16 nt, Human
cauccuccagcaggga

SEQ ID NO: 2279349 - RNA, 21 nt, Human
cauccuccacguucugcucau

SEQ ID NO: 2279350 - RNA, 14 nt, Human
cauccuccaagaau

SEQ ID NO: 2279351 - RNA, 20 nt, Human
cauccuccacguucugcuca

SEQ ID NO: 2279352 - RNA, 18 nt, Human
cauccuccacguucugcu

SEQ ID NO: 2279353 - RNA, 22 nt, Human
cauccucaaacacugcaggcau

SEQ ID NO: 2279354 - RNA, 17 nt, Human
cauccucauacccaccc

SEQ ID NO: 2279355 - RNA, 18 nt, Human
cauccucauacccacccc

SEQ ID NO: 2279356 - RNA, 21 nt, Human
cauccucauacccacccccac

SEQ ID NO: 2279357 - RNA, 22 nt, Human
cauccucauacccacccccacc

SEQ ID NO: 2279358 - RNA, 14 nt, Human
caucuuagugccug

SEQ ID NO: 2279359 - RNA, 20 nt, Human
caucuuaguauuugcauauu

SEQ ID NO: 2279360 - RNA, 22 nt, Human
caucugcaccccuucucuccuc

SEQ ID NO: 2279361 - RNA, 23 nt, Human
caucugcaccccuucucuccucc

SEQ ID NO: 2279362 - RNA, 21 nt, Human
caucuucacuucuaaaugcau

SEQ ID NO: 2279363 - RNA, 14 nt, Human
caucuucacuucua

SEQ ID NO: 2279364 - RNA, 13 nt, Human
caucuucagcuuc

SEQ ID NO: 2279365 - RNA, 14 nt, Human
caucuucagcuucu

SEQ ID NO: 2279366 - RNA, 14 nt, Human
caucuucaaagcuu

SEQ ID NO: 2279367 - RNA, 20 nt, Human
caucuuauuuucauguauau

SEQ ID NO: 2279368 - RNA, 12 nt, Human
caucuuccagaa

SEQ ID NO: 2279369 - RNA, 13 nt, Human
caucuuccagaag

SEQ ID NO: 2279370 - RNA, 22 nt, Human
caucuuccaaggguacuaagga

SEQ ID NO: 2279371 - RNA, 19 nt, Human
caucugcaccccccugggc

SEQ ID NO: 2279372 - RNA, 18 nt, Human
caucugcaccccccuggg

SEQ ID NO: 2279373 - RNA, 16 nt, Human
caucugcaccccuucu

SEQ ID NO: 2279374 - RNA, 17 nt, Human
caucugcaccccuucuc

SEQ ID NO: 2279375 - RNA, 19 nt, Human
caucugcaccccuucucuc

SEQ ID NO: 2279376 - RNA, 21 nt, Human
caucugcaccccuucucuccu

SEQ ID NO: 2279377 - RNA, 15 nt, Human
caucugagcaagagc

SEQ ID NO: 2279378 - RNA, 18 nt, Human
caucugagcaagagcugg

SEQ ID NO: 2279379 - RNA, 16 nt, Human
caucucuuguuuaaau

SEQ ID NO: 2279380 - RNA, 23 nt, Human
caucugagaaaagcuuugaaccc

SEQ ID NO: 2279381 - RNA, 14 nt, Human
caucugagaaaagc

SEQ ID NO: 2279382 - RNA, 16 nt, Human
caucuccaucagcugu

SEQ ID NO: 2279383 - RNA, 15 nt, Human
caucuccaucagcug

SEQ ID NO: 2279384 - RNA, 14 nt, Human
caucuccaucagcu

SEQ ID NO: 2279385 - RNA, 22 nt, Human
caucuccagggaguccccuccc

SEQ ID NO: 2279386 - RNA, 17 nt, Human
caucuccagggaguccc

SEQ ID NO: 2279387 - RNA, 19 nt, Human
caucuccagggaguccccu

SEQ ID NO: 2279388 - RNA, 20 nt, Human
caucuccagggaguccccuc

SEQ ID NO: 2279389 - RNA, 21 nt, Human
caucuccagggaguccccucc

SEQ ID NO: 2279390 - RNA, 21 nt, Human
caucucccaccuagcagcacc

SEQ ID NO: 2279391 - RNA, 17 nt, Human
caucuccaucuugaagg

SEQ ID NO: 2279392 - RNA, 18 nt, Human
caucucccagauaaugug

SEQ ID NO: 2279393 - RNA, 17 nt, Human
caucucccagauaaugu

SEQ ID NO: 2279394 - RNA, 14 nt, Human
caucuccacuccag

SEQ ID NO: 2279395 - RNA, 23 nt, Human
caucuccaagaaugcugaaacca

SEQ ID NO: 2279396 - RNA, 16 nt, Human
caucuccaccugcucc

SEQ ID NO: 2279397 - RNA, 20 nt, Human
caucuccaccugcucccagg

SEQ ID NO: 2279398 - RNA, 14 nt, Human
caucuccagggagu

SEQ ID NO: 2279399 - RNA, 16 nt, Human
caucuccaagaaugcu

SEQ ID NO: 2279400 - RNA, 17 nt, Human
caucuccaagaaugcug

SEQ ID NO: 2279401 - RNA, 18 nt, Human
caucuccaagaaugcuga

SEQ ID NO: 2279402 - RNA, 16 nt, Human
caucuccacccccagc

SEQ ID NO: 2279403 - RNA, 19 nt, Human
caucuccaagaaugcugaa

SEQ ID NO: 2279404 - RNA, 20 nt, Human
caucuccaagaaugcugaaa

SEQ ID NO: 2279405 - RNA, 20 nt, Human
caucucuugaggccaggagu

SEQ ID NO: 2279406 - RNA, 15 nt, Human
caucucuugaggcca

SEQ ID NO: 2279407 - RNA, 22 nt, Human
caucucuucuggguuccuuccu

SEQ ID NO: 2279408 - RNA, 19 nt, Human
caucucuuagcuccccucc

SEQ ID NO: 2279409 - RNA, 21 nt, Human
caucucuuagcuccccuccaa

SEQ ID NO: 2279410 - RNA, 23 nt, Human
caucucuuagcuccccuccaacc

SEQ ID NO: 2279411 - RNA, 23 nt, Human
caucucuuccuacccaaccacuc

SEQ ID NO: 2279412 - RNA, 21 nt, Human
caucucuuccuccgaggccag

SEQ ID NO: 2279413 - RNA, 16 nt, Human
caucucuuagcucccc

SEQ ID NO: 2279414 - RNA, 23 nt, Human
caucucuuacgcccaacccuucc

SEQ ID NO: 2279415 - RNA, 17 nt, Human
caucucuuagcuccccu

SEQ ID NO: 2279416 - RNA, 18 nt, Human
caucucuuagcuccccuc

SEQ ID NO: 2279417 - RNA, 22 nt, Human
caucucccagauaaugugaaaa

SEQ ID NO: 2279418 - RNA, 13 nt, Human
caucucuguccca

SEQ ID NO: 2279419 - RNA, 21 nt, Human
caucuucccagcagggccacu

SEQ ID NO: 2279420 - RNA, 12 nt, Human
caucuucccagc

SEQ ID NO: 2279421 - RNA, 14 nt, Human
caucuucccagcag

SEQ ID NO: 2279422 - RNA, 18 nt, Human
caucuuccagaaguguga

SEQ ID NO: 2279423 - RNA, 19 nt, Human
caucuuccagaagugugau

SEQ ID NO: 2279424 - RNA, 20 nt, Human
caucuuccagaagugugauu

SEQ ID NO: 2279425 - RNA, 21 nt, Human
caucuuccagaagugugauug

SEQ ID NO: 2279426 - RNA, 14 nt, Human
caucuuccaggugg

SEQ ID NO: 2279427 - RNA, 16 nt, Human
caucuuccaggugggg

SEQ ID NO: 2279428 - RNA, 21 nt, Human
caucuuccagguggggugagg

SEQ ID NO: 2279429 - RNA, 10 nt, Human
caucuuccca

SEQ ID NO: 2279430 - RNA, 17 nt, Human
caucuucuccaucuggc

SEQ ID NO: 2279431 - RNA, 16 nt, Human
caucuucuccaucugg

SEQ ID NO: 2279432 - RNA, 14 nt, Human
caucuucuccaucu

SEQ ID NO: 2279433 - RNA, 21 nt, Human
caucuucucagcucccauuuc

SEQ ID NO: 2279434 - RNA, 13 nt, Human
caucuucucagcu

SEQ ID NO: 2279435 - RNA, 14 nt, Human
caucuucucagcuc

SEQ ID NO: 2279436 - RNA, 17 nt, Human
caucuucucagcuccca

SEQ ID NO: 2279437 - RNA, 18 nt, Human
caucuucucagcucccau

SEQ ID NO: 2279438 - RNA, 22 nt, Human
caucuucccuagaggguuccug

SEQ ID NO: 2279439 - RNA, 12 nt, Human
caucuucucagc

SEQ ID NO: 2279440 - RNA, 21 nt, Human
caucuucuaaacccaauccaa

SEQ ID NO: 2279441 - RNA, 23 nt, Human
caucuugaucugcucagcccugg

SEQ ID NO: 2279442 - RNA, 21 nt, Human
caucuugaucugcucagcccu

SEQ ID NO: 2279443 - RNA, 22 nt, Human
caucuugaucugcucagcccug

SEQ ID NO: 2279444 - RNA, 24 nt, Human
caucuugaccaagcaggaagcuca

SEQ ID NO: 2279445 - RNA, 23 nt, Human
caucuugaccaagcaggaagcuc

SEQ ID NO: 2279446 - RNA, 19 nt, Human
caucuugaucugcucagcc

SEQ ID NO: 2279447 - RNA, 20 nt, Human
caucuugaucugcucagccc

SEQ ID NO: 2279448 - RNA, 22 nt, Human
caucuugaccaagcaggaagcu

SEQ ID NO: 2279449 - RNA, 21 nt, Human
caucuugaccaagcaggaagc

SEQ ID NO: 2279450 - RNA, 20 nt, Human
caucuugaccaagcaggaag

SEQ ID NO: 2279451 - RNA, 18 nt, Human
caucuugaccaagcagga

SEQ ID NO: 2279452 - RNA, 17 nt, Human
caucuugaccaagcagg

SEQ ID NO: 2279453 - RNA, 16 nt, Human
caucuugaccaagcag

SEQ ID NO: 2279454 - RNA, 15 nt, Human
caucuugaccaagca

SEQ ID NO: 2279455 - RNA, 13 nt, Human
caucuucugccuu

SEQ ID NO: 2279456 - RNA, 13 nt, Human
caucuugcucugc

SEQ ID NO: 2279457 - RNA, 14 nt, Human
caucuugcucugcu

SEQ ID NO: 2279458 - RNA, 13 nt, Human
caucuugcuuccc

SEQ ID NO: 2279459 - RNA, 14 nt, Human
caucuugcuucccu

SEQ ID NO: 2279460 - RNA, 20 nt, Human
caucuugcucugcugacaga

SEQ ID NO: 2279461 - RNA, 15 nt, Human
caucuugcuucccua

SEQ ID NO: 2279462 - RNA, 16 nt, Human
caucuuggagggacca

SEQ ID NO: 2279463 - RNA, 15 nt, Human
caucuuggggacauc

SEQ ID NO: 2279464 - RNA, 16 nt, Human
caucuuggggacaucu

SEQ ID NO: 2279465 - RNA, 18 nt, Human
caucuuggggacaucucu

SEQ ID NO: 2279466 - RNA, 20 nt, Human
caucuuggggacaucucuuu

SEQ ID NO: 2279467 - RNA, 11 nt, Human
caucuuggggg

SEQ ID NO: 2279468 - RNA, 12 nt, Human
caucuugguaaa

SEQ ID NO: 2279469 - RNA, 13 nt, Human
caucuugguaaau

SEQ ID NO: 2279470 - RNA, 14 nt, Human
caucuugguaaauu

SEQ ID NO: 2279471 - RNA, 16 nt, Human
cauccguaguucccug

SEQ ID NO: 2279472 - RNA, 22 nt, Human
caucccugaaggccccgcccag

SEQ ID NO: 2279473 - RNA, 21 nt, Human
cauccguaguucccugaaaac

SEQ ID NO: 2279474 - RNA, 18 nt, Human
cauccguaguucccugaa

SEQ ID NO: 2279475 - RNA, 17 nt, Human
cauccguaguucccuga

SEQ ID NO: 2279476 - RNA, 14 nt, Human
cauccuaacuccau

SEQ ID NO: 2279477 - RNA, 21 nt, Human
cauccuaacuccaugucucug

SEQ ID NO: 2279478 - RNA, 17 nt, Human
caucccugaaggccccg

SEQ ID NO: 2279479 - RNA, 18 nt, Human
caucccugaaggccccgc

SEQ ID NO: 2279480 - RNA, 19 nt, Human
caucccugaaggccccgcc

SEQ ID NO: 2279481 - RNA, 21 nt, Human
caucccugaaggccccgccca

SEQ ID NO: 2279482 - RNA, 15 nt, Human
cauccaaccccccac

SEQ ID NO: 2279483 - RNA, 21 nt, Human
cauccaaagcagacagcucca

SEQ ID NO: 2279484 - RNA, 18 nt, Human
cauccaaagcagacagcu

SEQ ID NO: 2279485 - RNA, 17 nt, Human
cauccaaagcagacagc

SEQ ID NO: 2279486 - RNA, 19 nt, Human
cauccaaccccccaccugc

SEQ ID NO: 2279487 - RNA, 16 nt, Human
cauccaaccccccacc

SEQ ID NO: 2279488 - RNA, 21 nt, Human
cauccaaccccccaccugcca

SEQ ID NO: 2279489 - RNA, 14 nt, Human
cauccaaccuuccc

SEQ ID NO: 2279490 - RNA, 14 nt, Human
cauccaaggagaaa

SEQ ID NO: 2279491 - RNA, 17 nt, Human
cauccaagagugcgccg

SEQ ID NO: 2279492 - RNA, 15 nt, Human
cauccaacuccagga

SEQ ID NO: 2279493 - RNA, 22 nt, Human
cauccaaggagaaacagagaca

SEQ ID NO: 2279494 - RNA, 21 nt, Human
cauccaaggagaaacagagac

SEQ ID NO: 2279495 - RNA, 21 nt, Human
cauccaaggccagguucuccg

SEQ ID NO: 2279496 - RNA, 16 nt, Human
cauccaaccuucccaa

SEQ ID NO: 2279497 - RNA, 18 nt, Human
cauccaaauaagaaaccu

SEQ ID NO: 2279498 - RNA, 15 nt, Human
caucauuguauauau

SEQ ID NO: 2279499 - RNA, 13 nt, Human
caucauuguauau

SEQ ID NO: 2279500 - RNA, 14 nt, Human
caucauuguauaua

SEQ ID NO: 2279501 - RNA, 24 nt, Human
caucauucucugucucauccauca

SEQ ID NO: 2279502 - RNA, 14 nt, Human
caucauugcacucu

SEQ ID NO: 2279503 - RNA, 19 nt, Human
caucauuguauauaugugu

SEQ ID NO: 2279504 - RNA, 16 nt, Human
cauccaaagcagacag

SEQ ID NO: 2279505 - RNA, 15 nt, Human
cauccaaagcagaca

SEQ ID NO: 2279506 - RNA, 23 nt, Human
cauccaaaauaguuaagacauga

SEQ ID NO: 2279507 - RNA, 16 nt, Human
caucauuuugcauuca

SEQ ID NO: 2279508 - RNA, 18 nt, Human
caucauuuugcauucaaa

SEQ ID NO: 2279509 - RNA, 20 nt, Human
caucauuuugcauucaaauu

SEQ ID NO: 2279510 - RNA, 17 nt, Human
caucauuuuuguaucua

SEQ ID NO: 2279511 - RNA, 22 nt, Human
caucauuuugcauucaaauuaa

SEQ ID NO: 2279512 - RNA, 18 nt, Human
caucauuuuuccuucccu

SEQ ID NO: 2279513 - RNA, 22 nt, Human
caucacaggguugggcccagau

SEQ ID NO: 2279514 - RNA, 13 nt, Human
caucacaguuuug

SEQ ID NO: 2279515 - RNA, 22 nt, Human
caucacaguuuugguugcuuua

SEQ ID NO: 2279516 - RNA, 21 nt, Human
caucacaguuuugguugcuuu

SEQ ID NO: 2279517 - RNA, 15 nt, Human
caucaccaacgucug

SEQ ID NO: 2279518 - RNA, 13 nt, Human
caucauugaaauc

SEQ ID NO: 2279519 - RNA, 22 nt, Human
caucauucucugucucauccau

SEQ ID NO: 2279520 - RNA, 21 nt, Human
caucauucucugucucaucca

SEQ ID NO: 2279521 - RNA, 13 nt, Human
caucacauuuuug

SEQ ID NO: 2279522 - RNA, 14 nt, Human
caucauugaaaucu

SEQ ID NO: 2279523 - RNA, 15 nt, Human
caucauugaaaucuu

SEQ ID NO: 2279524 - RNA, 20 nt, Human
caucauugaaaucuuuuugc

SEQ ID NO: 2279525 - RNA, 21 nt, Human
caucauugaaaucuuuuugcu

SEQ ID NO: 2279526 - RNA, 15 nt, Human
cauccacucuacccu

SEQ ID NO: 2279527 - RNA, 14 nt, Human
cauccacucuaccc

SEQ ID NO: 2279528 - RNA, 21 nt, Human
cauccacuagugcaaaucaua

SEQ ID NO: 2279529 - RNA, 22 nt, Human
cauccacuagugcaaaucauag

SEQ ID NO: 2279530 - RNA, 12 nt, Human
cauccaccuccu

SEQ ID NO: 2279531 - RNA, 13 nt, Human
cauccaccuccuu

SEQ ID NO: 2279532 - RNA, 14 nt, Human
cauccaccuccuuc

SEQ ID NO: 2279533 - RNA, 15 nt, Human
cauccaccuccuucu

SEQ ID NO: 2279534 - RNA, 16 nt, Human
cauccaccuccuucuc

SEQ ID NO: 2279535 - RNA, 14 nt, Human
cauccacuagugca

SEQ ID NO: 2279536 - RNA, 20 nt, Human
cauccacuagugcaaaucau

SEQ ID NO: 2279537 - RNA, 11 nt, Human
cauccagggcc

SEQ ID NO: 2279538 - RNA, 12 nt, Human
cauccaggcagu

SEQ ID NO: 2279539 - RNA, 21 nt, Human
cauccagggcccccaucucau

SEQ ID NO: 2279540 - RNA, 23 nt, Human
cauccaaugcucaagaaacaacu

SEQ ID NO: 2279541 - RNA, 18 nt, Human
cauccacacacgcaggaa

SEQ ID NO: 2279542 - RNA, 17 nt, Human
cauccacaugggagccg

SEQ ID NO: 2279543 - RNA, 17 nt, Human
cauccacauuguuuuaa

SEQ ID NO: 2279544 - RNA, 18 nt, Human
cauccacauuguuuuaaa

SEQ ID NO: 2279545 - RNA, 14 nt, Human
cauccaccccaucc

SEQ ID NO: 2279546 - RNA, 12 nt, Human
cauccaccccau

SEQ ID NO: 2279547 - RNA, 21 nt, Human
cauccacauuguuuuaaaaag

SEQ ID NO: 2279548 - RNA, 21 nt, Human
cauccaauccucacugggugg

SEQ ID NO: 2279549 - RNA, 19 nt, Human
cauccaaucuaaccacauc

SEQ ID NO: 2279550 - RNA, 19 nt, Human
cauccaauccucacugggu

SEQ ID NO: 2279551 - RNA, 18 nt, Human
cauccaauccucacuggg

SEQ ID NO: 2279552 - RNA, 14 nt, Human
cauccaaugcucaa

SEQ ID NO: 2279553 - RNA, 20 nt, Human
cauccaaucuaaccacauca

SEQ ID NO: 2279554 - RNA, 17 nt, Human
cauccaauccucacugg

SEQ ID NO: 2279555 - RNA, 16 nt, Human
cauccaauccucacug

SEQ ID NO: 2279556 - RNA, 15 nt, Human
cauccaauccucacu

SEQ ID NO: 2279557 - RNA, 14 nt, Human
cauccaauccucac

SEQ ID NO: 2279558 - RNA, 13 nt, Human
cauccaauccuca

SEQ ID NO: 2279559 - RNA, 23 nt, Human
cauccaaggagaaacagagacag

SEQ ID NO: 2279560 - RNA, 22 nt, Human
caucccuacccccuaagagcca

SEQ ID NO: 2279561 - RNA, 19 nt, Human
cauccagggcucugaccag

SEQ ID NO: 2279562 - RNA, 15 nt, Human
cauccagguucagcu

SEQ ID NO: 2279563 - RNA, 13 nt, Human
caucccuccccag

SEQ ID NO: 2279564 - RNA, 11 nt, Human
caucccugaag

SEQ ID NO: 2279565 - RNA, 13 nt, Human
caucccugaaggc

SEQ ID NO: 2279566 - RNA, 19 nt, Human
caucccucuggggcuguuc

SEQ ID NO: 2279567 - RNA, 14 nt, Human
caucccuccccagu

SEQ ID NO: 2279568 - RNA, 22 nt, Human
caguguucuguuuaauacucau

SEQ ID NO: 2279569 - RNA, 17 nt, Human
caguguuucccauaauu

SEQ ID NO: 2279570 - RNA, 15 nt, Human
caguguuucccauaa

SEQ ID NO: 2279571 - RNA, 14 nt, Human
caguguuucccaua

SEQ ID NO: 2279572 - RNA, 21 nt, Human
caguguuucccauaauuuucu

SEQ ID NO: 2279573 - RNA, 14 nt, Human
caguguuuccuuuu

SEQ ID NO: 2279574 - RNA, 20 nt, Human
caguguuucccauaauuuuc

SEQ ID NO: 2279575 - RNA, 18 nt, Human
caguguuucccauaauuu

SEQ ID NO: 2279576 - RNA, 22 nt, Human
caguuaacuuucagaagagaug

SEQ ID NO: 2279577 - RNA, 20 nt, Human
caguuaacuuucagaagaga

SEQ ID NO: 2279578 - RNA, 16 nt, Human
caguuaacuuucagaa

SEQ ID NO: 2279579 - RNA, 19 nt, Human
caguuaacuuuaagacuga

SEQ ID NO: 2279580 - RNA, 19 nt, Human
caguuaaaaaaaauuuuaa

SEQ ID NO: 2279581 - RNA, 16 nt, Human
caguuaaaaaaaauuu

SEQ ID NO: 2279582 - RNA, 15 nt, Human
caguuaaaaaaaauu

SEQ ID NO: 2279583 - RNA, 20 nt, Human
caguguuuuuguaaagugug

SEQ ID NO: 2279584 - RNA, 21 nt, Human
caguguuuuuguaaagugugg

SEQ ID NO: 2279585 - RNA, 15 nt, Human
caguguuuucuggga

SEQ ID NO: 2279586 - RNA, 22 nt, Human
caguguuuucugggauaaguaa

SEQ ID NO: 2279587 - RNA, 14 nt, Human
caguguuuuuguaa

SEQ ID NO: 2279588 - RNA, 15 nt, Human
caguguuuuuguaaa

SEQ ID NO: 2279589 - RNA, 19 nt, Human
caguguuuuuguaaagugu

SEQ ID NO: 2279590 - RNA, 16 nt, Human
caguguuaaaugaaau

SEQ ID NO: 2279591 - RNA, 17 nt, Human
caguguuaaaugaaauu

SEQ ID NO: 2279592 - RNA, 18 nt, Human
caguguuaaaugaaauug

SEQ ID NO: 2279593 - RNA, 15 nt, Human
caguguuaaaugaaa

SEQ ID NO: 2279594 - RNA, 17 nt, Human
caguguguuugugauug

SEQ ID NO: 2279595 - RNA, 19 nt, Human
caguguuaaaugugaugaa

SEQ ID NO: 2279596 - RNA, 14 nt, Human
caguguuaaaugug

SEQ ID NO: 2279597 - RNA, 16 nt, Human
caguguuaggccuggc

SEQ ID NO: 2279598 - RNA, 14 nt, Human
caguguuauuuucu

SEQ ID NO: 2279599 - RNA, 14 nt, Human
caguguuccccauc

SEQ ID NO: 2279600 - RNA, 19 nt, Human
caguguuagggaagggccu

SEQ ID NO: 2279601 - RNA, 18 nt, Human
caguguuccgugguuaaa

SEQ ID NO: 2279602 - RNA, 17 nt, Human
caguguuaggccuggca

SEQ ID NO: 2279603 - RNA, 18 nt, Human
caguguuaggccuggcac

SEQ ID NO: 2279604 - RNA, 19 nt, Human
caguguuaggccuggcaca

SEQ ID NO: 2279605 - RNA, 20 nt, Human
caguguuaggccuggcacag

SEQ ID NO: 2279606 - RNA, 21 nt, Human
caguguuaggccuggcacagu

SEQ ID NO: 2279607 - RNA, 22 nt, Human
caguguuaggccuggcacagug

SEQ ID NO: 2279608 - RNA, 23 nt, Human
caguguuaggccuggcacagugu

SEQ ID NO: 2279609 - RNA, 22 nt, Human
caguguuguggauuuaacagaa

SEQ ID NO: 2279610 - RNA, 20 nt, Human
caguguuguggauuuaacag

SEQ ID NO: 2279611 - RNA, 19 nt, Human
caguguuguggauuuaaca

SEQ ID NO: 2279612 - RNA, 18 nt, Human
caguguugagccuuuucc

SEQ ID NO: 2279613 - RNA, 13 nt, Human
caguguucuguuu

SEQ ID NO: 2279614 - RNA, 16 nt, Human
caguguucuguuuaau

SEQ ID NO: 2279615 - RNA, 19 nt, Human
caguguuccccaucugggu

SEQ ID NO: 2279616 - RNA, 21 nt, Human
caguguuccccaucugggucc

SEQ ID NO: 2279617 - RNA, 13 nt, Human
caguuaauuacau

SEQ ID NO: 2279618 - RNA, 20 nt, Human
caguuaagccuuuggaaaca

SEQ ID NO: 2279619 - RNA, 13 nt, Human
caguuacagaaag

SEQ ID NO: 2279620 - RNA, 14 nt, Human
caguuacagaaagu

SEQ ID NO: 2279621 - RNA, 15 nt, Human
caguuacagaaagug

SEQ ID NO: 2279622 - RNA, 14 nt, Human
caguuaagccuuug

SEQ ID NO: 2279623 - RNA, 17 nt, Human
caguuaagccuuuggaa

SEQ ID NO: 2279624 - RNA, 15 nt, Human
caguuaagccuuugg

SEQ ID NO: 2279625 - RNA, 13 nt, Human
caguuaagagaaa

SEQ ID NO: 2279626 - RNA, 14 nt, Human
caguuaagagaaau

SEQ ID NO: 2279627 - RNA, 20 nt, Human
caguucccuuggccucagaa

SEQ ID NO: 2279628 - RNA, 17 nt, Human
caguuccgauuucccag

SEQ ID NO: 2279629 - RNA, 18 nt, Human
caguuccgauuucccagg

SEQ ID NO: 2279630 - RNA, 19 nt, Human
caguucccuuggccucaga

SEQ ID NO: 2279631 - RNA, 18 nt, Human
caguucccuuggccucag

SEQ ID NO: 2279632 - RNA, 17 nt, Human
caguucccuuggccuca

SEQ ID NO: 2279633 - RNA, 16 nt, Human
caguucccuuggccuc

SEQ ID NO: 2279634 - RNA, 15 nt, Human
caguucccuuggccu

SEQ ID NO: 2279635 - RNA, 14 nt, Human
caguucccuuggcc

SEQ ID NO: 2279636 - RNA, 18 nt, Human
caguuccucgcccugggu

SEQ ID NO: 2279637 - RNA, 15 nt, Human
caguuccucuuugca

SEQ ID NO: 2279638 - RNA, 17 nt, Human
caguuccucgcccuggg

SEQ ID NO: 2279639 - RNA, 14 nt, Human
caguuccucgcccu

SEQ ID NO: 2279640 - RNA, 13 nt, Human
caguuccucgccc

SEQ ID NO: 2279641 - RNA, 20 nt, Human
caguuccggauuggcuugug

SEQ ID NO: 2279642 - RNA, 22 nt, Human
caguuccggauuggcuugugug

SEQ ID NO: 2279643 - RNA, 17 nt, Human
caguuccucuuugcaug

SEQ ID NO: 2279644 - RNA, 18 nt, Human
caguuccucuuugcaugg

SEQ ID NO: 2279645 - RNA, 23 nt, Human
caguuccucuuugcauggaauuu

SEQ ID NO: 2279646 - RNA, 13 nt, Human
caguucccuuggc

SEQ ID NO: 2279647 - RNA, 22 nt, Human
caguuacuaagaagaaaauugc

SEQ ID NO: 2279648 - RNA, 17 nt, Human
caguucccccaaccuca

SEQ ID NO: 2279649 - RNA, 18 nt, Human
caguucccccaaccucag

SEQ ID NO: 2279650 - RNA, 19 nt, Human
caguucccccaaccucaga

SEQ ID NO: 2279651 - RNA, 14 nt, Human
caguuacucagaau

SEQ ID NO: 2279652 - RNA, 19 nt, Human
caguuacuaagaagaaaau

SEQ ID NO: 2279653 - RNA, 22 nt, Human
caguuacaugcauacuucaaaa

SEQ ID NO: 2279654 - RNA, 17 nt, Human
caguuacagaaaguggu

SEQ ID NO: 2279655 - RNA, 21 nt, Human
caguuaccucugccucagaaa

SEQ ID NO: 2279656 - RNA, 15 nt, Human
caguuccuuucaaug

SEQ ID NO: 2279657 - RNA, 22 nt, Human
caguucggugagcuacaaaugc

SEQ ID NO: 2279658 - RNA, 13 nt, Human
caguucucuccuu

SEQ ID NO: 2279659 - RNA, 17 nt, Human
caguucuagucucucug

SEQ ID NO: 2279660 - RNA, 17 nt, Human
caguucuaguuugcauu

SEQ ID NO: 2279661 - RNA, 18 nt, Human
caguucuaguuugcauuc

SEQ ID NO: 2279662 - RNA, 19 nt, Human
caguucuaguuugcauucc

SEQ ID NO: 2279663 - RNA, 14 nt, Human
caguucucuccuuc

SEQ ID NO: 2279664 - RNA, 15 nt, Human
caguucucuccuucu

SEQ ID NO: 2279665 - RNA, 22 nt, Human
caguucucuccuucuucccccc

SEQ ID NO: 2279666 - RNA, 12 nt, Human
caguucugaaga

SEQ ID NO: 2279667 - RNA, 13 nt, Human
caguucugaagaa

SEQ ID NO: 2279668 - RNA, 14 nt, Human
caguucugaagaag

SEQ ID NO: 2279669 - RNA, 16 nt, Human
caguucucuucacuca

SEQ ID NO: 2279670 - RNA, 14 nt, Human
caguucugaagaau

SEQ ID NO: 2279671 - RNA, 21 nt, Human
caguucugaauaugcugcuca

SEQ ID NO: 2279672 - RNA, 22 nt, Human
caguucugaagaagaugguacc

SEQ ID NO: 2279673 - RNA, 15 nt, Human
caguucugaagaaga

SEQ ID NO: 2279674 - RNA, 16 nt, Human
caguucugaagaagau

SEQ ID NO: 2279675 - RNA, 15 nt, Human
caguucuuguguggu

SEQ ID NO: 2279676 - RNA, 24 nt, Human
caguucuucgggaagagaggaguu

SEQ ID NO: 2279677 - RNA, 16 nt, Human
caguucuugugugguu

SEQ ID NO: 2279678 - RNA, 19 nt, Human
caguucuucgggaagagag

SEQ ID NO: 2279679 - RNA, 20 nt, Human
caguucuucgggaagagagg

SEQ ID NO: 2279680 - RNA, 22 nt, Human
caguucuucgggaagagaggag

SEQ ID NO: 2279681 - RNA, 23 nt, Human
caguucuucgggaagagaggagu

SEQ ID NO: 2279682 - RNA, 20 nt, Human
caguucugggugcucccuac

SEQ ID NO: 2279683 - RNA, 17 nt, Human
caguucuucgggaagag

SEQ ID NO: 2279684 - RNA, 13 nt, Human
caguucugcagcu

SEQ ID NO: 2279685 - RNA, 13 nt, Human
caguucugcuccu

SEQ ID NO: 2279686 - RNA, 14 nt, Human
caguucugcuccuc

SEQ ID NO: 2279687 - RNA, 15 nt, Human
caguucugcuccucu

SEQ ID NO: 2279688 - RNA, 16 nt, Human
caguucugcuccucuc

SEQ ID NO: 2279689 - RNA, 17 nt, Human
caguucugggugcuccc

SEQ ID NO: 2279690 - RNA, 21 nt, Human
caguucugcuccucuccaggc

SEQ ID NO: 2279691 - RNA, 22 nt, Human
caguucugcuccucuccaggca

SEQ ID NO: 2279692 - RNA, 17 nt, Human
caguucugcuccucucc

SEQ ID NO: 2279693 - RNA, 18 nt, Human
caguucugcuccucucca

SEQ ID NO: 2279694 - RNA, 19 nt, Human
caguucugcuccucuccag

SEQ ID NO: 2279695 - RNA, 20 nt, Human
caguucugcuccucuccagg

SEQ ID NO: 2279696 - RNA, 19 nt, Human
caguugaaaaacagcugag

SEQ ID NO: 2279697 - RNA, 18 nt, Human
caguugaaaaacagcuga

SEQ ID NO: 2279698 - RNA, 12 nt, Human
caguugaaaaac

SEQ ID NO: 2279699 - RNA, 19 nt, Human
caguucuuugggccagaca

SEQ ID NO: 2279700 - RNA, 18 nt, Human
caguucuuugggccagac

SEQ ID NO: 2279701 - RNA, 17 nt, Human
caguucuuugggccaga

SEQ ID NO: 2279702 - RNA, 16 nt, Human
caguucuuugggccag

SEQ ID NO: 2279703 - RNA, 14 nt, Human
caguggauuaauua

SEQ ID NO: 2279704 - RNA, 19 nt, Human
caguggcacucaacaugag

SEQ ID NO: 2279705 - RNA, 16 nt, Human
caguggauugcauuuc

SEQ ID NO: 2279706 - RNA, 19 nt, Human
caguggcauggcuccaguc

SEQ ID NO: 2279707 - RNA, 17 nt, Human
caguggcauggcuccag

SEQ ID NO: 2279708 - RNA, 16 nt, Human
caguggcauggcucca

SEQ ID NO: 2279709 - RNA, 18 nt, Human
caguggcagggcucagga

SEQ ID NO: 2279710 - RNA, 13 nt, Human
caguggccacuca

SEQ ID NO: 2279711 - RNA, 14 nt, Human
caguggccacucag

SEQ ID NO: 2279712 - RNA, 15 nt, Human
caguggcauggcucc

SEQ ID NO: 2279713 - RNA, 14 nt, Human
caguggcagggcuc

SEQ ID NO: 2279714 - RNA, 15 nt, Human
caguggcagggcuca

SEQ ID NO: 2279715 - RNA, 17 nt, Human
caguggcagggcucagg

SEQ ID NO: 2279716 - RNA, 23 nt, Human
caguggccucaacccucccucag

SEQ ID NO: 2279717 - RNA, 20 nt, Human
caguggcucacgccuaugau

SEQ ID NO: 2279718 - RNA, 13 nt, Human
caguggcugcugc

SEQ ID NO: 2279719 - RNA, 22 nt, Human
caguggccucaacccucccuca

SEQ ID NO: 2279720 - RNA, 21 nt, Human
caguggccucaacccucccuc

SEQ ID NO: 2279721 - RNA, 20 nt, Human
caguggccucaacccucccu

SEQ ID NO: 2279722 - RNA, 19 nt, Human
caguggccucaacccuccc

SEQ ID NO: 2279723 - RNA, 16 nt, Human
caguggccucaacccu

SEQ ID NO: 2279724 - RNA, 19 nt, Human
caguggcuucaucugucaa

SEQ ID NO: 2279725 - RNA, 20 nt, Human
caguggcugguccagggcua

SEQ ID NO: 2279726 - RNA, 18 nt, Human
caguggcugguccagggc

SEQ ID NO: 2279727 - RNA, 19 nt, Human
caguggcugguccagggcu

SEQ ID NO: 2279728 - RNA, 21 nt, Human
cagugggaacgugacugcccc

SEQ ID NO: 2279729 - RNA, 20 nt, Human
cagugggaacgugacugccc

SEQ ID NO: 2279730 - RNA, 19 nt, Human
cagugggaacgugacugcc

SEQ ID NO: 2279731 - RNA, 14 nt, Human
cagugggaaauauu

SEQ ID NO: 2279732 - RNA, 12 nt, Human
cagugggaaaua

SEQ ID NO: 2279733 - RNA, 21 nt, Human
caguggcuucaucugucaagu

SEQ ID NO: 2279734 - RNA, 20 nt, Human
caguggcuggaucugugagg

SEQ ID NO: 2279735 - RNA, 18 nt, Human
caguggcuggaucuguga

SEQ ID NO: 2279736 - RNA, 16 nt, Human
caguggcuggaucugu

SEQ ID NO: 2279737 - RNA, 14 nt, Human
caguggcugcugcc

SEQ ID NO: 2279738 - RNA, 15 nt, Human
caguggcugcugccc

SEQ ID NO: 2279739 - RNA, 17 nt, Human
caguggcugcugcccag

SEQ ID NO: 2279740 - RNA, 18 nt, Human
caguggcugcugcccagg

SEQ ID NO: 2279741 - RNA, 13 nt, Human
cagugguugcugu

SEQ ID NO: 2279742 - RNA, 14 nt, Human
cagugguugcuguu

SEQ ID NO: 2279743 - RNA, 18 nt, Human
cagugguuugagacacug

SEQ ID NO: 2279744 - RNA, 22 nt, Human
cagugguuugagacacugguuu

SEQ ID NO: 2279745 - RNA, 15 nt, Human
cagugguuuuauacu

SEQ ID NO: 2279746 - RNA, 21 nt, Human
cagugguuuuauacugaagga

SEQ ID NO: 2279747 - RNA, 22 nt, Human
cagugguuccuaauccucuagg

SEQ ID NO: 2279748 - RNA, 14 nt, Human
cagugguuauuuag

SEQ ID NO: 2279749 - RNA, 22 nt, Human
cagugggaacgugacugcccca

SEQ ID NO: 2279750 - RNA, 11 nt, Human
cagugguuaag

SEQ ID NO: 2279751 - RNA, 11 nt, Human
cagugggaacu

SEQ ID NO: 2279752 - RNA, 22 nt, Human
caguggacaccaggagucccug

SEQ ID NO: 2279753 - RNA, 13 nt, Human
caguggacaccag

SEQ ID NO: 2279754 - RNA, 23 nt, Human
caguggaauauaaggaaagcaau

SEQ ID NO: 2279755 - RNA, 12 nt, Human
caguggcagcug

SEQ ID NO: 2279756 - RNA, 15 nt, Human
caguggaggaagagg

SEQ ID NO: 2279757 - RNA, 20 nt, Human
caguggaggaagagggacag

SEQ ID NO: 2279758 - RNA, 20 nt, Human
caguggacuuuccacccccu

SEQ ID NO: 2279759 - RNA, 19 nt, Human
caguggacuuuccaccccc

SEQ ID NO: 2279760 - RNA, 18 nt, Human
caguggacuuuccacccc

SEQ ID NO: 2279761 - RNA, 17 nt, Human
caguggacuuuccaccc

SEQ ID NO: 2279762 - RNA, 13 nt, Human
caguggaagaagc

SEQ ID NO: 2279763 - RNA, 23 nt, Human
caguggacuuuccacccccuccc

SEQ ID NO: 2279764 - RNA, 13 nt, Human
caguggagaauua

SEQ ID NO: 2279765 - RNA, 22 nt, Human
caguggacuuuccacccccucc

SEQ ID NO: 2279766 - RNA, 21 nt, Human
caguggacuuuccacccccuc

SEQ ID NO: 2279767 - RNA, 14 nt, Human
caguggagaauuau

SEQ ID NO: 2279768 - RNA, 13 nt, Human
caguggcagcugc

SEQ ID NO: 2279769 - RNA, 14 nt, Human
caguggcagcugcu

SEQ ID NO: 2279770 - RNA, 15 nt, Human
caguggcagcugcuu

SEQ ID NO: 2279771 - RNA, 16 nt, Human
caguggcagcugcuuu

SEQ ID NO: 2279772 - RNA, 21 nt, Human
cagugugaaguuagaauuccu

SEQ ID NO: 2279773 - RNA, 16 nt, Human
cagugugaggccaggg

SEQ ID NO: 2279774 - RNA, 18 nt, Human
cagugugaggccagggca

SEQ ID NO: 2279775 - RNA, 17 nt, Human
cagugugaggccagggc

SEQ ID NO: 2279776 - RNA, 19 nt, Human
cagugugaucccaagugcc

SEQ ID NO: 2279777 - RNA, 18 nt, Human
cagugugaucccaagugc

SEQ ID NO: 2279778 - RNA, 19 nt, Human
cagugugaggccagggcag

SEQ ID NO: 2279779 - RNA, 22 nt, Human
cagugugaucccaagugccagu

SEQ ID NO: 2279780 - RNA, 23 nt, Human
cagugugcacuaaggggcccggc

SEQ ID NO: 2279781 - RNA, 13 nt, Human
cagugugcccccc

SEQ ID NO: 2279782 - RNA, 19 nt, Human
cagugugcacuaaggggcc

SEQ ID NO: 2279783 - RNA, 15 nt, Human
cagugugcacuaagg

SEQ ID NO: 2279784 - RNA, 14 nt, Human
cagugugcccccca

SEQ ID NO: 2279785 - RNA, 15 nt, Human
cagugugccccccau

SEQ ID NO: 2279786 - RNA, 17 nt, Human
cagugugccccccaucc

SEQ ID NO: 2279787 - RNA, 19 nt, Human
cagugugccccccauccug

SEQ ID NO: 2279788 - RNA, 23 nt, Human
cagugugucuaaauuugaauguu

SEQ ID NO: 2279789 - RNA, 23 nt, Human
cagugugggaaugcggcaagaag

SEQ ID NO: 2279790 - RNA, 21 nt, Human
cagugugggaaugcggcaaga

SEQ ID NO: 2279791 - RNA, 14 nt, Human
cagugugucuaaau

SEQ ID NO: 2279792 - RNA, 20 nt, Human
cagugugccccccauccugg

SEQ ID NO: 2279793 - RNA, 22 nt, Human
cagugugccccccauccuggcc

SEQ ID NO: 2279794 - RNA, 23 nt, Human
cagugugccccccauccuggccc

SEQ ID NO: 2279795 - RNA, 11 nt, Human
caguguggaac

SEQ ID NO: 2279796 - RNA, 23 nt, Human
cagugucuuccauaauguauaaa

SEQ ID NO: 2279797 - RNA, 22 nt, Human
cagugucuuccauaauguauaa

SEQ ID NO: 2279798 - RNA, 20 nt, Human
cagugucuuccauaauguau

SEQ ID NO: 2279799 - RNA, 18 nt, Human
cagugucuuccauaaugu

SEQ ID NO: 2279800 - RNA, 17 nt, Human
cagugucuuccauaaug

SEQ ID NO: 2279801 - RNA, 16 nt, Human
cagugucuuccauaau

SEQ ID NO: 2279802 - RNA, 15 nt, Human
cagugucuuccauaa

SEQ ID NO: 2279803 - RNA, 14 nt, Human
cagugucuuccaua

SEQ ID NO: 2279804 - RNA, 24 nt, Human
cagugucuguaucggagacaguga

SEQ ID NO: 2279805 - RNA, 23 nt, Human
cagugucuguaucggagacagug

SEQ ID NO: 2279806 - RNA, 13 nt, Human
cagugucuguccc

SEQ ID NO: 2279807 - RNA, 14 nt, Human
cagugucugucccg

SEQ ID NO: 2279808 - RNA, 13 nt, Human
cagugucuuccau

SEQ ID NO: 2279809 - RNA, 16 nt, Human
cagugucugucccggg

SEQ ID NO: 2279810 - RNA, 22 nt, Human
cagugucuguaucggagacagu

SEQ ID NO: 2279811 - RNA, 18 nt, Human
cagugucugggcugacug

SEQ ID NO: 2279812 - RNA, 14 nt, Human
cagugucugggcug

SEQ ID NO: 2279813 - RNA, 15 nt, Human
cagugucugggcuga

SEQ ID NO: 2279814 - RNA, 14 nt, Human
cagugucucggagg

SEQ ID NO: 2279815 - RNA, 20 nt, Human
cagugucucacagcccugcu

SEQ ID NO: 2279816 - RNA, 13 nt, Human
cagugucugggcu

SEQ ID NO: 2279817 - RNA, 19 nt, Human
cagugucuggcugcagagc

SEQ ID NO: 2279818 - RNA, 17 nt, Human
cagugucuggcugcaga

SEQ ID NO: 2279819 - RNA, 13 nt, Human
cagugucuuccug

SEQ ID NO: 2279820 - RNA, 15 nt, Human
cagugucuuccugug

SEQ ID NO: 2279821 - RNA, 16 nt, Human
cagugucuuccugugg

SEQ ID NO: 2279822 - RNA, 17 nt, Human
cagugucuuccuguggg

SEQ ID NO: 2279823 - RNA, 13 nt, Human
cagugugaaguua

SEQ ID NO: 2279824 - RNA, 14 nt, Human
cagugugaaguuag

SEQ ID NO: 2279825 - RNA, 15 nt, Human
cagugugaaguuaga

SEQ ID NO: 2279826 - RNA, 17 nt, Human
cagugugaaguuagaau

SEQ ID NO: 2279827 - RNA, 20 nt, Human
cagugugaaguuagaauucc

SEQ ID NO: 2279828 - RNA, 14 nt, Human
cagugugacaagga

SEQ ID NO: 2279829 - RNA, 12 nt, Human
cagugugacuga

SEQ ID NO: 2279830 - RNA, 17 nt, Human
caguguacagucuugua

SEQ ID NO: 2279831 - RNA, 18 nt, Human
caguguacagucuuguau

SEQ ID NO: 2279832 - RNA, 16 nt, Human
caguguacauggaaua

SEQ ID NO: 2279833 - RNA, 12 nt, Human
caguguacaguc

SEQ ID NO: 2279834 - RNA, 15 nt, Human
caguguacagucuug

SEQ ID NO: 2279835 - RNA, 19 nt, Human
caguguaaauaguuacucc

SEQ ID NO: 2279836 - RNA, 17 nt, Human
caguguaaauaguuacu

SEQ ID NO: 2279837 - RNA, 20 nt, Human
cagugguuuuauacugaagg

SEQ ID NO: 2279838 - RNA, 12 nt, Human
caguguaauuuc

SEQ ID NO: 2279839 - RNA, 14 nt, Human
caguguaauuucuu

SEQ ID NO: 2279840 - RNA, 15 nt, Human
caguguaauuucuuu

SEQ ID NO: 2279841 - RNA, 16 nt, Human
caguguaauuucuuug

SEQ ID NO: 2279842 - RNA, 23 nt, Human
caguguacauggaauaacaugua

SEQ ID NO: 2279843 - RNA, 20 nt, Human
caguguacauggaauaacau

SEQ ID NO: 2279844 - RNA, 14 nt, Human
caguguacccccgc

SEQ ID NO: 2279845 - RNA, 17 nt, Human
caguguaauuucuuugc

SEQ ID NO: 2279846 - RNA, 20 nt, Human
caguguaauuucuuugccug

SEQ ID NO: 2279847 - RNA, 16 nt, Human
caguguacccccgccc

SEQ ID NO: 2279848 - RNA, 17 nt, Human
caguguacccccgccca

SEQ ID NO: 2279849 - RNA, 18 nt, Human
caguguacccccgcccag

SEQ ID NO: 2279850 - RNA, 19 nt, Human
caguguacccccgcccagg

SEQ ID NO: 2279851 - RNA, 20 nt, Human
caguguacccccgcccaggc

SEQ ID NO: 2279852 - RNA, 21 nt, Human
caguguacccccgcccaggcu

SEQ ID NO: 2279853 - RNA, 23 nt, Human
caguguacccccgcccaggcugg

SEQ ID NO: 2279854 - RNA, 18 nt, Human
caguguccucuugcucaa

SEQ ID NO: 2279855 - RNA, 21 nt, Human
caguguccccuccacugucac

SEQ ID NO: 2279856 - RNA, 14 nt, Human
cagugucccgggcc

SEQ ID NO: 2279857 - RNA, 16 nt, Human
caguguccccuccacu

SEQ ID NO: 2279858 - RNA, 17 nt, Human
caguguccccuccacug

SEQ ID NO: 2279859 - RNA, 19 nt, Human
caguguccccuccacuguc

SEQ ID NO: 2279860 - RNA, 20 nt, Human
caguguccccuccacuguca

SEQ ID NO: 2279861 - RNA, 15 nt, Human
caguguccccuccac

SEQ ID NO: 2279862 - RNA, 22 nt, Human
caguguccaaagcagggucugg

SEQ ID NO: 2279863 - RNA, 16 nt, Human
caguguccaaagcagg

SEQ ID NO: 2279864 - RNA, 17 nt, Human
caguguccaaagcaggg

SEQ ID NO: 2279865 - RNA, 16 nt, Human
caguguccuuagaaca

SEQ ID NO: 2279866 - RNA, 19 nt, Human
caguguccucuugcucaaa

SEQ ID NO: 2279867 - RNA, 20 nt, Human
caguguccuuagaacauuuu

SEQ ID NO: 2279868 - RNA, 12 nt, Human
cagugucucaca

SEQ ID NO: 2279869 - RNA, 16 nt, Human
cagugucucacacugg

SEQ ID NO: 2279870 - RNA, 18 nt, Human
cagugucucacacuggcg

SEQ ID NO: 2279871 - RNA, 15 nt, Human
cagugucucacagcc

SEQ ID NO: 2279872 - RNA, 19 nt, Human
caguguagccuugcccgga

SEQ ID NO: 2279873 - RNA, 17 nt, Human
caguguauggaaauaaa

SEQ ID NO: 2279874 - RNA, 22 nt, Human
caguguacccccgcccaggcug

SEQ ID NO: 2279875 - RNA, 15 nt, Human
caguguauuuguauu

SEQ ID NO: 2279876 - RNA, 23 nt, Human
caguguauuuguauuuuuuugca

SEQ ID NO: 2279877 - RNA, 16 nt, Human
cagugucaaauaaaca

SEQ ID NO: 2279878 - RNA, 17 nt, Human
cagugucaaauaaacac

SEQ ID NO: 2279879 - RNA, 18 nt, Human
cagugucaaauaaacacu

SEQ ID NO: 2279880 - RNA, 19 nt, Human
cagugucaaauaaacacug

SEQ ID NO: 2279881 - RNA, 20 nt, Human
cagugucaaauaaacacugu

SEQ ID NO: 2279882 - RNA, 20 nt, Human
cagugucauuuaugaaaaga

SEQ ID NO: 2279883 - RNA, 21 nt, Human
cagugucaaauaaacacugug

SEQ ID NO: 2279884 - RNA, 18 nt, Human
cagugucaaguugugcuu

SEQ ID NO: 2279885 - RNA, 19 nt, Human
cagugucaaguugugcuug

SEQ ID NO: 2279886 - RNA, 20 nt, Human
cagugucaaguugugcuugu

SEQ ID NO: 2279887 - RNA, 14 nt, Human
cagugucaaugcag

SEQ ID NO: 2279888 - RNA, 14 nt, Human
caguuguagaaugu

SEQ ID NO: 2279889 - RNA, 15 nt, Human
caguuguagaaugua

SEQ ID NO: 2279890 - RNA, 17 nt, Human
caguuguagaauguauu

SEQ ID NO: 2279891 - RNA, 18 nt, Human
caguuguagaauguauug

SEQ ID NO: 2279892 - RNA, 19 nt, Human
caguuguagaauguauugu

SEQ ID NO: 2279893 - RNA, 17 nt, Human
caguugggugagaacaa

SEQ ID NO: 2279894 - RNA, 21 nt, Human
caguuguagaauguauuguac

SEQ ID NO: 2279895 - RNA, 17 nt, Human
caguuguuagugugucu

SEQ ID NO: 2279896 - RNA, 15 nt, Human
caguuuucugagaaa

SEQ ID NO: 2279897 - RNA, 14 nt, Human
caguuuucugagaa

SEQ ID NO: 2279898 - RNA, 15 nt, Human
caguuuuuauugcuu

SEQ ID NO: 2279899 - RNA, 22 nt, Human
caguuuuucagaguggaaugcu

SEQ ID NO: 2279900 - RNA, 18 nt, Human
caguuuuucuguauuuua

SEQ ID NO: 2279901 - RNA, 16 nt, Human
caguuuuucuguauuu

SEQ ID NO: 2279902 - RNA, 17 nt, Human
caguuuuucuguauuuu

SEQ ID NO: 2279903 - RNA, 10 nt, Human
caguuuuucu

SEQ ID NO: 2279904 - RNA, 16 nt, Human
caguuuuuuaugcuaa

SEQ ID NO: 2279905 - RNA, 22 nt, Human
caguuuuccuucucaucuguga

SEQ ID NO: 2279906 - RNA, 17 nt, Human
caguuuugguugcuuua

SEQ ID NO: 2279907 - RNA, 20 nt, Human
caguuuucuggcuggagccu

SEQ ID NO: 2279908 - RNA, 19 nt, Human
caguuuugguugcuuuaau

SEQ ID NO: 2279909 - RNA, 18 nt, Human
caguuuugguugcuuuaa

SEQ ID NO: 2279910 - RNA, 20 nt, Human
caguuuucugagaaagacua

SEQ ID NO: 2279911 - RNA, 19 nt, Human
caguuuucugagaaagacu

SEQ ID NO: 2279912 - RNA, 18 nt, Human
caguuggguggaugccug

SEQ ID NO: 2279913 - RNA, 19 nt, Human
caguuggguggaugccugg

SEQ ID NO: 2279914 - RNA, 18 nt, Human
caguuggucccccuucca

SEQ ID NO: 2279915 - RNA, 20 nt, Human
caguugggagcacuggagug

SEQ ID NO: 2279916 - RNA, 21 nt, Human
caguugggagcacuggagugc

SEQ ID NO: 2279917 - RNA, 19 nt, Human
caguuggucccccuuccau

SEQ ID NO: 2279918 - RNA, 20 nt, Human
caguuggucccccuuccaug

SEQ ID NO: 2279919 - RNA, 21 nt, Human
caguuggucccccuuccaugg

SEQ ID NO: 2279920 - RNA, 22 nt, Human
caguuggucccccuuccaugga

SEQ ID NO: 2279921 - RNA, 23 nt, Human
caguugccagucaccccggccac

SEQ ID NO: 2279922 - RNA, 14 nt, Human
caguugggagcacu

SEQ ID NO: 2279923 - RNA, 16 nt, Human
caguuggccuucagaa

SEQ ID NO: 2279924 - RNA, 17 nt, Human
caguuggccagagagcc

SEQ ID NO: 2279925 - RNA, 15 nt, Human
caguugggagcacug

SEQ ID NO: 2279926 - RNA, 16 nt, Human
caguugggagcacugg

SEQ ID NO: 2279927 - RNA, 17 nt, Human
caguugggagcacugga

SEQ ID NO: 2279928 - RNA, 18 nt, Human
caguugggagcacuggag

SEQ ID NO: 2279929 - RNA, 16 nt, Human
caguuggguggaugcc

SEQ ID NO: 2279930 - RNA, 16 nt, Human
caguuggccagagagc

SEQ ID NO: 2279931 - RNA, 18 nt, Human
caguuggaaauccaucca

SEQ ID NO: 2279932 - RNA, 22 nt, Human
caguucuuugggccagacaugc

SEQ ID NO: 2279933 - RNA, 21 nt, Human
caguucuuugggccagacaug

SEQ ID NO: 2279934 - RNA, 20 nt, Human
caguucuuugggccagacau

SEQ ID NO: 2279935 - RNA, 18 nt, Human
caguugaaaagacuccaa

SEQ ID NO: 2279936 - RNA, 14 nt, Human
caguugaaaagacu

SEQ ID NO: 2279937 - RNA, 14 nt, Human
caguugacagcagg

SEQ ID NO: 2279938 - RNA, 16 nt, Human
caguugacagcaggug

SEQ ID NO: 2279939 - RNA, 20 nt, Human
caguugaaugacaacagaag

SEQ ID NO: 2279940 - RNA, 21 nt, Human
caguugaaugacaacagaagc

SEQ ID NO: 2279941 - RNA, 21 nt, Human
caguugaauuuauggaaucua

SEQ ID NO: 2279942 - RNA, 23 nt, Human
caguugaaaagacuccaaagaaa

SEQ ID NO: 2279943 - RNA, 22 nt, Human
caguugaaaagacuccaaagaa

SEQ ID NO: 2279944 - RNA, 21 nt, Human
caguugaaaagacuccaaaga

SEQ ID NO: 2279945 - RNA, 20 nt, Human
caguugcacuuggccucugg

SEQ ID NO: 2279946 - RNA, 19 nt, Human
caguugcacuuggccucug

SEQ ID NO: 2279947 - RNA, 13 nt, Human
caguugcacuugg

SEQ ID NO: 2279948 - RNA, 16 nt, Human
caguugcacuuggccu

SEQ ID NO: 2279949 - RNA, 15 nt, Human
caguugcaauaauac

SEQ ID NO: 2279950 - RNA, 20 nt, Human
caguugagucgucaucacuu

SEQ ID NO: 2279951 - RNA, 17 nt, Human
caguugcaauaauacuu

SEQ ID NO: 2279952 - RNA, 16 nt, Human
cauaaccuagccuuag

SEQ ID NO: 2279953 - RNA, 12 nt, Human
cauaaccccacc

SEQ ID NO: 2279954 - RNA, 13 nt, Human
cauaaccccaccc

SEQ ID NO: 2279955 - RNA, 20 nt, Human
cauaaccccacccuugccca

SEQ ID NO: 2279956 - RNA, 17 nt, Human
cauaacggaucagaaau

SEQ ID NO: 2279957 - RNA, 21 nt, Human
cauaacggaucagaaauacag

SEQ ID NO: 2279958 - RNA, 18 nt, Human
cauaaccuuaccagauuu

SEQ ID NO: 2279959 - RNA, 17 nt, Human
cauaacaauuccucuac

SEQ ID NO: 2279960 - RNA, 16 nt, Human
cauaacaauuccucua

SEQ ID NO: 2279961 - RNA, 15 nt, Human
cauaacaauuccucu

SEQ ID NO: 2279962 - RNA, 14 nt, Human
cauaacaauuccuc

SEQ ID NO: 2279963 - RNA, 15 nt, Human
cauaacaacuucaua

SEQ ID NO: 2279964 - RNA, 21 nt, Human
cauaaagccuuggauguauau

SEQ ID NO: 2279965 - RNA, 15 nt, Human
cauaaagucagugcc

SEQ ID NO: 2279966 - RNA, 22 nt, Human
cauaaaggugguaugugugugu

SEQ ID NO: 2279967 - RNA, 20 nt, Human
cauaaaggugguaugugugu

SEQ ID NO: 2279968 - RNA, 12 nt, Human
cauaaauaugca

SEQ ID NO: 2279969 - RNA, 18 nt, Human
cauaaauaaaaugaccag

SEQ ID NO: 2279970 - RNA, 23 nt, Human
cauaaaggugguaugugugugua

SEQ ID NO: 2279971 - RNA, 14 nt, Human
cauaaauaaaauga

SEQ ID NO: 2279972 - RNA, 13 nt, Human
cauaaauaugcag

SEQ ID NO: 2279973 - RNA, 15 nt, Human
cauaaauaugcagug

SEQ ID NO: 2279974 - RNA, 20 nt, Human
cauaaauaugcagugauaug

SEQ ID NO: 2279975 - RNA, 14 nt, Human
cauaaaugaggaaa

SEQ ID NO: 2279976 - RNA, 18 nt, Human
cauaaauaugcagugaua

SEQ ID NO: 2279977 - RNA, 13 nt, Human
cauaaaugaauuu

SEQ ID NO: 2279978 - RNA, 13 nt, Human
cauaaaugaagca

SEQ ID NO: 2279979 - RNA, 14 nt, Human
cauaaaugaagcag

SEQ ID NO: 2279980 - RNA, 13 nt, Human
cauaaaaagcuga

SEQ ID NO: 2279981 - RNA, 12 nt, Human
cauaaaacaggu

SEQ ID NO: 2279982 - RNA, 11 nt, Human
cauaaaacauu

SEQ ID NO: 2279983 - RNA, 21 nt, Human
cauaaaaauuagccaagugug

SEQ ID NO: 2279984 - RNA, 19 nt, Human
cauaaaauaaaguauauau

SEQ ID NO: 2279985 - RNA, 23 nt, Human
cauaaaacauuaagaaaaucaua

SEQ ID NO: 2279986 - RNA, 16 nt, Human
cauaaaacauuaagaa

SEQ ID NO: 2279987 - RNA, 17 nt, Human
cauaaaacauuaagaaa

SEQ ID NO: 2279988 - RNA, 18 nt, Human
cauaaaacauuaagaaaa

SEQ ID NO: 2279989 - RNA, 19 nt, Human
cauaaaacauuaagaaaau

SEQ ID NO: 2279990 - RNA, 20 nt, Human
cauaaaauaaaguauauaua

SEQ ID NO: 2279991 - RNA, 22 nt, Human
cauaaaacauuaagaaaaucau

SEQ ID NO: 2279992 - RNA, 22 nt, Human
cauaaaauuuucuacucuuuuu

SEQ ID NO: 2279993 - RNA, 23 nt, Human
cauaaaaagcaaaacaaaaauua

SEQ ID NO: 2279994 - RNA, 23 nt, Human
cauaaaaagccugcaauuucaua

SEQ ID NO: 2279995 - RNA, 15 nt, Human
cauaaacugugugca

SEQ ID NO: 2279996 - RNA, 14 nt, Human
cauaaacugugugc

SEQ ID NO: 2279997 - RNA, 12 nt, Human
cauaaacuucau

SEQ ID NO: 2279998 - RNA, 16 nt, Human
cauaaacuucaugguc

SEQ ID NO: 2279999 - RNA, 20 nt, Human
cauaaaccuuaaguaagcaa

SEQ ID NO: 2280000 - RNA, 13 nt, Human
cauaaacugacuu

SEQ ID NO: 2280001 - RNA, 15 nt, Human
cauaaacugacuuua

SEQ ID NO: 2280002 - RNA, 17 nt, Human
cauaaacugacuuuauc

SEQ ID NO: 2280003 - RNA, 12 nt, Human
cauaaagaagca

SEQ ID NO: 2280004 - RNA, 21 nt, Human
cauaaagaagcaauaaagaag

SEQ ID NO: 2280005 - RNA, 18 nt, Human
cauaaagaagauguuuaa

SEQ ID NO: 2280006 - RNA, 19 nt, Human
cauaaagaagauguuuaac

SEQ ID NO: 2280007 - RNA, 21 nt, Human
cauaaagaagauguuuaacuu

SEQ ID NO: 2280008 - RNA, 11 nt, Human
cauaaagaagc

SEQ ID NO: 2280009 - RNA, 14 nt, Human
cauaaagcaggcag

SEQ ID NO: 2280010 - RNA, 16 nt, Human
cauaaagcaggcagaa

SEQ ID NO: 2280011 - RNA, 21 nt, Human
cauaaacaagaccacguuucu

SEQ ID NO: 2280012 - RNA, 20 nt, Human
cauaaacaagaccacguuuc

SEQ ID NO: 2280013 - RNA, 21 nt, Human
cauaaacccaguugccaucug

SEQ ID NO: 2280014 - RNA, 12 nt, Human
cauaaaccuuaa

SEQ ID NO: 2280015 - RNA, 14 nt, Human
cauaaaccuuaagu

SEQ ID NO: 2280016 - RNA, 22 nt, Human
cauaaacaagaccacguuucua

SEQ ID NO: 2280017 - RNA, 17 nt, Human
cauaauaagcuaaagag

SEQ ID NO: 2280018 - RNA, 18 nt, Human
cauaauaaauaucuguac

SEQ ID NO: 2280019 - RNA, 12 nt, Human
cauaaguuucug

SEQ ID NO: 2280020 - RNA, 19 nt, Human
cauaaguauuaugucucuu

SEQ ID NO: 2280021 - RNA, 15 nt, Human
cauaaguauuucaaa

SEQ ID NO: 2280022 - RNA, 18 nt, Human
cauaaguaauucaagaaa

SEQ ID NO: 2280023 - RNA, 22 nt, Human
cauaaguaauucaagaaaacaa

SEQ ID NO: 2280024 - RNA, 22 nt, Human
cauaagguuucguuucuguaua

SEQ ID NO: 2280025 - RNA, 15 nt, Human
cauaagguuucguuu

SEQ ID NO: 2280026 - RNA, 21 nt, Human
cauaagguuucguuucuguau

SEQ ID NO: 2280027 - RNA, 16 nt, Human
cauaaguaauucaaga

SEQ ID NO: 2280028 - RNA, 17 nt, Human
cauaaguaauucaagaa

SEQ ID NO: 2280029 - RNA, 22 nt, Human
cauaagcuauagacccgaggaa

SEQ ID NO: 2280030 - RNA, 14 nt, Human
cauaagcucagaau

SEQ ID NO: 2280031 - RNA, 16 nt, Human
cauaagcucagaaucc

SEQ ID NO: 2280032 - RNA, 22 nt, Human
cauaaggaauguagcugguuuc

SEQ ID NO: 2280033 - RNA, 17 nt, Human
cauaaggaaacuggguu

SEQ ID NO: 2280034 - RNA, 18 nt, Human
cauaagacuuugggauag

SEQ ID NO: 2280035 - RNA, 16 nt, Human
cauaagacccuaagcc

SEQ ID NO: 2280036 - RNA, 20 nt, Human
cauaagacccuaagccuccu

SEQ ID NO: 2280037 - RNA, 11 nt, Human
cauaagaccau

SEQ ID NO: 2280038 - RNA, 20 nt, Human
cauaagaccauaacagccaa

SEQ ID NO: 2280039 - RNA, 21 nt, Human
cauaagaccauaacagccaac

SEQ ID NO: 2280040 - RNA, 23 nt, Human
cauaagaccauaacagccaacag

SEQ ID NO: 2280041 - RNA, 14 nt, Human
cauaagauaaaugu

SEQ ID NO: 2280042 - RNA, 23 nt, Human
cauaagccuccauuuaguucuuu

SEQ ID NO: 2280043 - RNA, 21 nt, Human
cauaagccuccauuuaguucu

SEQ ID NO: 2280044 - RNA, 17 nt, Human
cauaagccaauuuuucu

SEQ ID NO: 2280045 - RNA, 20 nt, Human
cauaagccaauuuuucugca

SEQ ID NO: 2280046 - RNA, 19 nt, Human
cauaagcggcguaaguuua

SEQ ID NO: 2280047 - RNA, 15 nt, Human
cauaagccaauuuuu

SEQ ID NO: 2280048 - RNA, 17 nt, Human
cauaagauauuuuucau

SEQ ID NO: 2280049 - RNA, 20 nt, Human
cauaacguuuuuccuuuaaa

SEQ ID NO: 2280050 - RNA, 17 nt, Human
cauaacguuuuuccuuu

SEQ ID NO: 2280051 - RNA, 18 nt, Human
cauaacguuuuuccuuua

SEQ ID NO: 2280052 - RNA, 22 nt, Human
cauaacggaucagaaauacaga

SEQ ID NO: 2280053 - RNA, 15 nt, Human
cauaacguuuuuccu

SEQ ID NO: 2280054 - RNA, 16 nt, Human
cauaacguuuuuccuu

SEQ ID NO: 2280055 - RNA, 21 nt, Human
cauaacguuuuuccuuuaaaa

SEQ ID NO: 2280056 - RNA, 14 nt, Human
cauaacugaaaaug

SEQ ID NO: 2280057 - RNA, 11 nt, Human
cauaacugaaa

SEQ ID NO: 2280058 - RNA, 21 nt, Human
cauaagaaugaauaauaauua

SEQ ID NO: 2280059 - RNA, 12 nt, Human
cauaagaaugaa

SEQ ID NO: 2280060 - RNA, 19 nt, Human
cauaagaaaacuaagaaau

SEQ ID NO: 2280061 - RNA, 24 nt, Human
cauacauuuauaauguuugcuauu

SEQ ID NO: 2280062 - RNA, 23 nt, Human
cauacauuuauaauguuugcuau

SEQ ID NO: 2280063 - RNA, 22 nt, Human
cauacauuuauaauguuugcua

SEQ ID NO: 2280064 - RNA, 21 nt, Human
cauacauuuauaauguuugcu

SEQ ID NO: 2280065 - RNA, 17 nt, Human
cauacauuuauaauguu

SEQ ID NO: 2280066 - RNA, 17 nt, Human
cauaccaacacgagcag

SEQ ID NO: 2280067 - RNA, 22 nt, Human
cauaauagacuucccacucuag

SEQ ID NO: 2280068 - RNA, 23 nt, Human
cauaauagacuucccacucuagg

SEQ ID NO: 2280069 - RNA, 15 nt, Human
cauaauacuugcuuu

SEQ ID NO: 2280070 - RNA, 18 nt, Human
cauaaucacaacccuuca

SEQ ID NO: 2280071 - RNA, 20 nt, Human
cauaaucuaccaacgaaaga

SEQ ID NO: 2280072 - RNA, 14 nt, Human
cauaccaaugaaaa

SEQ ID NO: 2280073 - RNA, 19 nt, Human
cauaccacuuuuguucuug

SEQ ID NO: 2280074 - RNA, 11 nt, Human
cauacccaccc

SEQ ID NO: 2280075 - RNA, 12 nt, Human
cauacccacccc

SEQ ID NO: 2280076 - RNA, 18 nt, Human
cauaccacuuuuguucuu

SEQ ID NO: 2280077 - RNA, 15 nt, Human
cauaccacuuuuguu

SEQ ID NO: 2280078 - RNA, 14 nt, Human
cauaccacuuuugu

SEQ ID NO: 2280079 - RNA, 13 nt, Human
cauaccacuuuug

SEQ ID NO: 2280080 - RNA, 22 nt, Human
cauaccaggccgccccagccuc

SEQ ID NO: 2280081 - RNA, 13 nt, Human
cauacccuccccc

SEQ ID NO: 2280082 - RNA, 15 nt, Human
cauaccuacauguau

SEQ ID NO: 2280083 - RNA, 15 nt, Human
cauaccuggcccugu

SEQ ID NO: 2280084 - RNA, 22 nt, Human
cauacccuggccgcccccugcc

SEQ ID NO: 2280085 - RNA, 18 nt, Human
cauaccugcuggugcaga

SEQ ID NO: 2280086 - RNA, 13 nt, Human
cauaccuuccuuc

SEQ ID NO: 2280087 - RNA, 14 nt, Human
cauaccuuccuucc

SEQ ID NO: 2280088 - RNA, 15 nt, Human
cauaccuuccuuccc

SEQ ID NO: 2280089 - RNA, 16 nt, Human
cauaccuuccuucccu

SEQ ID NO: 2280090 - RNA, 18 nt, Human
cauaccuuccuucccugg

SEQ ID NO: 2280091 - RNA, 21 nt, Human
cauaccuuccuucccugggcu

SEQ ID NO: 2280092 - RNA, 23 nt, Human
cauaccuuccuucccugggcugu

SEQ ID NO: 2280093 - RNA, 14 nt, Human
cauacccaccccca

SEQ ID NO: 2280094 - RNA, 17 nt, Human
cauacccacccccaccc

SEQ ID NO: 2280095 - RNA, 18 nt, Human
cauacccacccccaccca

SEQ ID NO: 2280096 - RNA, 21 nt, Human
cauacccacccccacccaagg

SEQ ID NO: 2280097 - RNA, 18 nt, Human
cauacgcaccacaucucu

SEQ ID NO: 2280098 - RNA, 19 nt, Human
cauaccuuuauugugaucu

SEQ ID NO: 2280099 - RNA, 13 nt, Human
cauacguacacau

SEQ ID NO: 2280100 - RNA, 16 nt, Human
cauacguacacauuuu

SEQ ID NO: 2280101 - RNA, 15 nt, Human
cauacguacacauuu

SEQ ID NO: 2280102 - RNA, 21 nt, Human
cauacuaaccagcagaaaugc

SEQ ID NO: 2280103 - RNA, 14 nt, Human
cauacuaaccagca

SEQ ID NO: 2280104 - RNA, 18 nt, Human
cauacguacacauuuuau

SEQ ID NO: 2280105 - RNA, 17 nt, Human
cauacguacacauuuua

SEQ ID NO: 2280106 - RNA, 13 nt, Human
cauacguccacca

SEQ ID NO: 2280107 - RNA, 20 nt, Human
cauacuaauuauacccccug

SEQ ID NO: 2280108 - RNA, 19 nt, Human
cauacucaauguuacuauc

SEQ ID NO: 2280109 - RNA, 22 nt, Human
ggaagcccccaccgugggcagg

SEQ ID NO: 2280110 - RNA, 21 nt, Human
ggaagcccccaccgugggcag

SEQ ID NO: 2280111 - RNA, 13 nt, Human
ggaagcccccacc

SEQ ID NO: 2280112 - RNA, 23 nt, Human
ggaagcccuggauuucagaaaga

SEQ ID NO: 2280113 - RNA, 15 nt, Human
ggaagcccuggauuu

SEQ ID NO: 2280114 - RNA, 11 nt, Human
ggaagcccugg

SEQ ID NO: 2280115 - RNA, 12 nt, Human
ggaagcccugga

SEQ ID NO: 2280116 - RNA, 17 nt, Human
ggaagcccuccuuccac

SEQ ID NO: 2280117 - RNA, 16 nt, Human
ggaagcccuccuucca

SEQ ID NO: 2280118 - RNA, 15 nt, Human
ggaagcccuccuucc

SEQ ID NO: 2280119 - RNA, 12 nt, Human
ggaagcccuccu

SEQ ID NO: 2280120 - RNA, 11 nt, Human
ggaagcccucc

SEQ ID NO: 2280121 - RNA, 22 nt, Human
ggaagcgugaaggccgagaagc

SEQ ID NO: 2280122 - RNA, 21 nt, Human
ggaagcgugaaggccgagaag

SEQ ID NO: 2280123 - RNA, 16 nt, Human
ggaagcuaauuugcau

SEQ ID NO: 2280124 - RNA, 13 nt, Human
ggaagcuacaggu

SEQ ID NO: 2280125 - RNA, 15 nt, Human
ggaagcuacagguua

SEQ ID NO: 2280126 - RNA, 15 nt, Human
ggaagccgcuggggc

SEQ ID NO: 2280127 - RNA, 23 nt, Human
ggaagcuacagguuacaacagau

SEQ ID NO: 2280128 - RNA, 21 nt, Human
ggaagcuacagguuacaacag

SEQ ID NO: 2280129 - RNA, 22 nt, Human
ggaagcuacagguuacaacaga

SEQ ID NO: 2280130 - RNA, 16 nt, Human
ggaagcuagcuccccu

SEQ ID NO: 2280131 - RNA, 17 nt, Human
ggaagcuagcuccccuc

SEQ ID NO: 2280132 - RNA, 19 nt, Human
ggaagcuagcuccccuccu

SEQ ID NO: 2280133 - RNA, 20 nt, Human
ggaagcuagcuccccuccuc

SEQ ID NO: 2280134 - RNA, 21 nt, Human
ggaagcuagcuccccuccucu

SEQ ID NO: 2280135 - RNA, 22 nt, Human
ggaagcuagcuccccuccucuc

SEQ ID NO: 2280136 - RNA, 23 nt, Human
ggaagcuccacugucacccucca

SEQ ID NO: 2280137 - RNA, 14 nt, Human
ggaagcuccacugu

SEQ ID NO: 2280138 - RNA, 11 nt, Human
ggaagcuccgc

SEQ ID NO: 2280139 - RNA, 15 nt, Human
ggaagcucagggccu

SEQ ID NO: 2280140 - RNA, 23 nt, Human
ggaagcucagggccuggcucagg

SEQ ID NO: 2280141 - RNA, 20 nt, Human
ggaagcuuccaguccaaucu

SEQ ID NO: 2280142 - RNA, 19 nt, Human
ggaagcuucuuaaaugaga

SEQ ID NO: 2280143 - RNA, 23 nt, Human
ggaagcuguguccuugcaccugc

SEQ ID NO: 2280144 - RNA, 13 nt, Human
ggaagcuuccagu

SEQ ID NO: 2280145 - RNA, 21 nt, Human
ggaagcuguguccuugcaccu

SEQ ID NO: 2280146 - RNA, 16 nt, Human
ggaaggaaacccagcu

SEQ ID NO: 2280147 - RNA, 18 nt, Human
ggaagcucugaagucaca

SEQ ID NO: 2280148 - RNA, 17 nt, Human
ggaagcugcccugccca

SEQ ID NO: 2280149 - RNA, 13 nt, Human
ggaagcugaggcg

SEQ ID NO: 2280150 - RNA, 18 nt, Human
ggaagcuggccgaggguc

SEQ ID NO: 2280151 - RNA, 17 nt, Human
ggaagcuguguccuugc

SEQ ID NO: 2280152 - RNA, 15 nt, Human
ggaagcugcuccgug

SEQ ID NO: 2280153 - RNA, 13 nt, Human
ggaagcugcuccg

SEQ ID NO: 2280154 - RNA, 13 nt, Human
ggaaggagagccu

SEQ ID NO: 2280155 - RNA, 22 nt, Human
ggaaggagacucaccucugccu

SEQ ID NO: 2280156 - RNA, 21 nt, Human
ggaaggagacucaccucugcc

SEQ ID NO: 2280157 - RNA, 12 nt, Human
ggaagugugggu

SEQ ID NO: 2280158 - RNA, 22 nt, Human
ggaagugugggucugugugugu

SEQ ID NO: 2280159 - RNA, 21 nt, Human
ggaagugugggucugugugug

SEQ ID NO: 2280160 - RNA, 11 nt, Human
ggaaguuuuca

SEQ ID NO: 2280161 - RNA, 14 nt, Human
ggaaguuuucaaug

SEQ ID NO: 2280162 - RNA, 18 nt, Human
ggaaguuucauauauugu

SEQ ID NO: 2280163 - RNA, 12 nt, Human
ggaaggagagaa

SEQ ID NO: 2280164 - RNA, 13 nt, Human
ggaaguuuagaga

SEQ ID NO: 2280165 - RNA, 20 nt, Human
ggaaggagacucaccucugc

SEQ ID NO: 2280166 - RNA, 15 nt, Human
ggaaggagacucacc

SEQ ID NO: 2280167 - RNA, 23 nt, Human
ggaaggaacucuggcuuccaggu

SEQ ID NO: 2280168 - RNA, 13 nt, Human
ggaaggacccuga

SEQ ID NO: 2280169 - RNA, 19 nt, Human
ggaaggaaagaaagaagga

SEQ ID NO: 2280170 - RNA, 16 nt, Human
ggaaggaacucuggcu

SEQ ID NO: 2280171 - RNA, 17 nt, Human
ggaaggaacucuggcuu

SEQ ID NO: 2280172 - RNA, 18 nt, Human
ggaaggaacucuggcuuc

SEQ ID NO: 2280173 - RNA, 19 nt, Human
ggaaggaaacccagcucug

SEQ ID NO: 2280174 - RNA, 20 nt, Human
ggaaggaaacccagcucugg

SEQ ID NO: 2280175 - RNA, 21 nt, Human
ggaaguuuuguggaggagcuc

SEQ ID NO: 2280176 - RNA, 18 nt, Human
ggaaguuuugcauuuaug

SEQ ID NO: 2280177 - RNA, 12 nt, Human
ggaauaaaauac

SEQ ID NO: 2280178 - RNA, 14 nt, Human
ggaauaaaauacua

SEQ ID NO: 2280179 - RNA, 19 nt, Human
ggaauaaaauacuauuuuu

SEQ ID NO: 2280180 - RNA, 12 nt, Human
ggaauaaauaug

SEQ ID NO: 2280181 - RNA, 13 nt, Human
ggaauaaauaugc

SEQ ID NO: 2280182 - RNA, 22 nt, Human
ggaauaaauaugccucuccuuu

SEQ ID NO: 2280183 - RNA, 23 nt, Human
ggaauaaauaugccucuccuuug

SEQ ID NO: 2280184 - RNA, 20 nt, Human
ggaauaaggccuuaauaugu

SEQ ID NO: 2280185 - RNA, 13 nt, Human
ggaauaauaccua

SEQ ID NO: 2280186 - RNA, 18 nt, Human
ggaauaacauguaauuaa

SEQ ID NO: 2280187 - RNA, 16 nt, Human
ggaauccagacccggc

SEQ ID NO: 2280188 - RNA, 24 nt, Human
ggaaucauuucuauuucuccucca

SEQ ID NO: 2280189 - RNA, 14 nt, Human
ggaauccacuccca

SEQ ID NO: 2280190 - RNA, 16 nt, Human
ggaauccacucccagg

SEQ ID NO: 2280191 - RNA, 19 nt, Human
ggaauccacucccaggcag

SEQ ID NO: 2280192 - RNA, 21 nt, Human
ggaaucagacuucacacugca

SEQ ID NO: 2280193 - RNA, 20 nt, Human
ggaaucacucuuguggaugu

SEQ ID NO: 2280194 - RNA, 18 nt, Human
ggaaucacucuuguggau

SEQ ID NO: 2280195 - RNA, 23 nt, Human
ggaaucagacuucacacugcaag

SEQ ID NO: 2280196 - RNA, 16 nt, Human
ggaaucagcaagaaga

SEQ ID NO: 2280197 - RNA, 13 nt, Human
ggaaucagcuucu

SEQ ID NO: 2280198 - RNA, 19 nt, Human
ggaaucaugucaggccugu

SEQ ID NO: 2280199 - RNA, 21 nt, Human
ggaaucaugucaggccugugu

SEQ ID NO: 2280200 - RNA, 14 nt, Human
ggaaucagcuucua

SEQ ID NO: 2280201 - RNA, 15 nt, Human
ggaaucaugucaggc

SEQ ID NO: 2280202 - RNA, 18 nt, Human
ggaaucaugucaggccug

SEQ ID NO: 2280203 - RNA, 14 nt, Human
ggaauccuguccuc

SEQ ID NO: 2280204 - RNA, 19 nt, Human
ggaauccuguccucagcuu

SEQ ID NO: 2280205 - RNA, 20 nt, Human
ggaauccacucccaggcagc

SEQ ID NO: 2280206 - RNA, 21 nt, Human
ggaaucgaggaaccagagcca

SEQ ID NO: 2280207 - RNA, 20 nt, Human
ggaaucgaggaaccagagcc

SEQ ID NO: 2280208 - RNA, 19 nt, Human
ggaaucgaggaaccagagc

SEQ ID NO: 2280209 - RNA, 16 nt, Human
ggacaacgaggaagcc

SEQ ID NO: 2280210 - RNA, 13 nt, Human
ggaaucuggagag

SEQ ID NO: 2280211 - RNA, 19 nt, Human
ggaaucuggagagcuagaa

SEQ ID NO: 2280212 - RNA, 17 nt, Human
ggacaacgaggaagccc

SEQ ID NO: 2280213 - RNA, 15 nt, Human
ggacaacgaggaagc

SEQ ID NO: 2280214 - RNA, 13 nt, Human
ggacaagagcagg

SEQ ID NO: 2280215 - RNA, 13 nt, Human
ggacaagcagagg

SEQ ID NO: 2280216 - RNA, 20 nt, Human
ggacaagcagagguggccag

SEQ ID NO: 2280217 - RNA, 20 nt, Human
ggacaagccaacuuguaaau

SEQ ID NO: 2280218 - RNA, 21 nt, Human
ggacaagccaacuuguaaaua

SEQ ID NO: 2280219 - RNA, 23 nt, Human
ggacaagccaacuuguaaauaca

SEQ ID NO: 2280220 - RNA, 22 nt, Human
ggacaaggaugaucuaggaaga

SEQ ID NO: 2280221 - RNA, 23 nt, Human
ggacaaggaugaucuaggaagac

SEQ ID NO: 2280222 - RNA, 19 nt, Human
ggacaaucaugaaauaugc

SEQ ID NO: 2280223 - RNA, 21 nt, Human
ggacaaucaugaaauaugcau

SEQ ID NO: 2280224 - RNA, 17 nt, Human
ggacaaucaguccccuc

SEQ ID NO: 2280225 - RNA, 18 nt, Human
ggacaaucaguccccucc

SEQ ID NO: 2280226 - RNA, 20 nt, Human
ggacaaucaguccccuccca

SEQ ID NO: 2280227 - RNA, 22 nt, Human
ggacaaucaguccccucccauc

SEQ ID NO: 2280228 - RNA, 14 nt, Human
ggacacagcucuuc

SEQ ID NO: 2280229 - RNA, 22 nt, Human
ggacaaggcuagaucaugaaga

SEQ ID NO: 2280230 - RNA, 20 nt, Human
ggacaaggaggucugugcca

SEQ ID NO: 2280231 - RNA, 19 nt, Human
ggacaaggacuaggguccu

SEQ ID NO: 2280232 - RNA, 16 nt, Human
ggacaaucaguccccu

SEQ ID NO: 2280233 - RNA, 18 nt, Human
ggacaauacagaacccau

SEQ ID NO: 2280234 - RNA, 20 nt, Human
ggacaaguggacucagggca

SEQ ID NO: 2280235 - RNA, 16 nt, Human
ggacaccugcccugcc

SEQ ID NO: 2280236 - RNA, 21 nt, Human
ggacacagcucuucuccaggc

SEQ ID NO: 2280237 - RNA, 15 nt, Human
ggacacagcucuucu

SEQ ID NO: 2280238 - RNA, 18 nt, Human
ggacacagcucuucucca

SEQ ID NO: 2280239 - RNA, 20 nt, Human
ggacagcuccuucuguccua

SEQ ID NO: 2280240 - RNA, 11 nt, Human
ggacagcuguc

SEQ ID NO: 2280241 - RNA, 13 nt, Human
ggacagcuguccu

SEQ ID NO: 2280242 - RNA, 19 nt, Human
ggacagcuugagccgggcc

SEQ ID NO: 2280243 - RNA, 22 nt, Human
ggacacuaaccacgcuggaccu

SEQ ID NO: 2280244 - RNA, 19 nt, Human
ggacagcuccuucuguccu

SEQ ID NO: 2280245 - RNA, 22 nt, Human
ggacacggggcaguggcaaccu

SEQ ID NO: 2280246 - RNA, 17 nt, Human
ggacacuaaccacgcug

SEQ ID NO: 2280247 - RNA, 16 nt, Human
ggaacuguccagagag

SEQ ID NO: 2280248 - RNA, 17 nt, Human
ggaacuguccagagagc

SEQ ID NO: 2280249 - RNA, 18 nt, Human
ggaacuguccagagagca

SEQ ID NO: 2280250 - RNA, 15 nt, Human
ggaacuucuaauaua

SEQ ID NO: 2280251 - RNA, 22 nt, Human
ggaagacaaugugaaaagaaaa

SEQ ID NO: 2280252 - RNA, 13 nt, Human
ggaagacagcucu

SEQ ID NO: 2280253 - RNA, 14 nt, Human
ggaagacagcucuu

SEQ ID NO: 2280254 - RNA, 22 nt, Human
ggaagacauggggaggaaggac

SEQ ID NO: 2280255 - RNA, 12 nt, Human
ggaagacuuugg

SEQ ID NO: 2280256 - RNA, 22 nt, Human
ggaacuuggggaguuaagaccu

SEQ ID NO: 2280257 - RNA, 12 nt, Human
ggaagacagaga

SEQ ID NO: 2280258 - RNA, 23 nt, Human
ggaagacagagaccuccugccuc

SEQ ID NO: 2280259 - RNA, 13 nt, Human
ggaagacuuugga

SEQ ID NO: 2280260 - RNA, 17 nt, Human
ggaagacuuuggaaaga

SEQ ID NO: 2280261 - RNA, 21 nt, Human
ggaagagaggaguucaaugau

SEQ ID NO: 2280262 - RNA, 18 nt, Human
ggaagagaggaguucaau

SEQ ID NO: 2280263 - RNA, 19 nt, Human
ggaagagaggaguucaaug

SEQ ID NO: 2280264 - RNA, 20 nt, Human
ggaagagaggaguucaauga

SEQ ID NO: 2280265 - RNA, 17 nt, Human
ggaagagaggaguucaa

SEQ ID NO: 2280266 - RNA, 13 nt, Human
ggaagagaaaaaa

SEQ ID NO: 2280267 - RNA, 18 nt, Human
ggaagacuuuggaaagag

SEQ ID NO: 2280268 - RNA, 21 nt, Human
ggaagaccagcuuugcaguga

SEQ ID NO: 2280269 - RNA, 13 nt, Human
ggaagagaaacca

SEQ ID NO: 2280270 - RNA, 15 nt, Human
ggaagagaaaaaaua

SEQ ID NO: 2280271 - RNA, 12 nt, Human
ggaacacucuga

SEQ ID NO: 2280272 - RNA, 14 nt, Human
ggaacacucugaga

SEQ ID NO: 2280273 - RNA, 21 nt, Human
ggaacagacaacagaagucau

SEQ ID NO: 2280274 - RNA, 20 nt, Human
ggaacagacaacagaaguca

SEQ ID NO: 2280275 - RNA, 18 nt, Human
ggaacagacaacagaagu

SEQ ID NO: 2280276 - RNA, 12 nt, Human
ggaacagaaugu

SEQ ID NO: 2280277 - RNA, 16 nt, Human
ggaacagaauguuuua

SEQ ID NO: 2280278 - RNA, 16 nt, Human
ggaacagacaggagaa

SEQ ID NO: 2280279 - RNA, 15 nt, Human
ggaacagacaggaga

SEQ ID NO: 2280280 - RNA, 13 nt, Human
ggaacagacagga

SEQ ID NO: 2280281 - RNA, 19 nt, Human
ggaacagaauguuuuacug

SEQ ID NO: 2280282 - RNA, 17 nt, Human
ggaacagacaggagaaa

SEQ ID NO: 2280283 - RNA, 20 nt, Human
ggaacugcugggcuuggcag

SEQ ID NO: 2280284 - RNA, 14 nt, Human
ggaacuguccagag

SEQ ID NO: 2280285 - RNA, 15 nt, Human
ggaacuguccagaga

SEQ ID NO: 2280286 - RNA, 19 nt, Human
ggaacagaaggaugaauga

SEQ ID NO: 2280287 - RNA, 13 nt, Human
ggaacagaaggau

SEQ ID NO: 2280288 - RNA, 12 nt, Human
ggaacagaagga

SEQ ID NO: 2280289 - RNA, 11 nt, Human
ggaacagaagg

SEQ ID NO: 2280290 - RNA, 15 nt, Human
ggaacacucugagac

SEQ ID NO: 2280291 - RNA, 16 nt, Human
ggaacacucugagacu

SEQ ID NO: 2280292 - RNA, 20 nt, Human
ggacaggaugaccuggauaa

SEQ ID NO: 2280293 - RNA, 15 nt, Human
ggacggcugggcaca

SEQ ID NO: 2280294 - RNA, 13 nt, Human
ggacggggccggc

SEQ ID NO: 2280295 - RNA, 16 nt, Human
ggacggggccggccag

SEQ ID NO: 2280296 - RNA, 22 nt, Human
ggacggccugaugcucccuccc

SEQ ID NO: 2280297 - RNA, 21 nt, Human
ggacggccugaugcucccucc

SEQ ID NO: 2280298 - RNA, 18 nt, Human
ggacggcauuccugcuua

SEQ ID NO: 2280299 - RNA, 20 nt, Human
ggaccucaggccugggggcu

SEQ ID NO: 2280300 - RNA, 14 nt, Human
ggaccucaggccug

SEQ ID NO: 2280301 - RNA, 15 nt, Human
ggaccucaggccugg

SEQ ID NO: 2280302 - RNA, 22 nt, Human
ggacguccugccaccuggggca

SEQ ID NO: 2280303 - RNA, 18 nt, Human
ggacguggcucagccagc

SEQ ID NO: 2280304 - RNA, 18 nt, Human
ggacguccugccaccugg

SEQ ID NO: 2280305 - RNA, 20 nt, Human
ggacggugcuccaggcaggc

SEQ ID NO: 2280306 - RNA, 16 nt, Human
ggacgucccugcccau

SEQ ID NO: 2280307 - RNA, 20 nt, Human
ggacguguuaugacuccaga

SEQ ID NO: 2280308 - RNA, 23 nt, Human
ggacggggggccccagucagccu

SEQ ID NO: 2280309 - RNA, 19 nt, Human
ggacggggggccccaguca

SEQ ID NO: 2280310 - RNA, 21 nt, Human
ggacggggggccccagucagc

SEQ ID NO: 2280311 - RNA, 17 nt, Human
ggacggugcccaagcca

SEQ ID NO: 2280312 - RNA, 19 nt, Human
ggacggugcccaagccaga

SEQ ID NO: 2280313 - RNA, 21 nt, Human
ggacggugcccaagccagagg

SEQ ID NO: 2280314 - RNA, 14 nt, Human
ggacggugcuccag

SEQ ID NO: 2280315 - RNA, 15 nt, Human
ggacggugcuccagg

SEQ ID NO: 2280316 - RNA, 17 nt, Human
ggacggugcuccaggca

SEQ ID NO: 2280317 - RNA, 18 nt, Human
ggacggugcuccaggcag

SEQ ID NO: 2280318 - RNA, 23 nt, Human
ggacccuuuccuuccuucccugg

SEQ ID NO: 2280319 - RNA, 21 nt, Human
ggacccuuuccuuccuucccu

SEQ ID NO: 2280320 - RNA, 17 nt, Human
ggacccuuuccuuccuu

SEQ ID NO: 2280321 - RNA, 16 nt, Human
ggacccuuuccuuccu

SEQ ID NO: 2280322 - RNA, 12 nt, Human
ggacccuuuccu

SEQ ID NO: 2280323 - RNA, 23 nt, Human
ggacccuugagaguaucaggucu

SEQ ID NO: 2280324 - RNA, 21 nt, Human
ggacccuucccuugagcccuc

SEQ ID NO: 2280325 - RNA, 17 nt, Human
ggacccuguugcuaagc

SEQ ID NO: 2280326 - RNA, 13 nt, Human
ggacccuguugcu

SEQ ID NO: 2280327 - RNA, 22 nt, Human
ggacccugugacauggugccug

SEQ ID NO: 2280328 - RNA, 23 nt, Human
ggacccugugacauggugccuga

SEQ ID NO: 2280329 - RNA, 22 nt, Human
ggacccuuuccuuccuucccug

SEQ ID NO: 2280330 - RNA, 17 nt, Human
ggaccgccagauggggc

SEQ ID NO: 2280331 - RNA, 15 nt, Human
ggaccgccagauggg

SEQ ID NO: 2280332 - RNA, 22 nt, Human
ggaccgccagauggggccucug

SEQ ID NO: 2280333 - RNA, 13 nt, Human
ggaccucaggccu

SEQ ID NO: 2280334 - RNA, 12 nt, Human
ggacccugaggc

SEQ ID NO: 2280335 - RNA, 13 nt, Human
ggacccugaggcc

SEQ ID NO: 2280336 - RNA, 16 nt, Human
ggacccugugacaugg

SEQ ID NO: 2280337 - RNA, 13 nt, Human
ggacccugaaggg

SEQ ID NO: 2280338 - RNA, 23 nt, Human
ggacccccgcccccugcccuccc

SEQ ID NO: 2280339 - RNA, 15 nt, Human
ggaccccgagccugg

SEQ ID NO: 2280340 - RNA, 12 nt, Human
ggacccccugaa

SEQ ID NO: 2280341 - RNA, 12 nt, Human
ggacccccuucc

SEQ ID NO: 2280342 - RNA, 14 nt, Human
ggacccccuucccc

SEQ ID NO: 2280343 - RNA, 11 nt, Human
ggacccugagg

SEQ ID NO: 2280344 - RNA, 16 nt, Human
ggacccccgcccccug

SEQ ID NO: 2280345 - RNA, 19 nt, Human
ggacccccgcccccugccc

SEQ ID NO: 2280346 - RNA, 20 nt, Human
ggacccccgcccccugcccu

SEQ ID NO: 2280347 - RNA, 22 nt, Human
ggacccccgcccccugcccucc

SEQ ID NO: 2280348 - RNA, 14 nt, Human
ggacccccgccccc

SEQ ID NO: 2280349 - RNA, 15 nt, Human
ggacccccgcccccu

SEQ ID NO: 2280350 - RNA, 19 nt, Human
ggacguggcucagccagca

SEQ ID NO: 2280351 - RNA, 13 nt, Human
ggacguuccagcc

SEQ ID NO: 2280352 - RNA, 14 nt, Human
ggacguuccagccg

SEQ ID NO: 2280353 - RNA, 16 nt, Human
ggacguuccagccggc

SEQ ID NO: 2280354 - RNA, 12 nt, Human
ggacuaaaagau

SEQ ID NO: 2280355 - RNA, 14 nt, Human
ggacuaaaagauau

SEQ ID NO: 2280356 - RNA, 19 nt, Human
ggacuaaaagauauaagug

SEQ ID NO: 2280357 - RNA, 21 nt, Human
ggacguuccagccggcauggc

SEQ ID NO: 2280358 - RNA, 20 nt, Human
ggacuaacuugucuuuggac

SEQ ID NO: 2280359 - RNA, 14 nt, Human
ggacuauuauaauu

SEQ ID NO: 2280360 - RNA, 23 nt, Human
ggacuauauuugggccugcucca

SEQ ID NO: 2280361 - RNA, 16 nt, Human
ggacuaagccuaccug

SEQ ID NO: 2280362 - RNA, 19 nt, Human
ggacuaagccuaccugcuc

SEQ ID NO: 2280363 - RNA, 15 nt, Human
ggacucaaugcacug

SEQ ID NO: 2280364 - RNA, 14 nt, Human
ggacuacaggugug

SEQ ID NO: 2280365 - RNA, 24 nt, Human
ggacuaacuugucuuuggacccug

SEQ ID NO: 2280366 - RNA, 18 nt, Human
ggacuccagaaucuaaag

SEQ ID NO: 2280367 - RNA, 14 nt, Human
ggacuccagacucu

SEQ ID NO: 2280368 - RNA, 19 nt, Human
ggacuccagacucucugug

SEQ ID NO: 2280369 - RNA, 24 nt, Human
ggacucauuucauuccuaacacag

SEQ ID NO: 2280370 - RNA, 11 nt, Human
ggacuccaccc

SEQ ID NO: 2280371 - RNA, 20 nt, Human
ggacuccacccauccuauca

SEQ ID NO: 2280372 - RNA, 22 nt, Human
ggacucagggcagcgccaggcu

SEQ ID NO: 2280373 - RNA, 20 nt, Human
ggacucagggccaugccugc

SEQ ID NO: 2280374 - RNA, 22 nt, Human
ggacucauuuuaaaaaauggaa

SEQ ID NO: 2280375 - RNA, 20 nt, Human
ggacucaggaugcccagggc

SEQ ID NO: 2280376 - RNA, 19 nt, Human
ggacucaggaugcccaggg

SEQ ID NO: 2280377 - RNA, 18 nt, Human
ggacucaggaugcccagg

SEQ ID NO: 2280378 - RNA, 17 nt, Human
ggacucaggaugcccag

SEQ ID NO: 2280379 - RNA, 15 nt, Human
ggacucagggcagcg

SEQ ID NO: 2280380 - RNA, 13 nt, Human
ggacucagggcag

SEQ ID NO: 2280381 - RNA, 17 nt, Human
ggacucagccuucagac

SEQ ID NO: 2280382 - RNA, 21 nt, Human
ggacuaagccuaccugcucuc

SEQ ID NO: 2280383 - RNA, 21 nt, Human
ggacucagccuucagacagag

SEQ ID NO: 2280384 - RNA, 13 nt, Human
ggacucagcuccc

SEQ ID NO: 2280385 - RNA, 17 nt, Human
ggacucagcuccccaga

SEQ ID NO: 2280386 - RNA, 16 nt, Human
ggacucaaugcacuga

SEQ ID NO: 2280387 - RNA, 18 nt, Human
ggacucaaugcacugaca

SEQ ID NO: 2280388 - RNA, 16 nt, Human
ggacuccggcccuccu

SEQ ID NO: 2280389 - RNA, 22 nt, Human
ggacucccuccucaccucugga

SEQ ID NO: 2280390 - RNA, 20 nt, Human
ggacucccuccucaccucug

SEQ ID NO: 2280391 - RNA, 14 nt, Human
ggacuccccaggcc

SEQ ID NO: 2280392 - RNA, 16 nt, Human
ggacuccccaggccag

SEQ ID NO: 2280393 - RNA, 17 nt, Human
ggacuccccaggccagg

SEQ ID NO: 2280394 - RNA, 18 nt, Human
ggacuccccaggccaggc

SEQ ID NO: 2280395 - RNA, 23 nt, Human
ggacuugaaagcauccaugugug

SEQ ID NO: 2280396 - RNA, 17 nt, Human
ggacuucuuuucacauu

SEQ ID NO: 2280397 - RNA, 19 nt, Human
ggacuccccaggccaggcc

SEQ ID NO: 2280398 - RNA, 11 nt, Human
ggacuucuuuu

SEQ ID NO: 2280399 - RNA, 21 nt, Human
ggacuuucuuuucgccguggc

SEQ ID NO: 2280400 - RNA, 21 nt, Human
ggacuuuccacccccucccug

SEQ ID NO: 2280401 - RNA, 20 nt, Human
ggacuuuccacccccucccu

SEQ ID NO: 2280402 - RNA, 17 nt, Human
ggacuuuccacccccuc

SEQ ID NO: 2280403 - RNA, 16 nt, Human
ggacuuuccacccccu

SEQ ID NO: 2280404 - RNA, 19 nt, Human
ggacuugcaaaaaggguca

SEQ ID NO: 2280405 - RNA, 14 nt, Human
ggacuuggaagcuc

SEQ ID NO: 2280406 - RNA, 12 nt, Human
ggacuugaaguu

SEQ ID NO: 2280407 - RNA, 13 nt, Human
ggacuugaaguug

SEQ ID NO: 2280408 - RNA, 18 nt, Human
ggacuugaggauuuugag

SEQ ID NO: 2280409 - RNA, 23 nt, Human
ggacuuucuuuucgccguggcug

SEQ ID NO: 2280410 - RNA, 20 nt, Human
ggacuuuccuaaauguuuaa

SEQ ID NO: 2280411 - RNA, 16 nt, Human
ggacuuugcagccggc

SEQ ID NO: 2280412 - RNA, 17 nt, Human
ggacuuugcagccggca

SEQ ID NO: 2280413 - RNA, 15 nt, Human
ggagaaacagagaca

SEQ ID NO: 2280414 - RNA, 22 nt, Human
ggacuuugcagccggcacaggg

SEQ ID NO: 2280415 - RNA, 9 nt, Human
ggacuuugu

SEQ ID NO: 2280416 - RNA, 16 nt, Human
ggagaaaggaagggcu

SEQ ID NO: 2280417 - RNA, 13 nt, Human
ggagaaacuggaa

SEQ ID NO: 2280418 - RNA, 16 nt, Human
ggagacucuguggggc

SEQ ID NO: 2280419 - RNA, 13 nt, Human
ggagacucugugg

SEQ ID NO: 2280420 - RNA, 18 nt, Human
ggagacuccuaggcagga

SEQ ID NO: 2280421 - RNA, 21 nt, Human
ggagacuccuaggcaggacau

SEQ ID NO: 2280422 - RNA, 12 nt, Human
ggagacuccugc

SEQ ID NO: 2280423 - RNA, 17 nt, Human
ggagacuccugcccugu

SEQ ID NO: 2280424 - RNA, 21 nt, Human
ggagacuccaugagaagccgu

SEQ ID NO: 2280425 - RNA, 18 nt, Human
ggagacuccaugagaagc

SEQ ID NO: 2280426 - RNA, 13 nt, Human
ggagacuccuagg

SEQ ID NO: 2280427 - RNA, 16 nt, Human
ggagacuccuaggcag

SEQ ID NO: 2280428 - RNA, 21 nt, Human
ggagacucaccucugccucaa

SEQ ID NO: 2280429 - RNA, 19 nt, Human
ggagacucaccucugccuc

SEQ ID NO: 2280430 - RNA, 18 nt, Human
ggagacucaccucugccu

SEQ ID NO: 2280431 - RNA, 17 nt, Human
ggagacucaccucugcc

SEQ ID NO: 2280432 - RNA, 16 nt, Human
ggagacucaccucugc

SEQ ID NO: 2280433 - RNA, 13 nt, Human
ggagacucaccuc

SEQ ID NO: 2280434 - RNA, 9 nt, Human
ggagacuca

SEQ ID NO: 2280435 - RNA, 19 nt, Human
ggagaaacccuugaaaaga

SEQ ID NO: 2280436 - RNA, 16 nt, Human
ggagaaacagagacag

SEQ ID NO: 2280437 - RNA, 17 nt, Human
ggagaaagcacugaccu

SEQ ID NO: 2280438 - RNA, 20 nt, Human
gcuucagccugaggcugaga

SEQ ID NO: 2280439 - RNA, 15 nt, Human
gcuucagccugaggc

SEQ ID NO: 2280440 - RNA, 14 nt, Human
gcuucagccugagg

SEQ ID NO: 2280441 - RNA, 12 nt, Human
gcuucagccuga

SEQ ID NO: 2280442 - RNA, 23 nt, Human
gcuucagccugaggcugagacug

SEQ ID NO: 2280443 - RNA, 21 nt, Human
gcuucagccugaggcugagac

SEQ ID NO: 2280444 - RNA, 13 nt, Human
gcuucaggaggga

SEQ ID NO: 2280445 - RNA, 18 nt, Human
gcuucacggaagagccuu

SEQ ID NO: 2280446 - RNA, 15 nt, Human
gcuucagccaggagc

SEQ ID NO: 2280447 - RNA, 19 nt, Human
gcuucacggaagagccuug

SEQ ID NO: 2280448 - RNA, 12 nt, Human
gcuucagccucc

SEQ ID NO: 2280449 - RNA, 19 nt, Human
gcuucagccaggagcuggg

SEQ ID NO: 2280450 - RNA, 17 nt, Human
gcuucagccuccccacc

SEQ ID NO: 2280451 - RNA, 15 nt, Human
gcuucacggaagagc

SEQ ID NO: 2280452 - RNA, 17 nt, Human
gcuucacggaagagccu

SEQ ID NO: 2280453 - RNA, 20 nt, Human
gcuucaaggauccugagcca

SEQ ID NO: 2280454 - RNA, 21 nt, Human
gcuucaaggauccugagccag

SEQ ID NO: 2280455 - RNA, 11 nt, Human
gcuuauuuaau

SEQ ID NO: 2280456 - RNA, 22 nt, Human
gcuuauuguuccaagacauugu

SEQ ID NO: 2280457 - RNA, 21 nt, Human
gcuuauuguuccaagacauug

SEQ ID NO: 2280458 - RNA, 20 nt, Human
gcuuauuguuccaagacauu

SEQ ID NO: 2280459 - RNA, 17 nt, Human
gcuuauuguuccaagac

SEQ ID NO: 2280460 - RNA, 15 nt, Human
gcuuauuguuccaag

SEQ ID NO: 2280461 - RNA, 14 nt, Human
gcuuauuguuccaa

SEQ ID NO: 2280462 - RNA, 13 nt, Human
gcuuauuguucca

SEQ ID NO: 2280463 - RNA, 20 nt, Human
gcuuauucaucuguuuuucu

SEQ ID NO: 2280464 - RNA, 18 nt, Human
gcuuauuuaauuaaaaaa

SEQ ID NO: 2280465 - RNA, 18 nt, Human
gcuucaaggauccugagc

SEQ ID NO: 2280466 - RNA, 19 nt, Human
gcuucaaggauccugagcc

SEQ ID NO: 2280467 - RNA, 22 nt, Human
gcuuugacugagcagacuggug

SEQ ID NO: 2280468 - RNA, 15 nt, Human
gcuuugacugagcag

SEQ ID NO: 2280469 - RNA, 11 nt, Human
gcuuugaaugu

SEQ ID NO: 2280470 - RNA, 14 nt, Human
gcuuugacucaccu

SEQ ID NO: 2280471 - RNA, 20 nt, Human
gcuuugacucaccuguuacu

SEQ ID NO: 2280472 - RNA, 17 nt, Human
gcuuucuugcugguugu

SEQ ID NO: 2280473 - RNA, 20 nt, Human
gcuuucuuucguuuguuugu

SEQ ID NO: 2280474 - RNA, 21 nt, Human
gcuuucuuucguuuguuuguu

SEQ ID NO: 2280475 - RNA, 22 nt, Human
gcuuguccccuccucacucccu

SEQ ID NO: 2280476 - RNA, 19 nt, Human
gcuuguccccuccucacuc

SEQ ID NO: 2280477 - RNA, 16 nt, Human
gcuuguccccuccuca

SEQ ID NO: 2280478 - RNA, 16 nt, Human
gcuuguccagcgccua

SEQ ID NO: 2280479 - RNA, 15 nt, Human
gcuuguccagcgccu

SEQ ID NO: 2280480 - RNA, 18 nt, Human
gcuugucauuaccagacg

SEQ ID NO: 2280481 - RNA, 14 nt, Human
gcuuucuugcuggu

SEQ ID NO: 2280482 - RNA, 13 nt, Human
gcuuucuugcugg

SEQ ID NO: 2280483 - RNA, 12 nt, Human
gcuuucuugcug

SEQ ID NO: 2280484 - RNA, 22 nt, Human
gcuuucuguugucauugcuguu

SEQ ID NO: 2280485 - RNA, 16 nt, Human
gcuuucuguugucauu

SEQ ID NO: 2280486 - RNA, 23 nt, Human
gcuuucuguugucauugcuguug

SEQ ID NO: 2280487 - RNA, 16 nt, Human
gcuuguaacuccacca

SEQ ID NO: 2280488 - RNA, 15 nt, Human
gcuuguaacuccacc

SEQ ID NO: 2280489 - RNA, 12 nt, Human
gcuuguacauaa

SEQ ID NO: 2280490 - RNA, 18 nt, Human
gcuugucagagcugggag

SEQ ID NO: 2280491 - RNA, 17 nt, Human
gcuugucagagcuggga

SEQ ID NO: 2280492 - RNA, 16 nt, Human
gcuugucagagcuggg

SEQ ID NO: 2280493 - RNA, 15 nt, Human
gcuugucagagcugg

SEQ ID NO: 2280494 - RNA, 21 nt, Human
gcuuguccaacccgaggcccg

SEQ ID NO: 2280495 - RNA, 14 nt, Human
gcuugucagagcug

SEQ ID NO: 2280496 - RNA, 13 nt, Human
gcuugucagagcu

SEQ ID NO: 2280497 - RNA, 17 nt, Human
gcuuguaucaacacugu

SEQ ID NO: 2280498 - RNA, 14 nt, Human
gcuuguauagugua

SEQ ID NO: 2280499 - RNA, 15 nt, Human
gcuugagcccaggag

SEQ ID NO: 2280500 - RNA, 14 nt, Human
gcuugagcccagga

SEQ ID NO: 2280501 - RNA, 16 nt, Human
gcuugagcccaggagu

SEQ ID NO: 2280502 - RNA, 12 nt, Human
gcuugagccggg

SEQ ID NO: 2280503 - RNA, 12 nt, Human
gcuugagcccag

SEQ ID NO: 2280504 - RNA, 20 nt, Human
gcuugagaaauauggacacu

SEQ ID NO: 2280505 - RNA, 15 nt, Human
gcuugacuuuuguau

SEQ ID NO: 2280506 - RNA, 22 nt, Human
gcuugacuuuuguauagguaga

SEQ ID NO: 2280507 - RNA, 12 nt, Human
gcuucuugccuc

SEQ ID NO: 2280508 - RNA, 13 nt, Human
gcuucuugccucu

SEQ ID NO: 2280509 - RNA, 14 nt, Human
gcuucuugccucug

SEQ ID NO: 2280510 - RNA, 15 nt, Human
gcuucuugccucugu

SEQ ID NO: 2280511 - RNA, 16 nt, Human
gcuucuugccucugug

SEQ ID NO: 2280512 - RNA, 17 nt, Human
gcuucuugccucugugc

SEQ ID NO: 2280513 - RNA, 18 nt, Human
gcuucuugccucugugcu

SEQ ID NO: 2280514 - RNA, 14 nt, Human
gcuugagcucagga

SEQ ID NO: 2280515 - RNA, 20 nt, Human
gcuuguaaauagcucaggug

SEQ ID NO: 2280516 - RNA, 17 nt, Human
gcuugagccgggccccu

SEQ ID NO: 2280517 - RNA, 18 nt, Human
gcuugagccgggccccug

SEQ ID NO: 2280518 - RNA, 21 nt, Human
gcuugagccgggccccugggc

SEQ ID NO: 2280519 - RNA, 22 nt, Human
gcuugagccgggccccugggcu

SEQ ID NO: 2280520 - RNA, 22 nt, Human
gcuuguaacuccaccaacccau

SEQ ID NO: 2280521 - RNA, 23 nt, Human
gcuuccuagaaguuacugaaugc

SEQ ID NO: 2280522 - RNA, 22 nt, Human
gcuuccucauaguaugguggcu

SEQ ID NO: 2280523 - RNA, 18 nt, Human
gcuuccugacaaucaacu

SEQ ID NO: 2280524 - RNA, 17 nt, Human
gcuucguuuauuuucaa

SEQ ID NO: 2280525 - RNA, 16 nt, Human
gcuucguuuauuuuca

SEQ ID NO: 2280526 - RNA, 15 nt, Human
gcuucuaauauuuau

SEQ ID NO: 2280527 - RNA, 18 nt, Human
gcuucuaauauuuauugc

SEQ ID NO: 2280528 - RNA, 20 nt, Human
gcuucuaauauuuauugcuu

SEQ ID NO: 2280529 - RNA, 21 nt, Human
gcuucuaauauuuauugcuuu

SEQ ID NO: 2280530 - RNA, 14 nt, Human
gcuucguuuauuuu

SEQ ID NO: 2280531 - RNA, 22 nt, Human
gcuuccucuagaagccaaggga

SEQ ID NO: 2280532 - RNA, 23 nt, Human
gcuuccucuagaagccaagggaa

SEQ ID NO: 2280533 - RNA, 13 nt, Human
gcuuccuccugcg

SEQ ID NO: 2280534 - RNA, 15 nt, Human
gcuuccucuagaagc

SEQ ID NO: 2280535 - RNA, 17 nt, Human
gcuuccucuagaagcca

SEQ ID NO: 2280536 - RNA, 20 nt, Human
gcuuccucuagaagccaagg

SEQ ID NO: 2280537 - RNA, 14 nt, Human
gcuuccuccucccu

SEQ ID NO: 2280538 - RNA, 12 nt, Human
gcuuccuccugg

SEQ ID NO: 2280539 - RNA, 13 nt, Human
gcuuccuccugga

SEQ ID NO: 2280540 - RNA, 16 nt, Human
gcuuccuccuggaaau

SEQ ID NO: 2280541 - RNA, 17 nt, Human
gcuucuaccaugaacag

SEQ ID NO: 2280542 - RNA, 22 nt, Human
gcuucuaauauuuauugcuuua

SEQ ID NO: 2280543 - RNA, 19 nt, Human
gcuucuaccaugaacagaa

SEQ ID NO: 2280544 - RNA, 16 nt, Human
gcuucuucagaucagu

SEQ ID NO: 2280545 - RNA, 15 nt, Human
gcuucuuccaggugc

SEQ ID NO: 2280546 - RNA, 19 nt, Human
gcuucuuccaggugcccag

SEQ ID NO: 2280547 - RNA, 16 nt, Human
gcuucuuccaggugcc

SEQ ID NO: 2280548 - RNA, 19 nt, Human
gcuucuucagaucagugcu

SEQ ID NO: 2280549 - RNA, 14 nt, Human
gcuucuucucaggc

SEQ ID NO: 2280550 - RNA, 21 nt, Human
gcuucuuccuauuugccaugg

SEQ ID NO: 2280551 - RNA, 20 nt, Human
gcuucuucuccuauguguaa

SEQ ID NO: 2280552 - RNA, 18 nt, Human
gcuucuucuccuaugugu

SEQ ID NO: 2280553 - RNA, 19 nt, Human
gcuucuucuccuaugugua

SEQ ID NO: 2280554 - RNA, 23 nt, Human
gcugggugcgaccccaucugccc

SEQ ID NO: 2280555 - RNA, 21 nt, Human
gcugggugcgaccccaucugc

SEQ ID NO: 2280556 - RNA, 22 nt, Human
gcugggugcgaccccaucugcc

SEQ ID NO: 2280557 - RNA, 23 nt, Human
gcuggguggcaccagcagccugg

SEQ ID NO: 2280558 - RNA, 22 nt, Human
gcuggguggcaccagcagccug

SEQ ID NO: 2280559 - RNA, 21 nt, Human
gcuggguggcaccagcagccu

SEQ ID NO: 2280560 - RNA, 16 nt, Human
gcuggcugggcaugga

SEQ ID NO: 2280561 - RNA, 15 nt, Human
gcuggcugggcaugg

SEQ ID NO: 2280562 - RNA, 14 nt, Human
gcuggcuggggccu

SEQ ID NO: 2280563 - RNA, 15 nt, Human
gcuggcuguuggcug

SEQ ID NO: 2280564 - RNA, 16 nt, Human
gcuggcuguuggcugg

SEQ ID NO: 2280565 - RNA, 17 nt, Human
gcuggcuguuggcuggg

SEQ ID NO: 2280566 - RNA, 16 nt, Human
gcuggcggcuacucag

SEQ ID NO: 2280567 - RNA, 16 nt, Human
gcuggcgccucugcaa

SEQ ID NO: 2280568 - RNA, 12 nt, Human
gcuggcgccucu

SEQ ID NO: 2280569 - RNA, 13 nt, Human
gcuggcgccucug

SEQ ID NO: 2280570 - RNA, 14 nt, Human
gcuggcgccucugc

SEQ ID NO: 2280571 - RNA, 15 nt, Human
gcuggcgccucugca

SEQ ID NO: 2280572 - RNA, 22 nt, Human
gcuggcuccagaugcagggcag

SEQ ID NO: 2280573 - RNA, 21 nt, Human
gcuggcuccagaugcagggca

SEQ ID NO: 2280574 - RNA, 17 nt, Human
gcuggcuccagaugcag

SEQ ID NO: 2280575 - RNA, 14 nt, Human
gcuggcuccagaug

SEQ ID NO: 2280576 - RNA, 20 nt, Human
gcuggcggcuacucagcagc

SEQ ID NO: 2280577 - RNA, 23 nt, Human
gcuggcuccagaugcagggcagu

SEQ ID NO: 2280578 - RNA, 12 nt, Human
gcuggcucugag

SEQ ID NO: 2280579 - RNA, 23 nt, Human
gcugggccccugccucucugcag

SEQ ID NO: 2280580 - RNA, 21 nt, Human
gcugggccccugccucucugc

SEQ ID NO: 2280581 - RNA, 22 nt, Human
gcugggccccugccucucugca

SEQ ID NO: 2280582 - RNA, 12 nt, Human
gcugggucgccc

SEQ ID NO: 2280583 - RNA, 16 nt, Human
gcugggucaggcaggg

SEQ ID NO: 2280584 - RNA, 15 nt, Human
gcugggucaggcagg

SEQ ID NO: 2280585 - RNA, 14 nt, Human
gcugggucaggcag

SEQ ID NO: 2280586 - RNA, 13 nt, Human
gcugggucaggca

SEQ ID NO: 2280587 - RNA, 21 nt, Human
gcuggguaaacuguggaugau

SEQ ID NO: 2280588 - RNA, 11 nt, Human
gcugcuggcuu

SEQ ID NO: 2280589 - RNA, 15 nt, Human
gcugcuggcuugcag

SEQ ID NO: 2280590 - RNA, 16 nt, Human
gcugcuggcgccucug

SEQ ID NO: 2280591 - RNA, 17 nt, Human
gcugcuggcgccucugc

SEQ ID NO: 2280592 - RNA, 18 nt, Human
gcugcuggcgccucugca

SEQ ID NO: 2280593 - RNA, 19 nt, Human
gcugcuggcgccucugcaa

SEQ ID NO: 2280594 - RNA, 14 nt, Human
gcugcugcugcugc

SEQ ID NO: 2280595 - RNA, 21 nt, Human
gcugcuggacaguaucacugu

SEQ ID NO: 2280596 - RNA, 13 nt, Human
gcugcuggagacu

SEQ ID NO: 2280597 - RNA, 14 nt, Human
gcugcuggagacuc

SEQ ID NO: 2280598 - RNA, 18 nt, Human
gcugcugaaggcucgagc

SEQ ID NO: 2280599 - RNA, 15 nt, Human
gcugcugaaggcuca

SEQ ID NO: 2280600 - RNA, 13 nt, Human
gcugcugcugcug

SEQ ID NO: 2280601 - RNA, 22 nt, Human
gcugcuggaggaaaacugagac

SEQ ID NO: 2280602 - RNA, 18 nt, Human
gcugcuggaucacagcug

SEQ ID NO: 2280603 - RNA, 14 nt, Human
gcugcuggaggaaa

SEQ ID NO: 2280604 - RNA, 12 nt, Human
gcugcuggagga

SEQ ID NO: 2280605 - RNA, 12 nt, Human
gcugcuggcgcc

SEQ ID NO: 2280606 - RNA, 20 nt, Human
gcugcuggaucacagcugcu

SEQ ID NO: 2280607 - RNA, 14 nt, Human
gcugcuggcgccuc

SEQ ID NO: 2280608 - RNA, 13 nt, Human
gcugcuggcuggu

SEQ ID NO: 2280609 - RNA, 15 nt, Human
gcucugcccugcccu

SEQ ID NO: 2280610 - RNA, 13 nt, Human
gcucugcccugcc

SEQ ID NO: 2280611 - RNA, 13 nt, Human
gcucugcccuugg

SEQ ID NO: 2280612 - RNA, 23 nt, Human
gcucugggccauucuccacagca

SEQ ID NO: 2280613 - RNA, 20 nt, Human
gcucugggccauucuccaca

SEQ ID NO: 2280614 - RNA, 14 nt, Human
gcucugggccauuc

SEQ ID NO: 2280615 - RNA, 15 nt, Human
gcucugguccauaga

SEQ ID NO: 2280616 - RNA, 16 nt, Human
gcucugguccauagag

SEQ ID NO: 2280617 - RNA, 23 nt, Human
gcucugguccauagagagcaaga

SEQ ID NO: 2280618 - RNA, 13 nt, Human
gcugcugaaggcu

SEQ ID NO: 2280619 - RNA, 14 nt, Human
gcugcugaaggcuc

SEQ ID NO: 2280620 - RNA, 15 nt, Human
gcugcugaaggcucg

SEQ ID NO: 2280621 - RNA, 12 nt, Human
gcuggagugagg

SEQ ID NO: 2280622 - RNA, 14 nt, Human
gcuggccuggccgg

SEQ ID NO: 2280623 - RNA, 17 nt, Human
gcuggccuggccggcaa

SEQ ID NO: 2280624 - RNA, 15 nt, Human
gcuggagugcagugg

SEQ ID NO: 2280625 - RNA, 12 nt, Human
gcuggccuuccu

SEQ ID NO: 2280626 - RNA, 13 nt, Human
gcuggccuuccug

SEQ ID NO: 2280627 - RNA, 15 nt, Human
gcuggccuuccugcc

SEQ ID NO: 2280628 - RNA, 16 nt, Human
gcuggccuuccugccc

SEQ ID NO: 2280629 - RNA, 23 nt, Human
gcuggccuuccugcccuacagag

SEQ ID NO: 2280630 - RNA, 19 nt, Human
gcuggccuuccugcccuac

SEQ ID NO: 2280631 - RNA, 20 nt, Human
gcuggcgugcaguggugcga

SEQ ID NO: 2280632 - RNA, 13 nt, Human
gcuggcgcagcca

SEQ ID NO: 2280633 - RNA, 14 nt, Human
gcuggcgcagccaa

SEQ ID NO: 2280634 - RNA, 16 nt, Human
gcuggcgcagccaagg

SEQ ID NO: 2280635 - RNA, 17 nt, Human
gcuggcgcagccaaggc

SEQ ID NO: 2280636 - RNA, 20 nt, Human
gcuggcgcagccaaggccga

SEQ ID NO: 2280637 - RNA, 18 nt, Human
gcuggagugcagugagcc

SEQ ID NO: 2280638 - RNA, 17 nt, Human
gcuggagugcagugagc

SEQ ID NO: 2280639 - RNA, 22 nt, Human
gcuggagugcagugagccgaga

SEQ ID NO: 2280640 - RNA, 20 nt, Human
gcuggccuggccccucaggg

SEQ ID NO: 2280641 - RNA, 21 nt, Human
gcuggaggcagggccuugccc

SEQ ID NO: 2280642 - RNA, 16 nt, Human
gcuggaggcagggccu

SEQ ID NO: 2280643 - RNA, 12 nt, Human
gcuggaggcagg

SEQ ID NO: 2280644 - RNA, 15 nt, Human
gcuggaggcagggcc

SEQ ID NO: 2280645 - RNA, 14 nt, Human
gcuggaggcagggc

SEQ ID NO: 2280646 - RNA, 13 nt, Human
gcuggaggcaggg

SEQ ID NO: 2280647 - RNA, 16 nt, Human
gcuggagguaaggccu

SEQ ID NO: 2280648 - RNA, 14 nt, Human
gcuggaggugggag

SEQ ID NO: 2280649 - RNA, 15 nt, Human
gcuggaggugggagc

SEQ ID NO: 2280650 - RNA, 16 nt, Human
gcuggaggugggagca

SEQ ID NO: 2280651 - RNA, 17 nt, Human
gcuggaggugggagcag

SEQ ID NO: 2280652 - RNA, 19 nt, Human
gcuggaggugggagcagga

SEQ ID NO: 2280653 - RNA, 21 nt, Human
gcuggaggugggagcaggaga

SEQ ID NO: 2280654 - RNA, 16 nt, Human
gcuggagguggggccu

SEQ ID NO: 2280655 - RNA, 22 nt, Human
gcuggaggugggagcaggagau

SEQ ID NO: 2280656 - RNA, 20 nt, Human
gcccucaccccugcccuggg

SEQ ID NO: 2280657 - RNA, 17 nt, Human
gcccccaccgugggcag

SEQ ID NO: 2280658 - RNA, 22 nt, Human
gcccccaccgugggcagggagc

SEQ ID NO: 2280659 - RNA, 13 nt, Human
gcccccaccucca

SEQ ID NO: 2280660 - RNA, 14 nt, Human
gcccccaccuccac

SEQ ID NO: 2280661 - RNA, 20 nt, Human
gcccccaccgugggcaggga

SEQ ID NO: 2280662 - RNA, 18 nt, Human
gcccccaccgugggcagg

SEQ ID NO: 2280663 - RNA, 12 nt, Human
gcccccacuggu

SEQ ID NO: 2280664 - RNA, 17 nt, Human
gcccccacugaccagaa

SEQ ID NO: 2280665 - RNA, 12 nt, Human
gcccccacugac

SEQ ID NO: 2280666 - RNA, 18 nt, Human
gcccccaccuccacccuc

SEQ ID NO: 2280667 - RNA, 15 nt, Human
gcccccaccuccacc

SEQ ID NO: 2280668 - RNA, 16 nt, Human
gcccccaccuccaccc

SEQ ID NO: 2280669 - RNA, 15 nt, Human
gcccccccuuccacu

SEQ ID NO: 2280670 - RNA, 11 nt, Human
gccccccucaa

SEQ ID NO: 2280671 - RNA, 14 nt, Human
gccccccucaaacc

SEQ ID NO: 2280672 - RNA, 16 nt, Human
gccccccucaaaccuc

SEQ ID NO: 2280673 - RNA, 18 nt, Human
gccccugccaccucccug

SEQ ID NO: 2280674 - RNA, 16 nt, Human
gccccugccagacccc

SEQ ID NO: 2280675 - RNA, 11 nt, Human
gccccugccag

SEQ ID NO: 2280676 - RNA, 17 nt, Human
gccccugccacccuggg

SEQ ID NO: 2280677 - RNA, 16 nt, Human
gccccugccacccugg

SEQ ID NO: 2280678 - RNA, 13 nt, Human
gcccccccuucca

SEQ ID NO: 2280679 - RNA, 14 nt, Human
gcccccccuuccac

SEQ ID NO: 2280680 - RNA, 17 nt, Human
gcccccccccaccccug

SEQ ID NO: 2280681 - RNA, 16 nt, Human
gcccccccccaccccu

SEQ ID NO: 2280682 - RNA, 23 nt, Human
gcccccccaacacugugcccugg

SEQ ID NO: 2280683 - RNA, 16 nt, Human
gccccccauccuggcc

SEQ ID NO: 2280684 - RNA, 17 nt, Human
gccccccauccuggccc

SEQ ID NO: 2280685 - RNA, 18 nt, Human
gccccccauccuggccca

SEQ ID NO: 2280686 - RNA, 19 nt, Human
gccccccauccuggcccau

SEQ ID NO: 2280687 - RNA, 20 nt, Human
gccccccauccuggcccauc

SEQ ID NO: 2280688 - RNA, 17 nt, Human
gcccccccaacacugug

SEQ ID NO: 2280689 - RNA, 19 nt, Human
gcccccccaacacugugcc

SEQ ID NO: 2280690 - RNA, 22 nt, Human
gcccccccaacacugugcccug

SEQ ID NO: 2280691 - RNA, 14 nt, Human
gccccccaccccag

SEQ ID NO: 2280692 - RNA, 13 nt, Human
gccccccacccca

SEQ ID NO: 2280693 - RNA, 15 nt, Human
gccccccauccuggc

SEQ ID NO: 2280694 - RNA, 16 nt, Human
gccccccagccucugg

SEQ ID NO: 2280695 - RNA, 19 nt, Human
gcccccacugccuuugacc

SEQ ID NO: 2280696 - RNA, 18 nt, Human
gcccccaucucaugcccc

SEQ ID NO: 2280697 - RNA, 16 nt, Human
gcccucaaggccuccc

SEQ ID NO: 2280698 - RNA, 15 nt, Human
gcccucaaggccucc

SEQ ID NO: 2280699 - RNA, 19 nt, Human
gcccucaaaaugacagcca

SEQ ID NO: 2280700 - RNA, 15 nt, Human
gcccucaaucccagc

SEQ ID NO: 2280701 - RNA, 17 nt, Human
gcccucaaggccuccca

SEQ ID NO: 2280702 - RNA, 18 nt, Human
gcccucaaggccucccac

SEQ ID NO: 2280703 - RNA, 19 nt, Human
gcccucaaggccucccaca

SEQ ID NO: 2280704 - RNA, 20 nt, Human
gcccucaaggccucccacag

SEQ ID NO: 2280705 - RNA, 13 nt, Human
gcccucaccccug

SEQ ID NO: 2280706 - RNA, 21 nt, Human
gcccucaaggccucccacagu

SEQ ID NO: 2280707 - RNA, 22 nt, Human
gcccucaaggccucccacagug

SEQ ID NO: 2280708 - RNA, 19 nt, Human
gcccucaccccugcccugg

SEQ ID NO: 2280709 - RNA, 23 nt, Human
gcccucaaggccucccacaguga

SEQ ID NO: 2280710 - RNA, 18 nt, Human
gcccucaccccugguucu

SEQ ID NO: 2280711 - RNA, 15 nt, Human
gcccucacccugggg

SEQ ID NO: 2280712 - RNA, 21 nt, Human
gcccucaccccugguucucau

SEQ ID NO: 2280713 - RNA, 22 nt, Human
gcccucaccccugguucucauc

SEQ ID NO: 2280714 - RNA, 18 nt, Human
gcccgucauguuccucaa

SEQ ID NO: 2280715 - RNA, 21 nt, Human
gcccuaaccucugagucacca

SEQ ID NO: 2280716 - RNA, 17 nt, Human
gcccguaaacacgccug

SEQ ID NO: 2280717 - RNA, 13 nt, Human
gcccguccugccu

SEQ ID NO: 2280718 - RNA, 15 nt, Human
gcccuaaggaucucu

SEQ ID NO: 2280719 - RNA, 20 nt, Human
gcccuaaugcgcaggcuggc

SEQ ID NO: 2280720 - RNA, 19 nt, Human
gcccuaaugcgcaggcugg

SEQ ID NO: 2280721 - RNA, 17 nt, Human
gcccuaaugcgcaggcu

SEQ ID NO: 2280722 - RNA, 16 nt, Human
gcccuaaugcgcaggc

SEQ ID NO: 2280723 - RNA, 15 nt, Human
gccccugcugccucc

SEQ ID NO: 2280724 - RNA, 13 nt, Human
gccccugcugccu

SEQ ID NO: 2280725 - RNA, 15 nt, Human
gccccugccccagcc

SEQ ID NO: 2280726 - RNA, 20 nt, Human
gccccugccccagcccaagu

SEQ ID NO: 2280727 - RNA, 21 nt, Human
gccccugccccagcccaaguc

SEQ ID NO: 2280728 - RNA, 20 nt, Human
gccccugccucucugcaggu

SEQ ID NO: 2280729 - RNA, 23 nt, Human
gccccugccucucugcagguccc

SEQ ID NO: 2280730 - RNA, 20 nt, Human
gccccugcugccuccccaac

SEQ ID NO: 2280731 - RNA, 17 nt, Human
gccccugcugccucccc

SEQ ID NO: 2280732 - RNA, 16 nt, Human
gccccugcugccuccc

SEQ ID NO: 2280733 - RNA, 19 nt, Human
gccccugcugccuccccaa

SEQ ID NO: 2280734 - RNA, 12 nt, Human
gcccgggcugcc

SEQ ID NO: 2280735 - RNA, 23 nt, Human
gcccgggcucugccucccaucac

SEQ ID NO: 2280736 - RNA, 22 nt, Human
gcccggggcagcugccagagaa

SEQ ID NO: 2280737 - RNA, 17 nt, Human
gcccggggcagcugcca

SEQ ID NO: 2280738 - RNA, 14 nt, Human
gcccggggcagcug

SEQ ID NO: 2280739 - RNA, 18 nt, Human
gcccggggcagcugccag

SEQ ID NO: 2280740 - RNA, 13 nt, Human
gcccgggcugccu

SEQ ID NO: 2280741 - RNA, 14 nt, Human
gcccgggcugccug

SEQ ID NO: 2280742 - RNA, 15 nt, Human
gcccgggcugccugg

SEQ ID NO: 2280743 - RNA, 16 nt, Human
gcccgggcugccuggg

SEQ ID NO: 2280744 - RNA, 17 nt, Human
gcccgggcugccugggc

SEQ ID NO: 2280745 - RNA, 18 nt, Human
gcccgggcugccugggcu

SEQ ID NO: 2280746 - RNA, 23 nt, Human
gcccgggcugccugggcuguugg

SEQ ID NO: 2280747 - RNA, 21 nt, Human
gcccugcagaggggaaaccag

SEQ ID NO: 2280748 - RNA, 16 nt, Human
gcccugcagagggcac

SEQ ID NO: 2280749 - RNA, 18 nt, Human
gcccugcagagggcacag

SEQ ID NO: 2280750 - RNA, 18 nt, Human
gcccugcccuagcuccac

SEQ ID NO: 2280751 - RNA, 17 nt, Human
gcccugcccuagcucca

SEQ ID NO: 2280752 - RNA, 16 nt, Human
gcccugcccuagcucc

SEQ ID NO: 2280753 - RNA, 15 nt, Human
gcccugcccuagcuc

SEQ ID NO: 2280754 - RNA, 11 nt, Human
gcccugcccug

SEQ ID NO: 2280755 - RNA, 16 nt, Human
gcccugcccugguuuc

SEQ ID NO: 2280756 - RNA, 12 nt, Human
gcccugcccugg

SEQ ID NO: 2280757 - RNA, 11 nt, Human
gcccugccucc

SEQ ID NO: 2280758 - RNA, 17 nt, Human
gcccugcccaccuggcc

SEQ ID NO: 2280759 - RNA, 20 nt, Human
gcccugcccaccuggccucu

SEQ ID NO: 2280760 - RNA, 21 nt, Human
gcccugcccaccuggccucug

SEQ ID NO: 2280761 - RNA, 22 nt, Human
gcccugcccaccuggccucugc

SEQ ID NO: 2280762 - RNA, 13 nt, Human
gcccugucccucc

SEQ ID NO: 2280763 - RNA, 15 nt, Human
gcccugucccuccca

SEQ ID NO: 2280764 - RNA, 16 nt, Human
gcccugucccucccac

SEQ ID NO: 2280765 - RNA, 17 nt, Human
gcccugucccucccacc

SEQ ID NO: 2280766 - RNA, 18 nt, Human
gcccugucccucccaccu

SEQ ID NO: 2280767 - RNA, 18 nt, Human
gcccugcccugguuuccu

SEQ ID NO: 2280768 - RNA, 12 nt, Human
gcccugccuccu

SEQ ID NO: 2280769 - RNA, 13 nt, Human
gcccugccuccuu

SEQ ID NO: 2280770 - RNA, 19 nt, Human
gcccuuagcagggaaacag

SEQ ID NO: 2280771 - RNA, 21 nt, Human
gcccugugcaaccucuuggcc

SEQ ID NO: 2280772 - RNA, 17 nt, Human
gcccugucgagacacuu

SEQ ID NO: 2280773 - RNA, 11 nt, Human
gcccugucugu

SEQ ID NO: 2280774 - RNA, 20 nt, Human
gcccuuagcagggaaacagc

SEQ ID NO: 2280775 - RNA, 22 nt, Human
gcccuguccugccuaaggcuga

SEQ ID NO: 2280776 - RNA, 19 nt, Human
gcccugucccucccaccuc

SEQ ID NO: 2280777 - RNA, 20 nt, Human
gcccugucccucccaccucu

SEQ ID NO: 2280778 - RNA, 21 nt, Human
gcccugucccucccaccucug

SEQ ID NO: 2280779 - RNA, 22 nt, Human
gcccugucccucccaccucugu

SEQ ID NO: 2280780 - RNA, 23 nt, Human
gcccugucccucccaccucugug

SEQ ID NO: 2280781 - RNA, 16 nt, Human
gcccugucgagacacu

SEQ ID NO: 2280782 - RNA, 21 nt, Human
gcccugucgagacacuugccu

SEQ ID NO: 2280783 - RNA, 18 nt, Human
gccgcagccucccucuga

SEQ ID NO: 2280784 - RNA, 17 nt, Human
gccgcagccucccucug

SEQ ID NO: 2280785 - RNA, 19 nt, Human
gccgcagcccugcagaggg

SEQ ID NO: 2280786 - RNA, 20 nt, Human
gccgcagcccugcagagggc

SEQ ID NO: 2280787 - RNA, 22 nt, Human
gcccuuagcagggaaacagcua

SEQ ID NO: 2280788 - RNA, 16 nt, Human
gcccuuaucugugcuc

SEQ ID NO: 2280789 - RNA, 15 nt, Human
gcccuuaucugugcu

SEQ ID NO: 2280790 - RNA, 19 nt, Human
gccgccccagccucugagc

SEQ ID NO: 2280791 - RNA, 14 nt, Human
gccgccccacccag

SEQ ID NO: 2280792 - RNA, 17 nt, Human
gccgcccccugcccccc

SEQ ID NO: 2280793 - RNA, 15 nt, Human
gccgccccacccaga

SEQ ID NO: 2280794 - RNA, 13 nt, Human
gccgccgccucgc

SEQ ID NO: 2280795 - RNA, 18 nt, Human
gccgcccugcgggugaac

SEQ ID NO: 2280796 - RNA, 23 nt, Human
gccgcccccugccccccagccuc

SEQ ID NO: 2280797 - RNA, 15 nt, Human
gccgcauucccugag

SEQ ID NO: 2280798 - RNA, 14 nt, Human
gccgcauucccuga

SEQ ID NO: 2280799 - RNA, 20 nt, Human
gccgcaucuucuccaucugg

SEQ ID NO: 2280800 - RNA, 18 nt, Human
gccgcaucuucuccaucu

SEQ ID NO: 2280801 - RNA, 17 nt, Human
gccgcaucuucuccauc

SEQ ID NO: 2280802 - RNA, 15 nt, Human
gccgcaucuucucca

SEQ ID NO: 2280803 - RNA, 19 nt, Human
gccgcagcucuugcccuuc

SEQ ID NO: 2280804 - RNA, 20 nt, Human
gccgcagcucuugcccuucc

SEQ ID NO: 2280805 - RNA, 18 nt, Human
gcccuuaucugugcucag

SEQ ID NO: 2280806 - RNA, 13 nt, Human
gccgcagcucuug

SEQ ID NO: 2280807 - RNA, 14 nt, Human
gccgcagcucuugc

SEQ ID NO: 2280808 - RNA, 15 nt, Human
gccgcagcucuugcc

SEQ ID NO: 2280809 - RNA, 21 nt, Human
gccuaguucauccaauccuca

SEQ ID NO: 2280810 - RNA, 17 nt, Human
gccuaguucauccaauc

SEQ ID NO: 2280811 - RNA, 23 nt, Human
gccuaguggggucucccucuccu

SEQ ID NO: 2280812 - RNA, 22 nt, Human
gccuaguggggucucccucucc

SEQ ID NO: 2280813 - RNA, 19 nt, Human
gccuaguggggucucccuc

SEQ ID NO: 2280814 - RNA, 18 nt, Human
gccuaguggggucucccu

SEQ ID NO: 2280815 - RNA, 19 nt, Human
gccuagucccuuccacacc

SEQ ID NO: 2280816 - RNA, 22 nt, Human
gccuaggggucagggaccaagg

SEQ ID NO: 2280817 - RNA, 19 nt, Human
gccuagugaaggcuucucu

SEQ ID NO: 2280818 - RNA, 23 nt, Human
gccuagugaaggcuucucucugu

SEQ ID NO: 2280819 - RNA, 22 nt, Human
gccuagugaaggcuucucucug

SEQ ID NO: 2280820 - RNA, 14 nt, Human
gccuagucccuucc

SEQ ID NO: 2280821 - RNA, 17 nt, Human
gccuaggggucagggac

SEQ ID NO: 2280822 - RNA, 17 nt, Human
gccuagggccuggucca

SEQ ID NO: 2280823 - RNA, 20 nt, Human
gccuaggugacagagugaga

SEQ ID NO: 2280824 - RNA, 16 nt, Human
gccuaggccucagcca

SEQ ID NO: 2280825 - RNA, 13 nt, Human
gccuaggccucag

SEQ ID NO: 2280826 - RNA, 17 nt, Human
gccuaggaauucccagc

SEQ ID NO: 2280827 - RNA, 20 nt, Human
gccuaggagauaucugaggg

SEQ ID NO: 2280828 - RNA, 11 nt, Human
gccuaggagau

SEQ ID NO: 2280829 - RNA, 18 nt, Human
gccuaggagauaucugag

SEQ ID NO: 2280830 - RNA, 15 nt, Human
gccuagcugcuacaa

SEQ ID NO: 2280831 - RNA, 16 nt, Human
gccuagcugcuacaaa

SEQ ID NO: 2280832 - RNA, 17 nt, Human
gccuagcugcuacaaag

SEQ ID NO: 2280833 - RNA, 19 nt, Human
gccuagcugcuacaaagaa

SEQ ID NO: 2280834 - RNA, 22 nt, Human
gccuagcugcuacaaagaagac

SEQ ID NO: 2280835 - RNA, 23 nt, Human
gccuagcugcuacaaagaagaca

SEQ ID NO: 2280836 - RNA, 24 nt, Human
gccuagcugcuacaaagaagacau

SEQ ID NO: 2280837 - RNA, 13 nt, Human
gccuaggugacag

SEQ ID NO: 2280838 - RNA, 18 nt, Human
gccuaggccucagccaga

SEQ ID NO: 2280839 - RNA, 17 nt, Human
gccuaggccucagccag

SEQ ID NO: 2280840 - RNA, 20 nt, Human
gccuaggccucagccagaga

SEQ ID NO: 2280841 - RNA, 14 nt, Human
gccuaggugacaga

SEQ ID NO: 2280842 - RNA, 15 nt, Human
gccuaggugacagag

SEQ ID NO: 2280843 - RNA, 20 nt, Human
gccuagccgaccucagccuu

SEQ ID NO: 2280844 - RNA, 19 nt, Human
gccuagccgaccucagccu

SEQ ID NO: 2280845 - RNA, 14 nt, Human
gccgccucaccccc

SEQ ID NO: 2280846 - RNA, 14 nt, Human
gccuagcugcuaca

SEQ ID NO: 2280847 - RNA, 18 nt, Human
gccuagccgaccucagcc

SEQ ID NO: 2280848 - RNA, 17 nt, Human
gccuagccgaccucagc

SEQ ID NO: 2280849 - RNA, 16 nt, Human
gccuagccgaccucag

SEQ ID NO: 2280850 - RNA, 15 nt, Human
gccuagccgaccuca

SEQ ID NO: 2280851 - RNA, 13 nt, Human
gccgccucaaugu

SEQ ID NO: 2280852 - RNA, 16 nt, Human
gccgccucacccccuc

SEQ ID NO: 2280853 - RNA, 23 nt, Human
gccuagcauacguacacauuuua

SEQ ID NO: 2280854 - RNA, 24 nt, Human
gccgccgccucgcccaccgcaugc

SEQ ID NO: 2280855 - RNA, 13 nt, Human
gccgccgccucuu

SEQ ID NO: 2280856 - RNA, 14 nt, Human
gccgccgccucgcc

SEQ ID NO: 2280857 - RNA, 15 nt, Human
gccgccgccucgccc

SEQ ID NO: 2280858 - RNA, 16 nt, Human
gccgccgccucgccca

SEQ ID NO: 2280859 - RNA, 20 nt, Human
gccuagcauacguacacauu

SEQ ID NO: 2280860 - RNA, 22 nt, Human
gccuagcauacguacacauuuu

SEQ ID NO: 2280861 - RNA, 21 nt, Human
gccuagcauacguacacauuu

SEQ ID NO: 2280862 - RNA, 18 nt, Human
gccugccccucccagaac

SEQ ID NO: 2280863 - RNA, 16 nt, Human
gccugccccucccaga

SEQ ID NO: 2280864 - RNA, 15 nt, Human
gccugccccucccag

SEQ ID NO: 2280865 - RNA, 14 nt, Human
gccugccccuccca

SEQ ID NO: 2280866 - RNA, 21 nt, Human
gccugccccgcccccaguccc

SEQ ID NO: 2280867 - RNA, 20 nt, Human
gccugccccgcccccagucc

SEQ ID NO: 2280868 - RNA, 17 nt, Human
gccugccccaaacaaau

SEQ ID NO: 2280869 - RNA, 23 nt, Human
gccugccccaaacaaauaugcaa

SEQ ID NO: 2280870 - RNA, 18 nt, Human
gccucuuuucucugugcu

SEQ ID NO: 2280871 - RNA, 16 nt, Human
gccugccccccucauc

SEQ ID NO: 2280872 - RNA, 22 nt, Human
gccugcccaggccccugccacc

SEQ ID NO: 2280873 - RNA, 23 nt, Human
gccucuuugucuaaaacaauaaa

SEQ ID NO: 2280874 - RNA, 19 nt, Human
gccucuuugucuaaaacaa

SEQ ID NO: 2280875 - RNA, 16 nt, Human
gccugaaagaggcuga

SEQ ID NO: 2280876 - RNA, 15 nt, Human
gccugcccaggcccc

SEQ ID NO: 2280877 - RNA, 16 nt, Human
gccuccaggugugcac

SEQ ID NO: 2280878 - RNA, 16 nt, Human
gccuccauccaaggcc

SEQ ID NO: 2280879 - RNA, 11 nt, Human
gccuccaugcu

SEQ ID NO: 2280880 - RNA, 16 nt, Human
gccucccaaagugcug

SEQ ID NO: 2280881 - RNA, 16 nt, Human
gccuccauucugacca

SEQ ID NO: 2280882 - RNA, 17 nt, Human
gccucccaaagugcugg

SEQ ID NO: 2280883 - RNA, 17 nt, Human
gccuccauuuaguucuu

SEQ ID NO: 2280884 - RNA, 17 nt, Human
gccuccauucugaccau

SEQ ID NO: 2280885 - RNA, 16 nt, Human
gccuccuuccaccucc

SEQ ID NO: 2280886 - RNA, 17 nt, Human
gccuccuuccaccuccc

SEQ ID NO: 2280887 - RNA, 18 nt, Human
gccuccuuccaccucccu

SEQ ID NO: 2280888 - RNA, 17 nt, Human
gccucgaacuggcugca

SEQ ID NO: 2280889 - RNA, 19 nt, Human
gccuccugugugugcgccu

SEQ ID NO: 2280890 - RNA, 23 nt, Human
gccuccugugugugcgccuacag

SEQ ID NO: 2280891 - RNA, 15 nt, Human
gccuccauccaaggc

SEQ ID NO: 2280892 - RNA, 12 nt, Human
gccuccauccug

SEQ ID NO: 2280893 - RNA, 21 nt, Human
gccuccagggcuggacugagg

SEQ ID NO: 2280894 - RNA, 22 nt, Human
gccuccagggcuggacugaggc

SEQ ID NO: 2280895 - RNA, 23 nt, Human
gccuccagggcuggacugaggcc

SEQ ID NO: 2280896 - RNA, 24 nt, Human
gccuccagggcuggacugaggccu

SEQ ID NO: 2280897 - RNA, 12 nt, Human
gccuccaggugu

SEQ ID NO: 2280898 - RNA, 13 nt, Human
gccuccaggugug

SEQ ID NO: 2280899 - RNA, 14 nt, Human
gccuccaggugugc

SEQ ID NO: 2280900 - RNA, 14 nt, Human
gccucuuggguuca

SEQ ID NO: 2280901 - RNA, 21 nt, Human
gccucuuaugggcuggguucu

SEQ ID NO: 2280902 - RNA, 21 nt, Human
gccucuuccagucuuccugac

SEQ ID NO: 2280903 - RNA, 19 nt, Human
gccucuuagacuucugcuu

SEQ ID NO: 2280904 - RNA, 17 nt, Human
gccucuucaaauuagaa

SEQ ID NO: 2280905 - RNA, 14 nt, Human
gccucuucccccug

SEQ ID NO: 2280906 - RNA, 16 nt, Human
gccucuucccccugcu

SEQ ID NO: 2280907 - RNA, 18 nt, Human
gccucuucccccugcuuc

SEQ ID NO: 2280908 - RNA, 22 nt, Human
gccucuucccccugcuuccacc

SEQ ID NO: 2280909 - RNA, 13 nt, Human
gccugcccaggcc

SEQ ID NO: 2280910 - RNA, 14 nt, Human
gccugcccaggccc

SEQ ID NO: 2280911 - RNA, 16 nt, Human
gccucuuucauccacu

SEQ ID NO: 2280912 - RNA, 23 nt, Human
gccucuuucauccacuagugcaa

SEQ ID NO: 2280913 - RNA, 23 nt, Human
gccucuuucaagcagucgugccu

SEQ ID NO: 2280914 - RNA, 17 nt, Human
gccucuuucugucccuu

SEQ ID NO: 2280915 - RNA, 12 nt, Human
gccucuuuucuc

SEQ ID NO: 2280916 - RNA, 23 nt, Human
gccucuuaaagcugccuguaguu

SEQ ID NO: 2280917 - RNA, 22 nt, Human
gccucuuaaagcugccuguagu

SEQ ID NO: 2280918 - RNA, 18 nt, Human
gccucuuagacuucugcu

SEQ ID NO: 2280919 - RNA, 20 nt, Human
gccucuuaaagcugccugua

SEQ ID NO: 2280920 - RNA, 17 nt, Human
gccucgacacagagugg

SEQ ID NO: 2280921 - RNA, 19 nt, Human
gccuccuuccaccucccuc

SEQ ID NO: 2280922 - RNA, 20 nt, Human
gccuccuuccaccucccucc

SEQ ID NO: 2280923 - RNA, 20 nt, Human
gccucgaacuggcugcaaag

SEQ ID NO: 2280924 - RNA, 22 nt, Human
gccucgaacuggcugcaaaggg

SEQ ID NO: 2280925 - RNA, 17 nt, Human
gccucuuaugggcuggg

SEQ ID NO: 2280926 - RNA, 18 nt, Human
gccucuuaugggcugggu

SEQ ID NO: 2280927 - RNA, 16 nt, Human
gccucuuaugggcugg

SEQ ID NO: 2280928 - RNA, 15 nt, Human
gccucuuagaugcag

SEQ ID NO: 2280929 - RNA, 22 nt, Human
gcgcacugugacccccagcucc

SEQ ID NO: 2280930 - RNA, 20 nt, Human
gcgcagcauauucaggaagc

SEQ ID NO: 2280931 - RNA, 19 nt, Human
gcgcaccugcccccuggug

SEQ ID NO: 2280932 - RNA, 18 nt, Human
gcgcaccugcccccuggu

SEQ ID NO: 2280933 - RNA, 17 nt, Human
gcgcaccugcccccugg

SEQ ID NO: 2280934 - RNA, 12 nt, Human
gcgcaccugccc

SEQ ID NO: 2280935 - RNA, 18 nt, Human
gcgcacaaggcugaccaa

SEQ ID NO: 2280936 - RNA, 17 nt, Human
gcgcacaaggcugacca

SEQ ID NO: 2280937 - RNA, 20 nt, Human
gcgcacaauaguaaccuggg

SEQ ID NO: 2280938 - RNA, 13 nt, Human
gcgcacccucccc

SEQ ID NO: 2280939 - RNA, 15 nt, Human
gcgcacccuccccuc

SEQ ID NO: 2280940 - RNA, 16 nt, Human
gcgcacccuccccucc

SEQ ID NO: 2280941 - RNA, 17 nt, Human
gcgcacccuccccuccc

SEQ ID NO: 2280942 - RNA, 18 nt, Human
gcgcacccuccccucccg

SEQ ID NO: 2280943 - RNA, 21 nt, Human
gcgcacccuccccucccgucu

SEQ ID NO: 2280944 - RNA, 19 nt, Human
gcgaugaauuuggagacuc

SEQ ID NO: 2280945 - RNA, 22 nt, Human
gcgaucuggguucacugcaacc

SEQ ID NO: 2280946 - RNA, 15 nt, Human
gcgauggucucagaa

SEQ ID NO: 2280947 - RNA, 21 nt, Human
gcgcacuuuccuccuggcaga

SEQ ID NO: 2280948 - RNA, 19 nt, Human
gccuguuggacccgcucug

SEQ ID NO: 2280949 - RNA, 17 nt, Human
gccuguuccccucacug

SEQ ID NO: 2280950 - RNA, 22 nt, Human
gccuguuccccucacuggauga

SEQ ID NO: 2280951 - RNA, 20 nt, Human
gccuugaccauucuccaccu

SEQ ID NO: 2280952 - RNA, 17 nt, Human
gccuugaccauucucca

SEQ ID NO: 2280953 - RNA, 19 nt, Human
gccuugaccauucuccacc

SEQ ID NO: 2280954 - RNA, 21 nt, Human
gccuguugggccaggagccuc

SEQ ID NO: 2280955 - RNA, 20 nt, Human
gccuucggccuccauccuga

SEQ ID NO: 2280956 - RNA, 23 nt, Human
gccuucggccuccauccugaggc

SEQ ID NO: 2280957 - RNA, 21 nt, Human
gccuucggccuccauccugag

SEQ ID NO: 2280958 - RNA, 22 nt, Human
gccuugcccggauucugggagg

SEQ ID NO: 2280959 - RNA, 20 nt, Human
gccuugcccagagaugccuc

SEQ ID NO: 2280960 - RNA, 22 nt, Human
gccuugcgguauccgcccccaa

SEQ ID NO: 2280961 - RNA, 19 nt, Human
gccuugcgguauccgcccc

SEQ ID NO: 2280962 - RNA, 18 nt, Human
gccuugcgguauccgccc

SEQ ID NO: 2280963 - RNA, 22 nt, Human
gccuugcccagagaugccucca

SEQ ID NO: 2280964 - RNA, 16 nt, Human
gccuugcccagagaug

SEQ ID NO: 2280965 - RNA, 15 nt, Human
gccuugcccagagau

SEQ ID NO: 2280966 - RNA, 14 nt, Human
gccuugcccagaga

SEQ ID NO: 2280967 - RNA, 12 nt, Human
gccuugcccaga

SEQ ID NO: 2280968 - RNA, 17 nt, Human
gccuugccagagaucca

SEQ ID NO: 2280969 - RNA, 13 nt, Human
gccuugccagaga

SEQ ID NO: 2280970 - RNA, 21 nt, Human
gccuguuggacccgcucugga

SEQ ID NO: 2280971 - RNA, 14 nt, Human
gccuugccagagau

SEQ ID NO: 2280972 - RNA, 21 nt, Human
gcgagcuaugaucgcgccacu

SEQ ID NO: 2280973 - RNA, 19 nt, Human
gcgaggagaugcuccuugg

SEQ ID NO: 2280974 - RNA, 15 nt, Human
gcgaggaggcuccag

SEQ ID NO: 2280975 - RNA, 20 nt, Human
gcgaggagaugcuccuuggg

SEQ ID NO: 2280976 - RNA, 21 nt, Human
gcgauccaccugucucagccu

SEQ ID NO: 2280977 - RNA, 18 nt, Human
gcgaggaggcuccagagg

SEQ ID NO: 2280978 - RNA, 17 nt, Human
gcgauccaccugucuca

SEQ ID NO: 2280979 - RNA, 17 nt, Human
gcgaggaggcuccagag

SEQ ID NO: 2280980 - RNA, 16 nt, Human
gcgaggaggcuccaga

SEQ ID NO: 2280981 - RNA, 17 nt, Human
gcgagcccugguggcag

SEQ ID NO: 2280982 - RNA, 15 nt, Human
gcgagcccugguggc

SEQ ID NO: 2280983 - RNA, 13 nt, Human
gccuggccugagc

SEQ ID NO: 2280984 - RNA, 14 nt, Human
gccuggccugagcu

SEQ ID NO: 2280985 - RNA, 18 nt, Human
gccuggccugagcuggga

SEQ ID NO: 2280986 - RNA, 21 nt, Human
gccuggcgaaaccccaucucu

SEQ ID NO: 2280987 - RNA, 13 nt, Human
gccuggccuggca

SEQ ID NO: 2280988 - RNA, 16 nt, Human
gccuggccuggcacac

SEQ ID NO: 2280989 - RNA, 19 nt, Human
gccuggcgacagagcgaga

SEQ ID NO: 2280990 - RNA, 15 nt, Human
gccuggcgggauggg

SEQ ID NO: 2280991 - RNA, 20 nt, Human
gccuggcgggaugggccacc

SEQ ID NO: 2280992 - RNA, 23 nt, Human
gccuggcgggaugggccaccgcc

SEQ ID NO: 2280993 - RNA, 21 nt, Human
gccuggcgggaugggccaccg

SEQ ID NO: 2280994 - RNA, 22 nt, Human
gccuggcgggaugggccaccgc

SEQ ID NO: 2280995 - RNA, 14 nt, Human
gccuggccugaggu

SEQ ID NO: 2280996 - RNA, 20 nt, Human
gccuggccugagcugggaug

SEQ ID NO: 2280997 - RNA, 23 nt, Human
gccuguucccauucuugcauggc

SEQ ID NO: 2280998 - RNA, 19 nt, Human
gccuguguccaugcgcuca

SEQ ID NO: 2280999 - RNA, 14 nt, Human
gccuguucccccgc

SEQ ID NO: 2281000 - RNA, 20 nt, Human
gccuguucccccgccgcuuu

SEQ ID NO: 2281001 - RNA, 14 nt, Human
gccuguugggccag

SEQ ID NO: 2281002 - RNA, 19 nt, Human
gccuguucccauucuugca

SEQ ID NO: 2281003 - RNA, 12 nt, Human
gccuguguccau

SEQ ID NO: 2281004 - RNA, 14 nt, Human
gccuguguccaugc

SEQ ID NO: 2281005 - RNA, 18 nt, Human
gccuguguaacagcuccu

SEQ ID NO: 2281006 - RNA, 19 nt, Human
gccuguguaacagcuccuu

SEQ ID NO: 2281007 - RNA, 22 nt, Human
gccuguguaacagcuccuuggg

SEQ ID NO: 2281008 - RNA, 23 nt, Human
gccuguguaacagcuccuuggga

SEQ ID NO: 2281009 - RNA, 15 nt, Human
gccuguugggccagg

SEQ ID NO: 2281010 - RNA, 16 nt, Human
gccuguugggccagga

SEQ ID NO: 2281011 - RNA, 18 nt, Human
gccuguugggccaggagc

SEQ ID NO: 2281012 - RNA, 20 nt, Human
gccuguugggccaggagccu

SEQ ID NO: 2281013 - RNA, 19 nt, Human
gccuguggcggugccuggg

SEQ ID NO: 2281014 - RNA, 18 nt, Human
gccuguggcggugccugg

SEQ ID NO: 2281015 - RNA, 16 nt, Human
gccuguggcggugccu

SEQ ID NO: 2281016 - RNA, 21 nt, Human
gccuguggcgccgucuccagg

SEQ ID NO: 2281017 - RNA, 23 nt, Human
gccuguggcgccgucuccagggg

SEQ ID NO: 2281018 - RNA, 14 nt, Human
gccuguguaacagc

SEQ ID NO: 2281019 - RNA, 16 nt, Human
gccuguguaacagcuc

SEQ ID NO: 2281020 - RNA, 17 nt, Human
gccuguguaacagcucc

SEQ ID NO: 2281021 - RNA, 18 nt, Human
gccugugccucugggacu

SEQ ID NO: 2281022 - RNA, 19 nt, Human
gccugugccuccucacccc

SEQ ID NO: 2281023 - RNA, 19 nt, Human
gccuguggcgccgucucca

SEQ ID NO: 2281024 - RNA, 18 nt, Human
gccuguggccuguguccc

SEQ ID NO: 2281025 - RNA, 17 nt, Human
gccugugccucugggac

SEQ ID NO: 2281026 - RNA, 16 nt, Human
gccugugccucuggga

SEQ ID NO: 2281027 - RNA, 13 nt, Human
gccuggcucaggu

SEQ ID NO: 2281028 - RNA, 14 nt, Human
gccuggcucagagc

SEQ ID NO: 2281029 - RNA, 16 nt, Human
gccuggcucagagcca

SEQ ID NO: 2281030 - RNA, 17 nt, Human
gccuggcucagagccag

SEQ ID NO: 2281031 - RNA, 18 nt, Human
gccuggcucagagccagu

SEQ ID NO: 2281032 - RNA, 20 nt, Human
gcgggaggauguucugggac

SEQ ID NO: 2281033 - RNA, 14 nt, Human
gcgggaugggccac

SEQ ID NO: 2281034 - RNA, 20 nt, Human
gcgugcacacaccagagccc

SEQ ID NO: 2281035 - RNA, 21 nt, Human
gcgggaggauguucugggaca

SEQ ID NO: 2281036 - RNA, 22 nt, Human
gcgggaggauguucugggacac

SEQ ID NO: 2281037 - RNA, 15 nt, Human
gcgggaugggccacc

SEQ ID NO: 2281038 - RNA, 16 nt, Human
gcgggaugggccaccg

SEQ ID NO: 2281039 - RNA, 19 nt, Human
gcgugcacacaccagagcc

SEQ ID NO: 2281040 - RNA, 23 nt, Human
gcgugcacacaccagagcccacc

SEQ ID NO: 2281041 - RNA, 14 nt, Human
gcgugcccucgcug

SEQ ID NO: 2281042 - RNA, 15 nt, Human
gcgugguuccuuucu

SEQ ID NO: 2281043 - RNA, 18 nt, Human
gcgugugcgugcaugugc

SEQ ID NO: 2281044 - RNA, 19 nt, Human
gcgugucgugggugugugu

SEQ ID NO: 2281045 - RNA, 17 nt, Human
gcgugucaccugugcuu

SEQ ID NO: 2281046 - RNA, 23 nt, Human
gcguguguccaugugugugcaag

SEQ ID NO: 2281047 - RNA, 18 nt, Human
gcguguguccaugugugu

SEQ ID NO: 2281048 - RNA, 16 nt, Human
gcguguguggguggau

SEQ ID NO: 2281049 - RNA, 23 nt, Human
gcguguguggguggauauaaaua

SEQ ID NO: 2281050 - RNA, 17 nt, Human
gcguguguccaugugug

SEQ ID NO: 2281051 - RNA, 22 nt, Human
gcguguguagaguuaagaagcu

SEQ ID NO: 2281052 - RNA, 20 nt, Human
gcguguguagaguuaagaag

SEQ ID NO: 2281053 - RNA, 21 nt, Human
gcguguguagaguuaagaagc

SEQ ID NO: 2281054 - RNA, 21 nt, Human
gcguguggcucacguguguga

SEQ ID NO: 2281055 - RNA, 18 nt, Human
gcguguguacacgggacu

SEQ ID NO: 2281056 - RNA, 12 nt, Human
gcguguguagag

SEQ ID NO: 2281057 - RNA, 15 nt, Human
gcguguguagaguua

SEQ ID NO: 2281058 - RNA, 19 nt, Human
gcguguggcucacgugugu

SEQ ID NO: 2281059 - RNA, 14 nt, Human
gcguguggcucacg

SEQ ID NO: 2281060 - RNA, 13 nt, Human
gcguguggcucac

SEQ ID NO: 2281061 - RNA, 11 nt, Human
gcguguggcuc

SEQ ID NO: 2281062 - RNA, 11 nt, Human
gcuaaaaaugg

SEQ ID NO: 2281063 - RNA, 22 nt, Human
gcguuugaccuuuuauguagua

SEQ ID NO: 2281064 - RNA, 18 nt, Human
gcguuucuaugacacaug

SEQ ID NO: 2281065 - RNA, 19 nt, Human
gcuacucagaagccugagg

SEQ ID NO: 2281066 - RNA, 18 nt, Human
gcuacucagaagccugag

SEQ ID NO: 2281067 - RNA, 17 nt, Human
gcuacucagaagccuga

SEQ ID NO: 2281068 - RNA, 16 nt, Human
gcuacucagaagccug

SEQ ID NO: 2281069 - RNA, 15 nt, Human
gcuacucagaagccu

SEQ ID NO: 2281070 - RNA, 20 nt, Human
gcuaauucccagagugugaa

SEQ ID NO: 2281071 - RNA, 22 nt, Human
gcuaauucuuugaccuguuggg

SEQ ID NO: 2281072 - RNA, 23 nt, Human
gcuacucaggaggcugaggcaga

SEQ ID NO: 2281073 - RNA, 16 nt, Human
gcuacucaggaggcug

SEQ ID NO: 2281074 - RNA, 15 nt, Human
gcuacucaggaggcu

SEQ ID NO: 2281075 - RNA, 14 nt, Human
gcuacucaggaggc

SEQ ID NO: 2281076 - RNA, 24 nt, Human
gcuacucagcagcccuccucaccc

SEQ ID NO: 2281077 - RNA, 22 nt, Human
gcuacucagcagcccuccucac

SEQ ID NO: 2281078 - RNA, 21 nt, Human
gcuacucagcagcccuccuca

SEQ ID NO: 2281079 - RNA, 19 nt, Human
gcuacucagcagcccuccu

SEQ ID NO: 2281080 - RNA, 18 nt, Human
gcuacucagcagcccucc

SEQ ID NO: 2281081 - RNA, 17 nt, Human
gcuacucagcagcccuc

SEQ ID NO: 2281082 - RNA, 16 nt, Human
gcuacucagcagcccu

SEQ ID NO: 2281083 - RNA, 12 nt, Human
gcuacucagcag

SEQ ID NO: 2281084 - RNA, 21 nt, Human
gcuacucagaagccugaggcu

SEQ ID NO: 2281085 - RNA, 11 nt, Human
gcuacucagca

SEQ ID NO: 2281086 - RNA, 21 nt, Human
gcuaaugaagggaaaggauau

SEQ ID NO: 2281087 - RNA, 15 nt, Human
gcuaaugggacacua

SEQ ID NO: 2281088 - RNA, 13 nt, Human
gcuaaugggacac

SEQ ID NO: 2281089 - RNA, 22 nt, Human
gcuaaucuguagggcuggaccu

SEQ ID NO: 2281090 - RNA, 20 nt, Human
gcuaaucuguagggcuggac

SEQ ID NO: 2281091 - RNA, 21 nt, Human
gcuaaucuguagggcuggacc

SEQ ID NO: 2281092 - RNA, 19 nt, Human
gcuaaucagugucucacac

SEQ ID NO: 2281093 - RNA, 17 nt, Human
gcuaaucuguagggcug

SEQ ID NO: 2281094 - RNA, 18 nt, Human
gcuaaucuguagggcugg

SEQ ID NO: 2281095 - RNA, 19 nt, Human
gcuaaucuguagggcugga

SEQ ID NO: 2281096 - RNA, 23 nt, Human
gcuaagugauccucccaccucag

SEQ ID NO: 2281097 - RNA, 13 nt, Human
gcuaagugugaac

SEQ ID NO: 2281098 - RNA, 16 nt, Human
gcuaaaaccugagcua

SEQ ID NO: 2281099 - RNA, 14 nt, Human
gcuaaaaccugagc

SEQ ID NO: 2281100 - RNA, 14 nt, Human
gcuaaaaaugggac

SEQ ID NO: 2281101 - RNA, 20 nt, Human
gcuaaaaaugggacuucuuu

SEQ ID NO: 2281102 - RNA, 20 nt, Human
gcuaauaucaauagaaggau

SEQ ID NO: 2281103 - RNA, 14 nt, Human
gcuaaucagcauuc

SEQ ID NO: 2281104 - RNA, 16 nt, Human
gcuaaucagcauucuc

SEQ ID NO: 2281105 - RNA, 17 nt, Human
gcuaaucagcauucuca

SEQ ID NO: 2281106 - RNA, 22 nt, Human
gcuaaucagcauucucacuccu

SEQ ID NO: 2281107 - RNA, 15 nt, Human
gcuaaucagugucuc

SEQ ID NO: 2281108 - RNA, 16 nt, Human
gcuaaucagugucuca

SEQ ID NO: 2281109 - RNA, 17 nt, Human
gcuaaucagugucucac

SEQ ID NO: 2281110 - RNA, 18 nt, Human
gcuaaucagugucucaca

SEQ ID NO: 2281111 - RNA, 19 nt, Human
gcuacugcagcuuuacaug

SEQ ID NO: 2281112 - RNA, 18 nt, Human
gcuacugcagcuuuacau

SEQ ID NO: 2281113 - RNA, 18 nt, Human
gcuagaacucccuuucaa

SEQ ID NO: 2281114 - RNA, 16 nt, Human
gcuagaacucccuuuc

SEQ ID NO: 2281115 - RNA, 20 nt, Human
gcuacucuaguauuccagac

SEQ ID NO: 2281116 - RNA, 19 nt, Human
gcuacucuaguauuccaga

SEQ ID NO: 2281117 - RNA, 21 nt, Human
gcuacucuaguauuccagacc

SEQ ID NO: 2281118 - RNA, 17 nt, Human
gcuacucuguuccuuca

SEQ ID NO: 2281119 - RNA, 17 nt, Human
gcuacugauuuccuuug

SEQ ID NO: 2281120 - RNA, 20 nt, Human
gcuacugauuuccuuuggag

SEQ ID NO: 2281121 - RNA, 16 nt, Human
gcuacugauuuuugug

SEQ ID NO: 2281122 - RNA, 17 nt, Human
gcuacugauuuuuguga

SEQ ID NO: 2281123 - RNA, 18 nt, Human
gcuacucuguuccuucac

SEQ ID NO: 2281124 - RNA, 15 nt, Human
gcuagaacucccuuu

SEQ ID NO: 2281125 - RNA, 14 nt, Human
gcuagaacucccuu

SEQ ID NO: 2281126 - RNA, 13 nt, Human
gcuagaacucccu

SEQ ID NO: 2281127 - RNA, 12 nt, Human
gcuagaacuccc

SEQ ID NO: 2281128 - RNA, 22 nt, Human
gcuauugauauaaauaaaacau

SEQ ID NO: 2281129 - RNA, 13 nt, Human
gcuauuguaaaua

SEQ ID NO: 2281130 - RNA, 16 nt, Human
gcuauugacaagucau

SEQ ID NO: 2281131 - RNA, 20 nt, Human
gcuauucaguaauaacucua

SEQ ID NO: 2281132 - RNA, 17 nt, Human
gcuaugggagccccagg

SEQ ID NO: 2281133 - RNA, 22 nt, Human
gcuauuuuuauuuguuugugca

SEQ ID NO: 2281134 - RNA, 15 nt, Human
gcuauuuuuauggaa

SEQ ID NO: 2281135 - RNA, 15 nt, Human
gcucaaaaaaugagc

SEQ ID NO: 2281136 - RNA, 20 nt, Human
gcucaaaauuugaagaauga

SEQ ID NO: 2281137 - RNA, 12 nt, Human
gcuauuuuuccc

SEQ ID NO: 2281138 - RNA, 16 nt, Human
gcuauuuuucccccug

SEQ ID NO: 2281139 - RNA, 23 nt, Human
gcucaaaauuugaagaaugaaca

SEQ ID NO: 2281140 - RNA, 17 nt, Human
gcucacuaugaaucuau

SEQ ID NO: 2281141 - RNA, 18 nt, Human
gcucacuauggugccaau

SEQ ID NO: 2281142 - RNA, 16 nt, Human
gcucacuauggugcca

SEQ ID NO: 2281143 - RNA, 17 nt, Human
gcucacugcagccucaa

SEQ ID NO: 2281144 - RNA, 16 nt, Human
gcucacugcauccucc

SEQ ID NO: 2281145 - RNA, 16 nt, Human
gcucacucggcacccu

SEQ ID NO: 2281146 - RNA, 15 nt, Human
gcucacugcagccuc

SEQ ID NO: 2281147 - RNA, 16 nt, Human
gcucacugcagccuca

SEQ ID NO: 2281148 - RNA, 11 nt, Human
gcucacugcag

SEQ ID NO: 2281149 - RNA, 12 nt, Human
gcucacugcagc

SEQ ID NO: 2281150 - RNA, 13 nt, Human
gcucacugcagcc

SEQ ID NO: 2281151 - RNA, 14 nt, Human
gcucacugcagccu

SEQ ID NO: 2281152 - RNA, 17 nt, Human
gcucagggaaaagcagc

SEQ ID NO: 2281153 - RNA, 15 nt, Human
gcucagggaaaagca

SEQ ID NO: 2281154 - RNA, 24 nt, Human
gcucaggcgauccaccugucucag

SEQ ID NO: 2281155 - RNA, 17 nt, Human
gcucagggaaaggccag

SEQ ID NO: 2281156 - RNA, 16 nt, Human
gcucagggaccacagc

SEQ ID NO: 2281157 - RNA, 17 nt, Human
gcucagggaccacagca

SEQ ID NO: 2281158 - RNA, 19 nt, Human
gcucagggccaugcugagg

SEQ ID NO: 2281159 - RNA, 18 nt, Human
gcucagggaccacagcaa

SEQ ID NO: 2281160 - RNA, 20 nt, Human
gcucagggaccacagcaagg

SEQ ID NO: 2281161 - RNA, 22 nt, Human
gcucaggcgauccaccugucuc

SEQ ID NO: 2281162 - RNA, 19 nt, Human
gcucaggcgauccaccugu

SEQ ID NO: 2281163 - RNA, 20 nt, Human
gcucaggccuauaaccccag

SEQ ID NO: 2281164 - RNA, 18 nt, Human
gcucaggaucucuuagca

SEQ ID NO: 2281165 - RNA, 14 nt, Human
gcucaggaucucuu

SEQ ID NO: 2281166 - RNA, 16 nt, Human
gcucaggacucagaag

SEQ ID NO: 2281167 - RNA, 15 nt, Human
gcucaggaccaggca

SEQ ID NO: 2281168 - RNA, 16 nt, Human
gcucaggaccaggcaa

SEQ ID NO: 2281169 - RNA, 14 nt, Human
gcucaggugucccu

SEQ ID NO: 2281170 - RNA, 23 nt, Human
gcucagguggggucacucuggca

SEQ ID NO: 2281171 - RNA, 16 nt, Human
gcucaggugucccugc

SEQ ID NO: 2281172 - RNA, 17 nt, Human
gcucaggugucccugca

SEQ ID NO: 2281173 - RNA, 20 nt, Human
gcucagggccaugcugaggc

SEQ ID NO: 2281174 - RNA, 16 nt, Human
gcucagaccagcucuu

SEQ ID NO: 2281175 - RNA, 21 nt, Human
gcucagacauguuuuccguga

SEQ ID NO: 2281176 - RNA, 23 nt, Human
gcucagacccccacucucauucc

SEQ ID NO: 2281177 - RNA, 13 nt, Human
gcucagagagggc

SEQ ID NO: 2281178 - RNA, 19 nt, Human
gcucagacccccacucuca

SEQ ID NO: 2281179 - RNA, 15 nt, Human
gcucagacccccacu

SEQ ID NO: 2281180 - RNA, 13 nt, Human
gcucagagagggu

SEQ ID NO: 2281181 - RNA, 21 nt, Human
gcucacugccaggccagccuc

SEQ ID NO: 2281182 - RNA, 20 nt, Human
gcucacugccaggccagccu

SEQ ID NO: 2281183 - RNA, 16 nt, Human
gcucagacauguuuuc

SEQ ID NO: 2281184 - RNA, 14 nt, Human
gcucacugccaggc

SEQ ID NO: 2281185 - RNA, 15 nt, Human
gcucacugccaggcc

SEQ ID NO: 2281186 - RNA, 17 nt, Human
gcucacugccaggccag

SEQ ID NO: 2281187 - RNA, 19 nt, Human
gcucacugccaggccagcc

SEQ ID NO: 2281188 - RNA, 12 nt, Human
gcucacugccag

SEQ ID NO: 2281189 - RNA, 13 nt, Human
gcucacugccagg

SEQ ID NO: 2281190 - RNA, 20 nt, Human
gcucacugcauccuccgccu

SEQ ID NO: 2281191 - RNA, 14 nt, Human
gcucagagagggug

SEQ ID NO: 2281192 - RNA, 20 nt, Human
gcucaggacagaugccacac

SEQ ID NO: 2281193 - RNA, 19 nt, Human
gcucagagagggcaggcau

SEQ ID NO: 2281194 - RNA, 14 nt, Human
gcucaggaccaggc

SEQ ID NO: 2281195 - RNA, 17 nt, Human
gcucaggacagaugcca

SEQ ID NO: 2281196 - RNA, 16 nt, Human
gcucagagagggcagg

SEQ ID NO: 2281197 - RNA, 18 nt, Human
gcucagagagggcaggca

SEQ ID NO: 2281198 - RNA, 16 nt, Human
gcuaggccuggccaga

SEQ ID NO: 2281199 - RNA, 16 nt, Human
gcuaggcgagugccag

SEQ ID NO: 2281200 - RNA, 18 nt, Human
gcuaggcgagugccagga

SEQ ID NO: 2281201 - RNA, 18 nt, Human
gcuagucagagagagugu

SEQ ID NO: 2281202 - RNA, 14 nt, Human
gcuagucagagaga

SEQ ID NO: 2281203 - RNA, 16 nt, Human
gcuagucuuaagaacu

SEQ ID NO: 2281204 - RNA, 19 nt, Human
gcuaggcgagugccaggac

SEQ ID NO: 2281205 - RNA, 20 nt, Human
gcuaggcgagugccaggacu

SEQ ID NO: 2281206 - RNA, 17 nt, Human
gcuaggccuggccagau

SEQ ID NO: 2281207 - RNA, 23 nt, Human
gcuaggccuggccagaugcacca

SEQ ID NO: 2281208 - RNA, 19 nt, Human
gcuauucaguaauaacucu

SEQ ID NO: 2281209 - RNA, 14 nt, Human
gcuaugggagcccc

SEQ ID NO: 2281210 - RNA, 13 nt, Human
gcuaugggagccc

SEQ ID NO: 2281211 - RNA, 18 nt, Human
gcuauggauggcuucuaa

SEQ ID NO: 2281212 - RNA, 17 nt, Human
gcuaugaucgcgccacu

SEQ ID NO: 2281213 - RNA, 14 nt, Human
gcuagugacuugug

SEQ ID NO: 2281214 - RNA, 13 nt, Human
gcuaugcauuuga

SEQ ID NO: 2281215 - RNA, 12 nt, Human
gcuaugcauuug

SEQ ID NO: 2281216 - RNA, 14 nt, Human
gcuaugagggccuu

SEQ ID NO: 2281217 - RNA, 21 nt, Human
gcuagugacuugugucccaug

SEQ ID NO: 2281218 - RNA, 21 nt, Human
gcuagugugguguuuccuggc

SEQ ID NO: 2281219 - RNA, 22 nt, Human
gcuagugugguguuuccuggca

SEQ ID NO: 2281220 - RNA, 21 nt, Human
gcuccccucuauuuagcauga

SEQ ID NO: 2281221 - RNA, 19 nt, Human
gcuccccucuauuuagcau

SEQ ID NO: 2281222 - RNA, 12 nt, Human
gcucccgcccgu

SEQ ID NO: 2281223 - RNA, 18 nt, Human
gcucccccuccaccugcu

SEQ ID NO: 2281224 - RNA, 17 nt, Human
gcucccccuccaccugc

SEQ ID NO: 2281225 - RNA, 21 nt, Human
gcuccccucggagaagagcug

SEQ ID NO: 2281226 - RNA, 21 nt, Human
gcuccugaggggcaucugccc

SEQ ID NO: 2281227 - RNA, 18 nt, Human
gcuccugaggggcaucug

SEQ ID NO: 2281228 - RNA, 15 nt, Human
gcucccuaccaccuc

SEQ ID NO: 2281229 - RNA, 23 nt, Human
gcuccugaggggcaucugccccu

SEQ ID NO: 2281230 - RNA, 22 nt, Human
gcuccugaggggcaucugcccc

SEQ ID NO: 2281231 - RNA, 12 nt, Human
gcuccugcacuu

SEQ ID NO: 2281232 - RNA, 20 nt, Human
gcuccugcacuuacuugcuu

SEQ ID NO: 2281233 - RNA, 18 nt, Human
gcuccugccaccacgccc

SEQ ID NO: 2281234 - RNA, 12 nt, Human
gcuccugccacc

SEQ ID NO: 2281235 - RNA, 19 nt, Human
gcuccuggcccacugcauc

SEQ ID NO: 2281236 - RNA, 18 nt, Human
gcuccuggcccacugcau

SEQ ID NO: 2281237 - RNA, 18 nt, Human
gcuccuggagccuuugaa

SEQ ID NO: 2281238 - RNA, 19 nt, Human
gcuccuggagccuuugaau

SEQ ID NO: 2281239 - RNA, 20 nt, Human
gcuccuggcccacugcaucg

SEQ ID NO: 2281240 - RNA, 15 nt, Human
gcuccuggcccacug

SEQ ID NO: 2281241 - RNA, 14 nt, Human
gcuccuggcccacu

SEQ ID NO: 2281242 - RNA, 22 nt, Human
gcuccuggaaaggcucagucuc

SEQ ID NO: 2281243 - RNA, 21 nt, Human
gcuccuggaaaggcucagucu

SEQ ID NO: 2281244 - RNA, 23 nt, Human
gcuccuggaaaggcucagucuca

SEQ ID NO: 2281245 - RNA, 22 nt, Human
gcuccugcugcaccaacccagc

SEQ ID NO: 2281246 - RNA, 18 nt, Human
gcuccuggaaaggcucag

SEQ ID NO: 2281247 - RNA, 21 nt, Human
gcuccugccaccacgcccggc

SEQ ID NO: 2281248 - RNA, 18 nt, Human
gcuccugcugcaccaacc

SEQ ID NO: 2281249 - RNA, 20 nt, Human
gcuccagcucaccagcccca

SEQ ID NO: 2281250 - RNA, 21 nt, Human
gcuccagcucaccagccccag

SEQ ID NO: 2281251 - RNA, 16 nt, Human
gcucccacaggcccuu

SEQ ID NO: 2281252 - RNA, 17 nt, Human
gcucccacaggcccuuc

SEQ ID NO: 2281253 - RNA, 20 nt, Human
gcucccacaggcccuuccuc

SEQ ID NO: 2281254 - RNA, 21 nt, Human
gcucccacaggcccuuccucu

SEQ ID NO: 2281255 - RNA, 18 nt, Human
gcuccagcucaccagccc

SEQ ID NO: 2281256 - RNA, 23 nt, Human
gcuccacucugcuucucugacuu

SEQ ID NO: 2281257 - RNA, 12 nt, Human
gcuccacuguca

SEQ ID NO: 2281258 - RNA, 18 nt, Human
gcuccacugucacccucc

SEQ ID NO: 2281259 - RNA, 19 nt, Human
gcuccacuuggucugugag

SEQ ID NO: 2281260 - RNA, 18 nt, Human
gcuccacuuggucuguga

SEQ ID NO: 2281261 - RNA, 21 nt, Human
gcucccaccccacccccuuca

SEQ ID NO: 2281262 - RNA, 18 nt, Human
gcucccaccccacccccu

SEQ ID NO: 2281263 - RNA, 22 nt, Human
gcucccacaggcccuuccucuc

SEQ ID NO: 2281264 - RNA, 12 nt, Human
gcucccagcagc

SEQ ID NO: 2281265 - RNA, 12 nt, Human
gcucccaggaac

SEQ ID NO: 2281266 - RNA, 23 nt, Human
gcucccagcagcccuaaggaucu

SEQ ID NO: 2281267 - RNA, 19 nt, Human
gcucccagcagcccuaagg

SEQ ID NO: 2281268 - RNA, 15 nt, Human
gcucccccacccccu

SEQ ID NO: 2281269 - RNA, 14 nt, Human
gcucccccaccccc

SEQ ID NO: 2281270 - RNA, 14 nt, Human
gcuccccauguguc

SEQ ID NO: 2281271 - RNA, 22 nt, Human
gcuccccagcccuggcucugca

SEQ ID NO: 2281272 - RNA, 12 nt, Human
gcuccccaugug

SEQ ID NO: 2281273 - RNA, 21 nt, Human
gcuccccagcccuggcucugc

SEQ ID NO: 2281274 - RNA, 17 nt, Human
gcucccaggcauucccc

SEQ ID NO: 2281275 - RNA, 22 nt, Human
gcucccccacccccuccccagg

SEQ ID NO: 2281276 - RNA, 20 nt, Human
gcucccccacccccucccca

SEQ ID NO: 2281277 - RNA, 16 nt, Human
gcucccccauccuccc

SEQ ID NO: 2281278 - RNA, 14 nt, Human
gcucccccauccuc

SEQ ID NO: 2281279 - RNA, 18 nt, Human
gcucccccauccuccccu

SEQ ID NO: 2281280 - RNA, 17 nt, Human
gcucccccauccucccc

SEQ ID NO: 2281281 - RNA, 20 nt, Human
gcucccccauccuccccuuc

SEQ ID NO: 2281282 - RNA, 15 nt, Human
gcucccccgggaggg

SEQ ID NO: 2281283 - RNA, 17 nt, Human
gcucccccgggaggggc

SEQ ID NO: 2281284 - RNA, 21 nt, Human
gcucccccgggaggggcccgc

SEQ ID NO: 2281285 - RNA, 23 nt, Human
gcuccacacccucucccaggacc

SEQ ID NO: 2281286 - RNA, 22 nt, Human
gcuccacacccucucccaggac

SEQ ID NO: 2281287 - RNA, 21 nt, Human
gcuccacacccucucccagga

SEQ ID NO: 2281288 - RNA, 19 nt, Human
gcuccacccuuggccuguc

SEQ ID NO: 2281289 - RNA, 17 nt, Human
gcuccacccuuggccug

SEQ ID NO: 2281290 - RNA, 16 nt, Human
gcuccacccuuggccu

SEQ ID NO: 2281291 - RNA, 15 nt, Human
gcuccacccuuggcc

SEQ ID NO: 2281292 - RNA, 14 nt, Human
gcuccacccuuggc

SEQ ID NO: 2281293 - RNA, 13 nt, Human
gcuccacccuugg

SEQ ID NO: 2281294 - RNA, 11 nt, Human
gcuccacccuu

SEQ ID NO: 2281295 - RNA, 19 nt, Human
gcuccacccuggccgaguc

SEQ ID NO: 2281296 - RNA, 15 nt, Human
gcuccaccacauccu

SEQ ID NO: 2281297 - RNA, 12 nt, Human
gcuccaccacau

SEQ ID NO: 2281298 - RNA, 19 nt, Human
gcuccaccaagaaagcagg

SEQ ID NO: 2281299 - RNA, 16 nt, Human
gcuccacagccauccc

SEQ ID NO: 2281300 - RNA, 12 nt, Human
gcuccacagugu

SEQ ID NO: 2281301 - RNA, 16 nt, Human
gcuccacccuggccga

SEQ ID NO: 2281302 - RNA, 21 nt, Human
gcuccacucugacuggcacag

SEQ ID NO: 2281303 - RNA, 19 nt, Human
gcuccacgucugcgccgcc

SEQ ID NO: 2281304 - RNA, 13 nt, Human
gcuccacucugcu

SEQ ID NO: 2281305 - RNA, 15 nt, Human
gcuccacucugcuuc

SEQ ID NO: 2281306 - RNA, 16 nt, Human
gcuccacucugcuucu

SEQ ID NO: 2281307 - RNA, 23 nt, Human
gcuccacccuuggccugucucau

SEQ ID NO: 2281308 - RNA, 22 nt, Human
gcuccacccuuggccugucuca

SEQ ID NO: 2281309 - RNA, 15 nt, Human
gcuccacuuggucug

SEQ ID NO: 2281310 - RNA, 17 nt, Human
gcuccacucugcuucuc

SEQ ID NO: 2281311 - RNA, 19 nt, Human
gcuccacucugcuucucug

SEQ ID NO: 2281312 - RNA, 20 nt, Human
gcuccacucugcuucucuga

SEQ ID NO: 2281313 - RNA, 21 nt, Human
gcuccacucugcuucucugac

SEQ ID NO: 2281314 - RNA, 14 nt, Human
gcucugagcgccuc

SEQ ID NO: 2281315 - RNA, 17 nt, Human
gcucugagcgccuccau

SEQ ID NO: 2281316 - RNA, 18 nt, Human
gcucugagcgccuccauc

SEQ ID NO: 2281317 - RNA, 16 nt, Human
gcucugagccaguuca

SEQ ID NO: 2281318 - RNA, 16 nt, Human
gcucugaggcuuccag

SEQ ID NO: 2281319 - RNA, 18 nt, Human
gcucugaggcuuccagag

SEQ ID NO: 2281320 - RNA, 21 nt, Human
gcucugaggcuuccagagagu

SEQ ID NO: 2281321 - RNA, 19 nt, Human
gcucugaggcuuccagaga

SEQ ID NO: 2281322 - RNA, 20 nt, Human
gcucugaggcuuccagagag

SEQ ID NO: 2281323 - RNA, 16 nt, Human
gcucugauaggccaag

SEQ ID NO: 2281324 - RNA, 19 nt, Human
gcucugccccagcucuggc

SEQ ID NO: 2281325 - RNA, 18 nt, Human
gcucugccccagcucugg

SEQ ID NO: 2281326 - RNA, 20 nt, Human
gcucugccccagcucuggcu

SEQ ID NO: 2281327 - RNA, 21 nt, Human
gcucugccccagaggccucuc

SEQ ID NO: 2281328 - RNA, 11 nt, Human
gcucugcccuu

SEQ ID NO: 2281329 - RNA, 15 nt, Human
gcucugccccagcuc

SEQ ID NO: 2281330 - RNA, 13 nt, Human
gcucugccccagc

SEQ ID NO: 2281331 - RNA, 12 nt, Human
gcucugccccag

SEQ ID NO: 2281332 - RNA, 15 nt, Human
gcucugccccagagg

SEQ ID NO: 2281333 - RNA, 16 nt, Human
gcucugccccagaggc

SEQ ID NO: 2281334 - RNA, 20 nt, Human
gcucugccccagaggccucu

SEQ ID NO: 2281335 - RNA, 23 nt, Human
gcucugcaaugggcacugggaug

SEQ ID NO: 2281336 - RNA, 17 nt, Human
gcucugcaauuccccuc

SEQ ID NO: 2281337 - RNA, 21 nt, Human
gcucugauauuccaugaaugu

SEQ ID NO: 2281338 - RNA, 23 nt, Human
gcucugaucccucuacagagcuu

SEQ ID NO: 2281339 - RNA, 22 nt, Human
gcucugaucccucuacagagcu

SEQ ID NO: 2281340 - RNA, 13 nt, Human
gcucugaucccuc

SEQ ID NO: 2281341 - RNA, 23 nt, Human
gcucugcaagaauugaagcagga

SEQ ID NO: 2281342 - RNA, 23 nt, Human
gcucugaucauccacugugccau

SEQ ID NO: 2281343 - RNA, 17 nt, Human
gcucugaucauccacug

SEQ ID NO: 2281344 - RNA, 18 nt, Human
gcucgguggacccaggga

SEQ ID NO: 2281345 - RNA, 17 nt, Human
gcucgguggacccaggg

SEQ ID NO: 2281346 - RNA, 14 nt, Human
gcucgguggaccca

SEQ ID NO: 2281347 - RNA, 12 nt, Human
gcucgguggacc

SEQ ID NO: 2281348 - RNA, 21 nt, Human
gcucgucggggggacagcucc

SEQ ID NO: 2281349 - RNA, 15 nt, Human
gcucguguauccugg

SEQ ID NO: 2281350 - RNA, 16 nt, Human
gcucguguauccuggg

SEQ ID NO: 2281351 - RNA, 17 nt, Human
gcucguguauccugggg

SEQ ID NO: 2281352 - RNA, 18 nt, Human
gcucguguauccuggggc

SEQ ID NO: 2281353 - RNA, 19 nt, Human
gcucguguauccuggggcu

SEQ ID NO: 2281354 - RNA, 23 nt, Human
gcucguguauccuggggcucccu

SEQ ID NO: 2281355 - RNA, 22 nt, Human
ggcucauauuccugcagccugg

SEQ ID NO: 2281356 - RNA, 21 nt, Human
ggcucauauuccugcagccug

SEQ ID NO: 2281357 - RNA, 17 nt, Human
ggcuccaaacccucgag

SEQ ID NO: 2281358 - RNA, 14 nt, Human
ggcuccacuugguc

SEQ ID NO: 2281359 - RNA, 15 nt, Human
ggcucacugccaggc

SEQ ID NO: 2281360 - RNA, 13 nt, Human
ggcucagccuggu

SEQ ID NO: 2281361 - RNA, 18 nt, Human
ggcucagagaugugcacc

SEQ ID NO: 2281362 - RNA, 13 nt, Human
ggcucagaucuca

SEQ ID NO: 2281363 - RNA, 18 nt, Human
ggcucagcggggacagcu

SEQ ID NO: 2281364 - RNA, 14 nt, Human
ggcucagagugggg

SEQ ID NO: 2281365 - RNA, 16 nt, Human
ggcucacugccaggcc

SEQ ID NO: 2281366 - RNA, 18 nt, Human
ggcucacugccaggccag

SEQ ID NO: 2281367 - RNA, 19 nt, Human
ggcucacugccaggccagc

SEQ ID NO: 2281368 - RNA, 20 nt, Human
ggcucacugccaggccagcc

SEQ ID NO: 2281369 - RNA, 22 nt, Human
ggcucacugccaggccagccuc

SEQ ID NO: 2281370 - RNA, 21 nt, Human
ggcucacugccaggccagccu

SEQ ID NO: 2281371 - RNA, 13 nt, Human
ggcucagagaugu

SEQ ID NO: 2281372 - RNA, 20 nt, Human
ggcucauauuccugcagccu

SEQ ID NO: 2281373 - RNA, 17 nt, Human
ggcucauauuccugcag

SEQ ID NO: 2281374 - RNA, 20 nt, Human
ggcucauagggaagaccugc

SEQ ID NO: 2281375 - RNA, 17 nt, Human
ggcucagucucaggagc

SEQ ID NO: 2281376 - RNA, 15 nt, Human
ggcucagucucagga

SEQ ID NO: 2281377 - RNA, 14 nt, Human
ggcucagucucagg

SEQ ID NO: 2281378 - RNA, 22 nt, Human
ggcucagggagguuaagugacu

SEQ ID NO: 2281379 - RNA, 19 nt, Human
ggcucagguggggucacuc

SEQ ID NO: 2281380 - RNA, 20 nt, Human
ggcucagguggggucacucu

SEQ ID NO: 2281381 - RNA, 19 nt, Human
ggcucagcggggacagcuc

SEQ ID NO: 2281382 - RNA, 20 nt, Human
ggcucagcggggacagcucc

SEQ ID NO: 2281383 - RNA, 12 nt, Human
ggcucaggaaaa

SEQ ID NO: 2281384 - RNA, 22 nt, Human
ggcucaggauuucgugggucug

SEQ ID NO: 2281385 - RNA, 20 nt, Human
ggcucagccuggugggccuc

SEQ ID NO: 2281386 - RNA, 14 nt, Human
ggcucagggaccac

SEQ ID NO: 2281387 - RNA, 16 nt, Human
ggcucagggaccacag

SEQ ID NO: 2281388 - RNA, 17 nt, Human
ggcucagggaccacagc

SEQ ID NO: 2281389 - RNA, 18 nt, Human
ggcucagggaccacagca

SEQ ID NO: 2281390 - RNA, 13 nt, Human
ggcugcuccucca

SEQ ID NO: 2281391 - RNA, 12 nt, Human
ggcugcuccucc

SEQ ID NO: 2281392 - RNA, 23 nt, Human
ggcugcuccuccagggccacgug

SEQ ID NO: 2281393 - RNA, 19 nt, Human
ggcugcuccuccagggcca

SEQ ID NO: 2281394 - RNA, 18 nt, Human
ggcugcuccuccagggcc

SEQ ID NO: 2281395 - RNA, 15 nt, Human
ggcugcuccuccagg

SEQ ID NO: 2281396 - RNA, 13 nt, Human
ggcugcugaagcu

SEQ ID NO: 2281397 - RNA, 16 nt, Human
ggcugcuacccagaaa

SEQ ID NO: 2281398 - RNA, 15 nt, Human
ggcugcuacccagaa

SEQ ID NO: 2281399 - RNA, 15 nt, Human
ggcugcucagggcug

SEQ ID NO: 2281400 - RNA, 21 nt, Human
ggcugcgucuggaggggcccc

SEQ ID NO: 2281401 - RNA, 13 nt, Human
ggcugggagagcc

SEQ ID NO: 2281402 - RNA, 13 nt, Human
ggcugcugaaggc

SEQ ID NO: 2281403 - RNA, 14 nt, Human
ggcugggagagccu

SEQ ID NO: 2281404 - RNA, 15 nt, Human
ggcugggagagccuu

SEQ ID NO: 2281405 - RNA, 16 nt, Human
ggcugggagagccuuc

SEQ ID NO: 2281406 - RNA, 13 nt, Human
ggcuccuggaaag

SEQ ID NO: 2281407 - RNA, 21 nt, Human
ggcuccugcugcaccaaccca

SEQ ID NO: 2281408 - RNA, 22 nt, Human
ggcuccugcugcaccaacccag

SEQ ID NO: 2281409 - RNA, 23 nt, Human
ggcuccugcugcaccaacccagc

SEQ ID NO: 2281410 - RNA, 18 nt, Human
ggcuccugccuucugucc

SEQ ID NO: 2281411 - RNA, 19 nt, Human
ggcuccugccuucuguccu

SEQ ID NO: 2281412 - RNA, 11 nt, Human
ggcuccugcug

SEQ ID NO: 2281413 - RNA, 12 nt, Human
ggcuccugcugc

SEQ ID NO: 2281414 - RNA, 13 nt, Human
ggcuccugcugca

SEQ ID NO: 2281415 - RNA, 14 nt, Human
ggcuccugcugcac

SEQ ID NO: 2281416 - RNA, 15 nt, Human
ggcuccugcugcacc

SEQ ID NO: 2281417 - RNA, 16 nt, Human
ggcuccugcugcacca

SEQ ID NO: 2281418 - RNA, 20 nt, Human
ggcuccuucccaucgcuguc

SEQ ID NO: 2281419 - RNA, 23 nt, Human
ggcuccugugcuacuuugccuuu

SEQ ID NO: 2281420 - RNA, 13 nt, Human
ggcuccugugccc

SEQ ID NO: 2281421 - RNA, 14 nt, Human
ggcuccugugcccu

SEQ ID NO: 2281422 - RNA, 17 nt, Human
ggcuccugugcccuuau

SEQ ID NO: 2281423 - RNA, 12 nt, Human
ggcuccugugcu

SEQ ID NO: 2281424 - RNA, 13 nt, Human
ggcuccugugcua

SEQ ID NO: 2281425 - RNA, 20 nt, Human
ggcuccugugcuacuuugcc

SEQ ID NO: 2281426 - RNA, 11 nt, Human
ggcucucaggc

SEQ ID NO: 2281427 - RNA, 12 nt, Human
ggcucuucuccu

SEQ ID NO: 2281428 - RNA, 13 nt, Human
ggcucuucuccuu

SEQ ID NO: 2281429 - RNA, 17 nt, Human
ggcucuucuccccagag

SEQ ID NO: 2281430 - RNA, 21 nt, Human
ggcucuuagcagcuuccagau

SEQ ID NO: 2281431 - RNA, 12 nt, Human
ggcucuuccagg

SEQ ID NO: 2281432 - RNA, 18 nt, Human
ggcucuuagcagcuucca

SEQ ID NO: 2281433 - RNA, 15 nt, Human
ggcucugugggcugc

SEQ ID NO: 2281434 - RNA, 18 nt, Human
ggcucugugggcugcacu

SEQ ID NO: 2281435 - RNA, 19 nt, Human
ggcucuuagcagcuuccag

SEQ ID NO: 2281436 - RNA, 20 nt, Human
ggcucuuagcagcuuccaga

SEQ ID NO: 2281437 - RNA, 20 nt, Human
ggcucugugcugacccuccu

SEQ ID NO: 2281438 - RNA, 12 nt, Human
ggcucugugggc

SEQ ID NO: 2281439 - RNA, 14 nt, Human
ggcucugugggcug

SEQ ID NO: 2281440 - RNA, 12 nt, Human
ggcucugugcug

SEQ ID NO: 2281441 - RNA, 16 nt, Human
ggcucugugcugaccc

SEQ ID NO: 2281442 - RNA, 18 nt, Human
ggcucugugcugacccuc

SEQ ID NO: 2281443 - RNA, 19 nt, Human
ggcucugugcugacccucc

SEQ ID NO: 2281444 - RNA, 15 nt, Human
ggcucugugcaggga

SEQ ID NO: 2281445 - RNA, 19 nt, Human
ggcucucagcucagcgcca

SEQ ID NO: 2281446 - RNA, 12 nt, Human
ggcucucagcuc

SEQ ID NO: 2281447 - RNA, 14 nt, Human
ggcucucagcucag

SEQ ID NO: 2281448 - RNA, 14 nt, Human
ggcucucaggccag

SEQ ID NO: 2281449 - RNA, 13 nt, Human
ggcucucaggcca

SEQ ID NO: 2281450 - RNA, 15 nt, Human
ggcugccaaggccag

SEQ ID NO: 2281451 - RNA, 19 nt, Human
ggcugaccacagcacagcc

SEQ ID NO: 2281452 - RNA, 13 nt, Human
ggcugcccuggug

SEQ ID NO: 2281453 - RNA, 21 nt, Human
ggcugccaaugggagcucaug

SEQ ID NO: 2281454 - RNA, 14 nt, Human
ggcugcccuggugc

SEQ ID NO: 2281455 - RNA, 15 nt, Human
ggcugcccuggugcu

SEQ ID NO: 2281456 - RNA, 16 nt, Human
ggcugcccuggugcug

SEQ ID NO: 2281457 - RNA, 19 nt, Human
ggcugcccuggugcugcca

SEQ ID NO: 2281458 - RNA, 22 nt, Human
ggcugcggaaugaaccacaucu

SEQ ID NO: 2281459 - RNA, 16 nt, Human
ggcugccuuagaaccu

SEQ ID NO: 2281460 - RNA, 17 nt, Human
ggcugccugggcuguug

SEQ ID NO: 2281461 - RNA, 14 nt, Human
ggcugccugggcug

SEQ ID NO: 2281462 - RNA, 15 nt, Human
ggcugccugggcugu

SEQ ID NO: 2281463 - RNA, 16 nt, Human
ggcugccuggccccca

SEQ ID NO: 2281464 - RNA, 11 nt, Human
ggcugccuggg

SEQ ID NO: 2281465 - RNA, 17 nt, Human
ggcugccaaggccagag

SEQ ID NO: 2281466 - RNA, 20 nt, Human
ggcugccuccacucccacuu

SEQ ID NO: 2281467 - RNA, 22 nt, Human
ggcugcccuggugcugccacac

SEQ ID NO: 2281468 - RNA, 16 nt, Human
ggcucuucuccuuuca

SEQ ID NO: 2281469 - RNA, 16 nt, Human
ggcugaauagcagaag

SEQ ID NO: 2281470 - RNA, 13 nt, Human
ggcugaaggacug

SEQ ID NO: 2281471 - RNA, 14 nt, Human
ggcugaaggacugu

SEQ ID NO: 2281472 - RNA, 24 nt, Human
ggcugacacguccaccccagugca

SEQ ID NO: 2281473 - RNA, 18 nt, Human
ggcugaaggacugugaca

SEQ ID NO: 2281474 - RNA, 14 nt, Human
ggcugacaucugug

SEQ ID NO: 2281475 - RNA, 22 nt, Human
ggcugacagacagcccuccauc

SEQ ID NO: 2281476 - RNA, 14 nt, Human
ggcucuucuccuuu

SEQ ID NO: 2281477 - RNA, 15 nt, Human
ggcucuucuccuuuc

SEQ ID NO: 2281478 - RNA, 19 nt, Human
ggcugccaaugggagcuca

SEQ ID NO: 2281479 - RNA, 20 nt, Human
ggcugccaaugggagcucau

SEQ ID NO: 2281480 - RNA, 18 nt, Human
ggcugaccacagcacagc

SEQ ID NO: 2281481 - RNA, 17 nt, Human
ggcugaccacagcacag

SEQ ID NO: 2281482 - RNA, 16 nt, Human
ggcugaccacagcaca

SEQ ID NO: 2281483 - RNA, 15 nt, Human
ggcugaccacagcac

SEQ ID NO: 2281484 - RNA, 13 nt, Human
ggcugaccacagc

SEQ ID NO: 2281485 - RNA, 18 nt, Human
ggcugacaucuguguuuc

SEQ ID NO: 2281486 - RNA, 21 nt, Human
aaaaauaaauuugguucuaau

SEQ ID NO: 2281487 - RNA, 14 nt, Human
aaaaauaacaauga

SEQ ID NO: 2281488 - RNA, 15 nt, Human
ggcugggggccucag

SEQ ID NO: 2281489 - RNA, 16 nt, Human
ggcugggggccucagu

SEQ ID NO: 2281490 - RNA, 17 nt, Human
ggcugggggccucagug

SEQ ID NO: 2281491 - RNA, 19 nt, Human
ggcugggggccucagugcc

SEQ ID NO: 2281492 - RNA, 14 nt, Human
ggcugggugcgacc

SEQ ID NO: 2281493 - RNA, 19 nt, Human
ggcuggguggcaccagcag

SEQ ID NO: 2281494 - RNA, 19 nt, Human
ggcuggguucuacccaggu

SEQ ID NO: 2281495 - RNA, 21 nt, Human
ggcuggguucuacccaggugc

SEQ ID NO: 2281496 - RNA, 16 nt, Human
aaaaauaauaauaaug

SEQ ID NO: 2281497 - RNA, 14 nt, Human
ggcugggucgcccu

SEQ ID NO: 2281498 - RNA, 17 nt, Human
ggcugggucgcccugga

SEQ ID NO: 2281499 - RNA, 20 nt, Human
ggcugggucgcccuggacug

SEQ ID NO: 2281500 - RNA, 14 nt, Human
ggcuucccgcucag

SEQ ID NO: 2281501 - RNA, 12 nt, Human
ggcuucauacac

SEQ ID NO: 2281502 - RNA, 22 nt, Human
ggcuucauccuccucagaucuu

SEQ ID NO: 2281503 - RNA, 18 nt, Human
ggcuucauccuccucaga

SEQ ID NO: 2281504 - RNA, 11 nt, Human
ggcuucauaca

SEQ ID NO: 2281505 - RNA, 9 nt, Human
ggcuucaua

SEQ ID NO: 2281506 - RNA, 16 nt, Human
ggcuuccucauaguau

SEQ ID NO: 2281507 - RNA, 19 nt, Human
ggcuucccgcucagcccuc

SEQ ID NO: 2281508 - RNA, 21 nt, Human
ggcuucccgcucagcccuccc

SEQ ID NO: 2281509 - RNA, 15 nt, Human
ggcuucccgcucagc

SEQ ID NO: 2281510 - RNA, 16 nt, Human
ggcuucccgcucagcc

SEQ ID NO: 2281511 - RNA, 17 nt, Human
ggcuucccgcucagccc

SEQ ID NO: 2281512 - RNA, 18 nt, Human
ggcuucccgcucagcccu

SEQ ID NO: 2281513 - RNA, 18 nt, Human
ggcuucaguggcagcugc

SEQ ID NO: 2281514 - RNA, 17 nt, Human
ggcuucaguggcagcug

SEQ ID NO: 2281515 - RNA, 19 nt, Human
ggcuucaguggcagcugcu

SEQ ID NO: 2281516 - RNA, 20 nt, Human
ggcuucaguggcagcugcuu

SEQ ID NO: 2281517 - RNA, 18 nt, Human
ggcuguaucccaugagcc

SEQ ID NO: 2281518 - RNA, 16 nt, Human
ggcuguaaaaugcaug

SEQ ID NO: 2281519 - RNA, 13 nt, Human
ggcugguuuugua

SEQ ID NO: 2281520 - RNA, 21 nt, Human
ggcugguuuuguaagaugcug

SEQ ID NO: 2281521 - RNA, 22 nt, Human
ggcugguuuuguaagaugcugg

SEQ ID NO: 2281522 - RNA, 23 nt, Human
ggcugguuuuguaagaugcuggg

SEQ ID NO: 2281523 - RNA, 23 nt, Human
ggcugguucggauuuggggugga

SEQ ID NO: 2281524 - RNA, 10 nt, Human
ggcugggugc

SEQ ID NO: 2281525 - RNA, 18 nt, Human
ggcugguuuggaaugcuu

SEQ ID NO: 2281526 - RNA, 22 nt, Human
ggcugguucggauuuggggugg

SEQ ID NO: 2281527 - RNA, 14 nt, Human
ggcuucucucugug

SEQ ID NO: 2281528 - RNA, 13 nt, Human
ggcuucugcaccc

SEQ ID NO: 2281529 - RNA, 14 nt, Human
ggcuucugcacccu

SEQ ID NO: 2281530 - RNA, 15 nt, Human
ggcuucugcacccuc

SEQ ID NO: 2281531 - RNA, 16 nt, Human
ggcuucugcacccucc

SEQ ID NO: 2281532 - RNA, 18 nt, Human
ggcuucugcacccuccac

SEQ ID NO: 2281533 - RNA, 20 nt, Human
ggcuucugcacccuccaccc

SEQ ID NO: 2281534 - RNA, 21 nt, Human
ggcuucugcacccuccacccu

SEQ ID NO: 2281535 - RNA, 21 nt, Human
ggcuuccucaguuccugcccu

SEQ ID NO: 2281536 - RNA, 12 nt, Human
ggcuuccuccuc

SEQ ID NO: 2281537 - RNA, 15 nt, Human
ggcuguagaaggaga

SEQ ID NO: 2281538 - RNA, 21 nt, Human
ggcuguaggacucgcagucag

SEQ ID NO: 2281539 - RNA, 22 nt, Human
ggcuucccgcucagcccucccu

SEQ ID NO: 2281540 - RNA, 21 nt, Human
ggcuuccuccugguguggaag

SEQ ID NO: 2281541 - RNA, 16 nt, Human
ggcuucuggagcccuu

SEQ ID NO: 2281542 - RNA, 13 nt, Human
ggcuucuggagcc

SEQ ID NO: 2281543 - RNA, 22 nt, Human
ggcuucugcacccuccacccug

SEQ ID NO: 2281544 - RNA, 20 nt, Human
ggcuucuggagcccuugggu

SEQ ID NO: 2281545 - RNA, 18 nt, Human
ggcuucuggagcccuugg

SEQ ID NO: 2281546 - RNA, 20 nt, Human
gggaacaguguuucccauaa

SEQ ID NO: 2281547 - RNA, 18 nt, Human
gggaaccaugaagacagg

SEQ ID NO: 2281548 - RNA, 20 nt, Human
ggcuucuucagaucagugcu

SEQ ID NO: 2281549 - RNA, 12 nt, Human
gggaacaguguu

SEQ ID NO: 2281550 - RNA, 13 nt, Human
gggaacuccugga

SEQ ID NO: 2281551 - RNA, 16 nt, Human
gggaacucagauccag

SEQ ID NO: 2281552 - RNA, 22 nt, Human
gggaacucaccuggggcugcug

SEQ ID NO: 2281553 - RNA, 23 nt, Human
gggaacucaccuggggcugcugg

SEQ ID NO: 2281554 - RNA, 17 nt, Human
gggaacgugacugcccc

SEQ ID NO: 2281555 - RNA, 14 nt, Human
gggaacgugacugc

SEQ ID NO: 2281556 - RNA, 18 nt, Human
gggaacgugacugcccca

SEQ ID NO: 2281557 - RNA, 18 nt, Human
gggaagaagcucucuccu

SEQ ID NO: 2281558 - RNA, 15 nt, Human
gggaacugcagaccu

SEQ ID NO: 2281559 - RNA, 20 nt, Human
gggaacugcagaccuguccu

SEQ ID NO: 2281560 - RNA, 13 nt, Human
gggaaccugaccc

SEQ ID NO: 2281561 - RNA, 12 nt, Human
gggaaccucacu

SEQ ID NO: 2281562 - RNA, 13 nt, Human
gggaaccuggaac

SEQ ID NO: 2281563 - RNA, 13 nt, Human
gggaaccuguguc

SEQ ID NO: 2281564 - RNA, 14 nt, Human
gggaaccugugucc

SEQ ID NO: 2281565 - RNA, 15 nt, Human
gggaaccuguguccg

SEQ ID NO: 2281566 - RNA, 20 nt, Human
gggaacccaaguccaagcau

SEQ ID NO: 2281567 - RNA, 19 nt, Human
gggaaccaugaagacagga

SEQ ID NO: 2281568 - RNA, 12 nt, Human
gggaacccugcu

SEQ ID NO: 2281569 - RNA, 19 nt, Human
gggaaccucacucuugcca

SEQ ID NO: 2281570 - RNA, 15 nt, Human
gggacagcuccuucu

SEQ ID NO: 2281571 - RNA, 14 nt, Human
gggacagaggccug

SEQ ID NO: 2281572 - RNA, 13 nt, Human
gggacagggcugg

SEQ ID NO: 2281573 - RNA, 18 nt, Human
gggacaggggcaggagga

SEQ ID NO: 2281574 - RNA, 21 nt, Human
gggacagggcuggcccagccc

SEQ ID NO: 2281575 - RNA, 22 nt, Human
gggacagggcuggcccagcccu

SEQ ID NO: 2281576 - RNA, 17 nt, Human
gggacaggggcaggagg

SEQ ID NO: 2281577 - RNA, 17 nt, Human
gggacagggcuggccca

SEQ ID NO: 2281578 - RNA, 18 nt, Human
gggacagggcuggcccag

SEQ ID NO: 2281579 - RNA, 19 nt, Human
gggacagggcuggcccagc

SEQ ID NO: 2281580 - RNA, 20 nt, Human
gggacagggcuggcccagcc

SEQ ID NO: 2281581 - RNA, 15 nt, Human
gggacaucucuuuga

SEQ ID NO: 2281582 - RNA, 22 nt, Human
gggacagucaccucauggaauu

SEQ ID NO: 2281583 - RNA, 20 nt, Human
gggacagucaccucauggaa

SEQ ID NO: 2281584 - RNA, 21 nt, Human
gggacagucaccucauggaau

SEQ ID NO: 2281585 - RNA, 20 nt, Human
gggacagagacaccugcacc

SEQ ID NO: 2281586 - RNA, 18 nt, Human
gggacagagacaccugca

SEQ ID NO: 2281587 - RNA, 17 nt, Human
gggacagaggccccagc

SEQ ID NO: 2281588 - RNA, 13 nt, Human
gggacagagcaga

SEQ ID NO: 2281589 - RNA, 21 nt, Human
gggacagaggccccagccucc

SEQ ID NO: 2281590 - RNA, 20 nt, Human
gggacagaggccccagccuc

SEQ ID NO: 2281591 - RNA, 19 nt, Human
gggacagaggccccagccu

SEQ ID NO: 2281592 - RNA, 18 nt, Human
gggacagaggccccagcc

SEQ ID NO: 2281593 - RNA, 12 nt, Human
gggacagcuccu

SEQ ID NO: 2281594 - RNA, 13 nt, Human
gggacagcuccuu

SEQ ID NO: 2281595 - RNA, 14 nt, Human
gggacaccugcccu

SEQ ID NO: 2281596 - RNA, 17 nt, Human
gggacagagacaccugc

SEQ ID NO: 2281597 - RNA, 16 nt, Human
gggacaccugcccugc

SEQ ID NO: 2281598 - RNA, 17 nt, Human
gggacaccugcccugcc

SEQ ID NO: 2281599 - RNA, 17 nt, Human
gggaagacgccugagcu

SEQ ID NO: 2281600 - RNA, 15 nt, Human
gggaagacgaggccc

SEQ ID NO: 2281601 - RNA, 19 nt, Human
gggaagaaaagagcuuucu

SEQ ID NO: 2281602 - RNA, 16 nt, Human
gggaagaaagagaagg

SEQ ID NO: 2281603 - RNA, 13 nt, Human
gggaagagacuug

SEQ ID NO: 2281604 - RNA, 14 nt, Human
gggaggucauuuug

SEQ ID NO: 2281605 - RNA, 15 nt, Human
gggaggucacuggaa

SEQ ID NO: 2281606 - RNA, 15 nt, Human
gggaggucgaggcag

SEQ ID NO: 2281607 - RNA, 20 nt, Human
gggaugacuaaaauauuuau

SEQ ID NO: 2281608 - RNA, 19 nt, Human
gggaugacuaaaauauuua

SEQ ID NO: 2281609 - RNA, 22 nt, Human
gggagggguaaaauuccuuagc

SEQ ID NO: 2281610 - RNA, 19 nt, Human
gggagggguugccacaggc

SEQ ID NO: 2281611 - RNA, 23 nt, Human
gggagggguugccacaggccucc

SEQ ID NO: 2281612 - RNA, 17 nt, Human
gggaggggggcacaugc

SEQ ID NO: 2281613 - RNA, 18 nt, Human
gggaggucaaggcugcag

SEQ ID NO: 2281614 - RNA, 14 nt, Human
gggaggcugaggcg

SEQ ID NO: 2281615 - RNA, 17 nt, Human
gggaggcugagacagga

SEQ ID NO: 2281616 - RNA, 13 nt, Human
gggaggcuucccc

SEQ ID NO: 2281617 - RNA, 15 nt, Human
gggagggagggcucc

SEQ ID NO: 2281618 - RNA, 16 nt, Human
gggagggagggcucca

SEQ ID NO: 2281619 - RNA, 15 nt, Human
gggaggcugagacag

SEQ ID NO: 2281620 - RNA, 22 nt, Human
gggagggauucugguuccaggg

SEQ ID NO: 2281621 - RNA, 15 nt, Human
gggagggggauccga

SEQ ID NO: 2281622 - RNA, 24 nt, Human
gggagcaggcggugggcacccacc

SEQ ID NO: 2281623 - RNA, 15 nt, Human
gggagcagggagguc

SEQ ID NO: 2281624 - RNA, 22 nt, Human
gggagaggccaugauucgccca

SEQ ID NO: 2281625 - RNA, 17 nt, Human
gggagagggaggucacu

SEQ ID NO: 2281626 - RNA, 20 nt, Human
gggagcagugucuuccauaa

SEQ ID NO: 2281627 - RNA, 18 nt, Human
gggagcauagaaggcagg

SEQ ID NO: 2281628 - RNA, 19 nt, Human
gggagcagugucuuccaua

SEQ ID NO: 2281629 - RNA, 11 nt, Human
gggagcagugu

SEQ ID NO: 2281630 - RNA, 16 nt, Human
gggagcauggcuguga

SEQ ID NO: 2281631 - RNA, 12 nt, Human
gggagccagggc

SEQ ID NO: 2281632 - RNA, 19 nt, Human
gggagcauagaaggcaggu

SEQ ID NO: 2281633 - RNA, 10 nt, Human
gggaggcuga

SEQ ID NO: 2281634 - RNA, 19 nt, Human
gggagccaugcgcccccuc

SEQ ID NO: 2281635 - RNA, 16 nt, Human
gggagagccugcuggc

SEQ ID NO: 2281636 - RNA, 21 nt, Human
gggagaggauuuuuuucugag

SEQ ID NO: 2281637 - RNA, 12 nt, Human
gggagagccugc

SEQ ID NO: 2281638 - RNA, 13 nt, Human
gggagagccugcu

SEQ ID NO: 2281639 - RNA, 23 nt, Human
gggagcaggcucgggcuccccag

SEQ ID NO: 2281640 - RNA, 15 nt, Human
gggagagccuuccag

SEQ ID NO: 2281641 - RNA, 19 nt, Human
gggagagccuuccaggggu

SEQ ID NO: 2281642 - RNA, 15 nt, Human
aaaagcauguacagu

SEQ ID NO: 2281643 - RNA, 18 nt, Human
aaaagcauguacaguguu

SEQ ID NO: 2281644 - RNA, 19 nt, Human
aaaagcauguacaguguuc

SEQ ID NO: 2281645 - RNA, 22 nt, Human
aaaagcauguacaguguucugu

SEQ ID NO: 2281646 - RNA, 18 nt, Human
aaaagccaagaggcugca

SEQ ID NO: 2281647 - RNA, 13 nt, Human
aaaaggaagacua

SEQ ID NO: 2281648 - RNA, 18 nt, Human
aaaaggaagccaaagagu

SEQ ID NO: 2281649 - RNA, 14 nt, Human
aaaagcuuuuuauu

SEQ ID NO: 2281650 - RNA, 14 nt, Human
aaaaggaaaagcaa

SEQ ID NO: 2281651 - RNA, 21 nt, Human
aaaagccucaacuagucauuu

SEQ ID NO: 2281652 - RNA, 21 nt, Human
aaaagcuuugaacccugggac

SEQ ID NO: 2281653 - RNA, 14 nt, Human
aaaagccucugugu

SEQ ID NO: 2281654 - RNA, 10 nt, Human
aaaaggaaaa

SEQ ID NO: 2281655 - RNA, 15 nt, Human
gggagaaccucaggc

SEQ ID NO: 2281656 - RNA, 16 nt, Human
gggagaaccucaggcu

SEQ ID NO: 2281657 - RNA, 14 nt, Human
gggagaaccucagg

SEQ ID NO: 2281658 - RNA, 16 nt, Human
gggagaaauugacaga

SEQ ID NO: 2281659 - RNA, 10 nt, Human
gggagaaaac

SEQ ID NO: 2281660 - RNA, 15 nt, Human
gggagaaaauucaau

SEQ ID NO: 2281661 - RNA, 13 nt, Human
gggagaaaauuca

SEQ ID NO: 2281662 - RNA, 15 nt, Human
gggagaaaagacaug

SEQ ID NO: 2281663 - RNA, 15 nt, Human
aaaaggaagacuaga

SEQ ID NO: 2281664 - RNA, 14 nt, Human
aaaaggaagacuag

SEQ ID NO: 2281665 - RNA, 21 nt, Human
gggagaaccaaaaagaggcua

SEQ ID NO: 2281666 - RNA, 15 nt, Human
gggacuuggaagcuc

SEQ ID NO: 2281667 - RNA, 17 nt, Human
gggacuuggaagcuccg

SEQ ID NO: 2281668 - RNA, 18 nt, Human
gggacuuggaagcuccgc

SEQ ID NO: 2281669 - RNA, 23 nt, Human
gggacuuggaagcuccgcuuucu

SEQ ID NO: 2281670 - RNA, 11 nt, Human
aaaaccaggcc

SEQ ID NO: 2281671 - RNA, 17 nt, Human
aaaaccacuagaacucu

SEQ ID NO: 2281672 - RNA, 12 nt, Human
aaaacccaagug

SEQ ID NO: 2281673 - RNA, 16 nt, Human
aaaaccacuagaacuc

SEQ ID NO: 2281674 - RNA, 20 nt, Human
aaaaccacagcccugucagu

SEQ ID NO: 2281675 - RNA, 19 nt, Human
aaaaccacagcccugucag

SEQ ID NO: 2281676 - RNA, 11 nt, Human
aaaacaucugg

SEQ ID NO: 2281677 - RNA, 21 nt, Human
aaaacauccagauacacccaa

SEQ ID NO: 2281678 - RNA, 16 nt, Human
aaaacauccagauaca

SEQ ID NO: 2281679 - RNA, 21 nt, Human
aaaacaucuauucucuccaaa

SEQ ID NO: 2281680 - RNA, 16 nt, Human
aaaacaucuauucucu

SEQ ID NO: 2281681 - RNA, 13 nt, Human
aaaacaucuauuc

SEQ ID NO: 2281682 - RNA, 16 nt, Human
aaaaauguauaugcac

SEQ ID NO: 2281683 - RNA, 14 nt, Human
aaaacaugcuacac

SEQ ID NO: 2281684 - RNA, 13 nt, Human
aaaacaugcuaca

SEQ ID NO: 2281685 - RNA, 15 nt, Human
gggacauugggaagg

SEQ ID NO: 2281686 - RNA, 17 nt, Human
gggaccaaggaccccuc

SEQ ID NO: 2281687 - RNA, 12 nt, Human
gggaccaaggca

SEQ ID NO: 2281688 - RNA, 17 nt, Human
gggaccaaggcaaggca

SEQ ID NO: 2281689 - RNA, 19 nt, Human
gggaccaaggcaaggcagg

SEQ ID NO: 2281690 - RNA, 23 nt, Human
gggaccaaggcaaggcaggugcc

SEQ ID NO: 2281691 - RNA, 19 nt, Human
gggaccacagcaaggcacc

SEQ ID NO: 2281692 - RNA, 22 nt, Human
gggaccacagcaaggcaccugc

SEQ ID NO: 2281693 - RNA, 23 nt, Human
gggaccacagcaaggcaccugca

SEQ ID NO: 2281694 - RNA, 14 nt, Human
gggaccagagcugc

SEQ ID NO: 2281695 - RNA, 20 nt, Human
gggaccagagcugccaccug

SEQ ID NO: 2281696 - RNA, 15 nt, Human
aaaaauggugccuga

SEQ ID NO: 2281697 - RNA, 12 nt, Human
aaaaauguaaau

SEQ ID NO: 2281698 - RNA, 13 nt, Human
aaaaauguaaaua

SEQ ID NO: 2281699 - RNA, 17 nt, Human
aaaaaugguuuaaaugg

SEQ ID NO: 2281700 - RNA, 14 nt, Human
gggaccagccaaga

SEQ ID NO: 2281701 - RNA, 13 nt, Human
aaaaaugguaauu

SEQ ID NO: 2281702 - RNA, 17 nt, Human
aaaaaugggacuucuuu

SEQ ID NO: 2281703 - RNA, 18 nt, Human
aaaaaugggacuucuuuu

SEQ ID NO: 2281704 - RNA, 23 nt, Human
aaaaaugggacuucuuuucacau

SEQ ID NO: 2281705 - RNA, 23 nt, Human
aaaacugaaagugaaaguccaga

SEQ ID NO: 2281706 - RNA, 18 nt, Human
aaaacugaaaaucuaaua

SEQ ID NO: 2281707 - RNA, 19 nt, Human
aaaacugaaaaucuaauau

SEQ ID NO: 2281708 - RNA, 15 nt, Human
aaaacugaagucuga

SEQ ID NO: 2281709 - RNA, 17 nt, Human
aaaacugaagucugaaa

SEQ ID NO: 2281710 - RNA, 18 nt, Human
aaaacugaagucugaaau

SEQ ID NO: 2281711 - RNA, 19 nt, Human
aaaacugaagucugaaauu

SEQ ID NO: 2281712 - RNA, 18 nt, Human
aaaacgguuaaaacuguc

SEQ ID NO: 2281713 - RNA, 21 nt, Human
aaaacucuacuuaauccaaug

SEQ ID NO: 2281714 - RNA, 16 nt, Human
aaaacgguuaaaacug

SEQ ID NO: 2281715 - RNA, 17 nt, Human
aaaacgcauggagugug

SEQ ID NO: 2281716 - RNA, 16 nt, Human
aaaacggcccucuuga

SEQ ID NO: 2281717 - RNA, 18 nt, Human
aaaacucuccucugcugc

SEQ ID NO: 2281718 - RNA, 20 nt, Human
aaaaccuuucaaauuucaca

SEQ ID NO: 2281719 - RNA, 14 nt, Human
aaaaccuuuugaaa

SEQ ID NO: 2281720 - RNA, 18 nt, Human
aaaacgcauggagugugu

SEQ ID NO: 2281721 - RNA, 14 nt, Human
aaaacgcauggagu

SEQ ID NO: 2281722 - RNA, 13 nt, Human
aaaacgcauggag

SEQ ID NO: 2281723 - RNA, 17 nt, Human
aaaacgcaaagggcuga

SEQ ID NO: 2281724 - RNA, 13 nt, Human
aaaaccuuucaaa

SEQ ID NO: 2281725 - RNA, 14 nt, Human
aaaaccugucaaug

SEQ ID NO: 2281726 - RNA, 17 nt, Human
aaaaccugucaaugaua

SEQ ID NO: 2281727 - RNA, 12 nt, Human
aaaacccagaga

SEQ ID NO: 2281728 - RNA, 22 nt, Human
aaaacccaccuuguuggagccu

SEQ ID NO: 2281729 - RNA, 20 nt, Human
aaaaccaucaaaaauauucc

SEQ ID NO: 2281730 - RNA, 11 nt, Human
aaaagauucau

SEQ ID NO: 2281731 - RNA, 13 nt, Human
aaaagauucauuu

SEQ ID NO: 2281732 - RNA, 23 nt, Human
aaaagauguagauuuauuucauc

SEQ ID NO: 2281733 - RNA, 12 nt, Human
aaaacuucuuuu

SEQ ID NO: 2281734 - RNA, 18 nt, Human
aaaagauugcugaaauuu

SEQ ID NO: 2281735 - RNA, 16 nt, Human
aaaagauugcugaaau

SEQ ID NO: 2281736 - RNA, 14 nt, Human
aaaagauugcugaa

SEQ ID NO: 2281737 - RNA, 21 nt, Human
aaaagauugaaguauuuugcu

SEQ ID NO: 2281738 - RNA, 14 nt, Human
aaaagauuuuaauc

SEQ ID NO: 2281739 - RNA, 17 nt, Human
aaaagauuuguuuuguc

SEQ ID NO: 2281740 - RNA, 13 nt, Human
aaaagauuuguuu

SEQ ID NO: 2281741 - RNA, 21 nt, Human
aaaagauugcugaaauuuuau

SEQ ID NO: 2281742 - RNA, 15 nt, Human
aaaagauuuuaauca

SEQ ID NO: 2281743 - RNA, 12 nt, Human
aaaagcaaaauc

SEQ ID NO: 2281744 - RNA, 21 nt, Human
aaaagauuuucagaaaauauu

SEQ ID NO: 2281745 - RNA, 16 nt, Human
aaaacugacuccuuag

SEQ ID NO: 2281746 - RNA, 21 nt, Human
aaaacugaagucugaaauuug

SEQ ID NO: 2281747 - RNA, 17 nt, Human
aaaacugaauuauaaga

SEQ ID NO: 2281748 - RNA, 15 nt, Human
aaaacugacagagga

SEQ ID NO: 2281749 - RNA, 15 nt, Human
aaaacuuauuugagu

SEQ ID NO: 2281750 - RNA, 11 nt, Human
aaaacuuauuu

SEQ ID NO: 2281751 - RNA, 17 nt, Human
aaaacuuaacauauuua

SEQ ID NO: 2281752 - RNA, 19 nt, Human
aaaacuuaacauauuuacu

SEQ ID NO: 2281753 - RNA, 15 nt, Human
aaaacuucagacaua

SEQ ID NO: 2281754 - RNA, 22 nt, Human
aaaagauguagauuuauuucau

SEQ ID NO: 2281755 - RNA, 14 nt, Human
ggcaggggacagga

SEQ ID NO: 2281756 - RNA, 13 nt, Human
ggcagggcucuga

SEQ ID NO: 2281757 - RNA, 14 nt, Human
ggcagggcucugau

SEQ ID NO: 2281758 - RNA, 15 nt, Human
ggcagggcugacucu

SEQ ID NO: 2281759 - RNA, 15 nt, Human
ggcagggcugaggcc

SEQ ID NO: 2281760 - RNA, 15 nt, Human
ggcagcccuguaggg

SEQ ID NO: 2281761 - RNA, 11 nt, Human
ggcagcccuug

SEQ ID NO: 2281762 - RNA, 21 nt, Human
ggcagcccuugcuuguuggga

SEQ ID NO: 2281763 - RNA, 13 nt, Human
ggcagcccuguag

SEQ ID NO: 2281764 - RNA, 22 nt, Human
ggcagccccuguucuggcagag

SEQ ID NO: 2281765 - RNA, 21 nt, Human
ggcagggccuugcccagagau

SEQ ID NO: 2281766 - RNA, 20 nt, Human
ggcagggccuugcccagaga

SEQ ID NO: 2281767 - RNA, 19 nt, Human
ggcagggccuugcccagag

SEQ ID NO: 2281768 - RNA, 18 nt, Human
ggcagggccuugcccaga

SEQ ID NO: 2281769 - RNA, 16 nt, Human
ggcagggccuugccca

SEQ ID NO: 2281770 - RNA, 13 nt, Human
ggcagccgagcuc

SEQ ID NO: 2281771 - RNA, 15 nt, Human
ggcagggcucaggau

SEQ ID NO: 2281772 - RNA, 13 nt, Human
ggcagggcucagg

SEQ ID NO: 2281773 - RNA, 11 nt, Human
ggcagggcuca

SEQ ID NO: 2281774 - RNA, 14 nt, Human
ggcaguuggccaga

SEQ ID NO: 2281775 - RNA, 21 nt, Human
ggcaguucugggugcucccua

SEQ ID NO: 2281776 - RNA, 15 nt, Human
ggcaguucugggugc

SEQ ID NO: 2281777 - RNA, 11 nt, Human
ggcaguuacau

SEQ ID NO: 2281778 - RNA, 21 nt, Human
ggcaguggugguuuucuguuc

SEQ ID NO: 2281779 - RNA, 20 nt, Human
ggcaguggugguuuucuguu

SEQ ID NO: 2281780 - RNA, 15 nt, Human
ggagagaccucauca

SEQ ID NO: 2281781 - RNA, 21 nt, Human
ggagagaaggggaggagggcg

SEQ ID NO: 2281782 - RNA, 20 nt, Human
ggagagaaggggaggagggc

SEQ ID NO: 2281783 - RNA, 18 nt, Human
ggagagaaggggaggagg

SEQ ID NO: 2281784 - RNA, 18 nt, Human
ggagagaccgagugaacc

SEQ ID NO: 2281785 - RNA, 11 nt, Human
ggagagaccuc

SEQ ID NO: 2281786 - RNA, 13 nt, Human
ggagagaccucau

SEQ ID NO: 2281787 - RNA, 18 nt, Human
ggagagaaacaauaaaga

SEQ ID NO: 2281788 - RNA, 16 nt, Human
ggagagaaagugggug

SEQ ID NO: 2281789 - RNA, 18 nt, Human
ggagagaaagugggugag

SEQ ID NO: 2281790 - RNA, 12 nt, Human
ggagagaagaau

SEQ ID NO: 2281791 - RNA, 24 nt, Human
ggagagaaagugggugagaugcug

SEQ ID NO: 2281792 - RNA, 16 nt, Human
ggagagaagagaaugc

SEQ ID NO: 2281793 - RNA, 20 nt, Human
ggagacucuguggggccuug

SEQ ID NO: 2281794 - RNA, 15 nt, Human
ggagacugcccagcu

SEQ ID NO: 2281795 - RNA, 12 nt, Human
ggagagaaaaca

SEQ ID NO: 2281796 - RNA, 12 nt, Human
ggcacagggucu

SEQ ID NO: 2281797 - RNA, 23 nt, Human
ggcacagaaaauggaagacagcu

SEQ ID NO: 2281798 - RNA, 21 nt, Human
ggcacaguuuucugagaaaga

SEQ ID NO: 2281799 - RNA, 17 nt, Human
ggcacagggucugcucu

SEQ ID NO: 2281800 - RNA, 18 nt, Human
ggcacagggucugcucuu

SEQ ID NO: 2281801 - RNA, 19 nt, Human
ggcacagggucugcucuuu

SEQ ID NO: 2281802 - RNA, 17 nt, Human
ggcacaguaugucccau

SEQ ID NO: 2281803 - RNA, 17 nt, Human
ggcacugagauauuuau

SEQ ID NO: 2281804 - RNA, 12 nt, Human
ggcacugagccc

SEQ ID NO: 2281805 - RNA, 22 nt, Human
ggcacucuguuauuuagacuca

SEQ ID NO: 2281806 - RNA, 23 nt, Human
ggcacucagaagacacugauggg

SEQ ID NO: 2281807 - RNA, 17 nt, Human
ggcacaucagaaaggaa

SEQ ID NO: 2281808 - RNA, 19 nt, Human
ggcacagugucugggcuga

SEQ ID NO: 2281809 - RNA, 15 nt, Human
ggcacagugucuggg

SEQ ID NO: 2281810 - RNA, 18 nt, Human
ggcacagugucugggcug

SEQ ID NO: 2281811 - RNA, 13 nt, Human
ggcacaucagcac

SEQ ID NO: 2281812 - RNA, 19 nt, Human
ggcacagaaaauggaagac

SEQ ID NO: 2281813 - RNA, 20 nt, Human
ggcacagaaaauggaagaca

SEQ ID NO: 2281814 - RNA, 21 nt, Human
ggcacagaaaauggaagacag

SEQ ID NO: 2281815 - RNA, 23 nt, Human
ggcagccccauucugccugccca

SEQ ID NO: 2281816 - RNA, 11 nt, Human
ggcagccccug

SEQ ID NO: 2281817 - RNA, 20 nt, Human
ggcagcagugugaggccagg

SEQ ID NO: 2281818 - RNA, 19 nt, Human
ggcagcagugugaggccag

SEQ ID NO: 2281819 - RNA, 14 nt, Human
ggcagcagugugag

SEQ ID NO: 2281820 - RNA, 13 nt, Human
ggcagcaguguga

SEQ ID NO: 2281821 - RNA, 21 nt, Human
ggcagcagggcuacccugagc

SEQ ID NO: 2281822 - RNA, 15 nt, Human
ggcagcaggugcugc

SEQ ID NO: 2281823 - RNA, 16 nt, Human
ggcagcaggugcugcu

SEQ ID NO: 2281824 - RNA, 19 nt, Human
ggcagcaggugcugcuacc

SEQ ID NO: 2281825 - RNA, 21 nt, Human
ggcagcaggugcugcuacccu

SEQ ID NO: 2281826 - RNA, 18 nt, Human
ggcagcagggcuacccug

SEQ ID NO: 2281827 - RNA, 13 nt, Human
ggcagcagggcua

SEQ ID NO: 2281828 - RNA, 12 nt, Human
ggcagcagccau

SEQ ID NO: 2281829 - RNA, 13 nt, Human
ggcagcagccauc

SEQ ID NO: 2281830 - RNA, 20 nt, Human
ggcagacagcagcucaggca

SEQ ID NO: 2281831 - RNA, 21 nt, Human
ggcagacacggaucugagaau

SEQ ID NO: 2281832 - RNA, 16 nt, Human
ggcagacgccggggac

SEQ ID NO: 2281833 - RNA, 15 nt, Human
ggcacugguggcccg

SEQ ID NO: 2281834 - RNA, 12 nt, Human
ggcacugccuga

SEQ ID NO: 2281835 - RNA, 13 nt, Human
ggcacugagcccc

SEQ ID NO: 2281836 - RNA, 19 nt, Human
ggcacugagcccccccaac

SEQ ID NO: 2281837 - RNA, 23 nt, Human
ggcacugagcccccccaacacug

SEQ ID NO: 2281838 - RNA, 14 nt, Human
ggcacugcaggggc

SEQ ID NO: 2281839 - RNA, 15 nt, Human
ggcacuucacagagu

SEQ ID NO: 2281840 - RNA, 21 nt, Human
ggcacuucacagagugugcug

SEQ ID NO: 2281841 - RNA, 11 nt, Human
ggcacuucaca

SEQ ID NO: 2281842 - RNA, 13 nt, Human
ggcacuucacaga

SEQ ID NO: 2281843 - RNA, 14 nt, Human
ggcacuucacagag

SEQ ID NO: 2281844 - RNA, 19 nt, Human
ggcagacagcagcucaggc

SEQ ID NO: 2281845 - RNA, 18 nt, Human
ggcagacagcagcucagg

SEQ ID NO: 2281846 - RNA, 17 nt, Human
ggcagacagcagcucag

SEQ ID NO: 2281847 - RNA, 16 nt, Human
ggcagacagcagcuca

SEQ ID NO: 2281848 - RNA, 15 nt, Human
ggcagacagcagcuc

SEQ ID NO: 2281849 - RNA, 14 nt, Human
ggcagacagcagcu

SEQ ID NO: 2281850 - RNA, 13 nt, Human
ggcagacagcagc

SEQ ID NO: 2281851 - RNA, 17 nt, Human
ggcagacacggaucuga

SEQ ID NO: 2281852 - RNA, 19 nt, Human
ggcagacacggaucugaga

SEQ ID NO: 2281853 - RNA, 16 nt, Human
ggcacuugauuccuug

SEQ ID NO: 2281854 - RNA, 18 nt, Human
ggcagaaugcuagcucug

SEQ ID NO: 2281855 - RNA, 20 nt, Human
ggcagaaugcuagcucugag

SEQ ID NO: 2281856 - RNA, 21 nt, Human
ggcagaaugcuagcucugagc

SEQ ID NO: 2281857 - RNA, 23 nt, Human
ggcagaaugcuagcucugagcca

SEQ ID NO: 2281858 - RNA, 17 nt, Human
ggcagacacagggacuu

SEQ ID NO: 2281859 - RNA, 20 nt, Human
ggcagacacagggacuugaa

SEQ ID NO: 2281860 - RNA, 19 nt, Human
ggccagugugaucccaagu

SEQ ID NO: 2281861 - RNA, 17 nt, Human
ggccagucugggcugcc

SEQ ID NO: 2281862 - RNA, 15 nt, Human
ggccauacuggccuc

SEQ ID NO: 2281863 - RNA, 14 nt, Human
ggccaguugguccc

SEQ ID NO: 2281864 - RNA, 17 nt, Human
ggccaguuggucccccu

SEQ ID NO: 2281865 - RNA, 21 nt, Human
ggcauacgccuguaguccuag

SEQ ID NO: 2281866 - RNA, 16 nt, Human
ggcaguuuuucuguau

SEQ ID NO: 2281867 - RNA, 12 nt, Human
ggcaguuuuucu

SEQ ID NO: 2281868 - RNA, 15 nt, Human
ggcaguuuuucugua

SEQ ID NO: 2281869 - RNA, 19 nt, Human
ggcaguuuuucuguauuuu

SEQ ID NO: 2281870 - RNA, 16 nt, Human
ggccaguccugccugg

SEQ ID NO: 2281871 - RNA, 19 nt, Human
ggcauagaugcaggugagc

SEQ ID NO: 2281872 - RNA, 15 nt, Human
ggcauagcccagaca

SEQ ID NO: 2281873 - RNA, 23 nt, Human
ggccagucccugaggcagguccc

SEQ ID NO: 2281874 - RNA, 17 nt, Human
ggccagucccugaggca

SEQ ID NO: 2281875 - RNA, 16 nt, Human
ggcauagaggcuucuc

SEQ ID NO: 2281876 - RNA, 14 nt, Human
ggcauacuaauaaa

SEQ ID NO: 2281877 - RNA, 22 nt, Human
ggcauagaggcuucuccgccag

SEQ ID NO: 2281878 - RNA, 21 nt, Human
ggccaguccugccuggccagg

SEQ ID NO: 2281879 - RNA, 20 nt, Human
ggccaguccugccuggccag

SEQ ID NO: 2281880 - RNA, 19 nt, Human
ggccaguccugccuggcca

SEQ ID NO: 2281881 - RNA, 18 nt, Human
ggccaguccugccuggcc

SEQ ID NO: 2281882 - RNA, 22 nt, Human
ggccaguccugccuggccaggc

SEQ ID NO: 2281883 - RNA, 15 nt, Human
ggccagucugggcug

SEQ ID NO: 2281884 - RNA, 16 nt, Human
ggccagucugggcugc

SEQ ID NO: 2281885 - RNA, 13 nt, Human
ggccagucugugg

SEQ ID NO: 2281886 - RNA, 14 nt, Human
ggccagucugugga

SEQ ID NO: 2281887 - RNA, 20 nt, Human
ggccagugugacaaggauug

SEQ ID NO: 2281888 - RNA, 23 nt, Human
ggccagucuguggaucagagaug

SEQ ID NO: 2281889 - RNA, 15 nt, Human
ggccagucuguggau

SEQ ID NO: 2281890 - RNA, 18 nt, Human
ggccagucuguggaucag

SEQ ID NO: 2281891 - RNA, 20 nt, Human
ggcccuccuacccugcgccc

SEQ ID NO: 2281892 - RNA, 15 nt, Human
ggcccucgcugccag

SEQ ID NO: 2281893 - RNA, 19 nt, Human
ggcccucgcugccagcucu

SEQ ID NO: 2281894 - RNA, 16 nt, Human
ggcccucgcugccagc

SEQ ID NO: 2281895 - RNA, 17 nt, Human
ggcccuccuacccugcg

SEQ ID NO: 2281896 - RNA, 19 nt, Human
ggcccuccuacccugcgcc

SEQ ID NO: 2281897 - RNA, 21 nt, Human
ggcccuccuacccugcgccca

SEQ ID NO: 2281898 - RNA, 16 nt, Human
ggcccuccuacccugc

SEQ ID NO: 2281899 - RNA, 22 nt, Human
ggcccggggcuggcggcuacuc

SEQ ID NO: 2281900 - RNA, 19 nt, Human
ggcccggggcuggcggcua

SEQ ID NO: 2281901 - RNA, 13 nt, Human
ggcccggggcugg

SEQ ID NO: 2281902 - RNA, 23 nt, Human
ggcccggcgcgguggcucacgcc

SEQ ID NO: 2281903 - RNA, 20 nt, Human
ggcccggccagccaugucug

SEQ ID NO: 2281904 - RNA, 15 nt, Human
ggcccggcuccaggc

SEQ ID NO: 2281905 - RNA, 19 nt, Human
ggcccuucucuccagcccc

SEQ ID NO: 2281906 - RNA, 17 nt, Human
ggcccucgggcccagcc

SEQ ID NO: 2281907 - RNA, 18 nt, Human
ggcccucgggcccagccc

SEQ ID NO: 2281908 - RNA, 19 nt, Human
ggcccucgggcccagcccc

SEQ ID NO: 2281909 - RNA, 20 nt, Human
ggcccucgggcccagccccc

SEQ ID NO: 2281910 - RNA, 23 nt, Human
ggcccucgcugccagcucuguau

SEQ ID NO: 2281911 - RNA, 15 nt, Human
ggcccucgggcccag

SEQ ID NO: 2281912 - RNA, 16 nt, Human
ggcccucgggcccagc

SEQ ID NO: 2281913 - RNA, 22 nt, Human
ggcccucgcugccagcucugua

SEQ ID NO: 2281914 - RNA, 21 nt, Human
ggcccucgcugccagcucugu

SEQ ID NO: 2281915 - RNA, 20 nt, Human
ggcccuucucuccagccccu

SEQ ID NO: 2281916 - RNA, 21 nt, Human
ggcccuucucuccagccccug

SEQ ID NO: 2281917 - RNA, 13 nt, Human
ggccccugcuggu

SEQ ID NO: 2281918 - RNA, 14 nt, Human
ggccccugcugguu

SEQ ID NO: 2281919 - RNA, 13 nt, Human
ggcccggcuccag

SEQ ID NO: 2281920 - RNA, 12 nt, Human
ggcccggccagc

SEQ ID NO: 2281921 - RNA, 19 nt, Human
ggccccugcuucuccagcc

SEQ ID NO: 2281922 - RNA, 22 nt, Human
ggcccgcuugccucggcuccug

SEQ ID NO: 2281923 - RNA, 23 nt, Human
ggcccgcuugccucggcuccugc

SEQ ID NO: 2281924 - RNA, 23 nt, Human
ggccccugcugguucaggguugg

SEQ ID NO: 2281925 - RNA, 16 nt, Human
ggccccugcuucucca

SEQ ID NO: 2281926 - RNA, 16 nt, Human
ggccuccauccugagg

SEQ ID NO: 2281927 - RNA, 15 nt, Human
ggccuccauccugag

SEQ ID NO: 2281928 - RNA, 14 nt, Human
ggccuccauccuga

SEQ ID NO: 2281929 - RNA, 20 nt, Human
ggccucagccagagaagcua

SEQ ID NO: 2281930 - RNA, 17 nt, Human
ggccucagccagagaag

SEQ ID NO: 2281931 - RNA, 15 nt, Human
ggccucagccagaga

SEQ ID NO: 2281932 - RNA, 19 nt, Human
ggccucaccgagugggggc

SEQ ID NO: 2281933 - RNA, 17 nt, Human
ggccucagcaccccugu

SEQ ID NO: 2281934 - RNA, 21 nt, Human
ggccucagcaccccugucucu

SEQ ID NO: 2281935 - RNA, 23 nt, Human
ggccucaagugauucuccugccu

SEQ ID NO: 2281936 - RNA, 14 nt, Human
ggccgaagcucugg

SEQ ID NO: 2281937 - RNA, 15 nt, Human
ggccgaagcucuggc

SEQ ID NO: 2281938 - RNA, 16 nt, Human
ggccgaagcucuggcu

SEQ ID NO: 2281939 - RNA, 17 nt, Human
ggccgaagcucuggcug

SEQ ID NO: 2281940 - RNA, 18 nt, Human
ggccgaagcucuggcuga

SEQ ID NO: 2281941 - RNA, 16 nt, Human
ggccgaaggcagugca

SEQ ID NO: 2281942 - RNA, 19 nt, Human
ggccgaauccccucccugu

SEQ ID NO: 2281943 - RNA, 10 nt, Human
ggccucagaa

SEQ ID NO: 2281944 - RNA, 19 nt, Human
ggccucacuaggcuucugg

SEQ ID NO: 2281945 - RNA, 21 nt, Human
ggccgaauccccucccuguca

SEQ ID NO: 2281946 - RNA, 18 nt, Human
ggccucaccgaguggggg

SEQ ID NO: 2281947 - RNA, 21 nt, Human
ggcccuugcaguucagcacca

SEQ ID NO: 2281948 - RNA, 13 nt, Human
ggcccucuacccc

SEQ ID NO: 2281949 - RNA, 16 nt, Human
ggcccuuuccucaggc

SEQ ID NO: 2281950 - RNA, 18 nt, Human
ggcccuuuccucaggcaa

SEQ ID NO: 2281951 - RNA, 22 nt, Human
ggcccuucucuccagccccugg

SEQ ID NO: 2281952 - RNA, 23 nt, Human
ggcccuucucuccagccccugga

SEQ ID NO: 2281953 - RNA, 14 nt, Human
guaccacucaggcc

SEQ ID NO: 2281954 - RNA, 21 nt, Human
guaccaaucauuuuaauuauu

SEQ ID NO: 2281955 - RNA, 14 nt, Human
guaccaaucauuuu

SEQ ID NO: 2281956 - RNA, 15 nt, Human
guaccaaucauuuua

SEQ ID NO: 2281957 - RNA, 16 nt, Human
guaccaaaugcuuuaa

SEQ ID NO: 2281958 - RNA, 18 nt, Human
guaccaaaugcuuuaaaa

SEQ ID NO: 2281959 - RNA, 20 nt, Human
guaccaagacuacuagggaa

SEQ ID NO: 2281960 - RNA, 23 nt, Human
guaccaagacuacuagggaaaug

SEQ ID NO: 2281961 - RNA, 13 nt, Human
guacauuucugaa

SEQ ID NO: 2281962 - RNA, 17 nt, Human
guacauuucugaaauga

SEQ ID NO: 2281963 - RNA, 15 nt, Human
guacauuuuguaaca

SEQ ID NO: 2281964 - RNA, 14 nt, Human
guacauuuaugauu

SEQ ID NO: 2281965 - RNA, 16 nt, Human
guacauuuaugauuua

SEQ ID NO: 2281966 - RNA, 18 nt, Human
guacauuuaugauuuaau

SEQ ID NO: 2281967 - RNA, 19 nt, Human
guacauuuaugauuuaaua

SEQ ID NO: 2281968 - RNA, 20 nt, Human
guacauuuaugauuuaauaa

SEQ ID NO: 2281969 - RNA, 21 nt, Human
guacauuuaugauuuaauaaa

SEQ ID NO: 2281970 - RNA, 22 nt, Human
guacauuuaugauuuaauaaaa

SEQ ID NO: 2281971 - RNA, 18 nt, Human
guacauuucccugugcug

SEQ ID NO: 2281972 - RNA, 14 nt, Human
guacauuucccugu

SEQ ID NO: 2281973 - RNA, 16 nt, Human
guacauuucccugugc

SEQ ID NO: 2281974 - RNA, 15 nt, Human
guacauuuggagaca

SEQ ID NO: 2281975 - RNA, 20 nt, Human
guaccauaguaccauuuaua

SEQ ID NO: 2281976 - RNA, 20 nt, Human
guaccaugaaacaaagcugc

SEQ ID NO: 2281977 - RNA, 12 nt, Human
guacccacugcu

SEQ ID NO: 2281978 - RNA, 19 nt, Human
guaccauuuauacaaauua

SEQ ID NO: 2281979 - RNA, 21 nt, Human
guaccauuuauacaaauuaga

SEQ ID NO: 2281980 - RNA, 14 nt, Human
guaccauuugcaug

SEQ ID NO: 2281981 - RNA, 18 nt, Human
guacccaaaagcucagcc

SEQ ID NO: 2281982 - RNA, 16 nt, Human
guaccagcccagaugu

SEQ ID NO: 2281983 - RNA, 14 nt, Human
guaccagcugcgcu

SEQ ID NO: 2281984 - RNA, 16 nt, Human
guaccagcugcgcuug

SEQ ID NO: 2281985 - RNA, 16 nt, Human
guaccagauaaaauua

SEQ ID NO: 2281986 - RNA, 16 nt, Human
guaccagcaauaugua

SEQ ID NO: 2281987 - RNA, 19 nt, Human
guaccaggucuccuccacc

SEQ ID NO: 2281988 - RNA, 22 nt, Human
guaccaggucuccuccaccgcc

SEQ ID NO: 2281989 - RNA, 19 nt, Human
guaccagcugcgcuugcuu

SEQ ID NO: 2281990 - RNA, 17 nt, Human
guaccagcugcgcuugc

SEQ ID NO: 2281991 - RNA, 18 nt, Human
guaccaggucuccuccac

SEQ ID NO: 2281992 - RNA, 14 nt, Human
guacaucuggccuu

SEQ ID NO: 2281993 - RNA, 20 nt, Human
guacaucuauuuuggauugu

SEQ ID NO: 2281994 - RNA, 18 nt, Human
guacaucuauuuuggauu

SEQ ID NO: 2281995 - RNA, 14 nt, Human
guacaugaaaacac

SEQ ID NO: 2281996 - RNA, 16 nt, Human
guacaugaaaacacau

SEQ ID NO: 2281997 - RNA, 15 nt, Human
guacaugaaaacaca

SEQ ID NO: 2281998 - RNA, 14 nt, Human
aaauccagaaagaa

SEQ ID NO: 2281999 - RNA, 15 nt, Human
aaauccagaaagaaa

SEQ ID NO: 2282000 - RNA, 15 nt, Human
aaauccauacauuug

SEQ ID NO: 2282001 - RNA, 20 nt, Human
guacauauuuguggaauaau

SEQ ID NO: 2282002 - RNA, 17 nt, Human
guacaucccauguaaca

SEQ ID NO: 2282003 - RNA, 20 nt, Human
guacaucccauguaacagaa

SEQ ID NO: 2282004 - RNA, 21 nt, Human
guacaucccauguaacagaaa

SEQ ID NO: 2282005 - RNA, 22 nt, Human
guacaucccauguaacagaaag

SEQ ID NO: 2282006 - RNA, 23 nt, Human
guacaucccauguaacagaaagg

SEQ ID NO: 2282007 - RNA, 18 nt, Human
aaauccauacauuugugu

SEQ ID NO: 2282008 - RNA, 19 nt, Human
guacauggaauaacaugua

SEQ ID NO: 2282009 - RNA, 16 nt, Human
guacauggcagaguuu

SEQ ID NO: 2282010 - RNA, 10 nt, Human
guacauguau

SEQ ID NO: 2282011 - RNA, 11 nt, Human
guacaugagaa

SEQ ID NO: 2282012 - RNA, 18 nt, Human
guacauucaauguuuaug

SEQ ID NO: 2282013 - RNA, 17 nt, Human
guacauucaauguuuau

SEQ ID NO: 2282014 - RNA, 13 nt, Human
guacaugugaggc

SEQ ID NO: 2282015 - RNA, 19 nt, Human
guacauguguagccugugc

SEQ ID NO: 2282016 - RNA, 20 nt, Human
guacauguguagccugugca

SEQ ID NO: 2282017 - RNA, 20 nt, Human
guacaugaaaacacauuuuu

SEQ ID NO: 2282018 - RNA, 19 nt, Human
guacaugaaaacacauuuu

SEQ ID NO: 2282019 - RNA, 18 nt, Human
guacaugaaaacacauuu

SEQ ID NO: 2282020 - RNA, 17 nt, Human
guacaugaaaacacauu

SEQ ID NO: 2282021 - RNA, 23 nt, Human
aaauauuauuguggaaaugaaua

SEQ ID NO: 2282022 - RNA, 15 nt, Human
aaauauuauguguuu

SEQ ID NO: 2282023 - RNA, 20 nt, Human
aaauauuauuuuaugaaagg

SEQ ID NO: 2282024 - RNA, 16 nt, Human
aaauauucaugcuucu

SEQ ID NO: 2282025 - RNA, 23 nt, Human
aaauauuccauccauauacuuug

SEQ ID NO: 2282026 - RNA, 22 nt, Human
aaaucaccacaccaaaccucuc

SEQ ID NO: 2282027 - RNA, 15 nt, Human
aaauauuccugcauu

SEQ ID NO: 2282028 - RNA, 19 nt, Human
aaauauucccuagaaacuu

SEQ ID NO: 2282029 - RNA, 18 nt, Human
aaauauucccuagaaacu

SEQ ID NO: 2282030 - RNA, 14 nt, Human
aaaucagacuauga

SEQ ID NO: 2282031 - RNA, 21 nt, Human
aaaucagacuaugaaguuuuu

SEQ ID NO: 2282032 - RNA, 18 nt, Human
aaaucagccaauuauguu

SEQ ID NO: 2282033 - RNA, 20 nt, Human
aaaucagccaauuauguuaa

SEQ ID NO: 2282034 - RNA, 21 nt, Human
aaaucagccaauuauguuaaa

SEQ ID NO: 2282035 - RNA, 23 nt, Human
aaaucagccaauuauguuaaacu

SEQ ID NO: 2282036 - RNA, 17 nt, Human
aaaucagccaauuaugu

SEQ ID NO: 2282037 - RNA, 20 nt, Human
aaauauuauaacuuaaaaaa

SEQ ID NO: 2282038 - RNA, 18 nt, Human
aaauauuagaugugauuu

SEQ ID NO: 2282039 - RNA, 20 nt, Human
aaauauuagaugugauuuaa

SEQ ID NO: 2282040 - RNA, 21 nt, Human
aaauauuagaugugauuuaau

SEQ ID NO: 2282041 - RNA, 22 nt, Human
aaauauuagaugugauuuaaua

SEQ ID NO: 2282042 - RNA, 14 nt, Human
aaauauuagaaaca

SEQ ID NO: 2282043 - RNA, 17 nt, Human
aaauauuagaaacagcu

SEQ ID NO: 2282044 - RNA, 13 nt, Human
aaauauuagaugu

SEQ ID NO: 2282045 - RNA, 14 nt, Human
aaauauuagaugug

SEQ ID NO: 2282046 - RNA, 15 nt, Human
aaauauuagauguga

SEQ ID NO: 2282047 - RNA, 14 nt, Human
aaauauuauguguu

SEQ ID NO: 2282048 - RNA, 17 nt, Human
aaauauuauguuaaaac

SEQ ID NO: 2282049 - RNA, 12 nt, Human
aaauauacugua

SEQ ID NO: 2282050 - RNA, 16 nt, Human
aaauauacuguaaaga

SEQ ID NO: 2282051 - RNA, 15 nt, Human
aaauauacuguaaag

SEQ ID NO: 2282052 - RNA, 14 nt, Human
aaauauacuguaaa

SEQ ID NO: 2282053 - RNA, 13 nt, Human
aaauauacuguaa

SEQ ID NO: 2282054 - RNA, 14 nt, Human
aaauauacuuaaau

SEQ ID NO: 2282055 - RNA, 18 nt, Human
aaauauacuuaaauggaa

SEQ ID NO: 2282056 - RNA, 23 nt, Human
aaauauacuguaaagaaagagag

SEQ ID NO: 2282057 - RNA, 21 nt, Human
aaauauacuguaaagaaagag

SEQ ID NO: 2282058 - RNA, 19 nt, Human
aaauauacuguaaagaaag

SEQ ID NO: 2282059 - RNA, 17 nt, Human
aaauauacuguaaagaa

SEQ ID NO: 2282060 - RNA, 18 nt, Human
aaaucagccugcuccagc

SEQ ID NO: 2282061 - RNA, 16 nt, Human
aaaucagcugcuacua

SEQ ID NO: 2282062 - RNA, 12 nt, Human
aaaucagccugc

SEQ ID NO: 2282063 - RNA, 19 nt, Human
aaaucagccguguaaccau

SEQ ID NO: 2282064 - RNA, 16 nt, Human
aaaucauaaacugugu

SEQ ID NO: 2282065 - RNA, 14 nt, Human
aaaucauaaacugu

SEQ ID NO: 2282066 - RNA, 17 nt, Human
aaaucaguuacuaagaa

SEQ ID NO: 2282067 - RNA, 21 nt, Human
aaaucaguuacuaagaagaaa

SEQ ID NO: 2282068 - RNA, 23 nt, Human
aaaucauaaacugugugcagacu

SEQ ID NO: 2282069 - RNA, 22 nt, Human
aaaucauaagauauuuuucaug

SEQ ID NO: 2282070 - RNA, 12 nt, Human
aaaucauuucug

SEQ ID NO: 2282071 - RNA, 22 nt, Human
aaaucagucagugcaaauguca

SEQ ID NO: 2282072 - RNA, 16 nt, Human
aaaucaguuacuaaga

SEQ ID NO: 2282073 - RNA, 22 nt, Human
aaaucauaggaaaguauuuuuu

SEQ ID NO: 2282074 - RNA, 12 nt, Human
aaaucauuuggg

SEQ ID NO: 2282075 - RNA, 20 nt, Human
aaaucauuuuauaugucaaa

SEQ ID NO: 2282076 - RNA, 21 nt, Human
aaaucauuuuauaugucaaag

SEQ ID NO: 2282077 - RNA, 23 nt, Human
aaaucauuuggguuaauauggcu

SEQ ID NO: 2282078 - RNA, 16 nt, Human
aaaucauuuuauaugu

SEQ ID NO: 2282079 - RNA, 15 nt, Human
aaauccacuuuaucu

SEQ ID NO: 2282080 - RNA, 23 nt, Human
aaaucauuucugcaucagcugcu

SEQ ID NO: 2282081 - RNA, 22 nt, Human
aaaucauuucugcaucagcugc

SEQ ID NO: 2282082 - RNA, 21 nt, Human
aaaucauuucugcaucagcug

SEQ ID NO: 2282083 - RNA, 19 nt, Human
aaaucauuucugcaucagc

SEQ ID NO: 2282084 - RNA, 11 nt, Human
guagagacagg

SEQ ID NO: 2282085 - RNA, 12 nt, Human
guagagacaggg

SEQ ID NO: 2282086 - RNA, 20 nt, Human
guagaccuagggaggaccuu

SEQ ID NO: 2282087 - RNA, 17 nt, Human
guagaccuagggaggac

SEQ ID NO: 2282088 - RNA, 16 nt, Human
guagaccuagggagga

SEQ ID NO: 2282089 - RNA, 19 nt, Human
guagaccuuguuacuucug

SEQ ID NO: 2282090 - RNA, 20 nt, Human
guagaccuuguuacuucuga

SEQ ID NO: 2282091 - RNA, 21 nt, Human
guagaccuuguuacuucugag

SEQ ID NO: 2282092 - RNA, 22 nt, Human
guagaccuuguuacuucugagg

SEQ ID NO: 2282093 - RNA, 18 nt, Human
guagacacgcucuucuau

SEQ ID NO: 2282094 - RNA, 19 nt, Human
guagacacgcucuucuauu

SEQ ID NO: 2282095 - RNA, 22 nt, Human
guagacaagcaauuagacaaga

SEQ ID NO: 2282096 - RNA, 16 nt, Human
guagaccaaaauaaaa

SEQ ID NO: 2282097 - RNA, 15 nt, Human
guagaccaaaauaaa

SEQ ID NO: 2282098 - RNA, 14 nt, Human
guagaccaaaauaa

SEQ ID NO: 2282099 - RNA, 15 nt, Human
guagacauuucucuu

SEQ ID NO: 2282100 - RNA, 15 nt, Human
guagagccagggucu

SEQ ID NO: 2282101 - RNA, 18 nt, Human
guagagccagggucucac

SEQ ID NO: 2282102 - RNA, 16 nt, Human
guagcccgccugccag

SEQ ID NO: 2282103 - RNA, 20 nt, Human
guagcccgccugccaguccu

SEQ ID NO: 2282104 - RNA, 17 nt, Human
guagagauggaggagga

SEQ ID NO: 2282105 - RNA, 16 nt, Human
guagagauggaggagg

SEQ ID NO: 2282106 - RNA, 17 nt, Human
guagcccuggccagagg

SEQ ID NO: 2282107 - RNA, 14 nt, Human
guagcccuuucugu

SEQ ID NO: 2282108 - RNA, 15 nt, Human
guagcccuggccaga

SEQ ID NO: 2282109 - RNA, 17 nt, Human
guagcccgccugccagu

SEQ ID NO: 2282110 - RNA, 19 nt, Human
guagccgagagccugcucc

SEQ ID NO: 2282111 - RNA, 13 nt, Human
guagagacagggu

SEQ ID NO: 2282112 - RNA, 10 nt, Human
guagagccag

SEQ ID NO: 2282113 - RNA, 15 nt, Human
guagagauggaggag

SEQ ID NO: 2282114 - RNA, 18 nt, Human
guagagaccgagccucug

SEQ ID NO: 2282115 - RNA, 13 nt, Human
guagagaaacacu

SEQ ID NO: 2282116 - RNA, 15 nt, Human
guagagccagagguc

SEQ ID NO: 2282117 - RNA, 11 nt, Human
guagagccagg

SEQ ID NO: 2282118 - RNA, 22 nt, Human
guagaacacaaggucauuugcu

SEQ ID NO: 2282119 - RNA, 22 nt, Human
guagaaaggggcccaguccugg

SEQ ID NO: 2282120 - RNA, 20 nt, Human
guagaaaugguuguauuaga

SEQ ID NO: 2282121 - RNA, 22 nt, Human
guagaaaugguuguauuagaug

SEQ ID NO: 2282122 - RNA, 14 nt, Human
guagaaaugaugau

SEQ ID NO: 2282123 - RNA, 17 nt, Human
guagaaauaauaugcau

SEQ ID NO: 2282124 - RNA, 17 nt, Human
guagaaaugguuguauu

SEQ ID NO: 2282125 - RNA, 18 nt, Human
guagaaaugguuguauua

SEQ ID NO: 2282126 - RNA, 19 nt, Human
guagaacguaaccacggaa

SEQ ID NO: 2282127 - RNA, 18 nt, Human
guagaacguaaccacgga

SEQ ID NO: 2282128 - RNA, 23 nt, Human
guagaaauaucugaaaauguaug

SEQ ID NO: 2282129 - RNA, 21 nt, Human
guagaaauaucugaaaaugua

SEQ ID NO: 2282130 - RNA, 16 nt, Human
guagaaauaauaugca

SEQ ID NO: 2282131 - RNA, 21 nt, Human
guagaaaggccuuuaaaauuu

SEQ ID NO: 2282132 - RNA, 16 nt, Human
guacuuauuacugcua

SEQ ID NO: 2282133 - RNA, 18 nt, Human
guacuuauuacugcuaag

SEQ ID NO: 2282134 - RNA, 15 nt, Human
guacuucacugucag

SEQ ID NO: 2282135 - RNA, 18 nt, Human
guacuucaggggcacuuc

SEQ ID NO: 2282136 - RNA, 20 nt, Human
guagaaauaucugaaaaugu

SEQ ID NO: 2282137 - RNA, 15 nt, Human
guagaauugcauuga

SEQ ID NO: 2282138 - RNA, 14 nt, Human
guagaauugcauug

SEQ ID NO: 2282139 - RNA, 20 nt, Human
guagaauguauuguaccuuu

SEQ ID NO: 2282140 - RNA, 23 nt, Human
guagaauguauuguaccuuuuaa

SEQ ID NO: 2282141 - RNA, 17 nt, Human
guagaauguauuguacc

SEQ ID NO: 2282142 - RNA, 18 nt, Human
guagaauguauuguaccu

SEQ ID NO: 2282143 - RNA, 19 nt, Human
guagaauguauuguaccuu

SEQ ID NO: 2282144 - RNA, 19 nt, Human
guagaaggguuauauuuua

SEQ ID NO: 2282145 - RNA, 15 nt, Human
guagaaggucggagg

SEQ ID NO: 2282146 - RNA, 14 nt, Human
guagaaguuuuugu

SEQ ID NO: 2282147 - RNA, 15 nt, Human
guagaaguuuuugua

SEQ ID NO: 2282148 - RNA, 19 nt, Human
guagaaguuuuuguacugu

SEQ ID NO: 2282149 - RNA, 14 nt, Human
guagaauguauugu

SEQ ID NO: 2282150 - RNA, 12 nt, Human
guagaagauggc

SEQ ID NO: 2282151 - RNA, 13 nt, Human
guagaagagggau

SEQ ID NO: 2282152 - RNA, 20 nt, Human
guagaagauuugaugcugga

SEQ ID NO: 2282153 - RNA, 15 nt, Human
guagaagcauuccuu

SEQ ID NO: 2282154 - RNA, 18 nt, Human
guagaagcccuucuaccu

SEQ ID NO: 2282155 - RNA, 13 nt, Human
guagaaggagaca

SEQ ID NO: 2282156 - RNA, 22 nt, Human
guagaagcauuccuucuuugau

SEQ ID NO: 2282157 - RNA, 18 nt, Human
guagaagcauuccuucuu

SEQ ID NO: 2282158 - RNA, 21 nt, Human
guagaagcauuccuucuuuga

SEQ ID NO: 2282159 - RNA, 17 nt, Human
guagaaggguuauauuu

SEQ ID NO: 2282160 - RNA, 15 nt, Human
guagaaggagacaga

SEQ ID NO: 2282161 - RNA, 21 nt, Human
guagaagucuuagauguauau

SEQ ID NO: 2282162 - RNA, 19 nt, Human
guacuggcugauggaguaa

SEQ ID NO: 2282163 - RNA, 16 nt, Human
guacuggcaugguacg

SEQ ID NO: 2282164 - RNA, 14 nt, Human
guacuggcauggua

SEQ ID NO: 2282165 - RNA, 16 nt, Human
guacuggagaaaaugg

SEQ ID NO: 2282166 - RNA, 14 nt, Human
guacuguaguuuuu

SEQ ID NO: 2282167 - RNA, 16 nt, Human
guacuguaaagagacc

SEQ ID NO: 2282168 - RNA, 12 nt, Human
guacuggggguu

SEQ ID NO: 2282169 - RNA, 21 nt, Human
guacuggggguugcgggggga

SEQ ID NO: 2282170 - RNA, 16 nt, Human
guacugauuuuuguaa

SEQ ID NO: 2282171 - RNA, 22 nt, Human
guacucuuccgaaaaauccucu

SEQ ID NO: 2282172 - RNA, 23 nt, Human
guacucuuccgaaaaauccucuu

SEQ ID NO: 2282173 - RNA, 16 nt, Human
guacugagccuuguaa

SEQ ID NO: 2282174 - RNA, 12 nt, Human
guacugagauuu

SEQ ID NO: 2282175 - RNA, 19 nt, Human
guacuuagcagcuaucucu

SEQ ID NO: 2282176 - RNA, 16 nt, Human
guacuuagcagcuauc

SEQ ID NO: 2282177 - RNA, 13 nt, Human
guacuuauuacug

SEQ ID NO: 2282178 - RNA, 15 nt, Human
guacuuauuacugcu

SEQ ID NO: 2282179 - RNA, 21 nt, Human
guacuucacugucaggaagaa

SEQ ID NO: 2282180 - RNA, 15 nt, Human
guacuucaugcuguc

SEQ ID NO: 2282181 - RNA, 21 nt, Human
guacuucaaauccuugaagau

SEQ ID NO: 2282182 - RNA, 22 nt, Human
guacuucaaauccuugaagauu

SEQ ID NO: 2282183 - RNA, 17 nt, Human
guacuuaaaugaaagca

SEQ ID NO: 2282184 - RNA, 23 nt, Human
guacuguucucuucuugaacacu

SEQ ID NO: 2282185 - RNA, 17 nt, Human
guacuguucugugucuu

SEQ ID NO: 2282186 - RNA, 18 nt, Human
guacuguucugugucuuu

SEQ ID NO: 2282187 - RNA, 15 nt, Human
guacuuaauaaauuc

SEQ ID NO: 2282188 - RNA, 19 nt, Human
guacuuaaaugaaagcaug

SEQ ID NO: 2282189 - RNA, 14 nt, Human
guacuuaacuauuc

SEQ ID NO: 2282190 - RNA, 23 nt, Human
guacuguguacagaauucugcua

SEQ ID NO: 2282191 - RNA, 14 nt, Human
guacuguucugugu

SEQ ID NO: 2282192 - RNA, 15 nt, Human
guacuguucuguguc

SEQ ID NO: 2282193 - RNA, 22 nt, Human
guacuagggggaagugacaagg

SEQ ID NO: 2282194 - RNA, 22 nt, Human
guacuagagaucugguuuugcu

SEQ ID NO: 2282195 - RNA, 21 nt, Human
guacuacuagaugucuuuagg

SEQ ID NO: 2282196 - RNA, 20 nt, Human
guacuacuagaugucuuuag

SEQ ID NO: 2282197 - RNA, 15 nt, Human
guacuacuagauguc

SEQ ID NO: 2282198 - RNA, 17 nt, Human
guacuacaguccuccca

SEQ ID NO: 2282199 - RNA, 13 nt, Human
guacuauguauca

SEQ ID NO: 2282200 - RNA, 17 nt, Human
guacuaguuacacaucu

SEQ ID NO: 2282201 - RNA, 16 nt, Human
guacuaguuacacauc

SEQ ID NO: 2282202 - RNA, 13 nt, Human
guacccacugcuc

SEQ ID NO: 2282203 - RNA, 14 nt, Human
guacccacugcucu

SEQ ID NO: 2282204 - RNA, 18 nt, Human
guacuacaguccucccau

SEQ ID NO: 2282205 - RNA, 19 nt, Human
guacuacaguccucccauc

SEQ ID NO: 2282206 - RNA, 20 nt, Human
guacucaucaucaacccuaa

SEQ ID NO: 2282207 - RNA, 15 nt, Human
guacuccugcaaaau

SEQ ID NO: 2282208 - RNA, 14 nt, Human
guacuccucccagg

SEQ ID NO: 2282209 - RNA, 13 nt, Human
guacucuuccgaa

SEQ ID NO: 2282210 - RNA, 15 nt, Human
guacucuccuagaga

SEQ ID NO: 2282211 - RNA, 14 nt, Human
guacucuuccgaaa

SEQ ID NO: 2282212 - RNA, 16 nt, Human
guacucugcacauacg

SEQ ID NO: 2282213 - RNA, 21 nt, Human
guacuccugcaaaauuuuaua

SEQ ID NO: 2282214 - RNA, 16 nt, Human
guacuccugcaaaauu

SEQ ID NO: 2282215 - RNA, 17 nt, Human
guacucgcuugugcaga

SEQ ID NO: 2282216 - RNA, 11 nt, Human
guacucuccua

SEQ ID NO: 2282217 - RNA, 14 nt, Human
guacucuccuagag

SEQ ID NO: 2282218 - RNA, 23 nt, Human
guacucuccuagagacagaagca

SEQ ID NO: 2282219 - RNA, 14 nt, Human
guacucauuaaaaa

SEQ ID NO: 2282220 - RNA, 23 nt, Human
guacucaggaggcugaggggagg

SEQ ID NO: 2282221 - RNA, 17 nt, Human
guacucaggaggcugag

SEQ ID NO: 2282222 - RNA, 15 nt, Human
guacucaaauguagc

SEQ ID NO: 2282223 - RNA, 21 nt, Human
guacuauuuagauauaacacu

SEQ ID NO: 2282224 - RNA, 13 nt, Human
guacuauucugau

SEQ ID NO: 2282225 - RNA, 17 nt, Human
guacuauguaucaauga

SEQ ID NO: 2282226 - RNA, 15 nt, Human
guacuauguaucaau

SEQ ID NO: 2282227 - RNA, 18 nt, Human
aaauaacuucaagcaaac

SEQ ID NO: 2282228 - RNA, 15 nt, Human
aaauaacuucaagca

SEQ ID NO: 2282229 - RNA, 17 nt, Human
aaauaacuaguguugcu

SEQ ID NO: 2282230 - RNA, 19 nt, Human
aaauaaccaauccuggaca

SEQ ID NO: 2282231 - RNA, 19 nt, Human
aaauaacaauguuaaggaa

SEQ ID NO: 2282232 - RNA, 21 nt, Human
aaauaacacacauauaaacau

SEQ ID NO: 2282233 - RNA, 13 nt, Human
aaauaacacacau

SEQ ID NO: 2282234 - RNA, 18 nt, Human
aaauaacaauguuaagga

SEQ ID NO: 2282235 - RNA, 14 nt, Human
aaauaaaaauauug

SEQ ID NO: 2282236 - RNA, 14 nt, Human
aaauaaaaauaaau

SEQ ID NO: 2282237 - RNA, 16 nt, Human
aaauaaaaauaaauuc

SEQ ID NO: 2282238 - RNA, 19 nt, Human
aaauaaaaaguuaaaaagu

SEQ ID NO: 2282239 - RNA, 15 nt, Human
aaauaaaaaguuaaa

SEQ ID NO: 2282240 - RNA, 13 nt, Human
aaauaaaaagaaa

SEQ ID NO: 2282241 - RNA, 14 nt, Human
aaauaaaaacuaaa

SEQ ID NO: 2282242 - RNA, 14 nt, Human
aaauaaaaagugac

SEQ ID NO: 2282243 - RNA, 15 nt, Human
aaauaaaaagugaca

SEQ ID NO: 2282244 - RNA, 19 nt, Human
aaauaaaaagugacacagc

SEQ ID NO: 2282245 - RNA, 14 nt, Human
aaauaaaaaguuaa

SEQ ID NO: 2282246 - RNA, 13 nt, Human
aaauaaaaaguua

SEQ ID NO: 2282247 - RNA, 12 nt, Human
aaauaaaaaguu

SEQ ID NO: 2282248 - RNA, 20 nt, Human
aaauaaaaagugacacagca

SEQ ID NO: 2282249 - RNA, 21 nt, Human
aaauaaaaagugacacagcag

SEQ ID NO: 2282250 - RNA, 20 nt, Human
aaaguuuaaaacagaagccu

SEQ ID NO: 2282251 - RNA, 18 nt, Human
aaaguugugauuccagau

SEQ ID NO: 2282252 - RNA, 13 nt, Human
aaauaaaaacaaa

SEQ ID NO: 2282253 - RNA, 10 nt, Human
aaauaaaaag

SEQ ID NO: 2282254 - RNA, 23 nt, Human
aaauaaaaacuaaauuguaaacu

SEQ ID NO: 2282255 - RNA, 16 nt, Human
aaaguuggugacagau

SEQ ID NO: 2282256 - RNA, 17 nt, Human
aaaguugguaaaccuuu

SEQ ID NO: 2282257 - RNA, 16 nt, Human
aaaguugguaaaccuu

SEQ ID NO: 2282258 - RNA, 12 nt, Human
aaauaagagaga

SEQ ID NO: 2282259 - RNA, 23 nt, Human
aaauaagacggauuuauuuuucc

SEQ ID NO: 2282260 - RNA, 17 nt, Human
aaauaagaauagaaaua

SEQ ID NO: 2282261 - RNA, 14 nt, Human
aaauaagaauagaa

SEQ ID NO: 2282262 - RNA, 16 nt, Human
aaauaacuucaagcaa

SEQ ID NO: 2282263 - RNA, 12 nt, Human
aaauaagaaaag

SEQ ID NO: 2282264 - RNA, 22 nt, Human
aaauaagaaaagauguagauuu

SEQ ID NO: 2282265 - RNA, 13 nt, Human
aaauaagaaaaga

SEQ ID NO: 2282266 - RNA, 24 nt, Human
aaauaagaaacaacucuuugagaa

SEQ ID NO: 2282267 - RNA, 15 nt, Human
aaauaagaaaaauca

SEQ ID NO: 2282268 - RNA, 14 nt, Human
aaauaagaaaccua

SEQ ID NO: 2282269 - RNA, 15 nt, Human
aaauaaucggcccac

SEQ ID NO: 2282270 - RNA, 14 nt, Human
aaauaaucauucuu

SEQ ID NO: 2282271 - RNA, 13 nt, Human
aaauaaucuauuu

SEQ ID NO: 2282272 - RNA, 22 nt, Human
aaauaaucuauuucuaugagaa

SEQ ID NO: 2282273 - RNA, 23 nt, Human
aaauaaucuauuucuaugagaaa

SEQ ID NO: 2282274 - RNA, 12 nt, Human
aaauaauaaauc

SEQ ID NO: 2282275 - RNA, 14 nt, Human
aaauaauaugcauu

SEQ ID NO: 2282276 - RNA, 12 nt, Human
aaauaauaugca

SEQ ID NO: 2282277 - RNA, 13 nt, Human
aaauaauaugcau

SEQ ID NO: 2282278 - RNA, 19 nt, Human
aaauaauaaagaugcucuu

SEQ ID NO: 2282279 - RNA, 17 nt, Human
aaauaauaaagaugcuc

SEQ ID NO: 2282280 - RNA, 15 nt, Human
aaauaauaauaaugu

SEQ ID NO: 2282281 - RNA, 12 nt, Human
aaauaauuuuau

SEQ ID NO: 2282282 - RNA, 20 nt, Human
guaaacagauggcacuuuga

SEQ ID NO: 2282283 - RNA, 17 nt, Human
aaauaauugauuucaag

SEQ ID NO: 2282284 - RNA, 12 nt, Human
aaauaauuuuaa

SEQ ID NO: 2282285 - RNA, 20 nt, Human
aaauaauuuuaaacaaaggu

SEQ ID NO: 2282286 - RNA, 18 nt, Human
aaauaauuuuaaacaaag

SEQ ID NO: 2282287 - RNA, 14 nt, Human
aaauaauuuuaaac

SEQ ID NO: 2282288 - RNA, 20 nt, Human
guaaacagugccugcugaau

SEQ ID NO: 2282289 - RNA, 18 nt, Human
guaaacagugccugcuga

SEQ ID NO: 2282290 - RNA, 17 nt, Human
guaaacagugccugcug

SEQ ID NO: 2282291 - RNA, 15 nt, Human
guaaacagugccugc

SEQ ID NO: 2282292 - RNA, 14 nt, Human
guaaacagugccug

SEQ ID NO: 2282293 - RNA, 13 nt, Human
guaaacagugccu

SEQ ID NO: 2282294 - RNA, 23 nt, Human
guaaacauaauucuuguauauua

SEQ ID NO: 2282295 - RNA, 22 nt, Human
guaaacagugccugcugaauga

SEQ ID NO: 2282296 - RNA, 14 nt, Human
guaaacauguguuu

SEQ ID NO: 2282297 - RNA, 20 nt, Human
guaaacauguguuuuaauuc

SEQ ID NO: 2282298 - RNA, 22 nt, Human
guaaacauguguuuuaauucca

SEQ ID NO: 2282299 - RNA, 13 nt, Human
guaaaccaaagcc

SEQ ID NO: 2282300 - RNA, 24 nt, Human
guaaacugugcaccaagcaggaaa

SEQ ID NO: 2282301 - RNA, 22 nt, Human
guaaaccccuuuaguggcuuca

SEQ ID NO: 2282302 - RNA, 21 nt, Human
aaaguuauuaauauuuuaauu

SEQ ID NO: 2282303 - RNA, 23 nt, Human
aaaguuagucuacucuuaagcca

SEQ ID NO: 2282304 - RNA, 16 nt, Human
aaaguuauauagguuu

SEQ ID NO: 2282305 - RNA, 20 nt, Human
aaaguuacuuugucagaggc

SEQ ID NO: 2282306 - RNA, 14 nt, Human
aaaguuagcugagc

SEQ ID NO: 2282307 - RNA, 14 nt, Human
aaaguuagucuacu

SEQ ID NO: 2282308 - RNA, 12 nt, Human
aaaguuacuagg

SEQ ID NO: 2282309 - RNA, 19 nt, Human
aaaguuacuaccugucaag

SEQ ID NO: 2282310 - RNA, 21 nt, Human
aaaguuacuagguaacuucau

SEQ ID NO: 2282311 - RNA, 22 nt, Human
aaaguuacugauucacugcaug

SEQ ID NO: 2282312 - RNA, 20 nt, Human
aaaguuacuagguaacuuca

SEQ ID NO: 2282313 - RNA, 15 nt, Human
aaaguuacuagguaa

SEQ ID NO: 2282314 - RNA, 12 nt, Human
aaaguugaaauu

SEQ ID NO: 2282315 - RNA, 21 nt, Human
aaaguucuguacucaaaugua

SEQ ID NO: 2282316 - RNA, 23 nt, Human
aaaguucugcagauaaacaguag

SEQ ID NO: 2282317 - RNA, 14 nt, Human
aaaguucuguacuc

SEQ ID NO: 2282318 - RNA, 16 nt, Human
aaaguucuagugaccg

SEQ ID NO: 2282319 - RNA, 17 nt, Human
aaaguucuguaaaauau

SEQ ID NO: 2282320 - RNA, 17 nt, Human
aaaguauuauuuuccaa

SEQ ID NO: 2282321 - RNA, 16 nt, Human
aaaguauuauuuucca

SEQ ID NO: 2282322 - RNA, 15 nt, Human
aaaguauuauuuucc

SEQ ID NO: 2282323 - RNA, 16 nt, Human
aaaguaucaugcauuc

SEQ ID NO: 2282324 - RNA, 21 nt, Human
aaaguauuuaauuagugcuaa

SEQ ID NO: 2282325 - RNA, 23 nt, Human
aaaguauuuaauuagugcuaagu

SEQ ID NO: 2282326 - RNA, 17 nt, Human
aaaguauuuaauuagug

SEQ ID NO: 2282327 - RNA, 18 nt, Human
aaaguauuuaauuagugc

SEQ ID NO: 2282328 - RNA, 19 nt, Human
aaaguauuuaauuagugcu

SEQ ID NO: 2282329 - RNA, 20 nt, Human
aaaguauuuaauuagugcua

SEQ ID NO: 2282330 - RNA, 19 nt, Human
aaaguauucuguacucuua

SEQ ID NO: 2282331 - RNA, 12 nt, Human
aaaguauucuuc

SEQ ID NO: 2282332 - RNA, 22 nt, Human
aaaguauucuucucuuccuuuu

SEQ ID NO: 2282333 - RNA, 16 nt, Human
aaaguacauguuaaac

SEQ ID NO: 2282334 - RNA, 14 nt, Human
aaaggugaaggaau

SEQ ID NO: 2282335 - RNA, 19 nt, Human
aaaguacuucuccacccug

SEQ ID NO: 2282336 - RNA, 12 nt, Human
aaaguacauuua

SEQ ID NO: 2282337 - RNA, 13 nt, Human
aaaguacauuuaa

SEQ ID NO: 2282338 - RNA, 14 nt, Human
aaaguacauuuaau

SEQ ID NO: 2282339 - RNA, 15 nt, Human
aaaguacauuuaaua

SEQ ID NO: 2282340 - RNA, 16 nt, Human
aaagguauaauuuuau

SEQ ID NO: 2282341 - RNA, 14 nt, Human
aaaggguguacuua

SEQ ID NO: 2282342 - RNA, 16 nt, Human
aaaggguguuuuucug

SEQ ID NO: 2282343 - RNA, 16 nt, Human
aaaggguuuuaaugua

SEQ ID NO: 2282344 - RNA, 20 nt, Human
aaagguauuuuaaucaccaa

SEQ ID NO: 2282345 - RNA, 14 nt, Human
aaagguauaauuuu

SEQ ID NO: 2282346 - RNA, 20 nt, Human
aaaguacacuguuucaaacu

SEQ ID NO: 2282347 - RNA, 14 nt, Human
aaaguauauguuag

SEQ ID NO: 2282348 - RNA, 12 nt, Human
aaaguaucaugc

SEQ ID NO: 2282349 - RNA, 14 nt, Human
aaaguaucaugcau

SEQ ID NO: 2282350 - RNA, 15 nt, Human
aaaguaucaugcauu

SEQ ID NO: 2282351 - RNA, 23 nt, Human
aaaguauauauuuauuuaagcuu

SEQ ID NO: 2282352 - RNA, 15 nt, Human
aaaguauauauuuau

SEQ ID NO: 2282353 - RNA, 14 nt, Human
aaaguauauauuua

SEQ ID NO: 2282354 - RNA, 22 nt, Human
aaaguauauauauauauuauau

SEQ ID NO: 2282355 - RNA, 18 nt, Human
aaaguauauauagaaucu

SEQ ID NO: 2282356 - RNA, 17 nt, Human
aaaguauauauagaauc

SEQ ID NO: 2282357 - RNA, 13 nt, Human
aaaguauauauag

SEQ ID NO: 2282358 - RNA, 14 nt, Human
aaaguaguaaaaau

SEQ ID NO: 2282359 - RNA, 18 nt, Human
aaaguaucccuacuguaa

SEQ ID NO: 2282360 - RNA, 18 nt, Human
aaaguauguuagugcaaa

SEQ ID NO: 2282361 - RNA, 23 nt, Human
aaaguacuucuccacccugcucu

SEQ ID NO: 2282362 - RNA, 21 nt, Human
aaaguaguaaaaauuaaaaaa

SEQ ID NO: 2282363 - RNA, 16 nt, Human
aaaguaguccugugaa

SEQ ID NO: 2282364 - RNA, 20 nt, Human
aaaguacuucuccacccugc

SEQ ID NO: 2282365 - RNA, 21 nt, Human
aaaguacuucuccacccugcu

SEQ ID NO: 2282366 - RNA, 15 nt, Human
aaauauacacacagc

SEQ ID NO: 2282367 - RNA, 23 nt, Human
aaauacugccagaugcugauguu

SEQ ID NO: 2282368 - RNA, 15 nt, Human
aaauacuguacaaug

SEQ ID NO: 2282369 - RNA, 14 nt, Human
aaauacuguacaau

SEQ ID NO: 2282370 - RNA, 18 nt, Human
aaauacugccagaugcug

SEQ ID NO: 2282371 - RNA, 20 nt, Human
aaauacugccagaugcugau

SEQ ID NO: 2282372 - RNA, 17 nt, Human
aaauacucauguguaug

SEQ ID NO: 2282373 - RNA, 21 nt, Human
aaauacucauguguaugggca

SEQ ID NO: 2282374 - RNA, 17 nt, Human
aaauacugcaagaaaau

SEQ ID NO: 2282375 - RNA, 13 nt, Human
aaauacugccaga

SEQ ID NO: 2282376 - RNA, 17 nt, Human
aaauacugccagaugcu

SEQ ID NO: 2282377 - RNA, 16 nt, Human
aaauacuauuuuuacu

SEQ ID NO: 2282378 - RNA, 21 nt, Human
aaauacuauuuuuacugccac

SEQ ID NO: 2282379 - RNA, 22 nt, Human
aaauacuauuuuuacugccacu

SEQ ID NO: 2282380 - RNA, 14 nt, Human
aaauacucaugugu

SEQ ID NO: 2282381 - RNA, 15 nt, Human
aaauacucaugugua

SEQ ID NO: 2282382 - RNA, 16 nt, Human
aaauacucauguguau

SEQ ID NO: 2282383 - RNA, 21 nt, Human
aaauaccaaaauuauuucaga

SEQ ID NO: 2282384 - RNA, 23 nt, Human
aaauaccaaaauuauuucagaaa

SEQ ID NO: 2282385 - RNA, 14 nt, Human
aaauacuacuccug

SEQ ID NO: 2282386 - RNA, 15 nt, Human
aaauacuacuccugu

SEQ ID NO: 2282387 - RNA, 20 nt, Human
aaauacuauuuaaagccucc

SEQ ID NO: 2282388 - RNA, 18 nt, Human
aaauaccagccaguaaau

SEQ ID NO: 2282389 - RNA, 18 nt, Human
aaauacacauagcaugua

SEQ ID NO: 2282390 - RNA, 19 nt, Human
aaauacaacuuaaauaaua

SEQ ID NO: 2282391 - RNA, 19 nt, Human
aaauacacacucaaaucaa

SEQ ID NO: 2282392 - RNA, 17 nt, Human
aaauacagauagauaua

SEQ ID NO: 2282393 - RNA, 17 nt, Human
aaauacacaaguaaaca

SEQ ID NO: 2282394 - RNA, 21 nt, Human
aaauacaccaccucacuccug

SEQ ID NO: 2282395 - RNA, 22 nt, Human
aaauacaccaccucacuccugu

SEQ ID NO: 2282396 - RNA, 23 nt, Human
aaauacaccaccucacuccuguu

SEQ ID NO: 2282397 - RNA, 14 nt, Human
aaauacagacacua

SEQ ID NO: 2282398 - RNA, 16 nt, Human
aaauacagacacuaag

SEQ ID NO: 2282399 - RNA, 17 nt, Human
aaauacagacacuaagu

SEQ ID NO: 2282400 - RNA, 14 nt, Human
aaauacaugcaucu

SEQ ID NO: 2282401 - RNA, 13 nt, Human
aaauacaugacau

SEQ ID NO: 2282402 - RNA, 16 nt, Human
aaauacauauuuccaa

SEQ ID NO: 2282403 - RNA, 23 nt, Human
aaauacagucuuccauuugcaag

SEQ ID NO: 2282404 - RNA, 22 nt, Human
aaauacagucuuccauuugcaa

SEQ ID NO: 2282405 - RNA, 22 nt, Human
aaauacaguuugucacaugaaa

SEQ ID NO: 2282406 - RNA, 20 nt, Human
aaauacaguuugucacauga

SEQ ID NO: 2282407 - RNA, 15 nt, Human
aaauacagauuuuga

SEQ ID NO: 2282408 - RNA, 22 nt, Human
aaauacagacacuaaguuauag

SEQ ID NO: 2282409 - RNA, 17 nt, Human
aaauacagauuuugaua

SEQ ID NO: 2282410 - RNA, 23 nt, Human
aaauacagauuuugauagcaaag

SEQ ID NO: 2282411 - RNA, 17 nt, Human
aaauacagcuggauugg

SEQ ID NO: 2282412 - RNA, 15 nt, Human
aaauacaaaacuucc

SEQ ID NO: 2282413 - RNA, 22 nt, Human
aaauaauuuuuauauuugaaau

SEQ ID NO: 2282414 - RNA, 23 nt, Human
aaauaauuuuuauauuugaaaua

SEQ ID NO: 2282415 - RNA, 15 nt, Human
aaauacacacucaaa

SEQ ID NO: 2282416 - RNA, 15 nt, Human
guaauuuuauaugaa

SEQ ID NO: 2282417 - RNA, 18 nt, Human
guaauuuuauaugaagau

SEQ ID NO: 2282418 - RNA, 14 nt, Human
guaauuuugccaaa

SEQ ID NO: 2282419 - RNA, 20 nt, Human
guacacagcucuagacacug

SEQ ID NO: 2282420 - RNA, 21 nt, Human
guaauuuuuuuaauuuacaaa

SEQ ID NO: 2282421 - RNA, 21 nt, Human
guaauuuuguucuaguuuuca

SEQ ID NO: 2282422 - RNA, 14 nt, Human
guacacguguccug

SEQ ID NO: 2282423 - RNA, 15 nt, Human
guacacguguccugu

SEQ ID NO: 2282424 - RNA, 15 nt, Human
guacacugaauauuu

SEQ ID NO: 2282425 - RNA, 14 nt, Human
guacacugaauauu

SEQ ID NO: 2282426 - RNA, 17 nt, Human
guacacguguccuguag

SEQ ID NO: 2282427 - RNA, 23 nt, Human
guacacugccuucucaacuccaa

SEQ ID NO: 2282428 - RNA, 21 nt, Human
aaauaauuuuuauauuugaaa

SEQ ID NO: 2282429 - RNA, 15 nt, Human
guaauccaccugccu

SEQ ID NO: 2282430 - RNA, 12 nt, Human
guaaucccagca

SEQ ID NO: 2282431 - RNA, 17 nt, Human
guaauccaucacuagcc

SEQ ID NO: 2282432 - RNA, 14 nt, Human
guaaucccagcacu

SEQ ID NO: 2282433 - RNA, 16 nt, Human
guaaucccagcacuuu

SEQ ID NO: 2282434 - RNA, 15 nt, Human
guaaucccagcacuu

SEQ ID NO: 2282435 - RNA, 13 nt, Human
guaaucccagcag

SEQ ID NO: 2282436 - RNA, 18 nt, Human
guaaucccagcacuuugg

SEQ ID NO: 2282437 - RNA, 20 nt, Human
guaaucccagcacuuuggga

SEQ ID NO: 2282438 - RNA, 23 nt, Human
guaaucauuucuugggcccuccu

SEQ ID NO: 2282439 - RNA, 22 nt, Human
guaaucauuucuugggcccucc

SEQ ID NO: 2282440 - RNA, 15 nt, Human
guaauauauugcugc

SEQ ID NO: 2282441 - RNA, 16 nt, Human
guaauauauugcugcu

SEQ ID NO: 2282442 - RNA, 18 nt, Human
guaauauauugcugcugg

SEQ ID NO: 2282443 - RNA, 20 nt, Human
guaauauauugcugcuggua

SEQ ID NO: 2282444 - RNA, 21 nt, Human
guaauccaagcaaaugugaau

SEQ ID NO: 2282445 - RNA, 18 nt, Human
guaauaugcacacauuuu

SEQ ID NO: 2282446 - RNA, 17 nt, Human
guaauaugcacacauuu

SEQ ID NO: 2282447 - RNA, 16 nt, Human
guaauaugcacacauu

SEQ ID NO: 2282448 - RNA, 14 nt, Human
guaauaugcacaca

SEQ ID NO: 2282449 - RNA, 21 nt, Human
guaaucccagcuacucaggag

SEQ ID NO: 2282450 - RNA, 18 nt, Human
guaaucccagcuacucag

SEQ ID NO: 2282451 - RNA, 17 nt, Human
guaaucccagcuacuca

SEQ ID NO: 2282452 - RNA, 12 nt, Human
guaaucccagcu

SEQ ID NO: 2282453 - RNA, 21 nt, Human
guaauuguugcuaaucuucuu

SEQ ID NO: 2282454 - RNA, 23 nt, Human
guaauuguuguuuguauguauaa

SEQ ID NO: 2282455 - RNA, 21 nt, Human
guaauuguuguuuguauguau

SEQ ID NO: 2282456 - RNA, 19 nt, Human
guaauuguuguuuguaugu

SEQ ID NO: 2282457 - RNA, 17 nt, Human
guaauuguuguuuguau

SEQ ID NO: 2282458 - RNA, 20 nt, Human
guaauuuaaaauugugaugu

SEQ ID NO: 2282459 - RNA, 19 nt, Human
guaauuuaaaauugugaug

SEQ ID NO: 2282460 - RNA, 11 nt, Human
guaauuuauuu

SEQ ID NO: 2282461 - RNA, 13 nt, Human
guaauuucuuugc

SEQ ID NO: 2282462 - RNA, 14 nt, Human
guaauuucuuugcc

SEQ ID NO: 2282463 - RNA, 23 nt, Human
guaauuugagagaaauaugaaga

SEQ ID NO: 2282464 - RNA, 22 nt, Human
guaauuucuuugccuguucagu

SEQ ID NO: 2282465 - RNA, 22 nt, Human
guaauuugugauacaaugcugu

SEQ ID NO: 2282466 - RNA, 16 nt, Human
guaauuugaggacaac

SEQ ID NO: 2282467 - RNA, 23 nt, Human
guaauuuaaaauugugauguguc

SEQ ID NO: 2282468 - RNA, 14 nt, Human
guaauuuaaacagg

SEQ ID NO: 2282469 - RNA, 16 nt, Human
guaauuuaaacaggcc

SEQ ID NO: 2282470 - RNA, 19 nt, Human
guaauuuaaacaggcccag

SEQ ID NO: 2282471 - RNA, 17 nt, Human
guaauuuaguuauugau

SEQ ID NO: 2282472 - RNA, 20 nt, Human
guaauuuaaacaggcccagc

SEQ ID NO: 2282473 - RNA, 21 nt, Human
guaauuuaaacaggcccagca

SEQ ID NO: 2282474 - RNA, 11 nt, Human
guaauaaauau

SEQ ID NO: 2282475 - RNA, 12 nt, Human
guaauaaauaug

SEQ ID NO: 2282476 - RNA, 15 nt, Human
guaauaaacuuuaau

SEQ ID NO: 2282477 - RNA, 14 nt, Human
guaacuggcugugu

SEQ ID NO: 2282478 - RNA, 15 nt, Human
guaauaacugugaag

SEQ ID NO: 2282479 - RNA, 16 nt, Human
guaauaacugugaagu

SEQ ID NO: 2282480 - RNA, 22 nt, Human
guaauaacugugaaguuuacau

SEQ ID NO: 2282481 - RNA, 13 nt, Human
guaauaaauauga

SEQ ID NO: 2282482 - RNA, 14 nt, Human
guaauaaauaugag

SEQ ID NO: 2282483 - RNA, 16 nt, Human
guaauaaauaugagug

SEQ ID NO: 2282484 - RNA, 12 nt, Human
guaauauauugc

SEQ ID NO: 2282485 - RNA, 13 nt, Human
guaauauauugcu

SEQ ID NO: 2282486 - RNA, 23 nt, Human
guaauaagacauaacguuuuucc

SEQ ID NO: 2282487 - RNA, 13 nt, Human
guaauaagacaua

SEQ ID NO: 2282488 - RNA, 14 nt, Human
guaauaagacauaa

SEQ ID NO: 2282489 - RNA, 19 nt, Human
guaauaagacauaacguuu

SEQ ID NO: 2282490 - RNA, 17 nt, Human
guaauagauuauaguug

SEQ ID NO: 2282491 - RNA, 20 nt, Human
guaauaggcguaacuaauuu

SEQ ID NO: 2282492 - RNA, 13 nt, Human
guaacugacaacu

SEQ ID NO: 2282493 - RNA, 17 nt, Human
guaacuccaccaaccca

SEQ ID NO: 2282494 - RNA, 12 nt, Human
guaacuccacca

SEQ ID NO: 2282495 - RNA, 23 nt, Human
guaacucuaauucccauuuugca

SEQ ID NO: 2282496 - RNA, 21 nt, Human
guaaagaaauuuaaaagacac

SEQ ID NO: 2282497 - RNA, 23 nt, Human
guaaagaaagagagaaaauaaaa

SEQ ID NO: 2282498 - RNA, 22 nt, Human
guaaagaaauuuaaaagacacu

SEQ ID NO: 2282499 - RNA, 13 nt, Human
guaacucaucugu

SEQ ID NO: 2282500 - RNA, 15 nt, Human
guaacucaucuguca

SEQ ID NO: 2282501 - RNA, 19 nt, Human
guaacugcauugagaacug

SEQ ID NO: 2282502 - RNA, 18 nt, Human
guaacugcauugagaacu

SEQ ID NO: 2282503 - RNA, 22 nt, Human
guaacugcauugagaacugcau

SEQ ID NO: 2282504 - RNA, 19 nt, Human
guaacucuaauucccauuu

SEQ ID NO: 2282505 - RNA, 14 nt, Human
guaacugcugaaaa

SEQ ID NO: 2282506 - RNA, 15 nt, Human
guaacugcugaaaac

SEQ ID NO: 2282507 - RNA, 14 nt, Human
guaaagaaagagag

SEQ ID NO: 2282508 - RNA, 16 nt, Human
guaaacuuuuugugcu

SEQ ID NO: 2282509 - RNA, 20 nt, Human
guaaacuguguauuccaaga

SEQ ID NO: 2282510 - RNA, 16 nt, Human
guaaacuguggaugau

SEQ ID NO: 2282511 - RNA, 22 nt, Human
guaaagaaagagagaaaauaaa

SEQ ID NO: 2282512 - RNA, 21 nt, Human
guaaagaaagagagaaaauaa

SEQ ID NO: 2282513 - RNA, 20 nt, Human
guaaagaaagagagaaaaua

SEQ ID NO: 2282514 - RNA, 19 nt, Human
guaaagaaagagagaaaau

SEQ ID NO: 2282515 - RNA, 18 nt, Human
guaaagaaagagagaaaa

SEQ ID NO: 2282516 - RNA, 17 nt, Human
guaaagaaagagagaaa

SEQ ID NO: 2282517 - RNA, 16 nt, Human
guaaagaaagagagaa

SEQ ID NO: 2282518 - RNA, 15 nt, Human
guaaagaaagagaga

SEQ ID NO: 2282519 - RNA, 17 nt, Human
aaacaauauuguuucua

SEQ ID NO: 2282520 - RNA, 16 nt, Human
aaacaauauuguuucu

SEQ ID NO: 2282521 - RNA, 19 nt, Human
aaacacaaacgggcucagc

SEQ ID NO: 2282522 - RNA, 11 nt, Human
aaacacagcaa

SEQ ID NO: 2282523 - RNA, 15 nt, Human
aaacaauauuguuuc

SEQ ID NO: 2282524 - RNA, 14 nt, Human
aaacaauauuguuu

SEQ ID NO: 2282525 - RNA, 21 nt, Human
aaacaauacucauaaugugaa

SEQ ID NO: 2282526 - RNA, 22 nt, Human
aaacaauaguaauucucaggcc

SEQ ID NO: 2282527 - RNA, 21 nt, Human
aaacaaauucauauucugucu

SEQ ID NO: 2282528 - RNA, 16 nt, Human
aaacaacaauuucuac

SEQ ID NO: 2282529 - RNA, 16 nt, Human
aaacaauaaaugugca

SEQ ID NO: 2282530 - RNA, 22 nt, Human
aaacaacaauuucuacuuugaa

SEQ ID NO: 2282531 - RNA, 12 nt, Human
aaacaaauaugc

SEQ ID NO: 2282532 - RNA, 23 nt, Human
aaacaaagcuuagcaggagagga

SEQ ID NO: 2282533 - RNA, 17 nt, Human
aaacaaaguuacuaggu

SEQ ID NO: 2282534 - RNA, 13 nt, Human
aaacaaauaugca

SEQ ID NO: 2282535 - RNA, 14 nt, Human
aaacaaauaugcaa

SEQ ID NO: 2282536 - RNA, 17 nt, Human
aaacaaauaugcaaaag

SEQ ID NO: 2282537 - RNA, 19 nt, Human
aaacaaauucauauucugu

SEQ ID NO: 2282538 - RNA, 16 nt, Human
aaacacaucuucccua

SEQ ID NO: 2282539 - RNA, 14 nt, Human
aaacacaucuuccc

SEQ ID NO: 2282540 - RNA, 18 nt, Human
aaacacaucuuuccuguc

SEQ ID NO: 2282541 - RNA, 11 nt, Human
aaacacauuuu

SEQ ID NO: 2282542 - RNA, 16 nt, Human
aaacacaguguuuuug

SEQ ID NO: 2282543 - RNA, 19 nt, Human
aaacacaguguuuuuguaa

SEQ ID NO: 2282544 - RNA, 20 nt, Human
aaacacaguguuuuuguaaa

SEQ ID NO: 2282545 - RNA, 20 nt, Human
aaacacaaaaguuagcugag

SEQ ID NO: 2282546 - RNA, 18 nt, Human
aaacacaguuacacuugu

SEQ ID NO: 2282547 - RNA, 13 nt, Human
aaacacaguuaca

SEQ ID NO: 2282548 - RNA, 16 nt, Human
aaacacaguuacacuu

SEQ ID NO: 2282549 - RNA, 14 nt, Human
aaacacagcaaggg

SEQ ID NO: 2282550 - RNA, 12 nt, Human
aaacacagcaag

SEQ ID NO: 2282551 - RNA, 13 nt, Human
aaaauuuuauucc

SEQ ID NO: 2282552 - RNA, 20 nt, Human
aaaauuuugauguuuuaagg

SEQ ID NO: 2282553 - RNA, 13 nt, Human
aaacaaagccaga

SEQ ID NO: 2282554 - RNA, 14 nt, Human
aaaauuuuauagcu

SEQ ID NO: 2282555 - RNA, 15 nt, Human
aaacaaagcuuagca

SEQ ID NO: 2282556 - RNA, 17 nt, Human
aaacaaagcuuagcagg

SEQ ID NO: 2282557 - RNA, 22 nt, Human
aaacaaagcuuagcaggagagg

SEQ ID NO: 2282558 - RNA, 17 nt, Human
aaacaaagguugagaug

SEQ ID NO: 2282559 - RNA, 19 nt, Human
aaaauuuagaaauauaauu

SEQ ID NO: 2282560 - RNA, 18 nt, Human
aaaauuuaagugcgugug

SEQ ID NO: 2282561 - RNA, 23 nt, Human
aaaauuuaagugcguguguagag

SEQ ID NO: 2282562 - RNA, 15 nt, Human
aaaauuuaguuuuug

SEQ ID NO: 2282563 - RNA, 16 nt, Human
aaaauuuaguuuuugu

SEQ ID NO: 2282564 - RNA, 19 nt, Human
aaaauuuaguuuuuguucu

SEQ ID NO: 2282565 - RNA, 23 nt, Human
aaaauuuaguuuuuguucuuaau

SEQ ID NO: 2282566 - RNA, 16 nt, Human
aaaauuuguuuugacg

SEQ ID NO: 2282567 - RNA, 20 nt, Human
aaaauuucaacaaguagcua

SEQ ID NO: 2282568 - RNA, 21 nt, Human
aaaauuuuauaaaauuaagca

SEQ ID NO: 2282569 - RNA, 22 nt, Human
aaaauuuguuuugacggaugau

SEQ ID NO: 2282570 - RNA, 23 nt, Human
aaaauuuaagcauuguuugcuua

SEQ ID NO: 2282571 - RNA, 21 nt, Human
aaaauuuaagcauuguuugcu

SEQ ID NO: 2282572 - RNA, 19 nt, Human
aaaauuuaaguaucuuuuu

SEQ ID NO: 2282573 - RNA, 15 nt, Human
aaaauuuaagugcgu

SEQ ID NO: 2282574 - RNA, 16 nt, Human
aaaauuuaagcauugu

SEQ ID NO: 2282575 - RNA, 15 nt, Human
aaaauuuaagcauug

SEQ ID NO: 2282576 - RNA, 14 nt, Human
aaaauuuaagcauu

SEQ ID NO: 2282577 - RNA, 21 nt, Human
aaaauguuggucauuuuaugu

SEQ ID NO: 2282578 - RNA, 15 nt, Human
aaaauguuuuagcaa

SEQ ID NO: 2282579 - RNA, 18 nt, Human
aaaauguuuuagcaauuu

SEQ ID NO: 2282580 - RNA, 14 nt, Human
aaaauguugagaau

SEQ ID NO: 2282581 - RNA, 15 nt, Human
aaaauguuggauuua

SEQ ID NO: 2282582 - RNA, 19 nt, Human
aaaauguuggauuuauaaa

SEQ ID NO: 2282583 - RNA, 20 nt, Human
aaaauguuggauuuauaaau

SEQ ID NO: 2282584 - RNA, 22 nt, Human
aaaauguuggauuuauaaaugc

SEQ ID NO: 2282585 - RNA, 13 nt, Human
aaaauguugaaaa

SEQ ID NO: 2282586 - RNA, 19 nt, Human
aaaauguugaaaagucaaa

SEQ ID NO: 2282587 - RNA, 17 nt, Human
aaaauguugaaaaguca

SEQ ID NO: 2282588 - RNA, 17 nt, Human
gggaugccaucuguggg

SEQ ID NO: 2282589 - RNA, 21 nt, Human
gggaugagcauggagcuggcc

SEQ ID NO: 2282590 - RNA, 15 nt, Human
gggaugagccgcugu

SEQ ID NO: 2282591 - RNA, 20 nt, Human
gggaugagcucaagcaggaa

SEQ ID NO: 2282592 - RNA, 22 nt, Human
gggaugaugccacaccaagcug

SEQ ID NO: 2282593 - RNA, 16 nt, Human
aaaauguuauuuaaca

SEQ ID NO: 2282594 - RNA, 16 nt, Human
aaaauguucagaaggu

SEQ ID NO: 2282595 - RNA, 23 nt, Human
gggaugacuagaggcagggaggg

SEQ ID NO: 2282596 - RNA, 15 nt, Human
gggaugacugugauu

SEQ ID NO: 2282597 - RNA, 17 nt, Human
gggaugacuagaggcag

SEQ ID NO: 2282598 - RNA, 20 nt, Human
gggaugacaugcacucagcu

SEQ ID NO: 2282599 - RNA, 15 nt, Human
gggaugagaguuuug

SEQ ID NO: 2282600 - RNA, 16 nt, Human
gggaugagaagagggg

SEQ ID NO: 2282601 - RNA, 20 nt, Human
gggaugagcauggagcuggc

SEQ ID NO: 2282602 - RNA, 13 nt, Human
gggaugagaaagg

SEQ ID NO: 2282603 - RNA, 15 nt, Human
ggggaauucaucucu

SEQ ID NO: 2282604 - RNA, 16 nt, Human
ggggaaguccucuggg

SEQ ID NO: 2282605 - RNA, 19 nt, Human
ggggaauugaggacacuga

SEQ ID NO: 2282606 - RNA, 22 nt, Human
ggggacagaggccugcccgggc

SEQ ID NO: 2282607 - RNA, 15 nt, Human
ggggaccagagcugc

SEQ ID NO: 2282608 - RNA, 16 nt, Human
ggggaccagagcugcc

SEQ ID NO: 2282609 - RNA, 18 nt, Human
ggggaauguuugccucug

SEQ ID NO: 2282610 - RNA, 22 nt, Human
ggggaauguuugccucugccuc

SEQ ID NO: 2282611 - RNA, 14 nt, Human
ggggaagcccugga

SEQ ID NO: 2282612 - RNA, 14 nt, Human
ggggaagagcacag

SEQ ID NO: 2282613 - RNA, 18 nt, Human
ggggaagagcacagcccu

SEQ ID NO: 2282614 - RNA, 16 nt, Human
ggggaagaguguacug

SEQ ID NO: 2282615 - RNA, 13 nt, Human
ggggaagcccugg

SEQ ID NO: 2282616 - RNA, 13 nt, Human
ggggaagggccag

SEQ ID NO: 2282617 - RNA, 22 nt, Human
ggggaagggccagucugggcug

SEQ ID NO: 2282618 - RNA, 23 nt, Human
ggggaagggccagucugggcugc

SEQ ID NO: 2282619 - RNA, 13 nt, Human
ggggaaggcaggg

SEQ ID NO: 2282620 - RNA, 14 nt, Human
aaacauguguuuua

SEQ ID NO: 2282621 - RNA, 16 nt, Human
aaacauguuagaagca

SEQ ID NO: 2282622 - RNA, 18 nt, Human
aaacauguacaaaaucga

SEQ ID NO: 2282623 - RNA, 22 nt, Human
aaacaugucuccuauccugguu

SEQ ID NO: 2282624 - RNA, 17 nt, Human
aaacauguuagaagcaa

SEQ ID NO: 2282625 - RNA, 21 nt, Human
aaacaugguagaauuggagag

SEQ ID NO: 2282626 - RNA, 22 nt, Human
aaacaugggguuggcugggccc

SEQ ID NO: 2282627 - RNA, 15 nt, Human
aaacaugguuacaau

SEQ ID NO: 2282628 - RNA, 17 nt, Human
aaacaugguuacaauca

SEQ ID NO: 2282629 - RNA, 17 nt, Human
aaacauggccuuugcuu

SEQ ID NO: 2282630 - RNA, 17 nt, Human
aaacaggucaauacagu

SEQ ID NO: 2282631 - RNA, 14 nt, Human
aaacaguagugaua

SEQ ID NO: 2282632 - RNA, 16 nt, Human
aaacauggccuuugcu

SEQ ID NO: 2282633 - RNA, 15 nt, Human
aaacagucucaggaa

SEQ ID NO: 2282634 - RNA, 18 nt, Human
ggggacccccgcccccug

SEQ ID NO: 2282635 - RNA, 11 nt, Human
ggggacccugu

SEQ ID NO: 2282636 - RNA, 13 nt, Human
ggggacccccgcc

SEQ ID NO: 2282637 - RNA, 15 nt, Human
ggggacccccgcccc

SEQ ID NO: 2282638 - RNA, 21 nt, Human
ggggacccaauguaggagcug

SEQ ID NO: 2282639 - RNA, 13 nt, Human
ggggacucagccc

SEQ ID NO: 2282640 - RNA, 18 nt, Human
ggggacggggggccccag

SEQ ID NO: 2282641 - RNA, 23 nt, Human
ggggacggggggccccagucagc

SEQ ID NO: 2282642 - RNA, 23 nt, Human
ggggacgcugguagagauggagg

SEQ ID NO: 2282643 - RNA, 21 nt, Human
ggggacgcugguagagaugga

SEQ ID NO: 2282644 - RNA, 15 nt, Human
ggggacucagcccug

SEQ ID NO: 2282645 - RNA, 14 nt, Human
ggggacucagcccu

SEQ ID NO: 2282646 - RNA, 11 nt, Human
ggggagaaagu

SEQ ID NO: 2282647 - RNA, 14 nt, Human
ggggacugucuuuc

SEQ ID NO: 2282648 - RNA, 16 nt, Human
ggggacucagcccuga

SEQ ID NO: 2282649 - RNA, 21 nt, Human
ggggacuagccccuguggaga

SEQ ID NO: 2282650 - RNA, 22 nt, Human
ggggccgcugccacccaccucc

SEQ ID NO: 2282651 - RNA, 14 nt, Human
ggggccgcugccac

SEQ ID NO: 2282652 - RNA, 19 nt, Human
ggggacuuacaugauucau

SEQ ID NO: 2282653 - RNA, 14 nt, Human
gggggccaggugca

SEQ ID NO: 2282654 - RNA, 12 nt, Human
ggggccucaggu

SEQ ID NO: 2282655 - RNA, 23 nt, Human
ggggccuaggccucagccagaga

SEQ ID NO: 2282656 - RNA, 19 nt, Human
ggggccuaucagugugccc

SEQ ID NO: 2282657 - RNA, 23 nt, Human
ggggccuaucagugugcccccca

SEQ ID NO: 2282658 - RNA, 21 nt, Human
gggggccccagucagccucuc

SEQ ID NO: 2282659 - RNA, 19 nt, Human
gggggccccagucagccuc

SEQ ID NO: 2282660 - RNA, 20 nt, Human
gggggccccagucagccucu

SEQ ID NO: 2282661 - RNA, 21 nt, Human
gggggccaugaggccucagug

SEQ ID NO: 2282662 - RNA, 17 nt, Human
gggggccccagucagcc

SEQ ID NO: 2282663 - RNA, 15 nt, Human
gggggccaugagcuc

SEQ ID NO: 2282664 - RNA, 14 nt, Human
gggggccaugagcu

SEQ ID NO: 2282665 - RNA, 15 nt, Human
ggggccucagugcca

SEQ ID NO: 2282666 - RNA, 20 nt, Human
ggggccuaggccucagccag

SEQ ID NO: 2282667 - RNA, 23 nt, Human
ggggccuacagcuuugaucccug

SEQ ID NO: 2282668 - RNA, 12 nt, Human
gggggccucagu

SEQ ID NO: 2282669 - RNA, 15 nt, Human
gggggccucagugcc

SEQ ID NO: 2282670 - RNA, 17 nt, Human
gggggccucagugccac

SEQ ID NO: 2282671 - RNA, 18 nt, Human
gggggccucagugccacu

SEQ ID NO: 2282672 - RNA, 23 nt, Human
gggucggaacccaagcuuagaac

SEQ ID NO: 2282673 - RNA, 14 nt, Human
gggucggcugacca

SEQ ID NO: 2282674 - RNA, 15 nt, Human
gggucggcugaccau

SEQ ID NO: 2282675 - RNA, 12 nt, Human
aaacauuaagaa

SEQ ID NO: 2282676 - RNA, 20 nt, Human
gggucggcugaccaugcuca

SEQ ID NO: 2282677 - RNA, 13 nt, Human
aaacauuaagaaa

SEQ ID NO: 2282678 - RNA, 14 nt, Human
aaacauuaagaaaa

SEQ ID NO: 2282679 - RNA, 15 nt, Human
aaacauuaagaaaau

SEQ ID NO: 2282680 - RNA, 16 nt, Human
aaacauuaagaaaauc

SEQ ID NO: 2282681 - RNA, 13 nt, Human
gggucgcccugga

SEQ ID NO: 2282682 - RNA, 15 nt, Human
gggucgcccuggacu

SEQ ID NO: 2282683 - RNA, 16 nt, Human
gggucccagccacccc

SEQ ID NO: 2282684 - RNA, 17 nt, Human
gggucccacuuccccuc

SEQ ID NO: 2282685 - RNA, 14 nt, Human
gggucccaguggga

SEQ ID NO: 2282686 - RNA, 16 nt, Human
gggucccagugggagg

SEQ ID NO: 2282687 - RNA, 17 nt, Human
gggucccagugggaggg

SEQ ID NO: 2282688 - RNA, 22 nt, Human
gggucccagugggaggggcagg

SEQ ID NO: 2282689 - RNA, 23 nt, Human
gggucccagugggaggggcaggc

SEQ ID NO: 2282690 - RNA, 12 nt, Human
ggguccaugggc

SEQ ID NO: 2282691 - RNA, 13 nt, Human
gggucccaagcug

SEQ ID NO: 2282692 - RNA, 15 nt, Human
gggucccaagcuggg

SEQ ID NO: 2282693 - RNA, 17 nt, Human
gggucccaagcugggcc

SEQ ID NO: 2282694 - RNA, 20 nt, Human
gggucccaagcugggcccca

SEQ ID NO: 2282695 - RNA, 22 nt, Human
gggucccaagcugggccccagc

SEQ ID NO: 2282696 - RNA, 23 nt, Human
gggucccaagcugggccccagcc

SEQ ID NO: 2282697 - RNA, 22 nt, Human
ggguccccaucaucccagcugc

SEQ ID NO: 2282698 - RNA, 17 nt, Human
ggguccccaucauccca

SEQ ID NO: 2282699 - RNA, 16 nt, Human
gggucccugcuguguu

SEQ ID NO: 2282700 - RNA, 13 nt, Human
ggggguggccgcu

SEQ ID NO: 2282701 - RNA, 13 nt, Human
ggggguggaggcu

SEQ ID NO: 2282702 - RNA, 16 nt, Human
ggguccagggagcagg

SEQ ID NO: 2282703 - RNA, 17 nt, Human
ggguccagggagcaggc

SEQ ID NO: 2282704 - RNA, 19 nt, Human
ggguccaggggaugggagg

SEQ ID NO: 2282705 - RNA, 19 nt, Human
gggggugcugggccccugc

SEQ ID NO: 2282706 - RNA, 22 nt, Human
gggggcuauagcuacaggaagc

SEQ ID NO: 2282707 - RNA, 20 nt, Human
ggggguagagcugauccaga

SEQ ID NO: 2282708 - RNA, 16 nt, Human
ggggguccacccagca

SEQ ID NO: 2282709 - RNA, 18 nt, Human
gggggucccagugggagg

SEQ ID NO: 2282710 - RNA, 22 nt, Human
gggggucccagugggaggggca

SEQ ID NO: 2282711 - RNA, 23 nt, Human
ggggggcccgccuggcagaacug

SEQ ID NO: 2282712 - RNA, 14 nt, Human
ggggguagagcuga

SEQ ID NO: 2282713 - RNA, 15 nt, Human
ggggguagagcugau

SEQ ID NO: 2282714 - RNA, 22 nt, Human
aaaccucuccucauguucugcu

SEQ ID NO: 2282715 - RNA, 11 nt, Human
aaaccucuccu

SEQ ID NO: 2282716 - RNA, 19 nt, Human
aaaccucuaauuuauuuug

SEQ ID NO: 2282717 - RNA, 20 nt, Human
aaaccucuaauuuauuuugu

SEQ ID NO: 2282718 - RNA, 24 nt, Human
aaaccucuaauuuauuuugucgaa

SEQ ID NO: 2282719 - RNA, 16 nt, Human
aaaccucuacuaaaaa

SEQ ID NO: 2282720 - RNA, 21 nt, Human
aaaccucuguucaguguaaau

SEQ ID NO: 2282721 - RNA, 16 nt, Human
aaaccugaaaaaaagu

SEQ ID NO: 2282722 - RNA, 17 nt, Human
aaaccucuguucagugu

SEQ ID NO: 2282723 - RNA, 16 nt, Human
aaaccucuguucagug

SEQ ID NO: 2282724 - RNA, 14 nt, Human
aaaccucuguucag

SEQ ID NO: 2282725 - RNA, 11 nt, Human
aaaccucuguu

SEQ ID NO: 2282726 - RNA, 15 nt, Human
aaaccucugugagca

SEQ ID NO: 2282727 - RNA, 17 nt, Human
aaaccuuucaaauuuca

SEQ ID NO: 2282728 - RNA, 11 nt, Human
aaaccuuucaa

SEQ ID NO: 2282729 - RNA, 19 nt, Human
aaaccuuucaaauuucaca

SEQ ID NO: 2282730 - RNA, 18 nt, Human
aaaccugaccccugcuca

SEQ ID NO: 2282731 - RNA, 22 nt, Human
aaaccugaaaaaaaguuuacaa

SEQ ID NO: 2282732 - RNA, 15 nt, Human
aaacgggcucagcaa

SEQ ID NO: 2282733 - RNA, 20 nt, Human
aaaccuuuuggaaaaucugc

SEQ ID NO: 2282734 - RNA, 13 nt, Human
aaaccuuuugaaa

SEQ ID NO: 2282735 - RNA, 18 nt, Human
aaaccuuuguuugcaucu

SEQ ID NO: 2282736 - RNA, 18 nt, Human
aaaccuuuuauauuuagu

SEQ ID NO: 2282737 - RNA, 22 nt, Human
aaaccucacccgaggcugccca

SEQ ID NO: 2282738 - RNA, 21 nt, Human
aaaccacaaggcuguugcaug

SEQ ID NO: 2282739 - RNA, 21 nt, Human
aaaccuccaaaacuccugccc

SEQ ID NO: 2282740 - RNA, 19 nt, Human
aaaccucuaacccaggucu

SEQ ID NO: 2282741 - RNA, 18 nt, Human
aaaccucuaauuuauuuu

SEQ ID NO: 2282742 - RNA, 12 nt, Human
aaaccacagcag

SEQ ID NO: 2282743 - RNA, 23 nt, Human
aaaccaagucaagugaaaaagga

SEQ ID NO: 2282744 - RNA, 22 nt, Human
aaaccaagggggaugacaugug

SEQ ID NO: 2282745 - RNA, 20 nt, Human
aaaccacaaggcuguugcau

SEQ ID NO: 2282746 - RNA, 16 nt, Human
aaacauugaaguaaug

SEQ ID NO: 2282747 - RNA, 12 nt, Human
aaacauugaaga

SEQ ID NO: 2282748 - RNA, 16 nt, Human
aaaccaagccguggcu

SEQ ID NO: 2282749 - RNA, 12 nt, Human
aaacauucuauc

SEQ ID NO: 2282750 - RNA, 23 nt, Human
aaacauucugauuuggaaaaaga

SEQ ID NO: 2282751 - RNA, 15 nt, Human
aaacauuaugaugug

SEQ ID NO: 2282752 - RNA, 20 nt, Human
aaacauuaagauugaggccu

SEQ ID NO: 2282753 - RNA, 18 nt, Human
aaacauuaagaaaaucau

SEQ ID NO: 2282754 - RNA, 19 nt, Human
aaacauuaagaaaaucaua

SEQ ID NO: 2282755 - RNA, 20 nt, Human
aaacauuaagaaaaucauau

SEQ ID NO: 2282756 - RNA, 15 nt, Human
aaacauuaagauuga

SEQ ID NO: 2282757 - RNA, 18 nt, Human
aaacuagggccaagccca

SEQ ID NO: 2282758 - RNA, 17 nt, Human
aaacguaugcaugugaa

SEQ ID NO: 2282759 - RNA, 22 nt, Human
aaacuaggugcauauuuauaaa

SEQ ID NO: 2282760 - RNA, 11 nt, Human
aaacuaucagu

SEQ ID NO: 2282761 - RNA, 16 nt, Human
aaacuaucuuggugaa

SEQ ID NO: 2282762 - RNA, 16 nt, Human
aaacuaucaguuuguc

SEQ ID NO: 2282763 - RNA, 15 nt, Human
aaacgguuaaaacug

SEQ ID NO: 2282764 - RNA, 17 nt, Human
aaacgguuaaaacuguc

SEQ ID NO: 2282765 - RNA, 15 nt, Human
aaaccuuuuuuaaga

SEQ ID NO: 2282766 - RNA, 16 nt, Human
aaaccuuuuuuaagau

SEQ ID NO: 2282767 - RNA, 18 nt, Human
aaaccuuuuuuaagauuu

SEQ ID NO: 2282768 - RNA, 16 nt, Human
aaacguaugcauguga

SEQ ID NO: 2282769 - RNA, 17 nt, Human
aaacuaggaaauuuuuu

SEQ ID NO: 2282770 - RNA, 18 nt, Human
aaacuaggugcauauuua

SEQ ID NO: 2282771 - RNA, 22 nt, Human
aaacucauuuccuauguaacug

SEQ ID NO: 2282772 - RNA, 16 nt, Human
aaacucgaggacugua

SEQ ID NO: 2282773 - RNA, 15 nt, Human
aaacucauuuccuau

SEQ ID NO: 2282774 - RNA, 17 nt, Human
aaacucgaggacuguau

SEQ ID NO: 2282775 - RNA, 19 nt, Human
aaacucgaggacuguauuu

SEQ ID NO: 2282776 - RNA, 20 nt, Human
aaacucgaggacuguauuug

SEQ ID NO: 2282777 - RNA, 22 nt, Human
aaacucgaggacuguauuugug

SEQ ID NO: 2282778 - RNA, 15 nt, Human
aaacucguuaauuug

SEQ ID NO: 2282779 - RNA, 24 nt, Human
aaacucauuuauaaagcuaaaaua

SEQ ID NO: 2282780 - RNA, 15 nt, Human
aaacucauuuauaaa

SEQ ID NO: 2282781 - RNA, 18 nt, Human
aaacucagggacagagcc

SEQ ID NO: 2282782 - RNA, 19 nt, Human
aaacucagggacagagcca

SEQ ID NO: 2282783 - RNA, 20 nt, Human
aaacucacugcucaagaaga

SEQ ID NO: 2282784 - RNA, 16 nt, Human
aaacucacugcucaag

SEQ ID NO: 2282785 - RNA, 23 nt, Human
aaacucagccucaauaagccuug

SEQ ID NO: 2282786 - RNA, 23 nt, Human
aaacucaggauggucaucuugga

SEQ ID NO: 2282787 - RNA, 13 nt, Human
aaacucagggaca

SEQ ID NO: 2282788 - RNA, 17 nt, Human
aaacucagggacagagc

SEQ ID NO: 2282789 - RNA, 22 nt, Human
aaacuauuuaucuguguuuuug

SEQ ID NO: 2282790 - RNA, 13 nt, Human
aaacuauuuaucu

SEQ ID NO: 2282791 - RNA, 20 nt, Human
aaacuauuugucuuucagga

SEQ ID NO: 2282792 - RNA, 13 nt, Human
aaacucaaaacuu

SEQ ID NO: 2282793 - RNA, 11 nt, Human
aaacuauuuau

SEQ ID NO: 2282794 - RNA, 17 nt, Human
aaacuauuuaacuugag

SEQ ID NO: 2282795 - RNA, 13 nt, Human
aaacuauuuaacu

SEQ ID NO: 2282796 - RNA, 21 nt, Human
aaacucaaaauauuuguacau

SEQ ID NO: 2282797 - RNA, 22 nt, Human
aaacucaaaacuuaacauauuu

SEQ ID NO: 2282798 - RNA, 15 nt, Human
aaacucaaacuuuuc

SEQ ID NO: 2282799 - RNA, 13 nt, Human
aaacucaaaauau

SEQ ID NO: 2282800 - RNA, 18 nt, Human
aaacucaaaacuuaacau

SEQ ID NO: 2282801 - RNA, 19 nt, Human
aaacucaaaacuuaacaua

SEQ ID NO: 2282802 - RNA, 22 nt, Human
aaacucaccugcuggccccuca

SEQ ID NO: 2282803 - RNA, 15 nt, Human
aaacucacugcucaa

SEQ ID NO: 2282804 - RNA, 20 nt, Human
aaacucaccugcuggccccu

SEQ ID NO: 2282805 - RNA, 19 nt, Human
aaacucaccugcuggcccc

SEQ ID NO: 2282806 - RNA, 18 nt, Human
aaacucaccugcuggccc

SEQ ID NO: 2282807 - RNA, 16 nt, Human
aaacucaccugcuggc

SEQ ID NO: 2282808 - RNA, 18 nt, Human
aaacucaccauguaaaag

SEQ ID NO: 2282809 - RNA, 16 nt, Human
aaacucaccauguaaa

SEQ ID NO: 2282810 - RNA, 11 nt, Human
aaacucaaaug

SEQ ID NO: 2282811 - RNA, 12 nt, Human
aaacugucccuu

SEQ ID NO: 2282812 - RNA, 22 nt, Human
aaacugcuuguuuccuagcaca

SEQ ID NO: 2282813 - RNA, 12 nt, Human
aaacugugcacc

SEQ ID NO: 2282814 - RNA, 10 nt, Human
aaacugugua

SEQ ID NO: 2282815 - RNA, 18 nt, Human
aaacuguguauuccaaga

SEQ ID NO: 2282816 - RNA, 16 nt, Human
aaacuguguauuccaa

SEQ ID NO: 2282817 - RNA, 21 nt, Human
aaacuguguacauaacugaaa

SEQ ID NO: 2282818 - RNA, 20 nt, Human
aaacuguguacauaacugaa

SEQ ID NO: 2282819 - RNA, 17 nt, Human
aaacugcguuaaaggcu

SEQ ID NO: 2282820 - RNA, 21 nt, Human
aaacugcccccucugcccugc

SEQ ID NO: 2282821 - RNA, 19 nt, Human
aaacugcuuguuuccuagc

SEQ ID NO: 2282822 - RNA, 17 nt, Human
aaacugcuuguuuccua

SEQ ID NO: 2282823 - RNA, 14 nt, Human
aaacugcuuguuuc

SEQ ID NO: 2282824 - RNA, 13 nt, Human
aaacugcuuguuu

SEQ ID NO: 2282825 - RNA, 21 nt, Human
aaacucuaaacauuaaucaau

SEQ ID NO: 2282826 - RNA, 20 nt, Human
aaacucuaaacauuaaucaa

SEQ ID NO: 2282827 - RNA, 23 nt, Human
aaacucgaggacuguauuuguga

SEQ ID NO: 2282828 - RNA, 24 nt, Human
aaacucgaggacuguauuugugac

SEQ ID NO: 2282829 - RNA, 22 nt, Human
aaacugcccccucugcccugcg

SEQ ID NO: 2282830 - RNA, 13 nt, Human
aaacucuccucug

SEQ ID NO: 2282831 - RNA, 20 nt, Human
aaacuguguggacugugaug

SEQ ID NO: 2282832 - RNA, 19 nt, Human
aaacuguguggacugugau

SEQ ID NO: 2282833 - RNA, 14 nt, Human
ggguggcacugcca

SEQ ID NO: 2282834 - RNA, 19 nt, Human
aaacuguguauuccaagac

SEQ ID NO: 2282835 - RNA, 19 nt, Human
ggguggcaccagcagccug

SEQ ID NO: 2282836 - RNA, 11 nt, Human
ggguggcccau

SEQ ID NO: 2282837 - RNA, 22 nt, Human
ggguggccuaagaguugagcuc

SEQ ID NO: 2282838 - RNA, 19 nt, Human
ggguggcccauccccccuc

SEQ ID NO: 2282839 - RNA, 21 nt, Human
ggguggccgcugaguggcagg

SEQ ID NO: 2282840 - RNA, 17 nt, Human
ggguggccgcugagugg

SEQ ID NO: 2282841 - RNA, 13 nt, Human
ggguggcccaucc

SEQ ID NO: 2282842 - RNA, 18 nt, Human
ggguggcccauccccccu

SEQ ID NO: 2282843 - RNA, 14 nt, Human
aaacuuaaucuaaa

SEQ ID NO: 2282844 - RNA, 16 nt, Human
aaacuuaaucuaaaug

SEQ ID NO: 2282845 - RNA, 18 nt, Human
aaacuuaaucuaaaugga

SEQ ID NO: 2282846 - RNA, 17 nt, Human
aaacuuaaucuaaaugg

SEQ ID NO: 2282847 - RNA, 19 nt, Human
ggugcagagugcccagaac

SEQ ID NO: 2282848 - RNA, 17 nt, Human
ggugcagagugcccaga

SEQ ID NO: 2282849 - RNA, 16 nt, Human
ggugcagagugcccag

SEQ ID NO: 2282850 - RNA, 23 nt, Human
ggugcaacccaaggacugaggga

SEQ ID NO: 2282851 - RNA, 16 nt, Human
ggugcaacccuuaccc

SEQ ID NO: 2282852 - RNA, 20 nt, Human
ggugcaguugacagcaggug

SEQ ID NO: 2282853 - RNA, 16 nt, Human
ggugcagugugaaaag

SEQ ID NO: 2282854 - RNA, 18 nt, Human
ggugcaguugacagcagg

SEQ ID NO: 2282855 - RNA, 21 nt, Human
ggugcauuugaggucuguucu

SEQ ID NO: 2282856 - RNA, 21 nt, Human
ggugcauauuuauaaaaauaa

SEQ ID NO: 2282857 - RNA, 11 nt, Human
ggugcugggcc

SEQ ID NO: 2282858 - RNA, 13 nt, Human
ggugcugggcccc

SEQ ID NO: 2282859 - RNA, 15 nt, Human
ggugcugggccccug

SEQ ID NO: 2282860 - RNA, 16 nt, Human
ggugcugggccccugc

SEQ ID NO: 2282861 - RNA, 13 nt, Human
gguggauauaaau

SEQ ID NO: 2282862 - RNA, 20 nt, Human
gguggagguugcagugagcu

SEQ ID NO: 2282863 - RNA, 16 nt, Human
gguggaucaccugagg

SEQ ID NO: 2282864 - RNA, 15 nt, Human
gguggaucacagagg

SEQ ID NO: 2282865 - RNA, 15 nt, Human
gguggauauaaauau

SEQ ID NO: 2282866 - RNA, 13 nt, Human
gguggaugccugg

SEQ ID NO: 2282867 - RNA, 15 nt, Human
gguggaggcuuccug

SEQ ID NO: 2282868 - RNA, 13 nt, Human
gguggagggccac

SEQ ID NO: 2282869 - RNA, 23 nt, Human
gguggagggccacaugggaggcu

SEQ ID NO: 2282870 - RNA, 21 nt, Human
gguggagccaguaaacagagg

SEQ ID NO: 2282871 - RNA, 20 nt, Human
gguggaggguggggggcgcu

SEQ ID NO: 2282872 - RNA, 13 nt, Human
gguggagaagcca

SEQ ID NO: 2282873 - RNA, 14 nt, Human
gguggagaagccau

SEQ ID NO: 2282874 - RNA, 15 nt, Human
gguggagaagccauu

SEQ ID NO: 2282875 - RNA, 15 nt, Human
gguggaauuauuuua

SEQ ID NO: 2282876 - RNA, 20 nt, Human
gguggaagcccuccuuccac

SEQ ID NO: 2282877 - RNA, 19 nt, Human
gguggaagcccuccuucca

SEQ ID NO: 2282878 - RNA, 18 nt, Human
gguggaagcccuccuucc

SEQ ID NO: 2282879 - RNA, 13 nt, Human
gguggaagcccuc

SEQ ID NO: 2282880 - RNA, 15 nt, Human
gguggaaggaggcgc

SEQ ID NO: 2282881 - RNA, 16 nt, Human
gguggaaggcccgagg

SEQ ID NO: 2282882 - RNA, 19 nt, Human
gguggaaggcccgaggggc

SEQ ID NO: 2282883 - RNA, 21 nt, Human
ggugcuuuuauagaggcuagc

SEQ ID NO: 2282884 - RNA, 19 nt, Human
gguggaagaagggagaaga

SEQ ID NO: 2282885 - RNA, 16 nt, Human
gguggaagaggggaca

SEQ ID NO: 2282886 - RNA, 19 nt, Human
ggugcauuacagagaggag

SEQ ID NO: 2282887 - RNA, 17 nt, Human
ggugcaugaucuugagc

SEQ ID NO: 2282888 - RNA, 20 nt, Human
ggugcugggaggagggagag

SEQ ID NO: 2282889 - RNA, 21 nt, Human
ggugcuuguucccucucccug

SEQ ID NO: 2282890 - RNA, 19 nt, Human
ggugcuuuuauagaggcua

SEQ ID NO: 2282891 - RNA, 13 nt, Human
ggucgcccaggag

SEQ ID NO: 2282892 - RNA, 12 nt, Human
ggucgcccagga

SEQ ID NO: 2282893 - RNA, 14 nt, Human
ggucgcccuggacu

SEQ ID NO: 2282894 - RNA, 20 nt, Human
ggucgaccccaaagccccuu

SEQ ID NO: 2282895 - RNA, 15 nt, Human
gguccuuugggguga

SEQ ID NO: 2282896 - RNA, 13 nt, Human
ggucgaggcagga

SEQ ID NO: 2282897 - RNA, 14 nt, Human
ggucgcccaggaga

SEQ ID NO: 2282898 - RNA, 13 nt, Human
ggugaaagggagc

SEQ ID NO: 2282899 - RNA, 13 nt, Human
ggugaacagaaca

SEQ ID NO: 2282900 - RNA, 22 nt, Human
ggugcaacccaaggacugaggg

SEQ ID NO: 2282901 - RNA, 12 nt, Human
ggugcaaauccu

SEQ ID NO: 2282902 - RNA, 19 nt, Human
ggugaucaauuaaauguag

SEQ ID NO: 2282903 - RNA, 18 nt, Human
ggugcaaaguucccuacu

SEQ ID NO: 2282904 - RNA, 12 nt, Human
ggugcaaugacc

SEQ ID NO: 2282905 - RNA, 13 nt, Human
ggugcaaugaccu

SEQ ID NO: 2282906 - RNA, 16 nt, Human
ggugcaaugaccuuuc

SEQ ID NO: 2282907 - RNA, 14 nt, Human
ggugaaagggagcu

SEQ ID NO: 2282908 - RNA, 18 nt, Human
ggugaacaaagcagccac

SEQ ID NO: 2282909 - RNA, 19 nt, Human
ggugaacaaagcagccacg

SEQ ID NO: 2282910 - RNA, 23 nt, Human
ggugaaauuuauuaguuaauaua

SEQ ID NO: 2282911 - RNA, 20 nt, Human
ggugauauccauucuuucug

SEQ ID NO: 2282912 - RNA, 18 nt, Human
ggugauccacccaccuca

SEQ ID NO: 2282913 - RNA, 23 nt, Human
ggugauccacccaccucagccuc

SEQ ID NO: 2282914 - RNA, 24 nt, Human
ggugauccacccaccucagccucc

SEQ ID NO: 2282915 - RNA, 21 nt, Human
aaagcugcucagggaaaagca

SEQ ID NO: 2282916 - RNA, 13 nt, Human
aaagcugcugaca

SEQ ID NO: 2282917 - RNA, 23 nt, Human
aaagcugccuguaguuaggaaau

SEQ ID NO: 2282918 - RNA, 21 nt, Human
aaagcugccuguaguuaggaa

SEQ ID NO: 2282919 - RNA, 17 nt, Human
aaagcugccuguaguua

SEQ ID NO: 2282920 - RNA, 16 nt, Human
aaagcugccuguaguu

SEQ ID NO: 2282921 - RNA, 15 nt, Human
aaagcugccuguagu

SEQ ID NO: 2282922 - RNA, 12 nt, Human
aaagcugaaaac

SEQ ID NO: 2282923 - RNA, 21 nt, Human
aaagcuuugcuuaugguaaua

SEQ ID NO: 2282924 - RNA, 23 nt, Human
aaagcuuuccugccccaggccug

SEQ ID NO: 2282925 - RNA, 14 nt, Human
aaagcuuuccugcc

SEQ ID NO: 2282926 - RNA, 22 nt, Human
aaagcuuuccugccccaggccu

SEQ ID NO: 2282927 - RNA, 15 nt, Human
aaagcuuuuagaaau

SEQ ID NO: 2282928 - RNA, 15 nt, Human
aaagcuuguuaagau

SEQ ID NO: 2282929 - RNA, 12 nt, Human
aaagcuuuccug

SEQ ID NO: 2282930 - RNA, 13 nt, Human
aaagcuuuccugc

SEQ ID NO: 2282931 - RNA, 14 nt, Human
aaagcacugaccug

SEQ ID NO: 2282932 - RNA, 13 nt, Human
aaagcaccugccg

SEQ ID NO: 2282933 - RNA, 14 nt, Human
aaagcacuauacag

SEQ ID NO: 2282934 - RNA, 14 nt, Human
aaagcacggacucu

SEQ ID NO: 2282935 - RNA, 17 nt, Human
gguggaucacagaggcu

SEQ ID NO: 2282936 - RNA, 12 nt, Human
aaagcaccugcc

SEQ ID NO: 2282937 - RNA, 22 nt, Human
aaagcaccagcuucuccaggcu

SEQ ID NO: 2282938 - RNA, 19 nt, Human
aaagcacgaaauguuauuu

SEQ ID NO: 2282939 - RNA, 21 nt, Human
aaagcacugacuucuaaguaa

SEQ ID NO: 2282940 - RNA, 17 nt, Human
aaagcacugacuucuaa

SEQ ID NO: 2282941 - RNA, 15 nt, Human
aaagcugaaaacugc

SEQ ID NO: 2282942 - RNA, 13 nt, Human
aaagcuccugucc

SEQ ID NO: 2282943 - RNA, 16 nt, Human
aaagcuccuguccucc

SEQ ID NO: 2282944 - RNA, 13 nt, Human
aaagcucauauuu

SEQ ID NO: 2282945 - RNA, 17 nt, Human
aaagcuccuagcagaga

SEQ ID NO: 2282946 - RNA, 20 nt, Human
aaagcuccucgagggcaggg

SEQ ID NO: 2282947 - RNA, 15 nt, Human
aaagcucacuuuacu

SEQ ID NO: 2282948 - RNA, 19 nt, Human
aaagcacuuggacucuugc

SEQ ID NO: 2282949 - RNA, 22 nt, Human
aaagcacugaccugucaugccc

SEQ ID NO: 2282950 - RNA, 16 nt, Human
aaagcacuuggacucu

SEQ ID NO: 2282951 - RNA, 21 nt, Human
aaagcucauauuuuguauaua

SEQ ID NO: 2282952 - RNA, 23 nt, Human
aaaggagcccuuaucugugcuca

SEQ ID NO: 2282953 - RNA, 20 nt, Human
aaagggacugagaaauuuau

SEQ ID NO: 2282954 - RNA, 22 nt, Human
aaagggacuuggaagcuccgcu

SEQ ID NO: 2282955 - RNA, 18 nt, Human
aaagggagcuaucaggaa

SEQ ID NO: 2282956 - RNA, 20 nt, Human
aaagggagcagaacugaacc

SEQ ID NO: 2282957 - RNA, 23 nt, Human
aaagggagcacuggguugacuuu

SEQ ID NO: 2282958 - RNA, 17 nt, Human
aaagggagagagagagg

SEQ ID NO: 2282959 - RNA, 20 nt, Human
aaagggauggcaagaugugg

SEQ ID NO: 2282960 - RNA, 18 nt, Human
aaagggugcugcuucccu

SEQ ID NO: 2282961 - RNA, 21 nt, Human
aaagggugaagcuauuuaucu

SEQ ID NO: 2282962 - RNA, 19 nt, Human
aaagggugaagcuauuuau

SEQ ID NO: 2282963 - RNA, 14 nt, Human
aaagggugaagcua

SEQ ID NO: 2282964 - RNA, 10 nt, Human
aaagggugaa

SEQ ID NO: 2282965 - RNA, 17 nt, Human
aaagggucuugggaaau

SEQ ID NO: 2282966 - RNA, 15 nt, Human
aaaggggugcuuuua

SEQ ID NO: 2282967 - RNA, 14 nt, Human
aaagguaaaucaga

SEQ ID NO: 2282968 - RNA, 14 nt, Human
aaagguacuucaaa

SEQ ID NO: 2282969 - RNA, 12 nt, Human
aaaggaagacua

SEQ ID NO: 2282970 - RNA, 13 nt, Human
aaaggaagacuag

SEQ ID NO: 2282971 - RNA, 23 nt, Human
aaaggaaaucucaccccauccca

SEQ ID NO: 2282972 - RNA, 15 nt, Human
aaaggaaaugauuga

SEQ ID NO: 2282973 - RNA, 15 nt, Human
aaaggaagccaaaga

SEQ ID NO: 2282974 - RNA, 14 nt, Human
aaaggaagccaaag

SEQ ID NO: 2282975 - RNA, 12 nt, Human
aaaggaagccaa

SEQ ID NO: 2282976 - RNA, 17 nt, Human
aaaggaaaucucacccc

SEQ ID NO: 2282977 - RNA, 22 nt, Human
aaaggaaagagggagguaagga

SEQ ID NO: 2282978 - RNA, 17 nt, Human
aaaggagagcuagcagc

SEQ ID NO: 2282979 - RNA, 21 nt, Human
aaaggagagcuagcagcaggg

SEQ ID NO: 2282980 - RNA, 14 nt, Human
aaaggagauaaauc

SEQ ID NO: 2282981 - RNA, 15 nt, Human
aaaggagauaaaucu

SEQ ID NO: 2282982 - RNA, 19 nt, Human
aaaggagcccuuaucugug

SEQ ID NO: 2282983 - RNA, 17 nt, Human
aaaggagauuggaagga

SEQ ID NO: 2282984 - RNA, 18 nt, Human
aaacuuuccucgccugac

SEQ ID NO: 2282985 - RNA, 20 nt, Human
aaacuuguaauuuuuuuaau

SEQ ID NO: 2282986 - RNA, 14 nt, Human
aaacuuugcuaaau

SEQ ID NO: 2282987 - RNA, 22 nt, Human
aaacuuccagugcaacacugaa

SEQ ID NO: 2282988 - RNA, 21 nt, Human
aaacuuccagugcaacacuga

SEQ ID NO: 2282989 - RNA, 18 nt, Human
aaacuugcuuuaugccuu

SEQ ID NO: 2282990 - RNA, 24 nt, Human
aaacuuggcucgaaucucugugcc

SEQ ID NO: 2282991 - RNA, 12 nt, Human
aaacuuguaaau

SEQ ID NO: 2282992 - RNA, 11 nt, Human
aaacuuguaaa

SEQ ID NO: 2282993 - RNA, 16 nt, Human
aaacuuguaauuuuuu

SEQ ID NO: 2282994 - RNA, 19 nt, Human
aaacuuguaaauaaaggaa

SEQ ID NO: 2282995 - RNA, 16 nt, Human
aaacuuguauuaugug

SEQ ID NO: 2282996 - RNA, 19 nt, Human
aaacuuccagugcaacacu

SEQ ID NO: 2282997 - RNA, 14 nt, Human
ggguggggcugcuc

SEQ ID NO: 2282998 - RNA, 23 nt, Human
aaacuucagcgguuuauauaagc

SEQ ID NO: 2282999 - RNA, 19 nt, Human
aaacuucagacauagaauu

SEQ ID NO: 2283000 - RNA, 19 nt, Human
ggguggggggcuucauaca

SEQ ID NO: 2283001 - RNA, 12 nt, Human
ggguggggcugc

SEQ ID NO: 2283002 - RNA, 23 nt, Human
ggguggccuaagaguugagcucu

SEQ ID NO: 2283003 - RNA, 17 nt, Human
ggguggggggcuucaua

SEQ ID NO: 2283004 - RNA, 14 nt, Human
ggguggccucccaa

SEQ ID NO: 2283005 - RNA, 22 nt, Human
aaagacagggcugauaagcuaa

SEQ ID NO: 2283006 - RNA, 14 nt, Human
aaagacagagcugg

SEQ ID NO: 2283007 - RNA, 13 nt, Human
aaagacagaagcc

SEQ ID NO: 2283008 - RNA, 14 nt, Human
aaagacaucaagca

SEQ ID NO: 2283009 - RNA, 19 nt, Human
aaagacauccauaaagaag

SEQ ID NO: 2283010 - RNA, 15 nt, Human
aaagacaugaauaug

SEQ ID NO: 2283011 - RNA, 18 nt, Human
aaagacauccauaaagaa

SEQ ID NO: 2283012 - RNA, 19 nt, Human
aaagacauucugacaucuu

SEQ ID NO: 2283013 - RNA, 15 nt, Human
aaagaccauuuuucc

SEQ ID NO: 2283014 - RNA, 13 nt, Human
aaagaccagacua

SEQ ID NO: 2283015 - RNA, 17 nt, Human
aaagaccuuguguguau

SEQ ID NO: 2283016 - RNA, 19 nt, Human
aaagaccuuguguguaugu

SEQ ID NO: 2283017 - RNA, 9 nt, Human
aaagacaga

SEQ ID NO: 2283018 - RNA, 14 nt, Human
aaacuuuucucaga

SEQ ID NO: 2283019 - RNA, 12 nt, Human
aaacuuuucuca

SEQ ID NO: 2283020 - RNA, 13 nt, Human
aaagacagugaaa

SEQ ID NO: 2283021 - RNA, 19 nt, Human
aaagacugaccaauauugu

SEQ ID NO: 2283022 - RNA, 21 nt, Human
aaagacuccaaagaaauguaa

SEQ ID NO: 2283023 - RNA, 15 nt, Human
aaagacuccaaagaa

SEQ ID NO: 2283024 - RNA, 21 nt, Human
aaagacuauucaaacagucuc

SEQ ID NO: 2283025 - RNA, 23 nt, Human
aaagacgaccagcauuuaaccaa

SEQ ID NO: 2283026 - RNA, 20 nt, Human
aaagaccuuguguguaugug

SEQ ID NO: 2283027 - RNA, 23 nt, Human
aaagaccuuguguguauguguac

SEQ ID NO: 2283028 - RNA, 22 nt, Human
aaagaccuuuggagcaaagcug

SEQ ID NO: 2283029 - RNA, 17 nt, Human
aaagacuauucaaacag

SEQ ID NO: 2283030 - RNA, 19 nt, Human
aaagacuauucaaacaguc

SEQ ID NO: 2283031 - RNA, 18 nt, Human
aaagacuauucaaacagu

SEQ ID NO: 2283032 - RNA, 22 nt, Human
aaagagcuuucuucccgaaccc

SEQ ID NO: 2283033 - RNA, 22 nt, Human
aaagagcuuuaguccuagagga

SEQ ID NO: 2283034 - RNA, 20 nt, Human
aaagagcacuuaagagaaua

SEQ ID NO: 2283035 - RNA, 21 nt, Human
aaagagcacuuaagagaauau

SEQ ID NO: 2283036 - RNA, 22 nt, Human
aaagagcacuuaagagaauauu

SEQ ID NO: 2283037 - RNA, 15 nt, Human
aaagagcccuugccu

SEQ ID NO: 2283038 - RNA, 23 nt, Human
aaagagcaagucuggaucuggga

SEQ ID NO: 2283039 - RNA, 12 nt, Human
aaagagcacuua

SEQ ID NO: 2283040 - RNA, 18 nt, Human
aaagagcacuuaagagaa

SEQ ID NO: 2283041 - RNA, 15 nt, Human
aaagagcaagucugg

SEQ ID NO: 2283042 - RNA, 14 nt, Human
aaagagauuucaag

SEQ ID NO: 2283043 - RNA, 13 nt, Human
aaagagauuucaa

SEQ ID NO: 2283044 - RNA, 15 nt, Human
aaagaggaaugaagu

SEQ ID NO: 2283045 - RNA, 15 nt, Human
aaagaggcagcuuga

SEQ ID NO: 2283046 - RNA, 14 nt, Human
aaagaugcuucuca

SEQ ID NO: 2283047 - RNA, 17 nt, Human
aaagaugcuucucacug

SEQ ID NO: 2283048 - RNA, 19 nt, Human
aaagaugcuucucacugcc

SEQ ID NO: 2283049 - RNA, 14 nt, Human
aaagaggagugcuu

SEQ ID NO: 2283050 - RNA, 18 nt, Human
aaagagcccuugccuccc

SEQ ID NO: 2283051 - RNA, 12 nt, Human
aaagaggaaaga

SEQ ID NO: 2283052 - RNA, 14 nt, Human
aaagaggaaagaau

SEQ ID NO: 2283053 - RNA, 13 nt, Human
aaagacuguacaa

SEQ ID NO: 2283054 - RNA, 13 nt, Human
aaagacuggcuuu

SEQ ID NO: 2283055 - RNA, 21 nt, Human
aaagacuggcuuuuauuaaug

SEQ ID NO: 2283056 - RNA, 23 nt, Human
aaagacuggcuuuuauuaaugca

SEQ ID NO: 2283057 - RNA, 16 nt, Human
aaagacugagcucaag

SEQ ID NO: 2283058 - RNA, 12 nt, Human
aaagacuggcuu

SEQ ID NO: 2283059 - RNA, 23 nt, Human
aaagacugaguacguugugcauu

SEQ ID NO: 2283060 - RNA, 12 nt, Human
aaagagauauuu

SEQ ID NO: 2283061 - RNA, 13 nt, Human
aaagagauauuuu

SEQ ID NO: 2283062 - RNA, 16 nt, Human
aaagagauauuuuaaa

SEQ ID NO: 2283063 - RNA, 11 nt, Human
aaagagagguu

SEQ ID NO: 2283064 - RNA, 12 nt, Human
aaagagagguua

SEQ ID NO: 2283065 - RNA, 14 nt, Human
aaagacuguacaaa

SEQ ID NO: 2283066 - RNA, 18 nt, Human
aaagagauggccugagaa

SEQ ID NO: 2283067 - RNA, 20 nt, Human
aaagagauauuuuaaaauga

SEQ ID NO: 2283068 - RNA, 22 nt, Human
aaagagaugaugaaaauauuua

SEQ ID NO: 2283069 - RNA, 20 nt, Human
aaagagaugaugaaaauauu

SEQ ID NO: 2283070 - RNA, 19 nt, Human
aaagagaugaugaaaauau

SEQ ID NO: 2283071 - RNA, 19 nt, Human
gguccuucccucuccccaa

SEQ ID NO: 2283072 - RNA, 15 nt, Human
gguccuucccucucc

SEQ ID NO: 2283073 - RNA, 16 nt, Human
gguccuuccaggcccc

SEQ ID NO: 2283074 - RNA, 15 nt, Human
gguccuuccaggccc

SEQ ID NO: 2283075 - RNA, 21 nt, Human
gguccuguggcaggcagcgcc

SEQ ID NO: 2283076 - RNA, 22 nt, Human
gguccuguggcaggcagcgcca

SEQ ID NO: 2283077 - RNA, 21 nt, Human
gguccuuugggaaaggagaag

SEQ ID NO: 2283078 - RNA, 20 nt, Human
gguccuuggugugacccucu

SEQ ID NO: 2283079 - RNA, 22 nt, Human
gguccuuuacacucaggcuuuc

SEQ ID NO: 2283080 - RNA, 16 nt, Human
gguccuugcaccccuc

SEQ ID NO: 2283081 - RNA, 21 nt, Human
gguccuucaaguuagcucagg

SEQ ID NO: 2283082 - RNA, 14 nt, Human
gguccuguggcagg

SEQ ID NO: 2283083 - RNA, 16 nt, Human
gguccuguggcaggca

SEQ ID NO: 2283084 - RNA, 17 nt, Human
gguccuguggcaggcag

SEQ ID NO: 2283085 - RNA, 18 nt, Human
gguccuguggcaggcagc

SEQ ID NO: 2283086 - RNA, 12 nt, Human
gguccuguggca

SEQ ID NO: 2283087 - RNA, 13 nt, Human
gguccuguggcag

SEQ ID NO: 2283088 - RNA, 11 nt, Human
gguccugcugc

SEQ ID NO: 2283089 - RNA, 19 nt, Human
gguccugcagucuggcuga

SEQ ID NO: 2283090 - RNA, 17 nt, Human
gguccugagggucccca

SEQ ID NO: 2283091 - RNA, 12 nt, Human
gguccugcugca

SEQ ID NO: 2283092 - RNA, 14 nt, Human
gguccugcugcagu

SEQ ID NO: 2283093 - RNA, 20 nt, Human
gguccugcagucuggcugag

SEQ ID NO: 2283094 - RNA, 17 nt, Human
aaagcaauaaaugaaug

SEQ ID NO: 2283095 - RNA, 15 nt, Human
aaagcaauaaaugaa

SEQ ID NO: 2283096 - RNA, 14 nt, Human
aaagcaauaauggu

SEQ ID NO: 2283097 - RNA, 22 nt, Human
aaagcaauaauggucccaucca

SEQ ID NO: 2283098 - RNA, 23 nt, Human
aaagcaauaauggucccauccag

SEQ ID NO: 2283099 - RNA, 22 nt, Human
aaagcaagugauugggacagag

SEQ ID NO: 2283100 - RNA, 20 nt, Human
aaagcaaggaaacuauguaa

SEQ ID NO: 2283101 - RNA, 14 nt, Human
aaagcaaggaaacu

SEQ ID NO: 2283102 - RNA, 14 nt, Human
aaagcaauaugcau

SEQ ID NO: 2283103 - RNA, 12 nt, Human
aaagcaaugcau

SEQ ID NO: 2283104 - RNA, 13 nt, Human
aaagcaaugcauu

SEQ ID NO: 2283105 - RNA, 14 nt, Human
aaagcaaugcauuu

SEQ ID NO: 2283106 - RNA, 15 nt, Human
aaagcaauuccaacc

SEQ ID NO: 2283107 - RNA, 12 nt, Human
aaagcaauuuuc

SEQ ID NO: 2283108 - RNA, 13 nt, Human
aaagcaauuuucc

SEQ ID NO: 2283109 - RNA, 14 nt, Human
aaagcaauuuuccu

SEQ ID NO: 2283110 - RNA, 15 nt, Human
aaagcaauuuuccuu

SEQ ID NO: 2283111 - RNA, 16 nt, Human
aaagcaauuuuccuug

SEQ ID NO: 2283112 - RNA, 17 nt, Human
aaagcaauuuuccuuga

SEQ ID NO: 2283113 - RNA, 18 nt, Human
aaagcaauuuuccuugaa

SEQ ID NO: 2283114 - RNA, 19 nt, Human
aaagcaauuuuccuugaag

SEQ ID NO: 2283115 - RNA, 20 nt, Human
aaagcaauuuuccuugaagc

SEQ ID NO: 2283116 - RNA, 22 nt, Human
aaagauggggucuguaaaaucu

SEQ ID NO: 2283117 - RNA, 19 nt, Human
aaagauggggucuguaaaa

SEQ ID NO: 2283118 - RNA, 21 nt, Human
aaagauggggucuguaaaauc

SEQ ID NO: 2283119 - RNA, 23 nt, Human
aaagauggcugugccucugccug

SEQ ID NO: 2283120 - RNA, 17 nt, Human
aaagauggggucuguaa

SEQ ID NO: 2283121 - RNA, 18 nt, Human
aaagauggggucuguaaa

SEQ ID NO: 2283122 - RNA, 16 nt, Human
aaagauggaugugcuu

SEQ ID NO: 2283123 - RNA, 21 nt, Human
aaagauggcugugccucugcc

SEQ ID NO: 2283124 - RNA, 22 nt, Human
aaagauggcugugccucugccu

SEQ ID NO: 2283125 - RNA, 18 nt, Human
gagguggaauuauuuuaa

SEQ ID NO: 2283126 - RNA, 19 nt, Human
gagguggagguugcaguga

SEQ ID NO: 2283127 - RNA, 20 nt, Human
gagguggagguugcagugag

SEQ ID NO: 2283128 - RNA, 19 nt, Human
gagguggaggcugcaguga

SEQ ID NO: 2283129 - RNA, 21 nt, Human
gagguggagcaaagugagggc

SEQ ID NO: 2283130 - RNA, 18 nt, Human
gagguggcagcccuguag

SEQ ID NO: 2283131 - RNA, 16 nt, Human
gagguggcagcccugu

SEQ ID NO: 2283132 - RNA, 15 nt, Human
gagguggcagcccug

SEQ ID NO: 2283133 - RNA, 20 nt, Human
gagguggaucacagaggcuu

SEQ ID NO: 2283134 - RNA, 20 nt, Human
gagguggcugagccccuguc

SEQ ID NO: 2283135 - RNA, 23 nt, Human
gagguggccagagcugggaggca

SEQ ID NO: 2283136 - RNA, 17 nt, Human
gagguggccagagcugg

SEQ ID NO: 2283137 - RNA, 19 nt, Human
gagguggccagagcuggga

SEQ ID NO: 2283138 - RNA, 21 nt, Human
gagguggccagagcugggagg

SEQ ID NO: 2283139 - RNA, 22 nt, Human
gagguggccagagcugggaggc

SEQ ID NO: 2283140 - RNA, 13 nt, Human
gaggugggauccu

SEQ ID NO: 2283141 - RNA, 15 nt, Human
gaggugggauccucc

SEQ ID NO: 2283142 - RNA, 16 nt, Human
gaggugggauccucca

SEQ ID NO: 2283143 - RNA, 14 nt, Human
gaggugggagcagg

SEQ ID NO: 2283144 - RNA, 13 nt, Human
gaggugggagcag

SEQ ID NO: 2283145 - RNA, 14 nt, Human
gagguggcuggguu

SEQ ID NO: 2283146 - RNA, 12 nt, Human
gagucacugccu

SEQ ID NO: 2283147 - RNA, 17 nt, Human
gaggugggauccuccag

SEQ ID NO: 2283148 - RNA, 14 nt, Human
gagucacuggaaca

SEQ ID NO: 2283149 - RNA, 21 nt, Human
gagucacuggaacacuaauga

SEQ ID NO: 2283150 - RNA, 23 nt, Human
gagugccccauucuuuuguaauu

SEQ ID NO: 2283151 - RNA, 14 nt, Human
gagugccuggccaa

SEQ ID NO: 2283152 - RNA, 19 nt, Human
gaguugauacuacaguuug

SEQ ID NO: 2283153 - RNA, 22 nt, Human
gaguugauacuacaguuuguua

SEQ ID NO: 2283154 - RNA, 21 nt, Human
gaguugauagcacagacccug

SEQ ID NO: 2283155 - RNA, 13 nt, Human
gagugcagugagc

SEQ ID NO: 2283156 - RNA, 18 nt, Human
gagugcagugagccgaga

SEQ ID NO: 2283157 - RNA, 14 nt, Human
gagugcccagaacu

SEQ ID NO: 2283158 - RNA, 20 nt, Human
gagugccaggacuccccagg

SEQ ID NO: 2283159 - RNA, 22 nt, Human
gagugccaggacuccccaggcc

SEQ ID NO: 2283160 - RNA, 12 nt, Human
gagugccaggac

SEQ ID NO: 2283161 - RNA, 13 nt, Human
gagugccaggacu

SEQ ID NO: 2283162 - RNA, 14 nt, Human
gagugccaggacuc

SEQ ID NO: 2283163 - RNA, 19 nt, Human
gagugccaggacuccccag

SEQ ID NO: 2283164 - RNA, 13 nt, Human
gagugagacccug

SEQ ID NO: 2283165 - RNA, 20 nt, Human
gaguccaacguggggcagca

SEQ ID NO: 2283166 - RNA, 22 nt, Human
gaguccaacguggggcagcaca

SEQ ID NO: 2283167 - RNA, 12 nt, Human
gaguccaagcug

SEQ ID NO: 2283168 - RNA, 14 nt, Human
gaguccaagcuggg

SEQ ID NO: 2283169 - RNA, 23 nt, Human
gagugagacccagcccucauccc

SEQ ID NO: 2283170 - RNA, 22 nt, Human
gagugagacccagcccucaucc

SEQ ID NO: 2283171 - RNA, 14 nt, Human
gagugagacucugu

SEQ ID NO: 2283172 - RNA, 18 nt, Human
gagugagacucugucuca

SEQ ID NO: 2283173 - RNA, 18 nt, Human
gagucaugaucucccugc

SEQ ID NO: 2283174 - RNA, 13 nt, Human
gagucaucuccau

SEQ ID NO: 2283175 - RNA, 16 nt, Human
gagucaugaucucccu

SEQ ID NO: 2283176 - RNA, 18 nt, Human
gagucauucguucugugg

SEQ ID NO: 2283177 - RNA, 20 nt, Human
gagucaugaucucccugccg

SEQ ID NO: 2283178 - RNA, 19 nt, Human
gagucaugaucucccugcc

SEQ ID NO: 2283179 - RNA, 12 nt, Human
gagucaugccaa

SEQ ID NO: 2283180 - RNA, 23 nt, Human
gagucacugccucucccuggccc

SEQ ID NO: 2283181 - RNA, 15 nt, Human
gagucagugccaggu

SEQ ID NO: 2283182 - RNA, 21 nt, Human
gagucacugccucucccuggc

SEQ ID NO: 2283183 - RNA, 15 nt, Human
gagucacugccucuc

SEQ ID NO: 2283184 - RNA, 18 nt, Human
gagucagugccagguccu

SEQ ID NO: 2283185 - RNA, 16 nt, Human
gagucauaaaccuuaa

SEQ ID NO: 2283186 - RNA, 20 nt, Human
gagucauaaaccuuaaguaa

SEQ ID NO: 2283187 - RNA, 14 nt, Human
gagucauauuuuga

SEQ ID NO: 2283188 - RNA, 18 nt, Human
gagucagaaguuucugcc

SEQ ID NO: 2283189 - RNA, 19 nt, Human
gaggggaauaauagaagaa

SEQ ID NO: 2283190 - RNA, 18 nt, Human
gaggggaauaauagaaga

SEQ ID NO: 2283191 - RNA, 19 nt, Human
gaggggacaaaacccaccu

SEQ ID NO: 2283192 - RNA, 13 nt, Human
gaggggacagguc

SEQ ID NO: 2283193 - RNA, 21 nt, Human
gaggccagccccacccaggag

SEQ ID NO: 2283194 - RNA, 20 nt, Human
gaggccagccccacccagga

SEQ ID NO: 2283195 - RNA, 18 nt, Human
gaggccagccccacccag

SEQ ID NO: 2283196 - RNA, 16 nt, Human
gaggccagccccaccc

SEQ ID NO: 2283197 - RNA, 14 nt, Human
gaggccagccuggc

SEQ ID NO: 2283198 - RNA, 13 nt, Human
gaggccagccugg

SEQ ID NO: 2283199 - RNA, 22 nt, Human
gaggccagccccacccaggagg

SEQ ID NO: 2283200 - RNA, 12 nt, Human
gaggccagccug

SEQ ID NO: 2283201 - RNA, 14 nt, Human
gaggccagccccac

SEQ ID NO: 2283202 - RNA, 13 nt, Human
gaggccagcccca

SEQ ID NO: 2283203 - RNA, 21 nt, Human
gaggccagaggcccccagccc

SEQ ID NO: 2283204 - RNA, 20 nt, Human
gaggccagagacacaagccu

SEQ ID NO: 2283205 - RNA, 17 nt, Human
gaggcuccagagggcac

SEQ ID NO: 2283206 - RNA, 14 nt, Human
gaggcuccagaggg

SEQ ID NO: 2283207 - RNA, 12 nt, Human
gaggcucugccc

SEQ ID NO: 2283208 - RNA, 13 nt, Human
gaggcucugcccu

SEQ ID NO: 2283209 - RNA, 14 nt, Human
gaggcucugcccuu

SEQ ID NO: 2283210 - RNA, 14 nt, Human
gaggcucuggagcc

SEQ ID NO: 2283211 - RNA, 19 nt, Human
gaggcucuggagcccacug

SEQ ID NO: 2283212 - RNA, 15 nt, Human
gaggcucugcccuug

SEQ ID NO: 2283213 - RNA, 17 nt, Human
gaggcucugcccuuggu

SEQ ID NO: 2283214 - RNA, 12 nt, Human
gaggggaacaga

SEQ ID NO: 2283215 - RNA, 14 nt, Human
gaggggaagggcca

SEQ ID NO: 2283216 - RNA, 15 nt, Human
gaggggaagggccag

SEQ ID NO: 2283217 - RNA, 21 nt, Human
gagggcuuccucuagaagcca

SEQ ID NO: 2283218 - RNA, 19 nt, Human
gaggggaagaguguacugg

SEQ ID NO: 2283219 - RNA, 21 nt, Human
gagggcuagaaucuggagagc

SEQ ID NO: 2283220 - RNA, 19 nt, Human
gagggcuagaacuggagag

SEQ ID NO: 2283221 - RNA, 18 nt, Human
gagggcuagaaucuggag

SEQ ID NO: 2283222 - RNA, 19 nt, Human
gagggcuagaaucuggaga

SEQ ID NO: 2283223 - RNA, 20 nt, Human
gagggcuagaaucuggagag

SEQ ID NO: 2283224 - RNA, 19 nt, Human
gagggcuuccucuagaagc

SEQ ID NO: 2283225 - RNA, 22 nt, Human
gagggcuuccucuagaagccaa

SEQ ID NO: 2283226 - RNA, 12 nt, Human
gagggcuccaga

SEQ ID NO: 2283227 - RNA, 13 nt, Human
gagggcuccagac

SEQ ID NO: 2283228 - RNA, 14 nt, Human
gagggcuccagaca

SEQ ID NO: 2283229 - RNA, 15 nt, Human
gagggcuccagacac

SEQ ID NO: 2283230 - RNA, 20 nt, Human
gagggcgugacucacccaag

SEQ ID NO: 2283231 - RNA, 14 nt, Human
gagggcguggaggg

SEQ ID NO: 2283232 - RNA, 17 nt, Human
gagggcuagaaccuaga

SEQ ID NO: 2283233 - RNA, 19 nt, Human
gagggcggcaggggccugg

SEQ ID NO: 2283234 - RNA, 23 nt, Human
gagggcggcaggggccuggagau

SEQ ID NO: 2283235 - RNA, 14 nt, Human
gagggcgugggagc

SEQ ID NO: 2283236 - RNA, 16 nt, Human
gagggcuagaaccugg

SEQ ID NO: 2283237 - RNA, 20 nt, Human
gagggcuagaaccuggaagg

SEQ ID NO: 2283238 - RNA, 18 nt, Human
gagggcuagaaccuggag

SEQ ID NO: 2283239 - RNA, 19 nt, Human
gagggcuagaaccuggaga

SEQ ID NO: 2283240 - RNA, 21 nt, Human
gagggcuagaaccuggagagc

SEQ ID NO: 2283241 - RNA, 20 nt, Human
gagggcuagaaccuggcagg

SEQ ID NO: 2283242 - RNA, 18 nt, Human
gagggcuagaacuggaga

SEQ ID NO: 2283243 - RNA, 14 nt, Human
gaggcugccucucc

SEQ ID NO: 2283244 - RNA, 19 nt, Human
gagggccugugggagccug

SEQ ID NO: 2283245 - RNA, 23 nt, Human
gagggcgaccccgucacagccuc

SEQ ID NO: 2283246 - RNA, 13 nt, Human
gagggcggcaggg

SEQ ID NO: 2283247 - RNA, 14 nt, Human
gaggcugcagucag

SEQ ID NO: 2283248 - RNA, 16 nt, Human
gaggcugcagcgagcu

SEQ ID NO: 2283249 - RNA, 23 nt, Human
gaggcugccccaccccuccccau

SEQ ID NO: 2283250 - RNA, 9 nt, Human
gaggcugcc

SEQ ID NO: 2283251 - RNA, 12 nt, Human
gaggcugccccc

SEQ ID NO: 2283252 - RNA, 17 nt, Human
gaggcugcccccggccc

SEQ ID NO: 2283253 - RNA, 22 nt, Human
gaggcuccugugcuacuuugcc

SEQ ID NO: 2283254 - RNA, 19 nt, Human
gaggcugcccccggccccc

SEQ ID NO: 2283255 - RNA, 20 nt, Human
gaggcugcccccggcccccu

SEQ ID NO: 2283256 - RNA, 21 nt, Human
gaggcugcccccggcccccug

SEQ ID NO: 2283257 - RNA, 22 nt, Human
gaggcugcccccggcccccugg

SEQ ID NO: 2283258 - RNA, 23 nt, Human
gaggcugcccccggcccccuggu

SEQ ID NO: 2283259 - RNA, 17 nt, Human
gagcuguucacagccag

SEQ ID NO: 2283260 - RNA, 18 nt, Human
gagcugugcaggugggga

SEQ ID NO: 2283261 - RNA, 20 nt, Human
gagcuguggacuuuguucac

SEQ ID NO: 2283262 - RNA, 14 nt, Human
gagcuggugucuga

SEQ ID NO: 2283263 - RNA, 18 nt, Human
gagcuguauuaagccacu

SEQ ID NO: 2283264 - RNA, 18 nt, Human
gagcugguugggaagaca

SEQ ID NO: 2283265 - RNA, 20 nt, Human
gagcugugcaucagcuagaa

SEQ ID NO: 2283266 - RNA, 21 nt, Human
gagcuggugcccggagauugg

SEQ ID NO: 2283267 - RNA, 17 nt, Human
gagcuggugcccggaga

SEQ ID NO: 2283268 - RNA, 16 nt, Human
gagcuggugcccggag

SEQ ID NO: 2283269 - RNA, 15 nt, Human
gagcuggugcccgga

SEQ ID NO: 2283270 - RNA, 18 nt, Human
gagcuggugcauuacaga

SEQ ID NO: 2283271 - RNA, 17 nt, Human
gagcggaaagcagcuca

SEQ ID NO: 2283272 - RNA, 16 nt, Human
gagcggaaagcagcuc

SEQ ID NO: 2283273 - RNA, 15 nt, Human
gagcggaaagcagcu

SEQ ID NO: 2283274 - RNA, 14 nt, Human
gagcggaaagcagc

SEQ ID NO: 2283275 - RNA, 13 nt, Human
gagcggaaagcag

SEQ ID NO: 2283276 - RNA, 18 nt, Human
gagcgcuuucuggaaaag

SEQ ID NO: 2283277 - RNA, 17 nt, Human
gagcggagaaaggaagg

SEQ ID NO: 2283278 - RNA, 15 nt, Human
gagcugccuguucag

SEQ ID NO: 2283279 - RNA, 16 nt, Human
gagcugccuguucagc

SEQ ID NO: 2283280 - RNA, 19 nt, Human
gagcugccuguucagcucc

SEQ ID NO: 2283281 - RNA, 21 nt, Human
gagcgagacuugguuucaaaa

SEQ ID NO: 2283282 - RNA, 16 nt, Human
gagcgagcgcuaccca

SEQ ID NO: 2283283 - RNA, 18 nt, Human
gagcgaggagaugcuccu

SEQ ID NO: 2283284 - RNA, 15 nt, Human
gagcgccugccccuc

SEQ ID NO: 2283285 - RNA, 13 nt, Human
gagcgccugcccc

SEQ ID NO: 2283286 - RNA, 21 nt, Human
gagcgaggagaugcuccuugg

SEQ ID NO: 2283287 - RNA, 22 nt, Human
gagcgccugccccucccagaac

SEQ ID NO: 2283288 - RNA, 18 nt, Human
gagcgccugccccuccca

SEQ ID NO: 2283289 - RNA, 16 nt, Human
gagcgccugccccucc

SEQ ID NO: 2283290 - RNA, 15 nt, Human
gagcgcuacccacuu

SEQ ID NO: 2283291 - RNA, 20 nt, Human
gagcgccugccccucccaga

SEQ ID NO: 2283292 - RNA, 15 nt, Human
gagcgcuccugccgc

SEQ ID NO: 2283293 - RNA, 21 nt, Human
gagcgcuccugccgcagagcu

SEQ ID NO: 2283294 - RNA, 22 nt, Human
gagcgcuccugccgcagagcug

SEQ ID NO: 2283295 - RNA, 23 nt, Human
gagcgcuccugccgcagagcugg

SEQ ID NO: 2283296 - RNA, 12 nt, Human
gagccuuccagg

SEQ ID NO: 2283297 - RNA, 13 nt, Human
gagccuuccaggg

SEQ ID NO: 2283298 - RNA, 15 nt, Human
gagcgacagugagac

SEQ ID NO: 2283299 - RNA, 13 nt, Human
gagcgacagugag

SEQ ID NO: 2283300 - RNA, 17 nt, Human
gagcccggaugcuucuc

SEQ ID NO: 2283301 - RNA, 17 nt, Human
gagcccggcgccccugc

SEQ ID NO: 2283302 - RNA, 14 nt, Human
gagcccgggagcug

SEQ ID NO: 2283303 - RNA, 22 nt, Human
gagcccgggagcugcugcccug

SEQ ID NO: 2283304 - RNA, 14 nt, Human
gagcccgggcugcc

SEQ ID NO: 2283305 - RNA, 15 nt, Human
gagcccgggcugccu

SEQ ID NO: 2283306 - RNA, 17 nt, Human
gagcccgggcugccugg

SEQ ID NO: 2283307 - RNA, 23 nt, Human
gagcccgcacccccacccuuugg

SEQ ID NO: 2283308 - RNA, 20 nt, Human
gagcccgcacccccacccuu

SEQ ID NO: 2283309 - RNA, 19 nt, Human
gagcccgcacccccacccu

SEQ ID NO: 2283310 - RNA, 17 nt, Human
gagcccgcacccccacc

SEQ ID NO: 2283311 - RNA, 17 nt, Human
gagcaucaggccaggcc

SEQ ID NO: 2283312 - RNA, 14 nt, Human
gagcauccaccucc

SEQ ID NO: 2283313 - RNA, 22 nt, Human
gagccccuucugcucagcucug

SEQ ID NO: 2283314 - RNA, 15 nt, Human
gagcccucaaaguga

SEQ ID NO: 2283315 - RNA, 13 nt, Human
gagcccucagaac

SEQ ID NO: 2283316 - RNA, 18 nt, Human
gagcccgggcugccuggg

SEQ ID NO: 2283317 - RNA, 19 nt, Human
gagcccgggcugccugggc

SEQ ID NO: 2283318 - RNA, 22 nt, Human
gagcccgggcugccugggcugu

SEQ ID NO: 2283319 - RNA, 20 nt, Human
gagcccgggcugccugggcu

SEQ ID NO: 2283320 - RNA, 22 nt, Human
gagccuguguaacagcuccuug

SEQ ID NO: 2283321 - RNA, 18 nt, Human
gagccuguguaacagcuc

SEQ ID NO: 2283322 - RNA, 19 nt, Human
gagccuguguaacagcucc

SEQ ID NO: 2283323 - RNA, 20 nt, Human
gagccuguguaacagcuccu

SEQ ID NO: 2283324 - RNA, 21 nt, Human
gagccuguguaacagcuccuu

SEQ ID NO: 2283325 - RNA, 19 nt, Human
gagccugugccuccucacc

SEQ ID NO: 2283326 - RNA, 21 nt, Human
gagcccucaaagugaggggaa

SEQ ID NO: 2283327 - RNA, 13 nt, Human
gagccuguguaac

SEQ ID NO: 2283328 - RNA, 14 nt, Human
gagccuguguaaca

SEQ ID NO: 2283329 - RNA, 15 nt, Human
gagccuguguaacag

SEQ ID NO: 2283330 - RNA, 16 nt, Human
gagccuguguaacagc

SEQ ID NO: 2283331 - RNA, 17 nt, Human
gagccuguguaacagcu

SEQ ID NO: 2283332 - RNA, 22 nt, Human
gagaagcuccucuccccagccc

SEQ ID NO: 2283333 - RNA, 23 nt, Human
gagaagcugaugcuuugcuucaa

SEQ ID NO: 2283334 - RNA, 19 nt, Human
gagaagcuaaaaccugagc

SEQ ID NO: 2283335 - RNA, 19 nt, Human
gagaagcuccucuccccag

SEQ ID NO: 2283336 - RNA, 17 nt, Human
gagaagcucccaggaac

SEQ ID NO: 2283337 - RNA, 20 nt, Human
gagaagcuaaaaccugagcu

SEQ ID NO: 2283338 - RNA, 11 nt, Human
gagaagcugcu

SEQ ID NO: 2283339 - RNA, 21 nt, Human
gagcagugaaugauucagugu

SEQ ID NO: 2283340 - RNA, 14 nt, Human
gagcagugcaggca

SEQ ID NO: 2283341 - RNA, 15 nt, Human
gagcagugcaggcac

SEQ ID NO: 2283342 - RNA, 16 nt, Human
gagcagugcaggcaca

SEQ ID NO: 2283343 - RNA, 17 nt, Human
gagcagugcaggcacag

SEQ ID NO: 2283344 - RNA, 14 nt, Human
gagcaguggcuggu

SEQ ID NO: 2283345 - RNA, 23 nt, Human
gagcaguggcugguccagggcua

SEQ ID NO: 2283346 - RNA, 12 nt, Human
gagcagugucuu

SEQ ID NO: 2283347 - RNA, 11 nt, Human
gagcagugucu

SEQ ID NO: 2283348 - RNA, 18 nt, Human
gagcagugggccuggcca

SEQ ID NO: 2283349 - RNA, 17 nt, Human
gagcagugggccuggcc

SEQ ID NO: 2283350 - RNA, 15 nt, Human
gagcagugggccugg

SEQ ID NO: 2283351 - RNA, 20 nt, Human
gagcaucaggccaggcccuc

SEQ ID NO: 2283352 - RNA, 22 nt, Human
gagcaucaggccaggcccucug

SEQ ID NO: 2283353 - RNA, 22 nt, Human
gacaguaugagucaaugugcag

SEQ ID NO: 2283354 - RNA, 21 nt, Human
gacaguaugagucaaugugca

SEQ ID NO: 2283355 - RNA, 20 nt, Human
gacaguauggcagcuuuccu

SEQ ID NO: 2283356 - RNA, 17 nt, Human
gacaggguuucaccaug

SEQ ID NO: 2283357 - RNA, 21 nt, Human
gacaggguuuggcugugucua

SEQ ID NO: 2283358 - RNA, 20 nt, Human
gacaggguuuggcugugucu

SEQ ID NO: 2283359 - RNA, 19 nt, Human
gacagguuugggaccccug

SEQ ID NO: 2283360 - RNA, 15 nt, Human
gacaguauacagucc

SEQ ID NO: 2283361 - RNA, 21 nt, Human
gacaguaucacugucuuuccu

SEQ ID NO: 2283362 - RNA, 17 nt, Human
gacaguaucacugucuu

SEQ ID NO: 2283363 - RNA, 22 nt, Human
gacagguuugggaccccuggug

SEQ ID NO: 2283364 - RNA, 23 nt, Human
gaccaggacucccuccucaccuc

SEQ ID NO: 2283365 - RNA, 16 nt, Human
gaccaggagggcacug

SEQ ID NO: 2283366 - RNA, 23 nt, Human
gaccaggagggcacuggagcugu

SEQ ID NO: 2283367 - RNA, 21 nt, Human
gaccaggacucccuccucacc

SEQ ID NO: 2283368 - RNA, 19 nt, Human
gaccaggacucccuccuca

SEQ ID NO: 2283369 - RNA, 17 nt, Human
gaccaggacucccuccu

SEQ ID NO: 2283370 - RNA, 16 nt, Human
gaccaggacucccucc

SEQ ID NO: 2283371 - RNA, 14 nt, Human
gaccaggacucccu

SEQ ID NO: 2283372 - RNA, 14 nt, Human
gaccaggacuauag

SEQ ID NO: 2283373 - RNA, 22 nt, Human
gaccaggacuauagcccagguc

SEQ ID NO: 2283374 - RNA, 16 nt, Human
gaccaggacaggacca

SEQ ID NO: 2283375 - RNA, 22 nt, Human
gaccagcuuuucccaaaagccc

SEQ ID NO: 2283376 - RNA, 15 nt, Human
gaccaguugcacuug

SEQ ID NO: 2283377 - RNA, 14 nt, Human
gaccaguggucuca

SEQ ID NO: 2283378 - RNA, 14 nt, Human
gaccaguugggagc

SEQ ID NO: 2283379 - RNA, 15 nt, Human
gaccaguugggagca

SEQ ID NO: 2283380 - RNA, 17 nt, Human
gaccaguugggagcacu

SEQ ID NO: 2283381 - RNA, 20 nt, Human
gaccaguugggagcacugga

SEQ ID NO: 2283382 - RNA, 19 nt, Human
gaccaguuuaaccugaugc

SEQ ID NO: 2283383 - RNA, 16 nt, Human
gaccauaacagccaac

SEQ ID NO: 2283384 - RNA, 14 nt, Human
gaccaucccugaag

SEQ ID NO: 2283385 - RNA, 15 nt, Human
gaccaucccugaagg

SEQ ID NO: 2283386 - RNA, 23 nt, Human
gaccaggggugauuucagagagg

SEQ ID NO: 2283387 - RNA, 22 nt, Human
gaccaggucuuggagcugagcc

SEQ ID NO: 2283388 - RNA, 23 nt, Human
gaccaggucuuggagcugagccu

SEQ ID NO: 2283389 - RNA, 22 nt, Human
gaccaggggugauuucagagag

SEQ ID NO: 2283390 - RNA, 18 nt, Human
gaccagucaaccugggca

SEQ ID NO: 2283391 - RNA, 15 nt, Human
gaccagucugacccu

SEQ ID NO: 2283392 - RNA, 17 nt, Human
gaccagucaaccugggc

SEQ ID NO: 2283393 - RNA, 21 nt, Human
gaccagguuauuuuaaaaaga

SEQ ID NO: 2283394 - RNA, 15 nt, Human
gaccaguaauuguga

SEQ ID NO: 2283395 - RNA, 23 nt, Human
gaccaggcauccuccacaauagc

SEQ ID NO: 2283396 - RNA, 13 nt, Human
gaccaggccuggg

SEQ ID NO: 2283397 - RNA, 22 nt, Human
gacccguucaacuuuuccuuug

SEQ ID NO: 2283398 - RNA, 16 nt, Human
gacccuaaaucuugac

SEQ ID NO: 2283399 - RNA, 18 nt, Human
gacccuaagaccggcggc

SEQ ID NO: 2283400 - RNA, 21 nt, Human
gacccggagcuaacacuggcc

SEQ ID NO: 2283401 - RNA, 16 nt, Human
gacccgcucuggacca

SEQ ID NO: 2283402 - RNA, 14 nt, Human
gacccguccauuug

SEQ ID NO: 2283403 - RNA, 14 nt, Human
gacccuaccccacc

SEQ ID NO: 2283404 - RNA, 11 nt, Human
gacccuacccc

SEQ ID NO: 2283405 - RNA, 15 nt, Human
gacccuacaggagag

SEQ ID NO: 2283406 - RNA, 14 nt, Human
gacccuacaggaga

SEQ ID NO: 2283407 - RNA, 16 nt, Human
gacccuaccccaccac

SEQ ID NO: 2283408 - RNA, 16 nt, Human
gacccuauugcugcuu

SEQ ID NO: 2283409 - RNA, 12 nt, Human
gacccggcugcg

SEQ ID NO: 2283410 - RNA, 13 nt, Human
gacccggcugcgu

SEQ ID NO: 2283411 - RNA, 18 nt, Human
gaccccuuuucagcuucu

SEQ ID NO: 2283412 - RNA, 17 nt, Human
gaccccuuuucagcuuc

SEQ ID NO: 2283413 - RNA, 20 nt, Human
gaccccuuuucagcuucugc

SEQ ID NO: 2283414 - RNA, 13 nt, Human
gacccgcucugga

SEQ ID NO: 2283415 - RNA, 14 nt, Human
gacccgcucuggac

SEQ ID NO: 2283416 - RNA, 21 nt, Human
gaccccuggcuuuucacugcu

SEQ ID NO: 2283417 - RNA, 22 nt, Human
gaccccuggcuuuucacugcug

SEQ ID NO: 2283418 - RNA, 13 nt, Human
gaccccuggcuuu

SEQ ID NO: 2283419 - RNA, 13 nt, Human
gaccccuggccuc

SEQ ID NO: 2283420 - RNA, 14 nt, Human
gaccccuggccucc

SEQ ID NO: 2283421 - RNA, 15 nt, Human
gaccccuggccuccg

SEQ ID NO: 2283422 - RNA, 16 nt, Human
gaccccuggccuccgg

SEQ ID NO: 2283423 - RNA, 23 nt, Human
gaccccugcucaguaaagcacuu

SEQ ID NO: 2283424 - RNA, 16 nt, Human
gaccauucuccaccug

SEQ ID NO: 2283425 - RNA, 19 nt, Human
gaccauaacagccaacagg

SEQ ID NO: 2283426 - RNA, 21 nt, Human
gaccaugcucaucugcugguc

SEQ ID NO: 2283427 - RNA, 22 nt, Human
gaccaugcucaucugcuggucc

SEQ ID NO: 2283428 - RNA, 16 nt, Human
gaccaucccugaaggc

SEQ ID NO: 2283429 - RNA, 17 nt, Human
gaccaucccugaaggcc

SEQ ID NO: 2283430 - RNA, 13 nt, Human
gacacucagaccu

SEQ ID NO: 2283431 - RNA, 15 nt, Human
gacacucagaccuga

SEQ ID NO: 2283432 - RNA, 14 nt, Human
gacagggcuggccc

SEQ ID NO: 2283433 - RNA, 12 nt, Human
gacagggcuggc

SEQ ID NO: 2283434 - RNA, 15 nt, Human
gacagggcuggccca

SEQ ID NO: 2283435 - RNA, 17 nt, Human
gacagggcuggcccagc

SEQ ID NO: 2283436 - RNA, 18 nt, Human
gacagggcuggcccagcc

SEQ ID NO: 2283437 - RNA, 19 nt, Human
gacagggcuggcccagccc

SEQ ID NO: 2283438 - RNA, 20 nt, Human
gacaggggcaggaggaaggg

SEQ ID NO: 2283439 - RNA, 22 nt, Human
gacagggcuggcccagcccugc

SEQ ID NO: 2283440 - RNA, 20 nt, Human
gacagggcuggcccagcccu

SEQ ID NO: 2283441 - RNA, 21 nt, Human
gacagggcuggcccagcccug

SEQ ID NO: 2283442 - RNA, 18 nt, Human
gacaggggcaggaggaag

SEQ ID NO: 2283443 - RNA, 13 nt, Human
gacagcuccuucu

SEQ ID NO: 2283444 - RNA, 11 nt, Human
gacagccuggc

SEQ ID NO: 2283445 - RNA, 12 nt, Human
gacagccuggca

SEQ ID NO: 2283446 - RNA, 14 nt, Human
gacagcuccuucug

SEQ ID NO: 2283447 - RNA, 15 nt, Human
gacagcuccuucugu

SEQ ID NO: 2283448 - RNA, 11 nt, Human
gacagccuccc

SEQ ID NO: 2283449 - RNA, 12 nt, Human
gacagaaagcag

SEQ ID NO: 2283450 - RNA, 16 nt, Human
gacagccucccacccc

SEQ ID NO: 2283451 - RNA, 21 nt, Human
gacagcccuucuuuccacaga

SEQ ID NO: 2283452 - RNA, 13 nt, Human
gacagcccuccau

SEQ ID NO: 2283453 - RNA, 16 nt, Human
gacagaaaacauguuu

SEQ ID NO: 2283454 - RNA, 20 nt, Human
gacagaaagcagaacaguga

SEQ ID NO: 2283455 - RNA, 19 nt, Human
gacacuuuuuugaguggau

SEQ ID NO: 2283456 - RNA, 12 nt, Human
gacacucugcuc

SEQ ID NO: 2283457 - RNA, 21 nt, Human
gacacuuuucaugugugauuu

SEQ ID NO: 2283458 - RNA, 14 nt, Human
gacagaaagcagaa

SEQ ID NO: 2283459 - RNA, 21 nt, Human
gacacuccccgaagucuuuug

SEQ ID NO: 2283460 - RNA, 16 nt, Human
gacacuccccgaaguc

SEQ ID NO: 2283461 - RNA, 12 nt, Human
gacacuccagug

SEQ ID NO: 2283462 - RNA, 14 nt, Human
gacacuccagugcc

SEQ ID NO: 2283463 - RNA, 19 nt, Human
gacacuccagugccagcaa

SEQ ID NO: 2283464 - RNA, 21 nt, Human
gacacucccuugggcucccug

SEQ ID NO: 2283465 - RNA, 15 nt, Human
gacacucccuugggc

SEQ ID NO: 2283466 - RNA, 16 nt, Human
gacacuccagugccag

SEQ ID NO: 2283467 - RNA, 14 nt, Human
gacacuccuagaga

SEQ ID NO: 2283468 - RNA, 21 nt, Human
gacacuccuagagaacgcagc

SEQ ID NO: 2283469 - RNA, 22 nt, Human
gacacuccuagagaacgcagcc

SEQ ID NO: 2283470 - RNA, 16 nt, Human
gaagcauguaggagaa

SEQ ID NO: 2283471 - RNA, 16 nt, Human
gaagcaugaaaaagca

SEQ ID NO: 2283472 - RNA, 17 nt, Human
gaagcauguaggagaau

SEQ ID NO: 2283473 - RNA, 12 nt, Human
gaagcauguuuc

SEQ ID NO: 2283474 - RNA, 13 nt, Human
gaagcauguuuca

SEQ ID NO: 2283475 - RNA, 14 nt, Human
gaagcauguuucau

SEQ ID NO: 2283476 - RNA, 19 nt, Human
gaagcauguuucauguuuu

SEQ ID NO: 2283477 - RNA, 16 nt, Human
gaagcauguuucaugu

SEQ ID NO: 2283478 - RNA, 13 nt, Human
gaagcaugaaaaa

SEQ ID NO: 2283479 - RNA, 16 nt, Human
gaagcaguugugucag

SEQ ID NO: 2283480 - RNA, 22 nt, Human
gaagcaucuuccagaaguguga

SEQ ID NO: 2283481 - RNA, 13 nt, Human
gaagcaguugugu

SEQ ID NO: 2283482 - RNA, 14 nt, Human
gaagcaguuguguc

SEQ ID NO: 2283483 - RNA, 16 nt, Human
gaagcagugagccgca

SEQ ID NO: 2283484 - RNA, 19 nt, Human
gaagcagugccuuccauaa

SEQ ID NO: 2283485 - RNA, 18 nt, Human
gaagcagugccuuccaua

SEQ ID NO: 2283486 - RNA, 17 nt, Human
gaagcagugccuuccau

SEQ ID NO: 2283487 - RNA, 21 nt, Human
gacgcugguagagauggagga

SEQ ID NO: 2283488 - RNA, 20 nt, Human
gacgcugguagagauggagg

SEQ ID NO: 2283489 - RNA, 13 nt, Human
gacgcugugcugc

SEQ ID NO: 2283490 - RNA, 18 nt, Human
gacgcugguagagaugga

SEQ ID NO: 2283491 - RNA, 13 nt, Human
gacgcugaauaaa

SEQ ID NO: 2283492 - RNA, 16 nt, Human
gacgcugaauaaaugu

SEQ ID NO: 2283493 - RNA, 17 nt, Human
gacgcugaauaaauguc

SEQ ID NO: 2283494 - RNA, 12 nt, Human
gacgcugugcug

SEQ ID NO: 2283495 - RNA, 18 nt, Human
gacccucguggccuuccc

SEQ ID NO: 2283496 - RNA, 23 nt, Human
gacccuccuguugcacccagccc

SEQ ID NO: 2283497 - RNA, 21 nt, Human
gacccuccuguugcacccagc

SEQ ID NO: 2283498 - RNA, 22 nt, Human
gacccuccuguugcacccagcc

SEQ ID NO: 2283499 - RNA, 15 nt, Human
gacccucguggccuu

SEQ ID NO: 2283500 - RNA, 11 nt, Human
gacccucucaa

SEQ ID NO: 2283501 - RNA, 22 nt, Human
gacccuccuccucccccagagg

SEQ ID NO: 2283502 - RNA, 19 nt, Human
gacccuccuccucccccag

SEQ ID NO: 2283503 - RNA, 15 nt, Human
gacccuccuguugca

SEQ ID NO: 2283504 - RNA, 18 nt, Human
gacccuccuguugcaccc

SEQ ID NO: 2283505 - RNA, 20 nt, Human
gacccuccuguugcacccag

SEQ ID NO: 2283506 - RNA, 17 nt, Human
gacccuccccgcacccc

SEQ ID NO: 2283507 - RNA, 15 nt, Human
gacccuccccgcacc

SEQ ID NO: 2283508 - RNA, 18 nt, Human
gacuauauuguacacacc

SEQ ID NO: 2283509 - RNA, 20 nt, Human
gacuauauagagauguuuuu

SEQ ID NO: 2283510 - RNA, 23 nt, Human
gacuauauagagauguuuuuaaa

SEQ ID NO: 2283511 - RNA, 16 nt, Human
gacuauauagagaugu

SEQ ID NO: 2283512 - RNA, 19 nt, Human
gacuauauagagauguuuu

SEQ ID NO: 2283513 - RNA, 19 nt, Human
gacuaugcguuuuuauaaa

SEQ ID NO: 2283514 - RNA, 21 nt, Human
gacuauauuugggccugcucc

SEQ ID NO: 2283515 - RNA, 19 nt, Human
gacuauauuugggccugcu

SEQ ID NO: 2283516 - RNA, 16 nt, Human
gacuauucaaacaguc

SEQ ID NO: 2283517 - RNA, 15 nt, Human
gacuauucaaacagu

SEQ ID NO: 2283518 - RNA, 22 nt, Human
gacucaaaugcucagaccagcu

SEQ ID NO: 2283519 - RNA, 18 nt, Human
gacucaaaguuucagaga

SEQ ID NO: 2283520 - RNA, 19 nt, Human
gacucaaaucuccaguauu

SEQ ID NO: 2283521 - RNA, 14 nt, Human
gacucaaaccaaau

SEQ ID NO: 2283522 - RNA, 15 nt, Human
gacuauggagcugag

SEQ ID NO: 2283523 - RNA, 22 nt, Human
gacuauucaaacagucucagga

SEQ ID NO: 2283524 - RNA, 22 nt, Human
gacucaacauguuacugaccag

SEQ ID NO: 2283525 - RNA, 17 nt, Human
gacuauagcccaggucc

SEQ ID NO: 2283526 - RNA, 18 nt, Human
gacuagugaggaaagauu

SEQ ID NO: 2283527 - RNA, 17 nt, Human
gagaagcggcuggcagc

SEQ ID NO: 2283528 - RNA, 21 nt, Human
gacucacaagaagaccagacu

SEQ ID NO: 2283529 - RNA, 22 nt, Human
gacucacaagaagaccagacug

SEQ ID NO: 2283530 - RNA, 22 nt, Human
gacugguguuaucaccgugggc

SEQ ID NO: 2283531 - RNA, 22 nt, Human
gacuguacaaaguagaagucuu

SEQ ID NO: 2283532 - RNA, 16 nt, Human
gacuguacuccuccca

SEQ ID NO: 2283533 - RNA, 17 nt, Human
gacuguacuccucccag

SEQ ID NO: 2283534 - RNA, 18 nt, Human
gacucacaaccugaaccu

SEQ ID NO: 2283535 - RNA, 16 nt, Human
gacucaauuucucccc

SEQ ID NO: 2283536 - RNA, 17 nt, Human
gacucaauuucucccca

SEQ ID NO: 2283537 - RNA, 19 nt, Human
gacucacaaccugaaccua

SEQ ID NO: 2283538 - RNA, 15 nt, Human
gacucacaagaagac

SEQ ID NO: 2283539 - RNA, 17 nt, Human
gacucacaagaagacca

SEQ ID NO: 2283540 - RNA, 17 nt, Human
gacucaaugcacugaca

SEQ ID NO: 2283541 - RNA, 17 nt, Human
gacucaaguccuuaccu

SEQ ID NO: 2283542 - RNA, 17 nt, Human
gacucaauaaaaucaug

SEQ ID NO: 2283543 - RNA, 15 nt, Human
gacucaauaaaauca

SEQ ID NO: 2283544 - RNA, 16 nt, Human
gacucaagugucucag

SEQ ID NO: 2283545 - RNA, 14 nt, Human
gacucaaugcacug

SEQ ID NO: 2283546 - RNA, 22 nt, Human
gacuguguauucuaguuuuguc

SEQ ID NO: 2283547 - RNA, 18 nt, Human
gacugucuccauggcccu

SEQ ID NO: 2283548 - RNA, 22 nt, Human
gacuguauuugugacuaauugu

SEQ ID NO: 2283549 - RNA, 23 nt, Human
gacuguauuugugacuaauugua

SEQ ID NO: 2283550 - RNA, 22 nt, Human
gacugucucaagagggcacugg

SEQ ID NO: 2283551 - RNA, 23 nt, Human
gacugucucaagagggcacuggu

SEQ ID NO: 2283552 - RNA, 17 nt, Human
gacuguauuugugacua

SEQ ID NO: 2283553 - RNA, 19 nt, Human
gacuguauuugugacuaau

SEQ ID NO: 2283554 - RNA, 20 nt, Human
gacuguauuugugacuaauu

SEQ ID NO: 2283555 - RNA, 21 nt, Human
gacugucucaagagggcacug

SEQ ID NO: 2283556 - RNA, 15 nt, Human
gacugucauagaaau

SEQ ID NO: 2283557 - RNA, 14 nt, Human
gacugugugcucag

SEQ ID NO: 2283558 - RNA, 16 nt, Human
gacugugugcucagga

SEQ ID NO: 2283559 - RNA, 17 nt, Human
gacugugugcucaggag

SEQ ID NO: 2283560 - RNA, 20 nt, Human
gacugugugcucaggagccc

SEQ ID NO: 2283561 - RNA, 21 nt, Human
gacuuugcagccggcacaggg

SEQ ID NO: 2283562 - RNA, 18 nt, Human
gacuuucugccuggagug

SEQ ID NO: 2283563 - RNA, 11 nt, Human
gacuuucuguu

SEQ ID NO: 2283564 - RNA, 13 nt, Human
gacuuucuguugg

SEQ ID NO: 2283565 - RNA, 14 nt, Human
gacuuuggaaagac

SEQ ID NO: 2283566 - RNA, 14 nt, Human
gacuuuggaaagag

SEQ ID NO: 2283567 - RNA, 19 nt, Human
gacuguuuucucucggcuc

SEQ ID NO: 2283568 - RNA, 21 nt, Human
gacuguuuucucucggcuccc

SEQ ID NO: 2283569 - RNA, 13 nt, Human
gacuguuuuuacc

SEQ ID NO: 2283570 - RNA, 17 nt, Human
gacuguuuuuacccaua

SEQ ID NO: 2283571 - RNA, 20 nt, Human
gacuguuuuuuccugagcuu

SEQ ID NO: 2283572 - RNA, 19 nt, Human
gacuguuuuuuccugagcu

SEQ ID NO: 2283573 - RNA, 16 nt, Human
gacuuucugccuggag

SEQ ID NO: 2283574 - RNA, 14 nt, Human
gacuguuuuuuccu

SEQ ID NO: 2283575 - RNA, 18 nt, Human
gacuguuuuuacccauau

SEQ ID NO: 2283576 - RNA, 18 nt, Human
gacuguuuucucuugaga

SEQ ID NO: 2283577 - RNA, 16 nt, Human
gacuguuuucucuuga

SEQ ID NO: 2283578 - RNA, 21 nt, Human
gacuuuucuguccgagcuuug

SEQ ID NO: 2283579 - RNA, 22 nt, Human
gacuuuucgaccaauucaaccc

SEQ ID NO: 2283580 - RNA, 19 nt, Human
gacuuuucgaccaauucaa

SEQ ID NO: 2283581 - RNA, 18 nt, Human
gacuuuuccauguaucua

SEQ ID NO: 2283582 - RNA, 17 nt, Human
gacuuuuccauguaucu

SEQ ID NO: 2283583 - RNA, 14 nt, Human
gacuuuguaccccc

SEQ ID NO: 2283584 - RNA, 23 nt, Human
gacuuuucuguccgagcuuugaa

SEQ ID NO: 2283585 - RNA, 13 nt, Human
gacuuuucugcaa

SEQ ID NO: 2283586 - RNA, 14 nt, Human
gacuuuucugcaaa

SEQ ID NO: 2283587 - RNA, 22 nt, Human
gacuuuguuaguuucuccaagc

SEQ ID NO: 2283588 - RNA, 19 nt, Human
gacuuuggcugcaugcgag

SEQ ID NO: 2283589 - RNA, 22 nt, Human
gacuuuguaccccccaaccccu

SEQ ID NO: 2283590 - RNA, 13 nt, Human
gacuuugugaucc

SEQ ID NO: 2283591 - RNA, 15 nt, Human
gacuuugcuucccau

SEQ ID NO: 2283592 - RNA, 16 nt, Human
gacuuuggcugcaugc

SEQ ID NO: 2283593 - RNA, 18 nt, Human
gacuuugggauaggaaaa

SEQ ID NO: 2283594 - RNA, 17 nt, Human
gcauacauuuauaaugu

SEQ ID NO: 2283595 - RNA, 23 nt, Human
gcauacacacacacacacagcca

SEQ ID NO: 2283596 - RNA, 16 nt, Human
gcauaccacuuuuguu

SEQ ID NO: 2283597 - RNA, 15 nt, Human
gcauaccacuuuugu

SEQ ID NO: 2283598 - RNA, 21 nt, Human
gcagggaaggggaggcagccg

SEQ ID NO: 2283599 - RNA, 21 nt, Human
gcagggaaguguaagaaacac

SEQ ID NO: 2283600 - RNA, 20 nt, Human
gcagggaaggggaggcagcc

SEQ ID NO: 2283601 - RNA, 17 nt, Human
gcagguggggagggggu

SEQ ID NO: 2283602 - RNA, 15 nt, Human
gcaggugguccugag

SEQ ID NO: 2283603 - RNA, 22 nt, Human
gcaggugucauauauggggggc

SEQ ID NO: 2283604 - RNA, 23 nt, Human
gcaggugguggcacugagccccc

SEQ ID NO: 2283605 - RNA, 21 nt, Human
gcaggugguggcacugagccc

SEQ ID NO: 2283606 - RNA, 22 nt, Human
gcaggugguggcacugagcccc

SEQ ID NO: 2283607 - RNA, 16 nt, Human
gcaggugguccugaga

SEQ ID NO: 2283608 - RNA, 21 nt, Human
gcaggugguccugagaccuga

SEQ ID NO: 2283609 - RNA, 14 nt, Human
gcaggugguggcac

SEQ ID NO: 2283610 - RNA, 20 nt, Human
gcaggugguggcacugagcc

SEQ ID NO: 2283611 - RNA, 16 nt, Human
gcagguuagaaccuag

SEQ ID NO: 2283612 - RNA, 15 nt, Human
gcaguugacagcagg

SEQ ID NO: 2283613 - RNA, 22 nt, Human
gcagguucuucuuccugaagcu

SEQ ID NO: 2283614 - RNA, 22 nt, Human
gcaguugaaugacaacagaagc

SEQ ID NO: 2283615 - RNA, 17 nt, Human
gcaguugacagcaggug

SEQ ID NO: 2283616 - RNA, 22 nt, Human
gcaguugaaaagacuccaaaga

SEQ ID NO: 2283617 - RNA, 13 nt, Human
gcagguucccaag

SEQ ID NO: 2283618 - RNA, 16 nt, Human
gcagguucccaagcuc

SEQ ID NO: 2283619 - RNA, 15 nt, Human
gcagguucccaagcu

SEQ ID NO: 2283620 - RNA, 19 nt, Human
gcagguucccaagcucaga

SEQ ID NO: 2283621 - RNA, 18 nt, Human
gcagguucccaagcucag

SEQ ID NO: 2283622 - RNA, 20 nt, Human
gcagguucuucuuccugaag

SEQ ID NO: 2283623 - RNA, 15 nt, Human
gcauaaaaauuagcc

SEQ ID NO: 2283624 - RNA, 14 nt, Human
gcauaaaggccuuu

SEQ ID NO: 2283625 - RNA, 13 nt, Human
gcauaaauaugca

SEQ ID NO: 2283626 - RNA, 14 nt, Human
gcaguugccaguca

SEQ ID NO: 2283627 - RNA, 23 nt, Human
gcaguugccagucaccccggcca

SEQ ID NO: 2283628 - RNA, 13 nt, Human
gcauacaaucuga

SEQ ID NO: 2283629 - RNA, 11 nt, Human
gcauacacaca

SEQ ID NO: 2283630 - RNA, 18 nt, Human
gcauaacaagguccaaga

SEQ ID NO: 2283631 - RNA, 22 nt, Human
gcauacacacacacacacagcc

SEQ ID NO: 2283632 - RNA, 21 nt, Human
gcauacacacacacacacagc

SEQ ID NO: 2283633 - RNA, 14 nt, Human
gcauacacacacac

SEQ ID NO: 2283634 - RNA, 13 nt, Human
gcauacacacaca

SEQ ID NO: 2283635 - RNA, 17 nt, Human
gcauaacaauuccucua

SEQ ID NO: 2283636 - RNA, 16 nt, Human
gcauaacaauuccucu

SEQ ID NO: 2283637 - RNA, 14 nt, Human
gcauaaauaugcag

SEQ ID NO: 2283638 - RNA, 15 nt, Human
gcauaaauaugcagu

SEQ ID NO: 2283639 - RNA, 17 nt, Human
gcacugaagugcuuagu

SEQ ID NO: 2283640 - RNA, 20 nt, Human
gcacuuucuauccucuguaa

SEQ ID NO: 2283641 - RNA, 16 nt, Human
gcacucuuaagcuucc

SEQ ID NO: 2283642 - RNA, 14 nt, Human
gcacucuguuauuu

SEQ ID NO: 2283643 - RNA, 20 nt, Human
gcacucugugcccaugggca

SEQ ID NO: 2283644 - RNA, 21 nt, Human
gcacucugugcccaugggcac

SEQ ID NO: 2283645 - RNA, 19 nt, Human
gcacucuguuauuuagacu

SEQ ID NO: 2283646 - RNA, 11 nt, Human
gcacucugugc

SEQ ID NO: 2283647 - RNA, 12 nt, Human
gcacucugugcc

SEQ ID NO: 2283648 - RNA, 13 nt, Human
gcacucugugccc

SEQ ID NO: 2283649 - RNA, 14 nt, Human
gcacucugugccca

SEQ ID NO: 2283650 - RNA, 19 nt, Human
gcacucugugcccaugggc

SEQ ID NO: 2283651 - RNA, 16 nt, Human
gcacuuugggaggcug

SEQ ID NO: 2283652 - RNA, 16 nt, Human
gcacuuugggaggccu

SEQ ID NO: 2283653 - RNA, 21 nt, Human
gcacuuugggaggcugaggcg

SEQ ID NO: 2283654 - RNA, 20 nt, Human
gcacuuugggaggcugaggc

SEQ ID NO: 2283655 - RNA, 16 nt, Human
gcacuuuguucuggcu

SEQ ID NO: 2283656 - RNA, 17 nt, Human
gcagcuguuagagucca

SEQ ID NO: 2283657 - RNA, 16 nt, Human
gcagcuguugcaguga

SEQ ID NO: 2283658 - RNA, 16 nt, Human
gcagcuguuuaaaugu

SEQ ID NO: 2283659 - RNA, 21 nt, Human
gcagcuguuuuaguuaaauuu

SEQ ID NO: 2283660 - RNA, 14 nt, Human
gcagcuguuagagu

SEQ ID NO: 2283661 - RNA, 23 nt, Human
gcagcugggcccaacccugucug

SEQ ID NO: 2283662 - RNA, 16 nt, Human
gcagcugggcccaacc

SEQ ID NO: 2283663 - RNA, 19 nt, Human
gcagcugggcccaacccug

SEQ ID NO: 2283664 - RNA, 21 nt, Human
gcagcugggcccaacccuguc

SEQ ID NO: 2283665 - RNA, 22 nt, Human
gcagcugggcccaacccugucu

SEQ ID NO: 2283666 - RNA, 14 nt, Human
gcagcugggcccaa

SEQ ID NO: 2283667 - RNA, 15 nt, Human
gcagcugggcccaac

SEQ ID NO: 2283668 - RNA, 16 nt, Human
gcagcuggacuaccca

SEQ ID NO: 2283669 - RNA, 23 nt, Human
gcagcuggaaaagggucuuggga

SEQ ID NO: 2283670 - RNA, 15 nt, Human
gcagcuggacuaccc

SEQ ID NO: 2283671 - RNA, 16 nt, Human
gcagcuugaggguugg

SEQ ID NO: 2283672 - RNA, 20 nt, Human
gcagcuucugccacuuccca

SEQ ID NO: 2283673 - RNA, 17 nt, Human
gcagcuucugccacuuc

SEQ ID NO: 2283674 - RNA, 18 nt, Human
gcagcuucugccacuucc

SEQ ID NO: 2283675 - RNA, 14 nt, Human
gcagcuucuguccu

SEQ ID NO: 2283676 - RNA, 15 nt, Human
gcagcuuauucacaa

SEQ ID NO: 2283677 - RNA, 14 nt, Human
gcagcuucaccaga

SEQ ID NO: 2283678 - RNA, 13 nt, Human
gcagcuucaguug

SEQ ID NO: 2283679 - RNA, 12 nt, Human
gcagcuuccaga

SEQ ID NO: 2283680 - RNA, 14 nt, Human
gcagcuucugccac

SEQ ID NO: 2283681 - RNA, 15 nt, Human
gcagcuucugccacu

SEQ ID NO: 2283682 - RNA, 22 nt, Human
gcagcugcgguccacccaggag

SEQ ID NO: 2283683 - RNA, 23 nt, Human
gcagcugcgguccacccaggagc

SEQ ID NO: 2283684 - RNA, 13 nt, Human
gcagcugcuuuug

SEQ ID NO: 2283685 - RNA, 20 nt, Human
gcagcugcuuuugucuaugg

SEQ ID NO: 2283686 - RNA, 19 nt, Human
gcaggcuggcaccgccuuc

SEQ ID NO: 2283687 - RNA, 18 nt, Human
gcaggcuggcaccgccuu

SEQ ID NO: 2283688 - RNA, 17 nt, Human
gcaggcuggcagcucuc

SEQ ID NO: 2283689 - RNA, 18 nt, Human
gcaggcuggcagcucucc

SEQ ID NO: 2283690 - RNA, 16 nt, Human
gcaggcuggcaccgcc

SEQ ID NO: 2283691 - RNA, 13 nt, Human
gcagcuugccccg

SEQ ID NO: 2283692 - RNA, 20 nt, Human
gcaggcuggagguaaggccu

SEQ ID NO: 2283693 - RNA, 12 nt, Human
gcagcuugcccc

SEQ ID NO: 2283694 - RNA, 17 nt, Human
gcaggcucucaggccag

SEQ ID NO: 2283695 - RNA, 22 nt, Human
gcagggaaacagcuaaugggac

SEQ ID NO: 2283696 - RNA, 22 nt, Human
gcagggaaaggcucugaaagcc

SEQ ID NO: 2283697 - RNA, 22 nt, Human
gcaggcuggccaguccaggcug

SEQ ID NO: 2283698 - RNA, 13 nt, Human
gcaggcuggcccu

SEQ ID NO: 2283699 - RNA, 12 nt, Human
gcaggcuggcca

SEQ ID NO: 2283700 - RNA, 14 nt, Human
gcaggcuggccagu

SEQ ID NO: 2283701 - RNA, 22 nt, Human
gcaggcuggcagcucuccaguc

SEQ ID NO: 2283702 - RNA, 23 nt, Human
gcaggcuggcagcucuccaguca

SEQ ID NO: 2283703 - RNA, 19 nt, Human
gcagcuugaggguugggcu

SEQ ID NO: 2283704 - RNA, 21 nt, Human
gcagcuugaggguugggcugg

SEQ ID NO: 2283705 - RNA, 22 nt, Human
gcaggcucgggcuccccagccc

SEQ ID NO: 2283706 - RNA, 12 nt, Human
gcaggcucucag

SEQ ID NO: 2283707 - RNA, 13 nt, Human
gcaggcucucagg

SEQ ID NO: 2283708 - RNA, 14 nt, Human
gcaggcucucaggc

SEQ ID NO: 2283709 - RNA, 15 nt, Human
gcaggcucucaggcc

SEQ ID NO: 2283710 - RNA, 16 nt, Human
gcaggcucucaggcca

SEQ ID NO: 2283711 - RNA, 20 nt, Human
gccaaggagggugagugcaa

SEQ ID NO: 2283712 - RNA, 23 nt, Human
gccaaggagcugcuauagccugg

SEQ ID NO: 2283713 - RNA, 21 nt, Human
gccaaggagcugcuauagccu

SEQ ID NO: 2283714 - RNA, 21 nt, Human
gccaaggagggugagugcaag

SEQ ID NO: 2283715 - RNA, 23 nt, Human
gccaaggaggguggaucaccuga

SEQ ID NO: 2283716 - RNA, 11 nt, Human
gccaaggccaa

SEQ ID NO: 2283717 - RNA, 19 nt, Human
gccaaggccaaaggaagca

SEQ ID NO: 2283718 - RNA, 17 nt, Human
gccaaggccaaaggaag

SEQ ID NO: 2283719 - RNA, 19 nt, Human
gccaagcuccuugggaggc

SEQ ID NO: 2283720 - RNA, 17 nt, Human
gccaagcuccuugggag

SEQ ID NO: 2283721 - RNA, 16 nt, Human
gccaagcuccuuggga

SEQ ID NO: 2283722 - RNA, 23 nt, Human
gccaagcucaggaccaggcaaug

SEQ ID NO: 2283723 - RNA, 16 nt, Human
gccaagcuccaagccc

SEQ ID NO: 2283724 - RNA, 14 nt, Human
gccaagcagccaag

SEQ ID NO: 2283725 - RNA, 14 nt, Human
gccaagcagggagg

SEQ ID NO: 2283726 - RNA, 21 nt, Human
gccaagcccuccccaucccau

SEQ ID NO: 2283727 - RNA, 22 nt, Human
gccaagcauuuaauguagccau

SEQ ID NO: 2283728 - RNA, 22 nt, Human
gccaagcccuccccaucccaug

SEQ ID NO: 2283729 - RNA, 13 nt, Human
gccaagcuagaau

SEQ ID NO: 2283730 - RNA, 20 nt, Human
gccaagcucaggaccaggca

SEQ ID NO: 2283731 - RNA, 14 nt, Human
gccaaggacugccg

SEQ ID NO: 2283732 - RNA, 17 nt, Human
gccaaggacugccgacc

SEQ ID NO: 2283733 - RNA, 11 nt, Human
gccaaggagcu

SEQ ID NO: 2283734 - RNA, 13 nt, Human
gccaaggagcugc

SEQ ID NO: 2283735 - RNA, 12 nt, Human
gccaaggagcug

SEQ ID NO: 2283736 - RNA, 20 nt, Human
gccaaggagcugcuauagcc

SEQ ID NO: 2283737 - RNA, 16 nt, Human
gccaaggagcugcuau

SEQ ID NO: 2283738 - RNA, 15 nt, Human
gccaaggagcugcua

SEQ ID NO: 2283739 - RNA, 14 nt, Human
gccaaggagcugcu

SEQ ID NO: 2283740 - RNA, 20 nt, Human
gccaagcacagugccugcau

SEQ ID NO: 2283741 - RNA, 12 nt, Human
gccaagcacagu

SEQ ID NO: 2283742 - RNA, 16 nt, Human
gccaagcacaguggug

SEQ ID NO: 2283743 - RNA, 21 nt, Human
gccaagcacagugguggcagg

SEQ ID NO: 2283744 - RNA, 13 nt, Human
gccaagcaaccug

SEQ ID NO: 2283745 - RNA, 18 nt, Human
gccaagcaaccugggucc

SEQ ID NO: 2283746 - RNA, 19 nt, Human
gccaagcaaccugggucca

SEQ ID NO: 2283747 - RNA, 20 nt, Human
gccaagcaaccuggguccaa

SEQ ID NO: 2283748 - RNA, 12 nt, Human
gccaagcagcca

SEQ ID NO: 2283749 - RNA, 23 nt, Human
gccaagcacugugcucagggcua

SEQ ID NO: 2283750 - RNA, 15 nt, Human
gccaagcacugugcu

SEQ ID NO: 2283751 - RNA, 18 nt, Human
gccaagcacugugcucag

SEQ ID NO: 2283752 - RNA, 22 nt, Human
gccaagcaccuagccucgcucu

SEQ ID NO: 2283753 - RNA, 18 nt, Human
gccaagaucgcgccacug

SEQ ID NO: 2283754 - RNA, 23 nt, Human
gccaagacuuggcaacagaagca

SEQ ID NO: 2283755 - RNA, 17 nt, Human
gccaagaggcugcagcc

SEQ ID NO: 2283756 - RNA, 23 nt, Human
gccaacccuucuccucuuguaaa

SEQ ID NO: 2283757 - RNA, 13 nt, Human
gccaacccuucuc

SEQ ID NO: 2283758 - RNA, 22 nt, Human
gccaacccuucuccucuuguaa

SEQ ID NO: 2283759 - RNA, 14 nt, Human
gccaaccccugugg

SEQ ID NO: 2283760 - RNA, 13 nt, Human
gccaaccauaccu

SEQ ID NO: 2283761 - RNA, 23 nt, Human
gccaaccauaccuuccuucccug

SEQ ID NO: 2283762 - RNA, 20 nt, Human
gccaacaucgugaaacccug

SEQ ID NO: 2283763 - RNA, 22 nt, Human
gccaacaucgugaaacccuguc

SEQ ID NO: 2283764 - RNA, 23 nt, Human
gccaacaucgugaaacccugucu

SEQ ID NO: 2283765 - RNA, 14 nt, Human
gccaacauggugaa

SEQ ID NO: 2283766 - RNA, 20 nt, Human
gccaacagucaaaacagaga

SEQ ID NO: 2283767 - RNA, 23 nt, Human
gccaacagguggcaggaccagga

SEQ ID NO: 2283768 - RNA, 19 nt, Human
gccaacagguggcaggacc

SEQ ID NO: 2283769 - RNA, 22 nt, Human
gccaacagguggcaggaccagg

SEQ ID NO: 2283770 - RNA, 20 nt, Human
gccaacaguguuaggccugg

SEQ ID NO: 2283771 - RNA, 21 nt, Human
gccaacaguguuaggccuggc

SEQ ID NO: 2283772 - RNA, 22 nt, Human
gccaacaguguuaggccuggca

SEQ ID NO: 2283773 - RNA, 23 nt, Human
gccaacaguguuaggccuggcac

SEQ ID NO: 2283774 - RNA, 16 nt, Human
gccaacagguggcagg

SEQ ID NO: 2283775 - RNA, 13 nt, Human
gcauuugagaaau

SEQ ID NO: 2283776 - RNA, 15 nt, Human
gcauuugaaugcauu

SEQ ID NO: 2283777 - RNA, 16 nt, Human
gcauuugaaugcauuu

SEQ ID NO: 2283778 - RNA, 16 nt, Human
gcauuugaaaauuuug

SEQ ID NO: 2283779 - RNA, 10 nt, Human
gcauuugaau

SEQ ID NO: 2283780 - RNA, 20 nt, Human
gcauuucuugauguugcuua

SEQ ID NO: 2283781 - RNA, 21 nt, Human
gcauuucuugauguugcuuag

SEQ ID NO: 2283782 - RNA, 12 nt, Human
gcauuugaaugc

SEQ ID NO: 2283783 - RNA, 13 nt, Human
gcauuugaaugca

SEQ ID NO: 2283784 - RNA, 14 nt, Human
gcauuugaaaauuu

SEQ ID NO: 2283785 - RNA, 13 nt, Human
gcauuucucuggg

SEQ ID NO: 2283786 - RNA, 12 nt, Human
gcauuucugaag

SEQ ID NO: 2283787 - RNA, 13 nt, Human
gcauuucugaagu

SEQ ID NO: 2283788 - RNA, 15 nt, Human
gcauuguugaggugg

SEQ ID NO: 2283789 - RNA, 19 nt, Human
gcauuguggcugucagcag

SEQ ID NO: 2283790 - RNA, 16 nt, Human
gcauuguggcugucag

SEQ ID NO: 2283791 - RNA, 18 nt, Human
gcauugugaacugacagg

SEQ ID NO: 2283792 - RNA, 22 nt, Human
gcauuguuugcuuauuguucca

SEQ ID NO: 2283793 - RNA, 21 nt, Human
gcauuguuugcuuauuguucc

SEQ ID NO: 2283794 - RNA, 20 nt, Human
gcauuguuugcuuauuguuc

SEQ ID NO: 2283795 - RNA, 18 nt, Human
gcauuguuugcuuauugu

SEQ ID NO: 2283796 - RNA, 17 nt, Human
gcauuguuugcuuauug

SEQ ID NO: 2283797 - RNA, 16 nt, Human
gcauuguugagguggu

SEQ ID NO: 2283798 - RNA, 23 nt, Human
gcauuguugagguggucugaaug

SEQ ID NO: 2283799 - RNA, 15 nt, Human
gcauuuaaaagauac

SEQ ID NO: 2283800 - RNA, 12 nt, Human
gcauuuaaaaga

SEQ ID NO: 2283801 - RNA, 19 nt, Human
gcauuuauggucaacacuu

SEQ ID NO: 2283802 - RNA, 17 nt, Human
gcauuuauuugugauga

SEQ ID NO: 2283803 - RNA, 16 nt, Human
gcauuuauuugugaug

SEQ ID NO: 2283804 - RNA, 23 nt, Human
gcauuguuugcuuauuguuccaa

SEQ ID NO: 2283805 - RNA, 18 nt, Human
gcauuuaaaacagacacu

SEQ ID NO: 2283806 - RNA, 11 nt, Human
gcauuucauuc

SEQ ID NO: 2283807 - RNA, 13 nt, Human
gcauuucauucuu

SEQ ID NO: 2283808 - RNA, 20 nt, Human
gcauuucauucuucucuagc

SEQ ID NO: 2283809 - RNA, 22 nt, Human
gcauuucauucuucucuagcug

SEQ ID NO: 2283810 - RNA, 21 nt, Human
gcauuuccaacaccacagaca

SEQ ID NO: 2283811 - RNA, 22 nt, Human
gcauuuccaacaccacagacac

SEQ ID NO: 2283812 - RNA, 23 nt, Human
gcauuuccaacaccacagacaca

SEQ ID NO: 2283813 - RNA, 21 nt, Human
gcauuuccuaucaccuauuuc

SEQ ID NO: 2283814 - RNA, 15 nt, Human
gccaaccccugugga

SEQ ID NO: 2283815 - RNA, 16 nt, Human
gccaaccuguaauaaa

SEQ ID NO: 2283816 - RNA, 18 nt, Human
gccaaccuguaauaaaua

SEQ ID NO: 2283817 - RNA, 20 nt, Human
gccaaccuguaauaaauaug

SEQ ID NO: 2283818 - RNA, 14 nt, Human
gccaacgacaaagc

SEQ ID NO: 2283819 - RNA, 21 nt, Human
gccaaccuguaauaaauauga

SEQ ID NO: 2283820 - RNA, 22 nt, Human
gccaaccuguaauaaauaugag

SEQ ID NO: 2283821 - RNA, 23 nt, Human
gccaacgacaaagccaaacucug

SEQ ID NO: 2283822 - RNA, 14 nt, Human
gccaacuauggccu

SEQ ID NO: 2283823 - RNA, 15 nt, Human
gccaacuauggccug

SEQ ID NO: 2283824 - RNA, 12 nt, Human
gccaacugcugc

SEQ ID NO: 2283825 - RNA, 19 nt, Human
gccaacuauggccugugga

SEQ ID NO: 2283826 - RNA, 19 nt, Human
gccaacugcugcuuuuuga

SEQ ID NO: 2283827 - RNA, 12 nt, Human
gccaacuguugu

SEQ ID NO: 2283828 - RNA, 19 nt, Human
gccaacuucuucagagcug

SEQ ID NO: 2283829 - RNA, 20 nt, Human
gccaacuucuucagagcuga

SEQ ID NO: 2283830 - RNA, 15 nt, Human
gccaacuugagggcc

SEQ ID NO: 2283831 - RNA, 20 nt, Human
gccaacuugagggcccagag

SEQ ID NO: 2283832 - RNA, 21 nt, Human
gccaacuugagggcccagagc

SEQ ID NO: 2283833 - RNA, 22 nt, Human
gccaacuugagggcccagagca

SEQ ID NO: 2283834 - RNA, 23 nt, Human
gccaacuugagggcccagagcag

SEQ ID NO: 2283835 - RNA, 14 nt, Human
gccaacuuggcuuu

SEQ ID NO: 2283836 - RNA, 13 nt, Human
gccaacuuguaaa

SEQ ID NO: 2283837 - RNA, 14 nt, Human
gccaacuuguaaau

SEQ ID NO: 2283838 - RNA, 15 nt, Human
gccaacuuguaaaua

SEQ ID NO: 2283839 - RNA, 17 nt, Human
gccaacuuguaaauaca

SEQ ID NO: 2283840 - RNA, 18 nt, Human
gccaacuuguaaauacac

SEQ ID NO: 2283841 - RNA, 20 nt, Human
gccaacuuguaaauacacca

SEQ ID NO: 2283842 - RNA, 20 nt, Human
gccaagagcagaggcagcga

SEQ ID NO: 2283843 - RNA, 16 nt, Human
gccaagagcagaggca

SEQ ID NO: 2283844 - RNA, 12 nt, Human
gccaagaggcug

SEQ ID NO: 2283845 - RNA, 14 nt, Human
gccaagaggcugca

SEQ ID NO: 2283846 - RNA, 13 nt, Human
gccaagaggcugc

SEQ ID NO: 2283847 - RNA, 12 nt, Human
gccaagacuugg

SEQ ID NO: 2283848 - RNA, 18 nt, Human
gccaagacuuggcaacag

SEQ ID NO: 2283849 - RNA, 22 nt, Human
gccaagacuuggcaacagaagc

SEQ ID NO: 2283850 - RNA, 18 nt, Human
gccaagaaguuuaaggaa

SEQ ID NO: 2283851 - RNA, 15 nt, Human
gccaagaaacgucuu

SEQ ID NO: 2283852 - RNA, 22 nt, Human
gccaagaaacgucuucuaaacu

SEQ ID NO: 2283853 - RNA, 21 nt, Human
gccaagaaacgucuucuaaac

SEQ ID NO: 2283854 - RNA, 14 nt, Human
gccaagaauucuua

SEQ ID NO: 2283855 - RNA, 18 nt, Human
gccaagaauucuuaaaua

SEQ ID NO: 2283856 - RNA, 22 nt, Human
gcauguacccuaaggucauuac

SEQ ID NO: 2283857 - RNA, 23 nt, Human
gcauguacaguguucuguuuaau

SEQ ID NO: 2283858 - RNA, 18 nt, Human
gcauguaccauuugcaug

SEQ ID NO: 2283859 - RNA, 23 nt, Human
gcauggggauaaaggagaaggca

SEQ ID NO: 2283860 - RNA, 22 nt, Human
gcaugggccuggccaccucucu

SEQ ID NO: 2283861 - RNA, 22 nt, Human
gcauggggauaaaggagaaggc

SEQ ID NO: 2283862 - RNA, 15 nt, Human
gcauguaggagaauc

SEQ ID NO: 2283863 - RNA, 14 nt, Human
gcauguaggagaau

SEQ ID NO: 2283864 - RNA, 20 nt, Human
gcauguaccauuugcauggc

SEQ ID NO: 2283865 - RNA, 14 nt, Human
gcauguaugucuug

SEQ ID NO: 2283866 - RNA, 15 nt, Human
gcauguaugucuugg

SEQ ID NO: 2283867 - RNA, 15 nt, Human
gcauguauuggccug

SEQ ID NO: 2283868 - RNA, 16 nt, Human
gcauguauuggccugg

SEQ ID NO: 2283869 - RNA, 17 nt, Human
gcauguauuggccugga

SEQ ID NO: 2283870 - RNA, 18 nt, Human
gcauguauuggccuggag

SEQ ID NO: 2283871 - RNA, 19 nt, Human
gcauguauuggccuggagg

SEQ ID NO: 2283872 - RNA, 20 nt, Human
gcauguauuggccuggaggu

SEQ ID NO: 2283873 - RNA, 20 nt, Human
gcauguauugugucuuuugc

SEQ ID NO: 2283874 - RNA, 13 nt, Human
gcaugggccuggc

SEQ ID NO: 2283875 - RNA, 12 nt, Human
gcauggcccugg

SEQ ID NO: 2283876 - RNA, 13 nt, Human
gcauggcccuggg

SEQ ID NO: 2283877 - RNA, 15 nt, Human
gcaugggcacucccu

SEQ ID NO: 2283878 - RNA, 19 nt, Human
gcaugggaaugaaugucag

SEQ ID NO: 2283879 - RNA, 13 nt, Human
gcaugggaaugaa

SEQ ID NO: 2283880 - RNA, 16 nt, Human
gcaugggaaugaaugu

SEQ ID NO: 2283881 - RNA, 21 nt, Human
gcaugugaaaaucaaauacau

SEQ ID NO: 2283882 - RNA, 21 nt, Human
gcaugugacucugaagcugac

SEQ ID NO: 2283883 - RNA, 15 nt, Human
gcaugugacucugaa

SEQ ID NO: 2283884 - RNA, 12 nt, Human
gcaugugaagaa

SEQ ID NO: 2283885 - RNA, 17 nt, Human
gcaugugaugagaggaa

SEQ ID NO: 2283886 - RNA, 23 nt, Human
gcaugucccuaccgagucucuuc

SEQ ID NO: 2283887 - RNA, 23 nt, Human
gcaugucgugaccaacuagacau

SEQ ID NO: 2283888 - RNA, 19 nt, Human
gcauguccuguaaagguua

SEQ ID NO: 2283889 - RNA, 23 nt, Human
gcauguauugugucuuuugcaug

SEQ ID NO: 2283890 - RNA, 21 nt, Human
gcauguauugugucuuuugca

SEQ ID NO: 2283891 - RNA, 16 nt, Human
gcauugucccugugcc

SEQ ID NO: 2283892 - RNA, 17 nt, Human
gcauugugaacugacag

SEQ ID NO: 2283893 - RNA, 19 nt, Human
gcauuguaucgauguuaug

SEQ ID NO: 2283894 - RNA, 15 nt, Human
gcauuguaucgaugu

SEQ ID NO: 2283895 - RNA, 20 nt, Human
gcaugugacucugaagcuga

SEQ ID NO: 2283896 - RNA, 21 nt, Human
gcauuggcagcaggugcugcu

SEQ ID NO: 2283897 - RNA, 20 nt, Human
gcauuggcagcaggugcugc

SEQ ID NO: 2283898 - RNA, 16 nt, Human
gcauuguaaaugugcu

SEQ ID NO: 2283899 - RNA, 17 nt, Human
gcauccuggcacccggc

SEQ ID NO: 2283900 - RNA, 21 nt, Human
gcauccuggcacccggccccu

SEQ ID NO: 2283901 - RNA, 14 nt, Human
gcauccugugaagu

SEQ ID NO: 2283902 - RNA, 17 nt, Human
gcauccugugaaguccu

SEQ ID NO: 2283903 - RNA, 14 nt, Human
gcauccuggcaccc

SEQ ID NO: 2283904 - RNA, 20 nt, Human
gcauccuuuucugcagaggg

SEQ ID NO: 2283905 - RNA, 18 nt, Human
gcaucgcaccauucugac

SEQ ID NO: 2283906 - RNA, 13 nt, Human
gcaucgcaaugua

SEQ ID NO: 2283907 - RNA, 22 nt, Human
gcauccuggcacccggccccug

SEQ ID NO: 2283908 - RNA, 23 nt, Human
gcauccuggcacccggccccugc

SEQ ID NO: 2283909 - RNA, 14 nt, Human
gcauggccaggugg

SEQ ID NO: 2283910 - RNA, 17 nt, Human
gcauggccagguggcca

SEQ ID NO: 2283911 - RNA, 17 nt, Human
gcauggccagcagcuug

SEQ ID NO: 2283912 - RNA, 13 nt, Human
gcauggccaggug

SEQ ID NO: 2283913 - RNA, 13 nt, Human
gcauccuucugcc

SEQ ID NO: 2283914 - RNA, 20 nt, Human
gcaucgcaccauucugacuc

SEQ ID NO: 2283915 - RNA, 18 nt, Human
gcauggcaucaccuccac

SEQ ID NO: 2283916 - RNA, 15 nt, Human
gcaaaagaugcuucu

SEQ ID NO: 2283917 - RNA, 16 nt, Human
gcaaaagacuaauuua

SEQ ID NO: 2283918 - RNA, 12 nt, Human
gcaaaacugaau

SEQ ID NO: 2283919 - RNA, 20 nt, Human
gcaaaacgcauggagugugu

SEQ ID NO: 2283920 - RNA, 17 nt, Human
gcaaaacucuacuuaau

SEQ ID NO: 2283921 - RNA, 22 nt, Human
gcaaaacucuacuuaauccaau

SEQ ID NO: 2283922 - RNA, 23 nt, Human
gcaaaacucuacuuaauccaaug

SEQ ID NO: 2283923 - RNA, 21 nt, Human
gcaaaaccacuagaacucucc

SEQ ID NO: 2283924 - RNA, 22 nt, Human
gcaaaacagcguuuaagacugu

SEQ ID NO: 2283925 - RNA, 16 nt, Human
gcaaaagaugcuucuc

SEQ ID NO: 2283926 - RNA, 17 nt, Human
gcaacccccagccugcu

SEQ ID NO: 2283927 - RNA, 18 nt, Human
gcaacccccagccugcua

SEQ ID NO: 2283928 - RNA, 23 nt, Human
gcaacccuccuaucaccuccccu

SEQ ID NO: 2283929 - RNA, 12 nt, Human
gcaacccuccua

SEQ ID NO: 2283930 - RNA, 21 nt, Human
gcaacccuuaccccuuagccu

SEQ ID NO: 2283931 - RNA, 23 nt, Human
gcaaccgucuguuaugcugugac

SEQ ID NO: 2283932 - RNA, 22 nt, Human
gcaacccuggugaccagcacca

SEQ ID NO: 2283933 - RNA, 18 nt, Human
gcaaccuccgccucuugg

SEQ ID NO: 2283934 - RNA, 21 nt, Human
gcaaguucuagagaagaggcu

SEQ ID NO: 2283935 - RNA, 22 nt, Human
gcaaguuucuagcuagaaauau

SEQ ID NO: 2283936 - RNA, 11 nt, Human
gcaauaaagca

SEQ ID NO: 2283937 - RNA, 18 nt, Human
gcaauaauggucccaucc

SEQ ID NO: 2283938 - RNA, 13 nt, Human
gcaauaaagaaga

SEQ ID NO: 2283939 - RNA, 19 nt, Human
gcaauaauggucccaucca

SEQ ID NO: 2283940 - RNA, 23 nt, Human
gcaauaaggggagaguaacccug

SEQ ID NO: 2283941 - RNA, 18 nt, Human
gcaauagucaaauugugu

SEQ ID NO: 2283942 - RNA, 23 nt, Human
gcaauaccguguugguuuugacu

SEQ ID NO: 2283943 - RNA, 20 nt, Human
gcaauaauggucccauccag

SEQ ID NO: 2283944 - RNA, 21 nt, Human
gcaauaauggucccauccagg

SEQ ID NO: 2283945 - RNA, 22 nt, Human
gcaauaauggucccauccaggc

SEQ ID NO: 2283946 - RNA, 23 nt, Human
gcaauaauggucccauccaggca

SEQ ID NO: 2283947 - RNA, 12 nt, Human
gcacacaccaga

SEQ ID NO: 2283948 - RNA, 14 nt, Human
gcacacaccagagc

SEQ ID NO: 2283949 - RNA, 15 nt, Human
gcacacaccagagcc

SEQ ID NO: 2283950 - RNA, 16 nt, Human
gcacacaccagagccc

SEQ ID NO: 2283951 - RNA, 17 nt, Human
gcacacaccagagccca

SEQ ID NO: 2283952 - RNA, 18 nt, Human
gcacacaccagagcccac

SEQ ID NO: 2283953 - RNA, 19 nt, Human
gcacacaccagagcccacc

SEQ ID NO: 2283954 - RNA, 18 nt, Human
gcaccuacaguguacagu

SEQ ID NO: 2283955 - RNA, 23 nt, Human
gcaccuaauccaggcagauccag

SEQ ID NO: 2283956 - RNA, 22 nt, Human
gcaccuaauccaggcagaucca

SEQ ID NO: 2283957 - RNA, 19 nt, Human
gcaccuacaguguacaguc

SEQ ID NO: 2283958 - RNA, 21 nt, Human
gcaccuacaguguacagucuu

SEQ ID NO: 2283959 - RNA, 14 nt, Human
gcaccucccauccu

SEQ ID NO: 2283960 - RNA, 11 nt, Human
gcaccucccau

SEQ ID NO: 2283961 - RNA, 18 nt, Human
gcaccuccacauccucca

SEQ ID NO: 2283962 - RNA, 18 nt, Human
gcaccuaccaccacgccc

SEQ ID NO: 2283963 - RNA, 17 nt, Human
gcaccuaccaccacgcc

SEQ ID NO: 2283964 - RNA, 17 nt, Human
gcaccggcuggccuggc

SEQ ID NO: 2283965 - RNA, 18 nt, Human
gcaccuaauccaggcaga

SEQ ID NO: 2283966 - RNA, 17 nt, Human
gcaccuaauccaggcag

SEQ ID NO: 2283967 - RNA, 15 nt, Human
gcaccggcuggccug

SEQ ID NO: 2283968 - RNA, 16 nt, Human
gcaccggcuggccugg

SEQ ID NO: 2283969 - RNA, 19 nt, Human
gcacacagcugcagagaca

SEQ ID NO: 2283970 - RNA, 23 nt, Human
gcacacagcacgggggccaagga

SEQ ID NO: 2283971 - RNA, 11 nt, Human
gcacacagcac

SEQ ID NO: 2283972 - RNA, 19 nt, Human
gcacacacugugcuuucua

SEQ ID NO: 2283973 - RNA, 13 nt, Human
gcacacaccugua

SEQ ID NO: 2283974 - RNA, 11 nt, Human
gcacacacugu

SEQ ID NO: 2283975 - RNA, 12 nt, Human
gcacacacugug

SEQ ID NO: 2283976 - RNA, 17 nt, Human
gcacacacugugcuuuc

SEQ ID NO: 2283977 - RNA, 21 nt, Human
gcacacaccuguagucccagc

SEQ ID NO: 2283978 - RNA, 16 nt, Human
gcacacaccucagagg

SEQ ID NO: 2283979 - RNA, 20 nt, Human
gcacacaccagagcccaccu

SEQ ID NO: 2283980 - RNA, 13 nt, Human
gcacacagggcag

SEQ ID NO: 2283981 - RNA, 11 nt, Human
gcacacauuuu

SEQ ID NO: 2283982 - RNA, 12 nt, Human
gcacacauuuuu

SEQ ID NO: 2283983 - RNA, 18 nt, Human
gcaccuccccccacugca

SEQ ID NO: 2283984 - RNA, 17 nt, Human
gcaccuccccccacugc

SEQ ID NO: 2283985 - RNA, 13 nt, Human
gcaccucccccca

SEQ ID NO: 2283986 - RNA, 17 nt, Human
gcaccucccauccuaau

SEQ ID NO: 2283987 - RNA, 21 nt, Human
gcaccuccccccacugcaggc

SEQ ID NO: 2283988 - RNA, 19 nt, Human
gcaccuccccccacugcag

SEQ ID NO: 2283989 - RNA, 23 nt, Human
gcaccuccccccacugcaggccc

SEQ ID NO: 2283990 - RNA, 12 nt, Human
gcaccuccugcc

SEQ ID NO: 2283991 - RNA, 22 nt, Human
gcacuauagccuaggugacaga

SEQ ID NO: 2283992 - RNA, 17 nt, Human
gcacucuaaaagguuca

SEQ ID NO: 2283993 - RNA, 21 nt, Human
gcacucuaaaagguucaggga

SEQ ID NO: 2283994 - RNA, 17 nt, Human
gcacuccagccugggug

SEQ ID NO: 2283995 - RNA, 21 nt, Human
gcacuccaugcuuagucacug

SEQ ID NO: 2283996 - RNA, 23 nt, Human
gcacuccaugcuuagucacugcc

SEQ ID NO: 2283997 - RNA, 23 nt, Human
gcacucacacaggacccccuucc

SEQ ID NO: 2283998 - RNA, 16 nt, Human
gcacuccaugagcacc

SEQ ID NO: 2283999 - RNA, 15 nt, Human
gcacuccaugcuuag

SEQ ID NO: 2284000 - RNA, 21 nt, Human
gcacuccagccugggcgacag

SEQ ID NO: 2284001 - RNA, 17 nt, Human
gcacuccagccugggca

SEQ ID NO: 2284002 - RNA, 16 nt, Human
gcacuccagccugggc

SEQ ID NO: 2284003 - RNA, 16 nt, Human
gcacucacacaggacc

SEQ ID NO: 2284004 - RNA, 22 nt, Human
gcacucacacaggacccccuuc

SEQ ID NO: 2284005 - RNA, 13 nt, Human
gcacucaacauga

SEQ ID NO: 2284006 - RNA, 15 nt, Human
gcacuccagccuggg

SEQ ID NO: 2284007 - RNA, 22 nt, Human
gcacuaugaggaauaauuauuu

SEQ ID NO: 2284008 - RNA, 23 nt, Human
gaugugcauuuuugugaaaugaa

SEQ ID NO: 2284009 - RNA, 14 nt, Human
gaugugcacccaug

SEQ ID NO: 2284010 - RNA, 21 nt, Human
gaugugcauuuuugugaaaug

SEQ ID NO: 2284011 - RNA, 15 nt, Human
gaugugcaugggagc

SEQ ID NO: 2284012 - RNA, 18 nt, Human
gaugugauuuaauagugu

SEQ ID NO: 2284013 - RNA, 23 nt, Human
gaugugauuuaauaguguuaauc

SEQ ID NO: 2284014 - RNA, 24 nt, Human
gaugugauuuaauaguguuaauca

SEQ ID NO: 2284015 - RNA, 18 nt, Human
gaugugauuguggaaugg

SEQ ID NO: 2284016 - RNA, 16 nt, Human
gaugugauuguggaau

SEQ ID NO: 2284017 - RNA, 15 nt, Human
gaugugauuguggaa

SEQ ID NO: 2284018 - RNA, 11 nt, Human
gaugugauaua

SEQ ID NO: 2284019 - RNA, 18 nt, Human
gaugugauauauaagugu

SEQ ID NO: 2284020 - RNA, 14 nt, Human
gaugucuaauaguu

SEQ ID NO: 2284021 - RNA, 17 nt, Human
gauguccucaccacaug

SEQ ID NO: 2284022 - RNA, 14 nt, Human
gaugucugccaauu

SEQ ID NO: 2284023 - RNA, 22 nt, Human
gaugucugccaauuuuugccuu

SEQ ID NO: 2284024 - RNA, 21 nt, Human
gaugucugccaauuuuugccu

SEQ ID NO: 2284025 - RNA, 14 nt, Human
gaugucuucauacc

SEQ ID NO: 2284026 - RNA, 18 nt, Human
gaugucuucauaccuaca

SEQ ID NO: 2284027 - RNA, 22 nt, Human
gaugucuuccuuggagggggga

SEQ ID NO: 2284028 - RNA, 20 nt, Human
gaugucuucguacaguucuu

SEQ ID NO: 2284029 - RNA, 19 nt, Human
gaugugaguugcacagcua

SEQ ID NO: 2284030 - RNA, 20 nt, Human
gaugucuucugccuguuaua

SEQ ID NO: 2284031 - RNA, 16 nt, Human
gaugucuucugccugu

SEQ ID NO: 2284032 - RNA, 18 nt, Human
gaugucuucugccuguua

SEQ ID NO: 2284033 - RNA, 21 nt, Human
gaugucuucguacaguucuuc

SEQ ID NO: 2284034 - RNA, 13 nt, Human
gaugucuucugcc

SEQ ID NO: 2284035 - RNA, 14 nt, Human
gaugucuucugccu

SEQ ID NO: 2284036 - RNA, 15 nt, Human
gaugucuucugccug

SEQ ID NO: 2284037 - RNA, 19 nt, Human
gauucuccugccucagccu

SEQ ID NO: 2284038 - RNA, 22 nt, Human
gauucuguguguuuucauaaua

SEQ ID NO: 2284039 - RNA, 19 nt, Human
gauucuguguguuuucaua

SEQ ID NO: 2284040 - RNA, 15 nt, Human
gauucuguggaacaa

SEQ ID NO: 2284041 - RNA, 12 nt, Human
gauucuguacau

SEQ ID NO: 2284042 - RNA, 14 nt, Human
gauucuccugugcu

SEQ ID NO: 2284043 - RNA, 16 nt, Human
gauucuccugugcuag

SEQ ID NO: 2284044 - RNA, 20 nt, Human
gauucuccugccucagccuc

SEQ ID NO: 2284045 - RNA, 21 nt, Human
gauucuccugccucagccucc

SEQ ID NO: 2284046 - RNA, 19 nt, Human
gauucuuuccauuaugauu

SEQ ID NO: 2284047 - RNA, 23 nt, Human
gauucuuggcccgcacagagcug

SEQ ID NO: 2284048 - RNA, 23 nt, Human
gauuuaacagaaauguacagcaa

SEQ ID NO: 2284049 - RNA, 20 nt, Human
gauuuaacagaaauguacag

SEQ ID NO: 2284050 - RNA, 21 nt, Human
gauucuucugcuucagccucc

SEQ ID NO: 2284051 - RNA, 23 nt, Human
gauucuuauggacaaugacccag

SEQ ID NO: 2284052 - RNA, 22 nt, Human
gauuucaggauacucugucaga

SEQ ID NO: 2284053 - RNA, 20 nt, Human
gauuucaggauacucuguca

SEQ ID NO: 2284054 - RNA, 22 nt, Human
gauuuuuuuuuccuucagugcc

SEQ ID NO: 2284055 - RNA, 23 nt, Human
gauuuuuuuuuccuucagugccu

SEQ ID NO: 2284056 - RNA, 12 nt, Human
gauuucaucugc

SEQ ID NO: 2284057 - RNA, 15 nt, Human
gauuucaucugcucu

SEQ ID NO: 2284058 - RNA, 20 nt, Human
gcaaaaaacucgaggacugu

SEQ ID NO: 2284059 - RNA, 18 nt, Human
gcaaaaaaaaaaaaaagc

SEQ ID NO: 2284060 - RNA, 21 nt, Human
gauuucagaaagagcaagucu

SEQ ID NO: 2284061 - RNA, 15 nt, Human
gauuuaauaaaauaa

SEQ ID NO: 2284062 - RNA, 17 nt, Human
gauuuaauaaaauaauu

SEQ ID NO: 2284063 - RNA, 15 nt, Human
gauuucagcucacug

SEQ ID NO: 2284064 - RNA, 20 nt, Human
gauuucagcucacugcaacc

SEQ ID NO: 2284065 - RNA, 17 nt, Human
gauuucagcucacugca

SEQ ID NO: 2284066 - RNA, 17 nt, Human
gauuucacucuccuugg

SEQ ID NO: 2284067 - RNA, 18 nt, Human
gauuucacucuccuuggu

SEQ ID NO: 2284068 - RNA, 22 nt, Human
gauuuaagggauggaaaaggaa

SEQ ID NO: 2284069 - RNA, 14 nt, Human
gauuuaauaaaaua

SEQ ID NO: 2284070 - RNA, 13 nt, Human
gauuuaauaaaau

SEQ ID NO: 2284071 - RNA, 18 nt, Human
gauuuaagacacuuuuug

SEQ ID NO: 2284072 - RNA, 20 nt, Human
gauucuuucccaauucacau

SEQ ID NO: 2284073 - RNA, 17 nt, Human
gauuuaacagucauuua

SEQ ID NO: 2284074 - RNA, 18 nt, Human
gauuuaacagucauuuaa

SEQ ID NO: 2284075 - RNA, 19 nt, Human
gauuuaacagucauuuaaa

SEQ ID NO: 2284076 - RNA, 13 nt, Human
gauuucacucucc

SEQ ID NO: 2284077 - RNA, 16 nt, Human
gauuucacucuccuug

SEQ ID NO: 2284078 - RNA, 23 nt, Human
gaucugggacccuuuccuuccuu

SEQ ID NO: 2284079 - RNA, 18 nt, Human
gaucuggggcucugggau

SEQ ID NO: 2284080 - RNA, 22 nt, Human
gaucugggacccuuuccuuccu

SEQ ID NO: 2284081 - RNA, 17 nt, Human
gaucuggggcucuggga

SEQ ID NO: 2284082 - RNA, 20 nt, Human
gaucuggguucacugcaacc

SEQ ID NO: 2284083 - RNA, 17 nt, Human
gaucugggacccuuucc

SEQ ID NO: 2284084 - RNA, 23 nt, Human
gaucuggaaccucagccuggcca

SEQ ID NO: 2284085 - RNA, 22 nt, Human
gaguugauagcacagacccugc

SEQ ID NO: 2284086 - RNA, 18 nt, Human
gaucuggguucacugcaa

SEQ ID NO: 2284087 - RNA, 12 nt, Human
gaugcuguugcc

SEQ ID NO: 2284088 - RNA, 14 nt, Human
gaugcuguuugaca

SEQ ID NO: 2284089 - RNA, 21 nt, Human
gaugcuuuaagugcacaacau

SEQ ID NO: 2284090 - RNA, 16 nt, Human
gaugcuuuucugucuc

SEQ ID NO: 2284091 - RNA, 17 nt, Human
gaugcuuuucugucucu

SEQ ID NO: 2284092 - RNA, 20 nt, Human
gaugcuuuucugucucugcc

SEQ ID NO: 2284093 - RNA, 17 nt, Human
gaugcuuuuagcucaaa

SEQ ID NO: 2284094 - RNA, 13 nt, Human
gaugcuguuugac

SEQ ID NO: 2284095 - RNA, 23 nt, Human
gaugcuuuguuucuuucauauga

SEQ ID NO: 2284096 - RNA, 16 nt, Human
gaugcuuguacauaau

SEQ ID NO: 2284097 - RNA, 14 nt, Human
gaugcuuguacaua

SEQ ID NO: 2284098 - RNA, 19 nt, Human
gauggagguucucucggag

SEQ ID NO: 2284099 - RNA, 22 nt, Human
gauggaggggugguccugacuc

SEQ ID NO: 2284100 - RNA, 21 nt, Human
gauggaggggugguccugacu

SEQ ID NO: 2284101 - RNA, 11 nt, Human
gauggaggagg

SEQ ID NO: 2284102 - RNA, 12 nt, Human
gauggaggagga

SEQ ID NO: 2284103 - RNA, 14 nt, Human
gauggaggagaaga

SEQ ID NO: 2284104 - RNA, 13 nt, Human
gauggaggagaag

SEQ ID NO: 2284105 - RNA, 23 nt, Human
gauggaggaaaaccaagccgugg

SEQ ID NO: 2284106 - RNA, 21 nt, Human
gaugcuuuucugucucugccu

SEQ ID NO: 2284107 - RNA, 18 nt, Human
gauggauaaccuauauga

SEQ ID NO: 2284108 - RNA, 16 nt, Human
gauggaguucuugugc

SEQ ID NO: 2284109 - RNA, 16 nt, Human
gauggagguuucauac

SEQ ID NO: 2284110 - RNA, 18 nt, Human
gauggaguccagggaaga

SEQ ID NO: 2284111 - RNA, 18 nt, Human
gauggaguucuugugcca

SEQ ID NO: 2284112 - RNA, 19 nt, Human
gauggaguucuugugccau

SEQ ID NO: 2284113 - RNA, 21 nt, Human
gaugucccuuucuuggccagu

SEQ ID NO: 2284114 - RNA, 20 nt, Human
gaugucccuuucuuggccag

SEQ ID NO: 2284115 - RNA, 21 nt, Human
gauguccucaccacaugcgga

SEQ ID NO: 2284116 - RNA, 18 nt, Human
gaugucccaacuuguaaa

SEQ ID NO: 2284117 - RNA, 12 nt, Human
gauguccagaag

SEQ ID NO: 2284118 - RNA, 20 nt, Human
gauguccagaagaauauuca

SEQ ID NO: 2284119 - RNA, 20 nt, Human
gauguccacagaugccucca

SEQ ID NO: 2284120 - RNA, 17 nt, Human
gauguccacagaugccu

SEQ ID NO: 2284121 - RNA, 17 nt, Human
gaugucccaacuuguaa

SEQ ID NO: 2284122 - RNA, 22 nt, Human
gaugucagccgagccgggccug

SEQ ID NO: 2284123 - RNA, 19 nt, Human
gauggauauauguuuuuga

SEQ ID NO: 2284124 - RNA, 12 nt, Human
gauguaaaguga

SEQ ID NO: 2284125 - RNA, 22 nt, Human
gauguacauuuccaaauucaca

SEQ ID NO: 2284126 - RNA, 19 nt, Human
gauguaccaugaaacaaag

SEQ ID NO: 2284127 - RNA, 15 nt, Human
gauguacauuuccaa

SEQ ID NO: 2284128 - RNA, 18 nt, Human
gauguacagucugucaug

SEQ ID NO: 2284129 - RNA, 19 nt, Human
gauguacagucugucauga

SEQ ID NO: 2284130 - RNA, 16 nt, Human
gauguacagucuguca

SEQ ID NO: 2284131 - RNA, 17 nt, Human
gauguacagucugucau

SEQ ID NO: 2284132 - RNA, 20 nt, Human
gaugcugguaauggccaugg

SEQ ID NO: 2284133 - RNA, 16 nt, Human
gaugcugugcuaugaa

SEQ ID NO: 2284134 - RNA, 23 nt, Human
gaugcuucucacugccaugccag

SEQ ID NO: 2284135 - RNA, 22 nt, Human
gaugcugggcuggcucccucuu

SEQ ID NO: 2284136 - RNA, 14 nt, Human
gaugcugggcuggg

SEQ ID NO: 2284137 - RNA, 15 nt, Human
gaugcugggcugggu

SEQ ID NO: 2284138 - RNA, 15 nt, Human
gaugauucagaaauu

SEQ ID NO: 2284139 - RNA, 17 nt, Human
gaugcugggcugggugc

SEQ ID NO: 2284140 - RNA, 19 nt, Human
gaugcuggguuggugcaca

SEQ ID NO: 2284141 - RNA, 20 nt, Human
gaugcuggguuggugcacag

SEQ ID NO: 2284142 - RNA, 23 nt, Human
gaugcuggguuggugcacaguga

SEQ ID NO: 2284143 - RNA, 17 nt, Human
gaugcugguaauggcca

SEQ ID NO: 2284144 - RNA, 20 nt, Human
gaugcuggucauguguuuga

SEQ ID NO: 2284145 - RNA, 17 nt, Human
gaugaugggaauugugu

SEQ ID NO: 2284146 - RNA, 19 nt, Human
gaugaugggaauuguguga

SEQ ID NO: 2284147 - RNA, 14 nt, Human
gaugaugcugccag

SEQ ID NO: 2284148 - RNA, 19 nt, Human
gaugaugccaaccucugga

SEQ ID NO: 2284149 - RNA, 13 nt, Human
gaugaugccacac

SEQ ID NO: 2284150 - RNA, 15 nt, Human
gaugaugccacacca

SEQ ID NO: 2284151 - RNA, 21 nt, Human
gaugauggucuucagccucuu

SEQ ID NO: 2284152 - RNA, 15 nt, Human
gaugaugguguuuug

SEQ ID NO: 2284153 - RNA, 22 nt, Human
gaugaugguugcaaaagacuaa

SEQ ID NO: 2284154 - RNA, 14 nt, Human
gaugaugugccugg

SEQ ID NO: 2284155 - RNA, 15 nt, Human
gaugaugugccuggg

SEQ ID NO: 2284156 - RNA, 17 nt, Human
gaugaugugccugggug

SEQ ID NO: 2284157 - RNA, 14 nt, Human
gaugaugacuaugg

SEQ ID NO: 2284158 - RNA, 22 nt, Human
gaugaggccucuuggaccucug

SEQ ID NO: 2284159 - RNA, 23 nt, Human
gaugaggccucuuggaccucugc

SEQ ID NO: 2284160 - RNA, 16 nt, Human
gaugagcucuacccag

SEQ ID NO: 2284161 - RNA, 11 nt, Human
gaugagcucua

SEQ ID NO: 2284162 - RNA, 20 nt, Human
gaugagcuggaaggagugag

SEQ ID NO: 2284163 - RNA, 20 nt, Human
gaugagcucuacccagggcc

SEQ ID NO: 2284164 - RNA, 19 nt, Human
gaugagcucuacccagggc

SEQ ID NO: 2284165 - RNA, 13 nt, Human
gaugaggcagagg

SEQ ID NO: 2284166 - RNA, 19 nt, Human
gaugaggccgcuagaggcc

SEQ ID NO: 2284167 - RNA, 21 nt, Human
gaugaggccgcuagaggccug

SEQ ID NO: 2284168 - RNA, 22 nt, Human
gaugaggccgcuagaggccuga

SEQ ID NO: 2284169 - RNA, 14 nt, Human
gaugaggccucuug

SEQ ID NO: 2284170 - RNA, 22 nt, Human
cuuggccugucucauccccagg

SEQ ID NO: 2284171 - RNA, 17 nt, Human
cuuggccugucucaucc

SEQ ID NO: 2284172 - RNA, 23 nt, Human
cuuggccugucucauccccaggg

SEQ ID NO: 2284173 - RNA, 16 nt, Human
cuuggccuugggcuuc

SEQ ID NO: 2284174 - RNA, 15 nt, Human
cuugcguaugucugu

SEQ ID NO: 2284175 - RNA, 15 nt, Human
cuugcuaaucagugu

SEQ ID NO: 2284176 - RNA, 16 nt, Human
cuugcuaaucaguguc

SEQ ID NO: 2284177 - RNA, 17 nt, Human
cuugcuaaucagugucu

SEQ ID NO: 2284178 - RNA, 18 nt, Human
cuugcuaaucagugucuc

SEQ ID NO: 2284179 - RNA, 12 nt, Human
cuugcaaaguau

SEQ ID NO: 2284180 - RNA, 16 nt, Human
cuugcuaccucaaggg

SEQ ID NO: 2284181 - RNA, 14 nt, Human
cuugcuaccucagu

SEQ ID NO: 2284182 - RNA, 23 nt, Human
cuugcuaaucagugucucacacu

SEQ ID NO: 2284183 - RNA, 19 nt, Human
cuugcuaaucagugucuca

SEQ ID NO: 2284184 - RNA, 20 nt, Human
cuugcuaaucagugucucac

SEQ ID NO: 2284185 - RNA, 21 nt, Human
cuugcuaaucagugucucaca

SEQ ID NO: 2284186 - RNA, 22 nt, Human
cuugcuaaucagugucucacac

SEQ ID NO: 2284187 - RNA, 15 nt, Human
cuugcaaaaaggguc

SEQ ID NO: 2284188 - RNA, 12 nt, Human
cuugauuuuugc

SEQ ID NO: 2284189 - RNA, 14 nt, Human
cuugauuuugcaaa

SEQ ID NO: 2284190 - RNA, 16 nt, Human
cuugcaaaaaggguca

SEQ ID NO: 2284191 - RNA, 19 nt, Human
cuugauuuuagccuucucu

SEQ ID NO: 2284192 - RNA, 21 nt, Human
cuugauuuuagccuucucugu

SEQ ID NO: 2284193 - RNA, 20 nt, Human
cuugauuuuagccuucucug

SEQ ID NO: 2284194 - RNA, 12 nt, Human
cuugauucauaa

SEQ ID NO: 2284195 - RNA, 23 nt, Human
cuuggccucagaauucacaaaau

SEQ ID NO: 2284196 - RNA, 12 nt, Human
cuuggccucaga

SEQ ID NO: 2284197 - RNA, 17 nt, Human
cuuggccugaucagacc

SEQ ID NO: 2284198 - RNA, 12 nt, Human
cuuggccugcug

SEQ ID NO: 2284199 - RNA, 13 nt, Human
cuuggccugcugu

SEQ ID NO: 2284200 - RNA, 15 nt, Human
cuuggccugcuguga

SEQ ID NO: 2284201 - RNA, 16 nt, Human
cuuggccugcugugau

SEQ ID NO: 2284202 - RNA, 11 nt, Human
cuuggccucag

SEQ ID NO: 2284203 - RNA, 20 nt, Human
cuuggcaacagaagcaguug

SEQ ID NO: 2284204 - RNA, 13 nt, Human
cuuggcaacagaa

SEQ ID NO: 2284205 - RNA, 15 nt, Human
cuuggcaacagaagc

SEQ ID NO: 2284206 - RNA, 13 nt, Human
cuugcuaugauga

SEQ ID NO: 2284207 - RNA, 23 nt, Human
cuuggauuguccccgacccuugc

SEQ ID NO: 2284208 - RNA, 24 nt, Human
cuuggauuguccccgacccuugcc

SEQ ID NO: 2284209 - RNA, 23 nt, Human
cuugaaggaucuguuuuuaaaaa

SEQ ID NO: 2284210 - RNA, 13 nt, Human
cuugaagggccag

SEQ ID NO: 2284211 - RNA, 21 nt, Human
cuugaagggccagagccaggg

SEQ ID NO: 2284212 - RNA, 19 nt, Human
cuugaagggccagagccag

SEQ ID NO: 2284213 - RNA, 18 nt, Human
cuugaagggccagagcca

SEQ ID NO: 2284214 - RNA, 17 nt, Human
cuugaagggccagagcc

SEQ ID NO: 2284215 - RNA, 16 nt, Human
cuugaagggccagagc

SEQ ID NO: 2284216 - RNA, 15 nt, Human
cuugaagggccagag

SEQ ID NO: 2284217 - RNA, 14 nt, Human
cuugaagggccaga

SEQ ID NO: 2284218 - RNA, 16 nt, Human
cuugaaggguaaagaa

SEQ ID NO: 2284219 - RNA, 20 nt, Human
cuugaagggccagagccagg

SEQ ID NO: 2284220 - RNA, 22 nt, Human
cuugaaggugcugacggccagg

SEQ ID NO: 2284221 - RNA, 14 nt, Human
cuugaaggugcuga

SEQ ID NO: 2284222 - RNA, 20 nt, Human
cuugaauguggcuugagaaa

SEQ ID NO: 2284223 - RNA, 20 nt, Human
cuugaauuguaacuguucuu

SEQ ID NO: 2284224 - RNA, 17 nt, Human
cuugaauuguaacuguu

SEQ ID NO: 2284225 - RNA, 22 nt, Human
cuugaauguggcuugagaaaua

SEQ ID NO: 2284226 - RNA, 19 nt, Human
cuugaauguggcuugagaa

SEQ ID NO: 2284227 - RNA, 13 nt, Human
cuugaaugucuuu

SEQ ID NO: 2284228 - RNA, 11 nt, Human
cuugaccagca

SEQ ID NO: 2284229 - RNA, 23 nt, Human
cuugaccaagcaggaagcucaga

SEQ ID NO: 2284230 - RNA, 20 nt, Human
cuugaccaagcaggaagcuc

SEQ ID NO: 2284231 - RNA, 19 nt, Human
cuugaccaagcaggaagcu

SEQ ID NO: 2284232 - RNA, 18 nt, Human
cuugaccaagcaggaagc

SEQ ID NO: 2284233 - RNA, 17 nt, Human
cuugaccaagcaggaag

SEQ ID NO: 2284234 - RNA, 15 nt, Human
cuugaccaagcagga

SEQ ID NO: 2284235 - RNA, 12 nt, Human
cuugaccaagca

SEQ ID NO: 2284236 - RNA, 19 nt, Human
cuugacauaauuucacuga

SEQ ID NO: 2284237 - RNA, 14 nt, Human
cuugacauucaagg

SEQ ID NO: 2284238 - RNA, 22 nt, Human
cuugaauuguaacuguucuuga

SEQ ID NO: 2284239 - RNA, 21 nt, Human
cuugaauuguaacuguucuug

SEQ ID NO: 2284240 - RNA, 16 nt, Human
cuugacaucaacugca

SEQ ID NO: 2284241 - RNA, 20 nt, Human
cuugacagggcacaccgggc

SEQ ID NO: 2284242 - RNA, 18 nt, Human
cuugauucacaaugaaau

SEQ ID NO: 2284243 - RNA, 23 nt, Human
cuugauguugcuuagucacuuau

SEQ ID NO: 2284244 - RNA, 16 nt, Human
cuugauuauccauauu

SEQ ID NO: 2284245 - RNA, 20 nt, Human
cuugauuaagaucucagugg

SEQ ID NO: 2284246 - RNA, 14 nt, Human
cuugauguugcuua

SEQ ID NO: 2284247 - RNA, 18 nt, Human
cuugauguguuaucucuu

SEQ ID NO: 2284248 - RNA, 22 nt, Human
cuugaccagcagaucccagcuc

SEQ ID NO: 2284249 - RNA, 21 nt, Human
cuugaccagcagaucccagcu

SEQ ID NO: 2284250 - RNA, 20 nt, Human
cuugaccagcagaucccagc

SEQ ID NO: 2284251 - RNA, 19 nt, Human
cuugaccagcagaucccag

SEQ ID NO: 2284252 - RNA, 17 nt, Human
cuugaucaacaucuuuu

SEQ ID NO: 2284253 - RNA, 23 nt, Human
cuugaucaacaucuuuucuugcc

SEQ ID NO: 2284254 - RNA, 22 nt, Human
cuugauauccucuuugagugaa

SEQ ID NO: 2284255 - RNA, 17 nt, Human
cuugauauccucuuuga

SEQ ID NO: 2284256 - RNA, 20 nt, Human
cuucuuaauauaacugccuu

SEQ ID NO: 2284257 - RNA, 16 nt, Human
cuucuuaaucuuuuca

SEQ ID NO: 2284258 - RNA, 17 nt, Human
cuucuuaaucuuuucac

SEQ ID NO: 2284259 - RNA, 20 nt, Human
cuucuuaaucuuuucacaaa

SEQ ID NO: 2284260 - RNA, 23 nt, Human
cuucuuaaucuuuucacaaauaa

SEQ ID NO: 2284261 - RNA, 21 nt, Human
cuucuuaaucuuuucacaaau

SEQ ID NO: 2284262 - RNA, 22 nt, Human
cuucuuaaucuuuucacaaaua

SEQ ID NO: 2284263 - RNA, 18 nt, Human
cuucuuaauauaacugcc

SEQ ID NO: 2284264 - RNA, 21 nt, Human
cuucuuaaccccaguaagcca

SEQ ID NO: 2284265 - RNA, 21 nt, Human
cuucuuaaaugagaaggaauu

SEQ ID NO: 2284266 - RNA, 16 nt, Human
cuucuuaaaugagaag

SEQ ID NO: 2284267 - RNA, 21 nt, Human
cuucugaccacagcaucauuu

SEQ ID NO: 2284268 - RNA, 23 nt, Human
cuucugaccacacuuccugucca

SEQ ID NO: 2284269 - RNA, 18 nt, Human
cuucugaccacagcauca

SEQ ID NO: 2284270 - RNA, 19 nt, Human
cuucugaccacacuuccug

SEQ ID NO: 2284271 - RNA, 18 nt, Human
cuucugaccacacuuccu

SEQ ID NO: 2284272 - RNA, 17 nt, Human
cuucugaccacacuucc

SEQ ID NO: 2284273 - RNA, 15 nt, Human
cuucugaccacacuu

SEQ ID NO: 2284274 - RNA, 14 nt, Human
cuucugaccacacu

SEQ ID NO: 2284275 - RNA, 13 nt, Human
cuucucuuccugu

SEQ ID NO: 2284276 - RNA, 14 nt, Human
cuucucuuccugua

SEQ ID NO: 2284277 - RNA, 22 nt, Human
cuucucuuccuuuuaucaguag

SEQ ID NO: 2284278 - RNA, 15 nt, Human
cuucugaaugcugcu

SEQ ID NO: 2284279 - RNA, 16 nt, Human
cuucugaaugcugcua

SEQ ID NO: 2284280 - RNA, 19 nt, Human
cuucugaaugcugcuacuu

SEQ ID NO: 2284281 - RNA, 20 nt, Human
cuucuucagaagacacugca

SEQ ID NO: 2284282 - RNA, 16 nt, Human
cuucuucacccagcua

SEQ ID NO: 2284283 - RNA, 18 nt, Human
cuucuucacccagcuaau

SEQ ID NO: 2284284 - RNA, 22 nt, Human
cuucuucacccagcuaaucugu

SEQ ID NO: 2284285 - RNA, 23 nt, Human
cuucuucacccagcuaaucugua

SEQ ID NO: 2284286 - RNA, 13 nt, Human
cuucuuacaugca

SEQ ID NO: 2284287 - RNA, 21 nt, Human
cuucuuacaauaauucuauga

SEQ ID NO: 2284288 - RNA, 22 nt, Human
cuucuuauucucacuccaccac

SEQ ID NO: 2284289 - RNA, 20 nt, Human
cuucuuauucucacuccacc

SEQ ID NO: 2284290 - RNA, 14 nt, Human
cuucuuacaugcau

SEQ ID NO: 2284291 - RNA, 17 nt, Human
cuucuuauucucacucc

SEQ ID NO: 2284292 - RNA, 13 nt, Human
cuucuucaccauu

SEQ ID NO: 2284293 - RNA, 14 nt, Human
cuucuucacccagc

SEQ ID NO: 2284294 - RNA, 15 nt, Human
cuucuucacccagcu

SEQ ID NO: 2284295 - RNA, 13 nt, Human
cuucuucagagac

SEQ ID NO: 2284296 - RNA, 14 nt, Human
cuucuucagagacu

SEQ ID NO: 2284297 - RNA, 22 nt, Human
cuuccuccuuuucuuucucucu

SEQ ID NO: 2284298 - RNA, 16 nt, Human
cuuccucgcagagagg

SEQ ID NO: 2284299 - RNA, 18 nt, Human
cuuccucgcagagaggcc

SEQ ID NO: 2284300 - RNA, 19 nt, Human
cuuccucgcagagaggcca

SEQ ID NO: 2284301 - RNA, 18 nt, Human
cuuccucuagaagccaag

SEQ ID NO: 2284302 - RNA, 13 nt, Human
cuuccuccuggug

SEQ ID NO: 2284303 - RNA, 14 nt, Human
cuuccucuccaccc

SEQ ID NO: 2284304 - RNA, 15 nt, Human
cuuccucucuccaga

SEQ ID NO: 2284305 - RNA, 19 nt, Human
cuuccucuagaagccaagg

SEQ ID NO: 2284306 - RNA, 15 nt, Human
cuuccucugagccuu

SEQ ID NO: 2284307 - RNA, 14 nt, Human
cuuccucugagccu

SEQ ID NO: 2284308 - RNA, 13 nt, Human
cuuccucuccacu

SEQ ID NO: 2284309 - RNA, 14 nt, Human
cuuccucuccacug

SEQ ID NO: 2284310 - RNA, 15 nt, Human
cuuccucuccacugc

SEQ ID NO: 2284311 - RNA, 21 nt, Human
cuuccucuuuccaucuacccu

SEQ ID NO: 2284312 - RNA, 16 nt, Human
cuuccucugaggcuga

SEQ ID NO: 2284313 - RNA, 16 nt, Human
cuuccucucuccagau

SEQ ID NO: 2284314 - RNA, 12 nt, Human
cuuccucugagg

SEQ ID NO: 2284315 - RNA, 14 nt, Human
cuuccucugaggcu

SEQ ID NO: 2284316 - RNA, 22 nt, Human
cuuccucuuuccaucuacccuc

SEQ ID NO: 2284317 - RNA, 22 nt, Human
cuuccucugaggcugaaauuca

SEQ ID NO: 2284318 - RNA, 15 nt, Human
cuuccucugaggcug

SEQ ID NO: 2284319 - RNA, 19 nt, Human
cuuccucugaggcuggauc

SEQ ID NO: 2284320 - RNA, 16 nt, Human
cuucucuuaauuuaau

SEQ ID NO: 2284321 - RNA, 15 nt, Human
cuucucuuaauuuaa

SEQ ID NO: 2284322 - RNA, 14 nt, Human
cuucucuuaauuua

SEQ ID NO: 2284323 - RNA, 12 nt, Human
cuucucuuaauu

SEQ ID NO: 2284324 - RNA, 21 nt, Human
cuucucuguuccauugaaucu

SEQ ID NO: 2284325 - RNA, 17 nt, Human
cuucucuguucauuucc

SEQ ID NO: 2284326 - RNA, 14 nt, Human
cuucucuguucauu

SEQ ID NO: 2284327 - RNA, 22 nt, Human
cuucucugugaacgauuuagaa

SEQ ID NO: 2284328 - RNA, 13 nt, Human
cuucucuguucau

SEQ ID NO: 2284329 - RNA, 21 nt, Human
cuucucugugaacgauuuaga

SEQ ID NO: 2284330 - RNA, 15 nt, Human
cuucuaguuucccac

SEQ ID NO: 2284331 - RNA, 22 nt, Human
cuucuagguggcaaggcugugc

SEQ ID NO: 2284332 - RNA, 14 nt, Human
cuucuaguuuccca

SEQ ID NO: 2284333 - RNA, 16 nt, Human
cuucuaguuucccaca

SEQ ID NO: 2284334 - RNA, 20 nt, Human
cuucucacauuuauauuuuu

SEQ ID NO: 2284335 - RNA, 13 nt, Human
cuucucacauuua

SEQ ID NO: 2284336 - RNA, 15 nt, Human
cuucuaaaugcauau

SEQ ID NO: 2284337 - RNA, 20 nt, Human
cuucuagguggcaaggcugu

SEQ ID NO: 2284338 - RNA, 21 nt, Human
cuucuaggguuauugcauuug

SEQ ID NO: 2284339 - RNA, 13 nt, Human
cuucuaaaugcau

SEQ ID NO: 2284340 - RNA, 23 nt, Human
cuucuaaagguguugucccuucu

SEQ ID NO: 2284341 - RNA, 23 nt, Human
cuucuaaauggcaaaggaaggug

SEQ ID NO: 2284342 - RNA, 21 nt, Human
cuucuaaguaaaaccacagca

SEQ ID NO: 2284343 - RNA, 16 nt, Human
cuucuagguucuaaaa

SEQ ID NO: 2284344 - RNA, 13 nt, Human
cuuccugaagcug

SEQ ID NO: 2284345 - RNA, 18 nt, Human
cuuccugacacuuuaauu

SEQ ID NO: 2284346 - RNA, 15 nt, Human
cuuccugacacuuua

SEQ ID NO: 2284347 - RNA, 17 nt, Human
cuuccugacacuuuaau

SEQ ID NO: 2284348 - RNA, 16 nt, Human
cuuccugacacuuuaa

SEQ ID NO: 2284349 - RNA, 17 nt, Human
cuucuaaguaaaaccac

SEQ ID NO: 2284350 - RNA, 13 nt, Human
cuucuaaguaaaa

SEQ ID NO: 2284351 - RNA, 17 nt, Human
cuugggucccagggaag

SEQ ID NO: 2284352 - RNA, 20 nt, Human
cuugggguuuucaguaugaa

SEQ ID NO: 2284353 - RNA, 23 nt, Human
cuugggucccccacgugacagug

SEQ ID NO: 2284354 - RNA, 15 nt, Human
cuuggguggagaagc

SEQ ID NO: 2284355 - RNA, 17 nt, Human
cuuggguggagaagcca

SEQ ID NO: 2284356 - RNA, 18 nt, Human
cuuggguggagaagccau

SEQ ID NO: 2284357 - RNA, 15 nt, Human
cuuggguaggcggga

SEQ ID NO: 2284358 - RNA, 23 nt, Human
cuuggguucaagugauucuccug

SEQ ID NO: 2284359 - RNA, 17 nt, Human
cuuggguuuuuguuacc

SEQ ID NO: 2284360 - RNA, 14 nt, Human
cuuggguucugaua

SEQ ID NO: 2284361 - RNA, 21 nt, Human
cuuggguguaacaggucuccu

SEQ ID NO: 2284362 - RNA, 23 nt, Human
cuuggguggagaagccauugucu

SEQ ID NO: 2284363 - RNA, 19 nt, Human
cuuggguggagaagccauu

SEQ ID NO: 2284364 - RNA, 20 nt, Human
cuuggguggagaagccauug

SEQ ID NO: 2284365 - RNA, 22 nt, Human
cuuggguguaacaggucuccuc

SEQ ID NO: 2284366 - RNA, 23 nt, Human
cuugguacuacuagaugucuuua

SEQ ID NO: 2284367 - RNA, 15 nt, Human
cuugguaagaagccg

SEQ ID NO: 2284368 - RNA, 14 nt, Human
cuuggucacauaca

SEQ ID NO: 2284369 - RNA, 22 nt, Human
cuugguagaagcccuucuaccu

SEQ ID NO: 2284370 - RNA, 15 nt, Human
cuuggucuuauuuau

SEQ ID NO: 2284371 - RNA, 14 nt, Human
cuuggucaccagcu

SEQ ID NO: 2284372 - RNA, 16 nt, Human
cuuggucaccagcucc

SEQ ID NO: 2284373 - RNA, 16 nt, Human
cuugguccaggaaaug

SEQ ID NO: 2284374 - RNA, 19 nt, Human
cuuggucugugagaugcua

SEQ ID NO: 2284375 - RNA, 14 nt, Human
cuugguccugcugc

SEQ ID NO: 2284376 - RNA, 16 nt, Human
cuuggucugugagaug

SEQ ID NO: 2284377 - RNA, 14 nt, Human
cuugguguccuuuc

SEQ ID NO: 2284378 - RNA, 19 nt, Human
cuugguguccaccuggccc

SEQ ID NO: 2284379 - RNA, 17 nt, Human
cuugguguccaccuggc

SEQ ID NO: 2284380 - RNA, 16 nt, Human
cuugguguccaccugg

SEQ ID NO: 2284381 - RNA, 20 nt, Human
cuuggugucgggcaugacac

SEQ ID NO: 2284382 - RNA, 19 nt, Human
cuuggugucgggcaugaca

SEQ ID NO: 2284383 - RNA, 15 nt, Human
cuugguguccaccug

SEQ ID NO: 2284384 - RNA, 17 nt, Human
cuugguguaguugaacu

SEQ ID NO: 2284385 - RNA, 22 nt, Human
cuuggugaauuuuuuuuuccua

SEQ ID NO: 2284386 - RNA, 20 nt, Human
cuuggugaauuuuuuuuucc

SEQ ID NO: 2284387 - RNA, 15 nt, Human
cuuggucuucccagg

SEQ ID NO: 2284388 - RNA, 16 nt, Human
cuuggucuucccaggc

SEQ ID NO: 2284389 - RNA, 21 nt, Human
cuugguguccuuucccuccac

SEQ ID NO: 2284390 - RNA, 20 nt, Human
cuugguguccuuucccucca

SEQ ID NO: 2284391 - RNA, 17 nt, Human
cuugucuauuuuugucu

SEQ ID NO: 2284392 - RNA, 14 nt, Human
cuugucucaaugcu

SEQ ID NO: 2284393 - RNA, 16 nt, Human
cuugucucaaugcuca

SEQ ID NO: 2284394 - RNA, 17 nt, Human
cuugucucaaugcucau

SEQ ID NO: 2284395 - RNA, 18 nt, Human
cuugucucaaugcucaua

SEQ ID NO: 2284396 - RNA, 19 nt, Human
cuugucucaaugcucauaa

SEQ ID NO: 2284397 - RNA, 23 nt, Human
cuugucucaaugcucauaacgga

SEQ ID NO: 2284398 - RNA, 21 nt, Human
cuugugacauauuaugucuuc

SEQ ID NO: 2284399 - RNA, 12 nt, Human
cuugugacauau

SEQ ID NO: 2284400 - RNA, 19 nt, Human
cuugugacagauuauacag

SEQ ID NO: 2284401 - RNA, 20 nt, Human
cuugugacagauuauacaga

SEQ ID NO: 2284402 - RNA, 13 nt, Human
cuugugacccagc

SEQ ID NO: 2284403 - RNA, 17 nt, Human
cuugugacccagcacug

SEQ ID NO: 2284404 - RNA, 13 nt, Human
cuugucuuuggac

SEQ ID NO: 2284405 - RNA, 15 nt, Human
cuugucuuuggaccc

SEQ ID NO: 2284406 - RNA, 18 nt, Human
cuugucuuuggacccuga

SEQ ID NO: 2284407 - RNA, 19 nt, Human
cuugucuuuggacccugag

SEQ ID NO: 2284408 - RNA, 23 nt, Human
cuuucagaugucuucugccuguu

SEQ ID NO: 2284409 - RNA, 21 nt, Human
cuuucagaugucuucugccug

SEQ ID NO: 2284410 - RNA, 22 nt, Human
cuuucagaugucuucugccugu

SEQ ID NO: 2284411 - RNA, 16 nt, Human
cuuucagaugucuucu

SEQ ID NO: 2284412 - RNA, 17 nt, Human
cuuucagaugucuucug

SEQ ID NO: 2284413 - RNA, 19 nt, Human
cuuucagaugucuucugcc

SEQ ID NO: 2284414 - RNA, 20 nt, Human
cuuucagaugucuucugccu

SEQ ID NO: 2284415 - RNA, 15 nt, Human
cuuucacuauuuccu

SEQ ID NO: 2284416 - RNA, 12 nt, Human
cuuucagauguc

SEQ ID NO: 2284417 - RNA, 15 nt, Human
cuuucagaugucuuc

SEQ ID NO: 2284418 - RNA, 20 nt, Human
cuuuacaugggguuuucaau

SEQ ID NO: 2284419 - RNA, 17 nt, Human
cuuuacaugacacagcu

SEQ ID NO: 2284420 - RNA, 17 nt, Human
cuuuacaugcaauuuau

SEQ ID NO: 2284421 - RNA, 14 nt, Human
cuuuacaugcaauu

SEQ ID NO: 2284422 - RNA, 19 nt, Human
cuuuacaugcaauuuauua

SEQ ID NO: 2284423 - RNA, 23 nt, Human
cuuucaccccagggccugagccu

SEQ ID NO: 2284424 - RNA, 22 nt, Human
cuuucaccccagggccugagcc

SEQ ID NO: 2284425 - RNA, 14 nt, Human
cuuuaccaccccca

SEQ ID NO: 2284426 - RNA, 16 nt, Human
cuuuaccacccccaca

SEQ ID NO: 2284427 - RNA, 17 nt, Human
cuuuaccacccccacac

SEQ ID NO: 2284428 - RNA, 14 nt, Human
cuuucacccuuuuc

SEQ ID NO: 2284429 - RNA, 15 nt, Human
cuuucacccuuuucu

SEQ ID NO: 2284430 - RNA, 20 nt, Human
cuuucacccuuuucuguuug

SEQ ID NO: 2284431 - RNA, 20 nt, Human
cuugugcugaucgugcuaaa

SEQ ID NO: 2284432 - RNA, 16 nt, Human
cuugugccuggcucag

SEQ ID NO: 2284433 - RNA, 15 nt, Human
cuugugccuggcuca

SEQ ID NO: 2284434 - RNA, 21 nt, Human
cuugugcuggauggagcccag

SEQ ID NO: 2284435 - RNA, 22 nt, Human
cuugugcuggauggagcccagg

SEQ ID NO: 2284436 - RNA, 23 nt, Human
cuugugcuggauggagcccaggc

SEQ ID NO: 2284437 - RNA, 23 nt, Human
cuuuaaugucacaggcaggucca

SEQ ID NO: 2284438 - RNA, 15 nt, Human
cuugugcaguguuga

SEQ ID NO: 2284439 - RNA, 20 nt, Human
cuugugcagaaaacauuguu

SEQ ID NO: 2284440 - RNA, 21 nt, Human
cuugugcagaaaacauuguuc

SEQ ID NO: 2284441 - RNA, 17 nt, Human
cuugugcagaaaacauu

SEQ ID NO: 2284442 - RNA, 18 nt, Human
cuugugcagaaaacauug

SEQ ID NO: 2284443 - RNA, 19 nt, Human
cuugugcagaaaacauugu

SEQ ID NO: 2284444 - RNA, 19 nt, Human
cuugugccauagucacaug

SEQ ID NO: 2284445 - RNA, 14 nt, Human
cuugugccuggcuc

SEQ ID NO: 2284446 - RNA, 11 nt, Human
cuugugccaua

SEQ ID NO: 2284447 - RNA, 18 nt, Human
cuugugccaacacucaag

SEQ ID NO: 2284448 - RNA, 17 nt, Human
cuugugccacacccucc

SEQ ID NO: 2284449 - RNA, 23 nt, Human
cuuuaauuguuaagauaugaugu

SEQ ID NO: 2284450 - RNA, 19 nt, Human
cuuuaauucucuuucaaag

SEQ ID NO: 2284451 - RNA, 17 nt, Human
cuuuaauucucauguga

SEQ ID NO: 2284452 - RNA, 20 nt, Human
cuuuaauucucaugugaucc

SEQ ID NO: 2284453 - RNA, 21 nt, Human
cuuuacagguauuuauaauau

SEQ ID NO: 2284454 - RNA, 22 nt, Human
cuuuaauuuauuuuugcauggc

SEQ ID NO: 2284455 - RNA, 16 nt, Human
cuuuaauuuauuuuug

SEQ ID NO: 2284456 - RNA, 18 nt, Human
cuuuaauuuauuuuugca

SEQ ID NO: 2284457 - RNA, 19 nt, Human
cuuuaauuuauuuuugcau

SEQ ID NO: 2284458 - RNA, 21 nt, Human
cuuuaauuuauuuuugcaugg

SEQ ID NO: 2284459 - RNA, 18 nt, Human
cuuguggaauugggagcu

SEQ ID NO: 2284460 - RNA, 20 nt, Human
cuugugcuuuuccuauuugu

SEQ ID NO: 2284461 - RNA, 21 nt, Human
cuuguggaagcaaaaaucuga

SEQ ID NO: 2284462 - RNA, 19 nt, Human
cuuuaauuaccaaccuguu

SEQ ID NO: 2284463 - RNA, 18 nt, Human
cuuuaauuaccaaccugu

SEQ ID NO: 2284464 - RNA, 22 nt, Human
cuuuuauaacuaguccuuuacu

SEQ ID NO: 2284465 - RNA, 20 nt, Human
cuuuguaugucauuuccuuc

SEQ ID NO: 2284466 - RNA, 14 nt, Human
cuuuuauaauaaaa

SEQ ID NO: 2284467 - RNA, 21 nt, Human
cuuuuauaauaaaaggaaaag

SEQ ID NO: 2284468 - RNA, 19 nt, Human
cuuuuauaaacuuuaccuu

SEQ ID NO: 2284469 - RNA, 22 nt, Human
cuuuguauucucuccuguaccu

SEQ ID NO: 2284470 - RNA, 21 nt, Human
cuuuuauaaacuuuaccuuuu

SEQ ID NO: 2284471 - RNA, 20 nt, Human
cuuuuauaaacuuuaccuuu

SEQ ID NO: 2284472 - RNA, 14 nt, Human
cuuugguucagcua

SEQ ID NO: 2284473 - RNA, 20 nt, Human
cuuugauucuccuucagccc

SEQ ID NO: 2284474 - RNA, 16 nt, Human
cuuugcaaaggagcuc

SEQ ID NO: 2284475 - RNA, 15 nt, Human
cuuugcaaaggagcu

SEQ ID NO: 2284476 - RNA, 18 nt, Human
cuuugcacagcucuccgg

SEQ ID NO: 2284477 - RNA, 17 nt, Human
cuuugagacugggucuc

SEQ ID NO: 2284478 - RNA, 17 nt, Human
cuuugagacaguuucuu

SEQ ID NO: 2284479 - RNA, 18 nt, Human
cuuugagacaguuucuua

SEQ ID NO: 2284480 - RNA, 13 nt, Human
cuuugagacaguu

SEQ ID NO: 2284481 - RNA, 15 nt, Human
cuuugagacaguuuc

SEQ ID NO: 2284482 - RNA, 16 nt, Human
cuuugagacaguuucu

SEQ ID NO: 2284483 - RNA, 17 nt, Human
cuuugacuuuuugcauu

SEQ ID NO: 2284484 - RNA, 15 nt, Human
cuuugacuuuuugca

SEQ ID NO: 2284485 - RNA, 14 nt, Human
cuuugacuuuuugc

SEQ ID NO: 2284486 - RNA, 18 nt, Human
cuuugagauagaagaacu

SEQ ID NO: 2284487 - RNA, 15 nt, Human
cuuugauucuccuuc

SEQ ID NO: 2284488 - RNA, 19 nt, Human
cuuugagauagaagaacug

SEQ ID NO: 2284489 - RNA, 16 nt, Human
cuuugauucuccuuca

SEQ ID NO: 2284490 - RNA, 18 nt, Human
cuuugauucuccuucagc

SEQ ID NO: 2284491 - RNA, 19 nt, Human
cuuugauucuccuucagcc

SEQ ID NO: 2284492 - RNA, 22 nt, Human
cuuugauucuccuucagcccuc

SEQ ID NO: 2284493 - RNA, 11 nt, Human
cuuugguuuuu

SEQ ID NO: 2284494 - RNA, 17 nt, Human
cuuugguuuuuuucuuc

SEQ ID NO: 2284495 - RNA, 19 nt, Human
cuuugguuuuuuucuucug

SEQ ID NO: 2284496 - RNA, 21 nt, Human
cuuugguucuggccagaaugc

SEQ ID NO: 2284497 - RNA, 19 nt, Human
cuuugguucuggccagaau

SEQ ID NO: 2284498 - RNA, 14 nt, Human
cuuugguucuggcc

SEQ ID NO: 2284499 - RNA, 13 nt, Human
cuuugcacugagg

SEQ ID NO: 2284500 - RNA, 14 nt, Human
cuuuguaaugaaaa

SEQ ID NO: 2284501 - RNA, 15 nt, Human
cuuuguaaugaaaac

SEQ ID NO: 2284502 - RNA, 12 nt, Human
cuuuguaugcac

SEQ ID NO: 2284503 - RNA, 18 nt, Human
cuuuguauauuauuucua

SEQ ID NO: 2284504 - RNA, 17 nt, Human
cuuuguauucucuccug

SEQ ID NO: 2284505 - RNA, 17 nt, Human
cuuuguaaugucaccac

SEQ ID NO: 2284506 - RNA, 13 nt, Human
cuuuguaauggga

SEQ ID NO: 2284507 - RNA, 13 nt, Human
cuuuguaaugaaa

SEQ ID NO: 2284508 - RNA, 22 nt, Human
cuuuguaaugucaccaccuucc

SEQ ID NO: 2284509 - RNA, 21 nt, Human
cuuuguaaugucaccaccuuc

SEQ ID NO: 2284510 - RNA, 16 nt, Human
cuuuguaaugaaaacc

SEQ ID NO: 2284511 - RNA, 17 nt, Human
cuuucuaaugugugaau

SEQ ID NO: 2284512 - RNA, 17 nt, Human
cuuucuauuguacagaa

SEQ ID NO: 2284513 - RNA, 23 nt, Human
cuuucuacaguauuauguacucu

SEQ ID NO: 2284514 - RNA, 16 nt, Human
cuuucuauugaaaaau

SEQ ID NO: 2284515 - RNA, 15 nt, Human
cuuucuauuguacag

SEQ ID NO: 2284516 - RNA, 16 nt, Human
cuuucuauuguacaga

SEQ ID NO: 2284517 - RNA, 20 nt, Human
cuuucuacaaugugaacuuu

SEQ ID NO: 2284518 - RNA, 14 nt, Human
cuuucuacaggcca

SEQ ID NO: 2284519 - RNA, 18 nt, Human
cuuucuacaaugugaacu

SEQ ID NO: 2284520 - RNA, 15 nt, Human
cuuucuacaauguga

SEQ ID NO: 2284521 - RNA, 20 nt, Human
cuuucuacagggcugacauu

SEQ ID NO: 2284522 - RNA, 19 nt, Human
cuuucuacaguauuaugua

SEQ ID NO: 2284523 - RNA, 15 nt, Human
cuuucuacccagcga

SEQ ID NO: 2284524 - RNA, 16 nt, Human
cuuucuacccagcgag

SEQ ID NO: 2284525 - RNA, 21 nt, Human
cuuucucagccgcuucugacu

SEQ ID NO: 2284526 - RNA, 22 nt, Human
cuuucucagccgcuucugacug

SEQ ID NO: 2284527 - RNA, 15 nt, Human
cuuucucaguuuuca

SEQ ID NO: 2284528 - RNA, 20 nt, Human
cuuucucaguuuucauaagu

SEQ ID NO: 2284529 - RNA, 17 nt, Human
cuuucucaguuuucaua

SEQ ID NO: 2284530 - RNA, 16 nt, Human
cuuucucaguuuucau

SEQ ID NO: 2284531 - RNA, 20 nt, Human
cuuucucagccucugaauau

SEQ ID NO: 2284532 - RNA, 13 nt, Human
cuuucuccagcca

SEQ ID NO: 2284533 - RNA, 14 nt, Human
cuuucuccagccag

SEQ ID NO: 2284534 - RNA, 15 nt, Human
cuuucuccagccagc

SEQ ID NO: 2284535 - RNA, 16 nt, Human
cuuucuccagccagca

SEQ ID NO: 2284536 - RNA, 19 nt, Human
cuuucuccagccagcaaug

SEQ ID NO: 2284537 - RNA, 20 nt, Human
cuuucuccagccagcaauga

SEQ ID NO: 2284538 - RNA, 18 nt, Human
cuuucucccacugaguuu

SEQ ID NO: 2284539 - RNA, 20 nt, Human
cuuugaccugccucccuuca

SEQ ID NO: 2284540 - RNA, 14 nt, Human
cuuugaccuguugg

SEQ ID NO: 2284541 - RNA, 16 nt, Human
cuuugacugagcagac

SEQ ID NO: 2284542 - RNA, 21 nt, Human
cuuugacucuuuugccauuaa

SEQ ID NO: 2284543 - RNA, 19 nt, Human
cuuugacucaccuguuacu

SEQ ID NO: 2284544 - RNA, 23 nt, Human
cuuugaccugccucccuucaugc

SEQ ID NO: 2284545 - RNA, 16 nt, Human
cuuugacucaccuguu

SEQ ID NO: 2284546 - RNA, 16 nt, Human
cuuugacgccauccca

SEQ ID NO: 2284547 - RNA, 17 nt, Human
cuuugacgccaucccag

SEQ ID NO: 2284548 - RNA, 18 nt, Human
gaaccaccacacccagcc

SEQ ID NO: 2284549 - RNA, 20 nt, Human
gaaccaccacacccagccca

SEQ ID NO: 2284550 - RNA, 21 nt, Human
gaaccaccacacccagcccac

SEQ ID NO: 2284551 - RNA, 22 nt, Human
gaaccaccacacccagcccacu

SEQ ID NO: 2284552 - RNA, 23 nt, Human
gaaccaugucagcaaaaagcaaa

SEQ ID NO: 2284553 - RNA, 21 nt, Human
gaaccaugucagcaaaaagca

SEQ ID NO: 2284554 - RNA, 16 nt, Human
gaaccaugaagacagg

SEQ ID NO: 2284555 - RNA, 17 nt, Human
gaaccaugaagacagga

SEQ ID NO: 2284556 - RNA, 18 nt, Human
gaaccaugaagacaggau

SEQ ID NO: 2284557 - RNA, 22 nt, Human
gaaccauggucggaaaacaugc

SEQ ID NO: 2284558 - RNA, 18 nt, Human
gaaccagggagaccgagc

SEQ ID NO: 2284559 - RNA, 19 nt, Human
gaaccaguccccccacccu

SEQ ID NO: 2284560 - RNA, 19 nt, Human
gaaccaguuucagguguuu

SEQ ID NO: 2284561 - RNA, 20 nt, Human
gaaccaucauuauaaacgug

SEQ ID NO: 2284562 - RNA, 12 nt, Human
gaaccaucagaa

SEQ ID NO: 2284563 - RNA, 23 nt, Human
gaaccaccacacccagcccacuu

SEQ ID NO: 2284564 - RNA, 19 nt, Human
gaaccacuacaugcagccc

SEQ ID NO: 2284565 - RNA, 14 nt, Human
gaaccacuucccuc

SEQ ID NO: 2284566 - RNA, 23 nt, Human
gaaccagagccauggacucuaca

SEQ ID NO: 2284567 - RNA, 19 nt, Human
gaaccagagccauggacuc

SEQ ID NO: 2284568 - RNA, 12 nt, Human
gaaccagagcca

SEQ ID NO: 2284569 - RNA, 21 nt, Human
gaaccaggaaauggaacccca

SEQ ID NO: 2284570 - RNA, 23 nt, Human
gaaccagaugaguaaaggaguaa

SEQ ID NO: 2284571 - RNA, 13 nt, Human
gaaccaggagcug

SEQ ID NO: 2284572 - RNA, 14 nt, Human
gaacccaccugcug

SEQ ID NO: 2284573 - RNA, 13 nt, Human
gaacccaccugcu

SEQ ID NO: 2284574 - RNA, 12 nt, Human
gaacccaccugc

SEQ ID NO: 2284575 - RNA, 19 nt, Human
gaacccaccugcugagaga

SEQ ID NO: 2284576 - RNA, 15 nt, Human
gaacccaccugcuga

SEQ ID NO: 2284577 - RNA, 13 nt, Human
gaacccagacuca

SEQ ID NO: 2284578 - RNA, 19 nt, Human
gaacccagacucagacauu

SEQ ID NO: 2284579 - RNA, 17 nt, Human
gaacccagacucagaca

SEQ ID NO: 2284580 - RNA, 16 nt, Human
gaacccagacucagac

SEQ ID NO: 2284581 - RNA, 17 nt, Human
gaacccaaguccaagca

SEQ ID NO: 2284582 - RNA, 16 nt, Human
gaacccaaguccaagc

SEQ ID NO: 2284583 - RNA, 17 nt, Human
gaaccccaaggagggag

SEQ ID NO: 2284584 - RNA, 14 nt, Human
gaaccccccuccca

SEQ ID NO: 2284585 - RNA, 19 nt, Human
gaacccaggacgcuucuga

SEQ ID NO: 2284586 - RNA, 23 nt, Human
gaacccauuccauuuaucuuucu

SEQ ID NO: 2284587 - RNA, 16 nt, Human
gaacccaggaggugga

SEQ ID NO: 2284588 - RNA, 15 nt, Human
gaacccaggacgcuu

SEQ ID NO: 2284589 - RNA, 17 nt, Human
gaacccaggacgcuucu

SEQ ID NO: 2284590 - RNA, 22 nt, Human
gaaccccuggcuccaggccagg

SEQ ID NO: 2284591 - RNA, 17 nt, Human
gaaccccuucauccucu

SEQ ID NO: 2284592 - RNA, 21 nt, Human
gaaccccuacaugaaacagaa

SEQ ID NO: 2284593 - RNA, 18 nt, Human
gaaccccuggcuccaggc

SEQ ID NO: 2284594 - RNA, 20 nt, Human
gaaccccggggugcccacag

SEQ ID NO: 2284595 - RNA, 17 nt, Human
gaaccccccucccaccc

SEQ ID NO: 2284596 - RNA, 21 nt, Human
gaaccccccucccacccaccg

SEQ ID NO: 2284597 - RNA, 13 nt, Human
gaacugaaaucau

SEQ ID NO: 2284598 - RNA, 21 nt, Human
gaacugagcuccucugggcag

SEQ ID NO: 2284599 - RNA, 14 nt, Human
gaacugagcuugga

SEQ ID NO: 2284600 - RNA, 22 nt, Human
gaacugagcuuggaagcuucug

SEQ ID NO: 2284601 - RNA, 21 nt, Human
gaacugagcuuggaagcuucu

SEQ ID NO: 2284602 - RNA, 16 nt, Human
gaacugagcuuggaag

SEQ ID NO: 2284603 - RNA, 15 nt, Human
gaacugagcuuggaa

SEQ ID NO: 2284604 - RNA, 19 nt, Human
gaacugauaguuacuguug

SEQ ID NO: 2284605 - RNA, 13 nt, Human
gaacugauaguua

SEQ ID NO: 2284606 - RNA, 16 nt, Human
gaacugcagaccuguc

SEQ ID NO: 2284607 - RNA, 17 nt, Human
gaacugcagaccugucc

SEQ ID NO: 2284608 - RNA, 18 nt, Human
gaacugcagaccuguccu

SEQ ID NO: 2284609 - RNA, 19 nt, Human
gaacugcagaccuguccuc

SEQ ID NO: 2284610 - RNA, 12 nt, Human
gaacugcaggcc

SEQ ID NO: 2284611 - RNA, 14 nt, Human
gaacugcaggcccu

SEQ ID NO: 2284612 - RNA, 16 nt, Human
gaacugcaggcccugg

SEQ ID NO: 2284613 - RNA, 17 nt, Human
gaacugcaggcccuggc

SEQ ID NO: 2284614 - RNA, 18 nt, Human
gaacugcaggcccuggcc

SEQ ID NO: 2284615 - RNA, 19 nt, Human
gaacugcaggcccuggccu

SEQ ID NO: 2284616 - RNA, 21 nt, Human
gaacugcaggcccuggccucc

SEQ ID NO: 2284617 - RNA, 23 nt, Human
gaacugcaggcccuggccucccc

SEQ ID NO: 2284618 - RNA, 13 nt, Human
gaacuccuggccu

SEQ ID NO: 2284619 - RNA, 14 nt, Human
gaacuccugaccuc

SEQ ID NO: 2284620 - RNA, 15 nt, Human
gaacuccugaccuca

SEQ ID NO: 2284621 - RNA, 19 nt, Human
gaacccgggaggcagaggu

SEQ ID NO: 2284622 - RNA, 17 nt, Human
gaacccgggaggcagag

SEQ ID NO: 2284623 - RNA, 20 nt, Human
gaacuccuggaaauaucagu

SEQ ID NO: 2284624 - RNA, 19 nt, Human
gaaccccgucgaggggcuc

SEQ ID NO: 2284625 - RNA, 19 nt, Human
gaacucuggcuuccaggua

SEQ ID NO: 2284626 - RNA, 15 nt, Human
gaacuccuggccuca

SEQ ID NO: 2284627 - RNA, 17 nt, Human
gaacucuggcuuccagg

SEQ ID NO: 2284628 - RNA, 14 nt, Human
gaacuccuggccuc

SEQ ID NO: 2284629 - RNA, 18 nt, Human
gaacucugggcugccaug

SEQ ID NO: 2284630 - RNA, 20 nt, Human
gaacucuggcuuccagguau

SEQ ID NO: 2284631 - RNA, 13 nt, Human
gaacucuuaauca

SEQ ID NO: 2284632 - RNA, 20 nt, Human
gaacucuuaaucaaauagca

SEQ ID NO: 2284633 - RNA, 15 nt, Human
gaacucuuagaaaug

SEQ ID NO: 2284634 - RNA, 18 nt, Human
gaacucuuagaaaugaag

SEQ ID NO: 2284635 - RNA, 22 nt, Human
gaagacauggggaggaaggaca

SEQ ID NO: 2284636 - RNA, 12 nt, Human
gaagacauguuu

SEQ ID NO: 2284637 - RNA, 15 nt, Human
gaagacauggagacu

SEQ ID NO: 2284638 - RNA, 20 nt, Human
gaagacauggagacuccugc

SEQ ID NO: 2284639 - RNA, 21 nt, Human
gaagacauggagacuccugcc

SEQ ID NO: 2284640 - RNA, 15 nt, Human
gaagacaggacagug

SEQ ID NO: 2284641 - RNA, 21 nt, Human
gaagacagagaccuccugccu

SEQ ID NO: 2284642 - RNA, 18 nt, Human
gaagacaugaaccaagug

SEQ ID NO: 2284643 - RNA, 14 nt, Human
gaagacagcucuua

SEQ ID NO: 2284644 - RNA, 15 nt, Human
gaagacagcucuuau

SEQ ID NO: 2284645 - RNA, 14 nt, Human
gaagaccccaccca

SEQ ID NO: 2284646 - RNA, 14 nt, Human
gaagacccuccccg

SEQ ID NO: 2284647 - RNA, 15 nt, Human
gaagaccccacccaa

SEQ ID NO: 2284648 - RNA, 16 nt, Human
gaagaccccacccaag

SEQ ID NO: 2284649 - RNA, 18 nt, Human
gaagacauguuuuagaca

SEQ ID NO: 2284650 - RNA, 23 nt, Human
gaagaccaaucucuugaauccca

SEQ ID NO: 2284651 - RNA, 14 nt, Human
gaagaccacaucca

SEQ ID NO: 2284652 - RNA, 20 nt, Human
gaagaccacauccacacacg

SEQ ID NO: 2284653 - RNA, 21 nt, Human
gaagaccacauccacacacgc

SEQ ID NO: 2284654 - RNA, 22 nt, Human
gaagaccacauccacacacgca

SEQ ID NO: 2284655 - RNA, 18 nt, Human
gaagaccagacuguggag

SEQ ID NO: 2284656 - RNA, 20 nt, Human
gaagaccagcuuugcaguga

SEQ ID NO: 2284657 - RNA, 22 nt, Human
gaagaccugcugagggaccagc

SEQ ID NO: 2284658 - RNA, 20 nt, Human
gaagaccucaccuagaaauu

SEQ ID NO: 2284659 - RNA, 22 nt, Human
gaagaccuggcaaggacacaga

SEQ ID NO: 2284660 - RNA, 18 nt, Human
gaagaccccacccaagcu

SEQ ID NO: 2284661 - RNA, 19 nt, Human
gaagaccucaccuagaaau

SEQ ID NO: 2284662 - RNA, 21 nt, Human
gaagacacugaaauauacaca

SEQ ID NO: 2284663 - RNA, 19 nt, Human
gaacugcaugcugcuggac

SEQ ID NO: 2284664 - RNA, 18 nt, Human
gaagacagagaccuccug

SEQ ID NO: 2284665 - RNA, 21 nt, Human
gaagacacugaugggcaaccc

SEQ ID NO: 2284666 - RNA, 21 nt, Human
gaacugcauauguuucgcuga

SEQ ID NO: 2284667 - RNA, 15 nt, Human
gaacugcauauguuu

SEQ ID NO: 2284668 - RNA, 15 nt, Human
gaacugcaugcugcu

SEQ ID NO: 2284669 - RNA, 16 nt, Human
gaagacacugaugggc

SEQ ID NO: 2284670 - RNA, 13 nt, Human
gaagacagagcua

SEQ ID NO: 2284671 - RNA, 15 nt, Human
gaagacagagcuaca

SEQ ID NO: 2284672 - RNA, 12 nt, Human
gaagacagcucu

SEQ ID NO: 2284673 - RNA, 13 nt, Human
gaagacagcucuu

SEQ ID NO: 2284674 - RNA, 18 nt, Human
gaagcagguugaggggcu

SEQ ID NO: 2284675 - RNA, 19 nt, Human
gaagcagguucccaagcuc

SEQ ID NO: 2284676 - RNA, 12 nt, Human
gaagcagguucc

SEQ ID NO: 2284677 - RNA, 22 nt, Human
gaagcagguugaggggcuccug

SEQ ID NO: 2284678 - RNA, 19 nt, Human
gaagcagguugaggggcuc

SEQ ID NO: 2284679 - RNA, 23 nt, Human
gaagcagguugaggggcuccugg

SEQ ID NO: 2284680 - RNA, 15 nt, Human
gaagcagugagccgc

SEQ ID NO: 2284681 - RNA, 15 nt, Human
gaagcaggcuggagg

SEQ ID NO: 2284682 - RNA, 19 nt, Human
gaagcaggcuacacugaca

SEQ ID NO: 2284683 - RNA, 23 nt, Human
gaagcaggcuacacugacacugg

SEQ ID NO: 2284684 - RNA, 12 nt, Human
gaagcaggcugg

SEQ ID NO: 2284685 - RNA, 13 nt, Human
gaagcaggcugga

SEQ ID NO: 2284686 - RNA, 12 nt, Human
gaagcagcucuu

SEQ ID NO: 2284687 - RNA, 14 nt, Human
gaagcaggcuacac

SEQ ID NO: 2284688 - RNA, 18 nt, Human
gaagcaggcuacacugac

SEQ ID NO: 2284689 - RNA, 23 nt, Human
gaagcagaugcaaagaggcaaga

SEQ ID NO: 2284690 - RNA, 12 nt, Human
gaagcagccucu

SEQ ID NO: 2284691 - RNA, 22 nt, Human
gaagcagccucuccccaggucc

SEQ ID NO: 2284692 - RNA, 21 nt, Human
gaagcaccccaugccaaagcu

SEQ ID NO: 2284693 - RNA, 16 nt, Human
gaagcaccccaugcca

SEQ ID NO: 2284694 - RNA, 19 nt, Human
gaagcacuguuccagccug

SEQ ID NO: 2284695 - RNA, 16 nt, Human
gaagcaccauaacuuu

SEQ ID NO: 2284696 - RNA, 14 nt, Human
gaagcacauguuua

SEQ ID NO: 2284697 - RNA, 21 nt, Human
gaagcacaugccucucucagg

SEQ ID NO: 2284698 - RNA, 13 nt, Human
gaagcacagcuuc

SEQ ID NO: 2284699 - RNA, 14 nt, Human
gaagcacagcuuca

SEQ ID NO: 2284700 - RNA, 14 nt, Human
gaagcacaugccuc

SEQ ID NO: 2284701 - RNA, 22 nt, Human
gaagcacaugccucucucaggc

SEQ ID NO: 2284702 - RNA, 17 nt, Human
gaagacucauucuucug

SEQ ID NO: 2284703 - RNA, 18 nt, Human
gaagacucauucuucugu

SEQ ID NO: 2284704 - RNA, 16 nt, Human
gaagacucauucuucu

SEQ ID NO: 2284705 - RNA, 14 nt, Human
gaagacgaggcccu

SEQ ID NO: 2284706 - RNA, 22 nt, Human
gaagacgaggcccucgggccca

SEQ ID NO: 2284707 - RNA, 23 nt, Human
gaagacgaggcccucgggcccag

SEQ ID NO: 2284708 - RNA, 15 nt, Human
gaagacgccugagcu

SEQ ID NO: 2284709 - RNA, 16 nt, Human
gaagacgccugagcuc

SEQ ID NO: 2284710 - RNA, 21 nt, Human
gaaacaacagcuuuaaaagaa

SEQ ID NO: 2284711 - RNA, 15 nt, Human
gaaacaacagcuuua

SEQ ID NO: 2284712 - RNA, 15 nt, Human
gaaacaaagcuuagc

SEQ ID NO: 2284713 - RNA, 19 nt, Human
gaaacaaagcuuagcagga

SEQ ID NO: 2284714 - RNA, 22 nt, Human
gaaacaaagcuuagcaggagag

SEQ ID NO: 2284715 - RNA, 16 nt, Human
gaaaauuauuugcaua

SEQ ID NO: 2284716 - RNA, 17 nt, Human
gaaaauuauuuuaaaca

SEQ ID NO: 2284717 - RNA, 17 nt, Human
gaaaauucaaaaagugu

SEQ ID NO: 2284718 - RNA, 14 nt, Human
gaaacaaagaaggu

SEQ ID NO: 2284719 - RNA, 19 nt, Human
gaaaauucaaaaaguguuu

SEQ ID NO: 2284720 - RNA, 20 nt, Human
gaaaauucaaaaaguguuua

SEQ ID NO: 2284721 - RNA, 21 nt, Human
gaaaauucaaaaaguguuuau

SEQ ID NO: 2284722 - RNA, 22 nt, Human
gaaaauucaaaaaguguuuauu

SEQ ID NO: 2284723 - RNA, 14 nt, Human
gaaacaacuuggaa

SEQ ID NO: 2284724 - RNA, 20 nt, Human
gaaacaacucuuugagaaac

SEQ ID NO: 2284725 - RNA, 17 nt, Human
gaaacaacucuuugaga

SEQ ID NO: 2284726 - RNA, 16 nt, Human
gaaaaaaaugacuaaa

SEQ ID NO: 2284727 - RNA, 19 nt, Human
gaaaaaacaccuagcuuua

SEQ ID NO: 2284728 - RNA, 16 nt, Human
gaaaaaagagaaaaga

SEQ ID NO: 2284729 - RNA, 10 nt, Human
gaaaaaagag

SEQ ID NO: 2284730 - RNA, 18 nt, Human
gaaaaaagagaaaagaaa

SEQ ID NO: 2284731 - RNA, 17 nt, Human
gaaaaaagagaaaagaa

SEQ ID NO: 2284732 - RNA, 17 nt, Human
gaaaaaauaacacacau

SEQ ID NO: 2284733 - RNA, 23 nt, Human
gaaaaaaguuguaggcgaaucau

SEQ ID NO: 2284734 - RNA, 22 nt, Human
gaaaaaaguuguaggcgaauca

SEQ ID NO: 2284735 - RNA, 14 nt, Human
gaaaaaaguuguag

SEQ ID NO: 2284736 - RNA, 19 nt, Human
gaaaacuuguauuaugugu

SEQ ID NO: 2284737 - RNA, 22 nt, Human
gaaaacuuguauuauguguguu

SEQ ID NO: 2284738 - RNA, 21 nt, Human
gaaaaaauaauugauuucaag

SEQ ID NO: 2284739 - RNA, 18 nt, Human
gaaaacuuguauuaugug

SEQ ID NO: 2284740 - RNA, 21 nt, Human
gaaaacuuuaugcuaagugaa

SEQ ID NO: 2284741 - RNA, 23 nt, Human
gaaaagaaaaaugagccuggcaa

SEQ ID NO: 2284742 - RNA, 20 nt, Human
gaaaagauacgacuuuauuu

SEQ ID NO: 2284743 - RNA, 19 nt, Human
gaaaagauacgacuuuauu

SEQ ID NO: 2284744 - RNA, 16 nt, Human
gaaaagauacgacuuu

SEQ ID NO: 2284745 - RNA, 21 nt, Human
gaaaagaggaguuucgaggua

SEQ ID NO: 2284746 - RNA, 22 nt, Human
gaaaagauacgacuuuauuuuc

SEQ ID NO: 2284747 - RNA, 18 nt, Human
gaaaagacuccaaagaaa

SEQ ID NO: 2284748 - RNA, 14 nt, Human
gaaaagagauggcc

SEQ ID NO: 2284749 - RNA, 21 nt, Human
gaaaagagauggccugagaag

SEQ ID NO: 2284750 - RNA, 12 nt, Human
gaaaagaggagu

SEQ ID NO: 2284751 - RNA, 20 nt, Human
gaaaagaggaguuucgaggu

SEQ ID NO: 2284752 - RNA, 13 nt, Human
gaaaagauaaaga

SEQ ID NO: 2284753 - RNA, 17 nt, Human
gaaaagacuccaaagaa

SEQ ID NO: 2284754 - RNA, 16 nt, Human
gaaaagacuccaaaga

SEQ ID NO: 2284755 - RNA, 18 nt, Human
gaaaagaauacagaaaga

SEQ ID NO: 2284756 - RNA, 16 nt, Human
gaaaagaauacagaaa

SEQ ID NO: 2284757 - RNA, 22 nt, Human
gaaaagaaaucuaugauuccag

SEQ ID NO: 2284758 - RNA, 19 nt, Human
gaaaagaauacagaaagau

SEQ ID NO: 2284759 - RNA, 14 nt, Human
gaaaagacuccaaa

SEQ ID NO: 2284760 - RNA, 21 nt, Human
gaaaagauguagauuuauuuc

SEQ ID NO: 2284761 - RNA, 17 nt, Human
gaaaagauuuuaaucaa

SEQ ID NO: 2284762 - RNA, 13 nt, Human
gaaaagauuuuaa

SEQ ID NO: 2284763 - RNA, 23 nt, Human
gaaaagauuuuaaucaaguugaa

SEQ ID NO: 2284764 - RNA, 19 nt, Human
gaaaagauguagauuuauu

SEQ ID NO: 2284765 - RNA, 18 nt, Human
gaaaagauguagauuuau

SEQ ID NO: 2284766 - RNA, 17 nt, Human
gaaaagauguagauuua

SEQ ID NO: 2284767 - RNA, 14 nt, Human
gaaaagauguagau

SEQ ID NO: 2284768 - RNA, 14 nt, Human
gaaaagcaccugcc

SEQ ID NO: 2284769 - RNA, 23 nt, Human
gaaaaugucagaaaccaguuaug

SEQ ID NO: 2284770 - RNA, 14 nt, Human
gaaaaugucuugug

SEQ ID NO: 2284771 - RNA, 15 nt, Human
gaaaaugugugugug

SEQ ID NO: 2284772 - RNA, 12 nt, Human
gaaaaugugugu

SEQ ID NO: 2284773 - RNA, 16 nt, Human
gaaaauguuauuuaac

SEQ ID NO: 2284774 - RNA, 15 nt, Human
gaaaauguuauuuaa

SEQ ID NO: 2284775 - RNA, 23 nt, Human
gaaaaugucuauucaaaauauca

SEQ ID NO: 2284776 - RNA, 20 nt, Human
gaaaauguugagaaucccaa

SEQ ID NO: 2284777 - RNA, 17 nt, Human
gaaaauguugagaaucc

SEQ ID NO: 2284778 - RNA, 15 nt, Human
gaaaauguugagaau

SEQ ID NO: 2284779 - RNA, 15 nt, Human
gaaaauuauuugcau

SEQ ID NO: 2284780 - RNA, 18 nt, Human
gaaaucccuguuuaauau

SEQ ID NO: 2284781 - RNA, 21 nt, Human
gaaaggggagagccugcuggc

SEQ ID NO: 2284782 - RNA, 19 nt, Human
gaaaucccuguuuaauauu

SEQ ID NO: 2284783 - RNA, 21 nt, Human
gaaaucccuguuuaauauuua

SEQ ID NO: 2284784 - RNA, 22 nt, Human
gaaaucccuguuuaauauuuaa

SEQ ID NO: 2284785 - RNA, 23 nt, Human
gaaaucccuguuuaauauuuaaa

SEQ ID NO: 2284786 - RNA, 12 nt, Human
gaaaucucaccc

SEQ ID NO: 2284787 - RNA, 20 nt, Human
gaaaucuaugauuccaggug

SEQ ID NO: 2284788 - RNA, 15 nt, Human
gaaaucuaguauuuc

SEQ ID NO: 2284789 - RNA, 18 nt, Human
gaaaucuaugauuccagg

SEQ ID NO: 2284790 - RNA, 15 nt, Human
gaaagggcccagaga

SEQ ID NO: 2284791 - RNA, 16 nt, Human
gaaagggcccagagag

SEQ ID NO: 2284792 - RNA, 16 nt, Human
gaaaggggagcccacu

SEQ ID NO: 2284793 - RNA, 15 nt, Human
gaaaggggagcccac

SEQ ID NO: 2284794 - RNA, 13 nt, Human
gaaaggggagccc

SEQ ID NO: 2284795 - RNA, 18 nt, Human
gaaaggggagagccugcu

SEQ ID NO: 2284796 - RNA, 20 nt, Human
gaaaggggagagccugcugg

SEQ ID NO: 2284797 - RNA, 20 nt, Human
gaaagggcaacaauaaaaua

SEQ ID NO: 2284798 - RNA, 15 nt, Human
gaaaggggagagccu

SEQ ID NO: 2284799 - RNA, 13 nt, Human
gaaaugaaagaaa

SEQ ID NO: 2284800 - RNA, 16 nt, Human
gaaaugaaaacaugua

SEQ ID NO: 2284801 - RNA, 20 nt, Human
gaaaucugugccugagaaca

SEQ ID NO: 2284802 - RNA, 19 nt, Human
gaaaucuuacagcugggug

SEQ ID NO: 2284803 - RNA, 14 nt, Human
gaaaucuuuuaaaa

SEQ ID NO: 2284804 - RNA, 11 nt, Human
gaaaugaaaaa

SEQ ID NO: 2284805 - RNA, 19 nt, Human
gaaaucucacuuuucucca

SEQ ID NO: 2284806 - RNA, 22 nt, Human
gaaaucuguaucuguagugaga

SEQ ID NO: 2284807 - RNA, 19 nt, Human
gaaaugaaaacauguaaua

SEQ ID NO: 2284808 - RNA, 16 nt, Human
gaacaaaaaaaucugc

SEQ ID NO: 2284809 - RNA, 21 nt, Human
gaacaaaaaaaucugcagaag

SEQ ID NO: 2284810 - RNA, 19 nt, Human
gaacaaaaaaaucugcaga

SEQ ID NO: 2284811 - RNA, 14 nt, Human
gaacaaagcagcca

SEQ ID NO: 2284812 - RNA, 16 nt, Human
gaacaaagcagccacg

SEQ ID NO: 2284813 - RNA, 15 nt, Human
gaacaaagcagccac

SEQ ID NO: 2284814 - RNA, 19 nt, Human
gaacaaagcagccacgagg

SEQ ID NO: 2284815 - RNA, 22 nt, Human
gaacaaaggacagaguaugaac

SEQ ID NO: 2284816 - RNA, 15 nt, Human
gaacaaagugagaca

SEQ ID NO: 2284817 - RNA, 21 nt, Human
gaacaccagagaccucaaauu

SEQ ID NO: 2284818 - RNA, 20 nt, Human
gaacacauaauucaggaagc

SEQ ID NO: 2284819 - RNA, 17 nt, Human
gaacacauaauucagga

SEQ ID NO: 2284820 - RNA, 15 nt, Human
gaacacagaaagccu

SEQ ID NO: 2284821 - RNA, 17 nt, Human
gaacacaggcaaaaucc

SEQ ID NO: 2284822 - RNA, 14 nt, Human
gaacacacuccauc

SEQ ID NO: 2284823 - RNA, 14 nt, Human
gaacacacuguguc

SEQ ID NO: 2284824 - RNA, 16 nt, Human
gaacacacuguguccu

SEQ ID NO: 2284825 - RNA, 22 nt, Human
gaacacacuguguccuggugcu

SEQ ID NO: 2284826 - RNA, 19 nt, Human
gaacacaaacuguaaauaa

SEQ ID NO: 2284827 - RNA, 19 nt, Human
gaacaauauugacuuuguc

SEQ ID NO: 2284828 - RNA, 20 nt, Human
gaacaauauugacuuugucu

SEQ ID NO: 2284829 - RNA, 21 nt, Human
gaacaaugugcuaugugaaga

SEQ ID NO: 2284830 - RNA, 14 nt, Human
gaacaaucaaagca

SEQ ID NO: 2284831 - RNA, 17 nt, Human
gaacacaaacuguaaau

SEQ ID NO: 2284832 - RNA, 19 nt, Human
gaacaaguuguuucauuga

SEQ ID NO: 2284833 - RNA, 21 nt, Human
gaacaaguuguuucauugacu

SEQ ID NO: 2284834 - RNA, 14 nt, Human
gaacacccucgaag

SEQ ID NO: 2284835 - RNA, 16 nt, Human
gaacacccuauauuuu

SEQ ID NO: 2284836 - RNA, 21 nt, Human
gaacacccgacuccucaaaag

SEQ ID NO: 2284837 - RNA, 22 nt, Human
gaacacggccacaucaaagagg

SEQ ID NO: 2284838 - RNA, 14 nt, Human
gaacacggccacau

SEQ ID NO: 2284839 - RNA, 16 nt, Human
gaacacucaugcugaa

SEQ ID NO: 2284840 - RNA, 13 nt, Human
gaacacuagccag

SEQ ID NO: 2284841 - RNA, 22 nt, Human
gaacacguccagaauuuuucau

SEQ ID NO: 2284842 - RNA, 16 nt, Human
gaacacuaaccugacc

SEQ ID NO: 2284843 - RNA, 22 nt, Human
gaacacuaaccugaccgugggc

SEQ ID NO: 2284844 - RNA, 18 nt, Human
gaacacuccaauuaagga

SEQ ID NO: 2284845 - RNA, 17 nt, Human
gaacacucaugcugaaa

SEQ ID NO: 2284846 - RNA, 21 nt, Human
gaaacugcuuguuuccuagca

SEQ ID NO: 2284847 - RNA, 17 nt, Human
gaaacuggauuaaacuu

SEQ ID NO: 2284848 - RNA, 13 nt, Human
gaaacuggauuaa

SEQ ID NO: 2284849 - RNA, 15 nt, Human
gaaagaaagaaggaa

SEQ ID NO: 2284850 - RNA, 22 nt, Human
gaaagaaacccgacagagggaa

SEQ ID NO: 2284851 - RNA, 21 nt, Human
gaaagaaacccgacagaggga

SEQ ID NO: 2284852 - RNA, 17 nt, Human
gaaagaaaauaugcauc

SEQ ID NO: 2284853 - RNA, 16 nt, Human
gaaagaaaauaugcau

SEQ ID NO: 2284854 - RNA, 18 nt, Human
gaaacuguagucucagga

SEQ ID NO: 2284855 - RNA, 18 nt, Human
gaaagaaaaucaggcugg

SEQ ID NO: 2284856 - RNA, 17 nt, Human
gaaacuggcacugaauu

SEQ ID NO: 2284857 - RNA, 17 nt, Human
gaaacuggguuccugca

SEQ ID NO: 2284858 - RNA, 19 nt, Human
gaaagaacauggacuugua

SEQ ID NO: 2284859 - RNA, 20 nt, Human
gaaagaacauggacuuguau

SEQ ID NO: 2284860 - RNA, 23 nt, Human
gaaagaacauggacuuguauauu

SEQ ID NO: 2284861 - RNA, 22 nt, Human
gaaagaaaguugcacggcugcu

SEQ ID NO: 2284862 - RNA, 23 nt, Human
gaaagaaaguugcacggcugcug

SEQ ID NO: 2284863 - RNA, 13 nt, Human
gaaaggcuccagg

SEQ ID NO: 2284864 - RNA, 14 nt, Human
gaaaggcuccagga

SEQ ID NO: 2284865 - RNA, 15 nt, Human
gaaaggcuccaggag

SEQ ID NO: 2284866 - RNA, 13 nt, Human
gaaagggcccaga

SEQ ID NO: 2284867 - RNA, 16 nt, Human
gaaaggcuccaggagc

SEQ ID NO: 2284868 - RNA, 14 nt, Human
cuguuggcuggggg

SEQ ID NO: 2284869 - RNA, 14 nt, Human
cuguugguuccaag

SEQ ID NO: 2284870 - RNA, 20 nt, Human
cuguugguuccaagcccugg

SEQ ID NO: 2284871 - RNA, 16 nt, Human
cuguuguaacuaggcu

SEQ ID NO: 2284872 - RNA, 22 nt, Human
cuguugggguggguauaaaaga

SEQ ID NO: 2284873 - RNA, 23 nt, Human
cuguugggguggguauaaaagau

SEQ ID NO: 2284874 - RNA, 19 nt, Human
cuguuggcugggggccuca

SEQ ID NO: 2284875 - RNA, 22 nt, Human
cuguuggcugggggccucagug

SEQ ID NO: 2284876 - RNA, 22 nt, Human
cuguuguauaaauuuauuuacu

SEQ ID NO: 2284877 - RNA, 12 nt, Human
cuguugucauug

SEQ ID NO: 2284878 - RNA, 17 nt, Human
cuguuguuucuaaacaa

SEQ ID NO: 2284879 - RNA, 16 nt, Human
cuguuguuuuguuuua

SEQ ID NO: 2284880 - RNA, 20 nt, Human
cuguuguuuuguuuuaaaua

SEQ ID NO: 2284881 - RNA, 19 nt, Human
cuguuuaaauauuucaaga

SEQ ID NO: 2284882 - RNA, 22 nt, Human
cuguuuaaauauuucaagacau

SEQ ID NO: 2284883 - RNA, 22 nt, Human
cuguuguacauuuaugauuuaa

SEQ ID NO: 2284884 - RNA, 15 nt, Human
cuguuguacauuuau

SEQ ID NO: 2284885 - RNA, 17 nt, Human
cuguuguacauuuauga

SEQ ID NO: 2284886 - RNA, 18 nt, Human
cuguuguacauuuaugau

SEQ ID NO: 2284887 - RNA, 19 nt, Human
cuguuguacauuuaugauu

SEQ ID NO: 2284888 - RNA, 22 nt, Human
cuguuguaacuaggcucagaga

SEQ ID NO: 2284889 - RNA, 12 nt, Human
cuguuguacauu

SEQ ID NO: 2284890 - RNA, 13 nt, Human
cuguuguacauuu

SEQ ID NO: 2284891 - RNA, 14 nt, Human
cuguuguacauuua

SEQ ID NO: 2284892 - RNA, 20 nt, Human
cuguuuaaauguuuuucuau

SEQ ID NO: 2284893 - RNA, 23 nt, Human
cuguuuaaauguuuuucuaugua

SEQ ID NO: 2284894 - RNA, 12 nt, Human
cuguuuaagaga

SEQ ID NO: 2284895 - RNA, 14 nt, Human
cuguuuaagagaca

SEQ ID NO: 2284896 - RNA, 21 nt, Human
cuuaaaaaugguuuaaauggu

SEQ ID NO: 2284897 - RNA, 16 nt, Human
cuuacaagccagcugg

SEQ ID NO: 2284898 - RNA, 17 nt, Human
cuuacaagccagcugga

SEQ ID NO: 2284899 - RNA, 16 nt, Human
cuuacaauucccugcu

SEQ ID NO: 2284900 - RNA, 18 nt, Human
cuuacaagccuaagaauc

SEQ ID NO: 2284901 - RNA, 21 nt, Human
cuuacauuagcaguuugcuuu

SEQ ID NO: 2284902 - RNA, 22 nt, Human
cuuacauuagcaguuugcuuug

SEQ ID NO: 2284903 - RNA, 22 nt, Human
cuuacaauuuuuuuaauuuugu

SEQ ID NO: 2284904 - RNA, 23 nt, Human
cuuacaauuuuuuuaauuuugua

SEQ ID NO: 2284905 - RNA, 19 nt, Human
cuuacaauucccugcuguc

SEQ ID NO: 2284906 - RNA, 20 nt, Human
cuuacaauucccugcugucg

SEQ ID NO: 2284907 - RNA, 20 nt, Human
cuuacaauuuuuuuaauuuu

SEQ ID NO: 2284908 - RNA, 21 nt, Human
cuuacaauuuuuuuaauuuug

SEQ ID NO: 2284909 - RNA, 20 nt, Human
cuuacauuuuacuuuuuccu

SEQ ID NO: 2284910 - RNA, 14 nt, Human
cuuaccaacuuucu

SEQ ID NO: 2284911 - RNA, 14 nt, Human
cuuacauuuuuaca

SEQ ID NO: 2284912 - RNA, 17 nt, Human
cuuacauuuuuacaaua

SEQ ID NO: 2284913 - RNA, 15 nt, Human
cuuacauugugaaac

SEQ ID NO: 2284914 - RNA, 20 nt, Human
cuuacauuguucaauuagaa

SEQ ID NO: 2284915 - RNA, 12 nt, Human
cuuacauuuccu

SEQ ID NO: 2284916 - RNA, 13 nt, Human
cuuacauuuccug

SEQ ID NO: 2284917 - RNA, 15 nt, Human
cuuaccagcagagca

SEQ ID NO: 2284918 - RNA, 22 nt, Human
cuuacauuuuuacaauaaauaa

SEQ ID NO: 2284919 - RNA, 15 nt, Human
cuuaccaacuuucug

SEQ ID NO: 2284920 - RNA, 16 nt, Human
cuuaccaacuuucugu

SEQ ID NO: 2284921 - RNA, 17 nt, Human
cuuaccaacuuucugua

SEQ ID NO: 2284922 - RNA, 19 nt, Human
cuuaccaacuuucuguaaa

SEQ ID NO: 2284923 - RNA, 13 nt, Human
cuuaccagaagcu

SEQ ID NO: 2284924 - RNA, 21 nt, Human
cuuaccagauaaugcuacuuu

SEQ ID NO: 2284925 - RNA, 14 nt, Human
cuuaaaacaacacu

SEQ ID NO: 2284926 - RNA, 16 nt, Human
cuguuuaauauuuaaa

SEQ ID NO: 2284927 - RNA, 18 nt, Human
cuguuuaauauuuaaaca

SEQ ID NO: 2284928 - RNA, 20 nt, Human
cuguuuaauauuuaaacagc

SEQ ID NO: 2284929 - RNA, 15 nt, Human
cuuaaaaauguaaau

SEQ ID NO: 2284930 - RNA, 16 nt, Human
cuuaaaaauguaaaua

SEQ ID NO: 2284931 - RNA, 17 nt, Human
cuuaaaaauguaaauau

SEQ ID NO: 2284932 - RNA, 18 nt, Human
cuuaaaaauguaaauauu

SEQ ID NO: 2284933 - RNA, 21 nt, Human
cuuaauuuugguuguauucuu

SEQ ID NO: 2284934 - RNA, 23 nt, Human
cuuaauuuugguuguauucuuug

SEQ ID NO: 2284935 - RNA, 20 nt, Human
cuuaauuuugguuguauucu

SEQ ID NO: 2284936 - RNA, 22 nt, Human
cuuaaauaauaaagaucaugua

SEQ ID NO: 2284937 - RNA, 21 nt, Human
cuuaaauaauaaacaguggaa

SEQ ID NO: 2284938 - RNA, 13 nt, Human
cuuaaauaauaaa

SEQ ID NO: 2284939 - RNA, 13 nt, Human
cuuaaaaccaaag

SEQ ID NO: 2284940 - RNA, 12 nt, Human
cuguucacagcc

SEQ ID NO: 2284941 - RNA, 16 nt, Human
cuguuauuucuauuuu

SEQ ID NO: 2284942 - RNA, 12 nt, Human
cuguucaagagc

SEQ ID NO: 2284943 - RNA, 17 nt, Human
cuguucaauguuuaaug

SEQ ID NO: 2284944 - RNA, 21 nt, Human
cuguucaagagcacacuuggc

SEQ ID NO: 2284945 - RNA, 23 nt, Human
cuguucaagagcacacuuggccc

SEQ ID NO: 2284946 - RNA, 17 nt, Human
cuguuauuucuauuuuu

SEQ ID NO: 2284947 - RNA, 20 nt, Human
cuguuauuuauaaucacuuu

SEQ ID NO: 2284948 - RNA, 14 nt, Human
cuguuauuuauaau

SEQ ID NO: 2284949 - RNA, 14 nt, Human
cuguuauuuagacu

SEQ ID NO: 2284950 - RNA, 16 nt, Human
cuguuauuuagacuca

SEQ ID NO: 2284951 - RNA, 14 nt, Human
cuguuauaacucug

SEQ ID NO: 2284952 - RNA, 15 nt, Human
cuuaggaagaauuuu

SEQ ID NO: 2284953 - RNA, 17 nt, Human
cuuaggaagagaaacca

SEQ ID NO: 2284954 - RNA, 16 nt, Human
cuuagcuuuuuaauug

SEQ ID NO: 2284955 - RNA, 17 nt, Human
cuuagcuuuuuaauugu

SEQ ID NO: 2284956 - RNA, 22 nt, Human
cuuaggaagagaaaccagggag

SEQ ID NO: 2284957 - RNA, 11 nt, Human
cuuaggaagga

SEQ ID NO: 2284958 - RNA, 20 nt, Human
cuuaggacagggucccugcu

SEQ ID NO: 2284959 - RNA, 15 nt, Human
cuuaggagagaccga

SEQ ID NO: 2284960 - RNA, 15 nt, Human
cuuaggcagggaagu

SEQ ID NO: 2284961 - RNA, 19 nt, Human
cuuaggcaugacuguagaa

SEQ ID NO: 2284962 - RNA, 15 nt, Human
cuuaggccagcacca

SEQ ID NO: 2284963 - RNA, 14 nt, Human
cuuaggcagggaag

SEQ ID NO: 2284964 - RNA, 18 nt, Human
cuuaggaugugugcaugu

SEQ ID NO: 2284965 - RNA, 22 nt, Human
cuuaggaugugugcaugugugu

SEQ ID NO: 2284966 - RNA, 16 nt, Human
cuuaggagcagagcuc

SEQ ID NO: 2284967 - RNA, 18 nt, Human
cuuaggagcagagcucug

SEQ ID NO: 2284968 - RNA, 14 nt, Human
cuuaggaugugugc

SEQ ID NO: 2284969 - RNA, 16 nt, Human
cuuaggaugugugcau

SEQ ID NO: 2284970 - RNA, 19 nt, Human
cuuagggaaggauacaaaa

SEQ ID NO: 2284971 - RNA, 17 nt, Human
cuuaggccuuccucucu

SEQ ID NO: 2284972 - RNA, 15 nt, Human
cuuaggccuuccucu

SEQ ID NO: 2284973 - RNA, 13 nt, Human
cuuaggccuuccu

SEQ ID NO: 2284974 - RNA, 12 nt, Human
cuuaggccuucc

SEQ ID NO: 2284975 - RNA, 21 nt, Human
cuuagggaaggauacaaaagc

SEQ ID NO: 2284976 - RNA, 23 nt, Human
cuuaggccuuccucucuccagau

SEQ ID NO: 2284977 - RNA, 16 nt, Human
cuuaggggcugcugac

SEQ ID NO: 2284978 - RNA, 15 nt, Human
cuuagggcaccaggg

SEQ ID NO: 2284979 - RNA, 14 nt, Human
cuuagcugagugga

SEQ ID NO: 2284980 - RNA, 14 nt, Human
cuuagcugucugcu

SEQ ID NO: 2284981 - RNA, 13 nt, Human
cuuagcugggaga

SEQ ID NO: 2284982 - RNA, 17 nt, Human
cuuagcuccccuccaac

SEQ ID NO: 2284983 - RNA, 17 nt, Human
cuuagcucuuaauuguu

SEQ ID NO: 2284984 - RNA, 11 nt, Human
cuuagcugagu

SEQ ID NO: 2284985 - RNA, 23 nt, Human
cuuagcucauucuccuuguguua

SEQ ID NO: 2284986 - RNA, 14 nt, Human
cuuagcuccccucc

SEQ ID NO: 2284987 - RNA, 14 nt, Human
cuuagcuaucagaa

SEQ ID NO: 2284988 - RNA, 20 nt, Human
cuuagcuuagaccucagccu

SEQ ID NO: 2284989 - RNA, 19 nt, Human
cuuagcuuagaccucagcc

SEQ ID NO: 2284990 - RNA, 18 nt, Human
cuuagcuuagaccucagc

SEQ ID NO: 2284991 - RNA, 17 nt, Human
cuuagcuuagaccucag

SEQ ID NO: 2284992 - RNA, 16 nt, Human
cuuagcuuagaccuca

SEQ ID NO: 2284993 - RNA, 15 nt, Human
cuuagcuuagaccuc

SEQ ID NO: 2284994 - RNA, 14 nt, Human
cuuagcuuagaccu

SEQ ID NO: 2284995 - RNA, 17 nt, Human
cuuagcugucugcucag

SEQ ID NO: 2284996 - RNA, 22 nt, Human
cuuagcuuagaccucagccugu

SEQ ID NO: 2284997 - RNA, 21 nt, Human
cuuagcuuagaccucagccug

SEQ ID NO: 2284998 - RNA, 23 nt, Human
cuuagcuuagaccucagccugug

SEQ ID NO: 2284999 - RNA, 23 nt, Human
cuuagcuucuauuauagccacau

SEQ ID NO: 2285000 - RNA, 18 nt, Human
cuuagcuuugcucugcca

SEQ ID NO: 2285001 - RNA, 14 nt, Human
cuuagcuuuuuaau

SEQ ID NO: 2285002 - RNA, 18 nt, Human
cuuagcauguguugaaaa

SEQ ID NO: 2285003 - RNA, 14 nt, Human
cuuaccaugugccu

SEQ ID NO: 2285004 - RNA, 16 nt, Human
cuuagcauguuugcug

SEQ ID NO: 2285005 - RNA, 17 nt, Human
cuuagcauguuugcuga

SEQ ID NO: 2285006 - RNA, 18 nt, Human
cuuagcauguuugcugaa

SEQ ID NO: 2285007 - RNA, 23 nt, Human
cuuacccaucugcaccccccugg

SEQ ID NO: 2285008 - RNA, 13 nt, Human
cuuaccauuaaag

SEQ ID NO: 2285009 - RNA, 15 nt, Human
cuuaccauaugugcu

SEQ ID NO: 2285010 - RNA, 13 nt, Human
cuuaccaggaagc

SEQ ID NO: 2285011 - RNA, 16 nt, Human
cuuaccagcagagcac

SEQ ID NO: 2285012 - RNA, 15 nt, Human
cuuagccucccugaa

SEQ ID NO: 2285013 - RNA, 14 nt, Human
cuuagccucccuga

SEQ ID NO: 2285014 - RNA, 14 nt, Human
cuuagccuccugac

SEQ ID NO: 2285015 - RNA, 17 nt, Human
cuuagccuccugaccug

SEQ ID NO: 2285016 - RNA, 21 nt, Human
cuuagccuccugaccugaggc

SEQ ID NO: 2285017 - RNA, 22 nt, Human
cuuagccuccugaccugaggcu

SEQ ID NO: 2285018 - RNA, 11 nt, Human
cuuagccuccc

SEQ ID NO: 2285019 - RNA, 18 nt, Human
cuuagcccccacccacuu

SEQ ID NO: 2285020 - RNA, 20 nt, Human
cuuagcccccacccacuucc

SEQ ID NO: 2285021 - RNA, 13 nt, Human
cuuagcccccacc

SEQ ID NO: 2285022 - RNA, 17 nt, Human
cuuagcccccacccacu

SEQ ID NO: 2285023 - RNA, 22 nt, Human
cuuagcucauucuccuuguguu

SEQ ID NO: 2285024 - RNA, 15 nt, Human
cugucgcccagucug

SEQ ID NO: 2285025 - RNA, 17 nt, Human
cuguccuggugucacuu

SEQ ID NO: 2285026 - RNA, 14 nt, Human
cuguccuguacauu

SEQ ID NO: 2285027 - RNA, 17 nt, Human
cugucgccuuagcaugu

SEQ ID NO: 2285028 - RNA, 22 nt, Human
cuguccuguacauugugggaug

SEQ ID NO: 2285029 - RNA, 18 nt, Human
cugucgccuuagcauguu

SEQ ID NO: 2285030 - RNA, 19 nt, Human
cugucgccuuagcauguuu

SEQ ID NO: 2285031 - RNA, 16 nt, Human
cugucgcccagucugg

SEQ ID NO: 2285032 - RNA, 19 nt, Human
cugucauaagaaugaauaa

SEQ ID NO: 2285033 - RNA, 16 nt, Human
cugucauagaaauuac

SEQ ID NO: 2285034 - RNA, 14 nt, Human
cugucauagaaauu

SEQ ID NO: 2285035 - RNA, 13 nt, Human
cugucacaccagc

SEQ ID NO: 2285036 - RNA, 15 nt, Human
cugucacaccagcca

SEQ ID NO: 2285037 - RNA, 16 nt, Human
cugucacaccagccau

SEQ ID NO: 2285038 - RNA, 17 nt, Human
cugucagugccgccgcc

SEQ ID NO: 2285039 - RNA, 18 nt, Human
cugucagugccgccgccu

SEQ ID NO: 2285040 - RNA, 22 nt, Human
cugucagugccgccgccucgcc

SEQ ID NO: 2285041 - RNA, 15 nt, Human
cugucaucaauugaa

SEQ ID NO: 2285042 - RNA, 17 nt, Human
cugucaauuucccugac

SEQ ID NO: 2285043 - RNA, 18 nt, Human
cugucaauuucccugacu

SEQ ID NO: 2285044 - RNA, 19 nt, Human
cugucaauuucccugacuc

SEQ ID NO: 2285045 - RNA, 15 nt, Human
cuguagucccagcca

SEQ ID NO: 2285046 - RNA, 17 nt, Human
cuguagucccagccacu

SEQ ID NO: 2285047 - RNA, 18 nt, Human
cuguagucccagccacuc

SEQ ID NO: 2285048 - RNA, 23 nt, Human
cuguagucccagccacucgggag

SEQ ID NO: 2285049 - RNA, 23 nt, Human
cugucaauuacaggaaguacugg

SEQ ID NO: 2285050 - RNA, 19 nt, Human
cugucaauuacaggaagua

SEQ ID NO: 2285051 - RNA, 20 nt, Human
cugucaauuacaggaaguac

SEQ ID NO: 2285052 - RNA, 17 nt, Human
cuguccuccaagccagc

SEQ ID NO: 2285053 - RNA, 15 nt, Human
cuguccuccaagcca

SEQ ID NO: 2285054 - RNA, 16 nt, Human
cuguccucccaucccc

SEQ ID NO: 2285055 - RNA, 18 nt, Human
cuguccucccauccccug

SEQ ID NO: 2285056 - RNA, 19 nt, Human
cuguccucccauccccugg

SEQ ID NO: 2285057 - RNA, 19 nt, Human
cuguccuccuggugggucc

SEQ ID NO: 2285058 - RNA, 20 nt, Human
cuguccucucuggcugggga

SEQ ID NO: 2285059 - RNA, 21 nt, Human
cuguccuccugguggguccag

SEQ ID NO: 2285060 - RNA, 23 nt, Human
cuguccuccucggaucaccgaga

SEQ ID NO: 2285061 - RNA, 12 nt, Human
cuguccuccucg

SEQ ID NO: 2285062 - RNA, 14 nt, Human
cuguccuccuggug

SEQ ID NO: 2285063 - RNA, 16 nt, Human
cuguccuccugguggg

SEQ ID NO: 2285064 - RNA, 21 nt, Human
cuguccucccauccccuggac

SEQ ID NO: 2285065 - RNA, 21 nt, Human
cuguccugggagugagcuggu

SEQ ID NO: 2285066 - RNA, 15 nt, Human
cuguccucuucugca

SEQ ID NO: 2285067 - RNA, 18 nt, Human
cuguccugggccugcaga

SEQ ID NO: 2285068 - RNA, 11 nt, Human
cuguccugggc

SEQ ID NO: 2285069 - RNA, 12 nt, Human
cuguccugggcg

SEQ ID NO: 2285070 - RNA, 14 nt, Human
cuguccugggccug

SEQ ID NO: 2285071 - RNA, 13 nt, Human
cuguccugggccu

SEQ ID NO: 2285072 - RNA, 13 nt, Human
cuguccugggcgc

SEQ ID NO: 2285073 - RNA, 18 nt, Human
cuguccugggcgcccugg

SEQ ID NO: 2285074 - RNA, 19 nt, Human
cuguccugggcgcccugga

SEQ ID NO: 2285075 - RNA, 21 nt, Human
cuguccugggcgcccuggaag

SEQ ID NO: 2285076 - RNA, 22 nt, Human
cuguccugggcgcccuggaagc

SEQ ID NO: 2285077 - RNA, 23 nt, Human
cuguccugggcgcccuggaagcc

SEQ ID NO: 2285078 - RNA, 14 nt, Human
cuguccugggcugg

SEQ ID NO: 2285079 - RNA, 18 nt, Human
cuguccugggcugguggc

SEQ ID NO: 2285080 - RNA, 17 nt, Human
cuguacuguucuguguc

SEQ ID NO: 2285081 - RNA, 16 nt, Human
cuguacuuaauaaauu

SEQ ID NO: 2285082 - RNA, 13 nt, Human
cuguacuuaauaa

SEQ ID NO: 2285083 - RNA, 20 nt, Human
cuguacuguucugugucuuu

SEQ ID NO: 2285084 - RNA, 15 nt, Human
cuguacucuuagaug

SEQ ID NO: 2285085 - RNA, 20 nt, Human
cuguacugauuuuuguaaga

SEQ ID NO: 2285086 - RNA, 22 nt, Human
cuguacugauuuuuguaagaca

SEQ ID NO: 2285087 - RNA, 15 nt, Human
cuguaacucuaaaag

SEQ ID NO: 2285088 - RNA, 19 nt, Human
cuguaacucuaaaagaucc

SEQ ID NO: 2285089 - RNA, 16 nt, Human
cuguaacacuuuacaa

SEQ ID NO: 2285090 - RNA, 15 nt, Human
cuguaaccucuucag

SEQ ID NO: 2285091 - RNA, 19 nt, Human
cuguaacauacuggccugg

SEQ ID NO: 2285092 - RNA, 23 nt, Human
cuguaaccucuucagaggcccuc

SEQ ID NO: 2285093 - RNA, 22 nt, Human
cuguaaccucuucagaggcccu

SEQ ID NO: 2285094 - RNA, 20 nt, Human
cuguaaccucuucagaggcc

SEQ ID NO: 2285095 - RNA, 19 nt, Human
cuguaaccucuucagaggc

SEQ ID NO: 2285096 - RNA, 19 nt, Human
cuguagaaaagggaacuga

SEQ ID NO: 2285097 - RNA, 15 nt, Human
cuguacuucaaguua

SEQ ID NO: 2285098 - RNA, 13 nt, Human
cuguagaaauggu

SEQ ID NO: 2285099 - RNA, 17 nt, Human
cuguagaaaugguugua

SEQ ID NO: 2285100 - RNA, 19 nt, Human
cuguagaaaugguuguauu

SEQ ID NO: 2285101 - RNA, 15 nt, Human
cuguagaagagggau

SEQ ID NO: 2285102 - RNA, 21 nt, Human
cuguagagcuagaacauggag

SEQ ID NO: 2285103 - RNA, 16 nt, Human
cuguagagggcccugg

SEQ ID NO: 2285104 - RNA, 22 nt, Human
cuguagaccuagggaggaccuu

SEQ ID NO: 2285105 - RNA, 18 nt, Human
cuguacuuaauaaauuca

SEQ ID NO: 2285106 - RNA, 20 nt, Human
cuguagaaaugguuguauua

SEQ ID NO: 2285107 - RNA, 13 nt, Human
cuguagaguggga

SEQ ID NO: 2285108 - RNA, 18 nt, Human
cuguaguagcccuuucug

SEQ ID NO: 2285109 - RNA, 19 nt, Human
cuguaguagcccuuucugu

SEQ ID NO: 2285110 - RNA, 12 nt, Human
cuguagucccag

SEQ ID NO: 2285111 - RNA, 14 nt, Human
cuguagucccagcc

SEQ ID NO: 2285112 - RNA, 21 nt, Human
cuguaguagcccuuucugugu

SEQ ID NO: 2285113 - RNA, 20 nt, Human
cuguaguaaacuauuuaucu

SEQ ID NO: 2285114 - RNA, 19 nt, Human
cuguaguaaacuauuuauc

SEQ ID NO: 2285115 - RNA, 18 nt, Human
cuguaguaaacuauuuau

SEQ ID NO: 2285116 - RNA, 24 nt, Human
cuguaggguaauuaguaacaugug

SEQ ID NO: 2285117 - RNA, 17 nt, Human
cuguagagggcccuggu

SEQ ID NO: 2285118 - RNA, 14 nt, Human
cugguugucauuuu

SEQ ID NO: 2285119 - RNA, 13 nt, Human
cugguugucauuu

SEQ ID NO: 2285120 - RNA, 21 nt, Human
cugguugguguugcagaaggu

SEQ ID NO: 2285121 - RNA, 20 nt, Human
cugguugguguugcagaagg

SEQ ID NO: 2285122 - RNA, 16 nt, Human
cuggugacaccagccu

SEQ ID NO: 2285123 - RNA, 15 nt, Human
cuggugacaccagcc

SEQ ID NO: 2285124 - RNA, 17 nt, Human
cuggugacaccagccuu

SEQ ID NO: 2285125 - RNA, 14 nt, Human
cuggugacaccagc

SEQ ID NO: 2285126 - RNA, 15 nt, Human
cuggugaagcucacu

SEQ ID NO: 2285127 - RNA, 22 nt, Human
cuggugacaugucuuuucuugc

SEQ ID NO: 2285128 - RNA, 15 nt, Human
cuggucuugagaugu

SEQ ID NO: 2285129 - RNA, 14 nt, Human
cuggucuugagaug

SEQ ID NO: 2285130 - RNA, 18 nt, Human
cuggucuuguggaauugg

SEQ ID NO: 2285131 - RNA, 20 nt, Human
cuggucuuguggaauuggga

SEQ ID NO: 2285132 - RNA, 15 nt, Human
cuggucuuuccucug

SEQ ID NO: 2285133 - RNA, 20 nt, Human
cuggugaagcucacuucugg

SEQ ID NO: 2285134 - RNA, 20 nt, Human
cuguaaagagaccuaccuca

SEQ ID NO: 2285135 - RNA, 22 nt, Human
cuguaaagagaccuaccucagg

SEQ ID NO: 2285136 - RNA, 23 nt, Human
cuguaaagagaccuaccucaggu

SEQ ID NO: 2285137 - RNA, 23 nt, Human
cuguaaagaaagagagaaaauaa

SEQ ID NO: 2285138 - RNA, 22 nt, Human
cuguaaagaaagagagaaaaua

SEQ ID NO: 2285139 - RNA, 21 nt, Human
cuguaaagaaagagagaaaau

SEQ ID NO: 2285140 - RNA, 20 nt, Human
cuguaaagaaagagagaaaa

SEQ ID NO: 2285141 - RNA, 19 nt, Human
cuguaaagaaagagagaaa

SEQ ID NO: 2285142 - RNA, 18 nt, Human
cuguaaagaaagagagaa

SEQ ID NO: 2285143 - RNA, 20 nt, Human
cuguaaacuguguauuccaa

SEQ ID NO: 2285144 - RNA, 14 nt, Human
cuguaaacugugua

SEQ ID NO: 2285145 - RNA, 22 nt, Human
cuguaaacucaaaacuuaacau

SEQ ID NO: 2285146 - RNA, 13 nt, Human
cuguaaagaaaga

SEQ ID NO: 2285147 - RNA, 17 nt, Human
cuguaaagaaagagaga

SEQ ID NO: 2285148 - RNA, 16 nt, Human
cuguaaagaaagagag

SEQ ID NO: 2285149 - RNA, 15 nt, Human
cuguaaagaaagaga

SEQ ID NO: 2285150 - RNA, 14 nt, Human
cuguaaagaaagag

SEQ ID NO: 2285151 - RNA, 17 nt, Human
cugguuucacuggccca

SEQ ID NO: 2285152 - RNA, 13 nt, Human
cugguuucacugg

SEQ ID NO: 2285153 - RNA, 18 nt, Human
cugguuucacuggcccaa

SEQ ID NO: 2285154 - RNA, 23 nt, Human
cugguuucauuucuacugugacu

SEQ ID NO: 2285155 - RNA, 15 nt, Human
cugguugucauuuuu

SEQ ID NO: 2285156 - RNA, 15 nt, Human
cugguuuacacuuua

SEQ ID NO: 2285157 - RNA, 14 nt, Human
cugguuuccugccc

SEQ ID NO: 2285158 - RNA, 13 nt, Human
cugguuuccugcc

SEQ ID NO: 2285159 - RNA, 13 nt, Human
cuguaaacugugu

SEQ ID NO: 2285160 - RNA, 12 nt, Human
cuguaaacugug

SEQ ID NO: 2285161 - RNA, 15 nt, Human
cugugacccccagcu

SEQ ID NO: 2285162 - RNA, 13 nt, Human
cugugacccccag

SEQ ID NO: 2285163 - RNA, 14 nt, Human
cugugaccucaggc

SEQ ID NO: 2285164 - RNA, 17 nt, Human
cugugaccucaggcacu

SEQ ID NO: 2285165 - RNA, 17 nt, Human
cugugaccucuccccug

SEQ ID NO: 2285166 - RNA, 22 nt, Human
cugugaccucaggcacuagccu

SEQ ID NO: 2285167 - RNA, 23 nt, Human
cugugaccucaggcacuagccuu

SEQ ID NO: 2285168 - RNA, 21 nt, Human
cugugacccccagcuccggcc

SEQ ID NO: 2285169 - RNA, 18 nt, Human
cugugacccccagcuccg

SEQ ID NO: 2285170 - RNA, 17 nt, Human
cugugacccccagcucc

SEQ ID NO: 2285171 - RNA, 16 nt, Human
cugugacccccagcuc

SEQ ID NO: 2285172 - RNA, 22 nt, Human
cugugaccugccccgcccagcu

SEQ ID NO: 2285173 - RNA, 16 nt, Human
cugugaccugccccgc

SEQ ID NO: 2285174 - RNA, 19 nt, Human
cugugccuucuuuugauua

SEQ ID NO: 2285175 - RNA, 15 nt, Human
cugugccugaauauu

SEQ ID NO: 2285176 - RNA, 17 nt, Human
cugugccugaccuugag

SEQ ID NO: 2285177 - RNA, 19 nt, Human
cugugccugaccuugagga

SEQ ID NO: 2285178 - RNA, 16 nt, Human
cugugccuuuugccau

SEQ ID NO: 2285179 - RNA, 21 nt, Human
cugugccuuugaguuuccuca

SEQ ID NO: 2285180 - RNA, 18 nt, Human
cugugccugccugggagu

SEQ ID NO: 2285181 - RNA, 14 nt, Human
cugugcgcugacaa

SEQ ID NO: 2285182 - RNA, 12 nt, Human
cugugcugcccu

SEQ ID NO: 2285183 - RNA, 13 nt, Human
cugugcugcccug

SEQ ID NO: 2285184 - RNA, 14 nt, Human
cugugcugcccugc

SEQ ID NO: 2285185 - RNA, 21 nt, Human
cugugcugcccugcccaccug

SEQ ID NO: 2285186 - RNA, 14 nt, Human
cugugucacuacgu

SEQ ID NO: 2285187 - RNA, 14 nt, Human
cugugucacuggcu

SEQ ID NO: 2285188 - RNA, 15 nt, Human
cugugucacuggcug

SEQ ID NO: 2285189 - RNA, 16 nt, Human
cugugucacuggcugc

SEQ ID NO: 2285190 - RNA, 17 nt, Human
cugugucacuggcugcc

SEQ ID NO: 2285191 - RNA, 19 nt, Human
cugugucagcauagaagua

SEQ ID NO: 2285192 - RNA, 17 nt, Human
cugugucagcauagaag

SEQ ID NO: 2285193 - RNA, 15 nt, Human
cugugcugcccugcc

SEQ ID NO: 2285194 - RNA, 17 nt, Human
cugugcugcccugccca

SEQ ID NO: 2285195 - RNA, 18 nt, Human
cugugcugcccugcccac

SEQ ID NO: 2285196 - RNA, 19 nt, Human
cugugcugcccugcccacc

SEQ ID NO: 2285197 - RNA, 22 nt, Human
cuguguccuugcaccugcaucc

SEQ ID NO: 2285198 - RNA, 11 nt, Human
cugugucuaaa

SEQ ID NO: 2285199 - RNA, 12 nt, Human
cugugucuaaac

SEQ ID NO: 2285200 - RNA, 13 nt, Human
cugugucuaaacu

SEQ ID NO: 2285201 - RNA, 16 nt, Human
cugugucguagccaag

SEQ ID NO: 2285202 - RNA, 19 nt, Human
cuguguccuugcaccugca

SEQ ID NO: 2285203 - RNA, 18 nt, Human
cuguguccuugcaccugc

SEQ ID NO: 2285204 - RNA, 16 nt, Human
cuguguccuugcaccu

SEQ ID NO: 2285205 - RNA, 14 nt, Human
cuguguccuugcac

SEQ ID NO: 2285206 - RNA, 15 nt, Human
cuguguccuucccug

SEQ ID NO: 2285207 - RNA, 16 nt, Human
cuguguccuucccugc

SEQ ID NO: 2285208 - RNA, 23 nt, Human
cuguguccuggugcucucugcca

SEQ ID NO: 2285209 - RNA, 19 nt, Human
cuguguccuggugcucucu

SEQ ID NO: 2285210 - RNA, 20 nt, Human
cuguguccuggugcucucug

SEQ ID NO: 2285211 - RNA, 23 nt, Human
cugugucccaugacccaccccug

SEQ ID NO: 2285212 - RNA, 13 nt, Human
cuguguccuggug

SEQ ID NO: 2285213 - RNA, 14 nt, Human
cuguguccuggugc

SEQ ID NO: 2285214 - RNA, 15 nt, Human
cuguguccuggugcu

SEQ ID NO: 2285215 - RNA, 17 nt, Human
cuguguccuggugcucu

SEQ ID NO: 2285216 - RNA, 18 nt, Human
cugugucacuggcugccu

SEQ ID NO: 2285217 - RNA, 19 nt, Human
cugugucacuggcugccuc

SEQ ID NO: 2285218 - RNA, 20 nt, Human
cugugucacuggcugccucc

SEQ ID NO: 2285219 - RNA, 21 nt, Human
cugugucacuggcugccucca

SEQ ID NO: 2285220 - RNA, 22 nt, Human
cugugucacuggcugccuccac

SEQ ID NO: 2285221 - RNA, 20 nt, Human
cugugucccaugacccaccc

SEQ ID NO: 2285222 - RNA, 21 nt, Human
cugugucccaugacccacccc

SEQ ID NO: 2285223 - RNA, 22 nt, Human
cugugucccaugacccaccccu

SEQ ID NO: 2285224 - RNA, 18 nt, Human
cuguuagucauuugcuga

SEQ ID NO: 2285225 - RNA, 14 nt, Human
cuguuagucauuug

SEQ ID NO: 2285226 - RNA, 15 nt, Human
cuguuagucauuugc

SEQ ID NO: 2285227 - RNA, 13 nt, Human
cuguuagucauuu

SEQ ID NO: 2285228 - RNA, 16 nt, Human
cugugucuaaacugca

SEQ ID NO: 2285229 - RNA, 14 nt, Human
cugugucuaaacug

SEQ ID NO: 2285230 - RNA, 15 nt, Human
cugugucuaaacugc

SEQ ID NO: 2285231 - RNA, 13 nt, Human
cuguuauaaucuu

SEQ ID NO: 2285232 - RNA, 19 nt, Human
cuguuauaaucuuucacag

SEQ ID NO: 2285233 - RNA, 20 nt, Human
cugggcaccggggccucgga

SEQ ID NO: 2285234 - RNA, 17 nt, Human
cugggcauugcuuucca

SEQ ID NO: 2285235 - RNA, 16 nt, Human
cugggcauugcuuucc

SEQ ID NO: 2285236 - RNA, 14 nt, Human
cugggcauugcuuu

SEQ ID NO: 2285237 - RNA, 15 nt, Human
cugggcagaaggaag

SEQ ID NO: 2285238 - RNA, 19 nt, Human
cugggcaccuggggagugg

SEQ ID NO: 2285239 - RNA, 17 nt, Human
cugggcaccuggggagu

SEQ ID NO: 2285240 - RNA, 16 nt, Human
cugggcaccuggggag

SEQ ID NO: 2285241 - RNA, 20 nt, Human
cugggcaccuggggaguggg

SEQ ID NO: 2285242 - RNA, 12 nt, Human
cugggcagaagg

SEQ ID NO: 2285243 - RNA, 17 nt, Human
cuggggagugggacaga

SEQ ID NO: 2285244 - RNA, 20 nt, Human
cuggggagcccgucucagug

SEQ ID NO: 2285245 - RNA, 12 nt, Human
cuggggagcccg

SEQ ID NO: 2285246 - RNA, 15 nt, Human
cuggggagcccgucu

SEQ ID NO: 2285247 - RNA, 20 nt, Human
cuggggagugggacagaguc

SEQ ID NO: 2285248 - RNA, 21 nt, Human
cuggggcacuuggcagcgcgg

SEQ ID NO: 2285249 - RNA, 17 nt, Human
cuggggaugucucucau

SEQ ID NO: 2285250 - RNA, 16 nt, Human
cuggggaugucucuca

SEQ ID NO: 2285251 - RNA, 14 nt, Human
cuggggagaaagua

SEQ ID NO: 2285252 - RNA, 14 nt, Human
cugggccagaauuu

SEQ ID NO: 2285253 - RNA, 12 nt, Human
cugggcauuuuc

SEQ ID NO: 2285254 - RNA, 13 nt, Human
cugggccagagua

SEQ ID NO: 2285255 - RNA, 20 nt, Human
cugggccaaguuccucuagu

SEQ ID NO: 2285256 - RNA, 18 nt, Human
cugggccaaguuccucua

SEQ ID NO: 2285257 - RNA, 15 nt, Human
cugggccaaguuccu

SEQ ID NO: 2285258 - RNA, 19 nt, Human
cugggccaacucaccugag

SEQ ID NO: 2285259 - RNA, 21 nt, Human
cugggccaaguuccucuagug

SEQ ID NO: 2285260 - RNA, 18 nt, Human
cugggccacuucugggug

SEQ ID NO: 2285261 - RNA, 12 nt, Human
cugggccagaau

SEQ ID NO: 2285262 - RNA, 13 nt, Human
cuggggcugaagg

SEQ ID NO: 2285263 - RNA, 14 nt, Human
cuggggcugaccuu

SEQ ID NO: 2285264 - RNA, 19 nt, Human
cuggggcucugugcaggga

SEQ ID NO: 2285265 - RNA, 17 nt, Human
cuggggcucugugcagg

SEQ ID NO: 2285266 - RNA, 14 nt, Human
cuggggcucugugc

SEQ ID NO: 2285267 - RNA, 15 nt, Human
cuggggcucugggau

SEQ ID NO: 2285268 - RNA, 14 nt, Human
cuggggcucuggga

SEQ ID NO: 2285269 - RNA, 20 nt, Human
cuggggcuccuuucuccagc

SEQ ID NO: 2285270 - RNA, 23 nt, Human
cuggggcuccuuucuccagccag

SEQ ID NO: 2285271 - RNA, 12 nt, Human
cuggggcucccu

SEQ ID NO: 2285272 - RNA, 14 nt, Human
cuggggcucccuuc

SEQ ID NO: 2285273 - RNA, 22 nt, Human
cuggggcucccuucaucuccag

SEQ ID NO: 2285274 - RNA, 19 nt, Human
cuggggcuccuuucuccag

SEQ ID NO: 2285275 - RNA, 19 nt, Human
cuggggcuaggcuggagcc

SEQ ID NO: 2285276 - RNA, 18 nt, Human
cuggggccacacagaaac

SEQ ID NO: 2285277 - RNA, 18 nt, Human
cuggggcuagggggagcc

SEQ ID NO: 2285278 - RNA, 17 nt, Human
cuggggccacacagaaa

SEQ ID NO: 2285279 - RNA, 15 nt, Human
cuggggccaggcugg

SEQ ID NO: 2285280 - RNA, 15 nt, Human
cuggggccacacaga

SEQ ID NO: 2285281 - RNA, 15 nt, Human
cuggggcagucaccu

SEQ ID NO: 2285282 - RNA, 21 nt, Human
cuggguggggugaggaccacu

SEQ ID NO: 2285283 - RNA, 16 nt, Human
cuggguggggugagga

SEQ ID NO: 2285284 - RNA, 22 nt, Human
cuggguggggcugcuccuccag

SEQ ID NO: 2285285 - RNA, 21 nt, Human
cuggguggggcugcuccucca

SEQ ID NO: 2285286 - RNA, 20 nt, Human
cuggguggggcugcuccucc

SEQ ID NO: 2285287 - RNA, 18 nt, Human
cuggguggggcugcuccu

SEQ ID NO: 2285288 - RNA, 17 nt, Human
cuggguggggcugcucc

SEQ ID NO: 2285289 - RNA, 13 nt, Human
cuggguggggcug

SEQ ID NO: 2285290 - RNA, 15 nt, Human
cuggguucacugcaa

SEQ ID NO: 2285291 - RNA, 15 nt, Human
cuggguggggcagug

SEQ ID NO: 2285292 - RNA, 14 nt, Human
cugggugggcucug

SEQ ID NO: 2285293 - RNA, 15 nt, Human
cugggugggcucugu

SEQ ID NO: 2285294 - RNA, 13 nt, Human
cugggugggcucu

SEQ ID NO: 2285295 - RNA, 23 nt, Human
cuggguggccucgggacaccugc

SEQ ID NO: 2285296 - RNA, 18 nt, Human
cuggggcugaccuuccuc

SEQ ID NO: 2285297 - RNA, 19 nt, Human
cuggguggccucgggacac

SEQ ID NO: 2285298 - RNA, 23 nt, Human
cuggguucagaaaugcugccugc

SEQ ID NO: 2285299 - RNA, 21 nt, Human
cuggguucagaaaugcugccu

SEQ ID NO: 2285300 - RNA, 22 nt, Human
cuggguucagaaaugcugccug

SEQ ID NO: 2285301 - RNA, 12 nt, Human
cugggugggugg

SEQ ID NO: 2285302 - RNA, 15 nt, Human
cuggguggguggugg

SEQ ID NO: 2285303 - RNA, 17 nt, Human
cuggguggguggugggg

SEQ ID NO: 2285304 - RNA, 18 nt, Human
cuggguggguggugggga

SEQ ID NO: 2285305 - RNA, 19 nt, Human
cugggugggugguggggag

SEQ ID NO: 2285306 - RNA, 20 nt, Human
cugggugggugguggggagg

SEQ ID NO: 2285307 - RNA, 22 nt, Human
cugggugggugguggggagggg

SEQ ID NO: 2285308 - RNA, 18 nt, Human
cuggguucagaaaugcug

SEQ ID NO: 2285309 - RNA, 18 nt, Human
cuggguucacugcaaccu

SEQ ID NO: 2285310 - RNA, 20 nt, Human
cuggguucacugcaaccucc

SEQ ID NO: 2285311 - RNA, 19 nt, Human
cuggcagccgugccuucag

SEQ ID NO: 2285312 - RNA, 20 nt, Human
cuggcagccgugccuucagc

SEQ ID NO: 2285313 - RNA, 13 nt, Human
cuggcagccccug

SEQ ID NO: 2285314 - RNA, 12 nt, Human
cuggcagccucc

SEQ ID NO: 2285315 - RNA, 15 nt, Human
cuggcagccucccau

SEQ ID NO: 2285316 - RNA, 14 nt, Human
cuggcagccuccca

SEQ ID NO: 2285317 - RNA, 21 nt, Human
cuggcagccgugccuucagcu

SEQ ID NO: 2285318 - RNA, 22 nt, Human
cuggcagccgugccuucagcuc

SEQ ID NO: 2285319 - RNA, 11 nt, Human
cuggcagccca

SEQ ID NO: 2285320 - RNA, 12 nt, Human
cuggcagccccu

SEQ ID NO: 2285321 - RNA, 15 nt, Human
cuggcagcagagugu

SEQ ID NO: 2285322 - RNA, 14 nt, Human
cuggcagaggaggg

SEQ ID NO: 2285323 - RNA, 19 nt, Human
cuggcagaguugaagacag

SEQ ID NO: 2285324 - RNA, 23 nt, Human
cuggcagaaugcuagcucugagc

SEQ ID NO: 2285325 - RNA, 17 nt, Human
cuggcagaguugaagac

SEQ ID NO: 2285326 - RNA, 18 nt, Human
cuggcagaguugaagaca

SEQ ID NO: 2285327 - RNA, 21 nt, Human
cugggacuuccuugcucuccc

SEQ ID NO: 2285328 - RNA, 16 nt, Human
cugggacuuccuugcu

SEQ ID NO: 2285329 - RNA, 17 nt, Human
cugggacuuccuugcuc

SEQ ID NO: 2285330 - RNA, 18 nt, Human
cugggacuuccuugcucu

SEQ ID NO: 2285331 - RNA, 20 nt, Human
cugggacuuccuugcucucc

SEQ ID NO: 2285332 - RNA, 11 nt, Human
cugggacacag

SEQ ID NO: 2285333 - RNA, 22 nt, Human
cugggaauguauuauucugcag

SEQ ID NO: 2285334 - RNA, 19 nt, Human
cugggaauguauuauucug

SEQ ID NO: 2285335 - RNA, 18 nt, Human
cugggaauguauuauucu

SEQ ID NO: 2285336 - RNA, 13 nt, Human
cugggaauguauu

SEQ ID NO: 2285337 - RNA, 18 nt, Human
cuggcucugcaaugggca

SEQ ID NO: 2285338 - RNA, 18 nt, Human
cugggaauaagugccagg

SEQ ID NO: 2285339 - RNA, 24 nt, Human
cuggcucugagcgccuccauccaa

SEQ ID NO: 2285340 - RNA, 24 nt, Human
cuggcucugcaaugggcacuggga

SEQ ID NO: 2285341 - RNA, 23 nt, Human
cugggaauguauuauucugcagc

SEQ ID NO: 2285342 - RNA, 13 nt, Human
cugggacucagcc

SEQ ID NO: 2285343 - RNA, 14 nt, Human
cugggacucagccu

SEQ ID NO: 2285344 - RNA, 15 nt, Human
cugggacucagccuu

SEQ ID NO: 2285345 - RNA, 16 nt, Human
cugggacucagccuuc

SEQ ID NO: 2285346 - RNA, 17 nt, Human
cugggacucagccuuca

SEQ ID NO: 2285347 - RNA, 14 nt, Human
cugggacuggccag

SEQ ID NO: 2285348 - RNA, 13 nt, Human
cugggacuggcca

SEQ ID NO: 2285349 - RNA, 20 nt, Human
cugggacugagccaguccca

SEQ ID NO: 2285350 - RNA, 14 nt, Human
cugggacuuccuug

SEQ ID NO: 2285351 - RNA, 18 nt, Human
cugggacucagccuucag

SEQ ID NO: 2285352 - RNA, 21 nt, Human
cugggacucagccuucagaca

SEQ ID NO: 2285353 - RNA, 13 nt, Human
cugggacugagcc

SEQ ID NO: 2285354 - RNA, 14 nt, Human
cugggacugagcca

SEQ ID NO: 2285355 - RNA, 15 nt, Human
cugggacugagccag

SEQ ID NO: 2285356 - RNA, 16 nt, Human
cugggacugagccagu

SEQ ID NO: 2285357 - RNA, 18 nt, Human
cuggcccgucauguuccu

SEQ ID NO: 2285358 - RNA, 13 nt, Human
cuggccccugggu

SEQ ID NO: 2285359 - RNA, 21 nt, Human
cuggcccgucauguuccucaa

SEQ ID NO: 2285360 - RNA, 14 nt, Human
cuggccccuggguc

SEQ ID NO: 2285361 - RNA, 13 nt, Human
cuggcccugaggu

SEQ ID NO: 2285362 - RNA, 16 nt, Human
cuggcccucuguguug

SEQ ID NO: 2285363 - RNA, 14 nt, Human
cuggcccugaggug

SEQ ID NO: 2285364 - RNA, 13 nt, Human
cuggcccucugug

SEQ ID NO: 2285365 - RNA, 14 nt, Human
cuggcccucugugu

SEQ ID NO: 2285366 - RNA, 14 nt, Human
cuggcccugcccug

SEQ ID NO: 2285367 - RNA, 17 nt, Human
cuggcccugaggugugg

SEQ ID NO: 2285368 - RNA, 19 nt, Human
cuggcccugaggugugggg

SEQ ID NO: 2285369 - RNA, 20 nt, Human
cuggcccugagguguggggg

SEQ ID NO: 2285370 - RNA, 13 nt, Human
cuggcccugcccu

SEQ ID NO: 2285371 - RNA, 11 nt, Human
cuggcccugcc

SEQ ID NO: 2285372 - RNA, 22 nt, Human
cuggccccucagggucccuggu

SEQ ID NO: 2285373 - RNA, 22 nt, Human
cuggcagccucccauccagggc

SEQ ID NO: 2285374 - RNA, 20 nt, Human
cuggcagccucccauccagg

SEQ ID NO: 2285375 - RNA, 23 nt, Human
cuggccccugagaucucugcagg

SEQ ID NO: 2285376 - RNA, 12 nt, Human
cuggccccuggg

SEQ ID NO: 2285377 - RNA, 22 nt, Human
cuggccccugagaucucugcag

SEQ ID NO: 2285378 - RNA, 18 nt, Human
cuggccccugagaucucu

SEQ ID NO: 2285379 - RNA, 12 nt, Human
cuggcccugccu

SEQ ID NO: 2285380 - RNA, 17 nt, Human
cuggccggucugcaagu

SEQ ID NO: 2285381 - RNA, 20 nt, Human
cuggccggucugcaagucag

SEQ ID NO: 2285382 - RNA, 21 nt, Human
cuggccggucugcaagucaga

SEQ ID NO: 2285383 - RNA, 16 nt, Human
cuggccggucugcaag

SEQ ID NO: 2285384 - RNA, 22 nt, Human
cuggccgggaccccgagccugg

SEQ ID NO: 2285385 - RNA, 16 nt, Human
cuggccgggagccuga

SEQ ID NO: 2285386 - RNA, 15 nt, Human
cuggcccugcccugg

SEQ ID NO: 2285387 - RNA, 19 nt, Human
cuggccgucacuugugggg

SEQ ID NO: 2285388 - RNA, 22 nt, Human
cuggccggucugcaagucagag

SEQ ID NO: 2285389 - RNA, 23 nt, Human
cuggccggucugcaagucagagg

SEQ ID NO: 2285390 - RNA, 15 nt, Human
cuggccgugggccug

SEQ ID NO: 2285391 - RNA, 23 nt, Human
cuggccguugauguuggcuggga

SEQ ID NO: 2285392 - RNA, 14 nt, Human
cuggccuagcauac

SEQ ID NO: 2285393 - RNA, 20 nt, Human
cuggcucucccauuuccuga

SEQ ID NO: 2285394 - RNA, 20 nt, Human
cuggcucuccaagugccaga

SEQ ID NO: 2285395 - RNA, 22 nt, Human
cuggcucuccaagugccagagg

SEQ ID NO: 2285396 - RNA, 15 nt, Human
cuggcucuccaagug

SEQ ID NO: 2285397 - RNA, 16 nt, Human
cuggcucuccaagugc

SEQ ID NO: 2285398 - RNA, 17 nt, Human
cuggcucuccaagugcc

SEQ ID NO: 2285399 - RNA, 19 nt, Human
cuggcucuccaagugccag

SEQ ID NO: 2285400 - RNA, 22 nt, Human
cuggccguugauguuggcuggg

SEQ ID NO: 2285401 - RNA, 17 nt, Human
cuggcucucaugggguc

SEQ ID NO: 2285402 - RNA, 12 nt, Human
cuggcucuccaa

SEQ ID NO: 2285403 - RNA, 13 nt, Human
cuggcucuccaag

SEQ ID NO: 2285404 - RNA, 14 nt, Human
cuggcucuccaagu

SEQ ID NO: 2285405 - RNA, 23 nt, Human
cuggcucuccaagugccagaggu

SEQ ID NO: 2285406 - RNA, 13 nt, Human
cuggcucucucca

SEQ ID NO: 2285407 - RNA, 14 nt, Human
cuggcucucuccag

SEQ ID NO: 2285408 - RNA, 15 nt, Human
cuggcucucuccagg

SEQ ID NO: 2285409 - RNA, 16 nt, Human
cuggcucucuccagga

SEQ ID NO: 2285410 - RNA, 12 nt, Human
cuggcucugagc

SEQ ID NO: 2285411 - RNA, 13 nt, Human
cuggcucugagcg

SEQ ID NO: 2285412 - RNA, 20 nt, Human
cuggcucugagcgccuccau

SEQ ID NO: 2285413 - RNA, 21 nt, Human
cuggcucugagcgccuccauc

SEQ ID NO: 2285414 - RNA, 22 nt, Human
cugcucagggaaaagcagcucu

SEQ ID NO: 2285415 - RNA, 16 nt, Human
cugcucagcuucuccu

SEQ ID NO: 2285416 - RNA, 23 nt, Human
cugcuauauuuucaugacuuuuc

SEQ ID NO: 2285417 - RNA, 23 nt, Human
cugcucagggaaaagcagcucuc

SEQ ID NO: 2285418 - RNA, 18 nt, Human
cugcucaguaaagcacuu

SEQ ID NO: 2285419 - RNA, 12 nt, Human
cugcucaucauu

SEQ ID NO: 2285420 - RNA, 19 nt, Human
cugcucauauugugauucu

SEQ ID NO: 2285421 - RNA, 15 nt, Human
cugcucauauuguga

SEQ ID NO: 2285422 - RNA, 19 nt, Human
cugcucaguaaagcacuug

SEQ ID NO: 2285423 - RNA, 18 nt, Human
cugcugaccuccacagcu

SEQ ID NO: 2285424 - RNA, 16 nt, Human
cugcugaccuccacag

SEQ ID NO: 2285425 - RNA, 18 nt, Human
cugcucagcuucuccugu

SEQ ID NO: 2285426 - RNA, 22 nt, Human
cugcugacccagccuguuuuaa

SEQ ID NO: 2285427 - RNA, 22 nt, Human
cugcucaucauucucugucuca

SEQ ID NO: 2285428 - RNA, 18 nt, Human
cugcucaucauucucugu

SEQ ID NO: 2285429 - RNA, 17 nt, Human
cugcucaucauucucug

SEQ ID NO: 2285430 - RNA, 16 nt, Human
cugcucaucauucucu

SEQ ID NO: 2285431 - RNA, 21 nt, Human
cugcugacuguuuucucuuga

SEQ ID NO: 2285432 - RNA, 18 nt, Human
cugcugacuguuuucucu

SEQ ID NO: 2285433 - RNA, 19 nt, Human
cugcugaccuccacagcuu

SEQ ID NO: 2285434 - RNA, 22 nt, Human
cugcuaggugggccagccccuc

SEQ ID NO: 2285435 - RNA, 21 nt, Human
cugcuaggugggccagccccu

SEQ ID NO: 2285436 - RNA, 20 nt, Human
cugcuaggugggccagcccc

SEQ ID NO: 2285437 - RNA, 16 nt, Human
cugcuaggugggccag

SEQ ID NO: 2285438 - RNA, 15 nt, Human
cugcuaggugggcca

SEQ ID NO: 2285439 - RNA, 23 nt, Human
cugcuaggcgagugccaggacuc

SEQ ID NO: 2285440 - RNA, 20 nt, Human
cugcuaggcgagugccagga

SEQ ID NO: 2285441 - RNA, 22 nt, Human
cugcuaggcgagugccaggacu

SEQ ID NO: 2285442 - RNA, 15 nt, Human
cugcuaggcgagugc

SEQ ID NO: 2285443 - RNA, 18 nt, Human
cugcuaggcgagugccag

SEQ ID NO: 2285444 - RNA, 19 nt, Human
cugcuaggcgagugccagg

SEQ ID NO: 2285445 - RNA, 23 nt, Human
cugcuaggugggccagccccucc

SEQ ID NO: 2285446 - RNA, 14 nt, Human
cugcuauagccugg

SEQ ID NO: 2285447 - RNA, 15 nt, Human
cugcuauagccuggg

SEQ ID NO: 2285448 - RNA, 17 nt, Human
cugcuauauuuucauga

SEQ ID NO: 2285449 - RNA, 19 nt, Human
cugcuauauuuucaugacu

SEQ ID NO: 2285450 - RNA, 15 nt, Human
cugcucagcuucucc

SEQ ID NO: 2285451 - RNA, 16 nt, Human
cugccuguaguuagga

SEQ ID NO: 2285452 - RNA, 15 nt, Human
cugccuguaguuagg

SEQ ID NO: 2285453 - RNA, 23 nt, Human
cugccuguugggccaggagccuc

SEQ ID NO: 2285454 - RNA, 21 nt, Human
cugccuguugggccaggagcc

SEQ ID NO: 2285455 - RNA, 22 nt, Human
cugccuguugggccaggagccu

SEQ ID NO: 2285456 - RNA, 23 nt, Human
cugccuccgcgugaucaaagcca

SEQ ID NO: 2285457 - RNA, 23 nt, Human
cugccucccuucaugcauggaaa

SEQ ID NO: 2285458 - RNA, 21 nt, Human
cugccucccuucaugcaugga

SEQ ID NO: 2285459 - RNA, 19 nt, Human
cugccucccuucaugcaug

SEQ ID NO: 2285460 - RNA, 18 nt, Human
cugccucccuucaugcau

SEQ ID NO: 2285461 - RNA, 17 nt, Human
cugccucccuucaugca

SEQ ID NO: 2285462 - RNA, 15 nt, Human
cugccucccuucaug

SEQ ID NO: 2285463 - RNA, 13 nt, Human
cugccuccucuuc

SEQ ID NO: 2285464 - RNA, 14 nt, Human
cugccuccucuuca

SEQ ID NO: 2285465 - RNA, 15 nt, Human
cugccuccucuucaa

SEQ ID NO: 2285466 - RNA, 24 nt, Human
cugccuccucuucaacugaccagc

SEQ ID NO: 2285467 - RNA, 22 nt, Human
cugccucucccaucacuucccu

SEQ ID NO: 2285468 - RNA, 15 nt, Human
cugccucucccauca

SEQ ID NO: 2285469 - RNA, 23 nt, Human
cugccucucccaucacuucccua

SEQ ID NO: 2285470 - RNA, 19 nt, Human
cugccuguaacuugagagu

SEQ ID NO: 2285471 - RNA, 16 nt, Human
cugccuguagcaguga

SEQ ID NO: 2285472 - RNA, 19 nt, Human
cugccuguagcccacucug

SEQ ID NO: 2285473 - RNA, 15 nt, Human
cugccuguagcccac

SEQ ID NO: 2285474 - RNA, 13 nt, Human
cugccuguaguua

SEQ ID NO: 2285475 - RNA, 23 nt, Human
cugccuguagcccacucugcucg

SEQ ID NO: 2285476 - RNA, 22 nt, Human
cugccuguagcccacucugcuc

SEQ ID NO: 2285477 - RNA, 20 nt, Human
cugccuguagcccacucugc

SEQ ID NO: 2285478 - RNA, 16 nt, Human
cugccugguccucaca

SEQ ID NO: 2285479 - RNA, 23 nt, Human
cugccugguccucacacucaccc

SEQ ID NO: 2285480 - RNA, 19 nt, Human
cugccugguccucacacuc

SEQ ID NO: 2285481 - RNA, 17 nt, Human
cugccugguccucacac

SEQ ID NO: 2285482 - RNA, 17 nt, Human
cugccuguucagcucca

SEQ ID NO: 2285483 - RNA, 18 nt, Human
cugccuguucagcuccag

SEQ ID NO: 2285484 - RNA, 19 nt, Human
cugccuguucagcuccagc

SEQ ID NO: 2285485 - RNA, 20 nt, Human
cugccuguugggccaggagc

SEQ ID NO: 2285486 - RNA, 21 nt, Human
cugaugaacucuuaaucaaau

SEQ ID NO: 2285487 - RNA, 20 nt, Human
cugaugaacuuauucuguag

SEQ ID NO: 2285488 - RNA, 23 nt, Human
cugaucugugcuuuccagcucac

SEQ ID NO: 2285489 - RNA, 13 nt, Human
cugaucugguuug

SEQ ID NO: 2285490 - RNA, 13 nt, Human
cugaucugugcuu

SEQ ID NO: 2285491 - RNA, 17 nt, Human
cugaucugugcuuucca

SEQ ID NO: 2285492 - RNA, 18 nt, Human
cugaucugugcuuuccag

SEQ ID NO: 2285493 - RNA, 20 nt, Human
cugaucugugcuuuccagcu

SEQ ID NO: 2285494 - RNA, 21 nt, Human
cugaucugugcuuuccagcuc

SEQ ID NO: 2285495 - RNA, 22 nt, Human
cugaucugugcuuuccagcuca

SEQ ID NO: 2285496 - RNA, 20 nt, Human
cugaucugaugcaagcaaga

SEQ ID NO: 2285497 - RNA, 18 nt, Human
cugaucugacauccccac

SEQ ID NO: 2285498 - RNA, 19 nt, Human
cugaucugacauccccacu

SEQ ID NO: 2285499 - RNA, 20 nt, Human
cugccuccccucuccuuccu

SEQ ID NO: 2285500 - RNA, 13 nt, Human
cugccuccccugu

SEQ ID NO: 2285501 - RNA, 14 nt, Human
cugccucccucacc

SEQ ID NO: 2285502 - RNA, 16 nt, Human
cugccuccccugugca

SEQ ID NO: 2285503 - RNA, 17 nt, Human
cugccuccccugugcag

SEQ ID NO: 2285504 - RNA, 14 nt, Human
cugccucccuucau

SEQ ID NO: 2285505 - RNA, 21 nt, Human
cugccucccucacccugagcc

SEQ ID NO: 2285506 - RNA, 22 nt, Human
cugccucccucacccugagccc

SEQ ID NO: 2285507 - RNA, 22 nt, Human
cugccuccccugugcaguccug

SEQ ID NO: 2285508 - RNA, 18 nt, Human
cugccucccucacccuga

SEQ ID NO: 2285509 - RNA, 19 nt, Human
cugccucccucacccugag

SEQ ID NO: 2285510 - RNA, 20 nt, Human
cugccucccucacccugagc

SEQ ID NO: 2285511 - RNA, 14 nt, Human
cugcuucaaauauu

SEQ ID NO: 2285512 - RNA, 20 nt, Human
cugcuuuugucuaugggacu

SEQ ID NO: 2285513 - RNA, 22 nt, Human
cugcuucaaggauccugagcca

SEQ ID NO: 2285514 - RNA, 23 nt, Human
cugcuucaaggauccugagccag

SEQ ID NO: 2285515 - RNA, 19 nt, Human
cugcuucaaauauuucccu

SEQ ID NO: 2285516 - RNA, 12 nt, Human
cugcuucaagga

SEQ ID NO: 2285517 - RNA, 13 nt, Human
cugcuucaaggau

SEQ ID NO: 2285518 - RNA, 21 nt, Human
cugcuucaaggauccugagcc

SEQ ID NO: 2285519 - RNA, 22 nt, Human
cuggauauuuucaaauuguauc

SEQ ID NO: 2285520 - RNA, 21 nt, Human
cuggauauuuucaaauuguau

SEQ ID NO: 2285521 - RNA, 23 nt, Human
cuggaucaaaguaggcaggacca

SEQ ID NO: 2285522 - RNA, 14 nt, Human
cuggaucacagcug

SEQ ID NO: 2285523 - RNA, 16 nt, Human
cuggaucacagcugcu

SEQ ID NO: 2285524 - RNA, 22 nt, Human
cuggaucacagcugcuuucugu

SEQ ID NO: 2285525 - RNA, 16 nt, Human
cuggauauuuucaaau

SEQ ID NO: 2285526 - RNA, 15 nt, Human
cuggauauuuucaaa

SEQ ID NO: 2285527 - RNA, 13 nt, Human
cuggauauuuuca

SEQ ID NO: 2285528 - RNA, 20 nt, Human
cuggauaggagccugcuggu

SEQ ID NO: 2285529 - RNA, 18 nt, Human
cuggauaggagccugcug

SEQ ID NO: 2285530 - RNA, 19 nt, Human
cuggauaggagccugcugg

SEQ ID NO: 2285531 - RNA, 15 nt, Human
cuggauaacuuaggu

SEQ ID NO: 2285532 - RNA, 13 nt, Human
cuggauaggagcc

SEQ ID NO: 2285533 - RNA, 15 nt, Human
cuggauaggagccug

SEQ ID NO: 2285534 - RNA, 13 nt, Human
cuggauaaaauga

SEQ ID NO: 2285535 - RNA, 16 nt, Human
cuggauaaagccacug

SEQ ID NO: 2285536 - RNA, 17 nt, Human
cuggauaaagccacuga

SEQ ID NO: 2285537 - RNA, 14 nt, Human
cuggauaacuuagg

SEQ ID NO: 2285538 - RNA, 18 nt, Human
cuggaguuucauguacaa

SEQ ID NO: 2285539 - RNA, 22 nt, Human
cuggaguuuuuguuuggagagc

SEQ ID NO: 2285540 - RNA, 23 nt, Human
cuggaguuuuuguuuggagagca

SEQ ID NO: 2285541 - RNA, 18 nt, Human
cuggaguugaucuggaac

SEQ ID NO: 2285542 - RNA, 13 nt, Human
cuggaguuucaug

SEQ ID NO: 2285543 - RNA, 22 nt, Human
cuggaguuucauguacaagaug

SEQ ID NO: 2285544 - RNA, 12 nt, Human
cuggacugaggc

SEQ ID NO: 2285545 - RNA, 19 nt, Human
cuggacugaagccugcagg

SEQ ID NO: 2285546 - RNA, 16 nt, Human
cuggacugaagccugc

SEQ ID NO: 2285547 - RNA, 13 nt, Human
cuggacugaggcc

SEQ ID NO: 2285548 - RNA, 15 nt, Human
cuggacugaggccug

SEQ ID NO: 2285549 - RNA, 16 nt, Human
cuggacugaggccuga

SEQ ID NO: 2285550 - RNA, 18 nt, Human
cuggacugaggccugagc

SEQ ID NO: 2285551 - RNA, 18 nt, Human
cuggacuugagcuuggca

SEQ ID NO: 2285552 - RNA, 20 nt, Human
cuggacugccuugaauaucc

SEQ ID NO: 2285553 - RNA, 22 nt, Human
cuggacugaagccugcaggagu

SEQ ID NO: 2285554 - RNA, 20 nt, Human
cuggacuugagcuuggcagc

SEQ ID NO: 2285555 - RNA, 22 nt, Human
cuggacugccuugaauaucccc

SEQ ID NO: 2285556 - RNA, 13 nt, Human
cuggacuuggagg

SEQ ID NO: 2285557 - RNA, 14 nt, Human
cuggagaaaaugga

SEQ ID NO: 2285558 - RNA, 22 nt, Human
cuggaguugaucuggaacccag

SEQ ID NO: 2285559 - RNA, 20 nt, Human
cuggaguugaucuggaaccc

SEQ ID NO: 2285560 - RNA, 13 nt, Human
cuggacuuuccug

SEQ ID NO: 2285561 - RNA, 14 nt, Human
cuggacuuuccugc

SEQ ID NO: 2285562 - RNA, 15 nt, Human
cuggacuuuccugca

SEQ ID NO: 2285563 - RNA, 16 nt, Human
cuggacuuuccugcaa

SEQ ID NO: 2285564 - RNA, 18 nt, Human
cuggacuuuccugcaacu

SEQ ID NO: 2285565 - RNA, 14 nt, Human
cuggaagcacagcu

SEQ ID NO: 2285566 - RNA, 23 nt, Human
cuggacugaagccugcaggaguu

SEQ ID NO: 2285567 - RNA, 13 nt, Human
cuggaagagagga

SEQ ID NO: 2285568 - RNA, 21 nt, Human
cuggaagacagagaccuccug

SEQ ID NO: 2285569 - RNA, 14 nt, Human
cuggaagauccugc

SEQ ID NO: 2285570 - RNA, 18 nt, Human
cuggaagauccugcgggu

SEQ ID NO: 2285571 - RNA, 12 nt, Human
cuggaagagagg

SEQ ID NO: 2285572 - RNA, 13 nt, Human
cuggaagacagag

SEQ ID NO: 2285573 - RNA, 21 nt, Human
cugcuucaauacccaaauccu

SEQ ID NO: 2285574 - RNA, 14 nt, Human
cuggaacuugggga

SEQ ID NO: 2285575 - RNA, 19 nt, Human
cugcuuuugucuaugggac

SEQ ID NO: 2285576 - RNA, 19 nt, Human
cugcuuuuuaaagaaugcu

SEQ ID NO: 2285577 - RNA, 21 nt, Human
cugcuuuugucuaugggacuc

SEQ ID NO: 2285578 - RNA, 14 nt, Human
cugacaccuuucau

SEQ ID NO: 2285579 - RNA, 17 nt, Human
cugacacguccacccca

SEQ ID NO: 2285580 - RNA, 14 nt, Human
cugacacguccacc

SEQ ID NO: 2285581 - RNA, 19 nt, Human
cugacaccuuugcaggcau

SEQ ID NO: 2285582 - RNA, 17 nt, Human
cugacacucccuugggc

SEQ ID NO: 2285583 - RNA, 13 nt, Human
cugacacugcggg

SEQ ID NO: 2285584 - RNA, 21 nt, Human
cugacacugcggggcuuggcu

SEQ ID NO: 2285585 - RNA, 14 nt, Human
cugacagaaagcag

SEQ ID NO: 2285586 - RNA, 19 nt, Human
cugacacuuuaauuaccaa

SEQ ID NO: 2285587 - RNA, 22 nt, Human
cugacacugguauuccugccuc

SEQ ID NO: 2285588 - RNA, 23 nt, Human
cugacacugcggggcuuggcuga

SEQ ID NO: 2285589 - RNA, 21 nt, Human
cugacacccauguuucucugg

SEQ ID NO: 2285590 - RNA, 13 nt, Human
cugacacccaugu

SEQ ID NO: 2285591 - RNA, 14 nt, Human
cugacacccauguu

SEQ ID NO: 2285592 - RNA, 18 nt, Human
cugacacaggaugaaggc

SEQ ID NO: 2285593 - RNA, 20 nt, Human
cugacacaaaccugccuggg

SEQ ID NO: 2285594 - RNA, 14 nt, Human
cugacacaaaccug

SEQ ID NO: 2285595 - RNA, 16 nt, Human
cugacacaaaccugcc

SEQ ID NO: 2285596 - RNA, 18 nt, Human
cugacacaaaccugccug

SEQ ID NO: 2285597 - RNA, 19 nt, Human
cugacacaaaccugccugg

SEQ ID NO: 2285598 - RNA, 22 nt, Human
cugaagcagaugcaaagaggca

SEQ ID NO: 2285599 - RNA, 13 nt, Human
cugaagcauguuu

SEQ ID NO: 2285600 - RNA, 21 nt, Human
cugaagcagguucccaagcuc

SEQ ID NO: 2285601 - RNA, 20 nt, Human
cugaagcagguucccaagcu

SEQ ID NO: 2285602 - RNA, 19 nt, Human
cugaagcagguucccaagc

SEQ ID NO: 2285603 - RNA, 14 nt, Human
cugaagcagccucu

SEQ ID NO: 2285604 - RNA, 15 nt, Human
cugaagcagccucuc

SEQ ID NO: 2285605 - RNA, 16 nt, Human
cugaagcagccucucc

SEQ ID NO: 2285606 - RNA, 20 nt, Human
cugaagcagccucuccccag

SEQ ID NO: 2285607 - RNA, 14 nt, Human
cugaaagaggccaa

SEQ ID NO: 2285608 - RNA, 14 nt, Human
cugaaagaggcuga

SEQ ID NO: 2285609 - RNA, 14 nt, Human
cugaaaauguaugu

SEQ ID NO: 2285610 - RNA, 14 nt, Human
cugaagcagaugca

SEQ ID NO: 2285611 - RNA, 12 nt, Human
cugaaagccacg

SEQ ID NO: 2285612 - RNA, 11 nt, Human
cugaaagccac

SEQ ID NO: 2285613 - RNA, 22 nt, Human
cugaaagaggcugaggccugga

SEQ ID NO: 2285614 - RNA, 18 nt, Human
cugacacaaaaaguagau

SEQ ID NO: 2285615 - RNA, 21 nt, Human
cugacaaucaacucuaauagu

SEQ ID NO: 2285616 - RNA, 13 nt, Human
cugacaaucaacu

SEQ ID NO: 2285617 - RNA, 14 nt, Human
cugaagccauuguc

SEQ ID NO: 2285618 - RNA, 15 nt, Human
cugaagcauguuuca

SEQ ID NO: 2285619 - RNA, 18 nt, Human
cugaagcauguuucaugu

SEQ ID NO: 2285620 - RNA, 20 nt, Human
cugaagcauguuucauguuu

SEQ ID NO: 2285621 - RNA, 23 nt, Human
cugaagcauguuucauguuuugu

SEQ ID NO: 2285622 - RNA, 16 nt, Human
cugaagccaaagccaa

SEQ ID NO: 2285623 - RNA, 13 nt, Human
cugaagccagccu

SEQ ID NO: 2285624 - RNA, 14 nt, Human
cugaagccagccuu

SEQ ID NO: 2285625 - RNA, 17 nt, Human
cugaagccagccuucuu

SEQ ID NO: 2285626 - RNA, 13 nt, Human
cugacacacagcu

SEQ ID NO: 2285627 - RNA, 15 nt, Human
cugacacacagcucu

SEQ ID NO: 2285628 - RNA, 16 nt, Human
cugacacacagcucug

SEQ ID NO: 2285629 - RNA, 17 nt, Human
cugacacacagcucugu

SEQ ID NO: 2285630 - RNA, 18 nt, Human
cugacacacagcucuguc

SEQ ID NO: 2285631 - RNA, 19 nt, Human
cugacacacagcucugucc

SEQ ID NO: 2285632 - RNA, 20 nt, Human
cugacacacagcucuguccu

SEQ ID NO: 2285633 - RNA, 21 nt, Human
cugacacacagcucuguccug

SEQ ID NO: 2285634 - RNA, 22 nt, Human
cugacacacagcucuguccugg

SEQ ID NO: 2285635 - RNA, 23 nt, Human
cugacacacagcucuguccuggg

SEQ ID NO: 2285636 - RNA, 17 nt, Human
cugaccccucauagccc

SEQ ID NO: 2285637 - RNA, 21 nt, Human
cugaccccucauagcccucac

SEQ ID NO: 2285638 - RNA, 20 nt, Human
cugaccccucauagcccuca

SEQ ID NO: 2285639 - RNA, 12 nt, Human
cugaccccuccu

SEQ ID NO: 2285640 - RNA, 14 nt, Human
cugaccccuccuca

SEQ ID NO: 2285641 - RNA, 15 nt, Human
cugaccccuccucac

SEQ ID NO: 2285642 - RNA, 16 nt, Human
cugaccccuccucacu

SEQ ID NO: 2285643 - RNA, 17 nt, Human
cugaccccuccucacug

SEQ ID NO: 2285644 - RNA, 20 nt, Human
cugaccccuccucacuggcc

SEQ ID NO: 2285645 - RNA, 14 nt, Human
cucuugagccuggg

SEQ ID NO: 2285646 - RNA, 13 nt, Human
cucuugagccugg

SEQ ID NO: 2285647 - RNA, 15 nt, Human
cucuugagggagcuu

SEQ ID NO: 2285648 - RNA, 14 nt, Human
cucuugagggagcu

SEQ ID NO: 2285649 - RNA, 17 nt, Human
cucuugaggccaggagu

SEQ ID NO: 2285650 - RNA, 16 nt, Human
cucuugaggccaggag

SEQ ID NO: 2285651 - RNA, 14 nt, Human
cucuugaggccagg

SEQ ID NO: 2285652 - RNA, 23 nt, Human
cucuugaguuugucgcucaugug

SEQ ID NO: 2285653 - RNA, 21 nt, Human
cucuugauaccccccucuguc

SEQ ID NO: 2285654 - RNA, 18 nt, Human
cucuugauaccccccucu

SEQ ID NO: 2285655 - RNA, 19 nt, Human
cucuugauaccccccucug

SEQ ID NO: 2285656 - RNA, 22 nt, Human
cucuugauucauaaugacuuaa

SEQ ID NO: 2285657 - RNA, 16 nt, Human
cucuugagccugggag

SEQ ID NO: 2285658 - RNA, 15 nt, Human
cucuugagccuggga

SEQ ID NO: 2285659 - RNA, 22 nt, Human
cucuugccccccaccccagccu

SEQ ID NO: 2285660 - RNA, 14 nt, Human
cucuugcccuuccc

SEQ ID NO: 2285661 - RNA, 20 nt, Human
cucuugccccccaccccagc

SEQ ID NO: 2285662 - RNA, 19 nt, Human
cucuugccccccaccccag

SEQ ID NO: 2285663 - RNA, 15 nt, Human
cucuugcccuucccu

SEQ ID NO: 2285664 - RNA, 16 nt, Human
cucuugcccuucccug

SEQ ID NO: 2285665 - RNA, 17 nt, Human
cucuugcccuucccugu

SEQ ID NO: 2285666 - RNA, 19 nt, Human
cucuugcccuucccugucc

SEQ ID NO: 2285667 - RNA, 16 nt, Human
cucuugccccccaccc

SEQ ID NO: 2285668 - RNA, 13 nt, Human
cucuugcccccca

SEQ ID NO: 2285669 - RNA, 12 nt, Human
cucuugcccccc

SEQ ID NO: 2285670 - RNA, 23 nt, Human
cucuugccccaacccccagcacc

SEQ ID NO: 2285671 - RNA, 14 nt, Human
cucuugccccaacc

SEQ ID NO: 2285672 - RNA, 19 nt, Human
cucuugccccaacccccag

SEQ ID NO: 2285673 - RNA, 20 nt, Human
cucuugccccaacccccagc

SEQ ID NO: 2285674 - RNA, 22 nt, Human
cucuugccccaacccccagcac

SEQ ID NO: 2285675 - RNA, 14 nt, Human
cucuuuuuguuuuu

SEQ ID NO: 2285676 - RNA, 20 nt, Human
cucuugcccuucccuguccc

SEQ ID NO: 2285677 - RNA, 21 nt, Human
cucuugcccuucccugucccu

SEQ ID NO: 2285678 - RNA, 22 nt, Human
cucuugcccuucccugucccuc

SEQ ID NO: 2285679 - RNA, 14 nt, Human
cucuugcaggucuc

SEQ ID NO: 2285680 - RNA, 20 nt, Human
cucuugcacccgccucuccc

SEQ ID NO: 2285681 - RNA, 21 nt, Human
cucuugcacccgccucucccg

SEQ ID NO: 2285682 - RNA, 13 nt, Human
cucuugcacccgc

SEQ ID NO: 2285683 - RNA, 14 nt, Human
cucuugcacccgcc

SEQ ID NO: 2285684 - RNA, 15 nt, Human
cucuugcacccgccu

SEQ ID NO: 2285685 - RNA, 19 nt, Human
cucuugcacccgccucucc

SEQ ID NO: 2285686 - RNA, 22 nt, Human
cucuugccacugccucuuccuc

SEQ ID NO: 2285687 - RNA, 18 nt, Human
cucuugcaggucucaacc

SEQ ID NO: 2285688 - RNA, 12 nt, Human
cucuugccccaa

SEQ ID NO: 2285689 - RNA, 24 nt, Human
cucuugauucauaaugacuuaagc

SEQ ID NO: 2285690 - RNA, 13 nt, Human
cucuugauuuuca

SEQ ID NO: 2285691 - RNA, 20 nt, Human
cucuugcaauccacaaucug

SEQ ID NO: 2285692 - RNA, 23 nt, Human
cucuugcaauccacaaucugaca

SEQ ID NO: 2285693 - RNA, 12 nt, Human
cucuugcacccg

SEQ ID NO: 2285694 - RNA, 14 nt, Human
cugaaaaaaaguuu

SEQ ID NO: 2285695 - RNA, 15 nt, Human
cugaaaaaaaguuua

SEQ ID NO: 2285696 - RNA, 18 nt, Human
cugaaaaaaaguuuacaa

SEQ ID NO: 2285697 - RNA, 22 nt, Human
cugaaaaaacaccuagcuuuau

SEQ ID NO: 2285698 - RNA, 20 nt, Human
cugaaaaaaaguuuacaagu

SEQ ID NO: 2285699 - RNA, 21 nt, Human
cugaaaaaacaccuagcuuua

SEQ ID NO: 2285700 - RNA, 12 nt, Human
cugaaaaaucac

SEQ ID NO: 2285701 - RNA, 17 nt, Human
cugaaaaaucacauccu

SEQ ID NO: 2285702 - RNA, 13 nt, Human
cugaaaauauaac

SEQ ID NO: 2285703 - RNA, 15 nt, Human
cugaaaauauaacca

SEQ ID NO: 2285704 - RNA, 21 nt, Human
cugaaaaaugguaauuguugc

SEQ ID NO: 2285705 - RNA, 22 nt, Human
cugaaaaaucuaagugauauaa

SEQ ID NO: 2285706 - RNA, 19 nt, Human
cugaaaaaucuaagugaua

SEQ ID NO: 2285707 - RNA, 21 nt, Human
cugaaaaaucacauccuggcc

SEQ ID NO: 2285708 - RNA, 23 nt, Human
cugaaaaaucacauccuggccug

SEQ ID NO: 2285709 - RNA, 17 nt, Human
cugaaagaggaaugaag

SEQ ID NO: 2285710 - RNA, 13 nt, Human
cugaaagaggaau

SEQ ID NO: 2285711 - RNA, 20 nt, Human
cugaaaaucgaguuuuuccu

SEQ ID NO: 2285712 - RNA, 15 nt, Human
cugaaaaucuaauau

SEQ ID NO: 2285713 - RNA, 16 nt, Human
cugaaaaucuaauauu

SEQ ID NO: 2285714 - RNA, 17 nt, Human
cugaaaaucuaauauua

SEQ ID NO: 2285715 - RNA, 20 nt, Human
cugaaaaucuaauauuaaaa

SEQ ID NO: 2285716 - RNA, 18 nt, Human
cugaaaaugguauuuucc

SEQ ID NO: 2285717 - RNA, 22 nt, Human
cugaaaauauaaccagccauug

SEQ ID NO: 2285718 - RNA, 18 nt, Human
cucugcacaagcugcacc

SEQ ID NO: 2285719 - RNA, 17 nt, Human
cucugcacaagcugcac

SEQ ID NO: 2285720 - RNA, 19 nt, Human
cucugcacaagcugcaccc

SEQ ID NO: 2285721 - RNA, 23 nt, Human
cugaggaagaugggggcaagaag

SEQ ID NO: 2285722 - RNA, 20 nt, Human
cugaggaagcacagcagcau

SEQ ID NO: 2285723 - RNA, 18 nt, Human
cugagcuuggccagaagg

SEQ ID NO: 2285724 - RNA, 18 nt, Human
cugaggaagaugggggca

SEQ ID NO: 2285725 - RNA, 23 nt, Human
cugaggaagaacggggcucuucu

SEQ ID NO: 2285726 - RNA, 23 nt, Human
cugaggaagagggacuguucuuu

SEQ ID NO: 2285727 - RNA, 18 nt, Human
cugaggaagagggacugu

SEQ ID NO: 2285728 - RNA, 15 nt, Human
cugaggaagaacggg

SEQ ID NO: 2285729 - RNA, 18 nt, Human
cugaggaagaacggggcu

SEQ ID NO: 2285730 - RNA, 22 nt, Human
cugaggaacccuuacaguagga

SEQ ID NO: 2285731 - RNA, 17 nt, Human
cugagcuuggccagaag

SEQ ID NO: 2285732 - RNA, 16 nt, Human
cugagcuuggccagaa

SEQ ID NO: 2285733 - RNA, 15 nt, Human
cugagcuuggccaga

SEQ ID NO: 2285734 - RNA, 12 nt, Human
cugagcuuggcc

SEQ ID NO: 2285735 - RNA, 21 nt, Human
cugagcuuggaagcuucuggu

SEQ ID NO: 2285736 - RNA, 20 nt, Human
cugagcuuggaagcuucugg

SEQ ID NO: 2285737 - RNA, 14 nt, Human
cugagcuuggaagc

SEQ ID NO: 2285738 - RNA, 15 nt, Human
cugagcuucucugug

SEQ ID NO: 2285739 - RNA, 16 nt, Human
cugagcuucucuguga

SEQ ID NO: 2285740 - RNA, 15 nt, Human
cugagcugugcaggu

SEQ ID NO: 2285741 - RNA, 22 nt, Human
cugagcuucccccccaccacag

SEQ ID NO: 2285742 - RNA, 22 nt, Human
cugagcuugcagagaugaggcc

SEQ ID NO: 2285743 - RNA, 12 nt, Human
cugagcuuggaa

SEQ ID NO: 2285744 - RNA, 18 nt, Human
cugacccucuccacccca

SEQ ID NO: 2285745 - RNA, 22 nt, Human
cugacccuccuguugcacccag

SEQ ID NO: 2285746 - RNA, 23 nt, Human
cugacccuccuguugcacccagc

SEQ ID NO: 2285747 - RNA, 13 nt, Human
cugacccuccugu

SEQ ID NO: 2285748 - RNA, 14 nt, Human
cugacccuccuguu

SEQ ID NO: 2285749 - RNA, 17 nt, Human
cugacccuccuguugca

SEQ ID NO: 2285750 - RNA, 19 nt, Human
cugacccugcuucaaauau

SEQ ID NO: 2285751 - RNA, 16 nt, Human
cugaccccugcucagu

SEQ ID NO: 2285752 - RNA, 14 nt, Human
cugaccccugcuca

SEQ ID NO: 2285753 - RNA, 13 nt, Human
cugaccccugcuc

SEQ ID NO: 2285754 - RNA, 15 nt, Human
cugagcugccaucca

SEQ ID NO: 2285755 - RNA, 13 nt, Human
cugagcugcucug

SEQ ID NO: 2285756 - RNA, 18 nt, Human
cugagcugaggcagcagu

SEQ ID NO: 2285757 - RNA, 15 nt, Human
cugagcugaggcagc

SEQ ID NO: 2285758 - RNA, 12 nt, Human
cugagcugggau

SEQ ID NO: 2285759 - RNA, 16 nt, Human
cugagcugccauccag

SEQ ID NO: 2285760 - RNA, 16 nt, Human
cugagcugcucugaau

SEQ ID NO: 2285761 - RNA, 13 nt, Human
cugagcugugcag

SEQ ID NO: 2285762 - RNA, 22 nt, Human
cugagcugggaugauuggaggg

SEQ ID NO: 2285763 - RNA, 14 nt, Human
cugaggugggccca

SEQ ID NO: 2285764 - RNA, 15 nt, Human
cugaggugggcccag

SEQ ID NO: 2285765 - RNA, 21 nt, Human
cugaggugggagauguggaaa

SEQ ID NO: 2285766 - RNA, 22 nt, Human
cugaggugggaggaucucuuga

SEQ ID NO: 2285767 - RNA, 13 nt, Human
cugaggugggagg

SEQ ID NO: 2285768 - RNA, 16 nt, Human
cugaggggggccgugc

SEQ ID NO: 2285769 - RNA, 20 nt, Human
cugaggggggccgugcccag

SEQ ID NO: 2285770 - RNA, 21 nt, Human
cugaggggggccgugcccagg

SEQ ID NO: 2285771 - RNA, 23 nt, Human
cugaggggggccgugcccagggg

SEQ ID NO: 2285772 - RNA, 22 nt, Human
cugaggggggccgugcccaggg

SEQ ID NO: 2285773 - RNA, 15 nt, Human
cugaggguccccacc

SEQ ID NO: 2285774 - RNA, 18 nt, Human
cugaggguccccaccugg

SEQ ID NO: 2285775 - RNA, 19 nt, Human
cugaggguccccaccuggg

SEQ ID NO: 2285776 - RNA, 20 nt, Human
cugaggguccccaccuggga

SEQ ID NO: 2285777 - RNA, 21 nt, Human
cugaggguccccaccugggac

SEQ ID NO: 2285778 - RNA, 15 nt, Human
cugaggguggagacu

SEQ ID NO: 2285779 - RNA, 19 nt, Human
cugaggguggagacuaagc

SEQ ID NO: 2285780 - RNA, 20 nt, Human
cugaggguggagacuaagcc

SEQ ID NO: 2285781 - RNA, 19 nt, Human
cugaggggcaucugccccu

SEQ ID NO: 2285782 - RNA, 18 nt, Human
cugaggggcaucugcccc

SEQ ID NO: 2285783 - RNA, 20 nt, Human
cugaggggcaucugccccuc

SEQ ID NO: 2285784 - RNA, 14 nt, Human
cugaggggccucuu

SEQ ID NO: 2285785 - RNA, 23 nt, Human
cugaggggaggaucacuggagcc

SEQ ID NO: 2285786 - RNA, 22 nt, Human
cugaggggaggaucacuggagc

SEQ ID NO: 2285787 - RNA, 17 nt, Human
cugaggggcaucugccc

SEQ ID NO: 2285788 - RNA, 16 nt, Human
cugaggggcaucugcc

SEQ ID NO: 2285789 - RNA, 23 nt, Human
cugaggaauccagacccggcugc

SEQ ID NO: 2285790 - RNA, 21 nt, Human
cugaggggaggaucacuggag

SEQ ID NO: 2285791 - RNA, 16 nt, Human
cugaggaauuucaccu

SEQ ID NO: 2285792 - RNA, 22 nt, Human
cugaguaaucgcuuaaagaugu

SEQ ID NO: 2285793 - RNA, 20 nt, Human
cugaguaagaaaugcugccc

SEQ ID NO: 2285794 - RNA, 21 nt, Human
cugagguuccucugccugccc

SEQ ID NO: 2285795 - RNA, 23 nt, Human
cugagguuccucugccugccccg

SEQ ID NO: 2285796 - RNA, 21 nt, Human
cugaguaaaaaagcugugugc

SEQ ID NO: 2285797 - RNA, 14 nt, Human
cugagguuccucug

SEQ ID NO: 2285798 - RNA, 15 nt, Human
cugagguuccucugc

SEQ ID NO: 2285799 - RNA, 16 nt, Human
cugagguuccucugcc

SEQ ID NO: 2285800 - RNA, 17 nt, Human
cugagguuccucugccu

SEQ ID NO: 2285801 - RNA, 18 nt, Human
cugagguuccucugccug

SEQ ID NO: 2285802 - RNA, 19 nt, Human
cugagguuccucugccugc

SEQ ID NO: 2285803 - RNA, 20 nt, Human
cugagguuccucugccugcc

SEQ ID NO: 2285804 - RNA, 21 nt, Human
cugaggugugggggcugcagc

SEQ ID NO: 2285805 - RNA, 22 nt, Human
cugaggugugggggcugcagca

SEQ ID NO: 2285806 - RNA, 17 nt, Human
cugaggugugggggcug

SEQ ID NO: 2285807 - RNA, 18 nt, Human
cugaggugugggggcugc

SEQ ID NO: 2285808 - RNA, 19 nt, Human
cugaggugugggggcugca

SEQ ID NO: 2285809 - RNA, 20 nt, Human
cugaggugugggggcugcag

SEQ ID NO: 2285810 - RNA, 16 nt, Human
cugaggugggcccagg

SEQ ID NO: 2285811 - RNA, 17 nt, Human
cugaggugggcccagga

SEQ ID NO: 2285812 - RNA, 20 nt, Human
cugaggugggcccaggacca

SEQ ID NO: 2285813 - RNA, 22 nt, Human
cugaggugggcccaggaccagc

SEQ ID NO: 2285814 - RNA, 23 nt, Human
cugaggugggcccaggaccagcu

SEQ ID NO: 2285815 - RNA, 13 nt, Human
cugaggugugggg

SEQ ID NO: 2285816 - RNA, 14 nt, Human
cugagguguggggg

SEQ ID NO: 2285817 - RNA, 16 nt, Human
cugaggugugggggcu

SEQ ID NO: 2285818 - RNA, 14 nt, Human
cugaucucucguga

SEQ ID NO: 2285819 - RNA, 17 nt, Human
cugaucucucgugauug

SEQ ID NO: 2285820 - RNA, 18 nt, Human
cugaucucucgugauuga

SEQ ID NO: 2285821 - RNA, 15 nt, Human
cuccccaucccaugu

SEQ ID NO: 2285822 - RNA, 15 nt, Human
cucccuccccugcca

SEQ ID NO: 2285823 - RNA, 14 nt, Human
cucccuccccugcc

SEQ ID NO: 2285824 - RNA, 11 nt, Human
cucccuccccu

SEQ ID NO: 2285825 - RNA, 21 nt, Human
cucccuccccugcccuggucc

SEQ ID NO: 2285826 - RNA, 18 nt, Human
cucccuccccugcccugg

SEQ ID NO: 2285827 - RNA, 16 nt, Human
cucccuccccugcccu

SEQ ID NO: 2285828 - RNA, 18 nt, Human
cucccuccccugccauuu

SEQ ID NO: 2285829 - RNA, 16 nt, Human
cucccucccucuuucc

SEQ ID NO: 2285830 - RNA, 21 nt, Human
cuccccaggggagagggucug

SEQ ID NO: 2285831 - RNA, 11 nt, Human
cuccccagggg

SEQ ID NO: 2285832 - RNA, 16 nt, Human
cuccccagguccagcu

SEQ ID NO: 2285833 - RNA, 17 nt, Human
cuccccagguccagcuc

SEQ ID NO: 2285834 - RNA, 23 nt, Human
cucccagcucuagacaacccugc

SEQ ID NO: 2285835 - RNA, 20 nt, Human
cucccagcucuagacaaccc

SEQ ID NO: 2285836 - RNA, 18 nt, Human
cucccagcucuagacaac

SEQ ID NO: 2285837 - RNA, 15 nt, Human
cucccagcucuagac

SEQ ID NO: 2285838 - RNA, 11 nt, Human
cucccagccug

SEQ ID NO: 2285839 - RNA, 18 nt, Human
cuccccagguccagcucu

SEQ ID NO: 2285840 - RNA, 19 nt, Human
cuccccagguccagcucug

SEQ ID NO: 2285841 - RNA, 20 nt, Human
cuccccagguccagcucugg

SEQ ID NO: 2285842 - RNA, 21 nt, Human
cuccccagguccagcucugga

SEQ ID NO: 2285843 - RNA, 23 nt, Human
cuccccagguccagcucuggagg

SEQ ID NO: 2285844 - RNA, 11 nt, Human
cuccccaguuc

SEQ ID NO: 2285845 - RNA, 21 nt, Human
cuccccaggguucaguccuca

SEQ ID NO: 2285846 - RNA, 14 nt, Human
cuccccaucccaug

SEQ ID NO: 2285847 - RNA, 18 nt, Human
cucccucugaccugcagg

SEQ ID NO: 2285848 - RNA, 17 nt, Human
cucccucugaccugcag

SEQ ID NO: 2285849 - RNA, 14 nt, Human
cucccucugaccug

SEQ ID NO: 2285850 - RNA, 13 nt, Human
cucccucugaccu

SEQ ID NO: 2285851 - RNA, 22 nt, Human
cucccucucucuucugcuccac

SEQ ID NO: 2285852 - RNA, 21 nt, Human
cucccucucucuucugcucca

SEQ ID NO: 2285853 - RNA, 20 nt, Human
cucccucucucuucugcucc

SEQ ID NO: 2285854 - RNA, 17 nt, Human
cucccucucucuucugc

SEQ ID NO: 2285855 - RNA, 16 nt, Human
cucccucucucuucug

SEQ ID NO: 2285856 - RNA, 15 nt, Human
cucccucucucuucu

SEQ ID NO: 2285857 - RNA, 15 nt, Human
cucccucuccugccu

SEQ ID NO: 2285858 - RNA, 14 nt, Human
cucccucuccugcc

SEQ ID NO: 2285859 - RNA, 13 nt, Human
cucccucuccugc

SEQ ID NO: 2285860 - RNA, 21 nt, Human
cucccuccgauccuuccuccc

SEQ ID NO: 2285861 - RNA, 23 nt, Human
cucccuccccugcccugguccag

SEQ ID NO: 2285862 - RNA, 18 nt, Human
cucccuccgauccuuccu

SEQ ID NO: 2285863 - RNA, 17 nt, Human
cucccucuggcccugcc

SEQ ID NO: 2285864 - RNA, 15 nt, Human
cucccucuggcccug

SEQ ID NO: 2285865 - RNA, 14 nt, Human
cucccucuggcccu

SEQ ID NO: 2285866 - RNA, 16 nt, Human
cucccucuggaucaaa

SEQ ID NO: 2285867 - RNA, 11 nt, Human
cucccucugga

SEQ ID NO: 2285868 - RNA, 13 nt, Human
cucccucuggauc

SEQ ID NO: 2285869 - RNA, 14 nt, Human
cucccucuggauca

SEQ ID NO: 2285870 - RNA, 22 nt, Human
cucccucugccugaaccuucca

SEQ ID NO: 2285871 - RNA, 17 nt, Human
cucccucugaggcugua

SEQ ID NO: 2285872 - RNA, 20 nt, Human
cucccucugaggcuguagga

SEQ ID NO: 2285873 - RNA, 17 nt, Human
cucccucuccugccuac

SEQ ID NO: 2285874 - RNA, 16 nt, Human
cucccucugaggcugu

SEQ ID NO: 2285875 - RNA, 21 nt, Human
cucccucugaccugcaggcca

SEQ ID NO: 2285876 - RNA, 20 nt, Human
cucccucuggcccugccuuc

SEQ ID NO: 2285877 - RNA, 19 nt, Human
cucccucuggcccugccuu

SEQ ID NO: 2285878 - RNA, 18 nt, Human
cucccucuggcccugccu

SEQ ID NO: 2285879 - RNA, 14 nt, Human
cucccucuucucaa

SEQ ID NO: 2285880 - RNA, 15 nt, Human
cucccucuucucaag

SEQ ID NO: 2285881 - RNA, 20 nt, Human
cucccucuucucaagugccu

SEQ ID NO: 2285882 - RNA, 15 nt, Human
cucccucuuucccuc

SEQ ID NO: 2285883 - RNA, 19 nt, Human
cucccucuuucccucccuu

SEQ ID NO: 2285884 - RNA, 15 nt, Human
cuccgggaccuggug

SEQ ID NO: 2285885 - RNA, 14 nt, Human
cuccgggagagggg

SEQ ID NO: 2285886 - RNA, 18 nt, Human
cuccggggagcgcccgcg

SEQ ID NO: 2285887 - RNA, 20 nt, Human
cuccgguaaaacaccggaga

SEQ ID NO: 2285888 - RNA, 21 nt, Human
cuccggggagcgcccgcgccc

SEQ ID NO: 2285889 - RNA, 22 nt, Human
cuccgcuuucuacccagcgagc

SEQ ID NO: 2285890 - RNA, 15 nt, Human
cuccguccagccgcc

SEQ ID NO: 2285891 - RNA, 21 nt, Human
cuccuagacugacccugauca

SEQ ID NO: 2285892 - RNA, 15 nt, Human
cuccuagagaacgca

SEQ ID NO: 2285893 - RNA, 18 nt, Human
cuccuagagaacgcagcc

SEQ ID NO: 2285894 - RNA, 20 nt, Human
cuccuagagaacgcagcccu

SEQ ID NO: 2285895 - RNA, 19 nt, Human
cuccuagagggaggggccu

SEQ ID NO: 2285896 - RNA, 18 nt, Human
cuccuagagggaggggcc

SEQ ID NO: 2285897 - RNA, 15 nt, Human
cuccuagagggaggg

SEQ ID NO: 2285898 - RNA, 13 nt, Human
cuccuagagggag

SEQ ID NO: 2285899 - RNA, 21 nt, Human
cuccuagagaacgcagcccua

SEQ ID NO: 2285900 - RNA, 17 nt, Human
cuccuagagacagaagc

SEQ ID NO: 2285901 - RNA, 18 nt, Human
cuccuagagacagaagca

SEQ ID NO: 2285902 - RNA, 23 nt, Human
cuccuagagacagaagcaggcug

SEQ ID NO: 2285903 - RNA, 23 nt, Human
cuccggugugccugcagccccgc

SEQ ID NO: 2285904 - RNA, 19 nt, Human
cuccggugugccugcagcc

SEQ ID NO: 2285905 - RNA, 18 nt, Human
cuccggugugccugcagc

SEQ ID NO: 2285906 - RNA, 13 nt, Human
cuccggugugccu

SEQ ID NO: 2285907 - RNA, 14 nt, Human
cuccguauuucaga

SEQ ID NO: 2285908 - RNA, 13 nt, Human
cuccguauuucag

SEQ ID NO: 2285909 - RNA, 15 nt, Human
cuccguauuucagac

SEQ ID NO: 2285910 - RNA, 21 nt, Human
cuccgcuuucuacccagcgag

SEQ ID NO: 2285911 - RNA, 20 nt, Human
cuccgcuuucuacccagcga

SEQ ID NO: 2285912 - RNA, 19 nt, Human
cucagacauguuuuccgug

SEQ ID NO: 2285913 - RNA, 20 nt, Human
cucagacauguuuuccguga

SEQ ID NO: 2285914 - RNA, 13 nt, Human
cucagacauuggc

SEQ ID NO: 2285915 - RNA, 21 nt, Human
cuccagaauuucccaaagcag

SEQ ID NO: 2285916 - RNA, 17 nt, Human
cucagaaucucaaauaa

SEQ ID NO: 2285917 - RNA, 16 nt, Human
cucagaaucucaaaua

SEQ ID NO: 2285918 - RNA, 20 nt, Human
cuccagacaaaccagaagca

SEQ ID NO: 2285919 - RNA, 22 nt, Human
cucagacaggaaagggaaggcc

SEQ ID NO: 2285920 - RNA, 16 nt, Human
cuccagacacaugucc

SEQ ID NO: 2285921 - RNA, 17 nt, Human
cucagacauuggcaccu

SEQ ID NO: 2285922 - RNA, 22 nt, Human
cuccagaauuucccaaagcagu

SEQ ID NO: 2285923 - RNA, 11 nt, Human
cuccagacaca

SEQ ID NO: 2285924 - RNA, 17 nt, Human
cuccaggcugucuuuca

SEQ ID NO: 2285925 - RNA, 23 nt, Human
cuccaggcuguaucccaugagcc

SEQ ID NO: 2285926 - RNA, 22 nt, Human
cuccaggcuguaucccaugagc

SEQ ID NO: 2285927 - RNA, 17 nt, Human
cuccaguuuucaguuga

SEQ ID NO: 2285928 - RNA, 16 nt, Human
cuccagugguugcugu

SEQ ID NO: 2285929 - RNA, 19 nt, Human
cuccagugguugcuguuga

SEQ ID NO: 2285930 - RNA, 21 nt, Human
cuccagggaguccccuccccg

SEQ ID NO: 2285931 - RNA, 18 nt, Human
cuccagugccagcaauga

SEQ ID NO: 2285932 - RNA, 20 nt, Human
cuccaguggggcaagauuuu

SEQ ID NO: 2285933 - RNA, 14 nt, Human
cuccagugccaaca

SEQ ID NO: 2285934 - RNA, 23 nt, Human
cuccaguggggcaagauuuuccu

SEQ ID NO: 2285935 - RNA, 15 nt, Human
cuccagugguugcug

SEQ ID NO: 2285936 - RNA, 22 nt, Human
cuccaggugcacaagcuccaag

SEQ ID NO: 2285937 - RNA, 18 nt, Human
cuccaggugcacaagcuc

SEQ ID NO: 2285938 - RNA, 14 nt, Human
cuccagggaguccc

SEQ ID NO: 2285939 - RNA, 17 nt, Human
cuccagggaguccccuc

SEQ ID NO: 2285940 - RNA, 18 nt, Human
cuccagggaguccccucc

SEQ ID NO: 2285941 - RNA, 20 nt, Human
cuccagggaguccccucccc

SEQ ID NO: 2285942 - RNA, 19 nt, Human
cuccaggugcacaagcucc

SEQ ID NO: 2285943 - RNA, 20 nt, Human
cuccaggugcacaagcucca

SEQ ID NO: 2285944 - RNA, 14 nt, Human
cucccaccucagcc

SEQ ID NO: 2285945 - RNA, 14 nt, Human
cuccauacucagga

SEQ ID NO: 2285946 - RNA, 22 nt, Human
cuccauaaccccacccuugccc

SEQ ID NO: 2285947 - RNA, 14 nt, Human
cuccauaaccccac

SEQ ID NO: 2285948 - RNA, 15 nt, Human
cuccauaaccccacc

SEQ ID NO: 2285949 - RNA, 16 nt, Human
cucccaccucagccuc

SEQ ID NO: 2285950 - RNA, 17 nt, Human
cucccaccucagccucc

SEQ ID NO: 2285951 - RNA, 16 nt, Human
cucccagcccuaugga

SEQ ID NO: 2285952 - RNA, 21 nt, Human
cucccagcccuauggaugugg

SEQ ID NO: 2285953 - RNA, 18 nt, Human
cucccagcccuauggaug

SEQ ID NO: 2285954 - RNA, 19 nt, Human
cucccagcccuauggaugu

SEQ ID NO: 2285955 - RNA, 21 nt, Human
cucccagcaacacaagcugga

SEQ ID NO: 2285956 - RNA, 19 nt, Human
cucccagcagcccuaagga

SEQ ID NO: 2285957 - RNA, 15 nt, Human
cucgugguaggacug

SEQ ID NO: 2285958 - RNA, 16 nt, Human
cucgugguaggacugu

SEQ ID NO: 2285959 - RNA, 12 nt, Human
cucucccuguug

SEQ ID NO: 2285960 - RNA, 13 nt, Human
cucucccuggccc

SEQ ID NO: 2285961 - RNA, 12 nt, Human
cucucccuggcc

SEQ ID NO: 2285962 - RNA, 13 nt, Human
cucucccuuggau

SEQ ID NO: 2285963 - RNA, 19 nt, Human
cucuccuccugcccaccug

SEQ ID NO: 2285964 - RNA, 15 nt, Human
cucuccuccugccca

SEQ ID NO: 2285965 - RNA, 20 nt, Human
cucuccuccccaaggagaca

SEQ ID NO: 2285966 - RNA, 16 nt, Human
cucuccgaccagacac

SEQ ID NO: 2285967 - RNA, 13 nt, Human
cucuccuccuuuu

SEQ ID NO: 2285968 - RNA, 20 nt, Human
cucuccuccuuuucacaguu

SEQ ID NO: 2285969 - RNA, 15 nt, Human
cucucuuugggaaug

SEQ ID NO: 2285970 - RNA, 17 nt, Human
cucucuuugggaauguu

SEQ ID NO: 2285971 - RNA, 18 nt, Human
cucucuuugggaauguuu

SEQ ID NO: 2285972 - RNA, 14 nt, Human
cucucuuuguucuc

SEQ ID NO: 2285973 - RNA, 15 nt, Human
cucucuuuguucuca

SEQ ID NO: 2285974 - RNA, 18 nt, Human
cucucuuuguucucagcu

SEQ ID NO: 2285975 - RNA, 15 nt, Human
cucucuuuccuucuu

SEQ ID NO: 2285976 - RNA, 17 nt, Human
cucucuuuccuucuugc

SEQ ID NO: 2285977 - RNA, 20 nt, Human
cucucuuuccuucuugccuu

SEQ ID NO: 2285978 - RNA, 18 nt, Human
cucucuucugcuccaccc

SEQ ID NO: 2285979 - RNA, 15 nt, Human
cucuccucugccuca

SEQ ID NO: 2285980 - RNA, 13 nt, Human
cucucuugcaccc

SEQ ID NO: 2285981 - RNA, 15 nt, Human
cucucuugguuuccu

SEQ ID NO: 2285982 - RNA, 14 nt, Human
cucucuugcacccg

SEQ ID NO: 2285983 - RNA, 16 nt, Human
cucucuugcacccgcc

SEQ ID NO: 2285984 - RNA, 17 nt, Human
cucucuucugcuccacc

SEQ ID NO: 2285985 - RNA, 20 nt, Human
cucuccuccugcccaccugu

SEQ ID NO: 2285986 - RNA, 20 nt, Human
cucuccucggcccccuccau

SEQ ID NO: 2285987 - RNA, 20 nt, Human
cucucuugauuaagaucuca

SEQ ID NO: 2285988 - RNA, 10 nt, Human
cucuccucug

SEQ ID NO: 2285989 - RNA, 17 nt, Human
cucucuggccuucggcc

SEQ ID NO: 2285990 - RNA, 22 nt, Human
cucucuggccuucggccuccau

SEQ ID NO: 2285991 - RNA, 19 nt, Human
cucucuggccuucggccuc

SEQ ID NO: 2285992 - RNA, 16 nt, Human
cucugaaaucugaaga

SEQ ID NO: 2285993 - RNA, 12 nt, Human
cucugaaaccag

SEQ ID NO: 2285994 - RNA, 19 nt, Human
cucucuuuuuggaggugcu

SEQ ID NO: 2285995 - RNA, 20 nt, Human
cucucuuuuuggaggugcuu

SEQ ID NO: 2285996 - RNA, 22 nt, Human
cucucuuuguucucagcucccc

SEQ ID NO: 2285997 - RNA, 19 nt, Human
cucucuuuguucucagcuc

SEQ ID NO: 2285998 - RNA, 20 nt, Human
cucucuuuguucucagcucc

SEQ ID NO: 2285999 - RNA, 21 nt, Human
cucucuuuguucucagcuccc

SEQ ID NO: 2286000 - RNA, 18 nt, Human
cucucuuuuuggaggugc

SEQ ID NO: 2286001 - RNA, 15 nt, Human
cucugaaacccugga

SEQ ID NO: 2286002 - RNA, 17 nt, Human
cucugaaaccaguguua

SEQ ID NO: 2286003 - RNA, 17 nt, Human
cucugaaaacggcccuc

SEQ ID NO: 2286004 - RNA, 22 nt, Human
cucugaaaucugaagaccucga

SEQ ID NO: 2286005 - RNA, 16 nt, Human
cucugcacaagcugca

SEQ ID NO: 2286006 - RNA, 22 nt, Human
cucgggcgagucacugccucuc

SEQ ID NO: 2286007 - RNA, 14 nt, Human
cucgggcuccugug

SEQ ID NO: 2286008 - RNA, 21 nt, Human
cucgggcgagucacugccucu

SEQ ID NO: 2286009 - RNA, 19 nt, Human
cucgggcgagucacugccu

SEQ ID NO: 2286010 - RNA, 15 nt, Human
cucgggcuccugugc

SEQ ID NO: 2286011 - RNA, 17 nt, Human
cucgggcuccugugccc

SEQ ID NO: 2286012 - RNA, 23 nt, Human
cucgggcugagaacccugcgugg

SEQ ID NO: 2286013 - RNA, 21 nt, Human
cucggguggcuagucagagag

SEQ ID NO: 2286014 - RNA, 24 nt, Human
cucgggcccaggccaucuuccagg

SEQ ID NO: 2286015 - RNA, 18 nt, Human
cucgguggacccagggau

SEQ ID NO: 2286016 - RNA, 11 nt, Human
cucggugccuu

SEQ ID NO: 2286017 - RNA, 14 nt, Human
cucgguggacccag

SEQ ID NO: 2286018 - RNA, 13 nt, Human
cucgguuucucca

SEQ ID NO: 2286019 - RNA, 18 nt, Human
cucguauaugucucaggu

SEQ ID NO: 2286020 - RNA, 14 nt, Human
cucguagccaucuc

SEQ ID NO: 2286021 - RNA, 14 nt, Human
cucguaacugguuu

SEQ ID NO: 2286022 - RNA, 20 nt, Human
cucguggccuuccccagccu

SEQ ID NO: 2286023 - RNA, 15 nt, Human
cucgugggagagcca

SEQ ID NO: 2286024 - RNA, 21 nt, Human
cucguggccuuccccagccuc

SEQ ID NO: 2286025 - RNA, 18 nt, Human
cucguggccuuccccagc

SEQ ID NO: 2286026 - RNA, 14 nt, Human
cucguggccuuccc

SEQ ID NO: 2286027 - RNA, 18 nt, Human
cucguggccagcccggcu

SEQ ID NO: 2286028 - RNA, 19 nt, Human
cucguggccagcccggcug

SEQ ID NO: 2286029 - RNA, 12 nt, Human
cucguggccagc

SEQ ID NO: 2286030 - RNA, 13 nt, Human
cucguggccagcc

SEQ ID NO: 2286031 - RNA, 14 nt, Human
cucguggccagccc

SEQ ID NO: 2286032 - RNA, 16 nt, Human
cucguggccagcccgg

SEQ ID NO: 2286033 - RNA, 17 nt, Human
cucguggccagcccggc

SEQ ID NO: 2286034 - RNA, 15 nt, Human
cucguccucccccug

SEQ ID NO: 2286035 - RNA, 14 nt, Human
cucguccucccccu

SEQ ID NO: 2286036 - RNA, 12 nt, Human
cucguccucccc

SEQ ID NO: 2286037 - RNA, 20 nt, Human
cucguauaugucucaggucc

SEQ ID NO: 2286038 - RNA, 22 nt, Human
cucgucaucauuuuuccuuccc

SEQ ID NO: 2286039 - RNA, 17 nt, Human
cucgaacuccugaccuu

SEQ ID NO: 2286040 - RNA, 16 nt, Human
cucgaacuccugaccu

SEQ ID NO: 2286041 - RNA, 23 nt, Human
cucgaacauggaacucauuccug

SEQ ID NO: 2286042 - RNA, 22 nt, Human
cucgaacauggaacucauuccu

SEQ ID NO: 2286043 - RNA, 20 nt, Human
cucgaaacacagaaaccuuu

SEQ ID NO: 2286044 - RNA, 13 nt, Human
cucgaacuccuga

SEQ ID NO: 2286045 - RNA, 19 nt, Human
cucgaaacacagaaaccuu

SEQ ID NO: 2286046 - RNA, 15 nt, Human
cucgaaacacagaaa

SEQ ID NO: 2286047 - RNA, 14 nt, Human
cucgaaacacagaa

SEQ ID NO: 2286048 - RNA, 19 nt, Human
cuccuuuuucucccucugg

SEQ ID NO: 2286049 - RNA, 21 nt, Human
cuccuuuuucucccucuggau

SEQ ID NO: 2286050 - RNA, 18 nt, Human
cuccuuuuuauguugcca

SEQ ID NO: 2286051 - RNA, 14 nt, Human
cuccuuuuucuccc

SEQ ID NO: 2286052 - RNA, 15 nt, Human
cuccuuuuucucccu

SEQ ID NO: 2286053 - RNA, 18 nt, Human
cuccuuuuucucccucug

SEQ ID NO: 2286054 - RNA, 14 nt, Human
cuccuuucuuucua

SEQ ID NO: 2286055 - RNA, 13 nt, Human
cuccuuucuuuuu

SEQ ID NO: 2286056 - RNA, 19 nt, Human
cuccuuucuuuuucuucuu

SEQ ID NO: 2286057 - RNA, 20 nt, Human
cuccuuucuuuuucuucuuc

SEQ ID NO: 2286058 - RNA, 21 nt, Human
cuccuuucuuuuucuucuucc

SEQ ID NO: 2286059 - RNA, 14 nt, Human
cuccuuugcacuga

SEQ ID NO: 2286060 - RNA, 15 nt, Human
cuccuuugcacugag

SEQ ID NO: 2286061 - RNA, 23 nt, Human
cuccuuugugaggaagccgcugg

SEQ ID NO: 2286062 - RNA, 16 nt, Human
cuccuuugcacugagg

SEQ ID NO: 2286063 - RNA, 18 nt, Human
cuccuuugcacugagggc

SEQ ID NO: 2286064 - RNA, 20 nt, Human
cuccuuugcacugagggcca

SEQ ID NO: 2286065 - RNA, 21 nt, Human
cuccuuugcacugagggccac

SEQ ID NO: 2286066 - RNA, 16 nt, Human
cuccuuugcaggcuca

SEQ ID NO: 2286067 - RNA, 22 nt, Human
cuccuuugcacugagggccaca

SEQ ID NO: 2286068 - RNA, 23 nt, Human
cuccuuugcugaggccuccagcu

SEQ ID NO: 2286069 - RNA, 24 nt, Human
cuccuuuucacaguucucuccuuc

SEQ ID NO: 2286070 - RNA, 22 nt, Human
cuccuagccugugccucuggga

SEQ ID NO: 2286071 - RNA, 16 nt, Human
cuccuagccacccacc

SEQ ID NO: 2286072 - RNA, 23 nt, Human
cuccuagagggaggggccuaggc

SEQ ID NO: 2286073 - RNA, 15 nt, Human
cuccuagcagagaga

SEQ ID NO: 2286074 - RNA, 16 nt, Human
cuccuuuagcgcccag

SEQ ID NO: 2286075 - RNA, 17 nt, Human
cuccuuuagcgcccagu

SEQ ID NO: 2286076 - RNA, 14 nt, Human
cuccuuucuccagc

SEQ ID NO: 2286077 - RNA, 17 nt, Human
cuccuuucuccagccag

SEQ ID NO: 2286078 - RNA, 18 nt, Human
cuccuuucuccagccagc

SEQ ID NO: 2286079 - RNA, 19 nt, Human
cuccuuucuccagccagca

SEQ ID NO: 2286080 - RNA, 21 nt, Human
cuccuuucuccagccagcaau

SEQ ID NO: 2286081 - RNA, 16 nt, Human
cuccuuucucuucucu

SEQ ID NO: 2286082 - RNA, 22 nt, Human
cuccuuuagcgcccaguugggu

SEQ ID NO: 2286083 - RNA, 14 nt, Human
cuccuuuagcaggu

SEQ ID NO: 2286084 - RNA, 15 nt, Human
cuccuaggaaaauac

SEQ ID NO: 2286085 - RNA, 20 nt, Human
cuccuuuagcaggugguccu

SEQ ID NO: 2286086 - RNA, 12 nt, Human
cguguuuguguu

SEQ ID NO: 2286087 - RNA, 13 nt, Human
cguuaaaauacca

SEQ ID NO: 2286088 - RNA, 20 nt, Human
cguuaagggaaggaacucug

SEQ ID NO: 2286089 - RNA, 14 nt, Human
cguuaccaggcagg

SEQ ID NO: 2286090 - RNA, 15 nt, Human
cgugucgugggugug

SEQ ID NO: 2286091 - RNA, 17 nt, Human
cguguccgacucuucug

SEQ ID NO: 2286092 - RNA, 15 nt, Human
cgugucccucucgga

SEQ ID NO: 2286093 - RNA, 11 nt, Human
cguguuugcac

SEQ ID NO: 2286094 - RNA, 20 nt, Human
cguguuucugacucugagcu

SEQ ID NO: 2286095 - RNA, 22 nt, Human
cguguccccuauccuacuuccc

SEQ ID NO: 2286096 - RNA, 16 nt, Human
cgugucaccugugcuu

SEQ ID NO: 2286097 - RNA, 16 nt, Human
cguguccccggccuca

SEQ ID NO: 2286098 - RNA, 17 nt, Human
cguguccccggccucag

SEQ ID NO: 2286099 - RNA, 14 nt, Human
cguguauccugggg

SEQ ID NO: 2286100 - RNA, 15 nt, Human
cguguauccuggggc

SEQ ID NO: 2286101 - RNA, 16 nt, Human
cguguauccuggggcu

SEQ ID NO: 2286102 - RNA, 13 nt, Human
cuaaaggccucuu

SEQ ID NO: 2286103 - RNA, 22 nt, Human
cuaaaguguauuuuuuuacuaa

SEQ ID NO: 2286104 - RNA, 19 nt, Human
cuaaaggcuaccuuuguau

SEQ ID NO: 2286105 - RNA, 17 nt, Human
cuaaaggcuaccuuugu

SEQ ID NO: 2286106 - RNA, 13 nt, Human
cuaaaguuuacag

SEQ ID NO: 2286107 - RNA, 14 nt, Human
cuaaaguuuacagu

SEQ ID NO: 2286108 - RNA, 18 nt, Human
cuaaaguuuacaguaaau

SEQ ID NO: 2286109 - RNA, 19 nt, Human
cuaaaguuuacaguaaaua

SEQ ID NO: 2286110 - RNA, 21 nt, Human
cuaaaguuuacaguaaauaaa

SEQ ID NO: 2286111 - RNA, 20 nt, Human
cuaacuagagcagcccugga

SEQ ID NO: 2286112 - RNA, 19 nt, Human
cuaaaguguguuguugcuu

SEQ ID NO: 2286113 - RNA, 16 nt, Human
cuaaagagagaaugua

SEQ ID NO: 2286114 - RNA, 21 nt, Human
cuaaagaaagauuacuuagag

SEQ ID NO: 2286115 - RNA, 14 nt, Human
cuaaagcugccagc

SEQ ID NO: 2286116 - RNA, 21 nt, Human
cuaaagaagguuucagaaaga

SEQ ID NO: 2286117 - RNA, 18 nt, Human
cuaaagaaaaagucaucc

SEQ ID NO: 2286118 - RNA, 19 nt, Human
cuaaagaaaaagucaucca

SEQ ID NO: 2286119 - RNA, 21 nt, Human
cguguuuuauuccuguauguu

SEQ ID NO: 2286120 - RNA, 19 nt, Human
cuaaagagagaauguagau

SEQ ID NO: 2286121 - RNA, 18 nt, Human
cuaaagagagaauguaga

SEQ ID NO: 2286122 - RNA, 15 nt, Human
cuaaagcugccagcc

SEQ ID NO: 2286123 - RNA, 16 nt, Human
cuaaaggcuaccuuug

SEQ ID NO: 2286124 - RNA, 15 nt, Human
cuaaaggcuaccuuu

SEQ ID NO: 2286125 - RNA, 13 nt, Human
cuaacuggaagca

SEQ ID NO: 2286126 - RNA, 20 nt, Human
cuaacucauacugugcugga

SEQ ID NO: 2286127 - RNA, 14 nt, Human
cuaacuggacuggu

SEQ ID NO: 2286128 - RNA, 19 nt, Human
cuaacucagaaacaucagu

SEQ ID NO: 2286129 - RNA, 17 nt, Human
cuaacucauacugugcu

SEQ ID NO: 2286130 - RNA, 21 nt, Human
cuaacuagagcagcccuggag

SEQ ID NO: 2286131 - RNA, 15 nt, Human
cuaacucaccuaacu

SEQ ID NO: 2286132 - RNA, 14 nt, Human
cuaacuccagugaa

SEQ ID NO: 2286133 - RNA, 20 nt, Human
cuaacugcuacaaauacucu

SEQ ID NO: 2286134 - RNA, 20 nt, Human
cgguuccacgucccccuggg

SEQ ID NO: 2286135 - RNA, 18 nt, Human
cgguuccacgucccccug

SEQ ID NO: 2286136 - RNA, 19 nt, Human
cgguuccacgucccccugg

SEQ ID NO: 2286137 - RNA, 15 nt, Human
cgguuuauauaagcu

SEQ ID NO: 2286138 - RNA, 16 nt, Human
cgguucaccagccucu

SEQ ID NO: 2286139 - RNA, 15 nt, Human
cgguucaccagccuc

SEQ ID NO: 2286140 - RNA, 14 nt, Human
cgguucaccagccu

SEQ ID NO: 2286141 - RNA, 13 nt, Human
cgguucaccagcc

SEQ ID NO: 2286142 - RNA, 20 nt, Human
cgguuaugaaauucaccccc

SEQ ID NO: 2286143 - RNA, 12 nt, Human
cgguucuuccag

SEQ ID NO: 2286144 - RNA, 14 nt, Human
cguaauaauuauua

SEQ ID NO: 2286145 - RNA, 21 nt, Human
cguaaugcuuagagaauguuc

SEQ ID NO: 2286146 - RNA, 16 nt, Human
cguaauuaaaagaauu

SEQ ID NO: 2286147 - RNA, 13 nt, Human
cguaaugcuuaga

SEQ ID NO: 2286148 - RNA, 17 nt, Human
cguaauaauuauuauua

SEQ ID NO: 2286149 - RNA, 16 nt, Human
cguacacauuuuauuu

SEQ ID NO: 2286150 - RNA, 13 nt, Human
cguacacauuuua

SEQ ID NO: 2286151 - RNA, 19 nt, Human
cggugggcauuugugaggc

SEQ ID NO: 2286152 - RNA, 15 nt, Human
cggagacagugaucu

SEQ ID NO: 2286153 - RNA, 12 nt, Human
cggagacagggu

SEQ ID NO: 2286154 - RNA, 18 nt, Human
cggagaaccuugugccug

SEQ ID NO: 2286155 - RNA, 15 nt, Human
cggagacggaguccc

SEQ ID NO: 2286156 - RNA, 24 nt, Human
cggagaagagcuguucacagccag

SEQ ID NO: 2286157 - RNA, 23 nt, Human
cggagaagagcuguucacagcca

SEQ ID NO: 2286158 - RNA, 20 nt, Human
cggugugccugcagccccgc

SEQ ID NO: 2286159 - RNA, 17 nt, Human
cggugugccugcagccc

SEQ ID NO: 2286160 - RNA, 15 nt, Human
cggugugccugcagc

SEQ ID NO: 2286161 - RNA, 16 nt, Human
cggugugcaccagggu

SEQ ID NO: 2286162 - RNA, 15 nt, Human
cggugugcaccaggg

SEQ ID NO: 2286163 - RNA, 21 nt, Human
cggugguaccaggucuccucc

SEQ ID NO: 2286164 - RNA, 17 nt, Human
cggugguaccaggucuc

SEQ ID NO: 2286165 - RNA, 19 nt, Human
cggugggccuugcugggga

SEQ ID NO: 2286166 - RNA, 19 nt, Human
cggugggccuuguccccug

SEQ ID NO: 2286167 - RNA, 13 nt, Human
cggugggccuugc

SEQ ID NO: 2286168 - RNA, 18 nt, Human
cggugggccuugcugggg

SEQ ID NO: 2286169 - RNA, 16 nt, Human
cguaauuuugccaaau

SEQ ID NO: 2286170 - RNA, 15 nt, Human
cgcauccuagucucu

SEQ ID NO: 2286171 - RNA, 16 nt, Human
cgcauccuagucucua

SEQ ID NO: 2286172 - RNA, 19 nt, Human
cgcauccuagucucuauca

SEQ ID NO: 2286173 - RNA, 14 nt, Human
cgcaucuucuccau

SEQ ID NO: 2286174 - RNA, 13 nt, Human
cgcaucuucucca

SEQ ID NO: 2286175 - RNA, 17 nt, Human
cgccuguaguccuagcc

SEQ ID NO: 2286176 - RNA, 20 nt, Human
cgccuguagucccagcuacu

SEQ ID NO: 2286177 - RNA, 21 nt, Human
cgcaucuucuccaucuggcag

SEQ ID NO: 2286178 - RNA, 16 nt, Human
cgcaucuucuccaucu

SEQ ID NO: 2286179 - RNA, 15 nt, Human
cgcaucuucuccauc

SEQ ID NO: 2286180 - RNA, 13 nt, Human
cgccuguuccccc

SEQ ID NO: 2286181 - RNA, 15 nt, Human
cgccuguucccccgc

SEQ ID NO: 2286182 - RNA, 19 nt, Human
cgccuguucccccgccgcu

SEQ ID NO: 2286183 - RNA, 20 nt, Human
cgccuguaguccuagccacu

SEQ ID NO: 2286184 - RNA, 16 nt, Human
cgccuuaaggauguuc

SEQ ID NO: 2286185 - RNA, 12 nt, Human
cgcaucauaugc

SEQ ID NO: 2286186 - RNA, 13 nt, Human
cgcaucagacaga

SEQ ID NO: 2286187 - RNA, 19 nt, Human
cgcaucaaaagacaauucu

SEQ ID NO: 2286188 - RNA, 22 nt, Human
cgcaucaaaagacaauucuuua

SEQ ID NO: 2286189 - RNA, 14 nt, Human
cgcaucaaaagaca

SEQ ID NO: 2286190 - RNA, 15 nt, Human
cgcaucaaaagacaa

SEQ ID NO: 2286191 - RNA, 18 nt, Human
cgcaucaaaagacaauuc

SEQ ID NO: 2286192 - RNA, 23 nt, Human
cgauacugcgacuuucugccugg

SEQ ID NO: 2286193 - RNA, 15 nt, Human
cgcauaggaccuuuc

SEQ ID NO: 2286194 - RNA, 19 nt, Human
cgauacugcgacuuucugc

SEQ ID NO: 2286195 - RNA, 16 nt, Human
cgaguuuggucccugg

SEQ ID NO: 2286196 - RNA, 15 nt, Human
cgauaaucagagaaa

SEQ ID NO: 2286197 - RNA, 20 nt, Human
cgauacugcgacuuucugcc

SEQ ID NO: 2286198 - RNA, 22 nt, Human
cgauacugcgacuuucugccug

SEQ ID NO: 2286199 - RNA, 18 nt, Human
cgcugcugcgcccugggc

SEQ ID NO: 2286200 - RNA, 18 nt, Human
cgcugccccuggcagccc

SEQ ID NO: 2286201 - RNA, 19 nt, Human
cgcuggaccuugaacuggg

SEQ ID NO: 2286202 - RNA, 23 nt, Human
cgcuggaccuugaacuggguacu

SEQ ID NO: 2286203 - RNA, 22 nt, Human
cgccuucacuccggugugccug

SEQ ID NO: 2286204 - RNA, 23 nt, Human
cgccuuagguacuuauuccagau

SEQ ID NO: 2286205 - RNA, 22 nt, Human
cgccuuagcacuaccacuccug

SEQ ID NO: 2286206 - RNA, 21 nt, Human
cgccuguucccccgccgcuuu

SEQ ID NO: 2286207 - RNA, 21 nt, Human
cgccuuagcauguuugcugaa

SEQ ID NO: 2286208 - RNA, 13 nt, Human
cgcugccccuggc

SEQ ID NO: 2286209 - RNA, 16 nt, Human
cgcugccccuggcagc

SEQ ID NO: 2286210 - RNA, 17 nt, Human
cgcugccccuggcagcc

SEQ ID NO: 2286211 - RNA, 17 nt, Human
cgcuggggccaguuggu

SEQ ID NO: 2286212 - RNA, 23 nt, Human
cgcuggccgggaccccgagccug

SEQ ID NO: 2286213 - RNA, 18 nt, Human
cgcuggccgggaccccga

SEQ ID NO: 2286214 - RNA, 20 nt, Human
cgcuggacucucagucucug

SEQ ID NO: 2286215 - RNA, 19 nt, Human
cgcugcugcgcccugggcu

SEQ ID NO: 2286216 - RNA, 20 nt, Human
cgcugcugcgcccugggcuc

SEQ ID NO: 2286217 - RNA, 15 nt, Human
cgcugcugcugcugc

SEQ ID NO: 2286218 - RNA, 20 nt, Human
cgcugcugcugcugcgcccu

SEQ ID NO: 2286219 - RNA, 20 nt, Human
cgcuggggccaguugguccc

SEQ ID NO: 2286220 - RNA, 17 nt, Human
cgcugggcugagccccu

SEQ ID NO: 2286221 - RNA, 14 nt, Human
cgcugggcugagcc

SEQ ID NO: 2286222 - RNA, 15 nt, Human
cgcugggcugagccc

SEQ ID NO: 2286223 - RNA, 20 nt, Human
cgagguggaucacagaggcu

SEQ ID NO: 2286224 - RNA, 21 nt, Human
cgaggucaacagagaaggcag

SEQ ID NO: 2286225 - RNA, 23 nt, Human
cgaggucaacagagaaggcagga

SEQ ID NO: 2286226 - RNA, 17 nt, Human
cgaggucaacagagaag

SEQ ID NO: 2286227 - RNA, 16 nt, Human
cgaggucaacagagaa

SEQ ID NO: 2286228 - RNA, 15 nt, Human
cgaggucaacagaga

SEQ ID NO: 2286229 - RNA, 16 nt, Human
cgagguaugaggucua

SEQ ID NO: 2286230 - RNA, 20 nt, Human
cgagguagaguuugaaggag

SEQ ID NO: 2286231 - RNA, 23 nt, Human
cgagguggaucacagaggcuucu

SEQ ID NO: 2286232 - RNA, 22 nt, Human
cgagguggaucacagaggcuuc

SEQ ID NO: 2286233 - RNA, 19 nt, Human
cgaguagcugagauuauag

SEQ ID NO: 2286234 - RNA, 22 nt, Human
cgaguuguggaaagccucugcu

SEQ ID NO: 2286235 - RNA, 14 nt, Human
cgaguuuccccaga

SEQ ID NO: 2286236 - RNA, 17 nt, Human
cgaguuuggucccuggg

SEQ ID NO: 2286237 - RNA, 18 nt, Human
cgauacaccgggccugga

SEQ ID NO: 2286238 - RNA, 20 nt, Human
cgauacaccgggccuggaga

SEQ ID NO: 2286239 - RNA, 21 nt, Human
cgauacaccgggccuggagaa

SEQ ID NO: 2286240 - RNA, 19 nt, Human
cuaggccucagccagagaa

SEQ ID NO: 2286241 - RNA, 15 nt, Human
cuaggcgagugccag

SEQ ID NO: 2286242 - RNA, 18 nt, Human
cuaggcuacaauuuucuc

SEQ ID NO: 2286243 - RNA, 19 nt, Human
cuaggcgagugccaggacu

SEQ ID NO: 2286244 - RNA, 20 nt, Human
cuaggcgagugccaggacuc

SEQ ID NO: 2286245 - RNA, 16 nt, Human
cuaggcgagugccagg

SEQ ID NO: 2286246 - RNA, 17 nt, Human
cuaggcgagugccagga

SEQ ID NO: 2286247 - RNA, 18 nt, Human
cuaggcgagugccaggac

SEQ ID NO: 2286248 - RNA, 13 nt, Human
cuaggccugggga

SEQ ID NO: 2286249 - RNA, 12 nt, Human
cuaggccugggg

SEQ ID NO: 2286250 - RNA, 14 nt, Human
cuaggccuggccag

SEQ ID NO: 2286251 - RNA, 15 nt, Human
cuaggccuggccaga

SEQ ID NO: 2286252 - RNA, 18 nt, Human
cuaggccuggccagaugc

SEQ ID NO: 2286253 - RNA, 19 nt, Human
cuaggccuggccagaugca

SEQ ID NO: 2286254 - RNA, 18 nt, Human
cuaggccucagccagaga

SEQ ID NO: 2286255 - RNA, 17 nt, Human
cuaggccucagccagag

SEQ ID NO: 2286256 - RNA, 16 nt, Human
cuaggccucagccaga

SEQ ID NO: 2286257 - RNA, 15 nt, Human
cuaggccucagccag

SEQ ID NO: 2286258 - RNA, 13 nt, Human
cuaggccuggcca

SEQ ID NO: 2286259 - RNA, 12 nt, Human
cuaggccgggcg

SEQ ID NO: 2286260 - RNA, 23 nt, Human
cuaggcccccacuugccucuucc

SEQ ID NO: 2286261 - RNA, 13 nt, Human
cuaggccucagcc

SEQ ID NO: 2286262 - RNA, 19 nt, Human
cuaggcccccacuugccuc

SEQ ID NO: 2286263 - RNA, 14 nt, Human
cuagcccaggagag

SEQ ID NO: 2286264 - RNA, 17 nt, Human
cuaggcccccacuugcc

SEQ ID NO: 2286265 - RNA, 20 nt, Human
cuaggcccccacuugccucu

SEQ ID NO: 2286266 - RNA, 22 nt, Human
cuaggcccccacuugccucuuc

SEQ ID NO: 2286267 - RNA, 19 nt, Human
cuagccagaggagagagga

SEQ ID NO: 2286268 - RNA, 17 nt, Human
cuagccagaggagagag

SEQ ID NO: 2286269 - RNA, 18 nt, Human
cuagcccaaugaaaugaa

SEQ ID NO: 2286270 - RNA, 17 nt, Human
cuagccauuccugguac

SEQ ID NO: 2286271 - RNA, 20 nt, Human
cuagccauuccugguaccca

SEQ ID NO: 2286272 - RNA, 21 nt, Human
cuagccauuccugguacccag

SEQ ID NO: 2286273 - RNA, 13 nt, Human
cuagcccaggaga

SEQ ID NO: 2286274 - RNA, 14 nt, Human
cuagccauuccugg

SEQ ID NO: 2286275 - RNA, 20 nt, Human
cuagccagcacuuguauaua

SEQ ID NO: 2286276 - RNA, 15 nt, Human
cuagccauuccuggu

SEQ ID NO: 2286277 - RNA, 22 nt, Human
cuagaaucagccuaggggucag

SEQ ID NO: 2286278 - RNA, 21 nt, Human
cuagaauauccuacuucucca

SEQ ID NO: 2286279 - RNA, 19 nt, Human
cuagaauauccuacuucuc

SEQ ID NO: 2286280 - RNA, 20 nt, Human
cuagaauauccuacuucucc

SEQ ID NO: 2286281 - RNA, 20 nt, Human
cuagaaucuggagagcuaga

SEQ ID NO: 2286282 - RNA, 16 nt, Human
cuagaaguuacugaau

SEQ ID NO: 2286283 - RNA, 17 nt, Human
cuagaaguuacugaaug

SEQ ID NO: 2286284 - RNA, 18 nt, Human
cuagaaguuacugaaugc

SEQ ID NO: 2286285 - RNA, 19 nt, Human
cuagaaguuacugaaugca

SEQ ID NO: 2286286 - RNA, 20 nt, Human
cuagaaguuacugaaugcac

SEQ ID NO: 2286287 - RNA, 21 nt, Human
cuagaauuuaucacacuucug

SEQ ID NO: 2286288 - RNA, 12 nt, Human
cuagaauuuauu

SEQ ID NO: 2286289 - RNA, 13 nt, Human
cuagaauuuauuc

SEQ ID NO: 2286290 - RNA, 16 nt, Human
cuagaauucccucucu

SEQ ID NO: 2286291 - RNA, 20 nt, Human
cuagaauucccucucucuga

SEQ ID NO: 2286292 - RNA, 22 nt, Human
cuagaauucccucucucugacu

SEQ ID NO: 2286293 - RNA, 15 nt, Human
cuagaauucuagugc

SEQ ID NO: 2286294 - RNA, 16 nt, Human
cuagaauucuagugcu

SEQ ID NO: 2286295 - RNA, 18 nt, Human
cuagaauucuagugcugc

SEQ ID NO: 2286296 - RNA, 19 nt, Human
cuagaauucuagugcugcu

SEQ ID NO: 2286297 - RNA, 20 nt, Human
cuagaauucuagugcugcug

SEQ ID NO: 2286298 - RNA, 20 nt, Human
cuagcauacguacacauuuu

SEQ ID NO: 2286299 - RNA, 19 nt, Human
cuagcauacguacacauuu

SEQ ID NO: 2286300 - RNA, 18 nt, Human
cuagcauacguacacauu

SEQ ID NO: 2286301 - RNA, 16 nt, Human
cuagcauacguacaca

SEQ ID NO: 2286302 - RNA, 13 nt, Human
cuagacacugcca

SEQ ID NO: 2286303 - RNA, 14 nt, Human
cuagacauucuguc

SEQ ID NO: 2286304 - RNA, 15 nt, Human
cuagacauucugucg

SEQ ID NO: 2286305 - RNA, 16 nt, Human
cuagacauucugucgc

SEQ ID NO: 2286306 - RNA, 14 nt, Human
cuagggagagaccc

SEQ ID NO: 2286307 - RNA, 17 nt, Human
cuagggaccccuccucc

SEQ ID NO: 2286308 - RNA, 20 nt, Human
cuagggaccccuccucccuu

SEQ ID NO: 2286309 - RNA, 20 nt, Human
cuagggaaaugaucaguuuu

SEQ ID NO: 2286310 - RNA, 15 nt, Human
cuagggaccccuccu

SEQ ID NO: 2286311 - RNA, 16 nt, Human
cuagggaccccuccuc

SEQ ID NO: 2286312 - RNA, 14 nt, Human
cuagggaagggugg

SEQ ID NO: 2286313 - RNA, 15 nt, Human
cuaggcuggagccca

SEQ ID NO: 2286314 - RNA, 16 nt, Human
cuagggaaacuucccg

SEQ ID NO: 2286315 - RNA, 17 nt, Human
cuagggaaacuucccgu

SEQ ID NO: 2286316 - RNA, 23 nt, Human
cuagggaggaccuuaucugugcg

SEQ ID NO: 2286317 - RNA, 21 nt, Human
cuagggaggaccuuaucugug

SEQ ID NO: 2286318 - RNA, 14 nt, Human
cuagggaggaccuu

SEQ ID NO: 2286319 - RNA, 15 nt, Human
cuagggagagacccu

SEQ ID NO: 2286320 - RNA, 21 nt, Human
cuaggggucagggaccaagga

SEQ ID NO: 2286321 - RNA, 23 nt, Human
cuaggggucuuguuaagugcagu

SEQ ID NO: 2286322 - RNA, 16 nt, Human
cuaggggucaggcucc

SEQ ID NO: 2286323 - RNA, 18 nt, Human
cuaggggucaggcuccau

SEQ ID NO: 2286324 - RNA, 23 nt, Human
cuagggggagccccuucugcuca

SEQ ID NO: 2286325 - RNA, 14 nt, Human
cuagggggaaguga

SEQ ID NO: 2286326 - RNA, 14 nt, Human
cuagggaagauaau

SEQ ID NO: 2286327 - RNA, 20 nt, Human
cuaggcucagagaugugcac

SEQ ID NO: 2286328 - RNA, 13 nt, Human
cuaggcuccaccc

SEQ ID NO: 2286329 - RNA, 22 nt, Human
cuaggcucagagaugugcaccc

SEQ ID NO: 2286330 - RNA, 20 nt, Human
cuaggcuacaauuuucuccc

SEQ ID NO: 2286331 - RNA, 12 nt, Human
cuaggcucagag

SEQ ID NO: 2286332 - RNA, 13 nt, Human
cuaggcucagaga

SEQ ID NO: 2286333 - RNA, 15 nt, Human
cuaggcucagagaug

SEQ ID NO: 2286334 - RNA, 17 nt, Human
cuaggguggcccuugca

SEQ ID NO: 2286335 - RNA, 13 nt, Human
cuaggguggcccu

SEQ ID NO: 2286336 - RNA, 15 nt, Human
cuaggguccugggga

SEQ ID NO: 2286337 - RNA, 14 nt, Human
cuaggguccugggg

SEQ ID NO: 2286338 - RNA, 13 nt, Human
cuaggguccuggg

SEQ ID NO: 2286339 - RNA, 19 nt, Human
cuaguuugauuaaauucuu

SEQ ID NO: 2286340 - RNA, 17 nt, Human
cuaguuugauuaaauuc

SEQ ID NO: 2286341 - RNA, 14 nt, Human
cuaguucuguagaa

SEQ ID NO: 2286342 - RNA, 13 nt, Human
cuauaaaacaggu

SEQ ID NO: 2286343 - RNA, 16 nt, Human
cuauaaacaauuacau

SEQ ID NO: 2286344 - RNA, 20 nt, Human
cuaguuuucuccucccagga

SEQ ID NO: 2286345 - RNA, 20 nt, Human
cuaguuugauuaaauucuug

SEQ ID NO: 2286346 - RNA, 15 nt, Human
cuaguucuguagaaa

SEQ ID NO: 2286347 - RNA, 15 nt, Human
cuaguuugauuaaau

SEQ ID NO: 2286348 - RNA, 23 nt, Human
cuauaaagaagaacuugcaugga

SEQ ID NO: 2286349 - RNA, 17 nt, Human
cuauaaacaauuacaug

SEQ ID NO: 2286350 - RNA, 16 nt, Human
cuauaaaguaaagcua

SEQ ID NO: 2286351 - RNA, 23 nt, Human
cuacuaacaaucagcuccuuccu

SEQ ID NO: 2286352 - RNA, 15 nt, Human
cuacuaaaaaugcaa

SEQ ID NO: 2286353 - RNA, 14 nt, Human
cuacuaaaaaugca

SEQ ID NO: 2286354 - RNA, 19 nt, Human
cuaccuugugacccagcac

SEQ ID NO: 2286355 - RNA, 14 nt, Human
cuacuaaugauguu

SEQ ID NO: 2286356 - RNA, 13 nt, Human
cuacuaaugaugu

SEQ ID NO: 2286357 - RNA, 15 nt, Human
cuacuaauuccacac

SEQ ID NO: 2286358 - RNA, 12 nt, Human
cuacuaauucca

SEQ ID NO: 2286359 - RNA, 18 nt, Human
cuacuacaucgcccucca

SEQ ID NO: 2286360 - RNA, 16 nt, Human
cuacuacaucgcccuc

SEQ ID NO: 2286361 - RNA, 17 nt, Human
cuacuaauuccacaccu

SEQ ID NO: 2286362 - RNA, 22 nt, Human
cuacuagagucugaacagcugu

SEQ ID NO: 2286363 - RNA, 22 nt, Human
cuaccuugaggucuuuugacau

SEQ ID NO: 2286364 - RNA, 14 nt, Human
cuaccuugugaccc

SEQ ID NO: 2286365 - RNA, 21 nt, Human
cuaccuugguucccccacuga

SEQ ID NO: 2286366 - RNA, 23 nt, Human
cuaccuugaggucuuuugacaug

SEQ ID NO: 2286367 - RNA, 16 nt, Human
cuaccuugggggaacc

SEQ ID NO: 2286368 - RNA, 19 nt, Human
cuaccuugaaaauaagaau

SEQ ID NO: 2286369 - RNA, 14 nt, Human
cuaccuugaaaaua

SEQ ID NO: 2286370 - RNA, 13 nt, Human
cuaccuucuguag

SEQ ID NO: 2286371 - RNA, 14 nt, Human
cuaccuucuguagu

SEQ ID NO: 2286372 - RNA, 15 nt, Human
cuaccuucuguaguu

SEQ ID NO: 2286373 - RNA, 18 nt, Human
cuaccuucauuucaggag

SEQ ID NO: 2286374 - RNA, 19 nt, Human
cuaccuuccagucaggaug

SEQ ID NO: 2286375 - RNA, 20 nt, Human
cuaccugauuggugcaaccc

SEQ ID NO: 2286376 - RNA, 18 nt, Human
cuaccuuccaguuccuca

SEQ ID NO: 2286377 - RNA, 12 nt, Human
cuaccuucugua

SEQ ID NO: 2286378 - RNA, 16 nt, Human
cuaccugaggggccuc

SEQ ID NO: 2286379 - RNA, 19 nt, Human
cuaccugaggggccucuua

SEQ ID NO: 2286380 - RNA, 23 nt, Human
cuaccugaggggccucuuauggg

SEQ ID NO: 2286381 - RNA, 15 nt, Human
cuacucacagucucu

SEQ ID NO: 2286382 - RNA, 20 nt, Human
cuacucaagaggcugaggca

SEQ ID NO: 2286383 - RNA, 16 nt, Human
cuacucaagaggcuga

SEQ ID NO: 2286384 - RNA, 18 nt, Human
cuacuaugccagaugccu

SEQ ID NO: 2286385 - RNA, 21 nt, Human
cuacuacaucgcccuccacau

SEQ ID NO: 2286386 - RNA, 15 nt, Human
cuacuagaugucuuu

SEQ ID NO: 2286387 - RNA, 14 nt, Human
cuacuauauaugug

SEQ ID NO: 2286388 - RNA, 20 nt, Human
cuacuagggaaaugccuuug

SEQ ID NO: 2286389 - RNA, 18 nt, Human
cuacucacagucucuuua

SEQ ID NO: 2286390 - RNA, 17 nt, Human
cuacucacagucucuuu

SEQ ID NO: 2286391 - RNA, 13 nt, Human
cucagaagggagg

SEQ ID NO: 2286392 - RNA, 20 nt, Human
cucagaaggcaaaugacuuu

SEQ ID NO: 2286393 - RNA, 14 nt, Human
cucagaaggcucuu

SEQ ID NO: 2286394 - RNA, 15 nt, Human
cucagaaggcucuuc

SEQ ID NO: 2286395 - RNA, 13 nt, Human
cucagaagguauu

SEQ ID NO: 2286396 - RNA, 20 nt, Human
cucagaagggaggcuggggu

SEQ ID NO: 2286397 - RNA, 20 nt, Human
cucagaaggcucuucugacu

SEQ ID NO: 2286398 - RNA, 14 nt, Human
cucagaagggaggc

SEQ ID NO: 2286399 - RNA, 19 nt, Human
cucagaagguauuccuuuu

SEQ ID NO: 2286400 - RNA, 16 nt, Human
cucagaagguauuccu

SEQ ID NO: 2286401 - RNA, 12 nt, Human
cucagaauauug

SEQ ID NO: 2286402 - RNA, 23 nt, Human
cucagaauccaagugaacacuag

SEQ ID NO: 2286403 - RNA, 11 nt, Human
cucagaaucua

SEQ ID NO: 2286404 - RNA, 20 nt, Human
cucagaaucuacccaaagga

SEQ ID NO: 2286405 - RNA, 19 nt, Human
cucagaaguuucuucuuua

SEQ ID NO: 2286406 - RNA, 16 nt, Human
cucagaaguuucuucu

SEQ ID NO: 2286407 - RNA, 15 nt, Human
cucacuuuucuccau

SEQ ID NO: 2286408 - RNA, 18 nt, Human
cucagaaacacuggggcu

SEQ ID NO: 2286409 - RNA, 19 nt, Human
cucagaaacacuggggcug

SEQ ID NO: 2286410 - RNA, 21 nt, Human
cucagaaacacuggggcuggc

SEQ ID NO: 2286411 - RNA, 19 nt, Human
cucagaaggcaaaugacuu

SEQ ID NO: 2286412 - RNA, 19 nt, Human
cucagaaaacaaggaugaa

SEQ ID NO: 2286413 - RNA, 23 nt, Human
cucagaaaacaaggaugaauuaa

SEQ ID NO: 2286414 - RNA, 21 nt, Human
cucaccuggggugugggaggc

SEQ ID NO: 2286415 - RNA, 14 nt, Human
cucaccuguacucu

SEQ ID NO: 2286416 - RNA, 13 nt, Human
cucaccuguugcu

SEQ ID NO: 2286417 - RNA, 15 nt, Human
cucaccuguugcuua

SEQ ID NO: 2286418 - RNA, 12 nt, Human
cucaccuggggu

SEQ ID NO: 2286419 - RNA, 21 nt, Human
cucaccuggggcugcuggccu

SEQ ID NO: 2286420 - RNA, 17 nt, Human
cucaccuggggcugcug

SEQ ID NO: 2286421 - RNA, 20 nt, Human
cucaccuggggcugcuggcc

SEQ ID NO: 2286422 - RNA, 11 nt, Human
cucaccugggg

SEQ ID NO: 2286423 - RNA, 21 nt, Human
cucaccugggcaccuggggag

SEQ ID NO: 2286424 - RNA, 20 nt, Human
cucaccugggcaccugggga

SEQ ID NO: 2286425 - RNA, 21 nt, Human
cucaccugcuggccccucacc

SEQ ID NO: 2286426 - RNA, 19 nt, Human
cucaccugggcaccugggg

SEQ ID NO: 2286427 - RNA, 18 nt, Human
cucaccuugcaacacaca

SEQ ID NO: 2286428 - RNA, 17 nt, Human
cucaccuguugcuuaca

SEQ ID NO: 2286429 - RNA, 20 nt, Human
cucaccuguugcuuacaauu

SEQ ID NO: 2286430 - RNA, 21 nt, Human
cucaccuguugcuuacaauuu

SEQ ID NO: 2286431 - RNA, 22 nt, Human
cucaccuguugcuuacaauuuu

SEQ ID NO: 2286432 - RNA, 21 nt, Human
cucaccuugcaacacacagac

SEQ ID NO: 2286433 - RNA, 20 nt, Human
cucaccuugcaacacacaga

SEQ ID NO: 2286434 - RNA, 19 nt, Human
cucaccuugcaacacacag

SEQ ID NO: 2286435 - RNA, 17 nt, Human
cucaccuuggcaccaga

SEQ ID NO: 2286436 - RNA, 16 nt, Human
cucaccuuggcaccag

SEQ ID NO: 2286437 - RNA, 14 nt, Human
cucacuuuucucca

SEQ ID NO: 2286438 - RNA, 20 nt, Human
cucacuuuccuccugaggcu

SEQ ID NO: 2286439 - RNA, 14 nt, Human
cucacuucacccug

SEQ ID NO: 2286440 - RNA, 21 nt, Human
cucacuuaucccaagagaaug

SEQ ID NO: 2286441 - RNA, 22 nt, Human
cucaccuugcaacacacagaca

SEQ ID NO: 2286442 - RNA, 19 nt, Human
cucaccuuggcaccagaca

SEQ ID NO: 2286443 - RNA, 20 nt, Human
cucacuucugggcuucaucu

SEQ ID NO: 2286444 - RNA, 18 nt, Human
cucacuuccauacagcuc

SEQ ID NO: 2286445 - RNA, 15 nt, Human
cucacuugcccacac

SEQ ID NO: 2286446 - RNA, 20 nt, Human
cucacuuccauacagcucua

SEQ ID NO: 2286447 - RNA, 21 nt, Human
cucacuuggugauauguccua

SEQ ID NO: 2286448 - RNA, 16 nt, Human
cucaccucuaaaacag

SEQ ID NO: 2286449 - RNA, 12 nt, Human
cucaccucugcc

SEQ ID NO: 2286450 - RNA, 23 nt, Human
cucaccucaugcccacccccugc

SEQ ID NO: 2286451 - RNA, 14 nt, Human
cucaccucuggacu

SEQ ID NO: 2286452 - RNA, 19 nt, Human
cucaccucugccucaaugu

SEQ ID NO: 2286453 - RNA, 18 nt, Human
cucaccucugccucaaug

SEQ ID NO: 2286454 - RNA, 16 nt, Human
cucaccucugccucaa

SEQ ID NO: 2286455 - RNA, 15 nt, Human
cucaccucugccuca

SEQ ID NO: 2286456 - RNA, 14 nt, Human
cucaccucugccuc

SEQ ID NO: 2286457 - RNA, 13 nt, Human
cucaccucugccu

SEQ ID NO: 2286458 - RNA, 21 nt, Human
cucaccucuggacuggcuaga

SEQ ID NO: 2286459 - RNA, 15 nt, Human
cucaccucuggacug

SEQ ID NO: 2286460 - RNA, 22 nt, Human
cucaccucuggacuggcuagag

SEQ ID NO: 2286461 - RNA, 19 nt, Human
cucaccugagucacccuac

SEQ ID NO: 2286462 - RNA, 13 nt, Human
cucaccugccccu

SEQ ID NO: 2286463 - RNA, 19 nt, Human
cucaccugcuggccccuca

SEQ ID NO: 2286464 - RNA, 18 nt, Human
cucaccugcuggccccuc

SEQ ID NO: 2286465 - RNA, 16 nt, Human
cucaccugcuggcccc

SEQ ID NO: 2286466 - RNA, 15 nt, Human
cucaccugcuggccc

SEQ ID NO: 2286467 - RNA, 18 nt, Human
cucaccugccccucaacu

SEQ ID NO: 2286468 - RNA, 14 nt, Human
cucaccugccccuc

SEQ ID NO: 2286469 - RNA, 16 nt, Human
cucaccugccccucaa

SEQ ID NO: 2286470 - RNA, 14 nt, Human
cucaccucaugccc

SEQ ID NO: 2286471 - RNA, 17 nt, Human
cucaccuaacucauacu

SEQ ID NO: 2286472 - RNA, 23 nt, Human
cucaccuaauguuuaugagccag

SEQ ID NO: 2286473 - RNA, 21 nt, Human
cucaccguggcuaagaguguc

SEQ ID NO: 2286474 - RNA, 15 nt, Human
cucaccgcagucguc

SEQ ID NO: 2286475 - RNA, 21 nt, Human
cucaccgcagucgucgcacag

SEQ ID NO: 2286476 - RNA, 16 nt, Human
cucaccucccccaucu

SEQ ID NO: 2286477 - RNA, 15 nt, Human
cucaccucaugccca

SEQ ID NO: 2286478 - RNA, 17 nt, Human
cucaccucaugcccacc

SEQ ID NO: 2286479 - RNA, 13 nt, Human
cucaccucucccu

SEQ ID NO: 2286480 - RNA, 14 nt, Human
cucaccucucccuu

SEQ ID NO: 2286481 - RNA, 15 nt, Human
cucaccucucccuug

SEQ ID NO: 2286482 - RNA, 16 nt, Human
cucaccucucccuugg

SEQ ID NO: 2286483 - RNA, 17 nt, Human
cucaccucucccuugga

SEQ ID NO: 2286484 - RNA, 14 nt, Human
cucacccgaggcug

SEQ ID NO: 2286485 - RNA, 14 nt, Human
cucacccugagccc

SEQ ID NO: 2286486 - RNA, 14 nt, Human
cucacccuggggcu

SEQ ID NO: 2286487 - RNA, 21 nt, Human
cucacccugccuuaucuugca

SEQ ID NO: 2286488 - RNA, 15 nt, Human
cucacccugcuacac

SEQ ID NO: 2286489 - RNA, 13 nt, Human
cucacccugccuu

SEQ ID NO: 2286490 - RNA, 19 nt, Human
cucacccugagccccuucc

SEQ ID NO: 2286491 - RNA, 20 nt, Human
cucacccugagccccuuccu

SEQ ID NO: 2286492 - RNA, 14 nt, Human
cucacccugccuua

SEQ ID NO: 2286493 - RNA, 15 nt, Human
cucacccugccuuau

SEQ ID NO: 2286494 - RNA, 20 nt, Human
cucacaaccugaaccuagga

SEQ ID NO: 2286495 - RNA, 15 nt, Human
cucacaagaagacca

SEQ ID NO: 2286496 - RNA, 17 nt, Human
cucacaagaagaccaga

SEQ ID NO: 2286497 - RNA, 19 nt, Human
cucacaagaagaccagacu

SEQ ID NO: 2286498 - RNA, 12 nt, Human
cucacacagcca

SEQ ID NO: 2286499 - RNA, 21 nt, Human
cucacaauaaaaauggcucag

SEQ ID NO: 2286500 - RNA, 22 nt, Human
cucacaauaaaaauggcucaga

SEQ ID NO: 2286501 - RNA, 14 nt, Human
cucacacagccagg

SEQ ID NO: 2286502 - RNA, 15 nt, Human
cucacacagccaggu

SEQ ID NO: 2286503 - RNA, 16 nt, Human
cucacacagccaggug

SEQ ID NO: 2286504 - RNA, 19 nt, Human
cucacacagccaggugccu

SEQ ID NO: 2286505 - RNA, 20 nt, Human
cucacacagccaggugccuu

SEQ ID NO: 2286506 - RNA, 22 nt, Human
cucacacagccaggugccuugg

SEQ ID NO: 2286507 - RNA, 13 nt, Human
cucacacaggacc

SEQ ID NO: 2286508 - RNA, 16 nt, Human
cucacaaccugaaccu

SEQ ID NO: 2286509 - RNA, 17 nt, Human
cucacaaccugaaccua

SEQ ID NO: 2286510 - RNA, 19 nt, Human
cucacaacauggugucugg

SEQ ID NO: 2286511 - RNA, 14 nt, Human
cucacaaaggaugc

SEQ ID NO: 2286512 - RNA, 12 nt, Human
cucaaauaacua

SEQ ID NO: 2286513 - RNA, 13 nt, Human
cucaaauaaaaua

SEQ ID NO: 2286514 - RNA, 21 nt, Human
cucaaaguuuugaaaagcuau

SEQ ID NO: 2286515 - RNA, 23 nt, Human
cucaaaguuuugaaaagcuauua

SEQ ID NO: 2286516 - RNA, 14 nt, Human
cucaaauaaaauaa

SEQ ID NO: 2286517 - RNA, 14 nt, Human
cucacacaugagca

SEQ ID NO: 2286518 - RNA, 21 nt, Human
cucacacaugagcaucaggcc

SEQ ID NO: 2286519 - RNA, 21 nt, Human
cucacacaggacccccuuccc

SEQ ID NO: 2286520 - RNA, 22 nt, Human
cucacacaggacccccuucccc

SEQ ID NO: 2286521 - RNA, 22 nt, Human
cuaugugauuuuaacucugucu

SEQ ID NO: 2286522 - RNA, 21 nt, Human
cuaugugauuuuaacucuguc

SEQ ID NO: 2286523 - RNA, 20 nt, Human
cuaugugauuuuaacucugu

SEQ ID NO: 2286524 - RNA, 22 nt, Human
cuauguguagggcgggaggaug

SEQ ID NO: 2286525 - RNA, 15 nt, Human
cuauguugcccaggc

SEQ ID NO: 2286526 - RNA, 17 nt, Human
cuauguggcuguaucuu

SEQ ID NO: 2286527 - RNA, 14 nt, Human
cuauguugcccagg

SEQ ID NO: 2286528 - RNA, 22 nt, Human
cuauguauggaauacaguguua

SEQ ID NO: 2286529 - RNA, 13 nt, Human
cuauguauuugca

SEQ ID NO: 2286530 - RNA, 14 nt, Human
cuauguauggaaua

SEQ ID NO: 2286531 - RNA, 16 nt, Human
cuauguaucaaugagu

SEQ ID NO: 2286532 - RNA, 22 nt, Human
cuauguauuugcaguucaccug

SEQ ID NO: 2286533 - RNA, 18 nt, Human
cuaugucauuucauuucc

SEQ ID NO: 2286534 - RNA, 16 nt, Human
cuaugucauuucauuu

SEQ ID NO: 2286535 - RNA, 23 nt, Human
cuaugucauuugcuggagcucug

SEQ ID NO: 2286536 - RNA, 19 nt, Human
cuaugugauuuuaacucug

SEQ ID NO: 2286537 - RNA, 18 nt, Human
cuaugugauuuuaacucu

SEQ ID NO: 2286538 - RNA, 16 nt, Human
cuaugugauuuuaacu

SEQ ID NO: 2286539 - RNA, 11 nt, Human
cuaugugauuu

SEQ ID NO: 2286540 - RNA, 19 nt, Human
cuauguaucaaugaguaac

SEQ ID NO: 2286541 - RNA, 18 nt, Human
cuaucugcuuaugcaguu

SEQ ID NO: 2286542 - RNA, 21 nt, Human
cuaucucugugugcacaaaua

SEQ ID NO: 2286543 - RNA, 21 nt, Human
cuaucugaaccauuaaagucg

SEQ ID NO: 2286544 - RNA, 17 nt, Human
cuaucucgugggagagc

SEQ ID NO: 2286545 - RNA, 17 nt, Human
cuaucucugugugcaca

SEQ ID NO: 2286546 - RNA, 20 nt, Human
cuaucucccccagccccauc

SEQ ID NO: 2286547 - RNA, 11 nt, Human
cucaaaggcac

SEQ ID NO: 2286548 - RNA, 18 nt, Human
cucaaagagggagugcau

SEQ ID NO: 2286549 - RNA, 15 nt, Human
cucaaagucugcaac

SEQ ID NO: 2286550 - RNA, 12 nt, Human
cucaaaguuuug

SEQ ID NO: 2286551 - RNA, 14 nt, Human
cucaaaguuuugaa

SEQ ID NO: 2286552 - RNA, 15 nt, Human
cucaaaguuuugaaa

SEQ ID NO: 2286553 - RNA, 17 nt, Human
cucaaaguuuugaaaag

SEQ ID NO: 2286554 - RNA, 18 nt, Human
cucaaaguuuugaaaagc

SEQ ID NO: 2286555 - RNA, 19 nt, Human
cucaaaguuuugaaaagcu

SEQ ID NO: 2286556 - RNA, 23 nt, Human
cucaaagugacuauucaguuuuc

SEQ ID NO: 2286557 - RNA, 14 nt, Human
cucaaagucugcaa

SEQ ID NO: 2286558 - RNA, 13 nt, Human
cucaaagucugca

SEQ ID NO: 2286559 - RNA, 22 nt, Human
cucaaagacaauguuauuuucc

SEQ ID NO: 2286560 - RNA, 17 nt, Human
cucaaacugccuuggcu

SEQ ID NO: 2286561 - RNA, 22 nt, Human
cucaaacugaggaauuucaccu

SEQ ID NO: 2286562 - RNA, 22 nt, Human
cucaaaacccaucugggcuccu

SEQ ID NO: 2286563 - RNA, 20 nt, Human
cucaaacuuuuccccugucc

SEQ ID NO: 2286564 - RNA, 19 nt, Human
cucaaaacccaucugggcu

SEQ ID NO: 2286565 - RNA, 17 nt, Human
cucaaaacugcacuguc

SEQ ID NO: 2286566 - RNA, 19 nt, Human
cucaaacugaggaauuuca

SEQ ID NO: 2286567 - RNA, 13 nt, Human
cucaaaacugcac

SEQ ID NO: 2286568 - RNA, 14 nt, Human
cuauuuuucagaau

SEQ ID NO: 2286569 - RNA, 15 nt, Human
cuauuuuuauuuaua

SEQ ID NO: 2286570 - RNA, 16 nt, Human
cuauuuuuacugccac

SEQ ID NO: 2286571 - RNA, 17 nt, Human
cuauuuuuacugccacu

SEQ ID NO: 2286572 - RNA, 13 nt, Human
cuauguguaaggu

SEQ ID NO: 2286573 - RNA, 19 nt, Human
cuauuuuguaaacucaaaa

SEQ ID NO: 2286574 - RNA, 18 nt, Human
cuauuuuuacuagaacac

SEQ ID NO: 2286575 - RNA, 21 nt, Human
cuauuuuuacuagaacacaga

SEQ ID NO: 2286576 - RNA, 12 nt, Human
cuauuuuuacug

SEQ ID NO: 2286577 - RNA, 16 nt, Human
cuauguugcccaggca

SEQ ID NO: 2286578 - RNA, 17 nt, Human
cuauguugcccaggcag

SEQ ID NO: 2286579 - RNA, 16 nt, Human
cuauuuuuauuuauau

SEQ ID NO: 2286580 - RNA, 19 nt, Human
cuauuuuuacugccacucu

SEQ ID NO: 2286581 - RNA, 18 nt, Human
cuauuuuuauuuauauuu

SEQ ID NO: 2286582 - RNA, 14 nt, Human
cuauuuuucccccu

SEQ ID NO: 2286583 - RNA, 22 nt, Human
cuauuuuuggcagucugaauuu

SEQ ID NO: 2286584 - RNA, 18 nt, Human
cucaaaaaaagaaaaaga

SEQ ID NO: 2286585 - RNA, 21 nt, Human
cuauuuuuggcagucugaauu

SEQ ID NO: 2286586 - RNA, 18 nt, Human
cuauuuuuggcagucuga

SEQ ID NO: 2286587 - RNA, 22 nt, Human
ccugagggcagaaagguucugc

SEQ ID NO: 2286588 - RNA, 22 nt, Human
ccugaggcuuuggauuugacau

SEQ ID NO: 2286589 - RNA, 20 nt, Human
ccugaggcuuuggauuugac

SEQ ID NO: 2286590 - RNA, 23 nt, Human
ccugagggcagaaagguucugcc

SEQ ID NO: 2286591 - RNA, 13 nt, Human
ccugagggccccu

SEQ ID NO: 2286592 - RNA, 14 nt, Human
ccugagggccccuc

SEQ ID NO: 2286593 - RNA, 16 nt, Human
ccugagggccccucug

SEQ ID NO: 2286594 - RNA, 18 nt, Human
ccugagggccccucugcc

SEQ ID NO: 2286595 - RNA, 19 nt, Human
ccugagggccccucugccc

SEQ ID NO: 2286596 - RNA, 20 nt, Human
ccugagggccccucugccca

SEQ ID NO: 2286597 - RNA, 19 nt, Human
ccugaggguccccaccugg

SEQ ID NO: 2286598 - RNA, 21 nt, Human
ccugagggccccucugcccag

SEQ ID NO: 2286599 - RNA, 22 nt, Human
ccugagggccccucugcccagc

SEQ ID NO: 2286600 - RNA, 23 nt, Human
ccugagggccccucugcccagcu

SEQ ID NO: 2286601 - RNA, 13 nt, Human
ccugagggucccc

SEQ ID NO: 2286602 - RNA, 20 nt, Human
ccugaggugaaagggagcua

SEQ ID NO: 2286603 - RNA, 21 nt, Human
ccugaggucuggcugcuugcc

SEQ ID NO: 2286604 - RNA, 12 nt, Human
ccugaggucugg

SEQ ID NO: 2286605 - RNA, 15 nt, Human
ccugaggucuggcug

SEQ ID NO: 2286606 - RNA, 17 nt, Human
ccugaggucuggcugcu

SEQ ID NO: 2286607 - RNA, 19 nt, Human
ccugaggucuggcugcuug

SEQ ID NO: 2286608 - RNA, 13 nt, Human
ccugaggguggag

SEQ ID NO: 2286609 - RNA, 15 nt, Human
ccugaggguggagac

SEQ ID NO: 2286610 - RNA, 16 nt, Human
ccugaggguggagacu

SEQ ID NO: 2286611 - RNA, 22 nt, Human
ccugaggucaggaguucaagac

SEQ ID NO: 2286612 - RNA, 16 nt, Human
ccugaggucucgcuga

SEQ ID NO: 2286613 - RNA, 19 nt, Human
ccugaguuccuagccaccg

SEQ ID NO: 2286614 - RNA, 15 nt, Human
ccugagguguggggg

SEQ ID NO: 2286615 - RNA, 17 nt, Human
ccugaggugugggggcu

SEQ ID NO: 2286616 - RNA, 19 nt, Human
ccugaggugugggggcugc

SEQ ID NO: 2286617 - RNA, 20 nt, Human
ccugaggugugggggcugca

SEQ ID NO: 2286618 - RNA, 15 nt, Human
ccugaggugggccca

SEQ ID NO: 2286619 - RNA, 16 nt, Human
ccugaggugggcccag

SEQ ID NO: 2286620 - RNA, 17 nt, Human
ccugaggugggcccagg

SEQ ID NO: 2286621 - RNA, 18 nt, Human
ccugaggugggcccagga

SEQ ID NO: 2286622 - RNA, 19 nt, Human
ccugaggugggcccaggac

SEQ ID NO: 2286623 - RNA, 21 nt, Human
ccugaggugggcccaggacca

SEQ ID NO: 2286624 - RNA, 23 nt, Human
ccugaggugggcccaggaccagc

SEQ ID NO: 2286625 - RNA, 23 nt, Human
ccugagcaacagagugagacccu

SEQ ID NO: 2286626 - RNA, 15 nt, Human
ccugaggcugugguc

SEQ ID NO: 2286627 - RNA, 16 nt, Human
ccugaggcugugguca

SEQ ID NO: 2286628 - RNA, 17 nt, Human
ccugaggcuguggucac

SEQ ID NO: 2286629 - RNA, 21 nt, Human
ccugagcaacagagugagacc

SEQ ID NO: 2286630 - RNA, 23 nt, Human
ccugagauuucaucugcucuccu

SEQ ID NO: 2286631 - RNA, 18 nt, Human
ccugagauuucaucugcu

SEQ ID NO: 2286632 - RNA, 22 nt, Human
ccugagauuucaucugcucucc

SEQ ID NO: 2286633 - RNA, 11 nt, Human
ccugagauuuc

SEQ ID NO: 2286634 - RNA, 15 nt, Human
ccugagauuucaucu

SEQ ID NO: 2286635 - RNA, 16 nt, Human
ccugagauuucaucug

SEQ ID NO: 2286636 - RNA, 17 nt, Human
ccugagauuucaucugc

SEQ ID NO: 2286637 - RNA, 14 nt, Human
ccugagauuuacac

SEQ ID NO: 2286638 - RNA, 22 nt, Human
ccugacccgucuaauauauaaa

SEQ ID NO: 2286639 - RNA, 18 nt, Human
ccugagaucucugcagga

SEQ ID NO: 2286640 - RNA, 17 nt, Human
ccugagaucucugcagg

SEQ ID NO: 2286641 - RNA, 18 nt, Human
ccugaccccucauagccc

SEQ ID NO: 2286642 - RNA, 15 nt, Human
ccugaccccugcuca

SEQ ID NO: 2286643 - RNA, 14 nt, Human
ccugaccccugcuc

SEQ ID NO: 2286644 - RNA, 12 nt, Human
ccugacccgucu

SEQ ID NO: 2286645 - RNA, 16 nt, Human
ccugaccccugcucag

SEQ ID NO: 2286646 - RNA, 17 nt, Human
ccugauaauaauugauc

SEQ ID NO: 2286647 - RNA, 17 nt, Human
ccugauaacaaccugga

SEQ ID NO: 2286648 - RNA, 18 nt, Human
ccugauaacaaccuggag

SEQ ID NO: 2286649 - RNA, 19 nt, Human
ccugauaaagaacaucugu

SEQ ID NO: 2286650 - RNA, 14 nt, Human
ccugauaugauuua

SEQ ID NO: 2286651 - RNA, 19 nt, Human
ccugauaacaaccuggaga

SEQ ID NO: 2286652 - RNA, 15 nt, Human
ccugauauaaaugca

SEQ ID NO: 2286653 - RNA, 21 nt, Human
ccugauauuucccuccccugg

SEQ ID NO: 2286654 - RNA, 19 nt, Human
ccugauaugauuuaaaaca

SEQ ID NO: 2286655 - RNA, 20 nt, Human
ccugauaugauuuaaaacau

SEQ ID NO: 2286656 - RNA, 21 nt, Human
ccugaggugugggggcugcag

SEQ ID NO: 2286657 - RNA, 21 nt, Human
ccugaguuccuagccaccgcc

SEQ ID NO: 2286658 - RNA, 20 nt, Human
ccugaguuccuagccaccgc

SEQ ID NO: 2286659 - RNA, 14 nt, Human
ccugcaggcagcca

SEQ ID NO: 2286660 - RNA, 20 nt, Human
ccugcaggaccugccuguag

SEQ ID NO: 2286661 - RNA, 19 nt, Human
ccugcaggaccugccugua

SEQ ID NO: 2286662 - RNA, 12 nt, Human
ccugcaggcagc

SEQ ID NO: 2286663 - RNA, 13 nt, Human
ccugcaggcagcc

SEQ ID NO: 2286664 - RNA, 23 nt, Human
ccucggagccucauccgaggcag

SEQ ID NO: 2286665 - RNA, 16 nt, Human
ccucggagccucaucc

SEQ ID NO: 2286666 - RNA, 14 nt, Human
ccucggagccucau

SEQ ID NO: 2286667 - RNA, 13 nt, Human
ccucggagccuca

SEQ ID NO: 2286668 - RNA, 17 nt, Human
ccucggaucaccgagag

SEQ ID NO: 2286669 - RNA, 15 nt, Human
ccucggaucaccgag

SEQ ID NO: 2286670 - RNA, 22 nt, Human
ccucggccucccaaagugcugg

SEQ ID NO: 2286671 - RNA, 16 nt, Human
ccucggccuggcuccu

SEQ ID NO: 2286672 - RNA, 12 nt, Human
ccucggcuccug

SEQ ID NO: 2286673 - RNA, 13 nt, Human
ccucggcuccugc

SEQ ID NO: 2286674 - RNA, 14 nt, Human
ccucggcuccugcu

SEQ ID NO: 2286675 - RNA, 19 nt, Human
ccucuuucccucccuuccu

SEQ ID NO: 2286676 - RNA, 18 nt, Human
ccucuugcggucccuucu

SEQ ID NO: 2286677 - RNA, 23 nt, Human
ccucuuuccucucuuuguucuca

SEQ ID NO: 2286678 - RNA, 15 nt, Human
ccucuuugagugaag

SEQ ID NO: 2286679 - RNA, 15 nt, Human
ccucuuuccucucuu

SEQ ID NO: 2286680 - RNA, 21 nt, Human
ccugacccaggccgcagcucu

SEQ ID NO: 2286681 - RNA, 15 nt, Human
ccugacccagucccc

SEQ ID NO: 2286682 - RNA, 16 nt, Human
ccucuuucccucccuu

SEQ ID NO: 2286683 - RNA, 17 nt, Human
ccucuugcggucccuuc

SEQ ID NO: 2286684 - RNA, 16 nt, Human
ccucuugccuccugga

SEQ ID NO: 2286685 - RNA, 12 nt, Human
ccucuugcucaa

SEQ ID NO: 2286686 - RNA, 23 nt, Human
ccucuugccccccaccccagccu

SEQ ID NO: 2286687 - RNA, 21 nt, Human
ccucuugccccccaccccagc

SEQ ID NO: 2286688 - RNA, 16 nt, Human
ccucuugccccccacc

SEQ ID NO: 2286689 - RNA, 12 nt, Human
ccucuugccccc

SEQ ID NO: 2286690 - RNA, 16 nt, Human
ccucuugccccaaccc

SEQ ID NO: 2286691 - RNA, 21 nt, Human
ccucuugccccaacccccagc

SEQ ID NO: 2286692 - RNA, 22 nt, Human
ccucuugccccaacccccagca

SEQ ID NO: 2286693 - RNA, 23 nt, Human
ccucuugccccaacccccagcac

SEQ ID NO: 2286694 - RNA, 23 nt, Human
ccucuugccacugccucuuccuc

SEQ ID NO: 2286695 - RNA, 12 nt, Human
ccucuugcccca

SEQ ID NO: 2286696 - RNA, 15 nt, Human
ccucuugccccaacc

SEQ ID NO: 2286697 - RNA, 22 nt, Human
ccucuugccacugccucuuccu

SEQ ID NO: 2286698 - RNA, 14 nt, Human
ccucuugccacugc

SEQ ID NO: 2286699 - RNA, 13 nt, Human
ccugccuccaccc

SEQ ID NO: 2286700 - RNA, 14 nt, Human
ccugccuccacccu

SEQ ID NO: 2286701 - RNA, 20 nt, Human
ccugccucucaucaacugaa

SEQ ID NO: 2286702 - RNA, 23 nt, Human
ccugccucucaucaacugaauga

SEQ ID NO: 2286703 - RNA, 17 nt, Human
ccugccucagccucccg

SEQ ID NO: 2286704 - RNA, 12 nt, Human
ccugccucagga

SEQ ID NO: 2286705 - RNA, 22 nt, Human
ccugcccacacagguucacgug

SEQ ID NO: 2286706 - RNA, 13 nt, Human
ccugccucucugc

SEQ ID NO: 2286707 - RNA, 20 nt, Human
ccugcugagucccaggcuga

SEQ ID NO: 2286708 - RNA, 19 nt, Human
ccugcugagucccaggcug

SEQ ID NO: 2286709 - RNA, 18 nt, Human
ccugcugagucccaggcu

SEQ ID NO: 2286710 - RNA, 14 nt, Human
ccugccucucugca

SEQ ID NO: 2286711 - RNA, 15 nt, Human
ccugccucucugcag

SEQ ID NO: 2286712 - RNA, 16 nt, Human
ccugccucagccuccc

SEQ ID NO: 2286713 - RNA, 15 nt, Human
ccugccucagccucc

SEQ ID NO: 2286714 - RNA, 21 nt, Human
ccugcccaggccccugccacc

SEQ ID NO: 2286715 - RNA, 22 nt, Human
ccugcccaggccccugccaccc

SEQ ID NO: 2286716 - RNA, 18 nt, Human
ccugcccaggccccugcc

SEQ ID NO: 2286717 - RNA, 14 nt, Human
ccugcccacacagg

SEQ ID NO: 2286718 - RNA, 19 nt, Human
ccugcccaggccccugcca

SEQ ID NO: 2286719 - RNA, 18 nt, Human
ccugcccaccuggccucu

SEQ ID NO: 2286720 - RNA, 19 nt, Human
ccugcccaccuggccucug

SEQ ID NO: 2286721 - RNA, 23 nt, Human
ccugccauuugcacccuccgccu

SEQ ID NO: 2286722 - RNA, 17 nt, Human
ccugccauuugcacccu

SEQ ID NO: 2286723 - RNA, 18 nt, Human
ccugccaucuucccagca

SEQ ID NO: 2286724 - RNA, 16 nt, Human
ccugccaucuucccag

SEQ ID NO: 2286725 - RNA, 17 nt, Human
ccugccaucuucccagc

SEQ ID NO: 2286726 - RNA, 23 nt, Human
ccugccagugccuuaccuccugc

SEQ ID NO: 2286727 - RNA, 14 nt, Human
ccugccaucuuccc

SEQ ID NO: 2286728 - RNA, 15 nt, Human
ccugccaucuuccca

SEQ ID NO: 2286729 - RNA, 15 nt, Human
ccugcccaccuggcc

SEQ ID NO: 2286730 - RNA, 17 nt, Human
ccugcccaccuggccuc

SEQ ID NO: 2286731 - RNA, 20 nt, Human
ccugccaucauguuuacaga

SEQ ID NO: 2286732 - RNA, 18 nt, Human
ccugccaucauguuuaca

SEQ ID NO: 2286733 - RNA, 13 nt, Human
ccugucuccuuuc

SEQ ID NO: 2286734 - RNA, 23 nt, Human
ccugucuccuuucaccccagggc

SEQ ID NO: 2286735 - RNA, 22 nt, Human
ccuguaacacaagccacagaag

SEQ ID NO: 2286736 - RNA, 17 nt, Human
ccugucucuacuaaaaa

SEQ ID NO: 2286737 - RNA, 20 nt, Human
ccugucucauccccaggggu

SEQ ID NO: 2286738 - RNA, 18 nt, Human
ccuguaacuugagaguag

SEQ ID NO: 2286739 - RNA, 18 nt, Human
ccugucucauccccaggg

SEQ ID NO: 2286740 - RNA, 21 nt, Human
ccuguaaccucuucagaggcc

SEQ ID NO: 2286741 - RNA, 16 nt, Human
ccuguaaccucuucag

SEQ ID NO: 2286742 - RNA, 19 nt, Human
ccuguaacauacuggccug

SEQ ID NO: 2286743 - RNA, 23 nt, Human
ccuguaacauacuggccuggacu

SEQ ID NO: 2286744 - RNA, 19 nt, Human
ccuguaaaugguguacaua

SEQ ID NO: 2286745 - RNA, 13 nt, Human
ccuguaaaccuga

SEQ ID NO: 2286746 - RNA, 19 nt, Human
ccuguaaaaaaaaaaaagu

SEQ ID NO: 2286747 - RNA, 18 nt, Human
ccuguaacacaagccaca

SEQ ID NO: 2286748 - RNA, 19 nt, Human
ccuguaacacaagccacag

SEQ ID NO: 2286749 - RNA, 20 nt, Human
ccuguaacacaagccacaga

SEQ ID NO: 2286750 - RNA, 21 nt, Human
ccuguaacacaagccacagaa

SEQ ID NO: 2286751 - RNA, 23 nt, Human
ccuguaacacaagccacagaagc

SEQ ID NO: 2286752 - RNA, 12 nt, Human
ccuguaaaccug

SEQ ID NO: 2286753 - RNA, 19 nt, Human
ccugguuuuuguagccuuc

SEQ ID NO: 2286754 - RNA, 22 nt, Human
ccugguuuuuguagccuuccuc

SEQ ID NO: 2286755 - RNA, 22 nt, Human
ccugguuuccugcccugggagg

SEQ ID NO: 2286756 - RNA, 18 nt, Human
ccugguuuuuguagccuu

SEQ ID NO: 2286757 - RNA, 22 nt, Human
ccugguuuuuaaauagaguuug

SEQ ID NO: 2286758 - RNA, 21 nt, Human
ccugucuccuuugcaggcuca

SEQ ID NO: 2286759 - RNA, 21 nt, Human
ccugucucuagccacuuuggu

SEQ ID NO: 2286760 - RNA, 14 nt, Human
ccuggauucauuuc

SEQ ID NO: 2286761 - RNA, 15 nt, Human
ccuggauucauuucc

SEQ ID NO: 2286762 - RNA, 17 nt, Human
ccuggauucauuuccug

SEQ ID NO: 2286763 - RNA, 18 nt, Human
ccuggauucauuuccugc

SEQ ID NO: 2286764 - RNA, 19 nt, Human
ccuggauucauuuccugcc

SEQ ID NO: 2286765 - RNA, 20 nt, Human
ccuggauucauuuccugccc

SEQ ID NO: 2286766 - RNA, 21 nt, Human
ccuggauucauuuccugcccu

SEQ ID NO: 2286767 - RNA, 23 nt, Human
ccuggauucauuuccugcccuuc

SEQ ID NO: 2286768 - RNA, 17 nt, Human
ccuggauggggcugcac

SEQ ID NO: 2286769 - RNA, 18 nt, Human
ccuggauggggcugcacc

SEQ ID NO: 2286770 - RNA, 12 nt, Human
ccugcugcacca

SEQ ID NO: 2286771 - RNA, 16 nt, Human
ccugcugcaccaaccc

SEQ ID NO: 2286772 - RNA, 17 nt, Human
ccugcugcaccaaccca

SEQ ID NO: 2286773 - RNA, 18 nt, Human
ccugcugcaccaacccag

SEQ ID NO: 2286774 - RNA, 19 nt, Human
ccugcugcaccaacccagc

SEQ ID NO: 2286775 - RNA, 20 nt, Human
ccugcugcaccaacccagcc

SEQ ID NO: 2286776 - RNA, 21 nt, Human
ccugcugcaccaacccagccg

SEQ ID NO: 2286777 - RNA, 23 nt, Human
ccugcugcaccaacccagccgcu

SEQ ID NO: 2286778 - RNA, 14 nt, Human
ccugcugcagaggg

SEQ ID NO: 2286779 - RNA, 16 nt, Human
ccugcugcagaggggc

SEQ ID NO: 2286780 - RNA, 18 nt, Human
ccugcugcagaggggcag

SEQ ID NO: 2286781 - RNA, 22 nt, Human
ccugcugcagaggggcaggccc

SEQ ID NO: 2286782 - RNA, 23 nt, Human
ccugcugcagaggggcaggcccu

SEQ ID NO: 2286783 - RNA, 12 nt, Human
ccugcugcaggg

SEQ ID NO: 2286784 - RNA, 13 nt, Human
ccugcugcagggg

SEQ ID NO: 2286785 - RNA, 15 nt, Human
ccuggauggggcugc

SEQ ID NO: 2286786 - RNA, 14 nt, Human
ccugcugcaggggc

SEQ ID NO: 2286787 - RNA, 12 nt, Human
ccuggcaauagu

SEQ ID NO: 2286788 - RNA, 23 nt, Human
ccuggcaagcuagaaccuggagg

SEQ ID NO: 2286789 - RNA, 21 nt, Human
ccuggcaagcuagaaccugga

SEQ ID NO: 2286790 - RNA, 22 nt, Human
ccuggcaagcuagaaccuggag

SEQ ID NO: 2286791 - RNA, 23 nt, Human
ccuggcaaagggagcagaacuga

SEQ ID NO: 2286792 - RNA, 19 nt, Human
ccuggcaaagggagcagaa

SEQ ID NO: 2286793 - RNA, 21 nt, Human
ccuggcaauaguguguucuga

SEQ ID NO: 2286794 - RNA, 19 nt, Human
ccuggcaauaguguguucu

SEQ ID NO: 2286795 - RNA, 12 nt, Human
ccuggcacacau

SEQ ID NO: 2286796 - RNA, 13 nt, Human
ccuggcacacauc

SEQ ID NO: 2286797 - RNA, 15 nt, Human
ccuggcacacaucag

SEQ ID NO: 2286798 - RNA, 16 nt, Human
ccugccuccacccucu

SEQ ID NO: 2286799 - RNA, 12 nt, Human
ccuggccugcug

SEQ ID NO: 2286800 - RNA, 16 nt, Human
ccuggccugaggucuc

SEQ ID NO: 2286801 - RNA, 12 nt, Human
ccuggccuggca

SEQ ID NO: 2286802 - RNA, 13 nt, Human
ccuggccuggcac

SEQ ID NO: 2286803 - RNA, 24 nt, Human
ccuggccuccggcgucagccucca

SEQ ID NO: 2286804 - RNA, 22 nt, Human
ccuggccuccggcgucagccuc

SEQ ID NO: 2286805 - RNA, 23 nt, Human
ccuggccuccggcgucagccucc

SEQ ID NO: 2286806 - RNA, 15 nt, Human
ccuggccuccccugc

SEQ ID NO: 2286807 - RNA, 17 nt, Human
ccuggccuccccugcca

SEQ ID NO: 2286808 - RNA, 18 nt, Human
ccuggccuccccugccac

SEQ ID NO: 2286809 - RNA, 19 nt, Human
ccuggccuccccugccacc

SEQ ID NO: 2286810 - RNA, 20 nt, Human
ccuggccuccccugccacca

SEQ ID NO: 2286811 - RNA, 13 nt, Human
ccuggccuccggc

SEQ ID NO: 2286812 - RNA, 21 nt, Human
ccuggccuccggcgucagccu

SEQ ID NO: 2286813 - RNA, 22 nt, Human
ccuggccucaagugauucuccu

SEQ ID NO: 2286814 - RNA, 20 nt, Human
ccuggccccucagggucccu

SEQ ID NO: 2286815 - RNA, 21 nt, Human
ccuggccccucagggucccug

SEQ ID NO: 2286816 - RNA, 18 nt, Human
ccuggccccucagggucc

SEQ ID NO: 2286817 - RNA, 21 nt, Human
ccugguuccggaauccugucc

SEQ ID NO: 2286818 - RNA, 16 nt, Human
ccugguuuccugcccu

SEQ ID NO: 2286819 - RNA, 20 nt, Human
ccugguuccggaauccuguc

SEQ ID NO: 2286820 - RNA, 22 nt, Human
ccugguucccguuucuccaccu

SEQ ID NO: 2286821 - RNA, 23 nt, Human
ccugguguuucuagcacuggccu

SEQ ID NO: 2286822 - RNA, 13 nt, Human
ccugguucccguu

SEQ ID NO: 2286823 - RNA, 21 nt, Human
ccugguguuucuagcacuggc

SEQ ID NO: 2286824 - RNA, 22 nt, Human
ccugguguuucuagcacuggcc

SEQ ID NO: 2286825 - RNA, 21 nt, Human
ccugguuuccugcccugggag

SEQ ID NO: 2286826 - RNA, 20 nt, Human
ccugguuuccugcccuggga

SEQ ID NO: 2286827 - RNA, 19 nt, Human
ccugguuuccugcccuggg

SEQ ID NO: 2286828 - RNA, 18 nt, Human
ccugguuuccugcccugg

SEQ ID NO: 2286829 - RNA, 13 nt, Human
ccugguguggaag

SEQ ID NO: 2286830 - RNA, 21 nt, Human
ccuggugguugcuguuuuccu

SEQ ID NO: 2286831 - RNA, 20 nt, Human
ccuggugugaagguccugcu

SEQ ID NO: 2286832 - RNA, 19 nt, Human
ccugguguuucuagcacug

SEQ ID NO: 2286833 - RNA, 12 nt, Human
ccuggugguuca

SEQ ID NO: 2286834 - RNA, 22 nt, Human
ccuggugguucacucuuggagc

SEQ ID NO: 2286835 - RNA, 13 nt, Human
ccuggugguucac

SEQ ID NO: 2286836 - RNA, 20 nt, Human
ccugguggcagugggagcug

SEQ ID NO: 2286837 - RNA, 19 nt, Human
ccuggggcuggccucccaa

SEQ ID NO: 2286838 - RNA, 17 nt, Human
ccuggggcugcuggccu

SEQ ID NO: 2286839 - RNA, 18 nt, Human
ccugguggguccaggggc

SEQ ID NO: 2286840 - RNA, 19 nt, Human
ccugguggguccaggggcc

SEQ ID NO: 2286841 - RNA, 22 nt, Human
ccugguggguccaggggccccu

SEQ ID NO: 2286842 - RNA, 23 nt, Human
ccugguggguccaggggccccuc

SEQ ID NO: 2286843 - RNA, 14 nt, Human
ccuggggcugcugg

SEQ ID NO: 2286844 - RNA, 18 nt, Human
ccuggggcucugugcagg

SEQ ID NO: 2286845 - RNA, 15 nt, Human
ccuggggcucugugc

SEQ ID NO: 2286846 - RNA, 17 nt, Human
ccuggggcuggccuccc

SEQ ID NO: 2286847 - RNA, 16 nt, Human
ccuggggcuggccucc

SEQ ID NO: 2286848 - RNA, 15 nt, Human
ccuggggcuggccuc

SEQ ID NO: 2286849 - RNA, 15 nt, Human
ccuggggcugcuggc

SEQ ID NO: 2286850 - RNA, 18 nt, Human
ccugguggcagugggagc

SEQ ID NO: 2286851 - RNA, 19 nt, Human
ccugguggcagugggagcu

SEQ ID NO: 2286852 - RNA, 22 nt, Human
ccuggggcuaggcuggagccca

SEQ ID NO: 2286853 - RNA, 20 nt, Human
ccuggggcuaggcuggagcc

SEQ ID NO: 2286854 - RNA, 17 nt, Human
ccuggggcgggccccuc

SEQ ID NO: 2286855 - RNA, 19 nt, Human
ccuggggcgggccccucau

SEQ ID NO: 2286856 - RNA, 19 nt, Human
ccuggggcagucaccugcc

SEQ ID NO: 2286857 - RNA, 24 nt, Human
ccuggggagugggacagagucugg

SEQ ID NO: 2286858 - RNA, 22 nt, Human
ccuggggcuccuuucuccagcc

SEQ ID NO: 2286859 - RNA, 20 nt, Human
ccuggggcuccuuucuccag

SEQ ID NO: 2286860 - RNA, 21 nt, Human
ccuggggcuccuuucuccagc

SEQ ID NO: 2286861 - RNA, 13 nt, Human
ccuggggcucccu

SEQ ID NO: 2286862 - RNA, 14 nt, Human
ccuggggcucccuu

SEQ ID NO: 2286863 - RNA, 15 nt, Human
ccuggggcuccuuuc

SEQ ID NO: 2286864 - RNA, 16 nt, Human
ccuggggcuccuuucu

SEQ ID NO: 2286865 - RNA, 15 nt, Human
ccuggggagaaagua

SEQ ID NO: 2286866 - RNA, 23 nt, Human
ccuggggagugggacagagucug

SEQ ID NO: 2286867 - RNA, 22 nt, Human
ccuggggagugggacagagucu

SEQ ID NO: 2286868 - RNA, 19 nt, Human
ccuggggagugggacagag

SEQ ID NO: 2286869 - RNA, 18 nt, Human
ccuggggagugggacaga

SEQ ID NO: 2286870 - RNA, 14 nt, Human
ccuggggagccagg

SEQ ID NO: 2286871 - RNA, 22 nt, Human
ccugggcugagagaaccucacg

SEQ ID NO: 2286872 - RNA, 22 nt, Human
ccugggcucugugggcugcacu

SEQ ID NO: 2286873 - RNA, 15 nt, Human
ccugggcucuguggg

SEQ ID NO: 2286874 - RNA, 19 nt, Human
ccugggcucugugggcugc

SEQ ID NO: 2286875 - RNA, 14 nt, Human
ccugggcuggaauc

SEQ ID NO: 2286876 - RNA, 20 nt, Human
ccugggcuggaaucaggaau

SEQ ID NO: 2286877 - RNA, 13 nt, Human
ccugggcugugcu

SEQ ID NO: 2286878 - RNA, 14 nt, Human
ccugggcugugcua

SEQ ID NO: 2286879 - RNA, 14 nt, Human
ccugggcuguuggc

SEQ ID NO: 2286880 - RNA, 16 nt, Human
ccugggcuguuggcac

SEQ ID NO: 2286881 - RNA, 18 nt, Human
ccugggcuguuggcacuc

SEQ ID NO: 2286882 - RNA, 20 nt, Human
ccugggcuguuggcacucac

SEQ ID NO: 2286883 - RNA, 18 nt, Human
ccuggggaaccugacccc

SEQ ID NO: 2286884 - RNA, 18 nt, Human
ccugggcuuggccugcug

SEQ ID NO: 2286885 - RNA, 19 nt, Human
ccugggcuuggccugcugu

SEQ ID NO: 2286886 - RNA, 20 nt, Human
ccugggcuuggccugcugug

SEQ ID NO: 2286887 - RNA, 21 nt, Human
ccugggcuuggccugcuguga

SEQ ID NO: 2286888 - RNA, 21 nt, Human
ccugggcuguuggcacucaca

SEQ ID NO: 2286889 - RNA, 22 nt, Human
ccugggcuguuggcacucacag

SEQ ID NO: 2286890 - RNA, 23 nt, Human
ccugggcuguuggcacucacaga

SEQ ID NO: 2286891 - RNA, 13 nt, Human
ccugggcuuggcc

SEQ ID NO: 2286892 - RNA, 14 nt, Human
ccugggcuuggccu

SEQ ID NO: 2286893 - RNA, 15 nt, Human
ccugggcuuggccug

SEQ ID NO: 2286894 - RNA, 16 nt, Human
ccugggcuuggccugc

SEQ ID NO: 2286895 - RNA, 17 nt, Human
ccugggcuuggccugcu

SEQ ID NO: 2286896 - RNA, 24 nt, Human
ccugggcucugccccagcucuggc

SEQ ID NO: 2286897 - RNA, 22 nt, Human
ccugggcucugccccagcucug

SEQ ID NO: 2286898 - RNA, 20 nt, Human
ccugggcucugccccagcuc

SEQ ID NO: 2286899 - RNA, 14 nt, Human
ccugggcucugccc

SEQ ID NO: 2286900 - RNA, 13 nt, Human
ccugggcucuggg

SEQ ID NO: 2286901 - RNA, 16 nt, Human
ccugggcucugggagc

SEQ ID NO: 2286902 - RNA, 17 nt, Human
ccugggcucugggagca

SEQ ID NO: 2286903 - RNA, 18 nt, Human
ccugggcucugggagcag

SEQ ID NO: 2286904 - RNA, 19 nt, Human
ccugggcucugggagcagc

SEQ ID NO: 2286905 - RNA, 12 nt, Human
ccugggcucugu

SEQ ID NO: 2286906 - RNA, 13 nt, Human
ccugggcucugug

SEQ ID NO: 2286907 - RNA, 14 nt, Human
ccugggcucugugg

SEQ ID NO: 2286908 - RNA, 12 nt, Human
ccugggcucugc

SEQ ID NO: 2286909 - RNA, 22 nt, Human
ccugggcucggaggcugccccc

SEQ ID NO: 2286910 - RNA, 16 nt, Human
ccugggcucggaggcu

SEQ ID NO: 2286911 - RNA, 18 nt, Human
ccugggcucggaggcugc

SEQ ID NO: 2286912 - RNA, 19 nt, Human
ccugggcucggaggcugcc

SEQ ID NO: 2286913 - RNA, 21 nt, Human
ccugggcucggaggcugcccc

SEQ ID NO: 2286914 - RNA, 15 nt, Human
ccugggcuacaagga

SEQ ID NO: 2286915 - RNA, 14 nt, Human
ccugggcucggagg

SEQ ID NO: 2286916 - RNA, 15 nt, Human
ccugggcucggaggc

SEQ ID NO: 2286917 - RNA, 13 nt, Human
ccuggccugcugg

SEQ ID NO: 2286918 - RNA, 15 nt, Human
ccuggccuggcuucu

SEQ ID NO: 2286919 - RNA, 11 nt, Human
ccuggccuguu

SEQ ID NO: 2286920 - RNA, 14 nt, Human
ccuggccugugccu

SEQ ID NO: 2286921 - RNA, 15 nt, Human
ccuggccuggcacac

SEQ ID NO: 2286922 - RNA, 16 nt, Human
ccuggccuggcacaca

SEQ ID NO: 2286923 - RNA, 19 nt, Human
ccuggccuggcacacauca

SEQ ID NO: 2286924 - RNA, 19 nt, Human
ccuggccuguucuguuuug

SEQ ID NO: 2286925 - RNA, 13 nt, Human
ccuggccuguucu

SEQ ID NO: 2286926 - RNA, 12 nt, Human
ccugggcgcccu

SEQ ID NO: 2286927 - RNA, 13 nt, Human
ccugggcgcccug

SEQ ID NO: 2286928 - RNA, 15 nt, Human
ccugggcgcccugga

SEQ ID NO: 2286929 - RNA, 16 nt, Human
ccugggcgcccuggaa

SEQ ID NO: 2286930 - RNA, 19 nt, Human
ccugggcgcccuggaagcc

SEQ ID NO: 2286931 - RNA, 17 nt, Human
ccugggcgcccuggaag

SEQ ID NO: 2286932 - RNA, 18 nt, Human
ccugggcgcccuggaagc

SEQ ID NO: 2286933 - RNA, 18 nt, Human
cccuucuccucuuguaaa

SEQ ID NO: 2286934 - RNA, 20 nt, Human
cccuucuccucuuguaaaua

SEQ ID NO: 2286935 - RNA, 15 nt, Human
cccuucucucaucuc

SEQ ID NO: 2286936 - RNA, 23 nt, Human
cccuuuuuuggcugcugaaggcu

SEQ ID NO: 2286937 - RNA, 21 nt, Human
cccuuuuuuggcugcugaagg

SEQ ID NO: 2286938 - RNA, 22 nt, Human
cccuuuuuuggcugcugaaggc

SEQ ID NO: 2286939 - RNA, 17 nt, Human
cccuucuccucuuguaa

SEQ ID NO: 2286940 - RNA, 15 nt, Human
cccuucucccacacu

SEQ ID NO: 2286941 - RNA, 14 nt, Human
cccuucucccacac

SEQ ID NO: 2286942 - RNA, 22 nt, Human
cccuucuccaucucucuggccc

SEQ ID NO: 2286943 - RNA, 23 nt, Human
cccuucuccaucucucuggcccu

SEQ ID NO: 2286944 - RNA, 19 nt, Human
cccuucucccaccccugcc

SEQ ID NO: 2286945 - RNA, 14 nt, Human
cccuucucccauga

SEQ ID NO: 2286946 - RNA, 14 nt, Human
cccuucucuccagc

SEQ ID NO: 2286947 - RNA, 19 nt, Human
cccuucucuccagccccug

SEQ ID NO: 2286948 - RNA, 20 nt, Human
ccgaagaaggguccuucccu

SEQ ID NO: 2286949 - RNA, 19 nt, Human
ccgaagaaggguccuuccc

SEQ ID NO: 2286950 - RNA, 16 nt, Human
ccgaagcucuggcuga

SEQ ID NO: 2286951 - RNA, 18 nt, Human
ccgaagccgccuguggac

SEQ ID NO: 2286952 - RNA, 18 nt, Human
ccgaagaaggguccuucc

SEQ ID NO: 2286953 - RNA, 17 nt, Human
ccgaacuguuguauaaa

SEQ ID NO: 2286954 - RNA, 16 nt, Human
ccgaaccuccucugug

SEQ ID NO: 2286955 - RNA, 15 nt, Human
ccgaaccuccucugu

SEQ ID NO: 2286956 - RNA, 13 nt, Human
ccgaaccuccucu

SEQ ID NO: 2286957 - RNA, 23 nt, Human
ccgaacaucaccgacgcgucucc

SEQ ID NO: 2286958 - RNA, 15 nt, Human
ccgaacacccucgaa

SEQ ID NO: 2286959 - RNA, 22 nt, Human
ccgaaaaauccucuuccucuga

SEQ ID NO: 2286960 - RNA, 15 nt, Human
ccgaaaaauccucuu

SEQ ID NO: 2286961 - RNA, 17 nt, Human
ccgaaaaauccucuucc

SEQ ID NO: 2286962 - RNA, 15 nt, Human
ccgacagccuggcac

SEQ ID NO: 2286963 - RNA, 22 nt, Human
ccgacagccuggcacagggcag

SEQ ID NO: 2286964 - RNA, 21 nt, Human
ccgaagcucuggcugaacccu

SEQ ID NO: 2286965 - RNA, 18 nt, Human
ccgacagcccccucugcc

SEQ ID NO: 2286966 - RNA, 13 nt, Human
ccgacagccuggc

SEQ ID NO: 2286967 - RNA, 14 nt, Human
ccgacagccuggca

SEQ ID NO: 2286968 - RNA, 12 nt, Human
ccgacagccugg

SEQ ID NO: 2286969 - RNA, 13 nt, Human
ccgacagagggaa

SEQ ID NO: 2286970 - RNA, 17 nt, Human
ccgaagcucuggcugaa

SEQ ID NO: 2286971 - RNA, 19 nt, Human
ccgaagcucuggcugaacc

SEQ ID NO: 2286972 - RNA, 13 nt, Human
cccuucucccaca

SEQ ID NO: 2286973 - RNA, 13 nt, Human
cccuucuccaucu

SEQ ID NO: 2286974 - RNA, 17 nt, Human
cccuucuccaucucucu

SEQ ID NO: 2286975 - RNA, 18 nt, Human
cccuucuccaucucucug

SEQ ID NO: 2286976 - RNA, 21 nt, Human
cccuucuccaucucucuggcc

SEQ ID NO: 2286977 - RNA, 23 nt, Human
cccuucuccauccacaugggagc

SEQ ID NO: 2286978 - RNA, 23 nt, Human
cccuucucauuccaacagugagu

SEQ ID NO: 2286979 - RNA, 10 nt, Human
cccuucucca

SEQ ID NO: 2286980 - RNA, 15 nt, Human
cccuucucagaaucu

SEQ ID NO: 2286981 - RNA, 16 nt, Human
cccuucucagaaucua

SEQ ID NO: 2286982 - RNA, 15 nt, Human
cccuucucaucacuc

SEQ ID NO: 2286983 - RNA, 19 nt, Human
cccuucucaucacuccccu

SEQ ID NO: 2286984 - RNA, 17 nt, Human
cccuguggagcccgcac

SEQ ID NO: 2286985 - RNA, 23 nt, Human
cccuucuaggguuauugcauuug

SEQ ID NO: 2286986 - RNA, 21 nt, Human
cccuguggaagggacuaggag

SEQ ID NO: 2286987 - RNA, 16 nt, Human
cccuguggagacuggg

SEQ ID NO: 2286988 - RNA, 18 nt, Human
cccuguggaagggacuag

SEQ ID NO: 2286989 - RNA, 14 nt, Human
cccuguggaaggga

SEQ ID NO: 2286990 - RNA, 21 nt, Human
cccuguggaugagcccucaga

SEQ ID NO: 2286991 - RNA, 20 nt, Human
cccuguggaugagcccucag

SEQ ID NO: 2286992 - RNA, 15 nt, Human
cccugugggccccca

SEQ ID NO: 2286993 - RNA, 23 nt, Human
cccuguggaugagcccucagaac

SEQ ID NO: 2286994 - RNA, 22 nt, Human
cccuguggaugagcccucagaa

SEQ ID NO: 2286995 - RNA, 20 nt, Human
cccugugcuccgugccucca

SEQ ID NO: 2286996 - RNA, 22 nt, Human
cccugugcuccgugccuccacc

SEQ ID NO: 2286997 - RNA, 12 nt, Human
cccugugcuggu

SEQ ID NO: 2286998 - RNA, 22 nt, Human
cccugugacauggugccugaga

SEQ ID NO: 2286999 - RNA, 24 nt, Human
cccugugacauggugccugagagg

SEQ ID NO: 2287000 - RNA, 23 nt, Human
cccugugagauuuugcuuuucca

SEQ ID NO: 2287001 - RNA, 23 nt, Human
cccugugaguuuguacagucuug

SEQ ID NO: 2287002 - RNA, 13 nt, Human
cccugugcuggug

SEQ ID NO: 2287003 - RNA, 14 nt, Human
cccugugcuggugu

SEQ ID NO: 2287004 - RNA, 15 nt, Human
cccugugcugguguc

SEQ ID NO: 2287005 - RNA, 16 nt, Human
cccugugcuggugucc

SEQ ID NO: 2287006 - RNA, 20 nt, Human
cccugugcugguguccugac

SEQ ID NO: 2287007 - RNA, 21 nt, Human
cccugugcugguguccugacc

SEQ ID NO: 2287008 - RNA, 22 nt, Human
cccugugcugguguccugacca

SEQ ID NO: 2287009 - RNA, 23 nt, Human
cccugugcugguguccugaccac

SEQ ID NO: 2287010 - RNA, 12 nt, Human
cccuccuugucu

SEQ ID NO: 2287011 - RNA, 16 nt, Human
cccuccuugggcacuu

SEQ ID NO: 2287012 - RNA, 18 nt, Human
cccuccuuguccacccac

SEQ ID NO: 2287013 - RNA, 19 nt, Human
cccuccuugcucugcaggc

SEQ ID NO: 2287014 - RNA, 20 nt, Human
cccuccuugcucugcaggca

SEQ ID NO: 2287015 - RNA, 23 nt, Human
cccuccuugcucugcaggcaccu

SEQ ID NO: 2287016 - RNA, 14 nt, Human
cccuccuugggcac

SEQ ID NO: 2287017 - RNA, 21 nt, Human
cccugugaguacuacaguccu

SEQ ID NO: 2287018 - RNA, 23 nt, Human
cccugugaguacuacaguccucc

SEQ ID NO: 2287019 - RNA, 15 nt, Human
cccugugauggggcc

SEQ ID NO: 2287020 - RNA, 11 nt, Human
cccuccuucca

SEQ ID NO: 2287021 - RNA, 22 nt, Human
cccuccuguugcacccagcccu

SEQ ID NO: 2287022 - RNA, 18 nt, Human
cccuccuguugcacccag

SEQ ID NO: 2287023 - RNA, 19 nt, Human
cccuccuguugcacccagc

SEQ ID NO: 2287024 - RNA, 12 nt, Human
cccuccuucaga

SEQ ID NO: 2287025 - RNA, 13 nt, Human
cccuccuguugca

SEQ ID NO: 2287026 - RNA, 18 nt, Human
cccuccuugccuccugug

SEQ ID NO: 2287027 - RNA, 17 nt, Human
cccuccuugccuccugu

SEQ ID NO: 2287028 - RNA, 18 nt, Human
cccuccuuccuugaccag

SEQ ID NO: 2287029 - RNA, 16 nt, Human
cccuccuuccuugacc

SEQ ID NO: 2287030 - RNA, 14 nt, Human
cccuccuuucacca

SEQ ID NO: 2287031 - RNA, 14 nt, Human
ccgcagcccugcag

SEQ ID NO: 2287032 - RNA, 15 nt, Human
ccgcagagcuggccg

SEQ ID NO: 2287033 - RNA, 14 nt, Human
ccgcagcagcuccc

SEQ ID NO: 2287034 - RNA, 13 nt, Human
ccgcagagcuggc

SEQ ID NO: 2287035 - RNA, 18 nt, Human
ccgcagcccugcagaggg

SEQ ID NO: 2287036 - RNA, 23 nt, Human
ccgcagcccugcagagggcacag

SEQ ID NO: 2287037 - RNA, 16 nt, Human
ccgguucuuccagugg

SEQ ID NO: 2287038 - RNA, 20 nt, Human
ccgguuucgaaguugaugca

SEQ ID NO: 2287039 - RNA, 20 nt, Human
ccgguucuuccagugguuug

SEQ ID NO: 2287040 - RNA, 21 nt, Human
ccgguuucgaaguugaugcaa

SEQ ID NO: 2287041 - RNA, 15 nt, Human
ccguaacccaacucu

SEQ ID NO: 2287042 - RNA, 17 nt, Human
ccguaauaauuauuauu

SEQ ID NO: 2287043 - RNA, 21 nt, Human
ccguaaacacgccugcaaacg

SEQ ID NO: 2287044 - RNA, 18 nt, Human
ccguacauucaauguuua

SEQ ID NO: 2287045 - RNA, 12 nt, Human
ccguaccccacc

SEQ ID NO: 2287046 - RNA, 13 nt, Human
ccguaccccaccc

SEQ ID NO: 2287047 - RNA, 18 nt, Human
ccguacaacguguccuca

SEQ ID NO: 2287048 - RNA, 18 nt, Human
ccguaccccacccucagc

SEQ ID NO: 2287049 - RNA, 20 nt, Human
ccguaccccacccucagcac

SEQ ID NO: 2287050 - RNA, 14 nt, Human
ccguaccccacccu

SEQ ID NO: 2287051 - RNA, 15 nt, Human
ccguaccccacccuc

SEQ ID NO: 2287052 - RNA, 16 nt, Human
ccguaccccacccuca

SEQ ID NO: 2287053 - RNA, 17 nt, Human
ccguaccccacccucag

SEQ ID NO: 2287054 - RNA, 13 nt, Human
ccguccgcccugc

SEQ ID NO: 2287055 - RNA, 14 nt, Human
ccguccgcccugcu

SEQ ID NO: 2287056 - RNA, 14 nt, Human
ccgucccccucugg

SEQ ID NO: 2287057 - RNA, 18 nt, Human
ccgucccauauccugccu

SEQ ID NO: 2287058 - RNA, 13 nt, Human
ccguccugccugu

SEQ ID NO: 2287059 - RNA, 16 nt, Human
ccguccucccgggccc

SEQ ID NO: 2287060 - RNA, 19 nt, Human
ccguccucccgggcccucc

SEQ ID NO: 2287061 - RNA, 15 nt, Human
ccguccugccugugg

SEQ ID NO: 2287062 - RNA, 11 nt, Human
ccguccucacc

SEQ ID NO: 2287063 - RNA, 14 nt, Human
ccguccucaccccu

SEQ ID NO: 2287064 - RNA, 16 nt, Human
ccguccucaccccugu

SEQ ID NO: 2287065 - RNA, 19 nt, Human
ccguccucaccccuguccu

SEQ ID NO: 2287066 - RNA, 20 nt, Human
ccguccucaccccuguccuc

SEQ ID NO: 2287067 - RNA, 23 nt, Human
ccguccucaccccuguccucacu

SEQ ID NO: 2287068 - RNA, 24 nt, Human
ccguccucaccccuguccucacug

SEQ ID NO: 2287069 - RNA, 14 nt, Human
ccguccucccgggc

SEQ ID NO: 2287070 - RNA, 13 nt, Human
ccggccaggccac

SEQ ID NO: 2287071 - RNA, 11 nt, Human
ccggccagccc

SEQ ID NO: 2287072 - RNA, 15 nt, Human
ccggccaggugggcg

SEQ ID NO: 2287073 - RNA, 13 nt, Human
ccggccagguggg

SEQ ID NO: 2287074 - RNA, 12 nt, Human
ccggccccagcc

SEQ ID NO: 2287075 - RNA, 13 nt, Human
ccggccccagcca

SEQ ID NO: 2287076 - RNA, 16 nt, Human
ccggccccagccagag

SEQ ID NO: 2287077 - RNA, 14 nt, Human
ccggccccagccag

SEQ ID NO: 2287078 - RNA, 15 nt, Human
ccggccccagccaga

SEQ ID NO: 2287079 - RNA, 18 nt, Human
ccggccaccugcggugcu

SEQ ID NO: 2287080 - RNA, 15 nt, Human
ccggccagccauguc

SEQ ID NO: 2287081 - RNA, 13 nt, Human
ccggcagaaggga

SEQ ID NO: 2287082 - RNA, 15 nt, Human
ccggcacuccaugcu

SEQ ID NO: 2287083 - RNA, 17 nt, Human
ccggccaccugcggugc

SEQ ID NO: 2287084 - RNA, 19 nt, Human
ccggcacagggucugcucu

SEQ ID NO: 2287085 - RNA, 20 nt, Human
ccggcacagggucugcucuu

SEQ ID NO: 2287086 - RNA, 14 nt, Human
ccuaauuagagcag

SEQ ID NO: 2287087 - RNA, 18 nt, Human
ccuaauguuuaugagcca

SEQ ID NO: 2287088 - RNA, 19 nt, Human
ccuaauguuuaugagccag

SEQ ID NO: 2287089 - RNA, 21 nt, Human
ccuagcauacguacacauuuu

SEQ ID NO: 2287090 - RNA, 16 nt, Human
ccuaaugcuccuuguu

SEQ ID NO: 2287091 - RNA, 19 nt, Human
ccuaaugcuccuuguuccu

SEQ ID NO: 2287092 - RNA, 12 nt, Human
ccuaaugcugca

SEQ ID NO: 2287093 - RNA, 22 nt, Human
ccuaauaaacauccuucaagaa

SEQ ID NO: 2287094 - RNA, 20 nt, Human
ccuaaugcgcaggcuggccc

SEQ ID NO: 2287095 - RNA, 21 nt, Human
ccuaaugcgcaggcuggcccu

SEQ ID NO: 2287096 - RNA, 23 nt, Human
ccuaauuagagcagaugaccccu

SEQ ID NO: 2287097 - RNA, 12 nt, Human
ccuagccaccca

SEQ ID NO: 2287098 - RNA, 16 nt, Human
ccuagccacccaccac

SEQ ID NO: 2287099 - RNA, 14 nt, Human
ccuagccauuccug

SEQ ID NO: 2287100 - RNA, 15 nt, Human
ccuagccauuccugg

SEQ ID NO: 2287101 - RNA, 21 nt, Human
ccuagccccuuagcccccacc

SEQ ID NO: 2287102 - RNA, 22 nt, Human
ccuagccccuuagcccccaccc

SEQ ID NO: 2287103 - RNA, 17 nt, Human
ccuagcccaggagagag

SEQ ID NO: 2287104 - RNA, 18 nt, Human
ccuagcccaggagagaga

SEQ ID NO: 2287105 - RNA, 19 nt, Human
ccuagcccaggagagagaa

SEQ ID NO: 2287106 - RNA, 20 nt, Human
ccuagcccaggagagagaaa

SEQ ID NO: 2287107 - RNA, 21 nt, Human
ccuagccauuccugguaccca

SEQ ID NO: 2287108 - RNA, 16 nt, Human
ccuagccauuccuggu

SEQ ID NO: 2287109 - RNA, 11 nt, Human
ccuagcccagg

SEQ ID NO: 2287110 - RNA, 13 nt, Human
ccuagcccaggag

SEQ ID NO: 2287111 - RNA, 15 nt, Human
ccuagcccaggagag

SEQ ID NO: 2287112 - RNA, 15 nt, Human
ccgucuucagccuag

SEQ ID NO: 2287113 - RNA, 14 nt, Human
ccgucuucagccua

SEQ ID NO: 2287114 - RNA, 13 nt, Human
ccgucugugaauu

SEQ ID NO: 2287115 - RNA, 14 nt, Human
ccguccugccugug

SEQ ID NO: 2287116 - RNA, 22 nt, Human
ccgucuuagaaguggaccagga

SEQ ID NO: 2287117 - RNA, 17 nt, Human
ccgugaaaacggagcug

SEQ ID NO: 2287118 - RNA, 18 nt, Human
ccgugaaaacggagcuga

SEQ ID NO: 2287119 - RNA, 18 nt, Human
ccgugacagacuccugag

SEQ ID NO: 2287120 - RNA, 20 nt, Human
ccgugacagacuccugagga

SEQ ID NO: 2287121 - RNA, 22 nt, Human
ccgugacagacuccugaggaca

SEQ ID NO: 2287122 - RNA, 18 nt, Human
ccuaauaaacauccuuca

SEQ ID NO: 2287123 - RNA, 13 nt, Human
ccuaauaaagcug

SEQ ID NO: 2287124 - RNA, 12 nt, Human
ccuaauaaagcu

SEQ ID NO: 2287125 - RNA, 22 nt, Human
ccuagccuuagaagucacacag

SEQ ID NO: 2287126 - RNA, 19 nt, Human
ccuagccuuauccucugau

SEQ ID NO: 2287127 - RNA, 18 nt, Human
ccuagccuuauccucuga

SEQ ID NO: 2287128 - RNA, 23 nt, Human
ccuagccugugccucugggacug

SEQ ID NO: 2287129 - RNA, 19 nt, Human
ccuagccuuagaagucaca

SEQ ID NO: 2287130 - RNA, 15 nt, Human
ccucccaggcucuca

SEQ ID NO: 2287131 - RNA, 20 nt, Human
ccucauuugggguagcuaga

SEQ ID NO: 2287132 - RNA, 17 nt, Human
ccuccaagaaucuaucu

SEQ ID NO: 2287133 - RNA, 14 nt, Human
ccucccagggccag

SEQ ID NO: 2287134 - RNA, 17 nt, Human
ccucauuugggguagcu

SEQ ID NO: 2287135 - RNA, 19 nt, Human
ccucauugacaagaacuga

SEQ ID NO: 2287136 - RNA, 20 nt, Human
ccuccaagaccuucuccuuc

SEQ ID NO: 2287137 - RNA, 21 nt, Human
ccucccagggccagggcccug

SEQ ID NO: 2287138 - RNA, 17 nt, Human
ccucccaguaccuccug

SEQ ID NO: 2287139 - RNA, 12 nt, Human
ccucccaucacc

SEQ ID NO: 2287140 - RNA, 20 nt, Human
ccucauuuaucccucaaccc

SEQ ID NO: 2287141 - RNA, 22 nt, Human
ccucauuucaggagcagccuca

SEQ ID NO: 2287142 - RNA, 19 nt, Human
ccucauuuaucccucaacc

SEQ ID NO: 2287143 - RNA, 16 nt, Human
ccucauuuaucccuca

SEQ ID NO: 2287144 - RNA, 16 nt, Human
ccuccaagaccuucuc

SEQ ID NO: 2287145 - RNA, 17 nt, Human
ccuccaagaccuucucc

SEQ ID NO: 2287146 - RNA, 19 nt, Human
ccuccaagaccuucuccuu

SEQ ID NO: 2287147 - RNA, 17 nt, Human
ccucccaucacccgcua

SEQ ID NO: 2287148 - RNA, 15 nt, Human
ccucccauccagggc

SEQ ID NO: 2287149 - RNA, 16 nt, Human
ccucccagucaccuug

SEQ ID NO: 2287150 - RNA, 18 nt, Human
ccucagcugccucacuuc

SEQ ID NO: 2287151 - RNA, 17 nt, Human
ccucagcugccucacuu

SEQ ID NO: 2287152 - RNA, 16 nt, Human
ccucagcugccucacu

SEQ ID NO: 2287153 - RNA, 15 nt, Human
ccucagcugccucac

SEQ ID NO: 2287154 - RNA, 14 nt, Human
ccucagcugccuca

SEQ ID NO: 2287155 - RNA, 13 nt, Human
ccucagcugccuc

SEQ ID NO: 2287156 - RNA, 15 nt, Human
ccucagcucugggag

SEQ ID NO: 2287157 - RNA, 16 nt, Human
ccucagcucugggaga

SEQ ID NO: 2287158 - RNA, 17 nt, Human
ccucagcucugggagag

SEQ ID NO: 2287159 - RNA, 18 nt, Human
ccucagcucugggagagg

SEQ ID NO: 2287160 - RNA, 18 nt, Human
ccucaggcaggugggaug

SEQ ID NO: 2287161 - RNA, 12 nt, Human
ccucaggcaggu

SEQ ID NO: 2287162 - RNA, 22 nt, Human
ccucaggcauaggccugggugc

SEQ ID NO: 2287163 - RNA, 18 nt, Human
ccucaggcauaggccugg

SEQ ID NO: 2287164 - RNA, 19 nt, Human
ccucaggcaggaagggcag

SEQ ID NO: 2287165 - RNA, 15 nt, Human
ccucaggcaggaagg

SEQ ID NO: 2287166 - RNA, 20 nt, Human
ccucagcucugggagaggau

SEQ ID NO: 2287167 - RNA, 10 nt, Human
ccucaggccu

SEQ ID NO: 2287168 - RNA, 22 nt, Human
ccucauucaggaaaacugacag

SEQ ID NO: 2287169 - RNA, 17 nt, Human
ccucauucaggaaaacu

SEQ ID NO: 2287170 - RNA, 16 nt, Human
ccucauucaggaaaac

SEQ ID NO: 2287171 - RNA, 15 nt, Human
ccucauucaggaaaa

SEQ ID NO: 2287172 - RNA, 21 nt, Human
ccucaggccaggugcaguggc

SEQ ID NO: 2287173 - RNA, 13 nt, Human
ccucauucaggaa

SEQ ID NO: 2287174 - RNA, 21 nt, Human
ccucauuccaccuucccaugc

SEQ ID NO: 2287175 - RNA, 13 nt, Human
ccucauuccugaa

SEQ ID NO: 2287176 - RNA, 23 nt, Human
ccucagccuuggauaaugcuguu

SEQ ID NO: 2287177 - RNA, 22 nt, Human
ccucagccuugccagagaucca

SEQ ID NO: 2287178 - RNA, 23 nt, Human
ccucaagugauucuccugccuca

SEQ ID NO: 2287179 - RNA, 11 nt, Human
ccucagcucca

SEQ ID NO: 2287180 - RNA, 12 nt, Human
ccucagcucugg

SEQ ID NO: 2287181 - RNA, 13 nt, Human
ccucagcucuggg

SEQ ID NO: 2287182 - RNA, 14 nt, Human
ccucagcucuggga

SEQ ID NO: 2287183 - RNA, 11 nt, Human
ccucagcucug

SEQ ID NO: 2287184 - RNA, 19 nt, Human
ccucaagggggacugucuu

SEQ ID NO: 2287185 - RNA, 20 nt, Human
ccucaaggggccauccuguc

SEQ ID NO: 2287186 - RNA, 20 nt, Human
ccucaagucacucccaagcc

SEQ ID NO: 2287187 - RNA, 20 nt, Human
ccucaagugauucuccugcc

SEQ ID NO: 2287188 - RNA, 21 nt, Human
ccucaaggccucccacaguga

SEQ ID NO: 2287189 - RNA, 15 nt, Human
ccucaacugccuacu

SEQ ID NO: 2287190 - RNA, 14 nt, Human
ccucaacugccuac

SEQ ID NO: 2287191 - RNA, 19 nt, Human
ccucaaaugacccaaagac

SEQ ID NO: 2287192 - RNA, 16 nt, Human
ccucaaaugacccaaa

SEQ ID NO: 2287193 - RNA, 15 nt, Human
ccucaaaucguccag

SEQ ID NO: 2287194 - RNA, 22 nt, Human
ccucaacaagggagagaccuca

SEQ ID NO: 2287195 - RNA, 18 nt, Human
ccucaacaagggagagac

SEQ ID NO: 2287196 - RNA, 21 nt, Human
ccucaacaagggagagaccuc

SEQ ID NO: 2287197 - RNA, 16 nt, Human
ccucaacccucccuca

SEQ ID NO: 2287198 - RNA, 18 nt, Human
ccucaacccucccucagc

SEQ ID NO: 2287199 - RNA, 23 nt, Human
ccucaacccucccucagccccuc

SEQ ID NO: 2287200 - RNA, 22 nt, Human
ccucaacccucccucagccccu

SEQ ID NO: 2287201 - RNA, 21 nt, Human
ccucaacccucccucagcccc

SEQ ID NO: 2287202 - RNA, 19 nt, Human
ccucaacccucccucagcc

SEQ ID NO: 2287203 - RNA, 16 nt, Human
ccucaacaccucugca

SEQ ID NO: 2287204 - RNA, 15 nt, Human
ccucaacaagggaga

SEQ ID NO: 2287205 - RNA, 16 nt, Human
ccucaacaagggagag

SEQ ID NO: 2287206 - RNA, 17 nt, Human
ccucaacaagggagaga

SEQ ID NO: 2287207 - RNA, 17 nt, Human
ccucaaauuacuuugug

SEQ ID NO: 2287208 - RNA, 15 nt, Human
ccucaaccuccuggg

SEQ ID NO: 2287209 - RNA, 19 nt, Human
ccucaacucuccuccagag

SEQ ID NO: 2287210 - RNA, 21 nt, Human
ccucaacucuccuccagaguc

SEQ ID NO: 2287211 - RNA, 23 nt, Human
ccucaacucuccuccagagucag

SEQ ID NO: 2287212 - RNA, 20 nt, Human
ccuccgcgugaucaaagcca

SEQ ID NO: 2287213 - RNA, 19 nt, Human
ccuccgccuucacuccggu

SEQ ID NO: 2287214 - RNA, 14 nt, Human
ccuccgccucuugg

SEQ ID NO: 2287215 - RNA, 18 nt, Human
ccuccuaucaccuccccu

SEQ ID NO: 2287216 - RNA, 19 nt, Human
ccuccuaccgaaaccuugc

SEQ ID NO: 2287217 - RNA, 22 nt, Human
ccuccuaccgaaaccuugccuu

SEQ ID NO: 2287218 - RNA, 15 nt, Human
ccuccuagccaccca

SEQ ID NO: 2287219 - RNA, 12 nt, Human
ccuccggccucc

SEQ ID NO: 2287220 - RNA, 15 nt, Human
ccuccggccuccccu

SEQ ID NO: 2287221 - RNA, 16 nt, Human
ccuccggccuccccuc

SEQ ID NO: 2287222 - RNA, 17 nt, Human
ccuccggcgucagccuc

SEQ ID NO: 2287223 - RNA, 18 nt, Human
ccuccggcgucagccucc

SEQ ID NO: 2287224 - RNA, 19 nt, Human
ccuccggcgucagccucca

SEQ ID NO: 2287225 - RNA, 20 nt, Human
ccuccggcgucagccuccag

SEQ ID NO: 2287226 - RNA, 22 nt, Human
ccuccggcgucagccuccagcc

SEQ ID NO: 2287227 - RNA, 13 nt, Human
ccuccgccucuug

SEQ ID NO: 2287228 - RNA, 15 nt, Human
ccuccgauccuuccu

SEQ ID NO: 2287229 - RNA, 14 nt, Human
ccuccgaggccagu

SEQ ID NO: 2287230 - RNA, 16 nt, Human
ccuccgauccuuccuc

SEQ ID NO: 2287231 - RNA, 14 nt, Human
ccuccgagagggag

SEQ ID NO: 2287232 - RNA, 16 nt, Human
ccuccgagagggagag

SEQ ID NO: 2287233 - RNA, 19 nt, Human
ccuccgagagggagagaga

SEQ ID NO: 2287234 - RNA, 21 nt, Human
ccuccgagccggggaguuucu

SEQ ID NO: 2287235 - RNA, 20 nt, Human
ccuccgacagcccccucugc

SEQ ID NO: 2287236 - RNA, 22 nt, Human
ccuccgacagcccccucugccg

SEQ ID NO: 2287237 - RNA, 16 nt, Human
ccucccuuuuuccuug

SEQ ID NO: 2287238 - RNA, 17 nt, Human
ccucccuuuuuccuugu

SEQ ID NO: 2287239 - RNA, 18 nt, Human
ccucccuuuuuccuuguc

SEQ ID NO: 2287240 - RNA, 19 nt, Human
ccucccuuuuuccuugucc

SEQ ID NO: 2287241 - RNA, 12 nt, Human
ccucccuuucuc

SEQ ID NO: 2287242 - RNA, 13 nt, Human
ccucccuuucucc

SEQ ID NO: 2287243 - RNA, 14 nt, Human
ccucccuuucuccc

SEQ ID NO: 2287244 - RNA, 15 nt, Human
ccucccuuucucccc

SEQ ID NO: 2287245 - RNA, 13 nt, Human
ccucccuuccuuu

SEQ ID NO: 2287246 - RNA, 15 nt, Human
ccucccuuccuuuuc

SEQ ID NO: 2287247 - RNA, 16 nt, Human
ccucccuuccuuuucc

SEQ ID NO: 2287248 - RNA, 17 nt, Human
ccucccuuccuuuuccc

SEQ ID NO: 2287249 - RNA, 16 nt, Human
ccucccuucucuucac

SEQ ID NO: 2287250 - RNA, 20 nt, Human
ccucccuuggggccuaugca

SEQ ID NO: 2287251 - RNA, 21 nt, Human
ccucccuuggaaaccugcccu

SEQ ID NO: 2287252 - RNA, 22 nt, Human
ccucccuuggaaaccugcccug

SEQ ID NO: 2287253 - RNA, 23 nt, Human
ccucccuuggaaaccugcccugc

SEQ ID NO: 2287254 - RNA, 19 nt, Human
ccucccuuggguucugaua

SEQ ID NO: 2287255 - RNA, 13 nt, Human
ccucccuucugcu

SEQ ID NO: 2287256 - RNA, 10 nt, Human
ccucccuucu

SEQ ID NO: 2287257 - RNA, 21 nt, Human
ccucccuuccuuuucccugcu

SEQ ID NO: 2287258 - RNA, 22 nt, Human
ccucccuuccuuuucccugcuu

SEQ ID NO: 2287259 - RNA, 16 nt, Human
ccucccuucugcuacu

SEQ ID NO: 2287260 - RNA, 15 nt, Human
ccucccuucugcuac

SEQ ID NO: 2287261 - RNA, 17 nt, Human
ccucccuucugcuacug

SEQ ID NO: 2287262 - RNA, 19 nt, Human
ccucccuuggaaaccugcc

SEQ ID NO: 2287263 - RNA, 12 nt, Human
ccucgcuuggac

SEQ ID NO: 2287264 - RNA, 18 nt, Human
ccucgcuggacucucagu

SEQ ID NO: 2287265 - RNA, 20 nt, Human
ccucggacuuagcugggaga

SEQ ID NO: 2287266 - RNA, 19 nt, Human
ccucggacuuagcugggag

SEQ ID NO: 2287267 - RNA, 14 nt, Human
ccucggagaagagc

SEQ ID NO: 2287268 - RNA, 12 nt, Human
ccucggagaaga

SEQ ID NO: 2287269 - RNA, 21 nt, Human
ccucgcuggggcagugcccuc

SEQ ID NO: 2287270 - RNA, 13 nt, Human
ccucgcugcuucu

SEQ ID NO: 2287271 - RNA, 17 nt, Human
ccucgcuggacucucag

SEQ ID NO: 2287272 - RNA, 13 nt, Human
ccucgcccugggu

SEQ ID NO: 2287273 - RNA, 12 nt, Human
ccucgcccuggg

SEQ ID NO: 2287274 - RNA, 12 nt, Human
ccucgcccaccg

SEQ ID NO: 2287275 - RNA, 21 nt, Human
ccucgcccaccgcaugccccc

SEQ ID NO: 2287276 - RNA, 13 nt, Human
ccucgcccaccgc

SEQ ID NO: 2287277 - RNA, 19 nt, Human
ccucgcccaccgcaugccc

SEQ ID NO: 2287278 - RNA, 14 nt, Human
ccucgcagagaggc

SEQ ID NO: 2287279 - RNA, 14 nt, Human
ccucgcaagcuggg

SEQ ID NO: 2287280 - RNA, 18 nt, Human
ccuccuuuucacaguucu

SEQ ID NO: 2287281 - RNA, 20 nt, Human
ccucgaaacacagaaaccuu

SEQ ID NO: 2287282 - RNA, 16 nt, Human
ccucgaaacacagaaa

SEQ ID NO: 2287283 - RNA, 18 nt, Human
ccuccuuuugcuugaaac

SEQ ID NO: 2287284 - RNA, 18 nt, Human
ccuccuuuuuauguugcc

SEQ ID NO: 2287285 - RNA, 12 nt, Human
ccuccucaccuc

SEQ ID NO: 2287286 - RNA, 13 nt, Human
ccuccucaccuca

SEQ ID NO: 2287287 - RNA, 14 nt, Human
ccuccucaccucau

SEQ ID NO: 2287288 - RNA, 15 nt, Human
ccuccucaccucaug

SEQ ID NO: 2287289 - RNA, 23 nt, Human
ccuccuuugugaggaagccgcug

SEQ ID NO: 2287290 - RNA, 15 nt, Human
ccuccucaccccguc

SEQ ID NO: 2287291 - RNA, 13 nt, Human
ccuccucaccccg

SEQ ID NO: 2287292 - RNA, 16 nt, Human
ccuccucacccccagc

SEQ ID NO: 2287293 - RNA, 14 nt, Human
ccuccucaccccca

SEQ ID NO: 2287294 - RNA, 13 nt, Human
ccuccucaccccc

SEQ ID NO: 2287295 - RNA, 19 nt, Human
ccuccuaucaccuccccuc

SEQ ID NO: 2287296 - RNA, 20 nt, Human
ccuccuagggaaaaguucau

SEQ ID NO: 2287297 - RNA, 22 nt, Human
ccuccuauucaguucccagaau

SEQ ID NO: 2287298 - RNA, 19 nt, Human
ccuccuaucagaaguuucu

SEQ ID NO: 2287299 - RNA, 21 nt, Human
cccaagacagaugccccagag

SEQ ID NO: 2287300 - RNA, 20 nt, Human
cccaagacagaugccccaga

SEQ ID NO: 2287301 - RNA, 19 nt, Human
cccaagacagaugccccag

SEQ ID NO: 2287302 - RNA, 22 nt, Human
cccaagacuugguguccuuucc

SEQ ID NO: 2287303 - RNA, 15 nt, Human
cccaagagaugaaga

SEQ ID NO: 2287304 - RNA, 17 nt, Human
cccaagagaugaagagu

SEQ ID NO: 2287305 - RNA, 23 nt, Human
cccaacuccuggaagcugugucc

SEQ ID NO: 2287306 - RNA, 17 nt, Human
cccaacuccuggaagcu

SEQ ID NO: 2287307 - RNA, 15 nt, Human
cccaacuccuggaag

SEQ ID NO: 2287308 - RNA, 13 nt, Human
cccaacuccugga

SEQ ID NO: 2287309 - RNA, 18 nt, Human
cccaagacagaugcccca

SEQ ID NO: 2287310 - RNA, 15 nt, Human
cccaagaaugggagg

SEQ ID NO: 2287311 - RNA, 21 nt, Human
cccaacucuagcugggggugg

SEQ ID NO: 2287312 - RNA, 16 nt, Human
cccaacucuagcuggg

SEQ ID NO: 2287313 - RNA, 15 nt, Human
cccaacucuagcugg

SEQ ID NO: 2287314 - RNA, 12 nt, Human
cccaacuccugg

SEQ ID NO: 2287315 - RNA, 18 nt, Human
ccauuucccaucugcacc

SEQ ID NO: 2287316 - RNA, 20 nt, Human
cccaacuaauuuuuguauuu

SEQ ID NO: 2287317 - RNA, 13 nt, Human
cccaacuccagaa

SEQ ID NO: 2287318 - RNA, 17 nt, Human
cccaacucaccccagcc

SEQ ID NO: 2287319 - RNA, 20 nt, Human
cccaacucaccccagcccca

SEQ ID NO: 2287320 - RNA, 13 nt, Human
cccaagcucugcu

SEQ ID NO: 2287321 - RNA, 14 nt, Human
cccaagcucugcuc

SEQ ID NO: 2287322 - RNA, 12 nt, Human
cccaagcucugc

SEQ ID NO: 2287323 - RNA, 23 nt, Human
cccaagaggucaaggcugcagug

SEQ ID NO: 2287324 - RNA, 20 nt, Human
cccaagauucacaccugacu

SEQ ID NO: 2287325 - RNA, 15 nt, Human
cccaagcucugcucc

SEQ ID NO: 2287326 - RNA, 15 nt, Human
cccacccacauguga

SEQ ID NO: 2287327 - RNA, 14 nt, Human
cccacccacaugug

SEQ ID NO: 2287328 - RNA, 23 nt, Human
cccaagauucacaccugacucug

SEQ ID NO: 2287329 - RNA, 19 nt, Human
cccaagcaaaaucauggaa

SEQ ID NO: 2287330 - RNA, 12 nt, Human
cccaccccacac

SEQ ID NO: 2287331 - RNA, 12 nt, Human
cccacccaggag

SEQ ID NO: 2287332 - RNA, 21 nt, Human
cccacccagcacccagcaacu

SEQ ID NO: 2287333 - RNA, 13 nt, Human
cccacccaggagg

SEQ ID NO: 2287334 - RNA, 22 nt, Human
cccaccccuuccccacugccug

SEQ ID NO: 2287335 - RNA, 17 nt, Human
cccaccccuuccccacu

SEQ ID NO: 2287336 - RNA, 15 nt, Human
cccaccccuucccca

SEQ ID NO: 2287337 - RNA, 13 nt, Human
cccaccccuuccc

SEQ ID NO: 2287338 - RNA, 14 nt, Human
cccaccccuugcuc

SEQ ID NO: 2287339 - RNA, 14 nt, Human
cccacccgaugcug

SEQ ID NO: 2287340 - RNA, 15 nt, Human
cccacccgaugcugc

SEQ ID NO: 2287341 - RNA, 16 nt, Human
cccacccgaugcugcu

SEQ ID NO: 2287342 - RNA, 12 nt, Human
cccacccucagc

SEQ ID NO: 2287343 - RNA, 13 nt, Human
cccacccucagca

SEQ ID NO: 2287344 - RNA, 14 nt, Human
cccacccucagcac

SEQ ID NO: 2287345 - RNA, 16 nt, Human
cccacccucagcaccc

SEQ ID NO: 2287346 - RNA, 17 nt, Human
cccacccucagcacccc

SEQ ID NO: 2287347 - RNA, 18 nt, Human
cccacccucagcaccccu

SEQ ID NO: 2287348 - RNA, 21 nt, Human
cccacccucagcaccccuucc

SEQ ID NO: 2287349 - RNA, 22 nt, Human
cccacucccuggcucucagaag

SEQ ID NO: 2287350 - RNA, 14 nt, Human
cccacccucccugg

SEQ ID NO: 2287351 - RNA, 12 nt, Human
cccacucccugc

SEQ ID NO: 2287352 - RNA, 13 nt, Human
cccacucccugca

SEQ ID NO: 2287353 - RNA, 12 nt, Human
cccaccccuucc

SEQ ID NO: 2287354 - RNA, 21 nt, Human
cccaccccugugcuccgugcc

SEQ ID NO: 2287355 - RNA, 15 nt, Human
cccaccccugugcuc

SEQ ID NO: 2287356 - RNA, 16 nt, Human
cccaccccugugcucc

SEQ ID NO: 2287357 - RNA, 22 nt, Human
cccaccccugggggcucucaug

SEQ ID NO: 2287358 - RNA, 16 nt, Human
cccaccccugccccca

SEQ ID NO: 2287359 - RNA, 12 nt, Human
cccaccccugug

SEQ ID NO: 2287360 - RNA, 13 nt, Human
cccaccccugugc

SEQ ID NO: 2287361 - RNA, 12 nt, Human
cccaccccuggg

SEQ ID NO: 2287362 - RNA, 12 nt, Human
cccaccccugcc

SEQ ID NO: 2287363 - RNA, 14 nt, Human
cccaccccagccua

SEQ ID NO: 2287364 - RNA, 17 nt, Human
cccaccccacccccacc

SEQ ID NO: 2287365 - RNA, 15 nt, Human
cccaccccacccccu

SEQ ID NO: 2287366 - RNA, 14 nt, Human
cccaccccacacuu

SEQ ID NO: 2287367 - RNA, 13 nt, Human
cccaccccacacu

SEQ ID NO: 2287368 - RNA, 21 nt, Human
cccacucugcuuugacugagc

SEQ ID NO: 2287369 - RNA, 12 nt, Human
cccacucugugc

SEQ ID NO: 2287370 - RNA, 16 nt, Human
cccacugacagccucc

SEQ ID NO: 2287371 - RNA, 14 nt, Human
cccacugaccagaa

SEQ ID NO: 2287372 - RNA, 15 nt, Human
cccacugcaauccug

SEQ ID NO: 2287373 - RNA, 18 nt, Human
cccacugcaauccugucu

SEQ ID NO: 2287374 - RNA, 23 nt, Human
cccacugcuuuuggucuguguga

SEQ ID NO: 2287375 - RNA, 16 nt, Human
cccacugcacacaccu

SEQ ID NO: 2287376 - RNA, 12 nt, Human
cccacugcaccc

SEQ ID NO: 2287377 - RNA, 14 nt, Human
cccacugcaccccc

SEQ ID NO: 2287378 - RNA, 15 nt, Human
cccacugcacccccu

SEQ ID NO: 2287379 - RNA, 22 nt, Human
cccacugcuuuuggucugugug

SEQ ID NO: 2287380 - RNA, 15 nt, Human
cccacucuccccaca

SEQ ID NO: 2287381 - RNA, 14 nt, Human
cccacucuccccac

SEQ ID NO: 2287382 - RNA, 11 nt, Human
cccacucuccc

SEQ ID NO: 2287383 - RNA, 19 nt, Human
cccacucucauuccccagg

SEQ ID NO: 2287384 - RNA, 14 nt, Human
cccacucucauucc

SEQ ID NO: 2287385 - RNA, 17 nt, Human
cccacucuccccacacu

SEQ ID NO: 2287386 - RNA, 21 nt, Human
cccacucucauuccccaggug

SEQ ID NO: 2287387 - RNA, 20 nt, Human
cccacucccuggcucucaga

SEQ ID NO: 2287388 - RNA, 13 nt, Human
cccacucucauuc

SEQ ID NO: 2287389 - RNA, 21 nt, Human
cccacucuaggggucaggcuc

SEQ ID NO: 2287390 - RNA, 21 nt, Human
ccauuucaucuauuucugaga

SEQ ID NO: 2287391 - RNA, 13 nt, Human
ccauuucccaucu

SEQ ID NO: 2287392 - RNA, 14 nt, Human
ccauuucccaucug

SEQ ID NO: 2287393 - RNA, 15 nt, Human
ccauuucccaucugc

SEQ ID NO: 2287394 - RNA, 16 nt, Human
ccauuucccaucugca

SEQ ID NO: 2287395 - RNA, 17 nt, Human
ccauuucccaucugcac

SEQ ID NO: 2287396 - RNA, 22 nt, Human
ccauuucauuugugccagaaug

SEQ ID NO: 2287397 - RNA, 21 nt, Human
ccauuucauuugugccagaau

SEQ ID NO: 2287398 - RNA, 15 nt, Human
cccaacucaccccag

SEQ ID NO: 2287399 - RNA, 16 nt, Human
cccaacucaccccagc

SEQ ID NO: 2287400 - RNA, 23 nt, Human
ccauugccuccuccuucccaaag

SEQ ID NO: 2287401 - RNA, 15 nt, Human
ccauuggaucucauu

SEQ ID NO: 2287402 - RNA, 19 nt, Human
ccauuggcuauuuaaaacu

SEQ ID NO: 2287403 - RNA, 20 nt, Human
ccauuggcuauuuaaaacuu

SEQ ID NO: 2287404 - RNA, 13 nt, Human
ccauuucagagag

SEQ ID NO: 2287405 - RNA, 17 nt, Human
ccauuucaucuauuucu

SEQ ID NO: 2287406 - RNA, 16 nt, Human
ccauuucaucuauuuc

SEQ ID NO: 2287407 - RNA, 17 nt, Human
ccauuucaauucucaaa

SEQ ID NO: 2287408 - RNA, 21 nt, Human
ccauuggcuauuuaaaacuug

SEQ ID NO: 2287409 - RNA, 14 nt, Human
ccauugcccugguu

SEQ ID NO: 2287410 - RNA, 13 nt, Human
ccauugccuccuc

SEQ ID NO: 2287411 - RNA, 15 nt, Human
ccauugccuccuccu

SEQ ID NO: 2287412 - RNA, 21 nt, Human
ccauugccaccaggagaacca

SEQ ID NO: 2287413 - RNA, 17 nt, Human
ccauugccaccaggaga

SEQ ID NO: 2287414 - RNA, 16 nt, Human
ccauugccaccaggag

SEQ ID NO: 2287415 - RNA, 15 nt, Human
ccauugccaccagga

SEQ ID NO: 2287416 - RNA, 18 nt, Human
ccauugcacuccagccug

SEQ ID NO: 2287417 - RNA, 20 nt, Human
ccauucuuccuaguuuucuc

SEQ ID NO: 2287418 - RNA, 22 nt, Human
ccauucuggauuuugucaagca

SEQ ID NO: 2287419 - RNA, 19 nt, Human
ccauucuuccuaguuuucu

SEQ ID NO: 2287420 - RNA, 14 nt, Human
ccauucuuccuagu

SEQ ID NO: 2287421 - RNA, 19 nt, Human
ccauucuggaagugacuuu

SEQ ID NO: 2287422 - RNA, 17 nt, Human
ccaugaucccuguguug

SEQ ID NO: 2287423 - RNA, 22 nt, Human
ccaugaucccuguguugucucu

SEQ ID NO: 2287424 - RNA, 16 nt, Human
ccauguacaugaagaa

SEQ ID NO: 2287425 - RNA, 12 nt, Human
ccaugaugcugg

SEQ ID NO: 2287426 - RNA, 22 nt, Human
ccauguacuguaguuuuucuuc

SEQ ID NO: 2287427 - RNA, 15 nt, Human
ccauguacuguaguu

SEQ ID NO: 2287428 - RNA, 14 nt, Human
ccauguacuguagu

SEQ ID NO: 2287429 - RNA, 13 nt, Human
ccauguacuguag

SEQ ID NO: 2287430 - RNA, 16 nt, Human
ccauguagaaaauuug

SEQ ID NO: 2287431 - RNA, 15 nt, Human
ccauguagaaaauuu

SEQ ID NO: 2287432 - RNA, 20 nt, Human
ccauguagcccccuggccuc

SEQ ID NO: 2287433 - RNA, 14 nt, Human
ccauguagcccccu

SEQ ID NO: 2287434 - RNA, 14 nt, Human
ccauguagaagcug

SEQ ID NO: 2287435 - RNA, 15 nt, Human
ccauguagaagcugc

SEQ ID NO: 2287436 - RNA, 18 nt, Human
ccauguagaagcugcauc

SEQ ID NO: 2287437 - RNA, 19 nt, Human
ccauguagaagcugcaucu

SEQ ID NO: 2287438 - RNA, 16 nt, Human
ccauguagcaggacug

SEQ ID NO: 2287439 - RNA, 15 nt, Human
ccauguaucuaccuc

SEQ ID NO: 2287440 - RNA, 23 nt, Human
ccauguagcccccuggccucugu

SEQ ID NO: 2287441 - RNA, 22 nt, Human
ccauguagcccccuggccucug

SEQ ID NO: 2287442 - RNA, 12 nt, Human
ccaugucgccuc

SEQ ID NO: 2287443 - RNA, 15 nt, Human
ccaugucgccucugc

SEQ ID NO: 2287444 - RNA, 16 nt, Human
ccaugucgccucugca

SEQ ID NO: 2287445 - RNA, 17 nt, Human
ccaugucgccucugcau

SEQ ID NO: 2287446 - RNA, 15 nt, Human
ccaugaggccucagu

SEQ ID NO: 2287447 - RNA, 20 nt, Human
ccaugaggaguugcuguuug

SEQ ID NO: 2287448 - RNA, 18 nt, Human
ccaugaggaguugcuguu

SEQ ID NO: 2287449 - RNA, 22 nt, Human
ccaucccucgugguccccaaca

SEQ ID NO: 2287450 - RNA, 23 nt, Human
ccaugaggaacaaggcaaggcug

SEQ ID NO: 2287451 - RNA, 20 nt, Human
ccaugaggaacaaggcaagg

SEQ ID NO: 2287452 - RNA, 18 nt, Human
ccaugaguuugcccuggu

SEQ ID NO: 2287453 - RNA, 17 nt, Human
ccaugaguuugcccugg

SEQ ID NO: 2287454 - RNA, 14 nt, Human
ccaugaucccugug

SEQ ID NO: 2287455 - RNA, 16 nt, Human
ccaugaucccuguguu

SEQ ID NO: 2287456 - RNA, 23 nt, Human
ccaugaguuggggucuggcagcc

SEQ ID NO: 2287457 - RNA, 22 nt, Human
ccaugaguuggggucuggcagc

SEQ ID NO: 2287458 - RNA, 21 nt, Human
ccaugaguuggggucuggcag

SEQ ID NO: 2287459 - RNA, 20 nt, Human
ccaugaguggcauggccacc

SEQ ID NO: 2287460 - RNA, 21 nt, Human
ccaugaguggcauggccacca

SEQ ID NO: 2287461 - RNA, 18 nt, Human
ccaugaguccccuguuug

SEQ ID NO: 2287462 - RNA, 17 nt, Human
ccaugaguccuugaaaa

SEQ ID NO: 2287463 - RNA, 15 nt, Human
ccauguccuuagcac

SEQ ID NO: 2287464 - RNA, 23 nt, Human
ccaguuccuuucaaugguuugca

SEQ ID NO: 2287465 - RNA, 13 nt, Human
ccaguucugcucc

SEQ ID NO: 2287466 - RNA, 14 nt, Human
ccaguucugcuccu

SEQ ID NO: 2287467 - RNA, 15 nt, Human
ccaguucugcuccuc

SEQ ID NO: 2287468 - RNA, 16 nt, Human
ccaguucugcuccucu

SEQ ID NO: 2287469 - RNA, 17 nt, Human
ccaguucugcuccucuc

SEQ ID NO: 2287470 - RNA, 19 nt, Human
ccaguucugcuccucucca

SEQ ID NO: 2287471 - RNA, 20 nt, Human
ccaguucugcuccucuccag

SEQ ID NO: 2287472 - RNA, 21 nt, Human
ccaguucugcuccucuccagg

SEQ ID NO: 2287473 - RNA, 22 nt, Human
ccaguucugcuccucuccaggc

SEQ ID NO: 2287474 - RNA, 20 nt, Human
ccaguugcacuuggccucug

SEQ ID NO: 2287475 - RNA, 14 nt, Human
ccaguugcacuugg

SEQ ID NO: 2287476 - RNA, 21 nt, Human
ccaguugcacuuggccucugg

SEQ ID NO: 2287477 - RNA, 18 nt, Human
ccaguugaucaaugaaua

SEQ ID NO: 2287478 - RNA, 22 nt, Human
ccaguuggagcagaugccuccc

SEQ ID NO: 2287479 - RNA, 15 nt, Human
ccaguugccaucugc

SEQ ID NO: 2287480 - RNA, 23 nt, Human
ccaguuggguggaugccuggugg

SEQ ID NO: 2287481 - RNA, 13 nt, Human
ccaguuggucccc

SEQ ID NO: 2287482 - RNA, 22 nt, Human
ccaucccgacauggacccggag

SEQ ID NO: 2287483 - RNA, 17 nt, Human
ccaucccgacauggacc

SEQ ID NO: 2287484 - RNA, 19 nt, Human
ccaucccgaaaaucucucg

SEQ ID NO: 2287485 - RNA, 19 nt, Human
ccaucccaugaacacacug

SEQ ID NO: 2287486 - RNA, 16 nt, Human
ccaucccgaaaaucuc

SEQ ID NO: 2287487 - RNA, 14 nt, Human
ccaucccguuuaga

SEQ ID NO: 2287488 - RNA, 16 nt, Human
ccaucccuccccaguu

SEQ ID NO: 2287489 - RNA, 11 nt, Human
ccaucccauga

SEQ ID NO: 2287490 - RNA, 17 nt, Human
ccauccccauccuccag

SEQ ID NO: 2287491 - RNA, 21 nt, Human
ccaucccauaugccugggcag

SEQ ID NO: 2287492 - RNA, 20 nt, Human
ccaucccaaacccuucagug

SEQ ID NO: 2287493 - RNA, 19 nt, Human
ccauccagugucucacagc

SEQ ID NO: 2287494 - RNA, 19 nt, Human
ccaucccauaugccugggc

SEQ ID NO: 2287495 - RNA, 20 nt, Human
ccaucccauaugccugggca

SEQ ID NO: 2287496 - RNA, 21 nt, Human
ccauaagccuccauuuaguuc

SEQ ID NO: 2287497 - RNA, 20 nt, Human
ccaguugggagcacuggagu

SEQ ID NO: 2287498 - RNA, 19 nt, Human
ccaguugggagcacuggag

SEQ ID NO: 2287499 - RNA, 18 nt, Human
ccaguugggagcacugga

SEQ ID NO: 2287500 - RNA, 17 nt, Human
ccaguugggagcacugg

SEQ ID NO: 2287501 - RNA, 17 nt, Human
ccauaagccuccauuua

SEQ ID NO: 2287502 - RNA, 15 nt, Human
ccauaaggaauguag

SEQ ID NO: 2287503 - RNA, 20 nt, Human
ccauaagguuucguuucugu

SEQ ID NO: 2287504 - RNA, 22 nt, Human
ccauaagguuucguuucuguau

SEQ ID NO: 2287505 - RNA, 18 nt, Human
ccaguuggucccccuucc

SEQ ID NO: 2287506 - RNA, 20 nt, Human
ccaguuggucccccuuccau

SEQ ID NO: 2287507 - RNA, 18 nt, Human
ccauccagguucagcuug

SEQ ID NO: 2287508 - RNA, 19 nt, Human
ccauccagguucagcuugu

SEQ ID NO: 2287509 - RNA, 14 nt, Human
ccauaaucuggacu

SEQ ID NO: 2287510 - RNA, 21 nt, Human
ccauaaucuggacuccucugu

SEQ ID NO: 2287511 - RNA, 23 nt, Human
ccauaauuuucuucaugcaauga

SEQ ID NO: 2287512 - RNA, 21 nt, Human
ccauaauuuucuucaugcaau

SEQ ID NO: 2287513 - RNA, 17 nt, Human
ccauaauuuucuucaug

SEQ ID NO: 2287514 - RNA, 20 nt, Human
ccauaauuaugacaguuaua

SEQ ID NO: 2287515 - RNA, 19 nt, Human
ccauaauguauaaagaaca

SEQ ID NO: 2287516 - RNA, 21 nt, Human
ccauaaugcuacugucucacu

SEQ ID NO: 2287517 - RNA, 22 nt, Human
ccagcuauugauauaaauaaaa

SEQ ID NO: 2287518 - RNA, 17 nt, Human
ccagcuauuuuuacuag

SEQ ID NO: 2287519 - RNA, 19 nt, Human
ccagcuauaccugugccuc

SEQ ID NO: 2287520 - RNA, 22 nt, Human
ccagcuauguuauauugaaaaa

SEQ ID NO: 2287521 - RNA, 18 nt, Human
ccagcuauaccugugccu

SEQ ID NO: 2287522 - RNA, 16 nt, Human
ccagcuauaccugugc

SEQ ID NO: 2287523 - RNA, 15 nt, Human
ccagcuauaccugug

SEQ ID NO: 2287524 - RNA, 14 nt, Human
ccagcuauaccugu

SEQ ID NO: 2287525 - RNA, 22 nt, Human
ccagcuccaaggggaaucagaa

SEQ ID NO: 2287526 - RNA, 20 nt, Human
ccagcuccaaccugcaaaga

SEQ ID NO: 2287527 - RNA, 19 nt, Human
ccagcuccaagaccuguug

SEQ ID NO: 2287528 - RNA, 21 nt, Human
ccagcuccaagaccuguuggu

SEQ ID NO: 2287529 - RNA, 15 nt, Human
ccagcuccaaccugc

SEQ ID NO: 2287530 - RNA, 14 nt, Human
ccagcuccaaccug

SEQ ID NO: 2287531 - RNA, 17 nt, Human
ccagcucaauggacugg

SEQ ID NO: 2287532 - RNA, 19 nt, Human
ccagcuauuuuuacuagaa

SEQ ID NO: 2287533 - RNA, 21 nt, Human
ccagcuauuuuuacuagaaca

SEQ ID NO: 2287534 - RNA, 14 nt, Human
ccagcucccuagga

SEQ ID NO: 2287535 - RNA, 17 nt, Human
ccagcucccccgggagg

SEQ ID NO: 2287536 - RNA, 21 nt, Human
ccagcucccccgggaggggcc

SEQ ID NO: 2287537 - RNA, 14 nt, Human
ccagcucccucuau

SEQ ID NO: 2287538 - RNA, 18 nt, Human
ccagcuuucccugccucu

SEQ ID NO: 2287539 - RNA, 14 nt, Human
ccagcuuucccugc

SEQ ID NO: 2287540 - RNA, 12 nt, Human
ccagcuuucccu

SEQ ID NO: 2287541 - RNA, 15 nt, Human
ccagcucccccggga

SEQ ID NO: 2287542 - RNA, 23 nt, Human
ccagcuccccaagaaagccucag

SEQ ID NO: 2287543 - RNA, 14 nt, Human
ccagcuccccaaga

SEQ ID NO: 2287544 - RNA, 20 nt, Human
ccagccccucccaccacagc

SEQ ID NO: 2287545 - RNA, 14 nt, Human
ccagccccuugaga

SEQ ID NO: 2287546 - RNA, 13 nt, Human
ccagccccucugg

SEQ ID NO: 2287547 - RNA, 13 nt, Human
ccagcccggccug

SEQ ID NO: 2287548 - RNA, 14 nt, Human
ccagcccggccugc

SEQ ID NO: 2287549 - RNA, 15 nt, Human
ccagcccggccugcu

SEQ ID NO: 2287550 - RNA, 17 nt, Human
ccagcccggccugcucc

SEQ ID NO: 2287551 - RNA, 17 nt, Human
ccagcccggcugguuuu

SEQ ID NO: 2287552 - RNA, 15 nt, Human
ccagcuacuuccucc

SEQ ID NO: 2287553 - RNA, 17 nt, Human
ccagcuacuuccuccuc

SEQ ID NO: 2287554 - RNA, 19 nt, Human
ccagcccggccugcuccca

SEQ ID NO: 2287555 - RNA, 20 nt, Human
ccagcccggccugcucccag

SEQ ID NO: 2287556 - RNA, 22 nt, Human
ccagcccggccugcucccagca

SEQ ID NO: 2287557 - RNA, 14 nt, Human
ccagcuacuuggga

SEQ ID NO: 2287558 - RNA, 16 nt, Human
ccagcuacuugggaag

SEQ ID NO: 2287559 - RNA, 17 nt, Human
ccagcuacuugggaagc

SEQ ID NO: 2287560 - RNA, 21 nt, Human
ccagccccucccaccacagca

SEQ ID NO: 2287561 - RNA, 16 nt, Human
ccagccccucccacca

SEQ ID NO: 2287562 - RNA, 15 nt, Human
ccagccccucccacc

SEQ ID NO: 2287563 - RNA, 14 nt, Human
ccagccccucccac

SEQ ID NO: 2287564 - RNA, 13 nt, Human
ccagccccuccca

SEQ ID NO: 2287565 - RNA, 12 nt, Human
ccagccccuccc

SEQ ID NO: 2287566 - RNA, 11 nt, Human
ccagccccucc

SEQ ID NO: 2287567 - RNA, 14 nt, Human
ccagccccuagccc

SEQ ID NO: 2287568 - RNA, 15 nt, Human
ccagccccuagccca

SEQ ID NO: 2287569 - RNA, 16 nt, Human
ccagccccuagcccag

SEQ ID NO: 2287570 - RNA, 17 nt, Human
ccagccccuagcccagg

SEQ ID NO: 2287571 - RNA, 18 nt, Human
ccagccccuagcccagga

SEQ ID NO: 2287572 - RNA, 19 nt, Human
ccagccccuagcccaggag

SEQ ID NO: 2287573 - RNA, 22 nt, Human
ccagccccuagcccaggagaga

SEQ ID NO: 2287574 - RNA, 23 nt, Human
ccagccccuagcccaggagagag

SEQ ID NO: 2287575 - RNA, 23 nt, Human
ccagccccuucugacccaugcug

SEQ ID NO: 2287576 - RNA, 24 nt, Human
ccagccccuucugacccaugcugc

SEQ ID NO: 2287577 - RNA, 17 nt, Human
ccagcacuuugggaggc

SEQ ID NO: 2287578 - RNA, 11 nt, Human
ccagcacuuug

SEQ ID NO: 2287579 - RNA, 19 nt, Human
ccagcacuuugggaggcca

SEQ ID NO: 2287580 - RNA, 16 nt, Human
ccagcacuuugggagg

SEQ ID NO: 2287581 - RNA, 15 nt, Human
ccagcacuuugggag

SEQ ID NO: 2287582 - RNA, 14 nt, Human
ccagcacuuuggga

SEQ ID NO: 2287583 - RNA, 20 nt, Human
ccagcacuuguccagcugag

SEQ ID NO: 2287584 - RNA, 19 nt, Human
ccagcacuuguccagcuga

SEQ ID NO: 2287585 - RNA, 16 nt, Human
ccagcacuuguccagc

SEQ ID NO: 2287586 - RNA, 21 nt, Human
ccagcacuuugggaggcugag

SEQ ID NO: 2287587 - RNA, 12 nt, Human
ccagcagacauu

SEQ ID NO: 2287588 - RNA, 21 nt, Human
ccagcacuuugggaggccaag

SEQ ID NO: 2287589 - RNA, 19 nt, Human
ccagcacuuugggaggccu

SEQ ID NO: 2287590 - RNA, 23 nt, Human
ccagcacuuugggaggccaagga

SEQ ID NO: 2287591 - RNA, 12 nt, Human
ccagcagaaaug

SEQ ID NO: 2287592 - RNA, 16 nt, Human
ccacucgcuuccccca

SEQ ID NO: 2287593 - RNA, 13 nt, Human
ccacucgcuuccc

SEQ ID NO: 2287594 - RNA, 22 nt, Human
ccacuccuuccugccaccugcu

SEQ ID NO: 2287595 - RNA, 13 nt, Human
ccacuccuuccug

SEQ ID NO: 2287596 - RNA, 12 nt, Human
ccacuccuuccu

SEQ ID NO: 2287597 - RNA, 15 nt, Human
ccacuccuguacacu

SEQ ID NO: 2287598 - RNA, 14 nt, Human
ccacuccuguacac

SEQ ID NO: 2287599 - RNA, 15 nt, Human
ccacuccucuuauuu

SEQ ID NO: 2287600 - RNA, 21 nt, Human
ccacucgcuucccccauagcc

SEQ ID NO: 2287601 - RNA, 18 nt, Human
ccacucgcuucccccaua

SEQ ID NO: 2287602 - RNA, 20 nt, Human
ccacucgggaggcugagaca

SEQ ID NO: 2287603 - RNA, 16 nt, Human
ccacucuacccuccca

SEQ ID NO: 2287604 - RNA, 23 nt, Human
ccacucgggaggcugagacagga

SEQ ID NO: 2287605 - RNA, 15 nt, Human
ccagcacuuggagag

SEQ ID NO: 2287606 - RNA, 21 nt, Human
ccagcacuuggagaggcugag

SEQ ID NO: 2287607 - RNA, 15 nt, Human
ccagcacuuguauau

SEQ ID NO: 2287608 - RNA, 17 nt, Human
ccagccccagugcccac

SEQ ID NO: 2287609 - RNA, 14 nt, Human
ccagcagagcaccu

SEQ ID NO: 2287610 - RNA, 12 nt, Human
ccagcagagcac

SEQ ID NO: 2287611 - RNA, 13 nt, Human
ccagcagagcacc

SEQ ID NO: 2287612 - RNA, 18 nt, Human
ccagccccauccucugua

SEQ ID NO: 2287613 - RNA, 13 nt, Human
ccagcagacauug

SEQ ID NO: 2287614 - RNA, 14 nt, Human
ccagcagacauugu

SEQ ID NO: 2287615 - RNA, 15 nt, Human
ccagcagacauuguc

SEQ ID NO: 2287616 - RNA, 17 nt, Human
ccagcagacauugucag

SEQ ID NO: 2287617 - RNA, 16 nt, Human
ccagccccaucaggac

SEQ ID NO: 2287618 - RNA, 17 nt, Human
ccagccccggggugagu

SEQ ID NO: 2287619 - RNA, 13 nt, Human
ccagccccuagcc

SEQ ID NO: 2287620 - RNA, 15 nt, Human
ccagccccauccucu

SEQ ID NO: 2287621 - RNA, 17 nt, Human
ccagccccauccucugu

SEQ ID NO: 2287622 - RNA, 19 nt, Human
ccaggaaacuccacaucug

SEQ ID NO: 2287623 - RNA, 20 nt, Human
ccaggaaacuccacaucugc

SEQ ID NO: 2287624 - RNA, 21 nt, Human
ccaggaaacuccacaucugcc

SEQ ID NO: 2287625 - RNA, 22 nt, Human
ccaggaaacuccacaucugccu

SEQ ID NO: 2287626 - RNA, 23 nt, Human
ccaggaaacuccacaucugccuu

SEQ ID NO: 2287627 - RNA, 13 nt, Human
ccagcuuuuccca

SEQ ID NO: 2287628 - RNA, 23 nt, Human
ccagcuuuucccaaaagcccauu

SEQ ID NO: 2287629 - RNA, 16 nt, Human
ccagcuuuuccucccu

SEQ ID NO: 2287630 - RNA, 18 nt, Human
ccagcuuuuccucccuug

SEQ ID NO: 2287631 - RNA, 20 nt, Human
ccagcuuugcuaccaaagca

SEQ ID NO: 2287632 - RNA, 15 nt, Human
ccagcuuugcccaac

SEQ ID NO: 2287633 - RNA, 18 nt, Human
ccagcuuugcccaacacc

SEQ ID NO: 2287634 - RNA, 19 nt, Human
ccagcuuugcccaacacca

SEQ ID NO: 2287635 - RNA, 22 nt, Human
ccagcuuugcccaacaccagcc

SEQ ID NO: 2287636 - RNA, 18 nt, Human
ccaggggaugaguggagg

SEQ ID NO: 2287637 - RNA, 21 nt, Human
ccaggggaggccugaggcuuc

SEQ ID NO: 2287638 - RNA, 23 nt, Human
ccagggggccagucccugaggca

SEQ ID NO: 2287639 - RNA, 17 nt, Human
ccaggggggugaggagc

SEQ ID NO: 2287640 - RNA, 20 nt, Human
ccaggggggugaggagcugg

SEQ ID NO: 2287641 - RNA, 19 nt, Human
ccaggggggugaggagcug

SEQ ID NO: 2287642 - RNA, 18 nt, Human
ccaggggucccagccacc

SEQ ID NO: 2287643 - RNA, 16 nt, Human
ccaggggucucccugg

SEQ ID NO: 2287644 - RNA, 17 nt, Human
ccaggggucccagccac

SEQ ID NO: 2287645 - RNA, 14 nt, Human
ccaggggucccagc

SEQ ID NO: 2287646 - RNA, 19 nt, Human
ccaggggugauuucagaga

SEQ ID NO: 2287647 - RNA, 20 nt, Human
ccaggggugauuucagagag

SEQ ID NO: 2287648 - RNA, 21 nt, Human
ccaggggugauuucagagagg

SEQ ID NO: 2287649 - RNA, 17 nt, Human
ccaggggucucccugga

SEQ ID NO: 2287650 - RNA, 18 nt, Human
ccaggggucucccuggag

SEQ ID NO: 2287651 - RNA, 19 nt, Human
ccaggggucucccuggagu

SEQ ID NO: 2287652 - RNA, 21 nt, Human
ccaguccaaauguccuccaga

SEQ ID NO: 2287653 - RNA, 14 nt, Human
ccaguccaaggaaa

SEQ ID NO: 2287654 - RNA, 21 nt, Human
ccaguccaaucucauggagaa

SEQ ID NO: 2287655 - RNA, 13 nt, Human
ccaguccaggcug

SEQ ID NO: 2287656 - RNA, 22 nt, Human
ccaguccaaucucauggagaag

SEQ ID NO: 2287657 - RNA, 14 nt, Human
ccaguccaggcugc

SEQ ID NO: 2287658 - RNA, 15 nt, Human
ccaguccaggcugcc

SEQ ID NO: 2287659 - RNA, 16 nt, Human
ccaguccaggcugccg

SEQ ID NO: 2287660 - RNA, 19 nt, Human
ccaguccaggcugccgugg

SEQ ID NO: 2287661 - RNA, 18 nt, Human
ccaggggugcccccuccu

SEQ ID NO: 2287662 - RNA, 18 nt, Human
ccaguccaaauguccucc

SEQ ID NO: 2287663 - RNA, 19 nt, Human
ccagucagguaguugcaau

SEQ ID NO: 2287664 - RNA, 13 nt, Human
ccaggggugcccc

SEQ ID NO: 2287665 - RNA, 15 nt, Human
ccaggggugcccccu

SEQ ID NO: 2287666 - RNA, 16 nt, Human
ccaggggugcccccuc

SEQ ID NO: 2287667 - RNA, 17 nt, Human
ccaggggugcccccucc

SEQ ID NO: 2287668 - RNA, 18 nt, Human
ccagucccccugccccag

SEQ ID NO: 2287669 - RNA, 22 nt, Human
ccaguccccgugccccgccucc

SEQ ID NO: 2287670 - RNA, 15 nt, Human
ccaguccccgugccc

SEQ ID NO: 2287671 - RNA, 17 nt, Human
ccaguccccgugccccg

SEQ ID NO: 2287672 - RNA, 15 nt, Human
ccagucccugaggca

SEQ ID NO: 2287673 - RNA, 23 nt, Human
ccagucccugggggaagcccugg

SEQ ID NO: 2287674 - RNA, 22 nt, Human
ccagucccugggggaagcccug

SEQ ID NO: 2287675 - RNA, 19 nt, Human
ccagucccugggggaagcc

SEQ ID NO: 2287676 - RNA, 15 nt, Human
ccagucccuggggga

SEQ ID NO: 2287677 - RNA, 13 nt, Human
ccagucccugggg

SEQ ID NO: 2287678 - RNA, 12 nt, Human
ccagucccuggg

SEQ ID NO: 2287679 - RNA, 14 nt, Human
ccaguccccuuugu

SEQ ID NO: 2287680 - RNA, 18 nt, Human
ccaguccuagcugcacag

SEQ ID NO: 2287681 - RNA, 14 nt, Human
ccaggauggagggg

SEQ ID NO: 2287682 - RNA, 17 nt, Human
ccaggaucccaggggcc

SEQ ID NO: 2287683 - RNA, 20 nt, Human
ccaggauggcccuucccacu

SEQ ID NO: 2287684 - RNA, 22 nt, Human
ccaggauggaggggugguccug

SEQ ID NO: 2287685 - RNA, 17 nt, Human
ccaggcaggugccugga

SEQ ID NO: 2287686 - RNA, 19 nt, Human
ccaggcaggugccuggaca

SEQ ID NO: 2287687 - RNA, 23 nt, Human
ccaggcaggucuugaacuccugg

SEQ ID NO: 2287688 - RNA, 12 nt, Human
ccaggcaggucu

SEQ ID NO: 2287689 - RNA, 14 nt, Human
ccaggcaggucuug

SEQ ID NO: 2287690 - RNA, 13 nt, Human
ccaggcugcucag

SEQ ID NO: 2287691 - RNA, 15 nt, Human
ccaggcugccguggg

SEQ ID NO: 2287692 - RNA, 18 nt, Human
ccaggcugccguggggcc

SEQ ID NO: 2287693 - RNA, 20 nt, Human
ccaggcugccaaggccagag

SEQ ID NO: 2287694 - RNA, 19 nt, Human
ccaggcugccaaggccaga

SEQ ID NO: 2287695 - RNA, 14 nt, Human
ccaggcugccgugg

SEQ ID NO: 2287696 - RNA, 17 nt, Human
ccaggcugcucagggcu

SEQ ID NO: 2287697 - RNA, 19 nt, Human
ccaggcugcucagggcugg

SEQ ID NO: 2287698 - RNA, 21 nt, Human
ccaggcugcucuugaacuccu

SEQ ID NO: 2287699 - RNA, 14 nt, Human
ccaggcugcuggac

SEQ ID NO: 2287700 - RNA, 12 nt, Human
ccaggcuggcca

SEQ ID NO: 2287701 - RNA, 20 nt, Human
ccaggggagagggucuggag

SEQ ID NO: 2287702 - RNA, 18 nt, Human
ccaggggagagggucugg

SEQ ID NO: 2287703 - RNA, 21 nt, Human
ccaggggagagggucuggaga

SEQ ID NO: 2287704 - RNA, 13 nt, Human
ccaggggaccaca

SEQ ID NO: 2287705 - RNA, 18 nt, Human
ccaggggaccacaccucc

SEQ ID NO: 2287706 - RNA, 18 nt, Human
ccaggggaguugugucug

SEQ ID NO: 2287707 - RNA, 16 nt, Human
ccaggggaguuguguc

SEQ ID NO: 2287708 - RNA, 13 nt, Human
ccaggggagcccu

SEQ ID NO: 2287709 - RNA, 14 nt, Human
ccaggggagcccuc

SEQ ID NO: 2287710 - RNA, 21 nt, Human
ccaggggaaaaucagccugcu

SEQ ID NO: 2287711 - RNA, 23 nt, Human
ccaggcuggcgcagccaaggccg

SEQ ID NO: 2287712 - RNA, 19 nt, Human
ccaggggaaagaugagcuu

SEQ ID NO: 2287713 - RNA, 12 nt, Human
ccaggcuggcgu

SEQ ID NO: 2287714 - RNA, 18 nt, Human
ccaggcuggcgcagccaa

SEQ ID NO: 2287715 - RNA, 19 nt, Human
ccaggcuggcgcagccaag

SEQ ID NO: 2287716 - RNA, 21 nt, Human
ccaggcuggcgcagccaaggc

SEQ ID NO: 2287717 - RNA, 22 nt, Human
ccaggcuggcgcagccaaggcc

SEQ ID NO: 2287718 - RNA, 13 nt, Human
ccaggcuggccag

SEQ ID NO: 2287719 - RNA, 14 nt, Human
ccaggcuggccagc

SEQ ID NO: 2287720 - RNA, 15 nt, Human
ccaggcuggccagcc

SEQ ID NO: 2287721 - RNA, 16 nt, Human
ccaggcuggccagccc

SEQ ID NO: 2287722 - RNA, 17 nt, Human
ccaggcuggccagcccc

SEQ ID NO: 2287723 - RNA, 18 nt, Human
ccaggcuggccagcccca

SEQ ID NO: 2287724 - RNA, 20 nt, Human
ccaggcuggccagccccaca

SEQ ID NO: 2287725 - RNA, 21 nt, Human
ccaggcuggccagccccacag

SEQ ID NO: 2287726 - RNA, 22 nt, Human
ccaggcuggccagccccacagc

SEQ ID NO: 2287727 - RNA, 23 nt, Human
ccaggcuggccagccccacagcc

SEQ ID NO: 2287728 - RNA, 13 nt, Human
ccaggcuggcgca

SEQ ID NO: 2287729 - RNA, 14 nt, Human
ccaggcuggcgcag

SEQ ID NO: 2287730 - RNA, 15 nt, Human
ccaggcuggcgcagc

SEQ ID NO: 2287731 - RNA, 16 nt, Human
ccaggcuggcgcagcc

SEQ ID NO: 2287732 - RNA, 17 nt, Human
ccaggcuggcgcagcca

SEQ ID NO: 2287733 - RNA, 18 nt, Human
ccaggaucagauugcaug

SEQ ID NO: 2287734 - RNA, 14 nt, Human
ccaggaucagauug

SEQ ID NO: 2287735 - RNA, 23 nt, Human
ccaggauagugggcaccccacug

SEQ ID NO: 2287736 - RNA, 21 nt, Human
ccaggauggaacacggccaca

SEQ ID NO: 2287737 - RNA, 20 nt, Human
ccaggaugagcaucccagga

SEQ ID NO: 2287738 - RNA, 17 nt, Human
ccaggauccagaagggg

SEQ ID NO: 2287739 - RNA, 19 nt, Human
ccaggaucagauugcaugu

SEQ ID NO: 2287740 - RNA, 14 nt, Human
ccaggaucauggug

SEQ ID NO: 2287741 - RNA, 21 nt, Human
ccaggaucagauugcauguga

SEQ ID NO: 2287742 - RNA, 15 nt, Human
ccaggaucauggugu

SEQ ID NO: 2287743 - RNA, 17 nt, Human
ccaggaucaugguguaa

SEQ ID NO: 2287744 - RNA, 20 nt, Human
ccaggaucaugguguaauaa

SEQ ID NO: 2287745 - RNA, 23 nt, Human
ccaggaucaugguguaauaagac

SEQ ID NO: 2287746 - RNA, 17 nt, Human
cccucagcaccccuucc

SEQ ID NO: 2287747 - RNA, 18 nt, Human
cccucagcaccccuucca

SEQ ID NO: 2287748 - RNA, 19 nt, Human
cccucagcaccccuuccau

SEQ ID NO: 2287749 - RNA, 21 nt, Human
cccucagcaccccuuccaugu

SEQ ID NO: 2287750 - RNA, 19 nt, Human
cccucagccccaccccagg

SEQ ID NO: 2287751 - RNA, 14 nt, Human
cccucagccccucu

SEQ ID NO: 2287752 - RNA, 13 nt, Human
cccucagccccuc

SEQ ID NO: 2287753 - RNA, 12 nt, Human
cccucagccccu

SEQ ID NO: 2287754 - RNA, 20 nt, Human
cccucagccccaccccaggu

SEQ ID NO: 2287755 - RNA, 21 nt, Human
cccucagccccucuugccccc

SEQ ID NO: 2287756 - RNA, 17 nt, Human
cccucagccccucuugc

SEQ ID NO: 2287757 - RNA, 23 nt, Human
cccucagccccucuugcccccca

SEQ ID NO: 2287758 - RNA, 23 nt, Human
cccucaccugggcaccuggggag

SEQ ID NO: 2287759 - RNA, 17 nt, Human
cccucaccugggcaccu

SEQ ID NO: 2287760 - RNA, 21 nt, Human
cccucaccuguagcagccagu

SEQ ID NO: 2287761 - RNA, 18 nt, Human
cccucaccuugcaacaca

SEQ ID NO: 2287762 - RNA, 20 nt, Human
cccucaccuuggcaccagac

SEQ ID NO: 2287763 - RNA, 21 nt, Human
cccucaccuugcaacacacag

SEQ ID NO: 2287764 - RNA, 23 nt, Human
cccucaccuuggcaccagacacc

SEQ ID NO: 2287765 - RNA, 21 nt, Human
cccucaccuuggcaccagaca

SEQ ID NO: 2287766 - RNA, 23 nt, Human
cccucaggcauaggccugggugc

SEQ ID NO: 2287767 - RNA, 12 nt, Human
cccucagggauc

SEQ ID NO: 2287768 - RNA, 22 nt, Human
cccucaggcauaggccugggug

SEQ ID NO: 2287769 - RNA, 21 nt, Human
cccucaggcauaggccugggu

SEQ ID NO: 2287770 - RNA, 20 nt, Human
cccucaggcauaggccuggg

SEQ ID NO: 2287771 - RNA, 19 nt, Human
cccucaggcauaggccugg

SEQ ID NO: 2287772 - RNA, 18 nt, Human
cccucaggcauaggccug

SEQ ID NO: 2287773 - RNA, 17 nt, Human
cccucaggacugcaaca

SEQ ID NO: 2287774 - RNA, 13 nt, Human
cccucaggacugc

SEQ ID NO: 2287775 - RNA, 12 nt, Human
cccucagcucca

SEQ ID NO: 2287776 - RNA, 16 nt, Human
cccucaacaccucugc

SEQ ID NO: 2287777 - RNA, 17 nt, Human
cccggcuaauuuuugua

SEQ ID NO: 2287778 - RNA, 18 nt, Human
cccucaaaugacccaaag

SEQ ID NO: 2287779 - RNA, 19 nt, Human
cccucaaaugacccaaaga

SEQ ID NO: 2287780 - RNA, 18 nt, Human
cccgggaagggggcuggg

SEQ ID NO: 2287781 - RNA, 21 nt, Human
cccgggaagggggcugggaca

SEQ ID NO: 2287782 - RNA, 15 nt, Human
cccucaccugggcac

SEQ ID NO: 2287783 - RNA, 14 nt, Human
cccucaccugggca

SEQ ID NO: 2287784 - RNA, 14 nt, Human
cccucaccuccucu

SEQ ID NO: 2287785 - RNA, 15 nt, Human
cccucacccuggggc

SEQ ID NO: 2287786 - RNA, 21 nt, Human
cccucaacaagggagagaccu

SEQ ID NO: 2287787 - RNA, 16 nt, Human
cccucacccuggggcu

SEQ ID NO: 2287788 - RNA, 16 nt, Human
cccucaacucuccucc

SEQ ID NO: 2287789 - RNA, 16 nt, Human
cccucaaccucuucug

SEQ ID NO: 2287790 - RNA, 20 nt, Human
cccucaaaugacccaaagac

SEQ ID NO: 2287791 - RNA, 17 nt, Human
cccucaacaagggagag

SEQ ID NO: 2287792 - RNA, 18 nt, Human
cccucaacaagggagaga

SEQ ID NO: 2287793 - RNA, 19 nt, Human
cccucaacaagggagagac

SEQ ID NO: 2287794 - RNA, 22 nt, Human
ccccuucucugcuccaccacau

SEQ ID NO: 2287795 - RNA, 16 nt, Human
ccccuucucugcucca

SEQ ID NO: 2287796 - RNA, 16 nt, Human
ccccuucugacccaug

SEQ ID NO: 2287797 - RNA, 14 nt, Human
ccccuucugaccca

SEQ ID NO: 2287798 - RNA, 14 nt, Human
ccccuucucugcuc

SEQ ID NO: 2287799 - RNA, 13 nt, Human
ccccuucucugcu

SEQ ID NO: 2287800 - RNA, 12 nt, Human
ccccuucucugc

SEQ ID NO: 2287801 - RNA, 19 nt, Human
ccccuucucuccuccccaa

SEQ ID NO: 2287802 - RNA, 13 nt, Human
ccccuucugaccc

SEQ ID NO: 2287803 - RNA, 16 nt, Human
cccgaauagcugggac

SEQ ID NO: 2287804 - RNA, 17 nt, Human
cccgaauagcugggacu

SEQ ID NO: 2287805 - RNA, 18 nt, Human
cccgaauagcugggacua

SEQ ID NO: 2287806 - RNA, 22 nt, Human
cccggcgcgguggcucacgccu

SEQ ID NO: 2287807 - RNA, 19 nt, Human
cccggcgcgguggcucacg

SEQ ID NO: 2287808 - RNA, 14 nt, Human
cccggcgcgguggc

SEQ ID NO: 2287809 - RNA, 19 nt, Human
cccggcgcccucuguccug

SEQ ID NO: 2287810 - RNA, 16 nt, Human
cccggcgcccucuguc

SEQ ID NO: 2287811 - RNA, 18 nt, Human
cccggcgcccucuguccu

SEQ ID NO: 2287812 - RNA, 20 nt, Human
cccggcgcccucuguccuga

SEQ ID NO: 2287813 - RNA, 18 nt, Human
cccggccucagcaccccu

SEQ ID NO: 2287814 - RNA, 17 nt, Human
cccggccugcucccagc

SEQ ID NO: 2287815 - RNA, 18 nt, Human
cccggccugcucccagca

SEQ ID NO: 2287816 - RNA, 20 nt, Human
cccggccugcucccagcagc

SEQ ID NO: 2287817 - RNA, 21 nt, Human
cccggccugcucccagcagcc

SEQ ID NO: 2287818 - RNA, 14 nt, Human
cccggcgcccucug

SEQ ID NO: 2287819 - RNA, 15 nt, Human
cccggcgcccucugu

SEQ ID NO: 2287820 - RNA, 20 nt, Human
cccggcuaauuuuuguauuu

SEQ ID NO: 2287821 - RNA, 15 nt, Human
cccgggaagggggcu

SEQ ID NO: 2287822 - RNA, 15 nt, Human
cccggccccugcugg

SEQ ID NO: 2287823 - RNA, 11 nt, Human
cccggccagcc

SEQ ID NO: 2287824 - RNA, 19 nt, Human
cccggccauguccuuagca

SEQ ID NO: 2287825 - RNA, 13 nt, Human
cccggccccagcc

SEQ ID NO: 2287826 - RNA, 14 nt, Human
cccggccccagcca

SEQ ID NO: 2287827 - RNA, 15 nt, Human
cccggccccagccag

SEQ ID NO: 2287828 - RNA, 16 nt, Human
cccggccccagccaga

SEQ ID NO: 2287829 - RNA, 12 nt, Human
cccggcccccug

SEQ ID NO: 2287830 - RNA, 16 nt, Human
cccggccccugcuggu

SEQ ID NO: 2287831 - RNA, 22 nt, Human
cccggcccugggcucggaggcu

SEQ ID NO: 2287832 - RNA, 18 nt, Human
cccggccgccgcccugcu

SEQ ID NO: 2287833 - RNA, 13 nt, Human
cccggcccccugg

SEQ ID NO: 2287834 - RNA, 21 nt, Human
cccggcccccuggucucuggu

SEQ ID NO: 2287835 - RNA, 18 nt, Human
cccggccccggccccagc

SEQ ID NO: 2287836 - RNA, 22 nt, Human
cccggcccuaccagcgcccgcu

SEQ ID NO: 2287837 - RNA, 17 nt, Human
ccccugccagugccuua

SEQ ID NO: 2287838 - RNA, 16 nt, Human
ccccugccagugccuu

SEQ ID NO: 2287839 - RNA, 15 nt, Human
ccccugccagugccu

SEQ ID NO: 2287840 - RNA, 14 nt, Human
ccccugccagugcc

SEQ ID NO: 2287841 - RNA, 14 nt, Human
ccccugcccaucug

SEQ ID NO: 2287842 - RNA, 18 nt, Human
ccccugcccaucugggaa

SEQ ID NO: 2287843 - RNA, 13 nt, Human
ccccugccccagc

SEQ ID NO: 2287844 - RNA, 23 nt, Human
ccccugccagggcagggccccag

SEQ ID NO: 2287845 - RNA, 19 nt, Human
ccccugccagggcagggcc

SEQ ID NO: 2287846 - RNA, 15 nt, Human
ccccugccagggcag

SEQ ID NO: 2287847 - RNA, 14 nt, Human
ccccugccagggca

SEQ ID NO: 2287848 - RNA, 16 nt, Human
ccccugcccccaggac

SEQ ID NO: 2287849 - RNA, 17 nt, Human
ccccugcccccaggacu

SEQ ID NO: 2287850 - RNA, 12 nt, Human
ccccugccccca

SEQ ID NO: 2287851 - RNA, 14 nt, Human
ccccugccccagcc

SEQ ID NO: 2287852 - RNA, 16 nt, Human
ccccugccccagccca

SEQ ID NO: 2287853 - RNA, 23 nt, Human
ccccugcccccaggacugggcca

SEQ ID NO: 2287854 - RNA, 17 nt, Human
ccccugccccccagccu

SEQ ID NO: 2287855 - RNA, 18 nt, Human
ccccugcccccaggacug

SEQ ID NO: 2287856 - RNA, 19 nt, Human
ccccugcccccaggacugg

SEQ ID NO: 2287857 - RNA, 14 nt, Human
ccccugccacccug

SEQ ID NO: 2287858 - RNA, 16 nt, Human
ccccugccacccuggg

SEQ ID NO: 2287859 - RNA, 10 nt, Human
ccccugccag

SEQ ID NO: 2287860 - RNA, 12 nt, Human
ccccugccacca

SEQ ID NO: 2287861 - RNA, 20 nt, Human
ccccugccaccaggccaccu

SEQ ID NO: 2287862 - RNA, 18 nt, Human
ccccugccaccucccuga

SEQ ID NO: 2287863 - RNA, 21 nt, Human
ccccugccaccucccugaccc

SEQ ID NO: 2287864 - RNA, 16 nt, Human
ccccucuggccaggau

SEQ ID NO: 2287865 - RNA, 22 nt, Human
ccccucuugccccaacccccag

SEQ ID NO: 2287866 - RNA, 13 nt, Human
ccccucuggccag

SEQ ID NO: 2287867 - RNA, 18 nt, Human
ccccucuggcuccagcug

SEQ ID NO: 2287868 - RNA, 16 nt, Human
ccccucuggcuccagc

SEQ ID NO: 2287869 - RNA, 15 nt, Human
ccccugacaacacuc

SEQ ID NO: 2287870 - RNA, 13 nt, Human
ccccugaaacuua

SEQ ID NO: 2287871 - RNA, 16 nt, Human
ccccugaaacuuauuu

SEQ ID NO: 2287872 - RNA, 17 nt, Human
ccccugaaacuuauuuu

SEQ ID NO: 2287873 - RNA, 20 nt, Human
ccccugcaaagcccagcuug

SEQ ID NO: 2287874 - RNA, 18 nt, Human
ccccugcaaagcccagcu

SEQ ID NO: 2287875 - RNA, 21 nt, Human
ccccugcaaagcccagcuuga

SEQ ID NO: 2287876 - RNA, 13 nt, Human
ccccugcacucca

SEQ ID NO: 2287877 - RNA, 16 nt, Human
ccccucugcugcuguc

SEQ ID NO: 2287878 - RNA, 23 nt, Human
ccccucugcccugcgggucacag

SEQ ID NO: 2287879 - RNA, 20 nt, Human
ccccucugcccugcggguca

SEQ ID NO: 2287880 - RNA, 15 nt, Human
ccccucugcccugcg

SEQ ID NO: 2287881 - RNA, 14 nt, Human
ccccucugcccugc

SEQ ID NO: 2287882 - RNA, 13 nt, Human
cccuccucaccuc

SEQ ID NO: 2287883 - RNA, 12 nt, Human
cccuccucaccu

SEQ ID NO: 2287884 - RNA, 13 nt, Human
cccuccucacccc

SEQ ID NO: 2287885 - RNA, 21 nt, Human
cccuccuaucaccuccccucc

SEQ ID NO: 2287886 - RNA, 23 nt, Human
cccuccucaccucuggacuggcu

SEQ ID NO: 2287887 - RNA, 18 nt, Human
cccuccucaccucuggac

SEQ ID NO: 2287888 - RNA, 17 nt, Human
cccuccucaccucugga

SEQ ID NO: 2287889 - RNA, 16 nt, Human
cccuccucaccucugg

SEQ ID NO: 2287890 - RNA, 14 nt, Human
cccuccucaccccg

SEQ ID NO: 2287891 - RNA, 14 nt, Human
cccuccucacuggc

SEQ ID NO: 2287892 - RNA, 12 nt, Human
cccuccucacug

SEQ ID NO: 2287893 - RNA, 15 nt, Human
cccuccucacuggcc

SEQ ID NO: 2287894 - RNA, 16 nt, Human
cccuccucacuggcca

SEQ ID NO: 2287895 - RNA, 19 nt, Human
cccuccucacuggccaucc

SEQ ID NO: 2287896 - RNA, 21 nt, Human
cccuccucacuggccaucccu

SEQ ID NO: 2287897 - RNA, 18 nt, Human
cccuccugaaacuuacac

SEQ ID NO: 2287898 - RNA, 16 nt, Human
cccuccucugccaccu

SEQ ID NO: 2287899 - RNA, 13 nt, Human
cccuccucugcca

SEQ ID NO: 2287900 - RNA, 18 nt, Human
cccuccugccgacuccug

SEQ ID NO: 2287901 - RNA, 13 nt, Human
cccuccuggcucu

SEQ ID NO: 2287902 - RNA, 13 nt, Human
cccuccugcugca

SEQ ID NO: 2287903 - RNA, 19 nt, Human
cccuccugccgacuccugg

SEQ ID NO: 2287904 - RNA, 20 nt, Human
cccuccugccgacuccuggg

SEQ ID NO: 2287905 - RNA, 11 nt, Human
cccuccugcug

SEQ ID NO: 2287906 - RNA, 12 nt, Human
cccuccugcugc

SEQ ID NO: 2287907 - RNA, 11 nt, Human
cccuccuggga

SEQ ID NO: 2287908 - RNA, 17 nt, Human
cccuccugggaucugcu

SEQ ID NO: 2287909 - RNA, 19 nt, Human
cccuccugggaucugcucg

SEQ ID NO: 2287910 - RNA, 16 nt, Human
cccuccugucuuccca

SEQ ID NO: 2287911 - RNA, 18 nt, Human
cccuccugucuucccagg

SEQ ID NO: 2287912 - RNA, 13 nt, Human
cccuccuguaaau

SEQ ID NO: 2287913 - RNA, 12 nt, Human
cccuccugucuu

SEQ ID NO: 2287914 - RNA, 14 nt, Human
cccuccugucuucc

SEQ ID NO: 2287915 - RNA, 15 nt, Human
cccuccugucuuccc

SEQ ID NO: 2287916 - RNA, 12 nt, Human
cccuccucugcc

SEQ ID NO: 2287917 - RNA, 11 nt, Human
cccuccucugc

SEQ ID NO: 2287918 - RNA, 20 nt, Human
cccuccucccuuuuuccuug

SEQ ID NO: 2287919 - RNA, 15 nt, Human
cccuccucucugccc

SEQ ID NO: 2287920 - RNA, 16 nt, Human
cccuccucucugcccu

SEQ ID NO: 2287921 - RNA, 12 nt, Human
cccuccuccacu

SEQ ID NO: 2287922 - RNA, 13 nt, Human
cccuccuccacuc

SEQ ID NO: 2287923 - RNA, 14 nt, Human
cccuccuccacucu

SEQ ID NO: 2287924 - RNA, 13 nt, Human
cccauccuggccc

SEQ ID NO: 2287925 - RNA, 12 nt, Human
cccauccuaccc

SEQ ID NO: 2287926 - RNA, 13 nt, Human
cccauccuacccu

SEQ ID NO: 2287927 - RNA, 14 nt, Human
cccauccuacccuc

SEQ ID NO: 2287928 - RNA, 18 nt, Human
cccauccuggcccaucag

SEQ ID NO: 2287929 - RNA, 14 nt, Human
cccauccuggccca

SEQ ID NO: 2287930 - RNA, 15 nt, Human
cccauccuggcccau

SEQ ID NO: 2287931 - RNA, 16 nt, Human
cccauccuggcccauc

SEQ ID NO: 2287932 - RNA, 17 nt, Human
cccauccuggcccauca

SEQ ID NO: 2287933 - RNA, 12 nt, Human
cccaucccugcc

SEQ ID NO: 2287934 - RNA, 13 nt, Human
cccaucccugccu

SEQ ID NO: 2287935 - RNA, 14 nt, Human
cccaucccugccug

SEQ ID NO: 2287936 - RNA, 15 nt, Human
cccaucccuccccag

SEQ ID NO: 2287937 - RNA, 16 nt, Human
cccaucccuccccagu

SEQ ID NO: 2287938 - RNA, 15 nt, Human
cccaucccugccugg

SEQ ID NO: 2287939 - RNA, 17 nt, Human
cccaucccugccugguc

SEQ ID NO: 2287940 - RNA, 18 nt, Human
cccaucccugccugguca

SEQ ID NO: 2287941 - RNA, 17 nt, Human
cccauccuaccaaugca

SEQ ID NO: 2287942 - RNA, 19 nt, Human
cccauccuaccaaugcaug

SEQ ID NO: 2287943 - RNA, 20 nt, Human
cccauccuaccaaugcaugc

SEQ ID NO: 2287944 - RNA, 21 nt, Human
cccauccuaccaaugcaugca

SEQ ID NO: 2287945 - RNA, 21 nt, Human
cccauccucuguacagagccc

SEQ ID NO: 2287946 - RNA, 22 nt, Human
cccauccucuguacagagccca

SEQ ID NO: 2287947 - RNA, 21 nt, Human
cccacugggguccagggagca

SEQ ID NO: 2287948 - RNA, 21 nt, Human
cccacuggggaaauaacagcu

SEQ ID NO: 2287949 - RNA, 15 nt, Human
cccacuggcagcauc

SEQ ID NO: 2287950 - RNA, 16 nt, Human
cccacuggacucaccu

SEQ ID NO: 2287951 - RNA, 16 nt, Human
cccacugcacccccuc

SEQ ID NO: 2287952 - RNA, 17 nt, Human
cccacugcacccccucc

SEQ ID NO: 2287953 - RNA, 18 nt, Human
cccagcacagcuugaccu

SEQ ID NO: 2287954 - RNA, 19 nt, Human
cccagcacagcuugaccug

SEQ ID NO: 2287955 - RNA, 21 nt, Human
cccagccaggccccaggcagg

SEQ ID NO: 2287956 - RNA, 17 nt, Human
cccagcacuaaagcagu

SEQ ID NO: 2287957 - RNA, 13 nt, Human
cccagcacugagg

SEQ ID NO: 2287958 - RNA, 14 nt, Human
cccagcacugagga

SEQ ID NO: 2287959 - RNA, 16 nt, Human
cccagcacuaaagcag

SEQ ID NO: 2287960 - RNA, 22 nt, Human
cccagcacccgggcucagggac

SEQ ID NO: 2287961 - RNA, 21 nt, Human
cccagcacccgggcucaggga

SEQ ID NO: 2287962 - RNA, 15 nt, Human
cccagcacccagcaa

SEQ ID NO: 2287963 - RNA, 18 nt, Human
cccagcacaugaaaccuu

SEQ ID NO: 2287964 - RNA, 12 nt, Human
cccagcacccgg

SEQ ID NO: 2287965 - RNA, 19 nt, Human
cccagcacccgggcucagg

SEQ ID NO: 2287966 - RNA, 13 nt, Human
cccagcacccagc

SEQ ID NO: 2287967 - RNA, 15 nt, Human
cccagcugcuugugu

SEQ ID NO: 2287968 - RNA, 21 nt, Human
cccagcugcuccccucccucc

SEQ ID NO: 2287969 - RNA, 15 nt, Human
cccagcugcuccccu

SEQ ID NO: 2287970 - RNA, 18 nt, Human
cccagccauuaccaugga

SEQ ID NO: 2287971 - RNA, 22 nt, Human
cccagccaucugcccaggggug

SEQ ID NO: 2287972 - RNA, 14 nt, Human
cccagcugcucccc

SEQ ID NO: 2287973 - RNA, 10 nt, Human
cccagccauu

SEQ ID NO: 2287974 - RNA, 23 nt, Human
cccagccaucugcccaggggugc

SEQ ID NO: 2287975 - RNA, 13 nt, Human
cccagccaucugc

SEQ ID NO: 2287976 - RNA, 15 nt, Human
cccagccaucugccc

SEQ ID NO: 2287977 - RNA, 16 nt, Human
cccagccaucugccca

SEQ ID NO: 2287978 - RNA, 17 nt, Human
cccagccaucugcccag

SEQ ID NO: 2287979 - RNA, 18 nt, Human
cccagccaucugcccagg

SEQ ID NO: 2287980 - RNA, 20 nt, Human
cccagccaucugcccagggg

SEQ ID NO: 2287981 - RNA, 21 nt, Human
cccagccaucugcccaggggu

SEQ ID NO: 2287982 - RNA, 15 nt, Human
cccaggaaaggcucc

SEQ ID NO: 2287983 - RNA, 16 nt, Human
cccaggaaaggcucca

SEQ ID NO: 2287984 - RNA, 11 nt, Human
cccagcuggcc

SEQ ID NO: 2287985 - RNA, 20 nt, Human
cccagcuggcccgugacaga

SEQ ID NO: 2287986 - RNA, 11 nt, Human
cccagcuggga

SEQ ID NO: 2287987 - RNA, 12 nt, Human
cccagcugggag

SEQ ID NO: 2287988 - RNA, 13 nt, Human
cccagcugggagg

SEQ ID NO: 2287989 - RNA, 14 nt, Human
cccagcugggaggc

SEQ ID NO: 2287990 - RNA, 15 nt, Human
cccagcugggaggca

SEQ ID NO: 2287991 - RNA, 17 nt, Human
cccagcugggaggcaag

SEQ ID NO: 2287992 - RNA, 18 nt, Human
cccagcugggaggcaaga

SEQ ID NO: 2287993 - RNA, 20 nt, Human
cccagcugggaggcaagagg

SEQ ID NO: 2287994 - RNA, 21 nt, Human
cccagcugggaggcaagaggg

SEQ ID NO: 2287995 - RNA, 22 nt, Human
cccagcugggaggcaagagggg

SEQ ID NO: 2287996 - RNA, 12 nt, Human
cccagcugggcu

SEQ ID NO: 2287997 - RNA, 13 nt, Human
cccagcugggcuc

SEQ ID NO: 2287998 - RNA, 14 nt, Human
cccagcugggcucu

SEQ ID NO: 2287999 - RNA, 17 nt, Human
cccagcugggcucugcc

SEQ ID NO: 2288000 - RNA, 15 nt, Human
cccagggaaguuuug

SEQ ID NO: 2288001 - RNA, 13 nt, Human
cccagggaagugc

SEQ ID NO: 2288002 - RNA, 14 nt, Human
cccagggacaccag

SEQ ID NO: 2288003 - RNA, 15 nt, Human
cccagggacaccagc

SEQ ID NO: 2288004 - RNA, 17 nt, Human
cccagggacaccagcca

SEQ ID NO: 2288005 - RNA, 18 nt, Human
cccagggacaccagccag

SEQ ID NO: 2288006 - RNA, 18 nt, Human
cccagggagaggccauga

SEQ ID NO: 2288007 - RNA, 14 nt, Human
cccagggagaggcc

SEQ ID NO: 2288008 - RNA, 17 nt, Human
cccagggaccgaaaagu

SEQ ID NO: 2288009 - RNA, 21 nt, Human
cccagggacaccagccaggcu

SEQ ID NO: 2288010 - RNA, 19 nt, Human
cccagggacaccagccagg

SEQ ID NO: 2288011 - RNA, 20 nt, Human
cccagggacaccagccaggc

SEQ ID NO: 2288012 - RNA, 22 nt, Human
cccaucacaggguugggcccag

SEQ ID NO: 2288013 - RNA, 21 nt, Human
cccaucacaggguugggccca

SEQ ID NO: 2288014 - RNA, 16 nt, Human
cccaucacgccugugc

SEQ ID NO: 2288015 - RNA, 15 nt, Human
cccagggagcggaaa

SEQ ID NO: 2288016 - RNA, 14 nt, Human
cccaucagaaggag

SEQ ID NO: 2288017 - RNA, 20 nt, Human
cccaucacuggagcaccagg

SEQ ID NO: 2288018 - RNA, 15 nt, Human
cccaucacuggagca

SEQ ID NO: 2288019 - RNA, 13 nt, Human
cccaucacuggag

SEQ ID NO: 2288020 - RNA, 18 nt, Human
cccaucagcuccagcugc

SEQ ID NO: 2288021 - RNA, 23 nt, Human
cccaucagugcucccucacaugu

SEQ ID NO: 2288022 - RNA, 13 nt, Human
cccaucaguguac

SEQ ID NO: 2288023 - RNA, 22 nt, Human
cccaucagugcucccucacaug

SEQ ID NO: 2288024 - RNA, 17 nt, Human
cccaucaggacucuugu

SEQ ID NO: 2288025 - RNA, 19 nt, Human
cccaucaggacucuuguga

SEQ ID NO: 2288026 - RNA, 16 nt, Human
cccauccccgcagugu

SEQ ID NO: 2288027 - RNA, 21 nt, Human
cccauccccuggacugggagg

SEQ ID NO: 2288028 - RNA, 16 nt, Human
cccaucccccugcccu

SEQ ID NO: 2288029 - RNA, 17 nt, Human
cccaucccccugcccuc

SEQ ID NO: 2288030 - RNA, 22 nt, Human
cccauccccccucaccaggggc

SEQ ID NO: 2288031 - RNA, 12 nt, Human
cccaucccccug

SEQ ID NO: 2288032 - RNA, 14 nt, Human
cccaucccccugcc

SEQ ID NO: 2288033 - RNA, 15 nt, Human
cccaucccccugccc

SEQ ID NO: 2288034 - RNA, 20 nt, Human
cccaucaguguacccccgcc

SEQ ID NO: 2288035 - RNA, 21 nt, Human
cccaucaguguacccccgccc

SEQ ID NO: 2288036 - RNA, 23 nt, Human
cccaucaguguacccccgcccag

SEQ ID NO: 2288037 - RNA, 17 nt, Human
cccaucauacacuuccu

SEQ ID NO: 2288038 - RNA, 12 nt, Human
cccauccccccu

SEQ ID NO: 2288039 - RNA, 14 nt, Human
cccauccccccuca

SEQ ID NO: 2288040 - RNA, 15 nt, Human
cccauccccccucac

SEQ ID NO: 2288041 - RNA, 16 nt, Human
cccauccccccucacc

SEQ ID NO: 2288042 - RNA, 20 nt, Human
cccauccccccucaccaggg

SEQ ID NO: 2288043 - RNA, 20 nt, Human
cccaggcuggagugcaauga

SEQ ID NO: 2288044 - RNA, 22 nt, Human
cccaggcuuagucacugagaca

SEQ ID NO: 2288045 - RNA, 13 nt, Human
cccaggcuggagu

SEQ ID NO: 2288046 - RNA, 18 nt, Human
cccaggcugagccucagu

SEQ ID NO: 2288047 - RNA, 24 nt, Human
cccagcugggcucugccacccuac

SEQ ID NO: 2288048 - RNA, 17 nt, Human
cccaggcugagccucag

SEQ ID NO: 2288049 - RNA, 16 nt, Human
cccaggcugagccuca

SEQ ID NO: 2288050 - RNA, 15 nt, Human
cccaggcugagccuc

SEQ ID NO: 2288051 - RNA, 18 nt, Human
cccagcugggcucugcca

SEQ ID NO: 2288052 - RNA, 19 nt, Human
cccagcugggcucugccac

SEQ ID NO: 2288053 - RNA, 20 nt, Human
cccagcugggcucugccacc

SEQ ID NO: 2288054 - RNA, 22 nt, Human
cccagcugggcucugccacccu

SEQ ID NO: 2288055 - RNA, 17 nt, Human
cccaggaaaggcuccag

SEQ ID NO: 2288056 - RNA, 18 nt, Human
cccaggaaaggcuccagg

SEQ ID NO: 2288057 - RNA, 12 nt, Human
ccccgcagaccu

SEQ ID NO: 2288058 - RNA, 13 nt, Human
ccccgcagaccuc

SEQ ID NO: 2288059 - RNA, 14 nt, Human
ccccgcagaccucc

SEQ ID NO: 2288060 - RNA, 17 nt, Human
ccccgcagaccucccca

SEQ ID NO: 2288061 - RNA, 19 nt, Human
ccccgcagaccuccccagc

SEQ ID NO: 2288062 - RNA, 14 nt, Human
ccccgcagacaccu

SEQ ID NO: 2288063 - RNA, 21 nt, Human
ccccgaguuuccccagacacc

SEQ ID NO: 2288064 - RNA, 14 nt, Human
ccccgcacugggcu

SEQ ID NO: 2288065 - RNA, 21 nt, Human
ccccgagggaugaugccacac

SEQ ID NO: 2288066 - RNA, 22 nt, Human
ccccgagggaugaugccacacc

SEQ ID NO: 2288067 - RNA, 18 nt, Human
cccccuuugugcuguggg

SEQ ID NO: 2288068 - RNA, 18 nt, Human
ccccgagggaugaugcca

SEQ ID NO: 2288069 - RNA, 19 nt, Human
ccccgagggaugaugccac

SEQ ID NO: 2288070 - RNA, 20 nt, Human
ccccgagggaugaugccaca

SEQ ID NO: 2288071 - RNA, 18 nt, Human
cccccuugccagacaugu

SEQ ID NO: 2288072 - RNA, 14 nt, Human
cccccuugaguggg

SEQ ID NO: 2288073 - RNA, 15 nt, Human
cccccuugccacccc

SEQ ID NO: 2288074 - RNA, 17 nt, Human
cccccuuucagaugucu

SEQ ID NO: 2288075 - RNA, 18 nt, Human
cccccuuucagaugucuu

SEQ ID NO: 2288076 - RNA, 12 nt, Human
cccccuuuccug

SEQ ID NO: 2288077 - RNA, 22 nt, Human
cccccuuucagaugucuucugc

SEQ ID NO: 2288078 - RNA, 20 nt, Human
cccccuuuccuggacacuca

SEQ ID NO: 2288079 - RNA, 16 nt, Human
cccccuuugggcccag

SEQ ID NO: 2288080 - RNA, 17 nt, Human
cccccuuugggcccagg

SEQ ID NO: 2288081 - RNA, 18 nt, Human
cccccuuugggcccaggg

SEQ ID NO: 2288082 - RNA, 19 nt, Human
cccccuuugggcccaggga

SEQ ID NO: 2288083 - RNA, 20 nt, Human
cccccuuugggcccagggac

SEQ ID NO: 2288084 - RNA, 14 nt, Human
cccccuuugugcug

SEQ ID NO: 2288085 - RNA, 16 nt, Human
cccccuuugugcugug

SEQ ID NO: 2288086 - RNA, 17 nt, Human
cccccuuugugcugugg

SEQ ID NO: 2288087 - RNA, 17 nt, Human
ccccaugccuguccagc

SEQ ID NO: 2288088 - RNA, 15 nt, Human
ccccaugccugucca

SEQ ID NO: 2288089 - RNA, 13 nt, Human
ccccaugccuguc

SEQ ID NO: 2288090 - RNA, 21 nt, Human
ccccagcccaggguuccccca

SEQ ID NO: 2288091 - RNA, 12 nt, Human
ccccaugccugu

SEQ ID NO: 2288092 - RNA, 20 nt, Human
ccccagcccagggcuccugc

SEQ ID NO: 2288093 - RNA, 21 nt, Human
ccccagcccagggcuccugca

SEQ ID NO: 2288094 - RNA, 13 nt, Human
ccccagcccaggg

SEQ ID NO: 2288095 - RNA, 12 nt, Human
ccccagcccagg

SEQ ID NO: 2288096 - RNA, 14 nt, Human
ccccagcccagggc

SEQ ID NO: 2288097 - RNA, 15 nt, Human
ccccagcccagggcu

SEQ ID NO: 2288098 - RNA, 16 nt, Human
ccccagcccagagaca

SEQ ID NO: 2288099 - RNA, 15 nt, Human
ccccagcccagagac

SEQ ID NO: 2288100 - RNA, 13 nt, Human
ccccagcccagag

SEQ ID NO: 2288101 - RNA, 12 nt, Human
ccccagcccaga

SEQ ID NO: 2288102 - RNA, 15 nt, Human
ccccagauugcaaca

SEQ ID NO: 2288103 - RNA, 22 nt, Human
ccccagagugugggaagggaga

SEQ ID NO: 2288104 - RNA, 15 nt, Human
ccccagauaccagcc

SEQ ID NO: 2288105 - RNA, 18 nt, Human
ccccagaucaccagcccg

SEQ ID NO: 2288106 - RNA, 17 nt, Human
ccccagaggcuggguga

SEQ ID NO: 2288107 - RNA, 11 nt, Human
ccccagcccag

SEQ ID NO: 2288108 - RNA, 20 nt, Human
ccccagcccacccuccuguc

SEQ ID NO: 2288109 - RNA, 22 nt, Human
ccccagcccacccuccugucuu

SEQ ID NO: 2288110 - RNA, 16 nt, Human
ccccagcccacccucc

SEQ ID NO: 2288111 - RNA, 18 nt, Human
ccccagauaccagccccu

SEQ ID NO: 2288112 - RNA, 19 nt, Human
ccccagcccacccuccugu

SEQ ID NO: 2288113 - RNA, 20 nt, Human
ccccagauugcaacaggcug

SEQ ID NO: 2288114 - RNA, 24 nt, Human
ccccaugccuguccagccugggca

SEQ ID NO: 2288115 - RNA, 15 nt, Human
ccccagcccagggug

SEQ ID NO: 2288116 - RNA, 12 nt, Human
ccccaugcugga

SEQ ID NO: 2288117 - RNA, 23 nt, Human
ccccaugccuguccagccugggc

SEQ ID NO: 2288118 - RNA, 22 nt, Human
ccccaugccuguccagccuggg

SEQ ID NO: 2288119 - RNA, 21 nt, Human
ccccaugccuguccagccugg

SEQ ID NO: 2288120 - RNA, 20 nt, Human
ccccaugccuguccagccug

SEQ ID NO: 2288121 - RNA, 19 nt, Human
ccccaugccuguccagccu

SEQ ID NO: 2288122 - RNA, 18 nt, Human
ccccaugccuguccagcc

SEQ ID NO: 2288123 - RNA, 14 nt, Human
ccccaugcuguuga

SEQ ID NO: 2288124 - RNA, 22 nt, Human
ccccaugcuggagccuguguaa

SEQ ID NO: 2288125 - RNA, 23 nt, Human
ccccaugcuggagccuguguaac

SEQ ID NO: 2288126 - RNA, 15 nt, Human
ccccaugcuggaggu

SEQ ID NO: 2288127 - RNA, 14 nt, Human
ccccaugcuggagc

SEQ ID NO: 2288128 - RNA, 15 nt, Human
ccccaugcuggagcc

SEQ ID NO: 2288129 - RNA, 16 nt, Human
ccccaugcuggagccu

SEQ ID NO: 2288130 - RNA, 17 nt, Human
ccccaugcuggagccug

SEQ ID NO: 2288131 - RNA, 18 nt, Human
ccccaugcuggagccugu

SEQ ID NO: 2288132 - RNA, 19 nt, Human
ccccaugcuggagccugug

SEQ ID NO: 2288133 - RNA, 20 nt, Human
ccccaugcuggagccugugu

SEQ ID NO: 2288134 - RNA, 21 nt, Human
ccccaugcuggagccugugua

SEQ ID NO: 2288135 - RNA, 17 nt, Human
ccccauuagagucagcc

SEQ ID NO: 2288136 - RNA, 18 nt, Human
ccccauguguccugguuc

SEQ ID NO: 2288137 - RNA, 23 nt, Human
ccccauguguccugguucccguu

SEQ ID NO: 2288138 - RNA, 17 nt, Human
ccccauuagcuuucaau

SEQ ID NO: 2288139 - RNA, 23 nt, Human
ccccauuagcuuucaauuccgua

SEQ ID NO: 2288140 - RNA, 12 nt, Human
cccccuucuggg

SEQ ID NO: 2288141 - RNA, 14 nt, Human
cccccuucugggca

SEQ ID NO: 2288142 - RNA, 22 nt, Human
cccccuucugggcaucuguucu

SEQ ID NO: 2288143 - RNA, 23 nt, Human
cccccuucugggcaucuguucug

SEQ ID NO: 2288144 - RNA, 17 nt, Human
ccccaugucucucagaa

SEQ ID NO: 2288145 - RNA, 15 nt, Human
ccccaugucucucag

SEQ ID NO: 2288146 - RNA, 14 nt, Human
ccccauguguccug

SEQ ID NO: 2288147 - RNA, 16 nt, Human
ccccauguguccuggu

SEQ ID NO: 2288148 - RNA, 22 nt, Human
ccccaugggaagacgaggcccu

SEQ ID NO: 2288149 - RNA, 19 nt, Human
ccccauggucagcccuagg

SEQ ID NO: 2288150 - RNA, 12 nt, Human
cccauuuugcaa

SEQ ID NO: 2288151 - RNA, 18 nt, Human
cccauuuugagugacucg

SEQ ID NO: 2288152 - RNA, 17 nt, Human
cccauuuugagugacuc

SEQ ID NO: 2288153 - RNA, 14 nt, Human
cccauuuuagucac

SEQ ID NO: 2288154 - RNA, 18 nt, Human
cccauuuuagucacuuuu

SEQ ID NO: 2288155 - RNA, 20 nt, Human
cccauuuuagucacuuuuuu

SEQ ID NO: 2288156 - RNA, 14 nt, Human
cccauuuucugugg

SEQ ID NO: 2288157 - RNA, 20 nt, Human
cccauuuuuauaucgaucuc

SEQ ID NO: 2288158 - RNA, 22 nt, Human
cccauuuugcaaaauuuccagu

SEQ ID NO: 2288159 - RNA, 19 nt, Human
cccauuuugcaaaauuucc

SEQ ID NO: 2288160 - RNA, 22 nt, Human
cccauuuuggaaguuuucagga

SEQ ID NO: 2288161 - RNA, 13 nt, Human
ccccagaggcugg

SEQ ID NO: 2288162 - RNA, 15 nt, Human
cccauuugcuccuuu

SEQ ID NO: 2288163 - RNA, 19 nt, Human
cccauucugccugcccagg

SEQ ID NO: 2288164 - RNA, 20 nt, Human
cccauuucuauuuauuuacu

SEQ ID NO: 2288165 - RNA, 15 nt, Human
cccauuucucacuga

SEQ ID NO: 2288166 - RNA, 14 nt, Human
cccauucugccugc

SEQ ID NO: 2288167 - RNA, 15 nt, Human
cccauucugccugcc

SEQ ID NO: 2288168 - RNA, 22 nt, Human
cacagggacugaaaaccucucc

SEQ ID NO: 2288169 - RNA, 14 nt, Human
cacagggacuugaa

SEQ ID NO: 2288170 - RNA, 16 nt, Human
cacagggacuugaagu

SEQ ID NO: 2288171 - RNA, 17 nt, Human
cacagggacuugaaguu

SEQ ID NO: 2288172 - RNA, 21 nt, Human
cacagggacuugaaguuguua

SEQ ID NO: 2288173 - RNA, 19 nt, Human
cacagaaaccucuacuaaa

SEQ ID NO: 2288174 - RNA, 20 nt, Human
cacagaaaauauacuguaaa

SEQ ID NO: 2288175 - RNA, 15 nt, Human
cacagaaagacugag

SEQ ID NO: 2288176 - RNA, 12 nt, Human
cacagaaaccuu

SEQ ID NO: 2288177 - RNA, 19 nt, Human
cacagaaaauauacuguaa

SEQ ID NO: 2288178 - RNA, 18 nt, Human
cacagaaaauauacugua

SEQ ID NO: 2288179 - RNA, 17 nt, Human
cacagaaaauauacugu

SEQ ID NO: 2288180 - RNA, 16 nt, Human
cacagaaaauauacug

SEQ ID NO: 2288181 - RNA, 12 nt, Human
cacagaaagccu

SEQ ID NO: 2288182 - RNA, 22 nt, Human
cacagaaagacugagcucaagg

SEQ ID NO: 2288183 - RNA, 18 nt, Human
cacagaaagacugagcuc

SEQ ID NO: 2288184 - RNA, 23 nt, Human
cacagaaagccuaucaaagaccu

SEQ ID NO: 2288185 - RNA, 13 nt, Human
cacagaacccuug

SEQ ID NO: 2288186 - RNA, 17 nt, Human
cacacuuuuuaagaaau

SEQ ID NO: 2288187 - RNA, 15 nt, Human
cacagaaaauauacu

SEQ ID NO: 2288188 - RNA, 14 nt, Human
cacagaaaauauac

SEQ ID NO: 2288189 - RNA, 13 nt, Human
cacagaaaauaua

SEQ ID NO: 2288190 - RNA, 12 nt, Human
cacagaaaauau

SEQ ID NO: 2288191 - RNA, 20 nt, Human
cacacuuguuccagcucuuu

SEQ ID NO: 2288192 - RNA, 19 nt, Human
cacacuuguuccagcucuu

SEQ ID NO: 2288193 - RNA, 18 nt, Human
cacacuuguuccagcucu

SEQ ID NO: 2288194 - RNA, 18 nt, Human
cacacauuuguguaaaca

SEQ ID NO: 2288195 - RNA, 18 nt, Human
cacaccaagcagcaacag

SEQ ID NO: 2288196 - RNA, 16 nt, Human
cacaccaagcugugcc

SEQ ID NO: 2288197 - RNA, 17 nt, Human
cacaccaagcugugcca

SEQ ID NO: 2288198 - RNA, 18 nt, Human
cacaccaagcugugccac

SEQ ID NO: 2288199 - RNA, 20 nt, Human
cacaccaagcugugccaccc

SEQ ID NO: 2288200 - RNA, 22 nt, Human
cacaccaagcugugccacccug

SEQ ID NO: 2288201 - RNA, 23 nt, Human
cacaccaagcugugccacccugg

SEQ ID NO: 2288202 - RNA, 18 nt, Human
cacacauggcuaauuuuu

SEQ ID NO: 2288203 - RNA, 11 nt, Human
cacacauuuuu

SEQ ID NO: 2288204 - RNA, 10 nt, Human
cacacauuuu

SEQ ID NO: 2288205 - RNA, 20 nt, Human
cacacauuuuuuaaaugcac

SEQ ID NO: 2288206 - RNA, 19 nt, Human
cacacauuuuuuaaaugca

SEQ ID NO: 2288207 - RNA, 16 nt, Human
cacacauuuuuuaaau

SEQ ID NO: 2288208 - RNA, 12 nt, Human
cacacauuuuuu

SEQ ID NO: 2288209 - RNA, 17 nt, Human
cacagcucuucuccagg

SEQ ID NO: 2288210 - RNA, 21 nt, Human
cacagcucuccggucucucuc

SEQ ID NO: 2288211 - RNA, 20 nt, Human
cacagcucuccggucucucu

SEQ ID NO: 2288212 - RNA, 14 nt, Human
cacagcucuucucc

SEQ ID NO: 2288213 - RNA, 15 nt, Human
cacagcucuucucca

SEQ ID NO: 2288214 - RNA, 15 nt, Human
cacagcucuguccug

SEQ ID NO: 2288215 - RNA, 16 nt, Human
cacagcucuguccugg

SEQ ID NO: 2288216 - RNA, 18 nt, Human
cacagcucuguccuggga

SEQ ID NO: 2288217 - RNA, 19 nt, Human
cacagcucuguccugggag

SEQ ID NO: 2288218 - RNA, 11 nt, Human
cacagcucugu

SEQ ID NO: 2288219 - RNA, 14 nt, Human
cacagcucuguccu

SEQ ID NO: 2288220 - RNA, 22 nt, Human
cacagaaaugagaucaggcucu

SEQ ID NO: 2288221 - RNA, 10 nt, Human
cacagcuccu

SEQ ID NO: 2288222 - RNA, 15 nt, Human
cacagcuccucccac

SEQ ID NO: 2288223 - RNA, 18 nt, Human
cacagacccugcccugug

SEQ ID NO: 2288224 - RNA, 19 nt, Human
cacagaagaggcugguucu

SEQ ID NO: 2288225 - RNA, 18 nt, Human
cacagaaagccuaucaaa

SEQ ID NO: 2288226 - RNA, 17 nt, Human
cacagaaaugagaucag

SEQ ID NO: 2288227 - RNA, 14 nt, Human
cacagacccugccc

SEQ ID NO: 2288228 - RNA, 16 nt, Human
cacagacccugcccug

SEQ ID NO: 2288229 - RNA, 17 nt, Human
cacagacccugcccugu

SEQ ID NO: 2288230 - RNA, 20 nt, Human
caccaggcuugccugcaggc

SEQ ID NO: 2288231 - RNA, 13 nt, Human
caccagggaaggg

SEQ ID NO: 2288232 - RNA, 21 nt, Human
caccagggaaggggacaagga

SEQ ID NO: 2288233 - RNA, 18 nt, Human
caccagggaaggggacaa

SEQ ID NO: 2288234 - RNA, 18 nt, Human
caccaggcugugggccuc

SEQ ID NO: 2288235 - RNA, 16 nt, Human
caccagggaugguacu

SEQ ID NO: 2288236 - RNA, 17 nt, Human
cacccaccucagccucc

SEQ ID NO: 2288237 - RNA, 13 nt, Human
caccagccccagu

SEQ ID NO: 2288238 - RNA, 20 nt, Human
caccagccaggcucugugcu

SEQ ID NO: 2288239 - RNA, 21 nt, Human
caccagccaggcucugugcug

SEQ ID NO: 2288240 - RNA, 17 nt, Human
caccaggcugugggccu

SEQ ID NO: 2288241 - RNA, 16 nt, Human
caccaggcugugggcc

SEQ ID NO: 2288242 - RNA, 15 nt, Human
caccaggcugugggc

SEQ ID NO: 2288243 - RNA, 16 nt, Human
caccagccccagugcc

SEQ ID NO: 2288244 - RNA, 23 nt, Human
cacccagcccauucucucuccug

SEQ ID NO: 2288245 - RNA, 23 nt, Human
cacccaccucccugccuccagga

SEQ ID NO: 2288246 - RNA, 15 nt, Human
cacccacucagcucc

SEQ ID NO: 2288247 - RNA, 22 nt, Human
cacccagcccauucucucuccu

SEQ ID NO: 2288248 - RNA, 14 nt, Human
cacccacucagcuc

SEQ ID NO: 2288249 - RNA, 13 nt, Human
cacccacucagcu

SEQ ID NO: 2288250 - RNA, 12 nt, Human
cacccagcccug

SEQ ID NO: 2288251 - RNA, 13 nt, Human
cacccagcccugg

SEQ ID NO: 2288252 - RNA, 14 nt, Human
cacccagcccuggu

SEQ ID NO: 2288253 - RNA, 16 nt, Human
cacccagcccuggucu

SEQ ID NO: 2288254 - RNA, 18 nt, Human
cacccagcccuggucuca

SEQ ID NO: 2288255 - RNA, 19 nt, Human
cacccagcccuggucucag

SEQ ID NO: 2288256 - RNA, 22 nt, Human
cacccagcccuggucucagcag

SEQ ID NO: 2288257 - RNA, 18 nt, Human
cacccaccucagccuccc

SEQ ID NO: 2288258 - RNA, 21 nt, Human
cacccaccucccugccuccag

SEQ ID NO: 2288259 - RNA, 18 nt, Human
cacccaccucccugccuc

SEQ ID NO: 2288260 - RNA, 16 nt, Human
cacccaccucccugcc

SEQ ID NO: 2288261 - RNA, 15 nt, Human
cacccaccucccugc

SEQ ID NO: 2288262 - RNA, 14 nt, Human
cacccaccucccug

SEQ ID NO: 2288263 - RNA, 13 nt, Human
cacccaccucccu

SEQ ID NO: 2288264 - RNA, 16 nt, Human
cacccaggagccccga

SEQ ID NO: 2288265 - RNA, 22 nt, Human
cacccagccucaguccuccccu

SEQ ID NO: 2288266 - RNA, 15 nt, Human
cacccagccucaguc

SEQ ID NO: 2288267 - RNA, 19 nt, Human
cacccagccucaguccucc

SEQ ID NO: 2288268 - RNA, 11 nt, Human
cacccagccuc

SEQ ID NO: 2288269 - RNA, 12 nt, Human
cacccagccuca

SEQ ID NO: 2288270 - RNA, 13 nt, Human
cacccagccucag

SEQ ID NO: 2288271 - RNA, 14 nt, Human
cacccagccucagu

SEQ ID NO: 2288272 - RNA, 22 nt, Human
cacccaugaagacaggacagug

SEQ ID NO: 2288273 - RNA, 14 nt, Human
cacccagcucagca

SEQ ID NO: 2288274 - RNA, 19 nt, Human
cacccaugaaucaaagaca

SEQ ID NO: 2288275 - RNA, 15 nt, Human
cacccaugaaucaaa

SEQ ID NO: 2288276 - RNA, 13 nt, Human
cacccaugggcuc

SEQ ID NO: 2288277 - RNA, 18 nt, Human
cacccaugggcucugaca

SEQ ID NO: 2288278 - RNA, 19 nt, Human
cacccaugggcucugacag

SEQ ID NO: 2288279 - RNA, 20 nt, Human
cacccaugggcucugacaga

SEQ ID NO: 2288280 - RNA, 12 nt, Human
caccccacacuu

SEQ ID NO: 2288281 - RNA, 11 nt, Human
caccccacacu

SEQ ID NO: 2288282 - RNA, 13 nt, Human
caccccacccccu

SEQ ID NO: 2288283 - RNA, 18 nt, Human
caccccaaagcuuuccug

SEQ ID NO: 2288284 - RNA, 13 nt, Human
cacccaugugcca

SEQ ID NO: 2288285 - RNA, 17 nt, Human
cacccauguuucucugg

SEQ ID NO: 2288286 - RNA, 18 nt, Human
cacccauguuucucuggc

SEQ ID NO: 2288287 - RNA, 15 nt, Human
cacccauuuucacau

SEQ ID NO: 2288288 - RNA, 19 nt, Human
caccccaaagcuuuccugc

SEQ ID NO: 2288289 - RNA, 23 nt, Human
caccaacaucccauugcccuggu

SEQ ID NO: 2288290 - RNA, 13 nt, Human
caccaacccagcc

SEQ ID NO: 2288291 - RNA, 14 nt, Human
caccaacccagccg

SEQ ID NO: 2288292 - RNA, 17 nt, Human
caccaacccagccgcug

SEQ ID NO: 2288293 - RNA, 13 nt, Human
caccaacccucag

SEQ ID NO: 2288294 - RNA, 14 nt, Human
caccaacgucugug

SEQ ID NO: 2288295 - RNA, 14 nt, Human
caccagccaggcuc

SEQ ID NO: 2288296 - RNA, 15 nt, Human
caccagccaggcucu

SEQ ID NO: 2288297 - RNA, 16 nt, Human
caccagccaggcucug

SEQ ID NO: 2288298 - RNA, 18 nt, Human
caccagccaggcucugug

SEQ ID NO: 2288299 - RNA, 19 nt, Human
caccagccaggcucugugc

SEQ ID NO: 2288300 - RNA, 19 nt, Human
caccaacccaucagaagga

SEQ ID NO: 2288301 - RNA, 20 nt, Human
caccaacccagccgcugccc

SEQ ID NO: 2288302 - RNA, 21 nt, Human
caccaacccagccgcugcccg

SEQ ID NO: 2288303 - RNA, 16 nt, Human
caccaacgucugugcc

SEQ ID NO: 2288304 - RNA, 22 nt, Human
caccaacaucccauugcccugg

SEQ ID NO: 2288305 - RNA, 17 nt, Human
caccaacaucccauugc

SEQ ID NO: 2288306 - RNA, 15 nt, Human
caccaacaccacggu

SEQ ID NO: 2288307 - RNA, 19 nt, Human
caccaaaauaagaaaagau

SEQ ID NO: 2288308 - RNA, 18 nt, Human
caccaaaauaagaaaaga

SEQ ID NO: 2288309 - RNA, 13 nt, Human
cacaucugccuua

SEQ ID NO: 2288310 - RNA, 16 nt, Human
caccaaacauacuaga

SEQ ID NO: 2288311 - RNA, 13 nt, Human
caccaaaggccag

SEQ ID NO: 2288312 - RNA, 15 nt, Human
caccaaaguauuuuu

SEQ ID NO: 2288313 - RNA, 12 nt, Human
cacaucuucccu

SEQ ID NO: 2288314 - RNA, 17 nt, Human
caccaaaauaagaaaag

SEQ ID NO: 2288315 - RNA, 12 nt, Human
caccaaaauaag

SEQ ID NO: 2288316 - RNA, 21 nt, Human
cacauuuuauuuuauuaugca

SEQ ID NO: 2288317 - RNA, 20 nt, Human
cacauuuuauuuuauuaugc

SEQ ID NO: 2288318 - RNA, 19 nt, Human
cacauuuuauuuuauuaug

SEQ ID NO: 2288319 - RNA, 22 nt, Human
cacaucuccuccauacucagga

SEQ ID NO: 2288320 - RNA, 13 nt, Human
cacaucucuaucu

SEQ ID NO: 2288321 - RNA, 21 nt, Human
cacaucugcauuuucacccca

SEQ ID NO: 2288322 - RNA, 13 nt, Human
cacaucugcauuu

SEQ ID NO: 2288323 - RNA, 11 nt, Human
cacaucucugc

SEQ ID NO: 2288324 - RNA, 12 nt, Human
cacaucugccuu

SEQ ID NO: 2288325 - RNA, 12 nt, Human
cacaucuguguc

SEQ ID NO: 2288326 - RNA, 17 nt, Human
cacauuuuauuuuauua

SEQ ID NO: 2288327 - RNA, 23 nt, Human
cacaucugugucuuguuuggaau

SEQ ID NO: 2288328 - RNA, 18 nt, Human
cacaucugugucuuguuu

SEQ ID NO: 2288329 - RNA, 17 nt, Human
cacaucugugucuuguu

SEQ ID NO: 2288330 - RNA, 16 nt, Human
cacaucugugucuugu

SEQ ID NO: 2288331 - RNA, 22 nt, Human
cacaucuaagccugaaggggcg

SEQ ID NO: 2288332 - RNA, 15 nt, Human
caaucaucuguguga

SEQ ID NO: 2288333 - RNA, 22 nt, Human
caaucaguccccucccaucugg

SEQ ID NO: 2288334 - RNA, 17 nt, Human
caaucaugaaauaugca

SEQ ID NO: 2288335 - RNA, 17 nt, Human
caaucaucugugugaaa

SEQ ID NO: 2288336 - RNA, 19 nt, Human
caaucaucugugugaaaau

SEQ ID NO: 2288337 - RNA, 20 nt, Human
caaucaucugugugaaaaug

SEQ ID NO: 2288338 - RNA, 15 nt, Human
caaucauugcugaaa

SEQ ID NO: 2288339 - RNA, 16 nt, Human
caaucauugcugaaaa

SEQ ID NO: 2288340 - RNA, 18 nt, Human
caaucauugcugaaaaug

SEQ ID NO: 2288341 - RNA, 21 nt, Human
caaucauugcugaaaauggua

SEQ ID NO: 2288342 - RNA, 13 nt, Human
caaucauuguaca

SEQ ID NO: 2288343 - RNA, 14 nt, Human
caaucauuguacag

SEQ ID NO: 2288344 - RNA, 15 nt, Human
caaucauuguacagu

SEQ ID NO: 2288345 - RNA, 15 nt, Human
caaucaguauaauuc

SEQ ID NO: 2288346 - RNA, 16 nt, Human
caaucaguauaauucu

SEQ ID NO: 2288347 - RNA, 19 nt, Human
caaucaguauaauucugua

SEQ ID NO: 2288348 - RNA, 14 nt, Human
caaucaguccccuc

SEQ ID NO: 2288349 - RNA, 15 nt, Human
caaucaguccccucc

SEQ ID NO: 2288350 - RNA, 16 nt, Human
caaucaguccccuccc

SEQ ID NO: 2288351 - RNA, 17 nt, Human
caaucaguccccuccca

SEQ ID NO: 2288352 - RNA, 20 nt, Human
caaucaguccccucccaucu

SEQ ID NO: 2288353 - RNA, 21 nt, Human
caaucaguccccucccaucug

SEQ ID NO: 2288354 - RNA, 15 nt, Human
caauccaagagucug

SEQ ID NO: 2288355 - RNA, 15 nt, Human
caauccauguaaggu

SEQ ID NO: 2288356 - RNA, 22 nt, Human
caaucauuguacaguuuguuua

SEQ ID NO: 2288357 - RNA, 17 nt, Human
caaucauuuuaauuauu

SEQ ID NO: 2288358 - RNA, 20 nt, Human
caaucauuguacaguuuguu

SEQ ID NO: 2288359 - RNA, 21 nt, Human
caaucauuguacaguuuguuu

SEQ ID NO: 2288360 - RNA, 23 nt, Human
caaucauuguacaguuuguuuac

SEQ ID NO: 2288361 - RNA, 23 nt, Human
caauccauguuaguuuuuacuuu

SEQ ID NO: 2288362 - RNA, 21 nt, Human
caauccauguuaguuuuuacu

SEQ ID NO: 2288363 - RNA, 17 nt, Human
caauccauguaagguau

SEQ ID NO: 2288364 - RNA, 16 nt, Human
caaucccaccaacccu

SEQ ID NO: 2288365 - RNA, 17 nt, Human
caaucccaccaacccuc

SEQ ID NO: 2288366 - RNA, 22 nt, Human
caaucccaccaacccucagagc

SEQ ID NO: 2288367 - RNA, 17 nt, Human
caaucccagcuaccuca

SEQ ID NO: 2288368 - RNA, 12 nt, Human
caaucccagcua

SEQ ID NO: 2288369 - RNA, 23 nt, Human
caaucccaccaacccucagagcc

SEQ ID NO: 2288370 - RNA, 22 nt, Human
caauccccucauucaggaaaac

SEQ ID NO: 2288371 - RNA, 21 nt, Human
caauccccucauucaggaaaa

SEQ ID NO: 2288372 - RNA, 15 nt, Human
caauccccucauuca

SEQ ID NO: 2288373 - RNA, 22 nt, Human
caauccauguuaguuuuuacuu

SEQ ID NO: 2288374 - RNA, 12 nt, Human
caauccccuccu

SEQ ID NO: 2288375 - RNA, 14 nt, Human
caauccccuccuug

SEQ ID NO: 2288376 - RNA, 16 nt, Human
caauccccuccuuggg

SEQ ID NO: 2288377 - RNA, 20 nt, Human
caauccccuccuugggcacu

SEQ ID NO: 2288378 - RNA, 22 nt, Human
caauccuaacacauuaucggga

SEQ ID NO: 2288379 - RNA, 17 nt, Human
caauccuaacacauuau

SEQ ID NO: 2288380 - RNA, 20 nt, Human
caaucccuuuauuacccccu

SEQ ID NO: 2288381 - RNA, 13 nt, Human
caaugcuggcugu

SEQ ID NO: 2288382 - RNA, 20 nt, Human
caaugcuggcuguuggcugg

SEQ ID NO: 2288383 - RNA, 21 nt, Human
caaugcuggcuguuggcuggg

SEQ ID NO: 2288384 - RNA, 16 nt, Human
caauggcgcagugccu

SEQ ID NO: 2288385 - RNA, 18 nt, Human
caauggcgcagugccucu

SEQ ID NO: 2288386 - RNA, 19 nt, Human
caauccuaauuucuccucc

SEQ ID NO: 2288387 - RNA, 19 nt, Human
caauggcgcagugccucug

SEQ ID NO: 2288388 - RNA, 20 nt, Human
caauggcgcagugccucugg

SEQ ID NO: 2288389 - RNA, 21 nt, Human
caauggcgcagugccucuggu

SEQ ID NO: 2288390 - RNA, 16 nt, Human
caauggcuaauuccca

SEQ ID NO: 2288391 - RNA, 16 nt, Human
caauggcagccuuggc

SEQ ID NO: 2288392 - RNA, 20 nt, Human
caauccuaauuucuccuccc

SEQ ID NO: 2288393 - RNA, 22 nt, Human
caauggcuauauggcaagaaag

SEQ ID NO: 2288394 - RNA, 14 nt, Human
caauggcugcugaa

SEQ ID NO: 2288395 - RNA, 22 nt, Human
caauggcugcugaagcugccug

SEQ ID NO: 2288396 - RNA, 17 nt, Human
caauggcuaauucccag

SEQ ID NO: 2288397 - RNA, 18 nt, Human
caauggcuaauucccaga

SEQ ID NO: 2288398 - RNA, 19 nt, Human
caauggcuaauucccagag

SEQ ID NO: 2288399 - RNA, 23 nt, Human
caauggcuaauucccagagugug

SEQ ID NO: 2288400 - RNA, 15 nt, Human
caaugggagcucaug

SEQ ID NO: 2288401 - RNA, 18 nt, Human
caauggcuuacuccagga

SEQ ID NO: 2288402 - RNA, 15 nt, Human
caauggcuuuuuaaa

SEQ ID NO: 2288403 - RNA, 21 nt, Human
caaugggaaauacuacuccug

SEQ ID NO: 2288404 - RNA, 21 nt, Human
caauugaacuuaaauaaaugu

SEQ ID NO: 2288405 - RNA, 21 nt, Human
caauugaauuaaauuaggaau

SEQ ID NO: 2288406 - RNA, 15 nt, Human
caauugaauggucag

SEQ ID NO: 2288407 - RNA, 17 nt, Human
caauuuccaagagcuga

SEQ ID NO: 2288408 - RNA, 16 nt, Human
caauuuccuuuauauu

SEQ ID NO: 2288409 - RNA, 15 nt, Human
caauuuccuuuauau

SEQ ID NO: 2288410 - RNA, 21 nt, Human
caauuuccuuuauauuuagug

SEQ ID NO: 2288411 - RNA, 19 nt, Human
caauuuccuuuauauuuag

SEQ ID NO: 2288412 - RNA, 20 nt, Human
caauuuccuuuauauuuagu

SEQ ID NO: 2288413 - RNA, 17 nt, Human
caauugcaucucccaga

SEQ ID NO: 2288414 - RNA, 15 nt, Human
caauugcaucuccca

SEQ ID NO: 2288415 - RNA, 14 nt, Human
caauugcaucuccc

SEQ ID NO: 2288416 - RNA, 19 nt, Human
caauugauuuuaaaccaua

SEQ ID NO: 2288417 - RNA, 19 nt, Human
caauugacugucacuguuc

SEQ ID NO: 2288418 - RNA, 18 nt, Human
cacaagagcccaggccuc

SEQ ID NO: 2288419 - RNA, 19 nt, Human
cacaagagcccaggccucc

SEQ ID NO: 2288420 - RNA, 21 nt, Human
caauuucuacuuugaagucau

SEQ ID NO: 2288421 - RNA, 20 nt, Human
caauuucuacuuugaaguca

SEQ ID NO: 2288422 - RNA, 16 nt, Human
caauuucuacuuugaa

SEQ ID NO: 2288423 - RNA, 20 nt, Human
caauuucuacaaaauccuga

SEQ ID NO: 2288424 - RNA, 22 nt, Human
caauuucuguccuucagaugga

SEQ ID NO: 2288425 - RNA, 15 nt, Human
caauuucuguguugc

SEQ ID NO: 2288426 - RNA, 12 nt, Human
caauuucucccc

SEQ ID NO: 2288427 - RNA, 13 nt, Human
caauuucucccca

SEQ ID NO: 2288428 - RNA, 14 nt, Human
caauuucuccccag

SEQ ID NO: 2288429 - RNA, 20 nt, Human
cacaagagcccaggccuccu

SEQ ID NO: 2288430 - RNA, 22 nt, Human
caauuucuguguugccaagcuc

SEQ ID NO: 2288431 - RNA, 20 nt, Human
caauuucuguguugccaagc

SEQ ID NO: 2288432 - RNA, 15 nt, Human
caauuucuccccagg

SEQ ID NO: 2288433 - RNA, 18 nt, Human
cacaagcuccaagcuccc

SEQ ID NO: 2288434 - RNA, 19 nt, Human
cacaagcuccaagcuccca

SEQ ID NO: 2288435 - RNA, 14 nt, Human
cacaagauucccag

SEQ ID NO: 2288436 - RNA, 20 nt, Human
cacaagcuccaagcucccag

SEQ ID NO: 2288437 - RNA, 21 nt, Human
cacaagcuccaagcucccagg

SEQ ID NO: 2288438 - RNA, 12 nt, Human
caagauuucaga

SEQ ID NO: 2288439 - RNA, 18 nt, Human
caagauugcuuaaaauag

SEQ ID NO: 2288440 - RNA, 16 nt, Human
caagauugcuuaaaau

SEQ ID NO: 2288441 - RNA, 21 nt, Human
caagauugcuuaaaauagcaa

SEQ ID NO: 2288442 - RNA, 13 nt, Human
caagauugcuuaa

SEQ ID NO: 2288443 - RNA, 17 nt, Human
caagauucugaaacauu

SEQ ID NO: 2288444 - RNA, 21 nt, Human
caagauguccuccuuguucua

SEQ ID NO: 2288445 - RNA, 19 nt, Human
caagauguccuccuuguuc

SEQ ID NO: 2288446 - RNA, 13 nt, Human
caaggcaccugca

SEQ ID NO: 2288447 - RNA, 17 nt, Human
caagauuuuccacaaga

SEQ ID NO: 2288448 - RNA, 15 nt, Human
caaggcaccugcagg

SEQ ID NO: 2288449 - RNA, 19 nt, Human
caaggcaccugcagguugg

SEQ ID NO: 2288450 - RNA, 18 nt, Human
caaggcaaggcugucaau

SEQ ID NO: 2288451 - RNA, 17 nt, Human
caaggcaaggcugucaa

SEQ ID NO: 2288452 - RNA, 16 nt, Human
caaggcaaggcuguca

SEQ ID NO: 2288453 - RNA, 18 nt, Human
caagauuuuaaagacaug

SEQ ID NO: 2288454 - RNA, 22 nt, Human
caaggccgcuguucacccacag

SEQ ID NO: 2288455 - RNA, 20 nt, Human
caaggccgcuguucacccac

SEQ ID NO: 2288456 - RNA, 13 nt, Human
caaggccucccac

SEQ ID NO: 2288457 - RNA, 14 nt, Human
caaggccucccaca

SEQ ID NO: 2288458 - RNA, 15 nt, Human
caaggccucccacag

SEQ ID NO: 2288459 - RNA, 16 nt, Human
caaggccucccacagu

SEQ ID NO: 2288460 - RNA, 17 nt, Human
caaggccucccacagug

SEQ ID NO: 2288461 - RNA, 18 nt, Human
caaggccucccacaguga

SEQ ID NO: 2288462 - RNA, 19 nt, Human
caaggccgcuguucaccca

SEQ ID NO: 2288463 - RNA, 23 nt, Human
caaggccgaagcucuggcugaac

SEQ ID NO: 2288464 - RNA, 20 nt, Human
caaggccgaagcucuggcug

SEQ ID NO: 2288465 - RNA, 21 nt, Human
caaggccgaagcucuggcuga

SEQ ID NO: 2288466 - RNA, 16 nt, Human
caaggccgaagcucug

SEQ ID NO: 2288467 - RNA, 17 nt, Human
caaggccgaagcucugg

SEQ ID NO: 2288468 - RNA, 19 nt, Human
caaggccgaagcucuggcu

SEQ ID NO: 2288469 - RNA, 14 nt, Human
caaggccagagugg

SEQ ID NO: 2288470 - RNA, 21 nt, Human
caaggccaaaggaagcacaug

SEQ ID NO: 2288471 - RNA, 19 nt, Human
caaggccaaaggaagcaca

SEQ ID NO: 2288472 - RNA, 20 nt, Human
caaggccaaaggaagcacau

SEQ ID NO: 2288473 - RNA, 19 nt, Human
caaggcugaccaagagaga

SEQ ID NO: 2288474 - RNA, 14 nt, Human
caagucacucccaa

SEQ ID NO: 2288475 - RNA, 18 nt, Human
caaggcugaccaagagag

SEQ ID NO: 2288476 - RNA, 16 nt, Human
caaggcgugaggaugg

SEQ ID NO: 2288477 - RNA, 14 nt, Human
caagucagaggaug

SEQ ID NO: 2288478 - RNA, 15 nt, Human
caagucagaggaugg

SEQ ID NO: 2288479 - RNA, 19 nt, Human
caagucagaggauggccag

SEQ ID NO: 2288480 - RNA, 21 nt, Human
caagucagaggauggccagug

SEQ ID NO: 2288481 - RNA, 19 nt, Human
caagucagcuuugccuucc

SEQ ID NO: 2288482 - RNA, 22 nt, Human
caagucagaggauggccagugu

SEQ ID NO: 2288483 - RNA, 23 nt, Human
caagucagaggauggccaguguc

SEQ ID NO: 2288484 - RNA, 20 nt, Human
caagucagcuuugccuucca

SEQ ID NO: 2288485 - RNA, 19 nt, Human
caagucaggcccuuauuuu

SEQ ID NO: 2288486 - RNA, 13 nt, Human
caagucaugugca

SEQ ID NO: 2288487 - RNA, 16 nt, Human
caagucaugugcauuu

SEQ ID NO: 2288488 - RNA, 12 nt, Human
caagucauggcu

SEQ ID NO: 2288489 - RNA, 14 nt, Human
caagucauggcugu

SEQ ID NO: 2288490 - RNA, 23 nt, Human
caagucaguccaggaugcuaaca

SEQ ID NO: 2288491 - RNA, 20 nt, Human
caagucauagguuaauauuu

SEQ ID NO: 2288492 - RNA, 19 nt, Human
caaggcgggagcaucucuu

SEQ ID NO: 2288493 - RNA, 14 nt, Human
caaggcggccccuc

SEQ ID NO: 2288494 - RNA, 15 nt, Human
caaggcggccccucc

SEQ ID NO: 2288495 - RNA, 16 nt, Human
caaggcggccccuccc

SEQ ID NO: 2288496 - RNA, 19 nt, Human
caaggcuagaucaugaaga

SEQ ID NO: 2288497 - RNA, 19 nt, Human
caaggcguccgcgcgccag

SEQ ID NO: 2288498 - RNA, 22 nt, Human
caaggcguccgcgcgccagcac

SEQ ID NO: 2288499 - RNA, 15 nt, Human
caaggcucugagcaa

SEQ ID NO: 2288500 - RNA, 13 nt, Human
caaggcggccccu

SEQ ID NO: 2288501 - RNA, 15 nt, Human
caaggccuuucugug

SEQ ID NO: 2288502 - RNA, 18 nt, Human
caaggccuuucugugugu

SEQ ID NO: 2288503 - RNA, 14 nt, Human
caaggccuucuccu

SEQ ID NO: 2288504 - RNA, 16 nt, Human
caaguuguuucauuga

SEQ ID NO: 2288505 - RNA, 13 nt, Human
caaguuguuugag

SEQ ID NO: 2288506 - RNA, 21 nt, Human
caaguuguuugagaaauuaag

SEQ ID NO: 2288507 - RNA, 17 nt, Human
caaguuguuugagaaau

SEQ ID NO: 2288508 - RNA, 13 nt, Human
caagucauggcug

SEQ ID NO: 2288509 - RNA, 23 nt, Human
caaguuguuugagaaauuaagua

SEQ ID NO: 2288510 - RNA, 20 nt, Human
caaguuuacucaacccucuc

SEQ ID NO: 2288511 - RNA, 22 nt, Human
caaguuucuagcuagaaauaug

SEQ ID NO: 2288512 - RNA, 23 nt, Human
caaguuucuagcuagaaauauga

SEQ ID NO: 2288513 - RNA, 22 nt, Human
caaguuuuaggacaaacagcuc

SEQ ID NO: 2288514 - RNA, 17 nt, Human
caaguuuguaucaggug

SEQ ID NO: 2288515 - RNA, 22 nt, Human
caauaaaagcaauuccaaccuu

SEQ ID NO: 2288516 - RNA, 17 nt, Human
caauaaaaauguuuaac

SEQ ID NO: 2288517 - RNA, 20 nt, Human
caauaaaagcaauuccaacc

SEQ ID NO: 2288518 - RNA, 15 nt, Human
caauaaaacauuaau

SEQ ID NO: 2288519 - RNA, 20 nt, Human
caauaaaaauguuuaacggu

SEQ ID NO: 2288520 - RNA, 14 nt, Human
caauaaaacauuaa

SEQ ID NO: 2288521 - RNA, 20 nt, Human
caauaaaauccauacauuug

SEQ ID NO: 2288522 - RNA, 23 nt, Human
caauaaaauccauacauuugugu

SEQ ID NO: 2288523 - RNA, 22 nt, Human
caauaaaaugugauuuuucuga

SEQ ID NO: 2288524 - RNA, 21 nt, Human
caauaaaaugugauuuuucug

SEQ ID NO: 2288525 - RNA, 20 nt, Human
caauaaaaugugauuuuucu

SEQ ID NO: 2288526 - RNA, 16 nt, Human
caauaaaaugugauuu

SEQ ID NO: 2288527 - RNA, 15 nt, Human
caauaaaaugugauu

SEQ ID NO: 2288528 - RNA, 20 nt, Human
caauaaaaucauguacauuu

SEQ ID NO: 2288529 - RNA, 15 nt, Human
caauaaaaucaugua

SEQ ID NO: 2288530 - RNA, 14 nt, Human
caauaaaaucaugu

SEQ ID NO: 2288531 - RNA, 20 nt, Human
caauaaaaucuugaaaaugc

SEQ ID NO: 2288532 - RNA, 13 nt, Human
caauaaaaucaug

SEQ ID NO: 2288533 - RNA, 13 nt, Human
caauaaaauagca

SEQ ID NO: 2288534 - RNA, 23 nt, Human
caccuuugugggguuuuuggaga

SEQ ID NO: 2288535 - RNA, 16 nt, Human
caccuuucuccuuugu

SEQ ID NO: 2288536 - RNA, 22 nt, Human
caccuuucauaaucuuugcuuu

SEQ ID NO: 2288537 - RNA, 19 nt, Human
caccuugggaugaugccuc

SEQ ID NO: 2288538 - RNA, 20 nt, Human
caccuugggaugaugccuca

SEQ ID NO: 2288539 - RNA, 21 nt, Human
caccuuucagauaacuguuau

SEQ ID NO: 2288540 - RNA, 22 nt, Human
caccuuucagauaacuguuauu

SEQ ID NO: 2288541 - RNA, 14 nt, Human
caccuuucccaucu

SEQ ID NO: 2288542 - RNA, 18 nt, Human
caccuuuuaacucaccuc

SEQ ID NO: 2288543 - RNA, 20 nt, Human
caccuuuugggaauguuuua

SEQ ID NO: 2288544 - RNA, 20 nt, Human
caccuuuucagcgauguaug

SEQ ID NO: 2288545 - RNA, 19 nt, Human
caccuuuuucauacaaggc

SEQ ID NO: 2288546 - RNA, 21 nt, Human
caccuuuuucauacaaggccc

SEQ ID NO: 2288547 - RNA, 13 nt, Human
cacgaaauguuau

SEQ ID NO: 2288548 - RNA, 17 nt, Human
caccuuuuuuaaggaaa

SEQ ID NO: 2288549 - RNA, 15 nt, Human
cacgaaauguuauuu

SEQ ID NO: 2288550 - RNA, 16 nt, Human
cacgaaauguuauuuu

SEQ ID NO: 2288551 - RNA, 22 nt, Human
caccugcccaucacaggguugg

SEQ ID NO: 2288552 - RNA, 18 nt, Human
caccugcccaucacaggg

SEQ ID NO: 2288553 - RNA, 13 nt, Human
caccugcccagau

SEQ ID NO: 2288554 - RNA, 11 nt, Human
caccucagccu

SEQ ID NO: 2288555 - RNA, 15 nt, Human
caccugcccccuggu

SEQ ID NO: 2288556 - RNA, 14 nt, Human
caccugcccccugg

SEQ ID NO: 2288557 - RNA, 16 nt, Human
caccugccccaacucu

SEQ ID NO: 2288558 - RNA, 15 nt, Human
caccugccccaacuc

SEQ ID NO: 2288559 - RNA, 18 nt, Human
caccugcccaaccugcuc

SEQ ID NO: 2288560 - RNA, 19 nt, Human
caccugcccaaccugcucu

SEQ ID NO: 2288561 - RNA, 13 nt, Human
caccugcccaacc

SEQ ID NO: 2288562 - RNA, 18 nt, Human
caccuuggcugcagggag

SEQ ID NO: 2288563 - RNA, 13 nt, Human
caccugcccccuu

SEQ ID NO: 2288564 - RNA, 21 nt, Human
caccugcccccugguggacag

SEQ ID NO: 2288565 - RNA, 23 nt, Human
caccuuuauucuggcagaggagg

SEQ ID NO: 2288566 - RNA, 15 nt, Human
caccuuggcugcagg

SEQ ID NO: 2288567 - RNA, 16 nt, Human
caccuuggcugcaggg

SEQ ID NO: 2288568 - RNA, 19 nt, Human
caccuaggccacuccucca

SEQ ID NO: 2288569 - RNA, 18 nt, Human
caccuaggccacuccucc

SEQ ID NO: 2288570 - RNA, 17 nt, Human
caccuaggccacuccuc

SEQ ID NO: 2288571 - RNA, 16 nt, Human
caccuaggccacuccu

SEQ ID NO: 2288572 - RNA, 16 nt, Human
caccuagcuuuauucu

SEQ ID NO: 2288573 - RNA, 16 nt, Human
caccuagaauuggcug

SEQ ID NO: 2288574 - RNA, 14 nt, Human
caccuagcagcacc

SEQ ID NO: 2288575 - RNA, 22 nt, Human
caccuacuuuucuuuccucaga

SEQ ID NO: 2288576 - RNA, 19 nt, Human
caccucagaggcuguucuu

SEQ ID NO: 2288577 - RNA, 20 nt, Human
caccucagagacauacaccu

SEQ ID NO: 2288578 - RNA, 19 nt, Human
caccucagaguauggagcu

SEQ ID NO: 2288579 - RNA, 22 nt, Human
caccucagaguauggagcucag

SEQ ID NO: 2288580 - RNA, 12 nt, Human
caccucagccuc

SEQ ID NO: 2288581 - RNA, 13 nt, Human
caccucacuccug

SEQ ID NO: 2288582 - RNA, 14 nt, Human
caccucacuccugu

SEQ ID NO: 2288583 - RNA, 15 nt, Human
caccucacuccuguu

SEQ ID NO: 2288584 - RNA, 21 nt, Human
caccucacugaaaacaucugg

SEQ ID NO: 2288585 - RNA, 14 nt, Human
caccucaccccacu

SEQ ID NO: 2288586 - RNA, 16 nt, Human
caccucaccccacuua

SEQ ID NO: 2288587 - RNA, 12 nt, Human
caccuacugagu

SEQ ID NO: 2288588 - RNA, 17 nt, Human
cacucuguuauuuagac

SEQ ID NO: 2288589 - RNA, 13 nt, Human
cacucuguuauuu

SEQ ID NO: 2288590 - RNA, 18 nt, Human
cacucugugcccaugggc

SEQ ID NO: 2288591 - RNA, 21 nt, Human
cacucugugcccaugggcacu

SEQ ID NO: 2288592 - RNA, 16 nt, Human
cacuccagccugggcg

SEQ ID NO: 2288593 - RNA, 15 nt, Human
cacuccagccugggc

SEQ ID NO: 2288594 - RNA, 21 nt, Human
cacuccagccugggcgacaga

SEQ ID NO: 2288595 - RNA, 15 nt, Human
cacuaccuccucagg

SEQ ID NO: 2288596 - RNA, 20 nt, Human
cacucugucgcccagucugg

SEQ ID NO: 2288597 - RNA, 12 nt, Human
cacucugugccc

SEQ ID NO: 2288598 - RNA, 13 nt, Human
cacucugugccca

SEQ ID NO: 2288599 - RNA, 14 nt, Human
cacucugugcccau

SEQ ID NO: 2288600 - RNA, 16 nt, Human
cacucugugcccaugg

SEQ ID NO: 2288601 - RNA, 21 nt, Human
cacuccagccugagcaacaga

SEQ ID NO: 2288602 - RNA, 15 nt, Human
cacuccagccugagc

SEQ ID NO: 2288603 - RNA, 14 nt, Human
cacuccagccugag

SEQ ID NO: 2288604 - RNA, 23 nt, Human
cacuccagccugagcgacaguga

SEQ ID NO: 2288605 - RNA, 14 nt, Human
cacuccagccuggg

SEQ ID NO: 2288606 - RNA, 13 nt, Human
cacuccagccugg

SEQ ID NO: 2288607 - RNA, 13 nt, Human
cacuccagccuga

SEQ ID NO: 2288608 - RNA, 12 nt, Human
cacuccagccug

SEQ ID NO: 2288609 - RNA, 21 nt, Human
cacuaccacgccaagcuaauu

SEQ ID NO: 2288610 - RNA, 20 nt, Human
cacuacaugugguuuauaga

SEQ ID NO: 2288611 - RNA, 19 nt, Human
cacuacauaaacugacuuu

SEQ ID NO: 2288612 - RNA, 19 nt, Human
cacuacaugugguuuauag

SEQ ID NO: 2288613 - RNA, 21 nt, Human
cacuacauucuguuaaucauu

SEQ ID NO: 2288614 - RNA, 15 nt, Human
cacuacaugcagccc

SEQ ID NO: 2288615 - RNA, 14 nt, Human
cacuacauaaacug

SEQ ID NO: 2288616 - RNA, 17 nt, Human
cacuacauaaacugacu

SEQ ID NO: 2288617 - RNA, 21 nt, Human
cacuacacuccagccugagca

SEQ ID NO: 2288618 - RNA, 20 nt, Human
cacuacacuccagccugagc

SEQ ID NO: 2288619 - RNA, 23 nt, Human
cacuacaugcagcccaugcccac

SEQ ID NO: 2288620 - RNA, 21 nt, Human
cacuacaugcagcccaugccc

SEQ ID NO: 2288621 - RNA, 17 nt, Human
cacuacauucuguuaau

SEQ ID NO: 2288622 - RNA, 16 nt, Human
cacuacauucuguuaa

SEQ ID NO: 2288623 - RNA, 23 nt, Human
cacggcaggacaacgaggaagcc

SEQ ID NO: 2288624 - RNA, 22 nt, Human
cacggcaggacaacgaggaagc

SEQ ID NO: 2288625 - RNA, 15 nt, Human
cacggccaacaaagc

SEQ ID NO: 2288626 - RNA, 17 nt, Human
cacggccaacaaagcug

SEQ ID NO: 2288627 - RNA, 21 nt, Human
cacggcaggacaacgaggaag

SEQ ID NO: 2288628 - RNA, 19 nt, Human
cacggccacaucaaagagg

SEQ ID NO: 2288629 - RNA, 13 nt, Human
cacggccacauca

SEQ ID NO: 2288630 - RNA, 19 nt, Human
cacuacacuccagccugag

SEQ ID NO: 2288631 - RNA, 18 nt, Human
cacuacacuccagccuga

SEQ ID NO: 2288632 - RNA, 17 nt, Human
cacuacacuccagccug

SEQ ID NO: 2288633 - RNA, 16 nt, Human
cacuacacuccagccu

SEQ ID NO: 2288634 - RNA, 23 nt, Human
cacuacaccuggcugagguuccu

SEQ ID NO: 2288635 - RNA, 15 nt, Human
cacuacaccuggcug

SEQ ID NO: 2288636 - RNA, 15 nt, Human
cacggcucacugcag

SEQ ID NO: 2288637 - RNA, 14 nt, Human
cacggcucacugca

SEQ ID NO: 2288638 - RNA, 14 nt, Human
cacggccgcuccag

SEQ ID NO: 2288639 - RNA, 14 nt, Human
cacggccacuggcc

SEQ ID NO: 2288640 - RNA, 15 nt, Human
cacggccgcuccagg

SEQ ID NO: 2288641 - RNA, 16 nt, Human
cacggccgcuccaggg

SEQ ID NO: 2288642 - RNA, 17 nt, Human
cacggccgcuccagggg

SEQ ID NO: 2288643 - RNA, 19 nt, Human
cacggccgcuccaggggug

SEQ ID NO: 2288644 - RNA, 17 nt, Human
cacggccaggccagagg

SEQ ID NO: 2288645 - RNA, 12 nt, Human
cacggccaggcc

SEQ ID NO: 2288646 - RNA, 13 nt, Human
cacggccaggcca

SEQ ID NO: 2288647 - RNA, 16 nt, Human
cacucuuaagcuuccg

SEQ ID NO: 2288648 - RNA, 20 nt, Human
cacucuuauugcccacgcug

SEQ ID NO: 2288649 - RNA, 21 nt, Human
cacucuuauugcccacgcugg

SEQ ID NO: 2288650 - RNA, 22 nt, Human
cacucuuauugcccacgcugga

SEQ ID NO: 2288651 - RNA, 20 nt, Human
cacucuguuauuuagacuca

SEQ ID NO: 2288652 - RNA, 20 nt, Human
cacugggagaggugccagca

SEQ ID NO: 2288653 - RNA, 23 nt, Human
cacugggagaggugccagcaacu

SEQ ID NO: 2288654 - RNA, 22 nt, Human
cacugccaucuuaguuuggauu

SEQ ID NO: 2288655 - RNA, 17 nt, Human
cacugccaugcagggcc

SEQ ID NO: 2288656 - RNA, 19 nt, Human
cacugccaugcagggccuc

SEQ ID NO: 2288657 - RNA, 16 nt, Human
cacugggagaggugcc

SEQ ID NO: 2288658 - RNA, 19 nt, Human
cacugggagaaaugaaaaa

SEQ ID NO: 2288659 - RNA, 20 nt, Human
cacugggaugagccgcugug

SEQ ID NO: 2288660 - RNA, 23 nt, Human
cacugggaugagccgcugugagc

SEQ ID NO: 2288661 - RNA, 13 nt, Human
cacugggcuucua

SEQ ID NO: 2288662 - RNA, 15 nt, Human
cacuggguugacuuu

SEQ ID NO: 2288663 - RNA, 20 nt, Human
cacugguagaccaaaauaaa

SEQ ID NO: 2288664 - RNA, 16 nt, Human
cacugguauuccugcc

SEQ ID NO: 2288665 - RNA, 17 nt, Human
cacugguauuccugccu

SEQ ID NO: 2288666 - RNA, 23 nt, Human
cacuggguggggugaggaccacu

SEQ ID NO: 2288667 - RNA, 21 nt, Human
cacuggguggggugaggacca

SEQ ID NO: 2288668 - RNA, 19 nt, Human
cacuggguggggugaggac

SEQ ID NO: 2288669 - RNA, 18 nt, Human
cacuggguggggugagga

SEQ ID NO: 2288670 - RNA, 15 nt, Human
cacugggugggguga

SEQ ID NO: 2288671 - RNA, 22 nt, Human
cacugggugcccaagcucagaa

SEQ ID NO: 2288672 - RNA, 20 nt, Human
cacuggggugccgccugccc

SEQ ID NO: 2288673 - RNA, 21 nt, Human
cacuggggugccgccugcccg

SEQ ID NO: 2288674 - RNA, 20 nt, Human
cacugggguccuggggccuc

SEQ ID NO: 2288675 - RNA, 22 nt, Human
cacugggaugagccgcugugag

SEQ ID NO: 2288676 - RNA, 13 nt, Human
cacuggggugccg

SEQ ID NO: 2288677 - RNA, 15 nt, Human
cacuggggugccgcc

SEQ ID NO: 2288678 - RNA, 18 nt, Human
cacuggggugccgccugc

SEQ ID NO: 2288679 - RNA, 16 nt, Human
cacuuaaaaaaugucc

SEQ ID NO: 2288680 - RNA, 14 nt, Human
cacuuaaaaaaugu

SEQ ID NO: 2288681 - RNA, 15 nt, Human
cacuuaaaaaugguu

SEQ ID NO: 2288682 - RNA, 19 nt, Human
cacugguauuccugccucc

SEQ ID NO: 2288683 - RNA, 18 nt, Human
cacuguugcccaggcugg

SEQ ID NO: 2288684 - RNA, 19 nt, Human
cacuguugcccaggcuggc

SEQ ID NO: 2288685 - RNA, 23 nt, Human
cacuguugcccaggcuggcgugc

SEQ ID NO: 2288686 - RNA, 20 nt, Human
cacugguauuccugccucca

SEQ ID NO: 2288687 - RNA, 19 nt, Human
cacugcagccucaaccucc

SEQ ID NO: 2288688 - RNA, 14 nt, Human
cacugcagccucaa

SEQ ID NO: 2288689 - RNA, 20 nt, Human
cacugcagccucaaccuccu

SEQ ID NO: 2288690 - RNA, 21 nt, Human
cacugcagccucaaccuccug

SEQ ID NO: 2288691 - RNA, 22 nt, Human
cacugcagccucaaccuccugg

SEQ ID NO: 2288692 - RNA, 23 nt, Human
cacugcagccucaaccuccuggg

SEQ ID NO: 2288693 - RNA, 17 nt, Human
cacugccaugccagcuu

SEQ ID NO: 2288694 - RNA, 14 nt, Human
cacugccauauacu

SEQ ID NO: 2288695 - RNA, 17 nt, Human
cacugccauaaaacauu

SEQ ID NO: 2288696 - RNA, 21 nt, Human
cacugccauaaaacauuaaga

SEQ ID NO: 2288697 - RNA, 16 nt, Human
cacugccaucuuaguu

SEQ ID NO: 2288698 - RNA, 20 nt, Human
cacugccaucuuaguuugga

SEQ ID NO: 2288699 - RNA, 12 nt, Human
cacugcaggcac

SEQ ID NO: 2288700 - RNA, 20 nt, Human
cacugcaggcaucacagcua

SEQ ID NO: 2288701 - RNA, 13 nt, Human
cacugccaggcca

SEQ ID NO: 2288702 - RNA, 14 nt, Human
cacugccaggccag

SEQ ID NO: 2288703 - RNA, 16 nt, Human
cacugccaggccagcc

SEQ ID NO: 2288704 - RNA, 17 nt, Human
cacugccaggccagccu

SEQ ID NO: 2288705 - RNA, 18 nt, Human
cacugccaggccagccuc

SEQ ID NO: 2288706 - RNA, 19 nt, Human
cacugccaggccagccucc

SEQ ID NO: 2288707 - RNA, 20 nt, Human
cacugccaggccagccuccg

SEQ ID NO: 2288708 - RNA, 21 nt, Human
cacugccaggccagccuccga

SEQ ID NO: 2288709 - RNA, 16 nt, Human
cacugccauaaaacau

SEQ ID NO: 2288710 - RNA, 18 nt, Human
cacuuguguuaugaagca

SEQ ID NO: 2288711 - RNA, 17 nt, Human
cacuuguguuuugcaag

SEQ ID NO: 2288712 - RNA, 19 nt, Human
cacuugugugugggcugug

SEQ ID NO: 2288713 - RNA, 17 nt, Human
cacuugugugugggcug

SEQ ID NO: 2288714 - RNA, 15 nt, Human
cacuugugugugggc

SEQ ID NO: 2288715 - RNA, 14 nt, Human
cacuuguguguggg

SEQ ID NO: 2288716 - RNA, 19 nt, Human
cacuuguugauuaauggaa

SEQ ID NO: 2288717 - RNA, 22 nt, Human
cacuugugugugggcugugagu

SEQ ID NO: 2288718 - RNA, 21 nt, Human
cacuugugugugggcugugag

SEQ ID NO: 2288719 - RNA, 14 nt, Human
cacuuguuguuuua

SEQ ID NO: 2288720 - RNA, 23 nt, Human
cacuugugugugggcugugagug

SEQ ID NO: 2288721 - RNA, 21 nt, Human
cacuuaagacuguguauucua

SEQ ID NO: 2288722 - RNA, 13 nt, Human
cacuuaagagaau

SEQ ID NO: 2288723 - RNA, 15 nt, Human
cacuuaagagaauau

SEQ ID NO: 2288724 - RNA, 17 nt, Human
cacuuaagagaauauuu

SEQ ID NO: 2288725 - RNA, 20 nt, Human
cacuuaagagaauauuuuaa

SEQ ID NO: 2288726 - RNA, 22 nt, Human
cacuuaagagaauauuuuaagu

SEQ ID NO: 2288727 - RNA, 17 nt, Human
cacuuaaggcacucugu

SEQ ID NO: 2288728 - RNA, 22 nt, Human
cacuuaacaagcucccaggccg

SEQ ID NO: 2288729 - RNA, 13 nt, Human
cacuuaacagaug

SEQ ID NO: 2288730 - RNA, 13 nt, Human
cacuuaagacugu

SEQ ID NO: 2288731 - RNA, 13 nt, Human
cacuugugugugg

SEQ ID NO: 2288732 - RNA, 22 nt, Human
cacuuguggguuuuuguuuugu

SEQ ID NO: 2288733 - RNA, 16 nt, Human
cacuuucuagccagag

SEQ ID NO: 2288734 - RNA, 17 nt, Human
cacuuucuagccagagg

SEQ ID NO: 2288735 - RNA, 13 nt, Human
cacuuucuagcca

SEQ ID NO: 2288736 - RNA, 23 nt, Human
cacuuucuacaaugugaacuuua

SEQ ID NO: 2288737 - RNA, 19 nt, Human
cacuuucuacaaugugaac

SEQ ID NO: 2288738 - RNA, 23 nt, Human
cacuuuagggcuguaaaaugcau

SEQ ID NO: 2288739 - RNA, 18 nt, Human
cacuuuagggcuguaaaa

SEQ ID NO: 2288740 - RNA, 17 nt, Human
cacuuuagggcuguaaa

SEQ ID NO: 2288741 - RNA, 15 nt, Human
cacuuuagggcugua

SEQ ID NO: 2288742 - RNA, 21 nt, Human
cacuuuagaugcugaugauuu

SEQ ID NO: 2288743 - RNA, 14 nt, Human
cacuuuagaugcug

SEQ ID NO: 2288744 - RNA, 15 nt, Human
cacuuuagaugcuga

SEQ ID NO: 2288745 - RNA, 16 nt, Human
cacuuuagaugcugau

SEQ ID NO: 2288746 - RNA, 21 nt, Human
cacuuuacaauguucauccca

SEQ ID NO: 2288747 - RNA, 22 nt, Human
cacuuuacaauguucaucccau

SEQ ID NO: 2288748 - RNA, 20 nt, Human
cacuuuaauuaccaaccugu

SEQ ID NO: 2288749 - RNA, 20 nt, Human
cacuuuaauucucaugugau

SEQ ID NO: 2288750 - RNA, 22 nt, Human
cacuuuaauucucaugugaucc

SEQ ID NO: 2288751 - RNA, 20 nt, Human
cagaaagguuuucuucuuuu

SEQ ID NO: 2288752 - RNA, 22 nt, Human
cagaaagggcaacaauaaaaua

SEQ ID NO: 2288753 - RNA, 15 nt, Human
cagaaagguucugcc

SEQ ID NO: 2288754 - RNA, 16 nt, Human
cagaaagguucugccc

SEQ ID NO: 2288755 - RNA, 17 nt, Human
cagaaagguucugcccg

SEQ ID NO: 2288756 - RNA, 21 nt, Human
cagaaagguucugcccgggaa

SEQ ID NO: 2288757 - RNA, 23 nt, Human
cagaaaguggccaugccacccug

SEQ ID NO: 2288758 - RNA, 17 nt, Human
cagaaaguggugcucag

SEQ ID NO: 2288759 - RNA, 22 nt, Human
cagaaaguggccaugccacccu

SEQ ID NO: 2288760 - RNA, 18 nt, Human
cagaaaguggugcucagu

SEQ ID NO: 2288761 - RNA, 19 nt, Human
cagaaaguggugcucaguu

SEQ ID NO: 2288762 - RNA, 21 nt, Human
cagaaaguggugcucaguugu

SEQ ID NO: 2288763 - RNA, 22 nt, Human
cagaaaguggugcucaguugua

SEQ ID NO: 2288764 - RNA, 20 nt, Human
cagaaauaaaguuggugaca

SEQ ID NO: 2288765 - RNA, 23 nt, Human
cagaaagugugcuuuaugcugaa

SEQ ID NO: 2288766 - RNA, 22 nt, Human
cagaaagugugcuuuaugcuga

SEQ ID NO: 2288767 - RNA, 17 nt, Human
cagaaagugugcuuuau

SEQ ID NO: 2288768 - RNA, 16 nt, Human
cagaaagugugcuuua

SEQ ID NO: 2288769 - RNA, 23 nt, Human
cagaaaguggugcucaguuguag

SEQ ID NO: 2288770 - RNA, 15 nt, Human
cagaaauacagauuu

SEQ ID NO: 2288771 - RNA, 20 nt, Human
cagaaauacagauuuugaua

SEQ ID NO: 2288772 - RNA, 13 nt, Human
cagaaauacauau

SEQ ID NO: 2288773 - RNA, 16 nt, Human
cagaaauacauauuuc

SEQ ID NO: 2288774 - RNA, 23 nt, Human
cagaaauacagauuuugauagca

SEQ ID NO: 2288775 - RNA, 12 nt, Human
cagaaaggagac

SEQ ID NO: 2288776 - RNA, 17 nt, Human
cagaaagggcaacaaua

SEQ ID NO: 2288777 - RNA, 23 nt, Human
cagaaauguacaacuuuuuaccu

SEQ ID NO: 2288778 - RNA, 23 nt, Human
cagaaaugcugccugccugucug

SEQ ID NO: 2288779 - RNA, 11 nt, Human
cagaaaugucu

SEQ ID NO: 2288780 - RNA, 14 nt, Human
cagaaaugucuaaa

SEQ ID NO: 2288781 - RNA, 16 nt, Human
cagaaauguacagcaa

SEQ ID NO: 2288782 - RNA, 20 nt, Human
cagaacagccgcuccugucu

SEQ ID NO: 2288783 - RNA, 17 nt, Human
cagaacagccgcuccug

SEQ ID NO: 2288784 - RNA, 12 nt, Human
cagaacagccgc

SEQ ID NO: 2288785 - RNA, 21 nt, Human
cagaaaugucuaaaugcugaa

SEQ ID NO: 2288786 - RNA, 12 nt, Human
cagaacagcuuc

SEQ ID NO: 2288787 - RNA, 13 nt, Human
cagaacagcuuca

SEQ ID NO: 2288788 - RNA, 15 nt, Human
cagaacagcuucagg

SEQ ID NO: 2288789 - RNA, 16 nt, Human
cagaacagcuucaggu

SEQ ID NO: 2288790 - RNA, 15 nt, Human
cagaaauaugugguu

SEQ ID NO: 2288791 - RNA, 23 nt, Human
cagaaauaccaaaauuauuucag

SEQ ID NO: 2288792 - RNA, 22 nt, Human
cagaaauaccaaaauuauuuca

SEQ ID NO: 2288793 - RNA, 19 nt, Human
cagaaauacauauuuccaa

SEQ ID NO: 2288794 - RNA, 19 nt, Human
cagaaaucuagaagacugu

SEQ ID NO: 2288795 - RNA, 14 nt, Human
cagaaauccaucua

SEQ ID NO: 2288796 - RNA, 20 nt, Human
cagaaaucaguaauauuuau

SEQ ID NO: 2288797 - RNA, 17 nt, Human
cagaaaugcugccugcc

SEQ ID NO: 2288798 - RNA, 19 nt, Human
cagaaaugcugccugccug

SEQ ID NO: 2288799 - RNA, 20 nt, Human
cagaaaugcugccugccugu

SEQ ID NO: 2288800 - RNA, 21 nt, Human
cagaaaugcugccugccuguc

SEQ ID NO: 2288801 - RNA, 20 nt, Human
cagaaaugagaucaggcucu

SEQ ID NO: 2288802 - RNA, 23 nt, Human
cagaaaugagaucaggcucugcc

SEQ ID NO: 2288803 - RNA, 14 nt, Human
cagaaaugcugccu

SEQ ID NO: 2288804 - RNA, 16 nt, Human
cagaaaugcugccugc

SEQ ID NO: 2288805 - RNA, 15 nt, Human
cagaaguuucucagc

SEQ ID NO: 2288806 - RNA, 19 nt, Human
cagaaguuucucagcuccc

SEQ ID NO: 2288807 - RNA, 18 nt, Human
cagaacagugauuaccag

SEQ ID NO: 2288808 - RNA, 14 nt, Human
cagaaguuucugcc

SEQ ID NO: 2288809 - RNA, 16 nt, Human
cagaaguuucugccgc

SEQ ID NO: 2288810 - RNA, 17 nt, Human
cagaacagcuucagguu

SEQ ID NO: 2288811 - RNA, 18 nt, Human
cagaacagcuucagguua

SEQ ID NO: 2288812 - RNA, 19 nt, Human
cagaacagcuucagguuau

SEQ ID NO: 2288813 - RNA, 24 nt, Human
cagaacagcuucagguuaucgaaa

SEQ ID NO: 2288814 - RNA, 11 nt, Human
cagaacaguga

SEQ ID NO: 2288815 - RNA, 17 nt, Human
cagaacagugauuacca

SEQ ID NO: 2288816 - RNA, 12 nt, Human
cagaacagugau

SEQ ID NO: 2288817 - RNA, 20 nt, Human
caaacaugugguuaaugcca

SEQ ID NO: 2288818 - RNA, 17 nt, Human
caaacauauauaacaau

SEQ ID NO: 2288819 - RNA, 17 nt, Human
caaacagucucaggaaa

SEQ ID NO: 2288820 - RNA, 16 nt, Human
caaacagucucaggaa

SEQ ID NO: 2288821 - RNA, 13 nt, Human
caaaaggaagucu

SEQ ID NO: 2288822 - RNA, 13 nt, Human
caaaagcuuuuua

SEQ ID NO: 2288823 - RNA, 15 nt, Human
caaacagucucagga

SEQ ID NO: 2288824 - RNA, 21 nt, Human
caaaaggauaaugaauacuuu

SEQ ID NO: 2288825 - RNA, 13 nt, Human
caaacccaugagg

SEQ ID NO: 2288826 - RNA, 18 nt, Human
caaaccccgaccaccugc

SEQ ID NO: 2288827 - RNA, 16 nt, Human
caaacccccuuugugc

SEQ ID NO: 2288828 - RNA, 17 nt, Human
caaaccccacccuaguu

SEQ ID NO: 2288829 - RNA, 21 nt, Human
caaaccccgaccaccugccca

SEQ ID NO: 2288830 - RNA, 17 nt, Human
caaacccccuuugugcu

SEQ ID NO: 2288831 - RNA, 18 nt, Human
caaacccccuuugugcug

SEQ ID NO: 2288832 - RNA, 15 nt, Human
caaaccaaauaaaaa

SEQ ID NO: 2288833 - RNA, 14 nt, Human
caaaccaaauaaaa

SEQ ID NO: 2288834 - RNA, 15 nt, Human
caaaagaaucagaaa

SEQ ID NO: 2288835 - RNA, 19 nt, Human
caaaagaaucagaaacagg

SEQ ID NO: 2288836 - RNA, 19 nt, Human
caaaagaagcccccagcua

SEQ ID NO: 2288837 - RNA, 18 nt, Human
caaaagaagcccccagcu

SEQ ID NO: 2288838 - RNA, 19 nt, Human
caaaagcugggcagguugg

SEQ ID NO: 2288839 - RNA, 23 nt, Human
caaaagacaauucuuuauacaac

SEQ ID NO: 2288840 - RNA, 21 nt, Human
caaaagacaauucuuuauaca

SEQ ID NO: 2288841 - RNA, 22 nt, Human
caaaagacaauucuuuauacaa

SEQ ID NO: 2288842 - RNA, 12 nt, Human
caaaagacaauu

SEQ ID NO: 2288843 - RNA, 13 nt, Human
caaaagacaauuc

SEQ ID NO: 2288844 - RNA, 15 nt, Human
caaaagacaauucuu

SEQ ID NO: 2288845 - RNA, 20 nt, Human
auuuuuuuuuccuucagugc

SEQ ID NO: 2288846 - RNA, 22 nt, Human
auuuuuuuuuccuucagugccu

SEQ ID NO: 2288847 - RNA, 13 nt, Human
caaaagaagcccc

SEQ ID NO: 2288848 - RNA, 17 nt, Human
caaaagaagcccccagc

SEQ ID NO: 2288849 - RNA, 16 nt, Human
caaaagaagcccccag

SEQ ID NO: 2288850 - RNA, 16 nt, Human
auuuuuuugagacaga

SEQ ID NO: 2288851 - RNA, 21 nt, Human
auuuuuuucugauuguaacgu

SEQ ID NO: 2288852 - RNA, 14 nt, Human
auuuuuuugcaagu

SEQ ID NO: 2288853 - RNA, 17 nt, Human
auuuuuuugcaagugaa

SEQ ID NO: 2288854 - RNA, 20 nt, Human
auuuuuuugcaagugaaggu

SEQ ID NO: 2288855 - RNA, 23 nt, Human
auuuuuuuguagaugaaaaagca

SEQ ID NO: 2288856 - RNA, 18 nt, Human
auuuuuuuuuccuucagu

SEQ ID NO: 2288857 - RNA, 22 nt, Human
auuuuuauaucuauauguacuu

SEQ ID NO: 2288858 - RNA, 15 nt, Human
auuuuuauauuuagu

SEQ ID NO: 2288859 - RNA, 16 nt, Human
auuuuuauauuugaaa

SEQ ID NO: 2288860 - RNA, 16 nt, Human
auuuuuuucugauugu

SEQ ID NO: 2288861 - RNA, 15 nt, Human
auuuuuauauuugaa

SEQ ID NO: 2288862 - RNA, 18 nt, Human
auuuuuauaucagccuga

SEQ ID NO: 2288863 - RNA, 20 nt, Human
auuuuuauaucagccugagu

SEQ ID NO: 2288864 - RNA, 16 nt, Human
caaagauaaucucuca

SEQ ID NO: 2288865 - RNA, 20 nt, Human
caaagauaaucucucagcuu

SEQ ID NO: 2288866 - RNA, 17 nt, Human
caaagauaucucaucuc

SEQ ID NO: 2288867 - RNA, 18 nt, Human
auuuucuucaugcaauga

SEQ ID NO: 2288868 - RNA, 14 nt, Human
auuuucuucaugca

SEQ ID NO: 2288869 - RNA, 11 nt, Human
auuuucuguug

SEQ ID NO: 2288870 - RNA, 19 nt, Human
auuuucuuaucuucugcaa

SEQ ID NO: 2288871 - RNA, 21 nt, Human
auuuucugugccugaauauuu

SEQ ID NO: 2288872 - RNA, 11 nt, Human
auuuucugugg

SEQ ID NO: 2288873 - RNA, 23 nt, Human
auuuucuguguuuugcuguacca

SEQ ID NO: 2288874 - RNA, 19 nt, Human
auuuucugugggcaggccu

SEQ ID NO: 2288875 - RNA, 20 nt, Human
auuuugaauaaauaaaugua

SEQ ID NO: 2288876 - RNA, 11 nt, Human
auuuugaauca

SEQ ID NO: 2288877 - RNA, 12 nt, Human
auuuugaaucaa

SEQ ID NO: 2288878 - RNA, 13 nt, Human
auuuugaaucaau

SEQ ID NO: 2288879 - RNA, 14 nt, Human
auuuugaaucaaua

SEQ ID NO: 2288880 - RNA, 15 nt, Human
auuuugaaucaauaa

SEQ ID NO: 2288881 - RNA, 17 nt, Human
auuuugaaucaauaaua

SEQ ID NO: 2288882 - RNA, 18 nt, Human
auuuugaaucaauaauau

SEQ ID NO: 2288883 - RNA, 16 nt, Human
auuuuaggaaaugaau

SEQ ID NO: 2288884 - RNA, 17 nt, Human
auuuuaggcagggauuu

SEQ ID NO: 2288885 - RNA, 21 nt, Human
auuuuaggcagggauuugagg

SEQ ID NO: 2288886 - RNA, 15 nt, Human
auuuuagguguugau

SEQ ID NO: 2288887 - RNA, 16 nt, Human
auuuuagguguugauu

SEQ ID NO: 2288888 - RNA, 21 nt, Human
auuuuagguguugauuuucug

SEQ ID NO: 2288889 - RNA, 21 nt, Human
auuuuauaucaauuuaaaaaa

SEQ ID NO: 2288890 - RNA, 16 nt, Human
auuuuagcugcagaac

SEQ ID NO: 2288891 - RNA, 15 nt, Human
auuuuagcugcagaa

SEQ ID NO: 2288892 - RNA, 21 nt, Human
auuuuaggaaaugaaugugug

SEQ ID NO: 2288893 - RNA, 18 nt, Human
auuuuagcuacuauauau

SEQ ID NO: 2288894 - RNA, 22 nt, Human
auuuuauguuaagggaagaauu

SEQ ID NO: 2288895 - RNA, 19 nt, Human
auuuuaugcuuuaaacauu

SEQ ID NO: 2288896 - RNA, 19 nt, Human
auuuuauggcucacuauga

SEQ ID NO: 2288897 - RNA, 18 nt, Human
auuuuaugcuuuaaacau

SEQ ID NO: 2288898 - RNA, 18 nt, Human
auuuuauaugcuuacuga

SEQ ID NO: 2288899 - RNA, 16 nt, Human
auuuuauaugcuuacu

SEQ ID NO: 2288900 - RNA, 15 nt, Human
auuuuauaugcuuac

SEQ ID NO: 2288901 - RNA, 20 nt, Human
auuuucugugccugaauauu

SEQ ID NO: 2288902 - RNA, 18 nt, Human
auuuucugugccugaaua

SEQ ID NO: 2288903 - RNA, 16 nt, Human
auuuucugugccugaa

SEQ ID NO: 2288904 - RNA, 21 nt, Human
auuuucugguagauagaaaua

SEQ ID NO: 2288905 - RNA, 21 nt, Human
auuuuuagauaguuagaaccu

SEQ ID NO: 2288906 - RNA, 15 nt, Human
auuuuuaaucaugaa

SEQ ID NO: 2288907 - RNA, 14 nt, Human
auuuuuacugccac

SEQ ID NO: 2288908 - RNA, 16 nt, Human
auuuuuaguaaagaca

SEQ ID NO: 2288909 - RNA, 14 nt, Human
auuuuuaaucauga

SEQ ID NO: 2288910 - RNA, 19 nt, Human
auuuuuaauauauacuaug

SEQ ID NO: 2288911 - RNA, 15 nt, Human
auuuuuacugccacu

SEQ ID NO: 2288912 - RNA, 14 nt, Human
auuuuuagacagag

SEQ ID NO: 2288913 - RNA, 18 nt, Human
auuuuuaauauauacuau

SEQ ID NO: 2288914 - RNA, 19 nt, Human
auuuuuaagugcugcauuu

SEQ ID NO: 2288915 - RNA, 18 nt, Human
auuuuuaagugcugcauu

SEQ ID NO: 2288916 - RNA, 16 nt, Human
auuuuuaagugcugca

SEQ ID NO: 2288917 - RNA, 17 nt, Human
caaccagcuaagaaaag

SEQ ID NO: 2288918 - RNA, 18 nt, Human
caaccaugagaccacugu

SEQ ID NO: 2288919 - RNA, 13 nt, Human
caaccaucgcuuu

SEQ ID NO: 2288920 - RNA, 23 nt, Human
caaccaugagaccacuguuauca

SEQ ID NO: 2288921 - RNA, 23 nt, Human
caaccaugaguggcauggccacc

SEQ ID NO: 2288922 - RNA, 22 nt, Human
caaccagcaucccuugaccagg

SEQ ID NO: 2288923 - RNA, 22 nt, Human
caaccagcuaagaaaagauuuu

SEQ ID NO: 2288924 - RNA, 15 nt, Human
caaccagcuaagaaa

SEQ ID NO: 2288925 - RNA, 17 nt, Human
caaccccccaccugcca

SEQ ID NO: 2288926 - RNA, 16 nt, Human
caaccccccaccugcc

SEQ ID NO: 2288927 - RNA, 16 nt, Human
caacccccauuucuau

SEQ ID NO: 2288928 - RNA, 14 nt, Human
caaccccccagcac

SEQ ID NO: 2288929 - RNA, 15 nt, Human
caaccccccagcacu

SEQ ID NO: 2288930 - RNA, 16 nt, Human
caaccccccagcacug

SEQ ID NO: 2288931 - RNA, 18 nt, Human
caaccccccagcacugag

SEQ ID NO: 2288932 - RNA, 10 nt, Human
caaccccuga

SEQ ID NO: 2288933 - RNA, 12 nt, Human
caaccccugagg

SEQ ID NO: 2288934 - RNA, 13 nt, Human
caaccccugagga

SEQ ID NO: 2288935 - RNA, 16 nt, Human
caaccccugaggaaga

SEQ ID NO: 2288936 - RNA, 19 nt, Human
caaccccccagcacugagg

SEQ ID NO: 2288937 - RNA, 20 nt, Human
caaccccccagcacugagga

SEQ ID NO: 2288938 - RNA, 22 nt, Human
caacuaacaagaaacucacccc

SEQ ID NO: 2288939 - RNA, 14 nt, Human
caaccccuguggag

SEQ ID NO: 2288940 - RNA, 12 nt, Human
caaccccugugg

SEQ ID NO: 2288941 - RNA, 18 nt, Human
caacuaauuuuuguauuu

SEQ ID NO: 2288942 - RNA, 18 nt, Human
caacucaccccagcccca

SEQ ID NO: 2288943 - RNA, 15 nt, Human
caacuagacauucug

SEQ ID NO: 2288944 - RNA, 21 nt, Human
caacuagacauucugucgccu

SEQ ID NO: 2288945 - RNA, 16 nt, Human
caacuagacauucugu

SEQ ID NO: 2288946 - RNA, 17 nt, Human
caacuagacauucuguc

SEQ ID NO: 2288947 - RNA, 17 nt, Human
caacucaccccagcccc

SEQ ID NO: 2288948 - RNA, 12 nt, Human
caacucagacua

SEQ ID NO: 2288949 - RNA, 21 nt, Human
caagaauuggaagcugcccug

SEQ ID NO: 2288950 - RNA, 21 nt, Human
caagaauggggaucacagaga

SEQ ID NO: 2288951 - RNA, 22 nt, Human
caagaauugaagcaggacuaaa

SEQ ID NO: 2288952 - RNA, 18 nt, Human
caacucuccccugaccug

SEQ ID NO: 2288953 - RNA, 13 nt, Human
caacucuagcugg

SEQ ID NO: 2288954 - RNA, 24 nt, Human
caacucuccccugaccugugagcc

SEQ ID NO: 2288955 - RNA, 17 nt, Human
caagaaugcugaaacca

SEQ ID NO: 2288956 - RNA, 15 nt, Human
caagaaugcugaaac

SEQ ID NO: 2288957 - RNA, 16 nt, Human
caagaaugcugaaacc

SEQ ID NO: 2288958 - RNA, 13 nt, Human
caagaaugcugaa

SEQ ID NO: 2288959 - RNA, 14 nt, Human
caagaaugcugaaa

SEQ ID NO: 2288960 - RNA, 21 nt, Human
caacuccuggaagcugugucc

SEQ ID NO: 2288961 - RNA, 14 nt, Human
caacuccugucuaa

SEQ ID NO: 2288962 - RNA, 14 nt, Human
caacucgcuuuagg

SEQ ID NO: 2288963 - RNA, 19 nt, Human
caacucgcuuuaggucagc

SEQ ID NO: 2288964 - RNA, 14 nt, Human
caacucuccuccag

SEQ ID NO: 2288965 - RNA, 17 nt, Human
caacuccuggaagcugu

SEQ ID NO: 2288966 - RNA, 14 nt, Human
caacuccuggaagc

SEQ ID NO: 2288967 - RNA, 23 nt, Human
caacucagucccuaaaaacacag

SEQ ID NO: 2288968 - RNA, 21 nt, Human
caagaauuuccuguuggauuu

SEQ ID NO: 2288969 - RNA, 19 nt, Human
caagacccaaaaggcagaa

SEQ ID NO: 2288970 - RNA, 18 nt, Human
caagaccacguuucuaaa

SEQ ID NO: 2288971 - RNA, 17 nt, Human
caagaccacguuucuaa

SEQ ID NO: 2288972 - RNA, 17 nt, Human
caagaugucagacuggc

SEQ ID NO: 2288973 - RNA, 16 nt, Human
caagaugucagacugg

SEQ ID NO: 2288974 - RNA, 15 nt, Human
caagaugucagacug

SEQ ID NO: 2288975 - RNA, 22 nt, Human
caagaugcuggaugucugccaa

SEQ ID NO: 2288976 - RNA, 21 nt, Human
caacaacauguauaauauuuu

SEQ ID NO: 2288977 - RNA, 22 nt, Human
caacaacauguauaauauuuuu

SEQ ID NO: 2288978 - RNA, 19 nt, Human
caacaaccucaacugccua

SEQ ID NO: 2288979 - RNA, 18 nt, Human
caacaaccucaacugccu

SEQ ID NO: 2288980 - RNA, 14 nt, Human
caacacacacacuc

SEQ ID NO: 2288981 - RNA, 11 nt, Human
caacacacaga

SEQ ID NO: 2288982 - RNA, 22 nt, Human
caacacacagauuugagcucag

SEQ ID NO: 2288983 - RNA, 21 nt, Human
caacacacagauuugagcuca

SEQ ID NO: 2288984 - RNA, 13 nt, Human
caacaccaagcac

SEQ ID NO: 2288985 - RNA, 20 nt, Human
caacacaagcuggaagcaca

SEQ ID NO: 2288986 - RNA, 19 nt, Human
caaagggugaagcuauuua

SEQ ID NO: 2288987 - RNA, 21 nt, Human
caaagggugaagcuauuuauc

SEQ ID NO: 2288988 - RNA, 20 nt, Human
caaagggugaagcuauuuau

SEQ ID NO: 2288989 - RNA, 23 nt, Human
caaagauauauacacaggauccu

SEQ ID NO: 2288990 - RNA, 22 nt, Human
caaagcagugcaugcugucccu

SEQ ID NO: 2288991 - RNA, 16 nt, Human
caaagauauuuugcuu

SEQ ID NO: 2288992 - RNA, 14 nt, Human
caaagauauuuugc

SEQ ID NO: 2288993 - RNA, 18 nt, Human
caaagcagugcaugcugu

SEQ ID NO: 2288994 - RNA, 21 nt, Human
caaagcagugcaugcuguccc

SEQ ID NO: 2288995 - RNA, 19 nt, Human
caaaguaucaggacgagaa

SEQ ID NO: 2288996 - RNA, 18 nt, Human
caaaggguuuuaauguag

SEQ ID NO: 2288997 - RNA, 19 nt, Human
caaaggguuuuaauguaga

SEQ ID NO: 2288998 - RNA, 22 nt, Human
caaaguagaagucuuagaugua

SEQ ID NO: 2288999 - RNA, 23 nt, Human
caaagggugaagcuauuuaucug

SEQ ID NO: 2289000 - RNA, 16 nt, Human
caaaggguuuuaaugu

SEQ ID NO: 2289001 - RNA, 22 nt, Human
caaagguaaaucagacuaugaa

SEQ ID NO: 2289002 - RNA, 14 nt, Human
caaagguaaaucag

SEQ ID NO: 2289003 - RNA, 20 nt, Human
caaagucaugcaaaggcugg

SEQ ID NO: 2289004 - RNA, 21 nt, Human
caaagucaugcaaaggcuggg

SEQ ID NO: 2289005 - RNA, 21 nt, Human
caaaguaucccuacuguaauu

SEQ ID NO: 2289006 - RNA, 19 nt, Human
caaaguaucccuacuguaa

SEQ ID NO: 2289007 - RNA, 19 nt, Human
caacaaauuagguuuugua

SEQ ID NO: 2289008 - RNA, 21 nt, Human
caacaaauuagguuuuguaca

SEQ ID NO: 2289009 - RNA, 20 nt, Human
caacaaaggguuuuaaugua

SEQ ID NO: 2289010 - RNA, 12 nt, Human
caacaaagcugu

SEQ ID NO: 2289011 - RNA, 19 nt, Human
caacaaaggguuuuaaugu

SEQ ID NO: 2289012 - RNA, 19 nt, Human
caacaaagccaacagucaa

SEQ ID NO: 2289013 - RNA, 17 nt, Human
caacaaagcacaguguu

SEQ ID NO: 2289014 - RNA, 16 nt, Human
caacaaagcuguugau

SEQ ID NO: 2289015 - RNA, 14 nt, Human
caacaaagaacacu

SEQ ID NO: 2289016 - RNA, 21 nt, Human
caaaugcugcgcccuucccca

SEQ ID NO: 2289017 - RNA, 20 nt, Human
caaaugcugcgcccuucccc

SEQ ID NO: 2289018 - RNA, 19 nt, Human
caaaugcugcgcccuuccc

SEQ ID NO: 2289019 - RNA, 18 nt, Human
caaaugcugcgcccuucc

SEQ ID NO: 2289020 - RNA, 21 nt, Human
caaaugcugacccaugcaaua

SEQ ID NO: 2289021 - RNA, 23 nt, Human
caaaugcuguaacuuucugaaau

SEQ ID NO: 2289022 - RNA, 19 nt, Human
caaaugcccaagggaaaga

SEQ ID NO: 2289023 - RNA, 18 nt, Human
caaaugcauggugcaguu

SEQ ID NO: 2289024 - RNA, 18 nt, Human
caaaugcccaagggaaag

SEQ ID NO: 2289025 - RNA, 20 nt, Human
caaaugagaucuaagccuuu

SEQ ID NO: 2289026 - RNA, 13 nt, Human
caaaugagccaug

SEQ ID NO: 2289027 - RNA, 12 nt, Human
caaaugagccau

SEQ ID NO: 2289028 - RNA, 22 nt, Human
caaaugaccagcagauucaaau

SEQ ID NO: 2289029 - RNA, 18 nt, Human
caaaugacccaaagacca

SEQ ID NO: 2289030 - RNA, 19 nt, Human
caaaugaaugaccuuguug

SEQ ID NO: 2289031 - RNA, 17 nt, Human
caaaugacccaaagacc

SEQ ID NO: 2289032 - RNA, 19 nt, Human
caaaucuuuuagucauuau

SEQ ID NO: 2289033 - RNA, 22 nt, Human
caaaugaauguugucuguuugu

SEQ ID NO: 2289034 - RNA, 13 nt, Human
caaaucuugaaau

SEQ ID NO: 2289035 - RNA, 19 nt, Human
caaaucuugaaauuaagaa

SEQ ID NO: 2289036 - RNA, 12 nt, Human
caaaucuugaaa

SEQ ID NO: 2289037 - RNA, 19 nt, Human
caaagucuaaaguuuacag

SEQ ID NO: 2289038 - RNA, 13 nt, Human
caaaucuggaagc

SEQ ID NO: 2289039 - RNA, 20 nt, Human
caaagucuaaaguuuacagu

SEQ ID NO: 2289040 - RNA, 21 nt, Human
caaaucuuaacuugaaggagu

SEQ ID NO: 2289041 - RNA, 23 nt, Human
caaaguccuuuuuuuccaucuuu

SEQ ID NO: 2289042 - RNA, 19 nt, Human
caaaguccuuuuuuuccau

SEQ ID NO: 2289043 - RNA, 13 nt, Human
caaagucuaaagu

SEQ ID NO: 2289044 - RNA, 15 nt, Human
caaagucuaaaguuu

SEQ ID NO: 2289045 - RNA, 16 nt, Human
caaagucuaaaguuua

SEQ ID NO: 2289046 - RNA, 17 nt, Human
caaagucuaaaguuuac

SEQ ID NO: 2289047 - RNA, 17 nt, Human
caaaguccuuuuuuucc

SEQ ID NO: 2289048 - RNA, 14 nt, Human
caaaguccuuuuuu

SEQ ID NO: 2289049 - RNA, 22 nt, Human
caaagucaugcaaaggcuggga

SEQ ID NO: 2289050 - RNA, 19 nt, Human
auucaauauccuuugccuc

SEQ ID NO: 2289051 - RNA, 14 nt, Human
auucaaucuguaaa

SEQ ID NO: 2289052 - RNA, 16 nt, Human
auucaaucuguaaacu

SEQ ID NO: 2289053 - RNA, 15 nt, Human
auucaaucuguaaac

SEQ ID NO: 2289054 - RNA, 18 nt, Human
auucaaucuguaaacugu

SEQ ID NO: 2289055 - RNA, 17 nt, Human
auucaaucuguaaacug

SEQ ID NO: 2289056 - RNA, 22 nt, Human
auucaaucgacuggguuuaugu

SEQ ID NO: 2289057 - RNA, 16 nt, Human
auucaauauccuuugc

SEQ ID NO: 2289058 - RNA, 13 nt, Human
auucaauaagcau

SEQ ID NO: 2289059 - RNA, 13 nt, Human
auucaauaaauug

SEQ ID NO: 2289060 - RNA, 21 nt, Human
auucaauaaaguauuuaauua

SEQ ID NO: 2289061 - RNA, 22 nt, Human
auucaauaaaguauuuaauuag

SEQ ID NO: 2289062 - RNA, 19 nt, Human
auucaaccacuguaaaaug

SEQ ID NO: 2289063 - RNA, 22 nt, Human
auucaaccacuguaaaaugaaa

SEQ ID NO: 2289064 - RNA, 18 nt, Human
auucaauaaaguauuuaa

SEQ ID NO: 2289065 - RNA, 20 nt, Human
auucaauaaaguauuuaauu

SEQ ID NO: 2289066 - RNA, 16 nt, Human
auucaaccacuguaaa

SEQ ID NO: 2289067 - RNA, 22 nt, Human
auucaacacucccuucccauga

SEQ ID NO: 2289068 - RNA, 18 nt, Human
auucaacagguuuuccug

SEQ ID NO: 2289069 - RNA, 20 nt, Human
auuauggaagauuuuaaauu

SEQ ID NO: 2289070 - RNA, 17 nt, Human
auuauggaagauuuuaa

SEQ ID NO: 2289071 - RNA, 16 nt, Human
auuauggaagauuuua

SEQ ID NO: 2289072 - RNA, 15 nt, Human
auuaugcuucuugga

SEQ ID NO: 2289073 - RNA, 12 nt, Human
auuaugcuucuu

SEQ ID NO: 2289074 - RNA, 19 nt, Human
auuaugccuuuuuugauca

SEQ ID NO: 2289075 - RNA, 20 nt, Human
auuaugcccaguuucugccu

SEQ ID NO: 2289076 - RNA, 22 nt, Human
auuaugcccaguuucugccucu

SEQ ID NO: 2289077 - RNA, 17 nt, Human
auuaugggaaucaagau

SEQ ID NO: 2289078 - RNA, 18 nt, Human
auuaugggaaucaagauu

SEQ ID NO: 2289079 - RNA, 22 nt, Human
auuauguaaaauguuuuagcaa

SEQ ID NO: 2289080 - RNA, 13 nt, Human
auuaaauuaggaa

SEQ ID NO: 2289081 - RNA, 23 nt, Human
auuaggacaaucaguccccuccc

SEQ ID NO: 2289082 - RNA, 14 nt, Human
auuaggauuucaug

SEQ ID NO: 2289083 - RNA, 16 nt, Human
auuaggauuucaugau

SEQ ID NO: 2289084 - RNA, 18 nt, Human
auuaaauuaggaauaaau

SEQ ID NO: 2289085 - RNA, 19 nt, Human
auuaggauuugccccuucc

SEQ ID NO: 2289086 - RNA, 17 nt, Human
auuaaaugcccagcccc

SEQ ID NO: 2289087 - RNA, 19 nt, Human
auuaaaugcccagccccuu

SEQ ID NO: 2289088 - RNA, 14 nt, Human
auuaguaaagaaau

SEQ ID NO: 2289089 - RNA, 21 nt, Human
auuagguuuuguacaauugaa

SEQ ID NO: 2289090 - RNA, 13 nt, Human
auuaguaacaugu

SEQ ID NO: 2289091 - RNA, 16 nt, Human
auuaguaaaugcuuau

SEQ ID NO: 2289092 - RNA, 15 nt, Human
auuagguuuuguaca

SEQ ID NO: 2289093 - RNA, 16 nt, Human
auuagggagaaaauuc

SEQ ID NO: 2289094 - RNA, 20 nt, Human
auuaguacuccccuccuuga

SEQ ID NO: 2289095 - RNA, 17 nt, Human
auuaguaacauguguua

SEQ ID NO: 2289096 - RNA, 16 nt, Human
auuaguaacauguguu

SEQ ID NO: 2289097 - RNA, 19 nt, Human
auuaguacugcucuuguuu

SEQ ID NO: 2289098 - RNA, 22 nt, Human
auuaguaccauaguaccauuua

SEQ ID NO: 2289099 - RNA, 22 nt, Human
auuaugaauuacauuuguauaa

SEQ ID NO: 2289100 - RNA, 19 nt, Human
auuaugaauuacauuugua

SEQ ID NO: 2289101 - RNA, 20 nt, Human
auuaugaauuacauuuguau

SEQ ID NO: 2289102 - RNA, 14 nt, Human
auucuugcaaagua

SEQ ID NO: 2289103 - RNA, 16 nt, Human
auucuugcaaaguauc

SEQ ID NO: 2289104 - RNA, 15 nt, Human
auucuugcaaaguau

SEQ ID NO: 2289105 - RNA, 17 nt, Human
auucuccuuguguuacu

SEQ ID NO: 2289106 - RNA, 12 nt, Human
auuccuugugaa

SEQ ID NO: 2289107 - RNA, 20 nt, Human
auuccuuggcaugccuucca

SEQ ID NO: 2289108 - RNA, 22 nt, Human
auuccuucuuugauaauguuaa

SEQ ID NO: 2289109 - RNA, 23 nt, Human
auuccuucuuugauaauguuaaa

SEQ ID NO: 2289110 - RNA, 19 nt, Human
auucuccuuguguuacuaa

SEQ ID NO: 2289111 - RNA, 18 nt, Human
auucuccuuguguuacua

SEQ ID NO: 2289112 - RNA, 18 nt, Human
auucucuaguuugauuaa

SEQ ID NO: 2289113 - RNA, 17 nt, Human
auucucuaguuugauua

SEQ ID NO: 2289114 - RNA, 22 nt, Human
auucuccuuguguuacuaaguu

SEQ ID NO: 2289115 - RNA, 21 nt, Human
auucuccuuguguuacuaagu

SEQ ID NO: 2289116 - RNA, 21 nt, Human
auuccuuggcaugccuuccag

SEQ ID NO: 2289117 - RNA, 19 nt, Human
auucucuaguuugauuaaa

SEQ ID NO: 2289118 - RNA, 18 nt, Human
auucucugagcugugcag

SEQ ID NO: 2289119 - RNA, 17 nt, Human
auucucugagcugugca

SEQ ID NO: 2289120 - RNA, 13 nt, Human
auucucugagcug

SEQ ID NO: 2289121 - RNA, 12 nt, Human
auucucugucuc

SEQ ID NO: 2289122 - RNA, 17 nt, Human
auucucugucucaucca

SEQ ID NO: 2289123 - RNA, 16 nt, Human
auucucugucucaucc

SEQ ID NO: 2289124 - RNA, 14 nt, Human
auucucugucucau

SEQ ID NO: 2289125 - RNA, 13 nt, Human
auucucugucuca

SEQ ID NO: 2289126 - RNA, 19 nt, Human
auucuucugcuucagccuc

SEQ ID NO: 2289127 - RNA, 19 nt, Human
auucucugucucauccauc

SEQ ID NO: 2289128 - RNA, 18 nt, Human
auucucugucucauccau

SEQ ID NO: 2289129 - RNA, 20 nt, Human
auucuucugcuucagccucc

SEQ ID NO: 2289130 - RNA, 22 nt, Human
auucuucuguacgucugacagg

SEQ ID NO: 2289131 - RNA, 23 nt, Human
auuccuuagcuuagaccucagcc

SEQ ID NO: 2289132 - RNA, 22 nt, Human
auuccuuagcuuagaccucagc

SEQ ID NO: 2289133 - RNA, 24 nt, Human
auuccuuagcuuagaccucagccu

SEQ ID NO: 2289134 - RNA, 14 nt, Human
auuccuucagggug

SEQ ID NO: 2289135 - RNA, 15 nt, Human
auuccuucaggguga

SEQ ID NO: 2289136 - RNA, 22 nt, Human
auuccuucagggugaugccagg

SEQ ID NO: 2289137 - RNA, 18 nt, Human
auuccuuccuguucugaa

SEQ ID NO: 2289138 - RNA, 17 nt, Human
auuccuuccuguucuga

SEQ ID NO: 2289139 - RNA, 14 nt, Human
auuccuucuuugau

SEQ ID NO: 2289140 - RNA, 15 nt, Human
auuccuucuuugaua

SEQ ID NO: 2289141 - RNA, 16 nt, Human
auuccuucuuugauaa

SEQ ID NO: 2289142 - RNA, 17 nt, Human
auuccuucuuugauaau

SEQ ID NO: 2289143 - RNA, 20 nt, Human
auuccuucuuugauaauguu

SEQ ID NO: 2289144 - RNA, 21 nt, Human
auuccuucuuugauaauguua

SEQ ID NO: 2289145 - RNA, 16 nt, Human
auuccuuccuguucug

SEQ ID NO: 2289146 - RNA, 14 nt, Human
auuccuuccuguuc

SEQ ID NO: 2289147 - RNA, 12 nt, Human
auuccuuccugu

SEQ ID NO: 2289148 - RNA, 21 nt, Human
auuccuuagcuuagaccucag

SEQ ID NO: 2289149 - RNA, 20 nt, Human
auuccuuagcuuagaccuca

SEQ ID NO: 2289150 - RNA, 22 nt, Human
auuccuguggauguaaagugau

SEQ ID NO: 2289151 - RNA, 16 nt, Human
auuccuuaaauaaacu

SEQ ID NO: 2289152 - RNA, 16 nt, Human
auuccuguagcaucuu

SEQ ID NO: 2289153 - RNA, 17 nt, Human
auuccuguagcaucuuc

SEQ ID NO: 2289154 - RNA, 18 nt, Human
auuccuguagcaucuucu

SEQ ID NO: 2289155 - RNA, 23 nt, Human
auuccuguagcaucuucuggagu

SEQ ID NO: 2289156 - RNA, 13 nt, Human
auuccuguauguu

SEQ ID NO: 2289157 - RNA, 16 nt, Human
auuccuguauguuguc

SEQ ID NO: 2289158 - RNA, 17 nt, Human
auuccuguauguugucc

SEQ ID NO: 2289159 - RNA, 18 nt, Human
auuccuguauguugucca

SEQ ID NO: 2289160 - RNA, 13 nt, Human
auuccugggcaca

SEQ ID NO: 2289161 - RNA, 10 nt, Human
auuccugggc

SEQ ID NO: 2289162 - RNA, 15 nt, Human
auuccugggcacagu

SEQ ID NO: 2289163 - RNA, 15 nt, Human
auuccugguacccag

SEQ ID NO: 2289164 - RNA, 18 nt, Human
auuccugguacccagcca

SEQ ID NO: 2289165 - RNA, 20 nt, Human
auuccugguacccagccauc

SEQ ID NO: 2289166 - RNA, 17 nt, Human
auuccugccugucuccu

SEQ ID NO: 2289167 - RNA, 18 nt, Human
auuccuggaaaccacagu

SEQ ID NO: 2289168 - RNA, 15 nt, Human
auuccugccugucuc

SEQ ID NO: 2289169 - RNA, 22 nt, Human
auuccugggaaauauucccuag

SEQ ID NO: 2289170 - RNA, 17 nt, Human
auuccugggaaauauuc

SEQ ID NO: 2289171 - RNA, 14 nt, Human
auuccucagggaca

SEQ ID NO: 2289172 - RNA, 17 nt, Human
auuccucaacguauugu

SEQ ID NO: 2289173 - RNA, 21 nt, Human
auuccuauugugauuugacug

SEQ ID NO: 2289174 - RNA, 23 nt, Human
auuccuauugugauuugacuguu

SEQ ID NO: 2289175 - RNA, 18 nt, Human
auuccuauugugauuuga

SEQ ID NO: 2289176 - RNA, 19 nt, Human
auuccuauugugauuugac

SEQ ID NO: 2289177 - RNA, 20 nt, Human
auuccuauugugauuugacu

SEQ ID NO: 2289178 - RNA, 18 nt, Human
auuccugcauuugugaaa

SEQ ID NO: 2289179 - RNA, 19 nt, Human
auuccugcagccuggaggc

SEQ ID NO: 2289180 - RNA, 22 nt, Human
auuccuccugggccccucaucu

SEQ ID NO: 2289181 - RNA, 17 nt, Human
auuccugcagccuggag

SEQ ID NO: 2289182 - RNA, 15 nt, Human
auuccugcauuugug

SEQ ID NO: 2289183 - RNA, 12 nt, Human
auuccuccuggg

SEQ ID NO: 2289184 - RNA, 20 nt, Human
auuccuccugcucauauugu

SEQ ID NO: 2289185 - RNA, 15 nt, Human
auuccuccaccugcc

SEQ ID NO: 2289186 - RNA, 16 nt, Human
auuccuccugcucaua

SEQ ID NO: 2289187 - RNA, 15 nt, Human
auuccuccugcucau

SEQ ID NO: 2289188 - RNA, 14 nt, Human
auuccuccugcuca

SEQ ID NO: 2289189 - RNA, 13 nt, Human
auuccuccugcuc

SEQ ID NO: 2289190 - RNA, 12 nt, Human
auuucagacucc

SEQ ID NO: 2289191 - RNA, 20 nt, Human
auuucauaccuaucaucuua

SEQ ID NO: 2289192 - RNA, 18 nt, Human
auuucauaaacaacuuaa

SEQ ID NO: 2289193 - RNA, 16 nt, Human
auuucauaugcuguau

SEQ ID NO: 2289194 - RNA, 14 nt, Human
auuucuaugaaaua

SEQ ID NO: 2289195 - RNA, 15 nt, Human
auuucugccuuccuu

SEQ ID NO: 2289196 - RNA, 23 nt, Human
auuucugcauauguugaauacuu

SEQ ID NO: 2289197 - RNA, 22 nt, Human
auuucugcauauguugaauacu

SEQ ID NO: 2289198 - RNA, 18 nt, Human
auuucugcauauguugaa

SEQ ID NO: 2289199 - RNA, 20 nt, Human
auuucuauuucuccuccaug

SEQ ID NO: 2289200 - RNA, 18 nt, Human
auuucuauuucuccucca

SEQ ID NO: 2289201 - RNA, 20 nt, Human
auuucugcugaauuuucaca

SEQ ID NO: 2289202 - RNA, 16 nt, Human
auuucugccuuccuug

SEQ ID NO: 2289203 - RNA, 17 nt, Human
auuucugccuuccuugc

SEQ ID NO: 2289204 - RNA, 14 nt, Human
auuucugcugaauu

SEQ ID NO: 2289205 - RNA, 16 nt, Human
auuucugcugaauuuu

SEQ ID NO: 2289206 - RNA, 22 nt, Human
auuucugcugaauuuucacaug

SEQ ID NO: 2289207 - RNA, 17 nt, Human
auuucuauuuauuuacu

SEQ ID NO: 2289208 - RNA, 15 nt, Human
auuucuauuucuccu

SEQ ID NO: 2289209 - RNA, 13 nt, Human
auuucuauuuauu

SEQ ID NO: 2289210 - RNA, 16 nt, Human
auuucuauuuauuuac

SEQ ID NO: 2289211 - RNA, 14 nt, Human
auuucuaugagaaa

SEQ ID NO: 2289212 - RNA, 12 nt, Human
auuucuauuuau

SEQ ID NO: 2289213 - RNA, 17 nt, Human
auuucuaugagaaaaga

SEQ ID NO: 2289214 - RNA, 23 nt, Human
auuucuauucaagguggccaaau

SEQ ID NO: 2289215 - RNA, 16 nt, Human
auuucugugggagaau

SEQ ID NO: 2289216 - RNA, 13 nt, Human
auuucugugggag

SEQ ID NO: 2289217 - RNA, 13 nt, Human
auuuaauaacauu

SEQ ID NO: 2289218 - RNA, 12 nt, Human
auuuaauaacau

SEQ ID NO: 2289219 - RNA, 14 nt, Human
auuuaauaacauua

SEQ ID NO: 2289220 - RNA, 16 nt, Human
auuuaauaacaauugu

SEQ ID NO: 2289221 - RNA, 16 nt, Human
auuuaauaaaugugcc

SEQ ID NO: 2289222 - RNA, 15 nt, Human
auuuaauaaucugua

SEQ ID NO: 2289223 - RNA, 19 nt, Human
auuuaauaauauacuugug

SEQ ID NO: 2289224 - RNA, 16 nt, Human
auuuaauaauauacuu

SEQ ID NO: 2289225 - RNA, 18 nt, Human
auuuaauaauauacuugu

SEQ ID NO: 2289226 - RNA, 13 nt, Human
auuuaauaauaua

SEQ ID NO: 2289227 - RNA, 15 nt, Human
auuuaauaauauacu

SEQ ID NO: 2289228 - RNA, 15 nt, Human
auuuaauaacauuac

SEQ ID NO: 2289229 - RNA, 17 nt, Human
auuuaauaacauuaccu

SEQ ID NO: 2289230 - RNA, 18 nt, Human
auuuaauaacauuaccuu

SEQ ID NO: 2289231 - RNA, 19 nt, Human
auuuaauaacauuaccuua

SEQ ID NO: 2289232 - RNA, 21 nt, Human
auuuaaugaaagacuguacaa

SEQ ID NO: 2289233 - RNA, 20 nt, Human
auuuaaugaaagacuguaca

SEQ ID NO: 2289234 - RNA, 15 nt, Human
auuuaaugaaagacu

SEQ ID NO: 2289235 - RNA, 16 nt, Human
auuuaaugaaagacug

SEQ ID NO: 2289236 - RNA, 21 nt, Human
auuuauaacucaucauaaaau

SEQ ID NO: 2289237 - RNA, 20 nt, Human
auuuauaacucaucauaaaa

SEQ ID NO: 2289238 - RNA, 19 nt, Human
auuuauaacucaucauaaa

SEQ ID NO: 2289239 - RNA, 18 nt, Human
auuuauaacucaucauaa

SEQ ID NO: 2289240 - RNA, 17 nt, Human
auuuauaacucaucaua

SEQ ID NO: 2289241 - RNA, 16 nt, Human
auuuauaacucaucau

SEQ ID NO: 2289242 - RNA, 15 nt, Human
auuuauaacucauca

SEQ ID NO: 2289243 - RNA, 23 nt, Human
auuuaauaacauuaccuuacugu

SEQ ID NO: 2289244 - RNA, 23 nt, Human
auuuauaacucaucauaaaauaa

SEQ ID NO: 2289245 - RNA, 22 nt, Human
auuuauaacucaucauaaaaua

SEQ ID NO: 2289246 - RNA, 22 nt, Human
auuuauaagcagauuuaacaau

SEQ ID NO: 2289247 - RNA, 14 nt, Human
auuuauaagcagau

SEQ ID NO: 2289248 - RNA, 22 nt, Human
auuuauaaucacuuuuuuccac

SEQ ID NO: 2289249 - RNA, 13 nt, Human
auuuauaaucacu

SEQ ID NO: 2289250 - RNA, 16 nt, Human
auuuauaagguuuuaa

SEQ ID NO: 2289251 - RNA, 17 nt, Human
auuuauaagcagauuua

SEQ ID NO: 2289252 - RNA, 15 nt, Human
auuuauaucacaugu

SEQ ID NO: 2289253 - RNA, 20 nt, Human
auuuauauauuuauaacuca

SEQ ID NO: 2289254 - RNA, 15 nt, Human
auuuauaaucacuuu

SEQ ID NO: 2289255 - RNA, 15 nt, Human
auuuauauguacaug

SEQ ID NO: 2289256 - RNA, 17 nt, Human
auuuauauguacaugag

SEQ ID NO: 2289257 - RNA, 16 nt, Human
auuuauauguacauga

SEQ ID NO: 2289258 - RNA, 16 nt, Human
auuuaucugugcaaau

SEQ ID NO: 2289259 - RNA, 19 nt, Human
auuuaucucuauuuaauau

SEQ ID NO: 2289260 - RNA, 20 nt, Human
auuuaucugggauuaugguu

SEQ ID NO: 2289261 - RNA, 19 nt, Human
auuuaucuugucucugggc

SEQ ID NO: 2289262 - RNA, 20 nt, Human
auuuaucuguguuuuugaaa

SEQ ID NO: 2289263 - RNA, 22 nt, Human
auuuaucucuauuuaauauuua

SEQ ID NO: 2289264 - RNA, 13 nt, Human
auuuaugaaaaga

SEQ ID NO: 2289265 - RNA, 22 nt, Human
auuuaucuuuacuuuuaaacag

SEQ ID NO: 2289266 - RNA, 17 nt, Human
auuuaugagcucuucau

SEQ ID NO: 2289267 - RNA, 23 nt, Human
auuuaugaauugaauuaucuugg

SEQ ID NO: 2289268 - RNA, 12 nt, Human
auuuauggagga

SEQ ID NO: 2289269 - RNA, 16 nt, Human
auuuaugauuuaauaa

SEQ ID NO: 2289270 - RNA, 17 nt, Human
auuuaugauuuaauaaa

SEQ ID NO: 2289271 - RNA, 19 nt, Human
auuuaugauuuaauaaaau

SEQ ID NO: 2289272 - RNA, 22 nt, Human
auuuaugcauauuauuuuaugu

SEQ ID NO: 2289273 - RNA, 19 nt, Human
auuuaugaguuuuugauag

SEQ ID NO: 2289274 - RNA, 13 nt, Human
auuuaugauuuaa

SEQ ID NO: 2289275 - RNA, 15 nt, Human
auuuaugauuuaaua

SEQ ID NO: 2289276 - RNA, 18 nt, Human
auuuaugaguuuuugaua

SEQ ID NO: 2289277 - RNA, 15 nt, Human
auuuaugaguuuuug

SEQ ID NO: 2289278 - RNA, 16 nt, Human
auuuaugcauauuauu

SEQ ID NO: 2289279 - RNA, 18 nt, Human
auuucacuuuagaugcug

SEQ ID NO: 2289280 - RNA, 19 nt, Human
auuucacuuuagaugcuga

SEQ ID NO: 2289281 - RNA, 17 nt, Human
auuucacuuaauaaugu

SEQ ID NO: 2289282 - RNA, 15 nt, Human
auuucacuuuagaug

SEQ ID NO: 2289283 - RNA, 12 nt, Human
auuucacuuaau

SEQ ID NO: 2289284 - RNA, 20 nt, Human
auuuaugccucuguauuuaa

SEQ ID NO: 2289285 - RNA, 19 nt, Human
auuuaugcauggaaaccug

SEQ ID NO: 2289286 - RNA, 18 nt, Human
auuguguguuauuuaaau

SEQ ID NO: 2289287 - RNA, 16 nt, Human
auuguguguuauuuaa

SEQ ID NO: 2289288 - RNA, 14 nt, Human
auuguguugugaau

SEQ ID NO: 2289289 - RNA, 20 nt, Human
auuguguucccauuucagcu

SEQ ID NO: 2289290 - RNA, 23 nt, Human
auuguaacuuggauguagccaug

SEQ ID NO: 2289291 - RNA, 15 nt, Human
auuguaacuuggaug

SEQ ID NO: 2289292 - RNA, 19 nt, Human
auuguaacuguucuugaau

SEQ ID NO: 2289293 - RNA, 15 nt, Human
auuguaacuguucuu

SEQ ID NO: 2289294 - RNA, 13 nt, Human
auuguaacuguuc

SEQ ID NO: 2289295 - RNA, 21 nt, Human
auuguaagaaauacuguacaa

SEQ ID NO: 2289296 - RNA, 20 nt, Human
auuguaagaaauacuguaca

SEQ ID NO: 2289297 - RNA, 14 nt, Human
auuguaagaaauac

SEQ ID NO: 2289298 - RNA, 12 nt, Human
auuguaagaaau

SEQ ID NO: 2289299 - RNA, 15 nt, Human
auuguuaaaauaacu

SEQ ID NO: 2289300 - RNA, 13 nt, Human
auuguuaaaauaa

SEQ ID NO: 2289301 - RNA, 13 nt, Human
auuguguuugugu

SEQ ID NO: 2289302 - RNA, 22 nt, Human
auuguguuugucauuagccuga

SEQ ID NO: 2289303 - RNA, 15 nt, Human
auuguguuugucauu

SEQ ID NO: 2289304 - RNA, 16 nt, Human
auuguguuugucauua

SEQ ID NO: 2289305 - RNA, 18 nt, Human
auuguguuugucauuagc

SEQ ID NO: 2289306 - RNA, 19 nt, Human
auuguguuugucauuagcc

SEQ ID NO: 2289307 - RNA, 13 nt, Human
auuguguuuguca

SEQ ID NO: 2289308 - RNA, 15 nt, Human
auuguguucccauuu

SEQ ID NO: 2289309 - RNA, 17 nt, Human
auuguguugugaauguu

SEQ ID NO: 2289310 - RNA, 23 nt, Human
auuguuaagucuaaauauuuccu

SEQ ID NO: 2289311 - RNA, 17 nt, Human
auuguuaacucuugucu

SEQ ID NO: 2289312 - RNA, 21 nt, Human
auuguuaagucuaaauauuuc

SEQ ID NO: 2289313 - RNA, 22 nt, Human
auuguuaagucuaaauauuucc

SEQ ID NO: 2289314 - RNA, 17 nt, Human
auuguuaauuuuuccua

SEQ ID NO: 2289315 - RNA, 12 nt, Human
auuguuguuucu

SEQ ID NO: 2289316 - RNA, 14 nt, Human
auuguuguuucuuu

SEQ ID NO: 2289317 - RNA, 16 nt, Human
auuguuguuucuuucu

SEQ ID NO: 2289318 - RNA, 19 nt, Human
auuguuguuucuuucuagu

SEQ ID NO: 2289319 - RNA, 20 nt, Human
auuguuguuucuuucuagug

SEQ ID NO: 2289320 - RNA, 19 nt, Human
auuguuguuugccauacuu

SEQ ID NO: 2289321 - RNA, 14 nt, Human
auugcuugcacaaa

SEQ ID NO: 2289322 - RNA, 16 nt, Human
auugcuuguuggauuu

SEQ ID NO: 2289323 - RNA, 15 nt, Human
auugcuugauacuuu

SEQ ID NO: 2289324 - RNA, 21 nt, Human
auugcuuacauuuuuacaaua

SEQ ID NO: 2289325 - RNA, 22 nt, Human
auugcuuacauuuuuacaauaa

SEQ ID NO: 2289326 - RNA, 17 nt, Human
auugcuuaaaauagcaa

SEQ ID NO: 2289327 - RNA, 16 nt, Human
auugcuuaaaauagca

SEQ ID NO: 2289328 - RNA, 17 nt, Human
auugcuguugucccucu

SEQ ID NO: 2289329 - RNA, 21 nt, Human
auugcuuacaagccuaagaau

SEQ ID NO: 2289330 - RNA, 21 nt, Human
auugcuguugucccucugcua

SEQ ID NO: 2289331 - RNA, 13 nt, Human
auugcuuacauuu

SEQ ID NO: 2289332 - RNA, 14 nt, Human
auugcuuacauuuu

SEQ ID NO: 2289333 - RNA, 16 nt, Human
auugcuuacauuuuua

SEQ ID NO: 2289334 - RNA, 19 nt, Human
auugcuuacauuuuuacaa

SEQ ID NO: 2289335 - RNA, 20 nt, Human
auugcuuacauuuuuacaau

SEQ ID NO: 2289336 - RNA, 11 nt, Human
auugcuuucug

SEQ ID NO: 2289337 - RNA, 17 nt, Human
auugcuuuauaaauaaa

SEQ ID NO: 2289338 - RNA, 14 nt, Human
auugcuuuccacug

SEQ ID NO: 2289339 - RNA, 16 nt, Human
auugcuuuacugucaa

SEQ ID NO: 2289340 - RNA, 13 nt, Human
auugcuuuauaaa

SEQ ID NO: 2289341 - RNA, 15 nt, Human
auugcuuuauaaaua

SEQ ID NO: 2289342 - RNA, 16 nt, Human
auugcuuuauaaauaa

SEQ ID NO: 2289343 - RNA, 17 nt, Human
auugcuuucugaaauua

SEQ ID NO: 2289344 - RNA, 16 nt, Human
auugcuuucugaaauu

SEQ ID NO: 2289345 - RNA, 15 nt, Human
auugcuuucugaaau

SEQ ID NO: 2289346 - RNA, 13 nt, Human
auugcuuucugaa

SEQ ID NO: 2289347 - RNA, 21 nt, Human
auugcuuugaagcaguugugu

SEQ ID NO: 2289348 - RNA, 10 nt, Human
auugcuuuga

SEQ ID NO: 2289349 - RNA, 23 nt, Human
auugcuuugaagcaguuguguca

SEQ ID NO: 2289350 - RNA, 14 nt, Human
auuguaacagacau

SEQ ID NO: 2289351 - RNA, 15 nt, Human
auuguaacagacauu

SEQ ID NO: 2289352 - RNA, 16 nt, Human
auuguaacagacauug

SEQ ID NO: 2289353 - RNA, 17 nt, Human
auuguaacagacauugu

SEQ ID NO: 2289354 - RNA, 18 nt, Human
auuguaacagacauuguu

SEQ ID NO: 2289355 - RNA, 15 nt, Human
auuguaacguugcug

SEQ ID NO: 2289356 - RNA, 19 nt, Human
auuguaacagacauuguuu

SEQ ID NO: 2289357 - RNA, 16 nt, Human
auuguaacguugcugu

SEQ ID NO: 2289358 - RNA, 17 nt, Human
auuguaacguugcugug

SEQ ID NO: 2289359 - RNA, 18 nt, Human
auuguaacguugcugugg

SEQ ID NO: 2289360 - RNA, 20 nt, Human
auuguaacguugcuguggga

SEQ ID NO: 2289361 - RNA, 21 nt, Human
auuguaacguugcugugggaa

SEQ ID NO: 2289362 - RNA, 19 nt, Human
auugcugugaauuagcuca

SEQ ID NO: 2289363 - RNA, 11 nt, Human
auugcugugcc

SEQ ID NO: 2289364 - RNA, 12 nt, Human
auugcuguguau

SEQ ID NO: 2289365 - RNA, 15 nt, Human
auugcuguguaucug

SEQ ID NO: 2289366 - RNA, 21 nt, Human
auuguuguuuguauguauaau

SEQ ID NO: 2289367 - RNA, 20 nt, Human
auuguuguuuguauguauaa

SEQ ID NO: 2289368 - RNA, 18 nt, Human
auuguuguuuguauguau

SEQ ID NO: 2289369 - RNA, 17 nt, Human
auuguuguuuguaugua

SEQ ID NO: 2289370 - RNA, 15 nt, Human
auuguuuaaaaucau

SEQ ID NO: 2289371 - RNA, 22 nt, Human
auuguuguuugccauacuuugu

SEQ ID NO: 2289372 - RNA, 17 nt, Human
caggagcuuuggaccua

SEQ ID NO: 2289373 - RNA, 13 nt, Human
caggaggaagggg

SEQ ID NO: 2289374 - RNA, 14 nt, Human
caggaggccagccu

SEQ ID NO: 2289375 - RNA, 15 nt, Human
caggaggccagccuu

SEQ ID NO: 2289376 - RNA, 16 nt, Human
caggaggccagccuug

SEQ ID NO: 2289377 - RNA, 23 nt, Human
caggagcugggcagaaggccaag

SEQ ID NO: 2289378 - RNA, 12 nt, Human
caggagcugggc

SEQ ID NO: 2289379 - RNA, 15 nt, Human
caggagcugggcaga

SEQ ID NO: 2289380 - RNA, 22 nt, Human
caggagcugggauccuaagggc

SEQ ID NO: 2289381 - RNA, 14 nt, Human
caggagcugggauc

SEQ ID NO: 2289382 - RNA, 13 nt, Human
caggagcugccca

SEQ ID NO: 2289383 - RNA, 22 nt, Human
caggagcugcccagaguugcug

SEQ ID NO: 2289384 - RNA, 23 nt, Human
caggagcucuucaggccucccuc

SEQ ID NO: 2289385 - RNA, 22 nt, Human
caggagcucuucaggccucccu

SEQ ID NO: 2289386 - RNA, 20 nt, Human
caggagcucuucaggccucc

SEQ ID NO: 2289387 - RNA, 19 nt, Human
caggagcucuucaggccuc

SEQ ID NO: 2289388 - RNA, 18 nt, Human
caggagcucuucaggccu

SEQ ID NO: 2289389 - RNA, 15 nt, Human
caggagcucuucagg

SEQ ID NO: 2289390 - RNA, 12 nt, Human
caggagcucuuc

SEQ ID NO: 2289391 - RNA, 15 nt, Human
caggacccugaaggg

SEQ ID NO: 2289392 - RNA, 14 nt, Human
caggacccugaagg

SEQ ID NO: 2289393 - RNA, 13 nt, Human
caggaacagaagg

SEQ ID NO: 2289394 - RNA, 13 nt, Human
caggacccugaag

SEQ ID NO: 2289395 - RNA, 14 nt, Human
caggaccccugagu

SEQ ID NO: 2289396 - RNA, 12 nt, Human
caggaccccuga

SEQ ID NO: 2289397 - RNA, 14 nt, Human
caggacccccuucc

SEQ ID NO: 2289398 - RNA, 15 nt, Human
caggacccccuuccc

SEQ ID NO: 2289399 - RNA, 16 nt, Human
caggacccccuucccc

SEQ ID NO: 2289400 - RNA, 17 nt, Human
caggacccccuuccccu

SEQ ID NO: 2289401 - RNA, 22 nt, Human
caggcagaucugugccccaugc

SEQ ID NO: 2289402 - RNA, 21 nt, Human
caggcagaucugugccccaug

SEQ ID NO: 2289403 - RNA, 19 nt, Human
caggcagaucugugcccca

SEQ ID NO: 2289404 - RNA, 18 nt, Human
caggcagaucugugcccc

SEQ ID NO: 2289405 - RNA, 17 nt, Human
caggcagaucugugccc

SEQ ID NO: 2289406 - RNA, 16 nt, Human
caggcagaucugugcc

SEQ ID NO: 2289407 - RNA, 15 nt, Human
caggcagaucugugc

SEQ ID NO: 2289408 - RNA, 13 nt, Human
caggcagaucugu

SEQ ID NO: 2289409 - RNA, 20 nt, Human
caggagguggagguugcagu

SEQ ID NO: 2289410 - RNA, 18 nt, Human
caggagguggcuauggcc

SEQ ID NO: 2289411 - RNA, 22 nt, Human
caggagguggcuauggccaccc

SEQ ID NO: 2289412 - RNA, 15 nt, Human
caggcacccccugga

SEQ ID NO: 2289413 - RNA, 16 nt, Human
caggcacccccuggag

SEQ ID NO: 2289414 - RNA, 18 nt, Human
caggcagauccaggacua

SEQ ID NO: 2289415 - RNA, 17 nt, Human
caggcagauccaggacu

SEQ ID NO: 2289416 - RNA, 15 nt, Human
caggcagauccagga

SEQ ID NO: 2289417 - RNA, 17 nt, Human
caggcacccccuggaga

SEQ ID NO: 2289418 - RNA, 14 nt, Human
caggcagauccagg

SEQ ID NO: 2289419 - RNA, 19 nt, Human
caggagguggagguugcag

SEQ ID NO: 2289420 - RNA, 15 nt, Human
caggagguggagguu

SEQ ID NO: 2289421 - RNA, 15 nt, Human
caggagguggucugg

SEQ ID NO: 2289422 - RNA, 18 nt, Human
caggcacccaccaucaug

SEQ ID NO: 2289423 - RNA, 22 nt, Human
caggcacccaccaucaugucug

SEQ ID NO: 2289424 - RNA, 23 nt, Human
caggcacccaccaucaugucugg

SEQ ID NO: 2289425 - RNA, 12 nt, Human
caggagggaggg

SEQ ID NO: 2289426 - RNA, 15 nt, Human
caggagggaggggga

SEQ ID NO: 2289427 - RNA, 17 nt, Human
caggaggccagccuuga

SEQ ID NO: 2289428 - RNA, 20 nt, Human
caggagguggaggcugcagu

SEQ ID NO: 2289429 - RNA, 12 nt, Human
caggagggcccu

SEQ ID NO: 2289430 - RNA, 17 nt, Human
caggagggcaagggcca

SEQ ID NO: 2289431 - RNA, 19 nt, Human
caggagggcaagggccaug

SEQ ID NO: 2289432 - RNA, 16 nt, Human
caggagggcccuaccu

SEQ ID NO: 2289433 - RNA, 18 nt, Human
caggagggcacuggagcu

SEQ ID NO: 2289434 - RNA, 22 nt, Human
caggagggauuggccgcuuggc

SEQ ID NO: 2289435 - RNA, 22 nt, Human
caggagggagcauagaaggcag

SEQ ID NO: 2289436 - RNA, 16 nt, Human
caggagggcaagggcc

SEQ ID NO: 2289437 - RNA, 23 nt, Human
caggagggagggggaaggcaggg

SEQ ID NO: 2289438 - RNA, 23 nt, Human
caggccagagggagugacagagg

SEQ ID NO: 2289439 - RNA, 15 nt, Human
caggcagcacagaga

SEQ ID NO: 2289440 - RNA, 11 nt, Human
caggcagcaga

SEQ ID NO: 2289441 - RNA, 12 nt, Human
caggcagcagag

SEQ ID NO: 2289442 - RNA, 14 nt, Human
caggcagcagagac

SEQ ID NO: 2289443 - RNA, 23 nt, Human
caggcagcagagacuugggacau

SEQ ID NO: 2289444 - RNA, 13 nt, Human
caggcagcauuua

SEQ ID NO: 2289445 - RNA, 19 nt, Human
caggccagagggagugaca

SEQ ID NO: 2289446 - RNA, 21 nt, Human
caggccagagggagugacaga

SEQ ID NO: 2289447 - RNA, 21 nt, Human
caggcggugggcacccacccu

SEQ ID NO: 2289448 - RNA, 16 nt, Human
caggcgggcucaagga

SEQ ID NO: 2289449 - RNA, 20 nt, Human
caggcuggcccugcccuggu

SEQ ID NO: 2289450 - RNA, 15 nt, Human
caggcuggcgugcag

SEQ ID NO: 2289451 - RNA, 16 nt, Human
caggcugggcuucagu

SEQ ID NO: 2289452 - RNA, 13 nt, Human
caggcuggcgcag

SEQ ID NO: 2289453 - RNA, 15 nt, Human
caggcuggcgcagcc

SEQ ID NO: 2289454 - RNA, 16 nt, Human
caggcuggcgcagcca

SEQ ID NO: 2289455 - RNA, 17 nt, Human
caggcuggcgcagccaa

SEQ ID NO: 2289456 - RNA, 15 nt, Human
caggcugggcuucag

SEQ ID NO: 2289457 - RNA, 15 nt, Human
caggcggugggcacc

SEQ ID NO: 2289458 - RNA, 17 nt, Human
caggcggugggcaccca

SEQ ID NO: 2289459 - RNA, 17 nt, Human
caggcuggcccugcccu

SEQ ID NO: 2289460 - RNA, 19 nt, Human
caggcuggcccugcccugg

SEQ ID NO: 2289461 - RNA, 18 nt, Human
caggcuggcccugcccug

SEQ ID NO: 2289462 - RNA, 17 nt, Human
caggcgccccuuccccc

SEQ ID NO: 2289463 - RNA, 17 nt, Human
caggcgccggcgggcgg

SEQ ID NO: 2289464 - RNA, 21 nt, Human
caggcgggagcgguggcccug

SEQ ID NO: 2289465 - RNA, 23 nt, Human
caggcgggagcgguggcccuguc

SEQ ID NO: 2289466 - RNA, 15 nt, Human
caggcgggcucaagg

SEQ ID NO: 2289467 - RNA, 23 nt, Human
cagggaggagguggcagcccugu

SEQ ID NO: 2289468 - RNA, 17 nt, Human
cagggaggaagaagcuu

SEQ ID NO: 2289469 - RNA, 18 nt, Human
caggcuggcgcagccaag

SEQ ID NO: 2289470 - RNA, 20 nt, Human
caggcuggcgcagccaaggc

SEQ ID NO: 2289471 - RNA, 19 nt, Human
cagggaggacgcucucugg

SEQ ID NO: 2289472 - RNA, 21 nt, Human
caggcuggcgcagccaaggcc

SEQ ID NO: 2289473 - RNA, 13 nt, Human
cagggagggccug

SEQ ID NO: 2289474 - RNA, 12 nt, Human
cagggagggccu

SEQ ID NO: 2289475 - RNA, 17 nt, Human
caggcugggcuucagug

SEQ ID NO: 2289476 - RNA, 19 nt, Human
caggcugggcuucaguggc

SEQ ID NO: 2289477 - RNA, 18 nt, Human
cagggaggacgcucucug

SEQ ID NO: 2289478 - RNA, 17 nt, Human
cagggaggacgcucucu

SEQ ID NO: 2289479 - RNA, 19 nt, Human
caggccucccucucucuuc

SEQ ID NO: 2289480 - RNA, 18 nt, Human
caggccucccucucucuu

SEQ ID NO: 2289481 - RNA, 17 nt, Human
caggccucccucucucu

SEQ ID NO: 2289482 - RNA, 16 nt, Human
caggccucccucucuc

SEQ ID NO: 2289483 - RNA, 15 nt, Human
caggccucccucucu

SEQ ID NO: 2289484 - RNA, 14 nt, Human
caggccucccucuc

SEQ ID NO: 2289485 - RNA, 13 nt, Human
caggccucccucu

SEQ ID NO: 2289486 - RNA, 23 nt, Human
caggccucccucucucuucugcu

SEQ ID NO: 2289487 - RNA, 22 nt, Human
caggccucccucucucuucugc

SEQ ID NO: 2289488 - RNA, 15 nt, Human
caggccugacucuca

SEQ ID NO: 2289489 - RNA, 22 nt, Human
caggccugaaagaggcugaggc

SEQ ID NO: 2289490 - RNA, 13 nt, Human
caggccucccugu

SEQ ID NO: 2289491 - RNA, 14 nt, Human
caggccucccuguu

SEQ ID NO: 2289492 - RNA, 14 nt, Human
caggccugccagac

SEQ ID NO: 2289493 - RNA, 12 nt, Human
caggccugccag

SEQ ID NO: 2289494 - RNA, 23 nt, Human
caggccugagauuucaucugcuc

SEQ ID NO: 2289495 - RNA, 19 nt, Human
caggccugagauuucaucu

SEQ ID NO: 2289496 - RNA, 21 nt, Human
caggccugagauuucaucugc

SEQ ID NO: 2289497 - RNA, 14 nt, Human
caggccugagauuu

SEQ ID NO: 2289498 - RNA, 23 nt, Human
caggccugaaagaggcugaggcc

SEQ ID NO: 2289499 - RNA, 16 nt, Human
caggccugagauuuca

SEQ ID NO: 2289500 - RNA, 18 nt, Human
caggccugagauuucauc

SEQ ID NO: 2289501 - RNA, 18 nt, Human
caggccugccagacggca

SEQ ID NO: 2289502 - RNA, 20 nt, Human
caggccugccuguucccauu

SEQ ID NO: 2289503 - RNA, 15 nt, Human
caggcgccccuuccc

SEQ ID NO: 2289504 - RNA, 20 nt, Human
caggcgauccaccugucuca

SEQ ID NO: 2289505 - RNA, 12 nt, Human
caggccucccuc

SEQ ID NO: 2289506 - RNA, 14 nt, Human
cagggagguggcug

SEQ ID NO: 2289507 - RNA, 17 nt, Human
cagggagguggcugggu

SEQ ID NO: 2289508 - RNA, 22 nt, Human
cagggaguccgaaagggacuug

SEQ ID NO: 2289509 - RNA, 18 nt, Human
cagggaggugaccccagg

SEQ ID NO: 2289510 - RNA, 16 nt, Human
cagggagggccugggc

SEQ ID NO: 2289511 - RNA, 14 nt, Human
cagggagggccugg

SEQ ID NO: 2289512 - RNA, 23 nt, Human
cagggagguuaagugacuugccc

SEQ ID NO: 2289513 - RNA, 13 nt, Human
cagggaguccccu

SEQ ID NO: 2289514 - RNA, 22 nt, Human
cagggaguccccuccccggccc

SEQ ID NO: 2289515 - RNA, 23 nt, Human
cagggaguccccuccccggcccu

SEQ ID NO: 2289516 - RNA, 20 nt, Human
cagggaguguaguaaagccg

SEQ ID NO: 2289517 - RNA, 22 nt, Human
cagugcaagagacucuggccuc

SEQ ID NO: 2289518 - RNA, 23 nt, Human
cagugcaagagacucuggccucc

SEQ ID NO: 2289519 - RNA, 15 nt, Human
cagugcacccacucu

SEQ ID NO: 2289520 - RNA, 24 nt, Human
cagugcaagagacucuggccucca

SEQ ID NO: 2289521 - RNA, 22 nt, Human
cagugcaaugguauaaauuuca

SEQ ID NO: 2289522 - RNA, 19 nt, Human
cagucugauucccaagcuc

SEQ ID NO: 2289523 - RNA, 20 nt, Human
cagucugauucccaagcucu

SEQ ID NO: 2289524 - RNA, 22 nt, Human
cagugcagcccguguggccccu

SEQ ID NO: 2289525 - RNA, 12 nt, Human
cagugcaggcac

SEQ ID NO: 2289526 - RNA, 16 nt, Human
cagugcagcccgugug

SEQ ID NO: 2289527 - RNA, 19 nt, Human
cagugcaugcugucccuua

SEQ ID NO: 2289528 - RNA, 22 nt, Human
cagugcaugcugucccuuacgu

SEQ ID NO: 2289529 - RNA, 23 nt, Human
cagugcaugcugucccuuacgug

SEQ ID NO: 2289530 - RNA, 14 nt, Human
cagugggagaaaac

SEQ ID NO: 2289531 - RNA, 13 nt, Human
cagugggagccag

SEQ ID NO: 2289532 - RNA, 17 nt, Human
cagugggagccagggcu

SEQ ID NO: 2289533 - RNA, 18 nt, Human
cagugggagccagggcug

SEQ ID NO: 2289534 - RNA, 11 nt, Human
cagugggagcu

SEQ ID NO: 2289535 - RNA, 12 nt, Human
cagugcccacag

SEQ ID NO: 2289536 - RNA, 19 nt, Human
cagugggacagggcauggc

SEQ ID NO: 2289537 - RNA, 16 nt, Human
cagugggacagggcau

SEQ ID NO: 2289538 - RNA, 19 nt, Human
cagugccaagcacagugcc

SEQ ID NO: 2289539 - RNA, 22 nt, Human
cagugccaauaaaauuuaggaa

SEQ ID NO: 2289540 - RNA, 23 nt, Human
cagugccaagcacagugccugca

SEQ ID NO: 2289541 - RNA, 15 nt, Human
cagugccaagcacag

SEQ ID NO: 2289542 - RNA, 14 nt, Human
cagugccagcaaug

SEQ ID NO: 2289543 - RNA, 15 nt, Human
cagugccagcaauga

SEQ ID NO: 2289544 - RNA, 17 nt, Human
cagugccagcaaugaca

SEQ ID NO: 2289545 - RNA, 21 nt, Human
cagugccagcaaugacaucuc

SEQ ID NO: 2289546 - RNA, 15 nt, Human
cagugccaaaaacaa

SEQ ID NO: 2289547 - RNA, 14 nt, Human
cagugcaggcacag

SEQ ID NO: 2289548 - RNA, 15 nt, Human
caguccuuccaccuc

SEQ ID NO: 2289549 - RNA, 16 nt, Human
cagucgauagagcugu

SEQ ID NO: 2289550 - RNA, 15 nt, Human
cagucgauagagcug

SEQ ID NO: 2289551 - RNA, 22 nt, Human
cagucugaugagaacucugagc

SEQ ID NO: 2289552 - RNA, 18 nt, Human
cagucucccuucucccau

SEQ ID NO: 2289553 - RNA, 17 nt, Human
cagucucccuucuccca

SEQ ID NO: 2289554 - RNA, 22 nt, Human
cagucugaucgugacgcugaau

SEQ ID NO: 2289555 - RNA, 11 nt, Human
cagucucccuu

SEQ ID NO: 2289556 - RNA, 17 nt, Human
cagucuccaccaggaac

SEQ ID NO: 2289557 - RNA, 16 nt, Human
cagucuccaccaggaa

SEQ ID NO: 2289558 - RNA, 14 nt, Human
cagucucaggagca

SEQ ID NO: 2289559 - RNA, 13 nt, Human
cagucucaggagc

SEQ ID NO: 2289560 - RNA, 17 nt, Human
cagucucacccagacuc

SEQ ID NO: 2289561 - RNA, 19 nt, Human
cagucucacugugggaagg

SEQ ID NO: 2289562 - RNA, 23 nt, Human
cagucucacugugggaaggccag

SEQ ID NO: 2289563 - RNA, 19 nt, Human
cagucucaggagcaugggg

SEQ ID NO: 2289564 - RNA, 18 nt, Human
cagucucaggagcauggg

SEQ ID NO: 2289565 - RNA, 14 nt, Human
cagucucccucccu

SEQ ID NO: 2289566 - RNA, 13 nt, Human
cagucgggggcug

SEQ ID NO: 2289567 - RNA, 14 nt, Human
cagucgggggcugg

SEQ ID NO: 2289568 - RNA, 16 nt, Human
cagucgggggcuggcc

SEQ ID NO: 2289569 - RNA, 17 nt, Human
cagucgggggcuggccu

SEQ ID NO: 2289570 - RNA, 18 nt, Human
cagucgggggcuggccua

SEQ ID NO: 2289571 - RNA, 19 nt, Human
cagucgggggcuggccuag

SEQ ID NO: 2289572 - RNA, 13 nt, Human
cagucgucgcaca

SEQ ID NO: 2289573 - RNA, 14 nt, Human
cagucgcgcugccu

SEQ ID NO: 2289574 - RNA, 15 nt, Human
cagucgcgcugccug

SEQ ID NO: 2289575 - RNA, 16 nt, Human
cagucgcgcugccugu

SEQ ID NO: 2289576 - RNA, 17 nt, Human
cagucgcgcugccugug

SEQ ID NO: 2289577 - RNA, 18 nt, Human
cagucgcgcugccugugu

SEQ ID NO: 2289578 - RNA, 20 nt, Human
cagucgcgcugccugugugg

SEQ ID NO: 2289579 - RNA, 20 nt, Human
cagucgucgcacagucucuc

SEQ ID NO: 2289580 - RNA, 14 nt, Human
cagucgugccugug

SEQ ID NO: 2289581 - RNA, 13 nt, Human
cagucgugccugu

SEQ ID NO: 2289582 - RNA, 17 nt, Human
cagucgucgcacagucu

SEQ ID NO: 2289583 - RNA, 18 nt, Human
cagucgucgcacagucuc

SEQ ID NO: 2289584 - RNA, 15 nt, Human
cagucucaggaaauc

SEQ ID NO: 2289585 - RNA, 14 nt, Human
caggguuggccccu

SEQ ID NO: 2289586 - RNA, 12 nt, Human
caggguuggccc

SEQ ID NO: 2289587 - RNA, 16 nt, Human
caggugauccacccac

SEQ ID NO: 2289588 - RNA, 17 nt, Human
caggugauccacccacc

SEQ ID NO: 2289589 - RNA, 20 nt, Human
caggugcagcccccacugcc

SEQ ID NO: 2289590 - RNA, 18 nt, Human
caggugcagcccccacug

SEQ ID NO: 2289591 - RNA, 15 nt, Human
caggugcacagacgu

SEQ ID NO: 2289592 - RNA, 23 nt, Human
caggugcacagacgucccuccac

SEQ ID NO: 2289593 - RNA, 20 nt, Human
caggugauccacccaccuca

SEQ ID NO: 2289594 - RNA, 15 nt, Human
caggugcaguggcuc

SEQ ID NO: 2289595 - RNA, 13 nt, Human
caggugcaguggc

SEQ ID NO: 2289596 - RNA, 12 nt, Human
caggugcagugg

SEQ ID NO: 2289597 - RNA, 23 nt, Human
caggugcagcccccacugccuuu

SEQ ID NO: 2289598 - RNA, 14 nt, Human
caggugcgaaagga

SEQ ID NO: 2289599 - RNA, 18 nt, Human
caggugcuaggaacacuc

SEQ ID NO: 2289600 - RNA, 20 nt, Human
caggugcuaggaacacuccu

SEQ ID NO: 2289601 - RNA, 14 nt, Human
cagguugguggggg

SEQ ID NO: 2289602 - RNA, 20 nt, Human
cagguugggaaugaggcuug

SEQ ID NO: 2289603 - RNA, 22 nt, Human
cagguugggaaugaggcuugcu

SEQ ID NO: 2289604 - RNA, 21 nt, Human
caggugcuacacccuuuucca

SEQ ID NO: 2289605 - RNA, 19 nt, Human
cagguugcugguugcugug

SEQ ID NO: 2289606 - RNA, 20 nt, Human
cagguugcugguugcugugu

SEQ ID NO: 2289607 - RNA, 21 nt, Human
cagguugcugguugcugugug

SEQ ID NO: 2289608 - RNA, 22 nt, Human
cagguugcugguugcugugugg

SEQ ID NO: 2289609 - RNA, 15 nt, Human
cagguugcuuugccc

SEQ ID NO: 2289610 - RNA, 17 nt, Human
cagguugcuuugcccug

SEQ ID NO: 2289611 - RNA, 18 nt, Human
cagguugcuuugcccugg

SEQ ID NO: 2289612 - RNA, 19 nt, Human
cagguugcuuugcccuggu

SEQ ID NO: 2289613 - RNA, 22 nt, Human
cagggucucacucugucgccca

SEQ ID NO: 2289614 - RNA, 21 nt, Human
cagggucucacucugucgccc

SEQ ID NO: 2289615 - RNA, 13 nt, Human
cagggucugcucu

SEQ ID NO: 2289616 - RNA, 14 nt, Human
cagggucugcucuu

SEQ ID NO: 2289617 - RNA, 17 nt, Human
cagggucugcucuuucu

SEQ ID NO: 2289618 - RNA, 20 nt, Human
cagggucugcucuuucucug

SEQ ID NO: 2289619 - RNA, 23 nt, Human
cagggucucuagugcugugaaaa

SEQ ID NO: 2289620 - RNA, 13 nt, Human
cagggucucugcu

SEQ ID NO: 2289621 - RNA, 15 nt, Human
cagggucucugcugc

SEQ ID NO: 2289622 - RNA, 16 nt, Human
cagggucucugcugcc

SEQ ID NO: 2289623 - RNA, 17 nt, Human
cagggucucugcugccg

SEQ ID NO: 2289624 - RNA, 18 nt, Human
cagggucucugcugccgc

SEQ ID NO: 2289625 - RNA, 17 nt, Human
cagggucucacucuguc

SEQ ID NO: 2289626 - RNA, 18 nt, Human
cagggucucacucugucg

SEQ ID NO: 2289627 - RNA, 21 nt, Human
caggguucccccagcccugug

SEQ ID NO: 2289628 - RNA, 20 nt, Human
caggguucccccagcccugu

SEQ ID NO: 2289629 - RNA, 18 nt, Human
caggguucccccagcccu

SEQ ID NO: 2289630 - RNA, 17 nt, Human
caggguucccccagccc

SEQ ID NO: 2289631 - RNA, 15 nt, Human
caggguucccccagc

SEQ ID NO: 2289632 - RNA, 18 nt, Human
caggguucaaaaugucug

SEQ ID NO: 2289633 - RNA, 15 nt, Human
caggguuaagaagac

SEQ ID NO: 2289634 - RNA, 13 nt, Human
cagggugugugcu

SEQ ID NO: 2289635 - RNA, 19 nt, Human
caggguguggcccugccau

SEQ ID NO: 2289636 - RNA, 23 nt, Human
caggguguugggauacugcaggg

SEQ ID NO: 2289637 - RNA, 21 nt, Human
caggguucuccucuccccucu

SEQ ID NO: 2289638 - RNA, 20 nt, Human
caggguucuccucuccccuc

SEQ ID NO: 2289639 - RNA, 17 nt, Human
caggguucuccucuccc

SEQ ID NO: 2289640 - RNA, 22 nt, Human
caggguucccccagcccugugg

SEQ ID NO: 2289641 - RNA, 15 nt, Human
caggguucuccucuc

SEQ ID NO: 2289642 - RNA, 18 nt, Human
caggguugaucacacucu

SEQ ID NO: 2289643 - RNA, 21 nt, Human
caggguugaucacacucuggg

SEQ ID NO: 2289644 - RNA, 20 nt, Human
caggguugaccccagaggau

SEQ ID NO: 2289645 - RNA, 19 nt, Human
caggguugaccccagagga

SEQ ID NO: 2289646 - RNA, 15 nt, Human
cagggucugggcagg

SEQ ID NO: 2289647 - RNA, 17 nt, Human
cagggucuucccuaccu

SEQ ID NO: 2289648 - RNA, 13 nt, Human
cagggucuucccu

SEQ ID NO: 2289649 - RNA, 16 nt, Human
cagggucugggcagga

SEQ ID NO: 2289650 - RNA, 21 nt, Human
cagggucugcucuuucucugc

SEQ ID NO: 2289651 - RNA, 22 nt, Human
cagggucugcucuuucucugcc

SEQ ID NO: 2289652 - RNA, 23 nt, Human
cagggucugcucuuucucugcca

SEQ ID NO: 2289653 - RNA, 19 nt, Human
cagggucucugcugccgcc

SEQ ID NO: 2289654 - RNA, 14 nt, Human
cagggucugggcag

SEQ ID NO: 2289655 - RNA, 20 nt, Human
cagggugggauggaggagaa

SEQ ID NO: 2289656 - RNA, 16 nt, Human
caggguggugcuggga

SEQ ID NO: 2289657 - RNA, 19 nt, Human
caggguggugcugggacug

SEQ ID NO: 2289658 - RNA, 17 nt, Human
caggguggugcugggac

SEQ ID NO: 2289659 - RNA, 18 nt, Human
caggguggugcugggacu

SEQ ID NO: 2289660 - RNA, 18 nt, Human
caggguguggcccugcca

SEQ ID NO: 2289661 - RNA, 15 nt, Human
cagucaaggaguggc

SEQ ID NO: 2289662 - RNA, 21 nt, Human
cagucaaccugggcaaagccu

SEQ ID NO: 2289663 - RNA, 20 nt, Human
cagguuucuggucucuaggc

SEQ ID NO: 2289664 - RNA, 17 nt, Human
cagguuucuggucucua

SEQ ID NO: 2289665 - RNA, 15 nt, Human
cagguuugggacccc

SEQ ID NO: 2289666 - RNA, 18 nt, Human
cagguuuaagcuguuacu

SEQ ID NO: 2289667 - RNA, 16 nt, Human
cagguuuaagcuguua

SEQ ID NO: 2289668 - RNA, 13 nt, Human
cagguugggccau

SEQ ID NO: 2289669 - RNA, 17 nt, Human
cagguugggccauacug

SEQ ID NO: 2289670 - RNA, 21 nt, Human
cagguugggccauacuggccu

SEQ ID NO: 2289671 - RNA, 22 nt, Human
cagguugggccauacuggccuc

SEQ ID NO: 2289672 - RNA, 23 nt, Human
cagguuugggaccccuggugguu

SEQ ID NO: 2289673 - RNA, 21 nt, Human
caguauugaagcauuuuauaa

SEQ ID NO: 2289674 - RNA, 18 nt, Human
cagguuugggaccccugg

SEQ ID NO: 2289675 - RNA, 21 nt, Human
caguauuuuggagaaauuauu

SEQ ID NO: 2289676 - RNA, 23 nt, Human
caguauuuuggagaaauuauuua

SEQ ID NO: 2289677 - RNA, 20 nt, Human
caguauuuuggagaaauuau

SEQ ID NO: 2289678 - RNA, 19 nt, Human
caguauuuuggagaaauua

SEQ ID NO: 2289679 - RNA, 19 nt, Human
cagucaaaacagagaugug

SEQ ID NO: 2289680 - RNA, 19 nt, Human
caguauuuugguucuuagu

SEQ ID NO: 2289681 - RNA, 15 nt, Human
cagucaaaacagaga

SEQ ID NO: 2289682 - RNA, 14 nt, Human
cagucaaccugggc

SEQ ID NO: 2289683 - RNA, 16 nt, Human
cagucaacaaacuauu

SEQ ID NO: 2289684 - RNA, 22 nt, Human
cagucaaccugggcaaagccua

SEQ ID NO: 2289685 - RNA, 16 nt, Human
cagucaaccugggcaa

SEQ ID NO: 2289686 - RNA, 15 nt, Human
cagucaaccugggca

SEQ ID NO: 2289687 - RNA, 20 nt, Human
cagucaccccggccaccugc

SEQ ID NO: 2289688 - RNA, 19 nt, Human
cagucaccccggccaccug

SEQ ID NO: 2289689 - RNA, 22 nt, Human
cagucaccccggccaccugcgg

SEQ ID NO: 2289690 - RNA, 15 nt, Human
cagucaccucaugga

SEQ ID NO: 2289691 - RNA, 15 nt, Human
cagcguacucaucau

SEQ ID NO: 2289692 - RNA, 15 nt, Human
cagcgguggccucuu

SEQ ID NO: 2289693 - RNA, 15 nt, Human
cagcgguuuggggag

SEQ ID NO: 2289694 - RNA, 21 nt, Human
cagccugagcaacucuugauu

SEQ ID NO: 2289695 - RNA, 23 nt, Human
cagcggggccuggcgggaugggc

SEQ ID NO: 2289696 - RNA, 14 nt, Human
cagcggggcgaagc

SEQ ID NO: 2289697 - RNA, 19 nt, Human
cagcggggcgaagcccagg

SEQ ID NO: 2289698 - RNA, 18 nt, Human
cagcgggggccagggaag

SEQ ID NO: 2289699 - RNA, 14 nt, Human
cagcgguggccucu

SEQ ID NO: 2289700 - RNA, 17 nt, Human
cagcguagccucuccgg

SEQ ID NO: 2289701 - RNA, 14 nt, Human
cagcgucccagucu

SEQ ID NO: 2289702 - RNA, 15 nt, Human
cagcguccuccucug

SEQ ID NO: 2289703 - RNA, 21 nt, Human
cagcgucccagucucuggcag

SEQ ID NO: 2289704 - RNA, 18 nt, Human
cagcguccuccucuguga

SEQ ID NO: 2289705 - RNA, 16 nt, Human
cagcguccuccucugu

SEQ ID NO: 2289706 - RNA, 15 nt, Human
cagcguccuguccac

SEQ ID NO: 2289707 - RNA, 14 nt, Human
cagcguccugucca

SEQ ID NO: 2289708 - RNA, 15 nt, Human
cagcgugcuuuaaaa

SEQ ID NO: 2289709 - RNA, 15 nt, Human
cagcggggacagcuc

SEQ ID NO: 2289710 - RNA, 20 nt, Human
cagccugagcaacucuugau

SEQ ID NO: 2289711 - RNA, 16 nt, Human
cagccugagcaacucu

SEQ ID NO: 2289712 - RNA, 16 nt, Human
cagcggggacagcucc

SEQ ID NO: 2289713 - RNA, 17 nt, Human
cagcggggacagcuccu

SEQ ID NO: 2289714 - RNA, 17 nt, Human
cagccucuuucuguccc

SEQ ID NO: 2289715 - RNA, 18 nt, Human
cagccugagcgacaguga

SEQ ID NO: 2289716 - RNA, 22 nt, Human
cagccugagcgacagugagacu

SEQ ID NO: 2289717 - RNA, 19 nt, Human
cagccugagcgacagugag

SEQ ID NO: 2289718 - RNA, 15 nt, Human
cagcccuuagcaggg

SEQ ID NO: 2289719 - RNA, 22 nt, Human
cagccccuggaugcagccucac

SEQ ID NO: 2289720 - RNA, 16 nt, Human
cagcccuuagcaggga

SEQ ID NO: 2289721 - RNA, 21 nt, Human
cagcccuuagcagggaaacag

SEQ ID NO: 2289722 - RNA, 17 nt, Human
cagccccuggaugcagc

SEQ ID NO: 2289723 - RNA, 18 nt, Human
cagccccuggaugcagcc

SEQ ID NO: 2289724 - RNA, 19 nt, Human
cagccccuggaugcagccu

SEQ ID NO: 2289725 - RNA, 21 nt, Human
cagccccuggaugcagccuca

SEQ ID NO: 2289726 - RNA, 12 nt, Human
cagccccuggau

SEQ ID NO: 2289727 - RNA, 13 nt, Human
cagccccuggaug

SEQ ID NO: 2289728 - RNA, 14 nt, Human
cagccccuggaugc

SEQ ID NO: 2289729 - RNA, 18 nt, Human
cagccgauucaccugagc

SEQ ID NO: 2289730 - RNA, 19 nt, Human
cagccgagccgggccuggg

SEQ ID NO: 2289731 - RNA, 14 nt, Human
cagccgagcucgug

SEQ ID NO: 2289732 - RNA, 22 nt, Human
cagccgagcucguguauccugg

SEQ ID NO: 2289733 - RNA, 23 nt, Human
cagccgagcucguguauccuggg

SEQ ID NO: 2289734 - RNA, 12 nt, Human
cagccgagccgg

SEQ ID NO: 2289735 - RNA, 14 nt, Human
cagccgagccgggc

SEQ ID NO: 2289736 - RNA, 17 nt, Human
cagccgagccgggccug

SEQ ID NO: 2289737 - RNA, 18 nt, Human
cagccgagccgggccugg

SEQ ID NO: 2289738 - RNA, 21 nt, Human
cagccgagauagccaaggcca

SEQ ID NO: 2289739 - RNA, 23 nt, Human
cagccccugccccagcccaaguc

SEQ ID NO: 2289740 - RNA, 15 nt, Human
cagcccuucuuucca

SEQ ID NO: 2289741 - RNA, 19 nt, Human
cagcccuucuuuccacaga

SEQ ID NO: 2289742 - RNA, 20 nt, Human
cagcccuucuuuccacagaa

SEQ ID NO: 2289743 - RNA, 14 nt, Human
cagccggcacccac

SEQ ID NO: 2289744 - RNA, 14 nt, Human
cagccggccucucu

SEQ ID NO: 2289745 - RNA, 15 nt, Human
cagccggccucucug

SEQ ID NO: 2289746 - RNA, 16 nt, Human
cagccggccucucugg

SEQ ID NO: 2289747 - RNA, 17 nt, Human
cagccggccucucuggc

SEQ ID NO: 2289748 - RNA, 18 nt, Human
cagccggccucucuggcc

SEQ ID NO: 2289749 - RNA, 15 nt, Human
cagccggcacagggu

SEQ ID NO: 2289750 - RNA, 17 nt, Human
cagccggcacagggucu

SEQ ID NO: 2289751 - RNA, 18 nt, Human
cagccggcacagggucug

SEQ ID NO: 2289752 - RNA, 23 nt, Human
cagccggcacagggucugcucuu

SEQ ID NO: 2289753 - RNA, 18 nt, Human
cagccgcuucugacugcu

SEQ ID NO: 2289754 - RNA, 22 nt, Human
cagccgcugcccggcgcccucu

SEQ ID NO: 2289755 - RNA, 13 nt, Human
cagccggcacagg

SEQ ID NO: 2289756 - RNA, 14 nt, Human
cagccgcuucugac

SEQ ID NO: 2289757 - RNA, 19 nt, Human
cagccgcagccucccucug

SEQ ID NO: 2289758 - RNA, 16 nt, Human
cagccgcagccucccu

SEQ ID NO: 2289759 - RNA, 19 nt, Human
cagccgauucaccugagca

SEQ ID NO: 2289760 - RNA, 11 nt, Human
cagccucuuaa

SEQ ID NO: 2289761 - RNA, 14 nt, Human
cagccucuguuccc

SEQ ID NO: 2289762 - RNA, 15 nt, Human
cagccgggcccugag

SEQ ID NO: 2289763 - RNA, 19 nt, Human
cagccggccucucuggccu

SEQ ID NO: 2289764 - RNA, 20 nt, Human
cagccggccucucuggccuc

SEQ ID NO: 2289765 - RNA, 22 nt, Human
cagccggccucucuggccuccc

SEQ ID NO: 2289766 - RNA, 23 nt, Human
cagccggccucucuggccuccca

SEQ ID NO: 2289767 - RNA, 24 nt, Human
cagccggccucucuggccucccac

SEQ ID NO: 2289768 - RNA, 12 nt, Human
cagccgggcccu

SEQ ID NO: 2289769 - RNA, 13 nt, Human
cagccgggcccug

SEQ ID NO: 2289770 - RNA, 21 nt, Human
cagccucuuaaagcugccugu

SEQ ID NO: 2289771 - RNA, 20 nt, Human
cagccucuuaaagcugccug

SEQ ID NO: 2289772 - RNA, 19 nt, Human
cagccucuuaaagcugccu

SEQ ID NO: 2289773 - RNA, 15 nt, Human
cagccucuuaaagcu

SEQ ID NO: 2289774 - RNA, 18 nt, Human
cagccucuuggccccaga

SEQ ID NO: 2289775 - RNA, 16 nt, Human
cagccucuuucugucc

SEQ ID NO: 2289776 - RNA, 16 nt, Human
cagcugcagagacaga

SEQ ID NO: 2289777 - RNA, 13 nt, Human
cagcugccagaga

SEQ ID NO: 2289778 - RNA, 15 nt, Human
cagcugcagagacag

SEQ ID NO: 2289779 - RNA, 18 nt, Human
cagcugcacugaugcugc

SEQ ID NO: 2289780 - RNA, 22 nt, Human
cagcugcaccugccagccuggc

SEQ ID NO: 2289781 - RNA, 12 nt, Human
cagcugcacuga

SEQ ID NO: 2289782 - RNA, 15 nt, Human
cagcugccagagaag

SEQ ID NO: 2289783 - RNA, 14 nt, Human
cagcugccagagaa

SEQ ID NO: 2289784 - RNA, 16 nt, Human
cagcugccagagaagc

SEQ ID NO: 2289785 - RNA, 15 nt, Human
cagcugccccagcca

SEQ ID NO: 2289786 - RNA, 12 nt, Human
cagcugccccgg

SEQ ID NO: 2289787 - RNA, 13 nt, Human
cagcugccccggg

SEQ ID NO: 2289788 - RNA, 17 nt, Human
cagcugccgaccagagc

SEQ ID NO: 2289789 - RNA, 18 nt, Human
cagcugccgaccagagcc

SEQ ID NO: 2289790 - RNA, 13 nt, Human
cagcugccucuuc

SEQ ID NO: 2289791 - RNA, 19 nt, Human
cagcugccgaccagagccc

SEQ ID NO: 2289792 - RNA, 12 nt, Human
cagcugccucuu

SEQ ID NO: 2289793 - RNA, 21 nt, Human
cagcucccccuguccccucag

SEQ ID NO: 2289794 - RNA, 19 nt, Human
cagcucccaccccaccccc

SEQ ID NO: 2289795 - RNA, 15 nt, Human
cagcucccaccccac

SEQ ID NO: 2289796 - RNA, 14 nt, Human
cagcucccacccca

SEQ ID NO: 2289797 - RNA, 12 nt, Human
cagcucccaccc

SEQ ID NO: 2289798 - RNA, 16 nt, Human
cagcuccccucggaga

SEQ ID NO: 2289799 - RNA, 18 nt, Human
cagcuccccucggagaag

SEQ ID NO: 2289800 - RNA, 17 nt, Human
cagcuccccucggagaa

SEQ ID NO: 2289801 - RNA, 20 nt, Human
cagcugauuuuaacaauaac

SEQ ID NO: 2289802 - RNA, 22 nt, Human
cagcucccccuguccccucagc

SEQ ID NO: 2289803 - RNA, 20 nt, Human
cagcuccccucggagaagag

SEQ ID NO: 2289804 - RNA, 21 nt, Human
cagcugcaccugccagccugg

SEQ ID NO: 2289805 - RNA, 20 nt, Human
cagcugcaccugccagccug

SEQ ID NO: 2289806 - RNA, 18 nt, Human
cagcugcaccugccagcc

SEQ ID NO: 2289807 - RNA, 17 nt, Human
cagcugcaccugccagc

SEQ ID NO: 2289808 - RNA, 21 nt, Human
cagcugauuuuaacaauaacu

SEQ ID NO: 2289809 - RNA, 16 nt, Human
cagcugcaccugccag

SEQ ID NO: 2289810 - RNA, 16 nt, Human
cagcuguccucuucug

SEQ ID NO: 2289811 - RNA, 22 nt, Human
cagcugucccugucaccaagcu

SEQ ID NO: 2289812 - RNA, 18 nt, Human
cagcugugaacauggacu

SEQ ID NO: 2289813 - RNA, 20 nt, Human
cagcugugaacauggacucu

SEQ ID NO: 2289814 - RNA, 13 nt, Human
cagcugugagccu

SEQ ID NO: 2289815 - RNA, 15 nt, Human
cagcugugagccuug

SEQ ID NO: 2289816 - RNA, 16 nt, Human
cagcugugagccuugg

SEQ ID NO: 2289817 - RNA, 17 nt, Human
cagcugugagccuuggc

SEQ ID NO: 2289818 - RNA, 18 nt, Human
cagcugugcucuggacag

SEQ ID NO: 2289819 - RNA, 15 nt, Human
cagcuucauuuccug

SEQ ID NO: 2289820 - RNA, 15 nt, Human
cagcuucagccagga

SEQ ID NO: 2289821 - RNA, 17 nt, Human
cagcuucagccaggagc

SEQ ID NO: 2289822 - RNA, 14 nt, Human
cagcuucagguuau

SEQ ID NO: 2289823 - RNA, 18 nt, Human
cagcuucauuuccugugu

SEQ ID NO: 2289824 - RNA, 12 nt, Human
cagcuucaguug

SEQ ID NO: 2289825 - RNA, 19 nt, Human
caggaaagcucagcuacug

SEQ ID NO: 2289826 - RNA, 18 nt, Human
caggaaaggcccagccac

SEQ ID NO: 2289827 - RNA, 15 nt, Human
caggaaaggaaucau

SEQ ID NO: 2289828 - RNA, 14 nt, Human
caggaaaggcucca

SEQ ID NO: 2289829 - RNA, 15 nt, Human
caggaaaggcuccag

SEQ ID NO: 2289830 - RNA, 12 nt, Human
caggaacagaag

SEQ ID NO: 2289831 - RNA, 22 nt, Human
caggaacacccgacuccucaaa

SEQ ID NO: 2289832 - RNA, 21 nt, Human
caggaacaaucgauggccuug

SEQ ID NO: 2289833 - RNA, 21 nt, Human
caggaaaugaaaaugucuugu

SEQ ID NO: 2289834 - RNA, 20 nt, Human
caggaaaugaaaaugucuug

SEQ ID NO: 2289835 - RNA, 13 nt, Human
caggaaaugaaaa

SEQ ID NO: 2289836 - RNA, 19 nt, Human
caggaaaggaaucauuucu

SEQ ID NO: 2289837 - RNA, 23 nt, Human
caggaaaucaaauaugcaaagca

SEQ ID NO: 2289838 - RNA, 13 nt, Human
cagcuccagcuca

SEQ ID NO: 2289839 - RNA, 23 nt, Human
cagcuccaaccugcaaagaucug

SEQ ID NO: 2289840 - RNA, 18 nt, Human
cagcuccaagaccuguug

SEQ ID NO: 2289841 - RNA, 20 nt, Human
cagcuccaagaccuguuggu

SEQ ID NO: 2289842 - RNA, 14 nt, Human
cagcuccagcucac

SEQ ID NO: 2289843 - RNA, 15 nt, Human
cagcuccagcucacc

SEQ ID NO: 2289844 - RNA, 20 nt, Human
cagcuccaaccugcaaagau

SEQ ID NO: 2289845 - RNA, 17 nt, Human
cagcuccaaccugcaaa

SEQ ID NO: 2289846 - RNA, 14 nt, Human
cagcuccaaccugc

SEQ ID NO: 2289847 - RNA, 23 nt, Human
cagcuccacucugacuggcacag

SEQ ID NO: 2289848 - RNA, 14 nt, Human
cagcuccagcugcu

SEQ ID NO: 2289849 - RNA, 15 nt, Human
cagcuccacccuggc

SEQ ID NO: 2289850 - RNA, 13 nt, Human
cagcuccacccug

SEQ ID NO: 2289851 - RNA, 22 nt, Human
cagcuccagcucaccagcccca

SEQ ID NO: 2289852 - RNA, 19 nt, Human
cagcuccacucugacuggc

SEQ ID NO: 2289853 - RNA, 17 nt, Human
cagcuccagguggcucu

SEQ ID NO: 2289854 - RNA, 21 nt, Human
cagcuccagguggcucugagg

SEQ ID NO: 2289855 - RNA, 21 nt, Human
cagcucccaaggcucugagca

SEQ ID NO: 2289856 - RNA, 16 nt, Human
cagcuccagcucacca

SEQ ID NO: 2289857 - RNA, 17 nt, Human
cagcuccagcucaccag

SEQ ID NO: 2289858 - RNA, 18 nt, Human
cagcuccagcucaccagc

SEQ ID NO: 2289859 - RNA, 20 nt, Human
cagcuccagcucaccagccc

SEQ ID NO: 2289860 - RNA, 16 nt, Human
cagaggggcaggcccu

SEQ ID NO: 2289861 - RNA, 18 nt, Human
cagaggggcaggcccugc

SEQ ID NO: 2289862 - RNA, 19 nt, Human
cagaggggcaggcccugca

SEQ ID NO: 2289863 - RNA, 20 nt, Human
cagaggggcaggcccugcac

SEQ ID NO: 2289864 - RNA, 23 nt, Human
cagaggggaaaccaguguagccu

SEQ ID NO: 2289865 - RNA, 22 nt, Human
cagagggccugcaagggaguga

SEQ ID NO: 2289866 - RNA, 20 nt, Human
cagagcuggggcugagggau

SEQ ID NO: 2289867 - RNA, 14 nt, Human
cagagcugggaggg

SEQ ID NO: 2289868 - RNA, 13 nt, Human
cagagcuggggcu

SEQ ID NO: 2289869 - RNA, 22 nt, Human
cagagcuguuuauggccucagc

SEQ ID NO: 2289870 - RNA, 13 nt, Human
cagagcuucccug

SEQ ID NO: 2289871 - RNA, 18 nt, Human
cagagcuucccugacuca

SEQ ID NO: 2289872 - RNA, 14 nt, Human
cagagcuucccuga

SEQ ID NO: 2289873 - RNA, 21 nt, Human
cagagcuguuuauggccucag

SEQ ID NO: 2289874 - RNA, 20 nt, Human
cagagcuguuuauggccuca

SEQ ID NO: 2289875 - RNA, 19 nt, Human
cagagcuguuuauggccuc

SEQ ID NO: 2289876 - RNA, 22 nt, Human
cagagcuguggacuuuguucac

SEQ ID NO: 2289877 - RNA, 20 nt, Human
cagagcugggauguuucugu

SEQ ID NO: 2289878 - RNA, 16 nt, Human
cagagcugccaccugc

SEQ ID NO: 2289879 - RNA, 18 nt, Human
cagagcugccaccugccu

SEQ ID NO: 2289880 - RNA, 23 nt, Human
cagaaguuugagaucagccuggg

SEQ ID NO: 2289881 - RNA, 22 nt, Human
cagaaguuugagaucagccugg

SEQ ID NO: 2289882 - RNA, 20 nt, Human
cagaaguuugagaucagccu

SEQ ID NO: 2289883 - RNA, 23 nt, Human
cagaaguuucugccgcagcccug

SEQ ID NO: 2289884 - RNA, 19 nt, Human
cagaaguuucugccgcagc

SEQ ID NO: 2289885 - RNA, 22 nt, Human
cagauauuuauauuuuuauuuu

SEQ ID NO: 2289886 - RNA, 21 nt, Human
cagauauuuauauuuuuauuu

SEQ ID NO: 2289887 - RNA, 20 nt, Human
cagauauuuauauuuuuauu

SEQ ID NO: 2289888 - RNA, 16 nt, Human
cagauauuuauauuuu

SEQ ID NO: 2289889 - RNA, 14 nt, Human
cagauauuuauauu

SEQ ID NO: 2289890 - RNA, 12 nt, Human
cagauauuuaua

SEQ ID NO: 2289891 - RNA, 11 nt, Human
cagauauuuau

SEQ ID NO: 2289892 - RNA, 14 nt, Human
cagagucagcagaa

SEQ ID NO: 2289893 - RNA, 15 nt, Human
cagauauuuuuucag

SEQ ID NO: 2289894 - RNA, 13 nt, Human
cagagucagcaga

SEQ ID NO: 2289895 - RNA, 21 nt, Human
cagagucacacgggggcagcu

SEQ ID NO: 2289896 - RNA, 20 nt, Human
cagaguauuugaaaaaugua

SEQ ID NO: 2289897 - RNA, 20 nt, Human
cagaguauggagcucagaga

SEQ ID NO: 2289898 - RNA, 20 nt, Human
cagagucagaaguuucugcc

SEQ ID NO: 2289899 - RNA, 22 nt, Human
cagaggggcaggcccugcacug

SEQ ID NO: 2289900 - RNA, 13 nt, Human
cagaguaugaaca

SEQ ID NO: 2289901 - RNA, 21 nt, Human
cagaguaugaacaccugggcu

SEQ ID NO: 2289902 - RNA, 14 nt, Human
cagaguauggagcu

SEQ ID NO: 2289903 - RNA, 18 nt, Human
cagaggggguggccuccc

SEQ ID NO: 2289904 - RNA, 17 nt, Human
cagaggggguggccucc

SEQ ID NO: 2289905 - RNA, 19 nt, Human
cagaggggguggccuccca

SEQ ID NO: 2289906 - RNA, 20 nt, Human
cagaggggguggccucccaa

SEQ ID NO: 2289907 - RNA, 20 nt, Human
cagcaccuacaguguacagu

SEQ ID NO: 2289908 - RNA, 21 nt, Human
cagcagguccccagcuuuggc

SEQ ID NO: 2289909 - RNA, 22 nt, Human
cagcagggucuuuucaucuggg

SEQ ID NO: 2289910 - RNA, 20 nt, Human
cagcagggucuuuucaucug

SEQ ID NO: 2289911 - RNA, 21 nt, Human
cagcagggucuuuucaucugg

SEQ ID NO: 2289912 - RNA, 19 nt, Human
cagcaggugcugcuacccu

SEQ ID NO: 2289913 - RNA, 23 nt, Human
cagcaggugcugcuacccucccu

SEQ ID NO: 2289914 - RNA, 19 nt, Human
cagcaguaccuauaaagua

SEQ ID NO: 2289915 - RNA, 11 nt, Human
cagcaggugcu

SEQ ID NO: 2289916 - RNA, 14 nt, Human
cagcaggugcugcu

SEQ ID NO: 2289917 - RNA, 15 nt, Human
cagcaggugcugcua

SEQ ID NO: 2289918 - RNA, 17 nt, Human
cagcaggugcugcuacc

SEQ ID NO: 2289919 - RNA, 15 nt, Human
cagcaccuacagugu

SEQ ID NO: 2289920 - RNA, 18 nt, Human
cagcaccguucugugcac

SEQ ID NO: 2289921 - RNA, 17 nt, Human
cagcaccguucugugca

SEQ ID NO: 2289922 - RNA, 16 nt, Human
cagcaccguucugugc

SEQ ID NO: 2289923 - RNA, 12 nt, Human
cagcacccugca

SEQ ID NO: 2289924 - RNA, 16 nt, Human
cagcacccgggcucag

SEQ ID NO: 2289925 - RNA, 13 nt, Human
cagcacagccaac

SEQ ID NO: 2289926 - RNA, 13 nt, Human
cagcacagcaagg

SEQ ID NO: 2289927 - RNA, 19 nt, Human
cagcacagcaaggaggcug

SEQ ID NO: 2289928 - RNA, 21 nt, Human
cagcacagcaaggaggcuggc

SEQ ID NO: 2289929 - RNA, 19 nt, Human
cagcaccccuuccaugugg

SEQ ID NO: 2289930 - RNA, 22 nt, Human
cagcaccccuuccauguggaga

SEQ ID NO: 2289931 - RNA, 23 nt, Human
cagcaccccuuccauguggagaa

SEQ ID NO: 2289932 - RNA, 12 nt, Human
cagcacagagag

SEQ ID NO: 2289933 - RNA, 16 nt, Human
cagcacagagaagaca

SEQ ID NO: 2289934 - RNA, 17 nt, Human
cagcacagagaagacaa

SEQ ID NO: 2289935 - RNA, 14 nt, Human
cagcacagagaaga

SEQ ID NO: 2289936 - RNA, 19 nt, Human
cagcacacagggcagugag

SEQ ID NO: 2289937 - RNA, 18 nt, Human
cagcacacagggcaguga

SEQ ID NO: 2289938 - RNA, 13 nt, Human
cagcacagagagg

SEQ ID NO: 2289939 - RNA, 17 nt, Human
cagcacagagagggggc

SEQ ID NO: 2289940 - RNA, 20 nt, Human
cagcacagagagggggccac

SEQ ID NO: 2289941 - RNA, 16 nt, Human
cagcacagagaccccc

SEQ ID NO: 2289942 - RNA, 22 nt, Human
cagcacagccucuuagaugcag

SEQ ID NO: 2289943 - RNA, 14 nt, Human
cagcauauuuauag

SEQ ID NO: 2289944 - RNA, 12 nt, Human
cagcauauuuau

SEQ ID NO: 2289945 - RNA, 22 nt, Human
cagcagugaaaacaagugcugg

SEQ ID NO: 2289946 - RNA, 22 nt, Human
cagcaguugaaaagacuccaaa

SEQ ID NO: 2289947 - RNA, 23 nt, Human
cagcauauucaggaagcucaggg

SEQ ID NO: 2289948 - RNA, 19 nt, Human
cagcauauucaggaagcuc

SEQ ID NO: 2289949 - RNA, 22 nt, Human
cagcauauucaggaagcucagg

SEQ ID NO: 2289950 - RNA, 14 nt, Human
cagcagugaaaaca

SEQ ID NO: 2289951 - RNA, 15 nt, Human
cagcagugaaaacaa

SEQ ID NO: 2289952 - RNA, 17 nt, Human
cagcagugaaaacaagu

SEQ ID NO: 2289953 - RNA, 23 nt, Human
cagcagugaaaacaagugcuggc

SEQ ID NO: 2289954 - RNA, 17 nt, Human
cagcaguugaaaagacu

SEQ ID NO: 2289955 - RNA, 21 nt, Human
cagcaguugaaaagacuccaa

SEQ ID NO: 2289956 - RNA, 20 nt, Human
cagcaguugaaaagacucca

SEQ ID NO: 2289957 - RNA, 18 nt, Human
cagccagcagccagcucu

SEQ ID NO: 2289958 - RNA, 17 nt, Human
cagccagcagccagcuc

SEQ ID NO: 2289959 - RNA, 18 nt, Human
cagcauauuuauagcaau

SEQ ID NO: 2289960 - RNA, 22 nt, Human
cagcauauuuguauaguugcuu

SEQ ID NO: 2289961 - RNA, 21 nt, Human
cagccagcagccagcucucag

SEQ ID NO: 2289962 - RNA, 19 nt, Human
cagccagcagccagcucuc

SEQ ID NO: 2289963 - RNA, 12 nt, Human
cagccaggagcu

SEQ ID NO: 2289964 - RNA, 14 nt, Human
cagccaggagcugg

SEQ ID NO: 2289965 - RNA, 11 nt, Human
cagccaggagc

SEQ ID NO: 2289966 - RNA, 22 nt, Human
cagccaggagcugggcagaagg

SEQ ID NO: 2289967 - RNA, 15 nt, Human
cagccaggagcuggg

SEQ ID NO: 2289968 - RNA, 16 nt, Human
cagccaggagcugggc

SEQ ID NO: 2289969 - RNA, 22 nt, Human
cagccaggccacaagacccuug

SEQ ID NO: 2289970 - RNA, 12 nt, Human
cagccaggccac

SEQ ID NO: 2289971 - RNA, 13 nt, Human
cagccaggccaca

SEQ ID NO: 2289972 - RNA, 14 nt, Human
ccaccagucacugu

SEQ ID NO: 2289973 - RNA, 18 nt, Human
ccaccaucaugucuggcu

SEQ ID NO: 2289974 - RNA, 19 nt, Human
ccaccaucaugucuggcua

SEQ ID NO: 2289975 - RNA, 14 nt, Human
ccaccauccugcag

SEQ ID NO: 2289976 - RNA, 15 nt, Human
ccaccauccugcagc

SEQ ID NO: 2289977 - RNA, 15 nt, Human
ccaccgcugccuaag

SEQ ID NO: 2289978 - RNA, 14 nt, Human
ccaccgcugccuaa

SEQ ID NO: 2289979 - RNA, 13 nt, Human
ccaccgcugccua

SEQ ID NO: 2289980 - RNA, 21 nt, Human
ccaccgcuccccagcccaggg

SEQ ID NO: 2289981 - RNA, 21 nt, Human
ccaccgcugccuaaguggcug

SEQ ID NO: 2289982 - RNA, 19 nt, Human
ccaccgggcugggagcucu

SEQ ID NO: 2289983 - RNA, 17 nt, Human
ccaccgcuccccagccc

SEQ ID NO: 2289984 - RNA, 15 nt, Human
ccaccgcuccccagc

SEQ ID NO: 2289985 - RNA, 14 nt, Human
ccaccgcuccccag

SEQ ID NO: 2289986 - RNA, 17 nt, Human
ccaccgccuccuacagc

SEQ ID NO: 2289987 - RNA, 15 nt, Human
ccaccaugcccagcu

SEQ ID NO: 2289988 - RNA, 16 nt, Human
ccaccaugccaggcua

SEQ ID NO: 2289989 - RNA, 22 nt, Human
ccaccaucuuugcagguugcuu

SEQ ID NO: 2289990 - RNA, 12 nt, Human
ccaccucacccc

SEQ ID NO: 2289991 - RNA, 14 nt, Human
ccaccucaccccac

SEQ ID NO: 2289992 - RNA, 20 nt, Human
ccaccuaucucgugggagag

SEQ ID NO: 2289993 - RNA, 21 nt, Human
ccaccuaucucgugggagagc

SEQ ID NO: 2289994 - RNA, 21 nt, Human
ccaccuaguggcuguccagug

SEQ ID NO: 2289995 - RNA, 22 nt, Human
ccaccuaguggcuguccagugc

SEQ ID NO: 2289996 - RNA, 23 nt, Human
ccaccuaguggcuguccagugcc

SEQ ID NO: 2289997 - RNA, 18 nt, Human
ccaccuaucucgugggag

SEQ ID NO: 2289998 - RNA, 22 nt, Human
ccaccuaggccacuccuccaaa

SEQ ID NO: 2289999 - RNA, 15 nt, Human
ccaccuaguggcugu

SEQ ID NO: 2290000 - RNA, 20 nt, Human
ccaccuaggccacuccucca

SEQ ID NO: 2290001 - RNA, 18 nt, Human
ccaccuaggccacuccuc

SEQ ID NO: 2290002 - RNA, 16 nt, Human
ccaccuaguggcuguc

SEQ ID NO: 2290003 - RNA, 18 nt, Human
ccaccuaguggcugucca

SEQ ID NO: 2290004 - RNA, 19 nt, Human
ccaccuaguggcuguccag

SEQ ID NO: 2290005 - RNA, 20 nt, Human
ccaccuaguggcuguccagu

SEQ ID NO: 2290006 - RNA, 17 nt, Human
ccaccuaggccacuccu

SEQ ID NO: 2290007 - RNA, 16 nt, Human
ccaccuaggccacucc

SEQ ID NO: 2290008 - RNA, 23 nt, Human
ccaccuagcagcaccguucugug

SEQ ID NO: 2290009 - RNA, 14 nt, Human
ccaccuagcagcac

SEQ ID NO: 2290010 - RNA, 13 nt, Human
ccaccuagcagca

SEQ ID NO: 2290011 - RNA, 21 nt, Human
ccaccuagacuguaaaccucu

SEQ ID NO: 2290012 - RNA, 12 nt, Human
ccaccuuggcug

SEQ ID NO: 2290013 - RNA, 14 nt, Human
ccaccuuggcugca

SEQ ID NO: 2290014 - RNA, 15 nt, Human
ccaccuuggcugcag

SEQ ID NO: 2290015 - RNA, 16 nt, Human
ccaccuuggcugcagg

SEQ ID NO: 2290016 - RNA, 18 nt, Human
ccacgcuggaccuugaac

SEQ ID NO: 2290017 - RNA, 17 nt, Human
ccacgccuguaauccca

SEQ ID NO: 2290018 - RNA, 21 nt, Human
ccacgcccuccccuccccugc

SEQ ID NO: 2290019 - RNA, 22 nt, Human
ccacgcccuccccuccccugcu

SEQ ID NO: 2290020 - RNA, 18 nt, Human
ccaccuuggcugcaggga

SEQ ID NO: 2290021 - RNA, 19 nt, Human
ccaccuuggcugcagggag

SEQ ID NO: 2290022 - RNA, 10 nt, Human
ccaccucagc

SEQ ID NO: 2290023 - RNA, 15 nt, Human
ccaccucacuccugu

SEQ ID NO: 2290024 - RNA, 16 nt, Human
ccaccucacuccuguu

SEQ ID NO: 2290025 - RNA, 18 nt, Human
ccaccucacuccuguuac

SEQ ID NO: 2290026 - RNA, 17 nt, Human
ccaccuuguuggagccu

SEQ ID NO: 2290027 - RNA, 18 nt, Human
ccaccuuguuggagccug

SEQ ID NO: 2290028 - RNA, 19 nt, Human
ccaccuuguuggagccugc

SEQ ID NO: 2290029 - RNA, 17 nt, Human
ccaccuuuauuaaaauc

SEQ ID NO: 2290030 - RNA, 22 nt, Human
ccaccuuguuggagccugcagg

SEQ ID NO: 2290031 - RNA, 20 nt, Human
ccaccuuguuggagccugca

SEQ ID NO: 2290032 - RNA, 21 nt, Human
ccaccuuguuggagccugcag

SEQ ID NO: 2290033 - RNA, 16 nt, Human
ccacgacugucuccau

SEQ ID NO: 2290034 - RNA, 20 nt, Human
ccacgauguggcccuggccu

SEQ ID NO: 2290035 - RNA, 17 nt, Human
ccacgauguggcccugg

SEQ ID NO: 2290036 - RNA, 16 nt, Human
ccacgagggucaggac

SEQ ID NO: 2290037 - RNA, 18 nt, Human
ccacgauguggcccuggc

SEQ ID NO: 2290038 - RNA, 13 nt, Human
ccacgcacuccau

SEQ ID NO: 2290039 - RNA, 13 nt, Human
ccacgcccccacu

SEQ ID NO: 2290040 - RNA, 21 nt, Human
ccacacuggacuccggcccuc

SEQ ID NO: 2290041 - RNA, 22 nt, Human
ccacacuggacuccggcccucc

SEQ ID NO: 2290042 - RNA, 19 nt, Human
ccacacuggggugccgccu

SEQ ID NO: 2290043 - RNA, 20 nt, Human
ccacacuggggugccgccug

SEQ ID NO: 2290044 - RNA, 16 nt, Human
ccacacuucaggcucu

SEQ ID NO: 2290045 - RNA, 20 nt, Human
ccacacuucaggcucuucuc

SEQ ID NO: 2290046 - RNA, 13 nt, Human
ccacacuggugac

SEQ ID NO: 2290047 - RNA, 22 nt, Human
ccacacuggggugccgccugcc

SEQ ID NO: 2290048 - RNA, 23 nt, Human
ccacacuggggugccgccugccc

SEQ ID NO: 2290049 - RNA, 14 nt, Human
ccacacuggugacu

SEQ ID NO: 2290050 - RNA, 21 nt, Human
ccacacuucaggcucuucucc

SEQ ID NO: 2290051 - RNA, 20 nt, Human
ccacagaagccaggagcaaa

SEQ ID NO: 2290052 - RNA, 21 nt, Human
ccacagaagccaggagcaaau

SEQ ID NO: 2290053 - RNA, 22 nt, Human
ccacagaagccaggagcaaaug

SEQ ID NO: 2290054 - RNA, 16 nt, Human
ccacagaagcuccagg

SEQ ID NO: 2290055 - RNA, 21 nt, Human
ccacagacaagguagcccugg

SEQ ID NO: 2290056 - RNA, 11 nt, Human
ccacagacaca

SEQ ID NO: 2290057 - RNA, 12 nt, Human
ccacagacacac

SEQ ID NO: 2290058 - RNA, 15 nt, Human
ccacagacaagguag

SEQ ID NO: 2290059 - RNA, 18 nt, Human
ccacagaagcuccaggua

SEQ ID NO: 2290060 - RNA, 22 nt, Human
ccacagagaaaguacuucucca

SEQ ID NO: 2290061 - RNA, 21 nt, Human
ccacagacacacacacgcacg

SEQ ID NO: 2290062 - RNA, 13 nt, Human
ccacagacacaca

SEQ ID NO: 2290063 - RNA, 14 nt, Human
ccacagacacacac

SEQ ID NO: 2290064 - RNA, 15 nt, Human
ccacagacacacaca

SEQ ID NO: 2290065 - RNA, 20 nt, Human
ccacagacacacacacgcac

SEQ ID NO: 2290066 - RNA, 15 nt, Human
ccacagcccugucag

SEQ ID NO: 2290067 - RNA, 14 nt, Human
ccacagcccuguca

SEQ ID NO: 2290068 - RNA, 13 nt, Human
ccacagcccuguc

SEQ ID NO: 2290069 - RNA, 21 nt, Human
ccacagcccacguccugucag

SEQ ID NO: 2290070 - RNA, 14 nt, Human
ccacagcccacguc

SEQ ID NO: 2290071 - RNA, 17 nt, Human
ccacagcccacguccug

SEQ ID NO: 2290072 - RNA, 18 nt, Human
ccacagcccacguccugu

SEQ ID NO: 2290073 - RNA, 19 nt, Human
ccacagcccacguccuguc

SEQ ID NO: 2290074 - RNA, 19 nt, Human
ccacagagagucccacugc

SEQ ID NO: 2290075 - RNA, 14 nt, Human
ccacagagcgggga

SEQ ID NO: 2290076 - RNA, 13 nt, Human
ccacagagagucc

SEQ ID NO: 2290077 - RNA, 18 nt, Human
ccacagagagucccacug

SEQ ID NO: 2290078 - RNA, 20 nt, Human
ccacagccaucccagccuug

SEQ ID NO: 2290079 - RNA, 13 nt, Human
ccacagccauccc

SEQ ID NO: 2290080 - RNA, 20 nt, Human
ccacagcccugucagugcag

SEQ ID NO: 2290081 - RNA, 21 nt, Human
ccacagcccugucagugcagc

SEQ ID NO: 2290082 - RNA, 23 nt, Human
ccacagcccugucagugcagccc

SEQ ID NO: 2290083 - RNA, 18 nt, Human
ccacagccgcagccuccc

SEQ ID NO: 2290084 - RNA, 16 nt, Human
ccaccaccccccacuc

SEQ ID NO: 2290085 - RNA, 20 nt, Human
ccaccaccccccacucugug

SEQ ID NO: 2290086 - RNA, 15 nt, Human
ccacagccgcagccu

SEQ ID NO: 2290087 - RNA, 12 nt, Human
ccacagccgcag

SEQ ID NO: 2290088 - RNA, 22 nt, Human
ccaccaccuaggccacuccucc

SEQ ID NO: 2290089 - RNA, 12 nt, Human
ccaccaccuccc

SEQ ID NO: 2290090 - RNA, 21 nt, Human
ccaccaccuaggccacuccuc

SEQ ID NO: 2290091 - RNA, 20 nt, Human
ccaccaccuaggccacuccu

SEQ ID NO: 2290092 - RNA, 18 nt, Human
ccaccaccuaggccacuc

SEQ ID NO: 2290093 - RNA, 12 nt, Human
ccaccaccuagg

SEQ ID NO: 2290094 - RNA, 24 nt, Human
ccaccaccccccacucugugccug

SEQ ID NO: 2290095 - RNA, 13 nt, Human
ccaccacccugag

SEQ ID NO: 2290096 - RNA, 20 nt, Human
ccaccacgauguggcccugg

SEQ ID NO: 2290097 - RNA, 19 nt, Human
ccaccacgauguggcccug

SEQ ID NO: 2290098 - RNA, 17 nt, Human
ccaccaccucccucacc

SEQ ID NO: 2290099 - RNA, 15 nt, Human
ccaccacgcccggcu

SEQ ID NO: 2290100 - RNA, 21 nt, Human
ccaccaggcuggcgcagccaa

SEQ ID NO: 2290101 - RNA, 23 nt, Human
ccaccaggcuggcgcagccaagg

SEQ ID NO: 2290102 - RNA, 18 nt, Human
ccaccagucugacuguuu

SEQ ID NO: 2290103 - RNA, 22 nt, Human
ccaccaggcugcucagggcugg

SEQ ID NO: 2290104 - RNA, 14 nt, Human
ccaccacuggccac

SEQ ID NO: 2290105 - RNA, 15 nt, Human
ccaccacuggccacc

SEQ ID NO: 2290106 - RNA, 12 nt, Human
ccaccaggcugg

SEQ ID NO: 2290107 - RNA, 18 nt, Human
ccaccaggcuggcgcagc

SEQ ID NO: 2290108 - RNA, 19 nt, Human
ccaccaggcuggcgcagcc

SEQ ID NO: 2290109 - RNA, 20 nt, Human
ccaccaggcuggcgcagcca

SEQ ID NO: 2290110 - RNA, 20 nt, Human
ccaccacuaggacucugagg

SEQ ID NO: 2290111 - RNA, 17 nt, Human
ccaccacuaggacucug

SEQ ID NO: 2290112 - RNA, 21 nt, Human
ccaccacgauguggcccuggc

SEQ ID NO: 2290113 - RNA, 16 nt, Human
ccaccacggccacugg

SEQ ID NO: 2290114 - RNA, 19 nt, Human
ccaccacggccacuggcca

SEQ ID NO: 2290115 - RNA, 20 nt, Human
ccacuccucugacucagggc

SEQ ID NO: 2290116 - RNA, 13 nt, Human
ccacuccucugac

SEQ ID NO: 2290117 - RNA, 14 nt, Human
ccacuccucugacu

SEQ ID NO: 2290118 - RNA, 23 nt, Human
cauugcuuugaagcaguuguguc

SEQ ID NO: 2290119 - RNA, 15 nt, Human
cauugcuuucugaaa

SEQ ID NO: 2290120 - RNA, 16 nt, Human
cauugcuuugaagcag

SEQ ID NO: 2290121 - RNA, 18 nt, Human
cauugcuuugaagcaguu

SEQ ID NO: 2290122 - RNA, 22 nt, Human
cauugcuuugaagcaguugugu

SEQ ID NO: 2290123 - RNA, 14 nt, Human
cauugcuuucugaa

SEQ ID NO: 2290124 - RNA, 12 nt, Human
cauugcuuucug

SEQ ID NO: 2290125 - RNA, 17 nt, Human
cauugcuuuacugucaa

SEQ ID NO: 2290126 - RNA, 22 nt, Human
cauugcuugugccacacccucc

SEQ ID NO: 2290127 - RNA, 13 nt, Human
cauuguaaaccac

SEQ ID NO: 2290128 - RNA, 21 nt, Human
cauuguaaaccacaaggcugu

SEQ ID NO: 2290129 - RNA, 19 nt, Human
cauuguaaauaguauuuga

SEQ ID NO: 2290130 - RNA, 17 nt, Human
cauuuauaauguuugcu

SEQ ID NO: 2290131 - RNA, 14 nt, Human
cauuuauaauguuu

SEQ ID NO: 2290132 - RNA, 21 nt, Human
cauuuauaaagcuaaaauaac

SEQ ID NO: 2290133 - RNA, 18 nt, Human
cauuuauaaagcuaaaau

SEQ ID NO: 2290134 - RNA, 23 nt, Human
cauuuaguuugauuauucagugu

SEQ ID NO: 2290135 - RNA, 21 nt, Human
cauuuauaauguuugcuauug

SEQ ID NO: 2290136 - RNA, 15 nt, Human
cauuuauacaaauua

SEQ ID NO: 2290137 - RNA, 12 nt, Human
cauuuauacaaa

SEQ ID NO: 2290138 - RNA, 20 nt, Human
cauuuauacaaauuagaaaa

SEQ ID NO: 2290139 - RNA, 19 nt, Human
cauuuauacaaauuagaaa

SEQ ID NO: 2290140 - RNA, 18 nt, Human
cauuuauacaaauuagaa

SEQ ID NO: 2290141 - RNA, 17 nt, Human
cauuuauacaaauuaga

SEQ ID NO: 2290142 - RNA, 12 nt, Human
cauuuauauauu

SEQ ID NO: 2290143 - RNA, 13 nt, Human
cauuuauauauug

SEQ ID NO: 2290144 - RNA, 11 nt, Human
cauuuauacuc

SEQ ID NO: 2290145 - RNA, 15 nt, Human
cauuuauacucuuuu

SEQ ID NO: 2290146 - RNA, 13 nt, Human
cauuuauauagau

SEQ ID NO: 2290147 - RNA, 15 nt, Human
cauugguucuuguau

SEQ ID NO: 2290148 - RNA, 16 nt, Human
cauuggaagaccccac

SEQ ID NO: 2290149 - RNA, 18 nt, Human
cauugguucuuguauuaa

SEQ ID NO: 2290150 - RNA, 15 nt, Human
cauuggaagacccca

SEQ ID NO: 2290151 - RNA, 22 nt, Human
cauugguucuuguauuaagaau

SEQ ID NO: 2290152 - RNA, 14 nt, Human
cauuuauucugcuc

SEQ ID NO: 2290153 - RNA, 15 nt, Human
cauuuauucugcuca

SEQ ID NO: 2290154 - RNA, 23 nt, Human
cauuuaugauuuaauaaaauaau

SEQ ID NO: 2290155 - RNA, 17 nt, Human
cauuuaugauuuaauaa

SEQ ID NO: 2290156 - RNA, 18 nt, Human
cauuuaugauuuaauaaa

SEQ ID NO: 2290157 - RNA, 20 nt, Human
cauuuaugauuuaauaaaau

SEQ ID NO: 2290158 - RNA, 21 nt, Human
cauuuaugauuuaauaaaaua

SEQ ID NO: 2290159 - RNA, 15 nt, Human
cauuuauauauugaa

SEQ ID NO: 2290160 - RNA, 22 nt, Human
cauuuauauauugaauuaauau

SEQ ID NO: 2290161 - RNA, 14 nt, Human
cauuuauguuuauu

SEQ ID NO: 2290162 - RNA, 20 nt, Human
cauuuauggucaacacuuaa

SEQ ID NO: 2290163 - RNA, 15 nt, Human
cauuucaggagcagc

SEQ ID NO: 2290164 - RNA, 21 nt, Human
cauuuauggucaacacuuaag

SEQ ID NO: 2290165 - RNA, 16 nt, Human
cauuucaggagcagcc

SEQ ID NO: 2290166 - RNA, 22 nt, Human
cauuucaggagcagccucagaa

SEQ ID NO: 2290167 - RNA, 13 nt, Human
cauuucaggaggg

SEQ ID NO: 2290168 - RNA, 18 nt, Human
cauuucaucuauuucuga

SEQ ID NO: 2290169 - RNA, 17 nt, Human
cauuucaucuauuucug

SEQ ID NO: 2290170 - RNA, 16 nt, Human
cauuucaucuauuucu

SEQ ID NO: 2290171 - RNA, 15 nt, Human
cauuucaucuauuuc

SEQ ID NO: 2290172 - RNA, 14 nt, Human
cauuucaucuauuu

SEQ ID NO: 2290173 - RNA, 20 nt, Human
cauuucaucuauuucugaga

SEQ ID NO: 2290174 - RNA, 15 nt, Human
cauuucauuccuaac

SEQ ID NO: 2290175 - RNA, 21 nt, Human
cauuucauuccuaacacagca

SEQ ID NO: 2290176 - RNA, 18 nt, Human
cauuucauuccuaacaca

SEQ ID NO: 2290177 - RNA, 17 nt, Human
cauuuggaauacuuuuu

SEQ ID NO: 2290178 - RNA, 12 nt, Human
cauuucauugua

SEQ ID NO: 2290179 - RNA, 15 nt, Human
cauuuggaauacuuu

SEQ ID NO: 2290180 - RNA, 21 nt, Human
cauuuggagacacaacuauuu

SEQ ID NO: 2290181 - RNA, 15 nt, Human
cauuuggauuggaug

SEQ ID NO: 2290182 - RNA, 23 nt, Human
cauuuggaguguuccccuuccac

SEQ ID NO: 2290183 - RNA, 23 nt, Human
cauuuggauuggggucccucuaa

SEQ ID NO: 2290184 - RNA, 14 nt, Human
cauuuggauugggg

SEQ ID NO: 2290185 - RNA, 20 nt, Human
cauuuggcaaugccaucauc

SEQ ID NO: 2290186 - RNA, 17 nt, Human
cauuugucacacacuuu

SEQ ID NO: 2290187 - RNA, 22 nt, Human
cauuugucuauucuccagcuga

SEQ ID NO: 2290188 - RNA, 16 nt, Human
cauuugugaaaugaug

SEQ ID NO: 2290189 - RNA, 14 nt, Human
cauuugugaaauga

SEQ ID NO: 2290190 - RNA, 17 nt, Human
cauuuuuuaaggaaaca

SEQ ID NO: 2290191 - RNA, 18 nt, Human
cauuuuuuaaggaaacaa

SEQ ID NO: 2290192 - RNA, 19 nt, Human
cauuuuuuaaaugcaccug

SEQ ID NO: 2290193 - RNA, 16 nt, Human
cauuuuuuaaaugcac

SEQ ID NO: 2290194 - RNA, 15 nt, Human
cauuuuuuaaaugca

SEQ ID NO: 2290195 - RNA, 18 nt, Human
ccaaucccagcuaccuca

SEQ ID NO: 2290196 - RNA, 16 nt, Human
ccaauccccuccuugg

SEQ ID NO: 2290197 - RNA, 17 nt, Human
ccaauccccuccuuggg

SEQ ID NO: 2290198 - RNA, 16 nt, Human
ccaaggccaaaggaag

SEQ ID NO: 2290199 - RNA, 18 nt, Human
ccaauccucacugggugg

SEQ ID NO: 2290200 - RNA, 17 nt, Human
ccaauccucacugggug

SEQ ID NO: 2290201 - RNA, 12 nt, Human
ccaauccugccc

SEQ ID NO: 2290202 - RNA, 18 nt, Human
ccaaucuaaccacaucaa

SEQ ID NO: 2290203 - RNA, 15 nt, Human
ccaauccucacuggg

SEQ ID NO: 2290204 - RNA, 14 nt, Human
ccaauccuauguuu

SEQ ID NO: 2290205 - RNA, 21 nt, Human
ccaauccccuccuugggcacu

SEQ ID NO: 2290206 - RNA, 13 nt, Human
ccaauccuauguu

SEQ ID NO: 2290207 - RNA, 13 nt, Human
ccaauccugcccc

SEQ ID NO: 2290208 - RNA, 15 nt, Human
ccaaugaaaaaaugu

SEQ ID NO: 2290209 - RNA, 23 nt, Human
ccaaugaaaaaauguauaugcac

SEQ ID NO: 2290210 - RNA, 23 nt, Human
ccaaugaaauacacaaguaaaca

SEQ ID NO: 2290211 - RNA, 24 nt, Human
ccaacggcaagggaacaaguacuu

SEQ ID NO: 2290212 - RNA, 22 nt, Human
ccaacggagagcgccugccccu

SEQ ID NO: 2290213 - RNA, 14 nt, Human
ccaagaaacgucuu

SEQ ID NO: 2290214 - RNA, 18 nt, Human
ccaagaaacugagaccaa

SEQ ID NO: 2290215 - RNA, 13 nt, Human
ccaagaaagcagg

SEQ ID NO: 2290216 - RNA, 13 nt, Human
ccaagaagcccag

SEQ ID NO: 2290217 - RNA, 21 nt, Human
ccaacggagagcgccugcccc

SEQ ID NO: 2290218 - RNA, 22 nt, Human
ccaaaugcuuuaaaaacuauuu

SEQ ID NO: 2290219 - RNA, 22 nt, Human
ccaaauggaaaugggcagagca

SEQ ID NO: 2290220 - RNA, 13 nt, Human
ccaacgucugugc

SEQ ID NO: 2290221 - RNA, 15 nt, Human
ccaacgucugugcca

SEQ ID NO: 2290222 - RNA, 21 nt, Human
ccaaggcagaagcagcagggg

SEQ ID NO: 2290223 - RNA, 17 nt, Human
ccaaggcaaggcaggug

SEQ ID NO: 2290224 - RNA, 22 nt, Human
ccaaggcaaggcaggugccucc

SEQ ID NO: 2290225 - RNA, 23 nt, Human
ccaaggcaaggcaggugccucca

SEQ ID NO: 2290226 - RNA, 15 nt, Human
ccaaggccaaaggaa

SEQ ID NO: 2290227 - RNA, 18 nt, Human
ccaaggaugccccguccc

SEQ ID NO: 2290228 - RNA, 22 nt, Human
ccaagcugggccccagcccacc

SEQ ID NO: 2290229 - RNA, 13 nt, Human
ccaaggcaaggca

SEQ ID NO: 2290230 - RNA, 15 nt, Human
ccaaggcaaggcagg

SEQ ID NO: 2290231 - RNA, 16 nt, Human
ccaaggcaaggcaggu

SEQ ID NO: 2290232 - RNA, 18 nt, Human
ccaagcugggccccagcc

SEQ ID NO: 2290233 - RNA, 19 nt, Human
ccaagcugggccccagccc

SEQ ID NO: 2290234 - RNA, 20 nt, Human
ccaagcugggccccagccca

SEQ ID NO: 2290235 - RNA, 21 nt, Human
ccaagcugggccccagcccac

SEQ ID NO: 2290236 - RNA, 12 nt, Human
ccaagcuggucc

SEQ ID NO: 2290237 - RNA, 19 nt, Human
ccaagcuggucccacucag

SEQ ID NO: 2290238 - RNA, 14 nt, Human
ccaagaagcccagg

SEQ ID NO: 2290239 - RNA, 11 nt, Human
ccaagcugggc

SEQ ID NO: 2290240 - RNA, 12 nt, Human
ccaagcugggcc

SEQ ID NO: 2290241 - RNA, 13 nt, Human
ccaagcugggccc

SEQ ID NO: 2290242 - RNA, 15 nt, Human
ccaagcugggcccca

SEQ ID NO: 2290243 - RNA, 16 nt, Human
ccaagcugggccccag

SEQ ID NO: 2290244 - RNA, 17 nt, Human
ccaagcugggccccagc

SEQ ID NO: 2290245 - RNA, 22 nt, Human
ccaaagugguauagaaaugcug

SEQ ID NO: 2290246 - RNA, 11 nt, Human
ccaaauaaaaa

SEQ ID NO: 2290247 - RNA, 16 nt, Human
ccaaauaaaaacuaaa

SEQ ID NO: 2290248 - RNA, 20 nt, Human
ccaaauaaaaacuaaauugu

SEQ ID NO: 2290249 - RNA, 15 nt, Human
ccaaauaagaaaccu

SEQ ID NO: 2290250 - RNA, 16 nt, Human
ccaaauaagaaaccua

SEQ ID NO: 2290251 - RNA, 17 nt, Human
ccaaauaagaaaccuaa

SEQ ID NO: 2290252 - RNA, 13 nt, Human
ccaaauauguccu

SEQ ID NO: 2290253 - RNA, 12 nt, Human
ccaaaugcagcu

SEQ ID NO: 2290254 - RNA, 15 nt, Human
ccaaauauguccugg

SEQ ID NO: 2290255 - RNA, 15 nt, Human
ccaaauaaugucucu

SEQ ID NO: 2290256 - RNA, 16 nt, Human
ccaaauaaugucucug

SEQ ID NO: 2290257 - RNA, 17 nt, Human
ccaaauaaugucucugu

SEQ ID NO: 2290258 - RNA, 17 nt, Human
ccaaaugcauggugcag

SEQ ID NO: 2290259 - RNA, 22 nt, Human
ccaaaugcauggugcaguugac

SEQ ID NO: 2290260 - RNA, 15 nt, Human
ccaaaugcuuuaaaa

SEQ ID NO: 2290261 - RNA, 18 nt, Human
ccaaaugcagcuuuaaaa

SEQ ID NO: 2290262 - RNA, 15 nt, Human
ccaaaugcagcuuua

SEQ ID NO: 2290263 - RNA, 13 nt, Human
ccaaaugcagcuu

SEQ ID NO: 2290264 - RNA, 22 nt, Human
cauuaugagaggcaaugauugu

SEQ ID NO: 2290265 - RNA, 14 nt, Human
cauuccuucuuuga

SEQ ID NO: 2290266 - RNA, 12 nt, Human
cauuccuguucc

SEQ ID NO: 2290267 - RNA, 13 nt, Human
cauuccuugccug

SEQ ID NO: 2290268 - RNA, 23 nt, Human
cauuccuucuuugauaauguuaa

SEQ ID NO: 2290269 - RNA, 15 nt, Human
cauuccuucuuugau

SEQ ID NO: 2290270 - RNA, 16 nt, Human
cauuccuucuuugaua

SEQ ID NO: 2290271 - RNA, 18 nt, Human
cauuccuucuuugauaau

SEQ ID NO: 2290272 - RNA, 19 nt, Human
cauuccuucuuugauaaug

SEQ ID NO: 2290273 - RNA, 13 nt, Human
cauucggcucccu

SEQ ID NO: 2290274 - RNA, 13 nt, Human
cauucucacuccu

SEQ ID NO: 2290275 - RNA, 14 nt, Human
cauucucaagcccu

SEQ ID NO: 2290276 - RNA, 16 nt, Human
cauucucaagcccugc

SEQ ID NO: 2290277 - RNA, 17 nt, Human
cauucucaagcccugca

SEQ ID NO: 2290278 - RNA, 19 nt, Human
cauucggcucccuggagcc

SEQ ID NO: 2290279 - RNA, 15 nt, Human
cauucggcucccugg

SEQ ID NO: 2290280 - RNA, 18 nt, Human
cauucggcucccuggagc

SEQ ID NO: 2290281 - RNA, 18 nt, Human
cauucuagguuugcaaga

SEQ ID NO: 2290282 - RNA, 14 nt, Human
cauucuauuguuaa

SEQ ID NO: 2290283 - RNA, 14 nt, Human
cauucucacuccua

SEQ ID NO: 2290284 - RNA, 16 nt, Human
cauguugcugaggagu

SEQ ID NO: 2290285 - RNA, 13 nt, Human
cauguugcugcca

SEQ ID NO: 2290286 - RNA, 14 nt, Human
cauguugcugagga

SEQ ID NO: 2290287 - RNA, 15 nt, Human
cauguugcugaggag

SEQ ID NO: 2290288 - RNA, 22 nt, Human
cauuaggugugacugaauuucu

SEQ ID NO: 2290289 - RNA, 17 nt, Human
cauuagggggaacucua

SEQ ID NO: 2290290 - RNA, 16 nt, Human
cauuaugagaggcaau

SEQ ID NO: 2290291 - RNA, 13 nt, Human
cauuaucucaaaa

SEQ ID NO: 2290292 - RNA, 23 nt, Human
cauuaucuagauacuguaucaug

SEQ ID NO: 2290293 - RNA, 12 nt, Human
cauuaucucaaa

SEQ ID NO: 2290294 - RNA, 12 nt, Human
cauguuggccag

SEQ ID NO: 2290295 - RNA, 13 nt, Human
cauguuggccagg

SEQ ID NO: 2290296 - RNA, 19 nt, Human
cauguugagccaggccugg

SEQ ID NO: 2290297 - RNA, 18 nt, Human
caugucagcaucagcuca

SEQ ID NO: 2290298 - RNA, 16 nt, Human
caugucaggccugugu

SEQ ID NO: 2290299 - RNA, 20 nt, Human
cauguccccaaaccugcaag

SEQ ID NO: 2290300 - RNA, 23 nt, Human
cauguugcacacccacucagcuc

SEQ ID NO: 2290301 - RNA, 22 nt, Human
cauguugcacacccacucagcu

SEQ ID NO: 2290302 - RNA, 18 nt, Human
cauguugcacacccacuc

SEQ ID NO: 2290303 - RNA, 18 nt, Human
cauguccaagaagcccag

SEQ ID NO: 2290304 - RNA, 18 nt, Human
caugucagcaaaaagcaa

SEQ ID NO: 2290305 - RNA, 20 nt, Human
caugucagcaaaaagcaaaa

SEQ ID NO: 2290306 - RNA, 22 nt, Human
caugucagcaaaaagcaaaauc

SEQ ID NO: 2290307 - RNA, 23 nt, Human
caugucagcaaaaagcaaaauca

SEQ ID NO: 2290308 - RNA, 21 nt, Human
caugucaggccugugugugaa

SEQ ID NO: 2290309 - RNA, 19 nt, Human
cauguccaagaagcccagg

SEQ ID NO: 2290310 - RNA, 20 nt, Human
cauguccaagaagcccagga

SEQ ID NO: 2290311 - RNA, 15 nt, Human
cauguauaauauuuu

SEQ ID NO: 2290312 - RNA, 18 nt, Human
cauguauaauauuuuuaa

SEQ ID NO: 2290313 - RNA, 20 nt, Human
cauguauaauauuuuuaauu

SEQ ID NO: 2290314 - RNA, 19 nt, Human
cauguaguaucaaauauua

SEQ ID NO: 2290315 - RNA, 20 nt, Human
cauguaguaucaaauauuag

SEQ ID NO: 2290316 - RNA, 21 nt, Human
cauguaguaucaaauauuaga

SEQ ID NO: 2290317 - RNA, 22 nt, Human
cauguaguaucaaauauuagau

SEQ ID NO: 2290318 - RNA, 16 nt, Human
cauguaguaucaaaua

SEQ ID NO: 2290319 - RNA, 17 nt, Human
cauguaguaucaaauau

SEQ ID NO: 2290320 - RNA, 18 nt, Human
cauguaguaucaaauauu

SEQ ID NO: 2290321 - RNA, 20 nt, Human
caugucaccggauccugggu

SEQ ID NO: 2290322 - RNA, 20 nt, Human
caugucaccguggaccuucc

SEQ ID NO: 2290323 - RNA, 22 nt, Human
caugucaccguggaccuuccug

SEQ ID NO: 2290324 - RNA, 23 nt, Human
caugucaccguggaccuuccugc

SEQ ID NO: 2290325 - RNA, 13 nt, Human
caugucacugugg

SEQ ID NO: 2290326 - RNA, 14 nt, Human
caugucacuguggu

SEQ ID NO: 2290327 - RNA, 15 nt, Human
caugucacugugguc

SEQ ID NO: 2290328 - RNA, 16 nt, Human
caugucacuguggucc

SEQ ID NO: 2290329 - RNA, 14 nt, Human
caugucagcaaaaa

SEQ ID NO: 2290330 - RNA, 16 nt, Human
caugucagcaaaaagc

SEQ ID NO: 2290331 - RNA, 17 nt, Human
caugucagcaaaaagca

SEQ ID NO: 2290332 - RNA, 21 nt, Human
cauguaucccaacuccuauaa

SEQ ID NO: 2290333 - RNA, 14 nt, Human
cauguaucuaccuc

SEQ ID NO: 2290334 - RNA, 15 nt, Human
cauguaucaucugga

SEQ ID NO: 2290335 - RNA, 20 nt, Human
cauguaucuaugcauuuucu

SEQ ID NO: 2290336 - RNA, 18 nt, Human
caugucaacuucuggcuc

SEQ ID NO: 2290337 - RNA, 22 nt, Human
caugucaacuucuggcuccuca

SEQ ID NO: 2290338 - RNA, 15 nt, Human
caugaagguuucuga

SEQ ID NO: 2290339 - RNA, 16 nt, Human
caugaaggugucauac

SEQ ID NO: 2290340 - RNA, 18 nt, Human
caugaagguuucugaaaa

SEQ ID NO: 2290341 - RNA, 21 nt, Human
caugacacgaauauugcugau

SEQ ID NO: 2290342 - RNA, 18 nt, Human
caugaaguuuccuuggcu

SEQ ID NO: 2290343 - RNA, 20 nt, Human
caugaaguguguuuccuuca

SEQ ID NO: 2290344 - RNA, 19 nt, Human
caugaagucguugugaggg

SEQ ID NO: 2290345 - RNA, 23 nt, Human
caugacacgaauauugcugaugg

SEQ ID NO: 2290346 - RNA, 23 nt, Human
caugaaguaauaugcacacauuu

SEQ ID NO: 2290347 - RNA, 22 nt, Human
caugaaguaauaugcacacauu

SEQ ID NO: 2290348 - RNA, 19 nt, Human
caugaaguaauaugcacac

SEQ ID NO: 2290349 - RNA, 15 nt, Human
caugaaguaauaugc

SEQ ID NO: 2290350 - RNA, 22 nt, Human
caugaagcccaagugaaaucaa

SEQ ID NO: 2290351 - RNA, 22 nt, Human
caugaaggaugccaagaaguuu

SEQ ID NO: 2290352 - RNA, 24 nt, Human
caugauuaaccacuucagcugacu

SEQ ID NO: 2290353 - RNA, 12 nt, Human
caugcacaaauu

SEQ ID NO: 2290354 - RNA, 18 nt, Human
caugcaauuuauuaaaau

SEQ ID NO: 2290355 - RNA, 22 nt, Human
caugaaguuuccuuggcuggug

SEQ ID NO: 2290356 - RNA, 14 nt, Human
caugcacaccuccc

SEQ ID NO: 2290357 - RNA, 23 nt, Human
caugauuaaccacuucagcugac

SEQ ID NO: 2290358 - RNA, 22 nt, Human
caugauuaaccacuucagcuga

SEQ ID NO: 2290359 - RNA, 20 nt, Human
caugaaguuuccuuggcugg

SEQ ID NO: 2290360 - RNA, 15 nt, Human
caugacauguuauau

SEQ ID NO: 2290361 - RNA, 12 nt, Human
caugacauguua

SEQ ID NO: 2290362 - RNA, 13 nt, Human
caugcuccuggcc

SEQ ID NO: 2290363 - RNA, 12 nt, Human
caugcugcccug

SEQ ID NO: 2290364 - RNA, 13 nt, Human
caugcugcccugu

SEQ ID NO: 2290365 - RNA, 23 nt, Human
caugcuaucucugugugcacaaa

SEQ ID NO: 2290366 - RNA, 16 nt, Human
caugcacgugugugca

SEQ ID NO: 2290367 - RNA, 23 nt, Human
caugcucagcccugacuggugcu

SEQ ID NO: 2290368 - RNA, 18 nt, Human
caugcucaucugcugguc

SEQ ID NO: 2290369 - RNA, 19 nt, Human
caugcucaucugcuggucc

SEQ ID NO: 2290370 - RNA, 15 nt, Human
caugcucagcccuga

SEQ ID NO: 2290371 - RNA, 20 nt, Human
caugcucagcccugacuggu

SEQ ID NO: 2290372 - RNA, 16 nt, Human
caugcucaucugcugg

SEQ ID NO: 2290373 - RNA, 17 nt, Human
caugcucaucugcuggu

SEQ ID NO: 2290374 - RNA, 19 nt, Human
cauggcaucaccuccacca

SEQ ID NO: 2290375 - RNA, 14 nt, Human
caugcugcccugug

SEQ ID NO: 2290376 - RNA, 15 nt, Human
caugcugcccuguga

SEQ ID NO: 2290377 - RNA, 14 nt, Human
cauggccagguggc

SEQ ID NO: 2290378 - RNA, 13 nt, Human
cauggccaggugg

SEQ ID NO: 2290379 - RNA, 18 nt, Human
cauggccaccuuuucagc

SEQ ID NO: 2290380 - RNA, 22 nt, Human
cauggccacuugggucuucccu

SEQ ID NO: 2290381 - RNA, 14 nt, Human
cauccccuggacug

SEQ ID NO: 2290382 - RNA, 19 nt, Human
cauccccgcagugugcacu

SEQ ID NO: 2290383 - RNA, 19 nt, Human
caucccccugcccucgugg

SEQ ID NO: 2290384 - RNA, 14 nt, Human
cauccccuguagag

SEQ ID NO: 2290385 - RNA, 19 nt, Human
cauccccuggacugggagg

SEQ ID NO: 2290386 - RNA, 15 nt, Human
cauccuguguuucua

SEQ ID NO: 2290387 - RNA, 21 nt, Human
cauccuucaagaacucugggc

SEQ ID NO: 2290388 - RNA, 22 nt, Human
cauccuguguuucuagggaaau

SEQ ID NO: 2290389 - RNA, 21 nt, Human
cauccuguguuucuagggaaa

SEQ ID NO: 2290390 - RNA, 12 nt, Human
cauccccccuca

SEQ ID NO: 2290391 - RNA, 21 nt, Human
cauccccauccuccagcuucu

SEQ ID NO: 2290392 - RNA, 12 nt, Human
caucccaucauc

SEQ ID NO: 2290393 - RNA, 23 nt, Human
caucccaguggccucaacccucc

SEQ ID NO: 2290394 - RNA, 20 nt, Human
caucccaguggccucaaccc

SEQ ID NO: 2290395 - RNA, 13 nt, Human
caucccaguggcc

SEQ ID NO: 2290396 - RNA, 13 nt, Human
cauccccccucac

SEQ ID NO: 2290397 - RNA, 14 nt, Human
cauccccccucacc

SEQ ID NO: 2290398 - RNA, 17 nt, Human
cauccccccucaccagg

SEQ ID NO: 2290399 - RNA, 18 nt, Human
cauccccccucaccaggg

SEQ ID NO: 2290400 - RNA, 11 nt, Human
caucccccugc

SEQ ID NO: 2290401 - RNA, 12 nt, Human
caucccccugcc

SEQ ID NO: 2290402 - RNA, 13 nt, Human
caucccccugccc

SEQ ID NO: 2290403 - RNA, 14 nt, Human
caucccccugcccu

SEQ ID NO: 2290404 - RNA, 19 nt, Human
caucccaggggaccacacc

SEQ ID NO: 2290405 - RNA, 14 nt, Human
caucccaggggacc

SEQ ID NO: 2290406 - RNA, 13 nt, Human
caucccaggggac

SEQ ID NO: 2290407 - RNA, 19 nt, Human
caucccaggcuucacccug

SEQ ID NO: 2290408 - RNA, 21 nt, Human
caucccaggacaccacaccca

SEQ ID NO: 2290409 - RNA, 22 nt, Human
caucccaggacaccacacccag

SEQ ID NO: 2290410 - RNA, 23 nt, Human
caucccaggacaccacacccagc

SEQ ID NO: 2290411 - RNA, 19 nt, Human
caucccauaugccugggca

SEQ ID NO: 2290412 - RNA, 15 nt, Human
cauccuucccugucu

SEQ ID NO: 2290413 - RNA, 21 nt, Human
cauccuucccugucugccagg

SEQ ID NO: 2290414 - RNA, 18 nt, Human
cauccuuccucacaccag

SEQ ID NO: 2290415 - RNA, 23 nt, Human
cauccuucaagaacucugggcug

SEQ ID NO: 2290416 - RNA, 22 nt, Human
cauccuucaagaacucugggcu

SEQ ID NO: 2290417 - RNA, 11 nt, Human
cauccuuaaag

SEQ ID NO: 2290418 - RNA, 22 nt, Human
cauccuucccugucugccaggg

SEQ ID NO: 2290419 - RNA, 14 nt, Human
cauccuuccuuccc

SEQ ID NO: 2290420 - RNA, 15 nt, Human
cauccuuccuuccca

SEQ ID NO: 2290421 - RNA, 16 nt, Human
cauccuuccuucccac

SEQ ID NO: 2290422 - RNA, 17 nt, Human
cauccuuccuucccacc

SEQ ID NO: 2290423 - RNA, 19 nt, Human
caucugccccucccccaac

SEQ ID NO: 2290424 - RNA, 20 nt, Human
caucugccgugccuggaucc

SEQ ID NO: 2290425 - RNA, 18 nt, Human
caucugccuuaaaaccaa

SEQ ID NO: 2290426 - RNA, 20 nt, Human
caucugccuuaaaaccaaag

SEQ ID NO: 2290427 - RNA, 12 nt, Human
caucugcuaaua

SEQ ID NO: 2290428 - RNA, 22 nt, Human
caucugcgugacaauaaaacau

SEQ ID NO: 2290429 - RNA, 23 nt, Human
caucugcgugacaauaaaacauu

SEQ ID NO: 2290430 - RNA, 16 nt, Human
caucugcgugacaaua

SEQ ID NO: 2290431 - RNA, 18 nt, Human
caucugcgugacaauaaa

SEQ ID NO: 2290432 - RNA, 19 nt, Human
caucugcgugacaauaaaa

SEQ ID NO: 2290433 - RNA, 21 nt, Human
caucugggaagauuucuaccu

SEQ ID NO: 2290434 - RNA, 14 nt, Human
caucugggaaagac

SEQ ID NO: 2290435 - RNA, 18 nt, Human
caucugggaguccccuuu

SEQ ID NO: 2290436 - RNA, 16 nt, Human
caucugggauucccac

SEQ ID NO: 2290437 - RNA, 19 nt, Human
caucugggaguccccuuuu

SEQ ID NO: 2290438 - RNA, 15 nt, Human
caucugggauuccca

SEQ ID NO: 2290439 - RNA, 13 nt, Human
caucugcucuccu

SEQ ID NO: 2290440 - RNA, 14 nt, Human
caucugcucuccuu

SEQ ID NO: 2290441 - RNA, 15 nt, Human
caucugcucuccuuc

SEQ ID NO: 2290442 - RNA, 12 nt, Human
caucugggaaag

SEQ ID NO: 2290443 - RNA, 13 nt, Human
caucccaggacac

SEQ ID NO: 2290444 - RNA, 14 nt, Human
caucccagccuugg

SEQ ID NO: 2290445 - RNA, 19 nt, Human
caucccaggacaccacacc

SEQ ID NO: 2290446 - RNA, 14 nt, Human
cauccauuccucag

SEQ ID NO: 2290447 - RNA, 15 nt, Human
cauccauuccucagg

SEQ ID NO: 2290448 - RNA, 15 nt, Human
cauccauguuuguaa

SEQ ID NO: 2290449 - RNA, 18 nt, Human
cauccauguuuguaaaac

SEQ ID NO: 2290450 - RNA, 19 nt, Human
cauccauguuuguaaaacu

SEQ ID NO: 2290451 - RNA, 18 nt, Human
cauccauguguggacuca

SEQ ID NO: 2290452 - RNA, 17 nt, Human
cauccauguguggacuc

SEQ ID NO: 2290453 - RNA, 16 nt, Human
cauccauguguggacu

SEQ ID NO: 2290454 - RNA, 19 nt, Human
cauccauggggcugauugu

SEQ ID NO: 2290455 - RNA, 16 nt, Human
caucaggccaggcccu

SEQ ID NO: 2290456 - RNA, 19 nt, Human
caucaggccaggcccucug

SEQ ID NO: 2290457 - RNA, 15 nt, Human
caucaggccaggccc

SEQ ID NO: 2290458 - RNA, 20 nt, Human
caucuggguagcuguaaggc

SEQ ID NO: 2290459 - RNA, 18 nt, Human
caucuggguagcuguaag

SEQ ID NO: 2290460 - RNA, 16 nt, Human
caucuggguagcugua

SEQ ID NO: 2290461 - RNA, 17 nt, Human
caucugggggaguggaa

SEQ ID NO: 2290462 - RNA, 18 nt, Human
caucugggggaguggaau

SEQ ID NO: 2290463 - RNA, 15 nt, Human
caucuggguccuugc

SEQ ID NO: 2290464 - RNA, 17 nt, Human
caucugggcuccuccag

SEQ ID NO: 2290465 - RNA, 16 nt, Human
caucugggcuccucca

SEQ ID NO: 2290466 - RNA, 11 nt, Human
caucugggcuc

SEQ ID NO: 2290467 - RNA, 20 nt, Human
caucugggcuccuccagggu

SEQ ID NO: 2290468 - RNA, 13 nt, Human
caucugggcuccu

SEQ ID NO: 2290469 - RNA, 15 nt, Human
caucugggggagugg

SEQ ID NO: 2290470 - RNA, 16 nt, Human
caucugggggagugga

SEQ ID NO: 2290471 - RNA, 23 nt, Human
cauacacacacacacacagccac

SEQ ID NO: 2290472 - RNA, 13 nt, Human
cauacaccagcau

SEQ ID NO: 2290473 - RNA, 23 nt, Human
cauaauuuguacauauguaaaau

SEQ ID NO: 2290474 - RNA, 21 nt, Human
cauaauuuguacauauguaaa

SEQ ID NO: 2290475 - RNA, 22 nt, Human
cauacacacacacacacagcca

SEQ ID NO: 2290476 - RNA, 21 nt, Human
cauacacacacacacacagcc

SEQ ID NO: 2290477 - RNA, 15 nt, Human
cauacacuuccuucu

SEQ ID NO: 2290478 - RNA, 23 nt, Human
cauacacuuauuggaacucugcu

SEQ ID NO: 2290479 - RNA, 20 nt, Human
cauacaccagcauuccuuuu

SEQ ID NO: 2290480 - RNA, 18 nt, Human
cauacaccagcauuccuu

SEQ ID NO: 2290481 - RNA, 14 nt, Human
cauacaccagcauu

SEQ ID NO: 2290482 - RNA, 20 nt, Human
cauacaccuaugucauuuca

SEQ ID NO: 2290483 - RNA, 15 nt, Human
cagugggagcugccu

SEQ ID NO: 2290484 - RNA, 13 nt, Human
cagugggagaaaa

SEQ ID NO: 2290485 - RNA, 18 nt, Human
cauaauucuaagacuaau

SEQ ID NO: 2290486 - RNA, 18 nt, Human
cauaauucuuguauauua

SEQ ID NO: 2290487 - RNA, 17 nt, Human
cauaauucuuguauauu

SEQ ID NO: 2290488 - RNA, 16 nt, Human
cauaauucuuguauau

SEQ ID NO: 2290489 - RNA, 15 nt, Human
cauaauuuguacaua

SEQ ID NO: 2290490 - RNA, 22 nt, Human
cauagcuuacaagccagcugga

SEQ ID NO: 2290491 - RNA, 13 nt, Human
cauagcuuccaug

SEQ ID NO: 2290492 - RNA, 14 nt, Human
cauagcugucuaga

SEQ ID NO: 2290493 - RNA, 15 nt, Human
cauagcugucuagag

SEQ ID NO: 2290494 - RNA, 18 nt, Human
cauagcuccuucucucuu

SEQ ID NO: 2290495 - RNA, 13 nt, Human
cauagcacuuccc

SEQ ID NO: 2290496 - RNA, 14 nt, Human
cauagcacuucccc

SEQ ID NO: 2290497 - RNA, 14 nt, Human
cauagcuccugcuc

SEQ ID NO: 2290498 - RNA, 15 nt, Human
cauagcuccugcucc

SEQ ID NO: 2290499 - RNA, 20 nt, Human
cauagcuccugcuccacagc

SEQ ID NO: 2290500 - RNA, 17 nt, Human
cauagcuccuucucucu

SEQ ID NO: 2290501 - RNA, 19 nt, Human
cauagcagagaaugaaagg

SEQ ID NO: 2290502 - RNA, 22 nt, Human
cauagcagagaaugaaagggcc

SEQ ID NO: 2290503 - RNA, 14 nt, Human
cauagcaagacaca

SEQ ID NO: 2290504 - RNA, 20 nt, Human
cauagcaagacacaucccua

SEQ ID NO: 2290505 - RNA, 15 nt, Human
cauagcaagacacau

SEQ ID NO: 2290506 - RNA, 23 nt, Human
cauagcaagauugcuuaaaauag

SEQ ID NO: 2290507 - RNA, 20 nt, Human
cauagcuugauaaagggcca

SEQ ID NO: 2290508 - RNA, 21 nt, Human
cauagcuugauaaagggccaa

SEQ ID NO: 2290509 - RNA, 22 nt, Human
cauaugccugggcagaaggaag

SEQ ID NO: 2290510 - RNA, 15 nt, Human
cauaugccugggcag

SEQ ID NO: 2290511 - RNA, 20 nt, Human
cauaugccugggcagaagga

SEQ ID NO: 2290512 - RNA, 22 nt, Human
cauauucaggaagcucagggcc

SEQ ID NO: 2290513 - RNA, 20 nt, Human
cauauucaggaagcucaggg

SEQ ID NO: 2290514 - RNA, 14 nt, Human
cauauucaggaagc

SEQ ID NO: 2290515 - RNA, 15 nt, Human
cauauucaggaagcu

SEQ ID NO: 2290516 - RNA, 20 nt, Human
auuuuaagacguguuugugu

SEQ ID NO: 2290517 - RNA, 17 nt, Human
auuugucuauucuccag

SEQ ID NO: 2290518 - RNA, 15 nt, Human
auuugucuugccuua

SEQ ID NO: 2290519 - RNA, 15 nt, Human
auuugucuuucagga

SEQ ID NO: 2290520 - RNA, 15 nt, Human
auuuguccaauucuc

SEQ ID NO: 2290521 - RNA, 18 nt, Human
auuugugaagguggaaau

SEQ ID NO: 2290522 - RNA, 21 nt, Human
auuugugaagguggaaauaaa

SEQ ID NO: 2290523 - RNA, 22 nt, Human
auuuuaaaaauacagauagaua

SEQ ID NO: 2290524 - RNA, 23 nt, Human
auuugugaaaugauggugaaagu

SEQ ID NO: 2290525 - RNA, 16 nt, Human
auuuuaaaagaaugau

SEQ ID NO: 2290526 - RNA, 17 nt, Human
auuugugaacucagcca

SEQ ID NO: 2290527 - RNA, 20 nt, Human
auuugugaacucagccaagc

SEQ ID NO: 2290528 - RNA, 21 nt, Human
auuugugaacucagccaagca

SEQ ID NO: 2290529 - RNA, 18 nt, Human
auuuuaaaaagucuucac

SEQ ID NO: 2290530 - RNA, 21 nt, Human
auuuuaaaaagucuucacucu

SEQ ID NO: 2290531 - RNA, 13 nt, Human
auuuuaaaaauga

SEQ ID NO: 2290532 - RNA, 16 nt, Human
auuuuaaccaaaacau

SEQ ID NO: 2290533 - RNA, 22 nt, Human
auuuuaaccuaugauauuuucu

SEQ ID NO: 2290534 - RNA, 22 nt, Human
auuuuaacaauaacuacugugu

SEQ ID NO: 2290535 - RNA, 13 nt, Human
auuuuaacucaua

SEQ ID NO: 2290536 - RNA, 14 nt, Human
auuuuaacucuguc

SEQ ID NO: 2290537 - RNA, 13 nt, Human
auuuuaacucugu

SEQ ID NO: 2290538 - RNA, 15 nt, Human
auuuuaacucugucu

SEQ ID NO: 2290539 - RNA, 16 nt, Human
auuuuaacucugucuu

SEQ ID NO: 2290540 - RNA, 16 nt, Human
auuuuaacaauaacua

SEQ ID NO: 2290541 - RNA, 15 nt, Human
auuuuaacaauaacu

SEQ ID NO: 2290542 - RNA, 14 nt, Human
auuuuaacaauaac

SEQ ID NO: 2290543 - RNA, 14 nt, Human
auuuuaaaaugaga

SEQ ID NO: 2290544 - RNA, 20 nt, Human
auuuuaaaagaugcaaugua

SEQ ID NO: 2290545 - RNA, 20 nt, Human
auuuuaaaagauaaauauua

SEQ ID NO: 2290546 - RNA, 17 nt, Human
auuuuaaaaaugaaauu

SEQ ID NO: 2290547 - RNA, 14 nt, Human
auuuuaaaaaugaa

SEQ ID NO: 2290548 - RNA, 23 nt, Human
auuuuaaaaauguuaaaauguau

SEQ ID NO: 2290549 - RNA, 23 nt, Human
auuuuaaaagaaugauuaugaau

SEQ ID NO: 2290550 - RNA, 19 nt, Human
auuuggccugcacuaauuu

SEQ ID NO: 2290551 - RNA, 16 nt, Human
auuuggccugcacuaa

SEQ ID NO: 2290552 - RNA, 18 nt, Human
auuugggaagugaagacu

SEQ ID NO: 2290553 - RNA, 14 nt, Human
auuugggaagugaa

SEQ ID NO: 2290554 - RNA, 13 nt, Human
auuugacuguuuu

SEQ ID NO: 2290555 - RNA, 17 nt, Human
auuugacuguuuuuacc

SEQ ID NO: 2290556 - RNA, 18 nt, Human
auuugacuguuuuuaccc

SEQ ID NO: 2290557 - RNA, 23 nt, Human
auuugacaaaauuuguugaaauu

SEQ ID NO: 2290558 - RNA, 14 nt, Human
auuugacugaagau

SEQ ID NO: 2290559 - RNA, 19 nt, Human
auuuggcauuuauuuguga

SEQ ID NO: 2290560 - RNA, 19 nt, Human
auuugacuguuuuuaccca

SEQ ID NO: 2290561 - RNA, 19 nt, Human
auuuguaaauuuaugugau

SEQ ID NO: 2290562 - RNA, 16 nt, Human
auuuguaaccucagcu

SEQ ID NO: 2290563 - RNA, 18 nt, Human
auuuguaaauuuauguga

SEQ ID NO: 2290564 - RNA, 17 nt, Human
auuugggagacauguga

SEQ ID NO: 2290565 - RNA, 19 nt, Human
auuugggccugcuccagac

SEQ ID NO: 2290566 - RNA, 19 nt, Human
auuugggagacaugugaca

SEQ ID NO: 2290567 - RNA, 23 nt, Human
auuugggccugcuccagaccuga

SEQ ID NO: 2290568 - RNA, 22 nt, Human
auuugggccugcuccagaccug

SEQ ID NO: 2290569 - RNA, 21 nt, Human
auuugggccugcuccagaccu

SEQ ID NO: 2290570 - RNA, 15 nt, Human
auuugucaacaaagu

SEQ ID NO: 2290571 - RNA, 13 nt, Human
auuugucaacaaa

SEQ ID NO: 2290572 - RNA, 17 nt, Human
auuugucaaugacaguu

SEQ ID NO: 2290573 - RNA, 14 nt, Human
auuugucaaugaca

SEQ ID NO: 2290574 - RNA, 18 nt, Human
auuuguaaguuucaggug

SEQ ID NO: 2290575 - RNA, 21 nt, Human
auuuguaaguuucaggugaca

SEQ ID NO: 2290576 - RNA, 17 nt, Human
auuuguauuuuuuugca

SEQ ID NO: 2290577 - RNA, 21 nt, Human
auuuguauuuuuuugcaagug

SEQ ID NO: 2290578 - RNA, 23 nt, Human
auuuguaaguuuaugucuaaaga

SEQ ID NO: 2290579 - RNA, 14 nt, Human
auuuguaaguuuca

SEQ ID NO: 2290580 - RNA, 15 nt, Human
auuuguaaguuucag

SEQ ID NO: 2290581 - RNA, 17 nt, Human
auuuguaaguuucaggu

SEQ ID NO: 2290582 - RNA, 19 nt, Human
auuuguaguguuggagaag

SEQ ID NO: 2290583 - RNA, 17 nt, Human
auuuguaaccucagcuc

SEQ ID NO: 2290584 - RNA, 19 nt, Human
auuuguaaccucagcucug

SEQ ID NO: 2290585 - RNA, 21 nt, Human
auuuguaaccucagcucuggg

SEQ ID NO: 2290586 - RNA, 20 nt, Human
auuuguaaccucagcucugg

SEQ ID NO: 2290587 - RNA, 14 nt, Human
auuuguaaguuuau

SEQ ID NO: 2290588 - RNA, 22 nt, Human
auuuguaaguuuaugucuaaag

SEQ ID NO: 2290589 - RNA, 22 nt, Human
auuuguaguguuggagaagaac

SEQ ID NO: 2290590 - RNA, 14 nt, Human
auuuguauaaaaua

SEQ ID NO: 2290591 - RNA, 16 nt, Human
auuucccguggcccca

SEQ ID NO: 2290592 - RNA, 18 nt, Human
auuucccguggccccagc

SEQ ID NO: 2290593 - RNA, 19 nt, Human
auuucccguggccccagcc

SEQ ID NO: 2290594 - RNA, 15 nt, Human
auuucccguggcccc

SEQ ID NO: 2290595 - RNA, 15 nt, Human
auuucccaggguuaa

SEQ ID NO: 2290596 - RNA, 21 nt, Human
auuucccaggcugaauuggga

SEQ ID NO: 2290597 - RNA, 19 nt, Human
auuucccaggacccugaag

SEQ ID NO: 2290598 - RNA, 16 nt, Human
auuucccaggacccug

SEQ ID NO: 2290599 - RNA, 14 nt, Human
auuucccaggaccc

SEQ ID NO: 2290600 - RNA, 18 nt, Human
auuucccaauuaggaagu

SEQ ID NO: 2290601 - RNA, 14 nt, Human
auuuccacaccaag

SEQ ID NO: 2290602 - RNA, 23 nt, Human
auuucccacaccguguaaaccaa

SEQ ID NO: 2290603 - RNA, 20 nt, Human
auuucccagcacaugaaacc

SEQ ID NO: 2290604 - RNA, 13 nt, Human
auuucccaggacc

SEQ ID NO: 2290605 - RNA, 12 nt, Human
auuucccaggac

SEQ ID NO: 2290606 - RNA, 17 nt, Human
auuucccaauuaggaag

SEQ ID NO: 2290607 - RNA, 15 nt, Human
auuuccaagagcuga

SEQ ID NO: 2290608 - RNA, 23 nt, Human
auuuccaacaccacagacacaca

SEQ ID NO: 2290609 - RNA, 21 nt, Human
auuuccaacaccacagacaca

SEQ ID NO: 2290610 - RNA, 22 nt, Human
auuuccaacaccacagacacac

SEQ ID NO: 2290611 - RNA, 17 nt, Human
auuuccaaauucacaag

SEQ ID NO: 2290612 - RNA, 19 nt, Human
auuuccaacaccacagaca

SEQ ID NO: 2290613 - RNA, 20 nt, Human
auuuccaacaccacagacac

SEQ ID NO: 2290614 - RNA, 17 nt, Human
auuuccaaauaaaauga

SEQ ID NO: 2290615 - RNA, 18 nt, Human
auuuccaaauaaaaugag

SEQ ID NO: 2290616 - RNA, 13 nt, Human
auuuccaaaugaa

SEQ ID NO: 2290617 - RNA, 17 nt, Human
auuuccaaaugaaugac

SEQ ID NO: 2290618 - RNA, 16 nt, Human
auuuccaagagcugag

SEQ ID NO: 2290619 - RNA, 19 nt, Human
auuucccaaagcagugcau

SEQ ID NO: 2290620 - RNA, 14 nt, Human
auuuauuuaaauuu

SEQ ID NO: 2290621 - RNA, 12 nt, Human
auuuauuuaaau

SEQ ID NO: 2290622 - RNA, 14 nt, Human
auuuauuucaaaaa

SEQ ID NO: 2290623 - RNA, 16 nt, Human
auuuauuuaauaacaa

SEQ ID NO: 2290624 - RNA, 14 nt, Human
auuuauuuaaaugu

SEQ ID NO: 2290625 - RNA, 13 nt, Human
auuuauuuaauaa

SEQ ID NO: 2290626 - RNA, 20 nt, Human
auuuauuuaauaacaauugu

SEQ ID NO: 2290627 - RNA, 12 nt, Human
auuuauuuaaua

SEQ ID NO: 2290628 - RNA, 20 nt, Human
auuuauuuaaaagauucauu

SEQ ID NO: 2290629 - RNA, 14 nt, Human
auuuauuuaaaaga

SEQ ID NO: 2290630 - RNA, 16 nt, Human
auuuauuuaaaagauu

SEQ ID NO: 2290631 - RNA, 16 nt, Human
auuuccaaagagaaaa

SEQ ID NO: 2290632 - RNA, 13 nt, Human
auuuccaaauaaa

SEQ ID NO: 2290633 - RNA, 15 nt, Human
auuuccaaauaaaau

SEQ ID NO: 2290634 - RNA, 14 nt, Human
auuuauuuuaauaa

SEQ ID NO: 2290635 - RNA, 14 nt, Human
auuuauuucaucau

SEQ ID NO: 2290636 - RNA, 13 nt, Human
auuuauuuccuag

SEQ ID NO: 2290637 - RNA, 18 nt, Human
auuuauuuccuaguucug

SEQ ID NO: 2290638 - RNA, 23 nt, Human
auuuauuuccuaguucuguagaa

SEQ ID NO: 2290639 - RNA, 16 nt, Human
auuugaaaauuuugau

SEQ ID NO: 2290640 - RNA, 15 nt, Human
auuugaaaauuuuga

SEQ ID NO: 2290641 - RNA, 11 nt, Human
auuugaaagaa

SEQ ID NO: 2290642 - RNA, 14 nt, Human
auuugaaagaaagg

SEQ ID NO: 2290643 - RNA, 18 nt, Human
auuugaaacacuuugcau

SEQ ID NO: 2290644 - RNA, 13 nt, Human
auuugaccuacaa

SEQ ID NO: 2290645 - RNA, 20 nt, Human
auuucuuccacaagagccca

SEQ ID NO: 2290646 - RNA, 23 nt, Human
auuucuuccacaagagcccaggc

SEQ ID NO: 2290647 - RNA, 18 nt, Human
auuucccugacuccucua

SEQ ID NO: 2290648 - RNA, 23 nt, Human
auuucccugaaggaaccaaagcg

SEQ ID NO: 2290649 - RNA, 17 nt, Human
auuucccugaaggaacc

SEQ ID NO: 2290650 - RNA, 22 nt, Human
auuucccguggccccagccugg

SEQ ID NO: 2290651 - RNA, 20 nt, Human
auuucccguggccccagccu

SEQ ID NO: 2290652 - RNA, 21 nt, Human
auuucccguggccccagccug

SEQ ID NO: 2290653 - RNA, 23 nt, Human
auuucccguggccccagccuggc

SEQ ID NO: 2290654 - RNA, 13 nt, Human
auuggguucauua

SEQ ID NO: 2290655 - RNA, 18 nt, Human
auuggguggguaaauuca

SEQ ID NO: 2290656 - RNA, 13 nt, Human
auuggguuaugaa

SEQ ID NO: 2290657 - RNA, 17 nt, Human
auuggguuaugaauauu

SEQ ID NO: 2290658 - RNA, 18 nt, Human
auugguaaagaauggaag

SEQ ID NO: 2290659 - RNA, 15 nt, Human
auugguaacauccuu

SEQ ID NO: 2290660 - RNA, 16 nt, Human
auugguaacauccuuu

SEQ ID NO: 2290661 - RNA, 20 nt, Human
auugggaaggggacccccgc

SEQ ID NO: 2290662 - RNA, 13 nt, Human
auugggaaaucuu

SEQ ID NO: 2290663 - RNA, 15 nt, Human
auugggaauaaauau

SEQ ID NO: 2290664 - RNA, 16 nt, Human
auugggaauaaauaug

SEQ ID NO: 2290665 - RNA, 17 nt, Human
auugggaauaaauaugc

SEQ ID NO: 2290666 - RNA, 20 nt, Human
auugggaauaaauaugccuc

SEQ ID NO: 2290667 - RNA, 17 nt, Human
auugggacuggggcuga

SEQ ID NO: 2290668 - RNA, 23 nt, Human
auuggguggggggcuucauacac

SEQ ID NO: 2290669 - RNA, 18 nt, Human
auugggagcuugggaaug

SEQ ID NO: 2290670 - RNA, 17 nt, Human
auugguccagcuugcuc

SEQ ID NO: 2290671 - RNA, 15 nt, Human
auugguucuuguauu

SEQ ID NO: 2290672 - RNA, 16 nt, Human
auugguucuuguauua

SEQ ID NO: 2290673 - RNA, 15 nt, Human
auugguccagcuugc

SEQ ID NO: 2290674 - RNA, 14 nt, Human
auugguccagcuug

SEQ ID NO: 2290675 - RNA, 18 nt, Human
auugguaucaagaaaguc

SEQ ID NO: 2290676 - RNA, 18 nt, Human
auugguauucacuaaucu

SEQ ID NO: 2290677 - RNA, 17 nt, Human
auugguaucaagaaagu

SEQ ID NO: 2290678 - RNA, 22 nt, Human
auuggauuauuuaauaacauua

SEQ ID NO: 2290679 - RNA, 19 nt, Human
auuggauuauuuaauaaca

SEQ ID NO: 2290680 - RNA, 20 nt, Human
auuggauuauuuaauaacau

SEQ ID NO: 2290681 - RNA, 22 nt, Human
auuggauucugagagcugugca

SEQ ID NO: 2290682 - RNA, 19 nt, Human
auuggauucugagagcugu

SEQ ID NO: 2290683 - RNA, 18 nt, Human
auuggauuauucauuuaa

SEQ ID NO: 2290684 - RNA, 19 nt, Human
auuggauuauucauuuaaa

SEQ ID NO: 2290685 - RNA, 21 nt, Human
auuggauuauucauuuaaaau

SEQ ID NO: 2290686 - RNA, 22 nt, Human
auuggauuauucauuuaaaaug

SEQ ID NO: 2290687 - RNA, 14 nt, Human
auuggauuauuuaa

SEQ ID NO: 2290688 - RNA, 16 nt, Human
auuggauuauuuaaua

SEQ ID NO: 2290689 - RNA, 17 nt, Human
auuggauuauuuaauaa

SEQ ID NO: 2290690 - RNA, 18 nt, Human
auuggauuauuuaauaac

SEQ ID NO: 2290691 - RNA, 12 nt, Human
auuggcagcaga

SEQ ID NO: 2290692 - RNA, 11 nt, Human
auuggcagcag

SEQ ID NO: 2290693 - RNA, 20 nt, Human
auuggcaccuaauccaggca

SEQ ID NO: 2290694 - RNA, 16 nt, Human
auugacuucgacugug

SEQ ID NO: 2290695 - RNA, 12 nt, Human
auugauuagaaa

SEQ ID NO: 2290696 - RNA, 20 nt, Human
auugauuauuacuggcaaaa

SEQ ID NO: 2290697 - RNA, 18 nt, Human
auugacuuuuuauggcac

SEQ ID NO: 2290698 - RNA, 13 nt, Human
auugacuuuuuau

SEQ ID NO: 2290699 - RNA, 22 nt, Human
auugauuauucugauuccacuu

SEQ ID NO: 2290700 - RNA, 16 nt, Human
auugauuucaagaccu

SEQ ID NO: 2290701 - RNA, 13 nt, Human
auugauuucaaga

SEQ ID NO: 2290702 - RNA, 18 nt, Human
auugcuuuggucauauga

SEQ ID NO: 2290703 - RNA, 21 nt, Human
auugauuuccguuaaaauacc

SEQ ID NO: 2290704 - RNA, 14 nt, Human
auugcuuuggucau

SEQ ID NO: 2290705 - RNA, 15 nt, Human
auugauuucugccuu

SEQ ID NO: 2290706 - RNA, 12 nt, Human
auugcuuugagc

SEQ ID NO: 2290707 - RNA, 21 nt, Human
auugcuuugauuaauccagaa

SEQ ID NO: 2290708 - RNA, 20 nt, Human
auuggaauuaaccuggugcu

SEQ ID NO: 2290709 - RNA, 19 nt, Human
auuggaauuaaccuggugc

SEQ ID NO: 2290710 - RNA, 16 nt, Human
auuggaauuaaccugg

SEQ ID NO: 2290711 - RNA, 15 nt, Human
auuggaauuaaccug

SEQ ID NO: 2290712 - RNA, 12 nt, Human
auuggaauuaac

SEQ ID NO: 2290713 - RNA, 14 nt, Human
auuggaauuaaccu

SEQ ID NO: 2290714 - RNA, 15 nt, Human
auugcuuuuucuaau

SEQ ID NO: 2290715 - RNA, 20 nt, Human
auugcuuuuucuaauguggu

SEQ ID NO: 2290716 - RNA, 19 nt, Human
auuggacaguaaaauccac

SEQ ID NO: 2290717 - RNA, 17 nt, Human
auuggacauuuucuuca

SEQ ID NO: 2290718 - RNA, 14 nt, Human
auuggacccuucca

SEQ ID NO: 2290719 - RNA, 19 nt, Human
auuggagcucgugggacag

SEQ ID NO: 2290720 - RNA, 22 nt, Human
auuggagggugggagagcccag

SEQ ID NO: 2290721 - RNA, 15 nt, Human
auuggaggaaagcaa

SEQ ID NO: 2290722 - RNA, 23 nt, Human
auuggaggaaagcaaccggugga

SEQ ID NO: 2290723 - RNA, 23 nt, Human
auuggagggugggagagcccagc

SEQ ID NO: 2290724 - RNA, 22 nt, Human
auuggaggguaaaugauguggu

SEQ ID NO: 2290725 - RNA, 21 nt, Human
auuuaaagacagggaagagca

SEQ ID NO: 2290726 - RNA, 14 nt, Human
auuguacaguuuuu

SEQ ID NO: 2290727 - RNA, 15 nt, Human
auuguacaguuuuua

SEQ ID NO: 2290728 - RNA, 17 nt, Human
auuguaaaaaaaaaugc

SEQ ID NO: 2290729 - RNA, 20 nt, Human
auuguaaaaaaaaaugccuu

SEQ ID NO: 2290730 - RNA, 21 nt, Human
auuguaaaaaaaaaugccuuu

SEQ ID NO: 2290731 - RNA, 22 nt, Human
auuguaaaaaaaaaugccuuug

SEQ ID NO: 2290732 - RNA, 23 nt, Human
auuguaaaaaaaaaugccuuuga

SEQ ID NO: 2290733 - RNA, 21 nt, Human
auuguacaguuuuuauugcuu

SEQ ID NO: 2290734 - RNA, 12 nt, Human
auuguaccucuc

SEQ ID NO: 2290735 - RNA, 15 nt, Human
auuguacauauuugu

SEQ ID NO: 2290736 - RNA, 20 nt, Human
auuguacauauuuguggaau

SEQ ID NO: 2290737 - RNA, 18 nt, Human
auuguaccucucuuauag

SEQ ID NO: 2290738 - RNA, 19 nt, Human
auuguaccucucuuauaga

SEQ ID NO: 2290739 - RNA, 14 nt, Human
auuguaccuuuuaa

SEQ ID NO: 2290740 - RNA, 15 nt, Human
auuguaccuuuuaac

SEQ ID NO: 2290741 - RNA, 16 nt, Human
auuguaccuuuuaaca

SEQ ID NO: 2290742 - RNA, 17 nt, Human
auuguaccuuuuaacac

SEQ ID NO: 2290743 - RNA, 13 nt, Human
auugucagcuacu

SEQ ID NO: 2290744 - RNA, 23 nt, Human
auugucagauauuuuuucagaaa

SEQ ID NO: 2290745 - RNA, 14 nt, Human
auugucagauauuu

SEQ ID NO: 2290746 - RNA, 19 nt, Human
auugucagaguucugcucu

SEQ ID NO: 2290747 - RNA, 22 nt, Human
auuguaccuuuuaacaccugau

SEQ ID NO: 2290748 - RNA, 23 nt, Human
auugucaaaguggugagaggcau

SEQ ID NO: 2290749 - RNA, 16 nt, Human
auugucaaagugguga

SEQ ID NO: 2290750 - RNA, 13 nt, Human
auugucuagugaa

SEQ ID NO: 2290751 - RNA, 19 nt, Human
auugucagcuacuaaugau

SEQ ID NO: 2290752 - RNA, 15 nt, Human
auugucaucaggaga

SEQ ID NO: 2290753 - RNA, 13 nt, Human
auugucauuaaag

SEQ ID NO: 2290754 - RNA, 15 nt, Human
auugucauuaaaggu

SEQ ID NO: 2290755 - RNA, 12 nt, Human
auugucccucug

SEQ ID NO: 2290756 - RNA, 15 nt, Human
auugucauuccugua

SEQ ID NO: 2290757 - RNA, 23 nt, Human
auugucccucugccccauccucc

SEQ ID NO: 2290758 - RNA, 17 nt, Human
auugucccucugcccca

SEQ ID NO: 2290759 - RNA, 12 nt, Human
auuguggcuccu

SEQ ID NO: 2290760 - RNA, 19 nt, Human
auuguggcuccuaucugug

SEQ ID NO: 2290761 - RNA, 20 nt, Human
auuguggcuccuaucugugu

SEQ ID NO: 2290762 - RNA, 13 nt, Human
auugugggaaggg

SEQ ID NO: 2290763 - RNA, 19 nt, Human
auuguggcugucagcagga

SEQ ID NO: 2290764 - RNA, 18 nt, Human
auuguggcugucagcagg

SEQ ID NO: 2290765 - RNA, 17 nt, Human
auuguggcugucagcag

SEQ ID NO: 2290766 - RNA, 20 nt, Human
auuguggggaugaugaaaua

SEQ ID NO: 2290767 - RNA, 21 nt, Human
auuguggggaugaugaaauaa

SEQ ID NO: 2290768 - RNA, 14 nt, Human
auugugggaagggg

SEQ ID NO: 2290769 - RNA, 20 nt, Human
auuguuugucugucuucaua

SEQ ID NO: 2290770 - RNA, 16 nt, Human
auuguuugucuuuaac

SEQ ID NO: 2290771 - RNA, 18 nt, Human
auugugguacaaucucaa

SEQ ID NO: 2290772 - RNA, 20 nt, Human
auugugggucuauuucuagu

SEQ ID NO: 2290773 - RNA, 19 nt, Human
auugugguacaaucucaaa

SEQ ID NO: 2290774 - RNA, 21 nt, Human
auuguuuggggaugagaaagg

SEQ ID NO: 2290775 - RNA, 13 nt, Human
auuuaaaagauac

SEQ ID NO: 2290776 - RNA, 21 nt, Human
auuguuugucuuuaacuguca

SEQ ID NO: 2290777 - RNA, 14 nt, Human
auuguuuuaaaaag

SEQ ID NO: 2290778 - RNA, 23 nt, Human
auuguuuuaaaaagaaacaagau

SEQ ID NO: 2290779 - RNA, 17 nt, Human
auuuaaaagauacaguu

SEQ ID NO: 2290780 - RNA, 22 nt, Human
auuguuuuaaaaagaaacaaga

SEQ ID NO: 2290781 - RNA, 13 nt, Human
auuuaaaagauuc

SEQ ID NO: 2290782 - RNA, 16 nt, Human
auuuaaaagauacagu

SEQ ID NO: 2290783 - RNA, 14 nt, Human
auuuaaaagauaca

SEQ ID NO: 2290784 - RNA, 16 nt, Human
auuuaaagacaaagac

SEQ ID NO: 2290785 - RNA, 13 nt, Human
auuuauuuaaaag

SEQ ID NO: 2290786 - RNA, 19 nt, Human
auuuaaagaacacccuaua

SEQ ID NO: 2290787 - RNA, 18 nt, Human
auuuaaacccauuuuagu

SEQ ID NO: 2290788 - RNA, 20 nt, Human
auuuaaacccauuuuaguca

SEQ ID NO: 2290789 - RNA, 13 nt, Human
auuuaaacccauu

SEQ ID NO: 2290790 - RNA, 14 nt, Human
auuuaaacccauuu

SEQ ID NO: 2290791 - RNA, 15 nt, Human
auuuaaacccauuuu

SEQ ID NO: 2290792 - RNA, 17 nt, Human
auuuaaacccauuuuag

SEQ ID NO: 2290793 - RNA, 16 nt, Human
auuuaaaagauucauu

SEQ ID NO: 2290794 - RNA, 19 nt, Human
auuuuaagacguguuugug

SEQ ID NO: 2290795 - RNA, 17 nt, Human
auuuuaacuuuaucaca

SEQ ID NO: 2290796 - RNA, 15 nt, Human
auuuuaacuuuauca

SEQ ID NO: 2290797 - RNA, 19 nt, Human
auuuuaacuuuaucacauu

SEQ ID NO: 2290798 - RNA, 20 nt, Human
auuuuaagugcuuuguaaug

SEQ ID NO: 2290799 - RNA, 15 nt, Human
auuuuaauaaacacu

SEQ ID NO: 2290800 - RNA, 16 nt, Human
auuuuaauaaacacuc

SEQ ID NO: 2290801 - RNA, 17 nt, Human
auuuuaauaaacacucu

SEQ ID NO: 2290802 - RNA, 15 nt, Human
auuuuccaugaaaau

SEQ ID NO: 2290803 - RNA, 13 nt, Human
auuuuaauaauau

SEQ ID NO: 2290804 - RNA, 21 nt, Human
auuuuccauuuuuauuucaaa

SEQ ID NO: 2290805 - RNA, 12 nt, Human
auuuuaauaaug

SEQ ID NO: 2290806 - RNA, 15 nt, Human
auuuuccccccacuc

SEQ ID NO: 2290807 - RNA, 14 nt, Human
auuuuccccccacu

SEQ ID NO: 2290808 - RNA, 14 nt, Human
auuuucccacugca

SEQ ID NO: 2290809 - RNA, 17 nt, Human
auuuucccacugcaccc

SEQ ID NO: 2290810 - RNA, 21 nt, Human
auuuuccccccacucucccca

SEQ ID NO: 2290811 - RNA, 20 nt, Human
auuuuccccccacucucccc

SEQ ID NO: 2290812 - RNA, 22 nt, Human
auuuuccccccacucuccccac

SEQ ID NO: 2290813 - RNA, 20 nt, Human
auuuucccccuuuucugcau

SEQ ID NO: 2290814 - RNA, 19 nt, Human
auuuucccuauuagagaag

SEQ ID NO: 2290815 - RNA, 14 nt, Human
auuuuccugaaaac

SEQ ID NO: 2290816 - RNA, 16 nt, Human
auuuuccugccaggca

SEQ ID NO: 2290817 - RNA, 13 nt, Human
auuuucccugcua

SEQ ID NO: 2290818 - RNA, 22 nt, Human
auuuucccccuuuucugcauuu

SEQ ID NO: 2290819 - RNA, 22 nt, Human
auuuuccuggugccaauuucaa

SEQ ID NO: 2290820 - RNA, 18 nt, Human
auuuuccuggugccaauu

SEQ ID NO: 2290821 - RNA, 15 nt, Human
auuuucuauaauuua

SEQ ID NO: 2290822 - RNA, 14 nt, Human
auuuucuauaauuu

SEQ ID NO: 2290823 - RNA, 12 nt, Human
auuuuccuugaa

SEQ ID NO: 2290824 - RNA, 14 nt, Human
auuuugaugaacaa

SEQ ID NO: 2290825 - RNA, 19 nt, Human
auuuugauccaagcugguc

SEQ ID NO: 2290826 - RNA, 23 nt, Human
auuuuccuggugccaauuucaag

SEQ ID NO: 2290827 - RNA, 15 nt, Human
auuuugauguuuuaa

SEQ ID NO: 2290828 - RNA, 19 nt, Human
auuuugcaaaauuuccagu

SEQ ID NO: 2290829 - RNA, 18 nt, Human
auuuugcaaaauuuccag

SEQ ID NO: 2290830 - RNA, 15 nt, Human
auuuugcaaaauuuc

SEQ ID NO: 2290831 - RNA, 14 nt, Human
auuuugcaaaauuu

SEQ ID NO: 2290832 - RNA, 14 nt, Human
auuuugauuauugu

SEQ ID NO: 2290833 - RNA, 16 nt, Human
auuuugauuauuguau

SEQ ID NO: 2290834 - RNA, 18 nt, Human
auuuugauuauuguauuu

SEQ ID NO: 2290835 - RNA, 22 nt, Human
auuuugauuauuguauuuauuc

SEQ ID NO: 2290836 - RNA, 17 nt, Human
auuuugauguuuuaagg

SEQ ID NO: 2290837 - RNA, 14 nt, Human
auuuugcauucaaa

SEQ ID NO: 2290838 - RNA, 16 nt, Human
auuuugcagcagugag

SEQ ID NO: 2290839 - RNA, 15 nt, Human
auuuugcagcaguga

SEQ ID NO: 2290840 - RNA, 14 nt, Human
auuuugcagcagug

SEQ ID NO: 2290841 - RNA, 12 nt, Human
auuuugcagcag

SEQ ID NO: 2290842 - RNA, 16 nt, Human
auuuugcauuugaaua

SEQ ID NO: 2290843 - RNA, 15 nt, Human
auuuugcauucaaau

SEQ ID NO: 2290844 - RNA, 18 nt, Human
auuuugccagugggaacu

SEQ ID NO: 2290845 - RNA, 23 nt, Human
auuuugcccuugacaaagucaag

SEQ ID NO: 2290846 - RNA, 15 nt, Human
auuuugcccuugaca

SEQ ID NO: 2290847 - RNA, 20 nt, Human
auuuugcuaaaugugaauga

SEQ ID NO: 2290848 - RNA, 18 nt, Human
auuuugccucuuuucucu

SEQ ID NO: 2290849 - RNA, 22 nt, Human
auuuugcccuuccauagccuaa

SEQ ID NO: 2290850 - RNA, 21 nt, Human
auuuugccucuuuucucugug

SEQ ID NO: 2290851 - RNA, 13 nt, Human
auuuugccugugu

SEQ ID NO: 2290852 - RNA, 17 nt, Human
auuuugcuauuguaaau

SEQ ID NO: 2290853 - RNA, 19 nt, Human
auuuugcuauuguaaauau

SEQ ID NO: 2290854 - RNA, 14 nt, Human
auuuugcuggaaua

SEQ ID NO: 2290855 - RNA, 21 nt, Human
auuuugcuauuguaaauaugu

SEQ ID NO: 2290856 - RNA, 22 nt, Human
auuuugcuauuguaaauauguu

SEQ ID NO: 2290857 - RNA, 21 nt, Human
auuuugcugucccuuuuccuu

SEQ ID NO: 2290858 - RNA, 16 nt, Human
auuuuguaauuauugu

SEQ ID NO: 2290859 - RNA, 21 nt, Human
auuuuguaauuauugugauuu

SEQ ID NO: 2290860 - RNA, 20 nt, Human
auuuuguaaacucaaaauau

SEQ ID NO: 2290861 - RNA, 20 nt, Human
auuuuggaaguuuucaggac

SEQ ID NO: 2290862 - RNA, 19 nt, Human
auuuuguaaacucaaaaua

SEQ ID NO: 2290863 - RNA, 17 nt, Human
auuuuguaacuuucucu

SEQ ID NO: 2290864 - RNA, 19 nt, Human
auuuuguaacgaagacaca

SEQ ID NO: 2290865 - RNA, 18 nt, Human
auuuuguaacgaagacac

SEQ ID NO: 2290866 - RNA, 13 nt, Human
auuuuguaucugc

SEQ ID NO: 2290867 - RNA, 14 nt, Human
auuuuguaucugca

SEQ ID NO: 2290868 - RNA, 15 nt, Human
auuuuguaucugcag

SEQ ID NO: 2290869 - RNA, 21 nt, Human
auuuuguaucugcaggcagac

SEQ ID NO: 2290870 - RNA, 23 nt, Human
auuuuguaucugcaggcagacac

SEQ ID NO: 2290871 - RNA, 20 nt, Human
auuuuguacaaauuuguuau

SEQ ID NO: 2290872 - RNA, 22 nt, Human
auuuuguaauuauugugauuuc

SEQ ID NO: 2290873 - RNA, 17 nt, Human
auuuuguauaauuguau

SEQ ID NO: 2290874 - RNA, 20 nt, Human
auuuuguauaauuguaucgu

SEQ ID NO: 2290875 - RNA, 14 nt, Human
auuuuguauauauc

SEQ ID NO: 2290876 - RNA, 10 nt, Human
auuuuguauu

SEQ ID NO: 2290877 - RNA, 19 nt, Human
auuuuguauuguuucaauu

SEQ ID NO: 2290878 - RNA, 12 nt, Human
auuuuguauuuu

SEQ ID NO: 2290879 - RNA, 15 nt, Human
auuuuguauuuucca

SEQ ID NO: 2290880 - RNA, 16 nt, Human
auuuuguauuuuccaa

SEQ ID NO: 2290881 - RNA, 20 nt, Human
auuuuguauuuuccaagugu

SEQ ID NO: 2290882 - RNA, 20 nt, Human
auuuugcuguagaagauggc

SEQ ID NO: 2290883 - RNA, 14 nt, Human
auuuugcuguauau

SEQ ID NO: 2290884 - RNA, 12 nt, Human
auuuugcuguau

SEQ ID NO: 2290885 - RNA, 23 nt, Human
auuuugcuauuguaaauauguuu

SEQ ID NO: 2290886 - RNA, 12 nt, Human
auuuugcuuugu

SEQ ID NO: 2290887 - RNA, 20 nt, Human
auuuugcuuugugauuuuug

SEQ ID NO: 2290888 - RNA, 18 nt, Human
auuuugcuuugugauuuu

SEQ ID NO: 2290889 - RNA, 20 nt, Human
auuuuggaaaauaaauuauu

SEQ ID NO: 2290890 - RNA, 23 nt, Human
auuuuggaaagcuccuagcagag

SEQ ID NO: 2290891 - RNA, 19 nt, Human
auuuuggaaaauaaauuau

SEQ ID NO: 2290892 - RNA, 14 nt, Human
auuuuggaaaauaa

SEQ ID NO: 2290893 - RNA, 12 nt, Human
auuuugugaaug

SEQ ID NO: 2290894 - RNA, 13 nt, Human
auuuugugaaugg

SEQ ID NO: 2290895 - RNA, 15 nt, Human
auuuugugaauggau

SEQ ID NO: 2290896 - RNA, 21 nt, Human
auuuugugaagacugggaagu

SEQ ID NO: 2290897 - RNA, 23 nt, Human
auuuugucauauaagauucauau

SEQ ID NO: 2290898 - RNA, 21 nt, Human
auuuugucuaaaaugccucag

SEQ ID NO: 2290899 - RNA, 13 nt, Human
auuuugucuaaaa

SEQ ID NO: 2290900 - RNA, 16 nt, Human
auuuugucuaaaaugc

SEQ ID NO: 2290901 - RNA, 22 nt, Human
auuuuguauuuuccaagugugc

SEQ ID NO: 2290902 - RNA, 14 nt, Human
auuuugucgaauuu

SEQ ID NO: 2290903 - RNA, 12 nt, Human
auuuugucuaaa

SEQ ID NO: 2290904 - RNA, 19 nt, Human
auuuugugcccccauguaa

SEQ ID NO: 2290905 - RNA, 19 nt, Human
auuuugugauauggagccc

SEQ ID NO: 2290906 - RNA, 20 nt, Human
auuuuguggcuuucuuucuu

SEQ ID NO: 2290907 - RNA, 17 nt, Human
auuuuguguuuaggaac

SEQ ID NO: 2290908 - RNA, 19 nt, Human
auuuuguugcuguuuugau

SEQ ID NO: 2290909 - RNA, 23 nt, Human
auuuuguugcuguuuugauuugu

SEQ ID NO: 2290910 - RNA, 18 nt, Human
auuuuguucuaguuuuca

SEQ ID NO: 2290911 - RNA, 19 nt, Human
auuuuguugcuuuugugaa

SEQ ID NO: 2290912 - RNA, 15 nt, Human
auuuuguuuaaauua

SEQ ID NO: 2290913 - RNA, 20 nt, Human
auuuuguugcuuuugugaac

SEQ ID NO: 2290914 - RNA, 15 nt, Human
auuuuucagaugcuu

SEQ ID NO: 2290915 - RNA, 14 nt, Human
auuuuucagaugcu

SEQ ID NO: 2290916 - RNA, 18 nt, Human
auuuuucagaugcuucug

SEQ ID NO: 2290917 - RNA, 16 nt, Human
auuuuucagauauaaa

SEQ ID NO: 2290918 - RNA, 19 nt, Human
auuuuucauugauaugaaa

SEQ ID NO: 2290919 - RNA, 19 nt, Human
auuuuucauauugugccaa

SEQ ID NO: 2290920 - RNA, 15 nt, Human
auuuuuccaaaauaa

SEQ ID NO: 2290921 - RNA, 13 nt, Human
auuuuucauauug

SEQ ID NO: 2290922 - RNA, 18 nt, Human
auuuuucauauugugcca

SEQ ID NO: 2290923 - RNA, 19 nt, Human
auuuuucaugauuuugaaa

SEQ ID NO: 2290924 - RNA, 22 nt, Human
auuuuucauugauaugaaaaau

SEQ ID NO: 2290925 - RNA, 20 nt, Human
auuuuuccuccacugaacua

SEQ ID NO: 2290926 - RNA, 10 nt, Human
auuuuuccua

SEQ ID NO: 2290927 - RNA, 21 nt, Human
auuuuucucaaaguuuugaaa

SEQ ID NO: 2290928 - RNA, 12 nt, Human
auuuuucuaaaa

SEQ ID NO: 2290929 - RNA, 17 nt, Human
auuuuucuaaaaaaaga

SEQ ID NO: 2290930 - RNA, 21 nt, Human
auuuuucuuagggaaggauac

SEQ ID NO: 2290931 - RNA, 12 nt, Human
auuuuucucaug

SEQ ID NO: 2290932 - RNA, 17 nt, Human
auuuuucucaaaguuuu

SEQ ID NO: 2290933 - RNA, 12 nt, Human
auuuuucugcac

SEQ ID NO: 2290934 - RNA, 14 nt, Human
auuuuucugcacug

SEQ ID NO: 2290935 - RNA, 23 nt, Human
auuuuguuuugcuuuuucugacu

SEQ ID NO: 2290936 - RNA, 24 nt, Human
auuuuguuuugcuuuuucugacuc

SEQ ID NO: 2290937 - RNA, 18 nt, Human
auuuuguuuugcuuuuuc

SEQ ID NO: 2290938 - RNA, 19 nt, Human
auuuuguuuugcuuuuucu

SEQ ID NO: 2290939 - RNA, 21 nt, Human
auuuuguuuugcuuuuucuga

SEQ ID NO: 2290940 - RNA, 22 nt, Human
auuuuguuuugcuuuuucugac

SEQ ID NO: 2290941 - RNA, 20 nt, Human
auuuuguuugguauuguauu

SEQ ID NO: 2290942 - RNA, 21 nt, Human
auuuuguuugguauuguauuu

SEQ ID NO: 2290943 - RNA, 22 nt, Human
auuuuguuugguauuguauuua

SEQ ID NO: 2290944 - RNA, 14 nt, Human
auuuuguuuugcuu

SEQ ID NO: 2290945 - RNA, 14 nt, Human
auuuuguuugguau

SEQ ID NO: 2290946 - RNA, 17 nt, Human
auuuuguuugguauugu

SEQ ID NO: 2290947 - RNA, 18 nt, Human
auuuuguuugguauugua

SEQ ID NO: 2290948 - RNA, 19 nt, Human
auuuuguuugguauuguau

SEQ ID NO: 2290949 - RNA, 21 nt, Human
auuuuguuuuugucuuaaaaa

SEQ ID NO: 2290950 - RNA, 17 nt, Human
auuuuucaauaaagcau

SEQ ID NO: 2290951 - RNA, 16 nt, Human
auuuuucaauaaagca

SEQ ID NO: 2290952 - RNA, 21 nt, Human
auuuuucaauaaagcauuuau

SEQ ID NO: 2290953 - RNA, 17 nt, Human
auuuuugaauguaguaa

SEQ ID NO: 2290954 - RNA, 22 nt, Human
auuuuucuggagguugauaacu

SEQ ID NO: 2290955 - RNA, 15 nt, Human
auuuuucugcacuga

SEQ ID NO: 2290956 - RNA, 16 nt, Human
auuuuucugcacugag

SEQ ID NO: 2290957 - RNA, 19 nt, Human
auuuuucuggagguugaua

SEQ ID NO: 2290958 - RNA, 21 nt, Human
auuuuucuggagguugauaac

SEQ ID NO: 2290959 - RNA, 22 nt, Human
auuuuucuuagggaaggauaca

SEQ ID NO: 2290960 - RNA, 15 nt, Human
auuuuucuuauuuca

SEQ ID NO: 2290961 - RNA, 20 nt, Human
auuuuucuuauuucauuucu

SEQ ID NO: 2290962 - RNA, 19 nt, Human
auuuuucuuauuucauuuc

SEQ ID NO: 2290963 - RNA, 23 nt, Human
auuuuuggaagaggacuccuuaa

SEQ ID NO: 2290964 - RNA, 19 nt, Human
auuuuugguugaauaaacu

SEQ ID NO: 2290965 - RNA, 17 nt, Human
auuuuugguugaauaaa

SEQ ID NO: 2290966 - RNA, 19 nt, Human
auuuuugguugucaauauu

SEQ ID NO: 2290967 - RNA, 15 nt, Human
auuuuugguugaaua

SEQ ID NO: 2290968 - RNA, 19 nt, Human
auuuuuggcagucugaauu

SEQ ID NO: 2290969 - RNA, 18 nt, Human
auuuuuggucauuguaau

SEQ ID NO: 2290970 - RNA, 17 nt, Human
auuuuugaaugugauuu

SEQ ID NO: 2290971 - RNA, 23 nt, Human
auuuuugauuuaugcauggaaac

SEQ ID NO: 2290972 - RNA, 13 nt, Human
auuuuugauuuau

SEQ ID NO: 2290973 - RNA, 15 nt, Human
auuuuugacaguguu

SEQ ID NO: 2290974 - RNA, 22 nt, Human
auuuuugaauguaguaaguaaa

SEQ ID NO: 2290975 - RNA, 15 nt, Human
auuuuugaaugugau

SEQ ID NO: 2290976 - RNA, 14 nt, Human
auuuuugccuucau

SEQ ID NO: 2290977 - RNA, 15 nt, Human
auuuuugccuucauu

SEQ ID NO: 2290978 - RNA, 21 nt, Human
auuuuugccucuuccagucuu

SEQ ID NO: 2290979 - RNA, 18 nt, Human
auuuuugccucuuccagu

SEQ ID NO: 2290980 - RNA, 14 nt, Human
auuuuugcaggagc

SEQ ID NO: 2290981 - RNA, 12 nt, Human
auuuuugccucu

SEQ ID NO: 2290982 - RNA, 22 nt, Human
auuuuugcccugaguccaagag

SEQ ID NO: 2290983 - RNA, 18 nt, Human
auuuuuuguuaaaugauu

SEQ ID NO: 2290984 - RNA, 18 nt, Human
auuuuuuuaaaauguuaa

SEQ ID NO: 2290985 - RNA, 15 nt, Human
auuuuuuuaaccaaa

SEQ ID NO: 2290986 - RNA, 16 nt, Human
auuuuuuuaaccaaag

SEQ ID NO: 2290987 - RNA, 18 nt, Human
auuuuuuuaaccaaaggu

SEQ ID NO: 2290988 - RNA, 19 nt, Human
auuuuuuuaaccaaaggug

SEQ ID NO: 2290989 - RNA, 21 nt, Human
auuuuuuuaaccaaaggugaa

SEQ ID NO: 2290990 - RNA, 13 nt, Human
auuuuuucugaau

SEQ ID NO: 2290991 - RNA, 20 nt, Human
auuuuuucucuaggaaauau

SEQ ID NO: 2290992 - RNA, 23 nt, Human
auuuuuucucuaggaaauauuua

SEQ ID NO: 2290993 - RNA, 13 nt, Human
auuuuuuauauau

SEQ ID NO: 2290994 - RNA, 19 nt, Human
auuuuuuacagcugccugc

SEQ ID NO: 2290995 - RNA, 15 nt, Human
auuuuuuaauuauua

SEQ ID NO: 2290996 - RNA, 20 nt, Human
auuuuuuaauuauuauuuau

SEQ ID NO: 2290997 - RNA, 19 nt, Human
auuuuuuaaguauuuauau

SEQ ID NO: 2290998 - RNA, 18 nt, Human
auuuuuuaaguauuuaua

SEQ ID NO: 2290999 - RNA, 17 nt, Human
auuuuuuaaguauuuau

SEQ ID NO: 2291000 - RNA, 16 nt, Human
auuuuuuaaguauuua

SEQ ID NO: 2291001 - RNA, 22 nt, Human
auuuuuuaaguauuuauauauu

SEQ ID NO: 2291002 - RNA, 20 nt, Human
auuuuuuaaguauuuauaua

SEQ ID NO: 2291003 - RNA, 22 nt, Human
auuuuuucagaaauaugugguu

SEQ ID NO: 2291004 - RNA, 12 nt, Human
auuuuuucagac

SEQ ID NO: 2291005 - RNA, 13 nt, Human
auuuuuucagaaa

SEQ ID NO: 2291006 - RNA, 15 nt, Human
auuuuuuauuuuacu

SEQ ID NO: 2291007 - RNA, 12 nt, Human
auuuuuuauugu

SEQ ID NO: 2291008 - RNA, 13 nt, Human
auuuuuuauuguu

SEQ ID NO: 2291009 - RNA, 18 nt, Human
auuuuuuauauauacagu

SEQ ID NO: 2291010 - RNA, 21 nt, Human
auuuuuuaucaugcauguccu

SEQ ID NO: 2291011 - RNA, 16 nt, Human
auuuuuuaucaugcau

SEQ ID NO: 2291012 - RNA, 13 nt, Human
auuuuuucccaaa

SEQ ID NO: 2291013 - RNA, 16 nt, Human
auuuuuucagaccgaa

SEQ ID NO: 2291014 - RNA, 13 nt, Human
auuuuuucagacc

SEQ ID NO: 2291015 - RNA, 14 nt, Human
auuuuuucagaccg

SEQ ID NO: 2291016 - RNA, 20 nt, Human
auuuuuuaaaguuacuuugu

SEQ ID NO: 2291017 - RNA, 18 nt, Human
auuuuuuaaauugaauuc

SEQ ID NO: 2291018 - RNA, 11 nt, Human
auuuuuuaagu

SEQ ID NO: 2291019 - RNA, 16 nt, Human
auuuuuuaaggaaaca

SEQ ID NO: 2291020 - RNA, 17 nt, Human
auuuuuuaaggaaacaa

SEQ ID NO: 2291021 - RNA, 14 nt, Human
auuuuuuaaaugca

SEQ ID NO: 2291022 - RNA, 13 nt, Human
auuuuuuaaaugc

SEQ ID NO: 2291023 - RNA, 22 nt, Human
auuuuuguuucuuccaaagcac

SEQ ID NO: 2291024 - RNA, 21 nt, Human
auuuuuguuuucauuaucuca

SEQ ID NO: 2291025 - RNA, 14 nt, Human
auuuuugucuugug

SEQ ID NO: 2291026 - RNA, 21 nt, Human
auuuuuguaucuacaucuuuu

SEQ ID NO: 2291027 - RNA, 21 nt, Human
auuuuuguacaguuugcugua

SEQ ID NO: 2291028 - RNA, 13 nt, Human
auuuuuguaucua

SEQ ID NO: 2291029 - RNA, 20 nt, Human
auuuuugugaaaugaaaaca

SEQ ID NO: 2291030 - RNA, 23 nt, Human
auuuuugucuuauauauauuucu

SEQ ID NO: 2291031 - RNA, 17 nt, Human
auuuuuguuucuuccaa

SEQ ID NO: 2291032 - RNA, 16 nt, Human
auuuuuguuucuaccu

SEQ ID NO: 2291033 - RNA, 22 nt, Human
auuuuugugauuuugugauuga

SEQ ID NO: 2291034 - RNA, 19 nt, Human
auuuuuguagagccagggu

SEQ ID NO: 2291035 - RNA, 12 nt, Human
auuuuuguaauu

SEQ ID NO: 2291036 - RNA, 20 nt, Human
auuuuuguacccuuccuaca

SEQ ID NO: 2291037 - RNA, 22 nt, Human
auuuuuguaagacaauccaugu

SEQ ID NO: 2291038 - RNA, 11 nt, Human
auuuuuguaca

SEQ ID NO: 2291039 - RNA, 12 nt, Human
auuuuuguacag

SEQ ID NO: 2291040 - RNA, 20 nt, Human
auuuuuguacaguuugcugu

SEQ ID NO: 2291041 - RNA, 14 nt, Human
auuuuggagaaauu

SEQ ID NO: 2291042 - RNA, 12 nt, Human
auucuagugcug

SEQ ID NO: 2291043 - RNA, 14 nt, Human
auucuagugcugcu

SEQ ID NO: 2291044 - RNA, 21 nt, Human
auucucaugccucagccuccu

SEQ ID NO: 2291045 - RNA, 20 nt, Human
auucuaggcaucccagggga

SEQ ID NO: 2291046 - RNA, 16 nt, Human
auucuaggcaucccag

SEQ ID NO: 2291047 - RNA, 13 nt, Human
auucuaggcaucc

SEQ ID NO: 2291048 - RNA, 15 nt, Human
auucuagcuuugagc

SEQ ID NO: 2291049 - RNA, 18 nt, Human
auucuaaugucuucauuu

SEQ ID NO: 2291050 - RNA, 14 nt, Human
auucuaaugucuuc

SEQ ID NO: 2291051 - RNA, 16 nt, Human
auucuaaugucuucau

SEQ ID NO: 2291052 - RNA, 15 nt, Human
auucuagcuaaugua

SEQ ID NO: 2291053 - RNA, 18 nt, Human
auucuagcuaauguaaua

SEQ ID NO: 2291054 - RNA, 17 nt, Human
auucucauuugucacac

SEQ ID NO: 2291055 - RNA, 14 nt, Human
auucuccacagcaa

SEQ ID NO: 2291056 - RNA, 13 nt, Human
auucuccacagca

SEQ ID NO: 2291057 - RNA, 15 nt, Human
auucucaugugaucc

SEQ ID NO: 2291058 - RNA, 22 nt, Human
auucucaugccucagccuccug

SEQ ID NO: 2291059 - RNA, 15 nt, Human
auucuagugcugcug

SEQ ID NO: 2291060 - RNA, 17 nt, Human
auucuagugcugcugaa

SEQ ID NO: 2291061 - RNA, 16 nt, Human
auucucauggagaagu

SEQ ID NO: 2291062 - RNA, 12 nt, Human
auucucauguga

SEQ ID NO: 2291063 - RNA, 11 nt, Human
auucugccugc

SEQ ID NO: 2291064 - RNA, 13 nt, Human
auucugccugccc

SEQ ID NO: 2291065 - RNA, 14 nt, Human
auucugccugccca

SEQ ID NO: 2291066 - RNA, 15 nt, Human
auucugccugcccag

SEQ ID NO: 2291067 - RNA, 16 nt, Human
auucugccugcccagg

SEQ ID NO: 2291068 - RNA, 17 nt, Human
auucugccugcccaggc

SEQ ID NO: 2291069 - RNA, 18 nt, Human
auucugccugcccaggcc

SEQ ID NO: 2291070 - RNA, 19 nt, Human
auucugccugcccaggccc

SEQ ID NO: 2291071 - RNA, 22 nt, Human
auucugccgugugcccucgggc

SEQ ID NO: 2291072 - RNA, 18 nt, Human
auucugcucacauaucug

SEQ ID NO: 2291073 - RNA, 20 nt, Human
auucugccugcccaggcccc

SEQ ID NO: 2291074 - RNA, 21 nt, Human
auucugccugcccaggccccu

SEQ ID NO: 2291075 - RNA, 19 nt, Human
auucugcucacauaucugu

SEQ ID NO: 2291076 - RNA, 20 nt, Human
auucugcucacauaucuguc

SEQ ID NO: 2291077 - RNA, 21 nt, Human
auucugcucacauaucuguca

SEQ ID NO: 2291078 - RNA, 22 nt, Human
auucugcucacauaucugucau

SEQ ID NO: 2291079 - RNA, 15 nt, Human
auucugcuaccucac

SEQ ID NO: 2291080 - RNA, 22 nt, Human
auucugcgucaugcuuguguua

SEQ ID NO: 2291081 - RNA, 19 nt, Human
auucugcuaccucacuggg

SEQ ID NO: 2291082 - RNA, 23 nt, Human
auucugguuccagggucccucug

SEQ ID NO: 2291083 - RNA, 20 nt, Human
auucuguaaaaugucuguua

SEQ ID NO: 2291084 - RNA, 12 nt, Human
auucuguaaaug

SEQ ID NO: 2291085 - RNA, 12 nt, Human
auucuguacaua

SEQ ID NO: 2291086 - RNA, 15 nt, Human
auucuguacauagcc

SEQ ID NO: 2291087 - RNA, 14 nt, Human
auucuguaaaaugu

SEQ ID NO: 2291088 - RNA, 14 nt, Human
auucuguacucuua

SEQ ID NO: 2291089 - RNA, 20 nt, Human
auucuguacauagccuauau

SEQ ID NO: 2291090 - RNA, 18 nt, Human
auucuguacauagccuau

SEQ ID NO: 2291091 - RNA, 19 nt, Human
auucuguacauagccuaua

SEQ ID NO: 2291092 - RNA, 13 nt, Human
auucuguacugau

SEQ ID NO: 2291093 - RNA, 15 nt, Human
auucuguacugauuu

SEQ ID NO: 2291094 - RNA, 21 nt, Human
auucuguacugauuuuuguaa

SEQ ID NO: 2291095 - RNA, 15 nt, Human
auucuguagauucug

SEQ ID NO: 2291096 - RNA, 19 nt, Human
auucuguuggccaguguga

SEQ ID NO: 2291097 - RNA, 21 nt, Human
auucuguuggccagugugaca

SEQ ID NO: 2291098 - RNA, 14 nt, Human
auucuguuggccag

SEQ ID NO: 2291099 - RNA, 13 nt, Human
auugacuuugucu

SEQ ID NO: 2291100 - RNA, 14 nt, Human
auugacuuguauau

SEQ ID NO: 2291101 - RNA, 14 nt, Human
auugacuucaauga

SEQ ID NO: 2291102 - RNA, 18 nt, Human
auugacuucaaugauagu

SEQ ID NO: 2291103 - RNA, 11 nt, Human
auugacuucuu

SEQ ID NO: 2291104 - RNA, 21 nt, Human
auugacuaucaaacugaagcc

SEQ ID NO: 2291105 - RNA, 18 nt, Human
auugacuaucaaacugaa

SEQ ID NO: 2291106 - RNA, 22 nt, Human
auugacucaaaucuccaguauu

SEQ ID NO: 2291107 - RNA, 17 nt, Human
auugaccugaggcccuu

SEQ ID NO: 2291108 - RNA, 19 nt, Human
auugacacuuaaaaauggu

SEQ ID NO: 2291109 - RNA, 17 nt, Human
auugacacagaaaaugu

SEQ ID NO: 2291110 - RNA, 22 nt, Human
auugacgacaagugcugaacag

SEQ ID NO: 2291111 - RNA, 21 nt, Human
auugacgacaagugcugaaca

SEQ ID NO: 2291112 - RNA, 20 nt, Human
auugacaauaauuucagguu

SEQ ID NO: 2291113 - RNA, 18 nt, Human
auugacaauaauuucagg

SEQ ID NO: 2291114 - RNA, 14 nt, Human
auugacacagaaaa

SEQ ID NO: 2291115 - RNA, 12 nt, Human
auugacacagaa

SEQ ID NO: 2291116 - RNA, 17 nt, Human
auugacaauaauuucag

SEQ ID NO: 2291117 - RNA, 15 nt, Human
auugacaagucauuu

SEQ ID NO: 2291118 - RNA, 15 nt, Human
auugacaagaacuga

SEQ ID NO: 2291119 - RNA, 17 nt, Human
auugacacuuaaaaaug

SEQ ID NO: 2291120 - RNA, 15 nt, Human
auugacacuuaaaaa

SEQ ID NO: 2291121 - RNA, 19 nt, Human
auugaacuuaaauaaaugu

SEQ ID NO: 2291122 - RNA, 23 nt, Human
auugaacucuuugaaugacaaag

SEQ ID NO: 2291123 - RNA, 15 nt, Human
auugaacucuuugaa

SEQ ID NO: 2291124 - RNA, 22 nt, Human
auugaagcauuuuauaaaucgc

SEQ ID NO: 2291125 - RNA, 15 nt, Human
auugaagcccuccaa

SEQ ID NO: 2291126 - RNA, 18 nt, Human
auugaaaaaauagagccu

SEQ ID NO: 2291127 - RNA, 14 nt, Human
auugaaaaaauaga

SEQ ID NO: 2291128 - RNA, 15 nt, Human
auugaaaaaccauuu

SEQ ID NO: 2291129 - RNA, 22 nt, Human
auugaaaaaauagagccugagg

SEQ ID NO: 2291130 - RNA, 19 nt, Human
auugaaaaaauagagccug

SEQ ID NO: 2291131 - RNA, 16 nt, Human
auugaaaugacuaaaa

SEQ ID NO: 2291132 - RNA, 20 nt, Human
auugaaaucuuuuugcuuug

SEQ ID NO: 2291133 - RNA, 17 nt, Human
auugaaaucuuuuugcu

SEQ ID NO: 2291134 - RNA, 18 nt, Human
auugaaaucuuuuugcuu

SEQ ID NO: 2291135 - RNA, 23 nt, Human
auucuuccaucugauugugaugu

SEQ ID NO: 2291136 - RNA, 17 nt, Human
auucuuacaaacaugug

SEQ ID NO: 2291137 - RNA, 13 nt, Human
auucuuccaucug

SEQ ID NO: 2291138 - RNA, 15 nt, Human
auucuuccaucugau

SEQ ID NO: 2291139 - RNA, 14 nt, Human
auucuuccaucuga

SEQ ID NO: 2291140 - RNA, 19 nt, Human
auucuuccuaguuuucucc

SEQ ID NO: 2291141 - RNA, 17 nt, Human
auucuuccuaguuuucu

SEQ ID NO: 2291142 - RNA, 20 nt, Human
auucuucccuaucuuugcca

SEQ ID NO: 2291143 - RNA, 12 nt, Human
auucuuccuagu

SEQ ID NO: 2291144 - RNA, 21 nt, Human
auucuucccuaucuuugccac

SEQ ID NO: 2291145 - RNA, 22 nt, Human
auucuuaagggaacuuccacau

SEQ ID NO: 2291146 - RNA, 16 nt, Human
auucuuacaaacaugu

SEQ ID NO: 2291147 - RNA, 21 nt, Human
auucuuacaaacaugugguua

SEQ ID NO: 2291148 - RNA, 17 nt, Human
auucuguagauucugug

SEQ ID NO: 2291149 - RNA, 14 nt, Human
auucuuaaauaugu

SEQ ID NO: 2291150 - RNA, 13 nt, Human
auuggcagcagau

SEQ ID NO: 2291151 - RNA, 12 nt, Human
auucuaaugucu

SEQ ID NO: 2291152 - RNA, 13 nt, Human
auucuaaugucuu

SEQ ID NO: 2291153 - RNA, 15 nt, Human
auucuaagugaaauu

SEQ ID NO: 2291154 - RNA, 19 nt, Human
auucuaacuuuuuugcuau

SEQ ID NO: 2291155 - RNA, 18 nt, Human
auucuaagacuaaugcuc

SEQ ID NO: 2291156 - RNA, 17 nt, Human
auucccuagaucuuucu

SEQ ID NO: 2291157 - RNA, 21 nt, Human
auuccccuaucucuagaauuu

SEQ ID NO: 2291158 - RNA, 20 nt, Human
auuccccggggcguuucuuu

SEQ ID NO: 2291159 - RNA, 13 nt, Human
auuccccucugcu

SEQ ID NO: 2291160 - RNA, 15 nt, Human
auuccccucugcugc

SEQ ID NO: 2291161 - RNA, 22 nt, Human
auuccccucugcugcugucccu

SEQ ID NO: 2291162 - RNA, 23 nt, Human
auuccccgucucugguuccuccc

SEQ ID NO: 2291163 - RNA, 23 nt, Human
auucccccuggccaccacccccc

SEQ ID NO: 2291164 - RNA, 21 nt, Human
auucccuagaaacuuccaaau

SEQ ID NO: 2291165 - RNA, 20 nt, Human
auucccuagaaacuuccaaa

SEQ ID NO: 2291166 - RNA, 17 nt, Human
auucccuagaaacuucc

SEQ ID NO: 2291167 - RNA, 20 nt, Human
auucccagggaagugcucug

SEQ ID NO: 2291168 - RNA, 22 nt, Human
auucccagggaagugcucugau

SEQ ID NO: 2291169 - RNA, 15 nt, Human
auucccauuuugcaa

SEQ ID NO: 2291170 - RNA, 15 nt, Human
auucccaucugucac

SEQ ID NO: 2291171 - RNA, 20 nt, Human
auucccauuuugcaaaauuu

SEQ ID NO: 2291172 - RNA, 18 nt, Human
auucccauuuugcaaaau

SEQ ID NO: 2291173 - RNA, 23 nt, Human
auucccauuuugcaaaauuucca

SEQ ID NO: 2291174 - RNA, 23 nt, Human
auucccagagacaggaaaauccu

SEQ ID NO: 2291175 - RNA, 19 nt, Human
auucccagagacaggaaaa

SEQ ID NO: 2291176 - RNA, 16 nt, Human
auucccagagacagga

SEQ ID NO: 2291177 - RNA, 12 nt, Human
auucccagagac

SEQ ID NO: 2291178 - RNA, 13 nt, Human
auuccagccccuc

SEQ ID NO: 2291179 - RNA, 14 nt, Human
auuccagccccucu

SEQ ID NO: 2291180 - RNA, 12 nt, Human
auucccagccca

SEQ ID NO: 2291181 - RNA, 19 nt, Human
auucccagagcaaaauaau

SEQ ID NO: 2291182 - RNA, 17 nt, Human
auucccagagcaaaaua

SEQ ID NO: 2291183 - RNA, 19 nt, Human
auuccagagcguguaguga

SEQ ID NO: 2291184 - RNA, 12 nt, Human
auuccagaggaa

SEQ ID NO: 2291185 - RNA, 20 nt, Human
auuccagaucugcagucacu

SEQ ID NO: 2291186 - RNA, 21 nt, Human
auuccagagaguggcuccucc

SEQ ID NO: 2291187 - RNA, 19 nt, Human
auuccagagaguggcuccu

SEQ ID NO: 2291188 - RNA, 13 nt, Human
auucaggaagcuc

SEQ ID NO: 2291189 - RNA, 16 nt, Human
auucaggaagaugaaa

SEQ ID NO: 2291190 - RNA, 22 nt, Human
auucaggaagcagcuuucccca

SEQ ID NO: 2291191 - RNA, 12 nt, Human
auucaggaagcu

SEQ ID NO: 2291192 - RNA, 22 nt, Human
auucaggaaaacugacagagga

SEQ ID NO: 2291193 - RNA, 20 nt, Human
auucagcuucauuuguguca

SEQ ID NO: 2291194 - RNA, 19 nt, Human
auucaggaaaagccucugu

SEQ ID NO: 2291195 - RNA, 12 nt, Human
auucagcuucau

SEQ ID NO: 2291196 - RNA, 18 nt, Human
auucagacagcugccugg

SEQ ID NO: 2291197 - RNA, 14 nt, Human
auucagacagcugc

SEQ ID NO: 2291198 - RNA, 15 nt, Human
auucagacagcugcc

SEQ ID NO: 2291199 - RNA, 16 nt, Human
auucagacagcugccu

SEQ ID NO: 2291200 - RNA, 17 nt, Human
auucagacagcugccug

SEQ ID NO: 2291201 - RNA, 13 nt, Human
auucagaaauugg

SEQ ID NO: 2291202 - RNA, 14 nt, Human
auucagaaauugga

SEQ ID NO: 2291203 - RNA, 13 nt, Human
auucacauuguau

SEQ ID NO: 2291204 - RNA, 20 nt, Human
auucacauuguauucagagu

SEQ ID NO: 2291205 - RNA, 11 nt, Human
auucagacagc

SEQ ID NO: 2291206 - RNA, 13 nt, Human
auucagacaagca

SEQ ID NO: 2291207 - RNA, 15 nt, Human
auucagaaggggagg

SEQ ID NO: 2291208 - RNA, 12 nt, Human
auucagacagcu

SEQ ID NO: 2291209 - RNA, 13 nt, Human
auucagacagcug

SEQ ID NO: 2291210 - RNA, 19 nt, Human
auuaucuauacauaucuuu

SEQ ID NO: 2291211 - RNA, 14 nt, Human
auuaucuauacaua

SEQ ID NO: 2291212 - RNA, 20 nt, Human
auuaucuauacauaucuuua

SEQ ID NO: 2291213 - RNA, 21 nt, Human
auuauguuaaaacugggacag

SEQ ID NO: 2291214 - RNA, 18 nt, Human
auuaucuagauacuguau

SEQ ID NO: 2291215 - RNA, 14 nt, Human
auuaucuagauacu

SEQ ID NO: 2291216 - RNA, 19 nt, Human
auuaucuaaaaucugcuag

SEQ ID NO: 2291217 - RNA, 17 nt, Human
auuaucuaaaguguguu

SEQ ID NO: 2291218 - RNA, 23 nt, Human
auuaucuaaaguguguuguugcu

SEQ ID NO: 2291219 - RNA, 15 nt, Human
auuauauuuauuacu

SEQ ID NO: 2291220 - RNA, 18 nt, Human
auuauauuuauuacugua

SEQ ID NO: 2291221 - RNA, 21 nt, Human
auuauuaguaagaaaacauca

SEQ ID NO: 2291222 - RNA, 22 nt, Human
auuauuagccagguaaugugaa

SEQ ID NO: 2291223 - RNA, 15 nt, Human
auuauuaguacugcu

SEQ ID NO: 2291224 - RNA, 22 nt, Human
auuauuaguuuugauuuaaugu

SEQ ID NO: 2291225 - RNA, 17 nt, Human
auuauuauuaaaaauau

SEQ ID NO: 2291226 - RNA, 15 nt, Human
auuauuauucuucau

SEQ ID NO: 2291227 - RNA, 22 nt, Human
auuauuaguuuacaucauuuuu

SEQ ID NO: 2291228 - RNA, 15 nt, Human
auuauuauuuggccc

SEQ ID NO: 2291229 - RNA, 13 nt, Human
auuauuacuguuu

SEQ ID NO: 2291230 - RNA, 21 nt, Human
auuauuacuuauuuuugacag

SEQ ID NO: 2291231 - RNA, 20 nt, Human
auuauuacuuauuuuugaca

SEQ ID NO: 2291232 - RNA, 23 nt, Human
auuauguuaaacuagcauaucug

SEQ ID NO: 2291233 - RNA, 12 nt, Human
auuauguuaaac

SEQ ID NO: 2291234 - RNA, 13 nt, Human
auuauguuaaacu

SEQ ID NO: 2291235 - RNA, 14 nt, Human
auuauguuaaacua

SEQ ID NO: 2291236 - RNA, 22 nt, Human
auuauguuaaacuagcauaucu

SEQ ID NO: 2291237 - RNA, 11 nt, Human
auuauuucaga

SEQ ID NO: 2291238 - RNA, 21 nt, Human
auuauuucacuuuagaugcug

SEQ ID NO: 2291239 - RNA, 17 nt, Human
auuauuuauuuaauaac

SEQ ID NO: 2291240 - RNA, 18 nt, Human
auuauuucacuuuagaug

SEQ ID NO: 2291241 - RNA, 16 nt, Human
auuauuucuaggaaga

SEQ ID NO: 2291242 - RNA, 20 nt, Human
auuauuucuaggaagaauuu

SEQ ID NO: 2291243 - RNA, 22 nt, Human
auuauuucuaggaagaauuuua

SEQ ID NO: 2291244 - RNA, 15 nt, Human
auuauuuauuuauuu

SEQ ID NO: 2291245 - RNA, 23 nt, Human
auuauuuauucagcuucauuugu

SEQ ID NO: 2291246 - RNA, 14 nt, Human
auuauuuauuuaau

SEQ ID NO: 2291247 - RNA, 16 nt, Human
auuauuauucuucaua

SEQ ID NO: 2291248 - RNA, 15 nt, Human
auuauuauuuguguu

SEQ ID NO: 2291249 - RNA, 14 nt, Human
auuauuugaaaaca

SEQ ID NO: 2291250 - RNA, 23 nt, Human
auuauuugaaaacauauaaagca

SEQ ID NO: 2291251 - RNA, 11 nt, Human
auuauuugcau

SEQ ID NO: 2291252 - RNA, 15 nt, Human
auuauuuguguaaua

SEQ ID NO: 2291253 - RNA, 12 nt, Human
auuauuuugaug

SEQ ID NO: 2291254 - RNA, 23 nt, Human
auucacaguucuuugggccagac

SEQ ID NO: 2291255 - RNA, 20 nt, Human
auuauuuugguacuuuuaug

SEQ ID NO: 2291256 - RNA, 22 nt, Human
auucacaguucuuugggccaga

SEQ ID NO: 2291257 - RNA, 20 nt, Human
auucacaucuaaccucaucu

SEQ ID NO: 2291258 - RNA, 17 nt, Human
auucacaucuaaccuca

SEQ ID NO: 2291259 - RNA, 20 nt, Human
auucaaacagucucaggaaa

SEQ ID NO: 2291260 - RNA, 19 nt, Human
auucaaacagucucaggaa

SEQ ID NO: 2291261 - RNA, 18 nt, Human
auucaaacagucucagga

SEQ ID NO: 2291262 - RNA, 16 nt, Human
auucaaacagucucag

SEQ ID NO: 2291263 - RNA, 17 nt, Human
auuauuuguguaauaga

SEQ ID NO: 2291264 - RNA, 19 nt, Human
auuauuuugguacuuuuau

SEQ ID NO: 2291265 - RNA, 16 nt, Human
auucuaguuuugucaa

SEQ ID NO: 2291266 - RNA, 22 nt, Human
auuauaauuuuuuucaauauuu

SEQ ID NO: 2291267 - RNA, 23 nt, Human
auuauaauuuuuuucaauauuua

SEQ ID NO: 2291268 - RNA, 17 nt, Human
auuauaauuuaaugcau

SEQ ID NO: 2291269 - RNA, 14 nt, Human
auuaguuaauauau

SEQ ID NO: 2291270 - RNA, 18 nt, Human
auuaguuuacaucauuuu

SEQ ID NO: 2291271 - RNA, 22 nt, Human
auuaguguaugcuuugaaugua

SEQ ID NO: 2291272 - RNA, 15 nt, Human
uuuguggccucagaa

SEQ ID NO: 2291273 - RNA, 17 nt, Human
auuagugcuaaguguga

SEQ ID NO: 2291274 - RNA, 18 nt, Human
auuagugcuaagugugaa

SEQ ID NO: 2291275 - RNA, 20 nt, Human
auuagugcuaagugugaacu

SEQ ID NO: 2291276 - RNA, 22 nt, Human
auuagugcuaagugugaacugg

SEQ ID NO: 2291277 - RNA, 14 nt, Human
uuuguggccucaga

SEQ ID NO: 2291278 - RNA, 12 nt, Human
uuuguggccuca

SEQ ID NO: 2291279 - RNA, 22 nt, Human
uuuguggccaaggagcugcuau

SEQ ID NO: 2291280 - RNA, 21 nt, Human
uuuguggccaaggagcugcua

SEQ ID NO: 2291281 - RNA, 20 nt, Human
uuuguggccaaggagcugcu

SEQ ID NO: 2291282 - RNA, 18 nt, Human
uuuguggccaaggagcug

SEQ ID NO: 2291283 - RNA, 11 nt, Human
uuuguggccaa

SEQ ID NO: 2291284 - RNA, 17 nt, Human
uuuguggaugucuuccu

SEQ ID NO: 2291285 - RNA, 17 nt, Human
uuuguggcaccuuuucu

SEQ ID NO: 2291286 - RNA, 14 nt, Human
uuugugcuucuaau

SEQ ID NO: 2291287 - RNA, 20 nt, Human
uuuguggaaagucacagguc

SEQ ID NO: 2291288 - RNA, 12 nt, Human
uuuguggaauaa

SEQ ID NO: 2291289 - RNA, 14 nt, Human
uuuguggaugucuu

SEQ ID NO: 2291290 - RNA, 11 nt, Human
uuuguggaaaa

SEQ ID NO: 2291291 - RNA, 13 nt, Human
uuugugcuguggg

SEQ ID NO: 2291292 - RNA, 12 nt, Human
uuugugcuucua

SEQ ID NO: 2291293 - RNA, 18 nt, Human
auuauauuguuaaucaau

SEQ ID NO: 2291294 - RNA, 20 nt, Human
auuauauuauuaguuuugau

SEQ ID NO: 2291295 - RNA, 14 nt, Human
auuauauuaugaag

SEQ ID NO: 2291296 - RNA, 15 nt, Human
auuauauuuacaaau

SEQ ID NO: 2291297 - RNA, 19 nt, Human
auuauacuaagaaaagaua

SEQ ID NO: 2291298 - RNA, 17 nt, Human
auuauacuaagaaaaga

SEQ ID NO: 2291299 - RNA, 15 nt, Human
auuauacuaagaaaa

SEQ ID NO: 2291300 - RNA, 12 nt, Human
auuauacuguau

SEQ ID NO: 2291301 - RNA, 18 nt, Human
auuauacuguauuaagag

SEQ ID NO: 2291302 - RNA, 13 nt, Human
auuauauuaaaau

SEQ ID NO: 2291303 - RNA, 14 nt, Human
auuauauuaaaaua

SEQ ID NO: 2291304 - RNA, 22 nt, Human
auuauacagaccgaacuguugu

SEQ ID NO: 2291305 - RNA, 19 nt, Human
auuauacccccugcaaagc

SEQ ID NO: 2291306 - RNA, 19 nt, Human
auucagacagcugccuggg

SEQ ID NO: 2291307 - RNA, 16 nt, Human
auggcaggauggccug

SEQ ID NO: 2291308 - RNA, 14 nt, Human
auggcagcugccac

SEQ ID NO: 2291309 - RNA, 20 nt, Human
auggcagcuguuuaaauguu

SEQ ID NO: 2291310 - RNA, 17 nt, Human
auggcaggauggccugg

SEQ ID NO: 2291311 - RNA, 22 nt, Human
auggcaggauggccuggccagg

SEQ ID NO: 2291312 - RNA, 16 nt, Human
auggcacuugcaucug

SEQ ID NO: 2291313 - RNA, 17 nt, Human
auggcacuugcaucugu

SEQ ID NO: 2291314 - RNA, 14 nt, Human
auggcaccagaggc

SEQ ID NO: 2291315 - RNA, 13 nt, Human
auggcacccagug

SEQ ID NO: 2291316 - RNA, 17 nt, Human
auggcaccuucagacuu

SEQ ID NO: 2291317 - RNA, 21 nt, Human
auggcaccuucagacuuugcu

SEQ ID NO: 2291318 - RNA, 20 nt, Human
auggcacuuagcuaucagaa

SEQ ID NO: 2291319 - RNA, 22 nt, Human
auggcacuuagcuaucagaaga

SEQ ID NO: 2291320 - RNA, 20 nt, Human
auggagacuccaugagaagc

SEQ ID NO: 2291321 - RNA, 22 nt, Human
auggagaagaaaggccaucaga

SEQ ID NO: 2291322 - RNA, 14 nt, Human
auggagacuccugc

SEQ ID NO: 2291323 - RNA, 18 nt, Human
auggagacuccugcccug

SEQ ID NO: 2291324 - RNA, 18 nt, Human
auggagacugucucaaga

SEQ ID NO: 2291325 - RNA, 13 nt, Human
auggagagaaaac

SEQ ID NO: 2291326 - RNA, 20 nt, Human
auggagacuccugcccuguu

SEQ ID NO: 2291327 - RNA, 21 nt, Human
auggagacugguccugugugc

SEQ ID NO: 2291328 - RNA, 14 nt, Human
auggcacuaguauu

SEQ ID NO: 2291329 - RNA, 16 nt, Human
auggcacuaguauuuc

SEQ ID NO: 2291330 - RNA, 14 nt, Human
auggccccagcaca

SEQ ID NO: 2291331 - RNA, 15 nt, Human
auggccccagcacag

SEQ ID NO: 2291332 - RNA, 17 nt, Human
auggccccagcacagcu

SEQ ID NO: 2291333 - RNA, 18 nt, Human
auggccccagcacagcuu

SEQ ID NO: 2291334 - RNA, 20 nt, Human
auggccccagcacagcuuga

SEQ ID NO: 2291335 - RNA, 22 nt, Human
auggccauggaguguacaagua

SEQ ID NO: 2291336 - RNA, 15 nt, Human
auggccaugguaccc

SEQ ID NO: 2291337 - RNA, 14 nt, Human
auggcccaguguca

SEQ ID NO: 2291338 - RNA, 17 nt, Human
auggccagugucugucc

SEQ ID NO: 2291339 - RNA, 22 nt, Human
auggccagugucugucccgggg

SEQ ID NO: 2291340 - RNA, 17 nt, Human
auggcauccugugaagu

SEQ ID NO: 2291341 - RNA, 15 nt, Human
auggcaucaccucca

SEQ ID NO: 2291342 - RNA, 16 nt, Human
auggcauccugugaag

SEQ ID NO: 2291343 - RNA, 15 nt, Human
auggcauccugugaa

SEQ ID NO: 2291344 - RNA, 17 nt, Human
auggcauccaagagugc

SEQ ID NO: 2291345 - RNA, 15 nt, Human
auggcagugucuuuc

SEQ ID NO: 2291346 - RNA, 18 nt, Human
auggcaguguuccuauuu

SEQ ID NO: 2291347 - RNA, 11 nt, Human
auggcccuggg

SEQ ID NO: 2291348 - RNA, 18 nt, Human
auggcccuucccacugga

SEQ ID NO: 2291349 - RNA, 20 nt, Human
auggcggguggggguggaau

SEQ ID NO: 2291350 - RNA, 11 nt, Human
auggccccucu

SEQ ID NO: 2291351 - RNA, 18 nt, Human
auggccccucugaccugc

SEQ ID NO: 2291352 - RNA, 23 nt, Human
auggccccucugaccugcacugg

SEQ ID NO: 2291353 - RNA, 20 nt, Human
auggcgugucccucucggaa

SEQ ID NO: 2291354 - RNA, 17 nt, Human
auggcgugaucucggcu

SEQ ID NO: 2291355 - RNA, 19 nt, Human
auggcuaagcaaaauguga

SEQ ID NO: 2291356 - RNA, 18 nt, Human
auggcucacuauggugcc

SEQ ID NO: 2291357 - RNA, 19 nt, Human
auggcucacuauggugcca

SEQ ID NO: 2291358 - RNA, 22 nt, Human
auggcucacuauggugccaaug

SEQ ID NO: 2291359 - RNA, 15 nt, Human
auggcuccagaaaug

SEQ ID NO: 2291360 - RNA, 16 nt, Human
auggcuccagaaaugu

SEQ ID NO: 2291361 - RNA, 16 nt, Human
auggcucacuaugaau

SEQ ID NO: 2291362 - RNA, 18 nt, Human
auggcucacuaugaaucu

SEQ ID NO: 2291363 - RNA, 20 nt, Human
auggcucacuaugaaucuau

SEQ ID NO: 2291364 - RNA, 19 nt, Human
auggcuauauggcaagaaa

SEQ ID NO: 2291365 - RNA, 18 nt, Human
auggcguggucaagcacu

SEQ ID NO: 2291366 - RNA, 14 nt, Human
auggcuauauggca

SEQ ID NO: 2291367 - RNA, 18 nt, Human
auggcuaauguacugcau

SEQ ID NO: 2291368 - RNA, 17 nt, Human
augggacugggagggcc

SEQ ID NO: 2291369 - RNA, 16 nt, Human
augggacugggagggc

SEQ ID NO: 2291370 - RNA, 13 nt, Human
augggacuucuuu

SEQ ID NO: 2291371 - RNA, 19 nt, Human
augggacuucuuuucacau

SEQ ID NO: 2291372 - RNA, 15 nt, Human
augggacugggaggg

SEQ ID NO: 2291373 - RNA, 14 nt, Human
augggacugggagg

SEQ ID NO: 2291374 - RNA, 23 nt, Human
auggcuccgaacacccucgaagc

SEQ ID NO: 2291375 - RNA, 22 nt, Human
auggcuccagucugcugcccuc

SEQ ID NO: 2291376 - RNA, 20 nt, Human
auggcuccagucugcugccc

SEQ ID NO: 2291377 - RNA, 13 nt, Human
auggcuccagucu

SEQ ID NO: 2291378 - RNA, 17 nt, Human
auggcuccagaaauguc

SEQ ID NO: 2291379 - RNA, 23 nt, Human
auggcuccagucugcugcccucc

SEQ ID NO: 2291380 - RNA, 17 nt, Human
auggcucccacaggagu

SEQ ID NO: 2291381 - RNA, 22 nt, Human
augggagaaauaguguggaaau

SEQ ID NO: 2291382 - RNA, 20 nt, Human
augggacuucuuuucacauu

SEQ ID NO: 2291383 - RNA, 23 nt, Human
augggacuucuuuucacauucuu

SEQ ID NO: 2291384 - RNA, 17 nt, Human
augggagacccuugaca

SEQ ID NO: 2291385 - RNA, 18 nt, Human
augggagacccuugacac

SEQ ID NO: 2291386 - RNA, 15 nt, Human
augggagagaagaga

SEQ ID NO: 2291387 - RNA, 19 nt, Human
augggagagaagagaaugc

SEQ ID NO: 2291388 - RNA, 22 nt, Human
augggagcugguuagaaaugca

SEQ ID NO: 2291389 - RNA, 20 nt, Human
augggagcugguuagaaaug

SEQ ID NO: 2291390 - RNA, 15 nt, Human
augggagaguagaug

SEQ ID NO: 2291391 - RNA, 23 nt, Human
augggagcugaggccacacucag

SEQ ID NO: 2291392 - RNA, 23 nt, Human
augggaggcucacccccuucucc

SEQ ID NO: 2291393 - RNA, 21 nt, Human
augggagcugguuagaaaugc

SEQ ID NO: 2291394 - RNA, 20 nt, Human
augggagggggcuugaagcc

SEQ ID NO: 2291395 - RNA, 18 nt, Human
augggagggaggcucagg

SEQ ID NO: 2291396 - RNA, 21 nt, Human
uuucccgagcaaagucuaaag

SEQ ID NO: 2291397 - RNA, 20 nt, Human
uuuccccugcccccagaccu

SEQ ID NO: 2291398 - RNA, 13 nt, Human
uuuccccucccug

SEQ ID NO: 2291399 - RNA, 16 nt, Human
uuuccccucccugggu

SEQ ID NO: 2291400 - RNA, 18 nt, Human
uuuccccggucccuugag

SEQ ID NO: 2291401 - RNA, 21 nt, Human
uuucccccuuuucugcauuuu

SEQ ID NO: 2291402 - RNA, 17 nt, Human
uuuccaugaaaaugcaa

SEQ ID NO: 2291403 - RNA, 16 nt, Human
uuuccaugaaaacguu

SEQ ID NO: 2291404 - RNA, 17 nt, Human
uuuccaugaaguuugaa

SEQ ID NO: 2291405 - RNA, 23 nt, Human
uuuccccccacucuccccacacu

SEQ ID NO: 2291406 - RNA, 16 nt, Human
uuucccccuucuacau

SEQ ID NO: 2291407 - RNA, 23 nt, Human
uuucccccugcauucuuucugua

SEQ ID NO: 2291408 - RNA, 13 nt, Human
uuucauuauuagu

SEQ ID NO: 2291409 - RNA, 21 nt, Human
uuucauuauuaguacugcucu

SEQ ID NO: 2291410 - RNA, 12 nt, Human
uuuccaucuuua

SEQ ID NO: 2291411 - RNA, 17 nt, Human
uuuccaugaguccccug

SEQ ID NO: 2291412 - RNA, 18 nt, Human
uuuccaugaguccccugu

SEQ ID NO: 2291413 - RNA, 14 nt, Human
uuucaaauuucaca

SEQ ID NO: 2291414 - RNA, 23 nt, Human
uuucaacaaguagcuaaagucug

SEQ ID NO: 2291415 - RNA, 21 nt, Human
uuucauuaauacagggcauuu

SEQ ID NO: 2291416 - RNA, 18 nt, Human
uuucauuauguaaaaugu

SEQ ID NO: 2291417 - RNA, 20 nt, Human
uuucauuauguaaaauguuu

SEQ ID NO: 2291418 - RNA, 14 nt, Human
uuucaaagaaggaa

SEQ ID NO: 2291419 - RNA, 17 nt, Human
uuucaaagggagagaga

SEQ ID NO: 2291420 - RNA, 16 nt, Human
uuucaaagauucaaaa

SEQ ID NO: 2291421 - RNA, 17 nt, Human
uuucaaagcuuuuucca

SEQ ID NO: 2291422 - RNA, 14 nt, Human
uuucaaauuguauc

SEQ ID NO: 2291423 - RNA, 16 nt, Human
uuucaaauugagagaa

SEQ ID NO: 2291424 - RNA, 21 nt, Human
uuucaaauuggagcuucaugg

SEQ ID NO: 2291425 - RNA, 13 nt, Human
uuucaaauaucac

SEQ ID NO: 2291426 - RNA, 14 nt, Human
uuucaaaugugcug

SEQ ID NO: 2291427 - RNA, 20 nt, Human
uuucaaauagggucuaacuc

SEQ ID NO: 2291428 - RNA, 19 nt, Human
uuucaaauagggucuaacu

SEQ ID NO: 2291429 - RNA, 18 nt, Human
auggacucuacacuguga

SEQ ID NO: 2291430 - RNA, 16 nt, Human
auggacucuacacugu

SEQ ID NO: 2291431 - RNA, 14 nt, Human
auggacucuacacu

SEQ ID NO: 2291432 - RNA, 21 nt, Human
auggacuccagccugccuggc

SEQ ID NO: 2291433 - RNA, 15 nt, Human
auggacucugcacau

SEQ ID NO: 2291434 - RNA, 17 nt, Human
auggacucuucccccac

SEQ ID NO: 2291435 - RNA, 16 nt, Human
auggacugaugcuuuu

SEQ ID NO: 2291436 - RNA, 16 nt, Human
auggacuuguauauuu

SEQ ID NO: 2291437 - RNA, 17 nt, Human
auggacuuguauauuug

SEQ ID NO: 2291438 - RNA, 23 nt, Human
auggacuuguauauuuguacaaa

SEQ ID NO: 2291439 - RNA, 14 nt, Human
auggagaaacccug

SEQ ID NO: 2291440 - RNA, 22 nt, Human
auggacuuguauauuuguacaa

SEQ ID NO: 2291441 - RNA, 22 nt, Human
auggagaagcagaaauacauau

SEQ ID NO: 2291442 - RNA, 11 nt, Human
auggacuuugu

SEQ ID NO: 2291443 - RNA, 12 nt, Human
auggacuuuguu

SEQ ID NO: 2291444 - RNA, 18 nt, Human
uuucccguggccccagcc

SEQ ID NO: 2291445 - RNA, 19 nt, Human
uuucccguggccccagccu

SEQ ID NO: 2291446 - RNA, 20 nt, Human
uuucccguggccccagccug

SEQ ID NO: 2291447 - RNA, 21 nt, Human
uuucccguggccccagccugg

SEQ ID NO: 2291448 - RNA, 13 nt, Human
uuucccgccaagc

SEQ ID NO: 2291449 - RNA, 15 nt, Human
uuucccguggcccca

SEQ ID NO: 2291450 - RNA, 16 nt, Human
uuucccguggccccag

SEQ ID NO: 2291451 - RNA, 14 nt, Human
uuuccccuguccug

SEQ ID NO: 2291452 - RNA, 23 nt, Human
uuuccccuguccugauggucagc

SEQ ID NO: 2291453 - RNA, 21 nt, Human
uuuccccuguggggaucucag

SEQ ID NO: 2291454 - RNA, 22 nt, Human
uuucccgagcaaagucuaaagu

SEQ ID NO: 2291455 - RNA, 21 nt, Human
auggacaccccuuauccagga

SEQ ID NO: 2291456 - RNA, 22 nt, Human
auggacaccccuuauccaggac

SEQ ID NO: 2291457 - RNA, 22 nt, Human
auggacacuuugaaauguguuu

SEQ ID NO: 2291458 - RNA, 22 nt, Human
auggacuaucugucugguggcc

SEQ ID NO: 2291459 - RNA, 20 nt, Human
auggacuaucugucuggugg

SEQ ID NO: 2291460 - RNA, 21 nt, Human
auggacuaucugucugguggc

SEQ ID NO: 2291461 - RNA, 13 nt, Human
auggacuaucugu

SEQ ID NO: 2291462 - RNA, 17 nt, Human
auggacuaucugucugg

SEQ ID NO: 2291463 - RNA, 19 nt, Human
auggacacuccagugccag

SEQ ID NO: 2291464 - RNA, 15 nt, Human
auggacacuuugaaa

SEQ ID NO: 2291465 - RNA, 23 nt, Human
auggacacuuugaaauguguuuc

SEQ ID NO: 2291466 - RNA, 19 nt, Human
auggacuaacuugucuuug

SEQ ID NO: 2291467 - RNA, 11 nt, Human
auggacacucc

SEQ ID NO: 2291468 - RNA, 23 nt, Human
auggacaccccuuauccaggacu

SEQ ID NO: 2291469 - RNA, 13 nt, Human
auggacacuccag

SEQ ID NO: 2291470 - RNA, 15 nt, Human
auggacacuccagug

SEQ ID NO: 2291471 - RNA, 17 nt, Human
auggacacuccagugcc

SEQ ID NO: 2291472 - RNA, 21 nt, Human
augcuccagccaaccccugug

SEQ ID NO: 2291473 - RNA, 20 nt, Human
augcuccagccaaccccugu

SEQ ID NO: 2291474 - RNA, 19 nt, Human
augcuccagccaaccccug

SEQ ID NO: 2291475 - RNA, 18 nt, Human
augcuccagccaaccccu

SEQ ID NO: 2291476 - RNA, 17 nt, Human
augcuccagccaacccc

SEQ ID NO: 2291477 - RNA, 12 nt, Human
augcuccagcca

SEQ ID NO: 2291478 - RNA, 18 nt, Human
augcuagguuaauuccaa

SEQ ID NO: 2291479 - RNA, 13 nt, Human
augcuaucucugu

SEQ ID NO: 2291480 - RNA, 22 nt, Human
uuuauuaagauggauucucaga

SEQ ID NO: 2291481 - RNA, 23 nt, Human
uuuaucaugacauguuauauauu

SEQ ID NO: 2291482 - RNA, 16 nt, Human
uuuauuaauaaacauu

SEQ ID NO: 2291483 - RNA, 21 nt, Human
uuuauuaauaaacauucuauc

SEQ ID NO: 2291484 - RNA, 17 nt, Human
uuuauuaauugcuuuga

SEQ ID NO: 2291485 - RNA, 17 nt, Human
uuuauuaaugcacuuuc

SEQ ID NO: 2291486 - RNA, 12 nt, Human
uuuauuaaugca

SEQ ID NO: 2291487 - RNA, 22 nt, Human
augcuagaacucccuuucaaca

SEQ ID NO: 2291488 - RNA, 16 nt, Human
augcuagcucugagcc

SEQ ID NO: 2291489 - RNA, 15 nt, Human
augcuaggucucgga

SEQ ID NO: 2291490 - RNA, 21 nt, Human
augcuagaacucccuuucaac

SEQ ID NO: 2291491 - RNA, 20 nt, Human
augcuagaacucccuuucaa

SEQ ID NO: 2291492 - RNA, 18 nt, Human
uuuaucacacuucuguga

SEQ ID NO: 2291493 - RNA, 17 nt, Human
uuuaucacacuucugug

SEQ ID NO: 2291494 - RNA, 14 nt, Human
uuuaucacauguau

SEQ ID NO: 2291495 - RNA, 16 nt, Human
uuuaucacauguaugu

SEQ ID NO: 2291496 - RNA, 18 nt, Human
uuuaucacauguauguuu

SEQ ID NO: 2291497 - RNA, 15 nt, Human
uuuaucacacuucug

SEQ ID NO: 2291498 - RNA, 18 nt, Human
uuuaucaaucaguauaau

SEQ ID NO: 2291499 - RNA, 14 nt, Human
uuuaucaaaucagu

SEQ ID NO: 2291500 - RNA, 21 nt, Human
uuuaucaaucaguauaauucu

SEQ ID NO: 2291501 - RNA, 12 nt, Human
uuuauauuuuua

SEQ ID NO: 2291502 - RNA, 22 nt, Human
uuuaucaaacagaauuuuaaag

SEQ ID NO: 2291503 - RNA, 18 nt, Human
uuuaucaugugaaaucau

SEQ ID NO: 2291504 - RNA, 15 nt, Human
uuuauuaagauggau

SEQ ID NO: 2291505 - RNA, 17 nt, Human
uuuaucauucaagugua

SEQ ID NO: 2291506 - RNA, 14 nt, Human
uuuaucauucaagu

SEQ ID NO: 2291507 - RNA, 15 nt, Human
uuuaucauucaagug

SEQ ID NO: 2291508 - RNA, 17 nt, Human
uuuaucaugugaaauca

SEQ ID NO: 2291509 - RNA, 23 nt, Human
uuuaucaugcauguccuguaaag

SEQ ID NO: 2291510 - RNA, 22 nt, Human
uuuaucaugcauguccuguaaa

SEQ ID NO: 2291511 - RNA, 16 nt, Human
uuuaucaugcaugucc

SEQ ID NO: 2291512 - RNA, 14 nt, Human
uuuaucaugacaug

SEQ ID NO: 2291513 - RNA, 15 nt, Human
uuuaucaugacaugu

SEQ ID NO: 2291514 - RNA, 23 nt, Human
augcuaaagaaaaagucauccaa

SEQ ID NO: 2291515 - RNA, 14 nt, Human
augcuaacaucuaa

SEQ ID NO: 2291516 - RNA, 16 nt, Human
augcuaacaucuaaaa

SEQ ID NO: 2291517 - RNA, 17 nt, Human
augcuaacaucuaaaaa

SEQ ID NO: 2291518 - RNA, 19 nt, Human
augcuaacaucuaaaaaua

SEQ ID NO: 2291519 - RNA, 16 nt, Human
augcuaagacucagug

SEQ ID NO: 2291520 - RNA, 16 nt, Human
uuuauauuagaagugu

SEQ ID NO: 2291521 - RNA, 14 nt, Human
uuuauaugucaaag

SEQ ID NO: 2291522 - RNA, 14 nt, Human
uuuauauuuaguga

SEQ ID NO: 2291523 - RNA, 14 nt, Human
uuuauauuuaguua

SEQ ID NO: 2291524 - RNA, 14 nt, Human
augcugugugacuc

SEQ ID NO: 2291525 - RNA, 22 nt, Human
augcuuccugacaaucaacucu

SEQ ID NO: 2291526 - RNA, 20 nt, Human
augcuuccugacaaucaacu

SEQ ID NO: 2291527 - RNA, 16 nt, Human
augcuuccugacaauc

SEQ ID NO: 2291528 - RNA, 15 nt, Human
augcuuccugacaau

SEQ ID NO: 2291529 - RNA, 15 nt, Human
augcuuccuagaagu

SEQ ID NO: 2291530 - RNA, 16 nt, Human
augcuuccuagaaguu

SEQ ID NO: 2291531 - RNA, 17 nt, Human
augcuuccuagaaguua

SEQ ID NO: 2291532 - RNA, 21 nt, Human
augcuuccuagaaguuacuga

SEQ ID NO: 2291533 - RNA, 23 nt, Human
augcuuccuagaaguuacugaau

SEQ ID NO: 2291534 - RNA, 20 nt, Human
auggaaccgcaggaagcugc

SEQ ID NO: 2291535 - RNA, 19 nt, Human
auggaaccgcaggaagcug

SEQ ID NO: 2291536 - RNA, 18 nt, Human
auggaaccgcaggaagcu

SEQ ID NO: 2291537 - RNA, 17 nt, Human
auggaaccgcaggaagc

SEQ ID NO: 2291538 - RNA, 13 nt, Human
augcuucucacug

SEQ ID NO: 2291539 - RNA, 18 nt, Human
auggaaccugacguagcu

SEQ ID NO: 2291540 - RNA, 21 nt, Human
auggaaccuccuuucucuucu

SEQ ID NO: 2291541 - RNA, 13 nt, Human
auggaaccuccuu

SEQ ID NO: 2291542 - RNA, 14 nt, Human
auggaaccuccuuu

SEQ ID NO: 2291543 - RNA, 20 nt, Human
augcucccccauccuccccu

SEQ ID NO: 2291544 - RNA, 18 nt, Human
augcucccccauccuccc

SEQ ID NO: 2291545 - RNA, 15 nt, Human
augcucccccauccu

SEQ ID NO: 2291546 - RNA, 13 nt, Human
augcuccagucaa

SEQ ID NO: 2291547 - RNA, 24 nt, Human
augcuccagucaacaaacuauuuc

SEQ ID NO: 2291548 - RNA, 22 nt, Human
augcucccccauccuccccuuc

SEQ ID NO: 2291549 - RNA, 21 nt, Human
augcucccccauccuccccuu

SEQ ID NO: 2291550 - RNA, 23 nt, Human
augcucccccauccuccccuucc

SEQ ID NO: 2291551 - RNA, 14 nt, Human
augcucccuccccu

SEQ ID NO: 2291552 - RNA, 13 nt, Human
augcugcuggaca

SEQ ID NO: 2291553 - RNA, 13 nt, Human
augcugcuacuua

SEQ ID NO: 2291554 - RNA, 21 nt, Human
augcugcuacuuaauuccuuu

SEQ ID NO: 2291555 - RNA, 23 nt, Human
augcugcucauccccaccugucu

SEQ ID NO: 2291556 - RNA, 13 nt, Human
augcugcuuuccc

SEQ ID NO: 2291557 - RNA, 17 nt, Human
augcugcuuuccccugu

SEQ ID NO: 2291558 - RNA, 18 nt, Human
augcugcuuuccccugug

SEQ ID NO: 2291559 - RNA, 20 nt, Human
augcugcuuuccccuguggg

SEQ ID NO: 2291560 - RNA, 22 nt, Human
augcugugcccuaaaguguauu

SEQ ID NO: 2291561 - RNA, 17 nt, Human
augcugugcuaugaauu

SEQ ID NO: 2291562 - RNA, 23 nt, Human
augcugcuuuccccuguggggau

SEQ ID NO: 2291563 - RNA, 18 nt, Human
augcugugcuaugaauuu

SEQ ID NO: 2291564 - RNA, 20 nt, Human
uuucaaaauaaaaaccaaga

SEQ ID NO: 2291565 - RNA, 15 nt, Human
uuucaaaaugcuuuu

SEQ ID NO: 2291566 - RNA, 13 nt, Human
uuucaaaaugcuu

SEQ ID NO: 2291567 - RNA, 12 nt, Human
uuucaaaaugcu

SEQ ID NO: 2291568 - RNA, 22 nt, Human
uuucaaaauuguuacaaauugu

SEQ ID NO: 2291569 - RNA, 16 nt, Human
uuucaaacauauauaa

SEQ ID NO: 2291570 - RNA, 22 nt, Human
uuucaaacuuuacuauggcccu

SEQ ID NO: 2291571 - RNA, 17 nt, Human
uuucaaacacaaaugca

SEQ ID NO: 2291572 - RNA, 16 nt, Human
uuucaaacacaaaugc

SEQ ID NO: 2291573 - RNA, 16 nt, Human
uuucaaacuuuacuau

SEQ ID NO: 2291574 - RNA, 17 nt, Human
uuucaaacauauauaac

SEQ ID NO: 2291575 - RNA, 21 nt, Human
auggaaccugacguagcugca

SEQ ID NO: 2291576 - RNA, 16 nt, Human
uuuauuuuguguuuag

SEQ ID NO: 2291577 - RNA, 15 nt, Human
uuuauuuuucauauu

SEQ ID NO: 2291578 - RNA, 12 nt, Human
uuuauuuuucau

SEQ ID NO: 2291579 - RNA, 20 nt, Human
uuuauuuuguguuuaggaac

SEQ ID NO: 2291580 - RNA, 20 nt, Human
uuucaaaacucauuuccuau

SEQ ID NO: 2291581 - RNA, 18 nt, Human
uuucaaaaccuuuugaaa

SEQ ID NO: 2291582 - RNA, 23 nt, Human
uuucaaaacacaucuuuccuguc

SEQ ID NO: 2291583 - RNA, 21 nt, Human
uuucaaaaauauaacuuaaaa

SEQ ID NO: 2291584 - RNA, 17 nt, Human
uuucaaaaauauaacuu

SEQ ID NO: 2291585 - RNA, 18 nt, Human
uuucaaaaauauaacuua

SEQ ID NO: 2291586 - RNA, 15 nt, Human
uuuauuuuugcaugg

SEQ ID NO: 2291587 - RNA, 20 nt, Human
uuuauuuuucauauugugcc

SEQ ID NO: 2291588 - RNA, 16 nt, Human
uuucaaaaauauaacu

SEQ ID NO: 2291589 - RNA, 17 nt, Human
uuuauuuuucauuuagu

SEQ ID NO: 2291590 - RNA, 16 nt, Human
uuuauuuuucauauug

SEQ ID NO: 2291591 - RNA, 17 nt, Human
uuuauuuuucauauugu

SEQ ID NO: 2291592 - RNA, 22 nt, Human
uuuauuuuuccauuuacaacaa

SEQ ID NO: 2291593 - RNA, 15 nt, Human
uuuauuuuucuaaaa

SEQ ID NO: 2291594 - RNA, 24 nt, Human
augcaccugaauguuagauaguua

SEQ ID NO: 2291595 - RNA, 18 nt, Human
uuguuuucuucuguaugu

SEQ ID NO: 2291596 - RNA, 23 nt, Human
uuguuuugauguuuguggccuca

SEQ ID NO: 2291597 - RNA, 20 nt, Human
uuguuuugagcuuuccaugu

SEQ ID NO: 2291598 - RNA, 24 nt, Human
uuguuuugagcuuuccauguugcu

SEQ ID NO: 2291599 - RNA, 20 nt, Human
uuguuuucuucuguauguua

SEQ ID NO: 2291600 - RNA, 19 nt, Human
uuguuuugacggaugauug

SEQ ID NO: 2291601 - RNA, 17 nt, Human
uuguuuugagcuuucca

SEQ ID NO: 2291602 - RNA, 15 nt, Human
uuguuuugcuuuuuc

SEQ ID NO: 2291603 - RNA, 18 nt, Human
uuguuuugcuuuuucuga

SEQ ID NO: 2291604 - RNA, 19 nt, Human
uuguuuugcuuuuucugac

SEQ ID NO: 2291605 - RNA, 16 nt, Human
uuguuuugcacuuuuu

SEQ ID NO: 2291606 - RNA, 20 nt, Human
uuguuuugcacacuuugcca

SEQ ID NO: 2291607 - RNA, 14 nt, Human
uuguuuugcacuuu

SEQ ID NO: 2291608 - RNA, 15 nt, Human
uuguuuugcacuuuu

SEQ ID NO: 2291609 - RNA, 18 nt, Human
uuguuuugccaacauugc

SEQ ID NO: 2291610 - RNA, 19 nt, Human
uuuaaaaaucauaaacugu

SEQ ID NO: 2291611 - RNA, 16 nt, Human
uuuaaaaaucauaaac

SEQ ID NO: 2291612 - RNA, 15 nt, Human
uuuaaaaaucauaaa

SEQ ID NO: 2291613 - RNA, 13 nt, Human
uuuaaaaaucaua

SEQ ID NO: 2291614 - RNA, 12 nt, Human
uuuaaaaaucau

SEQ ID NO: 2291615 - RNA, 14 nt, Human
uuuaaaaauauuuu

SEQ ID NO: 2291616 - RNA, 17 nt, Human
uuuaaaaauagacacuc

SEQ ID NO: 2291617 - RNA, 22 nt, Human
uuguuuuggcugaaauucuccu

SEQ ID NO: 2291618 - RNA, 14 nt, Human
uuuaaaaaugaaau

SEQ ID NO: 2291619 - RNA, 12 nt, Human
uuuaaaaaugca

SEQ ID NO: 2291620 - RNA, 11 nt, Human
uuuaaaaauga

SEQ ID NO: 2291621 - RNA, 12 nt, Human
uuuaaaaaugaa

SEQ ID NO: 2291622 - RNA, 20 nt, Human
uuuaaaaaucauuguaugga

SEQ ID NO: 2291623 - RNA, 22 nt, Human
uuuaaaaaucuaccuucuguag

SEQ ID NO: 2291624 - RNA, 18 nt, Human
uuuaaagaagaaacgucu

SEQ ID NO: 2291625 - RNA, 13 nt, Human
uuuaaagaaugcu

SEQ ID NO: 2291626 - RNA, 14 nt, Human
uuuaaagagagguu

SEQ ID NO: 2291627 - RNA, 15 nt, Human
uuuaaagagagguua

SEQ ID NO: 2291628 - RNA, 19 nt, Human
uuuaaauaaaagugaucaa

SEQ ID NO: 2291629 - RNA, 13 nt, Human
uuuaaauaaagua

SEQ ID NO: 2291630 - RNA, 21 nt, Human
uuuaaauaaaguaucaugcau

SEQ ID NO: 2291631 - RNA, 22 nt, Human
uuuaaauaaaguaucaugcauu

SEQ ID NO: 2291632 - RNA, 23 nt, Human
uuuaaauaaaguaucaugcauuc

SEQ ID NO: 2291633 - RNA, 20 nt, Human
uuuaaaguguuucuguuauu

SEQ ID NO: 2291634 - RNA, 16 nt, Human
uuuaaauaaaacccuu

SEQ ID NO: 2291635 - RNA, 23 nt, Human
uuuaaauaaaagaaaaaauaucu

SEQ ID NO: 2291636 - RNA, 19 nt, Human
uuuaaaguguuucuguuau

SEQ ID NO: 2291637 - RNA, 18 nt, Human
uuuaaagugauuaaacgu

SEQ ID NO: 2291638 - RNA, 17 nt, Human
uuuaaagugauuaaacg

SEQ ID NO: 2291639 - RNA, 22 nt, Human
uuuaaaggggcagaaaaacucu

SEQ ID NO: 2291640 - RNA, 16 nt, Human
uuuaaaggggcagaaa

SEQ ID NO: 2291641 - RNA, 16 nt, Human
uuuaaaguagauuaga

SEQ ID NO: 2291642 - RNA, 23 nt, Human
uuuaaaguaugaaucuaugccaa

SEQ ID NO: 2291643 - RNA, 23 nt, Human
augauucgcccaaagccagacag

SEQ ID NO: 2291644 - RNA, 23 nt, Human
augauucuaauuuuuaagcaaaa

SEQ ID NO: 2291645 - RNA, 23 nt, Human
augauucuauuuauauguacaug

SEQ ID NO: 2291646 - RNA, 22 nt, Human
augauucuauuuauauguacau

SEQ ID NO: 2291647 - RNA, 15 nt, Human
augauuccuuccugu

SEQ ID NO: 2291648 - RNA, 20 nt, Human
augauucuuuguuacaggca

SEQ ID NO: 2291649 - RNA, 23 nt, Human
augauucugcuuuuaccaugccc

SEQ ID NO: 2291650 - RNA, 22 nt, Human
augauuccuugauggagauauu

SEQ ID NO: 2291651 - RNA, 15 nt, Human
augauucugcuuuua

SEQ ID NO: 2291652 - RNA, 16 nt, Human
augcaaggaaggaaag

SEQ ID NO: 2291653 - RNA, 15 nt, Human
augcaaggaaggaaa

SEQ ID NO: 2291654 - RNA, 14 nt, Human
augcaaggaaggaa

SEQ ID NO: 2291655 - RNA, 13 nt, Human
augcaaggaagga

SEQ ID NO: 2291656 - RNA, 16 nt, Human
augcaacaggcacuca

SEQ ID NO: 2291657 - RNA, 12 nt, Human
augcaagauauu

SEQ ID NO: 2291658 - RNA, 13 nt, Human
augauuggauuau

SEQ ID NO: 2291659 - RNA, 14 nt, Human
augauuggauuauu

SEQ ID NO: 2291660 - RNA, 15 nt, Human
augauuggauuauuc

SEQ ID NO: 2291661 - RNA, 16 nt, Human
augauuggauuauuca

SEQ ID NO: 2291662 - RNA, 21 nt, Human
augauuggauuauucauuuaa

SEQ ID NO: 2291663 - RNA, 22 nt, Human
augauuggauuauucauuuaaa

SEQ ID NO: 2291664 - RNA, 14 nt, Human
augauuguaaaaua

SEQ ID NO: 2291665 - RNA, 19 nt, Human
augcaacauguguacuuaa

SEQ ID NO: 2291666 - RNA, 23 nt, Human
augcaagauaguuuaucuaacuu

SEQ ID NO: 2291667 - RNA, 23 nt, Human
augcaagcuaguggcuucaaaau

SEQ ID NO: 2291668 - RNA, 14 nt, Human
augcaccauuagaa

SEQ ID NO: 2291669 - RNA, 13 nt, Human
augcaccuggaau

SEQ ID NO: 2291670 - RNA, 15 nt, Human
augcaaggaccagga

SEQ ID NO: 2291671 - RNA, 14 nt, Human
augcaaggaccagg

SEQ ID NO: 2291672 - RNA, 20 nt, Human
augcaaggaaggaaagaaag

SEQ ID NO: 2291673 - RNA, 18 nt, Human
augcaaggaaggaaagaa

SEQ ID NO: 2291674 - RNA, 22 nt, Human
augcaccagcccuuagcaggga

SEQ ID NO: 2291675 - RNA, 16 nt, Human
augcacuuuguucugg

SEQ ID NO: 2291676 - RNA, 17 nt, Human
augcacuuuguucuggc

SEQ ID NO: 2291677 - RNA, 19 nt, Human
augcacuuuguucuggcuc

SEQ ID NO: 2291678 - RNA, 20 nt, Human
augcacuuuguucuggcucu

SEQ ID NO: 2291679 - RNA, 22 nt, Human
augauauguaaacauaauucuu

SEQ ID NO: 2291680 - RNA, 13 nt, Human
augaucaguuuuu

SEQ ID NO: 2291681 - RNA, 21 nt, Human
augauccaacuaaugccuuac

SEQ ID NO: 2291682 - RNA, 15 nt, Human
augaucaguuuuuuu

SEQ ID NO: 2291683 - RNA, 22 nt, Human
augaucauuugcccuuaaggac

SEQ ID NO: 2291684 - RNA, 21 nt, Human
augauauguaaacauaauucu

SEQ ID NO: 2291685 - RNA, 13 nt, Human
augauauguaaac

SEQ ID NO: 2291686 - RNA, 22 nt, Human
augauacccugaauuuggccug

SEQ ID NO: 2291687 - RNA, 15 nt, Human
augauacauccaaag

SEQ ID NO: 2291688 - RNA, 17 nt, Human
augauacuugaaaauua

SEQ ID NO: 2291689 - RNA, 21 nt, Human
augauacuugaaaauuaacau

SEQ ID NO: 2291690 - RNA, 17 nt, Human
augauaguaagaaaagu

SEQ ID NO: 2291691 - RNA, 19 nt, Human
augauuacucuuugagaua

SEQ ID NO: 2291692 - RNA, 14 nt, Human
augaucucucugaa

SEQ ID NO: 2291693 - RNA, 15 nt, Human
augaucucccugccg

SEQ ID NO: 2291694 - RNA, 16 nt, Human
augauuaauucaccuu

SEQ ID NO: 2291695 - RNA, 18 nt, Human
augauuaaguaaugauaa

SEQ ID NO: 2291696 - RNA, 14 nt, Human
augaucucccugcc

SEQ ID NO: 2291697 - RNA, 12 nt, Human
augaucucccug

SEQ ID NO: 2291698 - RNA, 21 nt, Human
augaucuagguuuaacucaga

SEQ ID NO: 2291699 - RNA, 22 nt, Human
augaucuagguuuaacucagau

SEQ ID NO: 2291700 - RNA, 15 nt, Human
augaucuagguuuaa

SEQ ID NO: 2291701 - RNA, 16 nt, Human
augaucuagguuuaac

SEQ ID NO: 2291702 - RNA, 17 nt, Human
augaucuagguuuaacu

SEQ ID NO: 2291703 - RNA, 19 nt, Human
augaucuagguuuaacuca

SEQ ID NO: 2291704 - RNA, 14 nt, Human
augauuaaguaaug

SEQ ID NO: 2291705 - RNA, 22 nt, Human
augauccaugaguuugcccugg

SEQ ID NO: 2291706 - RNA, 21 nt, Human
augauccaugaguuugcccug

SEQ ID NO: 2291707 - RNA, 15 nt, Human
augaucuaggaagac

SEQ ID NO: 2291708 - RNA, 13 nt, Human
augaucccugugu

SEQ ID NO: 2291709 - RNA, 17 nt, Human
augaucuaggaagacuu

SEQ ID NO: 2291710 - RNA, 20 nt, Human
augaucuaggaagacuuugg

SEQ ID NO: 2291711 - RNA, 11 nt, Human
uuguucccagu

SEQ ID NO: 2291712 - RNA, 20 nt, Human
uuguucuugguuuguaaauu

SEQ ID NO: 2291713 - RNA, 22 nt, Human
uuguuccaagacauugucaaua

SEQ ID NO: 2291714 - RNA, 21 nt, Human
uuguuccaagacauugucaau

SEQ ID NO: 2291715 - RNA, 12 nt, Human
uuguuccagcuc

SEQ ID NO: 2291716 - RNA, 13 nt, Human
uuguuccagauuc

SEQ ID NO: 2291717 - RNA, 13 nt, Human
uuguucuuuuuau

SEQ ID NO: 2291718 - RNA, 15 nt, Human
uuguucuuuguucuu

SEQ ID NO: 2291719 - RNA, 14 nt, Human
uuguucuuuaaagu

SEQ ID NO: 2291720 - RNA, 18 nt, Human
uuguugacaguucugaag

SEQ ID NO: 2291721 - RNA, 21 nt, Human
uuguugacaguucugaagaau

SEQ ID NO: 2291722 - RNA, 15 nt, Human
augauaacuggaaac

SEQ ID NO: 2291723 - RNA, 18 nt, Human
uuguugagcuauugcugu

SEQ ID NO: 2291724 - RNA, 17 nt, Human
augauacaagauuagaa

SEQ ID NO: 2291725 - RNA, 17 nt, Human
uuguugacuuauuuucu

SEQ ID NO: 2291726 - RNA, 14 nt, Human
uuguugacuuauuu

SEQ ID NO: 2291727 - RNA, 17 nt, Human
augauaaguaaaugcua

SEQ ID NO: 2291728 - RNA, 21 nt, Human
uuguuccacaaguuaaauaaa

SEQ ID NO: 2291729 - RNA, 17 nt, Human
uuguuccaagacauugu

SEQ ID NO: 2291730 - RNA, 19 nt, Human
uuguucauuuugagcugaa

SEQ ID NO: 2291731 - RNA, 16 nt, Human
uuguuccaagacauug

SEQ ID NO: 2291732 - RNA, 17 nt, Human
uuguucauuuugagcug

SEQ ID NO: 2291733 - RNA, 15 nt, Human
uuguucaucuguaac

SEQ ID NO: 2291734 - RNA, 16 nt, Human
uugguggagauaaaga

SEQ ID NO: 2291735 - RNA, 22 nt, Human
uuggugcuuacacaucucagac

SEQ ID NO: 2291736 - RNA, 15 nt, Human
uuguucauagcccag

SEQ ID NO: 2291737 - RNA, 20 nt, Human
uuggugccuggccuggcaca

SEQ ID NO: 2291738 - RNA, 22 nt, Human
uuggugccuggccuggcacaca

SEQ ID NO: 2291739 - RNA, 13 nt, Human
uuguguuacuaag

SEQ ID NO: 2291740 - RNA, 20 nt, Human
uuguguuacuaaguuuuuau

SEQ ID NO: 2291741 - RNA, 15 nt, Human
uuguguuacuaaguu

SEQ ID NO: 2291742 - RNA, 13 nt, Human
uuuaauuaaauaa

SEQ ID NO: 2291743 - RNA, 15 nt, Human
uuuaauuaaaugcuc

SEQ ID NO: 2291744 - RNA, 20 nt, Human
uuuaauuaaaugcucaucug

SEQ ID NO: 2291745 - RNA, 19 nt, Human
uuuaauuaaucaugaaugu

SEQ ID NO: 2291746 - RNA, 22 nt, Human
uuuaauuaaucaugaaugugua

SEQ ID NO: 2291747 - RNA, 17 nt, Human
uuuaauuaaugaaauau

SEQ ID NO: 2291748 - RNA, 19 nt, Human
uuuaauuaaugaaauaucu

SEQ ID NO: 2291749 - RNA, 22 nt, Human
uuuaaugugcuguguaaaguua

SEQ ID NO: 2291750 - RNA, 20 nt, Human
uuuaaugugcuguguaaagu

SEQ ID NO: 2291751 - RNA, 21 nt, Human
uuuaaugugcuguguaaaguu

SEQ ID NO: 2291752 - RNA, 16 nt, Human
uuuaaugugcugugua

SEQ ID NO: 2291753 - RNA, 17 nt, Human
uuuaaugugcuguguaa

SEQ ID NO: 2291754 - RNA, 18 nt, Human
uuuaaugugcuguguaaa

SEQ ID NO: 2291755 - RNA, 19 nt, Human
uuuaaugugcuguguaaag

SEQ ID NO: 2291756 - RNA, 18 nt, Human
uuuaagugcguguguaga

SEQ ID NO: 2291757 - RNA, 20 nt, Human
uuuaagugcguguguagagu

SEQ ID NO: 2291758 - RNA, 21 nt, Human
uuuaagugcguguguagaguu

SEQ ID NO: 2291759 - RNA, 15 nt, Human
uuuaaugugcugugu

SEQ ID NO: 2291760 - RNA, 21 nt, Human
uuuaauuagggguugcuaaga

SEQ ID NO: 2291761 - RNA, 22 nt, Human
uuuaauuaaugaaauaucugua

SEQ ID NO: 2291762 - RNA, 14 nt, Human
uuuaauuagugcua

SEQ ID NO: 2291763 - RNA, 15 nt, Human
uuuaauuagugcuaa

SEQ ID NO: 2291764 - RNA, 17 nt, Human
uuuaauuagugcuaagu

SEQ ID NO: 2291765 - RNA, 19 nt, Human
uuuaauuagugcuaagugu

SEQ ID NO: 2291766 - RNA, 20 nt, Human
uuuaauuagugcuaagugug

SEQ ID NO: 2291767 - RNA, 18 nt, Human
uuuaauuguuaagauaug

SEQ ID NO: 2291768 - RNA, 17 nt, Human
uuuaauucaccaaagua

SEQ ID NO: 2291769 - RNA, 23 nt, Human
uuuaauuauuauuuauauaugua

SEQ ID NO: 2291770 - RNA, 12 nt, Human
uuuaauucaguu

SEQ ID NO: 2291771 - RNA, 14 nt, Human
uuuaauuauuauuc

SEQ ID NO: 2291772 - RNA, 23 nt, Human
uuuaauuauuauucuucauaaca

SEQ ID NO: 2291773 - RNA, 21 nt, Human
uuuaauuagugcuaaguguga

SEQ ID NO: 2291774 - RNA, 22 nt, Human
uuuaauuagugcuaagugugaa

SEQ ID NO: 2291775 - RNA, 21 nt, Human
uuuaaauauaauucuguaaau

SEQ ID NO: 2291776 - RNA, 20 nt, Human
uuuaagguuauuuauuuaaa

SEQ ID NO: 2291777 - RNA, 21 nt, Human
uuuaagguuauuuauuuaaau

SEQ ID NO: 2291778 - RNA, 12 nt, Human
uuuaaguauuua

SEQ ID NO: 2291779 - RNA, 16 nt, Human
uuuaagguuuuuacug

SEQ ID NO: 2291780 - RNA, 18 nt, Human
uuuaaguauuuagguuuu

SEQ ID NO: 2291781 - RNA, 13 nt, Human
uuuaaguauuuag

SEQ ID NO: 2291782 - RNA, 20 nt, Human
uuuaaguauuuauauauuua

SEQ ID NO: 2291783 - RNA, 15 nt, Human
uuuaaguauuuauau

SEQ ID NO: 2291784 - RNA, 14 nt, Human
uuuaaguauuuaua

SEQ ID NO: 2291785 - RNA, 13 nt, Human
uuuaaguauuuau

SEQ ID NO: 2291786 - RNA, 21 nt, Human
uuuaaguauugcaucuguaua

SEQ ID NO: 2291787 - RNA, 18 nt, Human
uuuaaauauaugcuaagu

SEQ ID NO: 2291788 - RNA, 20 nt, Human
uuuaaauacagucuuccauu

SEQ ID NO: 2291789 - RNA, 12 nt, Human
uuuaaauauaau

SEQ ID NO: 2291790 - RNA, 13 nt, Human
uuuaaauauaauu

SEQ ID NO: 2291791 - RNA, 15 nt, Human
uuuaaauauaauucu

SEQ ID NO: 2291792 - RNA, 16 nt, Human
uuuaaauauaauucug

SEQ ID NO: 2291793 - RNA, 18 nt, Human
uuuaaauauaauucugua

SEQ ID NO: 2291794 - RNA, 20 nt, Human
uuuaaauacgcacuacaugu

SEQ ID NO: 2291795 - RNA, 23 nt, Human
uuuaauuguuguuucuuucuagu

SEQ ID NO: 2291796 - RNA, 24 nt, Human
uuuaauuguuguuucuuucuagug

SEQ ID NO: 2291797 - RNA, 16 nt, Human
uuuaauuguuguuucu

SEQ ID NO: 2291798 - RNA, 18 nt, Human
uuuaauuguuguuucuuu

SEQ ID NO: 2291799 - RNA, 21 nt, Human
uuuaauuguuguuucuuucua

SEQ ID NO: 2291800 - RNA, 22 nt, Human
uuuaauuguuguuucuuucuag

SEQ ID NO: 2291801 - RNA, 16 nt, Human
uuuaauuuaugaguuu

SEQ ID NO: 2291802 - RNA, 16 nt, Human
uuuaauuuauuuauua

SEQ ID NO: 2291803 - RNA, 22 nt, Human
uuuaauuuauuaauugcuuuga

SEQ ID NO: 2291804 - RNA, 21 nt, Human
uuuaauuuauuaauugcuuug

SEQ ID NO: 2291805 - RNA, 19 nt, Human
uuuaauuuuuuugagacag

SEQ ID NO: 2291806 - RNA, 20 nt, Human
uuuaauuuauuuauuaagau

SEQ ID NO: 2291807 - RNA, 19 nt, Human
uuuaauuuauuuauuaaga

SEQ ID NO: 2291808 - RNA, 19 nt, Human
uuuacaaaacuacaugaga

SEQ ID NO: 2291809 - RNA, 15 nt, Human
uuuacaaaaauauaa

SEQ ID NO: 2291810 - RNA, 16 nt, Human
uuuacaaaaauauaaa

SEQ ID NO: 2291811 - RNA, 12 nt, Human
uuuacaaagugu

SEQ ID NO: 2291812 - RNA, 16 nt, Human
uuuacaaaguguguau

SEQ ID NO: 2291813 - RNA, 18 nt, Human
uuuacaaaguguguauua

SEQ ID NO: 2291814 - RNA, 22 nt, Human
augcagcgaaccaauauuugua

SEQ ID NO: 2291815 - RNA, 20 nt, Human
augcagcgaaccaauauuug

SEQ ID NO: 2291816 - RNA, 22 nt, Human
augcagcccaugcccaccugcc

SEQ ID NO: 2291817 - RNA, 14 nt, Human
augcagcuaucugg

SEQ ID NO: 2291818 - RNA, 18 nt, Human
augcagccucacaguccu

SEQ ID NO: 2291819 - RNA, 15 nt, Human
augcagcugcacccu

SEQ ID NO: 2291820 - RNA, 13 nt, Human
augcagcgugaag

SEQ ID NO: 2291821 - RNA, 21 nt, Human
augcagcugcacccucccucc

SEQ ID NO: 2291822 - RNA, 23 nt, Human
augcagauggggcucccgcccgu

SEQ ID NO: 2291823 - RNA, 20 nt, Human
augcagcagggaugcccugg

SEQ ID NO: 2291824 - RNA, 19 nt, Human
augcagcagggaugcccug

SEQ ID NO: 2291825 - RNA, 17 nt, Human
augcagcaucuaaguaa

SEQ ID NO: 2291826 - RNA, 16 nt, Human
augcagcaaaauguga

SEQ ID NO: 2291827 - RNA, 22 nt, Human
augcagauuuugcccuugacaa

SEQ ID NO: 2291828 - RNA, 23 nt, Human
augcagcccaugcccaccugccc

SEQ ID NO: 2291829 - RNA, 16 nt, Human
augcagccgugaucaa

SEQ ID NO: 2291830 - RNA, 21 nt, Human
augcagcccaugcccaccugc

SEQ ID NO: 2291831 - RNA, 15 nt, Human
augcagcccaugccc

SEQ ID NO: 2291832 - RNA, 18 nt, Human
augccauggacagaagaa

SEQ ID NO: 2291833 - RNA, 19 nt, Human
augccauggacagaagaag

SEQ ID NO: 2291834 - RNA, 12 nt, Human
augcccaaggga

SEQ ID NO: 2291835 - RNA, 15 nt, Human
augcccaagggaaag

SEQ ID NO: 2291836 - RNA, 11 nt, Human
augcccagccc

SEQ ID NO: 2291837 - RNA, 21 nt, Human
augccauuuaaagcuuauuaa

SEQ ID NO: 2291838 - RNA, 17 nt, Human
augccauuuaaagcuua

SEQ ID NO: 2291839 - RNA, 17 nt, Human
augccauggacagaaga

SEQ ID NO: 2291840 - RNA, 22 nt, Human
augccacaccaagcugugccac

SEQ ID NO: 2291841 - RNA, 23 nt, Human
augccacaccaagcugugccacc

SEQ ID NO: 2291842 - RNA, 18 nt, Human
augccacacagagugguc

SEQ ID NO: 2291843 - RNA, 16 nt, Human
augccacacaucaccc

SEQ ID NO: 2291844 - RNA, 16 nt, Human
augccacacagagugg

SEQ ID NO: 2291845 - RNA, 15 nt, Human
augccacacagagug

SEQ ID NO: 2291846 - RNA, 15 nt, Human
augccacaccaagcu

SEQ ID NO: 2291847 - RNA, 17 nt, Human
augccacaccaagcugu

SEQ ID NO: 2291848 - RNA, 20 nt, Human
augccacaccaagcugugcc

SEQ ID NO: 2291849 - RNA, 21 nt, Human
augccacaccaagcugugcca

SEQ ID NO: 2291850 - RNA, 23 nt, Human
augccaaagaucacuuguuguuu

SEQ ID NO: 2291851 - RNA, 22 nt, Human
augccaauuagcaauugacugu

SEQ ID NO: 2291852 - RNA, 19 nt, Human
augccacaaggacuuccug

SEQ ID NO: 2291853 - RNA, 16 nt, Human
augccacaaggacuuc

SEQ ID NO: 2291854 - RNA, 18 nt, Human
augccaaaaaaagacagg

SEQ ID NO: 2291855 - RNA, 23 nt, Human
augcauuuuguuugguauuguau

SEQ ID NO: 2291856 - RNA, 18 nt, Human
augccaaagcuagggugg

SEQ ID NO: 2291857 - RNA, 17 nt, Human
augccaauauuaaaucu

SEQ ID NO: 2291858 - RNA, 16 nt, Human
augccaaagaucacuu

SEQ ID NO: 2291859 - RNA, 18 nt, Human
augccaaagaucacuugu

SEQ ID NO: 2291860 - RNA, 20 nt, Human
augccaaagaucacuuguug

SEQ ID NO: 2291861 - RNA, 19 nt, Human
augcauuuugcagcaguga

SEQ ID NO: 2291862 - RNA, 18 nt, Human
augcauuuugcagcagug

SEQ ID NO: 2291863 - RNA, 13 nt, Human
augcauuuugcag

SEQ ID NO: 2291864 - RNA, 12 nt, Human
augcauuuugca

SEQ ID NO: 2291865 - RNA, 19 nt, Human
augcauuuuguuugguauu

SEQ ID NO: 2291866 - RNA, 22 nt, Human
augcauuuuguuugguauugua

SEQ ID NO: 2291867 - RNA, 23 nt, Human
augcauuuuauuuuagacacaaa

SEQ ID NO: 2291868 - RNA, 13 nt, Human
augcagugcuucc

SEQ ID NO: 2291869 - RNA, 23 nt, Human
augcagugguaugaucacggcuc

SEQ ID NO: 2291870 - RNA, 18 nt, Human
augcagggauugcugcca

SEQ ID NO: 2291871 - RNA, 23 nt, Human
augcauuugaggucaaguaagaa

SEQ ID NO: 2291872 - RNA, 14 nt, Human
augcauuugcauuu

SEQ ID NO: 2291873 - RNA, 13 nt, Human
augcaguucugaa

SEQ ID NO: 2291874 - RNA, 20 nt, Human
augccucagcccugacccug

SEQ ID NO: 2291875 - RNA, 19 nt, Human
augccgauauacucuagau

SEQ ID NO: 2291876 - RNA, 16 nt, Human
augccucagccuccug

SEQ ID NO: 2291877 - RNA, 21 nt, Human
augccgaaugcccucagggga

SEQ ID NO: 2291878 - RNA, 15 nt, Human
augcccuuaaaucau

SEQ ID NO: 2291879 - RNA, 16 nt, Human
augcccuggagguggc

SEQ ID NO: 2291880 - RNA, 14 nt, Human
augcccuggaucca

SEQ ID NO: 2291881 - RNA, 23 nt, Human
augcccugugcaaccucuuggcc

SEQ ID NO: 2291882 - RNA, 13 nt, Human
augcccugugcaa

SEQ ID NO: 2291883 - RNA, 15 nt, Human
augcccuggaggugg

SEQ ID NO: 2291884 - RNA, 14 nt, Human
augcccuggaggug

SEQ ID NO: 2291885 - RNA, 12 nt, Human
augcccugugca

SEQ ID NO: 2291886 - RNA, 14 nt, Human
augcccuccucucc

SEQ ID NO: 2291887 - RNA, 23 nt, Human
augcccuccucucccauuguccc

SEQ ID NO: 2291888 - RNA, 15 nt, Human
augcccuccucuccc

SEQ ID NO: 2291889 - RNA, 14 nt, Human
augcccagccccuu

SEQ ID NO: 2291890 - RNA, 12 nt, Human
augcccagcccc

SEQ ID NO: 2291891 - RNA, 13 nt, Human
augcccagccccu

SEQ ID NO: 2291892 - RNA, 24 nt, Human
augccucagcccugacccugugga

SEQ ID NO: 2291893 - RNA, 14 nt, Human
augccucaguguau

SEQ ID NO: 2291894 - RNA, 20 nt, Human
augccuccaccccccagaac

SEQ ID NO: 2291895 - RNA, 20 nt, Human
augccucaguguauuuguau

SEQ ID NO: 2291896 - RNA, 16 nt, Human
augccucaguguauuu

SEQ ID NO: 2291897 - RNA, 19 nt, Human
augccucaguguauuugua

SEQ ID NO: 2291898 - RNA, 21 nt, Human
augccuccaccgcugccuaag

SEQ ID NO: 2291899 - RNA, 17 nt, Human
augccuccaccgcugcc

SEQ ID NO: 2291900 - RNA, 13 nt, Human
augccuccaccgc

SEQ ID NO: 2291901 - RNA, 12 nt, Human
augccuccaccg

SEQ ID NO: 2291902 - RNA, 17 nt, Human
augcgggcugggcagcu

SEQ ID NO: 2291903 - RNA, 18 nt, Human
augcgggcugggcagcug

SEQ ID NO: 2291904 - RNA, 23 nt, Human
augcuaaagguuguauugcauau

SEQ ID NO: 2291905 - RNA, 14 nt, Human
augcuaaagaaaaa

SEQ ID NO: 2291906 - RNA, 22 nt, Human
augcuaaagaaaaagucaucca

SEQ ID NO: 2291907 - RNA, 23 nt, Human
augcuaaaccuuaguacugaguu

SEQ ID NO: 2291908 - RNA, 21 nt, Human
augcguacguuuccugagaag

SEQ ID NO: 2291909 - RNA, 19 nt, Human
augcgggcugggcagcugu

SEQ ID NO: 2291910 - RNA, 14 nt, Human
augcgguagccagc

SEQ ID NO: 2291911 - RNA, 18 nt, Human
augcgguagccagcacac

SEQ ID NO: 2291912 - RNA, 15 nt, Human
augcgguagccagca

SEQ ID NO: 2291913 - RNA, 21 nt, Human
augcgguagccagcacacagg

SEQ ID NO: 2291914 - RNA, 20 nt, Human
augcgguagccagcacacag

SEQ ID NO: 2291915 - RNA, 15 nt, Human
augcggucuagggaa

SEQ ID NO: 2291916 - RNA, 17 nt, Human
augggucuggcugagcu

SEQ ID NO: 2291917 - RNA, 21 nt, Human
augggguuggcugggcccaga

SEQ ID NO: 2291918 - RNA, 18 nt, Human
auggguaauauaaagugu

SEQ ID NO: 2291919 - RNA, 18 nt, Human
augggguuggcugggccc

SEQ ID NO: 2291920 - RNA, 19 nt, Human
auggggugggccucugguu

SEQ ID NO: 2291921 - RNA, 19 nt, Human
auggggugggguagggcug

SEQ ID NO: 2291922 - RNA, 16 nt, Human
auggggugggccucug

SEQ ID NO: 2291923 - RNA, 18 nt, Human
auggggugggccucuggu

SEQ ID NO: 2291924 - RNA, 17 nt, Human
auggguagagaaacacu

SEQ ID NO: 2291925 - RNA, 22 nt, Human
auggggggccaacaccagggau

SEQ ID NO: 2291926 - RNA, 16 nt, Human
auggggggccaacacc

SEQ ID NO: 2291927 - RNA, 16 nt, Human
auggggguagcagcug

SEQ ID NO: 2291928 - RNA, 17 nt, Human
auggggguagcagcugg

SEQ ID NO: 2291929 - RNA, 18 nt, Human
auggggguagcagcugga

SEQ ID NO: 2291930 - RNA, 15 nt, Human
augggggugcauuug

SEQ ID NO: 2291931 - RNA, 21 nt, Human
auggggugaugcugggcuggc

SEQ ID NO: 2291932 - RNA, 15 nt, Human
auggggugggccucu

SEQ ID NO: 2291933 - RNA, 17 nt, Human
auggggucuguaaaauc

SEQ ID NO: 2291934 - RNA, 18 nt, Human
auggggucuguaaaaucu

SEQ ID NO: 2291935 - RNA, 16 nt, Human
auggggucuguaaaau

SEQ ID NO: 2291936 - RNA, 17 nt, Human
augggguccuggccauc

SEQ ID NO: 2291937 - RNA, 16 nt, Human
augggguccuggccau

SEQ ID NO: 2291938 - RNA, 19 nt, Human
auggggguagcagcuggac

SEQ ID NO: 2291939 - RNA, 21 nt, Human
augggggagucugaagcagau

SEQ ID NO: 2291940 - RNA, 15 nt, Human
augggggcaagaaga

SEQ ID NO: 2291941 - RNA, 14 nt, Human
augggggcaagaag

SEQ ID NO: 2291942 - RNA, 20 nt, Human
augggggagucugaagcaga

SEQ ID NO: 2291943 - RNA, 19 nt, Human
augggggagucugaagcag

SEQ ID NO: 2291944 - RNA, 19 nt, Human
augggggaggggggaagga

SEQ ID NO: 2291945 - RNA, 21 nt, Human
augggggaacucagauccagg

SEQ ID NO: 2291946 - RNA, 19 nt, Human
augggggaacucagaucca

SEQ ID NO: 2291947 - RNA, 18 nt, Human
augggggaacucagaucc

SEQ ID NO: 2291948 - RNA, 22 nt, Human
augggggaaagcacaggugggc

SEQ ID NO: 2291949 - RNA, 18 nt, Human
augggggaaauggugccu

SEQ ID NO: 2291950 - RNA, 15 nt, Human
augggggccuggauu

SEQ ID NO: 2291951 - RNA, 17 nt, Human
augggggcacugaggac

SEQ ID NO: 2291952 - RNA, 14 nt, Human
augggggugcauuu

SEQ ID NO: 2291953 - RNA, 24 nt, Human
auggggcugcaccggcuggccugg

SEQ ID NO: 2291954 - RNA, 22 nt, Human
auggggccagauccagccuggg

SEQ ID NO: 2291955 - RNA, 21 nt, Human
auggggccagauccagccugg

SEQ ID NO: 2291956 - RNA, 11 nt, Human
augggggaaag

SEQ ID NO: 2291957 - RNA, 16 nt, Human
augggggaaagcacag

SEQ ID NO: 2291958 - RNA, 12 nt, Human
auggggcugcac

SEQ ID NO: 2291959 - RNA, 19 nt, Human
auggggccagauccagccu

SEQ ID NO: 2291960 - RNA, 15 nt, Human
auggggccagaucca

SEQ ID NO: 2291961 - RNA, 14 nt, Human
auggggccagaucc

SEQ ID NO: 2291962 - RNA, 13 nt, Human
auggggccagauc

SEQ ID NO: 2291963 - RNA, 14 nt, Human
uuucuuuuucuucu

SEQ ID NO: 2291964 - RNA, 19 nt, Human
uuucuuuuucuucuucccu

SEQ ID NO: 2291965 - RNA, 23 nt, Human
uuucuuugggaauauuugaaucu

SEQ ID NO: 2291966 - RNA, 21 nt, Human
uuucuuugccuguucaguuac

SEQ ID NO: 2291967 - RNA, 17 nt, Human
uuucuuugggaauauuu

SEQ ID NO: 2291968 - RNA, 19 nt, Human
uuucuuugggaauauuuga

SEQ ID NO: 2291969 - RNA, 21 nt, Human
uuucuuugggaauauuugaau

SEQ ID NO: 2291970 - RNA, 15 nt, Human
uuugaaaucagcaua

SEQ ID NO: 2291971 - RNA, 15 nt, Human
uuugaaaacauauaa

SEQ ID NO: 2291972 - RNA, 16 nt, Human
uuugaaaaauuccuau

SEQ ID NO: 2291973 - RNA, 22 nt, Human
uuugaaaaauuccuauugugau

SEQ ID NO: 2291974 - RNA, 15 nt, Human
uuugaaauauugacu

SEQ ID NO: 2291975 - RNA, 12 nt, Human
auggggaugcag

SEQ ID NO: 2291976 - RNA, 20 nt, Human
auggggauagauguguggac

SEQ ID NO: 2291977 - RNA, 16 nt, Human
auggggaucacagaga

SEQ ID NO: 2291978 - RNA, 17 nt, Human
auggggaucacagagac

SEQ ID NO: 2291979 - RNA, 19 nt, Human
auggggaucacagagacau

SEQ ID NO: 2291980 - RNA, 19 nt, Human
augggcugcagcagaggca

SEQ ID NO: 2291981 - RNA, 16 nt, Human
augggcuaaugaagau

SEQ ID NO: 2291982 - RNA, 17 nt, Human
augggcuaaugaagauc

SEQ ID NO: 2291983 - RNA, 21 nt, Human
augggcucugacagaaagcag

SEQ ID NO: 2291984 - RNA, 20 nt, Human
augggcuggguucuacccag

SEQ ID NO: 2291985 - RNA, 18 nt, Human
augggccuccugugugug

SEQ ID NO: 2291986 - RNA, 19 nt, Human
augggccugcuuccugucu

SEQ ID NO: 2291987 - RNA, 20 nt, Human
augggccuggccaccucucu

SEQ ID NO: 2291988 - RNA, 16 nt, Human
uuugaaauguguuucu

SEQ ID NO: 2291989 - RNA, 18 nt, Human
uuugaaauuaaccucuca

SEQ ID NO: 2291990 - RNA, 19 nt, Human
uuucuguucuguggaaagu

SEQ ID NO: 2291991 - RNA, 22 nt, Human
uuucuguucuguggaaagugua

SEQ ID NO: 2291992 - RNA, 15 nt, Human
uuucuguucugugga

SEQ ID NO: 2291993 - RNA, 16 nt, Human
uuucuguucuguggaa

SEQ ID NO: 2291994 - RNA, 17 nt, Human
uuucuguucuguggaaa

SEQ ID NO: 2291995 - RNA, 12 nt, Human
uuucuuucuagu

SEQ ID NO: 2291996 - RNA, 13 nt, Human
uuucuuuccagag

SEQ ID NO: 2291997 - RNA, 13 nt, Human
uuucuuucuagug

SEQ ID NO: 2291998 - RNA, 13 nt, Human
uuucuuucuuaga

SEQ ID NO: 2291999 - RNA, 15 nt, Human
uuucuuucuuagaaa

SEQ ID NO: 2292000 - RNA, 16 nt, Human
uuucuuugaaugcuuu

SEQ ID NO: 2292001 - RNA, 22 nt, Human
uuucuuugaaugcuuuuugaau

SEQ ID NO: 2292002 - RNA, 23 nt, Human
uuucuguccuuuuggcacugaga

SEQ ID NO: 2292003 - RNA, 15 nt, Human
uuucugucccuucug

SEQ ID NO: 2292004 - RNA, 15 nt, Human
uuucugucucugccu

SEQ ID NO: 2292005 - RNA, 17 nt, Human
uuucugugccugaauau

SEQ ID NO: 2292006 - RNA, 11 nt, Human
uuucugugugc

SEQ ID NO: 2292007 - RNA, 20 nt, Human
uuucugugugcaccuuacca

SEQ ID NO: 2292008 - RNA, 22 nt, Human
uuucugugugcaccuuaccaac

SEQ ID NO: 2292009 - RNA, 19 nt, Human
uuucuguuauauaaauggu

SEQ ID NO: 2292010 - RNA, 19 nt, Human
uuucugguagauagaaaua

SEQ ID NO: 2292011 - RNA, 17 nt, Human
uuucuguauauacuuuu

SEQ ID NO: 2292012 - RNA, 15 nt, Human
uuucugucaagaaga

SEQ ID NO: 2292013 - RNA, 17 nt, Human
uuucugguagauagaaa

SEQ ID NO: 2292014 - RNA, 15 nt, Human
uuucugguagauaga

SEQ ID NO: 2292015 - RNA, 15 nt, Human
uuucugguggucugu

SEQ ID NO: 2292016 - RNA, 17 nt, Human
uuucugguggucuguug

SEQ ID NO: 2292017 - RNA, 20 nt, Human
uuucugguggucuguuggca

SEQ ID NO: 2292018 - RNA, 21 nt, Human
uuucugggcugucuauucuag

SEQ ID NO: 2292019 - RNA, 19 nt, Human
uuucuggcuggagccuaga

SEQ ID NO: 2292020 - RNA, 23 nt, Human
uuucugggcaccggggccucgga

SEQ ID NO: 2292021 - RNA, 16 nt, Human
uuucugggauaaguaa

SEQ ID NO: 2292022 - RNA, 19 nt, Human
uuucugggcugucuauucu

SEQ ID NO: 2292023 - RNA, 21 nt, Human
uuucugcagccacuauuguua

SEQ ID NO: 2292024 - RNA, 23 nt, Human
uuucugggagacagaaaacaugu

SEQ ID NO: 2292025 - RNA, 17 nt, Human
uuucugcacugagcaga

SEQ ID NO: 2292026 - RNA, 18 nt, Human
uuucugcacugagcagag

SEQ ID NO: 2292027 - RNA, 14 nt, Human
uuucugcagaaaca

SEQ ID NO: 2292028 - RNA, 13 nt, Human
uuucugcacugag

SEQ ID NO: 2292029 - RNA, 22 nt, Human
uuucugauuguaacguugcugu

SEQ ID NO: 2292030 - RNA, 19 nt, Human
uuucugcagccacuauugu

SEQ ID NO: 2292031 - RNA, 11 nt, Human
uuucugauugu

SEQ ID NO: 2292032 - RNA, 23 nt, Human
uuucugauuguaacguugcugug

SEQ ID NO: 2292033 - RNA, 13 nt, Human
uuucuccccugcc

SEQ ID NO: 2292034 - RNA, 14 nt, Human
uuucuccccugccc

SEQ ID NO: 2292035 - RNA, 16 nt, Human
uuucuccccugccccc

SEQ ID NO: 2292036 - RNA, 17 nt, Human
uuucuccccugccccca

SEQ ID NO: 2292037 - RNA, 19 nt, Human
uuucuggcuaugcauuuga

SEQ ID NO: 2292038 - RNA, 18 nt, Human
uuucuggcuaugcauuug

SEQ ID NO: 2292039 - RNA, 16 nt, Human
uuucuggcuaugcauu

SEQ ID NO: 2292040 - RNA, 15 nt, Human
uuucuggcuaugcau

SEQ ID NO: 2292041 - RNA, 15 nt, Human
uuucucccccugggc

SEQ ID NO: 2292042 - RNA, 14 nt, Human
uuucucccccuggg

SEQ ID NO: 2292043 - RNA, 13 nt, Human
uuucucccccugg

SEQ ID NO: 2292044 - RNA, 12 nt, Human
uuucuccccagg

SEQ ID NO: 2292045 - RNA, 18 nt, Human
uuucucccagucauuuaa

SEQ ID NO: 2292046 - RNA, 17 nt, Human
augggcaaaacugaauu

SEQ ID NO: 2292047 - RNA, 14 nt, Human
augggcaaaacuga

SEQ ID NO: 2292048 - RNA, 17 nt, Human
uuucucccagucauuua

SEQ ID NO: 2292049 - RNA, 23 nt, Human
augggauucagugcuucuuaaag

SEQ ID NO: 2292050 - RNA, 18 nt, Human
augggaugguggagggcc

SEQ ID NO: 2292051 - RNA, 15 nt, Human
augggauccuggagu

SEQ ID NO: 2292052 - RNA, 22 nt, Human
augggagggggcuugaagccaa

SEQ ID NO: 2292053 - RNA, 23 nt, Human
augggagggggcuugaagccaaa

SEQ ID NO: 2292054 - RNA, 16 nt, Human
augggagugagacaga

SEQ ID NO: 2292055 - RNA, 16 nt, Human
auggugcugagaagcu

SEQ ID NO: 2292056 - RNA, 14 nt, Human
auggugcugaccuc

SEQ ID NO: 2292057 - RNA, 12 nt, Human
auggugcugaga

SEQ ID NO: 2292058 - RNA, 14 nt, Human
auggugcugagaag

SEQ ID NO: 2292059 - RNA, 13 nt, Human
auggugcugagaa

SEQ ID NO: 2292060 - RNA, 20 nt, Human
auggugcuacgccugcaugu

SEQ ID NO: 2292061 - RNA, 16 nt, Human
auggugccuucauuug

SEQ ID NO: 2292062 - RNA, 14 nt, Human
auggugccuucauu

SEQ ID NO: 2292063 - RNA, 23 nt, Human
auggugccugagaggcaggcaua

SEQ ID NO: 2292064 - RNA, 22 nt, Human
auggugccugauucggcugucu

SEQ ID NO: 2292065 - RNA, 12 nt, Human
augguggcuggg

SEQ ID NO: 2292066 - RNA, 13 nt, Human
augguggagggcc

SEQ ID NO: 2292067 - RNA, 20 nt, Human
augguggacucgccuguaau

SEQ ID NO: 2292068 - RNA, 14 nt, Human
augguggagggcca

SEQ ID NO: 2292069 - RNA, 13 nt, Human
augguggcugggu

SEQ ID NO: 2292070 - RNA, 15 nt, Human
augguggcuggguug

SEQ ID NO: 2292071 - RNA, 16 nt, Human
augguggcgcgcaccu

SEQ ID NO: 2292072 - RNA, 17 nt, Human
augguggcuggguugga

SEQ ID NO: 2292073 - RNA, 22 nt, Human
auggugugaaagucagaugccc

SEQ ID NO: 2292074 - RNA, 18 nt, Human
auggugugaaagucagau

SEQ ID NO: 2292075 - RNA, 19 nt, Human
augguguucaaaaaacuug

SEQ ID NO: 2292076 - RNA, 12 nt, Human
augguguaauaa

SEQ ID NO: 2292077 - RNA, 22 nt, Human
auggugguaaacauucucucag

SEQ ID NO: 2292078 - RNA, 21 nt, Human
augguggugcaugucugcaaa

SEQ ID NO: 2292079 - RNA, 14 nt, Human
augguguaauaaga

SEQ ID NO: 2292080 - RNA, 16 nt, Human
augguguaauaagaca

SEQ ID NO: 2292081 - RNA, 18 nt, Human
augguguaauaagacaua

SEQ ID NO: 2292082 - RNA, 20 nt, Human
augguguaauaagacauaac

SEQ ID NO: 2292083 - RNA, 22 nt, Human
augguguaauaagacauaacgu

SEQ ID NO: 2292084 - RNA, 13 nt, Human
augguguacauaa

SEQ ID NO: 2292085 - RNA, 18 nt, Human
augguguacauaauguau

SEQ ID NO: 2292086 - RNA, 15 nt, Human
augguuacaaucauu

SEQ ID NO: 2292087 - RNA, 19 nt, Human
augguuacaaucauugcug

SEQ ID NO: 2292088 - RNA, 16 nt, Human
augguguuucucccuc

SEQ ID NO: 2292089 - RNA, 21 nt, Human
augguguuuucuuaugcagga

SEQ ID NO: 2292090 - RNA, 20 nt, Human
augguguugcccugagugga

SEQ ID NO: 2292091 - RNA, 20 nt, Human
augguuacaaucauugcuga

SEQ ID NO: 2292092 - RNA, 14 nt, Human
augguuauaaaagu

SEQ ID NO: 2292093 - RNA, 16 nt, Human
augguuauaaaaguga

SEQ ID NO: 2292094 - RNA, 16 nt, Human
augguuccaugccuga

SEQ ID NO: 2292095 - RNA, 17 nt, Human
augguuccaugccugag

SEQ ID NO: 2292096 - RNA, 18 nt, Human
augguuccaugccugagg

SEQ ID NO: 2292097 - RNA, 20 nt, Human
augguuccaugccugagggu

SEQ ID NO: 2292098 - RNA, 22 nt, Human
augguuccaugccugagggugg

SEQ ID NO: 2292099 - RNA, 11 nt, Human
auggugccuga

SEQ ID NO: 2292100 - RNA, 20 nt, Human
auggugcaguugacagcagg

SEQ ID NO: 2292101 - RNA, 9 nt, Human
auggugccu

SEQ ID NO: 2292102 - RNA, 14 nt, Human
auggugccugagag

SEQ ID NO: 2292103 - RNA, 15 nt, Human
auggugccugagagg

SEQ ID NO: 2292104 - RNA, 16 nt, Human
auggugccugagaggc

SEQ ID NO: 2292105 - RNA, 17 nt, Human
auggugccugagaggca

SEQ ID NO: 2292106 - RNA, 18 nt, Human
auggugccugagaggcag

SEQ ID NO: 2292107 - RNA, 20 nt, Human
auggugccugagaggcaggc

SEQ ID NO: 2292108 - RNA, 21 nt, Human
auggugccugagaggcaggca

SEQ ID NO: 2292109 - RNA, 22 nt, Human
auggugccccaggaccagcuca

SEQ ID NO: 2292110 - RNA, 21 nt, Human
auggugccccaggaccagcuc

SEQ ID NO: 2292111 - RNA, 20 nt, Human
auggugccccaggaccagcu

SEQ ID NO: 2292112 - RNA, 19 nt, Human
auggugccccaggaccagc

SEQ ID NO: 2292113 - RNA, 18 nt, Human
auggugccccaggaccag

SEQ ID NO: 2292114 - RNA, 17 nt, Human
auggugccccaggacca

SEQ ID NO: 2292115 - RNA, 16 nt, Human
auggugccccaggacc

SEQ ID NO: 2292116 - RNA, 15 nt, Human
auggugccccaggac

SEQ ID NO: 2292117 - RNA, 19 nt, Human
auggugcaaugaccuuuca

SEQ ID NO: 2292118 - RNA, 18 nt, Human
auggugcaguugacagca

SEQ ID NO: 2292119 - RNA, 14 nt, Human
auggugccccagga

SEQ ID NO: 2292120 - RNA, 16 nt, Human
auggugcaaugaccuu

SEQ ID NO: 2292121 - RNA, 17 nt, Human
auggugcaaugaccuuu

SEQ ID NO: 2292122 - RNA, 19 nt, Human
auggugagaugcagcugga

SEQ ID NO: 2292123 - RNA, 12 nt, Human
auggugcaauga

SEQ ID NO: 2292124 - RNA, 13 nt, Human
auggugcaaugac

SEQ ID NO: 2292125 - RNA, 15 nt, Human
auggugcaaugaccu

SEQ ID NO: 2292126 - RNA, 16 nt, Human
auggugaugaaaugua

SEQ ID NO: 2292127 - RNA, 17 nt, Human
auggugaugaaauguaa

SEQ ID NO: 2292128 - RNA, 22 nt, Human
augggugaagggagagccagcu

SEQ ID NO: 2292129 - RNA, 19 nt, Human
augggucuggcugagcuga

SEQ ID NO: 2292130 - RNA, 14 nt, Human
auggugaugaaaug

SEQ ID NO: 2292131 - RNA, 15 nt, Human
augggugcuuggagg

SEQ ID NO: 2292132 - RNA, 20 nt, Human
auggugagggauacccaucc

SEQ ID NO: 2292133 - RNA, 21 nt, Human
augguuugaauauaaacacua

SEQ ID NO: 2292134 - RNA, 13 nt, Human
augguuucaaaga

SEQ ID NO: 2292135 - RNA, 18 nt, Human
augguuguauuagauguu

SEQ ID NO: 2292136 - RNA, 21 nt, Human
augguuguauuagauguucuc

SEQ ID NO: 2292137 - RNA, 23 nt, Human
augguugguaacacaaauuuuca

SEQ ID NO: 2292138 - RNA, 18 nt, Human
augguugucuguuuuugu

SEQ ID NO: 2292139 - RNA, 13 nt, Human
augguuguacaua

SEQ ID NO: 2292140 - RNA, 12 nt, Human
augguuguauua

SEQ ID NO: 2292141 - RNA, 13 nt, Human
augguuguauuag

SEQ ID NO: 2292142 - RNA, 14 nt, Human
augguuguauuaga

SEQ ID NO: 2292143 - RNA, 16 nt, Human
augguuguauuagaug

SEQ ID NO: 2292144 - RNA, 16 nt, Human
augguugagaaaugaa

SEQ ID NO: 2292145 - RNA, 15 nt, Human
augguugccuuaaag

SEQ ID NO: 2292146 - RNA, 17 nt, Human
augguugccuuaaagaa

SEQ ID NO: 2292147 - RNA, 18 nt, Human
augguugccuuaaagaaa

SEQ ID NO: 2292148 - RNA, 19 nt, Human
augguugagaaaugaauaa

SEQ ID NO: 2292149 - RNA, 13 nt, Human
augguucugugcc

SEQ ID NO: 2292150 - RNA, 16 nt, Human
augguucucaggccug

SEQ ID NO: 2292151 - RNA, 16 nt, Human
augguucguucuguuu

SEQ ID NO: 2292152 - RNA, 18 nt, Human
augguucguucuguuuac

SEQ ID NO: 2292153 - RNA, 19 nt, Human
augguuccccuguucacuc

SEQ ID NO: 2292154 - RNA, 20 nt, Human
augguuccccuguucacucu

SEQ ID NO: 2292155 - RNA, 21 nt, Human
augguucccuugaugaagaag

SEQ ID NO: 2292156 - RNA, 22 nt, Human
augguuugaauauaaacacuau

SEQ ID NO: 2292157 - RNA, 22 nt, Human
augguuugacucccgaacauca

SEQ ID NO: 2292158 - RNA, 16 nt, Human
augguuugcaaggaag

SEQ ID NO: 2292159 - RNA, 17 nt, Human
augguuugcaaggaagc

SEQ ID NO: 2292160 - RNA, 18 nt, Human
augguuugcaaggaagcc

SEQ ID NO: 2292161 - RNA, 15 nt, Human
augguuuucaaaaua

SEQ ID NO: 2292162 - RNA, 14 nt, Human
augguuuucaaaau

SEQ ID NO: 2292163 - RNA, 16 nt, Human
augguuuucaaaauaa

SEQ ID NO: 2292164 - RNA, 14 nt, Human
augguuuucuugug

SEQ ID NO: 2292165 - RNA, 17 nt, Human
auguaaaagacuuuuuu

SEQ ID NO: 2292166 - RNA, 21 nt, Human
auguaaaagagucaucuggua

SEQ ID NO: 2292167 - RNA, 18 nt, Human
auguaaaaggccaaaccu

SEQ ID NO: 2292168 - RNA, 15 nt, Human
auguaaaaggccaaa

SEQ ID NO: 2292169 - RNA, 23 nt, Human
auguaaaaggccaaaccucuguu

SEQ ID NO: 2292170 - RNA, 22 nt, Human
auguaaaaggccaaaccucugu

SEQ ID NO: 2292171 - RNA, 21 nt, Human
auguaaaagguauuaaauuga

SEQ ID NO: 2292172 - RNA, 18 nt, Human
auguaaacaaaauuuagu

SEQ ID NO: 2292173 - RNA, 13 nt, Human
auguaaaauguuu

SEQ ID NO: 2292174 - RNA, 19 nt, Human
auguaaacaaaauuuaguu

SEQ ID NO: 2292175 - RNA, 16 nt, Human
auguaaaauguugaau

SEQ ID NO: 2292176 - RNA, 17 nt, Human
auguaaaauguugaaua

SEQ ID NO: 2292177 - RNA, 23 nt, Human
auguaaacauaauucuuguauau

SEQ ID NO: 2292178 - RNA, 22 nt, Human
auguaaacagugccugcugaau

SEQ ID NO: 2292179 - RNA, 20 nt, Human
auguaaacagugccugcuga

SEQ ID NO: 2292180 - RNA, 14 nt, Human
auguaaacugugca

SEQ ID NO: 2292181 - RNA, 17 nt, Human
auguaaacagugccugc

SEQ ID NO: 2292182 - RNA, 16 nt, Human
auguaaacagugccug

SEQ ID NO: 2292183 - RNA, 15 nt, Human
auguaaacagugccu

SEQ ID NO: 2292184 - RNA, 14 nt, Human
auguaaacaggaga

SEQ ID NO: 2292185 - RNA, 14 nt, Human
auguaaagauauuu

SEQ ID NO: 2292186 - RNA, 19 nt, Human
auguaaagaacauaaauaa

SEQ ID NO: 2292187 - RNA, 21 nt, Human
auguaaagauauuuuuaucuu

SEQ ID NO: 2292188 - RNA, 16 nt, Human
auguaaagugauauuu

SEQ ID NO: 2292189 - RNA, 20 nt, Human
auguaaaggagucaaaacua

SEQ ID NO: 2292190 - RNA, 13 nt, Human
auguaaaguaugu

SEQ ID NO: 2292191 - RNA, 17 nt, Human
auguaaaguauguaaac

SEQ ID NO: 2292192 - RNA, 12 nt, Human
auguaaauagug

SEQ ID NO: 2292193 - RNA, 17 nt, Human
auguaaauagugcagaa

SEQ ID NO: 2292194 - RNA, 18 nt, Human
auguaaaguauguaaaca

SEQ ID NO: 2292195 - RNA, 12 nt, Human
auguaaauauuc

SEQ ID NO: 2292196 - RNA, 15 nt, Human
auguaaauauucuau

SEQ ID NO: 2292197 - RNA, 21 nt, Human
auguaaaugcaucuguccuca

SEQ ID NO: 2292198 - RNA, 13 nt, Human
auguaaaugugca

SEQ ID NO: 2292199 - RNA, 12 nt, Human
auguaaaugugc

SEQ ID NO: 2292200 - RNA, 14 nt, Human
auguaaaugugcau

SEQ ID NO: 2292201 - RNA, 19 nt, Human
auguacauuucugaaauga

SEQ ID NO: 2292202 - RNA, 20 nt, Human
auguacauuuccaaauucac

SEQ ID NO: 2292203 - RNA, 14 nt, Human
auguacauuaauua

SEQ ID NO: 2292204 - RNA, 19 nt, Human
uuugacgggaaacaaaacu

SEQ ID NO: 2292205 - RNA, 17 nt, Human
uuugacauguggaaagu

SEQ ID NO: 2292206 - RNA, 14 nt, Human
uuugacggaugauu

SEQ ID NO: 2292207 - RNA, 19 nt, Human
uuugaccuuuuauguagua

SEQ ID NO: 2292208 - RNA, 20 nt, Human
uuugacgccaucccagcccc

SEQ ID NO: 2292209 - RNA, 21 nt, Human
uuugacuagggauucaggcug

SEQ ID NO: 2292210 - RNA, 19 nt, Human
uuugacuagaugauggaug

SEQ ID NO: 2292211 - RNA, 21 nt, Human
uuugacucuggcaaagcuuuu

SEQ ID NO: 2292212 - RNA, 18 nt, Human
uuugacucuugcaaucca

SEQ ID NO: 2292213 - RNA, 20 nt, Human
uuugacucuggcaaagcuuu

SEQ ID NO: 2292214 - RNA, 19 nt, Human
uuugacucuggcaaagcuu

SEQ ID NO: 2292215 - RNA, 19 nt, Human
uuugaugcuggagagguua

SEQ ID NO: 2292216 - RNA, 15 nt, Human
uuugaugcuguuuga

SEQ ID NO: 2292217 - RNA, 12 nt, Human
uuugacucuuuu

SEQ ID NO: 2292218 - RNA, 19 nt, Human
uuugacugaagaugcagcu

SEQ ID NO: 2292219 - RNA, 15 nt, Human
uuugacuggauauuc

SEQ ID NO: 2292220 - RNA, 13 nt, Human
uuugacgccaucc

SEQ ID NO: 2292221 - RNA, 14 nt, Human
uuugacgccauccc

SEQ ID NO: 2292222 - RNA, 16 nt, Human
uuugacgccaucccag

SEQ ID NO: 2292223 - RNA, 19 nt, Human
uuugacgccaucccagccc

SEQ ID NO: 2292224 - RNA, 23 nt, Human
uuugauuaaauucuugcaaagua

SEQ ID NO: 2292225 - RNA, 21 nt, Human
uuugauucagacagcugccug

SEQ ID NO: 2292226 - RNA, 21 nt, Human
uuugauuaaauucuugcaaag

SEQ ID NO: 2292227 - RNA, 18 nt, Human
uuugauuaaauucuugca

SEQ ID NO: 2292228 - RNA, 11 nt, Human
uuugauguuaa

SEQ ID NO: 2292229 - RNA, 14 nt, Human
uuugauguuaacac

SEQ ID NO: 2292230 - RNA, 15 nt, Human
uuugauguuaacaca

SEQ ID NO: 2292231 - RNA, 16 nt, Human
uuugauguuaacacau

SEQ ID NO: 2292232 - RNA, 17 nt, Human
uuugauguuaacacauu

SEQ ID NO: 2292233 - RNA, 13 nt, Human
uuugauuaaauuc

SEQ ID NO: 2292234 - RNA, 22 nt, Human
uuugauguucuuucacccuuuu

SEQ ID NO: 2292235 - RNA, 12 nt, Human
uuugcaaggaag

SEQ ID NO: 2292236 - RNA, 14 nt, Human
uuugcaaggaagcc

SEQ ID NO: 2292237 - RNA, 21 nt, Human
uuugcaaggaagccacagcug

SEQ ID NO: 2292238 - RNA, 14 nt, Human
uuugcaagccagau

SEQ ID NO: 2292239 - RNA, 15 nt, Human
uuugccguuauuaaa

SEQ ID NO: 2292240 - RNA, 12 nt, Human
uuugcccuuuga

SEQ ID NO: 2292241 - RNA, 21 nt, Human
uuugcaagggaaaagucucuu

SEQ ID NO: 2292242 - RNA, 20 nt, Human
uuugcaagggaaaagucucu

SEQ ID NO: 2292243 - RNA, 19 nt, Human
uuugauguuuguggccuca

SEQ ID NO: 2292244 - RNA, 17 nt, Human
uuugauguuuguggccu

SEQ ID NO: 2292245 - RNA, 20 nt, Human
uuugauucauaguaacuucu

SEQ ID NO: 2292246 - RNA, 15 nt, Human
uuugauucauaguaa

SEQ ID NO: 2292247 - RNA, 22 nt, Human
uuugauucagacagcugccugg

SEQ ID NO: 2292248 - RNA, 12 nt, Human
uuugauucuccu

SEQ ID NO: 2292249 - RNA, 13 nt, Human
uuugauucuccuu

SEQ ID NO: 2292250 - RNA, 14 nt, Human
uuugauucuccuuc

SEQ ID NO: 2292251 - RNA, 16 nt, Human
uuugauucuccuucag

SEQ ID NO: 2292252 - RNA, 14 nt, Human
uuugcaaccucgcu

SEQ ID NO: 2292253 - RNA, 14 nt, Human
uuugccugagggcg

SEQ ID NO: 2292254 - RNA, 20 nt, Human
uuugccucuuuucucugugc

SEQ ID NO: 2292255 - RNA, 17 nt, Human
uuugccucuuccagucu

SEQ ID NO: 2292256 - RNA, 13 nt, Human
uuugccucugccu

SEQ ID NO: 2292257 - RNA, 11 nt, Human
uuugccugugc

SEQ ID NO: 2292258 - RNA, 20 nt, Human
uuugcucucccgguucuucc

SEQ ID NO: 2292259 - RNA, 18 nt, Human
uuugcucuucaagaaauc

SEQ ID NO: 2292260 - RNA, 10 nt, Human
uuugcugcca

SEQ ID NO: 2292261 - RNA, 15 nt, Human
uuugcuggaauaagu

SEQ ID NO: 2292262 - RNA, 17 nt, Human
uuuggcaaugccaucau

SEQ ID NO: 2292263 - RNA, 23 nt, Human
uuuggcaaacucuccaccacacg

SEQ ID NO: 2292264 - RNA, 13 nt, Human
uuugcucuuucuu

SEQ ID NO: 2292265 - RNA, 12 nt, Human
uuugcucugcca

SEQ ID NO: 2292266 - RNA, 20 nt, Human
uuugcucuucaagaaaucug

SEQ ID NO: 2292267 - RNA, 19 nt, Human
uuugcugagcauguacuga

SEQ ID NO: 2292268 - RNA, 14 nt, Human
auguacguuuguau

SEQ ID NO: 2292269 - RNA, 21 nt, Human
auguacguuuguaugugugua

SEQ ID NO: 2292270 - RNA, 18 nt, Human
auguaccaugaaacaaag

SEQ ID NO: 2292271 - RNA, 15 nt, Human
auguaccauguacau

SEQ ID NO: 2292272 - RNA, 15 nt, Human
auguaccauuugcau

SEQ ID NO: 2292273 - RNA, 21 nt, Human
auguaccauguacaugaagaa

SEQ ID NO: 2292274 - RNA, 18 nt, Human
auguaccauuugcauggc

SEQ ID NO: 2292275 - RNA, 22 nt, Human
auguaccauuugcauggcucca

SEQ ID NO: 2292276 - RNA, 19 nt, Human
auguacuguaguuuuucuu

SEQ ID NO: 2292277 - RNA, 16 nt, Human
auguacuguaguuuuu

SEQ ID NO: 2292278 - RNA, 16 nt, Human
auguacuugucaaaga

SEQ ID NO: 2292279 - RNA, 17 nt, Human
auguacuugucaaagaa

SEQ ID NO: 2292280 - RNA, 18 nt, Human
auguacuugucaaagaag

SEQ ID NO: 2292281 - RNA, 19 nt, Human
auguacuugucaaagaagg

SEQ ID NO: 2292282 - RNA, 16 nt, Human
auguacuucaugcugu

SEQ ID NO: 2292283 - RNA, 17 nt, Human
auguacuccucuuuaca

SEQ ID NO: 2292284 - RNA, 20 nt, Human
auguacuccucuuuacacug

SEQ ID NO: 2292285 - RNA, 18 nt, Human
auguacugagccuuguaa

SEQ ID NO: 2292286 - RNA, 14 nt, Human
auguacugagauuu

SEQ ID NO: 2292287 - RNA, 16 nt, Human
auguacucuacugaua

SEQ ID NO: 2292288 - RNA, 22 nt, Human
auguacucuacugauaucuaaa

SEQ ID NO: 2292289 - RNA, 23 nt, Human
auguagauauugugaaguacaua

SEQ ID NO: 2292290 - RNA, 22 nt, Human
auguagauauugugaaguacau

SEQ ID NO: 2292291 - RNA, 19 nt, Human
auguagauaacaagaccuc

SEQ ID NO: 2292292 - RNA, 19 nt, Human
auguagauaaacucagaaa

SEQ ID NO: 2292293 - RNA, 18 nt, Human
auguagauaaacucagaa

SEQ ID NO: 2292294 - RNA, 19 nt, Human
auguagaggggaaaagaga

SEQ ID NO: 2292295 - RNA, 19 nt, Human
auguagaggagaaacugga

SEQ ID NO: 2292296 - RNA, 17 nt, Human
auguagaggagaaacug

SEQ ID NO: 2292297 - RNA, 12 nt, Human
auguagaaagcu

SEQ ID NO: 2292298 - RNA, 13 nt, Human
auguagaagcugc

SEQ ID NO: 2292299 - RNA, 14 nt, Human
auguagaaaauuug

SEQ ID NO: 2292300 - RNA, 13 nt, Human
auguagaggagaa

SEQ ID NO: 2292301 - RNA, 12 nt, Human
auguagaggaga

SEQ ID NO: 2292302 - RNA, 17 nt, Human
auguagguaugaauaag

SEQ ID NO: 2292303 - RNA, 16 nt, Human
auguagguaugaauaa

SEQ ID NO: 2292304 - RNA, 20 nt, Human
auguagggcauaaugaugau

SEQ ID NO: 2292305 - RNA, 18 nt, Human
auguaggguaaggugccu

SEQ ID NO: 2292306 - RNA, 17 nt, Human
auguaggcauucuggag

SEQ ID NO: 2292307 - RNA, 15 nt, Human
auguaggugucugca

SEQ ID NO: 2292308 - RNA, 21 nt, Human
auguaggugucugcacccagg

SEQ ID NO: 2292309 - RNA, 17 nt, Human
auguaguauaaagaaaa

SEQ ID NO: 2292310 - RNA, 16 nt, Human
auguaguauaaagaaa

SEQ ID NO: 2292311 - RNA, 18 nt, Human
auguaguaauugacaugu

SEQ ID NO: 2292312 - RNA, 14 nt, Human
auguaguaguacuu

SEQ ID NO: 2292313 - RNA, 17 nt, Human
auguaguaauugacaug

SEQ ID NO: 2292314 - RNA, 16 nt, Human
auguaguaauugacau

SEQ ID NO: 2292315 - RNA, 13 nt, Human
auguaguaauuga

SEQ ID NO: 2292316 - RNA, 16 nt, Human
auguaguaaguaaauu

SEQ ID NO: 2292317 - RNA, 13 nt, Human
uuugacaugugga

SEQ ID NO: 2292318 - RNA, 20 nt, Human
uuugacauugcguuugaccu

SEQ ID NO: 2292319 - RNA, 12 nt, Human
uuugaccucugc

SEQ ID NO: 2292320 - RNA, 19 nt, Human
auguaguauaaagaaaagu

SEQ ID NO: 2292321 - RNA, 23 nt, Human
auguaguaucaaauauuagaugu

SEQ ID NO: 2292322 - RNA, 21 nt, Human
auguaguaucaaauauuagau

SEQ ID NO: 2292323 - RNA, 18 nt, Human
uuugacaguguugaaaau

SEQ ID NO: 2292324 - RNA, 19 nt, Human
uuugacaguguugaaaaug

SEQ ID NO: 2292325 - RNA, 23 nt, Human
auguagccaugaccuuacauuuc

SEQ ID NO: 2292326 - RNA, 16 nt, Human
auguagccaugggacc

SEQ ID NO: 2292327 - RNA, 23 nt, Human
auguagcccccuggccucugugc

SEQ ID NO: 2292328 - RNA, 21 nt, Human
auguagcccccuggccucugu

SEQ ID NO: 2292329 - RNA, 19 nt, Human
auguagcccccuggccucu

SEQ ID NO: 2292330 - RNA, 18 nt, Human
auguagcccccuggccuc

SEQ ID NO: 2292331 - RNA, 20 nt, Human
auguagcaaaacgcauggag

SEQ ID NO: 2292332 - RNA, 21 nt, Human
auguagcaaaauacaugacau

SEQ ID NO: 2292333 - RNA, 17 nt, Human
auguagcaaaacgcaug

SEQ ID NO: 2292334 - RNA, 20 nt, Human
auguagauuuauuucaucau

SEQ ID NO: 2292335 - RNA, 17 nt, Human
auguagaugugcauuuu

SEQ ID NO: 2292336 - RNA, 17 nt, Human
auguagauuuauuucau

SEQ ID NO: 2292337 - RNA, 16 nt, Human
auguagauuuauuuca

SEQ ID NO: 2292338 - RNA, 15 nt, Human
auguagcugguuucc

SEQ ID NO: 2292339 - RNA, 14 nt, Human
auguagcugguuuc

SEQ ID NO: 2292340 - RNA, 12 nt, Human
auguagccaugg

SEQ ID NO: 2292341 - RNA, 23 nt, Human
auguaggagcugccuuggcucag

SEQ ID NO: 2292342 - RNA, 14 nt, Human
auguaggaaguagg

SEQ ID NO: 2292343 - RNA, 22 nt, Human
auguaggaaagaccauuuuucc

SEQ ID NO: 2292344 - RNA, 19 nt, Human
auguagccccucuccugga

SEQ ID NO: 2292345 - RNA, 13 nt, Human
augugauuuaaua

SEQ ID NO: 2292346 - RNA, 22 nt, Human
augugauuguggaauggagauu

SEQ ID NO: 2292347 - RNA, 16 nt, Human
augugauuuaauagug

SEQ ID NO: 2292348 - RNA, 17 nt, Human
augugauuuaauagugu

SEQ ID NO: 2292349 - RNA, 18 nt, Human
augugauuuaauaguguu

SEQ ID NO: 2292350 - RNA, 20 nt, Human
augugauuuaauaguguuaa

SEQ ID NO: 2292351 - RNA, 17 nt, Human
augugauuguggaaugg

SEQ ID NO: 2292352 - RNA, 15 nt, Human
augugauuguggaau

SEQ ID NO: 2292353 - RNA, 14 nt, Human
augugauuguggaa

SEQ ID NO: 2292354 - RNA, 23 nt, Human
augugauuccuuugaagaggaaa

SEQ ID NO: 2292355 - RNA, 15 nt, Human
augugauucuaaugu

SEQ ID NO: 2292356 - RNA, 18 nt, Human
augugacucugaagcuga

SEQ ID NO: 2292357 - RNA, 20 nt, Human
augugauuccuuugaagagg

SEQ ID NO: 2292358 - RNA, 23 nt, Human
augugcacaugcacgugugugca

SEQ ID NO: 2292359 - RNA, 14 nt, Human
augugauuuuucug

SEQ ID NO: 2292360 - RNA, 20 nt, Human
augugauuuuaacucugucu

SEQ ID NO: 2292361 - RNA, 19 nt, Human
augugauuuuaacucuguc

SEQ ID NO: 2292362 - RNA, 18 nt, Human
augugauuuuaacucugu

SEQ ID NO: 2292363 - RNA, 16 nt, Human
augugauuuuaacucu

SEQ ID NO: 2292364 - RNA, 15 nt, Human
augugauuuuaacuc

SEQ ID NO: 2292365 - RNA, 14 nt, Human
augugauuuuaacu

SEQ ID NO: 2292366 - RNA, 21 nt, Human
augugauuuaauaguguuaau

SEQ ID NO: 2292367 - RNA, 13 nt, Human
augugcaaaacag

SEQ ID NO: 2292368 - RNA, 14 nt, Human
augugcaaaacagc

SEQ ID NO: 2292369 - RNA, 16 nt, Human
augugcaaguguaugc

SEQ ID NO: 2292370 - RNA, 14 nt, Human
augugcaaaugcaa

SEQ ID NO: 2292371 - RNA, 15 nt, Human
augugauuuuucuga

SEQ ID NO: 2292372 - RNA, 13 nt, Human
augucucuucuga

SEQ ID NO: 2292373 - RNA, 17 nt, Human
augucucuucugagcua

SEQ ID NO: 2292374 - RNA, 16 nt, Human
augucucuucugagcu

SEQ ID NO: 2292375 - RNA, 23 nt, Human
augucucuuuaaugucacaggca

SEQ ID NO: 2292376 - RNA, 13 nt, Human
augugacucugaa

SEQ ID NO: 2292377 - RNA, 12 nt, Human
augugacucuga

SEQ ID NO: 2292378 - RNA, 20 nt, Human
augugacccagauccucaca

SEQ ID NO: 2292379 - RNA, 19 nt, Human
augugaccacucugucuug

SEQ ID NO: 2292380 - RNA, 16 nt, Human
augugaugagaggaaa

SEQ ID NO: 2292381 - RNA, 23 nt, Human
augugacuugcaucguggagaca

SEQ ID NO: 2292382 - RNA, 17 nt, Human
augugaugagaggaaau

SEQ ID NO: 2292383 - RNA, 19 nt, Human
augugaugagaggaaauca

SEQ ID NO: 2292384 - RNA, 17 nt, Human
uuugugaauggauugga

SEQ ID NO: 2292385 - RNA, 18 nt, Human
uuugugaauagaacucug

SEQ ID NO: 2292386 - RNA, 20 nt, Human
uuugugaagguggaaauaaa

SEQ ID NO: 2292387 - RNA, 19 nt, Human
uuugugaauggauuggauu

SEQ ID NO: 2292388 - RNA, 18 nt, Human
uuugugacuaauuguaua

SEQ ID NO: 2292389 - RNA, 23 nt, Human
uuugugaauggauuggauuauuu

SEQ ID NO: 2292390 - RNA, 22 nt, Human
uuugugacuaauuguauaacag

SEQ ID NO: 2292391 - RNA, 14 nt, Human
uuugugacuauaua

SEQ ID NO: 2292392 - RNA, 21 nt, Human
uuugucuuguguuucuuuagu

SEQ ID NO: 2292393 - RNA, 22 nt, Human
uuugugaaaugauggugaaagu

SEQ ID NO: 2292394 - RNA, 17 nt, Human
uuugucuuuaacuguca

SEQ ID NO: 2292395 - RNA, 16 nt, Human
uuugucuugaaugucu

SEQ ID NO: 2292396 - RNA, 20 nt, Human
uuugugaacucagccaagca

SEQ ID NO: 2292397 - RNA, 22 nt, Human
uuugugaacaagucccuguaau

SEQ ID NO: 2292398 - RNA, 17 nt, Human
uuugugaagcaaaauuu

SEQ ID NO: 2292399 - RNA, 23 nt, Human
uuuguaaugucaccaccuuccca

SEQ ID NO: 2292400 - RNA, 12 nt, Human
uuuguaauuauu

SEQ ID NO: 2292401 - RNA, 14 nt, Human
uuuguaauuauugu

SEQ ID NO: 2292402 - RNA, 18 nt, Human
uuuguaauugcuuacauu

SEQ ID NO: 2292403 - RNA, 21 nt, Human
uuuguaaucguuaugugugua

SEQ ID NO: 2292404 - RNA, 18 nt, Human
uuuguaaucguuaugugu

SEQ ID NO: 2292405 - RNA, 16 nt, Human
augugcacccaugggc

SEQ ID NO: 2292406 - RNA, 13 nt, Human
uuuguaaugaaaa

SEQ ID NO: 2292407 - RNA, 14 nt, Human
uuuguaaugaaaac

SEQ ID NO: 2292408 - RNA, 12 nt, Human
uuuguauaaaag

SEQ ID NO: 2292409 - RNA, 15 nt, Human
uuugucuucucccca

SEQ ID NO: 2292410 - RNA, 16 nt, Human
uuugucuucuccccag

SEQ ID NO: 2292411 - RNA, 20 nt, Human
uuuguaauugcuuacauuuu

SEQ ID NO: 2292412 - RNA, 19 nt, Human
uuuguaguguuggagaaga

SEQ ID NO: 2292413 - RNA, 21 nt, Human
uuuguaguguuggagaagaac

SEQ ID NO: 2292414 - RNA, 12 nt, Human
auguauguuuac

SEQ ID NO: 2292415 - RNA, 14 nt, Human
auguauguuuacau

SEQ ID NO: 2292416 - RNA, 13 nt, Human
auguauguuuaca

SEQ ID NO: 2292417 - RNA, 16 nt, Human
auguauguuuacauau

SEQ ID NO: 2292418 - RNA, 16 nt, Human
auguauguguaaguau

SEQ ID NO: 2292419 - RNA, 14 nt, Human
auguauguguguau

SEQ ID NO: 2292420 - RNA, 15 nt, Human
auguauguguguaug

SEQ ID NO: 2292421 - RNA, 17 nt, Human
auguauuauucugcagc

SEQ ID NO: 2292422 - RNA, 16 nt, Human
auguauuauucugcag

SEQ ID NO: 2292423 - RNA, 14 nt, Human
auguauuauucugc

SEQ ID NO: 2292424 - RNA, 13 nt, Human
auguauuauucug

SEQ ID NO: 2292425 - RNA, 16 nt, Human
augucaguauguggaa

SEQ ID NO: 2292426 - RNA, 17 nt, Human
auguauuaauauucauu

SEQ ID NO: 2292427 - RNA, 16 nt, Human
auguauuaauauucau

SEQ ID NO: 2292428 - RNA, 18 nt, Human
auguauguuuacauauca

SEQ ID NO: 2292429 - RNA, 17 nt, Human
auguauguuuacauauc

SEQ ID NO: 2292430 - RNA, 20 nt, Human
auguauguuuugguaucugu

SEQ ID NO: 2292431 - RNA, 14 nt, Human
auguaugauuacau

SEQ ID NO: 2292432 - RNA, 14 nt, Human
auguaugcagcuau

SEQ ID NO: 2292433 - RNA, 17 nt, Human
auguaugcagcuaucug

SEQ ID NO: 2292434 - RNA, 14 nt, Human
auguaugcuucaua

SEQ ID NO: 2292435 - RNA, 15 nt, Human
auguauguguaagua

SEQ ID NO: 2292436 - RNA, 16 nt, Human
auguaugcuucauaca

SEQ ID NO: 2292437 - RNA, 15 nt, Human
auguaugcuucauac

SEQ ID NO: 2292438 - RNA, 13 nt, Human
uuuggcagaguuc

SEQ ID NO: 2292439 - RNA, 20 nt, Human
uuuggcagagcuucuuccag

SEQ ID NO: 2292440 - RNA, 11 nt, Human
uuuggcacugg

SEQ ID NO: 2292441 - RNA, 17 nt, Human
uuuggcacuggggcacu

SEQ ID NO: 2292442 - RNA, 22 nt, Human
uuuggcaggggcagaaaacucu

SEQ ID NO: 2292443 - RNA, 13 nt, Human
uuuggcaggugca

SEQ ID NO: 2292444 - RNA, 19 nt, Human
auguaugaggaauuucugu

SEQ ID NO: 2292445 - RNA, 18 nt, Human
auguaugagguacaaccu

SEQ ID NO: 2292446 - RNA, 20 nt, Human
uuuggcaucuguuuaaagua

SEQ ID NO: 2292447 - RNA, 19 nt, Human
augucucgugguaggacug

SEQ ID NO: 2292448 - RNA, 21 nt, Human
augucucucagaauucuucag

SEQ ID NO: 2292449 - RNA, 17 nt, Human
augucucucagaauucu

SEQ ID NO: 2292450 - RNA, 16 nt, Human
augucucucagaauuc

SEQ ID NO: 2292451 - RNA, 13 nt, Human
augucucucagaa

SEQ ID NO: 2292452 - RNA, 17 nt, Human
augucucugagcauuag

SEQ ID NO: 2292453 - RNA, 21 nt, Human
augucucugugagacucgaga

SEQ ID NO: 2292454 - RNA, 23 nt, Human
augucucugugagacucgagaac

SEQ ID NO: 2292455 - RNA, 15 nt, Human
augucucgugguagg

SEQ ID NO: 2292456 - RNA, 16 nt, Human
augucucgugguagga

SEQ ID NO: 2292457 - RNA, 13 nt, Human
augucgccucugc

SEQ ID NO: 2292458 - RNA, 14 nt, Human
augucgccucugca

SEQ ID NO: 2292459 - RNA, 14 nt, Human
auguccuguaaagg

SEQ ID NO: 2292460 - RNA, 17 nt, Human
augucucaggucccugc

SEQ ID NO: 2292461 - RNA, 22 nt, Human
augucucaggucccugcagggc

SEQ ID NO: 2292462 - RNA, 13 nt, Human
auguccuguaaag

SEQ ID NO: 2292463 - RNA, 14 nt, Human
auguccacugugua

SEQ ID NO: 2292464 - RNA, 22 nt, Human
auguccagaagaauauucagga

SEQ ID NO: 2292465 - RNA, 23 nt, Human
auguccagaagaauauucaggac

SEQ ID NO: 2292466 - RNA, 16 nt, Human
auguccacuguguaua

SEQ ID NO: 2292467 - RNA, 17 nt, Human
auguccacuguguauag

SEQ ID NO: 2292468 - RNA, 12 nt, Human
auguccagaaga

SEQ ID NO: 2292469 - RNA, 21 nt, Human
auguccagaagaauauucagg

SEQ ID NO: 2292470 - RNA, 12 nt, Human
augucaguguga

SEQ ID NO: 2292471 - RNA, 13 nt, Human
augucagugugac

SEQ ID NO: 2292472 - RNA, 17 nt, Human
auguccacugguucuuc

SEQ ID NO: 2292473 - RNA, 16 nt, Human
auguccacugguucuu

SEQ ID NO: 2292474 - RNA, 23 nt, Human
aucauuuuuccuucccuucucca

SEQ ID NO: 2292475 - RNA, 13 nt, Human
aucauuuuuguac

SEQ ID NO: 2292476 - RNA, 18 nt, Human
auccaagcuggucccacu

SEQ ID NO: 2292477 - RNA, 21 nt, Human
auccaagcuggucccacucag

SEQ ID NO: 2292478 - RNA, 13 nt, Human
auccacccaccuc

SEQ ID NO: 2292479 - RNA, 15 nt, Human
auccacccaccucag

SEQ ID NO: 2292480 - RNA, 16 nt, Human
auccaguaucuugaag

SEQ ID NO: 2292481 - RNA, 15 nt, Human
aucauuuucccccca

SEQ ID NO: 2292482 - RNA, 14 nt, Human
aucauuuucccccc

SEQ ID NO: 2292483 - RNA, 13 nt, Human
aucauuuuccccc

SEQ ID NO: 2292484 - RNA, 19 nt, Human
aucauuuuauaugucaaag

SEQ ID NO: 2292485 - RNA, 17 nt, Human
aucauuuuauaugucaa

SEQ ID NO: 2292486 - RNA, 18 nt, Human
aucauuuuauaugucaaa

SEQ ID NO: 2292487 - RNA, 16 nt, Human
aucauuuuagaagacu

SEQ ID NO: 2292488 - RNA, 22 nt, Human
aucauuuuagaagacucuacca

SEQ ID NO: 2292489 - RNA, 23 nt, Human
aucauuuuagaagacucuaccag

SEQ ID NO: 2292490 - RNA, 17 nt, Human
aucauuuuccccccacu

SEQ ID NO: 2292491 - RNA, 22 nt, Human
aucauuuucuuaucuucugcaa

SEQ ID NO: 2292492 - RNA, 13 nt, Human
aucauuuugcauu

SEQ ID NO: 2292493 - RNA, 15 nt, Human
aucauuuugcauuca

SEQ ID NO: 2292494 - RNA, 17 nt, Human
aucauuuugcauucaaa

SEQ ID NO: 2292495 - RNA, 18 nt, Human
auccaagcaaaugugaau

SEQ ID NO: 2292496 - RNA, 19 nt, Human
aucauuuugccucuuuucu

SEQ ID NO: 2292497 - RNA, 19 nt, Human
aucauuuugcauucaaauu

SEQ ID NO: 2292498 - RNA, 14 nt, Human
aucauuuuuccuuc

SEQ ID NO: 2292499 - RNA, 23 nt, Human
uucuggggccccuuuuuacuccc

SEQ ID NO: 2292500 - RNA, 20 nt, Human
aucauuuuaccuuugacaaa

SEQ ID NO: 2292501 - RNA, 14 nt, Human
uucuggggccccuu

SEQ ID NO: 2292502 - RNA, 21 nt, Human
uucuggggccccuuuuuacuc

SEQ ID NO: 2292503 - RNA, 19 nt, Human
uucugggcaucuguucugg

SEQ ID NO: 2292504 - RNA, 16 nt, Human
uucugggcuucaucug

SEQ ID NO: 2292505 - RNA, 20 nt, Human
aucccagcuacucaagaggc

SEQ ID NO: 2292506 - RNA, 13 nt, Human
aucccagccuugg

SEQ ID NO: 2292507 - RNA, 23 nt, Human
aucccagcccuuugggaggcuga

SEQ ID NO: 2292508 - RNA, 18 nt, Human
aucccagcuacucaggag

SEQ ID NO: 2292509 - RNA, 17 nt, Human
aucccagcuacucagga

SEQ ID NO: 2292510 - RNA, 23 nt, Human
aucccagcuacucaagaggcuga

SEQ ID NO: 2292511 - RNA, 15 nt, Human
aucccagccuuggca

SEQ ID NO: 2292512 - RNA, 20 nt, Human
aucccagcuacucaggaggc

SEQ ID NO: 2292513 - RNA, 18 nt, Human
aucccagcuacuugggaa

SEQ ID NO: 2292514 - RNA, 22 nt, Human
aucccagcuacuugggaggcug

SEQ ID NO: 2292515 - RNA, 13 nt, Human
aucccagcucacg

SEQ ID NO: 2292516 - RNA, 20 nt, Human
aucccagcuacuugggaagc

SEQ ID NO: 2292517 - RNA, 12 nt, Human
aucccaggacac

SEQ ID NO: 2292518 - RNA, 17 nt, Human
aucccaggacaccacac

SEQ ID NO: 2292519 - RNA, 18 nt, Human
aucccauaugccugggca

SEQ ID NO: 2292520 - RNA, 22 nt, Human
aucccaaagccuugugucuaca

SEQ ID NO: 2292521 - RNA, 12 nt, Human
aucccagcccca

SEQ ID NO: 2292522 - RNA, 19 nt, Human
aucccaaacccuucagugc

SEQ ID NO: 2292523 - RNA, 20 nt, Human
aucccaaacccuucagugcc

SEQ ID NO: 2292524 - RNA, 13 nt, Human
auccaucaggcca

SEQ ID NO: 2292525 - RNA, 14 nt, Human
auccaucaucaugu

SEQ ID NO: 2292526 - RNA, 19 nt, Human
auccauaguggacauuguu

SEQ ID NO: 2292527 - RNA, 16 nt, Human
auccauaguaguauga

SEQ ID NO: 2292528 - RNA, 18 nt, Human
auccauauugagucaaau

SEQ ID NO: 2292529 - RNA, 20 nt, Human
auccauauugagucaaaugg

SEQ ID NO: 2292530 - RNA, 21 nt, Human
auccaguaucuugaagacuuu

SEQ ID NO: 2292531 - RNA, 18 nt, Human
auccacauuguuuuaaaa

SEQ ID NO: 2292532 - RNA, 19 nt, Human
auccacauuguuuuaaaaa

SEQ ID NO: 2292533 - RNA, 14 nt, Human
auccaccaccuccc

SEQ ID NO: 2292534 - RNA, 17 nt, Human
auccaccaccucccuca

SEQ ID NO: 2292535 - RNA, 19 nt, Human
auccauagcaccuccacau

SEQ ID NO: 2292536 - RNA, 16 nt, Human
auccaguucaugagaa

SEQ ID NO: 2292537 - RNA, 17 nt, Human
auccagugucucacagc

SEQ ID NO: 2292538 - RNA, 21 nt, Human
auccagugauccuuacaaguu

SEQ ID NO: 2292539 - RNA, 16 nt, Human
auccagugauccuuac

SEQ ID NO: 2292540 - RNA, 18 nt, Human
aucaguagccagcaucug

SEQ ID NO: 2292541 - RNA, 19 nt, Human
aucaguaagaaaaagaaga

SEQ ID NO: 2292542 - RNA, 15 nt, Human
aucaguaauauuuau

SEQ ID NO: 2292543 - RNA, 13 nt, Human
aucagguggggag

SEQ ID NO: 2292544 - RNA, 13 nt, Human
aucaggucuccca

SEQ ID NO: 2292545 - RNA, 20 nt, Human
aucaggugcccaucccugga

SEQ ID NO: 2292546 - RNA, 15 nt, Human
aucagguuccauccc

SEQ ID NO: 2292547 - RNA, 14 nt, Human
aucaguauaaacaa

SEQ ID NO: 2292548 - RNA, 10 nt, Human
uucuccugga

SEQ ID NO: 2292549 - RNA, 15 nt, Human
uucuccuuagucuuc

SEQ ID NO: 2292550 - RNA, 12 nt, Human
uucuccugugcu

SEQ ID NO: 2292551 - RNA, 15 nt, Human
uucuccuucagcccu

SEQ ID NO: 2292552 - RNA, 20 nt, Human
uucuccuucagcccucaccc

SEQ ID NO: 2292553 - RNA, 21 nt, Human
uucuccuuguguuacuaaguu

SEQ ID NO: 2292554 - RNA, 20 nt, Human
uucuccuuagucuucucaua

SEQ ID NO: 2292555 - RNA, 12 nt, Human
uucucuaggaaa

SEQ ID NO: 2292556 - RNA, 17 nt, Human
uucucuaguuugauuaa

SEQ ID NO: 2292557 - RNA, 15 nt, Human
uucucuaguuugauu

SEQ ID NO: 2292558 - RNA, 21 nt, Human
uucucuuccacucuccuugcu

SEQ ID NO: 2292559 - RNA, 20 nt, Human
uucucuaguuugauuaaauu

SEQ ID NO: 2292560 - RNA, 13 nt, Human
uucucuuccugua

SEQ ID NO: 2292561 - RNA, 12 nt, Human
uucucuuccugu

SEQ ID NO: 2292562 - RNA, 20 nt, Human
uucucuuccuuuuaucagua

SEQ ID NO: 2292563 - RNA, 12 nt, Human
uucucuucucug

SEQ ID NO: 2292564 - RNA, 14 nt, Human
uucucuucuugaac

SEQ ID NO: 2292565 - RNA, 14 nt, Human
uucucuucucuguu

SEQ ID NO: 2292566 - RNA, 15 nt, Human
uucucuugggcugag

SEQ ID NO: 2292567 - RNA, 22 nt, Human
uucucuugggaacugaacucac

SEQ ID NO: 2292568 - RNA, 17 nt, Human
uucucuugggaacugaa

SEQ ID NO: 2292569 - RNA, 22 nt, Human
uucugaacucaaacugaggaau

SEQ ID NO: 2292570 - RNA, 18 nt, Human
uucugaacucaaacugag

SEQ ID NO: 2292571 - RNA, 17 nt, Human
uucugaacucaaacuga

SEQ ID NO: 2292572 - RNA, 16 nt, Human
uucugaacucaaacug

SEQ ID NO: 2292573 - RNA, 19 nt, Human
uucugaacuuggcgcugcc

SEQ ID NO: 2292574 - RNA, 22 nt, Human
uucugaacuuggcgcugccccu

SEQ ID NO: 2292575 - RNA, 19 nt, Human
uucugcccacauuggaccc

SEQ ID NO: 2292576 - RNA, 19 nt, Human
uucugcccaaaaauauggu

SEQ ID NO: 2292577 - RNA, 16 nt, Human
uucugccagggagcuu

SEQ ID NO: 2292578 - RNA, 15 nt, Human
uucugccagggagcu

SEQ ID NO: 2292579 - RNA, 13 nt, Human
uucugcccuggcu

SEQ ID NO: 2292580 - RNA, 14 nt, Human
uucugcccuggcug

SEQ ID NO: 2292581 - RNA, 19 nt, Human
uucugcccaauuggaggaa

SEQ ID NO: 2292582 - RNA, 15 nt, Human
uucugccauauucug

SEQ ID NO: 2292583 - RNA, 23 nt, Human
uucugaacuuggcgcugccccug

SEQ ID NO: 2292584 - RNA, 21 nt, Human
uucugccugcccaggccccug

SEQ ID NO: 2292585 - RNA, 15 nt, Human
uucuggcucuuccag

SEQ ID NO: 2292586 - RNA, 14 nt, Human
uucugccuggagac

SEQ ID NO: 2292587 - RNA, 16 nt, Human
uucugcccuggcugcu

SEQ ID NO: 2292588 - RNA, 13 nt, Human
uucugccuguuau

SEQ ID NO: 2292589 - RNA, 17 nt, Human
uucugccugcccaggcc

SEQ ID NO: 2292590 - RNA, 18 nt, Human
uucugccugcccaggccc

SEQ ID NO: 2292591 - RNA, 19 nt, Human
uucuggcugaacacuggca

SEQ ID NO: 2292592 - RNA, 15 nt, Human
uucugccuguuauaa

SEQ ID NO: 2292593 - RNA, 14 nt, Human
uucugccuguuaua

SEQ ID NO: 2292594 - RNA, 22 nt, Human
uucuggcuggagccuagaacag

SEQ ID NO: 2292595 - RNA, 11 nt, Human
uucuggcugcc

SEQ ID NO: 2292596 - RNA, 20 nt, Human
uucuggcugccccaaccugc

SEQ ID NO: 2292597 - RNA, 23 nt, Human
uucugggaaauggcuugaagcca

SEQ ID NO: 2292598 - RNA, 17 nt, Human
uucugggaaauggcuug

SEQ ID NO: 2292599 - RNA, 20 nt, Human
uucuggcuuccuucucucaa

SEQ ID NO: 2292600 - RNA, 21 nt, Human
uucugggagggcagcagggcu

SEQ ID NO: 2292601 - RNA, 14 nt, Human
uucugggagggcag

SEQ ID NO: 2292602 - RNA, 16 nt, Human
uucuggcucuuccagg

SEQ ID NO: 2292603 - RNA, 17 nt, Human
uucuggcucuuccaggc

SEQ ID NO: 2292604 - RNA, 17 nt, Human
auccguaguucccugaa

SEQ ID NO: 2292605 - RNA, 21 nt, Human
auccgucuuuggccuccucca

SEQ ID NO: 2292606 - RNA, 23 nt, Human
auccuaaaacaaaagcucaucca

SEQ ID NO: 2292607 - RNA, 19 nt, Human
auccuaaaacaaaagcuca

SEQ ID NO: 2292608 - RNA, 15 nt, Human
auccggcagccugga

SEQ ID NO: 2292609 - RNA, 22 nt, Human
auccggcaacaucaacccgagu

SEQ ID NO: 2292610 - RNA, 16 nt, Human
auccguaguucccuga

SEQ ID NO: 2292611 - RNA, 20 nt, Human
auccggcccccagagcgccc

SEQ ID NO: 2292612 - RNA, 13 nt, Human
auccgaggcaggg

SEQ ID NO: 2292613 - RNA, 13 nt, Human
auccgccagggcc

SEQ ID NO: 2292614 - RNA, 23 nt, Human
auccgacuugaauuuucccacug

SEQ ID NO: 2292615 - RNA, 14 nt, Human
auccgccagggccc

SEQ ID NO: 2292616 - RNA, 19 nt, Human
auccgccagggcccacacc

SEQ ID NO: 2292617 - RNA, 15 nt, Human
auccgccagggccca

SEQ ID NO: 2292618 - RNA, 12 nt, Human
auccuaagcuau

SEQ ID NO: 2292619 - RNA, 14 nt, Human
auccuaaaacaaau

SEQ ID NO: 2292620 - RNA, 14 nt, Human
auccuacaagacac

SEQ ID NO: 2292621 - RNA, 19 nt, Human
auccuacaagacacaguga

SEQ ID NO: 2292622 - RNA, 18 nt, Human
auccuacaagacacagug

SEQ ID NO: 2292623 - RNA, 16 nt, Human
auccuaggcauuugcu

SEQ ID NO: 2292624 - RNA, 19 nt, Human
auccuagccuuauccucug

SEQ ID NO: 2292625 - RNA, 20 nt, Human
auccuagccuuauccucuga

SEQ ID NO: 2292626 - RNA, 21 nt, Human
auccuagccuuauccucugau

SEQ ID NO: 2292627 - RNA, 22 nt, Human
auccuagccuuauccucugauc

SEQ ID NO: 2292628 - RNA, 11 nt, Human
auccuccuccc

SEQ ID NO: 2292629 - RNA, 16 nt, Human
auccuccucagaucuu

SEQ ID NO: 2292630 - RNA, 14 nt, Human
auccuaccaaugca

SEQ ID NO: 2292631 - RNA, 22 nt, Human
auccuacacaccuaagggacau

SEQ ID NO: 2292632 - RNA, 15 nt, Human
auccuaccaaugcau

SEQ ID NO: 2292633 - RNA, 16 nt, Human
auccuaccaaugcaug

SEQ ID NO: 2292634 - RNA, 17 nt, Human
auccuaccaaugcaugc

SEQ ID NO: 2292635 - RNA, 18 nt, Human
auccuaccaaugcaugca

SEQ ID NO: 2292636 - RNA, 21 nt, Human
auccuaccccaauuccuugua

SEQ ID NO: 2292637 - RNA, 21 nt, Human
auccuacccucgggcccaccu

SEQ ID NO: 2292638 - RNA, 22 nt, Human
auccuacccucgggcccaccug

SEQ ID NO: 2292639 - RNA, 16 nt, Human
auccuaccuguuuugu

SEQ ID NO: 2292640 - RNA, 21 nt, Human
auccuagagauuugguguaca

SEQ ID NO: 2292641 - RNA, 23 nt, Human
auccuagagauuugguguacaau

SEQ ID NO: 2292642 - RNA, 14 nt, Human
auccuacuucucca

SEQ ID NO: 2292643 - RNA, 15 nt, Human
uugaaauuguacaua

SEQ ID NO: 2292644 - RNA, 19 nt, Human
uugaacccgggaggcagag

SEQ ID NO: 2292645 - RNA, 12 nt, Human
auccgaggcagg

SEQ ID NO: 2292646 - RNA, 17 nt, Human
auccgacugcuuuggac

SEQ ID NO: 2292647 - RNA, 22 nt, Human
uugaacgcccccccccaccccu

SEQ ID NO: 2292648 - RNA, 19 nt, Human
uugaaauuguuuaaguguu

SEQ ID NO: 2292649 - RNA, 17 nt, Human
uugaaauuguauuacaa

SEQ ID NO: 2292650 - RNA, 16 nt, Human
uugaaagcauccaugu

SEQ ID NO: 2292651 - RNA, 12 nt, Human
uugaaagcugug

SEQ ID NO: 2292652 - RNA, 22 nt, Human
uugaaagauucagguauguugc

SEQ ID NO: 2292653 - RNA, 21 nt, Human
uugaaaggcauucucugaaga

SEQ ID NO: 2292654 - RNA, 20 nt, Human
uugaaaggcauucucugaag

SEQ ID NO: 2292655 - RNA, 19 nt, Human
uugaaaggcauucucugaa

SEQ ID NO: 2292656 - RNA, 22 nt, Human
uugaaagcuguggccagcuugu

SEQ ID NO: 2292657 - RNA, 21 nt, Human
uugaaagggguugugaagagg

SEQ ID NO: 2292658 - RNA, 20 nt, Human
uugaaauuaagaaggcaaaa

SEQ ID NO: 2292659 - RNA, 18 nt, Human
uugaaauguguuucugua

SEQ ID NO: 2292660 - RNA, 19 nt, Human
uugaaauguguuucuguau

SEQ ID NO: 2292661 - RNA, 18 nt, Human
uugaaauuaaccucucac

SEQ ID NO: 2292662 - RNA, 18 nt, Human
uugaaauuauguauguuu

SEQ ID NO: 2292663 - RNA, 19 nt, Human
uugaaauuauguauguuua

SEQ ID NO: 2292664 - RNA, 21 nt, Human
uugaaauuauguauguuuaca

SEQ ID NO: 2292665 - RNA, 23 nt, Human
uugaaauuauguauguuuacaua

SEQ ID NO: 2292666 - RNA, 21 nt, Human
uucuuaagacgugauuuugcu

SEQ ID NO: 2292667 - RNA, 23 nt, Human
uucuuaagacgugauuuugcugu

SEQ ID NO: 2292668 - RNA, 22 nt, Human
uucuuaaggauugugauauuuu

SEQ ID NO: 2292669 - RNA, 20 nt, Human
uucuuaaggauugugauauu

SEQ ID NO: 2292670 - RNA, 22 nt, Human
uucuuaaguauguuauuuucug

SEQ ID NO: 2292671 - RNA, 13 nt, Human
uucuucucccuca

SEQ ID NO: 2292672 - RNA, 19 nt, Human
uucuuaaucuuuucacaaa

SEQ ID NO: 2292673 - RNA, 20 nt, Human
uucuuaaucuuuucacaaau

SEQ ID NO: 2292674 - RNA, 21 nt, Human
uucuuaaucuuuucacaaaua

SEQ ID NO: 2292675 - RNA, 14 nt, Human
uucuucucccucag

SEQ ID NO: 2292676 - RNA, 13 nt, Human
uucuucugaacuc

SEQ ID NO: 2292677 - RNA, 14 nt, Human
uucuucucugcugc

SEQ ID NO: 2292678 - RNA, 15 nt, Human
uucuucuccuaugug

SEQ ID NO: 2292679 - RNA, 17 nt, Human
uucuucuccuaugugua

SEQ ID NO: 2292680 - RNA, 18 nt, Human
uucuucuccuauguguaa

SEQ ID NO: 2292681 - RNA, 14 nt, Human
uucuucucuagcug

SEQ ID NO: 2292682 - RNA, 13 nt, Human
uucuucugcuuca

SEQ ID NO: 2292683 - RNA, 15 nt, Human
uucuucugcuucagc

SEQ ID NO: 2292684 - RNA, 21 nt, Human
aucccaggacaccacacccag

SEQ ID NO: 2292685 - RNA, 22 nt, Human
aucccaggacaccacacccagc

SEQ ID NO: 2292686 - RNA, 24 nt, Human
aucccauaugccugggcagaagga

SEQ ID NO: 2292687 - RNA, 13 nt, Human
aucccaugagccu

SEQ ID NO: 2292688 - RNA, 16 nt, Human
aucccaugaacacacu

SEQ ID NO: 2292689 - RNA, 18 nt, Human
aucccaugaacacacugu

SEQ ID NO: 2292690 - RNA, 14 nt, Human
aucccucauccuca

SEQ ID NO: 2292691 - RNA, 18 nt, Human
uucuuaagacauguauca

SEQ ID NO: 2292692 - RNA, 13 nt, Human
uucuuaaccaucu

SEQ ID NO: 2292693 - RNA, 13 nt, Human
aucccucauccuc

SEQ ID NO: 2292694 - RNA, 21 nt, Human
aucccucauccucauacccac

SEQ ID NO: 2292695 - RNA, 23 nt, Human
aucccucauccucauacccaccc

SEQ ID NO: 2292696 - RNA, 17 nt, Human
uucuucuuuuugcuuca

SEQ ID NO: 2292697 - RNA, 21 nt, Human
uucuucuuuuugcuucaaaaa

SEQ ID NO: 2292698 - RNA, 13 nt, Human
uucuugaaagcug

SEQ ID NO: 2292699 - RNA, 14 nt, Human
uucuugaaagcugu

SEQ ID NO: 2292700 - RNA, 15 nt, Human
uucuugaaagcugug

SEQ ID NO: 2292701 - RNA, 21 nt, Human
uucuugaacacucaugcugaa

SEQ ID NO: 2292702 - RNA, 18 nt, Human
uucuuugccuguucaguu

SEQ ID NO: 2292703 - RNA, 14 nt, Human
uucuuugccuguuc

SEQ ID NO: 2292704 - RNA, 20 nt, Human
uucuugaacacucaugcuga

SEQ ID NO: 2292705 - RNA, 18 nt, Human
uucuuugggaauauuuga

SEQ ID NO: 2292706 - RNA, 20 nt, Human
uucuuugggaauauuugaau

SEQ ID NO: 2292707 - RNA, 17 nt, Human
uucuuugccuguucagu

SEQ ID NO: 2292708 - RNA, 20 nt, Human
uucuucugcuucagccuccc

SEQ ID NO: 2292709 - RNA, 23 nt, Human
uucuucugaacucaaacugagga

SEQ ID NO: 2292710 - RNA, 20 nt, Human
uucuucugaacucaaacuga

SEQ ID NO: 2292711 - RNA, 15 nt, Human
uucuucuucagaaga

SEQ ID NO: 2292712 - RNA, 13 nt, Human
uucuucuucccuc

SEQ ID NO: 2292713 - RNA, 13 nt, Human
uucuucuuccuga

SEQ ID NO: 2292714 - RNA, 14 nt, Human
uucuucuuccugaa

SEQ ID NO: 2292715 - RNA, 15 nt, Human
uucuucuuuuugcug

SEQ ID NO: 2292716 - RNA, 16 nt, Human
uucuucuuuuugcugu

SEQ ID NO: 2292717 - RNA, 13 nt, Human
uucuucuucagaa

SEQ ID NO: 2292718 - RNA, 22 nt, Human
uucuucuuccaacguggcccag

SEQ ID NO: 2292719 - RNA, 13 nt, Human
uucuucuguauuu

SEQ ID NO: 2292720 - RNA, 22 nt, Human
uucuuugguggagauaaagauu

SEQ ID NO: 2292721 - RNA, 13 nt, Human
uucuuugggccag

SEQ ID NO: 2292722 - RNA, 22 nt, Human
uucuuugggaauauuugaaucu

SEQ ID NO: 2292723 - RNA, 15 nt, Human
uucuuuguaaugaaa

SEQ ID NO: 2292724 - RNA, 23 nt, Human
uucuuuuugcuguuguuucuaaa

SEQ ID NO: 2292725 - RNA, 13 nt, Human
uucuuuuugcugu

SEQ ID NO: 2292726 - RNA, 14 nt, Human
uucuuuuugcuguu

SEQ ID NO: 2292727 - RNA, 13 nt, Human
uugaaagaccuuc

SEQ ID NO: 2292728 - RNA, 14 nt, Human
uucuuuuuuuguga

SEQ ID NO: 2292729 - RNA, 15 nt, Human
uugaaagauucaggu

SEQ ID NO: 2292730 - RNA, 14 nt, Human
uugaaagaguccua

SEQ ID NO: 2292731 - RNA, 20 nt, Human
uugaaagagaaccaguuuca

SEQ ID NO: 2292732 - RNA, 14 nt, Human
uugaaagagauggc

SEQ ID NO: 2292733 - RNA, 17 nt, Human
uugaaagagaaccaguu

SEQ ID NO: 2292734 - RNA, 22 nt, Human
uucuuuuuugugugauuuaaga

SEQ ID NO: 2292735 - RNA, 20 nt, Human
uucggcagauacugucucuu

SEQ ID NO: 2292736 - RNA, 17 nt, Human
uucggauuuggggugga

SEQ ID NO: 2292737 - RNA, 18 nt, Human
uucggaaaccuuggugua

SEQ ID NO: 2292738 - RNA, 14 nt, Human
uucggccuccaucc

SEQ ID NO: 2292739 - RNA, 12 nt, Human
uucggaaaccuu

SEQ ID NO: 2292740 - RNA, 13 nt, Human
aucacuggaugaa

SEQ ID NO: 2292741 - RNA, 22 nt, Human
uucgcuucuugccucugugcug

SEQ ID NO: 2292742 - RNA, 17 nt, Human
aucacuggagcccagga

SEQ ID NO: 2292743 - RNA, 16 nt, Human
aucacuggagcccagg

SEQ ID NO: 2292744 - RNA, 12 nt, Human
uucgcugcaacc

SEQ ID NO: 2292745 - RNA, 15 nt, Human
aucacuggagcccag

SEQ ID NO: 2292746 - RNA, 14 nt, Human
aucacuggagccca

SEQ ID NO: 2292747 - RNA, 13 nt, Human
aucacuggagccc

SEQ ID NO: 2292748 - RNA, 12 nt, Human
aucacuggagcc

SEQ ID NO: 2292749 - RNA, 23 nt, Human
aucacuggagcaccaggcacgaa

SEQ ID NO: 2292750 - RNA, 19 nt, Human
aucacuggagcaccaggca

SEQ ID NO: 2292751 - RNA, 17 nt, Human
aucacuggagcaccagg

SEQ ID NO: 2292752 - RNA, 10 nt, Human
aucacuggag

SEQ ID NO: 2292753 - RNA, 15 nt, Human
uucgcuccugugucu

SEQ ID NO: 2292754 - RNA, 19 nt, Human
uucgcuccugugucuugca

SEQ ID NO: 2292755 - RNA, 23 nt, Human
uucuaaaugcauauccugagcca

SEQ ID NO: 2292756 - RNA, 13 nt, Human
uucuaaaugcaua

SEQ ID NO: 2292757 - RNA, 22 nt, Human
uucuaaagguguugucccuucu

SEQ ID NO: 2292758 - RNA, 18 nt, Human
uucuaaaugaauguuuac

SEQ ID NO: 2292759 - RNA, 21 nt, Human
uucuaaaugaauguuuacacu

SEQ ID NO: 2292760 - RNA, 14 nt, Human
uucuaaaugaagug

SEQ ID NO: 2292761 - RNA, 20 nt, Human
uucuaaagguguugucccuu

SEQ ID NO: 2292762 - RNA, 12 nt, Human
uucuaaaugaau

SEQ ID NO: 2292763 - RNA, 15 nt, Human
uucuaaaugaauguu

SEQ ID NO: 2292764 - RNA, 21 nt, Human
uucuaaaucuccaaaauaaaa

SEQ ID NO: 2292765 - RNA, 21 nt, Human
uucuaaaggcuaccuuuguau

SEQ ID NO: 2292766 - RNA, 20 nt, Human
uucuaaaggcuaccuuugua

SEQ ID NO: 2292767 - RNA, 15 nt, Human
uucggaguugggggu

SEQ ID NO: 2292768 - RNA, 19 nt, Human
uucuaaaggcuaccuuugu

SEQ ID NO: 2292769 - RNA, 15 nt, Human
uucggccuccauccu

SEQ ID NO: 2292770 - RNA, 20 nt, Human
uucuaaaugcauauccugag

SEQ ID NO: 2292771 - RNA, 12 nt, Human
uucuaagagaag

SEQ ID NO: 2292772 - RNA, 13 nt, Human
uucuaagagaagu

SEQ ID NO: 2292773 - RNA, 13 nt, Human
uucuaagaaguga

SEQ ID NO: 2292774 - RNA, 23 nt, Human
uucuaagaagugaaaaucuacac

SEQ ID NO: 2292775 - RNA, 16 nt, Human
uucuaaguaaaaccac

SEQ ID NO: 2292776 - RNA, 15 nt, Human
uucuaaguaaaacca

SEQ ID NO: 2292777 - RNA, 12 nt, Human
uucuagcacugg

SEQ ID NO: 2292778 - RNA, 14 nt, Human
uucuagcacuggcc

SEQ ID NO: 2292779 - RNA, 15 nt, Human
uucuagcacuggccu

SEQ ID NO: 2292780 - RNA, 16 nt, Human
uucuagcacuggccug

SEQ ID NO: 2292781 - RNA, 17 nt, Human
uucuagcacuggccugc

SEQ ID NO: 2292782 - RNA, 16 nt, Human
uucuagcuagaaauau

SEQ ID NO: 2292783 - RNA, 17 nt, Human
uucuagcuagaaauaug

SEQ ID NO: 2292784 - RNA, 18 nt, Human
uucuagcuagaaauauga

SEQ ID NO: 2292785 - RNA, 17 nt, Human
uucuagcuaauguaaua

SEQ ID NO: 2292786 - RNA, 12 nt, Human
uucuagcuguug

SEQ ID NO: 2292787 - RNA, 19 nt, Human
uucuagcuagaaauaugau

SEQ ID NO: 2292788 - RNA, 22 nt, Human
uucuagcuagaaauaugauuuu

SEQ ID NO: 2292789 - RNA, 20 nt, Human
uucuagcuguugagcuguuu

SEQ ID NO: 2292790 - RNA, 21 nt, Human
uucuagcuguugagcuguuuu

SEQ ID NO: 2292791 - RNA, 16 nt, Human
uucuagcauggcugcc

SEQ ID NO: 2292792 - RNA, 18 nt, Human
uucuagcccauggacuuc

SEQ ID NO: 2292793 - RNA, 18 nt, Human
uucuagcccgaauacaaa

SEQ ID NO: 2292794 - RNA, 21 nt, Human
uucuagcccgaauacaaacac

SEQ ID NO: 2292795 - RNA, 20 nt, Human
uucucaggcucugcccugcc

SEQ ID NO: 2292796 - RNA, 17 nt, Human
uucucaggccaucauca

SEQ ID NO: 2292797 - RNA, 12 nt, Human
uucucagggcuc

SEQ ID NO: 2292798 - RNA, 13 nt, Human
uucucagggcucc

SEQ ID NO: 2292799 - RNA, 15 nt, Human
uucucagggcuccug

SEQ ID NO: 2292800 - RNA, 16 nt, Human
uucucagggcuccugc

SEQ ID NO: 2292801 - RNA, 17 nt, Human
uucucagggcuccugcc

SEQ ID NO: 2292802 - RNA, 18 nt, Human
uucucagggcuccugccu

SEQ ID NO: 2292803 - RNA, 16 nt, Human
uucucagguguugcca

SEQ ID NO: 2292804 - RNA, 19 nt, Human
uucucagggucucugcugc

SEQ ID NO: 2292805 - RNA, 20 nt, Human
uucucagggucucugcugcc

SEQ ID NO: 2292806 - RNA, 13 nt, Human
uucucagggucuc

SEQ ID NO: 2292807 - RNA, 16 nt, Human
uucucagggucucugc

SEQ ID NO: 2292808 - RNA, 17 nt, Human
uucucagggucucugcu

SEQ ID NO: 2292809 - RNA, 18 nt, Human
uucucagggucucugcug

SEQ ID NO: 2292810 - RNA, 19 nt, Human
aucacuugaggucaggagu

SEQ ID NO: 2292811 - RNA, 21 nt, Human
uucucagggucucugcugccg

SEQ ID NO: 2292812 - RNA, 17 nt, Human
aucacuugaauccuagg

SEQ ID NO: 2292813 - RNA, 17 nt, Human
uucucagguguugccaa

SEQ ID NO: 2292814 - RNA, 19 nt, Human
uucucagguguugccaaau

SEQ ID NO: 2292815 - RNA, 18 nt, Human
aucacuuguacaaaauaa

SEQ ID NO: 2292816 - RNA, 17 nt, Human
aucacuuguacaaaaua

SEQ ID NO: 2292817 - RNA, 16 nt, Human
aucacuuguacaaaau

SEQ ID NO: 2292818 - RNA, 14 nt, Human
aucacuuguacaaa

SEQ ID NO: 2292819 - RNA, 11 nt, Human
aucagaauucu

SEQ ID NO: 2292820 - RNA, 18 nt, Human
aucagaaguuucucagcu

SEQ ID NO: 2292821 - RNA, 19 nt, Human
aucagaauagccacauuug

SEQ ID NO: 2292822 - RNA, 22 nt, Human
aucacuugucaauaaaauccau

SEQ ID NO: 2292823 - RNA, 16 nt, Human
aucacuuucucaguuu

SEQ ID NO: 2292824 - RNA, 17 nt, Human
aucacuuguuguuuuac

SEQ ID NO: 2292825 - RNA, 21 nt, Human
aucacuuguacaaaauaaaca

SEQ ID NO: 2292826 - RNA, 19 nt, Human
aucacuugagacaaaucua

SEQ ID NO: 2292827 - RNA, 13 nt, Human
aucacuuguuguu

SEQ ID NO: 2292828 - RNA, 19 nt, Human
uucucacagugggagccag

SEQ ID NO: 2292829 - RNA, 21 nt, Human
uucucacagugggagccaggg

SEQ ID NO: 2292830 - RNA, 22 nt, Human
uucucacagugggagccagggc

SEQ ID NO: 2292831 - RNA, 14 nt, Human
uucuaggaagaauu

SEQ ID NO: 2292832 - RNA, 18 nt, Human
uucuaggaagaauuuuaa

SEQ ID NO: 2292833 - RNA, 19 nt, Human
uucuaggaagaauuuuaaa

SEQ ID NO: 2292834 - RNA, 23 nt, Human
uucuaggaagaauuuuaaaaaug

SEQ ID NO: 2292835 - RNA, 16 nt, Human
uucucacuccaccacc

SEQ ID NO: 2292836 - RNA, 15 nt, Human
uucucacuccaccac

SEQ ID NO: 2292837 - RNA, 14 nt, Human
uucucacuccacca

SEQ ID NO: 2292838 - RNA, 16 nt, Human
uucucacuccuaccug

SEQ ID NO: 2292839 - RNA, 12 nt, Human
uucucaccagga

SEQ ID NO: 2292840 - RNA, 13 nt, Human
uucucaccaggaa

SEQ ID NO: 2292841 - RNA, 18 nt, Human
uucucacuccuaccuggu

SEQ ID NO: 2292842 - RNA, 17 nt, Human
uucucagcucccccugu

SEQ ID NO: 2292843 - RNA, 18 nt, Human
uucucagcucccccuguc

SEQ ID NO: 2292844 - RNA, 20 nt, Human
uucucagcucccccuguccc

SEQ ID NO: 2292845 - RNA, 14 nt, Human
uucucagcucuucu

SEQ ID NO: 2292846 - RNA, 18 nt, Human
uucucagcucuucugacu

SEQ ID NO: 2292847 - RNA, 17 nt, Human
uucucaggcaugaacau

SEQ ID NO: 2292848 - RNA, 23 nt, Human
aucagcaacaaccagcaucccuu

SEQ ID NO: 2292849 - RNA, 21 nt, Human
aucagcaaaccggggccuacu

SEQ ID NO: 2292850 - RNA, 21 nt, Human
aucagauugcaugugacucug

SEQ ID NO: 2292851 - RNA, 18 nt, Human
aucagauugcaugugacu

SEQ ID NO: 2292852 - RNA, 16 nt, Human
aucagauugcauguga

SEQ ID NO: 2292853 - RNA, 15 nt, Human
aucagauugcaugug

SEQ ID NO: 2292854 - RNA, 14 nt, Human
aucagauugcaugu

SEQ ID NO: 2292855 - RNA, 12 nt, Human
aucagaauucuc

SEQ ID NO: 2292856 - RNA, 22 nt, Human
aucagaauagccacauuuggaa

SEQ ID NO: 2292857 - RNA, 13 nt, Human
aucagcacgauuu

SEQ ID NO: 2292858 - RNA, 15 nt, Human
aucaggccaggcccu

SEQ ID NO: 2292859 - RNA, 16 nt, Human
aucaggccaggcccuc

SEQ ID NO: 2292860 - RNA, 18 nt, Human
aucaggccaggcccucug

SEQ ID NO: 2292861 - RNA, 15 nt, Human
aucaggcuauguaug

SEQ ID NO: 2292862 - RNA, 16 nt, Human
aucaggccugccagac

SEQ ID NO: 2292863 - RNA, 21 nt, Human
aucagcaagucucuuuauaug

SEQ ID NO: 2292864 - RNA, 16 nt, Human
aucaggcucugccuca

SEQ ID NO: 2292865 - RNA, 13 nt, Human
aucaggcugaggu

SEQ ID NO: 2292866 - RNA, 16 nt, Human
aucaggccauuguccc

SEQ ID NO: 2292867 - RNA, 13 nt, Human
aucaggccauugu

SEQ ID NO: 2292868 - RNA, 21 nt, Human
aucagggcaaucccaacacau

SEQ ID NO: 2292869 - RNA, 17 nt, Human
aucaggguuaguauugu

SEQ ID NO: 2292870 - RNA, 20 nt, Human
aucagguccucagagaauuu

SEQ ID NO: 2292871 - RNA, 16 nt, Human
aucagguccucagaga

SEQ ID NO: 2292872 - RNA, 18 nt, Human
aucagggaggucauuuug

SEQ ID NO: 2292873 - RNA, 15 nt, Human
uuccugaaccugaug

SEQ ID NO: 2292874 - RNA, 23 nt, Human
uuccuguccuucucucaccuccu

SEQ ID NO: 2292875 - RNA, 24 nt, Human
uuccuguccuucucucaccuccua

SEQ ID NO: 2292876 - RNA, 14 nt, Human
uuccugucuuccug

SEQ ID NO: 2292877 - RNA, 11 nt, Human
uuccugugucu

SEQ ID NO: 2292878 - RNA, 21 nt, Human
uuccuguggauguaaagugau

SEQ ID NO: 2292879 - RNA, 15 nt, Human
auauuuuuaucuuua

SEQ ID NO: 2292880 - RNA, 14 nt, Human
auauuuuuaucuuu

SEQ ID NO: 2292881 - RNA, 22 nt, Human
auauuuuuaucuuuauaugaag

SEQ ID NO: 2292882 - RNA, 20 nt, Human
auauuuuuaucuuuauauga

SEQ ID NO: 2292883 - RNA, 20 nt, Human
aucaaauuucacgucgucuu

SEQ ID NO: 2292884 - RNA, 21 nt, Human
auauuuuuuuaaaauguuaaa

SEQ ID NO: 2292885 - RNA, 15 nt, Human
auauuuuuucugaau

SEQ ID NO: 2292886 - RNA, 20 nt, Human
auauuuuuuguuaaaugauu

SEQ ID NO: 2292887 - RNA, 20 nt, Human
auauuuuuuauauauacagu

SEQ ID NO: 2292888 - RNA, 16 nt, Human
auauuuuuauuuuauu

SEQ ID NO: 2292889 - RNA, 18 nt, Human
auauuuuuucagaaauau

SEQ ID NO: 2292890 - RNA, 18 nt, Human
auauuuuuuguuaaauga

SEQ ID NO: 2292891 - RNA, 14 nt, Human
aucaacauuucuca

SEQ ID NO: 2292892 - RNA, 15 nt, Human
aucaacaucuuuucu

SEQ ID NO: 2292893 - RNA, 13 nt, Human
aucaacaucuuuu

SEQ ID NO: 2292894 - RNA, 16 nt, Human
aucaagcacagaagga

SEQ ID NO: 2292895 - RNA, 13 nt, Human
aucaagcccuuua

SEQ ID NO: 2292896 - RNA, 14 nt, Human
aucaagcagccaag

SEQ ID NO: 2292897 - RNA, 21 nt, Human
aucaagaugugacauguuuua

SEQ ID NO: 2292898 - RNA, 22 nt, Human
aucaaauuucacgucgucuucu

SEQ ID NO: 2292899 - RNA, 16 nt, Human
aucaacaaaaauuguc

SEQ ID NO: 2292900 - RNA, 18 nt, Human
aucaacaagaguugucuu

SEQ ID NO: 2292901 - RNA, 14 nt, Human
aucaacagauaaau

SEQ ID NO: 2292902 - RNA, 18 nt, Human
aucacggcucacugcagc

SEQ ID NO: 2292903 - RNA, 19 nt, Human
aucacggcucacugcagcc

SEQ ID NO: 2292904 - RNA, 21 nt, Human
aucacugaacuuugcugagcc

SEQ ID NO: 2292905 - RNA, 18 nt, Human
aucacgcuuuccugaauc

SEQ ID NO: 2292906 - RNA, 18 nt, Human
aucaccuuaggcagggaa

SEQ ID NO: 2292907 - RNA, 17 nt, Human
aucaccuuaggcaggga

SEQ ID NO: 2292908 - RNA, 16 nt, Human
aucaccuuaggcaggg

SEQ ID NO: 2292909 - RNA, 20 nt, Human
aucaccuuaggcagggaagu

SEQ ID NO: 2292910 - RNA, 22 nt, Human
aucaauggcgcagugccucugg

SEQ ID NO: 2292911 - RNA, 13 nt, Human
aucacgccacugc

SEQ ID NO: 2292912 - RNA, 14 nt, Human
aucacgcuuuccug

SEQ ID NO: 2292913 - RNA, 15 nt, Human
aucacggcucacugc

SEQ ID NO: 2292914 - RNA, 16 nt, Human
aucaauccuuguucag

SEQ ID NO: 2292915 - RNA, 21 nt, Human
aucaaucauuguacaguuugu

SEQ ID NO: 2292916 - RNA, 14 nt, Human
aucaaugaguaaca

SEQ ID NO: 2292917 - RNA, 15 nt, Human
aucaccuuaggcagg

SEQ ID NO: 2292918 - RNA, 12 nt, Human
aucaaugacaga

SEQ ID NO: 2292919 - RNA, 21 nt, Human
aucaauggcgcagugccucug

SEQ ID NO: 2292920 - RNA, 17 nt, Human
aucaagcuagaaggcca

SEQ ID NO: 2292921 - RNA, 16 nt, Human
aucaagcuagaaggcc

SEQ ID NO: 2292922 - RNA, 20 nt, Human
aucaagcuagaaggccacau

SEQ ID NO: 2292923 - RNA, 11 nt, Human
aucaagcugug

SEQ ID NO: 2292924 - RNA, 12 nt, Human
aucaagcuguga

SEQ ID NO: 2292925 - RNA, 21 nt, Human
aucaagcuucaguuuccuggu

SEQ ID NO: 2292926 - RNA, 15 nt, Human
aucaaggcacugccu

SEQ ID NO: 2292927 - RNA, 16 nt, Human
aucaaggcacugccug

SEQ ID NO: 2292928 - RNA, 22 nt, Human
aucaagcuucaguuuccugguc

SEQ ID NO: 2292929 - RNA, 13 nt, Human
aucaaggcacugc

SEQ ID NO: 2292930 - RNA, 14 nt, Human
aucaaggcacugcc

SEQ ID NO: 2292931 - RNA, 17 nt, Human
aucaaucauuguacagu

SEQ ID NO: 2292932 - RNA, 19 nt, Human
aucaaucauuguacaguuu

SEQ ID NO: 2292933 - RNA, 13 nt, Human
aucaaucauugua

SEQ ID NO: 2292934 - RNA, 14 nt, Human
aucaaucauuguac

SEQ ID NO: 2292935 - RNA, 15 nt, Human
aucaaucauuguaca

SEQ ID NO: 2292936 - RNA, 16 nt, Human
aucaaucauuguacag

SEQ ID NO: 2292937 - RNA, 23 nt, Human
aucaagggaauguaacugcugaa

SEQ ID NO: 2292938 - RNA, 23 nt, Human
uucccguggaacguuuuuccugu

SEQ ID NO: 2292939 - RNA, 21 nt, Human
uucccggacugcaagcagggc

SEQ ID NO: 2292940 - RNA, 20 nt, Human
uucccgucccauauccugcc

SEQ ID NO: 2292941 - RNA, 15 nt, Human
uucccuauuagagaa

SEQ ID NO: 2292942 - RNA, 21 nt, Human
uucccucaccuuggcaccaga

SEQ ID NO: 2292943 - RNA, 20 nt, Human
uucccucaccuuucccaucu

SEQ ID NO: 2292944 - RNA, 16 nt, Human
uucccgcucagcccuc

SEQ ID NO: 2292945 - RNA, 18 nt, Human
uucccgcucagcccuccc

SEQ ID NO: 2292946 - RNA, 21 nt, Human
uucccgcucagcccucccugc

SEQ ID NO: 2292947 - RNA, 22 nt, Human
uucccgcucagcccucccugcc

SEQ ID NO: 2292948 - RNA, 16 nt, Human
auagcaaacuuggaau

SEQ ID NO: 2292949 - RNA, 22 nt, Human
auagcaaagcgacguuagucgu

SEQ ID NO: 2292950 - RNA, 23 nt, Human
uuccggauuggcuuguguguuuc

SEQ ID NO: 2292951 - RNA, 17 nt, Human
uucccucaucucuccuc

SEQ ID NO: 2292952 - RNA, 21 nt, Human
uucccgucccauauccugccu

SEQ ID NO: 2292953 - RNA, 15 nt, Human
uucccucaucucucc

SEQ ID NO: 2292954 - RNA, 19 nt, Human
uuccguagguuauuuucag

SEQ ID NO: 2292955 - RNA, 16 nt, Human
uuccguuaaaauacca

SEQ ID NO: 2292956 - RNA, 14 nt, Human
uuccguuaaaauac

SEQ ID NO: 2292957 - RNA, 17 nt, Human
uuccgugaaaacggagc

SEQ ID NO: 2292958 - RNA, 18 nt, Human
uuccgugacgucacugga

SEQ ID NO: 2292959 - RNA, 18 nt, Human
uuccguagccagcugcuc

SEQ ID NO: 2292960 - RNA, 17 nt, Human
uuccguaacccaacucu

SEQ ID NO: 2292961 - RNA, 14 nt, Human
uuccggcuccugug

SEQ ID NO: 2292962 - RNA, 22 nt, Human
uuccucuuuccaucuacccucc

SEQ ID NO: 2292963 - RNA, 17 nt, Human
uuccucuuuccaucuac

SEQ ID NO: 2292964 - RNA, 13 nt, Human
uuccucuuuccau

SEQ ID NO: 2292965 - RNA, 13 nt, Human
uuccucugccugc

SEQ ID NO: 2292966 - RNA, 14 nt, Human
uuccucugccugcc

SEQ ID NO: 2292967 - RNA, 15 nt, Human
uuccucugccugccc

SEQ ID NO: 2292968 - RNA, 16 nt, Human
uuccucugccugcccc

SEQ ID NO: 2292969 - RNA, 14 nt, Human
uuccugaaccgaug

SEQ ID NO: 2292970 - RNA, 12 nt, Human
uuccucuuugca

SEQ ID NO: 2292971 - RNA, 15 nt, Human
uuccucuuugcaugg

SEQ ID NO: 2292972 - RNA, 17 nt, Human
uuccucuuugcauggaa

SEQ ID NO: 2292973 - RNA, 18 nt, Human
uuccugaagaauugaaaa

SEQ ID NO: 2292974 - RNA, 19 nt, Human
uuccugaagaaccaguccc

SEQ ID NO: 2292975 - RNA, 16 nt, Human
uuccugaagaaccagu

SEQ ID NO: 2292976 - RNA, 14 nt, Human
uuccucuuugcuuu

SEQ ID NO: 2292977 - RNA, 13 nt, Human
uuccucuuugcuu

SEQ ID NO: 2292978 - RNA, 15 nt, Human
uuccugaagaaccag

SEQ ID NO: 2292979 - RNA, 13 nt, Human
uuccuaauuuuag

SEQ ID NO: 2292980 - RNA, 14 nt, Human
uuccuaauuuuagu

SEQ ID NO: 2292981 - RNA, 23 nt, Human
uuccuaauuuuagugacagcucu

SEQ ID NO: 2292982 - RNA, 18 nt, Human
uuccuaauuccacagcug

SEQ ID NO: 2292983 - RNA, 17 nt, Human
uuccuaauuccacagcu

SEQ ID NO: 2292984 - RNA, 16 nt, Human
uuccuaauuccacagc

SEQ ID NO: 2292985 - RNA, 17 nt, Human
uuccuaauccucuagga

SEQ ID NO: 2292986 - RNA, 16 nt, Human
uuccuacaaagauguu

SEQ ID NO: 2292987 - RNA, 23 nt, Human
uuccuacaagagcagccuguggc

SEQ ID NO: 2292988 - RNA, 22 nt, Human
uuccuacaagagcagccugugg

SEQ ID NO: 2292989 - RNA, 20 nt, Human
uuccuacaagagcagccugu

SEQ ID NO: 2292990 - RNA, 17 nt, Human
uuccucugagccuuggg

SEQ ID NO: 2292991 - RNA, 14 nt, Human
uuccucugagccuu

SEQ ID NO: 2292992 - RNA, 13 nt, Human
uuccucugaggcu

SEQ ID NO: 2292993 - RNA, 21 nt, Human
uuccucugaggcuggauccua

SEQ ID NO: 2292994 - RNA, 21 nt, Human
uuccucugaggcugaaauuca

SEQ ID NO: 2292995 - RNA, 22 nt, Human
uuccucugcagcugaccucugu

SEQ ID NO: 2292996 - RNA, 12 nt, Human
uuccucugccug

SEQ ID NO: 2292997 - RNA, 10 nt, Human
uuccucugca

SEQ ID NO: 2292998 - RNA, 13 nt, Human
uuccucugcagcu

SEQ ID NO: 2292999 - RNA, 17 nt, Human
uuccucugcagcugacc

SEQ ID NO: 2293000 - RNA, 19 nt, Human
uuccucugcagcugaccuc

SEQ ID NO: 2293001 - RNA, 14 nt, Human
uugcauauauacau

SEQ ID NO: 2293002 - RNA, 23 nt, Human
uugcauauaacuuauauuguaag

SEQ ID NO: 2293003 - RNA, 14 nt, Human
uugcauauguauga

SEQ ID NO: 2293004 - RNA, 13 nt, Human
uugcaucaauuuu

SEQ ID NO: 2293005 - RNA, 22 nt, Human
uugcaaguauguuuuagcaugu

SEQ ID NO: 2293006 - RNA, 21 nt, Human
uugcaaguauguuuuagcaug

SEQ ID NO: 2293007 - RNA, 16 nt, Human
uugcaagucauggcug

SEQ ID NO: 2293008 - RNA, 23 nt, Human
uugcauaguaccaaucauuuuaa

SEQ ID NO: 2293009 - RNA, 15 nt, Human
uugcaagucauggcu

SEQ ID NO: 2293010 - RNA, 19 nt, Human
uugcaauggcuauauggca

SEQ ID NO: 2293011 - RNA, 22 nt, Human
uugcauauaacuuauauuguaa

SEQ ID NO: 2293012 - RNA, 17 nt, Human
uugcauauaacuuauau

SEQ ID NO: 2293013 - RNA, 14 nt, Human
uugcauauaacuua

SEQ ID NO: 2293014 - RNA, 20 nt, Human
uugcaaugguguugcccuga

SEQ ID NO: 2293015 - RNA, 22 nt, Human
uugcauugaacacaaacuguaa

SEQ ID NO: 2293016 - RNA, 18 nt, Human
uugcauugaacacaaacu

SEQ ID NO: 2293017 - RNA, 15 nt, Human
uugcauugaacacaa

SEQ ID NO: 2293018 - RNA, 14 nt, Human
uugcauugaacaca

SEQ ID NO: 2293019 - RNA, 17 nt, Human
uugcauugaauauauua

SEQ ID NO: 2293020 - RNA, 23 nt, Human
uugcauugaacacaaacuguaaa

SEQ ID NO: 2293021 - RNA, 14 nt, Human
uugcauugaauaua

SEQ ID NO: 2293022 - RNA, 21 nt, Human
uugcauugaccgcgacuaauu

SEQ ID NO: 2293023 - RNA, 21 nt, Human
uugcauuuaaaacagacacug

SEQ ID NO: 2293024 - RNA, 20 nt, Human
uugcauuuaaaacagacacu

SEQ ID NO: 2293025 - RNA, 15 nt, Human
uugcauuuaaaacag

SEQ ID NO: 2293026 - RNA, 18 nt, Human
uugcaccacugcacucca

SEQ ID NO: 2293027 - RNA, 16 nt, Human
uugcaccacugcacuc

SEQ ID NO: 2293028 - RNA, 15 nt, Human
uugcaccacugcacu

SEQ ID NO: 2293029 - RNA, 14 nt, Human
uugcaccacugcac

SEQ ID NO: 2293030 - RNA, 16 nt, Human
uugcaauggcagccuu

SEQ ID NO: 2293031 - RNA, 22 nt, Human
uugcaagggaaaagucucuugu

SEQ ID NO: 2293032 - RNA, 17 nt, Human
uugcaauggcagccuug

SEQ ID NO: 2293033 - RNA, 19 nt, Human
uugcaauggcagccuuggc

SEQ ID NO: 2293034 - RNA, 12 nt, Human
uugcaaggaagc

SEQ ID NO: 2293035 - RNA, 12 nt, Human
uugauuauucug

SEQ ID NO: 2293036 - RNA, 13 nt, Human
uugcaaggaagcc

SEQ ID NO: 2293037 - RNA, 23 nt, Human
uugcaaggccgcuguucacccac

SEQ ID NO: 2293038 - RNA, 17 nt, Human
uugcaaggccgcuguuc

SEQ ID NO: 2293039 - RNA, 14 nt, Human
uugcaaggccgcug

SEQ ID NO: 2293040 - RNA, 19 nt, Human
uugcaagggaaaagucucu

SEQ ID NO: 2293041 - RNA, 13 nt, Human
uugcaagggaaaa

SEQ ID NO: 2293042 - RNA, 17 nt, Human
uugauuauucaguguca

SEQ ID NO: 2293043 - RNA, 15 nt, Human
uugauuauucagugu

SEQ ID NO: 2293044 - RNA, 20 nt, Human
uugauuauucugauuccacu

SEQ ID NO: 2293045 - RNA, 22 nt, Human
uugcaagccagauuuuccugaa

SEQ ID NO: 2293046 - RNA, 16 nt, Human
uugauuauuagccagg

SEQ ID NO: 2293047 - RNA, 13 nt, Human
uugauuaugcaga

SEQ ID NO: 2293048 - RNA, 13 nt, Human
uugauuaugcaua

SEQ ID NO: 2293049 - RNA, 21 nt, Human
uugauuauccauauugaguca

SEQ ID NO: 2293050 - RNA, 20 nt, Human
aucugaccagcagcgccuuu

SEQ ID NO: 2293051 - RNA, 18 nt, Human
uugauuaauccagaauaa

SEQ ID NO: 2293052 - RNA, 14 nt, Human
uugauuaaauucuu

SEQ ID NO: 2293053 - RNA, 22 nt, Human
uugauuaagaucucagugguua

SEQ ID NO: 2293054 - RNA, 12 nt, Human
aucugaaaaugu

SEQ ID NO: 2293055 - RNA, 14 nt, Human
aucugaaaauguga

SEQ ID NO: 2293056 - RNA, 23 nt, Human
aucugaaaauguauguguaagua

SEQ ID NO: 2293057 - RNA, 14 nt, Human
aucugacaucccca

SEQ ID NO: 2293058 - RNA, 15 nt, Human
aucugacaucucugc

SEQ ID NO: 2293059 - RNA, 20 nt, Human
aucugacaucucugcaaucu

SEQ ID NO: 2293060 - RNA, 16 nt, Human
aucugacaucucugca

SEQ ID NO: 2293061 - RNA, 13 nt, Human
aucugaaauguga

SEQ ID NO: 2293062 - RNA, 22 nt, Human
uugauguuuguggccucagaau

SEQ ID NO: 2293063 - RNA, 12 nt, Human
aucugacccagu

SEQ ID NO: 2293064 - RNA, 13 nt, Human
uugauuaaauucu

SEQ ID NO: 2293065 - RNA, 23 nt, Human
uugauguuuuaaggaugcuugua

SEQ ID NO: 2293066 - RNA, 16 nt, Human
aucugaccagcagcgc

SEQ ID NO: 2293067 - RNA, 15 nt, Human
aucugaccagcagcg

SEQ ID NO: 2293068 - RNA, 14 nt, Human
aucugaccagcagc

SEQ ID NO: 2293069 - RNA, 23 nt, Human
aucugacaugauuccuuccuguu

SEQ ID NO: 2293070 - RNA, 20 nt, Human
aucugacaugauuccuuccu

SEQ ID NO: 2293071 - RNA, 19 nt, Human
aucugacaugauuccuucc

SEQ ID NO: 2293072 - RNA, 18 nt, Human
aucugacaugauuccuuc

SEQ ID NO: 2293073 - RNA, 16 nt, Human
aucugacauccccacu

SEQ ID NO: 2293074 - RNA, 12 nt, Human
aucuagaagacu

SEQ ID NO: 2293075 - RNA, 21 nt, Human
aucuagaacacaggcaaaauc

SEQ ID NO: 2293076 - RNA, 21 nt, Human
aucuagaauguguuuucugaa

SEQ ID NO: 2293077 - RNA, 19 nt, Human
aucuagacccaucuucuuu

SEQ ID NO: 2293078 - RNA, 21 nt, Human
aucuagacucaagguucccag

SEQ ID NO: 2293079 - RNA, 18 nt, Human
aucuagagcuugaugcca

SEQ ID NO: 2293080 - RNA, 19 nt, Human
aucuagaggcuuccuucau

SEQ ID NO: 2293081 - RNA, 17 nt, Human
aucuagaggcuuccuuc

SEQ ID NO: 2293082 - RNA, 23 nt, Human
aucuagaggcuuccuucauuucc

SEQ ID NO: 2293083 - RNA, 14 nt, Human
aucucagggccugg

SEQ ID NO: 2293084 - RNA, 16 nt, Human
aucucagguucuccuu

SEQ ID NO: 2293085 - RNA, 15 nt, Human
aucucagucaugcau

SEQ ID NO: 2293086 - RNA, 16 nt, Human
aucucagucaugcaua

SEQ ID NO: 2293087 - RNA, 18 nt, Human
aucucagucaugcauaaa

SEQ ID NO: 2293088 - RNA, 20 nt, Human
aucucagucaugcauaaaua

SEQ ID NO: 2293089 - RNA, 23 nt, Human
aucucaugccccuggcugggacg

SEQ ID NO: 2293090 - RNA, 22 nt, Human
aucucauggagaagcagaaaua

SEQ ID NO: 2293091 - RNA, 24 nt, Human
aucucauggagaagcagaaauaca

SEQ ID NO: 2293092 - RNA, 21 nt, Human
aucucaugccccuggcuggga

SEQ ID NO: 2293093 - RNA, 21 nt, Human
aucucagucaugcauaaauau

SEQ ID NO: 2293094 - RNA, 22 nt, Human
aucucagucaugcauaaauaug

SEQ ID NO: 2293095 - RNA, 16 nt, Human
aucucagggccugguc

SEQ ID NO: 2293096 - RNA, 20 nt, Human
aucuagagcuugaugccagu

SEQ ID NO: 2293097 - RNA, 15 nt, Human
aucucaggggccaga

SEQ ID NO: 2293098 - RNA, 16 nt, Human
aucucaggggccagag

SEQ ID NO: 2293099 - RNA, 17 nt, Human
aucucaggggccagagg

SEQ ID NO: 2293100 - RNA, 23 nt, Human
aucucaggggccagaggaacugu

SEQ ID NO: 2293101 - RNA, 17 nt, Human
aucucaggggcuguuug

SEQ ID NO: 2293102 - RNA, 20 nt, Human
aucucaggggcuguuugagg

SEQ ID NO: 2293103 - RNA, 21 nt, Human
aucucaggggcuguuugagga

SEQ ID NO: 2293104 - RNA, 13 nt, Human
aucuccaagaaug

SEQ ID NO: 2293105 - RNA, 14 nt, Human
aucuccaagaaugc

SEQ ID NO: 2293106 - RNA, 21 nt, Human
aucuccaaaauaaaacuuuuu

SEQ ID NO: 2293107 - RNA, 20 nt, Human
aucuccaaaauaaaacuuuu

SEQ ID NO: 2293108 - RNA, 17 nt, Human
aucuccaaaauaaaacu

SEQ ID NO: 2293109 - RNA, 14 nt, Human
aucuccaaaauaaa

SEQ ID NO: 2293110 - RNA, 14 nt, Human
aucucauuuccaag

SEQ ID NO: 2293111 - RNA, 20 nt, Human
aucucauuggacccuuccau

SEQ ID NO: 2293112 - RNA, 19 nt, Human
aucucauuggacccuucca

SEQ ID NO: 2293113 - RNA, 15 nt, Human
aucucauuggacccu

SEQ ID NO: 2293114 - RNA, 14 nt, Human
aucucauuggaccc

SEQ ID NO: 2293115 - RNA, 17 nt, Human
aucucauugcuuacaag

SEQ ID NO: 2293116 - RNA, 16 nt, Human
aucucauugcuuacaa

SEQ ID NO: 2293117 - RNA, 16 nt, Human
aucucauguaucaucu

SEQ ID NO: 2293118 - RNA, 19 nt, Human
aucucauguaucaucugga

SEQ ID NO: 2293119 - RNA, 18 nt, Human
aucuccaagaccagagau

SEQ ID NO: 2293120 - RNA, 20 nt, Human
aucuccaagaaugcugaaac

SEQ ID NO: 2293121 - RNA, 22 nt, Human
aucuccaagaaugcugaaacca

SEQ ID NO: 2293122 - RNA, 15 nt, Human
aucuccaagaaugcu

SEQ ID NO: 2293123 - RNA, 16 nt, Human
aucuccaagaaugcug

SEQ ID NO: 2293124 - RNA, 17 nt, Human
aucuccaagaaugcuga

SEQ ID NO: 2293125 - RNA, 18 nt, Human
aucuccaagaaugcugaa

SEQ ID NO: 2293126 - RNA, 19 nt, Human
aucuccacagucaaagaag

SEQ ID NO: 2293127 - RNA, 16 nt, Human
aucuccaaggaccagg

SEQ ID NO: 2293128 - RNA, 12 nt, Human
aucuccaaggac

SEQ ID NO: 2293129 - RNA, 15 nt, Human
aucuccacccccagc

SEQ ID NO: 2293130 - RNA, 19 nt, Human
aucuccacccccagcugcu

SEQ ID NO: 2293131 - RNA, 21 nt, Human
aucuccacccccagcugcuug

SEQ ID NO: 2293132 - RNA, 22 nt, Human
aucuccacccccagcugcuugu

SEQ ID NO: 2293133 - RNA, 13 nt, Human
aucuccaccugcu

SEQ ID NO: 2293134 - RNA, 15 nt, Human
aucuccaccugcucc

SEQ ID NO: 2293135 - RNA, 15 nt, Human
aucucccccagcccc

SEQ ID NO: 2293136 - RNA, 19 nt, Human
aucuccaccugcucccagg

SEQ ID NO: 2293137 - RNA, 21 nt, Human
aucucuucuggguuccuuccu

SEQ ID NO: 2293138 - RNA, 16 nt, Human
aucucccccagcccca

SEQ ID NO: 2293139 - RNA, 17 nt, Human
aucucccccagccccau

SEQ ID NO: 2293140 - RNA, 15 nt, Human
aucucuugagccugg

SEQ ID NO: 2293141 - RNA, 20 nt, Human
aucucuucuuuuggcuucca

SEQ ID NO: 2293142 - RNA, 14 nt, Human
aucucuucuuuuaa

SEQ ID NO: 2293143 - RNA, 14 nt, Human
aucugaaaauguau

SEQ ID NO: 2293144 - RNA, 18 nt, Human
aucucuugagccugggag

SEQ ID NO: 2293145 - RNA, 22 nt, Human
aucugaaaauguauguguaagu

SEQ ID NO: 2293146 - RNA, 20 nt, Human
aucugaaaauguauguguaa

SEQ ID NO: 2293147 - RNA, 19 nt, Human
aucugaaaauguaugugua

SEQ ID NO: 2293148 - RNA, 16 nt, Human
aucugaaaauguaugu

SEQ ID NO: 2293149 - RNA, 14 nt, Human
uugagugacucgag

SEQ ID NO: 2293150 - RNA, 20 nt, Human
uugagugacucgaggguugg

SEQ ID NO: 2293151 - RNA, 20 nt, Human
uugagugaagcugggagaac

SEQ ID NO: 2293152 - RNA, 20 nt, Human
uugaguugauucagcucugc

SEQ ID NO: 2293153 - RNA, 16 nt, Human
uugaguucagguagcu

SEQ ID NO: 2293154 - RNA, 19 nt, Human
uugaguuuccucaggcugc

SEQ ID NO: 2293155 - RNA, 12 nt, Human
uugagugauuau

SEQ ID NO: 2293156 - RNA, 22 nt, Human
uugaguuuccucaggcugcugg

SEQ ID NO: 2293157 - RNA, 11 nt, Human
uugaguuuguc

SEQ ID NO: 2293158 - RNA, 23 nt, Human
uugaguuugucgcucaugugugc

SEQ ID NO: 2293159 - RNA, 16 nt, Human
uugaguuuuauuuauu

SEQ ID NO: 2293160 - RNA, 20 nt, Human
uugaguuuuauuuauuuuau

SEQ ID NO: 2293161 - RNA, 19 nt, Human
uugaguuuucaguggggca

SEQ ID NO: 2293162 - RNA, 14 nt, Human
uugaguuuucagug

SEQ ID NO: 2293163 - RNA, 19 nt, Human
uugaguuuucuucugugau

SEQ ID NO: 2293164 - RNA, 18 nt, Human
uugaguuuucuucuguga

SEQ ID NO: 2293165 - RNA, 13 nt, Human
uugauaauguuaa

SEQ ID NO: 2293166 - RNA, 15 nt, Human
uugauaauugcauuc

SEQ ID NO: 2293167 - RNA, 23 nt, Human
uugauaauugcauucaucuugug

SEQ ID NO: 2293168 - RNA, 14 nt, Human
uugauaauguuaaa

SEQ ID NO: 2293169 - RNA, 15 nt, Human
uugauaauguuaaau

SEQ ID NO: 2293170 - RNA, 18 nt, Human
uugauaauguuaaauuug

SEQ ID NO: 2293171 - RNA, 19 nt, Human
uugauaauguuaaauuugu

SEQ ID NO: 2293172 - RNA, 20 nt, Human
uugauaauguuaaauuugua

SEQ ID NO: 2293173 - RNA, 21 nt, Human
uugauaauguuaaauuuguaa

SEQ ID NO: 2293174 - RNA, 22 nt, Human
uugauaauguuaaauuuguaag

SEQ ID NO: 2293175 - RNA, 18 nt, Human
aucuaauauguaacaagc

SEQ ID NO: 2293176 - RNA, 16 nt, Human
aucuaauauggccaca

SEQ ID NO: 2293177 - RNA, 22 nt, Human
aucuaauagcggguuacuuuca

SEQ ID NO: 2293178 - RNA, 22 nt, Human
aucuaauaccucugugugcucc

SEQ ID NO: 2293179 - RNA, 21 nt, Human
aucuaauagcggguuacuuuc

SEQ ID NO: 2293180 - RNA, 13 nt, Human
uugauaccccccu

SEQ ID NO: 2293181 - RNA, 15 nt, Human
uugauaccccccucu

SEQ ID NO: 2293182 - RNA, 23 nt, Human
aucuaauauggccacaguagucu

SEQ ID NO: 2293183 - RNA, 18 nt, Human
aucuacacuccagugaga

SEQ ID NO: 2293184 - RNA, 21 nt, Human
aucuacaucuuuuuucacaaa

SEQ ID NO: 2293185 - RNA, 14 nt, Human
aucuacaucuuuuu

SEQ ID NO: 2293186 - RNA, 17 nt, Human
aucuacaucuuuuuuca

SEQ ID NO: 2293187 - RNA, 20 nt, Human
aucuacaucuuuuuucacaa

SEQ ID NO: 2293188 - RNA, 19 nt, Human
aucuacacuccagugagac

SEQ ID NO: 2293189 - RNA, 17 nt, Human
uugagaccucagccaug

SEQ ID NO: 2293190 - RNA, 16 nt, Human
uugagaucagccuggg

SEQ ID NO: 2293191 - RNA, 15 nt, Human
uugagaucagccugg

SEQ ID NO: 2293192 - RNA, 14 nt, Human
uugagacuaguuuu

SEQ ID NO: 2293193 - RNA, 15 nt, Human
uugagaccucagcca

SEQ ID NO: 2293194 - RNA, 14 nt, Human
uugagaccucagcc

SEQ ID NO: 2293195 - RNA, 22 nt, Human
uugagacaguuucuuagcuuuu

SEQ ID NO: 2293196 - RNA, 14 nt, Human
uugagucugugcca

SEQ ID NO: 2293197 - RNA, 22 nt, Human
uugagucauuauccuugcuaug

SEQ ID NO: 2293198 - RNA, 16 nt, Human
uugagucaaaaaaucu

SEQ ID NO: 2293199 - RNA, 12 nt, Human
uugagauuagag

SEQ ID NO: 2293200 - RNA, 13 nt, Human
uugaguagaggcu

SEQ ID NO: 2293201 - RNA, 16 nt, Human
uugagauguguucaca

SEQ ID NO: 2293202 - RNA, 23 nt, Human
uugagagaaauaugaagaacuga

SEQ ID NO: 2293203 - RNA, 17 nt, Human
uugagauguauuucaac

SEQ ID NO: 2293204 - RNA, 17 nt, Human
uugagauuagagggagg

SEQ ID NO: 2293205 - RNA, 12 nt, Human
uugacuuugucu

SEQ ID NO: 2293206 - RNA, 11 nt, Human
uugacuuuguc

SEQ ID NO: 2293207 - RNA, 15 nt, Human
uugagaccagccugg

SEQ ID NO: 2293208 - RNA, 13 nt, Human
uugagaccagccu

SEQ ID NO: 2293209 - RNA, 12 nt, Human
uugagacaguuu

SEQ ID NO: 2293210 - RNA, 13 nt, Human
uugagacaguuuc

SEQ ID NO: 2293211 - RNA, 17 nt, Human
uugagacaguuucuuag

SEQ ID NO: 2293212 - RNA, 19 nt, Human
uugagacaguuucuuagcu

SEQ ID NO: 2293213 - RNA, 21 nt, Human
uugacuuucagguacuaaaua

SEQ ID NO: 2293214 - RNA, 15 nt, Human
uugacuuucagguac

SEQ ID NO: 2293215 - RNA, 14 nt, Human
uugacuuucaggua

SEQ ID NO: 2293216 - RNA, 13 nt, Human
uugacuuucaggu

SEQ ID NO: 2293217 - RNA, 12 nt, Human
uugagacagagu

SEQ ID NO: 2293218 - RNA, 19 nt, Human
uugacuugacagaacacug

SEQ ID NO: 2293219 - RNA, 20 nt, Human
uugacuugacagaacacugu

SEQ ID NO: 2293220 - RNA, 23 nt, Human
uugacuguuuuuacccauauccc

SEQ ID NO: 2293221 - RNA, 15 nt, Human
uugacuuauuuucuc

SEQ ID NO: 2293222 - RNA, 21 nt, Human
uugacuugacagaacacuguc

SEQ ID NO: 2293223 - RNA, 12 nt, Human
uugacuuucagg

SEQ ID NO: 2293224 - RNA, 16 nt, Human
uugacuuauuuucucu

SEQ ID NO: 2293225 - RNA, 19 nt, Human
uugacagaucaagcuguga

SEQ ID NO: 2293226 - RNA, 17 nt, Human
uugacagaucaagcugu

SEQ ID NO: 2293227 - RNA, 18 nt, Human
uugacagaucaagcugug

SEQ ID NO: 2293228 - RNA, 18 nt, Human
uugacagcuuugcugcug

SEQ ID NO: 2293229 - RNA, 17 nt, Human
uugacagcuuugcugcu

SEQ ID NO: 2293230 - RNA, 14 nt, Human
uugacagcuuugcu

SEQ ID NO: 2293231 - RNA, 21 nt, Human
uugaauaaaaacuuugcuaaa

SEQ ID NO: 2293232 - RNA, 20 nt, Human
uugaauaaaaauauguacaa

SEQ ID NO: 2293233 - RNA, 16 nt, Human
uugaauaaaaaugcac

SEQ ID NO: 2293234 - RNA, 21 nt, Human
uugaauaaagccugcuuuuua

SEQ ID NO: 2293235 - RNA, 19 nt, Human
uugaauaaaguugaagcua

SEQ ID NO: 2293236 - RNA, 12 nt, Human
uugaauaaacua

SEQ ID NO: 2293237 - RNA, 17 nt, Human
uugaagggaaauuucag

SEQ ID NO: 2293238 - RNA, 23 nt, Human
uugaagcucuggugacaccagcc

SEQ ID NO: 2293239 - RNA, 15 nt, Human
uugaaggcaaaauug

SEQ ID NO: 2293240 - RNA, 12 nt, Human
uugaaggcaaaa

SEQ ID NO: 2293241 - RNA, 17 nt, Human
uugaaggcagaaagcaa

SEQ ID NO: 2293242 - RNA, 15 nt, Human
uugaaggcagaaagc

SEQ ID NO: 2293243 - RNA, 17 nt, Human
uugaaggcaaaauugca

SEQ ID NO: 2293244 - RNA, 13 nt, Human
uugaagcucuggu

SEQ ID NO: 2293245 - RNA, 14 nt, Human
uugaagcuaagauu

SEQ ID NO: 2293246 - RNA, 13 nt, Human
uugaagccuuugu

SEQ ID NO: 2293247 - RNA, 21 nt, Human
uugaagccugcccuugucuga

SEQ ID NO: 2293248 - RNA, 13 nt, Human
uugaagccugccc

SEQ ID NO: 2293249 - RNA, 15 nt, Human
uugaaucuauuuaag

SEQ ID NO: 2293250 - RNA, 15 nt, Human
uugaauccucucucu

SEQ ID NO: 2293251 - RNA, 17 nt, Human
uugaaucuauuuaagua

SEQ ID NO: 2293252 - RNA, 19 nt, Human
uugaauccaugcuugggug

SEQ ID NO: 2293253 - RNA, 17 nt, Human
uugaauccaugcuuggg

SEQ ID NO: 2293254 - RNA, 22 nt, Human
uugaaucauguaguaucaaaua

SEQ ID NO: 2293255 - RNA, 23 nt, Human
uugaaucauguaguaucaaauau

SEQ ID NO: 2293256 - RNA, 17 nt, Human
uugaaucaguauaaaca

SEQ ID NO: 2293257 - RNA, 23 nt, Human
uugaaucaauaauauauuuucug

SEQ ID NO: 2293258 - RNA, 14 nt, Human
uugacagaacacug

SEQ ID NO: 2293259 - RNA, 15 nt, Human
uugacagaacacugu

SEQ ID NO: 2293260 - RNA, 16 nt, Human
uugacagaacacuguc

SEQ ID NO: 2293261 - RNA, 17 nt, Human
uugacagaacacugucu

SEQ ID NO: 2293262 - RNA, 12 nt, Human
uugaauaaauaa

SEQ ID NO: 2293263 - RNA, 12 nt, Human
uugaauaauggu

SEQ ID NO: 2293264 - RNA, 19 nt, Human
uugaauaaugguaccagau

SEQ ID NO: 2293265 - RNA, 22 nt, Human
uugaauaaugguaccagauaaa

SEQ ID NO: 2293266 - RNA, 13 nt, Human
uugaaucacagua

SEQ ID NO: 2293267 - RNA, 14 nt, Human
uugaaucaauaaua

SEQ ID NO: 2293268 - RNA, 22 nt, Human
uugaaucaauaauauauuuucu

SEQ ID NO: 2293269 - RNA, 10 nt, Human
uugaaucaau

SEQ ID NO: 2293270 - RNA, 14 nt, Human
aucguucucugccu

SEQ ID NO: 2293271 - RNA, 18 nt, Human
aucguuauguguguauau

SEQ ID NO: 2293272 - RNA, 16 nt, Human
aucguuauguguguau

SEQ ID NO: 2293273 - RNA, 15 nt, Human
aucguuaugugugua

SEQ ID NO: 2293274 - RNA, 14 nt, Human
aucguuaugugugu

SEQ ID NO: 2293275 - RNA, 15 nt, Human
aucguuccaguuccc

SEQ ID NO: 2293276 - RNA, 21 nt, Human
aucguuauguguguauaugua

SEQ ID NO: 2293277 - RNA, 19 nt, Human
aucuaaaaauagacuuaaa

SEQ ID NO: 2293278 - RNA, 13 nt, Human
aucuaaauggaac

SEQ ID NO: 2293279 - RNA, 21 nt, Human
uugaagccacugaagcuggga

SEQ ID NO: 2293280 - RNA, 17 nt, Human
uugaagccacugaagcu

SEQ ID NO: 2293281 - RNA, 13 nt, Human
uugaagccacuga

SEQ ID NO: 2293282 - RNA, 23 nt, Human
uugaagccaagucagcuuugccu

SEQ ID NO: 2293283 - RNA, 20 nt, Human
uugaagccaaguggggugcu

SEQ ID NO: 2293284 - RNA, 23 nt, Human
uugaagcauuuuauaaaucgcuu

SEQ ID NO: 2293285 - RNA, 11 nt, Human
uugaagccaaa

SEQ ID NO: 2293286 - RNA, 14 nt, Human
uugaagccaaagaa

SEQ ID NO: 2293287 - RNA, 15 nt, Human
uugaagccaaagaaa

SEQ ID NO: 2293288 - RNA, 18 nt, Human
aucuaaauggaaccacuc

SEQ ID NO: 2293289 - RNA, 17 nt, Human
aucuaaauggaaccacu

SEQ ID NO: 2293290 - RNA, 22 nt, Human
aucguuaguaucuaacauguau

SEQ ID NO: 2293291 - RNA, 16 nt, Human
aucgugcuaaauuuuc

SEQ ID NO: 2293292 - RNA, 12 nt, Human
aucguggagaca

SEQ ID NO: 2293293 - RNA, 17 nt, Human
aucgugcuaaauuuuca

SEQ ID NO: 2293294 - RNA, 15 nt, Human
aucgugcuaaauuuu

SEQ ID NO: 2293295 - RNA, 12 nt, Human
aucgugcuaaau

SEQ ID NO: 2293296 - RNA, 23 nt, Human
aucgugccguuacucuccaaccu

SEQ ID NO: 2293297 - RNA, 14 nt, Human
auccucuggcuggc

SEQ ID NO: 2293298 - RNA, 19 nt, Human
aucgugccguuacucucca

SEQ ID NO: 2293299 - RNA, 20 nt, Human
auccucuguaaacuuuuugu

SEQ ID NO: 2293300 - RNA, 16 nt, Human
auccucuguacagagc

SEQ ID NO: 2293301 - RNA, 17 nt, Human
auccucuguacagagcc

SEQ ID NO: 2293302 - RNA, 10 nt, Human
auccucuggc

SEQ ID NO: 2293303 - RNA, 12 nt, Human
auccucugaucu

SEQ ID NO: 2293304 - RNA, 18 nt, Human
auccucugagugugacca

SEQ ID NO: 2293305 - RNA, 20 nt, Human
auccucucaaccaccuuuca

SEQ ID NO: 2293306 - RNA, 23 nt, Human
auccuagccuuauccucugaucu

SEQ ID NO: 2293307 - RNA, 14 nt, Human
auccuccucccacc

SEQ ID NO: 2293308 - RNA, 11 nt, Human
auccuccugca

SEQ ID NO: 2293309 - RNA, 22 nt, Human
uugcuucuucuccuauguguaa

SEQ ID NO: 2293310 - RNA, 20 nt, Human
uugcucugccaacuucuuca

SEQ ID NO: 2293311 - RNA, 13 nt, Human
uugcuugaaacca

SEQ ID NO: 2293312 - RNA, 20 nt, Human
uugcucucuggccuuuuccu

SEQ ID NO: 2293313 - RNA, 18 nt, Human
uugcucucccucuucuca

SEQ ID NO: 2293314 - RNA, 23 nt, Human
uugcucucccucuucucaagugc

SEQ ID NO: 2293315 - RNA, 12 nt, Human
uugcucugcacc

SEQ ID NO: 2293316 - RNA, 13 nt, Human
uugcucugcaccc

SEQ ID NO: 2293317 - RNA, 15 nt, Human
uugcucugcaggcac

SEQ ID NO: 2293318 - RNA, 17 nt, Human
uugcucugcaggcaccu

SEQ ID NO: 2293319 - RNA, 13 nt, Human
uugcucucccggu

SEQ ID NO: 2293320 - RNA, 20 nt, Human
uugcucucccgguucuucca

SEQ ID NO: 2293321 - RNA, 21 nt, Human
uugcucucccgguucuuccag

SEQ ID NO: 2293322 - RNA, 22 nt, Human
uugcucucccgguucuuccagu

SEQ ID NO: 2293323 - RNA, 23 nt, Human
uugcucucccgguucuuccagug

SEQ ID NO: 2293324 - RNA, 13 nt, Human
uugcucucccucu

SEQ ID NO: 2293325 - RNA, 16 nt, Human
uugcucucccucuucu

SEQ ID NO: 2293326 - RNA, 12 nt, Human
uugcuccuugac

SEQ ID NO: 2293327 - RNA, 13 nt, Human
uugcucagucucc

SEQ ID NO: 2293328 - RNA, 21 nt, Human
uugcucuccccugcccugcug

SEQ ID NO: 2293329 - RNA, 15 nt, Human
uugcucaccuggggu

SEQ ID NO: 2293330 - RNA, 13 nt, Human
uugcucaccuggg

SEQ ID NO: 2293331 - RNA, 18 nt, Human
uugcucaaaaaaugagcu

SEQ ID NO: 2293332 - RNA, 16 nt, Human
uugcucaaaaaucugu

SEQ ID NO: 2293333 - RNA, 19 nt, Human
uugcucaaaucuauucaga

SEQ ID NO: 2293334 - RNA, 13 nt, Human
aucuugucucaau

SEQ ID NO: 2293335 - RNA, 14 nt, Human
aucuugucucaaug

SEQ ID NO: 2293336 - RNA, 15 nt, Human
aucuugucucaaugc

SEQ ID NO: 2293337 - RNA, 16 nt, Human
aucuugucucaaugcu

SEQ ID NO: 2293338 - RNA, 20 nt, Human
aucuugucucaaugcucaua

SEQ ID NO: 2293339 - RNA, 14 nt, Human
aucuugucucuggg

SEQ ID NO: 2293340 - RNA, 23 nt, Human
aucuugucucaaugcucauaacg

SEQ ID NO: 2293341 - RNA, 15 nt, Human
aucuugucucugggc

SEQ ID NO: 2293342 - RNA, 17 nt, Human
uugcucaaaaaaugagc

SEQ ID NO: 2293343 - RNA, 15 nt, Human
uugcuauuguaaaua

SEQ ID NO: 2293344 - RNA, 19 nt, Human
uugcuauuguaaauauguu

SEQ ID NO: 2293345 - RNA, 12 nt, Human
uugcuauuguaa

SEQ ID NO: 2293346 - RNA, 22 nt, Human
uugcuauuagacuguaggaaga

SEQ ID NO: 2293347 - RNA, 14 nt, Human
uugcuauuagagca

SEQ ID NO: 2293348 - RNA, 17 nt, Human
uugcuauuagagcauug

SEQ ID NO: 2293349 - RNA, 21 nt, Human
aucuuagugccugagaguauu

SEQ ID NO: 2293350 - RNA, 12 nt, Human
aucuuagugguu

SEQ ID NO: 2293351 - RNA, 18 nt, Human
aucuuagugccugagagu

SEQ ID NO: 2293352 - RNA, 16 nt, Human
aucuuaguauuugcau

SEQ ID NO: 2293353 - RNA, 14 nt, Human
aucuuaguuuggau

SEQ ID NO: 2293354 - RNA, 22 nt, Human
aucuuaguuuggauucuuaugu

SEQ ID NO: 2293355 - RNA, 20 nt, Human
aucuguuuuuaaaaaucaua

SEQ ID NO: 2293356 - RNA, 19 nt, Human
aucuguuuuuaaaaaucau

SEQ ID NO: 2293357 - RNA, 18 nt, Human
aucuguuuuuaaaaauca

SEQ ID NO: 2293358 - RNA, 19 nt, Human
aucuguuuugaaggcaaaa

SEQ ID NO: 2293359 - RNA, 22 nt, Human
aucuguuuuaaauuuauuucaa

SEQ ID NO: 2293360 - RNA, 18 nt, Human
aucuguuuugaaggcaaa

SEQ ID NO: 2293361 - RNA, 17 nt, Human
aucuguuuugaaggcaa

SEQ ID NO: 2293362 - RNA, 14 nt, Human
aucuguuuuaaauu

SEQ ID NO: 2293363 - RNA, 13 nt, Human
aucuguuucccag

SEQ ID NO: 2293364 - RNA, 14 nt, Human
aucuguuucccagc

SEQ ID NO: 2293365 - RNA, 17 nt, Human
aucuguuuacaguguuc

SEQ ID NO: 2293366 - RNA, 15 nt, Human
aucuguuuacagugu

SEQ ID NO: 2293367 - RNA, 18 nt, Human
aucugugaaaggaaagag

SEQ ID NO: 2293368 - RNA, 20 nt, Human
aucuuggucagauuugaacu

SEQ ID NO: 2293369 - RNA, 13 nt, Human
aucuugcucugcu

SEQ ID NO: 2293370 - RNA, 23 nt, Human
aucuugguccaggaaaugugcac

SEQ ID NO: 2293371 - RNA, 22 nt, Human
aucuugguacuacuagaugucu

SEQ ID NO: 2293372 - RNA, 19 nt, Human
aucuugguccaggaaaugu

SEQ ID NO: 2293373 - RNA, 23 nt, Human
aucuugguaaauuuccccaacag

SEQ ID NO: 2293374 - RNA, 23 nt, Human
aucuugaucugcucagcccugga

SEQ ID NO: 2293375 - RNA, 24 nt, Human
aucuugcaccccaaagcuuuccug

SEQ ID NO: 2293376 - RNA, 23 nt, Human
aucuuaguuuggauucuuaugua

SEQ ID NO: 2293377 - RNA, 14 nt, Human
aucuuauaauuuaa

SEQ ID NO: 2293378 - RNA, 19 nt, Human
aucugcucagcccuggagg

SEQ ID NO: 2293379 - RNA, 17 nt, Human
aucugcucagcccugga

SEQ ID NO: 2293380 - RNA, 18 nt, Human
aucugcucagcccuggag

SEQ ID NO: 2293381 - RNA, 14 nt, Human
aucugguuuugcua

SEQ ID NO: 2293382 - RNA, 22 nt, Human
aucugguuugacuccgcuggag

SEQ ID NO: 2293383 - RNA, 15 nt, Human
aucuguagggcugga

SEQ ID NO: 2293384 - RNA, 17 nt, Human
aucuguagggcuggacc

SEQ ID NO: 2293385 - RNA, 18 nt, Human
aucuguagggcuggaccu

SEQ ID NO: 2293386 - RNA, 17 nt, Human
aucuguauaaguaagaa

SEQ ID NO: 2293387 - RNA, 20 nt, Human
aucuguauauacaauaacau

SEQ ID NO: 2293388 - RNA, 14 nt, Human
aucuguauauacaa

SEQ ID NO: 2293389 - RNA, 21 nt, Human
aucuguauaaguaagaaaaua

SEQ ID NO: 2293390 - RNA, 16 nt, Human
aucuguauauaaaaua

SEQ ID NO: 2293391 - RNA, 17 nt, Human
aucuguauauaaaauau

SEQ ID NO: 2293392 - RNA, 19 nt, Human
aucuguauauaaaauauuu

SEQ ID NO: 2293393 - RNA, 18 nt, Human
aucuguauacccucuguu

SEQ ID NO: 2293394 - RNA, 19 nt, Human
aucuguauaaguaagaaaa

SEQ ID NO: 2293395 - RNA, 20 nt, Human
aucuguauaaguaagaaaau

SEQ ID NO: 2293396 - RNA, 23 nt, Human
aucuguauaaguaagaaaauauu

SEQ ID NO: 2293397 - RNA, 14 nt, Human
aucugcucagcagc

SEQ ID NO: 2293398 - RNA, 15 nt, Human
aucugcucagcagcu

SEQ ID NO: 2293399 - RNA, 13 nt, Human
aucugcucagccc

SEQ ID NO: 2293400 - RNA, 14 nt, Human
aucugcucagcccu

SEQ ID NO: 2293401 - RNA, 15 nt, Human
aucugcucagcccug

SEQ ID NO: 2293402 - RNA, 16 nt, Human
aucugcucagcccugg

SEQ ID NO: 2293403 - RNA, 10 nt, Human
aucuggugac

SEQ ID NO: 2293404 - RNA, 16 nt, Human
aucuggugacuuuccu

SEQ ID NO: 2293405 - RNA, 17 nt, Human
aucuggugacuuuccuc

SEQ ID NO: 2293406 - RNA, 14 nt, Human
aucuguaucucucu

SEQ ID NO: 2293407 - RNA, 15 nt, Human
aucuguaucucucuc

SEQ ID NO: 2293408 - RNA, 21 nt, Human
aucuguauauacaauaacaua

SEQ ID NO: 2293409 - RNA, 22 nt, Human
aucuguauauaaaauauuuuca

SEQ ID NO: 2293410 - RNA, 13 nt, Human
aucuguaucucuc

SEQ ID NO: 2293411 - RNA, 15 nt, Human
aucuguauuuaauuu

SEQ ID NO: 2293412 - RNA, 18 nt, Human
aucuguauuuaauuuuga

SEQ ID NO: 2293413 - RNA, 23 nt, Human
aucuguccaaaggaggcuggcag

SEQ ID NO: 2293414 - RNA, 21 nt, Human
aucuguccaaaggaggcuggc

SEQ ID NO: 2293415 - RNA, 19 nt, Human
aucuguccaaaggaggcug

SEQ ID NO: 2293416 - RNA, 18 nt, Human
aucuguccaaaggaggcu

SEQ ID NO: 2293417 - RNA, 14 nt, Human
aucuguccucagcc

SEQ ID NO: 2293418 - RNA, 16 nt, Human
aucugucccugccuca

SEQ ID NO: 2293419 - RNA, 14 nt, Human
aucuguccaaggaa

SEQ ID NO: 2293420 - RNA, 17 nt, Human
aucuguauuuaauuuug

SEQ ID NO: 2293421 - RNA, 13 nt, Human
aucuguccaagga

SEQ ID NO: 2293422 - RNA, 14 nt, Human
aucugucugguggc

SEQ ID NO: 2293423 - RNA, 16 nt, Human
aucugucugguggccc

SEQ ID NO: 2293424 - RNA, 17 nt, Human
aucugugaaaggaaaga

SEQ ID NO: 2293425 - RNA, 21 nt, Human
aucuguccucagccuugccag

SEQ ID NO: 2293426 - RNA, 18 nt, Human
aucuguccucagccuugc

SEQ ID NO: 2293427 - RNA, 17 nt, Human
aucuguccucagccuug

SEQ ID NO: 2293428 - RNA, 16 nt, Human
aucuguccucagccuu

SEQ ID NO: 2293429 - RNA, 15 nt, Human
aucuguccucagccu

SEQ ID NO: 2293430 - RNA, 20 nt, Human
aucugcuagggaauaucaau

SEQ ID NO: 2293431 - RNA, 14 nt, Human
aucugcuaauaaaa

SEQ ID NO: 2293432 - RNA, 17 nt, Human
aucugcgugacaauaaa

SEQ ID NO: 2293433 - RNA, 21 nt, Human
aucugcgugacaauaaaacau

SEQ ID NO: 2293434 - RNA, 22 nt, Human
aucugcgugacaauaaaacauu

SEQ ID NO: 2293435 - RNA, 23 nt, Human
aucugcgugacaauaaaacauua

SEQ ID NO: 2293436 - RNA, 19 nt, Human
aucugccuuuauuguguuu

SEQ ID NO: 2293437 - RNA, 21 nt, Human
aucugccuuuauuguguuugu

SEQ ID NO: 2293438 - RNA, 22 nt, Human
aucugccuuuauuguguuuguc

SEQ ID NO: 2293439 - RNA, 21 nt, Human
aucugccuuaaaaccaaagag

SEQ ID NO: 2293440 - RNA, 16 nt, Human
aucugcgugacaauaa

SEQ ID NO: 2293441 - RNA, 17 nt, Human
aucugccccucccccaa

SEQ ID NO: 2293442 - RNA, 14 nt, Human
aucugccccucccu

SEQ ID NO: 2293443 - RNA, 16 nt, Human
aucugccccucccugc

SEQ ID NO: 2293444 - RNA, 16 nt, Human
aucugccuuuauugug

SEQ ID NO: 2293445 - RNA, 18 nt, Human
aucugccuuaaaaccaaa

SEQ ID NO: 2293446 - RNA, 19 nt, Human
aucugccuuaaaaccaaag

SEQ ID NO: 2293447 - RNA, 17 nt, Human
aucugccuuaaaaccaa

SEQ ID NO: 2293448 - RNA, 15 nt, Human
uugcauuuggucaag

SEQ ID NO: 2293449 - RNA, 21 nt, Human
uugcauuuggauugggguccc

SEQ ID NO: 2293450 - RNA, 15 nt, Human
uugcauuugcucuuu

SEQ ID NO: 2293451 - RNA, 15 nt, Human
uugcauuuaugguca

SEQ ID NO: 2293452 - RNA, 22 nt, Human
uugcauuuaaaacagacacugg

SEQ ID NO: 2293453 - RNA, 12 nt, Human
uugcauuuuugc

SEQ ID NO: 2293454 - RNA, 17 nt, Human
uugcauuuuaaaaauga

SEQ ID NO: 2293455 - RNA, 16 nt, Human
aucugccccuccccca

SEQ ID NO: 2293456 - RNA, 15 nt, Human
aucugccccuccccc

SEQ ID NO: 2293457 - RNA, 12 nt, Human
aucugccccucc

SEQ ID NO: 2293458 - RNA, 11 nt, Human
aucugccccuc

SEQ ID NO: 2293459 - RNA, 13 nt, Human
aucugcccaggac

SEQ ID NO: 2293460 - RNA, 13 nt, Human
aucugcccagggg

SEQ ID NO: 2293461 - RNA, 15 nt, Human
aucugcccaggggug

SEQ ID NO: 2293462 - RNA, 16 nt, Human
aucugcccaggggugc

SEQ ID NO: 2293463 - RNA, 19 nt, Human
aucugcccaggggugcccc

SEQ ID NO: 2293464 - RNA, 21 nt, Human
aucugcccaggggugcccccu

SEQ ID NO: 2293465 - RNA, 22 nt, Human
aucugcccaggggugcccccuc

SEQ ID NO: 2293466 - RNA, 23 nt, Human
aucugcccaggggugcccccucc

SEQ ID NO: 2293467 - RNA, 12 nt, Human
aucugcccagga

SEQ ID NO: 2293468 - RNA, 16 nt, Human
uuggcccccgagcugg

SEQ ID NO: 2293469 - RNA, 15 nt, Human
uuggcccccgagcug

SEQ ID NO: 2293470 - RNA, 20 nt, Human
uuggagugaguguggcuccc

SEQ ID NO: 2293471 - RNA, 15 nt, Human
uuggagucuuccaaa

SEQ ID NO: 2293472 - RNA, 18 nt, Human
uuggccccugcccggcug

SEQ ID NO: 2293473 - RNA, 16 nt, Human
uuggagggugucccaa

SEQ ID NO: 2293474 - RNA, 23 nt, Human
uuggaggugcuuaagcagaagca

SEQ ID NO: 2293475 - RNA, 23 nt, Human
uuggagggucccaagcugggccc

SEQ ID NO: 2293476 - RNA, 18 nt, Human
uuggaggugcuuaagcag

SEQ ID NO: 2293477 - RNA, 23 nt, Human
uuggaguccccucaccuccucua

SEQ ID NO: 2293478 - RNA, 14 nt, Human
uuggcucaauccuc

SEQ ID NO: 2293479 - RNA, 13 nt, Human
uuggcucaauccu

SEQ ID NO: 2293480 - RNA, 16 nt, Human
uuggcuauuuaaaacu

SEQ ID NO: 2293481 - RNA, 17 nt, Human
uuggcuauuuaaaacuu

SEQ ID NO: 2293482 - RNA, 23 nt, Human
uuggcuauuagagaucaaccccu

SEQ ID NO: 2293483 - RNA, 17 nt, Human
uuggccugaucagacca

SEQ ID NO: 2293484 - RNA, 19 nt, Human
uuggcccccgagcuggggg

SEQ ID NO: 2293485 - RNA, 22 nt, Human
uuggccgggugcgguggcucac

SEQ ID NO: 2293486 - RNA, 12 nt, Human
uuggccucagaa

SEQ ID NO: 2293487 - RNA, 17 nt, Human
uuggccuccccugcuga

SEQ ID NO: 2293488 - RNA, 22 nt, Human
uuggccucugcaaaggaaauac

SEQ ID NO: 2293489 - RNA, 13 nt, Human
uuggccuccggcc

SEQ ID NO: 2293490 - RNA, 19 nt, Human
uuggccuccggccuccccu

SEQ ID NO: 2293491 - RNA, 15 nt, Human
uuggagacucugugg

SEQ ID NO: 2293492 - RNA, 13 nt, Human
uuggagacucugu

SEQ ID NO: 2293493 - RNA, 20 nt, Human
uuggagacucuguggggccu

SEQ ID NO: 2293494 - RNA, 17 nt, Human
uuggagaguaaaaacug

SEQ ID NO: 2293495 - RNA, 13 nt, Human
uuggagaguaaaa

SEQ ID NO: 2293496 - RNA, 22 nt, Human
uuggagagcuagaaccuggaga

SEQ ID NO: 2293497 - RNA, 20 nt, Human
uuggagaguaaaaacugaau

SEQ ID NO: 2293498 - RNA, 18 nt, Human
uuggagaguaaaaacuga

SEQ ID NO: 2293499 - RNA, 15 nt, Human
uuggagaguuuccug

SEQ ID NO: 2293500 - RNA, 23 nt, Human
uuggagggugggagagcccagcc

SEQ ID NO: 2293501 - RNA, 22 nt, Human
uuggagggugggagagcccagc

SEQ ID NO: 2293502 - RNA, 19 nt, Human
uuggagggguuuaugcuca

SEQ ID NO: 2293503 - RNA, 17 nt, Human
uuggagggucccaagcu

SEQ ID NO: 2293504 - RNA, 21 nt, Human
uuggagggucccaagcugggc

SEQ ID NO: 2293505 - RNA, 22 nt, Human
uuggagggucccaagcugggcc

SEQ ID NO: 2293506 - RNA, 17 nt, Human
uuggaggccuuucaucc

SEQ ID NO: 2293507 - RNA, 16 nt, Human
uuggagaguuuccuga

SEQ ID NO: 2293508 - RNA, 15 nt, Human
uuggaggggggagcc

SEQ ID NO: 2293509 - RNA, 15 nt, Human
uugcuugaaagaaaa

SEQ ID NO: 2293510 - RNA, 12 nt, Human
uugcuugaaaga

SEQ ID NO: 2293511 - RNA, 14 nt, Human
uugcuugagcccag

SEQ ID NO: 2293512 - RNA, 22 nt, Human
uugcuugaaagaaaauaugcau

SEQ ID NO: 2293513 - RNA, 14 nt, Human
uugcuugaaagaaa

SEQ ID NO: 2293514 - RNA, 17 nt, Human
uugcuugagcccaggag

SEQ ID NO: 2293515 - RNA, 16 nt, Human
uugcuugagcccagga

SEQ ID NO: 2293516 - RNA, 20 nt, Human
uuggagacacaacuauuuuu

SEQ ID NO: 2293517 - RNA, 18 nt, Human
uugcuugagcccaggagu

SEQ ID NO: 2293518 - RNA, 17 nt, Human
uuggagacauuccuggg

SEQ ID NO: 2293519 - RNA, 11 nt, Human
uuggagacaga

SEQ ID NO: 2293520 - RNA, 13 nt, Human
aucuuuucuauuu

SEQ ID NO: 2293521 - RNA, 11 nt, Human
aucuuuugaac

SEQ ID NO: 2293522 - RNA, 14 nt, Human
aucuuuucuugccu

SEQ ID NO: 2293523 - RNA, 23 nt, Human
aucuuuucuugccucuguccccu

SEQ ID NO: 2293524 - RNA, 18 nt, Human
augaaagggcccagagag

SEQ ID NO: 2293525 - RNA, 15 nt, Human
aucuuuuguauaguu

SEQ ID NO: 2293526 - RNA, 19 nt, Human
aucuuuugaccuguggugc

SEQ ID NO: 2293527 - RNA, 17 nt, Human
aucuuugcagacaggca

SEQ ID NO: 2293528 - RNA, 16 nt, Human
aucuuugauucuccuu

SEQ ID NO: 2293529 - RNA, 17 nt, Human
aucuuugauucuccuuc

SEQ ID NO: 2293530 - RNA, 18 nt, Human
aucuuugauucuccuuca

SEQ ID NO: 2293531 - RNA, 19 nt, Human
aucuuugauucuccuucag

SEQ ID NO: 2293532 - RNA, 22 nt, Human
aucuuuucauuuaggugaggaa

SEQ ID NO: 2293533 - RNA, 20 nt, Human
aucuuugauucuccuucagc

SEQ ID NO: 2293534 - RNA, 17 nt, Human
aucuuuucacaaauaaa

SEQ ID NO: 2293535 - RNA, 21 nt, Human
aucuuucuuuugauucuuccu

SEQ ID NO: 2293536 - RNA, 21 nt, Human
aucuuucuuucuuagaaauuu

SEQ ID NO: 2293537 - RNA, 17 nt, Human
aucuuucuuucuuagaa

SEQ ID NO: 2293538 - RNA, 20 nt, Human
aucuuucuuucuuagaaauu

SEQ ID NO: 2293539 - RNA, 15 nt, Human
aucuuucuuucuuag

SEQ ID NO: 2293540 - RNA, 21 nt, Human
aucuuucuuuaccugagacca

SEQ ID NO: 2293541 - RNA, 22 nt, Human
aucuuucuuuaccugagaccag

SEQ ID NO: 2293542 - RNA, 14 nt, Human
aucuuucuuuaccu

SEQ ID NO: 2293543 - RNA, 17 nt, Human
aucuuucuuuaccugag

SEQ ID NO: 2293544 - RNA, 18 nt, Human
aucuuucuuuaccugaga

SEQ ID NO: 2293545 - RNA, 20 nt, Human
aucuuucuuuaccugagacc

SEQ ID NO: 2293546 - RNA, 14 nt, Human
aucuuugauucucc

SEQ ID NO: 2293547 - RNA, 15 nt, Human
aucuuugauucuccu

SEQ ID NO: 2293548 - RNA, 13 nt, Human
aucuuucugcaga

SEQ ID NO: 2293549 - RNA, 11 nt, Human
aucuuucuucu

SEQ ID NO: 2293550 - RNA, 20 nt, Human
uuggcucgaaucucugugcc

SEQ ID NO: 2293551 - RNA, 21 nt, Human
uuggcucgaaucucugugccu

SEQ ID NO: 2293552 - RNA, 22 nt, Human
aucuuucuucuauuuuauuccc

SEQ ID NO: 2293553 - RNA, 19 nt, Human
aucuuucuucuauuuuauu

SEQ ID NO: 2293554 - RNA, 13 nt, Human
aucuuucuugauc

SEQ ID NO: 2293555 - RNA, 18 nt, Human
aucuuucuugaucaacau

SEQ ID NO: 2293556 - RNA, 22 nt, Human
uuggcucccauucacucuucca

SEQ ID NO: 2293557 - RNA, 17 nt, Human
uuggcucgaaucucugu

SEQ ID NO: 2293558 - RNA, 14 nt, Human
uuggcucagacaug

SEQ ID NO: 2293559 - RNA, 13 nt, Human
uuggcucagacau

SEQ ID NO: 2293560 - RNA, 12 nt, Human
uuggcucaccca

SEQ ID NO: 2293561 - RNA, 22 nt, Human
uuggcucacccaagcaaggcca

SEQ ID NO: 2293562 - RNA, 16 nt, Human
uuggcucacacugaga

SEQ ID NO: 2293563 - RNA, 17 nt, Human
uuggcucacacugagaa

SEQ ID NO: 2293564 - RNA, 21 nt, Human
uuggggaguuaagaccuggca

SEQ ID NO: 2293565 - RNA, 20 nt, Human
uuggggaguuaagaccuggc

SEQ ID NO: 2293566 - RNA, 19 nt, Human
uuggggaguuaagaccugg

SEQ ID NO: 2293567 - RNA, 17 nt, Human
uuggggaguuaagaccu

SEQ ID NO: 2293568 - RNA, 21 nt, Human
uuggugcaacccuuaccccuu

SEQ ID NO: 2293569 - RNA, 15 nt, Human
uuggugcacagugau

SEQ ID NO: 2293570 - RNA, 16 nt, Human
uuggugcaacccuuac

SEQ ID NO: 2293571 - RNA, 12 nt, Human
uuggugccuggc

SEQ ID NO: 2293572 - RNA, 13 nt, Human
uuggugccuggcc

SEQ ID NO: 2293573 - RNA, 17 nt, Human
uuggugcacagugauuu

SEQ ID NO: 2293574 - RNA, 18 nt, Human
uuggugcacagugauuuu

SEQ ID NO: 2293575 - RNA, 18 nt, Human
uuggggaccagagcugcc

SEQ ID NO: 2293576 - RNA, 23 nt, Human
uuggggacaggggcaggaggaag

SEQ ID NO: 2293577 - RNA, 19 nt, Human
uuggggacaucucuuugaa

SEQ ID NO: 2293578 - RNA, 15 nt, Human
uuggggaauuuccuc

SEQ ID NO: 2293579 - RNA, 16 nt, Human
augaauuacauuugua

SEQ ID NO: 2293580 - RNA, 17 nt, Human
augaauuacauuuguau

SEQ ID NO: 2293581 - RNA, 13 nt, Human
augaauguaucag

SEQ ID NO: 2293582 - RNA, 15 nt, Human
augaauuaaguuuuu

SEQ ID NO: 2293583 - RNA, 15 nt, Human
augaauuacauuugu

SEQ ID NO: 2293584 - RNA, 21 nt, Human
augaaugguauggaacucucu

SEQ ID NO: 2293585 - RNA, 21 nt, Human
augaaugggcugagcugccug

SEQ ID NO: 2293586 - RNA, 21 nt, Human
augaaugggcaaaacugaauu

SEQ ID NO: 2293587 - RNA, 23 nt, Human
augaauggacucaaacugccuug

SEQ ID NO: 2293588 - RNA, 23 nt, Human
augaauggagauuugaaggucug

SEQ ID NO: 2293589 - RNA, 23 nt, Human
augaauggcucacuauggugcca

SEQ ID NO: 2293590 - RNA, 17 nt, Human
augaaugggcaaaacug

SEQ ID NO: 2293591 - RNA, 18 nt, Human
augaaugggcaaaacuga

SEQ ID NO: 2293592 - RNA, 21 nt, Human
augaauauuuaguguucauaa

SEQ ID NO: 2293593 - RNA, 23 nt, Human
augaauggcuaagcaaaauguga

SEQ ID NO: 2293594 - RNA, 14 nt, Human
augaaucaaagaca

SEQ ID NO: 2293595 - RNA, 12 nt, Human
augaaucaaugg

SEQ ID NO: 2293596 - RNA, 17 nt, Human
augaaauuuaauauagc

SEQ ID NO: 2293597 - RNA, 17 nt, Human
augaacuuauucuguag

SEQ ID NO: 2293598 - RNA, 18 nt, Human
augaacuuauucuguaga

SEQ ID NO: 2293599 - RNA, 23 nt, Human
augaaauugucuagcagagcagg

SEQ ID NO: 2293600 - RNA, 13 nt, Human
augaacuucgcau

SEQ ID NO: 2293601 - RNA, 17 nt, Human
augaacuucgcaucaaa

SEQ ID NO: 2293602 - RNA, 20 nt, Human
augaacuucgcaucaaaaga

SEQ ID NO: 2293603 - RNA, 22 nt, Human
augaacuucgcaucaaaagaca

SEQ ID NO: 2293604 - RNA, 16 nt, Human
augaaauuacuuauca

SEQ ID NO: 2293605 - RNA, 23 nt, Human
augaaauuacuuaucauccacau

SEQ ID NO: 2293606 - RNA, 22 nt, Human
augaaauugucuagcagagcag

SEQ ID NO: 2293607 - RNA, 20 nt, Human
augaaauugucuagcagagc

SEQ ID NO: 2293608 - RNA, 16 nt, Human
augaaagguuuacauu

SEQ ID NO: 2293609 - RNA, 19 nt, Human
augaaagggcccagagagg

SEQ ID NO: 2293610 - RNA, 16 nt, Human
augaaaugguuaagaa

SEQ ID NO: 2293611 - RNA, 21 nt, Human
augaaagguuuacauugucaa

SEQ ID NO: 2293612 - RNA, 21 nt, Human
augaagacaggacagugcuuc

SEQ ID NO: 2293613 - RNA, 16 nt, Human
augaagacaggacagu

SEQ ID NO: 2293614 - RNA, 23 nt, Human
augaacuucgcaucaaaagacaa

SEQ ID NO: 2293615 - RNA, 15 nt, Human
augaagaacugagga

SEQ ID NO: 2293616 - RNA, 19 nt, Human
augaagagugagagggcau

SEQ ID NO: 2293617 - RNA, 18 nt, Human
augaagagugagagggca

SEQ ID NO: 2293618 - RNA, 16 nt, Human
augaagagauuuuuca

SEQ ID NO: 2293619 - RNA, 16 nt, Human
augaauauuuaguguu

SEQ ID NO: 2293620 - RNA, 11 nt, Human
augaagaggag

SEQ ID NO: 2293621 - RNA, 20 nt, Human
augaagagauuuuucaugau

SEQ ID NO: 2293622 - RNA, 21 nt, Human
augaagacuguuaaaugaaac

SEQ ID NO: 2293623 - RNA, 22 nt, Human
augaagacuguuaaaugaaacc

SEQ ID NO: 2293624 - RNA, 14 nt, Human
auaauauauuugug

SEQ ID NO: 2293625 - RNA, 19 nt, Human
auaauauauuuuaaauauu

SEQ ID NO: 2293626 - RNA, 13 nt, Human
auaauauauuuuc

SEQ ID NO: 2293627 - RNA, 13 nt, Human
auaauauacuugu

SEQ ID NO: 2293628 - RNA, 14 nt, Human
auaauauacuugug

SEQ ID NO: 2293629 - RNA, 20 nt, Human
auaauauacuuguggacuaa

SEQ ID NO: 2293630 - RNA, 14 nt, Human
auaagccaauuuuu

SEQ ID NO: 2293631 - RNA, 18 nt, Human
auaagccaauuuuucugc

SEQ ID NO: 2293632 - RNA, 19 nt, Human
auaagccaauuuuucugca

SEQ ID NO: 2293633 - RNA, 22 nt, Human
auaagccaauuuuucugcacug

SEQ ID NO: 2293634 - RNA, 23 nt, Human
auaagccaauuuuucugcacuga

SEQ ID NO: 2293635 - RNA, 18 nt, Human
auaauauaccaaugcuuu

SEQ ID NO: 2293636 - RNA, 14 nt, Human
auaagccagacauc

SEQ ID NO: 2293637 - RNA, 17 nt, Human
auaagcaucaaacucuu

SEQ ID NO: 2293638 - RNA, 16 nt, Human
auaagcaucaaacucu

SEQ ID NO: 2293639 - RNA, 22 nt, Human
auaagccaaaaaaugcuugcuu

SEQ ID NO: 2293640 - RNA, 21 nt, Human
auaagauucauauuuacuucu

SEQ ID NO: 2293641 - RNA, 20 nt, Human
auaagauuagaaugaaaauu

SEQ ID NO: 2293642 - RNA, 20 nt, Human
auaauauuuuuaauuaaaua

SEQ ID NO: 2293643 - RNA, 22 nt, Human
auaaucuggacuccucugucca

SEQ ID NO: 2293644 - RNA, 18 nt, Human
auaaucacaacccuucag

SEQ ID NO: 2293645 - RNA, 14 nt, Human
auaaucuguacaau

SEQ ID NO: 2293646 - RNA, 17 nt, Human
auaaucuguacaaugaa

SEQ ID NO: 2293647 - RNA, 15 nt, Human
auaaucuuauuaggg

SEQ ID NO: 2293648 - RNA, 14 nt, Human
auaaucuucugccu

SEQ ID NO: 2293649 - RNA, 17 nt, Human
auaaucuucugccuucu

SEQ ID NO: 2293650 - RNA, 15 nt, Human
auaaucuucugccuu

SEQ ID NO: 2293651 - RNA, 14 nt, Human
auaauauuuuuaau

SEQ ID NO: 2293652 - RNA, 18 nt, Human
auaauauuuuuaauauau

SEQ ID NO: 2293653 - RNA, 21 nt, Human
auaauaugcugccaaauuuug

SEQ ID NO: 2293654 - RNA, 20 nt, Human
auaauaugcacacagugcuu

SEQ ID NO: 2293655 - RNA, 12 nt, Human
auaauaugcaca

SEQ ID NO: 2293656 - RNA, 15 nt, Human
auaauaugagaauca

SEQ ID NO: 2293657 - RNA, 12 nt, Human
auaauaugagaa

SEQ ID NO: 2293658 - RNA, 22 nt, Human
auaauauauguuuaccuuuuaa

SEQ ID NO: 2293659 - RNA, 15 nt, Human
auaauauauuuucug

SEQ ID NO: 2293660 - RNA, 22 nt, Human
auaauuucccaauuaggaagug

SEQ ID NO: 2293661 - RNA, 18 nt, Human
auaauuucccaauuagga

SEQ ID NO: 2293662 - RNA, 11 nt, Human
auaauuuccca

SEQ ID NO: 2293663 - RNA, 21 nt, Human
auaauuucccaauuaggaagu

SEQ ID NO: 2293664 - RNA, 18 nt, Human
auaauuucuuacuaaaca

SEQ ID NO: 2293665 - RNA, 22 nt, Human
auaauuuguacauauguaaaau

SEQ ID NO: 2293666 - RNA, 19 nt, Human
auaauuuguacauauguaa

SEQ ID NO: 2293667 - RNA, 15 nt, Human
auaauuuuaaacaaa

SEQ ID NO: 2293668 - RNA, 12 nt, Human
auaauuuuaaau

SEQ ID NO: 2293669 - RNA, 13 nt, Human
auaauuuuaaaug

SEQ ID NO: 2293670 - RNA, 21 nt, Human
uuagaugugauuuaauagugu

SEQ ID NO: 2293671 - RNA, 20 nt, Human
uuagaugugauuuaauagug

SEQ ID NO: 2293672 - RNA, 14 nt, Human
auaauuuuaaaugu

SEQ ID NO: 2293673 - RNA, 22 nt, Human
uuagauguuccaguaaucuaau

SEQ ID NO: 2293674 - RNA, 21 nt, Human
uuagauguuccaguaaucuaa

SEQ ID NO: 2293675 - RNA, 20 nt, Human
uuagauguucuaagucuuuc

SEQ ID NO: 2293676 - RNA, 13 nt, Human
uuagauguucuaa

SEQ ID NO: 2293677 - RNA, 22 nt, Human
uuagauguucuaagucuuucca

SEQ ID NO: 2293678 - RNA, 15 nt, Human
uuagauguucucuau

SEQ ID NO: 2293679 - RNA, 19 nt, Human
uuagauguucucuaucauu

SEQ ID NO: 2293680 - RNA, 20 nt, Human
uuagauguucucuaucauuu

SEQ ID NO: 2293681 - RNA, 18 nt, Human
auaauuaugacaguuaua

SEQ ID NO: 2293682 - RNA, 20 nt, Human
auaaucuucugccuucucau

SEQ ID NO: 2293683 - RNA, 20 nt, Human
auaauuaugacaguuauacu

SEQ ID NO: 2293684 - RNA, 21 nt, Human
auaauuaugaguuugcuuaug

SEQ ID NO: 2293685 - RNA, 19 nt, Human
auaauuaugacaguuauac

SEQ ID NO: 2293686 - RNA, 23 nt, Human
auaaucuuauuagggagaaaauu

SEQ ID NO: 2293687 - RNA, 14 nt, Human
auaaucuuucacag

SEQ ID NO: 2293688 - RNA, 16 nt, Human
auaauuauuuauuuaa

SEQ ID NO: 2293689 - RNA, 17 nt, Human
auaauuauuuauuuaau

SEQ ID NO: 2293690 - RNA, 18 nt, Human
auaauuauuuauuuaaua

SEQ ID NO: 2293691 - RNA, 21 nt, Human
auaauuauuuauuuaauaaca

SEQ ID NO: 2293692 - RNA, 23 nt, Human
auaauucacauuguauucagagu

SEQ ID NO: 2293693 - RNA, 20 nt, Human
auaauucaggaagcagcuuu

SEQ ID NO: 2293694 - RNA, 20 nt, Human
uuauaaaaaauggugccuga

SEQ ID NO: 2293695 - RNA, 22 nt, Human
uuauaaaaccaucaaaaauauu

SEQ ID NO: 2293696 - RNA, 12 nt, Human
uuauaaaacuuc

SEQ ID NO: 2293697 - RNA, 23 nt, Human
uuauaaaagaauaaaauugcacu

SEQ ID NO: 2293698 - RNA, 21 nt, Human
uuauaaaaauaaaaaacacug

SEQ ID NO: 2293699 - RNA, 22 nt, Human
uuauaaaaauaaaaaacacugg

SEQ ID NO: 2293700 - RNA, 16 nt, Human
uuauaaaauuaagcaa

SEQ ID NO: 2293701 - RNA, 13 nt, Human
uuauaaaacuucu

SEQ ID NO: 2293702 - RNA, 13 nt, Human
uuauaaaagugau

SEQ ID NO: 2293703 - RNA, 23 nt, Human
uuauaaaccucuaauuuauuuug

SEQ ID NO: 2293704 - RNA, 16 nt, Human
uuauaaaccucuaauu

SEQ ID NO: 2293705 - RNA, 17 nt, Human
uuauaaaccucuaauuu

SEQ ID NO: 2293706 - RNA, 13 nt, Human
uuauaaacuuuac

SEQ ID NO: 2293707 - RNA, 18 nt, Human
uuaguuuuugugaaguuu

SEQ ID NO: 2293708 - RNA, 14 nt, Human
uuaguagagacagg

SEQ ID NO: 2293709 - RNA, 21 nt, Human
uuaguuuuugugaaguuuaau

SEQ ID NO: 2293710 - RNA, 19 nt, Human
uuauaaaaaauggugccug

SEQ ID NO: 2293711 - RNA, 15 nt, Human
uuauaaaaauaaaaa

SEQ ID NO: 2293712 - RNA, 12 nt, Human
uuaguaaugcua

SEQ ID NO: 2293713 - RNA, 19 nt, Human
uuaguacuccccuccuuga

SEQ ID NO: 2293714 - RNA, 13 nt, Human
uuaguagagacag

SEQ ID NO: 2293715 - RNA, 22 nt, Human
uuaguaaugcuacgugugauuu

SEQ ID NO: 2293716 - RNA, 20 nt, Human
uuaguaaugcuacgugugau

SEQ ID NO: 2293717 - RNA, 21 nt, Human
uuaguaaugcuacgugugauu

SEQ ID NO: 2293718 - RNA, 18 nt, Human
uuagguuggcaaaaaggc

SEQ ID NO: 2293719 - RNA, 13 nt, Human
uuaguaaucauau

SEQ ID NO: 2293720 - RNA, 20 nt, Human
uuaguaaggcuguguacacu

SEQ ID NO: 2293721 - RNA, 14 nt, Human
uuaguaaggcugug

SEQ ID NO: 2293722 - RNA, 14 nt, Human
uuaguaaucauauu

SEQ ID NO: 2293723 - RNA, 14 nt, Human
uuaggucucuuccc

SEQ ID NO: 2293724 - RNA, 19 nt, Human
uuagguguugauuuucugu

SEQ ID NO: 2293725 - RNA, 20 nt, Human
uuagguuaaaaaaaggcauu

SEQ ID NO: 2293726 - RNA, 13 nt, Human
uuaggucaagaag

SEQ ID NO: 2293727 - RNA, 19 nt, Human
uuaggugugggggaagcac

SEQ ID NO: 2293728 - RNA, 12 nt, Human
uuagggaggggu

SEQ ID NO: 2293729 - RNA, 21 nt, Human
uuagggagagucauauuuuga

SEQ ID NO: 2293730 - RNA, 23 nt, Human
uuagggagagucauauuuugauu

SEQ ID NO: 2293731 - RNA, 18 nt, Human
uuagggagagucauauuu

SEQ ID NO: 2293732 - RNA, 15 nt, Human
uuagggagagaagau

SEQ ID NO: 2293733 - RNA, 23 nt, Human
uuagauguucucuaucauuuaau

SEQ ID NO: 2293734 - RNA, 21 nt, Human
uuagauguucucuaucauuua

SEQ ID NO: 2293735 - RNA, 22 nt, Human
uuagauguucucuaucauuuaa

SEQ ID NO: 2293736 - RNA, 14 nt, Human
uuagggcagcuugc

SEQ ID NO: 2293737 - RNA, 15 nt, Human
uuagggccaggcagg

SEQ ID NO: 2293738 - RNA, 15 nt, Human
uuaggggaacugggu

SEQ ID NO: 2293739 - RNA, 17 nt, Human
uuagggcaccagggguu

SEQ ID NO: 2293740 - RNA, 12 nt, Human
uuagggcagcuu

SEQ ID NO: 2293741 - RNA, 14 nt, Human
uuaggguuaugauu

SEQ ID NO: 2293742 - RNA, 16 nt, Human
uuaggguuaugauuaa

SEQ ID NO: 2293743 - RNA, 15 nt, Human
uuagaauaaaauugu

SEQ ID NO: 2293744 - RNA, 13 nt, Human
uuagaaguguuaa

SEQ ID NO: 2293745 - RNA, 14 nt, Human
uuagaauaaaauug

SEQ ID NO: 2293746 - RNA, 16 nt, Human
uuagaagucacacagu

SEQ ID NO: 2293747 - RNA, 13 nt, Human
uuacuguaccugu

SEQ ID NO: 2293748 - RNA, 22 nt, Human
uuacugucugguuuuaacaauu

SEQ ID NO: 2293749 - RNA, 15 nt, Human
uuacuguaauuccuc

SEQ ID NO: 2293750 - RNA, 23 nt, Human
uuacugucaaggcugcuuagaau

SEQ ID NO: 2293751 - RNA, 18 nt, Human
uuagaagguucucuccuc

SEQ ID NO: 2293752 - RNA, 23 nt, Human
uuacugucugguuuuaacaauuu

SEQ ID NO: 2293753 - RNA, 21 nt, Human
uuagaaucagccuugaaacau

SEQ ID NO: 2293754 - RNA, 18 nt, Human
uuagaauccaaacuugga

SEQ ID NO: 2293755 - RNA, 12 nt, Human
uuagaaugaaaa

SEQ ID NO: 2293756 - RNA, 22 nt, Human
uuagaauccaaacuuggauuuu

SEQ ID NO: 2293757 - RNA, 12 nt, Human
uuagaauuauuu

SEQ ID NO: 2293758 - RNA, 13 nt, Human
uuagaaugaaaau

SEQ ID NO: 2293759 - RNA, 13 nt, Human
uuagaauuauuua

SEQ ID NO: 2293760 - RNA, 15 nt, Human
uuagaauuauuuaaa

SEQ ID NO: 2293761 - RNA, 16 nt, Human
uuagaauuauuuaaac

SEQ ID NO: 2293762 - RNA, 16 nt, Human
uuagaauuaaaaguug

SEQ ID NO: 2293763 - RNA, 18 nt, Human
uuagaauuccuucagggu

SEQ ID NO: 2293764 - RNA, 18 nt, Human
auaacuuuuuuuuaaguu

SEQ ID NO: 2293765 - RNA, 21 nt, Human
auaagaaaagauguagauuua

SEQ ID NO: 2293766 - RNA, 18 nt, Human
auaagaaaagauguagau

SEQ ID NO: 2293767 - RNA, 12 nt, Human
auaagaaaagau

SEQ ID NO: 2293768 - RNA, 11 nt, Human
auaagaaaaga

SEQ ID NO: 2293769 - RNA, 15 nt, Human
auaagaaaaaucaug

SEQ ID NO: 2293770 - RNA, 17 nt, Human
auaagaaaaaucauguu

SEQ ID NO: 2293771 - RNA, 14 nt, Human
auaagauucauauu

SEQ ID NO: 2293772 - RNA, 13 nt, Human
auaagauuagaau

SEQ ID NO: 2293773 - RNA, 17 nt, Human
auaagauuagaaugaaa

SEQ ID NO: 2293774 - RNA, 22 nt, Human
auaagaaaagauguagauuuau

SEQ ID NO: 2293775 - RNA, 16 nt, Human
auaagaaaaaucaugu

SEQ ID NO: 2293776 - RNA, 18 nt, Human
auaagauauuuuucauga

SEQ ID NO: 2293777 - RNA, 22 nt, Human
auaagaaagugcgaguccucca

SEQ ID NO: 2293778 - RNA, 22 nt, Human
uuacugcuaaguauuucccagc

SEQ ID NO: 2293779 - RNA, 23 nt, Human
uuacugcuaaguauuucccagca

SEQ ID NO: 2293780 - RNA, 23 nt, Human
uuacuguacagacagaaaaaacu

SEQ ID NO: 2293781 - RNA, 12 nt, Human
uuacuguacaug

SEQ ID NO: 2293782 - RNA, 23 nt, Human
uuacuguacaugaaaacacauuu

SEQ ID NO: 2293783 - RNA, 22 nt, Human
uuacuguacaugaaaacacauu

SEQ ID NO: 2293784 - RNA, 14 nt, Human
uuacuguacaugaa

SEQ ID NO: 2293785 - RNA, 13 nt, Human
uuacuguacauga

SEQ ID NO: 2293786 - RNA, 17 nt, Human
uuacucaugaucuugug

SEQ ID NO: 2293787 - RNA, 21 nt, Human
uuacucauuuuuuuaauuuau

SEQ ID NO: 2293788 - RNA, 17 nt, Human
uuacucaggaagaacac

SEQ ID NO: 2293789 - RNA, 14 nt, Human
uuacucaggaagaa

SEQ ID NO: 2293790 - RNA, 18 nt, Human
uuacucauagcacuuccc

SEQ ID NO: 2293791 - RNA, 22 nt, Human
uuacucagcccugggccccacc

SEQ ID NO: 2293792 - RNA, 14 nt, Human
uuacucagcccugg

SEQ ID NO: 2293793 - RNA, 13 nt, Human
uuacucagcccug

SEQ ID NO: 2293794 - RNA, 15 nt, Human
uuaccauaugugcuu

SEQ ID NO: 2293795 - RNA, 11 nt, Human
uuaccaugaga

SEQ ID NO: 2293796 - RNA, 20 nt, Human
uuaccaugagaagagggccu

SEQ ID NO: 2293797 - RNA, 21 nt, Human
uuacugccaaagggaaauauc

SEQ ID NO: 2293798 - RNA, 11 nt, Human
uuacugccacu

SEQ ID NO: 2293799 - RNA, 17 nt, Human
uuacugcuaaguauuuc

SEQ ID NO: 2293800 - RNA, 20 nt, Human
uuacugcuaaguauuuccca

SEQ ID NO: 2293801 - RNA, 21 nt, Human
uuacugcuaaguauuucccag

SEQ ID NO: 2293802 - RNA, 22 nt, Human
uuacugcagccuuugccucccc

SEQ ID NO: 2293803 - RNA, 15 nt, Human
uuacugcagcuuugu

SEQ ID NO: 2293804 - RNA, 20 nt, Human
uuacuccccuugagcugaga

SEQ ID NO: 2293805 - RNA, 11 nt, Human
uuacuccccuu

SEQ ID NO: 2293806 - RNA, 15 nt, Human
uuacaaacauguggu

SEQ ID NO: 2293807 - RNA, 13 nt, Human
uuaauuuuuccua

SEQ ID NO: 2293808 - RNA, 12 nt, Human
uuacaaacaugu

SEQ ID NO: 2293809 - RNA, 13 nt, Human
uuacaaagugugu

SEQ ID NO: 2293810 - RNA, 14 nt, Human
uuacaaagugugua

SEQ ID NO: 2293811 - RNA, 15 nt, Human
uuacaaaguguguau

SEQ ID NO: 2293812 - RNA, 16 nt, Human
uuacaaaguguguauu

SEQ ID NO: 2293813 - RNA, 17 nt, Human
uuacaaaguguguauua

SEQ ID NO: 2293814 - RNA, 18 nt, Human
uuacaaaguguguauuaa

SEQ ID NO: 2293815 - RNA, 22 nt, Human
uuacaaaguguguauuaaaaaa

SEQ ID NO: 2293816 - RNA, 14 nt, Human
auaaaucgcuuuug

SEQ ID NO: 2293817 - RNA, 21 nt, Human
auaaaucgcuuuugauaauca

SEQ ID NO: 2293818 - RNA, 19 nt, Human
auaaaucgcuuuugauaau

SEQ ID NO: 2293819 - RNA, 16 nt, Human
auaaaucgcuuuugau

SEQ ID NO: 2293820 - RNA, 19 nt, Human
auaaaucugacccagugcc

SEQ ID NO: 2293821 - RNA, 18 nt, Human
auaaaucugacccagugc

SEQ ID NO: 2293822 - RNA, 16 nt, Human
auaaaucugacccagu

SEQ ID NO: 2293823 - RNA, 15 nt, Human
auaaaucugacccag

SEQ ID NO: 2293824 - RNA, 21 nt, Human
auaaauucuauaggaacauau

SEQ ID NO: 2293825 - RNA, 16 nt, Human
auaaauucuauaggaa

SEQ ID NO: 2293826 - RNA, 13 nt, Human
auaaaugcuuuua

SEQ ID NO: 2293827 - RNA, 13 nt, Human
auaaauggcuggu

SEQ ID NO: 2293828 - RNA, 16 nt, Human
auaaauggcugguuuu

SEQ ID NO: 2293829 - RNA, 23 nt, Human
auaaaugcaauauuaaugccuuu

SEQ ID NO: 2293830 - RNA, 15 nt, Human
auaaaugcaauauua

SEQ ID NO: 2293831 - RNA, 19 nt, Human
auaaaugcuauuuuuuauu

SEQ ID NO: 2293832 - RNA, 21 nt, Human
auaaaugcuauuuuuuauuuu

SEQ ID NO: 2293833 - RNA, 23 nt, Human
auaaaugcuauuuuuuauuuuac

SEQ ID NO: 2293834 - RNA, 21 nt, Human
auaaaugcuuuuaaaaaucua

SEQ ID NO: 2293835 - RNA, 21 nt, Human
auaaauuccucuuugcuuugc

SEQ ID NO: 2293836 - RNA, 13 nt, Human
auaaauugcuccu

SEQ ID NO: 2293837 - RNA, 16 nt, Human
auaaauugcuccuuga

SEQ ID NO: 2293838 - RNA, 22 nt, Human
auaaaugcaauauguauuaaua

SEQ ID NO: 2293839 - RNA, 20 nt, Human
auaaaugcaauauguauuaa

SEQ ID NO: 2293840 - RNA, 18 nt, Human
auaaaugcaauauguauu

SEQ ID NO: 2293841 - RNA, 17 nt, Human
auaaaugcaauauguau

SEQ ID NO: 2293842 - RNA, 16 nt, Human
auaaaugauucuuagu

SEQ ID NO: 2293843 - RNA, 18 nt, Human
auaaaugauucuuaguga

SEQ ID NO: 2293844 - RNA, 13 nt, Human
uuacaguguuccg

SEQ ID NO: 2293845 - RNA, 13 nt, Human
uuacaguaaauaa

SEQ ID NO: 2293846 - RNA, 15 nt, Human
uuacaguaaauaaau

SEQ ID NO: 2293847 - RNA, 16 nt, Human
uuacaguaaauaaauu

SEQ ID NO: 2293848 - RNA, 17 nt, Human
uuacaguaaauaaauug

SEQ ID NO: 2293849 - RNA, 18 nt, Human
uuacaguaaauaaauugu

SEQ ID NO: 2293850 - RNA, 22 nt, Human
uuacaguaaauaaauuguuuga

SEQ ID NO: 2293851 - RNA, 17 nt, Human
uuacaguaggagcccag

SEQ ID NO: 2293852 - RNA, 23 nt, Human
uuaccagccuccguauuucagac

SEQ ID NO: 2293853 - RNA, 21 nt, Human
uuaccagccuccguauuucag

SEQ ID NO: 2293854 - RNA, 20 nt, Human
uuaccagccuccguauuuca

SEQ ID NO: 2293855 - RNA, 22 nt, Human
uuaccagccuccguauuucaga

SEQ ID NO: 2293856 - RNA, 19 nt, Human
uuaccagcagagcaccuua

SEQ ID NO: 2293857 - RNA, 18 nt, Human
uuacaguuucaaaaacug

SEQ ID NO: 2293858 - RNA, 18 nt, Human
uuacagggagcugggaca

SEQ ID NO: 2293859 - RNA, 21 nt, Human
uuacagggagccuccugccca

SEQ ID NO: 2293860 - RNA, 18 nt, Human
uuacagguggacacacaa

SEQ ID NO: 2293861 - RNA, 14 nt, Human
uuacaggugugaac

SEQ ID NO: 2293862 - RNA, 20 nt, Human
uuacagggaugagccaccgc

SEQ ID NO: 2293863 - RNA, 21 nt, Human
auaacucugcacuacuccucu

SEQ ID NO: 2293864 - RNA, 19 nt, Human
auaacucugcacuacuccu

SEQ ID NO: 2293865 - RNA, 20 nt, Human
uuacagggagccuccugccc

SEQ ID NO: 2293866 - RNA, 12 nt, Human
auaacuccuucu

SEQ ID NO: 2293867 - RNA, 20 nt, Human
auaacuccuucuuguaguag

SEQ ID NO: 2293868 - RNA, 11 nt, Human
auaacucugca

SEQ ID NO: 2293869 - RNA, 19 nt, Human
auaacucaucauaaaauaa

SEQ ID NO: 2293870 - RNA, 18 nt, Human
auaacucaucauaaaaua

SEQ ID NO: 2293871 - RNA, 17 nt, Human
auaacucaucauaaaau

SEQ ID NO: 2293872 - RNA, 16 nt, Human
auaacucaucauaaaa

SEQ ID NO: 2293873 - RNA, 15 nt, Human
auaacucaucauaaa

SEQ ID NO: 2293874 - RNA, 18 nt, Human
auaaauugcuccuugaca

SEQ ID NO: 2293875 - RNA, 19 nt, Human
auaaauuguaauuguaaag

SEQ ID NO: 2293876 - RNA, 13 nt, Human
auaaauuguauau

SEQ ID NO: 2293877 - RNA, 19 nt, Human
auaacuaguguugcuugga

SEQ ID NO: 2293878 - RNA, 16 nt, Human
auaacuaguguugcuu

SEQ ID NO: 2293879 - RNA, 15 nt, Human
auaacuauguugaua

SEQ ID NO: 2293880 - RNA, 21 nt, Human
aguuuaugucuaaagagcuuu

SEQ ID NO: 2293881 - RNA, 15 nt, Human
aguuuaugucuaaag

SEQ ID NO: 2293882 - RNA, 16 nt, Human
aguuuaugucuaaaga

SEQ ID NO: 2293883 - RNA, 14 nt, Human
aguuuaucauucaa

SEQ ID NO: 2293884 - RNA, 15 nt, Human
aguuuaucauucaag

SEQ ID NO: 2293885 - RNA, 16 nt, Human
aguuuaucauucaagu

SEQ ID NO: 2293886 - RNA, 17 nt, Human
aguuuaucauucaagug

SEQ ID NO: 2293887 - RNA, 19 nt, Human
uuaacacugcuuguguuuu

SEQ ID NO: 2293888 - RNA, 16 nt, Human
uuaacagaaauguaca

SEQ ID NO: 2293889 - RNA, 12 nt, Human
uuaacagaaaug

SEQ ID NO: 2293890 - RNA, 14 nt, Human
uuaacagaaaugua

SEQ ID NO: 2293891 - RNA, 13 nt, Human
uuaacagaaaugu

SEQ ID NO: 2293892 - RNA, 15 nt, Human
uuaaaguucuguaaa

SEQ ID NO: 2293893 - RNA, 23 nt, Human
uuaaauuuuacccuuuagacugu

SEQ ID NO: 2293894 - RNA, 16 nt, Human
uuaaauuuuacccuuu

SEQ ID NO: 2293895 - RNA, 20 nt, Human
uuaaauuuuacccuuuagac

SEQ ID NO: 2293896 - RNA, 15 nt, Human
uuaaauuuugaguuc

SEQ ID NO: 2293897 - RNA, 14 nt, Human
uuaaauuuuguguc

SEQ ID NO: 2293898 - RNA, 16 nt, Human
uuaaauuuugugucuc

SEQ ID NO: 2293899 - RNA, 20 nt, Human
uuaaauuuugaguucuacau

SEQ ID NO: 2293900 - RNA, 11 nt, Human
uuaaauaaaag

SEQ ID NO: 2293901 - RNA, 13 nt, Human
uuaaauaaaagaa

SEQ ID NO: 2293902 - RNA, 18 nt, Human
aguuuuaacuagaauuua

SEQ ID NO: 2293903 - RNA, 16 nt, Human
aguuuuaauccagaau

SEQ ID NO: 2293904 - RNA, 16 nt, Human
aguuuuaaaaaaauaa

SEQ ID NO: 2293905 - RNA, 22 nt, Human
aguuuuaaaaaaauaaaacauu

SEQ ID NO: 2293906 - RNA, 23 nt, Human
aguuuuaaaaaaauaaaacauuu

SEQ ID NO: 2293907 - RNA, 19 nt, Human
aguuuguguguugucuuga

SEQ ID NO: 2293908 - RNA, 20 nt, Human
aguuuguguguugucuugaa

SEQ ID NO: 2293909 - RNA, 14 nt, Human
aguuuguuuacaca

SEQ ID NO: 2293910 - RNA, 15 nt, Human
aguuuguugaaacac

SEQ ID NO: 2293911 - RNA, 22 nt, Human
aguuuguuaguaugaggcauuu

SEQ ID NO: 2293912 - RNA, 22 nt, Human
aguuugugugucuuaauuauua

SEQ ID NO: 2293913 - RNA, 14 nt, Human
aguuuguguguugu

SEQ ID NO: 2293914 - RNA, 21 nt, Human
aguuuguguguugucucuuga

SEQ ID NO: 2293915 - RNA, 16 nt, Human
aguuuguguguugucu

SEQ ID NO: 2293916 - RNA, 18 nt, Human
aguuuguguguugucuug

SEQ ID NO: 2293917 - RNA, 19 nt, Human
aguuucugccgcagcccug

SEQ ID NO: 2293918 - RNA, 14 nt, Human
aguuugugugucuu

SEQ ID NO: 2293919 - RNA, 15 nt, Human
aguuugugugucuua

SEQ ID NO: 2293920 - RNA, 16 nt, Human
aguuugugugucuuaa

SEQ ID NO: 2293921 - RNA, 14 nt, Human
aguuucucuuuuca

SEQ ID NO: 2293922 - RNA, 13 nt, Human
aguuucucagcuc

SEQ ID NO: 2293923 - RNA, 15 nt, Human
aguuucugccgcagc

SEQ ID NO: 2293924 - RNA, 12 nt, Human
aguuucucagcu

SEQ ID NO: 2293925 - RNA, 14 nt, Human
aguuucucagcucc

SEQ ID NO: 2293926 - RNA, 22 nt, Human
aguuuauugacaauaauuucag

SEQ ID NO: 2293927 - RNA, 22 nt, Human
aguuuauuuccaaauaaaauga

SEQ ID NO: 2293928 - RNA, 16 nt, Human
aguuucuagcuagaaa

SEQ ID NO: 2293929 - RNA, 21 nt, Human
aguuucuagcuagaaauauga

SEQ ID NO: 2293930 - RNA, 15 nt, Human
aguuucucagauccu

SEQ ID NO: 2293931 - RNA, 18 nt, Human
aguuucucagauccuugu

SEQ ID NO: 2293932 - RNA, 22 nt, Human
aguuucucagauccuuguuuca

SEQ ID NO: 2293933 - RNA, 23 nt, Human
aguuucucagauccuuguuucaa

SEQ ID NO: 2293934 - RNA, 11 nt, Human
aguuucucagc

SEQ ID NO: 2293935 - RNA, 23 nt, Human
uuaaaauguauucuuaaauucau

SEQ ID NO: 2293936 - RNA, 20 nt, Human
uuaaacauugguucuuguau

SEQ ID NO: 2293937 - RNA, 18 nt, Human
uuaaacauugguucuugu

SEQ ID NO: 2293938 - RNA, 22 nt, Human
uuaaacauugguucuuguauua

SEQ ID NO: 2293939 - RNA, 19 nt, Human
uuaaaccauaaaaagcuga

SEQ ID NO: 2293940 - RNA, 18 nt, Human
uuaaaaugauuguaaaau

SEQ ID NO: 2293941 - RNA, 16 nt, Human
uuaaaaugauuguaaa

SEQ ID NO: 2293942 - RNA, 16 nt, Human
uuaaaaugcaacaugu

SEQ ID NO: 2293943 - RNA, 12 nt, Human
uuaaaaugagaa

SEQ ID NO: 2293944 - RNA, 19 nt, Human
uuaaaaugagaaaucuaaa

SEQ ID NO: 2293945 - RNA, 15 nt, Human
uuaaaaaugcaaauc

SEQ ID NO: 2293946 - RNA, 12 nt, Human
uuaaaauccuca

SEQ ID NO: 2293947 - RNA, 14 nt, Human
uuaaaaucuuaaac

SEQ ID NO: 2293948 - RNA, 11 nt, Human
uuaaaaucuua

SEQ ID NO: 2293949 - RNA, 13 nt, Human
uuaaaauccucaa

SEQ ID NO: 2293950 - RNA, 22 nt, Human
uuaaaaucauuucugcaucagc

SEQ ID NO: 2293951 - RNA, 12 nt, Human
uuaaaaaugcaa

SEQ ID NO: 2293952 - RNA, 20 nt, Human
uuaaaaaucucaaauuucua

SEQ ID NO: 2293953 - RNA, 19 nt, Human
uuaaaaaucucaaauuucu

SEQ ID NO: 2293954 - RNA, 16 nt, Human
uuaaaaaauggaacau

SEQ ID NO: 2293955 - RNA, 15 nt, Human
aguuaggaaauaaaa

SEQ ID NO: 2293956 - RNA, 15 nt, Human
aguuuacauuguaaa

SEQ ID NO: 2293957 - RNA, 17 nt, Human
aguuuacauuguaaaua

SEQ ID NO: 2293958 - RNA, 22 nt, Human
aguuagcucaggaggcuuggaa

SEQ ID NO: 2293959 - RNA, 19 nt, Human
aguuagcucaggaggcuug

SEQ ID NO: 2293960 - RNA, 12 nt, Human
aguuaggaaaua

SEQ ID NO: 2293961 - RNA, 14 nt, Human
aguuaggaaauaaa

SEQ ID NO: 2293962 - RNA, 13 nt, Human
aguuaggaaauaa

SEQ ID NO: 2293963 - RNA, 13 nt, Human
aguuuacauugua

SEQ ID NO: 2293964 - RNA, 20 nt, Human
aguuuaaauuguaauaggcg

SEQ ID NO: 2293965 - RNA, 17 nt, Human
aguuuaaauuguaauag

SEQ ID NO: 2293966 - RNA, 19 nt, Human
aguuuagaggaaaaaaaug

SEQ ID NO: 2293967 - RNA, 21 nt, Human
aguuuagaggaaaaaaaugac

SEQ ID NO: 2293968 - RNA, 16 nt, Human
aguuuagcuggaaaag

SEQ ID NO: 2293969 - RNA, 19 nt, Human
uuaaaaaagaaacauuugg

SEQ ID NO: 2293970 - RNA, 14 nt, Human
aguuuaccuuguau

SEQ ID NO: 2293971 - RNA, 20 nt, Human
aguuuaccuuguauacugua

SEQ ID NO: 2293972 - RNA, 12 nt, Human
aguuuaacacaa

SEQ ID NO: 2293973 - RNA, 16 nt, Human
aguuuaccucuuuaaa

SEQ ID NO: 2293974 - RNA, 20 nt, Human
aguuuaccucuuuaaaaaca

SEQ ID NO: 2293975 - RNA, 15 nt, Human
aguuuacuauuuuac

SEQ ID NO: 2293976 - RNA, 14 nt, Human
aguuuacuauuuua

SEQ ID NO: 2293977 - RNA, 16 nt, Human
aguuuacuauuuuacu

SEQ ID NO: 2293978 - RNA, 14 nt, Human
aguuuagaggaaaa

SEQ ID NO: 2293979 - RNA, 15 nt, Human
aguuuagcuggaaaa

SEQ ID NO: 2293980 - RNA, 17 nt, Human
uuaaucuucaguuuuau

SEQ ID NO: 2293981 - RNA, 15 nt, Human
uuaaucuucaguuuu

SEQ ID NO: 2293982 - RNA, 13 nt, Human
uuaaucuuuaauu

SEQ ID NO: 2293983 - RNA, 22 nt, Human
uuaaucuucaguuuuaucuuua

SEQ ID NO: 2293984 - RNA, 14 nt, Human
uuaaucuuuccuga

SEQ ID NO: 2293985 - RNA, 17 nt, Human
uuaaucuuucuuuaccu

SEQ ID NO: 2293986 - RNA, 16 nt, Human
uuaaucuuuucacaaa

SEQ ID NO: 2293987 - RNA, 21 nt, Human
uuaaucuuucuuuaccugaga

SEQ ID NO: 2293988 - RNA, 23 nt, Human
uuaaucuuucuuuaccugagacc

SEQ ID NO: 2293989 - RNA, 17 nt, Human
uuaaucuuuaauuuuac

SEQ ID NO: 2293990 - RNA, 18 nt, Human
uuaauuuaugaguuuuug

SEQ ID NO: 2293991 - RNA, 15 nt, Human
uuaauuuaugaguuu

SEQ ID NO: 2293992 - RNA, 24 nt, Human
uuaaucuuucuuuaccugagacca

SEQ ID NO: 2293993 - RNA, 20 nt, Human
uuaauuuaugaguuuuugau

SEQ ID NO: 2293994 - RNA, 19 nt, Human
uuaauuuauuauugaaauu

SEQ ID NO: 2293995 - RNA, 14 nt, Human
uuaauuuauuuuug

SEQ ID NO: 2293996 - RNA, 20 nt, Human
uuaauuugauaucacagucu

SEQ ID NO: 2293997 - RNA, 13 nt, Human
uuaauuuuccugg

SEQ ID NO: 2293998 - RNA, 13 nt, Human
uuaauuuuguauu

SEQ ID NO: 2293999 - RNA, 23 nt, Human
uuaauuuugguuguauucuuuga

SEQ ID NO: 2294000 - RNA, 18 nt, Human
uuaauuuugguuguauuc

SEQ ID NO: 2294001 - RNA, 20 nt, Human
uuaauuuugguuguauucuu

SEQ ID NO: 2294002 - RNA, 13 nt, Human
uuaauuuucagua

SEQ ID NO: 2294003 - RNA, 17 nt, Human
uuaauuuugguuguauu

SEQ ID NO: 2294004 - RNA, 22 nt, Human
uuaauuuugacacuauaucugu

SEQ ID NO: 2294005 - RNA, 18 nt, Human
uuaauuuuguauuuucca

SEQ ID NO: 2294006 - RNA, 14 nt, Human
uuaauuuuguauuu

SEQ ID NO: 2294007 - RNA, 15 nt, Human
uuaauuuuguauuuu

SEQ ID NO: 2294008 - RNA, 16 nt, Human
uuaauuuuguauuuuc

SEQ ID NO: 2294009 - RNA, 17 nt, Human
uuaauuuuguauuuucc

SEQ ID NO: 2294010 - RNA, 13 nt, Human
uuaagacguguuu

SEQ ID NO: 2294011 - RNA, 16 nt, Human
uuaagacguguuugug

SEQ ID NO: 2294012 - RNA, 17 nt, Human
uuaagacguguuugugu

SEQ ID NO: 2294013 - RNA, 21 nt, Human
uuaagacugagcaccugcuuc

SEQ ID NO: 2294014 - RNA, 22 nt, Human
uuaagacgaaacauuuguucua

SEQ ID NO: 2294015 - RNA, 16 nt, Human
uuaaguuguuugcaug

SEQ ID NO: 2294016 - RNA, 15 nt, Human
uuaaguuucaggaua

SEQ ID NO: 2294017 - RNA, 22 nt, Human
uuaagagccauauaaguuugaa

SEQ ID NO: 2294018 - RNA, 19 nt, Human
uuaaguuguuugcauguga

SEQ ID NO: 2294019 - RNA, 11 nt, Human
uuaaguuucuc

SEQ ID NO: 2294020 - RNA, 12 nt, Human
uuaaguuucuca

SEQ ID NO: 2294021 - RNA, 15 nt, Human
uuaaguuucucagcu

SEQ ID NO: 2294022 - RNA, 20 nt, Human
uuaauaaaaaaacaaucauu

SEQ ID NO: 2294023 - RNA, 16 nt, Human
uuaauaaaaguacaug

SEQ ID NO: 2294024 - RNA, 15 nt, Human
uuaauaaaaaggcac

SEQ ID NO: 2294025 - RNA, 14 nt, Human
uuaauaaaaaggca

SEQ ID NO: 2294026 - RNA, 11 nt, Human
uuaauaaaaag

SEQ ID NO: 2294027 - RNA, 14 nt, Human
uuaauccuucuagu

SEQ ID NO: 2294028 - RNA, 20 nt, Human
uuaauccuucuaguuuccca

SEQ ID NO: 2294029 - RNA, 15 nt, Human
uuaaucuaaauggaa

SEQ ID NO: 2294030 - RNA, 18 nt, Human
uuaauccagaauaacuag

SEQ ID NO: 2294031 - RNA, 20 nt, Human
uuaauccagaauaacuagca

SEQ ID NO: 2294032 - RNA, 12 nt, Human
uuaauccaaugg

SEQ ID NO: 2294033 - RNA, 18 nt, Human
uuaaucaucuauaaagaa

SEQ ID NO: 2294034 - RNA, 21 nt, Human
uuaaucaucuauaaagaagaa

SEQ ID NO: 2294035 - RNA, 22 nt, Human
uuaaucauuuugccucuuuucu

SEQ ID NO: 2294036 - RNA, 17 nt, Human
uuaauccccaguaaaau

SEQ ID NO: 2294037 - RNA, 23 nt, Human
uuaauccagaauaacuagcacca

SEQ ID NO: 2294038 - RNA, 18 nt, Human
uuaauccccaguaaaauu

SEQ ID NO: 2294039 - RNA, 21 nt, Human
uuaauccccaguaaaauugcc

SEQ ID NO: 2294040 - RNA, 16 nt, Human
uuaaucagacaaagua

SEQ ID NO: 2294041 - RNA, 20 nt, Human
uuaaucagguccucagagaa

SEQ ID NO: 2294042 - RNA, 15 nt, Human
uuaaucaucuauaaa

SEQ ID NO: 2294043 - RNA, 17 nt, Human
uuaaucacuauuguucc

SEQ ID NO: 2294044 - RNA, 16 nt, Human
uuaauaaaauaauucu

SEQ ID NO: 2294045 - RNA, 20 nt, Human
uuaauaaaauaauucuaaag

SEQ ID NO: 2294046 - RNA, 16 nt, Human
uuaaucaauuaauuuu

SEQ ID NO: 2294047 - RNA, 17 nt, Human
uuaaucaauuaauuuuu

SEQ ID NO: 2294048 - RNA, 18 nt, Human
uuaaucaauuuaaaccca

SEQ ID NO: 2294049 - RNA, 20 nt, Human
uuaaucaauuuaaacccauu

SEQ ID NO: 2294050 - RNA, 13 nt, Human
auaaaaaaaagaa

SEQ ID NO: 2294051 - RNA, 19 nt, Human
auaaaagccuguuuaagag

SEQ ID NO: 2294052 - RNA, 23 nt, Human
aguuuuuuuuuauacacuguaau

SEQ ID NO: 2294053 - RNA, 20 nt, Human
auaaaagccuguuuaagaga

SEQ ID NO: 2294054 - RNA, 17 nt, Human
auaaaaggaagccaaag

SEQ ID NO: 2294055 - RNA, 15 nt, Human
auaaaaggaagccaa

SEQ ID NO: 2294056 - RNA, 12 nt, Human
auaaaaggaaaa

SEQ ID NO: 2294057 - RNA, 15 nt, Human
auaaaagcuauggug

SEQ ID NO: 2294058 - RNA, 22 nt, Human
uuaacuuuuauaaacuuuaccu

SEQ ID NO: 2294059 - RNA, 23 nt, Human
uuaacuuuuauaaacuuuaccuu

SEQ ID NO: 2294060 - RNA, 20 nt, Human
auaaaaggaagccaaagagu

SEQ ID NO: 2294061 - RNA, 19 nt, Human
auaaaaggaagccaaagag

SEQ ID NO: 2294062 - RNA, 19 nt, Human
auaaaaggcaaauguguac

SEQ ID NO: 2294063 - RNA, 20 nt, Human
auaaaaggcaaauguguaca

SEQ ID NO: 2294064 - RNA, 18 nt, Human
uuaagacaugauuuccuu

SEQ ID NO: 2294065 - RNA, 23 nt, Human
uuaagacauuuuuggaaggggac

SEQ ID NO: 2294066 - RNA, 18 nt, Human
uuaagacauuuuuggaag

SEQ ID NO: 2294067 - RNA, 16 nt, Human
uuaagacaugauuucc

SEQ ID NO: 2294068 - RNA, 19 nt, Human
uuaagacgaaacauuuguu

SEQ ID NO: 2294069 - RNA, 18 nt, Human
uuaagaccuggcagcucu

SEQ ID NO: 2294070 - RNA, 14 nt, Human
uuaagaccuggcag

SEQ ID NO: 2294071 - RNA, 11 nt, Human
uuaagaccugg

SEQ ID NO: 2294072 - RNA, 20 nt, Human
uuaagaaaaaauaacacaca

SEQ ID NO: 2294073 - RNA, 21 nt, Human
uuaagaaaaaauaacacacau

SEQ ID NO: 2294074 - RNA, 18 nt, Human
uuaagaaggcaaaaaugu

SEQ ID NO: 2294075 - RNA, 22 nt, Human
uuaagaaugaaauacuguuuga

SEQ ID NO: 2294076 - RNA, 20 nt, Human
uuaagaaugaaauacuguuu

SEQ ID NO: 2294077 - RNA, 14 nt, Human
uuaagaaugaaaua

SEQ ID NO: 2294078 - RNA, 20 nt, Human
uuaagacacugaaaaaucua

SEQ ID NO: 2294079 - RNA, 22 nt, Human
aguuuuucccagcuacaccuuu

SEQ ID NO: 2294080 - RNA, 23 nt, Human
aguuuuucccagcuacaccuuuc

SEQ ID NO: 2294081 - RNA, 16 nt, Human
aguuuuugauagcuuu

SEQ ID NO: 2294082 - RNA, 16 nt, Human
aguuuuucuguauuuu

SEQ ID NO: 2294083 - RNA, 12 nt, Human
aguuuuucuguc

SEQ ID NO: 2294084 - RNA, 13 nt, Human
aguuuuucuguca

SEQ ID NO: 2294085 - RNA, 20 nt, Human
aguuuuuauugcuuguugga

SEQ ID NO: 2294086 - RNA, 17 nt, Human
aguuuuucagaaagcau

SEQ ID NO: 2294087 - RNA, 22 nt, Human
aguuuuucagaguggaaugcuu

SEQ ID NO: 2294088 - RNA, 17 nt, Human
aguuuuuaaaauaucuu

SEQ ID NO: 2294089 - RNA, 18 nt, Human
aguuuuguuuuaaaauua

SEQ ID NO: 2294090 - RNA, 18 nt, Human
aguuuuuucucuugggcu

SEQ ID NO: 2294091 - RNA, 17 nt, Human
aguuuuuucucuugggc

SEQ ID NO: 2294092 - RNA, 15 nt, Human
aguuuuuuuuauaca

SEQ ID NO: 2294093 - RNA, 16 nt, Human
aguuuuuguaauuuau

SEQ ID NO: 2294094 - RNA, 12 nt, Human
aguuuuuguacu

SEQ ID NO: 2294095 - RNA, 18 nt, Human
aguuuuuguacuguaaag

SEQ ID NO: 2294096 - RNA, 19 nt, Human
aguuuuuguacuguaaaga

SEQ ID NO: 2294097 - RNA, 12 nt, Human
aguuuuuguucu

SEQ ID NO: 2294098 - RNA, 20 nt, Human
aguuuuuguucuuaauugca

SEQ ID NO: 2294099 - RNA, 15 nt, Human
aguuuuaguugcaga

SEQ ID NO: 2294100 - RNA, 21 nt, Human
aguuuuaguugcagaaacauu

SEQ ID NO: 2294101 - RNA, 20 nt, Human
aguuuuacucugcugcaaaa

SEQ ID NO: 2294102 - RNA, 16 nt, Human
aguuuuaccagaugau

SEQ ID NO: 2294103 - RNA, 20 nt, Human
aguuuuacuuuuaaacugug

SEQ ID NO: 2294104 - RNA, 19 nt, Human
aguuuuacuuuuaaacugu

SEQ ID NO: 2294105 - RNA, 16 nt, Human
aguuuuauaugcuucu

SEQ ID NO: 2294106 - RNA, 13 nt, Human
aguuuuaucacau

SEQ ID NO: 2294107 - RNA, 17 nt, Human
aguuuuaucacauguau

SEQ ID NO: 2294108 - RNA, 19 nt, Human
aguuuuaucacauguaugu

SEQ ID NO: 2294109 - RNA, 13 nt, Human
aguuuuaucauuu

SEQ ID NO: 2294110 - RNA, 12 nt, Human
aguuuuaucauu

SEQ ID NO: 2294111 - RNA, 20 nt, Human
aguuuuaucacauguauguu

SEQ ID NO: 2294112 - RNA, 21 nt, Human
aguuuuaucacauguauguuu

SEQ ID NO: 2294113 - RNA, 20 nt, Human
uuaugaugugggucaaggaa

SEQ ID NO: 2294114 - RNA, 21 nt, Human
uuaugaugugggucaaggaau

SEQ ID NO: 2294115 - RNA, 23 nt, Human
uuaugggaaccccuucauccucu

SEQ ID NO: 2294116 - RNA, 17 nt, Human
uuaugggaaucaagauu

SEQ ID NO: 2294117 - RNA, 13 nt, Human
uuaugggcugggu

SEQ ID NO: 2294118 - RNA, 19 nt, Human
uuauggcuuuugugcauua

SEQ ID NO: 2294119 - RNA, 22 nt, Human
uuaugauuaaguaaugauaacu

SEQ ID NO: 2294120 - RNA, 16 nt, Human
uuaugauguauauuua

SEQ ID NO: 2294121 - RNA, 19 nt, Human
uuaugauuaaguaaugaua

SEQ ID NO: 2294122 - RNA, 17 nt, Human
uuaugguuuugugaugu

SEQ ID NO: 2294123 - RNA, 22 nt, Human
uuauguaaaaggccaaaccucu

SEQ ID NO: 2294124 - RNA, 20 nt, Human
uuauguaaaaggccaaaccu

SEQ ID NO: 2294125 - RNA, 16 nt, Human
uuauguaaaauguuuu

SEQ ID NO: 2294126 - RNA, 20 nt, Human
uuauguaaaauguuuuagca

SEQ ID NO: 2294127 - RNA, 11 nt, Human
uuaugguuuug

SEQ ID NO: 2294128 - RNA, 20 nt, Human
uuaugguguuucucccucuc

SEQ ID NO: 2294129 - RNA, 13 nt, Human
uuaugguguuucu

SEQ ID NO: 2294130 - RNA, 22 nt, Human
uuaugggcuggguucuacccag

SEQ ID NO: 2294131 - RNA, 22 nt, Human
uuauguguguauauguaugugu

SEQ ID NO: 2294132 - RNA, 18 nt, Human
uuauguguguauauguau

SEQ ID NO: 2294133 - RNA, 12 nt, Human
uuauguguguau

SEQ ID NO: 2294134 - RNA, 10 nt, Human
uuaugugugu

SEQ ID NO: 2294135 - RNA, 14 nt, Human
uuaugugugugugu

SEQ ID NO: 2294136 - RNA, 12 nt, Human
uuaugugugugu

SEQ ID NO: 2294137 - RNA, 18 nt, Human
uuaugugccguguuauug

SEQ ID NO: 2294138 - RNA, 15 nt, Human
uuauguguaaauaca

SEQ ID NO: 2294139 - RNA, 19 nt, Human
uuaugugugaggagcugcu

SEQ ID NO: 2294140 - RNA, 13 nt, Human
uuaugugagagaa

SEQ ID NO: 2294141 - RNA, 22 nt, Human
uuaugugccagauuuaugcaua

SEQ ID NO: 2294142 - RNA, 23 nt, Human
uuaugugaaugaucucucugaau

SEQ ID NO: 2294143 - RNA, 15 nt, Human
uuaugugaaacaugu

SEQ ID NO: 2294144 - RNA, 16 nt, Human
uuauguagaugugcau

SEQ ID NO: 2294145 - RNA, 16 nt, Human
uuauguaguaauugac

SEQ ID NO: 2294146 - RNA, 15 nt, Human
uuauguaguaauuga

SEQ ID NO: 2294147 - RNA, 21 nt, Human
uuauguauauuuaaaagaaag

SEQ ID NO: 2294148 - RNA, 19 nt, Human
uuauguaguaauugacaug

SEQ ID NO: 2294149 - RNA, 21 nt, Human
uuauguaauaaugugaaucau

SEQ ID NO: 2294150 - RNA, 15 nt, Human
uuauguaaucuaugu

SEQ ID NO: 2294151 - RNA, 15 nt, Human
uuauguagaugugca

SEQ ID NO: 2294152 - RNA, 17 nt, Human
uuauguaauaaugugaa

SEQ ID NO: 2294153 - RNA, 16 nt, Human
uuauguaauaauguga

SEQ ID NO: 2294154 - RNA, 18 nt, Human
uuauguaagagcaccuuc

SEQ ID NO: 2294155 - RNA, 21 nt, Human
uuaugucugcugaauaauaaa

SEQ ID NO: 2294156 - RNA, 19 nt, Human
uuaugucugcugaauaaua

SEQ ID NO: 2294157 - RNA, 13 nt, Human
uuaugugaaacau

SEQ ID NO: 2294158 - RNA, 13 nt, Human
uuaugucuaaaga

SEQ ID NO: 2294159 - RNA, 17 nt, Human
uuaugucuauuuaagcc

SEQ ID NO: 2294160 - RNA, 15 nt, Human
uuaugucucuucuga

SEQ ID NO: 2294161 - RNA, 17 nt, Human
uuaugucccuucacaua

SEQ ID NO: 2294162 - RNA, 18 nt, Human
uuaugucccuucacauag

SEQ ID NO: 2294163 - RNA, 22 nt, Human
uuaugucccuucacauaguuuu

SEQ ID NO: 2294164 - RNA, 15 nt, Human
uuauguccacugugu

SEQ ID NO: 2294165 - RNA, 17 nt, Human
uuauguccacuguguau

SEQ ID NO: 2294166 - RNA, 18 nt, Human
uuauguccacuguguaua

SEQ ID NO: 2294167 - RNA, 17 nt, Human
uuaugucaucauacaug

SEQ ID NO: 2294168 - RNA, 13 nt, Human
uuaugagggccac

SEQ ID NO: 2294169 - RNA, 18 nt, Human
uuaugagggccacggguc

SEQ ID NO: 2294170 - RNA, 18 nt, Human
uuaugagcucuucauguu

SEQ ID NO: 2294171 - RNA, 18 nt, Human
uuaugaccucuuccuuua

SEQ ID NO: 2294172 - RNA, 22 nt, Human
uuaugacuucauuaauaauaaa

SEQ ID NO: 2294173 - RNA, 19 nt, Human
uuaugacuucauuaauaau

SEQ ID NO: 2294174 - RNA, 23 nt, Human
uuaugaguuuuugauagcuuuau

SEQ ID NO: 2294175 - RNA, 21 nt, Human
uuaugaguuuuugauagcuuu

SEQ ID NO: 2294176 - RNA, 15 nt, Human
uuaugaguuuuugau

SEQ ID NO: 2294177 - RNA, 13 nt, Human
uuaugaguuuuug

SEQ ID NO: 2294178 - RNA, 20 nt, Human
uuaugauacuugaaaauuaa

SEQ ID NO: 2294179 - RNA, 15 nt, Human
uuaugaguuugcuua

SEQ ID NO: 2294180 - RNA, 14 nt, Human
uuaugacaguuaua

SEQ ID NO: 2294181 - RNA, 21 nt, Human
uuaugaauuacauuuguauaa

SEQ ID NO: 2294182 - RNA, 11 nt, Human
uuaugacucca

SEQ ID NO: 2294183 - RNA, 23 nt, Human
uuaugacaucacuuguacaaaau

SEQ ID NO: 2294184 - RNA, 21 nt, Human
uuaugacaucacuuguacaaa

SEQ ID NO: 2294185 - RNA, 18 nt, Human
uuaugacaucacuuguac

SEQ ID NO: 2294186 - RNA, 16 nt, Human
uuaugacaucacuugu

SEQ ID NO: 2294187 - RNA, 14 nt, Human
uuaugaaugaaaaa

SEQ ID NO: 2294188 - RNA, 19 nt, Human
uuaugaauauuuacguuuu

SEQ ID NO: 2294189 - RNA, 14 nt, Human
uuaugaauuacauu

SEQ ID NO: 2294190 - RNA, 16 nt, Human
uuaugaauuacauuug

SEQ ID NO: 2294191 - RNA, 17 nt, Human
uuaugaauuacauuugu

SEQ ID NO: 2294192 - RNA, 18 nt, Human
uuaugaaagguuuacauu

SEQ ID NO: 2294193 - RNA, 13 nt, Human
uuaucccucucca

SEQ ID NO: 2294194 - RNA, 14 nt, Human
uuaugaaauaaaga

SEQ ID NO: 2294195 - RNA, 23 nt, Human
uuaugaagaaaaaauacauuuua

SEQ ID NO: 2294196 - RNA, 18 nt, Human
uuaugaagaaaaaauaca

SEQ ID NO: 2294197 - RNA, 20 nt, Human
uuaugaaauaaagaaauugc

SEQ ID NO: 2294198 - RNA, 19 nt, Human
uuaugaaauucacccccuu

SEQ ID NO: 2294199 - RNA, 20 nt, Human
uuaugaagcuuuuaugugaa

SEQ ID NO: 2294200 - RNA, 18 nt, Human
uuauccauggggaaggga

SEQ ID NO: 2294201 - RNA, 19 nt, Human
uuauccauauugagucaaa

SEQ ID NO: 2294202 - RNA, 17 nt, Human
uuauccauauugaguca

SEQ ID NO: 2294203 - RNA, 15 nt, Human
uuaucccucaccugu

SEQ ID NO: 2294204 - RNA, 17 nt, Human
uuaucccucaccuguag

SEQ ID NO: 2294205 - RNA, 20 nt, Human
uuaucccucaccuguagcag

SEQ ID NO: 2294206 - RNA, 22 nt, Human
uuauccaagguguaacucuaau

SEQ ID NO: 2294207 - RNA, 16 nt, Human
uuauccaccuccaucu

SEQ ID NO: 2294208 - RNA, 12 nt, Human
uuauccaggacu

SEQ ID NO: 2294209 - RNA, 18 nt, Human
uuauccaggacucuguca

SEQ ID NO: 2294210 - RNA, 19 nt, Human
uuauccacagaaacauuuu

SEQ ID NO: 2294211 - RNA, 21 nt, Human
uuaucaccagcugccucuucu

SEQ ID NO: 2294212 - RNA, 16 nt, Human
uuaucauuuucaaaau

SEQ ID NO: 2294213 - RNA, 12 nt, Human
uuaucauuuuca

SEQ ID NO: 2294214 - RNA, 18 nt, Human
uuaucaccgugggcuccc

SEQ ID NO: 2294215 - RNA, 21 nt, Human
uuaucacccagaagaaaauag

SEQ ID NO: 2294216 - RNA, 19 nt, Human
uuaucacccagaagaaaau

SEQ ID NO: 2294217 - RNA, 18 nt, Human
uuaucacccagaagaaaa

SEQ ID NO: 2294218 - RNA, 17 nt, Human
uuaucacccagaagaaa

SEQ ID NO: 2294219 - RNA, 16 nt, Human
auacauaucuuuauua

SEQ ID NO: 2294220 - RNA, 14 nt, Human
auacauaucuuuau

SEQ ID NO: 2294221 - RNA, 13 nt, Human
auacauaucuuua

SEQ ID NO: 2294222 - RNA, 20 nt, Human
auacauaucuuuauuaauca

SEQ ID NO: 2294223 - RNA, 17 nt, Human
auacauaucuuuauuaa

SEQ ID NO: 2294224 - RNA, 10 nt, Human
auacaugcca

SEQ ID NO: 2294225 - RNA, 22 nt, Human
auacaugguagccaguugaauu

SEQ ID NO: 2294226 - RNA, 15 nt, Human
auacaugcugcuaau

SEQ ID NO: 2294227 - RNA, 14 nt, Human
auacauggauaaca

SEQ ID NO: 2294228 - RNA, 13 nt, Human
auacaugcugcua

SEQ ID NO: 2294229 - RNA, 15 nt, Human
auacaugcucuuaga

SEQ ID NO: 2294230 - RNA, 21 nt, Human
auacaugugccgaaugugcag

SEQ ID NO: 2294231 - RNA, 23 nt, Human
auacaguguuauuuucuuugaaa

SEQ ID NO: 2294232 - RNA, 21 nt, Human
auacauaagcggcguaaguuu

SEQ ID NO: 2294233 - RNA, 15 nt, Human
auacauacaccagca

SEQ ID NO: 2294234 - RNA, 23 nt, Human
auacauacaccagcauuccuuuu

SEQ ID NO: 2294235 - RNA, 15 nt, Human
auacaguguuauuuu

SEQ ID NO: 2294236 - RNA, 14 nt, Human
auacaguguuauuu

SEQ ID NO: 2294237 - RNA, 20 nt, Human
auacauaaacaagaccacgu

SEQ ID NO: 2294238 - RNA, 20 nt, Human
auacaguuacucagaauucu

SEQ ID NO: 2294239 - RNA, 23 nt, Human
auacagauagauauaugcucugc

SEQ ID NO: 2294240 - RNA, 23 nt, Human
auacaggaaaagcugcugacagu

SEQ ID NO: 2294241 - RNA, 18 nt, Human
auacaguuacucagaauu

SEQ ID NO: 2294242 - RNA, 20 nt, Human
auacagucuuccauuugcaa

SEQ ID NO: 2294243 - RNA, 19 nt, Human
auacagucuuccauuugca

SEQ ID NO: 2294244 - RNA, 21 nt, Human
auacaggaugaugacuaugga

SEQ ID NO: 2294245 - RNA, 21 nt, Human
auacaggauuugaacucagau

SEQ ID NO: 2294246 - RNA, 17 nt, Human
auacaggaaugaagccu

SEQ ID NO: 2294247 - RNA, 16 nt, Human
auacagggaugguguu

SEQ ID NO: 2294248 - RNA, 16 nt, Human
auacaacuuaaauaau

SEQ ID NO: 2294249 - RNA, 18 nt, Human
auacaaccugcuugggug

SEQ ID NO: 2294250 - RNA, 22 nt, Human
auacaagccauucuaaggaaau

SEQ ID NO: 2294251 - RNA, 14 nt, Human
auacaaccugcuug

SEQ ID NO: 2294252 - RNA, 14 nt, Human
auacaauaacauaa

SEQ ID NO: 2294253 - RNA, 14 nt, Human
auacagaacucuuu

SEQ ID NO: 2294254 - RNA, 16 nt, Human
auacagaacucuuuca

SEQ ID NO: 2294255 - RNA, 15 nt, Human
auacagaacucuuuc

SEQ ID NO: 2294256 - RNA, 20 nt, Human
auacagaacucuuucaaaac

SEQ ID NO: 2294257 - RNA, 18 nt, Human
auacagaacucuuucaaa

SEQ ID NO: 2294258 - RNA, 23 nt, Human
auacagaacucuuucaaaaccuu

SEQ ID NO: 2294259 - RNA, 20 nt, Human
auacagaauugugucugcag

SEQ ID NO: 2294260 - RNA, 17 nt, Human
auacagaggcaacugca

SEQ ID NO: 2294261 - RNA, 16 nt, Human
auacagaggcaacugc

SEQ ID NO: 2294262 - RNA, 20 nt, Human
auacagaccgaacuguugua

SEQ ID NO: 2294263 - RNA, 18 nt, Human
auacagaccgaacuguug

SEQ ID NO: 2294264 - RNA, 21 nt, Human
auacagaccgaacuguuguau

SEQ ID NO: 2294265 - RNA, 21 nt, Human
auacagaauugugucugcagg

SEQ ID NO: 2294266 - RNA, 22 nt, Human
auacagaauugugucugcagga

SEQ ID NO: 2294267 - RNA, 12 nt, Human
auacagacacua

SEQ ID NO: 2294268 - RNA, 14 nt, Human
auacagacacuaag

SEQ ID NO: 2294269 - RNA, 15 nt, Human
auacagacacuaagu

SEQ ID NO: 2294270 - RNA, 18 nt, Human
auacagacacuaaguuau

SEQ ID NO: 2294271 - RNA, 19 nt, Human
auacagacacuaaguuaua

SEQ ID NO: 2294272 - RNA, 23 nt, Human
auacagacacuaaguuauaguau

SEQ ID NO: 2294273 - RNA, 22 nt, Human
uuauaaacuuuuuucuuacugu

SEQ ID NO: 2294274 - RNA, 15 nt, Human
uuauaaauauauuua

SEQ ID NO: 2294275 - RNA, 12 nt, Human
auacaacagugc

SEQ ID NO: 2294276 - RNA, 14 nt, Human
auacaacagugcua

SEQ ID NO: 2294277 - RNA, 15 nt, Human
auacaacagugcuaa

SEQ ID NO: 2294278 - RNA, 16 nt, Human
auacaacagugcuaaa

SEQ ID NO: 2294279 - RNA, 18 nt, Human
auacaacagugcuaaaaa

SEQ ID NO: 2294280 - RNA, 20 nt, Human
auacaacagugcuaaaaaug

SEQ ID NO: 2294281 - RNA, 21 nt, Human
auacaacagugcuaaaaaugg

SEQ ID NO: 2294282 - RNA, 20 nt, Human
auacaacauguagcugaguu

SEQ ID NO: 2294283 - RNA, 22 nt, Human
auacaacccuggcauuaugucc

SEQ ID NO: 2294284 - RNA, 12 nt, Human
uuauaaacuuuu

SEQ ID NO: 2294285 - RNA, 16 nt, Human
uuauaaacuuuuuucu

SEQ ID NO: 2294286 - RNA, 18 nt, Human
uuauaaacuuuaccuuuu

SEQ ID NO: 2294287 - RNA, 17 nt, Human
uuauaaacuuuaccuuu

SEQ ID NO: 2294288 - RNA, 15 nt, Human
uuaucacauguaugu

SEQ ID NO: 2294289 - RNA, 16 nt, Human
uuaucacauguauguu

SEQ ID NO: 2294290 - RNA, 17 nt, Human
uuaucacauguauguuu

SEQ ID NO: 2294291 - RNA, 18 nt, Human
uuaucacauuauuugcau

SEQ ID NO: 2294292 - RNA, 18 nt, Human
uuaucaccacaguaaguu

SEQ ID NO: 2294293 - RNA, 18 nt, Human
uuaucacauguauguuuu

SEQ ID NO: 2294294 - RNA, 19 nt, Human
uuaucacauguauguuuug

SEQ ID NO: 2294295 - RNA, 22 nt, Human
uuaucaccacaguaaguuccua

SEQ ID NO: 2294296 - RNA, 20 nt, Human
uuaucaccagagagggacug

SEQ ID NO: 2294297 - RNA, 17 nt, Human
uuaucaccagcugccuc

SEQ ID NO: 2294298 - RNA, 19 nt, Human
uuaucaccagcugccucuu

SEQ ID NO: 2294299 - RNA, 16 nt, Human
uuaucaaaaauuucau

SEQ ID NO: 2294300 - RNA, 17 nt, Human
uuaucaagugucuucca

SEQ ID NO: 2294301 - RNA, 15 nt, Human
uuaucaagugucuuc

SEQ ID NO: 2294302 - RNA, 15 nt, Human
uuauauuuuuauaga

SEQ ID NO: 2294303 - RNA, 13 nt, Human
uuauauuuuuaaa

SEQ ID NO: 2294304 - RNA, 19 nt, Human
uuauauuuuacuacugugg

SEQ ID NO: 2294305 - RNA, 19 nt, Human
uuauauuugaaauauugac

SEQ ID NO: 2294306 - RNA, 18 nt, Human
auacuaaaaaucaugaga

SEQ ID NO: 2294307 - RNA, 13 nt, Human
auacuaaaaauca

SEQ ID NO: 2294308 - RNA, 13 nt, Human
auacuaguuguga

SEQ ID NO: 2294309 - RNA, 21 nt, Human
auacuaaaaguucuucuccaa

SEQ ID NO: 2294310 - RNA, 14 nt, Human
auacuauauuuaug

SEQ ID NO: 2294311 - RNA, 14 nt, Human
auacuaguugugac

SEQ ID NO: 2294312 - RNA, 16 nt, Human
auacuaguugugaccu

SEQ ID NO: 2294313 - RNA, 20 nt, Human
auacuaguugugaccuuagu

SEQ ID NO: 2294314 - RNA, 17 nt, Human
auacuauggaauuucuc

SEQ ID NO: 2294315 - RNA, 15 nt, Human
auacuauauuuuagg

SEQ ID NO: 2294316 - RNA, 20 nt, Human
auacuaaccagcagaaaugc

SEQ ID NO: 2294317 - RNA, 19 nt, Human
auacuaaccagcagaaaug

SEQ ID NO: 2294318 - RNA, 14 nt, Human
auacguccaccaug

SEQ ID NO: 2294319 - RNA, 21 nt, Human
auacgugaaaauuauuugaaa

SEQ ID NO: 2294320 - RNA, 13 nt, Human
auacguguagcua

SEQ ID NO: 2294321 - RNA, 13 nt, Human
auacuaaccagca

SEQ ID NO: 2294322 - RNA, 13 nt, Human
auacgauaaauaa

SEQ ID NO: 2294323 - RNA, 17 nt, Human
auacgacuuuauuuucu

SEQ ID NO: 2294324 - RNA, 21 nt, Human
auacgccuguaguccuagcca

SEQ ID NO: 2294325 - RNA, 16 nt, Human
auacgcacuacaugug

SEQ ID NO: 2294326 - RNA, 23 nt, Human
auacgcaacauaauuaaauuuug

SEQ ID NO: 2294327 - RNA, 13 nt, Human
auacguacacauu

SEQ ID NO: 2294328 - RNA, 17 nt, Human
auacgcacuacaugugg

SEQ ID NO: 2294329 - RNA, 16 nt, Human
auacguacacauuuua

SEQ ID NO: 2294330 - RNA, 15 nt, Human
auacguacacauuuu

SEQ ID NO: 2294331 - RNA, 14 nt, Human
auacguacacauuu

SEQ ID NO: 2294332 - RNA, 20 nt, Human
auacaugguugugaccugag

SEQ ID NO: 2294333 - RNA, 14 nt, Human
auacaugguuguga

SEQ ID NO: 2294334 - RNA, 16 nt, Human
auaccacccaaugcug

SEQ ID NO: 2294335 - RNA, 18 nt, Human
auaccacuuuuguucuug

SEQ ID NO: 2294336 - RNA, 17 nt, Human
auaccacuuuuguucuu

SEQ ID NO: 2294337 - RNA, 13 nt, Human
auacgacuuuauu

SEQ ID NO: 2294338 - RNA, 14 nt, Human
auaccuuuuuuaga

SEQ ID NO: 2294339 - RNA, 15 nt, Human
auaccuuugccuugg

SEQ ID NO: 2294340 - RNA, 15 nt, Human
uuauuaguuuacauc

SEQ ID NO: 2294341 - RNA, 18 nt, Human
uuauuaguuuacaucauu

SEQ ID NO: 2294342 - RNA, 12 nt, Human
uuauuauaauug

SEQ ID NO: 2294343 - RNA, 20 nt, Human
uuauuauaauuguaucagag

SEQ ID NO: 2294344 - RNA, 15 nt, Human
uuauuauaauuguau

SEQ ID NO: 2294345 - RNA, 18 nt, Human
uuauuauaauuguaucag

SEQ ID NO: 2294346 - RNA, 15 nt, Human
uuauuauauuuacaa

SEQ ID NO: 2294347 - RNA, 16 nt, Human
uuauuaucuaaagugu

SEQ ID NO: 2294348 - RNA, 12 nt, Human
uuauuaugcaug

SEQ ID NO: 2294349 - RNA, 20 nt, Human
uuauguuauuuauauauugg

SEQ ID NO: 2294350 - RNA, 15 nt, Human
uuauguuacaucugu

SEQ ID NO: 2294351 - RNA, 22 nt, Human
uuauguuaagggaagaauucca

SEQ ID NO: 2294352 - RNA, 14 nt, Human
uuauguuaaacuag

SEQ ID NO: 2294353 - RNA, 17 nt, Human
uuauguuaaaucaauaa

SEQ ID NO: 2294354 - RNA, 10 nt, Human
uuauguuaaa

SEQ ID NO: 2294355 - RNA, 11 nt, Human
uuauguuaaac

SEQ ID NO: 2294356 - RNA, 12 nt, Human
uuauguuaaacu

SEQ ID NO: 2294357 - RNA, 13 nt, Human
uuauguuaaacua

SEQ ID NO: 2294358 - RNA, 19 nt, Human
uuauguuaaaacugggaca

SEQ ID NO: 2294359 - RNA, 14 nt, Human
uuauuauauuuaca

SEQ ID NO: 2294360 - RNA, 20 nt, Human
uuauuaguaagaaaacauca

SEQ ID NO: 2294361 - RNA, 24 nt, Human
uuauuaguaccauaguaccauuua

SEQ ID NO: 2294362 - RNA, 20 nt, Human
uuauuaguguaugcuuugaa

SEQ ID NO: 2294363 - RNA, 14 nt, Human
uuauuaguuuacau

SEQ ID NO: 2294364 - RNA, 15 nt, Human
uuauuaguuaauaua

SEQ ID NO: 2294365 - RNA, 14 nt, Human
uuauucaauaaagu

SEQ ID NO: 2294366 - RNA, 17 nt, Human
uuauucaauaaaguauu

SEQ ID NO: 2294367 - RNA, 19 nt, Human
uuauucaauaaaguauuua

SEQ ID NO: 2294368 - RNA, 18 nt, Human
uuauucaauuccucuggg

SEQ ID NO: 2294369 - RNA, 19 nt, Human
uuauucaauuccucuggga

SEQ ID NO: 2294370 - RNA, 20 nt, Human
uuauucaauaaaguauuuaa

SEQ ID NO: 2294371 - RNA, 21 nt, Human
uuauucaauaaaguauuuaau

SEQ ID NO: 2294372 - RNA, 15 nt, Human
uuauucagcuucauu

SEQ ID NO: 2294373 - RNA, 20 nt, Human
uuauucagcuucauuugugu

SEQ ID NO: 2294374 - RNA, 20 nt, Human
uuauucacuuuuauuuagca

SEQ ID NO: 2294375 - RNA, 12 nt, Human
uuauucauuuaa

SEQ ID NO: 2294376 - RNA, 13 nt, Human
uuauucauuuaaa

SEQ ID NO: 2294377 - RNA, 16 nt, Human
uuauucauuuaaaaug

SEQ ID NO: 2294378 - RNA, 23 nt, Human
uuauucauaagccaauuuuucug

SEQ ID NO: 2294379 - RNA, 12 nt, Human
uuauucauaauu

SEQ ID NO: 2294380 - RNA, 14 nt, Human
uuauucagugucac

SEQ ID NO: 2294381 - RNA, 13 nt, Human
uuauucaguguca

SEQ ID NO: 2294382 - RNA, 20 nt, Human
uuauucaggaaaagccucug

SEQ ID NO: 2294383 - RNA, 21 nt, Human
uuauucaggaaaagccucugu

SEQ ID NO: 2294384 - RNA, 22 nt, Human
uuauucaggaaaagccucugug

SEQ ID NO: 2294385 - RNA, 23 nt, Human
uuauucaggaaaagccucugugu

SEQ ID NO: 2294386 - RNA, 22 nt, Human
uuauuauuuguguuuuaauuua

SEQ ID NO: 2294387 - RNA, 14 nt, Human
uuauuauuacuguu

SEQ ID NO: 2294388 - RNA, 15 nt, Human
uuauuauugaaauug

SEQ ID NO: 2294389 - RNA, 16 nt, Human
uuauuauugaaauugu

SEQ ID NO: 2294390 - RNA, 16 nt, Human
uuauucaaguuauugu

SEQ ID NO: 2294391 - RNA, 12 nt, Human
uuauucaauaaa

SEQ ID NO: 2294392 - RNA, 16 nt, Human
uuauuauuuucaccug

SEQ ID NO: 2294393 - RNA, 13 nt, Human
uuauuaugcauga

SEQ ID NO: 2294394 - RNA, 16 nt, Human
uuauuauuauuuuuua

SEQ ID NO: 2294395 - RNA, 22 nt, Human
uuauuaucuaaaguguguuguu

SEQ ID NO: 2294396 - RNA, 19 nt, Human
auacugacugagaauauaa

SEQ ID NO: 2294397 - RNA, 22 nt, Human
auacugaaggaaaaacacaagc

SEQ ID NO: 2294398 - RNA, 12 nt, Human
auacugaaggaa

SEQ ID NO: 2294399 - RNA, 13 nt, Human
auacugaaggaaa

SEQ ID NO: 2294400 - RNA, 14 nt, Human
auacugaaggaaaa

SEQ ID NO: 2294401 - RNA, 15 nt, Human
auacugaaggaaaaa

SEQ ID NO: 2294402 - RNA, 11 nt, Human
auacugaagau

SEQ ID NO: 2294403 - RNA, 13 nt, Human
auacugaagaugc

SEQ ID NO: 2294404 - RNA, 14 nt, Human
auacucuuucugua

SEQ ID NO: 2294405 - RNA, 16 nt, Human
auacucuuucuguaua

SEQ ID NO: 2294406 - RNA, 15 nt, Human
auacucuuucuguau

SEQ ID NO: 2294407 - RNA, 23 nt, Human
auacucuuucuguauauacuuuu

SEQ ID NO: 2294408 - RNA, 22 nt, Human
auacucuuucuguauauacuuu

SEQ ID NO: 2294409 - RNA, 17 nt, Human
auacucuuucuguauau

SEQ ID NO: 2294410 - RNA, 22 nt, Human
auacugcccggggcagcugcca

SEQ ID NO: 2294411 - RNA, 21 nt, Human
auacugccagaugcugauguu

SEQ ID NO: 2294412 - RNA, 18 nt, Human
auacugccagaugcugau

SEQ ID NO: 2294413 - RNA, 19 nt, Human
auacugccagaugcugaug

SEQ ID NO: 2294414 - RNA, 15 nt, Human
auacugccagaugcu

SEQ ID NO: 2294415 - RNA, 16 nt, Human
auacugccagaugcug

SEQ ID NO: 2294416 - RNA, 17 nt, Human
auacugccagaugcuga

SEQ ID NO: 2294417 - RNA, 21 nt, Human
auacugcauacuuuuuaaaug

SEQ ID NO: 2294418 - RNA, 15 nt, Human
auacugcauacuuuu

SEQ ID NO: 2294419 - RNA, 14 nt, Human
auacugcagggcca

SEQ ID NO: 2294420 - RNA, 15 nt, Human
auacugcagggccag

SEQ ID NO: 2294421 - RNA, 17 nt, Human
auacugcagggccagga

SEQ ID NO: 2294422 - RNA, 19 nt, Human
auacugcagggccaggacu

SEQ ID NO: 2294423 - RNA, 14 nt, Human
auacugagggacca

SEQ ID NO: 2294424 - RNA, 20 nt, Human
auacugaaggaaaaacacaa

SEQ ID NO: 2294425 - RNA, 22 nt, Human
auacugagggaccaacugggcc

SEQ ID NO: 2294426 - RNA, 16 nt, Human
auacugcaagaaaaug

SEQ ID NO: 2294427 - RNA, 14 nt, Human
auacugcaagaaaa

SEQ ID NO: 2294428 - RNA, 23 nt, Human
auacugcaauuaaagugauacug

SEQ ID NO: 2294429 - RNA, 17 nt, Human
auacuggccucgccugg

SEQ ID NO: 2294430 - RNA, 20 nt, Human
auacuggaaguuuugcauuu

SEQ ID NO: 2294431 - RNA, 19 nt, Human
auacuggaaguuuugcauu

SEQ ID NO: 2294432 - RNA, 18 nt, Human
auacuggaaguuuugcau

SEQ ID NO: 2294433 - RNA, 17 nt, Human
auacuggaaguuuugca

SEQ ID NO: 2294434 - RNA, 16 nt, Human
auacuggaaguuuugc

SEQ ID NO: 2294435 - RNA, 14 nt, Human
auacuggaaguuuu

SEQ ID NO: 2294436 - RNA, 21 nt, Human
auacuggugcagucauuauga

SEQ ID NO: 2294437 - RNA, 14 nt, Human
auacuggcugguga

SEQ ID NO: 2294438 - RNA, 14 nt, Human
auacuggccuggac

SEQ ID NO: 2294439 - RNA, 15 nt, Human
auacuggccuggacu

SEQ ID NO: 2294440 - RNA, 15 nt, Human
auacuguaaagaaag

SEQ ID NO: 2294441 - RNA, 14 nt, Human
auacuguaaagaaa

SEQ ID NO: 2294442 - RNA, 13 nt, Human
auacuguaaagaa

SEQ ID NO: 2294443 - RNA, 12 nt, Human
auacuguaaaga

SEQ ID NO: 2294444 - RNA, 13 nt, Human
auacuggaaguuu

SEQ ID NO: 2294445 - RNA, 22 nt, Human
auacugcuacuguaauuuuaua

SEQ ID NO: 2294446 - RNA, 20 nt, Human
auacugcuacuguaauuuua

SEQ ID NO: 2294447 - RNA, 19 nt, Human
auacugcuacuguaauuuu

SEQ ID NO: 2294448 - RNA, 16 nt, Human
auacugcuacuguaau

SEQ ID NO: 2294449 - RNA, 19 nt, Human
auacugcgacuuucugccu

SEQ ID NO: 2294450 - RNA, 15 nt, Human
auacugcuacuguaa

SEQ ID NO: 2294451 - RNA, 20 nt, Human
auacugcgacuuucugccug

SEQ ID NO: 2294452 - RNA, 22 nt, Human
auacugcgacuuucugccugga

SEQ ID NO: 2294453 - RNA, 23 nt, Human
auacucuagaugaaguuuuacau

SEQ ID NO: 2294454 - RNA, 17 nt, Human
auacucuagaugaaguu

SEQ ID NO: 2294455 - RNA, 15 nt, Human
auacucuagauuuug

SEQ ID NO: 2294456 - RNA, 20 nt, Human
auacucuagauuuuguuuug

SEQ ID NO: 2294457 - RNA, 21 nt, Human
auacucuagauuuuguuuugc

SEQ ID NO: 2294458 - RNA, 22 nt, Human
auacucuagauuuuguuuugcu

SEQ ID NO: 2294459 - RNA, 17 nt, Human
auacuccuccaagguua

SEQ ID NO: 2294460 - RNA, 14 nt, Human
auacucccaucugu

SEQ ID NO: 2294461 - RNA, 14 nt, Human
auacucugucagau

SEQ ID NO: 2294462 - RNA, 13 nt, Human
auacucugucaga

SEQ ID NO: 2294463 - RNA, 12 nt, Human
auacucugucag

SEQ ID NO: 2294464 - RNA, 16 nt, Human
auacucugucagaugg

SEQ ID NO: 2294465 - RNA, 15 nt, Human
auacucugucagaug

SEQ ID NO: 2294466 - RNA, 19 nt, Human
auacucuuaggaagagaaa

SEQ ID NO: 2294467 - RNA, 16 nt, Human
auacucugcuuagaau

SEQ ID NO: 2294468 - RNA, 21 nt, Human
auacucuuaggaagagaaacc

SEQ ID NO: 2294469 - RNA, 22 nt, Human
auacucuuaggaagagaaacca

SEQ ID NO: 2294470 - RNA, 18 nt, Human
auacucuuauagacaaca

SEQ ID NO: 2294471 - RNA, 20 nt, Human
uuauuccuauauaguuuauu

SEQ ID NO: 2294472 - RNA, 19 nt, Human
uuauucccuuucacaaaau

SEQ ID NO: 2294473 - RNA, 16 nt, Human
uuauucccuguacaau

SEQ ID NO: 2294474 - RNA, 20 nt, Human
uuauuccccauucuuccuag

SEQ ID NO: 2294475 - RNA, 19 nt, Human
uuauuccauauucauguaa

SEQ ID NO: 2294476 - RNA, 20 nt, Human
uuauuccauauucauguaaa

SEQ ID NO: 2294477 - RNA, 22 nt, Human
uuauuccagaaugcuguacauc

SEQ ID NO: 2294478 - RNA, 20 nt, Human
uuauuccagaaugcuguaca

SEQ ID NO: 2294479 - RNA, 17 nt, Human
uuauuccagaaugcugu

SEQ ID NO: 2294480 - RNA, 17 nt, Human
uuauucauuuaaaauga

SEQ ID NO: 2294481 - RNA, 18 nt, Human
uuauucauuuaaaaugau

SEQ ID NO: 2294482 - RNA, 20 nt, Human
uuauucauuuaaaaugauua

SEQ ID NO: 2294483 - RNA, 14 nt, Human
uuauucauuugagu

SEQ ID NO: 2294484 - RNA, 12 nt, Human
uuauuccacauc

SEQ ID NO: 2294485 - RNA, 13 nt, Human
uuauuccacaucu

SEQ ID NO: 2294486 - RNA, 19 nt, Human
uuauuccacaucuacguuu

SEQ ID NO: 2294487 - RNA, 22 nt, Human
uuauuccuauauaguuuauuga

SEQ ID NO: 2294488 - RNA, 16 nt, Human
uuauuccuccugcuca

SEQ ID NO: 2294489 - RNA, 20 nt, Human
uuauuccuccugcucauauu

SEQ ID NO: 2294490 - RNA, 17 nt, Human
uuauuccugauaauaau

SEQ ID NO: 2294491 - RNA, 16 nt, Human
auacucauuaggaugg

SEQ ID NO: 2294492 - RNA, 11 nt, Human
auacucccauc

SEQ ID NO: 2294493 - RNA, 14 nt, Human
auacucauguguau

SEQ ID NO: 2294494 - RNA, 20 nt, Human
uuauuccugauaauaauuga

SEQ ID NO: 2294495 - RNA, 21 nt, Human
uuauuccugauaauaauugau

SEQ ID NO: 2294496 - RNA, 15 nt, Human
auacucauguguaug

SEQ ID NO: 2294497 - RNA, 14 nt, Human
auagauguguggac

SEQ ID NO: 2294498 - RNA, 18 nt, Human
auagaugucuagguacuu

SEQ ID NO: 2294499 - RNA, 14 nt, Human
auagauuauaacuu

SEQ ID NO: 2294500 - RNA, 15 nt, Human
auagauuauaacuug

SEQ ID NO: 2294501 - RNA, 21 nt, Human
auagauuauaacuugucuaaa

SEQ ID NO: 2294502 - RNA, 23 nt, Human
auagauuggagccaccaugccca

SEQ ID NO: 2294503 - RNA, 13 nt, Human
auagauuugaccu

SEQ ID NO: 2294504 - RNA, 15 nt, Human
auagaucccccagac

SEQ ID NO: 2294505 - RNA, 14 nt, Human
auagaguguuauca

SEQ ID NO: 2294506 - RNA, 16 nt, Human
auagaguuuaacacaa

SEQ ID NO: 2294507 - RNA, 15 nt, Human
auagaguuugcuauu

SEQ ID NO: 2294508 - RNA, 20 nt, Human
auagauaagaguagaaacug

SEQ ID NO: 2294509 - RNA, 20 nt, Human
auagaugcuggcccagggcc

SEQ ID NO: 2294510 - RNA, 17 nt, Human
auagaugcuggcccagg

SEQ ID NO: 2294511 - RNA, 16 nt, Human
auagaugcuggcccag

SEQ ID NO: 2294512 - RNA, 15 nt, Human
auagaugcuggccca

SEQ ID NO: 2294513 - RNA, 16 nt, Human
auagaucccccagacu

SEQ ID NO: 2294514 - RNA, 16 nt, Human
auagaugcaagauauu

SEQ ID NO: 2294515 - RNA, 19 nt, Human
auagaugcaagauauuuau

SEQ ID NO: 2294516 - RNA, 21 nt, Human
auagaugcaagauauuuauau

SEQ ID NO: 2294517 - RNA, 23 nt, Human
auagaugucccuuucuuggccag

SEQ ID NO: 2294518 - RNA, 22 nt, Human
auagaugucccuuucuuggcca

SEQ ID NO: 2294519 - RNA, 19 nt, Human
auagaugucccuuucuugg

SEQ ID NO: 2294520 - RNA, 23 nt, Human
auagaugggucuggcugagcuga

SEQ ID NO: 2294521 - RNA, 22 nt, Human
auagauguagauaaacucagaa

SEQ ID NO: 2294522 - RNA, 19 nt, Human
auagaugggaaugaagcuu

SEQ ID NO: 2294523 - RNA, 22 nt, Human
auagaugggucuggcugagcug

SEQ ID NO: 2294524 - RNA, 12 nt, Human
auagaugggaau

SEQ ID NO: 2294525 - RNA, 23 nt, Human
auagaugcuggcccagggcccag

SEQ ID NO: 2294526 - RNA, 13 nt, Human
auagaugggucug

SEQ ID NO: 2294527 - RNA, 13 nt, Human
auagaugggaaug

SEQ ID NO: 2294528 - RNA, 15 nt, Human
auagaugggaaugaa

SEQ ID NO: 2294529 - RNA, 11 nt, Human
auagaugugug

SEQ ID NO: 2294530 - RNA, 13 nt, Human
auagaugugugga

SEQ ID NO: 2294531 - RNA, 12 nt, Human
auagaugugugg

SEQ ID NO: 2294532 - RNA, 15 nt, Human
auagacuuaaaucuc

SEQ ID NO: 2294533 - RNA, 16 nt, Human
auagacauuuguaaau

SEQ ID NO: 2294534 - RNA, 15 nt, Human
auagacccucucaag

SEQ ID NO: 2294535 - RNA, 18 nt, Human
auagacccacaagaggca

SEQ ID NO: 2294536 - RNA, 18 nt, Human
auagagagggagaagaag

SEQ ID NO: 2294537 - RNA, 14 nt, Human
auagagaucauccu

SEQ ID NO: 2294538 - RNA, 16 nt, Human
auagagauguuuuuaa

SEQ ID NO: 2294539 - RNA, 14 nt, Human
auagagagagacca

SEQ ID NO: 2294540 - RNA, 21 nt, Human
auagagagggagaagaaguca

SEQ ID NO: 2294541 - RNA, 21 nt, Human
auagagcaccuaguccaguga

SEQ ID NO: 2294542 - RNA, 14 nt, Human
auagagcuguauua

SEQ ID NO: 2294543 - RNA, 15 nt, Human
auagagccugaggga

SEQ ID NO: 2294544 - RNA, 13 nt, Human
auagagccugagg

SEQ ID NO: 2294545 - RNA, 15 nt, Human
auagagcaaaauuga

SEQ ID NO: 2294546 - RNA, 17 nt, Human
auagagcaaaauugaug

SEQ ID NO: 2294547 - RNA, 21 nt, Human
auagagcaaaauugauguguu

SEQ ID NO: 2294548 - RNA, 22 nt, Human
auagagcaaaauugauguguuu

SEQ ID NO: 2294549 - RNA, 22 nt, Human
auagaggugagggaagccugaa

SEQ ID NO: 2294550 - RNA, 15 nt, Human
auagaggugagggaa

SEQ ID NO: 2294551 - RNA, 16 nt, Human
auagagguaccagcaa

SEQ ID NO: 2294552 - RNA, 21 nt, Human
auagaggcuucuccgccagcc

SEQ ID NO: 2294553 - RNA, 22 nt, Human
auagaggcuucuccgccagccu

SEQ ID NO: 2294554 - RNA, 23 nt, Human
auagaggcuucuccgccagccuc

SEQ ID NO: 2294555 - RNA, 14 nt, Human
auagagggccaaga

SEQ ID NO: 2294556 - RNA, 15 nt, Human
auagaguauaugcac

SEQ ID NO: 2294557 - RNA, 13 nt, Human
auagagucuugcu

SEQ ID NO: 2294558 - RNA, 14 nt, Human
auagaguauaugca

SEQ ID NO: 2294559 - RNA, 19 nt, Human
auagaggcuaaauuacuca

SEQ ID NO: 2294560 - RNA, 13 nt, Human
auagagcuguauu

SEQ ID NO: 2294561 - RNA, 12 nt, Human
auagaggcuagc

SEQ ID NO: 2294562 - RNA, 19 nt, Human
auagaggcuagcuucugcu

SEQ ID NO: 2294563 - RNA, 20 nt, Human
auagaggcuagcuucugcuu

SEQ ID NO: 2294564 - RNA, 18 nt, Human
auagaggcuucuccgcca

SEQ ID NO: 2294565 - RNA, 18 nt, Human
auagauaggucagugcaa

SEQ ID NO: 2294566 - RNA, 14 nt, Human
auagaguguacuua

SEQ ID NO: 2294567 - RNA, 19 nt, Human
auagaguguacuuaacuau

SEQ ID NO: 2294568 - RNA, 21 nt, Human
auagaguguacuuaacuauuc

SEQ ID NO: 2294569 - RNA, 20 nt, Human
auagacaguauauuuauagu

SEQ ID NO: 2294570 - RNA, 23 nt, Human
auagacaauuuauuauggcacau

SEQ ID NO: 2294571 - RNA, 22 nt, Human
auagacacuccccgaagucuuu

SEQ ID NO: 2294572 - RNA, 14 nt, Human
auagaauuuccaau

SEQ ID NO: 2294573 - RNA, 22 nt, Human
auagacaauuuauuauggcaca

SEQ ID NO: 2294574 - RNA, 16 nt, Human
auagacaauuuauuau

SEQ ID NO: 2294575 - RNA, 12 nt, Human
auagaauauuua

SEQ ID NO: 2294576 - RNA, 13 nt, Human
auagaauauuuau

SEQ ID NO: 2294577 - RNA, 19 nt, Human
auagaauauuuauuaccuc

SEQ ID NO: 2294578 - RNA, 22 nt, Human
auagaauauuuauuaccucuga

SEQ ID NO: 2294579 - RNA, 19 nt, Human
auagaauauaauuaucgga

SEQ ID NO: 2294580 - RNA, 17 nt, Human
auagaauuaacacauga

SEQ ID NO: 2294581 - RNA, 14 nt, Human
auagaauaaaauuu

SEQ ID NO: 2294582 - RNA, 19 nt, Human
auagaauaaaauuuuuaau

SEQ ID NO: 2294583 - RNA, 22 nt, Human
auagaauaaaauuuuuaaucuu

SEQ ID NO: 2294584 - RNA, 13 nt, Human
auagaaaugcugg

SEQ ID NO: 2294585 - RNA, 13 nt, Human
auacuguauuaag

SEQ ID NO: 2294586 - RNA, 15 nt, Human
auacuguauuaagag

SEQ ID NO: 2294587 - RNA, 16 nt, Human
auacuguauuaagagu

SEQ ID NO: 2294588 - RNA, 17 nt, Human
auacuguacuuaauaaa

SEQ ID NO: 2294589 - RNA, 16 nt, Human
auacuguacuuaauaa

SEQ ID NO: 2294590 - RNA, 20 nt, Human
auacuguacaaugacuuuau

SEQ ID NO: 2294591 - RNA, 22 nt, Human
auacuggccucgccuggccuga

SEQ ID NO: 2294592 - RNA, 23 nt, Human
auacuguaaagaaagagagaaaa

SEQ ID NO: 2294593 - RNA, 12 nt, Human
auacuguaacac

SEQ ID NO: 2294594 - RNA, 22 nt, Human
auacuguaaagaaagagagaaa

SEQ ID NO: 2294595 - RNA, 21 nt, Human
auacuguaaagaaagagagaa

SEQ ID NO: 2294596 - RNA, 20 nt, Human
auacuguaaagaaagagaga

SEQ ID NO: 2294597 - RNA, 19 nt, Human
auacuguaaagaaagagag

SEQ ID NO: 2294598 - RNA, 18 nt, Human
auacuguaaagaaagaga

SEQ ID NO: 2294599 - RNA, 16 nt, Human
auacuguaaagaaaga

SEQ ID NO: 2294600 - RNA, 19 nt, Human
auagaaaugcugguuuuuc

SEQ ID NO: 2294601 - RNA, 15 nt, Human
auagaaauuuccaga

SEQ ID NO: 2294602 - RNA, 20 nt, Human
auacuguauuaagagugaaa

SEQ ID NO: 2294603 - RNA, 22 nt, Human
auacuguauuaagagugaaaau

SEQ ID NO: 2294604 - RNA, 22 nt, Human
auagaaaugcugguuuuucagu

SEQ ID NO: 2294605 - RNA, 21 nt, Human
auagaacucaguuuuaacuag

SEQ ID NO: 2294606 - RNA, 17 nt, Human
auagaacagagaaagag

SEQ ID NO: 2294607 - RNA, 16 nt, Human
auagaaauuuccagag

SEQ ID NO: 2294608 - RNA, 19 nt, Human
auagaaggauguacauuuc

SEQ ID NO: 2294609 - RNA, 19 nt, Human
auagaaggcuauggggaua

SEQ ID NO: 2294610 - RNA, 14 nt, Human
auagaagcuguagu

SEQ ID NO: 2294611 - RNA, 13 nt, Human
auagaagcuguag

SEQ ID NO: 2294612 - RNA, 15 nt, Human
auagaacucugggcu

SEQ ID NO: 2294613 - RNA, 13 nt, Human
auagaacagugcu

SEQ ID NO: 2294614 - RNA, 18 nt, Human
auagaacucugaaaugaa

SEQ ID NO: 2294615 - RNA, 14 nt, Human
auagaacugaauga

SEQ ID NO: 2294616 - RNA, 15 nt, Human
auagaagaacugcaa

SEQ ID NO: 2294617 - RNA, 20 nt, Human
auagaagaauacaaacauau

SEQ ID NO: 2294618 - RNA, 19 nt, Human
auagaagaacugcaaaggu

SEQ ID NO: 2294619 - RNA, 18 nt, Human
auagaauaaaauauaauu

SEQ ID NO: 2294620 - RNA, 16 nt, Human
auagaagcuguaguag

SEQ ID NO: 2294621 - RNA, 13 nt, Human
auagaaggcaggu

SEQ ID NO: 2294622 - RNA, 13 nt, Human
auagaaguaaaaa

SEQ ID NO: 2294623 - RNA, 17 nt, Human
agugcaagccccugcuc

SEQ ID NO: 2294624 - RNA, 15 nt, Human
agugcaagccccugc

SEQ ID NO: 2294625 - RNA, 18 nt, Human
agugcaagccccugcucc

SEQ ID NO: 2294626 - RNA, 20 nt, Human
agugcaauaaaucugaccca

SEQ ID NO: 2294627 - RNA, 23 nt, Human
agugcaauaaaucugacccagug

SEQ ID NO: 2294628 - RNA, 22 nt, Human
agugcaauaaaucugacccagu

SEQ ID NO: 2294629 - RNA, 21 nt, Human
agugcaauaaaucugacccag

SEQ ID NO: 2294630 - RNA, 17 nt, Human
agugcagugagccgaga

SEQ ID NO: 2294631 - RNA, 21 nt, Human
agugcagcccguguggccccu

SEQ ID NO: 2294632 - RNA, 23 nt, Human
agugcaguccugaucagagccgu

SEQ ID NO: 2294633 - RNA, 17 nt, Human
agugcauuuucccagau

SEQ ID NO: 2294634 - RNA, 15 nt, Human
agugcauuuucccag

SEQ ID NO: 2294635 - RNA, 14 nt, Human
agugccaaaaacaa

SEQ ID NO: 2294636 - RNA, 18 nt, Human
agugccaggauggaauga

SEQ ID NO: 2294637 - RNA, 22 nt, Human
agugccagaggugggcaggugg

SEQ ID NO: 2294638 - RNA, 19 nt, Human
agugccaggacuccccagg

SEQ ID NO: 2294639 - RNA, 23 nt, Human
agugccaggacuccccaggccag

SEQ ID NO: 2294640 - RNA, 24 nt, Human
agugccaggacuccccaggccagg

SEQ ID NO: 2294641 - RNA, 13 nt, Human
agugccaggacuc

SEQ ID NO: 2294642 - RNA, 20 nt, Human
agugccagaggugggcaggu

SEQ ID NO: 2294643 - RNA, 21 nt, Human
agugccagaggugggcaggug

SEQ ID NO: 2294644 - RNA, 15 nt, Human
agugccagagguggg

SEQ ID NO: 2294645 - RNA, 16 nt, Human
agugccagaggugggc

SEQ ID NO: 2294646 - RNA, 18 nt, Human
agugccagaggugggcag

SEQ ID NO: 2294647 - RNA, 19 nt, Human
agugccagaggugggcagg

SEQ ID NO: 2294648 - RNA, 16 nt, Human
agugcaugcugucccu

SEQ ID NO: 2294649 - RNA, 22 nt, Human
agugcauuuaugagcucuucau

SEQ ID NO: 2294650 - RNA, 14 nt, Human
agugcaugcugucc

SEQ ID NO: 2294651 - RNA, 14 nt, Human
agugcauauuccuu

SEQ ID NO: 2294652 - RNA, 16 nt, Human
agugcauauuccuuuc

SEQ ID NO: 2294653 - RNA, 18 nt, Human
agugcauauuccuuucua

SEQ ID NO: 2294654 - RNA, 19 nt, Human
agugcauauuccuuucuau

SEQ ID NO: 2294655 - RNA, 20 nt, Human
agugcauauuccuuucuauc

SEQ ID NO: 2294656 - RNA, 14 nt, Human
agugcauccaaagg

SEQ ID NO: 2294657 - RNA, 15 nt, Human
agugcauccaaaggu

SEQ ID NO: 2294658 - RNA, 21 nt, Human
agugcauccaaaggugcucag

SEQ ID NO: 2294659 - RNA, 17 nt, Human
agugcaacacugaagcu

SEQ ID NO: 2294660 - RNA, 18 nt, Human
agugcaaauuugauacau

SEQ ID NO: 2294661 - RNA, 21 nt, Human
agugcaaagauuugcuuuaau

SEQ ID NO: 2294662 - RNA, 17 nt, Human
agugcaaaucauagcug

SEQ ID NO: 2294663 - RNA, 18 nt, Human
agugcaaaucauagcugg

SEQ ID NO: 2294664 - RNA, 15 nt, Human
agugcaacaguagca

SEQ ID NO: 2294665 - RNA, 20 nt, Human
agugcaacagcacuggcucu

SEQ ID NO: 2294666 - RNA, 19 nt, Human
agugauauggcagaagaca

SEQ ID NO: 2294667 - RNA, 14 nt, Human
agugcaaauuguca

SEQ ID NO: 2294668 - RNA, 17 nt, Human
agugauacaacuucaag

SEQ ID NO: 2294669 - RNA, 20 nt, Human
agugauagagcuaacccuua

SEQ ID NO: 2294670 - RNA, 23 nt, Human
agugauacaacuucaagugcaug

SEQ ID NO: 2294671 - RNA, 15 nt, Human
agugauagucuuuug

SEQ ID NO: 2294672 - RNA, 17 nt, Human
agugauagucuuuugcu

SEQ ID NO: 2294673 - RNA, 19 nt, Human
agugauaauuucuggaauu

SEQ ID NO: 2294674 - RNA, 20 nt, Human
agugaguuguugcccugggu

SEQ ID NO: 2294675 - RNA, 18 nt, Human
agugaguuguugcccugg

SEQ ID NO: 2294676 - RNA, 19 nt, Human
agugaguuguugcccuggg

SEQ ID NO: 2294677 - RNA, 20 nt, Human
agugauagucuuuugcuuuu

SEQ ID NO: 2294678 - RNA, 21 nt, Human
agugauagucuuuugcuuuug

SEQ ID NO: 2294679 - RNA, 14 nt, Human
agugauauaaauca

SEQ ID NO: 2294680 - RNA, 14 nt, Human
agugauauggcaga

SEQ ID NO: 2294681 - RNA, 17 nt, Human
agugauauggcagaaga

SEQ ID NO: 2294682 - RNA, 15 nt, Human
agugaggcccaggga

SEQ ID NO: 2294683 - RNA, 13 nt, Human
agugaggcccagg

SEQ ID NO: 2294684 - RNA, 13 nt, Human
agugaggcucugc

SEQ ID NO: 2294685 - RNA, 12 nt, Human
agugaggcucug

SEQ ID NO: 2294686 - RNA, 18 nt, Human
agugaggcauugcacagg

SEQ ID NO: 2294687 - RNA, 22 nt, Human
agugaggcauugcacagggaga

SEQ ID NO: 2294688 - RNA, 14 nt, Human
agugaggaugucug

SEQ ID NO: 2294689 - RNA, 21 nt, Human
agugagcuuggaaaggaccag

SEQ ID NO: 2294690 - RNA, 22 nt, Human
uguggauguuuuaauuccauga

SEQ ID NO: 2294691 - RNA, 15 nt, Human
uguggaugucuuccu

SEQ ID NO: 2294692 - RNA, 19 nt, Human
uguggauguuuuaauucca

SEQ ID NO: 2294693 - RNA, 17 nt, Human
agugagcuguaggugug

SEQ ID NO: 2294694 - RNA, 14 nt, Human
agugagcuuugcug

SEQ ID NO: 2294695 - RNA, 16 nt, Human
agugagcuuugcugcu

SEQ ID NO: 2294696 - RNA, 19 nt, Human
agugagcuuugcugcuaca

SEQ ID NO: 2294697 - RNA, 20 nt, Human
agugagcuuugcugcuacag

SEQ ID NO: 2294698 - RNA, 21 nt, Human
agugaggaauaguugagcccc

SEQ ID NO: 2294699 - RNA, 22 nt, Human
agugaggaaggcaggaagagag

SEQ ID NO: 2294700 - RNA, 20 nt, Human
agugaggaauaguugagccc

SEQ ID NO: 2294701 - RNA, 19 nt, Human
agugaggaagccaggucca

SEQ ID NO: 2294702 - RNA, 14 nt, Human
agugaggaaggcag

SEQ ID NO: 2294703 - RNA, 20 nt, Human
agugaggaaggcaggaagag

SEQ ID NO: 2294704 - RNA, 16 nt, Human
agugaggaugaaaaaa

SEQ ID NO: 2294705 - RNA, 23 nt, Human
ugugcugguguccugaccacccu

SEQ ID NO: 2294706 - RNA, 19 nt, Human
ugugcugguguccugacca

SEQ ID NO: 2294707 - RNA, 14 nt, Human
ugugcuguggaagc

SEQ ID NO: 2294708 - RNA, 17 nt, Human
ugugcugugcccaaguu

SEQ ID NO: 2294709 - RNA, 16 nt, Human
ugugcuguggaagcaa

SEQ ID NO: 2294710 - RNA, 12 nt, Human
ugugcuguguaa

SEQ ID NO: 2294711 - RNA, 17 nt, Human
ugugcuguggaagcaac

SEQ ID NO: 2294712 - RNA, 17 nt, Human
ugugcuguggggcuggu

SEQ ID NO: 2294713 - RNA, 20 nt, Human
ugugcuguggggcugguagc

SEQ ID NO: 2294714 - RNA, 13 nt, Human
ugugcuguguaaa

SEQ ID NO: 2294715 - RNA, 14 nt, Human
ugugcuguguaaag

SEQ ID NO: 2294716 - RNA, 15 nt, Human
ugugcuguguaaagu

SEQ ID NO: 2294717 - RNA, 15 nt, Human
ugugcugugugugac

SEQ ID NO: 2294718 - RNA, 12 nt, Human
ugugcugugugu

SEQ ID NO: 2294719 - RNA, 16 nt, Human
ugugcuguguaaaguu

SEQ ID NO: 2294720 - RNA, 23 nt, Human
ugugcuguguaaaguuagucuac

SEQ ID NO: 2294721 - RNA, 18 nt, Human
ugugcugcccugcccacc

SEQ ID NO: 2294722 - RNA, 19 nt, Human
ugugcugcccugcccaccu

SEQ ID NO: 2294723 - RNA, 20 nt, Human
ugugcugcccugcccaccug

SEQ ID NO: 2294724 - RNA, 21 nt, Human
ugugcugcccugcccaccugg

SEQ ID NO: 2294725 - RNA, 14 nt, Human
uguggaugauaaaa

SEQ ID NO: 2294726 - RNA, 23 nt, Human
uguggaugagcccucagaacccu

SEQ ID NO: 2294727 - RNA, 19 nt, Human
uguggaugagcccucagaa

SEQ ID NO: 2294728 - RNA, 14 nt, Human
uguggaucagagau

SEQ ID NO: 2294729 - RNA, 21 nt, Human
uguggaucaaauccagccugc

SEQ ID NO: 2294730 - RNA, 20 nt, Human
uguggaucaaccaucgcuuu

SEQ ID NO: 2294731 - RNA, 19 nt, Human
uguggaucaaccaucgcuu

SEQ ID NO: 2294732 - RNA, 17 nt, Human
uguggaucagagaugca

SEQ ID NO: 2294733 - RNA, 23 nt, Human
agugagcugguuuuuagcggaga

SEQ ID NO: 2294734 - RNA, 22 nt, Human
uguggauuuaacagaaauguac

SEQ ID NO: 2294735 - RNA, 20 nt, Human
uguggauuuaacagaaaugu

SEQ ID NO: 2294736 - RNA, 19 nt, Human
uguggauuuaacagaaaug

SEQ ID NO: 2294737 - RNA, 20 nt, Human
ugugauugggaauaaauaug

SEQ ID NO: 2294738 - RNA, 17 nt, Human
ugugauugggaauaaau

SEQ ID NO: 2294739 - RNA, 19 nt, Human
ugugauugggaauaaauau

SEQ ID NO: 2294740 - RNA, 15 nt, Human
ugugauugggaauaa

SEQ ID NO: 2294741 - RNA, 23 nt, Human
ugugauugacagcuuugcugcug

SEQ ID NO: 2294742 - RNA, 22 nt, Human
ugugauugacagcuuugcugcu

SEQ ID NO: 2294743 - RNA, 16 nt, Human
ugugauugacagcuuu

SEQ ID NO: 2294744 - RNA, 15 nt, Human
ugugauugaaucuga

SEQ ID NO: 2294745 - RNA, 21 nt, Human
ugugauucuaaugucuucauu

SEQ ID NO: 2294746 - RNA, 17 nt, Human
ugugauucuaaugucuu

SEQ ID NO: 2294747 - RNA, 13 nt, Human
ugugauugaaucu

SEQ ID NO: 2294748 - RNA, 22 nt, Human
ugugauucaaucuguaaacugu

SEQ ID NO: 2294749 - RNA, 20 nt, Human
ugugauucaaucuguaaacu

SEQ ID NO: 2294750 - RNA, 16 nt, Human
ugugauucaaucugua

SEQ ID NO: 2294751 - RNA, 22 nt, Human
ugugauuccacuacaccuggcu

SEQ ID NO: 2294752 - RNA, 19 nt, Human
ugugauuccuuugaagagg

SEQ ID NO: 2294753 - RNA, 20 nt, Human
ugugauuccuuugaagagga

SEQ ID NO: 2294754 - RNA, 21 nt, Human
ugugauuccuuugaagaggaa

SEQ ID NO: 2294755 - RNA, 14 nt, Human
ugugauucuaaugu

SEQ ID NO: 2294756 - RNA, 16 nt, Human
ugugauucuaaugucu

SEQ ID NO: 2294757 - RNA, 15 nt, Human
ugugccuaacaccag

SEQ ID NO: 2294758 - RNA, 15 nt, Human
ugugccgacagaagg

SEQ ID NO: 2294759 - RNA, 20 nt, Human
ugugcucaggagcccuggga

SEQ ID NO: 2294760 - RNA, 14 nt, Human
ugugcccucuugau

SEQ ID NO: 2294761 - RNA, 11 nt, Human
ugugcccuggu

SEQ ID NO: 2294762 - RNA, 13 nt, Human
ugugcccuggugg

SEQ ID NO: 2294763 - RNA, 14 nt, Human
ugugcccuggugga

SEQ ID NO: 2294764 - RNA, 15 nt, Human
ugugccgaaugugca

SEQ ID NO: 2294765 - RNA, 16 nt, Human
ugugccgaaugugcag

SEQ ID NO: 2294766 - RNA, 20 nt, Human
ugugcugcccgucuucagcc

SEQ ID NO: 2294767 - RNA, 19 nt, Human
ugugcugagucugaaggcu

SEQ ID NO: 2294768 - RNA, 18 nt, Human
ugugcugagucugaaggc

SEQ ID NO: 2294769 - RNA, 23 nt, Human
ugugcuccgugccuccaccacca

SEQ ID NO: 2294770 - RNA, 19 nt, Human
ugugcugaauucugcaaug

SEQ ID NO: 2294771 - RNA, 14 nt, Human
ugugcugacccucc

SEQ ID NO: 2294772 - RNA, 17 nt, Human
ugugcugacccuccugu

SEQ ID NO: 2294773 - RNA, 21 nt, Human
ugugcugacggaagccaacuu

SEQ ID NO: 2294774 - RNA, 14 nt, Human
ugugcugaggccuu

SEQ ID NO: 2294775 - RNA, 21 nt, Human
ugugcugaggccuuaucauuc

SEQ ID NO: 2294776 - RNA, 17 nt, Human
ugugcuccccuuugccu

SEQ ID NO: 2294777 - RNA, 21 nt, Human
ugugcucccugguucugauga

SEQ ID NO: 2294778 - RNA, 14 nt, Human
ugugcuccgugccu

SEQ ID NO: 2294779 - RNA, 16 nt, Human
ugugccuaacaccagc

SEQ ID NO: 2294780 - RNA, 21 nt, Human
ugugcucaggagcccugggag

SEQ ID NO: 2294781 - RNA, 14 nt, Human
ugugcucuccaagc

SEQ ID NO: 2294782 - RNA, 16 nt, Human
ugugcuccuccuuggu

SEQ ID NO: 2294783 - RNA, 16 nt, Human
ugugcuccgugccucc

SEQ ID NO: 2294784 - RNA, 20 nt, Human
ugugcuccgugccuccacca

SEQ ID NO: 2294785 - RNA, 19 nt, Human
ugugcucuccaagcccagu

SEQ ID NO: 2294786 - RNA, 22 nt, Human
agugagcggugcuguccucagg

SEQ ID NO: 2294787 - RNA, 14 nt, Human
agugagccuggcuc

SEQ ID NO: 2294788 - RNA, 15 nt, Human
agugagccuggcucu

SEQ ID NO: 2294789 - RNA, 23 nt, Human
agugagcggugcuguccucaggu

SEQ ID NO: 2294790 - RNA, 16 nt, Human
agugagcucuaugggc

SEQ ID NO: 2294791 - RNA, 17 nt, Human
agugagcucuaugggca

SEQ ID NO: 2294792 - RNA, 12 nt, Human
agugagcugguu

SEQ ID NO: 2294793 - RNA, 22 nt, Human
agugagccgcaucuucuccauc

SEQ ID NO: 2294794 - RNA, 20 nt, Human
agugagccgcaucuucucca

SEQ ID NO: 2294795 - RNA, 11 nt, Human
agugagccuga

SEQ ID NO: 2294796 - RNA, 24 nt, Human
agugagccgcaucuucuccaucug

SEQ ID NO: 2294797 - RNA, 13 nt, Human
agugagccuggcu

SEQ ID NO: 2294798 - RNA, 21 nt, Human
agugagccugaauuuuguugc

SEQ ID NO: 2294799 - RNA, 19 nt, Human
agugagccgcaucuucucc

SEQ ID NO: 2294800 - RNA, 16 nt, Human
agugagaugcauucuu

SEQ ID NO: 2294801 - RNA, 19 nt, Human
agugagauagcauugugaa

SEQ ID NO: 2294802 - RNA, 12 nt, Human
agugagaugcau

SEQ ID NO: 2294803 - RNA, 16 nt, Human
agugagauagcauugu

SEQ ID NO: 2294804 - RNA, 22 nt, Human
agugagauagcauugugaacug

SEQ ID NO: 2294805 - RNA, 23 nt, Human
agugagcugagaucgugccguua

SEQ ID NO: 2294806 - RNA, 19 nt, Human
ugugaugagaggaaaucac

SEQ ID NO: 2294807 - RNA, 14 nt, Human
ugugaugaggggag

SEQ ID NO: 2294808 - RNA, 16 nt, Human
ugugaugaggcagagg

SEQ ID NO: 2294809 - RNA, 16 nt, Human
ugugaugaggggaggg

SEQ ID NO: 2294810 - RNA, 17 nt, Human
ugugaugccacacagag

SEQ ID NO: 2294811 - RNA, 15 nt, Human
ugugaugccacacag

SEQ ID NO: 2294812 - RNA, 15 nt, Human
ugugauucaaucugu

SEQ ID NO: 2294813 - RNA, 22 nt, Human
ugugaugaugaaaugaggucag

SEQ ID NO: 2294814 - RNA, 14 nt, Human
agugagcacuaagg

SEQ ID NO: 2294815 - RNA, 22 nt, Human
agugagcacuaaggugugcucu

SEQ ID NO: 2294816 - RNA, 16 nt, Human
agugagaagcuuugcc

SEQ ID NO: 2294817 - RNA, 20 nt, Human
agugagaaaaagcuccuguc

SEQ ID NO: 2294818 - RNA, 17 nt, Human
agugagaauaggcagcc

SEQ ID NO: 2294819 - RNA, 12 nt, Human
agugagacagaa

SEQ ID NO: 2294820 - RNA, 13 nt, Human
agugagagggcau

SEQ ID NO: 2294821 - RNA, 14 nt, Human
agugagagggcaug

SEQ ID NO: 2294822 - RNA, 20 nt, Human
agugagaagcuuugcccucc

SEQ ID NO: 2294823 - RNA, 22 nt, Human
agugagagggcaugcgcacaag

SEQ ID NO: 2294824 - RNA, 17 nt, Human
agugacuguucaagagc

SEQ ID NO: 2294825 - RNA, 19 nt, Human
agugacuguucaagagcac

SEQ ID NO: 2294826 - RNA, 20 nt, Human
agugacuguucaagagcaca

SEQ ID NO: 2294827 - RNA, 21 nt, Human
agugacuuagcagaugcuggu

SEQ ID NO: 2294828 - RNA, 22 nt, Human
agugacucgggcuccugugccc

SEQ ID NO: 2294829 - RNA, 14 nt, Human
agugagaaaaagcu

SEQ ID NO: 2294830 - RNA, 18 nt, Human
agugacuuuggcugcaug

SEQ ID NO: 2294831 - RNA, 18 nt, Human
agugagaaaaagcuccug

SEQ ID NO: 2294832 - RNA, 19 nt, Human
agugagaaaaagcuccugu

SEQ ID NO: 2294833 - RNA, 22 nt, Human
agugagaaaaagcuccuguccu

SEQ ID NO: 2294834 - RNA, 14 nt, Human
agugacuugcccag

SEQ ID NO: 2294835 - RNA, 15 nt, Human
agugacuugcccagu

SEQ ID NO: 2294836 - RNA, 16 nt, Human
agugacuuguguccca

SEQ ID NO: 2294837 - RNA, 18 nt, Human
agugacuugugucccaug

SEQ ID NO: 2294838 - RNA, 16 nt, Human
agugaacuugggccac

SEQ ID NO: 2294839 - RNA, 13 nt, Human
agugaaccaaaga

SEQ ID NO: 2294840 - RNA, 15 nt, Human
agugaaccaaagaga

SEQ ID NO: 2294841 - RNA, 22 nt, Human
agugaaccaaagagacuggagc

SEQ ID NO: 2294842 - RNA, 23 nt, Human
agugaaccaaagagacuggagca

SEQ ID NO: 2294843 - RNA, 16 nt, Human
agugaacacuagccag

SEQ ID NO: 2294844 - RNA, 17 nt, Human
agugaacacuagccaga

SEQ ID NO: 2294845 - RNA, 23 nt, Human
agugaacaaauuuacagagacag

SEQ ID NO: 2294846 - RNA, 22 nt, Human
agugaacaaauuuacagagaca

SEQ ID NO: 2294847 - RNA, 23 nt, Human
agugacucauccucuugaagaug

SEQ ID NO: 2294848 - RNA, 18 nt, Human
agugacucauccucuuga

SEQ ID NO: 2294849 - RNA, 22 nt, Human
agugacuaugaacuucucucag

SEQ ID NO: 2294850 - RNA, 21 nt, Human
agugaaccaucauuauaaacg

SEQ ID NO: 2294851 - RNA, 13 nt, Human
agugaaccaucau

SEQ ID NO: 2294852 - RNA, 15 nt, Human
agugaaccuguauaa

SEQ ID NO: 2294853 - RNA, 17 nt, Human
agugaaccuaccuucau

SEQ ID NO: 2294854 - RNA, 20 nt, Human
agugaacuacgcuugcucau

SEQ ID NO: 2294855 - RNA, 21 nt, Human
agugacugauggcuaauguac

SEQ ID NO: 2294856 - RNA, 13 nt, Human
agugacuccagga

SEQ ID NO: 2294857 - RNA, 17 nt, Human
agugacuccaggagagg

SEQ ID NO: 2294858 - RNA, 14 nt, Human
agugacucgagggu

SEQ ID NO: 2294859 - RNA, 15 nt, Human
agugacucgggcucc

SEQ ID NO: 2294860 - RNA, 17 nt, Human
agugacucgggcuccug

SEQ ID NO: 2294861 - RNA, 19 nt, Human
agugacucgggcuccugug

SEQ ID NO: 2294862 - RNA, 20 nt, Human
agugacucgggcuccugugc

SEQ ID NO: 2294863 - RNA, 21 nt, Human
agugacucgggcuccugugcc

SEQ ID NO: 2294864 - RNA, 15 nt, Human
agucuugugcuuuuc

SEQ ID NO: 2294865 - RNA, 12 nt, Human
agucuugugcuu

SEQ ID NO: 2294866 - RNA, 22 nt, Human
agucuuguauuaaguuguuaau

SEQ ID NO: 2294867 - RNA, 16 nt, Human
agucuuucacauuuaa

SEQ ID NO: 2294868 - RNA, 18 nt, Human
agucuuucacauuuaaau

SEQ ID NO: 2294869 - RNA, 21 nt, Human
agugaacaaauuuacagagac

SEQ ID NO: 2294870 - RNA, 20 nt, Human
agucuugugcuuuuccuauu

SEQ ID NO: 2294871 - RNA, 20 nt, Human
agucuuuacagcugagcaca

SEQ ID NO: 2294872 - RNA, 22 nt, Human
ugugacugauguuacaucacag

SEQ ID NO: 2294873 - RNA, 18 nt, Human
ugugacuucagcucuguu

SEQ ID NO: 2294874 - RNA, 19 nt, Human
ugugacuucagcucuguuu

SEQ ID NO: 2294875 - RNA, 23 nt, Human
ugugacuugcaucguggagacag

SEQ ID NO: 2294876 - RNA, 15 nt, Human
ugugacuucuccagg

SEQ ID NO: 2294877 - RNA, 20 nt, Human
ugucuccagacccccacccc

SEQ ID NO: 2294878 - RNA, 19 nt, Human
ugucuccagacccccaccc

SEQ ID NO: 2294879 - RNA, 17 nt, Human
ugucuccagacccccac

SEQ ID NO: 2294880 - RNA, 16 nt, Human
ugucuccagaccccca

SEQ ID NO: 2294881 - RNA, 14 nt, Human
ugucuccagacccc

SEQ ID NO: 2294882 - RNA, 12 nt, Human
ugucuccagacc

SEQ ID NO: 2294883 - RNA, 11 nt, Human
ugucuccagac

SEQ ID NO: 2294884 - RNA, 14 nt, Human
ugucucccuggccc

SEQ ID NO: 2294885 - RNA, 23 nt, Human
ugucuccagacccccaccccuuc

SEQ ID NO: 2294886 - RNA, 22 nt, Human
ugucuccagacccccaccccuu

SEQ ID NO: 2294887 - RNA, 15 nt, Human
ugucuccauggcccu

SEQ ID NO: 2294888 - RNA, 15 nt, Human
ugucucccuggcccu

SEQ ID NO: 2294889 - RNA, 16 nt, Human
ugucucccuggcccuc

SEQ ID NO: 2294890 - RNA, 16 nt, Human
ugugacugaucucucg

SEQ ID NO: 2294891 - RNA, 21 nt, Human
ugugagccccugguccugagg

SEQ ID NO: 2294892 - RNA, 22 nt, Human
ugugagccccugguccugaggg

SEQ ID NO: 2294893 - RNA, 14 nt, Human
ugugagccuuggcu

SEQ ID NO: 2294894 - RNA, 16 nt, Human
ugugaggaaagucauu

SEQ ID NO: 2294895 - RNA, 22 nt, Human
ugugaggaaagucauuggcuuu

SEQ ID NO: 2294896 - RNA, 23 nt, Human
ugugaggaaagucauuggcuuua

SEQ ID NO: 2294897 - RNA, 14 nt, Human
agucucccuucucc

SEQ ID NO: 2294898 - RNA, 11 nt, Human
ugugaggaagc

SEQ ID NO: 2294899 - RNA, 19 nt, Human
ugugagacccccacaccuc

SEQ ID NO: 2294900 - RNA, 18 nt, Human
ugugagacccccacaccu

SEQ ID NO: 2294901 - RNA, 16 nt, Human
ugugagacccccacac

SEQ ID NO: 2294902 - RNA, 15 nt, Human
ugugagacccccaca

SEQ ID NO: 2294903 - RNA, 13 nt, Human
ugugagagaaagu

SEQ ID NO: 2294904 - RNA, 12 nt, Human
ugugagccccug

SEQ ID NO: 2294905 - RNA, 14 nt, Human
ugugagccccuggu

SEQ ID NO: 2294906 - RNA, 17 nt, Human
ugugagccccugguccu

SEQ ID NO: 2294907 - RNA, 18 nt, Human
ugugagcccagcuggguc

SEQ ID NO: 2294908 - RNA, 19 nt, Human
ugugagacucgagaacuuu

SEQ ID NO: 2294909 - RNA, 14 nt, Human
ugugagacccccac

SEQ ID NO: 2294910 - RNA, 13 nt, Human
ugugagaccccca

SEQ ID NO: 2294911 - RNA, 14 nt, Human
ugugagaaucaaaa

SEQ ID NO: 2294912 - RNA, 18 nt, Human
ugugagacagugggaaau

SEQ ID NO: 2294913 - RNA, 19 nt, Human
ugugagacagugggaaaua

SEQ ID NO: 2294914 - RNA, 21 nt, Human
ugugagaagugaaugcuggga

SEQ ID NO: 2294915 - RNA, 22 nt, Human
ugugagaagugaaugcugggac

SEQ ID NO: 2294916 - RNA, 23 nt, Human
ugugagaagugaaugcugggacu

SEQ ID NO: 2294917 - RNA, 24 nt, Human
ugugagaagugaaugcugggacuc

SEQ ID NO: 2294918 - RNA, 19 nt, Human
agucucgcucuguugccca

SEQ ID NO: 2294919 - RNA, 15 nt, Human
agucucgcucuguca

SEQ ID NO: 2294920 - RNA, 20 nt, Human
agucucgcucugucacccag

SEQ ID NO: 2294921 - RNA, 16 nt, Human
agucucuagguucuga

SEQ ID NO: 2294922 - RNA, 19 nt, Human
agucucuucuccacuggau

SEQ ID NO: 2294923 - RNA, 14 nt, Human
agucuccuuccccu

SEQ ID NO: 2294924 - RNA, 17 nt, Human
agucucccuucucccau

SEQ ID NO: 2294925 - RNA, 17 nt, Human
agucuccuuugcacuga

SEQ ID NO: 2294926 - RNA, 18 nt, Human
agucuccuuugcacugag

SEQ ID NO: 2294927 - RNA, 19 nt, Human
agucuccuuugcacugagg

SEQ ID NO: 2294928 - RNA, 21 nt, Human
agucuccuuugcacugagggc

SEQ ID NO: 2294929 - RNA, 22 nt, Human
agucuccuuugcacugagggcc

SEQ ID NO: 2294930 - RNA, 23 nt, Human
agucuccuuugcacugagggcca

SEQ ID NO: 2294931 - RNA, 17 nt, Human
agucucccuuucccuuc

SEQ ID NO: 2294932 - RNA, 22 nt, Human
agucucuuuaaucuucaguuuu

SEQ ID NO: 2294933 - RNA, 15 nt, Human
agucucuuuucuuua

SEQ ID NO: 2294934 - RNA, 21 nt, Human
agucucuuuucuuuagagcau

SEQ ID NO: 2294935 - RNA, 22 nt, Human
agucucuuuucuuuagagcauu

SEQ ID NO: 2294936 - RNA, 23 nt, Human
agucucuuuaaucuucaguuuua

SEQ ID NO: 2294937 - RNA, 21 nt, Human
agucucuuuaaucuucaguuu

SEQ ID NO: 2294938 - RNA, 17 nt, Human
agucucuuuaaucuuca

SEQ ID NO: 2294939 - RNA, 15 nt, Human
agucucuuuaaucuu

SEQ ID NO: 2294940 - RNA, 17 nt, Human
agucucuuguauuaaac

SEQ ID NO: 2294941 - RNA, 18 nt, Human
agucucuucuccacugga

SEQ ID NO: 2294942 - RNA, 21 nt, Human
agucucuucuccacuggaugg

SEQ ID NO: 2294943 - RNA, 16 nt, Human
agucucuugauucaua

SEQ ID NO: 2294944 - RNA, 17 nt, Human
agucucuugauucauaa

SEQ ID NO: 2294945 - RNA, 23 nt, Human
agucuuagauguauauauuuccu

SEQ ID NO: 2294946 - RNA, 16 nt, Human
agucuuagauguauau

SEQ ID NO: 2294947 - RNA, 14 nt, Human
agucuuagauguau

SEQ ID NO: 2294948 - RNA, 13 nt, Human
agucuuagaugua

SEQ ID NO: 2294949 - RNA, 14 nt, Human
agucugaagcagau

SEQ ID NO: 2294950 - RNA, 21 nt, Human
agucugaagcagaugcaaaga

SEQ ID NO: 2294951 - RNA, 12 nt, Human
agucugaaggcu

SEQ ID NO: 2294952 - RNA, 23 nt, Human
agucucuuuucuuuagagcauug

SEQ ID NO: 2294953 - RNA, 15 nt, Human
agucugaacagcugu

SEQ ID NO: 2294954 - RNA, 16 nt, Human
agucugaacagcugua

SEQ ID NO: 2294955 - RNA, 18 nt, Human
agucugaacagcuguaau

SEQ ID NO: 2294956 - RNA, 20 nt, Human
uguucgcauggucacacacu

SEQ ID NO: 2294957 - RNA, 19 nt, Human
uguuccuuagaccuuccau

SEQ ID NO: 2294958 - RNA, 18 nt, Human
uguuccuucacauccugu

SEQ ID NO: 2294959 - RNA, 21 nt, Human
uguuccuggcaauaguguguu

SEQ ID NO: 2294960 - RNA, 14 nt, Human
uguuccuggcaaua

SEQ ID NO: 2294961 - RNA, 19 nt, Human
uguuccuggcaguuuaaaa

SEQ ID NO: 2294962 - RNA, 15 nt, Human
uguuccuggcaguuu

SEQ ID NO: 2294963 - RNA, 15 nt, Human
uguucgcgugugugg

SEQ ID NO: 2294964 - RNA, 23 nt, Human
uguucgcguguguggguggauau

SEQ ID NO: 2294965 - RNA, 23 nt, Human
uguucgcauggucacacacugau

SEQ ID NO: 2294966 - RNA, 22 nt, Human
uguucgcauggucacacacuga

SEQ ID NO: 2294967 - RNA, 21 nt, Human
uguuccaagacauugucaaua

SEQ ID NO: 2294968 - RNA, 15 nt, Human
uguuccaauaaacag

SEQ ID NO: 2294969 - RNA, 19 nt, Human
uguuccaagacauugucaa

SEQ ID NO: 2294970 - RNA, 18 nt, Human
uguuccaagacauuguca

SEQ ID NO: 2294971 - RNA, 15 nt, Human
uguuccaagacauug

SEQ ID NO: 2294972 - RNA, 14 nt, Human
uguuccaagacauu

SEQ ID NO: 2294973 - RNA, 11 nt, Human
uguuccaagac

SEQ ID NO: 2294974 - RNA, 14 nt, Human
uguuccaacugccc

SEQ ID NO: 2294975 - RNA, 19 nt, Human
uguuccacaaguuaaauaa

SEQ ID NO: 2294976 - RNA, 20 nt, Human
uguuccaagacauugucaau

SEQ ID NO: 2294977 - RNA, 22 nt, Human
uguuccugaauucuauuugcug

SEQ ID NO: 2294978 - RNA, 13 nt, Human
uguuaugaaauaa

SEQ ID NO: 2294979 - RNA, 16 nt, Human
uguuaugaaauaaaga

SEQ ID NO: 2294980 - RNA, 21 nt, Human
uguuaugaaauaaagaaauug

SEQ ID NO: 2294981 - RNA, 14 nt, Human
aguguguauuaaaa

SEQ ID NO: 2294982 - RNA, 19 nt, Human
aguguguauuaaaaaaaac

SEQ ID NO: 2294983 - RNA, 20 nt, Human
aguguguaugugcgugugug

SEQ ID NO: 2294984 - RNA, 11 nt, Human
aguguguauua

SEQ ID NO: 2294985 - RNA, 19 nt, Human
aguguguaugugcgugugu

SEQ ID NO: 2294986 - RNA, 16 nt, Human
aguguguaugugcgug

SEQ ID NO: 2294987 - RNA, 11 nt, Human
aguguguaaag

SEQ ID NO: 2294988 - RNA, 22 nt, Human
agugugguguuuccuggcacug

SEQ ID NO: 2294989 - RNA, 9 nt, Human
aguguguaa

SEQ ID NO: 2294990 - RNA, 17 nt, Human
uguucauuuugagcuga

SEQ ID NO: 2294991 - RNA, 14 nt, Human
uguucauuuccuca

SEQ ID NO: 2294992 - RNA, 17 nt, Human
uguuccaaaugaauguu

SEQ ID NO: 2294993 - RNA, 18 nt, Human
uguucauuuugagcugaa

SEQ ID NO: 2294994 - RNA, 20 nt, Human
uguucauuuugagcugaaau

SEQ ID NO: 2294995 - RNA, 17 nt, Human
uguuaugacuccagaau

SEQ ID NO: 2294996 - RNA, 13 nt, Human
uguuaugacucca

SEQ ID NO: 2294997 - RNA, 20 nt, Human
aguguggaagccggagggug

SEQ ID NO: 2294998 - RNA, 17 nt, Human
aguguggcaguuuggca

SEQ ID NO: 2294999 - RNA, 16 nt, Human
aguguggcaguuuggc

SEQ ID NO: 2295000 - RNA, 14 nt, Human
aguguggcuccccu

SEQ ID NO: 2295001 - RNA, 21 nt, Human
aguguggcuccccucuauuua

SEQ ID NO: 2295002 - RNA, 20 nt, Human
aguguggcugaggaggccuc

SEQ ID NO: 2295003 - RNA, 17 nt, Human
aguguggcuccccucua

SEQ ID NO: 2295004 - RNA, 16 nt, Human
aguguggcuccccucu

SEQ ID NO: 2295005 - RNA, 14 nt, Human
agugugggaaugcg

SEQ ID NO: 2295006 - RNA, 17 nt, Human
agugugggaagggagag

SEQ ID NO: 2295007 - RNA, 15 nt, Human
agugugggaagggag

SEQ ID NO: 2295008 - RNA, 19 nt, Human
agugugaguaagagcuggu

SEQ ID NO: 2295009 - RNA, 18 nt, Human
agugugaguaagagcugg

SEQ ID NO: 2295010 - RNA, 17 nt, Human
agugugaguaagagcug

SEQ ID NO: 2295011 - RNA, 16 nt, Human
agugugaguaagagcu

SEQ ID NO: 2295012 - RNA, 18 nt, Human
agugugaggccagggcag

SEQ ID NO: 2295013 - RNA, 21 nt, Human
agugugccugaagucccagau

SEQ ID NO: 2295014 - RNA, 19 nt, Human
aguguggaaauuaagaaga

SEQ ID NO: 2295015 - RNA, 17 nt, Human
aguguggaaauuaagaa

SEQ ID NO: 2295016 - RNA, 21 nt, Human
agugugcuuuaugcugaaaca

SEQ ID NO: 2295017 - RNA, 18 nt, Human
agugugcuuuaugcugaa

SEQ ID NO: 2295018 - RNA, 12 nt, Human
agugugcuuuau

SEQ ID NO: 2295019 - RNA, 12 nt, Human
agugugcuggag

SEQ ID NO: 2295020 - RNA, 13 nt, Human
agugugcuggagg

SEQ ID NO: 2295021 - RNA, 15 nt, Human
agugugcuggaggac

SEQ ID NO: 2295022 - RNA, 14 nt, Human
agugguauagaaau

SEQ ID NO: 2295023 - RNA, 16 nt, Human
agugguaagcucuggc

SEQ ID NO: 2295024 - RNA, 15 nt, Human
agugguauagaaaug

SEQ ID NO: 2295025 - RNA, 16 nt, Human
agugguauagaaaugc

SEQ ID NO: 2295026 - RNA, 18 nt, Human
agugguauagaaaugcug

SEQ ID NO: 2295027 - RNA, 22 nt, Human
aguggucaaaccgcacucaccc

SEQ ID NO: 2295028 - RNA, 19 nt, Human
agugguaagcucuggcuuu

SEQ ID NO: 2295029 - RNA, 23 nt, Human
aguggucaaaccgcacucaccca

SEQ ID NO: 2295030 - RNA, 15 nt, Human
aguggucccugcccu

SEQ ID NO: 2295031 - RNA, 16 nt, Human
aguggucccugcccuc

SEQ ID NO: 2295032 - RNA, 17 nt, Human
agugguccacaucccgg

SEQ ID NO: 2295033 - RNA, 18 nt, Human
agugguccauggaaugcu

SEQ ID NO: 2295034 - RNA, 19 nt, Human
agugguccauggaaugcuu

SEQ ID NO: 2295035 - RNA, 12 nt, Human
agugugaguaag

SEQ ID NO: 2295036 - RNA, 15 nt, Human
agugugaggccaggg

SEQ ID NO: 2295037 - RNA, 16 nt, Human
agugugagcagugagu

SEQ ID NO: 2295038 - RNA, 21 nt, Human
agugugagcagugaguuacag

SEQ ID NO: 2295039 - RNA, 20 nt, Human
agugugccugaagucccaga

SEQ ID NO: 2295040 - RNA, 12 nt, Human
agugugagaauc

SEQ ID NO: 2295041 - RNA, 14 nt, Human
agugugaccaggca

SEQ ID NO: 2295042 - RNA, 20 nt, Human
agugugacugaucucucgug

SEQ ID NO: 2295043 - RNA, 12 nt, Human
uguugccagaga

SEQ ID NO: 2295044 - RNA, 16 nt, Human
uguugccacaggacac

SEQ ID NO: 2295045 - RNA, 15 nt, Human
uguugccacaggaca

SEQ ID NO: 2295046 - RNA, 14 nt, Human
uguugccacaggac

SEQ ID NO: 2295047 - RNA, 14 nt, Human
uguugccaagcugg

SEQ ID NO: 2295048 - RNA, 22 nt, Human
uguugcccacagcuguaugauu

SEQ ID NO: 2295049 - RNA, 23 nt, Human
uguugcccaggcuggcgugcagu

SEQ ID NO: 2295050 - RNA, 20 nt, Human
uguugcccaggcuggcgugc

SEQ ID NO: 2295051 - RNA, 18 nt, Human
agugugugcaugugugug

SEQ ID NO: 2295052 - RNA, 17 nt, Human
agugugugcaugugugu

SEQ ID NO: 2295053 - RNA, 14 nt, Human
agugugugggucua

SEQ ID NO: 2295054 - RNA, 23 nt, Human
agugugugcaugugugugcucag

SEQ ID NO: 2295055 - RNA, 17 nt, Human
agugugugcaugugugc

SEQ ID NO: 2295056 - RNA, 16 nt, Human
agugugugcaugugug

SEQ ID NO: 2295057 - RNA, 14 nt, Human
agugugugcaugug

SEQ ID NO: 2295058 - RNA, 22 nt, Human
uguugccuugaaccacuucccu

SEQ ID NO: 2295059 - RNA, 20 nt, Human
agugugugcacaugugugcg

SEQ ID NO: 2295060 - RNA, 22 nt, Human
agugugugcacaugugugcgug

SEQ ID NO: 2295061 - RNA, 20 nt, Human
uguugccuugaaccacuucc

SEQ ID NO: 2295062 - RNA, 12 nt, Human
uguugcccuggg

SEQ ID NO: 2295063 - RNA, 13 nt, Human
uguugcccugagu

SEQ ID NO: 2295064 - RNA, 23 nt, Human
uguugccaaauauguccuggggu

SEQ ID NO: 2295065 - RNA, 18 nt, Human
uguugccaagcuccaagc

SEQ ID NO: 2295066 - RNA, 20 nt, Human
uguugccaagcuccaagccc

SEQ ID NO: 2295067 - RNA, 19 nt, Human
uguugccaaauauguccug

SEQ ID NO: 2295068 - RNA, 20 nt, Human
uguugcaugggcuaaugaag

SEQ ID NO: 2295069 - RNA, 20 nt, Human
uguugccaaauauguccugg

SEQ ID NO: 2295070 - RNA, 22 nt, Human
uguugccaaauauguccugggg

SEQ ID NO: 2295071 - RNA, 17 nt, Human
uguugcaugauguauuu

SEQ ID NO: 2295072 - RNA, 14 nt, Human
uguugcauggaugu

SEQ ID NO: 2295073 - RNA, 17 nt, Human
uguugcauggauguuuu

SEQ ID NO: 2295074 - RNA, 14 nt, Human
uguugcaugggcua

SEQ ID NO: 2295075 - RNA, 15 nt, Human
uguugcauagaauaa

SEQ ID NO: 2295076 - RNA, 16 nt, Human
uguugcacccagcccu

SEQ ID NO: 2295077 - RNA, 17 nt, Human
uguugcacccagcccug

SEQ ID NO: 2295078 - RNA, 18 nt, Human
uguugcacccagcccugg

SEQ ID NO: 2295079 - RNA, 19 nt, Human
uguugcacccagcccuggu

SEQ ID NO: 2295080 - RNA, 23 nt, Human
uguugcacacccacucagcuccg

SEQ ID NO: 2295081 - RNA, 14 nt, Human
uguugcacccagcc

SEQ ID NO: 2295082 - RNA, 15 nt, Human
uguugcacccagccc

SEQ ID NO: 2295083 - RNA, 15 nt, Human
uguucuaagaaguga

SEQ ID NO: 2295084 - RNA, 16 nt, Human
aguuacuagguaacuu

SEQ ID NO: 2295085 - RNA, 22 nt, Human
aguuacuagguaacuucauauu

SEQ ID NO: 2295086 - RNA, 19 nt, Human
aguuacuagguaacuucau

SEQ ID NO: 2295087 - RNA, 18 nt, Human
aguuacuagguaacuuca

SEQ ID NO: 2295088 - RNA, 17 nt, Human
aguuacuagguaacuuc

SEQ ID NO: 2295089 - RNA, 13 nt, Human
aguuacucagaau

SEQ ID NO: 2295090 - RNA, 20 nt, Human
aguguuguggauuuaacaga

SEQ ID NO: 2295091 - RNA, 19 nt, Human
aguguuguggauuuaacag

SEQ ID NO: 2295092 - RNA, 18 nt, Human
aguuacucagcccugggc

SEQ ID NO: 2295093 - RNA, 17 nt, Human
aguuacucagcccuggg

SEQ ID NO: 2295094 - RNA, 16 nt, Human
aguuacucagcccugg

SEQ ID NO: 2295095 - RNA, 15 nt, Human
aguuacucagcccug

SEQ ID NO: 2295096 - RNA, 23 nt, Human
aguuacucagcccugggccccac

SEQ ID NO: 2295097 - RNA, 19 nt, Human
aguuacucagcccugggcc

SEQ ID NO: 2295098 - RNA, 13 nt, Human
aguuagacuguug

SEQ ID NO: 2295099 - RNA, 14 nt, Human
aguuacucagcccu

SEQ ID NO: 2295100 - RNA, 13 nt, Human
aguuacucagccc

SEQ ID NO: 2295101 - RNA, 12 nt, Human
aguuacucagcc

SEQ ID NO: 2295102 - RNA, 23 nt, Human
aguuacuaucaugucaaacguga

SEQ ID NO: 2295103 - RNA, 12 nt, Human
aguuagagcuga

SEQ ID NO: 2295104 - RNA, 19 nt, Human
aguuagaggccagccuggc

SEQ ID NO: 2295105 - RNA, 15 nt, Human
aguuagcaaacuuug

SEQ ID NO: 2295106 - RNA, 16 nt, Human
aguuagcaaacuuugu

SEQ ID NO: 2295107 - RNA, 22 nt, Human
aguuagcaaacuuuguauguca

SEQ ID NO: 2295108 - RNA, 16 nt, Human
aguuagcucaggaggc

SEQ ID NO: 2295109 - RNA, 14 nt, Human
aguuagcucaggag

SEQ ID NO: 2295110 - RNA, 11 nt, Human
aguuagcacca

SEQ ID NO: 2295111 - RNA, 18 nt, Human
aguguucccuuuccuacu

SEQ ID NO: 2295112 - RNA, 16 nt, Human
aguguuccuauuuggg

SEQ ID NO: 2295113 - RNA, 17 nt, Human
aguguucugcaaaaaua

SEQ ID NO: 2295114 - RNA, 20 nt, Human
aguguuccuauuuggggcuu

SEQ ID NO: 2295115 - RNA, 15 nt, Human
aguguucuguuuaau

SEQ ID NO: 2295116 - RNA, 16 nt, Human
aguguugaaaauguuc

SEQ ID NO: 2295117 - RNA, 16 nt, Human
aguguuguggauuuaa

SEQ ID NO: 2295118 - RNA, 12 nt, Human
agugugugugcg

SEQ ID NO: 2295119 - RNA, 16 nt, Human
aguguuccccuuccac

SEQ ID NO: 2295120 - RNA, 21 nt, Human
aguguuccgugguuaaacucg

SEQ ID NO: 2295121 - RNA, 21 nt, Human
aguguuccccuuccacugagg

SEQ ID NO: 2295122 - RNA, 18 nt, Human
aguguguguuuuucauaa

SEQ ID NO: 2295123 - RNA, 21 nt, Human
aguguucauaaauaaaguuug

SEQ ID NO: 2295124 - RNA, 12 nt, Human
ugugucugcagg

SEQ ID NO: 2295125 - RNA, 14 nt, Human
ugugucucuuuucu

SEQ ID NO: 2295126 - RNA, 21 nt, Human
ugugucuaaacugcauuaccg

SEQ ID NO: 2295127 - RNA, 22 nt, Human
ugugucucuugguccugcugca

SEQ ID NO: 2295128 - RNA, 19 nt, Human
ugugucuaaauuugaaugu

SEQ ID NO: 2295129 - RNA, 22 nt, Human
ugugucuaaauuugaauguuaa

SEQ ID NO: 2295130 - RNA, 19 nt, Human
ugugucugcgucuguguug

SEQ ID NO: 2295131 - RNA, 16 nt, Human
ugugucucuuuucucu

SEQ ID NO: 2295132 - RNA, 13 nt, Human
ugugucuguacac

SEQ ID NO: 2295133 - RNA, 14 nt, Human
ugugucugcucagu

SEQ ID NO: 2295134 - RNA, 14 nt, Human
ugugucuguacacg

SEQ ID NO: 2295135 - RNA, 21 nt, Human
ugugucuguacacguguccug

SEQ ID NO: 2295136 - RNA, 14 nt, Human
ugugucuuaauuau

SEQ ID NO: 2295137 - RNA, 16 nt, Human
ugugucuuaauuauua

SEQ ID NO: 2295138 - RNA, 18 nt, Human
uguguguugucuugaaag

SEQ ID NO: 2295139 - RNA, 18 nt, Human
uguguguugucucuugag

SEQ ID NO: 2295140 - RNA, 18 nt, Human
uguguguuguguguggga

SEQ ID NO: 2295141 - RNA, 11 nt, Human
uguguguuuau

SEQ ID NO: 2295142 - RNA, 22 nt, Human
uguguguugaucccaagacaau

SEQ ID NO: 2295143 - RNA, 17 nt, Human
uguguguugccacagga

SEQ ID NO: 2295144 - RNA, 16 nt, Human
uguguguugccacagg

SEQ ID NO: 2295145 - RNA, 20 nt, Human
uguguguugccacaggacac

SEQ ID NO: 2295146 - RNA, 19 nt, Human
uguguguugccacaggaca

SEQ ID NO: 2295147 - RNA, 20 nt, Human
ugugucuugcaauggcagcc

SEQ ID NO: 2295148 - RNA, 17 nt, Human
uguguccaugugugugc

SEQ ID NO: 2295149 - RNA, 16 nt, Human
uguguccaugugugug

SEQ ID NO: 2295150 - RNA, 14 nt, Human
uguguccaugugug

SEQ ID NO: 2295151 - RNA, 18 nt, Human
uguguccaugugugugca

SEQ ID NO: 2295152 - RNA, 19 nt, Human
ugugucccaugaucccugu

SEQ ID NO: 2295153 - RNA, 20 nt, Human
ugugucccaugaucccugug

SEQ ID NO: 2295154 - RNA, 14 nt, Human
ugugucccaugacc

SEQ ID NO: 2295155 - RNA, 19 nt, Human
ugugucccaugacccaccc

SEQ ID NO: 2295156 - RNA, 21 nt, Human
ugugucccaugacccaccccu

SEQ ID NO: 2295157 - RNA, 22 nt, Human
ugugucccaugacccaccccug

SEQ ID NO: 2295158 - RNA, 19 nt, Human
uguguccaagugugugugc

SEQ ID NO: 2295159 - RNA, 16 nt, Human
uguguccaaaacugcc

SEQ ID NO: 2295160 - RNA, 19 nt, Human
uguguccacgacugucucc

SEQ ID NO: 2295161 - RNA, 20 nt, Human
uguguccaugcgcucagggc

SEQ ID NO: 2295162 - RNA, 18 nt, Human
uguguccacgacugucuc

SEQ ID NO: 2295163 - RNA, 17 nt, Human
uguguccacgacugucu

SEQ ID NO: 2295164 - RNA, 20 nt, Human
uguguccuugcaccugcauc

SEQ ID NO: 2295165 - RNA, 16 nt, Human
uguguccuugugcaug

SEQ ID NO: 2295166 - RNA, 19 nt, Human
uguguccuugcaccugcau

SEQ ID NO: 2295167 - RNA, 18 nt, Human
uguguccuugcaccugca

SEQ ID NO: 2295168 - RNA, 12 nt, Human
ugugucuaaacu

SEQ ID NO: 2295169 - RNA, 13 nt, Human
ugugucuaaacug

SEQ ID NO: 2295170 - RNA, 15 nt, Human
ugugucuaaacugca

SEQ ID NO: 2295171 - RNA, 17 nt, Human
ugugucuaaacugcauu

SEQ ID NO: 2295172 - RNA, 14 nt, Human
uguguccuugcacc

SEQ ID NO: 2295173 - RNA, 17 nt, Human
uguguccuucccugcau

SEQ ID NO: 2295174 - RNA, 14 nt, Human
uguguccuucccug

SEQ ID NO: 2295175 - RNA, 16 nt, Human
uguguccuucccugca

SEQ ID NO: 2295176 - RNA, 14 nt, Human
uguguccugguucc

SEQ ID NO: 2295177 - RNA, 20 nt, Human
uguguccuggugcucucugc

SEQ ID NO: 2295178 - RNA, 22 nt, Human
uguguccuggugcucucugcca

SEQ ID NO: 2295179 - RNA, 21 nt, Human
ugugucccccucuguccaggc

SEQ ID NO: 2295180 - RNA, 18 nt, Human
ugugucccccucugucca

SEQ ID NO: 2295181 - RNA, 16 nt, Human
ugugucccccucuguc

SEQ ID NO: 2295182 - RNA, 15 nt, Human
uguguccuggugcuc

SEQ ID NO: 2295183 - RNA, 19 nt, Human
uguguccuggugcucucug

SEQ ID NO: 2295184 - RNA, 22 nt, Human
ugugguagggacuuaaaaaacu

SEQ ID NO: 2295185 - RNA, 18 nt, Human
ugugguagggggugucuc

SEQ ID NO: 2295186 - RNA, 21 nt, Human
ugugguacaagcauucugucu

SEQ ID NO: 2295187 - RNA, 16 nt, Human
ugugguacaaucucaa

SEQ ID NO: 2295188 - RNA, 14 nt, Human
agugcccaacuguu

SEQ ID NO: 2295189 - RNA, 20 nt, Human
agugccagucuugugucugc

SEQ ID NO: 2295190 - RNA, 18 nt, Human
agugcccccacugaccag

SEQ ID NO: 2295191 - RNA, 19 nt, Human
agugccccugcugccuccc

SEQ ID NO: 2295192 - RNA, 14 nt, Human
agugccccugcugc

SEQ ID NO: 2295193 - RNA, 13 nt, Human
agugccccugcug

SEQ ID NO: 2295194 - RNA, 12 nt, Human
agugccccugcu

SEQ ID NO: 2295195 - RNA, 11 nt, Human
agugccccugc

SEQ ID NO: 2295196 - RNA, 21 nt, Human
agugcccuccacagccgcagc

SEQ ID NO: 2295197 - RNA, 17 nt, Human
agugcccuccacagccg

SEQ ID NO: 2295198 - RNA, 16 nt, Human
agugcccuccacagcc

SEQ ID NO: 2295199 - RNA, 21 nt, Human
agugccccugcugccucccca

SEQ ID NO: 2295200 - RNA, 20 nt, Human
agugccccugcugccucccc

SEQ ID NO: 2295201 - RNA, 22 nt, Human
agugccccugcugccuccccaa

SEQ ID NO: 2295202 - RNA, 16 nt, Human
agugcccuccaggaua

SEQ ID NO: 2295203 - RNA, 23 nt, Human
ugugguuuuccccucccuggguu

SEQ ID NO: 2295204 - RNA, 16 nt, Human
ugugguuuuccccucc

SEQ ID NO: 2295205 - RNA, 18 nt, Human
ugugguuuuccccucccu

SEQ ID NO: 2295206 - RNA, 21 nt, Human
ugugguuuuccccucccuggg

SEQ ID NO: 2295207 - RNA, 22 nt, Human
ugugguuuuccccucccugggu

SEQ ID NO: 2295208 - RNA, 15 nt, Human
uguguaaaaagagag

SEQ ID NO: 2295209 - RNA, 14 nt, Human
uguguaaaauguga

SEQ ID NO: 2295210 - RNA, 23 nt, Human
uguggucacagcggaggugugga

SEQ ID NO: 2295211 - RNA, 21 nt, Human
uguguaaaguguaaauccuuu

SEQ ID NO: 2295212 - RNA, 21 nt, Human
uguguaacaauuuuaaugcua

SEQ ID NO: 2295213 - RNA, 14 nt, Human
uguguaaaguuagu

SEQ ID NO: 2295214 - RNA, 17 nt, Human
uguguaaaguuagucua

SEQ ID NO: 2295215 - RNA, 20 nt, Human
ugugucagguggggcagcuu

SEQ ID NO: 2295216 - RNA, 12 nt, Human
uguguaacacag

SEQ ID NO: 2295217 - RNA, 17 nt, Human
aguggcaauauagaaac

SEQ ID NO: 2295218 - RNA, 20 nt, Human
aguggcacgucaucuaguuu

SEQ ID NO: 2295219 - RNA, 20 nt, Human
aguggaugauguuucgugaa

SEQ ID NO: 2295220 - RNA, 15 nt, Human
aguggaugauguuuc

SEQ ID NO: 2295221 - RNA, 13 nt, Human
aguggaugauguu

SEQ ID NO: 2295222 - RNA, 14 nt, Human
aguggauugcauuu

SEQ ID NO: 2295223 - RNA, 17 nt, Human
aguggauggaaggggcu

SEQ ID NO: 2295224 - RNA, 21 nt, Human
uguuacaggcaccgagaaugu

SEQ ID NO: 2295225 - RNA, 23 nt, Human
uguuacaggcaccgagaauguug

SEQ ID NO: 2295226 - RNA, 23 nt, Human
aguggaccuuaggccuuccucuc

SEQ ID NO: 2295227 - RNA, 20 nt, Human
aguggaccuuaggccuuccu

SEQ ID NO: 2295228 - RNA, 19 nt, Human
aguggaccuuaggccuucc

SEQ ID NO: 2295229 - RNA, 17 nt, Human
aguggaccuuaggccuu

SEQ ID NO: 2295230 - RNA, 18 nt, Human
aguggaccuugagaccac

SEQ ID NO: 2295231 - RNA, 13 nt, Human
aguggacucaggg

SEQ ID NO: 2295232 - RNA, 19 nt, Human
aguggaccuugagaccaca

SEQ ID NO: 2295233 - RNA, 18 nt, Human
aguggacucuuugguggc

SEQ ID NO: 2295234 - RNA, 16 nt, Human
aguggacucagggcag

SEQ ID NO: 2295235 - RNA, 19 nt, Human
aguggacuggaguggagca

SEQ ID NO: 2295236 - RNA, 15 nt, Human
aguggacuggccccu

SEQ ID NO: 2295237 - RNA, 16 nt, Human
aguggacuggccccug

SEQ ID NO: 2295238 - RNA, 21 nt, Human
aguggacuguucccugaggug

SEQ ID NO: 2295239 - RNA, 17 nt, Human
aguggacuggccccugg

SEQ ID NO: 2295240 - RNA, 18 nt, Human
aguggacuggccccuggg

SEQ ID NO: 2295241 - RNA, 23 nt, Human
aguggggucucccucuccugccu

SEQ ID NO: 2295242 - RNA, 22 nt, Human
aguggggucucccucuccugcc

SEQ ID NO: 2295243 - RNA, 14 nt, Human
aguggggugcuggg

SEQ ID NO: 2295244 - RNA, 16 nt, Human
aguggggugcugggag

SEQ ID NO: 2295245 - RNA, 20 nt, Human
aguggggucucccucuccug

SEQ ID NO: 2295246 - RNA, 19 nt, Human
aguggggucucccucuccu

SEQ ID NO: 2295247 - RNA, 18 nt, Human
aguggggucucccucucc

SEQ ID NO: 2295248 - RNA, 19 nt, Human
agugggguuaucucugugu

SEQ ID NO: 2295249 - RNA, 18 nt, Human
agugggguuaucucugug

SEQ ID NO: 2295250 - RNA, 18 nt, Human
aguggggugcugggagga

SEQ ID NO: 2295251 - RNA, 21 nt, Human
aguggggugcugggaggaggg

SEQ ID NO: 2295252 - RNA, 16 nt, Human
agugggguagguuggg

SEQ ID NO: 2295253 - RNA, 15 nt, Human
aguggggacagagca

SEQ ID NO: 2295254 - RNA, 14 nt, Human
aguggggaggggcu

SEQ ID NO: 2295255 - RNA, 22 nt, Human
agugggcuugauucugcaguaa

SEQ ID NO: 2295256 - RNA, 16 nt, Human
agugggcuugauucug

SEQ ID NO: 2295257 - RNA, 22 nt, Human
agugggcccaaugcacuuuguu

SEQ ID NO: 2295258 - RNA, 19 nt, Human
agugggcccuccgacagcc

SEQ ID NO: 2295259 - RNA, 17 nt, Human
agugggcugcaucuggg

SEQ ID NO: 2295260 - RNA, 13 nt, Human
uguuaauaaaagu

SEQ ID NO: 2295261 - RNA, 18 nt, Human
uguuaauaaaaguacaug

SEQ ID NO: 2295262 - RNA, 22 nt, Human
uguuaaguugauggugaugaaa

SEQ ID NO: 2295263 - RNA, 20 nt, Human
uguuaagcgugucuguauuu

SEQ ID NO: 2295264 - RNA, 19 nt, Human
uguuaauaaaaguacaugu

SEQ ID NO: 2295265 - RNA, 18 nt, Human
uguuaauacuaguuguga

SEQ ID NO: 2295266 - RNA, 19 nt, Human
uguuacauaagauaaaugu

SEQ ID NO: 2295267 - RNA, 17 nt, Human
uguuacaaauuguagaa

SEQ ID NO: 2295268 - RNA, 18 nt, Human
uguuacaaauuguagaag

SEQ ID NO: 2295269 - RNA, 14 nt, Human
uguuaacuuagcuu

SEQ ID NO: 2295270 - RNA, 22 nt, Human
uguuaacuuaauaguauuuaug

SEQ ID NO: 2295271 - RNA, 23 nt, Human
uguuaagcagauggaaugcugug

SEQ ID NO: 2295272 - RNA, 22 nt, Human
uguuaacugagugccuuuuggu

SEQ ID NO: 2295273 - RNA, 16 nt, Human
uguuaacugagugccu

SEQ ID NO: 2295274 - RNA, 14 nt, Human
uguguuaguuccca

SEQ ID NO: 2295275 - RNA, 17 nt, Human
uguguuaguucccaaca

SEQ ID NO: 2295276 - RNA, 22 nt, Human
uguguguuuaaauaaaguauca

SEQ ID NO: 2295277 - RNA, 23 nt, Human
uguguuaccugaaaacacugugc

SEQ ID NO: 2295278 - RNA, 19 nt, Human
uguguuacccuccuguaaa

SEQ ID NO: 2295279 - RNA, 22 nt, Human
uguguuaaguauguguaaaaug

SEQ ID NO: 2295280 - RNA, 15 nt, Human
uguguguuuaaauaa

SEQ ID NO: 2295281 - RNA, 16 nt, Human
uguguguuuaaauaaa

SEQ ID NO: 2295282 - RNA, 18 nt, Human
uguguguuuaaauaaagu

SEQ ID NO: 2295283 - RNA, 19 nt, Human
uguguguuuaaauaaagua

SEQ ID NO: 2295284 - RNA, 22 nt, Human
uguguuaucacccagaagaaaa

SEQ ID NO: 2295285 - RNA, 23 nt, Human
agucacuggagguugaagccaag

SEQ ID NO: 2295286 - RNA, 10 nt, Human
agucacuguc

SEQ ID NO: 2295287 - RNA, 16 nt, Human
agucacuuauuucaua

SEQ ID NO: 2295288 - RNA, 21 nt, Human
agucacuggagguugaagcca

SEQ ID NO: 2295289 - RNA, 16 nt, Human
agucacugccugcaga

SEQ ID NO: 2295290 - RNA, 22 nt, Human
agucacuggagguugaagccaa

SEQ ID NO: 2295291 - RNA, 21 nt, Human
ugucggccucuaaccccaggc

SEQ ID NO: 2295292 - RNA, 22 nt, Human
ugucggccucuaaccccaggcc

SEQ ID NO: 2295293 - RNA, 21 nt, Human
agucacugccucucccuggcc

SEQ ID NO: 2295294 - RNA, 14 nt, Human
agucacugccugca

SEQ ID NO: 2295295 - RNA, 14 nt, Human
agucagcagaacug

SEQ ID NO: 2295296 - RNA, 17 nt, Human
agucacuuuuuuuuucc

SEQ ID NO: 2295297 - RNA, 19 nt, Human
agucacuuuuuuuuuccaa

SEQ ID NO: 2295298 - RNA, 24 nt, Human
agucacuucgugggaucugccccu

SEQ ID NO: 2295299 - RNA, 20 nt, Human
agucacuugaugugccauuu

SEQ ID NO: 2295300 - RNA, 21 nt, Human
agucacuugaugugccauuuu

SEQ ID NO: 2295301 - RNA, 23 nt, Human
agucacuugaugugccauuuuaa

SEQ ID NO: 2295302 - RNA, 22 nt, Human
agucagugggaacgugacugcc

SEQ ID NO: 2295303 - RNA, 22 nt, Human
agucagcuuugccuuccacgcu

SEQ ID NO: 2295304 - RNA, 19 nt, Human
agucagcuuugccuuccac

SEQ ID NO: 2295305 - RNA, 14 nt, Human
agucaggaaagaga

SEQ ID NO: 2295306 - RNA, 23 nt, Human
agucagccuucccccucccaggg

SEQ ID NO: 2295307 - RNA, 22 nt, Human
agucagccuucccccucccagg

SEQ ID NO: 2295308 - RNA, 21 nt, Human
agucagccucucucccagucu

SEQ ID NO: 2295309 - RNA, 11 nt, Human
agucagccucu

SEQ ID NO: 2295310 - RNA, 15 nt, Human
agucagccucucucc

SEQ ID NO: 2295311 - RNA, 16 nt, Human
agucagccucucuccc

SEQ ID NO: 2295312 - RNA, 17 nt, Human
agucagccucucuccca

SEQ ID NO: 2295313 - RNA, 18 nt, Human
agucagccucucucccag

SEQ ID NO: 2295314 - RNA, 21 nt, Human
ugucccugucaccaagcucac

SEQ ID NO: 2295315 - RNA, 16 nt, Human
ugucccugucaccaag

SEQ ID NO: 2295316 - RNA, 18 nt, Human
uguccacacccagcucag

SEQ ID NO: 2295317 - RNA, 14 nt, Human
ugucccugugccua

SEQ ID NO: 2295318 - RNA, 13 nt, Human
ugucccugucacc

SEQ ID NO: 2295319 - RNA, 12 nt, Human
ugucccuacacc

SEQ ID NO: 2295320 - RNA, 19 nt, Human
ugucccuuacgugaguccu

SEQ ID NO: 2295321 - RNA, 23 nt, Human
ugucccuuacgugaguccuggca

SEQ ID NO: 2295322 - RNA, 14 nt, Human
ugucgccucugcau

SEQ ID NO: 2295323 - RNA, 13 nt, Human
ugucgccucugca

SEQ ID NO: 2295324 - RNA, 16 nt, Human
ugucccuuaaacaaaa

SEQ ID NO: 2295325 - RNA, 14 nt, Human
ugucgcucaugugu

SEQ ID NO: 2295326 - RNA, 15 nt, Human
ugucgcucaugugug

SEQ ID NO: 2295327 - RNA, 17 nt, Human
ugucccuucacauaguu

SEQ ID NO: 2295328 - RNA, 14 nt, Human
ugucgcgccuucuc

SEQ ID NO: 2295329 - RNA, 20 nt, Human
ugucgcgccuucuccccccc

SEQ ID NO: 2295330 - RNA, 14 nt, Human
ugucgcgcucagca

SEQ ID NO: 2295331 - RNA, 16 nt, Human
ugucgcucaugugugc

SEQ ID NO: 2295332 - RNA, 22 nt, Human
ugucgcucaugugugcaacagg

SEQ ID NO: 2295333 - RNA, 17 nt, Human
ugucgcucugcuggccu

SEQ ID NO: 2295334 - RNA, 19 nt, Human
ugucgcucugcuggccugg

SEQ ID NO: 2295335 - RNA, 12 nt, Human
ugucggccucua

SEQ ID NO: 2295336 - RNA, 14 nt, Human
ugucggccucuaac

SEQ ID NO: 2295337 - RNA, 13 nt, Human
agucauaaaccuu

SEQ ID NO: 2295338 - RNA, 14 nt, Human
agucauaaaccuua

SEQ ID NO: 2295339 - RNA, 16 nt, Human
agucaguugaaauucu

SEQ ID NO: 2295340 - RNA, 14 nt, Human
agucaguuugcagu

SEQ ID NO: 2295341 - RNA, 14 nt, Human
agucauaccaauga

SEQ ID NO: 2295342 - RNA, 21 nt, Human
agucauaaucauuagggggaa

SEQ ID NO: 2295343 - RNA, 20 nt, Human
agucauaaaccuuaaguaag

SEQ ID NO: 2295344 - RNA, 15 nt, Human
agucauaaaccuuaa

SEQ ID NO: 2295345 - RNA, 18 nt, Human
agucauaaaccuuaagua

SEQ ID NO: 2295346 - RNA, 18 nt, Human
agucauauaaaagcuaug

SEQ ID NO: 2295347 - RNA, 15 nt, Human
agucauauuuugauu

SEQ ID NO: 2295348 - RNA, 21 nt, Human
agucauauuuugauuauugua

SEQ ID NO: 2295349 - RNA, 23 nt, Human
agucauaccaaugaaaaaaugua

SEQ ID NO: 2295350 - RNA, 17 nt, Human
agucauaccaaugaaaa

SEQ ID NO: 2295351 - RNA, 16 nt, Human
agucauagguuaauau

SEQ ID NO: 2295352 - RNA, 22 nt, Human
agucauagguuaauauuuaaga

SEQ ID NO: 2295353 - RNA, 17 nt, Human
agucccaaggaaagccc

SEQ ID NO: 2295354 - RNA, 14 nt, Human
agucccaaggaaag

SEQ ID NO: 2295355 - RNA, 16 nt, Human
aguccauucucccagg

SEQ ID NO: 2295356 - RNA, 17 nt, Human
aguccauucucccaggu

SEQ ID NO: 2295357 - RNA, 20 nt, Human
agucauauuuugauuauugu

SEQ ID NO: 2295358 - RNA, 14 nt, Human
aguccauucuccca

SEQ ID NO: 2295359 - RNA, 15 nt, Human
aguccauucucccag

SEQ ID NO: 2295360 - RNA, 19 nt, Human
aguccauucucccagguac

SEQ ID NO: 2295361 - RNA, 15 nt, Human
agucccaccuuggcu

SEQ ID NO: 2295362 - RNA, 16 nt, Human
agucccaccuuggcug

SEQ ID NO: 2295363 - RNA, 18 nt, Human
agucccaccuuggcugca

SEQ ID NO: 2295364 - RNA, 19 nt, Human
agucccaccuuggcugcag

SEQ ID NO: 2295365 - RNA, 21 nt, Human
agucccaaggaaagccccagc

SEQ ID NO: 2295366 - RNA, 20 nt, Human
agucccaaggaaagccccag

SEQ ID NO: 2295367 - RNA, 23 nt, Human
agucccacugccucagguuccua

SEQ ID NO: 2295368 - RNA, 12 nt, Human
agucccagagca

SEQ ID NO: 2295369 - RNA, 23 nt, Human
agucccagagcaggaggccccug

SEQ ID NO: 2295370 - RNA, 22 nt, Human
agucccagcuacucagaagccu

SEQ ID NO: 2295371 - RNA, 19 nt, Human
agucccagcuacucaggag

SEQ ID NO: 2295372 - RNA, 18 nt, Human
agucccagcuacucagga

SEQ ID NO: 2295373 - RNA, 18 nt, Human
agucccaggcugagccuc

SEQ ID NO: 2295374 - RNA, 17 nt, Human
agucccaggcugagccu

SEQ ID NO: 2295375 - RNA, 15 nt, Human
agucccccaacccca

SEQ ID NO: 2295376 - RNA, 22 nt, Human
agucccccaacagaugcuuuuc

SEQ ID NO: 2295377 - RNA, 18 nt, Human
agucccccaaccccagcc

SEQ ID NO: 2295378 - RNA, 19 nt, Human
agucccaggcugagccuca

SEQ ID NO: 2295379 - RNA, 21 nt, Human
aguccccaggccccaggaagc

SEQ ID NO: 2295380 - RNA, 18 nt, Human
ugucccuucacauaguuu

SEQ ID NO: 2295381 - RNA, 20 nt, Human
agucccaggagcugcccaga

SEQ ID NO: 2295382 - RNA, 23 nt, Human
ugucucauccccaggggucccag

SEQ ID NO: 2295383 - RNA, 13 nt, Human
ugucucaugugug

SEQ ID NO: 2295384 - RNA, 20 nt, Human
ugucucaugugugcucuucu

SEQ ID NO: 2295385 - RNA, 16 nt, Human
ugucucauccccaggg

SEQ ID NO: 2295386 - RNA, 13 nt, Human
ugucucaucccca

SEQ ID NO: 2295387 - RNA, 21 nt, Human
ugucucauccaucaucaugug

SEQ ID NO: 2295388 - RNA, 11 nt, Human
ugucucauccc

SEQ ID NO: 2295389 - RNA, 12 nt, Human
ugucucauccca

SEQ ID NO: 2295390 - RNA, 11 nt, Human
ugucuccaacc

SEQ ID NO: 2295391 - RNA, 16 nt, Human
ugucuccaacccccca

SEQ ID NO: 2295392 - RNA, 17 nt, Human
ugucuccaaccccccag

SEQ ID NO: 2295393 - RNA, 19 nt, Human
ugucuccaaccccccagca

SEQ ID NO: 2295394 - RNA, 20 nt, Human
ugucuccaaccccccagcac

SEQ ID NO: 2295395 - RNA, 21 nt, Human
ugucuccaaccccccagcacu

SEQ ID NO: 2295396 - RNA, 22 nt, Human
ugucuccaaccccccagcacug

SEQ ID NO: 2295397 - RNA, 23 nt, Human
ugucuccaaccccccagcacuga

SEQ ID NO: 2295398 - RNA, 19 nt, Human
agucucacuuugucgccca

SEQ ID NO: 2295399 - RNA, 13 nt, Human
agucucaggaaau

SEQ ID NO: 2295400 - RNA, 17 nt, Human
ugucucauccaucauca

SEQ ID NO: 2295401 - RNA, 16 nt, Human
ugucucauccaucauc

SEQ ID NO: 2295402 - RNA, 11 nt, Human
ugucucaucca

SEQ ID NO: 2295403 - RNA, 16 nt, Human
agucucaggaaaucaa

SEQ ID NO: 2295404 - RNA, 23 nt, Human
agucucacuguugcccaggcugg

SEQ ID NO: 2295405 - RNA, 14 nt, Human
agucuauuagccac

SEQ ID NO: 2295406 - RNA, 14 nt, Human
agucuauucauuau

SEQ ID NO: 2295407 - RNA, 17 nt, Human
agucuauucauuauauu

SEQ ID NO: 2295408 - RNA, 16 nt, Human
agucuauccacagaga

SEQ ID NO: 2295409 - RNA, 15 nt, Human
agucuauccacagag

SEQ ID NO: 2295410 - RNA, 18 nt, Human
agucuauaugaaaaacaa

SEQ ID NO: 2295411 - RNA, 14 nt, Human
agucuauccacaga

SEQ ID NO: 2295412 - RNA, 18 nt, Human
agucuaucaaucaacuua

SEQ ID NO: 2295413 - RNA, 20 nt, Human
agucuaggagcugggaggaa

SEQ ID NO: 2295414 - RNA, 22 nt, Human
agucuaggagcugggaggaaaa

SEQ ID NO: 2295415 - RNA, 18 nt, Human
agucuaggagcugggagg

SEQ ID NO: 2295416 - RNA, 17 nt, Human
agucuacgcucuccuuu

SEQ ID NO: 2295417 - RNA, 15 nt, Human
agucuacgcucuccu

SEQ ID NO: 2295418 - RNA, 14 nt, Human
agucuacgcucucc

SEQ ID NO: 2295419 - RNA, 13 nt, Human
agucuacccagag

SEQ ID NO: 2295420 - RNA, 14 nt, Human
agucuacccagaga

SEQ ID NO: 2295421 - RNA, 13 nt, Human
agucuaauuuuua

SEQ ID NO: 2295422 - RNA, 14 nt, Human
agucuacagaguga

SEQ ID NO: 2295423 - RNA, 17 nt, Human
agucuaauuuuuauuca

SEQ ID NO: 2295424 - RNA, 20 nt, Human
agucuaauuuuuauucauaa

SEQ ID NO: 2295425 - RNA, 16 nt, Human
agucuaaauauuuccu

SEQ ID NO: 2295426 - RNA, 23 nt, Human
agucuaaaguuuacaguaaauaa

SEQ ID NO: 2295427 - RNA, 18 nt, Human
agucuaaaguuuacagua

SEQ ID NO: 2295428 - RNA, 20 nt, Human
agucuaaaguuuacaguaaa

SEQ ID NO: 2295429 - RNA, 23 nt, Human
agucuaaauauuuccuuaaacug

SEQ ID NO: 2295430 - RNA, 17 nt, Human
agucuaaauauuuccuu

SEQ ID NO: 2295431 - RNA, 18 nt, Human
aguccucacucccagucc

SEQ ID NO: 2295432 - RNA, 17 nt, Human
aguccucacucccaguc

SEQ ID NO: 2295433 - RNA, 16 nt, Human
aguccucacucccagu

SEQ ID NO: 2295434 - RNA, 15 nt, Human
aguccucacucccag

SEQ ID NO: 2295435 - RNA, 18 nt, Human
aguccucauaaaaagcaa

SEQ ID NO: 2295436 - RNA, 17 nt, Human
aguccucauaaaaagca

SEQ ID NO: 2295437 - RNA, 20 nt, Human
aguccucaaggggccauccu

SEQ ID NO: 2295438 - RNA, 16 nt, Human
aguccuauucuauugc

SEQ ID NO: 2295439 - RNA, 21 nt, Human
aguccuagcugcacagggcag

SEQ ID NO: 2295440 - RNA, 22 nt, Human
aguccuagcugcacagggcagc

SEQ ID NO: 2295441 - RNA, 17 nt, Human
aguccuagccacucagg

SEQ ID NO: 2295442 - RNA, 12 nt, Human
aguccuagcugc

SEQ ID NO: 2295443 - RNA, 13 nt, Human
aguccuagcugca

SEQ ID NO: 2295444 - RNA, 14 nt, Human
aguccuagcugcac

SEQ ID NO: 2295445 - RNA, 15 nt, Human
aguccuagcugcaca

SEQ ID NO: 2295446 - RNA, 16 nt, Human
aguccuagcugcacag

SEQ ID NO: 2295447 - RNA, 20 nt, Human
aguccuagcugcacagggca

SEQ ID NO: 2295448 - RNA, 19 nt, Human
aguccccuccccggcccua

SEQ ID NO: 2295449 - RNA, 20 nt, Human
aguccuacaagcuaaaauua

SEQ ID NO: 2295450 - RNA, 21 nt, Human
aguccccucccaucugggagu

SEQ ID NO: 2295451 - RNA, 18 nt, Human
aguccccuccccggcccu

SEQ ID NO: 2295452 - RNA, 21 nt, Human
aguccccuccccggcccuacc

SEQ ID NO: 2295453 - RNA, 16 nt, Human
agucccccugccccag

SEQ ID NO: 2295454 - RNA, 19 nt, Human
aguccccgaguuuccccag

SEQ ID NO: 2295455 - RNA, 15 nt, Human
aguccccgugccccg

SEQ ID NO: 2295456 - RNA, 18 nt, Human
aguccccgugccccgccu

SEQ ID NO: 2295457 - RNA, 16 nt, Human
aguccccucaccuccu

SEQ ID NO: 2295458 - RNA, 23 nt, Human
aguccccgugccccgccuccccg

SEQ ID NO: 2295459 - RNA, 20 nt, Human
aguccccgugccccgccucc

SEQ ID NO: 2295460 - RNA, 13 nt, Human
aguccccucccau

SEQ ID NO: 2295461 - RNA, 16 nt, Human
aguccccucccaucug

SEQ ID NO: 2295462 - RNA, 18 nt, Human
aguccccucccaucuggg

SEQ ID NO: 2295463 - RNA, 19 nt, Human
agucgcaucucagugcagg

SEQ ID NO: 2295464 - RNA, 13 nt, Human
agucgcgcugccu

SEQ ID NO: 2295465 - RNA, 14 nt, Human
agucgcgcugccug

SEQ ID NO: 2295466 - RNA, 17 nt, Human
agucgcgcugccugugu

SEQ ID NO: 2295467 - RNA, 12 nt, Human
aguccuccccuc

SEQ ID NO: 2295468 - RNA, 13 nt, Human
aguccuccccuca

SEQ ID NO: 2295469 - RNA, 14 nt, Human
aguccuccccucac

SEQ ID NO: 2295470 - RNA, 15 nt, Human
aguccuccccucaca

SEQ ID NO: 2295471 - RNA, 16 nt, Human
aguccuccccucacag

SEQ ID NO: 2295472 - RNA, 18 nt, Human
aguccuccccucacagcc

SEQ ID NO: 2295473 - RNA, 19 nt, Human
aguccuccccucacagccu

SEQ ID NO: 2295474 - RNA, 14 nt, Human
aguccucccaucuc

SEQ ID NO: 2295475 - RNA, 16 nt, Human
aguccucccaucucac

SEQ ID NO: 2295476 - RNA, 16 nt, Human
agucgcugaggaaaaa

SEQ ID NO: 2295477 - RNA, 15 nt, Human
agucgcugaggaaaa

SEQ ID NO: 2295478 - RNA, 13 nt, Human
agucgcugaggaa

SEQ ID NO: 2295479 - RNA, 18 nt, Human
agucgcgcugccugugug

SEQ ID NO: 2295480 - RNA, 19 nt, Human
agucgcugugguuguuuua

SEQ ID NO: 2295481 - RNA, 20 nt, Human
agucggaacggagaaaggug

SEQ ID NO: 2295482 - RNA, 15 nt, Human
agucgggggcuggcc

SEQ ID NO: 2295483 - RNA, 16 nt, Human
agucgggggcuggccu

SEQ ID NO: 2295484 - RNA, 17 nt, Human
agucgggggcuggccua

SEQ ID NO: 2295485 - RNA, 20 nt, Human
agucgggggcuggccuagga

SEQ ID NO: 2295486 - RNA, 21 nt, Human
agucgggggcuggccuaggag

SEQ ID NO: 2295487 - RNA, 13 nt, Human
agucuaaaguuua

SEQ ID NO: 2295488 - RNA, 14 nt, Human
agucuaaaguuuac

SEQ ID NO: 2295489 - RNA, 17 nt, Human
agucuaaaguuuacagu

SEQ ID NO: 2295490 - RNA, 12 nt, Human
agucuaaaguuu

SEQ ID NO: 2295491 - RNA, 18 nt, Human
agucguacagaaagcugc

SEQ ID NO: 2295492 - RNA, 22 nt, Human
agucgucaucacuuuucaguga

SEQ ID NO: 2295493 - RNA, 16 nt, Human
agucgucgcacagucu

SEQ ID NO: 2295494 - RNA, 22 nt, Human
aguauuccauugugugagugua

SEQ ID NO: 2295495 - RNA, 20 nt, Human
aguauuccauugugugagug

SEQ ID NO: 2295496 - RNA, 19 nt, Human
aguauuccauugugugagu

SEQ ID NO: 2295497 - RNA, 20 nt, Human
aguauuccagaccugaagaa

SEQ ID NO: 2295498 - RNA, 18 nt, Human
aguauuauuuuccaaaag

SEQ ID NO: 2295499 - RNA, 15 nt, Human
aguauuauuuuccaa

SEQ ID NO: 2295500 - RNA, 14 nt, Human
aguauuauuuucca

SEQ ID NO: 2295501 - RNA, 13 nt, Human
aguauuauuuucc

SEQ ID NO: 2295502 - RNA, 16 nt, Human
uguauauuuguacaaa

SEQ ID NO: 2295503 - RNA, 15 nt, Human
aguauaccugauuuu

SEQ ID NO: 2295504 - RNA, 20 nt, Human
aguauguuuuagcauguguu

SEQ ID NO: 2295505 - RNA, 19 nt, Human
aguauguuuuagcaugugu

SEQ ID NO: 2295506 - RNA, 18 nt, Human
aguauguuuuagcaugug

SEQ ID NO: 2295507 - RNA, 16 nt, Human
aguauguuuuagcaug

SEQ ID NO: 2295508 - RNA, 15 nt, Human
aguauguugucaaag

SEQ ID NO: 2295509 - RNA, 18 nt, Human
aguauguugucaaagaga

SEQ ID NO: 2295510 - RNA, 23 nt, Human
uguauauuauggaagauuuuaaa

SEQ ID NO: 2295511 - RNA, 12 nt, Human
uguauauuauuu

SEQ ID NO: 2295512 - RNA, 21 nt, Human
uguauauuauggaagauuuua

SEQ ID NO: 2295513 - RNA, 14 nt, Human
uguauauuauuucu

SEQ ID NO: 2295514 - RNA, 15 nt, Human
uguauauuauuucua

SEQ ID NO: 2295515 - RNA, 16 nt, Human
uguauauuauuucuag

SEQ ID NO: 2295516 - RNA, 21 nt, Human
uguauauuauuucuaggaaga

SEQ ID NO: 2295517 - RNA, 22 nt, Human
uguauauuauuucuaggaagaa

SEQ ID NO: 2295518 - RNA, 18 nt, Human
uguauauuuaaaagaaag

SEQ ID NO: 2295519 - RNA, 19 nt, Human
uguauauugucagauauuu

SEQ ID NO: 2295520 - RNA, 20 nt, Human
uguauauuguguuuguguau

SEQ ID NO: 2295521 - RNA, 12 nt, Human
uguauauucacu

SEQ ID NO: 2295522 - RNA, 14 nt, Human
uguauauucacuuu

SEQ ID NO: 2295523 - RNA, 21 nt, Human
uguauauuugugauagcacuu

SEQ ID NO: 2295524 - RNA, 14 nt, Human
uguauauuuguaca

SEQ ID NO: 2295525 - RNA, 15 nt, Human
uguauauuuguacaa

SEQ ID NO: 2295526 - RNA, 23 nt, Human
ugucagauauuuuuucagaaaua

SEQ ID NO: 2295527 - RNA, 21 nt, Human
ugucagauauuuuuucagaaa

SEQ ID NO: 2295528 - RNA, 20 nt, Human
ugucagauauuuuuucagaa

SEQ ID NO: 2295529 - RNA, 15 nt, Human
ugucagauaugauau

SEQ ID NO: 2295530 - RNA, 20 nt, Human
ugucagaggcacaaaagggu

SEQ ID NO: 2295531 - RNA, 16 nt, Human
ugucagaguucugcuc

SEQ ID NO: 2295532 - RNA, 15 nt, Human
ugucagauacaaugu

SEQ ID NO: 2295533 - RNA, 16 nt, Human
ugucagauacaaugua

SEQ ID NO: 2295534 - RNA, 15 nt, Human
ugucagagcugggag

SEQ ID NO: 2295535 - RNA, 14 nt, Human
ugucagagcuggga

SEQ ID NO: 2295536 - RNA, 13 nt, Human
ugucagagcuggg

SEQ ID NO: 2295537 - RNA, 12 nt, Human
ugucagagcugg

SEQ ID NO: 2295538 - RNA, 19 nt, Human
agucaccaggaauguuaaa

SEQ ID NO: 2295539 - RNA, 13 nt, Human
agucaccccagga

SEQ ID NO: 2295540 - RNA, 20 nt, Human
agucacccaugaagacagga

SEQ ID NO: 2295541 - RNA, 17 nt, Human
agucacccaugaagaca

SEQ ID NO: 2295542 - RNA, 16 nt, Human
agucacccaugaagac

SEQ ID NO: 2295543 - RNA, 13 nt, Human
agucaccaggaau

SEQ ID NO: 2295544 - RNA, 17 nt, Human
agucaccccggccaccu

SEQ ID NO: 2295545 - RNA, 15 nt, Human
agucaccaagcccag
